United States Patent Application Publication US 2005/0244851 A1 - sequence listing, part 150

SEQ ID NO: 5857100 - DNA, 25 bp, Homo sapien
acattacacatgagggacctgaagg

SEQ ID NO: 5857101 - DNA, 25 bp, Homo sapien
ctacttcagcactcacagaaggtat

SEQ ID NO: 5857102 - DNA, 25 bp, Homo sapien
aacactatatgcaactcacattttc

SEQ ID NO: 5857103 - DNA, 25 bp, Homo sapien
cgatcaacacccctcagcagcagtg

SEQ ID NO: 5857104 - DNA, 25 bp, Homo sapien
ttttctttactcttcactattaatg

SEQ ID NO: 5857105 - DNA, 25 bp, Homo sapien
agaaatgggtcaggtatctctgtgt

SEQ ID NO: 5857106 - DNA, 25 bp, Homo sapien
gaagagtggaagcaaatgaagagtt

SEQ ID NO: 5857107 - DNA, 25 bp, Homo sapien
ttccactctctagatccagtactat

SEQ ID NO: 5857108 - DNA, 25 bp, Homo sapien
tacgatggaaatgtatcctgccacc

SEQ ID NO: 5857109 - DNA, 25 bp, Homo sapien
taacagttatgggtcaaaccttagc

SEQ ID NO: 5857110 - DNA, 25 bp, Homo sapien
caaacactatatgcaactcacattt

SEQ ID NO: 5857111 - DNA, 25 bp, Homo sapien
aaatgtatcctgccacctagctggg

SEQ ID NO: 5857112 - DNA, 25 bp, Homo sapien
aaacaaacatctggagactctcata

SEQ ID NO: 5857113 - DNA, 25 bp, Homo sapien
tcatatggacattacacatgaggga

SEQ ID NO: 5857114 - DNA, 25 bp, Homo sapien
ggacctgaaggagggatgaattggt

SEQ ID NO: 5857115 - DNA, 25 bp, Homo sapien
ccctcaggacctgtccaagtgttgg

SEQ ID NO: 5857116 - DNA, 25 bp, Homo sapien
tcatcacaaagccacagaccaagtc

SEQ ID NO: 5857117 - DNA, 25 bp, Homo sapien
acctcttcattgtgcatatggaaga

SEQ ID NO: 5857118 - DNA, 25 bp, Homo sapien
ggtatctctgtgttcttccctgcct

SEQ ID NO: 5857119 - DNA, 25 bp, Homo sapien
tgaacagttcacagaagtccaattt

SEQ ID NO: 5857120 - DNA, 25 bp, Homo sapien
atccttaaagctctgaaagaaaaat

SEQ ID NO: 5857121 - DNA, 25 bp, Homo sapien
ttagctgttgagaaagtaagagcaa

SEQ ID NO: 5857122 - DNA, 25 bp, Homo sapien
agcagtggccctgcaagtcaagcac

SEQ ID NO: 5857123 - DNA, 25 bp, Homo sapien
tcctgggtgaacagcttccttcatg

SEQ ID NO: 5857124 - DNA, 25 bp, Homo sapien
tcccttcttgggcctatagaagaac

SEQ ID NO: 5857125 - DNA, 25 bp, Homo sapien
atatggacattacacatgagggacc

SEQ ID NO: 5857126 - DNA, 25 bp, Homo sapien
catagaagagtggaagcaaatgaag

SEQ ID NO: 5857127 - DNA, 25 bp, Homo sapien
agtggaagcaaatgaagagtttaac

SEQ ID NO: 5857128 - DNA, 25 bp, Homo sapien
caacccaaggacccaaacaaacatc

SEQ ID NO: 5857129 - DNA, 25 bp, Homo sapien
gctgatgaacttagtttcccctcag

SEQ ID NO: 5857130 - DNA, 25 bp, Homo sapien
tttcccctcaggacctgtccaagtg

SEQ ID NO: 5857131 - DNA, 25 bp, Homo sapien
gcaataaagcttcctacgatggaaa

SEQ ID NO: 5857132 - DNA, 25 bp, Homo sapien
acagcaacccaaggacccaaacaaa

SEQ ID NO: 5857133 - DNA, 25 bp, Homo sapien
tttacattgatgagaacaagagcta

SEQ ID NO: 5857134 - DNA, 25 bp, Homo sapien
agggacctgaaggagggatgaattg

SEQ ID NO: 5857135 - DNA, 25 bp, Homo sapien
tgatgaacttagtttcccctcagga

SEQ ID NO: 5857136 - DNA, 25 bp, Homo sapien
ttatgggtcaaaccttagctgttga

SEQ ID NO: 5857137 - DNA, 25 bp, Homo sapien
cttccttcatgatgaacactgagac

SEQ ID NO: 5857138 - DNA, 25 bp, Homo sapien
tggaagacactggacccattttctt

SEQ ID NO: 5857139 - DNA, 25 bp, Homo sapien
gggggattttgttcattttgatcta

SEQ ID NO: 5857140 - DNA, 25 bp, Homo sapien
gaaagtaagagcaataaagcttcct

SEQ ID NO: 5857141 - DNA, 25 bp, Homo sapien
tatgagtccaaacactatatgcaac

SEQ ID NO: 5857142 - DNA, 25 bp, Homo sapien
actgttgaaagtgagggagctgatg

SEQ ID NO: 5857143 - DNA, 25 bp, Homo sapien
ctcttgttttgttttgagttgtttg

SEQ ID NO: 5857144 - DNA, 25 bp, Homo sapien
agggactacagaaatatgagtccaa

SEQ ID NO: 5857145 - DNA, 25 bp, Homo sapien
attttgatctagaaatctaagtttt

SEQ ID NO: 5857146 - DNA, 25 bp, Homo sapien
gggtcaaaccttagctgttgagaaa

SEQ ID NO: 5857147 - DNA, 25 bp, Homo sapien
gtttaacatcatcacaaagccacag

SEQ ID NO: 5857148 - DNA, 25 bp, Homo sapien
actacattgaagccactggaagaaa

SEQ ID NO: 5857149 - DNA, 25 bp, Homo sapien
gcaactcacattttctatggaccat

SEQ ID NO: 5857150 - DNA, 25 bp, Homo sapien
ttcttgggcctatagaagaacttga

SEQ ID NO: 5857151 - DNA, 25 bp, Homo sapien
cctgcctcactgttgaaagtgaggg

SEQ ID NO: 5857152 - DNA, 25 bp, Homo sapien
ttaaaaaatctaatccttaaagctc

SEQ ID NO: 5857153 - DNA, 25 bp, Homo sapien
ttcagcactcacagaaggtatgatt

SEQ ID NO: 5857154 - DNA, 25 bp, Homo sapien
aacttgaacagttcacagaagtcca

SEQ ID NO: 5857155 - DNA, 25 bp, Homo sapien
ttttgttcattttgatctagaaatc

SEQ ID NO: 5857156 - DNA, 25 bp, Homo sapien
ttaacatcatcacaaagccacagac

SEQ ID NO: 5857157 - DNA, 25 bp, Homo sapien
ccactctctagatccagtactatga

SEQ ID NO: 5857158 - DNA, 25 bp, Homo sapien
cttgtatgactacattgaagccact

SEQ ID NO: 5857159 - DNA, 25 bp, Homo sapien
agtttcccctcaggacctgtccaag

SEQ ID NO: 5857160 - DNA, 25 bp, Homo sapien
tatgactacattgaagccactggaa

SEQ ID NO: 5857161 - DNA, 25 bp, Homo sapien
tgcctcactgttgaaagtgagggag

SEQ ID NO: 5857162 - DNA, 25 bp, Homo sapien
atctggagactctcatatggacatt

SEQ ID NO: 5857163 - DNA, 25 bp, Homo sapien
cagcactcacagaaggtatgattcc

SEQ ID NO: 5857164 - DNA, 25 bp, Homo sapien
acaaggaaagggcttcatggaacta

SEQ ID NO: 5857165 - DNA, 25 bp, Homo sapien
agccactggaagaaatgggtcaggt

SEQ ID NO: 5857166 - DNA, 25 bp, Homo sapien
agctctgaaagaaaaatcaactccc

SEQ ID NO: 5857167 - DNA, 25 bp, Homo sapien
attcccttcttgggcctatagaaga

SEQ ID NO: 5857168 - DNA, 25 bp, Homo sapien
tctctagatccagtactatgacagg

SEQ ID NO: 5857169 - DNA, 25 bp, Homo sapien
tttaacagttatgggtcaaacctta

SEQ ID NO: 5857170 - DNA, 25 bp, Homo sapien
tgggcctatagaagaacttgaacag

SEQ ID NO: 5857171 - DNA, 25 bp, Homo sapien
gattttgttcattttgatctagaaa

SEQ ID NO: 5857172 - DNA, 25 bp, Homo sapien
gtaagagcaataaagcttcctacga

SEQ ID NO: 5857173 - DNA, 25 bp, Homo sapien
gttgtgtttacattgatgagaacaa

SEQ ID NO: 5857174 - DNA, 25 bp, Homo sapien
ttgagaaagtaagagcaataaagct

SEQ ID NO: 5857175 - DNA, 25 bp, Homo sapien
tcatggaactacttcagcactcaca

SEQ ID NO: 5857176 - DNA, 25 bp, Homo sapien
acccaaacaaacatctggagactct

SEQ ID NO: 5857177 - DNA, 25 bp, Homo sapien
cctatagaagaacttgaacagttca

SEQ ID NO: 5857178 - DNA, 25 bp, Homo sapien
gagaccacctgattccaagtttcca

SEQ ID NO: 5857179 - DNA, 25 bp, Homo sapien
cacccgtggaggatgttcctgggtg

SEQ ID NO: 5857180 - DNA, 25 bp, Homo sapien
cttccctgcctcactgttgaaagtg

SEQ ID NO: 5857181 - DNA, 25 bp, Homo sapien
cgatggaaatgtatcctgccaccta

SEQ ID NO: 5857182 - DNA, 25 bp, Homo sapien
gaacctcttcattgtgcatatggaa

SEQ ID NO: 5857183 - DNA, 25 bp, Homo sapien
cgtggaggatgttcctgggtgaaca

SEQ ID NO: 5857184 - DNA, 25 bp, Homo sapien
tgattcccttcttgggcctatagaa

SEQ ID NO: 5857185 - DNA, 25 bp, Homo sapien
aatcaactccctcgatcaacacccc

SEQ ID NO: 5857186 - DNA, 25 bp, Homo sapien
cactattaatgttgtgtttacattg

SEQ ID NO: 5857187 - DNA, 25 bp, Homo sapien
cagttcacagaagtccaatttgaac

SEQ ID NO: 5857188 - DNA, 25 bp, Homo sapien
aagtcaagcacccgtggaggatgtt

SEQ ID NO: 5857189 - DNA, 25 bp, Homo sapien
caaatgaagagtttaacatcatcac

SEQ ID NO: 5857190 - DNA, 25 bp, Homo sapien
acccctcagcagcagtggccctgca

SEQ ID NO: 5857191 - DNA, 25 bp, Homo sapien
gagcaataaagcttcctacgatgga

SEQ ID NO: 5857192 - DNA, 25 bp, Homo sapien
atatggacagcaacccaaggaccca

SEQ ID NO: 5857193 - DNA, 25 bp, Homo sapien
atgttgtgtttacattgatgagaac

SEQ ID NO: 5857194 - DNA, 25 bp, Homo sapien
acctgaaggagggatgaattggttg

SEQ ID NO: 5857195 - DNA, 25 bp, Homo sapien
ggaccatcaccaagccacaaggaaa

SEQ ID NO: 5857196 - DNA, 25 bp, Homo sapien
tagaagaacttgaacagttcacaga

SEQ ID NO: 5857197 - DNA, 25 bp, Homo sapien
acagttatgggtcaaaccttagctg

SEQ ID NO: 5857198 - DNA, 25 bp, Homo sapien
aaggtatgattcccttcttgggcct

SEQ ID NO: 5857199 - DNA, 25 bp, Homo sapien
aatttgaacacttgtatgactacat

SEQ ID NO: 5857200 - DNA, 25 bp, Homo sapien
agtccaaacactatatgcaactcac

SEQ ID NO: 5857201 - DNA, 25 bp, Homo sapien
tcaactccctcgatcaacacccctc

SEQ ID NO: 5857202 - DNA, 25 bp, Homo sapien
atgatgaacactgagaccacctgat

SEQ ID NO: 5857203 - DNA, 25 bp, Homo sapien
agacactggacccattttctttact

SEQ ID NO: 5857204 - DNA, 25 bp, Homo sapien
aggagggatgaattggttgtttatt

SEQ ID NO: 5857205 - DNA, 25 bp, Homo sapien
tgtgttcttccctgcctcactgttg

SEQ ID NO: 5857206 - DNA, 25 bp, Homo sapien
aagtgagggagctgatgaacttagt

SEQ ID NO: 5857207 - DNA, 25 bp, Homo sapien
acctgattccaagtttccactctct

SEQ ID NO: 5857208 - DNA, 25 bp, Homo sapien
aaaatctaatccttaaagctctgaa

SEQ ID NO: 5857209 - DNA, 25 bp, Homo sapien
ctagctgggtacccatatggacagc

SEQ ID NO: 5857210 - DNA, 25 bp, Homo sapien
gttcacagaagtccaatttgaacac

SEQ ID NO: 5857211 - DNA, 25 bp, Homo sapien
ccattgctttttaacagttatgggt

SEQ ID NO: 5857212 - DNA, 25 bp, Homo sapien
agcacccgtggaggatgttcctggg

SEQ ID NO: 5857213 - DNA, 25 bp, Homo sapien
ccaaggacccaaacaaacatctgga

SEQ ID NO: 5857214 - DNA, 25 bp, Homo sapien
ccttcttgggcctatagaagaactt

SEQ ID NO: 5857215 - DNA, 25 bp, Homo sapien
agaaggtatgattcccttcttgggc

SEQ ID NO: 5857216 - DNA, 25 bp, Homo sapien
ccacctgattccaagtttccactct

SEQ ID NO: 5857217 - DNA, 25 bp, Homo sapien
tgtgtttacattgatgagaacaaga

SEQ ID NO: 5857218 - DNA, 25 bp, Homo sapien
gggattttgttcattttgatctaga

SEQ ID NO: 5857219 - DNA, 25 bp, Homo sapien
ccctcgatcaacacccctcagcagc

SEQ ID NO: 5857220 - DNA, 25 bp, Homo sapien
aaaaaatctaatccttaaagctctg

SEQ ID NO: 5857221 - DNA, 25 bp, Homo sapien
ttctatggaccatcaccaagccaca

SEQ ID NO: 5857222 - DNA, 25 bp, Homo sapien
atggaaatgtatcctgccacctagc

SEQ ID NO: 5857223 - DNA, 25 bp, Homo sapien
acccatatggacagcaacccaagga

SEQ ID NO: 5857224 - DNA, 25 bp, Homo sapien
aatctaatccttaaagctctgaaag

SEQ ID NO: 5857225 - DNA, 25 bp, Homo sapien
ctgttgagaaagtaagagcaataaa

SEQ ID NO: 5857226 - DNA, 25 bp, Homo sapien
tcaaagtcactcttgttttgttttg

SEQ ID NO: 5857227 - DNA, 25 bp, Homo sapien
acagaagtccaatttgaacacttgt

SEQ ID NO: 5857228 - DNA, 25 bp, Homo sapien
ttccaagtttccactctctagatcc

SEQ ID NO: 5857229 - DNA, 25 bp, Homo sapien
tgagtccaaacactatatgcaactc

SEQ ID NO: 5857230 - DNA, 25 bp, Homo sapien
ccttaaagctctgaaagaaaaatca

SEQ ID NO: 5857231 - DNA, 25 bp, Homo sapien
ggaaatgtatcctgccacctagctg

SEQ ID NO: 5857232 - DNA, 25 bp, Homo sapien
tgatctagaaatctaagttttttaa

SEQ ID NO: 5857233 - DNA, 25 bp, Homo sapien
agtcactcttgttttgttttgagtt

SEQ ID NO: 5857234 - DNA, 25 bp, Homo sapien
attgctttttaacagttatgggtca

SEQ ID NO: 5857235 - DNA, 25 bp, Homo sapien
cagtactatgacagggactacagaa

SEQ ID NO: 5857236 - DNA, 25 bp, Homo sapien
cagcagcagtggccctgcaagtcaa

SEQ ID NO: 5857237 - DNA, 25 bp, Homo sapien
ctctgaaagaaaaatcaactccctc

SEQ ID NO: 5857238 - DNA, 25 bp, Homo sapien
acagggactacagaaatatgagtcc

SEQ ID NO: 5857239 - DNA, 25 bp, Homo sapien
tagatccagtactatgacagggact

SEQ ID NO: 5857240 - DNA, 25 bp, Homo sapien
ttctttactcttcactattaatgtt

SEQ ID NO: 5857241 - DNA, 25 bp, Homo sapien
gtgaacagcttccttcatgatgaac

SEQ ID NO: 5857242 - DNA, 25 bp, Homo sapien
tgagggacctgaaggagggatgaat

SEQ ID NO: 5857243 - DNA, 25 bp, Homo sapien
gtttccactctctagatccagtact

SEQ ID NO: 5857244 - DNA, 25 bp, Homo sapien
ccaaacaaacatctggagactctca

SEQ ID NO: 5857245 - DNA, 25 bp, Homo sapien
acccaaggacccaaacaaacatctg

SEQ ID NO: 5857246 - DNA, 25 bp, Homo sapien
acttcagcactcacagaaggtatga

SEQ ID NO: 5857247 - DNA, 25 bp, Homo sapien
actcacagaaggtatgattcccttc

SEQ ID NO: 5857248 - DNA, 25 bp, Homo sapien
ggacagcaacccaaggacccaaaca

SEQ ID NO: 5857249 - DNA, 25 bp, Homo sapien
gcttctggatattcccattgctttt

SEQ ID NO: 5857250 - DNA, 25 bp, Homo sapien
catatggaagacactggacccattt

SEQ ID NO: 5857251 - DNA, 25 bp, Homo sapien
ctttactcttcactattaatgttgt

SEQ ID NO: 5857252 - DNA, 25 bp, Homo sapien
ctatatgcaactcacattttctatg

SEQ ID NO: 5857253 - DNA, 25 bp, Homo sapien
tggaggatgttcctgggtgaacagc

SEQ ID NO: 5857254 - DNA, 25 bp, Homo sapien
attcccattgctttttaacagttat

SEQ ID NO: 5857255 - DNA, 25 bp, Homo sapien
ctggagactctcatatggacattac

SEQ ID NO: 5857256 - DNA, 25 bp, Homo sapien
tcattttgatctagaaatctaagtt

SEQ ID NO: 5857257 - DNA, 25 bp, Homo sapien
aactcacattttctatggaccatca

SEQ ID NO: 5857258 - DNA, 25 bp, Homo sapien
cagtggccctgcaagtcaagcaccc

SEQ ID NO: 5857259 - DNA, 25 bp, Homo sapien
ccaagtcagggcttctggatattcc

SEQ ID NO: 5857260 - DNA, 25 bp, Homo sapien
attaatgttgtgtttacattgatga

SEQ ID NO: 5857261 - DNA, 25 bp, Homo sapien
gggcttctggatattcccattgctt

SEQ ID NO: 5857262 - DNA, 25 bp, Homo sapien
gcagcagtggccctgcaagtcaagc

SEQ ID NO: 5857263 - DNA, 25 bp, Homo sapien
ctcaggacctgtccaagtgttggca

SEQ ID NO: 5857264 - DNA, 25 bp, Homo sapien
gagaaagtaagagcaataaagcttc

SEQ ID NO: 5857265 - DNA, 25 bp, Homo sapien
cttcatggaactacttcagcactca

SEQ ID NO: 5857266 - DNA, 25 bp, Homo sapien
aaaatcaactccctcgatcaacacc

SEQ ID NO: 5857267 - DNA, 25 bp, Homo sapien
tggaagcaaatgaagagtttaacat

SEQ ID NO: 5857268 - DNA, 25 bp, Homo sapien
gattccaagtttccactctctagat

SEQ ID NO: 5857269 - DNA, 25 bp, Homo sapien
ggacattacacatgagggacctgaa

SEQ ID NO: 5857270 - DNA, 25 bp, Homo sapien
catcatcacaaagccacagaccaag

SEQ ID NO: 5857271 - DNA, 25 bp, Homo sapien
taatgttgtgtttacattgatgaga

SEQ ID NO: 5857272 - DNA, 25 bp, Homo sapien
gagtttaacatcatcacaaagccac

SEQ ID NO: 5857273 - DNA, 25 bp, Homo sapien
acactggacccattttctttactct

SEQ ID NO: 5857274 - DNA, 25 bp, Homo sapien
tcttcactattaatgttgtgtttac

SEQ ID NO: 5857275 - DNA, 25 bp, Homo sapien
ttgttcattttgatctagaaatcta

SEQ ID NO: 5857276 - DNA, 25 bp, Homo sapien
accaagccacaaggaaagggcttca

SEQ ID NO: 5857277 - DNA, 25 bp, Homo sapien
cattttctatggaccatcaccaagc

SEQ ID NO: 5857278 - DNA, 25 bp, Homo sapien
tttgaacacttgtatgactacattg

SEQ ID NO: 5857279 - DNA, 25 bp, Homo sapien
tcactcttgttttgttttgagttgt

SEQ ID NO: 5857280 - DNA, 25 bp, Homo sapien
tatctctgtgttcttccctgcctca

SEQ ID NO: 5857281 - DNA, 25 bp, Homo sapien
gaccacctgattccaagtttccact

SEQ ID NO: 5857282 - DNA, 25 bp, Homo sapien
tgcatatggaagacactggacccat

SEQ ID NO: 5857283 - DNA, 25 bp, Homo sapien
cactgagaccacctgattccaagtt

SEQ ID NO: 5857284 - DNA, 25 bp, Homo sapien
ttaaagctctgaaagaaaaatcaac

SEQ ID NO: 5857285 - DNA, 25 bp, Homo sapien
agggcttcatggaactacttcagca

SEQ ID NO: 5857286 - DNA, 25 bp, Homo sapien
cttgaacagttcacagaagtccaat

SEQ ID NO: 5857287 - DNA, 25 bp, Homo sapien
caaagccacagaccaagtcagggct

SEQ ID NO: 5857288 - DNA, 25 bp, Homo sapien
ttcttccctgcctcactgttgaaag

SEQ ID NO: 5857289 - DNA, 25 bp, Homo sapien
catgagggacctgaaggagggatga

SEQ ID NO: 5857290 - DNA, 25 bp, Homo sapien
cattttctttactcttcactattaa

SEQ ID NO: 5857291 - DNA, 25 bp, Homo sapien
atgttcctgggtgaacagcttcctt

SEQ ID NO: 5857292 - DNA, 25 bp, Homo sapien
ggaaagggcttcatggaactacttc

SEQ ID NO: 5857293 - DNA, 25 bp, Homo sapien
ttgaaagtgagggagctgatgaact

SEQ ID NO: 5857294 - DNA, 25 bp, Homo sapien
gttcattttgatctagaaatctaag

SEQ ID NO: 5857295 - DNA, 25 bp, Homo sapien
agccacaaggaaagggcttcatgga

SEQ ID NO: 5857296 - DNA, 25 bp, Homo sapien
tacattgaagccactggaagaaatg

SEQ ID NO: 5857297 - DNA, 25 bp, Homo sapien
ggacccaaacaaacatctggagact

SEQ ID NO: 5857298 - DNA, 25 bp, Homo sapien
tgtttacattgatgagaacaagagc

SEQ ID NO: 5857299 - DNA, 25 bp, Homo sapien
atgggtcaaaccttagctgttgaga

SEQ ID NO: 5857300 - DNA, 25 bp, Homo sapien
tccttcatgatgaacactgagacca

SEQ ID NO: 5857301 - DNA, 25 bp, Homo sapien
ggatattcccattgctttttaacag

SEQ ID NO: 5857302 - DNA, 25 bp, Homo sapien
ggatgttcctgggtgaacagcttcc

SEQ ID NO: 5857303 - DNA, 25 bp, Homo sapien
atggaactacttcagcactcacaga

SEQ ID NO: 5857304 - DNA, 25 bp, Homo sapien
ctccctcgatcaacacccctcagca

SEQ ID NO: 5857305 - DNA, 25 bp, Homo sapien
cctcactgttgaaagtgagggagct

SEQ ID NO: 5857306 - DNA, 25 bp, Homo sapien
gggatgaattggttgtttattctca

SEQ ID NO: 5857307 - DNA, 25 bp, Homo sapien
caggacctgtccaagtgttggcacg

SEQ ID NO: 5857308 - DNA, 25 bp, Homo sapien
ccatatggacagcaacccaaggacc

SEQ ID NO: 5857309 - DNA, 25 bp, Homo sapien
ttttgttttgagttgtttgaatttg

SEQ ID NO: 5857310 - DNA, 25 bp, Homo sapien
gaagaaatgggtcaggtatctctgt

SEQ ID NO: 5857311 - DNA, 25 bp, Homo sapien
tgttttgttttgagttgtttgaatt

SEQ ID NO: 5857312 - DNA, 25 bp, Homo sapien
aacacttgtatgactacattgaagc

SEQ ID NO: 5857313 - DNA, 25 bp, Homo sapien
aatatgagtccaaacactatatgca

SEQ ID NO: 5857314 - DNA, 25 bp, Homo sapien
caagccacaaggaaagggcttcatg

SEQ ID NO: 5857315 - DNA, 25 bp, Homo sapien
aaggacccaaacaaacatctggaga

SEQ ID NO: 5857316 - DNA, 25 bp, Homo sapien
aagaaaaatcaactccctcgatcaa

SEQ ID NO: 5857317 - DNA, 25 bp, Homo sapien
gaagccactggaagaaatgggtcag

SEQ ID NO: 5857318 - DNA, 25 bp, Homo sapien
ccacaaggaaagggcttcatggaac

SEQ ID NO: 5857319 - DNA, 25 bp, Homo sapien
tccagtactatgacagggactacag

SEQ ID NO: 5857320 - DNA, 25 bp, Homo sapien
gtcaggtatctctgtgttcttccct

SEQ ID NO: 5857321 - DNA, 25 bp, Homo sapien
tgttgaaagtgagggagctgatgaa

SEQ ID NO: 5857322 - DNA, 25 bp, Homo sapien
ctcttcattgtgcatatggaagaca

SEQ ID NO: 5857323 - DNA, 25 bp, Homo sapien
ttgtttattctcaaagtcactcttg

SEQ ID NO: 5857324 - DNA, 25 bp, Homo sapien
gttggcacgaacctcttcattgtgc

SEQ ID NO: 5857325 - DNA, 25 bp, Homo sapien
tgttcttccctgcctcactgttgaa

SEQ ID NO: 5857326 - DNA, 25 bp, Homo sapien
acaaacatctggagactctcatatg

SEQ ID NO: 5857327 - DNA, 25 bp, Homo sapien
tctcaaagtcactcttgttttgttt

SEQ ID NO: 5857328 - DNA, 25 bp, Homo sapien
gggtgaacagcttccttcatgatga

SEQ ID NO: 5857329 - DNA, 25 bp, Homo sapien
ctgattccaagtttccactctctag

SEQ ID NO: 5857330 - DNA, 25 bp, Homo sapien
atcctgccacctagctgggtaccca

SEQ ID NO: 5857331 - DNA, 25 bp, Homo sapien
gaaagtgagggagctgatgaactta

SEQ ID NO: 5857332 - DNA, 25 bp, Homo sapien
actggaagaaatgggtcaggtatct

SEQ ID NO: 5857333 - DNA, 25 bp, Homo sapien
aattggttgtttattctcaaagtca

SEQ ID NO: 5857334 - DNA, 25 bp, Homo sapien
tctaatccttaaagctctgaaagaa

SEQ ID NO: 5857335 - DNA, 25 bp, Homo sapien
ttgttttgagttgtttgaatttggg

SEQ ID NO: 5857336 - DNA, 25 bp, Homo sapien
cagggcttctggatattcccattgc

SEQ ID NO: 5857337 - DNA, 25 bp, Homo sapien
gtcaagcacccgtggaggatgttcc

SEQ ID NO: 5857338 - DNA, 25 bp, Homo sapien
ttgaagccactggaagaaatgggtc

SEQ ID NO: 5857339 - DNA, 25 bp, Homo sapien
gtcaaaccttagctgttgagaaagt

SEQ ID NO: 5857340 - DNA, 25 bp, Homo sapien
aaggaaagggcttcatggaactact

SEQ ID NO: 5857341 - DNA, 25 bp, Homo sapien
gtatcctgccacctagctgggtacc

SEQ ID NO: 5857342 - DNA, 25 bp, Homo sapien
gggacatagaagagtggaagcaaat

SEQ ID NO: 5857343 - DNA, 25 bp, Homo sapien
ctgggtacccatatggacagcaacc

SEQ ID NO: 5857344 - DNA, 25 bp, Homo sapien
gacatagaagagtggaagcaaatga

SEQ ID NO: 5857345 - DNA, 25 bp, Homo sapien
atggaccatcaccaagccacaagga

SEQ ID NO: 5857346 - DNA, 25 bp, Homo sapien
agactctcatatggacattacacat

SEQ ID NO: 5857347 - DNA, 25 bp, Homo sapien
gagggatgaattggttgtttattct

SEQ ID NO: 5857348 - DNA, 25 bp, Homo sapien
aagtcagggcttctggatattccca

SEQ ID NO: 5857349 - DNA, 25 bp, Homo sapien
gggtcaggtatctctgtgttcttcc

SEQ ID NO: 5857350 - DNA, 25 bp, Homo sapien
agttatgggtcaaaccttagctgtt

SEQ ID NO: 5857351 - DNA, 25 bp, Homo sapien
cacatgagggacctgaaggagggat

SEQ ID NO: 5857352 - DNA, 25 bp, Homo sapien
acgaacctcttcattgtgcatatgg

SEQ ID NO: 5857353 - DNA, 25 bp, Homo sapien
aactccctcgatcaacacccctcag

SEQ ID NO: 5857354 - DNA, 25 bp, Homo sapien
gtgagggagctgatgaacttagttt

SEQ ID NO: 5857355 - DNA, 25 bp, Homo sapien
gcttcctacgatggaaatgtatcct

SEQ ID NO: 5857356 - DNA, 25 bp, Homo sapien
gggagctgatgaacttagtttcccc

SEQ ID NO: 5857357 - DNA, 25 bp, Homo sapien
ttttctatggaccatcaccaagcca

SEQ ID NO: 5857358 - DNA, 25 bp, Homo sapien
cttcatgatgaacactgagaccacc

SEQ ID NO: 5857359 - DNA, 25 bp, Homo sapien
atgaacttagtttcccctcaggacc

SEQ ID NO: 5857360 - DNA, 25 bp, Homo sapien
caacacccctcagcagcagtggccc

SEQ ID NO: 5857361 - DNA, 25 bp, Homo sapien
gaacagcttccttcatgatgaacac

SEQ ID NO: 5857362 - DNA, 25 bp, Homo sapien
gaggatgttcctgggtgaacagctt

SEQ ID NO: 5857363 - DNA, 25 bp, Homo sapien
ttcctacgatggaaatgtatcctgc

SEQ ID NO: 5857364 - DNA, 25 bp, Homo sapien
actctctagatccagtactatgaca

SEQ ID NO: 5857365 - DNA, 25 bp, Homo sapien
aagtccaatttgaacacttgtatga

SEQ ID NO: 5857366 - DNA, 25 bp, Homo sapien
aaccttagctgttgagaaagtaaga

SEQ ID NO: 5857367 - DNA, 25 bp, Homo sapien
cagaccaagtcagggcttctggata

SEQ ID NO: 5857368 - DNA, 25 bp, Homo sapien
aacatcatcacaaagccacagacca

SEQ ID NO: 5857369 - DNA, 25 bp, Homo sapien
caagcacccgtggaggatgttcctg

SEQ ID NO: 5857370 - DNA, 25 bp, Homo sapien
tcatgatgaacactgagaccacctg

SEQ ID NO: 5857371 - DNA, 25 bp, Homo sapien
gcaagtcaagcacccgtggaggatg

SEQ ID NO: 5857372 - DNA, 25 bp, Homo sapien
ggacctgtccaagtgttggcacgaa

SEQ ID NO: 5857373 - DNA, 25 bp, Homo sapien
ttctggatattcccattgcttttta

SEQ ID NO: 5857374 - DNA, 25 bp, Homo sapien
atattcccattgctttttaacagtt

SEQ ID NO: 5857375 - DNA, 25 bp, Homo sapien
attctcaaagtcactcttgttttgt

SEQ ID NO: 5857376 - DNA, 25 bp, Homo sapien
tgactacattgaagccactggaaga

SEQ ID NO: 5857377 - DNA, 25 bp, Homo sapien
tgtatgactacattgaagccactgg

SEQ ID NO: 5857378 - DNA, 25 bp, Homo sapien
gaaagaaaaatcaactccctcgatc

SEQ ID NO: 5857379 - DNA, 25 bp, Homo sapien
tttgatctagaaatctaagtttttt

SEQ ID NO: 5857380 - DNA, 25 bp, Homo sapien
aagtgttggcacgaacctcttcatt

SEQ ID NO: 5857381 - DNA, 25 bp, Homo sapien
ctcagcagcagtggccctgcaagtc

SEQ ID NO: 5857382 - DNA, 25 bp, Homo sapien
ccaatttgaacacttgtatgactac

SEQ ID NO: 5857383 - DNA, 25 bp, Homo sapien
cattgatgagaacaagagctaatgg

SEQ ID NO: 5857384 - DNA, 25 bp, Homo sapien
ggagactctcatatggacattacac

SEQ ID NO: 5857385 - DNA, 25 bp, Homo sapien
ctgagaccacctgattccaagtttc

SEQ ID NO: 5857386 - DNA, 25 bp, Homo sapien
ctattaatgttgtgtttacattgat

SEQ ID NO: 5857387 - DNA, 25 bp, Homo sapien
tggcacgaacctcttcattgtgcat

SEQ ID NO: 5857388 - DNA, 25 bp, Homo sapien
agcaacccaaggacccaaacaaaca

SEQ ID NO: 5857389 - DNA, 25 bp, Homo sapien
tcaccaagccacaaggaaagggctt

SEQ ID NO: 5857390 - DNA, 25 bp, Homo sapien
gtttattctcaaagtcactcttgtt

SEQ ID NO: 5857391 - DNA, 25 bp, Homo sapien
tcccctcaggacctgtccaagtgtt

SEQ ID NO: 5857392 - DNA, 25 bp, Homo sapien
agcttccttcatgatgaacactgag

SEQ ID NO: 5857393 - DNA, 25 bp, Homo sapien
caggtatctctgtgttcttccctgc

SEQ ID NO: 5857394 - DNA, 25 bp, Homo sapien
aaagctctgaaagaaaaatcaactc

SEQ ID NO: 5857395 - DNA, 25 bp, Homo sapien
tgacagggactacagaaatatgagt

SEQ ID NO: 5857396 - DNA, 25 bp, Homo sapien
tggaagaaatgggtcaggtatctct

SEQ ID NO: 5857397 - DNA, 25 bp, Homo sapien
ctgaaggagggatgaattggttgtt

SEQ ID NO: 5857398 - DNA, 25 bp, Homo sapien
ctcacattttctatggaccatcacc

SEQ ID NO: 5857399 - DNA, 25 bp, Homo sapien
tgaacactgagaccacctgattcca

SEQ ID NO: 5857400 - DNA, 25 bp, Homo sapien
caaaccttagctgttgagaaagtaa

SEQ ID NO: 5857401 - DNA, 25 bp, Homo sapien
tgaagagtttaacatcatcacaaag

SEQ ID NO: 5857402 - DNA, 25 bp, Homo sapien
gtgttggcacgaacctcttcattgt

SEQ ID NO: 5857403 - DNA, 25 bp, Homo sapien
ccaagtgttggcacgaacctcttca

SEQ ID NO: 5857404 - DNA, 25 bp, Homo sapien
taatccttaaagctctgaaagaaaa

SEQ ID NO: 5857405 - DNA, 25 bp, Homo sapien
gcactcacagaaggtatgattccct

SEQ ID NO: 5857406 - DNA, 25 bp, Homo sapien
atgggtcaggtatctctgtgttctt

SEQ ID NO: 5857407 - DNA, 25 bp, Homo sapien
ggcttcatggaactacttcagcact

SEQ ID NO: 5857408 - DNA, 25 bp, Homo sapien
gtggccctgcaagtcaagcacccgt

SEQ ID NO: 5857409 - DNA, 25 bp, Homo sapien
ggtatgattcccttcttgggcctat

SEQ ID NO: 5857410 - DNA, 25 bp, Homo sapien
tggacccattttctttactcttcac

SEQ ID NO: 5857411 - DNA, 25 bp, Homo sapien
ttggttgtttattctcaaagtcact

SEQ ID NO: 5857412 - DNA, 25 bp, Homo sapien
ttattctcaaagtcactcttgtttt

SEQ ID NO: 5857413 - DNA, 25 bp, Homo sapien
tatggaagacactggacccattttc

SEQ ID NO: 5857414 - DNA, 25 bp, Homo sapien
ctgaaagaaaaatcaactccctcga

SEQ ID NO: 5857415 - DNA, 25 bp, Homo sapien
ctcgatcaacacccctcagcagcag

SEQ ID NO: 5857416 - DNA, 25 bp, Homo sapien
aagagcaataaagcttcctacgatg

SEQ ID NO: 5857417 - DNA, 25 bp, Homo sapien
tcacagaagtccaatttgaacactt

SEQ ID NO: 5857418 - DNA, 25 bp, Homo sapien
aaacatctggagactctcatatgga

SEQ ID NO: 5857419 - DNA, 25 bp, Homo sapien
ggttgtttattctcaaagtcactct

SEQ ID NO: 5857420 - DNA, 25 bp, Homo sapien
actatgacagggactacagaaatat

SEQ ID NO: 5857421 - DNA, 25 bp, Homo sapien
tatagaagaacttgaacagttcaca

SEQ ID NO: 5857422 - DNA, 25 bp, Homo sapien
aagccacagaccaagtcagggcttc

SEQ ID NO: 5857423 - DNA, 25 bp, Homo sapien
cagaaatatgagtccaaacactata

SEQ ID NO: 5857424 - DNA, 25 bp, Homo sapien
cctacgatggaaatgtatcctgcca

SEQ ID NO: 5857425 - DNA, 25 bp, Homo sapien
tgtgcatatggaagacactggaccc

SEQ ID NO: 5857426 - DNA, 25 bp, Homo sapien
actacagaaatatgagtccaaacac

SEQ ID NO: 5857427 - DNA, 25 bp, Homo sapien
tacacatgagggacctgaaggaggg

SEQ ID NO: 5857428 - DNA, 25 bp, Homo sapien
ggaactacttcagcactcacagaag

SEQ ID NO: 5857429 - DNA, 25 bp, Homo sapien
actctcatatggacattacacatga

SEQ ID NO: 5857430 - DNA, 25 bp, Homo sapien
aacagttcacagaagtccaatttga

SEQ ID NO: 5857431 - DNA, 25 bp, Homo sapien
agagtggaagcaaatgaagagttta

SEQ ID NO: 5857432 - DNA, 25 bp, Homo sapien
cttgggcctatagaagaacttgaac

SEQ ID NO: 5857433 - DNA, 25 bp, Homo sapien
gggtacccatatggacagcaaccca

SEQ ID NO: 5857434 - DNA, 25 bp, Homo sapien
tagaagagtggaagcaaatgaagag

SEQ ID NO: 5857435 - DNA, 25 bp, Homo sapien
aaatgggtcaggtatctctgtgttc

SEQ ID NO: 5857436 - DNA, 25 bp, Homo sapien
atggacagcaacccaaggacccaaa

SEQ ID NO: 5857437 - DNA, 25 bp, Homo sapien
tcacagaaggtatgattcccttctt

SEQ ID NO: 5857438 - DNA, 25 bp, Homo sapien
agctgttgagaaagtaagagcaata

SEQ ID NO: 5857439 - DNA, 25 bp, Homo sapien
ttactcttcactattaatgttgtgt

SEQ ID NO: 5857440 - DNA, 25 bp, Homo sapien
ccacctagctgggtacccatatgga

SEQ ID NO: 5857441 - DNA, 25 bp, Homo sapien
acctgtccaagtgttggcacgaacc

SEQ ID NO: 5857442 - DNA, 25 bp, Homo sapien
cttcattgtgcatatggaagacact

SEQ ID NO: 5857443 - DNA, 25 bp, Homo sapien
actggacccattttctttactcttc

SEQ ID NO: 5857444 - DNA, 25 bp, Homo sapien
cactatatgcaactcacattttcta

SEQ ID NO: 5857445 - DNA, 25 bp, Homo sapien
attgtgcatatggaagacactggac

SEQ ID NO: 5857446 - DNA, 25 bp, Homo sapien
gcagggaagaacacagagatacctg

SEQ ID NO: 5857447 - DNA, 25 bp, Homo sapien
cttctgtgaactgttcaagttcttc

SEQ ID NO: 5857448 - DNA, 25 bp, Homo sapien
ccataactgttaaaaagcaatggga

SEQ ID NO: 5857449 - DNA, 25 bp, Homo sapien
ttgacttgcagggccactgctgctg

SEQ ID NO: 5857450 - DNA, 25 bp, Homo sapien
caatgtaaacacaacattaatagtg

SEQ ID NO: 5857451 - DNA, 25 bp, Homo sapien
gcaatgggaatatccagaagccctg

SEQ ID NO: 5857452 - DNA, 25 bp, Homo sapien
cgtgccaacacttggacaggtcctg

SEQ ID NO: 5857453 - DNA, 25 bp, Homo sapien
catatgggtacccagctaggtggca

SEQ ID NO: 5857454 - DNA, 25 bp, Homo sapien
ggttgctgtccatatgggtacccag

SEQ ID NO: 5857455 - DNA, 25 bp, Homo sapien
aagaagggaatcataccttctgtga

SEQ ID NO: 5857456 - DNA, 25 bp, Homo sapien
tcatatttctgtagtccctgtcata

SEQ ID NO: 5857457 - DNA, 25 bp, Homo sapien
actcatatttctgtagtccctgtca

SEQ ID NO: 5857458 - DNA, 25 bp, Homo sapien
tgcatatagtgtttggactcatatt

SEQ ID NO: 5857459 - DNA, 25 bp, Homo sapien
gtagtccctgtcatagtactggatc

SEQ ID NO: 5857460 - DNA, 25 bp, Homo sapien
tcttccagtggcttcaatgtagtca

SEQ ID NO: 5857461 - DNA, 25 bp, Homo sapien
actttgagaataaacaaccaattca

SEQ ID NO: 5857462 - DNA, 25 bp, Homo sapien
gacttgcagggccactgctgctgag

SEQ ID NO: 5857463 - DNA, 25 bp, Homo sapien
acaatgaagaggttcgtgccaacac

SEQ ID NO: 5857464 - DNA, 25 bp, Homo sapien
tccctcatgtgtaatgtccatatga

SEQ ID NO: 5857465 - DNA, 25 bp, Homo sapien
cattaatagtgaagagtaaagaaaa

SEQ ID NO: 5857466 - DNA, 25 bp, Homo sapien
ctgacccatttcttccagtggcttc

SEQ ID NO: 5857467 - DNA, 25 bp, Homo sapien
gtgtttggactcatatttctgtagt

SEQ ID NO: 5857468 - DNA, 25 bp, Homo sapien
ctcagtgttcatcatgaaggaagct

SEQ ID NO: 5857469 - DNA, 25 bp, Homo sapien
agtactggatctagagagtggaaac

SEQ ID NO: 5857470 - DNA, 25 bp, Homo sapien
gtgttcaaattggacttctgtgaac

SEQ ID NO: 5857471 - DNA, 25 bp, Homo sapien
atctagagagtggaaacttggaatc

SEQ ID NO: 5857472 - DNA, 25 bp, Homo sapien
tgtgaactgttcaagttcttctata

SEQ ID NO: 5857473 - DNA, 25 bp, Homo sapien
gggtccagtgtcttccatatgcaca

SEQ ID NO: 5857474 - DNA, 25 bp, Homo sapien
ctcttcatttgcttccactcttcta

SEQ ID NO: 5857475 - DNA, 25 bp, Homo sapien
cagctaggtggcaggatacatttcc

SEQ ID NO: 5857476 - DNA, 25 bp, Homo sapien
ctggatctagagagtggaaacttgg

SEQ ID NO: 5857477 - DNA, 25 bp, Homo sapien
gatcgagggagttgatttttctttc

SEQ ID NO: 5857478 - DNA, 25 bp, Homo sapien
taaacaaccaattcatccctccttc

SEQ ID NO: 5857479 - DNA, 25 bp, Homo sapien
tctgtgaactgttcaagttcttcta

SEQ ID NO: 5857480 - DNA, 25 bp, Homo sapien
ttttctttcagagctttaaggatta

SEQ ID NO: 5857481 - DNA, 25 bp, Homo sapien
gccctttccttgtggcttggtgatg

SEQ ID NO: 5857482 - DNA, 25 bp, Homo sapien
gaggttcgtgccaacacttggacag

SEQ ID NO: 5857483 - DNA, 25 bp, Homo sapien
tgggttgctgtccatatgggtaccc

SEQ ID NO: 5857484 - DNA, 25 bp, Homo sapien
ggactcatatttctgtagtccctgt

SEQ ID NO: 5857485 - DNA, 25 bp, Homo sapien
tcttgttctcatcaatgtaaacaca

SEQ ID NO: 5857486 - DNA, 25 bp, Homo sapien
tgtccatatgagagtctccagatgt

SEQ ID NO: 5857487 - DNA, 25 bp, Homo sapien
tgacccataactgttaaaaagcaat

SEQ ID NO: 5857488 - DNA, 25 bp, Homo sapien
agtccctgtcatagtactggatcta

SEQ ID NO: 5857489 - DNA, 25 bp, Homo sapien
acacagagatacctgacccatttct

SEQ ID NO: 5857490 - DNA, 25 bp, Homo sapien
tatccagaagccctgacttggtctg

SEQ ID NO: 5857491 - DNA, 25 bp, Homo sapien
ccaagaagggaatcataccttctgt

SEQ ID NO: 5857492 - DNA, 25 bp, Homo sapien
tcctgaggggaaactaagttcatca

SEQ ID NO: 5857493 - DNA, 25 bp, Homo sapien
tagatcaaaatgaacaaaatccccc

SEQ ID NO: 5857494 - DNA, 25 bp, Homo sapien
ggaagctgttcacccaggaacatcc

SEQ ID NO: 5857495 - DNA, 25 bp, Homo sapien
tcttccatatgcacaatgaagaggt

SEQ ID NO: 5857496 - DNA, 25 bp, Homo sapien
tacatttccatcgtaggaagcttta

SEQ ID NO: 5857497 - DNA, 25 bp, Homo sapien
tcttactttctcaacagctaaggtt

SEQ ID NO: 5857498 - DNA, 25 bp, Homo sapien
accaattcatccctccttcaggtcc

SEQ ID NO: 5857499 - DNA, 25 bp, Homo sapien
agtgaggcagggaagaacacagaga

SEQ ID NO: 5857500 - DNA, 25 bp, Homo sapien
cagatgtttgtttgggtccttgggt

SEQ ID NO: 5857501 - DNA, 25 bp, Homo sapien
ctccacgggtgcttgacttgcaggg

SEQ ID NO: 5857502 - DNA, 25 bp, Homo sapien
gtttggactcatatttctgtagtcc

SEQ ID NO: 5857503 - DNA, 25 bp, Homo sapien
tccttgtggcttggtgatggtccat

SEQ ID NO: 5857504 - DNA, 25 bp, Homo sapien
ctgctgctgaggggtgttgatcgag

SEQ ID NO: 5857505 - DNA, 25 bp, Homo sapien
atatgcacaatgaagaggttcgtgc

SEQ ID NO: 5857506 - DNA, 25 bp, Homo sapien
tccttgggttgctgtccatatgggt

SEQ ID NO: 5857507 - DNA, 25 bp, Homo sapien
aagccctttccttgtggcttggtga

SEQ ID NO: 5857508 - DNA, 25 bp, Homo sapien
gctgttcacccaggaacatcctcca

SEQ ID NO: 5857509 - DNA, 25 bp, Homo sapien
tgagtgctgaagtagttccatgaag

SEQ ID NO: 5857510 - DNA, 25 bp, Homo sapien
cactttcaacagtgaggcagggaag

SEQ ID NO: 5857511 - DNA, 25 bp, Homo sapien
ggaacatcctccacgggtgcttgac

SEQ ID NO: 5857512 - DNA, 25 bp, Homo sapien
tgatgttaaactcttcatttgcttc

SEQ ID NO: 5857513 - DNA, 25 bp, Homo sapien
tttgtttgggtccttgggttgctgt

SEQ ID NO: 5857514 - DNA, 25 bp, Homo sapien
gttctcatcaatgtaaacacaacat

SEQ ID NO: 5857515 - DNA, 25 bp, Homo sapien
gaacacagagatacctgacccattt

SEQ ID NO: 5857516 - DNA, 25 bp, Homo sapien
catttcttccagtggcttcaatgta

SEQ ID NO: 5857517 - DNA, 25 bp, Homo sapien
ccctccttcaggtccctcatgtgta

SEQ ID NO: 5857518 - DNA, 25 bp, Homo sapien
gctcttactttctcaacagctaagg

SEQ ID NO: 5857519 - DNA, 25 bp, Homo sapien
catcagctccctcactttcaacagt

SEQ ID NO: 5857520 - DNA, 25 bp, Homo sapien
tccatatgagagtctccagatgttt

SEQ ID NO: 5857521 - DNA, 25 bp, Homo sapien
tgtcatagtactggatctagagagt

SEQ ID NO: 5857522 - DNA, 25 bp, Homo sapien
gtgtaatgtccatatgagagtctcc

SEQ ID NO: 5857523 - DNA, 25 bp, Homo sapien
acaaaacaagagtgactttgagaat

SEQ ID NO: 5857524 - DNA, 25 bp, Homo sapien
aatgggaatatccagaagccctgac

SEQ ID NO: 5857525 - DNA, 25 bp, Homo sapien
gaaaatgggtccagtgtcttccata

SEQ ID NO: 5857526 - DNA, 25 bp, Homo sapien
gacaggtcctgaggggaaactaagt

SEQ ID NO: 5857527 - DNA, 25 bp, Homo sapien
aactgttaaaaagcaatgggaatat

SEQ ID NO: 5857528 - DNA, 25 bp, Homo sapien
aatagtgaagagtaaagaaaatggg

SEQ ID NO: 5857529 - DNA, 25 bp, Homo sapien
caacagtgaggcagggaagaacaca

SEQ ID NO: 5857530 - DNA, 25 bp, Homo sapien
ggtccatagaaaatgtgagttgcat

SEQ ID NO: 5857531 - DNA, 25 bp, Homo sapien
tgaagaggttcgtgccaacacttgg

SEQ ID NO: 5857532 - DNA, 25 bp, Homo sapien
tttctcaacagctaaggtttgaccc

SEQ ID NO: 5857533 - DNA, 25 bp, Homo sapien
aatgtccatatgagagtctccagat

SEQ ID NO: 5857534 - DNA, 25 bp, Homo sapien
gttgatttttctttcagagctttaa

SEQ ID NO: 5857535 - DNA, 25 bp, Homo sapien
ggtacccagctaggtggcaggatac

SEQ ID NO: 5857536 - DNA, 25 bp, Homo sapien
gaagctttattgctcttactttctc

SEQ ID NO: 5857537 - DNA, 25 bp, Homo sapien
aaaacttagatttctagatcaaaat

SEQ ID NO: 5857538 - DNA, 25 bp, Homo sapien
atgtagtcatacaagtgttcaaatt

SEQ ID NO: 5857539 - DNA, 25 bp, Homo sapien
ttcagagctttaaggattagatttt

SEQ ID NO: 5857540 - DNA, 25 bp, Homo sapien
gtgagttgcatatagtgtttggact

SEQ ID NO: 5857541 - DNA, 25 bp, Homo sapien
tgaggcagggaagaacacagagata

SEQ ID NO: 5857542 - DNA, 25 bp, Homo sapien
atcatgaaggaagctgttcacccag

SEQ ID NO: 5857543 - DNA, 25 bp, Homo sapien
aggcagggaagaacacagagatacc

SEQ ID NO: 5857544 - DNA, 25 bp, Homo sapien
tttcttccagtggcttcaatgtagt

SEQ ID NO: 5857545 - DNA, 25 bp, Homo sapien
cctttccttgtggcttggtgatggt

SEQ ID NO: 5857546 - DNA, 25 bp, Homo sapien
gttaaaaagcaatgggaatatccag

SEQ ID NO: 5857547 - DNA, 25 bp, Homo sapien
cacccaggaacatcctccacgggtg

SEQ ID NO: 5857548 - DNA, 25 bp, Homo sapien
tagatttctagatcaaaatgaacaa

SEQ ID NO: 5857549 - DNA, 25 bp, Homo sapien
ataggcccaagaagggaatcatacc

SEQ ID NO: 5857550 - DNA, 25 bp, Homo sapien
gcttcaatgtagtcatacaagtgtt

SEQ ID NO: 5857551 - DNA, 25 bp, Homo sapien
tgccaacacttggacaggtcctgag

SEQ ID NO: 5857552 - DNA, 25 bp, Homo sapien
caatgtagtcatacaagtgttcaaa

SEQ ID NO: 5857553 - DNA, 25 bp, Homo sapien
gtgatgatgttaaactcttcatttg

SEQ ID NO: 5857554 - DNA, 25 bp, Homo sapien
gctaggtggcaggatacatttccat

SEQ ID NO: 5857555 - DNA, 25 bp, Homo sapien
aactcaaaacaaaacaagagtgact

SEQ ID NO: 5857556 - DNA, 25 bp, Homo sapien
cagaagccctgacttggtctgtggc

SEQ ID NO: 5857557 - DNA, 25 bp, Homo sapien
tattgctcttactttctcaacagct

SEQ ID NO: 5857558 - DNA, 25 bp, Homo sapien
gaaaatgtgagttgcatatagtgtt

SEQ ID NO: 5857559 - DNA, 25 bp, Homo sapien
ttccatatgcacaatgaagaggttc

SEQ ID NO: 5857560 - DNA, 25 bp, Homo sapien
gacttctgtgaactgttcaagttct

SEQ ID NO: 5857561 - DNA, 25 bp, Homo sapien
atacaagtgttcaaattggacttct

SEQ ID NO: 5857562 - DNA, 25 bp, Homo sapien
gtaggaagctttattgctcttactt

SEQ ID NO: 5857563 - DNA, 25 bp, Homo sapien
tctgtgagtgctgaagtagttccat

SEQ ID NO: 5857564 - DNA, 25 bp, Homo sapien
ggaagaacacagagatacctgaccc

SEQ ID NO: 5857565 - DNA, 25 bp, Homo sapien
agtgtcttccatatgcacaatgaag

SEQ ID NO: 5857566 - DNA, 25 bp, Homo sapien
tcatagtactggatctagagagtgg

SEQ ID NO: 5857567 - DNA, 25 bp, Homo sapien
aggaagctttattgctcttactttc

SEQ ID NO: 5857568 - DNA, 25 bp, Homo sapien
aactcttcatttgcttccactcttc

SEQ ID NO: 5857569 - DNA, 25 bp, Homo sapien
attggacttctgtgaactgttcaag

SEQ ID NO: 5857570 - DNA, 25 bp, Homo sapien
tagttccatgaagccctttccttgt

SEQ ID NO: 5857571 - DNA, 25 bp, Homo sapien
ttgatcgagggagttgatttttctt

SEQ ID NO: 5857572 - DNA, 25 bp, Homo sapien
caaaacaaaacaagagtgactttga

SEQ ID NO: 5857573 - DNA, 25 bp, Homo sapien
aggcccaagaagggaatcatacctt

SEQ ID NO: 5857574 - DNA, 25 bp, Homo sapien
tgatttttctttcagagctttaagg

SEQ ID NO: 5857575 - DNA, 25 bp, Homo sapien
caattcatccctccttcaggtccct

SEQ ID NO: 5857576 - DNA, 25 bp, Homo sapien
agatacctgacccatttcttccagt

SEQ ID NO: 5857577 - DNA, 25 bp, Homo sapien
ctttcagagctttaaggattagatt

SEQ ID NO: 5857578 - DNA, 25 bp, Homo sapien
gatttctagatcaaaatgaacaaaa

SEQ ID NO: 5857579 - DNA, 25 bp, Homo sapien
ggtgttgatcgagggagttgatttt

SEQ ID NO: 5857580 - DNA, 25 bp, Homo sapien
tctccagatgtttgtttgggtcctt

SEQ ID NO: 5857581 - DNA, 25 bp, Homo sapien
atcaggtggtctcagtgttcatcat

SEQ ID NO: 5857582 - DNA, 25 bp, Homo sapien
aaggaagctgttcacccaggaacat

SEQ ID NO: 5857583 - DNA, 25 bp, Homo sapien
aataaacaaccaattcatccctcct

SEQ ID NO: 5857584 - DNA, 25 bp, Homo sapien
cttggaatcaggtggtctcagtgtt

SEQ ID NO: 5857585 - DNA, 25 bp, Homo sapien
ttctataggcccaagaagggaatca

SEQ ID NO: 5857586 - DNA, 25 bp, Homo sapien
atacctgacccatttcttccagtgg

SEQ ID NO: 5857587 - DNA, 25 bp, Homo sapien
tagctcttgttctcatcaatgtaaa

SEQ ID NO: 5857588 - DNA, 25 bp, Homo sapien
aaatgtgagttgcatatagtgtttg

SEQ ID NO: 5857589 - DNA, 25 bp, Homo sapien
cactgctgctgaggggtgttgatcg

SEQ ID NO: 5857590 - DNA, 25 bp, Homo sapien
atcaatgtaaacacaacattaatag

SEQ ID NO: 5857591 - DNA, 25 bp, Homo sapien
ctgttcaagttcttctataggccca

SEQ ID NO: 5857592 - DNA, 25 bp, Homo sapien
tggtctgtggctttgtgatgatgtt

SEQ ID NO: 5857593 - DNA, 25 bp, Homo sapien
aagaaaatgggtccagtgtcttcca

SEQ ID NO: 5857594 - DNA, 25 bp, Homo sapien
aacacttggacaggtcctgagggga

SEQ ID NO: 5857595 - DNA, 25 bp, Homo sapien
tcaacagctaaggtttgacccataa

SEQ ID NO: 5857596 - DNA, 25 bp, Homo sapien
tccagatgtttgtttgggtccttgg

SEQ ID NO: 5857597 - DNA, 25 bp, Homo sapien
cttcatttgcttccactcttctatg

SEQ ID NO: 5857598 - DNA, 25 bp, Homo sapien
agtgctgaagtagttccatgaagcc

SEQ ID NO: 5857599 - DNA, 25 bp, Homo sapien
gcttgacttgcagggccactgctgc

SEQ ID NO: 5857600 - DNA, 25 bp, Homo sapien
atccctccttcaggtccctcatgtg

SEQ ID NO: 5857601 - DNA, 25 bp, Homo sapien
ataccttctgtgagtgctgaagtag

SEQ ID NO: 5857602 - DNA, 25 bp, Homo sapien
caaattcaaacaactcaaaacaaaa

SEQ ID NO: 5857603 - DNA, 25 bp, Homo sapien
gccactgctgctgaggggtgttgat

SEQ ID NO: 5857604 - DNA, 25 bp, Homo sapien
agctttattgctcttactttctcaa

SEQ ID NO: 5857605 - DNA, 25 bp, Homo sapien
ggtggtctcagtgttcatcatgaag

SEQ ID NO: 5857606 - DNA, 25 bp, Homo sapien
agtagttccatgaagccctttcctt

SEQ ID NO: 5857607 - DNA, 25 bp, Homo sapien
tcaagttcttctataggcccaagaa

SEQ ID NO: 5857608 - DNA, 25 bp, Homo sapien
tcagctccctcactttcaacagtga

SEQ ID NO: 5857609 - DNA, 25 bp, Homo sapien
gcccaagaagggaatcataccttct

SEQ ID NO: 5857610 - DNA, 25 bp, Homo sapien
gacttggtctgtggctttgtgatga

SEQ ID NO: 5857611 - DNA, 25 bp, Homo sapien
gttcaagttcttctataggcccaag

SEQ ID NO: 5857612 - DNA, 25 bp, Homo sapien
ttaaaaaacttagatttctagatca

SEQ ID NO: 5857613 - DNA, 25 bp, Homo sapien
tggaaacttggaatcaggtggtctc

SEQ ID NO: 5857614 - DNA, 25 bp, Homo sapien
ctccctcactttcaacagtgaggca

SEQ ID NO: 5857615 - DNA, 25 bp, Homo sapien
ttgtgatgatgttaaactcttcatt

SEQ ID NO: 5857616 - DNA, 25 bp, Homo sapien
gttgcatatagtgtttggactcata

SEQ ID NO: 5857617 - DNA, 25 bp, Homo sapien
ttggactcatatttctgtagtccct

SEQ ID NO: 5857618 - DNA, 25 bp, Homo sapien
tggacttctgtgaactgttcaagtt

SEQ ID NO: 5857619 - DNA, 25 bp, Homo sapien
caagagtgactttgagaataaacaa

SEQ ID NO: 5857620 - DNA, 25 bp, Homo sapien
cttggacaggtcctgaggggaaact

SEQ ID NO: 5857621 - DNA, 25 bp, Homo sapien
acagtgaggcagggaagaacacaga

SEQ ID NO: 5857622 - DNA, 25 bp, Homo sapien
caggtggtctcagtgttcatcatga

SEQ ID NO: 5857623 - DNA, 25 bp, Homo sapien
aaaagcaatgggaatatccagaagc

SEQ ID NO: 5857624 - DNA, 25 bp, Homo sapien
ctgtggctttgtgatgatgttaaac

SEQ ID NO: 5857625 - DNA, 25 bp, Homo sapien
gaaacttggaatcaggtggtctcag

SEQ ID NO: 5857626 - DNA, 25 bp, Homo sapien
gttcttctataggcccaagaaggga

SEQ ID NO: 5857627 - DNA, 25 bp, Homo sapien
gtaatgtccatatgagagtctccag

SEQ ID NO: 5857628 - DNA, 25 bp, Homo sapien
agggaatcataccttctgtgagtgc

SEQ ID NO: 5857629 - DNA, 25 bp, Homo sapien
cttgtggcttggtgatggtccatag

SEQ ID NO: 5857630 - DNA, 25 bp, Homo sapien
ttgctcttactttctcaacagctaa

SEQ ID NO: 5857631 - DNA, 25 bp, Homo sapien
tgtcttccatatgcacaatgaagag

SEQ ID NO: 5857632 - DNA, 25 bp, Homo sapien
agtggaaacttggaatcaggtggtc

SEQ ID NO: 5857633 - DNA, 25 bp, Homo sapien
gtctgtggctttgtgatgatgttaa

SEQ ID NO: 5857634 - DNA, 25 bp, Homo sapien
atgtgagttgcatatagtgtttgga

SEQ ID NO: 5857635 - DNA, 25 bp, Homo sapien
ctttgtgatgatgttaaactcttca

SEQ ID NO: 5857636 - DNA, 25 bp, Homo sapien
caggtcctgaggggaaactaagttc

SEQ ID NO: 5857637 - DNA, 25 bp, Homo sapien
tgggaatatccagaagccctgactt

SEQ ID NO: 5857638 - DNA, 25 bp, Homo sapien
tgctgaagtagttccatgaagccct

SEQ ID NO: 5857639 - DNA, 25 bp, Homo sapien
gggtgcttgacttgcagggccactg

SEQ ID NO: 5857640 - DNA, 25 bp, Homo sapien
tggtctcagtgttcatcatgaagga

SEQ ID NO: 5857641 - DNA, 25 bp, Homo sapien
aagctgttcacccaggaacatcctc

SEQ ID NO: 5857642 - DNA, 25 bp, Homo sapien
tttctagatcaaaatgaacaaaatc

SEQ ID NO: 5857643 - DNA, 25 bp, Homo sapien
ttcaaacaactcaaaacaaaacaag

SEQ ID NO: 5857644 - DNA, 25 bp, Homo sapien
ccagtggcttcaatgtagtcataca

SEQ ID NO: 5857645 - DNA, 25 bp, Homo sapien
ggtccttgggttgctgtccatatgg

SEQ ID NO: 5857646 - DNA, 25 bp, Homo sapien
tcatccctccttcaggtccctcatg

SEQ ID NO: 5857647 - DNA, 25 bp, Homo sapien
gaggggtgttgatcgagggagttga

SEQ ID NO: 5857648 - DNA, 25 bp, Homo sapien
agtctccagatgtttgtttgggtcc

SEQ ID NO: 5857649 - DNA, 25 bp, Homo sapien
ggaatcataccttctgtgagtgctg

SEQ ID NO: 5857650 - DNA, 25 bp, Homo sapien
aaaaaacttagatttctagatcaaa

SEQ ID NO: 5857651 - DNA, 25 bp, Homo sapien
aacatcctccacgggtgcttgactt

SEQ ID NO: 5857652 - DNA, 25 bp, Homo sapien
ggtccctcatgtgtaatgtccatat

SEQ ID NO: 5857653 - DNA, 25 bp, Homo sapien
atttttctttcagagctttaaggat

SEQ ID NO: 5857654 - DNA, 25 bp, Homo sapien
tgaactgttcaagttcttctatagg

SEQ ID NO: 5857655 - DNA, 25 bp, Homo sapien
tccctgtcatagtactggatctaga

SEQ ID NO: 5857656 - DNA, 25 bp, Homo sapien
tgggtccttgggttgctgtccatat

SEQ ID NO: 5857657 - DNA, 25 bp, Homo sapien
agagatacctgacccatttcttcca

SEQ ID NO: 5857658 - DNA, 25 bp, Homo sapien
cccatttcttccagtggcttcaatg

SEQ ID NO: 5857659 - DNA, 25 bp, Homo sapien
tgtttgggtccttgggttgctgtcc

SEQ ID NO: 5857660 - DNA, 25 bp, Homo sapien
tcaaaatgaacaaaatcccccaaat

SEQ ID NO: 5857661 - DNA, 25 bp, Homo sapien
tcataccttctgtgagtgctgaagt

SEQ ID NO: 5857662 - DNA, 25 bp, Homo sapien
atgttaaactcttcatttgcttcca

SEQ ID NO: 5857663 - DNA, 25 bp, Homo sapien
ttccagtggcttcaatgtagtcata

SEQ ID NO: 5857664 - DNA, 25 bp, Homo sapien
tttccttgtggcttggtgatggtcc

SEQ ID NO: 5857665 - DNA, 25 bp, Homo sapien
aaacacaacattaatagtgaagagt

SEQ ID NO: 5857666 - DNA, 25 bp, Homo sapien
aagttcttctataggcccaagaagg

SEQ ID NO: 5857667 - DNA, 25 bp, Homo sapien
tgatggtccatagaaaatgtgagtt

SEQ ID NO: 5857668 - DNA, 25 bp, Homo sapien
gagttgcatatagtgtttggactca

SEQ ID NO: 5857669 - DNA, 25 bp, Homo sapien
atgggtccagtgtcttccatatgca

SEQ ID NO: 5857670 - DNA, 25 bp, Homo sapien
ccattagctcttgttctcatcaatg

SEQ ID NO: 5857671 - DNA, 25 bp, Homo sapien
ggaatatccagaagccctgacttgg

SEQ ID NO: 5857672 - DNA, 25 bp, Homo sapien
tggcaggatacatttccatcgtagg

SEQ ID NO: 5857673 - DNA, 25 bp, Homo sapien
tggcttcaatgtagtcatacaagtg

SEQ ID NO: 5857674 - DNA, 25 bp, Homo sapien
taaaaagcaatgggaatatccagaa

SEQ ID NO: 5857675 - DNA, 25 bp, Homo sapien
catcgtaggaagctttattgctctt

SEQ ID NO: 5857676 - DNA, 25 bp, Homo sapien
tgtgagtgctgaagtagttccatga

SEQ ID NO: 5857677 - DNA, 25 bp, Homo sapien
aagtgttcaaattggacttctgtga

SEQ ID NO: 5857678 - DNA, 25 bp, Homo sapien
gcacaatgaagaggttcgtgccaac

SEQ ID NO: 5857679 - DNA, 25 bp, Homo sapien
gtgaagagtaaagaaaatgggtcca

SEQ ID NO: 5857680 - DNA, 25 bp, Homo sapien
gagctttaaggattagattttttaa

SEQ ID NO: 5857681 - DNA, 25 bp, Homo sapien
cccaggaacatcctccacgggtgct

SEQ ID NO: 5857682 - DNA, 25 bp, Homo sapien
cttggtctgtggctttgtgatgatg

SEQ ID NO: 5857683 - DNA, 25 bp, Homo sapien
aacaaccaattcatccctccttcag

SEQ ID NO: 5857684 - DNA, 25 bp, Homo sapien
taggtggcaggatacatttccatcg

SEQ ID NO: 5857685 - DNA, 25 bp, Homo sapien
gtgcttgacttgcagggccactgct

SEQ ID NO: 5857686 - DNA, 25 bp, Homo sapien
ttcaggtccctcatgtgtaatgtcc

SEQ ID NO: 5857687 - DNA, 25 bp, Homo sapien
tccatcgtaggaagctttattgctc

SEQ ID NO: 5857688 - DNA, 25 bp, Homo sapien
caaacaactcaaaacaaaacaagag

SEQ ID NO: 5857689 - DNA, 25 bp, Homo sapien
gtgttcatcatgaaggaagctgttc

SEQ ID NO: 5857690 - DNA, 25 bp, Homo sapien
ttcacccaggaacatcctccacggg

SEQ ID NO: 5857691 - DNA, 25 bp, Homo sapien
tagaaaatgtgagttgcatatagtg

SEQ ID NO: 5857692 - DNA, 25 bp, Homo sapien
ctttcaacagtgaggcagggaagaa

SEQ ID NO: 5857693 - DNA, 25 bp, Homo sapien
tagtgtttggactcatatttctgta

SEQ ID NO: 5857694 - DNA, 25 bp, Homo sapien
atgtaaacacaacattaatagtgaa

SEQ ID NO: 5857695 - DNA, 25 bp, Homo sapien
gatcaaaatgaacaaaatcccccaa

SEQ ID NO: 5857696 - DNA, 25 bp, Homo sapien
catatagtgtttggactcatatttc

SEQ ID NO: 5857697 - DNA, 25 bp, Homo sapien
gtccagtgtcttccatatgcacaat

SEQ ID NO: 5857698 - DNA, 25 bp, Homo sapien
ggtgatggtccatagaaaatgtgag

SEQ ID NO: 5857699 - DNA, 25 bp, Homo sapien
agagtgactttgagaataaacaacc

SEQ ID NO: 5857700 - DNA, 25 bp, Homo sapien
ccttcaggtccctcatgtgtaatgt

SEQ ID NO: 5857701 - DNA, 25 bp, Homo sapien
caggaacatcctccacgggtgcttg

SEQ ID NO: 5857702 - DNA, 25 bp, Homo sapien
acctgacccatttcttccagtggct

SEQ ID NO: 5857703 - DNA, 25 bp, Homo sapien
gaagagtaaagaaaatgggtccagt

SEQ ID NO: 5857704 - DNA, 25 bp, Homo sapien
taaagaaaatgggtccagtgtcttc

SEQ ID NO: 5857705 - DNA, 25 bp, Homo sapien
aaaacaagagtgactttgagaataa

SEQ ID NO: 5857706 - DNA, 25 bp, Homo sapien
atggtccatagaaaatgtgagttgc

SEQ ID NO: 5857707 - DNA, 25 bp, Homo sapien
atatttctgtagtccctgtcatagt

SEQ ID NO: 5857708 - DNA, 25 bp, Homo sapien
ttggtgatggtccatagaaaatgtg

SEQ ID NO: 5857709 - DNA, 25 bp, Homo sapien
catttccatcgtaggaagctttatt

SEQ ID NO: 5857710 - DNA, 25 bp, Homo sapien
ggaaactaagttcatcagctccctc

SEQ ID NO: 5857711 - DNA, 25 bp, Homo sapien
ctataggcccaagaagggaatcata

SEQ ID NO: 5857712 - DNA, 25 bp, Homo sapien
tgctgaggggtgttgatcgagggag

SEQ ID NO: 5857713 - DNA, 25 bp, Homo sapien
gttcaaattggacttctgtgaactg

SEQ ID NO: 5857714 - DNA, 25 bp, Homo sapien
ttcgtgccaacacttggacaggtcc

SEQ ID NO: 5857715 - DNA, 25 bp, Homo sapien
tccatagaaaatgtgagttgcatat

SEQ ID NO: 5857716 - DNA, 25 bp, Homo sapien
atgtgtaatgtccatatgagagtct

SEQ ID NO: 5857717 - DNA, 25 bp, Homo sapien
ccacgggtgcttgacttgcagggcc

SEQ ID NO: 5857718 - DNA, 25 bp, Homo sapien
aacagctaaggtttgacccataact

SEQ ID NO: 5857719 - DNA, 25 bp, Homo sapien
aattcaaacaactcaaaacaaaaca

SEQ ID NO: 5857720 - DNA, 25 bp, Homo sapien
acagagatacctgacccatttcttc

SEQ ID NO: 5857721 - DNA, 25 bp, Homo sapien
aagaggttcgtgccaacacttggac

SEQ ID NO: 5857722 - DNA, 25 bp, Homo sapien
cccaaattcaaacaactcaaaacaa

SEQ ID NO: 5857723 - DNA, 25 bp, Homo sapien
ctagagagtggaaacttggaatcag

SEQ ID NO: 5857724 - DNA, 25 bp, Homo sapien
tttgacccataactgttaaaaagca

SEQ ID NO: 5857725 - DNA, 25 bp, Homo sapien
taagttcatcagctccctcactttc

SEQ ID NO: 5857726 - DNA, 25 bp, Homo sapien
agaataaacaaccaattcatccctc

SEQ ID NO: 5857727 - DNA, 25 bp, Homo sapien
agtcatacaagtgttcaaattggac

SEQ ID NO: 5857728 - DNA, 25 bp, Homo sapien
tgttcacccaggaacatcctccacg

SEQ ID NO: 5857729 - DNA, 25 bp, Homo sapien
agctccctcactttcaacagtgagg

SEQ ID NO: 5857730 - DNA, 25 bp, Homo sapien
tctcatcaatgtaaacacaacatta

SEQ ID NO: 5857731 - DNA, 25 bp, Homo sapien
attagctcttgttctcatcaatgta

SEQ ID NO: 5857732 - DNA, 25 bp, Homo sapien
ttcaacagtgaggcagggaagaaca

SEQ ID NO: 5857733 - DNA, 25 bp, Homo sapien
cttgggttgctgtccatatgggtac

SEQ ID NO: 5857734 - DNA, 25 bp, Homo sapien
cttctgtgagtgctgaagtagttcc

SEQ ID NO: 5857735 - DNA, 25 bp, Homo sapien
tatgggtacccagctaggtggcagg

SEQ ID NO: 5857736 - DNA, 25 bp, Homo sapien
ggggaaactaagttcatcagctccc

SEQ ID NO: 5857737 - DNA, 25 bp, Homo sapien
ttgttctcatcaatgtaaacacaac

SEQ ID NO: 5857738 - DNA, 25 bp, Homo sapien
tctagatcaaaatgaacaaaatccc

SEQ ID NO: 5857739 - DNA, 25 bp, Homo sapien
gatgatgttaaactcttcatttgct

SEQ ID NO: 5857740 - DNA, 25 bp, Homo sapien
gctaaggtttgacccataactgtta

SEQ ID NO: 5857741 - DNA, 25 bp, Homo sapien
acgggtgcttgacttgcagggccac

SEQ ID NO: 5857742 - DNA, 25 bp, Homo sapien
gaggggaaactaagttcatcagctc

SEQ ID NO: 5857743 - DNA, 25 bp, Homo sapien
catatgagagtctccagatgtttgt

SEQ ID NO: 5857744 - DNA, 25 bp, Homo sapien
ctgaagtagttccatgaagcccttt

SEQ ID NO: 5857745 - DNA, 25 bp, Homo sapien
aacaagagtgactttgagaataaac

SEQ ID NO: 5857746 - DNA, 25 bp, Homo sapien
tccatgaagccctttccttgtggct

SEQ ID NO: 5857747 - DNA, 25 bp, Homo sapien
agtgactttgagaataaacaaccaa

SEQ ID NO: 5857748 - DNA, 25 bp, Homo sapien
tgtttgtttgggtccttgggttgct

SEQ ID NO: 5857749 - DNA, 25 bp, Homo sapien
tggaatcaggtggtctcagtgttca

SEQ ID NO: 5857750 - DNA, 25 bp, Homo sapien
cagtgttcatcatgaaggaagctgt

SEQ ID NO: 5857751 - DNA, 25 bp, Homo sapien
aatcataccttctgtgagtgctgaa

SEQ ID NO: 5857752 - DNA, 25 bp, Homo sapien
cagggccactgctgctgaggggtgt

SEQ ID NO: 5857753 - DNA, 25 bp, Homo sapien
tgagaataaacaaccaattcatccc

SEQ ID NO: 5857754 - DNA, 25 bp, Homo sapien
attcatccctccttcaggtccctca

SEQ ID NO: 5857755 - DNA, 25 bp, Homo sapien
agagtctccagatgtttgtttgggt

SEQ ID NO: 5857756 - DNA, 25 bp, Homo sapien
tcgtaggaagctttattgctcttac

SEQ ID NO: 5857757 - DNA, 25 bp, Homo sapien
ggatctagagagtggaaacttggaa

SEQ ID NO: 5857758 - DNA, 25 bp, Homo sapien
gtggctttgtgatgatgttaaactc

SEQ ID NO: 5857759 - DNA, 25 bp, Homo sapien
gttcatcatgaaggaagctgttcac

SEQ ID NO: 5857760 - DNA, 25 bp, Homo sapien
tgagagtctccagatgtttgtttgg

SEQ ID NO: 5857761 - DNA, 25 bp, Homo sapien
gtctcagtgttcatcatgaaggaag

SEQ ID NO: 5857762 - DNA, 25 bp, Homo sapien
tgggtacccagctaggtggcaggat

SEQ ID NO: 5857763 - DNA, 25 bp, Homo sapien
aatatccagaagccctgacttggtc

SEQ ID NO: 5857764 - DNA, 25 bp, Homo sapien
tttgggtccttgggttgctgtccat

SEQ ID NO: 5857765 - DNA, 25 bp, Homo sapien
gaagtagttccatgaagccctttcc

SEQ ID NO: 5857766 - DNA, 25 bp, Homo sapien
ttactttctcaacagctaaggtttg

SEQ ID NO: 5857767 - DNA, 25 bp, Homo sapien
ctgaggggtgttgatcgagggagtt

SEQ ID NO: 5857768 - DNA, 25 bp, Homo sapien
gctgctgaggggtgttgatcgaggg

SEQ ID NO: 5857769 - DNA, 25 bp, Homo sapien
tatagtgtttggactcatatttctg

SEQ ID NO: 5857770 - DNA, 25 bp, Homo sapien
ccctgacttggtctgtggctttgtg

SEQ ID NO: 5857771 - DNA, 25 bp, Homo sapien
tgcagggccactgctgctgaggggt

SEQ ID NO: 5857772 - DNA, 25 bp, Homo sapien
tacccagctaggtggcaggatacat

SEQ ID NO: 5857773 - DNA, 25 bp, Homo sapien
gttaaactcttcatttgcttccact

SEQ ID NO: 5857774 - DNA, 25 bp, Homo sapien
agtaaagaaaatgggtccagtgtct

SEQ ID NO: 5857775 - DNA, 25 bp, Homo sapien
actttctcaacagctaaggtttgac

SEQ ID NO: 5857776 - DNA, 25 bp, Homo sapien
tttgagaataaacaaccaattcatc

SEQ ID NO: 5857777 - DNA, 25 bp, Homo sapien
caaccaattcatccctccttcaggt

SEQ ID NO: 5857778 - DNA, 25 bp, Homo sapien
ttctttcagagctttaaggattaga

SEQ ID NO: 5857779 - DNA, 25 bp, Homo sapien
tatgagagtctccagatgtttgttt

SEQ ID NO: 5857780 - DNA, 25 bp, Homo sapien
gtagtcatacaagtgttcaaattgg

SEQ ID NO: 5857781 - DNA, 25 bp, Homo sapien
taaactcttcatttgcttccactct

SEQ ID NO: 5857782 - DNA, 25 bp, Homo sapien
agtggcttcaatgtagtcatacaag

SEQ ID NO: 5857783 - DNA, 25 bp, Homo sapien
agagtaaagaaaatgggtccagtgt

SEQ ID NO: 5857784 - DNA, 25 bp, Homo sapien
gagttgatttttctttcagagcttt

SEQ ID NO: 5857785 - DNA, 25 bp, Homo sapien
aggatacatttccatcgtaggaagc

SEQ ID NO: 5857786 - DNA, 25 bp, Homo sapien
tgttgatcgagggagttgatttttc

SEQ ID NO: 5857787 - DNA, 25 bp, Homo sapien
aaactaagttcatcagctccctcac

SEQ ID NO: 5857788 - DNA, 25 bp, Homo sapien
tcaaattggacttctgtgaactgtt

SEQ ID NO: 5857789 - DNA, 25 bp, Homo sapien
taaggtttgacccataactgttaaa

SEQ ID NO: 5857790 - DNA, 25 bp, Homo sapien
ttgctgtccatatgggtacccagct

SEQ ID NO: 5857791 - DNA, 25 bp, Homo sapien
gaagggaatcataccttctgtgagt

SEQ ID NO: 5857792 - DNA, 25 bp, Homo sapien
gacccatttcttccagtggcttcaa

SEQ ID NO: 5857793 - DNA, 25 bp, Homo sapien
tcatacaagtgttcaaattggactt

SEQ ID NO: 5857794 - DNA, 25 bp, Homo sapien
acaactcaaaacaaaacaagagtga

SEQ ID NO: 5857795 - DNA, 25 bp, Homo sapien
acacaacattaatagtgaagagtaa

SEQ ID NO: 5857796 - DNA, 25 bp, Homo sapien
tgtggcttggtgatggtccatagaa

SEQ ID NO: 5857797 - DNA, 25 bp, Homo sapien
ccatatgcacaatgaagaggttcgt

SEQ ID NO: 5857798 - DNA, 25 bp, Homo sapien
gaagccctgacttggtctgtggctt

SEQ ID NO: 5857799 - DNA, 25 bp, Homo sapien
acaacattaatagtgaagagtaaag

SEQ ID NO: 5857800 - DNA, 25 bp, Homo sapien
tggacaggtcctgaggggaaactaa

SEQ ID NO: 5857801 - DNA, 25 bp, Homo sapien
ctgacttggtctgtggctttgtgat

SEQ ID NO: 5857802 - DNA, 25 bp, Homo sapien
agggaagaacacagagatacctgac

SEQ ID NO: 5857803 - DNA, 25 bp, Homo sapien
aagcaatgggaatatccagaagccc

SEQ ID NO: 5857804 - DNA, 25 bp, Homo sapien
ctcactttcaacagtgaggcaggga

SEQ ID NO: 5857805 - DNA, 25 bp, Homo sapien
tgtccatatgggtacccagctaggt

SEQ ID NO: 5857806 - DNA, 25 bp, Homo sapien
ctcaaaacaaaacaagagtgacttt

SEQ ID NO: 5857807 - DNA, 25 bp, Homo sapien
gcttggtgatggtccatagaaaatg

SEQ ID NO: 5857808 - DNA, 25 bp, Homo sapien
caggtccctcatgtgtaatgtccat

SEQ ID NO: 5857809 - DNA, 25 bp, Homo sapien
tttattgctcttactttctcaacag

SEQ ID NO: 5857810 - DNA, 25 bp, Homo sapien
ggggtgttgatcgagggagttgatt

SEQ ID NO: 5857811 - DNA, 25 bp, Homo sapien
cctgtcatagtactggatctagaga

SEQ ID NO: 5857812 - DNA, 25 bp, Homo sapien
tcctccacgggtgcttgacttgcag

SEQ ID NO: 5857813 - DNA, 25 bp, Homo sapien
gttccatgaagccctttccttgtgg

SEQ ID NO: 5857814 - DNA, 25 bp, Homo sapien
agagagtggaaacttggaatcaggt

SEQ ID NO: 5857815 - DNA, 25 bp, Homo sapien
tccagaagccctgacttggtctgtg

SEQ ID NO: 5857816 - DNA, 25 bp, Homo sapien
aacttggaatcaggtggtctcagtg

SEQ ID NO: 5857817 - DNA, 25 bp, Homo sapien
ttaatagtgaagagtaaagaaaatg

SEQ ID NO: 5857818 - DNA, 25 bp, Homo sapien
acaagtgttcaaattggacttctgt

SEQ ID NO: 5857819 - DNA, 25 bp, Homo sapien
aaatgggtccagtgtcttccatatg

SEQ ID NO: 5857820 - DNA, 25 bp, Homo sapien
tcatttgcttccactcttctatgtc

SEQ ID NO: 5857821 - DNA, 25 bp, Homo sapien
tgactttgagaataaacaaccaatt

SEQ ID NO: 5857822 - DNA, 25 bp, Homo sapien
gatgtttgtttgggtccttgggttg

SEQ ID NO: 5857823 - DNA, 25 bp, Homo sapien
tgaaggaagctgttcacccaggaac

SEQ ID NO: 5857824 - DNA, 25 bp, Homo sapien
tcatgtgtaatgtccatatgagagt

SEQ ID NO: 5857825 - DNA, 25 bp, Homo sapien
accttctgtgagtgctgaagtagtt

SEQ ID NO: 5857826 - DNA, 25 bp, Homo sapien
cagagctttaaggattagatttttt

SEQ ID NO: 5857827 - DNA, 25 bp, Homo sapien
gagggagttgatttttctttcagag

SEQ ID NO: 5857828 - DNA, 25 bp, Homo sapien
tcgagggagttgatttttctttcag

SEQ ID NO: 5857829 - DNA, 25 bp, Homo sapien
ttcatcagctccctcactttcaaca

SEQ ID NO: 5857830 - DNA, 25 bp, Homo sapien
ttcaatgtagtcatacaagtgttca

SEQ ID NO: 5857831 - DNA, 25 bp, Homo sapien
catgaaggaagctgttcacccagga

SEQ ID NO: 5857832 - DNA, 25 bp, Homo sapien
gcaggatacatttccatcgtaggaa

SEQ ID NO: 5857833 - DNA, 25 bp, Homo sapien
cagctaaggtttgacccataactgt

SEQ ID NO: 5857834 - DNA, 25 bp, Homo sapien
catcctccacgggtgcttgacttgc

SEQ ID NO: 5857835 - DNA, 25 bp, Homo sapien
tgaagccctttccttgtggcttggt

SEQ ID NO: 5857836 - DNA, 25 bp, Homo sapien
tttccatcgtaggaagctttattgc

SEQ ID NO: 5857837 - DNA, 25 bp, Homo sapien
ggtggcaggatacatttccatcgta

SEQ ID NO: 5857838 - DNA, 25 bp, Homo sapien
ggctttgtgatgatgttaaactctt

SEQ ID NO: 5857839 - DNA, 25 bp, Homo sapien
ccaacacttggacaggtcctgaggg

SEQ ID NO: 5857840 - DNA, 25 bp, Homo sapien
gggagttgatttttctttcagagct

SEQ ID NO: 5857841 - DNA, 25 bp, Homo sapien
ccctcactttcaacagtgaggcagg

SEQ ID NO: 5857842 - DNA, 25 bp, Homo sapien
atagtactggatctagagagtggaa

SEQ ID NO: 5857843 - DNA, 25 bp, Homo sapien
atttgcttccactcttctatgtccc

SEQ ID NO: 5857844 - DNA, 25 bp, Homo sapien
actaagttcatcagctccctcactt

SEQ ID NO: 5857845 - DNA, 25 bp, Homo sapien
catgaagccctttccttgtggcttg

SEQ ID NO: 5857846 - DNA, 25 bp, Homo sapien
agttcatcagctccctcactttcaa

SEQ ID NO: 5857847 - DNA, 25 bp, Homo sapien
cacttggacaggtcctgaggggaaa

SEQ ID NO: 5857848 - DNA, 25 bp, Homo sapien
cctcatgtgtaatgtccatatgaga

SEQ ID NO: 5857849 - DNA, 25 bp, Homo sapien
atgcacaatgaagaggttcgtgcca

SEQ ID NO: 5857850 - DNA, 25 bp, Homo sapien
tctcaacagctaaggtttgacccat

SEQ ID NO: 5857851 - DNA, 25 bp, Homo sapien
catagaaaatgtgagttgcatatag

SEQ ID NO: 5857852 - DNA, 25 bp, Homo sapien
ttctgtagtccctgtcatagtactg

SEQ ID NO: 5857853 - DNA, 25 bp, Homo sapien
tagtgaagagtaaagaaaatgggtc

SEQ ID NO: 5857854 - DNA, 25 bp, Homo sapien
ctgttaaaaagcaatgggaatatcc

SEQ ID NO: 5857855 - DNA, 25 bp, Homo sapien
agccctgacttggtctgtggctttg

SEQ ID NO: 5857856 - DNA, 25 bp, Homo sapien
gggccactgctgctgaggggtgttg

SEQ ID NO: 5857857 - DNA, 25 bp, Homo sapien
cttagatttctagatcaaaatgaac

SEQ ID NO: 5857858 - DNA, 25 bp, Homo sapien
ataactgttaaaaagcaatgggaat

SEQ ID NO: 5857859 - DNA, 25 bp, Homo sapien
tccatatgggtacccagctaggtgg

SEQ ID NO: 5857860 - DNA, 25 bp, Homo sapien
tactggatctagagagtggaaactt

SEQ ID NO: 5857861 - DNA, 25 bp, Homo sapien
gaatcaggtggtctcagtgttcatc

SEQ ID NO: 5857862 - DNA, 25 bp, Homo sapien
gtaaacacaacattaatagtgaaga

SEQ ID NO: 5857863 - DNA, 25 bp, Homo sapien
atttctgtagtccctgtcatagtac

SEQ ID NO: 5857864 - DNA, 25 bp, Homo sapien
aatgaagaggttcgtgccaacactt

SEQ ID NO: 5857865 - DNA, 25 bp, Homo sapien
acccataactgttaaaaagcaatgg

SEQ ID NO: 5857866 - DNA, 25 bp, Homo sapien
aacttagatttctagatcaaaatga

SEQ ID NO: 5857867 - DNA, 25 bp, Homo sapien
gatacatttccatcgtaggaagctt

SEQ ID NO: 5857868 - DNA, 25 bp, Homo sapien
tggcttggtgatggtccatagaaaa

SEQ ID NO: 5857869 - DNA, 25 bp, Homo sapien
ctgtagtccctgtcatagtactgga

SEQ ID NO: 5857870 - DNA, 25 bp, Homo sapien
ccagtgtcttccatatgcacaatga

SEQ ID NO: 5857871 - DNA, 25 bp, Homo sapien
ctccttcaggtccctcatgtgtaat

SEQ ID NO: 5857872 - DNA, 25 bp, Homo sapien
tcttctataggcccaagaagggaat

SEQ ID NO: 5857873 - DNA, 25 bp, Homo sapien
aaattggacttctgtgaactgttca

SEQ ID NO: 5857874 - DNA, 25 bp, Homo sapien
gctgtccatatgggtacccagctag

SEQ ID NO: 5857875 - DNA, 25 bp, Homo sapien
agagtggaaacttggaatcaggtgg

SEQ ID NO: 5857876 - DNA, 25 bp, Homo sapien
aaacaaaacaagagtgactttgaga

SEQ ID NO: 5857877 - DNA, 25 bp, Homo sapien
cttgcagggccactgctgctgaggg

SEQ ID NO: 5857878 - DNA, 25 bp, Homo sapien
aactgttcaagttcttctataggcc

SEQ ID NO: 5857879 - DNA, 25 bp, Homo sapien
tcatcaatgtaaacacaacattaat

SEQ ID NO: 5857880 - DNA, 25 bp, Homo sapien
ggtcctgaggggaaactaagttcat

SEQ ID NO: 5857881 - DNA, 25 bp, Homo sapien
ggttcgtgccaacacttggacaggt

SEQ ID NO: 5857882 - DNA, 25 bp, Homo sapien
ctgaggggaaactaagttcatcagc

SEQ ID NO: 5857883 - DNA, 25 bp, Homo sapien
aacattaatagtgaagagtaaagaa

SEQ ID NO: 5857884 - DNA, 25 bp, Homo sapien
gctcttgttctcatcaatgtaaaca

SEQ ID NO: 5857885 - DNA, 25 bp, Homo sapien
aagaacacagagatacctgacccat

SEQ ID NO: 5857886 - DNA, 25 bp, Homo sapien
tcatcatgaaggaagctgttcaccc

SEQ ID NO: 5857887 - DNA, 25 bp, Homo sapien
cccagctaggtggcaggatacattt

SEQ ID NO: 5857888 - DNA, 25 bp, Homo sapien
tcctggggccccgtctccatcccta

SEQ ID NO: 5857889 - DNA, 25 bp, Homo sapien
tgtttttgggggcactgggaatcaa

SEQ ID NO: 5857890 - DNA, 25 bp, Homo sapien
caggctgtgtcaaagcctaggggtc

SEQ ID NO: 5857891 - DNA, 25 bp, Homo sapien
gcctgtaagccagcagccatggctg

SEQ ID NO: 5857892 - DNA, 25 bp, Homo sapien
ctggcatctctcttctgctctttat

SEQ ID NO: 5857893 - DNA, 25 bp, Homo sapien
cactgggaatcaagcccatgcccct

SEQ ID NO: 5857894 - DNA, 25 bp, Homo sapien
ctggggtctggcatgggcaaagggc

SEQ ID NO: 5857895 - DNA, 25 bp, Homo sapien
ggtgccaaggagctgtgcaatgggc

SEQ ID NO: 5857896 - DNA, 25 bp, Homo sapien
catgggctcaccagctggggccacg

SEQ ID NO: 5857897 - DNA, 25 bp, Homo sapien
gtctccatccctagtgacttcccct

SEQ ID NO: 5857898 - DNA, 25 bp, Homo sapien
aacccttatcctcggcgttaagaca

SEQ ID NO: 5857899 - DNA, 25 bp, Homo sapien
ggctgctctggggggtctggtgttc

SEQ ID NO: 5857900 - DNA, 25 bp, Homo sapien
tggccttcctgaagaaggctccctt

SEQ ID NO: 5857901 - DNA, 25 bp, Homo sapien
ttctgtgcctgactggggtctggca

SEQ ID NO: 5857902 - DNA, 25 bp, Homo sapien
ccctaagccattgtctctctggagt

SEQ ID NO: 5857903 - DNA, 25 bp, Homo sapien
ggcaggttttctgtgcctgactggg

SEQ ID NO: 5857904 - DNA, 25 bp, Homo sapien
cgaggccagcacgctacagagtgag

SEQ ID NO: 5857905 - DNA, 25 bp, Homo sapien
tgtcctggggccccgtctccatccc

SEQ ID NO: 5857906 - DNA, 25 bp, Homo sapien
gtcccagggacacctgcccctgggg

SEQ ID NO: 5857907 - DNA, 25 bp, Homo sapien
ggacacctgcccctgggggtgacgg

SEQ ID NO: 5857908 - DNA, 25 bp, Homo sapien
cctccaccactctctgtttttgggg

SEQ ID NO: 5857909 - DNA, 25 bp, Homo sapien
acaagagcatgcagattaaggagtg

SEQ ID NO: 5857910 - DNA, 25 bp, Homo sapien
gggatgccaagaagagctggcatct

SEQ ID NO: 5857911 - DNA, 25 bp, Homo sapien
tatacgaggccagcacgctacagag

SEQ ID NO: 5857912 - DNA, 25 bp, Homo sapien
tcctgaagaaggctcccttggtata

SEQ ID NO: 5857913 - DNA, 25 bp, Homo sapien
ctgtgtgctgagattacaggtgtgt

SEQ ID NO: 5857914 - DNA, 25 bp, Homo sapien
agctgtgcaatgggcatacagctag

SEQ ID NO: 5857915 - DNA, 25 bp, Homo sapien
tacagagtgagctgcatcccgggct

SEQ ID NO: 5857916 - DNA, 25 bp, Homo sapien
ggggccacgtggtcactgggtgcca

SEQ ID NO: 5857917 - DNA, 25 bp, Homo sapien
ttaaagcttgtcctgtcacgctatg

SEQ ID NO: 5857918 - DNA, 25 bp, Homo sapien
ttcaccctgtttctcatagcctcgt

SEQ ID NO: 5857919 - DNA, 25 bp, Homo sapien
atgcagattaaggagtgtgagctgc

SEQ ID NO: 5857920 - DNA, 25 bp, Homo sapien
cctgggacccggagaggacacccag

SEQ ID NO: 5857921 - DNA, 25 bp, Homo sapien
agggacacctgcccctgggggtgac

SEQ ID NO: 5857922 - DNA, 25 bp, Homo sapien
taagggcaaccttaatccttctgcc

SEQ ID NO: 5857923 - DNA, 25 bp, Homo sapien
gggtccctgggttggcaggctgctc

SEQ ID NO: 5857924 - DNA, 25 bp, Homo sapien
agcccatgcccctgtatacgaggcc

SEQ ID NO: 5857925 - DNA, 25 bp, Homo sapien
aagccagcagccatggctgtcccag

SEQ ID NO: 5857926 - DNA, 25 bp, Homo sapien
ggagaggacacccagggatgccaag

SEQ ID NO: 5857927 - DNA, 25 bp, Homo sapien
gagctgcatcccgggctgggcaggt

SEQ ID NO: 5857928 - DNA, 25 bp, Homo sapien
cccatgcccctgtatacgaggccag

SEQ ID NO: 5857929 - DNA, 25 bp, Homo sapien
atgtaactaagggcaaccttaatcc

SEQ ID NO: 5857930 - DNA, 25 bp, Homo sapien
caccagctggggccacgtggtcact

SEQ ID NO: 5857931 - DNA, 25 bp, Homo sapien
acaaggatgtgggatcaaggaccag

SEQ ID NO: 5857932 - DNA, 25 bp, Homo sapien
tacacaggaagcctctgtggtactc

SEQ ID NO: 5857933 - DNA, 25 bp, Homo sapien
ctgctctggggggtctggtgttcac

SEQ ID NO: 5857934 - DNA, 25 bp, Homo sapien
ggcctgggacccggagaggacaccc

SEQ ID NO: 5857935 - DNA, 25 bp, Homo sapien
caccactctctgtttttgggggcac

SEQ ID NO: 5857936 - DNA, 25 bp, Homo sapien
accttaatccttctgcctccacttg

SEQ ID NO: 5857937 - DNA, 25 bp, Homo sapien
ctgtgtcaaagcctaggggtccctg

SEQ ID NO: 5857938 - DNA, 25 bp, Homo sapien
gctctttattctttggtctcattac

SEQ ID NO: 5857939 - DNA, 25 bp, Homo sapien
gcacgctacagagtgagctgcatcc

SEQ ID NO: 5857940 - DNA, 25 bp, Homo sapien
gacagcatctcgtgtgacttaagct

SEQ ID NO: 5857941 - DNA, 25 bp, Homo sapien
ctgaagaaggctcccttggtataga

SEQ ID NO: 5857942 - DNA, 25 bp, Homo sapien
tagcctcgttgtgtggctttggccc

SEQ ID NO: 5857943 - DNA, 25 bp, Homo sapien
ccacgtggtcactgggtgccaagga

SEQ ID NO: 5857944 - DNA, 25 bp, Homo sapien
gggcaaagggcaaagggccatgggc

SEQ ID NO: 5857945 - DNA, 25 bp, Homo sapien
tcctaggcccttccttagccaggct

SEQ ID NO: 5857946 - DNA, 25 bp, Homo sapien
caagcccatgcccctgtatacgagg

SEQ ID NO: 5857947 - DNA, 25 bp, Homo sapien
ccactctctgtttttgggggcactg

SEQ ID NO: 5857948 - DNA, 25 bp, Homo sapien
tctttattctttggtctcattacac

SEQ ID NO: 5857949 - DNA, 25 bp, Homo sapien
cagcatctcgtgtgacttaagctgg

SEQ ID NO: 5857950 - DNA, 25 bp, Homo sapien
gcctcgttgtgtggctttggcccta

SEQ ID NO: 5857951 - DNA, 25 bp, Homo sapien
cttgtctccctctggctctgctggg

SEQ ID NO: 5857952 - DNA, 25 bp, Homo sapien
taagacaagagcatgcagattaagg

SEQ ID NO: 5857953 - DNA, 25 bp, Homo sapien
aggcccttccttagccaggctgtgt

SEQ ID NO: 5857954 - DNA, 25 bp, Homo sapien
catcctttggctggttttaaagctt

SEQ ID NO: 5857955 - DNA, 25 bp, Homo sapien
tccaccactctctgtttttgggggc

SEQ ID NO: 5857956 - DNA, 25 bp, Homo sapien
ttatgtaactaagggcaaccttaat

SEQ ID NO: 5857957 - DNA, 25 bp, Homo sapien
taactaagggcaaccttaatccttc

SEQ ID NO: 5857958 - DNA, 25 bp, Homo sapien
tcctcggcgttaagacaagagcatg

SEQ ID NO: 5857959 - DNA, 25 bp, Homo sapien
ctggtgttcaccctgtttctcatag

SEQ ID NO: 5857960 - DNA, 25 bp, Homo sapien
ctcaaccctgttatgtaactaaggg

SEQ ID NO: 5857961 - DNA, 25 bp, Homo sapien
cgttgtgtggctttggccctaagcc

SEQ ID NO: 5857962 - DNA, 25 bp, Homo sapien
tgtgtgtggacctccaccactctct

SEQ ID NO: 5857963 - DNA, 25 bp, Homo sapien
ttggccctaagccattgtctctctg

SEQ ID NO: 5857964 - DNA, 25 bp, Homo sapien
agacaagagcatgcagattaaggag

SEQ ID NO: 5857965 - DNA, 25 bp, Homo sapien
gggccatgggctcaccagctggggc

SEQ ID NO: 5857966 - DNA, 25 bp, Homo sapien
ttaagacagcatctcgtgtgactta

SEQ ID NO: 5857967 - DNA, 25 bp, Homo sapien
gacctccaccactctctgtttttgg

SEQ ID NO: 5857968 - DNA, 25 bp, Homo sapien
ggcaaagggccatgggctcaccagc

SEQ ID NO: 5857969 - DNA, 25 bp, Homo sapien
tgtggacctccaccactctctgttt

SEQ ID NO: 5857970 - DNA, 25 bp, Homo sapien
ctgggttggcaggctgctctggggg

SEQ ID NO: 5857971 - DNA, 25 bp, Homo sapien
tcctgtcacgctatgtcccaaccct

SEQ ID NO: 5857972 - DNA, 25 bp, Homo sapien
cttgtcctggggccccgtctccatc

SEQ ID NO: 5857973 - DNA, 25 bp, Homo sapien
gtcttgtctccctctggctctgctg

SEQ ID NO: 5857974 - DNA, 25 bp, Homo sapien
ttctgctctttattctttggtctca

SEQ ID NO: 5857975 - DNA, 25 bp, Homo sapien
caggggtggccttcctgaagaaggc

SEQ ID NO: 5857976 - DNA, 25 bp, Homo sapien
agagctggcatctctcttctgctct

SEQ ID NO: 5857977 - DNA, 25 bp, Homo sapien
cccttatcctcggcgttaagacaag

SEQ ID NO: 5857978 - DNA, 25 bp, Homo sapien
taagcccagatagcctgtaagccag

SEQ ID NO: 5857979 - DNA, 25 bp, Homo sapien
tggcatgggcaaagggcaaagggcc

SEQ ID NO: 5857980 - DNA, 25 bp, Homo sapien
ttgtctccctgtgtgctgagattac

SEQ ID NO: 5857981 - DNA, 25 bp, Homo sapien
tctgctgggatcctaggcccttcct

SEQ ID NO: 5857982 - DNA, 25 bp, Homo sapien
gctggcctcaaccctgttatgtaac

SEQ ID NO: 5857983 - DNA, 25 bp, Homo sapien
agctgtcttgtctccctctggctct

SEQ ID NO: 5857984 - DNA, 25 bp, Homo sapien
ggtctggcatgggcaaagggcaaag

SEQ ID NO: 5857985 - DNA, 25 bp, Homo sapien
tccctctggctctgctgggatccta

SEQ ID NO: 5857986 - DNA, 25 bp, Homo sapien
tacgaggccagcacgctacagagtg

SEQ ID NO: 5857987 - DNA, 25 bp, Homo sapien
caggaagcctctgtggtactcactt

SEQ ID NO: 5857988 - DNA, 25 bp, Homo sapien
cccagggatgccaagaagagctggc

SEQ ID NO: 5857989 - DNA, 25 bp, Homo sapien
gatcctaggcccttccttagccagg

SEQ ID NO: 5857990 - DNA, 25 bp, Homo sapien
ctgcctccacttgtctccctgtgtg

SEQ ID NO: 5857991 - DNA, 25 bp, Homo sapien
catcccgggctgggcaggttttctg

SEQ ID NO: 5857992 - DNA, 25 bp, Homo sapien
gctgggcaggttttctgtgcctgac

SEQ ID NO: 5857993 - DNA, 25 bp, Homo sapien
tctggctctgctgggatcctaggcc

SEQ ID NO: 5857994 - DNA, 25 bp, Homo sapien
ctaagccattgtctctctggagtga

SEQ ID NO: 5857995 - DNA, 25 bp, Homo sapien
tggcctcaaccctgttatgtaacta

SEQ ID NO: 5857996 - DNA, 25 bp, Homo sapien
ctcatagcctcgttgtgtggctttg

SEQ ID NO: 5857997 - DNA, 25 bp, Homo sapien
gtgacggtgctcactcctttctgtt

SEQ ID NO: 5857998 - DNA, 25 bp, Homo sapien
cttggtatagacctgccaggccttg

SEQ ID NO: 5857999 - DNA, 25 bp, Homo sapien
atggctgtcccagggacacctgccc

SEQ ID NO: 5858000 - DNA, 25 bp, Homo sapien
ggctggttttaaagcttgtcctgtc

SEQ ID NO: 5858001 - DNA, 25 bp, Homo sapien
tcaaggaccaggcctgggacccgga

SEQ ID NO: 5858002 - DNA, 25 bp, Homo sapien
ggctgtgtcaaagcctaggggtccc

SEQ ID NO: 5858003 - DNA, 25 bp, Homo sapien
gactggggtctggcatgggcaaagg

SEQ ID NO: 5858004 - DNA, 25 bp, Homo sapien
gaatcaagcccatgcccctgtatac

SEQ ID NO: 5858005 - DNA, 25 bp, Homo sapien
ggaagcctctgtggtactcacttgt

SEQ ID NO: 5858006 - DNA, 25 bp, Homo sapien
cttatcctcggcgttaagacaagag

SEQ ID NO: 5858007 - DNA, 25 bp, Homo sapien
ccttgccatcctttggctggtttta

SEQ ID NO: 5858008 - DNA, 25 bp, Homo sapien
gttggcaggctgctctggggggtct

SEQ ID NO: 5858009 - DNA, 25 bp, Homo sapien
catctctcttctgctctttattctt

SEQ ID NO: 5858010 - DNA, 25 bp, Homo sapien
ggatgtgggatcaaggaccaggcct

SEQ ID NO: 5858011 - DNA, 25 bp, Homo sapien
ctttggccctaagccattgtctctc

SEQ ID NO: 5858012 - DNA, 25 bp, Homo sapien
gcgttaagacaagagcatgcagatt

SEQ ID NO: 5858013 - DNA, 25 bp, Homo sapien
gtaagccagcagccatggctgtccc

SEQ ID NO: 5858014 - DNA, 25 bp, Homo sapien
gggggtctggtgttcaccctgtttc

SEQ ID NO: 5858015 - DNA, 25 bp, Homo sapien
cctgttatgtaactaagggcaacct

SEQ ID NO: 5858016 - DNA, 25 bp, Homo sapien
tgttatgtaactaagggcaacctta

SEQ ID NO: 5858017 - DNA, 25 bp, Homo sapien
gcatctcgtgtgacttaagctggcc

SEQ ID NO: 5858018 - DNA, 25 bp, Homo sapien
ctatgtcccaacccttatcctcggc

SEQ ID NO: 5858019 - DNA, 25 bp, Homo sapien
gctgagattacaggtgtgtgtgtgg

SEQ ID NO: 5858020 - DNA, 25 bp, Homo sapien
ttttttaagacagcatctcgtgtga

SEQ ID NO: 5858021 - DNA, 25 bp, Homo sapien
aggacacccagggatgccaagaaga

SEQ ID NO: 5858022 - DNA, 25 bp, Homo sapien
caggttttctgtgcctgactggggt

SEQ ID NO: 5858023 - DNA, 25 bp, Homo sapien
agggcaaagggccatgggctcacca

SEQ ID NO: 5858024 - DNA, 25 bp, Homo sapien
ctgccaggccttgccatcctttggc

SEQ ID NO: 5858025 - DNA, 25 bp, Homo sapien
ccctgggggtgacggtgctcactcc

SEQ ID NO: 5858026 - DNA, 25 bp, Homo sapien
gtggtactcacttgtcctggggccc

SEQ ID NO: 5858027 - DNA, 25 bp, Homo sapien
gtcaggggtggccttcctgaagaag

SEQ ID NO: 5858028 - DNA, 25 bp, Homo sapien
ggccccgtctccatccctagtgact

SEQ ID NO: 5858029 - DNA, 25 bp, Homo sapien
ctcaccagctggggccacgtggtca

SEQ ID NO: 5858030 - DNA, 25 bp, Homo sapien
ctcggcgttaagacaagagcatgca

SEQ ID NO: 5858031 - DNA, 25 bp, Homo sapien
ggtgttcaccctgtttctcatagcc

SEQ ID NO: 5858032 - DNA, 25 bp, Homo sapien
gtttctcatagcctcgttgtgtggc

SEQ ID NO: 5858033 - DNA, 25 bp, Homo sapien
agcttgtcctgtcacgctatgtccc

SEQ ID NO: 5858034 - DNA, 25 bp, Homo sapien
ctgactggggtctggcatgggcaaa

SEQ ID NO: 5858035 - DNA, 25 bp, Homo sapien
ctgcccctgggggtgacggtgctca

SEQ ID NO: 5858036 - DNA, 25 bp, Homo sapien
aagctggcctcaaccctgttatgta

SEQ ID NO: 5858037 - DNA, 25 bp, Homo sapien
ccagctggggccacgtggtcactgg

SEQ ID NO: 5858038 - DNA, 25 bp, Homo sapien
ccagggacacctgcccctgggggtg

SEQ ID NO: 5858039 - DNA, 25 bp, Homo sapien
ccttagccaggctgtgtcaaagcct

SEQ ID NO: 5858040 - DNA, 25 bp, Homo sapien
ttaagctggcctcaaccctgttatg

SEQ ID NO: 5858041 - DNA, 25 bp, Homo sapien
acctgcccctgggggtgacggtgct

SEQ ID NO: 5858042 - DNA, 25 bp, Homo sapien
gcccttccttagccaggctgtgtca

SEQ ID NO: 5858043 - DNA, 25 bp, Homo sapien
agccaggctgtgtcaaagcctaggg

SEQ ID NO: 5858044 - DNA, 25 bp, Homo sapien
gcagattaaggagtgtgagctgcca

SEQ ID NO: 5858045 - DNA, 25 bp, Homo sapien
actctctgtttttgggggcactggg

SEQ ID NO: 5858046 - DNA, 25 bp, Homo sapien
tcaaagcctaggggtccctgggttg

SEQ ID NO: 5858047 - DNA, 25 bp, Homo sapien
gggatcctaggcccttccttagcca

SEQ ID NO: 5858048 - DNA, 25 bp, Homo sapien
ttttctgtgcctgactggggtctgg

SEQ ID NO: 5858049 - DNA, 25 bp, Homo sapien
tacaggtgtgtgtgtggacctccac

SEQ ID NO: 5858050 - DNA, 25 bp, Homo sapien
ttgtctctctggagtgagttttctt

SEQ ID NO: 5858051 - DNA, 25 bp, Homo sapien
cacgctatgtcccaacccttatcct

SEQ ID NO: 5858052 - DNA, 25 bp, Homo sapien
ctcgttgtgtggctttggccctaag

SEQ ID NO: 5858053 - DNA, 25 bp, Homo sapien
atagacctgccaggccttgccatcc

SEQ ID NO: 5858054 - DNA, 25 bp, Homo sapien
ggccttgccatcctttggctggttt

SEQ ID NO: 5858055 - DNA, 25 bp, Homo sapien
aaggctcccttggtatagacctgcc

SEQ ID NO: 5858056 - DNA, 25 bp, Homo sapien
aaggagctgtgcaatgggcatacag

SEQ ID NO: 5858057 - DNA, 25 bp, Homo sapien
tggggggtctggtgttcaccctgtt

SEQ ID NO: 5858058 - DNA, 25 bp, Homo sapien
gtgagctgccatagacaaggatgtg

SEQ ID NO: 5858059 - DNA, 25 bp, Homo sapien
gagtgtgagctgccatagacaagga

SEQ ID NO: 5858060 - DNA, 25 bp, Homo sapien
tgggtgccaaggagctgtgcaatgg

SEQ ID NO: 5858061 - DNA, 25 bp, Homo sapien
ctttggctggttttaaagcttgtcc

SEQ ID NO: 5858062 - DNA, 25 bp, Homo sapien
tcctttggctggttttaaagcttgt

SEQ ID NO: 5858063 - DNA, 25 bp, Homo sapien
gggatcaaggaccaggcctgggacc

SEQ ID NO: 5858064 - DNA, 25 bp, Homo sapien
gtcacgctatgtcccaacccttatc

SEQ ID NO: 5858065 - DNA, 25 bp, Homo sapien
ctcccttggtatagacctgccaggc

SEQ ID NO: 5858066 - DNA, 25 bp, Homo sapien
gccaggccttgccatcctttggctg

SEQ ID NO: 5858067 - DNA, 25 bp, Homo sapien
gagtgagctgcatcccgggctgggc

SEQ ID NO: 5858068 - DNA, 25 bp, Homo sapien
ccacttgtctccctgtgtgctgaga

SEQ ID NO: 5858069 - DNA, 25 bp, Homo sapien
catgcccctgtatacgaggccagca

SEQ ID NO: 5858070 - DNA, 25 bp, Homo sapien
gccttcctgaagaaggctcccttgg

SEQ ID NO: 5858071 - DNA, 25 bp, Homo sapien
cacaggaagcctctgtggtactcac

SEQ ID NO: 5858072 - DNA, 25 bp, Homo sapien
acttgtctccctgtgtgctgagatt

SEQ ID NO: 5858073 - DNA, 25 bp, Homo sapien
cgtgtgacttaagctggcctcaacc

SEQ ID NO: 5858074 - DNA, 25 bp, Homo sapien
attacaggtgtgtgtgtggacctcc

SEQ ID NO: 5858075 - DNA, 25 bp, Homo sapien
gtgctcactcctttctgtttactac

SEQ ID NO: 5858076 - DNA, 25 bp, Homo sapien
ctctgtggtactcacttgtcctggg

SEQ ID NO: 5858077 - DNA, 25 bp, Homo sapien
caaccctgttatgtaactaagggca

SEQ ID NO: 5858078 - DNA, 25 bp, Homo sapien
ggggtctggcatgggcaaagggcaa

SEQ ID NO: 5858079 - DNA, 25 bp, Homo sapien
tctggggggtctggtgttcaccctg

SEQ ID NO: 5858080 - DNA, 25 bp, Homo sapien
ggttttaaagcttgtcctgtcacgc

SEQ ID NO: 5858081 - DNA, 25 bp, Homo sapien
tgttcaccctgtttctcatagcctc

SEQ ID NO: 5858082 - DNA, 25 bp, Homo sapien
atgggcaaagggcaaagggccatgg

SEQ ID NO: 5858083 - DNA, 25 bp, Homo sapien
actgggtgccaaggagctgtgcaat

SEQ ID NO: 5858084 - DNA, 25 bp, Homo sapien
ttcccctgtaagcccagatagcctg

SEQ ID NO: 5858085 - DNA, 25 bp, Homo sapien
atccttctgcctccacttgtctccc

SEQ ID NO: 5858086 - DNA, 25 bp, Homo sapien
gaagagctggcatctctcttctgct

SEQ ID NO: 5858087 - DNA, 25 bp, Homo sapien
ggtgtgtgtgtggacctccaccact

SEQ ID NO: 5858088 - DNA, 25 bp, Homo sapien
tgggctcaccagctggggccacgtg

SEQ ID NO: 5858089 - DNA, 25 bp, Homo sapien
ggccacgtggtcactgggtgccaag

SEQ ID NO: 5858090 - DNA, 25 bp, Homo sapien
ccaagaagagctggcatctctcttc

SEQ ID NO: 5858091 - DNA, 25 bp, Homo sapien
ggagctgtgcaatgggcatacagct

SEQ ID NO: 5858092 - DNA, 25 bp, Homo sapien
gggttggcaggctgctctggggggt

SEQ ID NO: 5858093 - DNA, 25 bp, Homo sapien
tttattctttggtctcattacacag

SEQ ID NO: 5858094 - DNA, 25 bp, Homo sapien
gtgctgagattacaggtgtgtgtgt

SEQ ID NO: 5858095 - DNA, 25 bp, Homo sapien
ctgtttctcatagcctcgttgtgtg

SEQ ID NO: 5858096 - DNA, 25 bp, Homo sapien
ccttctgcctccacttgtctccctg

SEQ ID NO: 5858097 - DNA, 25 bp, Homo sapien
cagcagccatggctgtcccagggac

SEQ ID NO: 5858098 - DNA, 25 bp, Homo sapien
ttagccaggctgtgtcaaagcctag

SEQ ID NO: 5858099 - DNA, 25 bp, Homo sapien
ctaggcccttccttagccaggctgt

SEQ ID NO: 5858100 - DNA, 25 bp, Homo sapien
caccctgtttctcatagcctcgttg

SEQ ID NO: 5858101 - DNA, 25 bp, Homo sapien
tttgggggcactgggaatcaagccc

SEQ ID NO: 5858102 - DNA, 25 bp, Homo sapien
aaggaccaggcctgggacccggaga

SEQ ID NO: 5858103 - DNA, 25 bp, Homo sapien
gatcaaggaccaggcctgggacccg

SEQ ID NO: 5858104 - DNA, 25 bp, Homo sapien
tgtatacgaggccagcacgctacag

SEQ ID NO: 5858105 - DNA, 25 bp, Homo sapien
aaggatgtgggatcaaggaccaggc

SEQ ID NO: 5858106 - DNA, 25 bp, Homo sapien
ggcatctctcttctgctctttattc

SEQ ID NO: 5858107 - DNA, 25 bp, Homo sapien
gtgtgagctgccatagacaaggatg

SEQ ID NO: 5858108 - DNA, 25 bp, Homo sapien
agctggcatctctcttctgctcttt

SEQ ID NO: 5858109 - DNA, 25 bp, Homo sapien
ggccctaagccattgtctctctgga

SEQ ID NO: 5858110 - DNA, 25 bp, Homo sapien
agaaggctcccttggtatagacctg

SEQ ID NO: 5858111 - DNA, 25 bp, Homo sapien
agattaaggagtgtgagctgccata

SEQ ID NO: 5858112 - DNA, 25 bp, Homo sapien
gtggctttggccctaagccattgtc

SEQ ID NO: 5858113 - DNA, 25 bp, Homo sapien
agacaaggatgtgggatcaaggacc

SEQ ID NO: 5858114 - DNA, 25 bp, Homo sapien
cccagatagcctgtaagccagcagc

SEQ ID NO: 5858115 - DNA, 25 bp, Homo sapien
ccctgtttctcatagcctcgttgtg

SEQ ID NO: 5858116 - DNA, 25 bp, Homo sapien
ctgggaatcaagcccatgcccctgt

SEQ ID NO: 5858117 - DNA, 25 bp, Homo sapien
ggacccggagaggacacccagggat

SEQ ID NO: 5858118 - DNA, 25 bp, Homo sapien
gcccctgggggtgacggtgctcact

SEQ ID NO: 5858119 - DNA, 25 bp, Homo sapien
ctgtcttgtctccctctggctctgc

SEQ ID NO: 5858120 - DNA, 25 bp, Homo sapien
gagctgccatagacaaggatgtggg

SEQ ID NO: 5858121 - DNA, 25 bp, Homo sapien
taatccttctgcctccacttgtctc

SEQ ID NO: 5858122 - DNA, 25 bp, Homo sapien
ggctcaccagctggggccacgtggt

SEQ ID NO: 5858123 - DNA, 25 bp, Homo sapien
ccccgtctccatccctagtgacttc

SEQ ID NO: 5858124 - DNA, 25 bp, Homo sapien
atctcgtgtgacttaagctggcctc

SEQ ID NO: 5858125 - DNA, 25 bp, Homo sapien
ccaaggagctgtgcaatgggcatac

SEQ ID NO: 5858126 - DNA, 25 bp, Homo sapien
aagggccatgggctcaccagctggg

SEQ ID NO: 5858127 - DNA, 25 bp, Homo sapien
gccagcacgctacagagtgagctgc

SEQ ID NO: 5858128 - DNA, 25 bp, Homo sapien
tcccgggctgggcaggttttctgtg

SEQ ID NO: 5858129 - DNA, 25 bp, Homo sapien
gctacagagtgagctgcatcccggg

SEQ ID NO: 5858130 - DNA, 25 bp, Homo sapien
accaggcctgggacccggagaggac

SEQ ID NO: 5858131 - DNA, 25 bp, Homo sapien
tgtcctgtcacgctatgtcccaacc

SEQ ID NO: 5858132 - DNA, 25 bp, Homo sapien
tactcacttgtcctggggccccgtc

SEQ ID NO: 5858133 - DNA, 25 bp, Homo sapien
ccctgggttggcaggctgctctggg

SEQ ID NO: 5858134 - DNA, 25 bp, Homo sapien
acctgccaggccttgccatcctttg

SEQ ID NO: 5858135 - DNA, 25 bp, Homo sapien
gctggggtcaggggtggccttcctg

SEQ ID NO: 5858136 - DNA, 25 bp, Homo sapien
cattgtctctctggagtgagttttc

SEQ ID NO: 5858137 - DNA, 25 bp, Homo sapien
tcttctgctctttattctttggtct

SEQ ID NO: 5858138 - DNA, 25 bp, Homo sapien
gacggtgctcactcctttctgttta

SEQ ID NO: 5858139 - DNA, 25 bp, Homo sapien
tgggacccggagaggacacccaggg

SEQ ID NO: 5858140 - DNA, 25 bp, Homo sapien
ctccacttgtctccctgtgtgctga

SEQ ID NO: 5858141 - DNA, 25 bp, Homo sapien
cacccagggatgccaagaagagctg

SEQ ID NO: 5858142 - DNA, 25 bp, Homo sapien
ccaacccttatcctcggcgttaaga

SEQ ID NO: 5858143 - DNA, 25 bp, Homo sapien
ctgtgcctgactggggtctggcatg

SEQ ID NO: 5858144 - DNA, 25 bp, Homo sapien
ctctggagtgagttttctttttttc

SEQ ID NO: 5858145 - DNA, 25 bp, Homo sapien
gtctggtgttcaccctgtttctcat

SEQ ID NO: 5858146 - DNA, 25 bp, Homo sapien
tgggggcactgggaatcaagcccat

SEQ ID NO: 5858147 - DNA, 25 bp, Homo sapien
tagcctgtaagccagcagccatggc

SEQ ID NO: 5858148 - DNA, 25 bp, Homo sapien
gggtctggtgttcaccctgtttctc

SEQ ID NO: 5858149 - DNA, 25 bp, Homo sapien
ggtctcattacacaggaagcctctg

SEQ ID NO: 5858150 - DNA, 25 bp, Homo sapien
gcatgggcaaagggcaaagggccat

SEQ ID NO: 5858151 - DNA, 25 bp, Homo sapien
agcccagatagcctgtaagccagca

SEQ ID NO: 5858152 - DNA, 25 bp, Homo sapien
ctccatccctagtgacttcccctgt

SEQ ID NO: 5858153 - DNA, 25 bp, Homo sapien
gtctctctggagtgagttttctttt

SEQ ID NO: 5858154 - DNA, 25 bp, Homo sapien
tgtgtggacctccaccactctctgt

SEQ ID NO: 5858155 - DNA, 25 bp, Homo sapien
gtggtcactgggtgccaaggagctg

SEQ ID NO: 5858156 - DNA, 25 bp, Homo sapien
tgcatcccgggctgggcaggttttc

SEQ ID NO: 5858157 - DNA, 25 bp, Homo sapien
gtgtcaaagcctaggggtccctggg

SEQ ID NO: 5858158 - DNA, 25 bp, Homo sapien
tgggcatacagctaggtgggaagct

SEQ ID NO: 5858159 - DNA, 25 bp, Homo sapien
ctggggccacgtggtcactgggtgc

SEQ ID NO: 5858160 - DNA, 25 bp, Homo sapien
cacttgtcctggggccccgtctcca

SEQ ID NO: 5858161 - DNA, 25 bp, Homo sapien
actaagggcaaccttaatccttctg

SEQ ID NO: 5858162 - DNA, 25 bp, Homo sapien
gacacccagggatgccaagaagagc

SEQ ID NO: 5858163 - DNA, 25 bp, Homo sapien
cctgtaagcccagatagcctgtaag

SEQ ID NO: 5858164 - DNA, 25 bp, Homo sapien
aagcctctgtggtactcacttgtcc

SEQ ID NO: 5858165 - DNA, 25 bp, Homo sapien
gcaaagggcaaagggccatgggctc

SEQ ID NO: 5858166 - DNA, 25 bp, Homo sapien
ttttaaagcttgtcctgtcacgcta

SEQ ID NO: 5858167 - DNA, 25 bp, Homo sapien
gcatgcagattaaggagtgtgagct

SEQ ID NO: 5858168 - DNA, 25 bp, Homo sapien
ggtcactgggtgccaaggagctgtg

SEQ ID NO: 5858169 - DNA, 25 bp, Homo sapien
gggctgggcaggttttctgtgcctg

SEQ ID NO: 5858170 - DNA, 25 bp, Homo sapien
actcctttctgtttactaccagtgg

SEQ ID NO: 5858171 - DNA, 25 bp, Homo sapien
aaagcttgtcctgtcacgctatgtc

SEQ ID NO: 5858172 - DNA, 25 bp, Homo sapien
tctccctctggctctgctgggatcc

SEQ ID NO: 5858173 - DNA, 25 bp, Homo sapien
gcctgactggggtctggcatgggca

SEQ ID NO: 5858174 - DNA, 25 bp, Homo sapien
ctggttttaaagcttgtcctgtcac

SEQ ID NO: 5858175 - DNA, 25 bp, Homo sapien
cagcacgctacagagtgagctgcat

SEQ ID NO: 5858176 - DNA, 25 bp, Homo sapien
gtgcctgactggggtctggcatggg

SEQ ID NO: 5858177 - DNA, 25 bp, Homo sapien
tgtgacttaagctggcctcaaccct

SEQ ID NO: 5858178 - DNA, 25 bp, Homo sapien
aggccagcacgctacagagtgagct

SEQ ID NO: 5858179 - DNA, 25 bp, Homo sapien
ttggtctcattacacaggaagcctc

SEQ ID NO: 5858180 - DNA, 25 bp, Homo sapien
ccgggctgggcaggttttctgtgcc

SEQ ID NO: 5858181 - DNA, 25 bp, Homo sapien
gtccctgggttggcaggctgctctg

SEQ ID NO: 5858182 - DNA, 25 bp, Homo sapien
tatcctcggcgttaagacaagagca

SEQ ID NO: 5858183 - DNA, 25 bp, Homo sapien
acttcccctgtaagcccagatagcc

SEQ ID NO: 5858184 - DNA, 25 bp, Homo sapien
cagggatgccaagaagagctggcat

SEQ ID NO: 5858185 - DNA, 25 bp, Homo sapien
tctcattacacaggaagcctctgtg

SEQ ID NO: 5858186 - DNA, 25 bp, Homo sapien
tattctttggtctcattacacagga

SEQ ID NO: 5858187 - DNA, 25 bp, Homo sapien
caggtgtgtgtgtggacctccacca

SEQ ID NO: 5858188 - DNA, 25 bp, Homo sapien
ctgtcccagggacacctgcccctgg

SEQ ID NO: 5858189 - DNA, 25 bp, Homo sapien
gtgtgctgagattacaggtgtgtgt

SEQ ID NO: 5858190 - DNA, 25 bp, Homo sapien
tgacttcccctgtaagcccagatag

SEQ ID NO: 5858191 - DNA, 25 bp, Homo sapien
tgccatagacaaggatgtgggatca

SEQ ID NO: 5858192 - DNA, 25 bp, Homo sapien
ggaagctggggtcaggggtggcctt

SEQ ID NO: 5858193 - DNA, 25 bp, Homo sapien
agggcaaccttaatccttctgcctc

SEQ ID NO: 5858194 - DNA, 25 bp, Homo sapien
ccttccttagccaggctgtgtcaaa

SEQ ID NO: 5858195 - DNA, 25 bp, Homo sapien
caaagggccatgggctcaccagctg

SEQ ID NO: 5858196 - DNA, 25 bp, Homo sapien
tgtgtgtgtggacctccaccactct

SEQ ID NO: 5858197 - DNA, 25 bp, Homo sapien
gcctccacttgtctccctgtgtgct

SEQ ID NO: 5858198 - DNA, 25 bp, Homo sapien
gtgcaatgggcatacagctaggtgg

SEQ ID NO: 5858199 - DNA, 25 bp, Homo sapien
ggcaaccttaatccttctgcctcca

SEQ ID NO: 5858200 - DNA, 25 bp, Homo sapien
atgtgggatcaaggaccaggcctgg

SEQ ID NO: 5858201 - DNA, 25 bp, Homo sapien
gttaagacaagagcatgcagattaa

SEQ ID NO: 5858202 - DNA, 25 bp, Homo sapien
gccagcagccatggctgtcccaggg

SEQ ID NO: 5858203 - DNA, 25 bp, Homo sapien
ctgtggtactcacttgtcctggggc

SEQ ID NO: 5858204 - DNA, 25 bp, Homo sapien
ggcatacagctaggtgggaagctgg

SEQ ID NO: 5858205 - DNA, 25 bp, Homo sapien
agtgacttcccctgtaagcccagat

SEQ ID NO: 5858206 - DNA, 25 bp, Homo sapien
ccatagacaaggatgtgggatcaag

SEQ ID NO: 5858207 - DNA, 25 bp, Homo sapien
gaagaaggctcccttggtatagacc

SEQ ID NO: 5858208 - DNA, 25 bp, Homo sapien
aagacagcatctcgtgtgacttaag

SEQ ID NO: 5858209 - DNA, 25 bp, Homo sapien
gggggtgacggtgctcactcctttc

SEQ ID NO: 5858210 - DNA, 25 bp, Homo sapien
ccatccctagtgacttcccctgtaa

SEQ ID NO: 5858211 - DNA, 25 bp, Homo sapien
gtatagacctgccaggccttgccat

SEQ ID NO: 5858212 - DNA, 25 bp, Homo sapien
tctcttctgctctttattctttggt

SEQ ID NO: 5858213 - DNA, 25 bp, Homo sapien
ctttctgtttactaccagtggggcc

SEQ ID NO: 5858214 - DNA, 25 bp, Homo sapien
ggttttctgtgcctgactggggtct

SEQ ID NO: 5858215 - DNA, 25 bp, Homo sapien
acgctacagagtgagctgcatcccg

SEQ ID NO: 5858216 - DNA, 25 bp, Homo sapien
caggccttgccatcctttggctggt

SEQ ID NO: 5858217 - DNA, 25 bp, Homo sapien
caggctgctctggggggtctggtgt

SEQ ID NO: 5858218 - DNA, 25 bp, Homo sapien
ttttttttaagacagcatctcgtgt

SEQ ID NO: 5858219 - DNA, 25 bp, Homo sapien
agacctgccaggccttgccatcctt

SEQ ID NO: 5858220 - DNA, 25 bp, Homo sapien
gatgccaagaagagctggcatctct

SEQ ID NO: 5858221 - DNA, 25 bp, Homo sapien
ccggagaggacacccagggatgcca

SEQ ID NO: 5858222 - DNA, 25 bp, Homo sapien
accctgttatgtaactaagggcaac

SEQ ID NO: 5858223 - DNA, 25 bp, Homo sapien
tttttgggggcactgggaatcaagc

SEQ ID NO: 5858224 - DNA, 25 bp, Homo sapien
gcctaggggtccctgggttggcagg

SEQ ID NO: 5858225 - DNA, 25 bp, Homo sapien
ccgtctccatccctagtgacttccc

SEQ ID NO: 5858226 - DNA, 25 bp, Homo sapien
gatagcctgtaagccagcagccatg

SEQ ID NO: 5858227 - DNA, 25 bp, Homo sapien
ccctgtgtgctgagattacaggtgt

SEQ ID NO: 5858228 - DNA, 25 bp, Homo sapien
ggcactgggaatcaagcccatgccc

SEQ ID NO: 5858229 - DNA, 25 bp, Homo sapien
tgagattacaggtgtgtgtgtggac

SEQ ID NO: 5858230 - DNA, 25 bp, Homo sapien
gtgggatcaaggaccaggcctggga

SEQ ID NO: 5858231 - DNA, 25 bp, Homo sapien
ccagctgtcttgtctccctctggct

SEQ ID NO: 5858232 - DNA, 25 bp, Homo sapien
atccctagtgacttcccctgtaagc

SEQ ID NO: 5858233 - DNA, 25 bp, Homo sapien
aagcctaggggtccctgggttggca

SEQ ID NO: 5858234 - DNA, 25 bp, Homo sapien
ggaccaggcctgggacccggagagg

SEQ ID NO: 5858235 - DNA, 25 bp, Homo sapien
ggcaggctgctctggggggtctggt

SEQ ID NO: 5858236 - DNA, 25 bp, Homo sapien
cccttggtatagacctgccaggcct

SEQ ID NO: 5858237 - DNA, 25 bp, Homo sapien
acacctgcccctgggggtgacggtg

SEQ ID NO: 5858238 - DNA, 25 bp, Homo sapien
ttttttttttaagacagcatctcgt

SEQ ID NO: 5858239 - DNA, 25 bp, Homo sapien
cgctatgtcccaacccttatcctcg

SEQ ID NO: 5858240 - DNA, 25 bp, Homo sapien
gccatcctttggctggttttaaagc

SEQ ID NO: 5858241 - DNA, 25 bp, Homo sapien
ggggtggccttcctgaagaaggctc

SEQ ID NO: 5858242 - DNA, 25 bp, Homo sapien
ttgccatcctttggctggttttaaa

SEQ ID NO: 5858243 - DNA, 25 bp, Homo sapien
gctgcatcccgggctgggcaggttt

SEQ ID NO: 5858244 - DNA, 25 bp, Homo sapien
attaaggagtgtgagctgccataga

SEQ ID NO: 5858245 - DNA, 25 bp, Homo sapien
ggctttggccctaagccattgtctc

SEQ ID NO: 5858246 - DNA, 25 bp, Homo sapien
tctctgtttttgggggcactgggaa

SEQ ID NO: 5858247 - DNA, 25 bp, Homo sapien
gtctccctgtgtgctgagattacag

SEQ ID NO: 5858248 - DNA, 25 bp, Homo sapien
tggctctgctgggatcctaggccct

SEQ ID NO: 5858249 - DNA, 25 bp, Homo sapien
tgccaaggagctgtgcaatgggcat

SEQ ID NO: 5858250 - DNA, 25 bp, Homo sapien
tctgtttttgggggcactgggaatc

SEQ ID NO: 5858251 - DNA, 25 bp, Homo sapien
tggacctccaccactctctgttttt

SEQ ID NO: 5858252 - DNA, 25 bp, Homo sapien
aggggtccctgggttggcaggctgc

SEQ ID NO: 5858253 - DNA, 25 bp, Homo sapien
gagcatgcagattaaggagtgtgag

SEQ ID NO: 5858254 - DNA, 25 bp, Homo sapien
gtgagctgcatcccgggctgggcag

SEQ ID NO: 5858255 - DNA, 25 bp, Homo sapien
tggtatagacctgccaggccttgcc

SEQ ID NO: 5858256 - DNA, 25 bp, Homo sapien
aggagtgtgagctgccatagacaag

SEQ ID NO: 5858257 - DNA, 25 bp, Homo sapien
ggctgtcccagggacacctgcccct

SEQ ID NO: 5858258 - DNA, 25 bp, Homo sapien
aagaagagctggcatctctcttctg

SEQ ID NO: 5858259 - DNA, 25 bp, Homo sapien
aagagcatgcagattaaggagtgtg

SEQ ID NO: 5858260 - DNA, 25 bp, Homo sapien
aaagggcaaagggccatgggctcac

SEQ ID NO: 5858261 - DNA, 25 bp, Homo sapien
gcctcaaccctgttatgtaactaag

SEQ ID NO: 5858262 - DNA, 25 bp, Homo sapien
ctcacttgtcctggggccccgtctc

SEQ ID NO: 5858263 - DNA, 25 bp, Homo sapien
agccatggctgtcccagggacacct

SEQ ID NO: 5858264 - DNA, 25 bp, Homo sapien
ccatggctgtcccagggacacctgc

SEQ ID NO: 5858265 - DNA, 25 bp, Homo sapien
tcactgggtgccaaggagctgtgca

SEQ ID NO: 5858266 - DNA, 25 bp, Homo sapien
gccatgggctcaccagctggggcca

SEQ ID NO: 5858267 - DNA, 25 bp, Homo sapien
cttcctgaagaaggctcccttggta

SEQ ID NO: 5858268 - DNA, 25 bp, Homo sapien
atagacaaggatgtgggatcaagga

SEQ ID NO: 5858269 - DNA, 25 bp, Homo sapien
tgggcaggttttctgtgcctgactg

SEQ ID NO: 5858270 - DNA, 25 bp, Homo sapien
gtgtggctttggccctaagccattg

SEQ ID NO: 5858271 - DNA, 25 bp, Homo sapien
ctgggatcctaggcccttccttagc

SEQ ID NO: 5858272 - DNA, 25 bp, Homo sapien
cttgtcctgtcacgctatgtcccaa

SEQ ID NO: 5858273 - DNA, 25 bp, Homo sapien
tgtaagcccagatagcctgtaagcc

SEQ ID NO: 5858274 - DNA, 25 bp, Homo sapien
aagctggggtcaggggtggccttcc

SEQ ID NO: 5858275 - DNA, 25 bp, Homo sapien
tctggcatgggcaaagggcaaaggg

SEQ ID NO: 5858276 - DNA, 25 bp, Homo sapien
cggtgctcactcctttctgtttact

SEQ ID NO: 5858277 - DNA, 25 bp, Homo sapien
ccctagtgacttcccctgtaagccc

SEQ ID NO: 5858278 - DNA, 25 bp, Homo sapien
ttggctggttttaaagcttgtcctg

SEQ ID NO: 5858279 - DNA, 25 bp, Homo sapien
agaggacacccagggatgccaagaa

SEQ ID NO: 5858280 - DNA, 25 bp, Homo sapien
tgccaagaagagctggcatctctct

SEQ ID NO: 5858281 - DNA, 25 bp, Homo sapien
tgtctccctctggctctgctgggat

SEQ ID NO: 5858282 - DNA, 25 bp, Homo sapien
ttttttttttttaagacagcatctc

SEQ ID NO: 5858283 - DNA, 25 bp, Homo sapien
cctctggctctgctgggatcctagg

SEQ ID NO: 5858284 - DNA, 25 bp, Homo sapien
ttctgcctccacttgtctccctgtg

SEQ ID NO: 5858285 - DNA, 25 bp, Homo sapien
ctgtcacgctatgtcccaaccctta

SEQ ID NO: 5858286 - DNA, 25 bp, Homo sapien
acgtggtcactgggtgccaaggagc

SEQ ID NO: 5858287 - DNA, 25 bp, Homo sapien
catagcctcgttgtgtggctttggc

SEQ ID NO: 5858288 - DNA, 25 bp, Homo sapien
tcattacacaggaagcctctgtggt

SEQ ID NO: 5858289 - DNA, 25 bp, Homo sapien
gccattgtctctctggagtgagttt

SEQ ID NO: 5858290 - DNA, 25 bp, Homo sapien
tcctttctgtttactaccagtgggg

SEQ ID NO: 5858291 - DNA, 25 bp, Homo sapien
cccctgtaagcccagatagcctgta

SEQ ID NO: 5858292 - DNA, 25 bp, Homo sapien
attacacaggaagcctctgtggtac

SEQ ID NO: 5858293 - DNA, 25 bp, Homo sapien
tcactcctttctgtttactaccagt

SEQ ID NO: 5858294 - DNA, 25 bp, Homo sapien
ggtggccttcctgaagaaggctccc

SEQ ID NO: 5858295 - DNA, 25 bp, Homo sapien
atcaagcccatgcccctgtatacga

SEQ ID NO: 5858296 - DNA, 25 bp, Homo sapien
ggtactcacttgtcctggggccccg

SEQ ID NO: 5858297 - DNA, 25 bp, Homo sapien
ggggccccgtctccatccctagtga

SEQ ID NO: 5858298 - DNA, 25 bp, Homo sapien
gcctctgtggtactcacttgtcctg

SEQ ID NO: 5858299 - DNA, 25 bp, Homo sapien
acttaagctggcctcaaccctgtta

SEQ ID NO: 5858300 - DNA, 25 bp, Homo sapien
gcaatgggcatacagctaggtggga

SEQ ID NO: 5858301 - DNA, 25 bp, Homo sapien
gtcccaacccttatcctcggcgtta

SEQ ID NO: 5858302 - DNA, 25 bp, Homo sapien
ttctcatagcctcgttgtgtggctt

SEQ ID NO: 5858303 - DNA, 25 bp, Homo sapien
gctctggggggtctggtgttcaccc

SEQ ID NO: 5858304 - DNA, 25 bp, Homo sapien
ttccttagccaggctgtgtcaaagc

SEQ ID NO: 5858305 - DNA, 25 bp, Homo sapien
ctaggggtccctgggttggcaggct

SEQ ID NO: 5858306 - DNA, 25 bp, Homo sapien
taaggagtgtgagctgccatagaca

SEQ ID NO: 5858307 - DNA, 25 bp, Homo sapien
ctgggggtgacggtgctcactcctt

SEQ ID NO: 5858308 - DNA, 25 bp, Homo sapien
ctcgtgtgacttaagctggcctcaa

SEQ ID NO: 5858309 - DNA, 25 bp, Homo sapien
ttttaagacagcatctcgtgtgact

SEQ ID NO: 5858310 - DNA, 25 bp, Homo sapien
tgcccctgtatacgaggccagcacg

SEQ ID NO: 5858311 - DNA, 25 bp, Homo sapien
ctgctctttattctttggtctcatt

SEQ ID NO: 5858312 - DNA, 25 bp, Homo sapien
cttaatccttctgcctccacttgtc

SEQ ID NO: 5858313 - DNA, 25 bp, Homo sapien
cccctgtatacgaggccagcacgct

SEQ ID NO: 5858314 - DNA, 25 bp, Homo sapien
gctgccatagacaaggatgtgggat

SEQ ID NO: 5858315 - DNA, 25 bp, Homo sapien
tgctgggatcctaggcccttcctta

SEQ ID NO: 5858316 - DNA, 25 bp, Homo sapien
gctctgctgggatcctaggcccttc

SEQ ID NO: 5858317 - DNA, 25 bp, Homo sapien
ttctttggtctcattacacaggaag

SEQ ID NO: 5858318 - DNA, 25 bp, Homo sapien
ctctctggagtgagttttctttttt

SEQ ID NO: 5858319 - DNA, 25 bp, Homo sapien
agctggggccacgtggtcactgggt

SEQ ID NO: 5858320 - DNA, 25 bp, Homo sapien
ctgtgcaatgggcatacagctaggt

SEQ ID NO: 5858321 - DNA, 25 bp, Homo sapien
ctccctgtgtgctgagattacaggt

SEQ ID NO: 5858322 - DNA, 25 bp, Homo sapien
cggcgttaagacaagagcatgcaga

SEQ ID NO: 5858323 - DNA, 25 bp, Homo sapien
gctcactcctttctgtttactacca

SEQ ID NO: 5858324 - DNA, 25 bp, Homo sapien
ggggcactgggaatcaagcccatgc

SEQ ID NO: 5858325 - DNA, 25 bp, Homo sapien
gggaatcaagcccatgcccctgtat

SEQ ID NO: 5858326 - DNA, 25 bp, Homo sapien
acccggagaggacacccagggatgc

SEQ ID NO: 5858327 - DNA, 25 bp, Homo sapien
atgtcccaacccttatcctcggcgt

SEQ ID NO: 5858328 - DNA, 25 bp, Homo sapien
ctggggccccgtctccatccctagt

SEQ ID NO: 5858329 - DNA, 25 bp, Homo sapien
caggcctgggacccggagaggacac

SEQ ID NO: 5858330 - DNA, 25 bp, Homo sapien
gcagccatggctgtcccagggacac

SEQ ID NO: 5858331 - DNA, 25 bp, Homo sapien
aatgggcatacagctaggtgggaag

SEQ ID NO: 5858332 - DNA, 25 bp, Homo sapien
caaccttaatccttctgcctccact

SEQ ID NO: 5858333 - DNA, 25 bp, Homo sapien
tgacttaagctggcctcaaccctgt

SEQ ID NO: 5858334 - DNA, 25 bp, Homo sapien
ctgtaagccagcagccatggctgtc

SEQ ID NO: 5858335 - DNA, 25 bp, Homo sapien
cagagtgagctgcatcccgggctgg

SEQ ID NO: 5858336 - DNA, 25 bp, Homo sapien
tggggtcaggggtggccttcctgaa

SEQ ID NO: 5858337 - DNA, 25 bp, Homo sapien
ttgtgtggctttggccctaagccat

SEQ ID NO: 5858338 - DNA, 25 bp, Homo sapien
aagccattgtctctctggagtgagt

SEQ ID NO: 5858339 - DNA, 25 bp, Homo sapien
ctttggtctcattacacaggaagcc

SEQ ID NO: 5858340 - DNA, 25 bp, Homo sapien
gggtcaggggtggccttcctgaaga

SEQ ID NO: 5858341 - DNA, 25 bp, Homo sapien
cagatagcctgtaagccagcagcca

SEQ ID NO: 5858342 - DNA, 25 bp, Homo sapien
cctgtatacgaggccagcacgctac

SEQ ID NO: 5858343 - DNA, 25 bp, Homo sapien
ggctcccttggtatagacctgccag

SEQ ID NO: 5858344 - DNA, 25 bp, Homo sapien
gggtgacggtgctcactcctttctg

SEQ ID NO: 5858345 - DNA, 25 bp, Homo sapien
tctctcttctgctctttattctttg

SEQ ID NO: 5858346 - DNA, 25 bp, Homo sapien
agattacaggtgtgtgtgtggacct

SEQ ID NO: 5858347 - DNA, 25 bp, Homo sapien
ctagtgacttcccctgtaagcccag

SEQ ID NO: 5858348 - DNA, 25 bp, Homo sapien
aaactcactccagagagacaatggc

SEQ ID NO: 5858349 - DNA, 25 bp, Homo sapien
ctgtgtaatgagaccaaagaataaa

SEQ ID NO: 5858350 - DNA, 25 bp, Homo sapien
atcccagcagagccagagggagaca

SEQ ID NO: 5858351 - DNA, 25 bp, Homo sapien
cagaaaacctgcccagcccgggatg

SEQ ID NO: 5858352 - DNA, 25 bp, Homo sapien
gcgtgacaggacaagctttaaaacc

SEQ ID NO: 5858353 - DNA, 25 bp, Homo sapien
gtagcgtgctggcctcgtatacagg

SEQ ID NO: 5858354 - DNA, 25 bp, Homo sapien
acagagagtggtggaggtccacaca

SEQ ID NO: 5858355 - DNA, 25 bp, Homo sapien
gcctggtccttgatcccacatcctt

SEQ ID NO: 5858356 - DNA, 25 bp, Homo sapien
ggatggcaaggcctggcaggtctat

SEQ ID NO: 5858357 - DNA, 25 bp, Homo sapien
atccctgggtgtcctctccgggtcc

SEQ ID NO: 5858358 - DNA, 25 bp, Homo sapien
gagacggggccccaggacaagtgag

SEQ ID NO: 5858359 - DNA, 25 bp, Homo sapien
gtgtccctgggacagccatggctgc

SEQ ID NO: 5858360 - DNA, 25 bp, Homo sapien
cccatgccagaccccagtcaggcac

SEQ ID NO: 5858361 - DNA, 25 bp, Homo sapien
aagaataaagagcagaagagagatg

SEQ ID NO: 5858362 - DNA, 25 bp, Homo sapien
gttgcccttagttacataacagggt

SEQ ID NO: 5858363 - DNA, 25 bp, Homo sapien
tcttaacgccgaggataagggttgg

SEQ ID NO: 5858364 - DNA, 25 bp, Homo sapien
tcccacctagctgtatgcccattgc

SEQ ID NO: 5858365 - DNA, 25 bp, Homo sapien
gtgtaatgagaccaaagaataaaga

SEQ ID NO: 5858366 - DNA, 25 bp, Homo sapien
tggctgctggcttacaggctatctg

SEQ ID NO: 5858367 - DNA, 25 bp, Homo sapien
ggccagcttaagtcacacgagatgc

SEQ ID NO: 5858368 - DNA, 25 bp, Homo sapien
cccaggacaagtgagtaccacagag

SEQ ID NO: 5858369 - DNA, 25 bp, Homo sapien
gcctggcaggtctataccaagggag

SEQ ID NO: 5858370 - DNA, 25 bp, Homo sapien
tatggcagctcacactccttaatct

SEQ ID NO: 5858371 - DNA, 25 bp, Homo sapien
aggggcatgggcttgattcccagtg

SEQ ID NO: 5858372 - DNA, 25 bp, Homo sapien
cactccttaatctgcatgctcttgt

SEQ ID NO: 5858373 - DNA, 25 bp, Homo sapien
agcacacagggagacaagtggaggc

SEQ ID NO: 5858374 - DNA, 25 bp, Homo sapien
agtaaacagaaaggagtgagcaccg

SEQ ID NO: 5858375 - DNA, 25 bp, Homo sapien
tgaccacgtggccccagctggtgag

SEQ ID NO: 5858376 - DNA, 25 bp, Homo sapien
atgcagctcactctgtagcgtgctg

SEQ ID NO: 5858377 - DNA, 25 bp, Homo sapien
tcctgtgtaatgagaccaaagaata

SEQ ID NO: 5858378 - DNA, 25 bp, Homo sapien
ccttaatctgcatgctcttgtctta

SEQ ID NO: 5858379 - DNA, 25 bp, Homo sapien
aagctttaaaaccagccaaaggatg

SEQ ID NO: 5858380 - DNA, 25 bp, Homo sapien
gagaaacagggtgaacaccagaccc

SEQ ID NO: 5858381 - DNA, 25 bp, Homo sapien
gagatgctgtcttaaaaaaaaaaaa

SEQ ID NO: 5858382 - DNA, 25 bp, Homo sapien
ctttgccctttgcccatgccagacc

SEQ ID NO: 5858383 - DNA, 25 bp, Homo sapien
gcccagcccgggatgcagctcactc

SEQ ID NO: 5858384 - DNA, 25 bp, Homo sapien
gcccccaaaaacagagagtggtgga

SEQ ID NO: 5858385 - DNA, 25 bp, Homo sapien
ttacaggggaagtcactagggatgg

SEQ ID NO: 5858386 - DNA, 25 bp, Homo sapien
gaggcttcctgtgtaatgagaccaa

SEQ ID NO: 5858387 - DNA, 25 bp, Homo sapien
gggacagccatggctgctggcttac

SEQ ID NO: 5858388 - DNA, 25 bp, Homo sapien
cagctggtgagcccatggccctttg

SEQ ID NO: 5858389 - DNA, 25 bp, Homo sapien
caaagaataaagagcagaagagaga

SEQ ID NO: 5858390 - DNA, 25 bp, Homo sapien
gctgctggcttacaggctatctggg

SEQ ID NO: 5858391 - DNA, 25 bp, Homo sapien
agggcctaggatcccagcagagcca

SEQ ID NO: 5858392 - DNA, 25 bp, Homo sapien
tccttgatcccacatccttgtctat

SEQ ID NO: 5858393 - DNA, 25 bp, Homo sapien
cctgccaacccagggacccctaggc

SEQ ID NO: 5858394 - DNA, 25 bp, Homo sapien
cttcctgtgtaatgagaccaaagaa

SEQ ID NO: 5858395 - DNA, 25 bp, Homo sapien
tgccaacccagggacccctaggctt

SEQ ID NO: 5858396 - DNA, 25 bp, Homo sapien
acacgagatgctgtcttaaaaaaaa

SEQ ID NO: 5858397 - DNA, 25 bp, Homo sapien
cgtgctggcctcgtatacaggggca

SEQ ID NO: 5858398 - DNA, 25 bp, Homo sapien
tgatcccacatccttgtctatggca

SEQ ID NO: 5858399 - DNA, 25 bp, Homo sapien
caggacaagctttaaaaccagccaa

SEQ ID NO: 5858400 - DNA, 25 bp, Homo sapien
cacacagggagacaagtggaggcag

SEQ ID NO: 5858401 - DNA, 25 bp, Homo sapien
cccagcagagccagagggagacaag

SEQ ID NO: 5858402 - DNA, 25 bp, Homo sapien
accacgtggccccagctggtgagcc

SEQ ID NO: 5858403 - DNA, 25 bp, Homo sapien
tggcagctcacactccttaatctgc

SEQ ID NO: 5858404 - DNA, 25 bp, Homo sapien
tcacacgagatgctgtcttaaaaaa

SEQ ID NO: 5858405 - DNA, 25 bp, Homo sapien
attaaggttgcccttagttacataa

SEQ ID NO: 5858406 - DNA, 25 bp, Homo sapien
ttgccctttgcccatgccagacccc

SEQ ID NO: 5858407 - DNA, 25 bp, Homo sapien
ggttgggacatagcgtgacaggaca

SEQ ID NO: 5858408 - DNA, 25 bp, Homo sapien
aggttgcccttagttacataacagg

SEQ ID NO: 5858409 - DNA, 25 bp, Homo sapien
cacccccaggggcaggtgtccctgg

SEQ ID NO: 5858410 - DNA, 25 bp, Homo sapien
ccaagggagccttcttcaggaaggc

SEQ ID NO: 5858411 - DNA, 25 bp, Homo sapien
agagatgccagctcttcttggcatc

SEQ ID NO: 5858412 - DNA, 25 bp, Homo sapien
gtccctgggacagccatggctgctg

SEQ ID NO: 5858413 - DNA, 25 bp, Homo sapien
gtgagtaccacagaggcttcctgtg

SEQ ID NO: 5858414 - DNA, 25 bp, Homo sapien
gaagagagatgccagctcttcttgg

SEQ ID NO: 5858415 - DNA, 25 bp, Homo sapien
gacagccatggctgctggcttacag

SEQ ID NO: 5858416 - DNA, 25 bp, Homo sapien
gccgaggataagggttgggacatag

SEQ ID NO: 5858417 - DNA, 25 bp, Homo sapien
cccccagagcagcctgccaacccag

SEQ ID NO: 5858418 - DNA, 25 bp, Homo sapien
gggatggagacggggccccaggaca

SEQ ID NO: 5858419 - DNA, 25 bp, Homo sapien
tccgggtcccaggcctggtccttga

SEQ ID NO: 5858420 - DNA, 25 bp, Homo sapien
aagccacacaacgaggctatgagaa

SEQ ID NO: 5858421 - DNA, 25 bp, Homo sapien
ctcacactccttaatctgcatgctc

SEQ ID NO: 5858422 - DNA, 25 bp, Homo sapien
gtggaggtccacacacacacctgta

SEQ ID NO: 5858423 - DNA, 25 bp, Homo sapien
agagccagagggagacaagacagct

SEQ ID NO: 5858424 - DNA, 25 bp, Homo sapien
gcttgattcccagtgcccccaaaaa

SEQ ID NO: 5858425 - DNA, 25 bp, Homo sapien
gccagctcttcttggcatccctggg

SEQ ID NO: 5858426 - DNA, 25 bp, Homo sapien
gcatgggcttgattcccagtgcccc

SEQ ID NO: 5858427 - DNA, 25 bp, Homo sapien
aagtgagtaccacagaggcttcctg

SEQ ID NO: 5858428 - DNA, 25 bp, Homo sapien
aaaccagccaaaggatggcaaggcc

SEQ ID NO: 5858429 - DNA, 25 bp, Homo sapien
acgagatgctgtcttaaaaaaaaaa

SEQ ID NO: 5858430 - DNA, 25 bp, Homo sapien
ttcaggaaggccacccctgacccca

SEQ ID NO: 5858431 - DNA, 25 bp, Homo sapien
ggccccactggtagtaaacagaaag

SEQ ID NO: 5858432 - DNA, 25 bp, Homo sapien
tctataccaagggagccttcttcag

SEQ ID NO: 5858433 - DNA, 25 bp, Homo sapien
aggctttgacacagcctggctaagg

SEQ ID NO: 5858434 - DNA, 25 bp, Homo sapien
cagagagacaatggcttagggccaa

SEQ ID NO: 5858435 - DNA, 25 bp, Homo sapien
cacacaacgaggctatgagaaacag

SEQ ID NO: 5858436 - DNA, 25 bp, Homo sapien
gattcccagtgcccccaaaaacaga

SEQ ID NO: 5858437 - DNA, 25 bp, Homo sapien
gacatagcgtgacaggacaagcttt

SEQ ID NO: 5858438 - DNA, 25 bp, Homo sapien
gaaaaaaagaaaactcactccagag

SEQ ID NO: 5858439 - DNA, 25 bp, Homo sapien
tcccaggcctggtccttgatcccac

SEQ ID NO: 5858440 - DNA, 25 bp, Homo sapien
gagagacaatggcttagggccaaag

SEQ ID NO: 5858441 - DNA, 25 bp, Homo sapien
taaggttgcccttagttacataaca

SEQ ID NO: 5858442 - DNA, 25 bp, Homo sapien
tggcatccctgggtgtcctctccgg

SEQ ID NO: 5858443 - DNA, 25 bp, Homo sapien
cagggacccctaggctttgacacag

SEQ ID NO: 5858444 - DNA, 25 bp, Homo sapien
ttcccagtgcccccaaaaacagaga

SEQ ID NO: 5858445 - DNA, 25 bp, Homo sapien
ccacctagctgtatgcccattgcac

SEQ ID NO: 5858446 - DNA, 25 bp, Homo sapien
gccttcttcaggaaggccacccctg

SEQ ID NO: 5858447 - DNA, 25 bp, Homo sapien
gacggggccccaggacaagtgagta

SEQ ID NO: 5858448 - DNA, 25 bp, Homo sapien
acctgtaatctcagcacacagggag

SEQ ID NO: 5858449 - DNA, 25 bp, Homo sapien
aggcctggtccttgatcccacatcc

SEQ ID NO: 5858450 - DNA, 25 bp, Homo sapien
aaggagtgagcaccgtcacccccag

SEQ ID NO: 5858451 - DNA, 25 bp, Homo sapien
gcccatggccctttgccctttgccc

SEQ ID NO: 5858452 - DNA, 25 bp, Homo sapien
ccattgcacagctccttggcaccca

SEQ ID NO: 5858453 - DNA, 25 bp, Homo sapien
ccacacacacacctgtaatctcagc

SEQ ID NO: 5858454 - DNA, 25 bp, Homo sapien
gagccttcttcaggaaggccacccc

SEQ ID NO: 5858455 - DNA, 25 bp, Homo sapien
gcaggtgtccctgggacagccatgg

SEQ ID NO: 5858456 - DNA, 25 bp, Homo sapien
gtgacaggacaagctttaaaaccag

SEQ ID NO: 5858457 - DNA, 25 bp, Homo sapien
cccagctggtgagcccatggccctt

SEQ ID NO: 5858458 - DNA, 25 bp, Homo sapien
taagggttgggacatagcgtgacag

SEQ ID NO: 5858459 - DNA, 25 bp, Homo sapien
cgtggccccagctggtgagcccatg

SEQ ID NO: 5858460 - DNA, 25 bp, Homo sapien
gcagctcactctgtagcgtgctggc

SEQ ID NO: 5858461 - DNA, 25 bp, Homo sapien
ctggcaggtctataccaagggagcc

SEQ ID NO: 5858462 - DNA, 25 bp, Homo sapien
gtatgcccattgcacagctccttgg

SEQ ID NO: 5858463 - DNA, 25 bp, Homo sapien
cgggatgcagctcactctgtagcgt

SEQ ID NO: 5858464 - DNA, 25 bp, Homo sapien
gccaaagccacacaacgaggctatg

SEQ ID NO: 5858465 - DNA, 25 bp, Homo sapien
gggcatgggcttgattcccagtgcc

SEQ ID NO: 5858466 - DNA, 25 bp, Homo sapien
cttgtctatggcagctcacactcct

SEQ ID NO: 5858467 - DNA, 25 bp, Homo sapien
ctccttaatctgcatgctcttgtct

SEQ ID NO: 5858468 - DNA, 25 bp, Homo sapien
accccagtcaggcacagaaaacctg

SEQ ID NO: 5858469 - DNA, 25 bp, Homo sapien
cccgggatgcagctcactctgtagc

SEQ ID NO: 5858470 - DNA, 25 bp, Homo sapien
aggtgtccctgggacagccatggct

SEQ ID NO: 5858471 - DNA, 25 bp, Homo sapien
tcttcaggaaggccacccctgaccc

SEQ ID NO: 5858472 - DNA, 25 bp, Homo sapien
gcagagccagagggagacaagacag

SEQ ID NO: 5858473 - DNA, 25 bp, Homo sapien
gccctttgcccatgccagaccccag

SEQ ID NO: 5858474 - DNA, 25 bp, Homo sapien
tgagcaccgtcacccccaggggcag

SEQ ID NO: 5858475 - DNA, 25 bp, Homo sapien
acagcctggctaaggaagggcctag

SEQ ID NO: 5858476 - DNA, 25 bp, Homo sapien
cagaggcttcctgtgtaatgagacc

SEQ ID NO: 5858477 - DNA, 25 bp, Homo sapien
ataaagagcagaagagagatgccag

SEQ ID NO: 5858478 - DNA, 25 bp, Homo sapien
ccagaccccagtcaggcacagaaaa

SEQ ID NO: 5858479 - DNA, 25 bp, Homo sapien
gggcaggtgtccctgggacagccat

SEQ ID NO: 5858480 - DNA, 25 bp, Homo sapien
ccctaggctttgacacagcctggct

SEQ ID NO: 5858481 - DNA, 25 bp, Homo sapien
cccagggacccctaggctttgacac

SEQ ID NO: 5858482 - DNA, 25 bp, Homo sapien
catgctcttgtcttaacgccgagga

SEQ ID NO: 5858483 - DNA, 25 bp, Homo sapien
aacagaaaggagtgagcaccgtcac

SEQ ID NO: 5858484 - DNA, 25 bp, Homo sapien
cagaagagagatgccagctcttctt

SEQ ID NO: 5858485 - DNA, 25 bp, Homo sapien
gcccattgcacagctccttggcacc

SEQ ID NO: 5858486 - DNA, 25 bp, Homo sapien
atctgggcttacaggggaagtcact

SEQ ID NO: 5858487 - DNA, 25 bp, Homo sapien
accaaagaataaagagcagaagaga

SEQ ID NO: 5858488 - DNA, 25 bp, Homo sapien
aatgagaccaaagaataaagagcag

SEQ ID NO: 5858489 - DNA, 25 bp, Homo sapien
catagcgtgacaggacaagctttaa

SEQ ID NO: 5858490 - DNA, 25 bp, Homo sapien
tcgtatacaggggcatgggcttgat

SEQ ID NO: 5858491 - DNA, 25 bp, Homo sapien
tccagagagacaatggcttagggcc

SEQ ID NO: 5858492 - DNA, 25 bp, Homo sapien
tacataacagggttgaggccagctt

SEQ ID NO: 5858493 - DNA, 25 bp, Homo sapien
agcttaagtcacacgagatgctgtc

SEQ ID NO: 5858494 - DNA, 25 bp, Homo sapien
caacgaggctatgagaaacagggtg

SEQ ID NO: 5858495 - DNA, 25 bp, Homo sapien
cagctcttcttggcatccctgggtg

SEQ ID NO: 5858496 - DNA, 25 bp, Homo sapien
cagagcagcctgccaacccagggac

SEQ ID NO: 5858497 - DNA, 25 bp, Homo sapien
ctgtatgcccattgcacagctcctt

SEQ ID NO: 5858498 - DNA, 25 bp, Homo sapien
cgaggataagggttgggacatagcg

SEQ ID NO: 5858499 - DNA, 25 bp, Homo sapien
gtccacacacacacctgtaatctca

SEQ ID NO: 5858500 - DNA, 25 bp, Homo sapien
acctagctgtatgcccattgcacag

SEQ ID NO: 5858501 - DNA, 25 bp, Homo sapien
cccagtgcccccaaaaacagagagt

SEQ ID NO: 5858502 - DNA, 25 bp, Homo sapien
gtaccacagaggcttcctgtgtaat

SEQ ID NO: 5858503 - DNA, 25 bp, Homo sapien
ccactggtagtaaacagaaaggagt

SEQ ID NO: 5858504 - DNA, 25 bp, Homo sapien
cccagtcaggcacagaaaacctgcc

SEQ ID NO: 5858505 - DNA, 25 bp, Homo sapien
aaggatggcaaggcctggcaggtct

SEQ ID NO: 5858506 - DNA, 25 bp, Homo sapien
ctagctgtatgcccattgcacagct

SEQ ID NO: 5858507 - DNA, 25 bp, Homo sapien
ggaggtccacacacacacctgtaat

SEQ ID NO: 5858508 - DNA, 25 bp, Homo sapien
acacacacctgtaatctcagcacac

SEQ ID NO: 5858509 - DNA, 25 bp, Homo sapien
aatctcagcacacagggagacaagt

SEQ ID NO: 5858510 - DNA, 25 bp, Homo sapien
accagaccccccagagcagcctgcc

SEQ ID NO: 5858511 - DNA, 25 bp, Homo sapien
ggcctaggatcccagcagagccaga

SEQ ID NO: 5858512 - DNA, 25 bp, Homo sapien
gggacatagcgtgacaggacaagct

SEQ ID NO: 5858513 - DNA, 25 bp, Homo sapien
aggggaagtcactagggatggagac

SEQ ID NO: 5858514 - DNA, 25 bp, Homo sapien
ggctatgagaaacagggtgaacacc

SEQ ID NO: 5858515 - DNA, 25 bp, Homo sapien
actggtagtaaacagaaaggagtga

SEQ ID NO: 5858516 - DNA, 25 bp, Homo sapien
aggtccacacacacacctgtaatct

SEQ ID NO: 5858517 - DNA, 25 bp, Homo sapien
catgccagaccccagtcaggcacag

SEQ ID NO: 5858518 - DNA, 25 bp, Homo sapien
gggaagtcactagggatggagacgg

SEQ ID NO: 5858519 - DNA, 25 bp, Homo sapien
ccaaaaacagagagtggtggaggtc

SEQ ID NO: 5858520 - DNA, 25 bp, Homo sapien
acaggggaagtcactagggatggag

SEQ ID NO: 5858521 - DNA, 25 bp, Homo sapien
cttggcatccctgggtgtcctctcc

SEQ ID NO: 5858522 - DNA, 25 bp, Homo sapien
caaaggatggcaaggcctggcaggt

SEQ ID NO: 5858523 - DNA, 25 bp, Homo sapien
gggccccaggacaagtgagtaccac

SEQ ID NO: 5858524 - DNA, 25 bp, Homo sapien
ccccaggggcaggtgtccctgggac

SEQ ID NO: 5858525 - DNA, 25 bp, Homo sapien
cctttgcccatgccagaccccagtc

SEQ ID NO: 5858526 - DNA, 25 bp, Homo sapien
gggcttgattcccagtgcccccaaa

SEQ ID NO: 5858527 - DNA, 25 bp, Homo sapien
gtcacccccaggggcaggtgtccct

SEQ ID NO: 5858528 - DNA, 25 bp, Homo sapien
ccccactggtagtaaacagaaagga

SEQ ID NO: 5858529 - DNA, 25 bp, Homo sapien
aaacctgcccagcccgggatgcagc

SEQ ID NO: 5858530 - DNA, 25 bp, Homo sapien
ccagtgaccacgtggccccagctgg

SEQ ID NO: 5858531 - DNA, 25 bp, Homo sapien
caaggcctggcaggtctataccaag

SEQ ID NO: 5858532 - DNA, 25 bp, Homo sapien
cttaagtcacacgagatgctgtctt

SEQ ID NO: 5858533 - DNA, 25 bp, Homo sapien
agagcagaagagagatgccagctct

SEQ ID NO: 5858534 - DNA, 25 bp, Homo sapien
gacaatggcttagggccaaagccac

SEQ ID NO: 5858535 - DNA, 25 bp, Homo sapien
tttgcccatgccagaccccagtcag

SEQ ID NO: 5858536 - DNA, 25 bp, Homo sapien
ggcctcgtatacaggggcatgggct

SEQ ID NO: 5858537 - DNA, 25 bp, Homo sapien
cagaaaggagtgagcaccgtcaccc

SEQ ID NO: 5858538 - DNA, 25 bp, Homo sapien
gacaggacaagctttaaaaccagcc

SEQ ID NO: 5858539 - DNA, 25 bp, Homo sapien
gccacacaacgaggctatgagaaac

SEQ ID NO: 5858540 - DNA, 25 bp, Homo sapien
tggctaaggaagggcctaggatccc

SEQ ID NO: 5858541 - DNA, 25 bp, Homo sapien
gtcaggcacagaaaacctgcccagc

SEQ ID NO: 5858542 - DNA, 25 bp, Homo sapien
gggacccctaggctttgacacagcc

SEQ ID NO: 5858543 - DNA, 25 bp, Homo sapien
ggtcccaggcctggtccttgatccc

SEQ ID NO: 5858544 - DNA, 25 bp, Homo sapien
tggtggaggtccacacacacacctg

SEQ ID NO: 5858545 - DNA, 25 bp, Homo sapien
acaagctttaaaaccagccaaagga

SEQ ID NO: 5858546 - DNA, 25 bp, Homo sapien
gagcagcctgccaacccagggaccc

SEQ ID NO: 5858547 - DNA, 25 bp, Homo sapien
tcactagggatggagacggggcccc

SEQ ID NO: 5858548 - DNA, 25 bp, Homo sapien
ggatgcagctcactctgtagcgtgc

SEQ ID NO: 5858549 - DNA, 25 bp, Homo sapien
gagacaagtggaggcagaaggatta

SEQ ID NO: 5858550 - DNA, 25 bp, Homo sapien
cttagggccaaagccacacaacgag

SEQ ID NO: 5858551 - DNA, 25 bp, Homo sapien
gcacccagtgaccacgtggccccag

SEQ ID NO: 5858552 - DNA, 25 bp, Homo sapien
gtcctctccgggtcccaggcctggt

SEQ ID NO: 5858553 - DNA, 25 bp, Homo sapien
gggtgaacaccagaccccccagagc

SEQ ID NO: 5858554 - DNA, 25 bp, Homo sapien
caacccagggacccctaggctttga

SEQ ID NO: 5858555 - DNA, 25 bp, Homo sapien
ctgtaatctcagcacacagggagac

SEQ ID NO: 5858556 - DNA, 25 bp, Homo sapien
aaagagcagaagagagatgccagct

SEQ ID NO: 5858557 - DNA, 25 bp, Homo sapien
tctccgggtcccaggcctggtcctt

SEQ ID NO: 5858558 - DNA, 25 bp, Homo sapien
tgacacagcctggctaaggaagggc

SEQ ID NO: 5858559 - DNA, 25 bp, Homo sapien
caggaaggccacccctgaccccagc

SEQ ID NO: 5858560 - DNA, 25 bp, Homo sapien
acacacacacctgtaatctcagcac

SEQ ID NO: 5858561 - DNA, 25 bp, Homo sapien
ggacaagctttaaaaccagccaaag

SEQ ID NO: 5858562 - DNA, 25 bp, Homo sapien
agtggaggcagaaggattaaggttg

SEQ ID NO: 5858563 - DNA, 25 bp, Homo sapien
actccagagagacaatggcttaggg

SEQ ID NO: 5858564 - DNA, 25 bp, Homo sapien
cacagggagacaagtggaggcagaa

SEQ ID NO: 5858565 - DNA, 25 bp, Homo sapien
caccgtcacccccaggggcaggtgt

SEQ ID NO: 5858566 - DNA, 25 bp, Homo sapien
aaaagaaaactcactccagagagac

SEQ ID NO: 5858567 - DNA, 25 bp, Homo sapien
tggtgagcccatggccctttgccct

SEQ ID NO: 5858568 - DNA, 25 bp, Homo sapien
tctgcatgctcttgtcttaacgccg

SEQ ID NO: 5858569 - DNA, 25 bp, Homo sapien
gaagtcactagggatggagacgggg

SEQ ID NO: 5858570 - DNA, 25 bp, Homo sapien
cttcccacctagctgtatgcccatt

SEQ ID NO: 5858571 - DNA, 25 bp, Homo sapien
actagggatggagacggggccccag

SEQ ID NO: 5858572 - DNA, 25 bp, Homo sapien
ttcttggcatccctgggtgtcctct

SEQ ID NO: 5858573 - DNA, 25 bp, Homo sapien
acaccagaccccccagagcagcctg

SEQ ID NO: 5858574 - DNA, 25 bp, Homo sapien
cctaggatcccagcagagccagagg

SEQ ID NO: 5858575 - DNA, 25 bp, Homo sapien
tagggccaaagccacacaacgaggc

SEQ ID NO: 5858576 - DNA, 25 bp, Homo sapien
ctgggacagccatggctgctggctt

SEQ ID NO: 5858577 - DNA, 25 bp, Homo sapien
gaaaacctgcccagcccgggatgca

SEQ ID NO: 5858578 - DNA, 25 bp, Homo sapien
ctgtagcgtgctggcctcgtataca

SEQ ID NO: 5858579 - DNA, 25 bp, Homo sapien
acacctgtaatctcagcacacaggg

SEQ ID NO: 5858580 - DNA, 25 bp, Homo sapien
atggcttagggccaaagccacacaa

SEQ ID NO: 5858581 - DNA, 25 bp, Homo sapien
tgagaccaaagaataaagagcagaa

SEQ ID NO: 5858582 - DNA, 25 bp, Homo sapien
ccaggggcaggtgtccctgggacag

SEQ ID NO: 5858583 - DNA, 25 bp, Homo sapien
aaaaacagagagtggtggaggtcca

SEQ ID NO: 5858584 - DNA, 25 bp, Homo sapien
atacaggggcatgggcttgattccc

SEQ ID NO: 5858585 - DNA, 25 bp, Homo sapien
gaggcagaaggattaaggttgccct

SEQ ID NO: 5858586 - DNA, 25 bp, Homo sapien
caggtctataccaagggagccttct

SEQ ID NO: 5858587 - DNA, 25 bp, Homo sapien
cttggcacccagtgaccacgtggcc

SEQ ID NO: 5858588 - DNA, 25 bp, Homo sapien
gaggctatgagaaacagggtgaaca

SEQ ID NO: 5858589 - DNA, 25 bp, Homo sapien
taagtcacacgagatgctgtcttaa

SEQ ID NO: 5858590 - DNA, 25 bp, Homo sapien
ctaggctttgacacagcctggctaa

SEQ ID NO: 5858591 - DNA, 25 bp, Homo sapien
gagtaccacagaggcttcctgtgta

SEQ ID NO: 5858592 - DNA, 25 bp, Homo sapien
tgcccatgccagaccccagtcaggc

SEQ ID NO: 5858593 - DNA, 25 bp, Homo sapien
gcagctcacactccttaatctgcat

SEQ ID NO: 5858594 - DNA, 25 bp, Homo sapien
attgcacagctccttggcacccagt

SEQ ID NO: 5858595 - DNA, 25 bp, Homo sapien
tgctggcctcgtatacaggggcatg

SEQ ID NO: 5858596 - DNA, 25 bp, Homo sapien
gacccctaggctttgacacagcctg

SEQ ID NO: 5858597 - DNA, 25 bp, Homo sapien
ccagcccgggatgcagctcactctg

SEQ ID NO: 5858598 - DNA, 25 bp, Homo sapien
agccagagggagacaagacagctgg

SEQ ID NO: 5858599 - DNA, 25 bp, Homo sapien
tgctggcttacaggctatctgggct

SEQ ID NO: 5858600 - DNA, 25 bp, Homo sapien
aaacagagagtggtggaggtccaca

SEQ ID NO: 5858601 - DNA, 25 bp, Homo sapien
ctggcttacaggctatctgggctta

SEQ ID NO: 5858602 - DNA, 25 bp, Homo sapien
cttgtcttaacgccgaggataaggg

SEQ ID NO: 5858603 - DNA, 25 bp, Homo sapien
gcttacaggggaagtcactagggat

SEQ ID NO: 5858604 - DNA, 25 bp, Homo sapien
gaaggattaaggttgcccttagtta

SEQ ID NO: 5858605 - DNA, 25 bp, Homo sapien
ctcactctgtagcgtgctggcctcg

SEQ ID NO: 5858606 - DNA, 25 bp, Homo sapien
ggcaaggcctggcaggtctatacca

SEQ ID NO: 5858607 - DNA, 25 bp, Homo sapien
cttacaggctatctgggcttacagg

SEQ ID NO: 5858608 - DNA, 25 bp, Homo sapien
ctggtccttgatcccacatccttgt

SEQ ID NO: 5858609 - DNA, 25 bp, Homo sapien
tagcgtgacaggacaagctttaaaa

SEQ ID NO: 5858610 - DNA, 25 bp, Homo sapien
acccagtgaccacgtggccccagct

SEQ ID NO: 5858611 - DNA, 25 bp, Homo sapien
ctgggcttacaggggaagtcactag

SEQ ID NO: 5858612 - DNA, 25 bp, Homo sapien
ggtccttgatcccacatccttgtct

SEQ ID NO: 5858613 - DNA, 25 bp, Homo sapien
tcagcacacagggagacaagtggag

SEQ ID NO: 5858614 - DNA, 25 bp, Homo sapien
caaagccacacaacgaggctatgag

SEQ ID NO: 5858615 - DNA, 25 bp, Homo sapien
cgggtcccaggcctggtccttgatc

SEQ ID NO: 5858616 - DNA, 25 bp, Homo sapien
accccccagagcagcctgccaaccc

SEQ ID NO: 5858617 - DNA, 25 bp, Homo sapien
taacagggttgaggccagcttaagt

SEQ ID NO: 5858618 - DNA, 25 bp, Homo sapien
gtgtcctctccgggtcccaggcctg

SEQ ID NO: 5858619 - DNA, 25 bp, Homo sapien
cagccatggctgctggcttacaggc

SEQ ID NO: 5858620 - DNA, 25 bp, Homo sapien
agtgagcaccgtcacccccaggggc

SEQ ID NO: 5858621 - DNA, 25 bp, Homo sapien
ccgtcacccccaggggcaggtgtcc

SEQ ID NO: 5858622 - DNA, 25 bp, Homo sapien
cagccaaaggatggcaaggcctggc

SEQ ID NO: 5858623 - DNA, 25 bp, Homo sapien
ctatgagaaacagggtgaacaccag

SEQ ID NO: 5858624 - DNA, 25 bp, Homo sapien
tataccaagggagccttcttcagga

SEQ ID NO: 5858625 - DNA, 25 bp, Homo sapien
gaaaactcactccagagagacaatg

SEQ ID NO: 5858626 - DNA, 25 bp, Homo sapien
caggcacagaaaacctgcccagccc

SEQ ID NO: 5858627 - DNA, 25 bp, Homo sapien
acctgcccagcccgggatgcagctc

SEQ ID NO: 5858628 - DNA, 25 bp, Homo sapien
gggtgtcctctccgggtcccaggcc

SEQ ID NO: 5858629 - DNA, 25 bp, Homo sapien
agtcacacgagatgctgtcttaaaa

SEQ ID NO: 5858630 - DNA, 25 bp, Homo sapien
acacagcctggctaaggaagggcct

SEQ ID NO: 5858631 - DNA, 25 bp, Homo sapien
tccttggcacccagtgaccacgtgg

SEQ ID NO: 5858632 - DNA, 25 bp, Homo sapien
accacagaggcttcctgtgtaatga

SEQ ID NO: 5858633 - DNA, 25 bp, Homo sapien
ggattaaggttgcccttagttacat

SEQ ID NO: 5858634 - DNA, 25 bp, Homo sapien
gtatacaggggcatgggcttgattc

SEQ ID NO: 5858635 - DNA, 25 bp, Homo sapien
ggcttacaggctatctgggcttaca

SEQ ID NO: 5858636 - DNA, 25 bp, Homo sapien
ggcttcctgtgtaatgagaccaaag

SEQ ID NO: 5858637 - DNA, 25 bp, Homo sapien
gcagcctgccaacccagggacccct

SEQ ID NO: 5858638 - DNA, 25 bp, Homo sapien
cccagagcagcctgccaacccaggg

SEQ ID NO: 5858639 - DNA, 25 bp, Homo sapien
agagagatgccagctcttcttggca

SEQ ID NO: 5858640 - DNA, 25 bp, Homo sapien
cacactccttaatctgcatgctctt

SEQ ID NO: 5858641 - DNA, 25 bp, Homo sapien
caggacaagtgagtaccacagaggc

SEQ ID NO: 5858642 - DNA, 25 bp, Homo sapien
cacaacgaggctatgagaaacaggg

SEQ ID NO: 5858643 - DNA, 25 bp, Homo sapien
atgccagctcttcttggcatccctg

SEQ ID NO: 5858644 - DNA, 25 bp, Homo sapien
taaggaagggcctaggatcccagca

SEQ ID NO: 5858645 - DNA, 25 bp, Homo sapien
accagccaaaggatggcaaggcctg

SEQ ID NO: 5858646 - DNA, 25 bp, Homo sapien
acacacctgtaatctcagcacacag

SEQ ID NO: 5858647 - DNA, 25 bp, Homo sapien
aatctgcatgctcttgtcttaacgc

SEQ ID NO: 5858648 - DNA, 25 bp, Homo sapien
cactctgtagcgtgctggcctcgta

SEQ ID NO: 5858649 - DNA, 25 bp, Homo sapien
agaccccccagagcagcctgccaac

SEQ ID NO: 5858650 - DNA, 25 bp, Homo sapien
atgcccattgcacagctccttggca

SEQ ID NO: 5858651 - DNA, 25 bp, Homo sapien
cacatccttgtctatggcagctcac

SEQ ID NO: 5858652 - DNA, 25 bp, Homo sapien
cggggccccaggacaagtgagtacc

SEQ ID NO: 5858653 - DNA, 25 bp, Homo sapien
cagctccttggcacccagtgaccac

SEQ ID NO: 5858654 - DNA, 25 bp, Homo sapien
aggcctggcaggtctataccaaggg

SEQ ID NO: 5858655 - DNA, 25 bp, Homo sapien
gaacaccagaccccccagagcagcc

SEQ ID NO: 5858656 - DNA, 25 bp, Homo sapien
gtgagcccatggccctttgcccttt

SEQ ID NO: 5858657 - DNA, 25 bp, Homo sapien
gacaagtggaggcagaaggattaag

SEQ ID NO: 5858658 - DNA, 25 bp, Homo sapien
cagggagacaagtggaggcagaagg

SEQ ID NO: 5858659 - DNA, 25 bp, Homo sapien
tgcccttagttacataacagggttg

SEQ ID NO: 5858660 - DNA, 25 bp, Homo sapien
aacagggtgaacaccagacccccca

SEQ ID NO: 5858661 - DNA, 25 bp, Homo sapien
gccccaggacaagtgagtaccacag

SEQ ID NO: 5858662 - DNA, 25 bp, Homo sapien
gagcccatggccctttgccctttgc

SEQ ID NO: 5858663 - DNA, 25 bp, Homo sapien
acaagtgagtaccacagaggcttcc

SEQ ID NO: 5858664 - DNA, 25 bp, Homo sapien
aagaaaactcactccagagagacaa

SEQ ID NO: 5858665 - DNA, 25 bp, Homo sapien
gaagggcctaggatcccagcagagc

SEQ ID NO: 5858666 - DNA, 25 bp, Homo sapien
aggggcaggtgtccctgggacagcc

SEQ ID NO: 5858667 - DNA, 25 bp, Homo sapien
gaaacagggtgaacaccagaccccc

SEQ ID NO: 5858668 - DNA, 25 bp, Homo sapien
agtggtggaggtccacacacacacc

SEQ ID NO: 5858669 - DNA, 25 bp, Homo sapien
tgtctatggcagctcacactcctta

SEQ ID NO: 5858670 - DNA, 25 bp, Homo sapien
agcgtgctggcctcgtatacagggg

SEQ ID NO: 5858671 - DNA, 25 bp, Homo sapien
acgaggctatgagaaacagggtgaa

SEQ ID NO: 5858672 - DNA, 25 bp, Homo sapien
ctcttgtcttaacgccgaggataag

SEQ ID NO: 5858673 - DNA, 25 bp, Homo sapien
cttagttacataacagggttgaggc

SEQ ID NO: 5858674 - DNA, 25 bp, Homo sapien
ccctgggtgtcctctccgggtccca

SEQ ID NO: 5858675 - DNA, 25 bp, Homo sapien
ggcaggtctataccaagggagcctt

SEQ ID NO: 5858676 - DNA, 25 bp, Homo sapien
ggtctataccaagggagccttcttc

SEQ ID NO: 5858677 - DNA, 25 bp, Homo sapien
cacagaaaacctgcccagcccggga

SEQ ID NO: 5858678 - DNA, 25 bp, Homo sapien
cccttagttacataacagggttgag

SEQ ID NO: 5858679 - DNA, 25 bp, Homo sapien
ctgggtgtcctctccgggtcccagg

SEQ ID NO: 5858680 - DNA, 25 bp, Homo sapien
agggttgggacatagcgtgacagga

SEQ ID NO: 5858681 - DNA, 25 bp, Homo sapien
taaacagaaaggagtgagcaccgtc

SEQ ID NO: 5858682 - DNA, 25 bp, Homo sapien
caggctatctgggcttacaggggaa

SEQ ID NO: 5858683 - DNA, 25 bp, Homo sapien
tgccagaccccagtcaggcacagaa

SEQ ID NO: 5858684 - DNA, 25 bp, Homo sapien
agctgtatgcccattgcacagctcc

SEQ ID NO: 5858685 - DNA, 25 bp, Homo sapien
gaaaggagtgagcaccgtcaccccc

SEQ ID NO: 5858686 - DNA, 25 bp, Homo sapien
gccatggctgctggcttacaggcta

SEQ ID NO: 5858687 - DNA, 25 bp, Homo sapien
agggttgaggccagcttaagtcaca

SEQ ID NO: 5858688 - DNA, 25 bp, Homo sapien
gaggccagcttaagtcacacgagat

SEQ ID NO: 5858689 - DNA, 25 bp, Homo sapien
agtgaccacgtggccccagctggtg

SEQ ID NO: 5858690 - DNA, 25 bp, Homo sapien
gataagggttgggacatagcgtgac

SEQ ID NO: 5858691 - DNA, 25 bp, Homo sapien
agctcacactccttaatctgcatgc

SEQ ID NO: 5858692 - DNA, 25 bp, Homo sapien
ttaatctgcatgctcttgtcttaac

SEQ ID NO: 5858693 - DNA, 25 bp, Homo sapien
ggagtgagcaccgtcacccccaggg

SEQ ID NO: 5858694 - DNA, 25 bp, Homo sapien
catccttgtctatggcagctcacac

SEQ ID NO: 5858695 - DNA, 25 bp, Homo sapien
agaccccagtcaggcacagaaaacc

SEQ ID NO: 5858696 - DNA, 25 bp, Homo sapien
tcttcttggcatccctgggtgtcct

SEQ ID NO: 5858697 - DNA, 25 bp, Homo sapien
gtaatgagaccaaagaataaagagc

SEQ ID NO: 5858698 - DNA, 25 bp, Homo sapien
gtgcccccaaaaacagagagtggtg

SEQ ID NO: 5858699 - DNA, 25 bp, Homo sapien
tttgacacagcctggctaaggaagg

SEQ ID NO: 5858700 - DNA, 25 bp, Homo sapien
ccatggccctttgccctttgcccat

SEQ ID NO: 5858701 - DNA, 25 bp, Homo sapien
tacaggctatctgggcttacagggg

SEQ ID NO: 5858702 - DNA, 25 bp, Homo sapien
gccccagctggtgagcccatggccc

SEQ ID NO: 5858703 - DNA, 25 bp, Homo sapien
aggaagggcctaggatcccagcaga

SEQ ID NO: 5858704 - DNA, 25 bp, Homo sapien
aggataagggttgggacatagcgtg

SEQ ID NO: 5858705 - DNA, 25 bp, Homo sapien
cttcttcaggaaggccacccctgac

SEQ ID NO: 5858706 - DNA, 25 bp, Homo sapien
cctcgtatacaggggcatgggcttg

SEQ ID NO: 5858707 - DNA, 25 bp, Homo sapien
agcaccgtcacccccaggggcaggt

SEQ ID NO: 5858708 - DNA, 25 bp, Homo sapien
ggcttagggccaaagccacacaacg

SEQ ID NO: 5858709 - DNA, 25 bp, Homo sapien
agcttcccacctagctgtatgccca

SEQ ID NO: 5858710 - DNA, 25 bp, Homo sapien
gctttaaaaccagccaaaggatggc

SEQ ID NO: 5858711 - DNA, 25 bp, Homo sapien
gagacaatggcttagggccaaagcc

SEQ ID NO: 5858712 - DNA, 25 bp, Homo sapien
cacagctccttggcacccagtgacc

SEQ ID NO: 5858713 - DNA, 25 bp, Homo sapien
agtcactagggatggagacggggcc

SEQ ID NO: 5858714 - DNA, 25 bp, Homo sapien
cagggtgaacaccagaccccccaga

SEQ ID NO: 5858715 - DNA, 25 bp, Homo sapien
tttaaaaccagccaaaggatggcaa

SEQ ID NO: 5858716 - DNA, 25 bp, Homo sapien
ccagcttaagtcacacgagatgctg

SEQ ID NO: 5858717 - DNA, 25 bp, Homo sapien
taaaaccagccaaaggatggcaagg

SEQ ID NO: 5858718 - DNA, 25 bp, Homo sapien
ttgattcccagtgcccccaaaaaca

SEQ ID NO: 5858719 - DNA, 25 bp, Homo sapien
gttacataacagggttgaggccagc

SEQ ID NO: 5858720 - DNA, 25 bp, Homo sapien
caatggcttagggccaaagccacac

SEQ ID NO: 5858721 - DNA, 25 bp, Homo sapien
tagggatggagacggggccccagga

SEQ ID NO: 5858722 - DNA, 25 bp, Homo sapien
aagggagccttcttcaggaaggcca

SEQ ID NO: 5858723 - DNA, 25 bp, Homo sapien
tggagacggggccccaggacaagtg

SEQ ID NO: 5858724 - DNA, 25 bp, Homo sapien
gatggagacggggccccaggacaag

SEQ ID NO: 5858725 - DNA, 25 bp, Homo sapien
tggccccagctggtgagcccatggc

SEQ ID NO: 5858726 - DNA, 25 bp, Homo sapien
tcactccagagagacaatggcttag

SEQ ID NO: 5858727 - DNA, 25 bp, Homo sapien
agagagtggtggaggtccacacaca

SEQ ID NO: 5858728 - DNA, 25 bp, Homo sapien
ggctatctgggcttacaggggaagt

SEQ ID NO: 5858729 - DNA, 25 bp, Homo sapien
cccacatccttgtctatggcagctc

SEQ ID NO: 5858730 - DNA, 25 bp, Homo sapien
agcctggctaaggaagggcctagga

SEQ ID NO: 5858731 - DNA, 25 bp, Homo sapien
agcccgggatgcagctcactctgta

SEQ ID NO: 5858732 - DNA, 25 bp, Homo sapien
ggcagaaggattaaggttgccctta

SEQ ID NO: 5858733 - DNA, 25 bp, Homo sapien
cagcagagccagagggagacaagac

SEQ ID NO: 5858734 - DNA, 25 bp, Homo sapien
ggatcccagcagagccagagggaga

SEQ ID NO: 5858735 - DNA, 25 bp, Homo sapien
ccccaaaaacagagagtggtggagg

SEQ ID NO: 5858736 - DNA, 25 bp, Homo sapien
tgtcttaacgccgaggataagggtt

SEQ ID NO: 5858737 - DNA, 25 bp, Homo sapien
taggatcccagcagagccagaggga

SEQ ID NO: 5858738 - DNA, 25 bp, Homo sapien
aaaaaagaaaactcactccagagag

SEQ ID NO: 5858739 - DNA, 25 bp, Homo sapien
tctcagcacacagggagacaagtgg

SEQ ID NO: 5858740 - DNA, 25 bp, Homo sapien
atggcaaggcctggcaggtctatac

SEQ ID NO: 5858741 - DNA, 25 bp, Homo sapien
ggaaggccacccctgaccccagctt

SEQ ID NO: 5858742 - DNA, 25 bp, Homo sapien
gccaaaggatggcaaggcctggcag

SEQ ID NO: 5858743 - DNA, 25 bp, Homo sapien
ctgcccagcccgggatgcagctcac

SEQ ID NO: 5858744 - DNA, 25 bp, Homo sapien
taacgccgaggataagggttgggac

SEQ ID NO: 5858745 - DNA, 25 bp, Homo sapien
tggaggcagaaggattaaggttgcc

SEQ ID NO: 5858746 - DNA, 25 bp, Homo sapien
acagggttgaggccagcttaagtca

SEQ ID NO: 5858747 - DNA, 25 bp, Homo sapien
gaataaagagcagaagagagatgcc

SEQ ID NO: 5858748 - DNA, 25 bp, Homo sapien
gtaatctcagcacacagggagacaa

SEQ ID NO: 5858749 - DNA, 25 bp, Homo sapien
gggagccttcttcaggaaggccacc

SEQ ID NO: 5858750 - DNA, 25 bp, Homo sapien
agagtggtggaggtccacacacaca

SEQ ID NO: 5858751 - DNA, 25 bp, Homo sapien
tccttgtctatggcagctcacactc

SEQ ID NO: 5858752 - DNA, 25 bp, Homo sapien
ccaggcctggtccttgatcccacat

SEQ ID NO: 5858753 - DNA, 25 bp, Homo sapien
tagttacataacagggttgaggcca

SEQ ID NO: 5858754 - DNA, 25 bp, Homo sapien
agcctgccaacccagggacccctag

SEQ ID NO: 5858755 - DNA, 25 bp, Homo sapien
gggcttacaggggaagtcactaggg

SEQ ID NO: 5858756 - DNA, 25 bp, Homo sapien
atggccctttgccctttgcccatgc

SEQ ID NO: 5858757 - DNA, 25 bp, Homo sapien
taccaagggagccttcttcaggaag

SEQ ID NO: 5858758 - DNA, 25 bp, Homo sapien
ggttgaggccagcttaagtcacacg

SEQ ID NO: 5858759 - DNA, 25 bp, Homo sapien
gggccaaagccacacaacgaggcta

SEQ ID NO: 5858760 - DNA, 25 bp, Homo sapien
ggccctttgccctttgcccatgcca

SEQ ID NO: 5858761 - DNA, 25 bp, Homo sapien
agaccaaagaataaagagcagaaga

SEQ ID NO: 5858762 - DNA, 25 bp, Homo sapien
cagtcaggcacagaaaacctgccca

SEQ ID NO: 5858763 - DNA, 25 bp, Homo sapien
agcagaagagagatgccagctcttc

SEQ ID NO: 5858764 - DNA, 25 bp, Homo sapien
agatgccagctcttcttggcatccc

SEQ ID NO: 5858765 - DNA, 25 bp, Homo sapien
actcactccagagagacaatggctt

SEQ ID NO: 5858766 - DNA, 25 bp, Homo sapien
ctatctgggcttacaggggaagtca

SEQ ID NO: 5858767 - DNA, 25 bp, Homo sapien
cacagaggcttcctgtgtaatgaga

SEQ ID NO: 5858768 - DNA, 25 bp, Homo sapien
gctccttggcacccagtgaccacgt

SEQ ID NO: 5858769 - DNA, 25 bp, Homo sapien
cagtgcccccaaaaacagagagtgg

SEQ ID NO: 5858770 - DNA, 25 bp, Homo sapien
gggagacaagtggaggcagaaggat

SEQ ID NO: 5858771 - DNA, 25 bp, Homo sapien
gcatccctgggtgtcctctccgggt

SEQ ID NO: 5858772 - DNA, 25 bp, Homo sapien
atgagaaacagggtgaacaccagac

SEQ ID NO: 5858773 - DNA, 25 bp, Homo sapien
agctcactctgtagcgtgctggcct

SEQ ID NO: 5858774 - DNA, 25 bp, Homo sapien
ccctgggacagccatggctgctggc

SEQ ID NO: 5858775 - DNA, 25 bp, Homo sapien
gctaaggaagggcctaggatcccag

SEQ ID NO: 5858776 - DNA, 25 bp, Homo sapien
cctggctaaggaagggcctaggatc

SEQ ID NO: 5858777 - DNA, 25 bp, Homo sapien
ggacaagtgagtaccacagaggctt

SEQ ID NO: 5858778 - DNA, 25 bp, Homo sapien
acaggggcatgggcttgattcccag

SEQ ID NO: 5858779 - DNA, 25 bp, Homo sapien
atcccacatccttgtctatggcagc

SEQ ID NO: 5858780 - DNA, 25 bp, Homo sapien
gtagtaaacagaaaggagtgagcac

SEQ ID NO: 5858781 - DNA, 25 bp, Homo sapien
tggcacccagtgaccacgtggcccc

SEQ ID NO: 5858782 - DNA, 25 bp, Homo sapien
gctcttcttggcatccctgggtgtc

SEQ ID NO: 5858783 - DNA, 25 bp, Homo sapien
gctttgacacagcctggctaaggaa

SEQ ID NO: 5858784 - DNA, 25 bp, Homo sapien
ccagcttcccacctagctgtatgcc

SEQ ID NO: 5858785 - DNA, 25 bp, Homo sapien
ccctttgccctttgcccatgccaga

SEQ ID NO: 5858786 - DNA, 25 bp, Homo sapien
ggcacagaaaacctgcccagcccgg

SEQ ID NO: 5858787 - DNA, 25 bp, Homo sapien
atgggcttgattcccagtgccccca

SEQ ID NO: 5858788 - DNA, 25 bp, Homo sapien
catggctgctggcttacaggctatc

SEQ ID NO: 5858789 - DNA, 25 bp, Homo sapien
cataacagggttgaggccagcttaa

SEQ ID NO: 5858790 - DNA, 25 bp, Homo sapien
ttgaggccagcttaagtcacacgag

SEQ ID NO: 5858791 - DNA, 25 bp, Homo sapien
tgctcttgtcttaacgccgaggata

SEQ ID NO: 5858792 - DNA, 25 bp, Homo sapien
tgcacagctccttggcacccagtga

SEQ ID NO: 5858793 - DNA, 25 bp, Homo sapien
ctggcctcgtatacaggggcatggg

SEQ ID NO: 5858794 - DNA, 25 bp, Homo sapien
ttgggacatagcgtgacaggacaag

SEQ ID NO: 5858795 - DNA, 25 bp, Homo sapien
ctctgtagcgtgctggcctcgtata

SEQ ID NO: 5858796 - DNA, 25 bp, Homo sapien
tggtagtaaacagaaaggagtgagc

SEQ ID NO: 5858797 - DNA, 25 bp, Homo sapien
gctggtgagcccatggccctttgcc

SEQ ID NO: 5858798 - DNA, 25 bp, Homo sapien
cagaaggattaaggttgcccttagt

SEQ ID NO: 5858799 - DNA, 25 bp, Homo sapien
cacgtggccccagctggtgagccca

SEQ ID NO: 5858800 - DNA, 25 bp, Homo sapien
aaggccacccctgaccccagcttcc

SEQ ID NO: 5858801 - DNA, 25 bp, Homo sapien
cttgatcccacatccttgtctatgg

SEQ ID NO: 5858802 - DNA, 25 bp, Homo sapien
tgcatgctcttgtcttaacgccgag

SEQ ID NO: 5858803 - DNA, 25 bp, Homo sapien
tctatggcagctcacactccttaat

SEQ ID NO: 5858804 - DNA, 25 bp, Homo sapien
gtgaacaccagaccccccagagcag

SEQ ID NO: 5858805 - DNA, 25 bp, Homo sapien
caagtggaggcagaaggattaaggt

SEQ ID NO: 5858806 - DNA, 25 bp, Homo sapien
acgccgaggataagggttgggacat

SEQ ID NO: 5858807 - DNA, 25 bp, Homo sapien
cctctccgggtcccaggcctggtcc

SEQ ID NO: 5858808 - DNA, 25 bp, Homo sapien
tttgagtatacgcgttgcgaaaatg

SEQ ID NO: 5858809 - DNA, 25 bp, Homo sapien
gttattcgcgtattagtctgcatct

SEQ ID NO: 5858810 - DNA, 25 bp, Homo sapien
ctatattctcgtagcgctatcgtaa

SEQ ID NO: 5858811 - DNA, 25 bp, Homo sapien
tctagtactatcgcgctaaacgatt

SEQ ID NO: 5858812 - DNA, 25 bp, Homo sapien
ttatagtgttcgcgacctattcttg

SEQ ID NO: 5858813 - DNA, 25 bp, Homo sapien
aatattcgaatcgggataatcctcc

SEQ ID NO: 5858814 - DNA, 25 bp, Homo sapien
tccgtatgtcgatcgttacgtatta

SEQ ID NO: 5858815 - DNA, 25 bp, Homo sapien
ctctaattagcgacatacgcaatga

SEQ ID NO: 5858816 - DNA, 25 bp, Homo sapien
ccaagacgcgtaatagtagacattt

SEQ ID NO: 5858817 - DNA, 25 bp, Homo sapien
tctcatttcgcctcgcataagaata

SEQ ID NO: 5858818 - DNA, 25 bp, Homo sapien
ttatcaacggttagtcgacttctga

SEQ ID NO: 5858819 - DNA, 25 bp, Homo sapien
atggtgtgcgtatcgacaacttaat

SEQ ID NO: 5858820 - DNA, 25 bp, Homo sapien
acgatttaacgcgctatacaagatg

SEQ ID NO: 5858821 - DNA, 25 bp, Homo sapien
catttggttgtatcgccgagtatta

SEQ ID NO: 5858822 - DNA, 25 bp, Homo sapien
tctaaaactaacggcgggattaatg

SEQ ID NO: 5858823 - DNA, 25 bp, Homo sapien
agtgattcgcgacattagttgaaac

SEQ ID NO: 5858824 - DNA, 25 bp, Homo sapien
cgttatgtataactgcgcgtattac

SEQ ID NO: 5858825 - DNA, 25 bp, Homo sapien
tttcaatacaatcgcggtcgtcaat

SEQ ID NO: 5858826 - DNA, 25 bp, Homo sapien
aggttaatgacgcgcgatcaaaatt

SEQ ID NO: 5858827 - DNA, 25 bp, Homo sapien
acaataatcgttccgacgatcttag

SEQ ID NO: 5858828 - DNA, 25 bp, Homo sapien
gttgcttctataacgcgttgttttc

SEQ ID NO: 5858829 - DNA, 25 bp, Homo sapien
aaactaaacccgctcgtatttgatc

SEQ ID NO: 5858830 - DNA, 25 bp, Homo sapien
tgtatccgacgaaacgataatatcg

SEQ ID NO: 5858831 - DNA, 25 bp, Homo sapien
cattgaacgctacgatagcagtaat

SEQ ID NO: 5858832 - DNA, 25 bp, Homo sapien
tgttttcgctaagagcgattagcat

SEQ ID NO: 5858833 - DNA, 25 bp, Homo sapien
ataagttacagcgtagtcgacaatg

SEQ ID NO: 5858834 - DNA, 25 bp, Homo sapien
gtatttcgatacttcgtacgagaca

SEQ ID NO: 5858835 - DNA, 25 bp, Homo sapien
cataacgttattcgcgtcgtaaaca

SEQ ID NO: 5858836 - DNA, 25 bp, Homo sapien
taactctaggttcgatcgatgtcat

SEQ ID NO: 5858837 - DNA, 25 bp, Homo sapien
taaatccgtaaggttacgcgagata

SEQ ID NO: 5858838 - DNA, 25 bp, Homo sapien
gtcttatcgtaaggcgattattgca

SEQ ID NO: 5858839 - DNA, 25 bp, Homo sapien
ttattagtcgcgaaacatatggcga

SEQ ID NO: 5858840 - DNA, 25 bp, Homo sapien
aggatgatatcgcgaacgtaatatc

SEQ ID NO: 5858841 - DNA, 25 bp, Homo sapien
tatttaataacgggcgctggtactt

SEQ ID NO: 5858842 - DNA, 25 bp, Homo sapien
taaatcgcgtatcaatcgtttcctg

SEQ ID NO: 5858843 - DNA, 25 bp, Homo sapien
acttaccgatccgctattaggataa

SEQ ID NO: 5858844 - DNA, 25 bp, Homo sapien
taatttgcgtcaatcgcatcgacat

SEQ ID NO: 5858845 - DNA, 25 bp, Homo sapien
aaaagctatagtacgcgtcagacaa

SEQ ID NO: 5858846 - DNA, 25 bp, Homo sapien
tgatcacgaccaatacgtccataaa

SEQ ID NO: 5858847 - DNA, 25 bp, Homo sapien
ttttagtagcgtacgaacgttgttg

SEQ ID NO: 5858848 - DNA, 25 bp, Homo sapien
gaggatcgacgttaataccttatgt

SEQ ID NO: 5858849 - DNA, 25 bp, Homo sapien
ctatttcgcggtgttaatcttctgt

SEQ ID NO: 5858850 - DNA, 25 bp, Homo sapien
tcatacatattaggtcgcgagaatg

SEQ ID NO: 5858851 - DNA, 25 bp, Homo sapien
aaatcatatgtcgagccgatacgaa

SEQ ID NO: 5858852 - DNA, 25 bp, Homo sapien
tgtatccgtcgtgcgatataaaatg

SEQ ID NO: 5858853 - DNA, 25 bp, Homo sapien
ctatttggtatatcgtcggatcttc

SEQ ID NO: 5858854 - DNA, 25 bp, Homo sapien
ttccagacttcgctatacgttgttt

SEQ ID NO: 5858855 - DNA, 25 bp, Homo sapien
aatccttaaagttcgtgcgattctc

SEQ ID NO: 5858856 - DNA, 25 bp, Homo sapien
ttatgatatgattcgggcgaacaca

SEQ ID NO: 5858857 - DNA, 25 bp, Homo sapien
caatcttatatccgcgtaccttatc

SEQ ID NO: 5858858 - DNA, 25 bp, Homo sapien
taatcctacgttcgcgagaagaatt

SEQ ID NO: 5858859 - DNA, 25 bp, Homo sapien
gattattctaactatcgcgcagtac

SEQ ID NO: 5858860 - DNA, 25 bp, Homo sapien
aaggtagtcgcgaagtaagtgaaaa

SEQ ID NO: 5858861 - DNA, 25 bp, Homo sapien
atttactcgcgattgaccttcaatc

SEQ ID NO: 5858862 - DNA, 25 bp, Homo sapien
ggattaatcgtctatcgcgatattg

SEQ ID NO: 5858863 - DNA, 25 bp, Homo sapien
ggctttcgtaacgacactaataagt

SEQ ID NO: 5858864 - DNA, 25 bp, Homo sapien
tttaattcgaaccgcgtaacgagaa

SEQ ID NO: 5858865 - DNA, 25 bp, Homo sapien
actccttagtccgacgataataaca

SEQ ID NO: 5858866 - DNA, 25 bp, Homo sapien
ttggctgtctaatcgcgagatatta

SEQ ID NO: 5858867 - DNA, 25 bp, Homo sapien
acatgacgtattacaaccgcaaatc

SEQ ID NO: 5858868 - DNA, 25 bp, Homo sapien
catttttatacggtcgcgacacata

SEQ ID NO: 5858869 - DNA, 25 bp, Homo sapien
aagctagtttagaccgacgctttta

SEQ ID NO: 5858870 - DNA, 25 bp, Homo sapien
tatttcttacggtcgactatcagca

SEQ ID NO: 5858871 - DNA, 25 bp, Homo sapien
taatcagcgggtacgtagtaattga

SEQ ID NO: 5858872 - DNA, 25 bp, Homo sapien
tagcaggcgactatacgagaaataa

SEQ ID NO: 5858873 - DNA, 25 bp, Homo sapien
tataacgtctagagcgtacctattg

SEQ ID NO: 5858874 - DNA, 25 bp, Homo sapien
cttggtcgtcgtatagtcaaataca

SEQ ID NO: 5858875 - DNA, 25 bp, Homo sapien
ttaaacctagcgcgagattagaaag

SEQ ID NO: 5858876 - DNA, 25 bp, Homo sapien
gttacacggtataggttcgttagaa

SEQ ID NO: 5858877 - DNA, 25 bp, Homo sapien
tcatcatacgatcgtacccaataac

SEQ ID NO: 5858878 - DNA, 25 bp, Homo sapien
aagtaggtacgactagacgtagtaa

SEQ ID NO: 5858879 - DNA, 25 bp, Homo sapien
atgctaaccgtacggctatcaaata

SEQ ID NO: 5858880 - DNA, 25 bp, Homo sapien
ctatattacgggcgagtatgatgtt

SEQ ID NO: 5858881 - DNA, 25 bp, Homo sapien
ttgtagcggtttcgacgttatttac

SEQ ID NO: 5858882 - DNA, 25 bp, Homo sapien
tattaccttacgcgacgtaaattgg

SEQ ID NO: 5858883 - DNA, 25 bp, Homo sapien
tgttcccctatacgaatcgtaagta

SEQ ID NO: 5858884 - DNA, 25 bp, Homo sapien
acatatcgactacggttcgaatgta

SEQ ID NO: 5858885 - DNA, 25 bp, Homo sapien
tattagatagtccggtacgcatgta

SEQ ID NO: 5858886 - DNA, 25 bp, Homo sapien
agttatctatagcgcgactaacaca

SEQ ID NO: 5858887 - DNA, 25 bp, Homo sapien
tctacataataggcgtcgaagagaa

SEQ ID NO: 5858888 - DNA, 25 bp, Homo sapien
agtaaaaggtacgtcgttcagtgta

SEQ ID NO: 5858889 - DNA, 25 bp, Homo sapien
aggtatttatgcgcgatcggtttta

SEQ ID NO: 5858890 - DNA, 25 bp, Homo sapien
aaaagattacgaacgcggtaagaca

SEQ ID NO: 5858891 - DNA, 25 bp, Homo sapien
tcgcattaatcatacgcgataagct

SEQ ID NO: 5858892 - DNA, 25 bp, Homo sapien
tgagaattagtcgtatgcggtaagt

SEQ ID NO: 5858893 - DNA, 25 bp, Homo sapien
agtgtagtcgaaccgatactgattt

SEQ ID NO: 5858894 - DNA, 25 bp, Homo sapien
aagttagtcgtccggtatatcacta

SEQ ID NO: 5858895 - DNA, 25 bp, Homo sapien
attgtgtaacgagccgtacatagaa

SEQ ID NO: 5858896 - DNA, 25 bp, Homo sapien
attcgatttgcgcgacctagtattt

SEQ ID NO: 5858897 - DNA, 25 bp, Homo sapien
tcttactcgtacgcgtaactatgaa

SEQ ID NO: 5858898 - DNA, 25 bp, Homo sapien
gtatgatatcacgcgttagactaca

SEQ ID NO: 5858899 - DNA, 25 bp, Homo sapien
ctcagcatcgcgctagtatataaaa

SEQ ID NO: 5858900 - DNA, 25 bp, Homo sapien
actatagagtatacgagcgttatcg

SEQ ID NO: 5858901 - DNA, 25 bp, Homo sapien
caattcactacggtcgataagcaaa

SEQ ID NO: 5858902 - DNA, 25 bp, Homo sapien
actcatgcgaacgactagtattgta

SEQ ID NO: 5858903 - DNA, 25 bp, Homo sapien
ttcaggttgactaatcgcgtaagat

SEQ ID NO: 5858904 - DNA, 25 bp, Homo sapien
gtatatagtctcgcgcatagatcta

SEQ ID NO: 5858905 - DNA, 25 bp, Homo sapien
tcgaattacgtattgcgcgcatatt

SEQ ID NO: 5858906 - DNA, 25 bp, Homo sapien
cgatatactcgcggacaattaacaa

SEQ ID NO: 5858907 - DNA, 25 bp, Homo sapien
gagtcattaacgcgtcgtaatctta

SEQ ID NO: 5858908 - DNA, 25 bp, Homo sapien
tatatctagagcgctacgtctatct

SEQ ID NO: 5858909 - DNA, 25 bp, Homo sapien
aatcctatcgttatagcggataggt

SEQ ID NO: 5858910 - DNA, 25 bp, Homo sapien
agaaatgacatattcgtcgtgaagc

SEQ ID NO: 5858911 - DNA, 25 bp, Homo sapien
caagcaccgataatacgtcattaag

SEQ ID NO: 5858912 - DNA, 25 bp, Homo sapien
agcagtagttcgtacgcaatagtaa

SEQ ID NO: 5858913 - DNA, 25 bp, Homo sapien
actagatatcggcgtactatgatag

SEQ ID NO: 5858914 - DNA, 25 bp, Homo sapien
tcttatgtaatgttccgcgaaagga

SEQ ID NO: 5858915 - DNA, 25 bp, Homo sapien
gaaagttaattacgcgtcggattga

SEQ ID NO: 5858916 - DNA, 25 bp, Homo sapien
ttgaaacgataacgctatacggatc

SEQ ID NO: 5858917 - DNA, 25 bp, Homo sapien
tttattttcgcactagcgtgagatg

SEQ ID NO: 5858918 - DNA, 25 bp, Homo sapien
atatagattacgtacgcgacgatga

SEQ ID NO: 5858919 - DNA, 25 bp, Homo sapien
tacatgtatgggcgcgatatagaat

SEQ ID NO: 5858920 - DNA, 25 bp, Homo sapien
atctatacgacgtactacgtacctt

SEQ ID NO: 5858921 - DNA, 25 bp, Homo sapien
ttagactatctcgatacggtgaagt

SEQ ID NO: 5858922 - DNA, 25 bp, Homo sapien
agtttactagttacgcgttaggcat

SEQ ID NO: 5858923 - DNA, 25 bp, Homo sapien
ttcttcatataacgagtcggccaat

SEQ ID NO: 5858924 - DNA, 25 bp, Homo sapien
ttaccttacgctagtaacgcatact

SEQ ID NO: 5858925 - DNA, 25 bp, Homo sapien
gatgtgattacgcgaacctacttaa

SEQ ID NO: 5858926 - DNA, 25 bp, Homo sapien
attctagcgtacgacgttatcgttt

SEQ ID NO: 5858927 - DNA, 25 bp, Homo sapien
gattaactattaatcgcgtccacgt

SEQ ID NO: 5858928 - DNA, 25 bp, Homo sapien
actataattcgctacggtaaggtga

SEQ ID NO: 5858929 - DNA, 25 bp, Homo sapien
ttccaatacgcgggataaattaacc

SEQ ID NO: 5858930 - DNA, 25 bp, Homo sapien
aatcaatttacgttcgtacgggtga

SEQ ID NO: 5858931 - DNA, 25 bp, Homo sapien
ttctctgtatagacgcgcttaaaac

SEQ ID NO: 5858932 - DNA, 25 bp, Homo sapien
ctaacaagcgcgcgtatatagtata

SEQ ID NO: 5858933 - DNA, 25 bp, Homo sapien
tattaaacgatcgtccctaacgttg

SEQ ID NO: 5858934 - DNA, 25 bp, Homo sapien
attatccgcgtatataggacgattc

SEQ ID NO: 5858935 - DNA, 25 bp, Homo sapien
tatttaagtcgttcgcgtagaagac

SEQ ID NO: 5858936 - DNA, 25 bp, Homo sapien
aatttacgatcttatgccgagggaa

SEQ ID NO: 5858937 - DNA, 25 bp, Homo sapien
tttctacgatctagtatcgctagtc

SEQ ID NO: 5858938 - DNA, 25 bp, Homo sapien
ctatctcgcgacgtataagaaatgt

SEQ ID NO: 5858939 - DNA, 25 bp, Homo sapien
ttgactaccttacgcgctatgttaa

SEQ ID NO: 5858940 - DNA, 25 bp, Homo sapien
atatcgtaatcgcgtaacggaaact

SEQ ID NO: 5858941 - DNA, 25 bp, Homo sapien
gctttatatcgcgctaaggttatga

SEQ ID NO: 5858942 - DNA, 25 bp, Homo sapien
ctgaatgtagcgcgttaatatccaa

SEQ ID NO: 5858943 - DNA, 25 bp, Homo sapien
aaatatactttcgtcgtgcgctaac

SEQ ID NO: 5858944 - DNA, 25 bp, Homo sapien
atttcgcgatataactccggtatag

SEQ ID NO: 5858945 - DNA, 25 bp, Homo sapien
ttatagtcgcgcgttagatcttgta

SEQ ID NO: 5858946 - DNA, 25 bp, Homo sapien
aattgcaacacgcgtaggtgtaatt

SEQ ID NO: 5858947 - DNA, 25 bp, Homo sapien
acttaaggtcgtacgcatataacct

SEQ ID NO: 5858948 - DNA, 25 bp, Homo sapien
ctatgtataacgctagacgagaaac

SEQ ID NO: 5858949 - DNA, 25 bp, Homo sapien
ttttgaacgtaccgattacgtcaga

SEQ ID NO: 5858950 - DNA, 25 bp, Homo sapien
tcgttagtcgacggacttattcatt

SEQ ID NO: 5858951 - DNA, 25 bp, Homo sapien
tagaagtagcgtcgacaagagataa

SEQ ID NO: 5858952 - DNA, 25 bp, Homo sapien
aagctgtcgcggtatactatatgaa

SEQ ID NO: 5858953 - DNA, 25 bp, Homo sapien
tatctgaattgtcgtacgctacgat

SEQ ID NO: 5858954 - DNA, 25 bp, Homo sapien
acttacttagatccgaacgcaaact

SEQ ID NO: 5858955 - DNA, 25 bp, Homo sapien
atataacgcgtacattaactacccg

SEQ ID NO: 5858956 - DNA, 25 bp, Homo sapien
gaattattgtcgtactacgtgcaac

SEQ ID NO: 5858957 - DNA, 25 bp, Homo sapien
atggagtagcgacgcaatttaattg

SEQ ID NO: 5858958 - DNA, 25 bp, Homo sapien
aatgaacgcccgataacatatggtt

SEQ ID NO: 5858959 - DNA, 25 bp, Homo sapien
cgataacctattcgacgaattaagg

SEQ ID NO: 5858960 - DNA, 25 bp, Homo sapien
gggatacggattagtatcgagattt

SEQ ID NO: 5858961 - DNA, 25 bp, Homo sapien
gaaatgcgtacgattaaggcaaact

SEQ ID NO: 5858962 - DNA, 25 bp, Homo sapien
aaatgcatcttacgccgataggtta

SEQ ID NO: 5858963 - DNA, 25 bp, Homo sapien
tgtttttagcgcgatcctagtgtta

SEQ ID NO: 5858964 - DNA, 25 bp, Homo sapien
tagaatgtacgacggtaattcacga

SEQ ID NO: 5858965 - DNA, 25 bp, Homo sapien
atactcgcgtactataacgaatcgt

SEQ ID NO: 5858966 - DNA, 25 bp, Homo sapien
tgctatcgcgaatcataggtttaag

SEQ ID NO: 5858967 - DNA, 25 bp, Homo sapien
aactcataactctcgcgacgtttaa

SEQ ID NO: 5858968 - DNA, 25 bp, Homo sapien
ttagactagcggacggttatttgaa

SEQ ID NO: 5858969 - DNA, 25 bp, Homo sapien
aaaagataccgcggtcaatgaatca

SEQ ID NO: 5858970 - DNA, 25 bp, Homo sapien
aataaacgtcttatacgcgcactct

SEQ ID NO: 5858971 - DNA, 25 bp, Homo sapien
atctgatagtcgtttacgctcttca

SEQ ID NO: 5858972 - DNA, 25 bp, Homo sapien
tggtattacgatccggtattctaga

SEQ ID NO: 5858973 - DNA, 25 bp, Homo sapien
acggtaataatcggtcgtcattact

SEQ ID NO: 5858974 - DNA, 25 bp, Homo sapien
gtgttatcgtaagacgcgaaaaaac

SEQ ID NO: 5858975 - DNA, 25 bp, Homo sapien
cttatcaatctaccgtcgctaattg

SEQ ID NO: 5858976 - DNA, 25 bp, Homo sapien
catatccgaaggtcgtaacagattt

SEQ ID NO: 5858977 - DNA, 25 bp, Homo sapien
tggaatagattcgcgcgtatatgta

SEQ ID NO: 5858978 - DNA, 25 bp, Homo sapien
gatcagtagcgcgtaatagcaattt

SEQ ID NO: 5858979 - DNA, 25 bp, Homo sapien
gatatgagcgcgtcgatatttcttt

SEQ ID NO: 5858980 - DNA, 25 bp, Homo sapien
gctttaacgttagtcgagtatatgc

SEQ ID NO: 5858981 - DNA, 25 bp, Homo sapien
ttgcgtcgcttattgcgagaatatt

SEQ ID NO: 5858982 - DNA, 25 bp, Homo sapien
acctaatagtatcgcgcgattaact

SEQ ID NO: 5858983 - DNA, 25 bp, Homo sapien
atcttcgtacgctaagtcgtgtaaa

SEQ ID NO: 5858984 - DNA, 25 bp, Homo sapien
gagtaaacgcgttattcgtaatcca

SEQ ID NO: 5858985 - DNA, 25 bp, Homo sapien
ttgaattatctagccgcgttaccat

SEQ ID NO: 5858986 - DNA, 25 bp, Homo sapien
cctatatatcgacgtcggaagtaat

SEQ ID NO: 5858987 - DNA, 25 bp, Homo sapien
tcccatacgtatagcgtcgtatttt

SEQ ID NO: 5858988 - DNA, 25 bp, Homo sapien
cataactgtataacgagcgtgatca

SEQ ID NO: 5858989 - DNA, 25 bp, Homo sapien
tttgatactatcgcacgactatgga

SEQ ID NO: 5858990 - DNA, 25 bp, Homo sapien
tagtaagcgccgattaagttgtgaa

SEQ ID NO: 5858991 - DNA, 25 bp, Homo sapien
taatatcgttataggtacggcagct

SEQ ID NO: 5858992 - DNA, 25 bp, Homo sapien
agcacacgtagcgtcgtatataatt

SEQ ID NO: 5858993 - DNA, 25 bp, Homo sapien
tcgataacgtaatcgcgaaaagttc

SEQ ID NO: 5858994 - DNA, 25 bp, Homo sapien
tcagcataaccgcgacgttaataat

SEQ ID NO: 5858995 - DNA, 25 bp, Homo sapien
aatttagacgcgtacttatcgcact

SEQ ID NO: 5858996 - DNA, 25 bp, Homo sapien
tgacatactatcgacgtagttggaa

SEQ ID NO: 5858997 - DNA, 25 bp, Homo sapien
ctttaccgtagtacgacaaagacta

SEQ ID NO: 5858998 - DNA, 25 bp, Homo sapien
gaatagtagggcgtactacaacata

SEQ ID NO: 5858999 - DNA, 25 bp, Homo sapien
aacattgattacccgatcggctata

SEQ ID NO: 5859000 - DNA, 25 bp, Homo sapien
agtctcttataaccgctcgatgtaa

SEQ ID NO: 5859001 - DNA, 25 bp, Homo sapien
taggtagtcgacgcatagtctataa

SEQ ID NO: 5859002 - DNA, 25 bp, Homo sapien
tctagagtattatcgcgtcccatat

SEQ ID NO: 5859003 - DNA, 25 bp, Homo sapien
ttcctatcgtactacgtagtaaacg

SEQ ID NO: 5859004 - DNA, 25 bp, Homo sapien
actactacttagttcgacgtcatgt

SEQ ID NO: 5859005 - DNA, 25 bp, Homo sapien
cgtactcattgacgtaacgaatttg

SEQ ID NO: 5859006 - DNA, 25 bp, Homo sapien
catatccttatgtatcgcgatgcat

SEQ ID NO: 5859007 - DNA, 25 bp, Homo sapien
gttagacgtttataggtcgtttgtc

SEQ ID NO: 5859008 - DNA, 25 bp, Homo sapien
tatgtcacgtctagtatcgtattcg

SEQ ID NO: 5859009 - DNA, 25 bp, Homo sapien
atctatctaatcgcgctagtcaatg

SEQ ID NO: 5859010 - DNA, 25 bp, Homo sapien
atttgcttagtagcgcgacattgat

SEQ ID NO: 5859011 - DNA, 25 bp, Homo sapien
caagtaccgatcatacgttaaagtc

SEQ ID NO: 5859012 - DNA, 25 bp, Homo sapien
catatctaacgcactatcgtttgac

SEQ ID NO: 5859013 - DNA, 25 bp, Homo sapien
agataactaacgagcggtactatca

SEQ ID NO: 5859014 - DNA, 25 bp, Homo sapien
ttttgcacgatataaggcgccttaa

SEQ ID NO: 5859015 - DNA, 25 bp, Homo sapien
tacacatacgtcgcataacgtcata

SEQ ID NO: 5859016 - DNA, 25 bp, Homo sapien
cctactggtccgctactattataat

SEQ ID NO: 5859017 - DNA, 25 bp, Homo sapien
atttcacgcgtaacgtatactatgc

SEQ ID NO: 5859018 - DNA, 25 bp, Homo sapien
aagatggtacgtacaatcgtctcta

SEQ ID NO: 5859019 - DNA, 25 bp, Homo sapien
ttaagtcgcgtacgtttactattgg

SEQ ID NO: 5859020 - DNA, 25 bp, Homo sapien
agtttggatcggacgtatatgttgt

SEQ ID NO: 5859021 - DNA, 25 bp, Homo sapien
attcctctcgtacgatcaagaatca

SEQ ID NO: 5859022 - DNA, 25 bp, Homo sapien
aatcaatcgcgagtatactatagcc

SEQ ID NO: 5859023 - DNA, 25 bp, Homo sapien
ctattacgactaatcgtcgactcaa

SEQ ID NO: 5859024 - DNA, 25 bp, Homo sapien
tcgtaatacgcgttcgaatctatgt

SEQ ID NO: 5859025 - DNA, 25 bp, Homo sapien
cataaatcgcacgaattactcatcg

SEQ ID NO: 5859026 - DNA, 25 bp, Homo sapien
aagtcagcgtcgtgtaatactgaaa

SEQ ID NO: 5859027 - DNA, 25 bp, Homo sapien
aatgcacgatactagatcgaactct

SEQ ID NO: 5859028 - DNA, 25 bp, Homo sapien
atagtatcgcgatacgtgaattcac

SEQ ID NO: 5859029 - DNA, 25 bp, Homo sapien
catcaagtcgcgaatactattgtca

SEQ ID NO: 5859030 - DNA, 25 bp, Homo sapien
tacatatctatcggacgcactttac

SEQ ID NO: 5859031 - DNA, 25 bp, Homo sapien
caacatgtcgaacgtaacaacatca

SEQ ID NO: 5859032 - DNA, 25 bp, Homo sapien
tttgatcgtaatacgaccgaaagca

SEQ ID NO: 5859033 - DNA, 25 bp, Homo sapien
acttttgtacattacgccgttctct

SEQ ID NO: 5859034 - DNA, 25 bp, Homo sapien
cttagcgactatcatcgcgaaaatt

SEQ ID NO: 5859035 - DNA, 25 bp, Homo sapien
gggttatttactagcgcgacattta

SEQ ID NO: 5859036 - DNA, 25 bp, Homo sapien
tataaccgcgagacaatctattcag

SEQ ID NO: 5859037 - DNA, 25 bp, Homo sapien
aacagagcgcgtaatagtttttctg

SEQ ID NO: 5859038 - DNA, 25 bp, Homo sapien
attctgtattgcgccgttataatgg

SEQ ID NO: 5859039 - DNA, 25 bp, Homo sapien
aatatcgtacgcgattacgttcaac

SEQ ID NO: 5859040 - DNA, 25 bp, Homo sapien
cactcaattcgcgttatcgaatgta

SEQ ID NO: 5859041 - DNA, 25 bp, Homo sapien
caattagttacgcgacgttgtttga

SEQ ID NO: 5859042 - DNA, 25 bp, Homo sapien
gtgctaattgtatgacgcgtctatt

SEQ ID NO: 5859043 - DNA, 25 bp, Homo sapien
catagttatacgattcgactggctt

SEQ ID NO: 5859044 - DNA, 25 bp, Homo sapien
tctctctatcgcgacgtaattaatc

SEQ ID NO: 5859045 - DNA, 25 bp, Homo sapien
ttatgccgattcgtatagggaagtt

SEQ ID NO: 5859046 - DNA, 25 bp, Homo sapien
agcacacgcgttatgtctcaaatta

SEQ ID NO: 5859047 - DNA, 25 bp, Homo sapien
aagactttagtaggcgtcgatcata

SEQ ID NO: 5859048 - DNA, 25 bp, Homo sapien
taaaggcgatcggtacaacaaatag

SEQ ID NO: 5859049 - DNA, 25 bp, Homo sapien
gttcgacgtacgatcaatgtttact

SEQ ID NO: 5859050 - DNA, 25 bp, Homo sapien
tcctttgaacttcgcgtattttacc

SEQ ID NO: 5859051 - DNA, 25 bp, Homo sapien
ttaatttatgacgcggccttggtta

SEQ ID NO: 5859052 - DNA, 25 bp, Homo sapien
ttattcacgcggactaatgtcctat

SEQ ID NO: 5859053 - DNA, 25 bp, Homo sapien
ctgaatgcctatacgcgtttgaaat

SEQ ID NO: 5859054 - DNA, 25 bp, Homo sapien
tatccttaacgcgatgtgaactcta

SEQ ID NO: 5859055 - DNA, 25 bp, Homo sapien
gctttacgcgttacggtatgaaata

SEQ ID NO: 5859056 - DNA, 25 bp, Homo sapien
tattcgacgcgatactaacagtatc

SEQ ID NO: 5859057 - DNA, 25 bp, Homo sapien
gttaattgatcgtacgcacatgttc

SEQ ID NO: 5859058 - DNA, 25 bp, Homo sapien
agtctaggtcgaatatacgactaac

SEQ ID NO: 5859059 - DNA, 25 bp, Homo sapien
ttcctccctaatcgcgtaagaatta

SEQ ID NO: 5859060 - DNA, 25 bp, Homo sapien
tttgatgacgacgcggttagaataa

SEQ ID NO: 5859061 - DNA, 25 bp, Homo sapien
accctaagttatcgcgtatttagtc

SEQ ID NO: 5859062 - DNA, 25 bp, Homo sapien
ctctaaacgcgcgttttacttttga

SEQ ID NO: 5859063 - DNA, 25 bp, Homo sapien
cacaaatatcgagcgtgttcatagt

SEQ ID NO: 5859064 - DNA, 25 bp, Homo sapien
ggagtgtcgctataaccgattatat

SEQ ID NO: 5859065 - DNA, 25 bp, Homo sapien
gtatatgtctcgcgaatagatgatc

SEQ ID NO: 5859066 - DNA, 25 bp, Homo sapien
tcaatttcgcgtaatcggctgaaat

SEQ ID NO: 5859067 - DNA, 25 bp, Homo sapien
acttcctatacgggtcgtagaatat

SEQ ID NO: 5859068 - DNA, 25 bp, Homo sapien
gattcattcgcgtaggtaatctcta

SEQ ID NO: 5859069 - DNA, 25 bp, Homo sapien
aatgaatagtatgatcgcgagcaag

SEQ ID NO: 5859070 - DNA, 25 bp, Homo sapien
caaatagcgtaacgttcgttgtaca

SEQ ID NO: 5859071 - DNA, 25 bp, Homo sapien
tgttagcgcgtcgactatttcatat

SEQ ID NO: 5859072 - DNA, 25 bp, Homo sapien
attaacctacgcgaagtgttctgtt

SEQ ID NO: 5859073 - DNA, 25 bp, Homo sapien
ctagatacgcgatcgtatagaatac

SEQ ID NO: 5859074 - DNA, 25 bp, Homo sapien
tcctttaccgcgactaataagagtt

SEQ ID NO: 5859075 - DNA, 25 bp, Homo sapien
tagatctcggtacgtcgttaataca

SEQ ID NO: 5859076 - DNA, 25 bp, Homo sapien
tacaaatcgtatactaccgtcagga

SEQ ID NO: 5859077 - DNA, 25 bp, Homo sapien
taaaattactcgaatcgcggtgcta

SEQ ID NO: 5859078 - DNA, 25 bp, Homo sapien
acatatttactagtcgacgctgtga

SEQ ID NO: 5859079 - DNA, 25 bp, Homo sapien
ttgtattttaggcgatcggctcata

SEQ ID NO: 5859080 - DNA, 25 bp, Homo sapien
ttcgtgctatagcgttacgaagata

SEQ ID NO: 5859081 - DNA, 25 bp, Homo sapien
gagattgaccgaatacgattgattc

SEQ ID NO: 5859082 - DNA, 25 bp, Homo sapien
ttaatcaacggtcggcatataaacc

SEQ ID NO: 5859083 - DNA, 25 bp, Homo sapien
tacgtacgtcgacacgttacaatta

SEQ ID NO: 5859084 - DNA, 25 bp, Homo sapien
atctaaactcgactaacgtgtgcta

SEQ ID NO: 5859085 - DNA, 25 bp, Homo sapien
taaaatgtacgtcgcactagatcct

SEQ ID NO: 5859086 - DNA, 25 bp, Homo sapien
ttggaatccgcgacgtttatttact

SEQ ID NO: 5859087 - DNA, 25 bp, Homo sapien
tgagccattacgcgctctattaaaa

SEQ ID NO: 5859088 - DNA, 25 bp, Homo sapien
aattagtaagacggatcgcgacatt

SEQ ID NO: 5859089 - DNA, 25 bp, Homo sapien
tacaagcgcgatgattgaagtaatc

SEQ ID NO: 5859090 - DNA, 25 bp, Homo sapien
tcttgtactactgcgtacgttaaga

SEQ ID NO: 5859091 - DNA, 25 bp, Homo sapien
aaaatgtcgtccgaactagcacaaa

SEQ ID NO: 5859092 - DNA, 25 bp, Homo sapien
tattcttagtcgccgtatacatgac

SEQ ID NO: 5859093 - DNA, 25 bp, Homo sapien
ggtgactagtcgcgtgataatatta

SEQ ID NO: 5859094 - DNA, 25 bp, Homo sapien
ccctttgacgcgattactagttatt

SEQ ID NO: 5859095 - DNA, 25 bp, Homo sapien
tgcaattatattcgcgcgagactaa

SEQ ID NO: 5859096 - DNA, 25 bp, Homo sapien
tcattttattcgtcgagcgctgtat

SEQ ID NO: 5859097 - DNA, 25 bp, Homo sapien
tgttatactcgcgtatagaacacca

SEQ ID NO: 5859098 - DNA, 25 bp, Homo sapien
tggctaatacgttacgacgattcat

SEQ ID NO: 5859099 - DNA, 25 bp, Homo sapien
ttgcgtcgtttcgtcgataatacat

SEQ ID NO: 5859100 - DNA, 25 bp, Homo sapien
gggatctctcgtatagcgattaaaa

SEQ ID NO: 5859101 - DNA, 25 bp, Homo sapien
attattatgctagtcgacgtcgtgt

SEQ ID NO: 5859102 - DNA, 25 bp, Homo sapien
ttatccgcgaattatcgtccactat

SEQ ID NO: 5859103 - DNA, 25 bp, Homo sapien
gtcagatcgtatatacgcgactatt

SEQ ID NO: 5859104 - DNA, 25 bp, Homo sapien
gctttggttatcgaccgcttaattt

SEQ ID NO: 5859105 - DNA, 25 bp, Homo sapien
taaactgtatcgtaaggcgctgtaa

SEQ ID NO: 5859106 - DNA, 25 bp, Homo sapien
agaagttaatgtacgtccgctgatt

SEQ ID NO: 5859107 - DNA, 25 bp, Homo sapien
cgaatacgtataacgacggttatag

SEQ ID NO: 5859108 - DNA, 25 bp, Homo sapien
ttctctcgctataacgatctgcatt

SEQ ID NO: 5859109 - DNA, 25 bp, Homo sapien
acaagtcgatgttgtacgataactg

SEQ ID NO: 5859110 - DNA, 25 bp, Homo sapien
ttatctatagtaccgcgtacatagc

SEQ ID NO: 5859111 - DNA, 25 bp, Homo sapien
taccattagtatcggcgtaattcga

SEQ ID NO: 5859112 - DNA, 25 bp, Homo sapien
tgattttaatcgggcgtaactctga

SEQ ID NO: 5859113 - DNA, 25 bp, Homo sapien
actcttgtcggttatcggatataag

SEQ ID NO: 5859114 - DNA, 25 bp, Homo sapien
acgtttatagttatccgcggcattt

SEQ ID NO: 5859115 - DNA, 25 bp, Homo sapien
aaagagtactaacggacgtgaaaca

SEQ ID NO: 5859116 - DNA, 25 bp, Homo sapien
atagttttaacgcgtatcgtatcgc

SEQ ID NO: 5859117 - DNA, 25 bp, Homo sapien
agtaagtctttagtacgcgaaggaa

SEQ ID NO: 5859118 - DNA, 25 bp, Homo sapien
tcaaaccgcctaattcgtaaaaagc

SEQ ID NO: 5859119 - DNA, 25 bp, Homo sapien
aagaatgcgtctaactacgttcatc

SEQ ID NO: 5859120 - DNA, 25 bp, Homo sapien
atcaaggtataatcgcgcttagaca

SEQ ID NO: 5859121 - DNA, 25 bp, Homo sapien
tactattcgtcgtacgttaagcaga

SEQ ID NO: 5859122 - DNA, 25 bp, Homo sapien
gtagtattggacgtcgttcttatac

SEQ ID NO: 5859123 - DNA, 25 bp, Homo sapien
aaggttgttacgaccgatatggtat

SEQ ID NO: 5859124 - DNA, 25 bp, Homo sapien
ttttaagacgagcggtatatacgtg

SEQ ID NO: 5859125 - DNA, 25 bp, Homo sapien
gtctttaaccgatctacgcgaatta

SEQ ID NO: 5859126 - DNA, 25 bp, Homo sapien
attgcacgcacgattaagctaagaa

SEQ ID NO: 5859127 - DNA, 25 bp, Homo sapien
ttaaattcgtatgtcgactggcaac

SEQ ID NO: 5859128 - DNA, 25 bp, Homo sapien
gccattcgtcgagatattatagttc

SEQ ID NO: 5859129 - DNA, 25 bp, Homo sapien
gatgtacgtatagcgcgaattttag

SEQ ID NO: 5859130 - DNA, 25 bp, Homo sapien
attaaatatccgcgagtaactgcca

SEQ ID NO: 5859131 - DNA, 25 bp, Homo sapien
attccctacgcgtatcgtttaaatg

SEQ ID NO: 5859132 - DNA, 25 bp, Homo sapien
acagaccggattagtctcgaaaaaa

SEQ ID NO: 5859133 - DNA, 25 bp, Homo sapien
tcgaattcgcgactaatcttacttg

SEQ ID NO: 5859134 - DNA, 25 bp, Homo sapien
gagtaagacgcactatacggaaaat

SEQ ID NO: 5859135 - DNA, 25 bp, Homo sapien
tcaaattctatacggttcgtcagac

SEQ ID NO: 5859136 - DNA, 25 bp, Homo sapien
gattttattcgctacgcgtcaaaga

SEQ ID NO: 5859137 - DNA, 25 bp, Homo sapien
ccatcttgcgcgtatactaaattgt

SEQ ID NO: 5859138 - DNA, 25 bp, Homo sapien
atatccacgcgtatcatagtgaaag

SEQ ID NO: 5859139 - DNA, 25 bp, Homo sapien
caaatcacgcgattgtaacaatgtg

SEQ ID NO: 5859140 - DNA, 25 bp, Homo sapien
tagtaacctccgaacgataacagtt

SEQ ID NO: 5859141 - DNA, 25 bp, Homo sapien
tttatgaaggtcgaccgtatgagta

SEQ ID NO: 5859142 - DNA, 25 bp, Homo sapien
tggttgtaactcgtatgcgaagaaa

SEQ ID NO: 5859143 - DNA, 25 bp, Homo sapien
ttcaattaagcggttcgacgtacta

SEQ ID NO: 5859144 - DNA, 25 bp, Homo sapien
atatagtatcatacgaccgaaggca

SEQ ID NO: 5859145 - DNA, 25 bp, Homo sapien
tatcgttacgtcgtgacgaatttga

SEQ ID NO: 5859146 - DNA, 25 bp, Homo sapien
caagtagttcatacgtccgtattgt

SEQ ID NO: 5859147 - DNA, 25 bp, Homo sapien
tgaaatacgaactacgctacgagaa

SEQ ID NO: 5859148 - DNA, 25 bp, Homo sapien
aatacgtagcggtacgtgataacat

SEQ ID NO: 5859149 - DNA, 25 bp, Homo sapien
gtactatctaacgcgtcaattactc

SEQ ID NO: 5859150 - DNA, 25 bp, Homo sapien
tacgttctatgcgcgacatatagaa

SEQ ID NO: 5859151 - DNA, 25 bp, Homo sapien
aacttccgtacgataatagttgacg

SEQ ID NO: 5859152 - DNA, 25 bp, Homo sapien
aattctcgcgacgattaatcttcga

SEQ ID NO: 5859153 - DNA, 25 bp, Homo sapien
gttgcacgagtcgtactataatcta

SEQ ID NO: 5859154 - DNA, 25 bp, Homo sapien
aaatccagcgaattcgcgtagataa

SEQ ID NO: 5859155 - DNA, 25 bp, Homo sapien
acattcagacgcgaattacatcaac

SEQ ID NO: 5859156 - DNA, 25 bp, Homo sapien
atgacttatgcgcgagactaacaat

SEQ ID NO: 5859157 - DNA, 25 bp, Homo sapien
tcattttagggttaacgcgtaatcg

SEQ ID NO: 5859158 - DNA, 25 bp, Homo sapien
ctatggaactatatcgcgctattga

SEQ ID NO: 5859159 - DNA, 25 bp, Homo sapien
cgttatcgcgtacaatagcagttat

SEQ ID NO: 5859160 - DNA, 25 bp, Homo sapien
catacactttacgcgtctacttgat

SEQ ID NO: 5859161 - DNA, 25 bp, Homo sapien
tgatgttcgcgttatacgtcttcaa

SEQ ID NO: 5859162 - DNA, 25 bp, Homo sapien
ggactatctaatcggcgtatactaa

SEQ ID NO: 5859163 - DNA, 25 bp, Homo sapien
agtgagtctatatccgcgattacaa

SEQ ID NO: 5859164 - DNA, 25 bp, Homo sapien
tatacgtcgcgcgatacaataatgt

SEQ ID NO: 5859165 - DNA, 25 bp, Homo sapien
tgatacaaccgtcgatacgaattgt

SEQ ID NO: 5859166 - DNA, 25 bp, Homo sapien
acaatttagcgtatcggaagacttg

SEQ ID NO: 5859167 - DNA, 25 bp, Homo sapien
aagtagtaaagcgtagtcgacagtt

SEQ ID NO: 5859168 - DNA, 25 bp, Homo sapien
ttaaaatatccctcgcgaagctaca

SEQ ID NO: 5859169 - DNA, 25 bp, Homo sapien
aataacgaccgaacgttacactgaa

SEQ ID NO: 5859170 - DNA, 25 bp, Homo sapien
acagcacgtaacgctatagcatatt

SEQ ID NO: 5859171 - DNA, 25 bp, Homo sapien
attgaacgcgaaagcatacatcagt

SEQ ID NO: 5859172 - DNA, 25 bp, Homo sapien
ttaaagacgttgtagctcgcttatg

SEQ ID NO: 5859173 - DNA, 25 bp, Homo sapien
actgtaaagcgcgataacgtattgt

SEQ ID NO: 5859174 - DNA, 25 bp, Homo sapien
atatcgcgatcgtcctaatctagta

SEQ ID NO: 5859175 - DNA, 25 bp, Homo sapien
tagatccgtactacgtcgagatatt

SEQ ID NO: 5859176 - DNA, 25 bp, Homo sapien
caattaccttcgcgtataaaacgct

SEQ ID NO: 5859177 - DNA, 25 bp, Homo sapien
cctaaagtatgattcgcgctaatag

SEQ ID NO: 5859178 - DNA, 25 bp, Homo sapien
ctatagcaactatcgcgcaaattag

SEQ ID NO: 5859179 - DNA, 25 bp, Homo sapien
atcggtcgcgaagtatcattgttta

SEQ ID NO: 5859180 - DNA, 25 bp, Homo sapien
actcagccgtatacgatacattgaa

SEQ ID NO: 5859181 - DNA, 25 bp, Homo sapien
aaatgttcgcgaccgcttatatgat

SEQ ID NO: 5859182 - DNA, 25 bp, Homo sapien
tcacagaatcgcgctagtaataact

SEQ ID NO: 5859183 - DNA, 25 bp, Homo sapien
ctttcatagacgatcgagtaacttc

SEQ ID NO: 5859184 - DNA, 25 bp, Homo sapien
tggcaacgtaacgcactattatcta

SEQ ID NO: 5859185 - DNA, 25 bp, Homo sapien
atataacggatcgtcgttagaaagg

SEQ ID NO: 5859186 - DNA, 25 bp, Homo sapien
gttattgttacgtccgctatagtag

SEQ ID NO: 5859187 - DNA, 25 bp, Homo sapien
tgaatagatcgctcgttagtaaagg

SEQ ID NO: 5859188 - DNA, 25 bp, Homo sapien
tagctttaggttcgtacgcttcaaa

SEQ ID NO: 5859189 - DNA, 25 bp, Homo sapien
ttaaaagcgcgtatagtcgaatgag

SEQ ID NO: 5859190 - DNA, 25 bp, Homo sapien
cagtaagacgtaacgtcgattgtta

SEQ ID NO: 5859191 - DNA, 25 bp, Homo sapien
agactacgtattacggcgaaaaaca

SEQ ID NO: 5859192 - DNA, 25 bp, Homo sapien
ctagtatcgctagtcgataagaatc

SEQ ID NO: 5859193 - DNA, 25 bp, Homo sapien
ttgactatatcgcgtctcgtgttta

SEQ ID NO: 5859194 - DNA, 25 bp, Homo sapien
aaatgaggcgatacgttgattagag

SEQ ID NO: 5859195 - DNA, 25 bp, Homo sapien
ctggaccgtcgatcgtatttattta

SEQ ID NO: 5859196 - DNA, 25 bp, Homo sapien
tcgatacgcgaccttattgtttaag

SEQ ID NO: 5859197 - DNA, 25 bp, Homo sapien
atcaaggcgtatatacgtccattga

SEQ ID NO: 5859198 - DNA, 25 bp, Homo sapien
agaactattatacgacgcgttcatg

SEQ ID NO: 5859199 - DNA, 25 bp, Homo sapien
tttattggtcgcgaactattcggtt

SEQ ID NO: 5859200 - DNA, 25 bp, Homo sapien
catttttcgtaatacgaccgcagat

SEQ ID NO: 5859201 - DNA, 25 bp, Homo sapien
cggataattaacgcgtcgtgtatat

SEQ ID NO: 5859202 - DNA, 25 bp, Homo sapien
aataggctaactacgtcgctgaaaa

SEQ ID NO: 5859203 - DNA, 25 bp, Homo sapien
tttagcgtcgctcgattagaattga

SEQ ID NO: 5859204 - DNA, 25 bp, Homo sapien
taattcgctcgacgtataaatcagg

SEQ ID NO: 5859205 - DNA, 25 bp, Homo sapien
agcaaacgcgattaggttgcaattt

SEQ ID NO: 5859206 - DNA, 25 bp, Homo sapien
catatatatcgtaccgacgctgaat

SEQ ID NO: 5859207 - DNA, 25 bp, Homo sapien
taaatttacacttcgcgcgtatagc

SEQ ID NO: 5859208 - DNA, 25 bp, Homo sapien
atagaccgataggactacgatctaa

SEQ ID NO: 5859209 - DNA, 25 bp, Homo sapien
aatcggatacgatagcgtgtagtaa

SEQ ID NO: 5859210 - DNA, 25 bp, Homo sapien
gaacgttacgacgtatcgtaaaatg

SEQ ID NO: 5859211 - DNA, 25 bp, Homo sapien
aaaagtctagtaattcgcgtggatc

SEQ ID NO: 5859212 - DNA, 25 bp, Homo sapien
gacttagatacgactcgttcgtaaa

SEQ ID NO: 5859213 - DNA, 25 bp, Homo sapien
ttctcagttcgcgagattaaatgtc

SEQ ID NO: 5859214 - DNA, 25 bp, Homo sapien
aacactttagtccgcgactaaaatg

SEQ ID NO: 5859215 - DNA, 25 bp, Homo sapien
taaaattcgatacgcgtaggtgtct

SEQ ID NO: 5859216 - DNA, 25 bp, Homo sapien
cgaacatcgcgttagtcatatatgt

SEQ ID NO: 5859217 - DNA, 25 bp, Homo sapien
atcctacgatcgtactagtcttgtt

SEQ ID NO: 5859218 - DNA, 25 bp, Homo sapien
tgtatgttagttactcgcggttttc

SEQ ID NO: 5859219 - DNA, 25 bp, Homo sapien
atagtctgtcgatcgtagatagact

SEQ ID NO: 5859220 - DNA, 25 bp, Homo sapien
atgctacgtacgtcgtatctcttat

SEQ ID NO: 5859221 - DNA, 25 bp, Homo sapien
taactgtcgatcgcggttaaatcaa

SEQ ID NO: 5859222 - DNA, 25 bp, Homo sapien
gcatcatatcgcgtcatactttctt

SEQ ID NO: 5859223 - DNA, 25 bp, Homo sapien
atacttatcgtgtagcgaggttgta

SEQ ID NO: 5859224 - DNA, 25 bp, Homo sapien
ctaatacgctatgcgttaaaggcta

SEQ ID NO: 5859225 - DNA, 25 bp, Homo sapien
aattgagttaatcggtcggaagttg

SEQ ID NO: 5859226 - DNA, 25 bp, Homo sapien
aaaagcttcgcgttactagaactgt

SEQ ID NO: 5859227 - DNA, 25 bp, Homo sapien
gaataatcgaacgagacgtagaatc

SEQ ID NO: 5859228 - DNA, 25 bp, Homo sapien
tagattttacttcgcgcgttgacat

SEQ ID NO: 5859229 - DNA, 25 bp, Homo sapien
aaaagtcgttaaacgggatgcgata

SEQ ID NO: 5859230 - DNA, 25 bp, Homo sapien
catttgcgcggcatattattattcg

SEQ ID NO: 5859231 - DNA, 25 bp, Homo sapien
aacttcattcgctacggactatatc

SEQ ID NO: 5859232 - DNA, 25 bp, Homo sapien
atcacgcgttgatacgcgaattaat

SEQ ID NO: 5859233 - DNA, 25 bp, Homo sapien
atgcaaatcgtcccgattatttcac

SEQ ID NO: 5859234 - DNA, 25 bp, Homo sapien
ctagttactagcgtaacgatcaaca

SEQ ID NO: 5859235 - DNA, 25 bp, Homo sapien
tagctatatgcgtacgacggaatat

SEQ ID NO: 5859236 - DNA, 25 bp, Homo sapien
cagaaaacgcgattaatagtactgc

SEQ ID NO: 5859237 - DNA, 25 bp, Homo sapien
cgttaatatcctatcgcgcaatcaa

SEQ ID NO: 5859238 - DNA, 25 bp, Homo sapien
taaggcatcttgcgtcgtatttaag

SEQ ID NO: 5859239 - DNA, 25 bp, Homo sapien
attgattagtttacgcgagcagtgt

SEQ ID NO: 5859240 - DNA, 25 bp, Homo sapien
ttatttttacgtaccgcgatgcaga

SEQ ID NO: 5859241 - DNA, 25 bp, Homo sapien
ttcagtcttcgcgagactagaaaaa

SEQ ID NO: 5859242 - DNA, 25 bp, Homo sapien
tagattagtcattacgcggacttct

SEQ ID NO: 5859243 - DNA, 25 bp, Homo sapien
gcaaacgcacgcgatataagaaaaa

SEQ ID NO: 5859244 - DNA, 25 bp, Homo sapien
tagtttgtcgattaagccgtgtgaa

SEQ ID NO: 5859245 - DNA, 25 bp, Homo sapien
ttcggaatactaccgcgaaatcatt

SEQ ID NO: 5859246 - DNA, 25 bp, Homo sapien
taaacatgcgcgtcgtttaaacagt

SEQ ID NO: 5859247 - DNA, 25 bp, Homo sapien
gagtactgtaacgtcgatcttagtt

SEQ ID NO: 5859248 - DNA, 25 bp, Homo sapien
gtatacgtacgcgagatagaaactt

SEQ ID NO: 5859249 - DNA, 25 bp, Homo sapien
ctattggtattacgcggtcaaacat

SEQ ID NO: 5859250 - DNA, 25 bp, Homo sapien
tcagatttggattaacgcgttgcta

SEQ ID NO: 5859251 - DNA, 25 bp, Homo sapien
atttttgacttacgtccgcgtaatg

SEQ ID NO: 5859252 - DNA, 25 bp, Homo sapien
gatctggttaacgcgagcataataa

SEQ ID NO: 5859253 - DNA, 25 bp, Homo sapien
taaagctaagtattacgcgtcaagc

SEQ ID NO: 5859254 - DNA, 25 bp, Homo sapien
gtactagcgcgactatatgaatctt

SEQ ID NO: 5859255 - DNA, 25 bp, Homo sapien
tttgactcataacgcgacttcgaaa

SEQ ID NO: 5859256 - DNA, 25 bp, Homo sapien
tgctatttatacggtacgccaacaa

SEQ ID NO: 5859257 - DNA, 25 bp, Homo sapien
aaaccgaatgcgcgataggaaaaat

SEQ ID NO: 5859258 - DNA, 25 bp, Homo sapien
taattctagacgcgagtaatgtgga

SEQ ID NO: 5859259 - DNA, 25 bp, Homo sapien
tgacagatatactagcgcgtgtatt

SEQ ID NO: 5859260 - DNA, 25 bp, Homo sapien
ttgaagtcgaagcgtatactgtgaa

SEQ ID NO: 5859261 - DNA, 25 bp, Homo sapien
gacatttacgtacagtcgactaatc

SEQ ID NO: 5859262 - DNA, 25 bp, Homo sapien
tcagtctcgcgctaataagacattt

SEQ ID NO: 5859263 - DNA, 25 bp, Homo sapien
aagtcatagcgaacgatagtgtcaa

SEQ ID NO: 5859264 - DNA, 25 bp, Homo sapien
tgaacaacgatagcgcgtatataag

SEQ ID NO: 5859265 - DNA, 25 bp, Homo sapien
tagatctcgcgcataaggtaattca

SEQ ID NO: 5859266 - DNA, 25 bp, Homo sapien
tatcataccgcgcgtaatagttgtt

SEQ ID NO: 5859267 - DNA, 25 bp, Homo sapien
aactaatacgccgatattagctacc

SEQ ID NO: 5859268 - DNA, 25 bp, Homo sapien
cagcaacgcgctaatattggaatta

SEQ ID NO: 5859269 - DNA, 25 bp, Homo sapien
ggacaatagttatcgcggttttcaa

SEQ ID NO: 5859270 - DNA, 25 bp, Homo sapien
cggaaatacttcgcgtcaagtaaat

SEQ ID NO: 5859271 - DNA, 25 bp, Homo sapien
tttgtattcgctcgagttagaagga

SEQ ID NO: 5859272 - DNA, 25 bp, Homo sapien
tattattgtcgcgactaagggtaca

SEQ ID NO: 5859273 - DNA, 25 bp, Homo sapien
ctttatagacgcgtaacgtatgtag

SEQ ID NO: 5859274 - DNA, 25 bp, Homo sapien
tcaacagcgcgacgaaataattagt

SEQ ID NO: 5859275 - DNA, 25 bp, Homo sapien
aaatgtactctaacggtcggtaaca

SEQ ID NO: 5859276 - DNA, 25 bp, Homo sapien
ttcaagtagttaccgacggatcatt

SEQ ID NO: 5859277 - DNA, 25 bp, Homo sapien
aacttccgtatcaacgaccatactt

SEQ ID NO: 5859278 - DNA, 25 bp, Homo sapien
atttcaagattaccgcgctgatgat

SEQ ID NO: 5859279 - DNA, 25 bp, Homo sapien
gatacttcgtacgcgtctaatacat

SEQ ID NO: 5859280 - DNA, 25 bp, Homo sapien
atatcatatacgcggtcgattaggt

SEQ ID NO: 5859281 - DNA, 25 bp, Homo sapien
cctcactcgatccgacatataatat

SEQ ID NO: 5859282 - DNA, 25 bp, Homo sapien
aggtagggtattacgcgaaattaga

SEQ ID NO: 5859283 - DNA, 25 bp, Homo sapien
ttctattatacgtcgctagagttgg

SEQ ID NO: 5859284 - DNA, 25 bp, Homo sapien
acttgttataacgctccgaatttgg

SEQ ID NO: 5859285 - DNA, 25 bp, Homo sapien
ttaaatagcgtcggttacgatcaag

SEQ ID NO: 5859286 - DNA, 25 bp, Homo sapien
acatctctattacgcgctagtatgt

SEQ ID NO: 5859287 - DNA, 25 bp, Homo sapien
taccttctgtcgcggattaagtaat

SEQ ID NO: 5859288 - DNA, 25 bp, Homo sapien
taaacatatcgacgcctagagttca

SEQ ID NO: 5859289 - DNA, 25 bp, Homo sapien
gaataacgcgaccttactatgtgaa

SEQ ID NO: 5859290 - DNA, 25 bp, Homo sapien
ttgcttgtatccggacgtaatactt

SEQ ID NO: 5859291 - DNA, 25 bp, Homo sapien
cattcaaactatcgcgtacttctga

SEQ ID NO: 5859292 - DNA, 25 bp, Homo sapien
aacagaacacttcgcgtaggttaat

SEQ ID NO: 5859293 - DNA, 25 bp, Homo sapien
tcaccttaccgtagcgaattatagt

SEQ ID NO: 5859294 - DNA, 25 bp, Homo sapien
gattcttatcgactagcgatactag

SEQ ID NO: 5859295 - DNA, 25 bp, Homo sapien
atacagcgctcgacgaataaaatga

SEQ ID NO: 5859296 - DNA, 25 bp, Homo sapien
taaacaatgatacttcgcgaccgat

SEQ ID NO: 5859297 - DNA, 25 bp, Homo sapien
gagaatcgcacgaactttaaggatt

SEQ ID NO: 5859298 - DNA, 25 bp, Homo sapien
caattaaattgcgtcgctactccat

SEQ ID NO: 5859299 - DNA, 25 bp, Homo sapien
cataagcgagctacaacgtctttaa

SEQ ID NO: 5859300 - DNA, 25 bp, Homo sapien
tttgtgctagttcggacgacatttt

SEQ ID NO: 5859301 - DNA, 25 bp, Homo sapien
aaatactaggtcgcgcaaatcgaat

SEQ ID NO: 5859302 - DNA, 25 bp, Homo sapien
atatacacgacgcgttaattatccg

SEQ ID NO: 5859303 - DNA, 25 bp, Homo sapien
aatagtcgcgtatatacgatctgac

SEQ ID NO: 5859304 - DNA, 25 bp, Homo sapien
gaatcgtcctatatacgcggataat

SEQ ID NO: 5859305 - DNA, 25 bp, Homo sapien
tcagaagtacgcgatagtttgaatg

SEQ ID NO: 5859306 - DNA, 25 bp, Homo sapien
gtcatgtatacggcgactaagaata

SEQ ID NO: 5859307 - DNA, 25 bp, Homo sapien
aatatgctatagcgttacgtgctgt

SEQ ID NO: 5859308 - DNA, 25 bp, Homo sapien
tatactatatacgcgcgcttgttag

SEQ ID NO: 5859309 - DNA, 25 bp, Homo sapien
ccaactctagcgacgtataatagaa

SEQ ID NO: 5859310 - DNA, 25 bp, Homo sapien
ttagatcgtagtcctatcggtctat

SEQ ID NO: 5859311 - DNA, 25 bp, Homo sapien
gttattgggtacgatcgtatgatga

SEQ ID NO: 5859312 - DNA, 25 bp, Homo sapien
ctaatttgcgcgatagttgctatag

SEQ ID NO: 5859313 - DNA, 25 bp, Homo sapien
aagtatggtcgttgatacggaagtt

SEQ ID NO: 5859314 - DNA, 25 bp, Homo sapien
tctgcatcgcggtacgtaaaaataa

SEQ ID NO: 5859315 - DNA, 25 bp, Homo sapien
aaagaaatatcgacgcgctcatatc

SEQ ID NO: 5859316 - DNA, 25 bp, Homo sapien
gagtaattgacgcgttagatagtac

SEQ ID NO: 5859317 - DNA, 25 bp, Homo sapien
gttgcacgtagtacgacaataattc

SEQ ID NO: 5859318 - DNA, 25 bp, Homo sapien
taaccaaggccgcgtcataaattaa

SEQ ID NO: 5859319 - DNA, 25 bp, Homo sapien
aatgatccgtcggtaactacttgaa

SEQ ID NO: 5859320 - DNA, 25 bp, Homo sapien
actgatgtatgctttcgcgttcaat

SEQ ID NO: 5859321 - DNA, 25 bp, Homo sapien
ctataaccgtcgttatacgtattcg

SEQ ID NO: 5859322 - DNA, 25 bp, Homo sapien
ttccaactacgtcgatagtatgtca

SEQ ID NO: 5859323 - DNA, 25 bp, Homo sapien
ttatctcttgtcgacgctacttcta

SEQ ID NO: 5859324 - DNA, 25 bp, Homo sapien
tatttgatagccgtacggttagcat

SEQ ID NO: 5859325 - DNA, 25 bp, Homo sapien
tcctgacggtagtatacgatttgta

SEQ ID NO: 5859326 - DNA, 25 bp, Homo sapien
agagaacggcgtaatgtacaaaagt

SEQ ID NO: 5859327 - DNA, 25 bp, Homo sapien
gtctgacgaaccgtatagaatttga

SEQ ID NO: 5859328 - DNA, 25 bp, Homo sapien
atttcagccgattacgcgaaattga

SEQ ID NO: 5859329 - DNA, 25 bp, Homo sapien
cattaatcccgccgttagttttaga

SEQ ID NO: 5859330 - DNA, 25 bp, Homo sapien
taatactcggcgatacaaccaaatg

SEQ ID NO: 5859331 - DNA, 25 bp, Homo sapien
caagaataggtcgcgaacactataa

SEQ ID NO: 5859332 - DNA, 25 bp, Homo sapien
tatgtgtcgcgaccgtataaaaatg

SEQ ID NO: 5859333 - DNA, 25 bp, Homo sapien
taaacacgagacgcgatatagtcaa

SEQ ID NO: 5859334 - DNA, 25 bp, Homo sapien
ctataccggagttatatcgcgaaat

SEQ ID NO: 5859335 - DNA, 25 bp, Homo sapien
aatcagcggacgtacattaacttct

SEQ ID NO: 5859336 - DNA, 25 bp, Homo sapien
aattacacctacgcgtgttgcaatt

SEQ ID NO: 5859337 - DNA, 25 bp, Homo sapien
atgctaatcgctcttagcgaaaaca

SEQ ID NO: 5859338 - DNA, 25 bp, Homo sapien
acttcaccgtatcgagatagtctaa

SEQ ID NO: 5859339 - DNA, 25 bp, Homo sapien
acgtggacgcgattaatagttaatc

SEQ ID NO: 5859340 - DNA, 25 bp, Homo sapien
attctatatcgcgcccatacatgta

SEQ ID NO: 5859341 - DNA, 25 bp, Homo sapien
ttgttaattgtccgcgagtatatcg

SEQ ID NO: 5859342 - DNA, 25 bp, Homo sapien
gcttgacgcgtaatacttagcttta

SEQ ID NO: 5859343 - DNA, 25 bp, Homo sapien
gacatttaatctcgcgaactgagaa

SEQ ID NO: 5859344 - DNA, 25 bp, Homo sapien
gatcaaatacgagcgggtttagttt

SEQ ID NO: 5859345 - DNA, 25 bp, Homo sapien
aactaagatcgacgttacagtactc

SEQ ID NO: 5859346 - DNA, 25 bp, Homo sapien
cgtttactacgtagtacgataggaa

SEQ ID NO: 5859347 - DNA, 25 bp, Homo sapien
cgataacgctcgtatactctatagt

SEQ ID NO: 5859348 - DNA, 25 bp, Homo sapien
ttatctacgcgaattcgctggattt

SEQ ID NO: 5859349 - DNA, 25 bp, Homo sapien
ttaacatagcgcgtaaggtagtcaa

SEQ ID NO: 5859350 - DNA, 25 bp, Homo sapien
tgtttcacgtccgttagtactcttt

SEQ ID NO: 5859351 - DNA, 25 bp, Homo sapien
cgaatacgatactagacgtgacata

SEQ ID NO: 5859352 - DNA, 25 bp, Homo sapien
gactagcgatactagatcgtagaaa

SEQ ID NO: 5859353 - DNA, 25 bp, Homo sapien
taatattatcacgcgactagtcacc

SEQ ID NO: 5859354 - DNA, 25 bp, Homo sapien
aacaagactagtacgatcgtaggat

SEQ ID NO: 5859355 - DNA, 25 bp, Homo sapien
ttgacactatcgttcgctatgactt

SEQ ID NO: 5859356 - DNA, 25 bp, Homo sapien
agatgcagactaatacgcgaataac

SEQ ID NO: 5859357 - DNA, 25 bp, Homo sapien
taatatctcgcgattagacagccaa

SEQ ID NO: 5859358 - DNA, 25 bp, Homo sapien
tttcttcgcatacgagttacaacca

SEQ ID NO: 5859359 - DNA, 25 bp, Homo sapien
ttactacacgctatcgtatccgatt

SEQ ID NO: 5859360 - DNA, 25 bp, Homo sapien
gtttctcgtctagcgttatacatag

SEQ ID NO: 5859361 - DNA, 25 bp, Homo sapien
ttgatttaaccgcgatcgacagtta

SEQ ID NO: 5859362 - DNA, 25 bp, Homo sapien
cgggtagttaatgtacgcgttatat

SEQ ID NO: 5859363 - DNA, 25 bp, Homo sapien
actaattatttcgtcgcgctgttga

SEQ ID NO: 5859364 - DNA, 25 bp, Homo sapien
agtttccgttacgcgattacgatat

SEQ ID NO: 5859365 - DNA, 25 bp, Homo sapien
tgttgatcgttacgctagtaactag

SEQ ID NO: 5859366 - DNA, 25 bp, Homo sapien
gaagttactcgatcgtctatgaaag

SEQ ID NO: 5859367 - DNA, 25 bp, Homo sapien
acatgacgtcgaactaagtagtagt

SEQ ID NO: 5859368 - DNA, 25 bp, Homo sapien
tggtgttctatacgcgagtataaca

SEQ ID NO: 5859369 - DNA, 25 bp, Homo sapien
ttctaacgaacctataccgtgtaac

SEQ ID NO: 5859370 - DNA, 25 bp, Homo sapien
attaattcgcgtatcaacgcgtgat

SEQ ID NO: 5859371 - DNA, 25 bp, Homo sapien
ataagagatacgacgtacgtagcat

SEQ ID NO: 5859372 - DNA, 25 bp, Homo sapien
attgttagtctcgcgcataagtcat

SEQ ID NO: 5859373 - DNA, 25 bp, Homo sapien
ttccctcggcataagatcgtaaatt

SEQ ID NO: 5859374 - DNA, 25 bp, Homo sapien
acttattagtgtcgttacgaaagcc

SEQ ID NO: 5859375 - DNA, 25 bp, Homo sapien
acctatccgctataacgataggatt

SEQ ID NO: 5859376 - DNA, 25 bp, Homo sapien
gactaaatacgcgataacttagggt

SEQ ID NO: 5859377 - DNA, 25 bp, Homo sapien
gttttttcgcgtcttacgataacac

SEQ ID NO: 5859378 - DNA, 25 bp, Homo sapien
taacaatcgacgttacgtcttactg

SEQ ID NO: 5859379 - DNA, 25 bp, Homo sapien
aagattcatatagtcgcgctagtac

SEQ ID NO: 5859380 - DNA, 25 bp, Homo sapien
tgccttcggtcgtatgatactatat

SEQ ID NO: 5859381 - DNA, 25 bp, Homo sapien
ctttcactatgatacgcgtggatat

SEQ ID NO: 5859382 - DNA, 25 bp, Homo sapien
tcatcgtcgcgtacgtaatctatat

SEQ ID NO: 5859383 - DNA, 25 bp, Homo sapien
attaagttgtcgatacgcacaccat

SEQ ID NO: 5859384 - DNA, 25 bp, Homo sapien
ccattataacggcgcaatacagaat

SEQ ID NO: 5859385 - DNA, 25 bp, Homo sapien
agtgcgataagtacgcgtctaaatt

SEQ ID NO: 5859386 - DNA, 25 bp, Homo sapien
gattagtcgactgtacgtaaatgtc

SEQ ID NO: 5859387 - DNA, 25 bp, Homo sapien
taaataaatacgatcgacggtccag

SEQ ID NO: 5859388 - DNA, 25 bp, Homo sapien
ttgattgcgcgataggatattaacg

SEQ ID NO: 5859389 - DNA, 25 bp, Homo sapien
cttaaatacgacgcaagatgcctta

SEQ ID NO: 5859390 - DNA, 25 bp, Homo sapien
gttgccagtcgacatacgaatttaa

SEQ ID NO: 5859391 - DNA, 25 bp, Homo sapien
tgaattaccttatgcgcgagatcta

SEQ ID NO: 5859392 - DNA, 25 bp, Homo sapien
gtattctatacgatcgcgtatctag

SEQ ID NO: 5859393 - DNA, 25 bp, Homo sapien
agtttgcgttcggatctaagtaagt

SEQ ID NO: 5859394 - DNA, 25 bp, Homo sapien
atgtttgaccgcgtaataccaatag

SEQ ID NO: 5859395 - DNA, 25 bp, Homo sapien
aaacgataacgtcgtacgctagaat

SEQ ID NO: 5859396 - DNA, 25 bp, Homo sapien
acataaggtattaacgtcgatcctc

SEQ ID NO: 5859397 - DNA, 25 bp, Homo sapien
cattacgcggacgtaagtcaaaaat

SEQ ID NO: 5859398 - DNA, 25 bp, Homo sapien
aacaactattacgcgcggtatgata

SEQ ID NO: 5859399 - DNA, 25 bp, Homo sapien
gatgaacgtagttagacgcattctt

SEQ ID NO: 5859400 - DNA, 25 bp, Homo sapien
gcatatactcgactaacgttaaagc

SEQ ID NO: 5859401 - DNA, 25 bp, Homo sapien
tcaatccgacgcgtaattaactttc

SEQ ID NO: 5859402 - DNA, 25 bp, Homo sapien
ttagtctcgcgcgaatataattgca

SEQ ID NO: 5859403 - DNA, 25 bp, Homo sapien
ttatcctaatagcggatcggtaagt

SEQ ID NO: 5859404 - DNA, 25 bp, Homo sapien
atatgaaatagtcgacgcgctaaca

SEQ ID NO: 5859405 - DNA, 25 bp, Homo sapien
tgtagtctaacgcgtgatatcatac

SEQ ID NO: 5859406 - DNA, 25 bp, Homo sapien
tatgatcgacgcctactaaagtctt

SEQ ID NO: 5859407 - DNA, 25 bp, Homo sapien
tacattcgataacgcgaattgagtg

SEQ ID NO: 5859408 - DNA, 25 bp, Homo sapien
gatactgttagtatcgcgtcgaata

SEQ ID NO: 5859409 - DNA, 25 bp, Homo sapien
cattttacgatacgtcgtaacgttc

SEQ ID NO: 5859410 - DNA, 25 bp, Homo sapien
aatgatttcgcggtagtattccgaa

SEQ ID NO: 5859411 - DNA, 25 bp, Homo sapien
acaatttagtatacgcgcaagatgg

SEQ ID NO: 5859412 - DNA, 25 bp, Homo sapien
ttcacacggcttaatcgacaaacta

SEQ ID NO: 5859413 - DNA, 25 bp, Homo sapien
tgtatttgactatacgacgaccaag

SEQ ID NO: 5859414 - DNA, 25 bp, Homo sapien
tttgaagcgtacgaacctaaagcta

SEQ ID NO: 5859415 - DNA, 25 bp, Homo sapien
atcgtagcgtacgacaattcagata

SEQ ID NO: 5859416 - DNA, 25 bp, Homo sapien
acatttcttatacgtcgcgagatag

SEQ ID NO: 5859417 - DNA, 25 bp, Homo sapien
tagataatagtgcgttacgttgcca

SEQ ID NO: 5859418 - DNA, 25 bp, Homo sapien
aaattgcaacctaatcgcgtttgct

SEQ ID NO: 5859419 - DNA, 25 bp, Homo sapien
gatttgcggttgtaatacgtcatgt

SEQ ID NO: 5859420 - DNA, 25 bp, Homo sapien
ttttcacttacttcgcgactacctt

SEQ ID NO: 5859421 - DNA, 25 bp, Homo sapien
ccaatttacgtcgcgtaaggtaata

SEQ ID NO: 5859422 - DNA, 25 bp, Homo sapien
agtctatctacgatcgacagactat

SEQ ID NO: 5859423 - DNA, 25 bp, Homo sapien
acatactagcgcgtaatagagatgt

SEQ ID NO: 5859424 - DNA, 25 bp, Homo sapien
taattcgcgtagatcggttaaagac

SEQ ID NO: 5859425 - DNA, 25 bp, Homo sapien
tcataaccttagcgcgatataaagc

SEQ ID NO: 5859426 - DNA, 25 bp, Homo sapien
tggcagttactcgcggatatttaat

SEQ ID NO: 5859427 - DNA, 25 bp, Homo sapien
cacattgttacaatcgcgtgatttg

SEQ ID NO: 5859428 - DNA, 25 bp, Homo sapien
catgaacgcgtcgtataatagttct

SEQ ID NO: 5859429 - DNA, 25 bp, Homo sapien
attataatagtagcggaccagtagg

SEQ ID NO: 5859430 - DNA, 25 bp, Homo sapien
gacaaacgacctataaacgtctaac

SEQ ID NO: 5859431 - DNA, 25 bp, Homo sapien
aattttcgcgatgatagtcgctaag

SEQ ID NO: 5859432 - DNA, 25 bp, Homo sapien
ttttcagcgacgtagttagcctatt

SEQ ID NO: 5859433 - DNA, 25 bp, Homo sapien
tgtacaacgaacgttacgctatttg

SEQ ID NO: 5859434 - DNA, 25 bp, Homo sapien
ttattctaaccgcgtcgtcatcaaa

SEQ ID NO: 5859435 - DNA, 25 bp, Homo sapien
ttctcttcgacgcctattatgtaga

SEQ ID NO: 5859436 - DNA, 25 bp, Homo sapien
cattttagtcgcggactaaagtgtt

SEQ ID NO: 5859437 - DNA, 25 bp, Homo sapien
cctgatttatacgtcgagcgaatta

SEQ ID NO: 5859438 - DNA, 25 bp, Homo sapien
aatacacgcgctagtatatctgtca

SEQ ID NO: 5859439 - DNA, 25 bp, Homo sapien
gaatcaatcgtattcggtcaatctc

SEQ ID NO: 5859440 - DNA, 25 bp, Homo sapien
ttcttagcttaatcgtgcgtgcaat

SEQ ID NO: 5859441 - DNA, 25 bp, Homo sapien
cattctcgcgacctaatatgtatga

SEQ ID NO: 5859442 - DNA, 25 bp, Homo sapien
gctatgtacgcggtactatagataa

SEQ ID NO: 5859443 - DNA, 25 bp, Homo sapien
gtaaataacgtcgaaaccgctacaa

SEQ ID NO: 5859444 - DNA, 25 bp, Homo sapien
tcaaattcgtcacgacgtaacgata

SEQ ID NO: 5859445 - DNA, 25 bp, Homo sapien
tccacattactcgcgtctagaatta

SEQ ID NO: 5859446 - DNA, 25 bp, Homo sapien
ccaaattcggagcgttataacaagt

SEQ ID NO: 5859447 - DNA, 25 bp, Homo sapien
aaattgctattacgcgctactgatc

SEQ ID NO: 5859448 - DNA, 25 bp, Homo sapien
tatcttcgtaacgctatagcacgaa

SEQ ID NO: 5859449 - DNA, 25 bp, Homo sapien
agtatgcgttactagcgtaaggtaa

SEQ ID NO: 5859450 - DNA, 25 bp, Homo sapien
ttatagactatgcgtcgactaccta

SEQ ID NO: 5859451 - DNA, 25 bp, Homo sapien
aataactagtaatcgcgtcaaaggg

SEQ ID NO: 5859452 - DNA, 25 bp, Homo sapien
gcttcacgacgaatatgtcatttct

SEQ ID NO: 5859453 - DNA, 25 bp, Homo sapien
atgcatcgcgatacataaggatatg

SEQ ID NO: 5859454 - DNA, 25 bp, Homo sapien
gattaattacgtcgcgatagagaga

SEQ ID NO: 5859455 - DNA, 25 bp, Homo sapien
tatagccgatcgggtaatcaatgtt

SEQ ID NO: 5859456 - DNA, 25 bp, Homo sapien
aggttatatgcgtacgaccttaagt

SEQ ID NO: 5859457 - DNA, 25 bp, Homo sapien
tttgcttatcgaccgtagtgaattg

SEQ ID NO: 5859458 - DNA, 25 bp, Homo sapien
taattccaatattagcgcgttgctg

SEQ ID NO: 5859459 - DNA, 25 bp, Homo sapien
tactcatacggtcgaccttcataaa

SEQ ID NO: 5859460 - DNA, 25 bp, Homo sapien
agatagacgtagcgctctagatata

SEQ ID NO: 5859461 - DNA, 25 bp, Homo sapien
atattatatgtcggatcgagtgagg

SEQ ID NO: 5859462 - DNA, 25 bp, Homo sapien
actatgaacacgctcgatatttgtg

SEQ ID NO: 5859463 - DNA, 25 bp, Homo sapien
tgtttacgacgcgaataacgttatg

SEQ ID NO: 5859464 - DNA, 25 bp, Homo sapien
tagatctatgcgcgagactatatac

SEQ ID NO: 5859465 - DNA, 25 bp, Homo sapien
catcttgtatagcgcgttaaatcgt

SEQ ID NO: 5859466 - DNA, 25 bp, Homo sapien
tagagacgattgtacgtaccatctt

SEQ ID NO: 5859467 - DNA, 25 bp, Homo sapien
ttagtatacgccgattagatagtcc

SEQ ID NO: 5859468 - DNA, 25 bp, Homo sapien
ttctcgtagcgtagttcgtatttca

SEQ ID NO: 5859469 - DNA, 25 bp, Homo sapien
ataactgctattgtacgcgataacg

SEQ ID NO: 5859470 - DNA, 25 bp, Homo sapien
ctttctaatctcgcgctaggtttaa

SEQ ID NO: 5859471 - DNA, 25 bp, Homo sapien
aactcttattagtcgcggtaaagga

SEQ ID NO: 5859472 - DNA, 25 bp, Homo sapien
gatcatctattcgcgagacatatac

SEQ ID NO: 5859473 - DNA, 25 bp, Homo sapien
tcacccgtacgaacgtaaattgatt

SEQ ID NO: 5859474 - DNA, 25 bp, Homo sapien
acaatacggacgtatgaactacttg

SEQ ID NO: 5859475 - DNA, 25 bp, Homo sapien
gtaaagtgcgtccgatagatatgta

SEQ ID NO: 5859476 - DNA, 25 bp, Homo sapien
tatgttgtagtacgccctactattc

SEQ ID NO: 5859477 - DNA, 25 bp, Homo sapien
tagcctttaacgcatagcgtattag

SEQ ID NO: 5859478 - DNA, 25 bp, Homo sapien
gattgaaggtcaatcgcgagtaaat

SEQ ID NO: 5859479 - DNA, 25 bp, Homo sapien
aactgttatcgttcggaggttacta

SEQ ID NO: 5859480 - DNA, 25 bp, Homo sapien
cattttcgcaacgcgtatactcaaa

SEQ ID NO: 5859481 - DNA, 25 bp, Homo sapien
tgattcttgatcgtacgagaggaat

SEQ ID NO: 5859482 - DNA, 25 bp, Homo sapien
gattacttcaatcatcgcgcttgta

SEQ ID NO: 5859483 - DNA, 25 bp, Homo sapien
tgatgttgttacgttcgacatgttg

SEQ ID NO: 5859484 - DNA, 25 bp, Homo sapien
ataccatatcggtcgtaacaacctt

SEQ ID NO: 5859485 - DNA, 25 bp, Homo sapien
caacttccgaccgattaactcaatt

SEQ ID NO: 5859486 - DNA, 25 bp, Homo sapien
tagtctttgtcgtactacggtaaag

SEQ ID NO: 5859487 - DNA, 25 bp, Homo sapien
ggtaaaatacgcgaagttcaaagga

SEQ ID NO: 5859488 - DNA, 25 bp, Homo sapien
caaattcgttacgtcaatgagtacg

SEQ ID NO: 5859489 - DNA, 25 bp, Homo sapien
taatacgtaacgatcgacatacgga

SEQ ID NO: 5859490 - DNA, 25 bp, Homo sapien
ttcgtatcggctcgacatatgattt

SEQ ID NO: 5859491 - DNA, 25 bp, Homo sapien
ggctatagtatactcgcgattgatt

SEQ ID NO: 5859492 - DNA, 25 bp, Homo sapien
aatattctcgcaataagcgacgcaa

SEQ ID NO: 5859493 - DNA, 25 bp, Homo sapien
ttttaatcgctatacgagagatccc

SEQ ID NO: 5859494 - DNA, 25 bp, Homo sapien
atataatcggttatagcgacactcc

SEQ ID NO: 5859495 - DNA, 25 bp, Homo sapien
aattcttctcgcgaacgtaggatta

SEQ ID NO: 5859496 - DNA, 25 bp, Homo sapien
tcctttcgcggaacattacataaga

SEQ ID NO: 5859497 - DNA, 25 bp, Homo sapien
gttagtcgtatattcgacctagact

SEQ ID NO: 5859498 - DNA, 25 bp, Homo sapien
aaatgtcttattagcgcgagactga

SEQ ID NO: 5859499 - DNA, 25 bp, Homo sapien
cattgactagcgcgattagatagat

SEQ ID NO: 5859500 - DNA, 25 bp, Homo sapien
caagtcttccgatacgctaaattgt

SEQ ID NO: 5859501 - DNA, 25 bp, Homo sapien
ttccttcgcgtactaaagacttact

SEQ ID NO: 5859502 - DNA, 25 bp, Homo sapien
attactgctatcgtagcgttcaatg

SEQ ID NO: 5859503 - DNA, 25 bp, Homo sapien
tctttgacgcgtagcgaataaaatc

SEQ ID NO: 5859504 - DNA, 25 bp, Homo sapien
atatgggacgcgataatactctaga

SEQ ID NO: 5859505 - DNA, 25 bp, Homo sapien
atgtcgatgcgattgacgcaaatta

SEQ ID NO: 5859506 - DNA, 25 bp, Homo sapien
catctcacgctagtgcgaaaataaa

SEQ ID NO: 5859507 - DNA, 25 bp, Homo sapien
attgacgaccgcgattgtattgaaa

SEQ ID NO: 5859508 - DNA, 25 bp, Homo sapien
atgacatcgatcgaacctagagtta

SEQ ID NO: 5859509 - DNA, 25 bp, Homo sapien
ctatcatagtacgccgatatctagt

SEQ ID NO: 5859510 - DNA, 25 bp, Homo sapien
cttgctcgcgatcatactattcatt

SEQ ID NO: 5859511 - DNA, 25 bp, Homo sapien
ttaagtaggttcgcgtaatcacatc

SEQ ID NO: 5859512 - DNA, 25 bp, Homo sapien
gctttttacgaattaggcggtttga

SEQ ID NO: 5859513 - DNA, 25 bp, Homo sapien
aaatctcgatactaatccgtatccc

SEQ ID NO: 5859514 - DNA, 25 bp, Homo sapien
aatgcagatcgttatagcgagagaa

SEQ ID NO: 5859515 - DNA, 25 bp, Homo sapien
tactagattaggacgatcgcgatat

SEQ ID NO: 5859516 - DNA, 25 bp, Homo sapien
aagtattacgtccggatacaagcaa

SEQ ID NO: 5859517 - DNA, 25 bp, Homo sapien
aagtttctatctcgcgtacgtatac

SEQ ID NO: 5859518 - DNA, 25 bp, Homo sapien
tttttctagtctcgcgaagactgaa

SEQ ID NO: 5859519 - DNA, 25 bp, Homo sapien
gcgatacgatacgcgttaaaactat

SEQ ID NO: 5859520 - DNA, 25 bp, Homo sapien
tccttctaactcgagcgaatacaaa

SEQ ID NO: 5859521 - DNA, 25 bp, Homo sapien
cattttatatcgcacgacggataca

SEQ ID NO: 5859522 - DNA, 25 bp, Homo sapien
tcaatggacgtatatacgccttgat

SEQ ID NO: 5859523 - DNA, 25 bp, Homo sapien
tacattcgaaccgtagtcgatatgt

SEQ ID NO: 5859524 - DNA, 25 bp, Homo sapien
ttattatgctcgcgttaaccagatc

SEQ ID NO: 5859525 - DNA, 25 bp, Homo sapien
aatcgtttagcgcgatagtactaga

SEQ ID NO: 5859526 - DNA, 25 bp, Homo sapien
tcttaacgtacgcagtagtacaaga

SEQ ID NO: 5859527 - DNA, 25 bp, Homo sapien
cgatattatcgtttcgtcggataca

SEQ ID NO: 5859528 - DNA, 25 bp, Homo sapien
gatatagtccgtagcgaatgaagtt

SEQ ID NO: 5859529 - DNA, 25 bp, Homo sapien
ctcattcgactatacgcgcttttaa

SEQ ID NO: 5859530 - DNA, 25 bp, Homo sapien
tgacaatagtattcgcgacttgatg

SEQ ID NO: 5859531 - DNA, 25 bp, Homo sapien
aaccgaatagttcgcgaccaataaa

SEQ ID NO: 5859532 - DNA, 25 bp, Homo sapien
tgatcacgctcgttatacagttatg

SEQ ID NO: 5859533 - DNA, 25 bp, Homo sapien
ctatttgttgtaccgatcgccttta

SEQ ID NO: 5859534 - DNA, 25 bp, Homo sapien
tgtctcgtacgaagtatcgaaatac

SEQ ID NO: 5859535 - DNA, 25 bp, Homo sapien
atattccgtcgtacgcatatagcta

SEQ ID NO: 5859536 - DNA, 25 bp, Homo sapien
atcaagtagacgcgtaaagtgtatg

SEQ ID NO: 5859537 - DNA, 25 bp, Homo sapien
tcagagttacgcccgattaaaatca

SEQ ID NO: 5859538 - DNA, 25 bp, Homo sapien
acgattcgttatagtacgcgagtat

SEQ ID NO: 5859539 - DNA, 25 bp, Homo sapien
cttaaacaataaggtcgcgtatcga

SEQ ID NO: 5859540 - DNA, 25 bp, Homo sapien
agagttcgatctagtatcgtgcatt

SEQ ID NO: 5859541 - DNA, 25 bp, Homo sapien
aaccatatgttatcgggcgttcatt

SEQ ID NO: 5859542 - DNA, 25 bp, Homo sapien
cagttatcgtacaacatcgacttgt

SEQ ID NO: 5859543 - DNA, 25 bp, Homo sapien
tctgcttaacgtacgacgaatagta

SEQ ID NO: 5859544 - DNA, 25 bp, Homo sapien
gtgaaataatcgggacgatttgcat

SEQ ID NO: 5859545 - DNA, 25 bp, Homo sapien
gatattacgttcgcgatatcatcct

SEQ ID NO: 5859546 - DNA, 25 bp, Homo sapien
atgcctaacgcgtaactagtaaact

SEQ ID NO: 5859547 - DNA, 25 bp, Homo sapien
aaggtacgtagtacgtcgtatagat

SEQ ID NO: 5859548 - DNA, 25 bp, Homo sapien
ttcacatagtaaggtcgcgttattc

SEQ ID NO: 5859549 - DNA, 25 bp, Homo sapien
agttattactagcgcgattctgtga

SEQ ID NO: 5859550 - DNA, 25 bp, Homo sapien
tagcaccgcgattcgagtaatttta

SEQ ID NO: 5859551 - DNA, 25 bp, Homo sapien
gttagcgcacgacgaaagtatattt

SEQ ID NO: 5859552 - DNA, 25 bp, Homo sapien
tttcagtattacacgacgctgactt

SEQ ID NO: 5859553 - DNA, 25 bp, Homo sapien
gttgaacgtaatcgcgtacgatatt

SEQ ID NO: 5859554 - DNA, 25 bp, Homo sapien
ctaaaattcgcgctatacgtacatc

SEQ ID NO: 5859555 - DNA, 25 bp, Homo sapien
ttcatagttacgcgtacgagtaaga

SEQ ID NO: 5859556 - DNA, 25 bp, Homo sapien
tgtctaagcgcgattataccttgat

SEQ ID NO: 5859557 - DNA, 25 bp, Homo sapien
ttgaagacgtataacgcgaacatca

SEQ ID NO: 5859558 - DNA, 25 bp, Homo sapien
tctagaataccggatcgtaatacca

SEQ ID NO: 5859559 - DNA, 25 bp, Homo sapien
aagtaccagcgcccgttattaaata

SEQ ID NO: 5859560 - DNA, 25 bp, Homo sapien
tatgagccgatcgcctaaaatacaa

SEQ ID NO: 5859561 - DNA, 25 bp, Homo sapien
agcttatcgcgtatgattaatgcga

SEQ ID NO: 5859562 - DNA, 25 bp, Homo sapien
tacactgaacgacgtaccttttact

SEQ ID NO: 5859563 - DNA, 25 bp, Homo sapien
ttgtctgacgcgtactatagctttt

SEQ ID NO: 5859564 - DNA, 25 bp, Homo sapien
tcaatagcgcgatatagttccatag

SEQ ID NO: 5859565 - DNA, 25 bp, Homo sapien
ttatttctcgtatagtcgcctgcta

SEQ ID NO: 5859566 - DNA, 25 bp, Homo sapien
tttacgaacgagtcgtatctaagtc

SEQ ID NO: 5859567 - DNA, 25 bp, Homo sapien
gcatagtatacgttacgcgtgaaat

SEQ ID NO: 5859568 - DNA, 25 bp, Homo sapien
attacttccgacgtcgatatatagg

SEQ ID NO: 5859569 - DNA, 25 bp, Homo sapien
ttctatatgtcgcgcatagaacgta

SEQ ID NO: 5859570 - DNA, 25 bp, Homo sapien
acagaagattaacaccgcgaaatag

SEQ ID NO: 5859571 - DNA, 25 bp, Homo sapien
gaagatccgacgatataccaaatag

SEQ ID NO: 5859572 - DNA, 25 bp, Homo sapien
tgtgttcgcccgaatcatatcataa

SEQ ID NO: 5859573 - DNA, 25 bp, Homo sapien
caataggtacgctctagacgttata

SEQ ID NO: 5859574 - DNA, 25 bp, Homo sapien
gtactgcgcgatagttagaataatc

SEQ ID NO: 5859575 - DNA, 25 bp, Homo sapien
gattctacgtctcgttcgattattc

SEQ ID NO: 5859576 - DNA, 25 bp, Homo sapien
ttcacagtatacgcttcgacttcaa

SEQ ID NO: 5859577 - DNA, 25 bp, Homo sapien
tcattgcgtatgtcgctaattagag

SEQ ID NO: 5859578 - DNA, 25 bp, Homo sapien
cttatatccgataaccgacaagagt

SEQ ID NO: 5859579 - DNA, 25 bp, Homo sapien
ctacatacgttacgcgtctataaag

SEQ ID NO: 5859580 - DNA, 25 bp, Homo sapien
cttaatgacgtattatcggtgcttg

SEQ ID NO: 5859581 - DNA, 25 bp, Homo sapien
ttaaggcgccttatatcgtgcaaaa

SEQ ID NO: 5859582 - DNA, 25 bp, Homo sapien
tatgacgttatgcgacgtatgtgta

SEQ ID NO: 5859583 - DNA, 25 bp, Homo sapien
ttgtaatcgcggatatagactcact

SEQ ID NO: 5859584 - DNA, 25 bp, Homo sapien
aacatcatactcgcccgtaatatag

SEQ ID NO: 5859585 - DNA, 25 bp, Homo sapien
acagttctagtaacgcgaagctttt

SEQ ID NO: 5859586 - DNA, 25 bp, Homo sapien
gtcttctacgcgaacgacttaaata

SEQ ID NO: 5859587 - DNA, 25 bp, Homo sapien
ttaaacgtcgcgagagttatgagtt

SEQ ID NO: 5859588 - DNA, 25 bp, Homo sapien
caagtaagattagtcgcgaattcga

SEQ ID NO: 5859589 - DNA, 25 bp, Homo sapien
tatttcataccgtaacgcgtaaagc

SEQ ID NO: 5859590 - DNA, 25 bp, Homo sapien
ttcatatagtataccgcgacagctt

SEQ ID NO: 5859591 - DNA, 25 bp, Homo sapien
agctgccgtacctataacgatatta

SEQ ID NO: 5859592 - DNA, 25 bp, Homo sapien
gtcaaacgatagtgcgttagatatg

SEQ ID NO: 5859593 - DNA, 25 bp, Homo sapien
aggatctagtgcgacgtacatttta

SEQ ID NO: 5859594 - DNA, 25 bp, Homo sapien
tcgaattacgccgatactaatggta

SEQ ID NO: 5859595 - DNA, 25 bp, Homo sapien
agtaaacattgatcgtacgtcgaac

SEQ ID NO: 5859596 - DNA, 25 bp, Homo sapien
gaactataatatctcgacgaatggc

SEQ ID NO: 5859597 - DNA, 25 bp, Homo sapien
tgtacccttagtcgcgacaataata

SEQ ID NO: 5859598 - DNA, 25 bp, Homo sapien
gaaaacaacgcgttatagaagcaac

SEQ ID NO: 5859599 - DNA, 25 bp, Homo sapien
acatatatgactaacgcgatgttcg

SEQ ID NO: 5859600 - DNA, 25 bp, Homo sapien
tgtttttcgccgtaatacgtagtct

SEQ ID NO: 5859601 - DNA, 25 bp, Homo sapien
acaacatatacgtccgatccaaact

SEQ ID NO: 5859602 - DNA, 25 bp, Homo sapien
ttcagtgtaacgttcggtcgttatt

SEQ ID NO: 5859603 - DNA, 25 bp, Homo sapien
tatctcgcgtaaccttacggattta

SEQ ID NO: 5859604 - DNA, 25 bp, Homo sapien
tgtagcttcgcgagggatattttaa

SEQ ID NO: 5859605 - DNA, 25 bp, Homo sapien
caggaaacgattgatacgcgattta

SEQ ID NO: 5859606 - DNA, 25 bp, Homo sapien
ccaatagtaaacgtacgcgacttaa

SEQ ID NO: 5859607 - DNA, 25 bp, Homo sapien
acttaccgcatacgactaattctca

SEQ ID NO: 5859608 - DNA, 25 bp, Homo sapien
atgtattatcgacgaaacgacgcaa

SEQ ID NO: 5859609 - DNA, 25 bp, Homo sapien
aacttccctatacgaatcggcataa

SEQ ID NO: 5859610 - DNA, 25 bp, Homo sapien
ttgttggcgtaccgtataaatagca

SEQ ID NO: 5859611 - DNA, 25 bp, Homo sapien
attcagcgtcggtacgatatatatg

SEQ ID NO: 5859612 - DNA, 25 bp, Homo sapien
cttaaacctatgattcgcgatagca

SEQ ID NO: 5859613 - DNA, 25 bp, Homo sapien
atggtaacgcggctagataattcaa

SEQ ID NO: 5859614 - DNA, 25 bp, Homo sapien
atgaatcgtcgtaacgtattagcca

SEQ ID NO: 5859615 - DNA, 25 bp, Homo sapien
ctaagatcgtcggaacgattattgt

SEQ ID NO: 5859616 - DNA, 25 bp, Homo sapien
tattcttatgcgaggcgaaatgaga

SEQ ID NO: 5859617 - DNA, 25 bp, Homo sapien
gttttaagcgcgtctatacagagaa

SEQ ID NO: 5859618 - DNA, 25 bp, Homo sapien
attggccgactcgttatatgaagaa

SEQ ID NO: 5859619 - DNA, 25 bp, Homo sapien
atcatcagcgcggtaatcttgaaat

SEQ ID NO: 5859620 - DNA, 25 bp, Homo sapien
tagcaacgcgttaatccaaatctga

SEQ ID NO: 5859621 - DNA, 25 bp, Homo sapien
atattctacgacccgtataggaagt

SEQ ID NO: 5859622 - DNA, 25 bp, Homo sapien
ggtttatatgccgaccgttgattaa

SEQ ID NO: 5859623 - DNA, 25 bp, Homo sapien
aaattaagcggtcgataaccaaagc

SEQ ID NO: 5859624 - DNA, 25 bp, Homo sapien
acctaatcgaccgcgtatatgatat

SEQ ID NO: 5859625 - DNA, 25 bp, Homo sapien
tgattcattgaccgcggtatctttt

SEQ ID NO: 5859626 - DNA, 25 bp, Homo sapien
agtttgccttaatcgtacgcatttc

SEQ ID NO: 5859627 - DNA, 25 bp, Homo sapien
gaacttttcgcgattacgttatcga

SEQ ID NO: 5859628 - DNA, 25 bp, Homo sapien
gtaatacgcgcagttatacataacg

SEQ ID NO: 5859629 - DNA, 25 bp, Homo sapien
tcagaagtcgactaaccgttgataa

SEQ ID NO: 5859630 - DNA, 25 bp, Homo sapien
gtataagaacgacgtccaatactac

SEQ ID NO: 5859631 - DNA, 25 bp, Homo sapien
caatatcgcgatagacgattaatcc

SEQ ID NO: 5859632 - DNA, 25 bp, Homo sapien
tgctgatagtcgaccgtaagaaata

SEQ ID NO: 5859633 - DNA, 25 bp, Homo sapien
attacttaatccgcgacagaaggta

SEQ ID NO: 5859634 - DNA, 25 bp, Homo sapien
cttgatcgtaaccgacgctatttaa

SEQ ID NO: 5859635 - DNA, 25 bp, Homo sapien
gcagtactattaatcgcgttttctg

SEQ ID NO: 5859636 - DNA, 25 bp, Homo sapien
aaatgccgcggataactataaacgt

SEQ ID NO: 5859637 - DNA, 25 bp, Homo sapien
actgtttaaacgacgcgcatgttta

SEQ ID NO: 5859638 - DNA, 25 bp, Homo sapien
tgtcttaccgcgttcgtaatctttt

SEQ ID NO: 5859639 - DNA, 25 bp, Homo sapien
aatatctcgacgtagtacggatcta

SEQ ID NO: 5859640 - DNA, 25 bp, Homo sapien
tgttattatcgtcggactaaggagt

SEQ ID NO: 5859641 - DNA, 25 bp, Homo sapien
gaacatgtgcgtacgatcaattaac

SEQ ID NO: 5859642 - DNA, 25 bp, Homo sapien
ttactattgcgtacgaactactgct

SEQ ID NO: 5859643 - DNA, 25 bp, Homo sapien
attttccgtatagtgcgtcttactc

SEQ ID NO: 5859644 - DNA, 25 bp, Homo sapien
aaatcagtatcggttcgactacact

SEQ ID NO: 5859645 - DNA, 25 bp, Homo sapien
gctatacgcgcgaagtgtaaattta

SEQ ID NO: 5859646 - DNA, 25 bp, Homo sapien
cagaaaaactattacgcgctctgtt

SEQ ID NO: 5859647 - DNA, 25 bp, Homo sapien
tttacacgacttagcgtacgaagat

SEQ ID NO: 5859648 - DNA, 25 bp, Homo sapien
tacttacgattcgtataggggaaca

SEQ ID NO: 5859649 - DNA, 25 bp, Homo sapien
ctgaatagattgtctcgcggttata

SEQ ID NO: 5859650 - DNA, 25 bp, Homo sapien
gttgatgtaattcgcgtctgaatgt

SEQ ID NO: 5859651 - DNA, 25 bp, Homo sapien
aaaatacgacgctatacgtatggga

SEQ ID NO: 5859652 - DNA, 25 bp, Homo sapien
tgaactctaggcgtcgatatgttta

SEQ ID NO: 5859653 - DNA, 25 bp, Homo sapien
acaattcgtatcgacggttgtatca

SEQ ID NO: 5859654 - DNA, 25 bp, Homo sapien
taacctatcggcgtaagatgcattt

SEQ ID NO: 5859655 - DNA, 25 bp, Homo sapien
tcgtgaattaccgtcgtacattcta

SEQ ID NO: 5859656 - DNA, 25 bp, Homo sapien
tttttcttatatcgcgtgcgtttgc

SEQ ID NO: 5859657 - DNA, 25 bp, Homo sapien
tgtattaacgacgtaccgagatcta

SEQ ID NO: 5859658 - DNA, 25 bp, Homo sapien
ggaggattatcccgattcgaatatt

SEQ ID NO: 5859659 - DNA, 25 bp, Homo sapien
acacgacgtcgactagcataataat

SEQ ID NO: 5859660 - DNA, 25 bp, Homo sapien
atttacttgacgcgaagtatttccg

SEQ ID NO: 5859661 - DNA, 25 bp, Homo sapien
tggattacgaataacgcgtttactc

SEQ ID NO: 5859662 - DNA, 25 bp, Homo sapien
gtgaattcacgtatcgcgatactat

SEQ ID NO: 5859663 - DNA, 25 bp, Homo sapien
aagccagtcgaatcgtataactatg

SEQ ID NO: 5859664 - DNA, 25 bp, Homo sapien
ttctatgtacggctcgttacacaat

SEQ ID NO: 5859665 - DNA, 25 bp, Homo sapien
aatgtcgcgatccgtcttactaatt

SEQ ID NO: 5859666 - DNA, 25 bp, Homo sapien
tacaatactagtcgttcgcatgagt

SEQ ID NO: 5859667 - DNA, 25 bp, Homo sapien
gataaggtacgcggatataagattg

SEQ ID NO: 5859668 - DNA, 25 bp, Homo sapien
ataggacattagtccgcgtgaataa

SEQ ID NO: 5859669 - DNA, 25 bp, Homo sapien
tctgacgtaatcggtacgttcaaaa

SEQ ID NO: 5859670 - DNA, 25 bp, Homo sapien
tacatgcgtaccggactatctaata

SEQ ID NO: 5859671 - DNA, 25 bp, Homo sapien
tcgccatatgtttcgcgactaataa

SEQ ID NO: 5859672 - DNA, 25 bp, Homo sapien
ttacatcgagcggttataagagact

SEQ ID NO: 5859673 - DNA, 25 bp, Homo sapien
aattttgatcgcgcgtcattaacct

SEQ ID NO: 5859674 - DNA, 25 bp, Homo sapien
agagtgcgcgtataagacgtttatt

SEQ ID NO: 5859675 - DNA, 25 bp, Homo sapien
atctgcggtcgtattacgaaaaatg

SEQ ID NO: 5859676 - DNA, 25 bp, Homo sapien
taaaaccgatcgcgcataaatacct

SEQ ID NO: 5859677 - DNA, 25 bp, Homo sapien
cttatatacgcgctatcgttgttca

SEQ ID NO: 5859678 - DNA, 25 bp, Homo sapien
ttgagtcgacgattagtcgtaatag

SEQ ID NO: 5859679 - DNA, 25 bp, Homo sapien
aaacaacgtatagcgaagtctggaa

SEQ ID NO: 5859680 - DNA, 25 bp, Homo sapien
cgaataataatatgccgcgcaaatg

SEQ ID NO: 5859681 - DNA, 25 bp, Homo sapien
tcgaagattaatcgtcgcgagaatt

SEQ ID NO: 5859682 - DNA, 25 bp, Homo sapien
ggttaatttatcccgcgtattggaa

SEQ ID NO: 5859683 - DNA, 25 bp, Homo sapien
tagagattacctacgcgaatgaatc

SEQ ID NO: 5859684 - DNA, 25 bp, Homo sapien
tcaaaagtaaaacgcgcgtttagag

SEQ ID NO: 5859685 - DNA, 25 bp, Homo sapien
atcttacgcgattagtcaacctgaa

SEQ ID NO: 5859686 - DNA, 25 bp, Homo sapien
gatccgtatagcgttatcgtttcaa

SEQ ID NO: 5859687 - DNA, 25 bp, Homo sapien
gatccacgcgaattactagactttt

SEQ ID NO: 5859688 - DNA, 25 bp, Homo sapien
ctattagcgcgaatcatactttagg

SEQ ID NO: 5859689 - DNA, 25 bp, Homo sapien
caacgttagggacgatcgtttaata

SEQ ID NO: 5859690 - DNA, 25 bp, Homo sapien
tgttaccgaccgttagagtacattt

SEQ ID NO: 5859691 - DNA, 25 bp, Homo sapien
tagtgatataccggacgactaactt

SEQ ID NO: 5859692 - DNA, 25 bp, Homo sapien
tgatagtaccgctcgttagttatct

SEQ ID NO: 5859693 - DNA, 25 bp, Homo sapien
ttcacaacttaatcggcgcttacta

SEQ ID NO: 5859694 - DNA, 25 bp, Homo sapien
taaatgtcgcgctagtaaataaccc

SEQ ID NO: 5859695 - DNA, 25 bp, Homo sapien
ttttatatactagcgcgatgctgag

SEQ ID NO: 5859696 - DNA, 25 bp, Homo sapien
tctaatttcgcgtaataccctacct

SEQ ID NO: 5859697 - DNA, 25 bp, Homo sapien
tgctttcggtcgtattacgatcaaa

SEQ ID NO: 5859698 - DNA, 25 bp, Homo sapien
taagattacgacgcgttaatgactc

SEQ ID NO: 5859699 - DNA, 25 bp, Homo sapien
tgtgttagtcgcgctatagataact

SEQ ID NO: 5859700 - DNA, 25 bp, Homo sapien
tatcgcatcccgtttaacgactttt

SEQ ID NO: 5859701 - DNA, 25 bp, Homo sapien
ttcaatgtatcgtatacggctgagt

SEQ ID NO: 5859702 - DNA, 25 bp, Homo sapien
ttgaaaaccgcgataactattgtcc

SEQ ID NO: 5859703 - DNA, 25 bp, Homo sapien
agtaaataaacgtcgcggattccaa

SEQ ID NO: 5859704 - DNA, 25 bp, Homo sapien
atagtggacgataattcgcggataa

SEQ ID NO: 5859705 - DNA, 25 bp, Homo sapien
cctttctaacgacgatccgttatat

SEQ ID NO: 5859706 - DNA, 25 bp, Homo sapien
tcaattactacgtacccgctgatta

SEQ ID NO: 5859707 - DNA, 25 bp, Homo sapien
ttcaaataaccgtccgctagtctaa

SEQ ID NO: 5859708 - DNA, 25 bp, Homo sapien
caacaacgttcgtacgctactaaaa

SEQ ID NO: 5859709 - DNA, 25 bp, Homo sapien
cctttactaacgagcgatctattca

SEQ ID NO: 5859710 - DNA, 25 bp, Homo sapien
agacacctacgcgtatcgaatttta

SEQ ID NO: 5859711 - DNA, 25 bp, Homo sapien
tacaacctcgctacacgataagtat

SEQ ID NO: 5859712 - DNA, 25 bp, Homo sapien
gtttcaactaatgtcgcgaatcact

SEQ ID NO: 5859713 - DNA, 25 bp, Homo sapien
tttcgaagtcgcgttatgagtcaaa

SEQ ID NO: 5859714 - DNA, 25 bp, Homo sapien
tcacagcgtcgactagtaaatatgt

SEQ ID NO: 5859715 - DNA, 25 bp, Homo sapien
acactgctcgcgtaaactaatcaat

SEQ ID NO: 5859716 - DNA, 25 bp, Homo sapien
agtaatgacgaccgattattaccgt

SEQ ID NO: 5859717 - DNA, 25 bp, Homo sapien
tacatatacgcgcgaatctattcca

SEQ ID NO: 5859718 - DNA, 25 bp, Homo sapien
acaatacgttatcgcgctttacagt

SEQ ID NO: 5859719 - DNA, 25 bp, Homo sapien
caattagcgacggtagattgataag

SEQ ID NO: 5859720 - DNA, 25 bp, Homo sapien
aatgaataagtccgtcgactaacga

SEQ ID NO: 5859721 - DNA, 25 bp, Homo sapien
gactttaacgtatgatcggtacttg

SEQ ID NO: 5859722 - DNA, 25 bp, Homo sapien
atgttatcacgtaccgctacgtatt

SEQ ID NO: 5859723 - DNA, 25 bp, Homo sapien
aaatctgttacgaccttcggatatg

SEQ ID NO: 5859724 - DNA, 25 bp, Homo sapien
ccttaattcgtcgaataggttatcg

SEQ ID NO: 5859725 - DNA, 25 bp, Homo sapien
atcaatgtcgcgctactaagcaaat

SEQ ID NO: 5859726 - DNA, 25 bp, Homo sapien
ttttaatagagcgcgtaatggctca

SEQ ID NO: 5859727 - DNA, 25 bp, Homo sapien
atgtattagacgcgtacgaagtatc

SEQ ID NO: 5859728 - DNA, 25 bp, Homo sapien
taattcttacgcgattagggaggaa

SEQ ID NO: 5859729 - DNA, 25 bp, Homo sapien
ctctaatcaacgtatcgcctcattt

SEQ ID NO: 5859730 - DNA, 25 bp, Homo sapien
catttaaacgatacgcgtagggaat

SEQ ID NO: 5859731 - DNA, 25 bp, Homo sapien
cgattacgcgttaaccctaaaatga

SEQ ID NO: 5859732 - DNA, 25 bp, Homo sapien
tagtacgtcgaaccgcttaattgaa

SEQ ID NO: 5859733 - DNA, 25 bp, Homo sapien
tagattatagtacgactcgtgcaac

SEQ ID NO: 5859734 - DNA, 25 bp, Homo sapien
tcaattctaatcgagcgacgctaaa

SEQ ID NO: 5859735 - DNA, 25 bp, Homo sapien
aatagacgcgtcatacaattagcac

SEQ ID NO: 5859736 - DNA, 25 bp, Homo sapien
tagcacacgttagtcgagtttagat

SEQ ID NO: 5859737 - DNA, 25 bp, Homo sapien
cattgtcgactacgctgtaacttat

SEQ ID NO: 5859738 - DNA, 25 bp, Homo sapien
aatatgcgcgcaatacgtaattcga

SEQ ID NO: 5859739 - DNA, 25 bp, Homo sapien
agcgttttatacgcgaaggtaattg

SEQ ID NO: 5859740 - DNA, 25 bp, Homo sapien
tagagttcacatcgcgttaaggata

SEQ ID NO: 5859741 - DNA, 25 bp, Homo sapien
atgtcaacgcgcgaagtaaaatcta

SEQ ID NO: 5859742 - DNA, 25 bp, Homo sapien
atttcaaacgcgtataggcattcag

SEQ ID NO: 5859743 - DNA, 25 bp, Homo sapien
ttacagcgccttacgatacagttta

SEQ ID NO: 5859744 - DNA, 25 bp, Homo sapien
agaagtccgcgtaatgactaatcta

SEQ ID NO: 5859745 - DNA, 25 bp, Homo sapien
ggtagctaatatcggcgtattagtt

SEQ ID NO: 5859746 - DNA, 25 bp, Homo sapien
ttggatattaacgcgctacattcag

SEQ ID NO: 5859747 - DNA, 25 bp, Homo sapien
taacactaggatcgcgctaaaaaca

SEQ ID NO: 5859748 - DNA, 25 bp, Homo sapien
cgatgagtaattcgtgcgatttatg

SEQ ID NO: 5859749 - DNA, 25 bp, Homo sapien
ttacgatagcgctacgagaatatag

SEQ ID NO: 5859750 - DNA, 25 bp, Homo sapien
atcatataagcggtcgcgaacattt

SEQ ID NO: 5859751 - DNA, 25 bp, Homo sapien
ttctcgttacgcggttcgaattaaa

SEQ ID NO: 5859752 - DNA, 25 bp, Homo sapien
taattgtaacgtgtcgacgtacgta

SEQ ID NO: 5859753 - DNA, 25 bp, Homo sapien
tgcaataatcgccttacgataagac

SEQ ID NO: 5859754 - DNA, 25 bp, Homo sapien
atttttcctatcgcgcattcggttt

SEQ ID NO: 5859755 - DNA, 25 bp, Homo sapien
acattattgtatcgcgcgacgtata

SEQ ID NO: 5859756 - DNA, 25 bp, Homo sapien
attattaacgtcgcggttatgctga

SEQ ID NO: 5859757 - DNA, 25 bp, Homo sapien
acatagattcgaacgcgtattacga

SEQ ID NO: 5859758 - DNA, 25 bp, Homo sapien
cgtcaactattatcgtacggaagtt

SEQ ID NO: 5859759 - DNA, 25 bp, Homo sapien
ctactatagcggacgtaacaataac

SEQ ID NO: 5859760 - DNA, 25 bp, Homo sapien
tccatagtcgtgcgatagtatcaaa

SEQ ID NO: 5859761 - DNA, 25 bp, Homo sapien
aattatatacgacgctacgtgtgct

SEQ ID NO: 5859762 - DNA, 25 bp, Homo sapien
ttttttcgagactaatccggtctgt

SEQ ID NO: 5859763 - DNA, 25 bp, Homo sapien
cacgtatataccgctcgtcttaaaa

SEQ ID NO: 5859764 - DNA, 25 bp, Homo sapien
tacaagatctaacgcgcgactataa

SEQ ID NO: 5859765 - DNA, 25 bp, Homo sapien
taatttgagacataacgcgtgtgct

SEQ ID NO: 5859766 - DNA, 25 bp, Homo sapien
ttactacgtctagtcgtacctactt

SEQ ID NO: 5859767 - DNA, 25 bp, Homo sapien
tcaaacaacgtcgcgtaactaattg

SEQ ID NO: 5859768 - DNA, 25 bp, Homo sapien
agttaatcgcgcgatactattaggt

SEQ ID NO: 5859769 - DNA, 25 bp, Homo sapien
aagaaagtatgacgcgatatgatgc

SEQ ID NO: 5859770 - DNA, 25 bp, Homo sapien
tgaagagcgtaaacgactatcagat

SEQ ID NO: 5859771 - DNA, 25 bp, Homo sapien
aaatgtctactattacgcgtcttgg

SEQ ID NO: 5859772 - DNA, 25 bp, Homo sapien
gaaaaccgcgagtaactaacataca

SEQ ID NO: 5859773 - DNA, 25 bp, Homo sapien
aactgtcgactacgctttactactt

SEQ ID NO: 5859774 - DNA, 25 bp, Homo sapien
tttatggacgtattggtcgtgatca

SEQ ID NO: 5859775 - DNA, 25 bp, Homo sapien
taaaagcgtcggtctaaactagctt

SEQ ID NO: 5859776 - DNA, 25 bp, Homo sapien
gtacggacgcgctaataagtattgt

SEQ ID NO: 5859777 - DNA, 25 bp, Homo sapien
caatcttaacatacgacgcaacggt

SEQ ID NO: 5859778 - DNA, 25 bp, Homo sapien
ccaagaatcgcgtatatcggagtta

SEQ ID NO: 5859779 - DNA, 25 bp, Homo sapien
cttcatacgtcgattaccgtacatg

SEQ ID NO: 5859780 - DNA, 25 bp, Homo sapien
actctattaggtcgcgttagcagta

SEQ ID NO: 5859781 - DNA, 25 bp, Homo sapien
atgtgttgtataccgtcgagtatgg

SEQ ID NO: 5859782 - DNA, 25 bp, Homo sapien
tagaggtgtcgacgcgtaaataact

SEQ ID NO: 5859783 - DNA, 25 bp, Homo sapien
cacaatgcgcataacgagaatacag

SEQ ID NO: 5859784 - DNA, 25 bp, Homo sapien
gagagacgttcgagtcgaatttaga

SEQ ID NO: 5859785 - DNA, 25 bp, Homo sapien
gtgtatccgacgactagtacatatc

SEQ ID NO: 5859786 - DNA, 25 bp, Homo sapien
acctataatagcgttgcgaatccct

SEQ ID NO: 5859787 - DNA, 25 bp, Homo sapien
atgtgaacgcggtataagttacgct

SEQ ID NO: 5859788 - DNA, 25 bp, Homo sapien
gcgtaacgacgcctactaatactta

SEQ ID NO: 5859789 - DNA, 25 bp, Homo sapien
cactattcgaactacgctcgctata

SEQ ID NO: 5859790 - DNA, 25 bp, Homo sapien
ggtttgtcgcgcaatcgtaatcatt

SEQ ID NO: 5859791 - DNA, 25 bp, Homo sapien
agtatgactagcgtaccgaagtcaa

SEQ ID NO: 5859792 - DNA, 25 bp, Homo sapien
tgttcattacttcgcgcgatgaatg

SEQ ID NO: 5859793 - DNA, 25 bp, Homo sapien
aggtgtcgcgatagactcttaaagt

SEQ ID NO: 5859794 - DNA, 25 bp, Homo sapien
taaacacgcgactgacgtacaatac

SEQ ID NO: 5859795 - DNA, 25 bp, Homo sapien
taaatgcgcatataacgcgaaggct

SEQ ID NO: 5859796 - DNA, 25 bp, Homo sapien
gcttaaatagtcgactgcgtaacag

SEQ ID NO: 5859797 - DNA, 25 bp, Homo sapien
aatcgctatagctcggacgtgaatt

SEQ ID NO: 5859798 - DNA, 25 bp, Homo sapien
ttcaaacgcgacttagtacccttga

SEQ ID NO: 5859799 - DNA, 25 bp, Homo sapien
gcaatattcgtacacgcgtaactca

SEQ ID NO: 5859800 - DNA, 25 bp, Homo sapien
ctaaatgtcggacgaaactcagtga

SEQ ID NO: 5859801 - DNA, 25 bp, Homo sapien
aagtctcgtatatcggctgtcgaat

SEQ ID NO: 5859802 - DNA, 25 bp, Homo sapien
tcatcttaaacgcgttacgtgcttg

SEQ ID NO: 5859803 - DNA, 25 bp, Homo sapien
ttgcttgacgttagtccgattatgg

SEQ ID NO: 5859804 - DNA, 25 bp, Homo sapien
acacgtcgcgatatgatacgcttta

SEQ ID NO: 5859805 - DNA, 25 bp, Homo sapien
ctacagcgtaacgagtagctttttg

SEQ ID NO: 5859806 - DNA, 25 bp, Homo sapien
gatgaaacgcccgtattatagacga

SEQ ID NO: 5859807 - DNA, 25 bp, Homo sapien
attatgtcgttaggtcgaccttgga

SEQ ID NO: 5859808 - DNA, 25 bp, Homo sapien
tgtgcggcacgacgtatgaaaatat

SEQ ID NO: 5859809 - DNA, 25 bp, Homo sapien
caaaaacgatattcgcgtcatctgc

SEQ ID NO: 5859810 - DNA, 25 bp, Homo sapien
ggttttatcgtcggagtacaaacac

SEQ ID NO: 5859811 - DNA, 25 bp, Homo sapien
tctaatcgcgtttataccggaggta

SEQ ID NO: 5859812 - DNA, 25 bp, Homo sapien
tatgcaatcgcgagtctagatggaa

SEQ ID NO: 5859813 - DNA, 25 bp, Homo sapien
ccacctgtaacgtcgcgataaaaat

SEQ ID NO: 5859814 - DNA, 25 bp, Homo sapien
agaatatactctcgcgctatcagct

SEQ ID NO: 5859815 - DNA, 25 bp, Homo sapien
gtgaactcgtacaacatcgagacta

SEQ ID NO: 5859816 - DNA, 25 bp, Homo sapien
acataccgcgtcgtaactaagaaag

SEQ ID NO: 5859817 - DNA, 25 bp, Homo sapien
tcataaggtataacgcgctttcagc

SEQ ID NO: 5859818 - DNA, 25 bp, Homo sapien
gggtttattcgtactaccgatagct

SEQ ID NO: 5859819 - DNA, 25 bp, Homo sapien
gagttataggcgtaacgggctttta

SEQ ID NO: 5859820 - DNA, 25 bp, Homo sapien
gtcagtatcgtaacgcgagaagtta

SEQ ID NO: 5859821 - DNA, 25 bp, Homo sapien
atcttatgatcgtcgcgtagagaag

SEQ ID NO: 5859822 - DNA, 25 bp, Homo sapien
agaatgtcgcgctagtattttcagc

SEQ ID NO: 5859823 - DNA, 25 bp, Homo sapien
tagtcctataacggctcggaatcat

SEQ ID NO: 5859824 - DNA, 25 bp, Homo sapien
tcgatgggagtatcgtacgttaatc

SEQ ID NO: 5859825 - DNA, 25 bp, Homo sapien
tagaaggttgcaatacgcgaactag

SEQ ID NO: 5859826 - DNA, 25 bp, Homo sapien
tcactaacgcgtaccaactagtaga

SEQ ID NO: 5859827 - DNA, 25 bp, Homo sapien
ggaaattcgcgctaaggtcaaatga

SEQ ID NO: 5859828 - DNA, 25 bp, Homo sapien
ccttactcgcaggtatacgtcttaa

SEQ ID NO: 5859829 - DNA, 25 bp, Homo sapien
ctcctatcgtcacgacgtatctata

SEQ ID NO: 5859830 - DNA, 25 bp, Homo sapien
attacggcgcgctgataatacctat

SEQ ID NO: 5859831 - DNA, 25 bp, Homo sapien
acagcagtacgctcgataaagtagt

SEQ ID NO: 5859832 - DNA, 25 bp, Homo sapien
ttaagatgcttcgtacgacgcatac

SEQ ID NO: 5859833 - DNA, 25 bp, Homo sapien
attcttccgctcgttacaaaacagg

SEQ ID NO: 5859834 - DNA, 25 bp, Homo sapien
aaaaagtgcgcgaagtttatcggtc

SEQ ID NO: 5859835 - DNA, 25 bp, Homo sapien
taagtgcgttatcggcgtagtctta

SEQ ID NO: 5859836 - DNA, 25 bp, Homo sapien
gttgattactagtcgcgtagcatac

SEQ ID NO: 5859837 - DNA, 25 bp, Homo sapien
ccgttatagtaaacgtccgcagtaa

SEQ ID NO: 5859838 - DNA, 25 bp, Homo sapien
ttgagagtatcgcgcaagtctcaaa

SEQ ID NO: 5859839 - DNA, 25 bp, Homo sapien
ctttctcgacgttattcgggatgta

SEQ ID NO: 5859840 - DNA, 25 bp, Homo sapien
aaagtagcgtccggattaaatcgga

SEQ ID NO: 5859841 - DNA, 25 bp, Homo sapien
tatctctacgactcgtcgtctaaag

SEQ ID NO: 5859842 - DNA, 25 bp, Homo sapien
tacagacgggtttaggcgtatagat

SEQ ID NO: 5859843 - DNA, 25 bp, Homo sapien
ttcactcggttaagcgctatgctat

SEQ ID NO: 5859844 - DNA, 25 bp, Homo sapien
ttgacggactgtcgtatcgactata

SEQ ID NO: 5859845 - DNA, 25 bp, Homo sapien
ctactataattgggcgcgaaaagag

SEQ ID NO: 5859846 - DNA, 25 bp, Homo sapien
ttgtacggtatcgcgatagagagtt

SEQ ID NO: 5859847 - DNA, 25 bp, Homo sapien
aagaaatatactaagcgcgggctac

SEQ ID NO: 5859848 - DNA, 25 bp, Homo sapien
tggttagcgatctacgctaatcaag

SEQ ID NO: 5859849 - DNA, 25 bp, Homo sapien
ttagcataacgatccgacgagtaga

SEQ ID NO: 5859850 - DNA, 25 bp, Homo sapien
tatggttattcgctagacgttcctg

SEQ ID NO: 5859851 - DNA, 25 bp, Homo sapien
atatcgaacccgcgtatactcatca

SEQ ID NO: 5859852 - DNA, 25 bp, Homo sapien
agcacagcggcgatatctaattgat

SEQ ID NO: 5859853 - DNA, 25 bp, Homo sapien
gagattgtataatcgcgcgtcaaga

SEQ ID NO: 5859854 - DNA, 25 bp, Homo sapien
ttggtataacggatatcgaggtcga

SEQ ID NO: 5859855 - DNA, 25 bp, Homo sapien
cactgaactatcgccggtagtattt

SEQ ID NO: 5859856 - DNA, 25 bp, Homo sapien
acgaatatcggtaagtcgcagcttt

SEQ ID NO: 5859857 - DNA, 25 bp, Homo sapien
gaactcatacgcgagctaaagctta

SEQ ID NO: 5859858 - DNA, 25 bp, Homo sapien
acaaagcatattcgctccgaaacag

SEQ ID NO: 5859859 - DNA, 25 bp, Homo sapien
tgcccaagttatacgcgcgtttaat

SEQ ID NO: 5859860 - DNA, 25 bp, Homo sapien
tttataatatgcgttcccgccgcaa

SEQ ID NO: 5859861 - DNA, 25 bp, Homo sapien
aaaatgtagcgttacgcgattggct

SEQ ID NO: 5859862 - DNA, 25 bp, Homo sapien
ggaaagtataagagcgcgagtgtta

SEQ ID NO: 5859863 - DNA, 25 bp, Homo sapien
agattaagtccgacgatacgatctg

SEQ ID NO: 5859864 - DNA, 25 bp, Homo sapien
ggttttcgcattacgacgatctaca

SEQ ID NO: 5859865 - DNA, 25 bp, Homo sapien
cgaatatacgcgtctaagagaccta

SEQ ID NO: 5859866 - DNA, 25 bp, Homo sapien
tttacgaactattgacgcgcgtaag

SEQ ID NO: 5859867 - DNA, 25 bp, Homo sapien
acgcgacgagtcgtgtaacttatta

SEQ ID NO: 5859868 - DNA, 25 bp, Homo sapien
tacagtacgtaatacgccgtattgc

SEQ ID NO: 5859869 - DNA, 25 bp, Homo sapien
accaactcgcgataacatggagtta

SEQ ID NO: 5859870 - DNA, 25 bp, Homo sapien
ccaattcgggacgttaattggtaga

SEQ ID NO: 5859871 - DNA, 25 bp, Homo sapien
tgattcgaccgcgaagtattaaagc

SEQ ID NO: 5859872 - DNA, 25 bp, Homo sapien
atcgactacgacgtgcgaattcaat

SEQ ID NO: 5859873 - DNA, 25 bp, Homo sapien
atttcggcgatctacgtagctaact

SEQ ID NO: 5859874 - DNA, 25 bp, Homo sapien
ggaggataaccgcgacataaattag

SEQ ID NO: 5859875 - DNA, 25 bp, Homo sapien
cctgtcatagcgcgataacaacata

SEQ ID NO: 5859876 - DNA, 25 bp, Homo sapien
atattgtcgggctcgaatacaacac

SEQ ID NO: 5859877 - DNA, 25 bp, Homo sapien
cataggatacgttagcgcgctttta

SEQ ID NO: 5859878 - DNA, 25 bp, Homo sapien
catcaagtccgagtacgtattccaa

SEQ ID NO: 5859879 - DNA, 25 bp, Homo sapien
attgctcgcgtaactagctgagttt

SEQ ID NO: 5859880 - DNA, 25 bp, Homo sapien
tcctttgcgtcgtatgttatttgcg

SEQ ID NO: 5859881 - DNA, 25 bp, Homo sapien
ctgattatctggcgcgatttaaacg

SEQ ID NO: 5859882 - DNA, 25 bp, Homo sapien
aagttctgatctatcgacgttctcg

SEQ ID NO: 5859883 - DNA, 25 bp, Homo sapien
cctattcgtcgcaatctacgaaaac

SEQ ID NO: 5859884 - DNA, 25 bp, Homo sapien
gttttcacgttacgcgattcgcaaa

SEQ ID NO: 5859885 - DNA, 25 bp, Homo sapien
tgtatggtcacgacgttatagcaga

SEQ ID NO: 5859886 - DNA, 25 bp, Homo sapien
gtaactcgtcgtaatacgaacttgg

SEQ ID NO: 5859887 - DNA, 25 bp, Homo sapien
tacaatctcctacgttacgggtaga

SEQ ID NO: 5859888 - DNA, 25 bp, Homo sapien
gtcggttaatacgcgatcgaatact

SEQ ID NO: 5859889 - DNA, 25 bp, Homo sapien
tgagttggtccgcggttatttgtaa

SEQ ID NO: 5859890 - DNA, 25 bp, Homo sapien
ggtatagtagcgttcgtaaccatac

SEQ ID NO: 5859891 - DNA, 25 bp, Homo sapien
cattatcgttacatagcgcataggc

SEQ ID NO: 5859892 - DNA, 25 bp, Homo sapien
gagttagttccgtcgaatactcaga

SEQ ID NO: 5859893 - DNA, 25 bp, Homo sapien
tcaattgctcgcgtcatacttgagt

SEQ ID NO: 5859894 - DNA, 25 bp, Homo sapien
cgaagtctcgcggactatttatctt

SEQ ID NO: 5859895 - DNA, 25 bp, Homo sapien
ttttagcgtacaagcgactaggttc

SEQ ID NO: 5859896 - DNA, 25 bp, Homo sapien
agtatgcgtacgactaagtatggag

SEQ ID NO: 5859897 - DNA, 25 bp, Homo sapien
cttctagacgccgtatagcatatca

SEQ ID NO: 5859898 - DNA, 25 bp, Homo sapien
tcaagagatgcgtcgtactatagct

SEQ ID NO: 5859899 - DNA, 25 bp, Homo sapien
gagtctgttacgtcgactacaaaca

SEQ ID NO: 5859900 - DNA, 25 bp, Homo sapien
ctctctttaacggtccgcatgataa

SEQ ID NO: 5859901 - DNA, 25 bp, Homo sapien
aaggattcggcgtatgcgataagat

SEQ ID NO: 5859902 - DNA, 25 bp, Homo sapien
catgaagccggtacgtagtaaagtt

SEQ ID NO: 5859903 - DNA, 25 bp, Homo sapien
atttggcgcgaataacgtatcacga

SEQ ID NO: 5859904 - DNA, 25 bp, Homo sapien
actgctcgcggggtatataataatg

SEQ ID NO: 5859905 - DNA, 25 bp, Homo sapien
tagtaaccgcggtattactcgtttg

SEQ ID NO: 5859906 - DNA, 25 bp, Homo sapien
aatatctatcgtgaccgcggaatct

SEQ ID NO: 5859907 - DNA, 25 bp, Homo sapien
ataactcgcgagattacgttacctc

SEQ ID NO: 5859908 - DNA, 25 bp, Homo sapien
ctcacatcgacgcgtgtagataaaa

SEQ ID NO: 5859909 - DNA, 25 bp, Homo sapien
cgttcctgttagcgccgtaaattaa

SEQ ID NO: 5859910 - DNA, 25 bp, Homo sapien
atatgatcgtaacgtacgtaaccgc

SEQ ID NO: 5859911 - DNA, 25 bp, Homo sapien
tagagcactacttacgcgtcaaatc

SEQ ID NO: 5859912 - DNA, 25 bp, Homo sapien
atgcttgactcgacgtaaccgaaaa

SEQ ID NO: 5859913 - DNA, 25 bp, Homo sapien
gggtcaatcgattcgcggtataaat

SEQ ID NO: 5859914 - DNA, 25 bp, Homo sapien
attctgtacttcgcgcgttatcaca

SEQ ID NO: 5859915 - DNA, 25 bp, Homo sapien
gttcgacgttaatcggctcatcaaa

SEQ ID NO: 5859916 - DNA, 25 bp, Homo sapien
ttttctcgggtcgaagaatctctca

SEQ ID NO: 5859917 - DNA, 25 bp, Homo sapien
acaggtccgacgtattaggtatcta

SEQ ID NO: 5859918 - DNA, 25 bp, Homo sapien
aagaggctagactcgcgatgaaata

SEQ ID NO: 5859919 - DNA, 25 bp, Homo sapien
ggtgtccgcgtgtataacgttattt

SEQ ID NO: 5859920 - DNA, 25 bp, Homo sapien
tgtgttccgttattcgcgctaaatc

SEQ ID NO: 5859921 - DNA, 25 bp, Homo sapien
aactacgcgcgaatatacggacaat

SEQ ID NO: 5859922 - DNA, 25 bp, Homo sapien
aagatccgatacgcgattgtcacaa

SEQ ID NO: 5859923 - DNA, 25 bp, Homo sapien
ggtgagttagtagtcgcgaatgtaa

SEQ ID NO: 5859924 - DNA, 25 bp, Homo sapien
gagattcgtaatatcggccacgata

SEQ ID NO: 5859925 - DNA, 25 bp, Homo sapien
cgttcaaccgcggtcaatatatctt

SEQ ID NO: 5859926 - DNA, 25 bp, Homo sapien
cccttgactacgcgcgtaaaattat

SEQ ID NO: 5859927 - DNA, 25 bp, Homo sapien
agaatatacctaacgcgaagggtca

SEQ ID NO: 5859928 - DNA, 25 bp, Homo sapien
acgcatcgtatcaacgtaccatctt

SEQ ID NO: 5859929 - DNA, 25 bp, Homo sapien
tttcggtcgcgtatcgttatcgtta

SEQ ID NO: 5859930 - DNA, 25 bp, Homo sapien
tatgttggggtcgatcgtaaattgc

SEQ ID NO: 5859931 - DNA, 25 bp, Homo sapien
tgtcttcttgtacgaccgtccaaaa

SEQ ID NO: 5859932 - DNA, 25 bp, Homo sapien
caactacggaacgcgtataataagg

SEQ ID NO: 5859933 - DNA, 25 bp, Homo sapien
atattatcgagcctaacgcagctca

SEQ ID NO: 5859934 - DNA, 25 bp, Homo sapien
cattgacgcctagtgtcgaaagata

SEQ ID NO: 5859935 - DNA, 25 bp, Homo sapien
cttaattccgcgactaggtcactaa

SEQ ID NO: 5859936 - DNA, 25 bp, Homo sapien
acgtatatctaagacgcgacagaac

SEQ ID NO: 5859937 - DNA, 25 bp, Homo sapien
ttctattttacgccgacatcggttc

SEQ ID NO: 5859938 - DNA, 25 bp, Homo sapien
aattatatgacgctcgtcggatagg

SEQ ID NO: 5859939 - DNA, 25 bp, Homo sapien
gcgtaaccgcaacgtttagtttaca

SEQ ID NO: 5859940 - DNA, 25 bp, Homo sapien
tgaacccacgctatcgtatttaggt

SEQ ID NO: 5859941 - DNA, 25 bp, Homo sapien
gtattcaacgcggagtatacccatt

SEQ ID NO: 5859942 - DNA, 25 bp, Homo sapien
ggtttgtaacgtaatcggctcaaga

SEQ ID NO: 5859943 - DNA, 25 bp, Homo sapien
taacaaagtattgcgtcggatgggt

SEQ ID NO: 5859944 - DNA, 25 bp, Homo sapien
cggaatgtcgcgatactagtttatg

SEQ ID NO: 5859945 - DNA, 25 bp, Homo sapien
tgatcacgacggtatgacttagttc

SEQ ID NO: 5859946 - DNA, 25 bp, Homo sapien
tctatgctagaatgcgacgttagct

SEQ ID NO: 5859947 - DNA, 25 bp, Homo sapien
cttttcttactcgatccggaaatcc

SEQ ID NO: 5859948 - DNA, 25 bp, Homo sapien
tggaagagtatcgcgtagaattggt

SEQ ID NO: 5859949 - DNA, 25 bp, Homo sapien
tttataacggcctatcgtccagttc

SEQ ID NO: 5859950 - DNA, 25 bp, Homo sapien
ttatctgcggacccgtatatctcaa

SEQ ID NO: 5859951 - DNA, 25 bp, Homo sapien
tctagacaacataacgcgagagtag

SEQ ID NO: 5859952 - DNA, 25 bp, Homo sapien
cagattatcgcaaccggtatccaat

SEQ ID NO: 5859953 - DNA, 25 bp, Homo sapien
gaatcctgttccgacgctaattaca

SEQ ID NO: 5859954 - DNA, 25 bp, Homo sapien
ctcgatccacgcgttatcatttgat

SEQ ID NO: 5859955 - DNA, 25 bp, Homo sapien
gttttctacgacgcgtgatgcaata

SEQ ID NO: 5859956 - DNA, 25 bp, Homo sapien
cgaattacgtatgcgcgatactagt

SEQ ID NO: 5859957 - DNA, 25 bp, Homo sapien
ggtttagtcgccacgtataactttc

SEQ ID NO: 5859958 - DNA, 25 bp, Homo sapien
tcgctttacgacgttaccgtaagta

SEQ ID NO: 5859959 - DNA, 25 bp, Homo sapien
aactcacaacgcgcaactatctcaa

SEQ ID NO: 5859960 - DNA, 25 bp, Homo sapien
tatgatctcgcgcacttatcctcaa

SEQ ID NO: 5859961 - DNA, 25 bp, Homo sapien
atgagtcgtataacgggtggtaaga

SEQ ID NO: 5859962 - DNA, 25 bp, Homo sapien
aactatgatacgacggatctaggac

SEQ ID NO: 5859963 - DNA, 25 bp, Homo sapien
atttgtcgcgtgatatacgcctaac

SEQ ID NO: 5859964 - DNA, 25 bp, Homo sapien
aaggattatactacgccgctggaat

SEQ ID NO: 5859965 - DNA, 25 bp, Homo sapien
aactcaaccgcggatatgtatatcc

SEQ ID NO: 5859966 - DNA, 25 bp, Homo sapien
attaatcgtactagtagcgggcact

SEQ ID NO: 5859967 - DNA, 25 bp, Homo sapien
aaagtgagtcgatacggtaggacta

SEQ ID NO: 5859968 - DNA, 25 bp, Homo sapien
aattacccgaccgatatgttcccta

SEQ ID NO: 5859969 - DNA, 25 bp, Homo sapien
cgattatcgtacgtcgaactgttgt

SEQ ID NO: 5859970 - DNA, 25 bp, Homo sapien
tgtcggcgtgtcgaacgattttatt

SEQ ID NO: 5859971 - DNA, 25 bp, Homo sapien
ttgtgttcgtcgatagacggataca

SEQ ID NO: 5859972 - DNA, 25 bp, Homo sapien
ttaagagacgactaatcgtcagcac

SEQ ID NO: 5859973 - DNA, 25 bp, Homo sapien
atgtatgtcgaatatcgcaactccc

SEQ ID NO: 5859974 - DNA, 25 bp, Homo sapien
attagcggcgagtatcgtatatggt

SEQ ID NO: 5859975 - DNA, 25 bp, Homo sapien
caaacgccgcgctttaatgaaatac

SEQ ID NO: 5859976 - DNA, 25 bp, Homo sapien
attagctatcgcgaacgataggatc

SEQ ID NO: 5859977 - DNA, 25 bp, Homo sapien
ttcgagtagtcgcaacgatgtaatg

SEQ ID NO: 5859978 - DNA, 25 bp, Homo sapien
tcggtatcgatctatggcgattatg

SEQ ID NO: 5859979 - DNA, 25 bp, Homo sapien
actcaacgaggttacgtactgcaat

SEQ ID NO: 5859980 - DNA, 25 bp, Homo sapien
ctcgattcgtaatacggcggaaata

SEQ ID NO: 5859981 - DNA, 25 bp, Homo sapien
aatcctggtcgcgactaattgaaca

SEQ ID NO: 5859982 - DNA, 25 bp, Homo sapien
aataattcttgacggtccggtcgaa

SEQ ID NO: 5859983 - DNA, 25 bp, Homo sapien
taaagtacgatcgcgtagatgaagg

SEQ ID NO: 5859984 - DNA, 25 bp, Homo sapien
ataatattcccgcgacgtatcccaa

SEQ ID NO: 5859985 - DNA, 25 bp, Homo sapien
tagttagcgcggatactaataggca

SEQ ID NO: 5859986 - DNA, 25 bp, Homo sapien
acgttagtcgcgaattacccatgat

SEQ ID NO: 5859987 - DNA, 25 bp, Homo sapien
atagtctcgcgactaaacaagctag

SEQ ID NO: 5859988 - DNA, 25 bp, Homo sapien
agcagggcgtatagtaacggtaaat

SEQ ID NO: 5859989 - DNA, 25 bp, Homo sapien
gaaaaactgtacgatcgacgttacc

SEQ ID NO: 5859990 - DNA, 25 bp, Homo sapien
tcaatcacatacgcggtagtttgga

SEQ ID NO: 5859991 - DNA, 25 bp, Homo sapien
cgctagcgtaacgtcaacgaataat

SEQ ID NO: 5859992 - DNA, 25 bp, Homo sapien
ttattttgcgttacgtcgaggcact

SEQ ID NO: 5859993 - DNA, 25 bp, Homo sapien
gaaatgatagacgcgcgttaagact

SEQ ID NO: 5859994 - DNA, 25 bp, Homo sapien
ttgaatcgcgtatcaaccggaaaca

SEQ ID NO: 5859995 - DNA, 25 bp, Homo sapien
atttacggcgcgttataagctagct

SEQ ID NO: 5859996 - DNA, 25 bp, Homo sapien
ctacagcgacgcatactcgttttta

SEQ ID NO: 5859997 - DNA, 25 bp, Homo sapien
gtacctgtatcgtatacggattagg

SEQ ID NO: 5859998 - DNA, 25 bp, Homo sapien
atttgatcgagtatcggaggacgaa

SEQ ID NO: 5859999 - DNA, 25 bp, Homo sapien
taccttaggcggcgtactataattc

SEQ ID NO: 5860000 - DNA, 25 bp, Homo sapien
tatgtctacgcgctccttagcttaa

SEQ ID NO: 5860001 - DNA, 25 bp, Homo sapien
taatactctaacgtcgcactccctt

SEQ ID NO: 5860002 - DNA, 25 bp, Homo sapien
tgttaacgtatattcgacgctggtc

SEQ ID NO: 5860003 - DNA, 25 bp, Homo sapien
gagacaacgcgaacgttagtctata

SEQ ID NO: 5860004 - DNA, 25 bp, Homo sapien
tttcatcgatactctaacgctggtc

SEQ ID NO: 5860005 - DNA, 25 bp, Homo sapien
tctaaaatactagcgcgctatcgga

SEQ ID NO: 5860006 - DNA, 25 bp, Homo sapien
ctttaatatgtttcgcgacgactcc

SEQ ID NO: 5860007 - DNA, 25 bp, Homo sapien
tggcatcataagtttcgcggatgta

SEQ ID NO: 5860008 - DNA, 25 bp, Homo sapien
ccactataacggcgcaatagttctt

SEQ ID NO: 5860009 - DNA, 25 bp, Homo sapien
taactctcgcgattatacgcgagat

SEQ ID NO: 5860010 - DNA, 25 bp, Homo sapien
ttagcagcacgacgtatcaggtata

SEQ ID NO: 5860011 - DNA, 25 bp, Homo sapien
tatatacgcgtaatcggtaacggtc

SEQ ID NO: 5860012 - DNA, 25 bp, Homo sapien
gattgaatgcgtcgtacgagatgtt

SEQ ID NO: 5860013 - DNA, 25 bp, Homo sapien
aagttcactaatcgcccgtgctttt

SEQ ID NO: 5860014 - DNA, 25 bp, Homo sapien
tcaaactcggcgtaataccttcaac

SEQ ID NO: 5860015 - DNA, 25 bp, Homo sapien
taaccatcgtcggaacgatattcac

SEQ ID NO: 5860016 - DNA, 25 bp, Homo sapien
ctctatcgcgacatgatagacgaat

SEQ ID NO: 5860017 - DNA, 25 bp, Homo sapien
atgtactagcggtatcggcatgtta

SEQ ID NO: 5860018 - DNA, 25 bp, Homo sapien
gagttcgctctatacgacgatagat

SEQ ID NO: 5860019 - DNA, 25 bp, Homo sapien
accctgcacctatcgcgtaaatatt

SEQ ID NO: 5860020 - DNA, 25 bp, Homo sapien
ttataccgaagtattgccggaaacc

SEQ ID NO: 5860021 - DNA, 25 bp, Homo sapien
gataccctataactcgcgatgcatt

SEQ ID NO: 5860022 - DNA, 25 bp, Homo sapien
ctatagcgtcgatctgcgttcataa

SEQ ID NO: 5860023 - DNA, 25 bp, Homo sapien
acctttcgtcgtacggtacatgaaa

SEQ ID NO: 5860024 - DNA, 25 bp, Homo sapien
gtcaatatcggcgatagggatgatt

SEQ ID NO: 5860025 - DNA, 25 bp, Homo sapien
aatgaacgcgatacataagcacagg

SEQ ID NO: 5860026 - DNA, 25 bp, Homo sapien
aagtagttgatcgtacgagctatcc

SEQ ID NO: 5860027 - DNA, 25 bp, Homo sapien
atagagttatcgcgtcgaccatagt

SEQ ID NO: 5860028 - DNA, 25 bp, Homo sapien
gcctgtcgaattatgcggtattgtt

SEQ ID NO: 5860029 - DNA, 25 bp, Homo sapien
atttgttacgattgcgcgagtccta

SEQ ID NO: 5860030 - DNA, 25 bp, Homo sapien
atccgctaacacgtccgcaatatta

SEQ ID NO: 5860031 - DNA, 25 bp, Homo sapien
atgttatcgcgtacgatagtcctac

SEQ ID NO: 5860032 - DNA, 25 bp, Homo sapien
tacccctagcgcgcattataaaatg

SEQ ID NO: 5860033 - DNA, 25 bp, Homo sapien
ttctttttaagctcgcgtcaaggtc

SEQ ID NO: 5860034 - DNA, 25 bp, Homo sapien
ttccagcgcgaacctatacatgtta

SEQ ID NO: 5860035 - DNA, 25 bp, Homo sapien
ttctaatgcgcgattagtaaacgcc

SEQ ID NO: 5860036 - DNA, 25 bp, Homo sapien
acattgctatagcgtcgtagatgtg

SEQ ID NO: 5860037 - DNA, 25 bp, Homo sapien
agatctggccgattcgtaagataca

SEQ ID NO: 5860038 - DNA, 25 bp, Homo sapien
ctgaaagttgcgcgttaacattgtg

SEQ ID NO: 5860039 - DNA, 25 bp, Homo sapien
tcattctacgctcggagtaatcgta

SEQ ID NO: 5860040 - DNA, 25 bp, Homo sapien
ttatgaacgaacgcgtatgaaaggg

SEQ ID NO: 5860041 - DNA, 25 bp, Homo sapien
cttcagtaccgattacgcgacaaat

SEQ ID NO: 5860042 - DNA, 25 bp, Homo sapien
tctttctgcgtcgtactatagactg

SEQ ID NO: 5860043 - DNA, 25 bp, Homo sapien
gtaactatacgtagcggctcttgat

SEQ ID NO: 5860044 - DNA, 25 bp, Homo sapien
aagtattcgcgcgataacatgacgt

SEQ ID NO: 5860045 - DNA, 25 bp, Homo sapien
gaatcaatagacggtacgctagagt

SEQ ID NO: 5860046 - DNA, 25 bp, Homo sapien
atctagaacgttatcgcgtcaccta

SEQ ID NO: 5860047 - DNA, 25 bp, Homo sapien
gtatagataacctgcgcgatctaga

SEQ ID NO: 5860048 - DNA, 25 bp, Homo sapien
gaattccggcgtaactagagacttt

SEQ ID NO: 5860049 - DNA, 25 bp, Homo sapien
atgtataccgataacgcgatgctgt

SEQ ID NO: 5860050 - DNA, 25 bp, Homo sapien
acaacacgctaaacgatagtctctc

SEQ ID NO: 5860051 - DNA, 25 bp, Homo sapien
tttttcgtagtatcgtgcggcacat

SEQ ID NO: 5860052 - DNA, 25 bp, Homo sapien
ccttgcgtcgtacgctaactaaata

SEQ ID NO: 5860053 - DNA, 25 bp, Homo sapien
gtacgacacgtcgcgataaattatc

SEQ ID NO: 5860054 - DNA, 25 bp, Homo sapien
tggtctaatacggtcgcgatcatat

SEQ ID NO: 5860055 - DNA, 25 bp, Homo sapien
agtacaacgattgaccgcgacttaa

SEQ ID NO: 5860056 - DNA, 25 bp, Homo sapien
acgttcgttctaactcgcgtatagt

SEQ ID NO: 5860057 - DNA, 25 bp, Homo sapien
gaacgatattagcgcgcgataatga

SEQ ID NO: 5860058 - DNA, 25 bp, Homo sapien
gtttcgcgacgtgcgtatatactaa

SEQ ID NO: 5860059 - DNA, 25 bp, Homo sapien
taccttcggtctaaacgcaacttac

SEQ ID NO: 5860060 - DNA, 25 bp, Homo sapien
tacatgtacccgcgaatgtaagtct

SEQ ID NO: 5860061 - DNA, 25 bp, Homo sapien
cactgagtcgcatacgatcgaaata

SEQ ID NO: 5860062 - DNA, 25 bp, Homo sapien
agactactactaactcgcgttgtgt

SEQ ID NO: 5860063 - DNA, 25 bp, Homo sapien
tcaacttagcgcgactatggtagtt

SEQ ID NO: 5860064 - DNA, 25 bp, Homo sapien
gttacctaaggatcgcgtacaaatg

SEQ ID NO: 5860065 - DNA, 25 bp, Homo sapien
caaatgcgcgctaatatcaagagag

SEQ ID NO: 5860066 - DNA, 25 bp, Homo sapien
tcctctcggatacgtctagtaagtt

SEQ ID NO: 5860067 - DNA, 25 bp, Homo sapien
caaattttgtattcgggcgcacaag

SEQ ID NO: 5860068 - DNA, 25 bp, Homo sapien
gatgtattcgcgtcttacgtgtcat

SEQ ID NO: 5860069 - DNA, 25 bp, Homo sapien
aattaccgctattcgcgattgcaca

SEQ ID NO: 5860070 - DNA, 25 bp, Homo sapien
attctacgtcggtctatagtccaac

SEQ ID NO: 5860071 - DNA, 25 bp, Homo sapien
ccacattatgtccgacgtaaacgaa

SEQ ID NO: 5860072 - DNA, 25 bp, Homo sapien
agtacccgtatgataggcgattcaa

SEQ ID NO: 5860073 - DNA, 25 bp, Homo sapien
caatcgcgatagtagacgtagaaca

SEQ ID NO: 5860074 - DNA, 25 bp, Homo sapien
tttttagttcgcaacgtccaacgct

SEQ ID NO: 5860075 - DNA, 25 bp, Homo sapien
ttagttgtacgaatatcggctgacc

SEQ ID NO: 5860076 - DNA, 25 bp, Homo sapien
gaattttatcgcgcggcatgaagaa

SEQ ID NO: 5860077 - DNA, 25 bp, Homo sapien
ctgctttacgcgtcgaattgttctt

SEQ ID NO: 5860078 - DNA, 25 bp, Homo sapien
atgtaagtattatcgcgcttccacg

SEQ ID NO: 5860079 - DNA, 25 bp, Homo sapien
atgacacgcgtaagttaggaaagtc

SEQ ID NO: 5860080 - DNA, 25 bp, Homo sapien
ctaaaccgcgaaatacgtatacgca

SEQ ID NO: 5860081 - DNA, 25 bp, Homo sapien
atgtagacgcgctataagcgtgtat

SEQ ID NO: 5860082 - DNA, 25 bp, Homo sapien
gcattctatcacgcgactaatggtt

SEQ ID NO: 5860083 - DNA, 25 bp, Homo sapien
atcaaatagctacgttgcgcccttt

SEQ ID NO: 5860084 - DNA, 25 bp, Homo sapien
aacgctgcgaattacgtcgaaaatg

SEQ ID NO: 5860085 - DNA, 25 bp, Homo sapien
agtaataaccgactcgtatagcctc

SEQ ID NO: 5860086 - DNA, 25 bp, Homo sapien
atttaggataacgaccgactacgtg

SEQ ID NO: 5860087 - DNA, 25 bp, Homo sapien
ttgccgtatagcgttatcgcaatgt

SEQ ID NO: 5860088 - DNA, 25 bp, Homo sapien
ggtagaacgcgtcgtgtatcaaaat

SEQ ID NO: 5860089 - DNA, 25 bp, Homo sapien
tttggcatacgcgggtctataagtt

SEQ ID NO: 5860090 - DNA, 25 bp, Homo sapien
cctatttcgcgtgcgtatatctatc

SEQ ID NO: 5860091 - DNA, 25 bp, Homo sapien
atagattaacgtcgaaagcgccttc

SEQ ID NO: 5860092 - DNA, 25 bp, Homo sapien
aggtgcaacggtcgttagttgaaat

SEQ ID NO: 5860093 - DNA, 25 bp, Homo sapien
agaattgacgcgtttatcgtacggt

SEQ ID NO: 5860094 - DNA, 25 bp, Homo sapien
agttgacgacgccgtactaacaatt

SEQ ID NO: 5860095 - DNA, 25 bp, Homo sapien
ccataccgattaacggctaacctaa

SEQ ID NO: 5860096 - DNA, 25 bp, Homo sapien
ccaatacgcgtctaacgtacattac

SEQ ID NO: 5860097 - DNA, 25 bp, Homo sapien
actattgttacgcgactagtcatgc

SEQ ID NO: 5860098 - DNA, 25 bp, Homo sapien
tcatgagtccgaatacccgttgtaa

SEQ ID NO: 5860099 - DNA, 25 bp, Homo sapien
ttggttctctacgtacgcgtaacat

SEQ ID NO: 5860100 - DNA, 25 bp, Homo sapien
gagacaggtgttacgtcgaagttaa

SEQ ID NO: 5860101 - DNA, 25 bp, Homo sapien
tttcatttacgcgaccctaagcaga

SEQ ID NO: 5860102 - DNA, 25 bp, Homo sapien
gtataagcgtcggttatacctgtct

SEQ ID NO: 5860103 - DNA, 25 bp, Homo sapien
tctaaagacgttcacgcgttgtcta

SEQ ID NO: 5860104 - DNA, 25 bp, Homo sapien
atgcgctagcgcgtagatcttttat

SEQ ID NO: 5860105 - DNA, 25 bp, Homo sapien
gataagccgatcggcgttattaatc

SEQ ID NO: 5860106 - DNA, 25 bp, Homo sapien
gcatatactattacgcgcgatatgg

SEQ ID NO: 5860107 - DNA, 25 bp, Homo sapien
atataatacaagtccgacgtctccc

SEQ ID NO: 5860108 - DNA, 25 bp, Homo sapien
ggtaaatcccgcgataaactgcata

SEQ ID NO: 5860109 - DNA, 25 bp, Homo sapien
gtcagacggtcgcaatgatactttt

SEQ ID NO: 5860110 - DNA, 25 bp, Homo sapien
cattaataacgccgcgacgatagtt

SEQ ID NO: 5860111 - DNA, 25 bp, Homo sapien
acttactacgacgcgttaacttgct

SEQ ID NO: 5860112 - DNA, 25 bp, Homo sapien
ctagaaagtaacgttcgcgattcga

SEQ ID NO: 5860113 - DNA, 25 bp, Homo sapien
tctactcgcgacgttcttaagattg

SEQ ID NO: 5860114 - DNA, 25 bp, Homo sapien
taaatataccggttaacgcgcccat

SEQ ID NO: 5860115 - DNA, 25 bp, Homo sapien
tcttgaacttcgtacgatcccagtt

SEQ ID NO: 5860116 - DNA, 25 bp, Homo sapien
gctctagcgactcgatagttaagaa

SEQ ID NO: 5860117 - DNA, 25 bp, Homo sapien
tgcgtttcacatcgcgttacaaaca

SEQ ID NO: 5860118 - DNA, 25 bp, Homo sapien
ttctagagatctacgacgcctttga

SEQ ID NO: 5860119 - DNA, 25 bp, Homo sapien
taaaatctatagcgcaccgagacag

SEQ ID NO: 5860120 - DNA, 25 bp, Homo sapien
taaaaaatcgcgagaggtttgtcgg

SEQ ID NO: 5860121 - DNA, 25 bp, Homo sapien
gataacgtacgcgatagttgatgtc

SEQ ID NO: 5860122 - DNA, 25 bp, Homo sapien
caaccatacggttatcgtgatactc

SEQ ID NO: 5860123 - DNA, 25 bp, Homo sapien
tttgcatagcgtaccgacgaacaat

SEQ ID NO: 5860124 - DNA, 25 bp, Homo sapien
ctcagtcgtcgcgtagtttctatat

SEQ ID NO: 5860125 - DNA, 25 bp, Homo sapien
ttaacctaggtcgatcgtaactctc

SEQ ID NO: 5860126 - DNA, 25 bp, Homo sapien
gcaacactatcgcgatctaatgaca

SEQ ID NO: 5860127 - DNA, 25 bp, Homo sapien
cgatttagtcgttacgccgattgtt

SEQ ID NO: 5860128 - DNA, 25 bp, Homo sapien
gagttgcgtacccgaatatcttttg

SEQ ID NO: 5860129 - DNA, 25 bp, Homo sapien
atctaacgccttatatcgtagcacc

SEQ ID NO: 5860130 - DNA, 25 bp, Homo sapien
ttgagcacgcgttagtacttagtca

SEQ ID NO: 5860131 - DNA, 25 bp, Homo sapien
ataaggcgaattgacgtacgaacct

SEQ ID NO: 5860132 - DNA, 25 bp, Homo sapien
caaagcgtcgcaacgctatcttaat

SEQ ID NO: 5860133 - DNA, 25 bp, Homo sapien
tgtgcagtataacgcgatctatcga

SEQ ID NO: 5860134 - DNA, 25 bp, Homo sapien
tacctccgcactactatcgtacatt

SEQ ID NO: 5860135 - DNA, 25 bp, Homo sapien
gatgtctcgaatatcaccgagtttg

SEQ ID NO: 5860136 - DNA, 25 bp, Homo sapien
caaaacgtctcacgcgaaacacaat

SEQ ID NO: 5860137 - DNA, 25 bp, Homo sapien
gcgtcacgtacgctagataaagtat

SEQ ID NO: 5860138 - DNA, 25 bp, Homo sapien
aagatgaaccgcgactatttgtacg

SEQ ID NO: 5860139 - DNA, 25 bp, Homo sapien
cttaatcgcgctatgttacatgagc

SEQ ID NO: 5860140 - DNA, 25 bp, Homo sapien
agatttcgtcgcgatataagcgcaa

SEQ ID NO: 5860141 - DNA, 25 bp, Homo sapien
atgatatagcggttctacgcccatt

SEQ ID NO: 5860142 - DNA, 25 bp, Homo sapien
acgacatagcgtgtcgaacttgaat

SEQ ID NO: 5860143 - DNA, 25 bp, Homo sapien
agattcttgcgtcgcatagagatag

SEQ ID NO: 5860144 - DNA, 25 bp, Homo sapien
aatacattattcgcgcgactatgcg

SEQ ID NO: 5860145 - DNA, 25 bp, Homo sapien
ctagtctatcttagtcgcgctagta

SEQ ID NO: 5860146 - DNA, 25 bp, Homo sapien
atgaacgcgttaaccggtactctaa

SEQ ID NO: 5860147 - DNA, 25 bp, Homo sapien
taggtgatacttcgcggtctaaact

SEQ ID NO: 5860148 - DNA, 25 bp, Homo sapien
ttgaaactacgcgaacgtactccta

SEQ ID NO: 5860149 - DNA, 25 bp, Homo sapien
tatctgtaacgaccgtcgacctaat

SEQ ID NO: 5860150 - DNA, 25 bp, Homo sapien
acgtgctacattaagcgcggtatat

SEQ ID NO: 5860151 - DNA, 25 bp, Homo sapien
cgagtttaactgccgcgtatataac

SEQ ID NO: 5860152 - DNA, 25 bp, Homo sapien
caaaattatgcgaagcgagtactgc

SEQ ID NO: 5860153 - DNA, 25 bp, Homo sapien
ctatattactgacgcgactcacatg

SEQ ID NO: 5860154 - DNA, 25 bp, Homo sapien
cagctgtaacggcgagtataaacat

SEQ ID NO: 5860155 - DNA, 25 bp, Homo sapien
tagatccgtacgctgatacacgtaa

SEQ ID NO: 5860156 - DNA, 25 bp, Homo sapien
tcgctctaattacgtccgctataga

SEQ ID NO: 5860157 - DNA, 25 bp, Homo sapien
gaatgaattcgtgcgtaaccacaac

SEQ ID NO: 5860158 - DNA, 25 bp, Homo sapien
atatttgtccgcgatcaattggcac

SEQ ID NO: 5860159 - DNA, 25 bp, Homo sapien
attatggcgctttgcgctaacgtta

SEQ ID NO: 5860160 - DNA, 25 bp, Homo sapien
actggtcctatacgcgactcaattt

SEQ ID NO: 5860161 - DNA, 25 bp, Homo sapien
tatgcaatcgtacctcgcgtaagaa

SEQ ID NO: 5860162 - DNA, 25 bp, Homo sapien
taagtctaccgaacgcgtaaacttg

SEQ ID NO: 5860163 - DNA, 25 bp, Homo sapien
tgtagtatacggttcgcgtcgttta

SEQ ID NO: 5860164 - DNA, 25 bp, Homo sapien
tgcatctatacgcgccgtattagta

SEQ ID NO: 5860165 - DNA, 25 bp, Homo sapien
taaccttagatcggacgtacgctat

SEQ ID NO: 5860166 - DNA, 25 bp, Homo sapien
agatgaacgtcgaccgatatgaaag

SEQ ID NO: 5860167 - DNA, 25 bp, Homo sapien
acgaattactcgcgcgttttaagga

SEQ ID NO: 5860168 - DNA, 25 bp, Homo sapien
gcaagtcgttacgatcgatctatac

SEQ ID NO: 5860169 - DNA, 25 bp, Homo sapien
tggcttcgtacgcgtaaacaatgtt

SEQ ID NO: 5860170 - DNA, 25 bp, Homo sapien
accactcgcgatacgacatcaatat

SEQ ID NO: 5860171 - DNA, 25 bp, Homo sapien
ctaccctattcgctcgaggatatta

SEQ ID NO: 5860172 - DNA, 25 bp, Homo sapien
tcttaaacagtatgtcgcgagtcca

SEQ ID NO: 5860173 - DNA, 25 bp, Homo sapien
tttcgacgtatcacgtccggaaaat

SEQ ID NO: 5860174 - DNA, 25 bp, Homo sapien
gatttttatacgtcacgcgtggcta

SEQ ID NO: 5860175 - DNA, 25 bp, Homo sapien
ggtcacgttcgatagtcgcaaataa

SEQ ID NO: 5860176 - DNA, 25 bp, Homo sapien
aagaaacgatacgccctattgtacg

SEQ ID NO: 5860177 - DNA, 25 bp, Homo sapien
tgccatgacgtatcgaatgtcagaa

SEQ ID NO: 5860178 - DNA, 25 bp, Homo sapien
ccacttacgcgtacggatattgaat

SEQ ID NO: 5860179 - DNA, 25 bp, Homo sapien
ttgttaacgaaccgcggttcatatg

SEQ ID NO: 5860180 - DNA, 25 bp, Homo sapien
tttggataaccgatcgcgataatcg

SEQ ID NO: 5860181 - DNA, 25 bp, Homo sapien
tcgttttcataacgcgtcgatcgat

SEQ ID NO: 5860182 - DNA, 25 bp, Homo sapien
tttgtttcgcgtcgacataggagaa

SEQ ID NO: 5860183 - DNA, 25 bp, Homo sapien
agcttaatcctacgcgtaacgtcta

SEQ ID NO: 5860184 - DNA, 25 bp, Homo sapien
gtaggaattcgcgaacacgtaatga

SEQ ID NO: 5860185 - DNA, 25 bp, Homo sapien
aacacgcgttaccgatcgaattgaa

SEQ ID NO: 5860186 - DNA, 25 bp, Homo sapien
catgtatgtcgcgataccgacttat

SEQ ID NO: 5860187 - DNA, 25 bp, Homo sapien
actgcatagcgtacgaagcttacat

SEQ ID NO: 5860188 - DNA, 25 bp, Homo sapien
tgagaaccgttactaagcgtcttct

SEQ ID NO: 5860189 - DNA, 25 bp, Homo sapien
atgtcttatccgatcgctaataccc

SEQ ID NO: 5860190 - DNA, 25 bp, Homo sapien
cgcaagaactagatcgacgcattaa

SEQ ID NO: 5860191 - DNA, 25 bp, Homo sapien
aaactcagcgcgtataagtattggg

SEQ ID NO: 5860192 - DNA, 25 bp, Homo sapien
tgtccaacgagcgatacttatcact

SEQ ID NO: 5860193 - DNA, 25 bp, Homo sapien
gaagtaccgaataacgtcggctata

SEQ ID NO: 5860194 - DNA, 25 bp, Homo sapien
actttgcattacgatcgcttgatcc

SEQ ID NO: 5860195 - DNA, 25 bp, Homo sapien
acaaacttagcgcgatagtcggaaa

SEQ ID NO: 5860196 - DNA, 25 bp, Homo sapien
cgtgagatataacggcgcgtaaaat

SEQ ID NO: 5860197 - DNA, 25 bp, Homo sapien
tgctcctgtatcgcgattcatacat

SEQ ID NO: 5860198 - DNA, 25 bp, Homo sapien
aatctgataacgttcgtcgtggaca

SEQ ID NO: 5860199 - DNA, 25 bp, Homo sapien
tgtctattacgcgtacagcatatcc

SEQ ID NO: 5860200 - DNA, 25 bp, Homo sapien
gtttagcgcgactaagatagctcat

SEQ ID NO: 5860201 - DNA, 25 bp, Homo sapien
ttgcatacgttcgcgatataccact

SEQ ID NO: 5860202 - DNA, 25 bp, Homo sapien
atctagtatatcggtcgcacagaag

SEQ ID NO: 5860203 - DNA, 25 bp, Homo sapien
aatttgatcgcgttagtagccagct

SEQ ID NO: 5860204 - DNA, 25 bp, Homo sapien
tttatacacgtacggtcgacaggat

SEQ ID NO: 5860205 - DNA, 25 bp, Homo sapien
tggcaatagttcgacgcaaaaatgc

SEQ ID NO: 5860206 - DNA, 25 bp, Homo sapien
ctagcgatcacggtccgtattatat

SEQ ID NO: 5860207 - DNA, 25 bp, Homo sapien
gtttcagttacgtcggaccttcata

SEQ ID NO: 5860208 - DNA, 25 bp, Homo sapien
tcttggatactatagcgcgaaaagg

SEQ ID NO: 5860209 - DNA, 25 bp, Homo sapien
aaatgccgattgtcttacggagatg

SEQ ID NO: 5860210 - DNA, 25 bp, Homo sapien
gtaaagacgagtacgcgttatctga

SEQ ID NO: 5860211 - DNA, 25 bp, Homo sapien
caaagccgaactatgtgcgtatcat

SEQ ID NO: 5860212 - DNA, 25 bp, Homo sapien
gaaactaatcttacgtcgcctctga

SEQ ID NO: 5860213 - DNA, 25 bp, Homo sapien
tatatgcgccgattataggcagact

SEQ ID NO: 5860214 - DNA, 25 bp, Homo sapien
catcagtacgaattaggcggctaaa

SEQ ID NO: 5860215 - DNA, 25 bp, Homo sapien
tgatacgtacgacgtttcgtgtcaa

SEQ ID NO: 5860216 - DNA, 25 bp, Homo sapien
tacacaaggttgcgtcgtatttacg

SEQ ID NO: 5860217 - DNA, 25 bp, Homo sapien
gaacgagcgtaccggctaatttaaa

SEQ ID NO: 5860218 - DNA, 25 bp, Homo sapien
catcaatacgtagcgcgtaaacaga

SEQ ID NO: 5860219 - DNA, 25 bp, Homo sapien
cgatactacggcgctagtcattaaa

SEQ ID NO: 5860220 - DNA, 25 bp, Homo sapien
cttgcctagtcgaacgtcaaagtaa

SEQ ID NO: 5860221 - DNA, 25 bp, Homo sapien
ggaataagtcacgcgcgataagtat

SEQ ID NO: 5860222 - DNA, 25 bp, Homo sapien
agatcatacgcgactaatctcccat

SEQ ID NO: 5860223 - DNA, 25 bp, Homo sapien
taatcataatagcgcggtcagtagg

SEQ ID NO: 5860224 - DNA, 25 bp, Homo sapien
gttcagtactcgcgtctactttgat

SEQ ID NO: 5860225 - DNA, 25 bp, Homo sapien
gtaacctagtagtccgacgaattca

SEQ ID NO: 5860226 - DNA, 25 bp, Homo sapien
agatgctactacacgtcggtaagta

SEQ ID NO: 5860227 - DNA, 25 bp, Homo sapien
aactctcgtattccgcgatggataa

SEQ ID NO: 5860228 - DNA, 25 bp, Homo sapien
tgaatacgatactcgaacgggatag

SEQ ID NO: 5860229 - DNA, 25 bp, Homo sapien
tacctgcgcgacttatagcacattt

SEQ ID NO: 5860230 - DNA, 25 bp, Homo sapien
ggctagtcggactaacgtttagatt

SEQ ID NO: 5860231 - DNA, 25 bp, Homo sapien
gatctttcgaccgccctattaattg

SEQ ID NO: 5860232 - DNA, 25 bp, Homo sapien
tttatagccgtactattcgctccac

SEQ ID NO: 5860233 - DNA, 25 bp, Homo sapien
taccttccgcgactatctagttgta

SEQ ID NO: 5860234 - DNA, 25 bp, Homo sapien
catatttcgcacgaactagtgccaa

SEQ ID NO: 5860235 - DNA, 25 bp, Homo sapien
actattttcgtcgcgatacgtgttg

SEQ ID NO: 5860236 - DNA, 25 bp, Homo sapien
tttccatcgcggtaggtacagatta

SEQ ID NO: 5860237 - DNA, 25 bp, Homo sapien
catagtcgattcgaacctatttccg

SEQ ID NO: 5860238 - DNA, 25 bp, Homo sapien
tactaacgcgtacggttatgatacg

SEQ ID NO: 5860239 - DNA, 25 bp, Homo sapien
attattacgcacggttcgtttccac

SEQ ID NO: 5860240 - DNA, 25 bp, Homo sapien
cgtaaaatcgcgagtagagactttg

SEQ ID NO: 5860241 - DNA, 25 bp, Homo sapien
actaatcggtcgcgaattaacgatc

SEQ ID NO: 5860242 - DNA, 25 bp, Homo sapien
agtatgaggataccgctcgtaattc

SEQ ID NO: 5860243 - DNA, 25 bp, Homo sapien
tatagctacccttacgcgaactact

SEQ ID NO: 5860244 - DNA, 25 bp, Homo sapien
ctggcagattattacgccgtaaatg

SEQ ID NO: 5860245 - DNA, 25 bp, Homo sapien
gttattacgtattacgaccacgcgt

SEQ ID NO: 5860246 - DNA, 25 bp, Homo sapien
ttgggagttacgcgctagattaatg

SEQ ID NO: 5860247 - DNA, 25 bp, Homo sapien
tgtaacgtgcccgatcgtactttaa

SEQ ID NO: 5860248 - DNA, 25 bp, Homo sapien
catatggacgaccgattatagacag

SEQ ID NO: 5860249 - DNA, 25 bp, Homo sapien
gtgaatcgtatctacgcgaggtata

SEQ ID NO: 5860250 - DNA, 25 bp, Homo sapien
gctactgcgtaagattacggtaatc

SEQ ID NO: 5860251 - DNA, 25 bp, Homo sapien
actatatccttatacgcgcttcgga

SEQ ID NO: 5860252 - DNA, 25 bp, Homo sapien
gtggattaagagcgcgattacaaca

SEQ ID NO: 5860253 - DNA, 25 bp, Homo sapien
aagttgcgaccgtattaagagagca

SEQ ID NO: 5860254 - DNA, 25 bp, Homo sapien
ccgatattcgacgacctaggataat

SEQ ID NO: 5860255 - DNA, 25 bp, Homo sapien
cttttttagtctcgcgaagatccag

SEQ ID NO: 5860256 - DNA, 25 bp, Homo sapien
gtaagttgcgtttagaccgaaggta

SEQ ID NO: 5860257 - DNA, 25 bp, Homo sapien
tttaatgactagcgccgtagtatcg

SEQ ID NO: 5860258 - DNA, 25 bp, Homo sapien
gaactaagtcataccgtcgtgatca

SEQ ID NO: 5860259 - DNA, 25 bp, Homo sapien
ttaatttacggcgctaacaggaacg

SEQ ID NO: 5860260 - DNA, 25 bp, Homo sapien
agttagctacgtagatcgccgaaat

SEQ ID NO: 5860261 - DNA, 25 bp, Homo sapien
actactttatcgagcgtactgctgt

SEQ ID NO: 5860262 - DNA, 25 bp, Homo sapien
attaagatagcgttgcgacgctttg

SEQ ID NO: 5860263 - DNA, 25 bp, Homo sapien
gtgccaattgatcgcggacaaatat

SEQ ID NO: 5860264 - DNA, 25 bp, Homo sapien
acgtcatgttatcgcgcgaatactt

SEQ ID NO: 5860265 - DNA, 25 bp, Homo sapien
gaactggacgataggccgttataaa

SEQ ID NO: 5860266 - DNA, 25 bp, Homo sapien
attttgatacacgacgcgttctacc

SEQ ID NO: 5860267 - DNA, 25 bp, Homo sapien
aagggagtgcgacgttagagtatta

SEQ ID NO: 5860268 - DNA, 25 bp, Homo sapien
attaggtcgacggtcgttacagata

SEQ ID NO: 5860269 - DNA, 25 bp, Homo sapien
ttatcatgcggaccgttaaagagag

SEQ ID NO: 5860270 - DNA, 25 bp, Homo sapien
tatagcgagcgtagttcgaatagtg

SEQ ID NO: 5860271 - DNA, 25 bp, Homo sapien
taggactcgcgcaatcgtaacaaat

SEQ ID NO: 5860272 - DNA, 25 bp, Homo sapien
ttcttcatgccgcgcgataaaattc

SEQ ID NO: 5860273 - DNA, 25 bp, Homo sapien
tgatatgctatacggcgtctagaag

SEQ ID NO: 5860274 - DNA, 25 bp, Homo sapien
ttatgaacgcagatcgacgctatag

SEQ ID NO: 5860275 - DNA, 25 bp, Homo sapien
ttacaacgggtattcggactcatga

SEQ ID NO: 5860276 - DNA, 25 bp, Homo sapien
gaggctatacgagtcggttattact

SEQ ID NO: 5860277 - DNA, 25 bp, Homo sapien
caagcacgtaacgcgtttaagatga

SEQ ID NO: 5860278 - DNA, 25 bp, Homo sapien
aatatttacgcgataggtgcagggt

SEQ ID NO: 5860279 - DNA, 25 bp, Homo sapien
agccaatcgcgtaacgctacatttt

SEQ ID NO: 5860280 - DNA, 25 bp, Homo sapien
ctttagacgacgagtcgtagagata

SEQ ID NO: 5860281 - DNA, 25 bp, Homo sapien
cgtttaaatcgcgccagataatcag

SEQ ID NO: 5860282 - DNA, 25 bp, Homo sapien
gaggtaacgtaatctcgcgagttat

SEQ ID NO: 5860283 - DNA, 25 bp, Homo sapien
ccataatcggactaacgtcaagcaa

SEQ ID NO: 5860284 - DNA, 25 bp, Homo sapien
gctgaaaatactagcgcgacattct

SEQ ID NO: 5860285 - DNA, 25 bp, Homo sapien
caattaatagggcggtcgaaagatc

SEQ ID NO: 5860286 - DNA, 25 bp, Homo sapien
taacttctcgcgttacgatactgac

SEQ ID NO: 5860287 - DNA, 25 bp, Homo sapien
attttacgcgccgttatatctcacg

SEQ ID NO: 5860288 - DNA, 25 bp, Homo sapien
ccctttcatacgcgttcgttcataa

SEQ ID NO: 5860289 - DNA, 25 bp, Homo sapien
ttccatctagactcgcgattgcata

SEQ ID NO: 5860290 - DNA, 25 bp, Homo sapien
ttaatgcgtcgatctagttcttgcg

SEQ ID NO: 5860291 - DNA, 25 bp, Homo sapien
aatctaaacgttagtccgactagcc

SEQ ID NO: 5860292 - DNA, 25 bp, Homo sapien
tctgagtattcgacggaactaactc

SEQ ID NO: 5860293 - DNA, 25 bp, Homo sapien
atgtttatactcgccgttacagctg

SEQ ID NO: 5860294 - DNA, 25 bp, Homo sapien
cattattatataccccgcgagcagt

SEQ ID NO: 5860295 - DNA, 25 bp, Homo sapien
agtggtatatcgcgaacgtatgcaa

SEQ ID NO: 5860296 - DNA, 25 bp, Homo sapien
gaaccgatgtcggcgtaaaatagaa

SEQ ID NO: 5860297 - DNA, 25 bp, Homo sapien
ttgcgcttatatcgcgacgaaatct

SEQ ID NO: 5860298 - DNA, 25 bp, Homo sapien
atgtaagcttcgtacgctatgcagt

SEQ ID NO: 5860299 - DNA, 25 bp, Homo sapien
ggatagctcgtacgatcaactactt

SEQ ID NO: 5860300 - DNA, 25 bp, Homo sapien
tatgaaggtccgacgtaactgaaac

SEQ ID NO: 5860301 - DNA, 25 bp, Homo sapien
tctacccgtaacgtaggagattgta

SEQ ID NO: 5860302 - DNA, 25 bp, Homo sapien
cgtatcataaccgtacgcgttagta

SEQ ID NO: 5860303 - DNA, 25 bp, Homo sapien
ttaggttagccgttaatcggtatgg

SEQ ID NO: 5860304 - DNA, 25 bp, Homo sapien
agacttacattcgcgggtacatgta

SEQ ID NO: 5860305 - DNA, 25 bp, Homo sapien
atcaaatgataacgcgtggatcgag

SEQ ID NO: 5860306 - DNA, 25 bp, Homo sapien
tatagtcgatacgacagtccgtcaa

SEQ ID NO: 5860307 - DNA, 25 bp, Homo sapien
tcgatagatcgcgttatactgcaca

SEQ ID NO: 5860308 - DNA, 25 bp, Homo sapien
atcaaagtagacgcgagtactgaac

SEQ ID NO: 5860309 - DNA, 25 bp, Homo sapien
agctatagtacgacgcatctcttga

SEQ ID NO: 5860310 - DNA, 25 bp, Homo sapien
ctttcttagttacgacgcggtatgt

SEQ ID NO: 5860311 - DNA, 25 bp, Homo sapien
cattaatctagcgcgtaactcccaa

SEQ ID NO: 5860312 - DNA, 25 bp, Homo sapien
aacattgtttacgcgtacgaagcca

SEQ ID NO: 5860313 - DNA, 25 bp, Homo sapien
caaaaagctactcgttacgctgtag

SEQ ID NO: 5860314 - DNA, 25 bp, Homo sapien
tgatgagtatacgcgggttcgatat

SEQ ID NO: 5860315 - DNA, 25 bp, Homo sapien
cgtacaatagggcgtatcgtttctt

SEQ ID NO: 5860316 - DNA, 25 bp, Homo sapien
cacaatgttaacgcgcaactttcag

SEQ ID NO: 5860317 - DNA, 25 bp, Homo sapien
gattaataacgccgatcggcttatc

SEQ ID NO: 5860318 - DNA, 25 bp, Homo sapien
tgcctattagtatccgcgctaacta

SEQ ID NO: 5860319 - DNA, 25 bp, Homo sapien
tgtccacgacgaacgttatcagatt

SEQ ID NO: 5860320 - DNA, 25 bp, Homo sapien
catgtacggtaatcgacgtatgaag

SEQ ID NO: 5860321 - DNA, 25 bp, Homo sapien
ttactgcggacgtttactataacgg

SEQ ID NO: 5860322 - DNA, 25 bp, Homo sapien
tgagttacgcgtgtacgaatattgc

SEQ ID NO: 5860323 - DNA, 25 bp, Homo sapien
tcgtctataatacgggcgtttcatc

SEQ ID NO: 5860324 - DNA, 25 bp, Homo sapien
atgattccgagccgttataggacta

SEQ ID NO: 5860325 - DNA, 25 bp, Homo sapien
aagataaatagtccgcgagacttcg

SEQ ID NO: 5860326 - DNA, 25 bp, Homo sapien
tgtttgtagtcgacgtaacagactc

SEQ ID NO: 5860327 - DNA, 25 bp, Homo sapien
ttttcggttacgtcgagtcaagcat

SEQ ID NO: 5860328 - DNA, 25 bp, Homo sapien
tcattatcgcgcgctaatatcgttc

SEQ ID NO: 5860329 - DNA, 25 bp, Homo sapien
acctaaatacgatagcgtgggttca

SEQ ID NO: 5860330 - DNA, 25 bp, Homo sapien
caatcttaagaacgtcgcgagtaga

SEQ ID NO: 5860331 - DNA, 25 bp, Homo sapien
taaaaacgagtatgcgtcgctgtag

SEQ ID NO: 5860332 - DNA, 25 bp, Homo sapien
atatgatcgcgaccgtattagacca

SEQ ID NO: 5860333 - DNA, 25 bp, Homo sapien
cgcatagtcgcgcgaataatgtatt

SEQ ID NO: 5860334 - DNA, 25 bp, Homo sapien
cgtacaaatagtcgcggttcatctt

SEQ ID NO: 5860335 - DNA, 25 bp, Homo sapien
cgattatcgcgatcggttatccaaa

SEQ ID NO: 5860336 - DNA, 25 bp, Homo sapien
cgtaaatacgacgcaaccttgtgta

SEQ ID NO: 5860337 - DNA, 25 bp, Homo sapien
tttcatgtaccgtacgacgaaaggt

SEQ ID NO: 5860338 - DNA, 25 bp, Homo sapien
agttatttacgcgtcgacacctcta

SEQ ID NO: 5860339 - DNA, 25 bp, Homo sapien
agctggctactaacgcgatcaaatt

SEQ ID NO: 5860340 - DNA, 25 bp, Homo sapien
taacgataacgatacgcgaccgaaa

SEQ ID NO: 5860341 - DNA, 25 bp, Homo sapien
taagtattagtaggcgtcgttacgc

SEQ ID NO: 5860342 - DNA, 25 bp, Homo sapien
atttataccgcgaatcgattgaccc

SEQ ID NO: 5860343 - DNA, 25 bp, Homo sapien
tactaatacggcgcgtatagatgca

SEQ ID NO: 5860344 - DNA, 25 bp, Homo sapien
agggattcgcaacgctattataggt

SEQ ID NO: 5860345 - DNA, 25 bp, Homo sapien
ttaagctaaggagcgcgtagacata

SEQ ID NO: 5860346 - DNA, 25 bp, Homo sapien
aacttactagacgtatccgagagga

SEQ ID NO: 5860347 - DNA, 25 bp, Homo sapien
aaccattagtcgcgtgatagaatgc

SEQ ID NO: 5860348 - DNA, 25 bp, Homo sapien
aactaccatagtcgcgctaagttga

SEQ ID NO: 5860349 - DNA, 25 bp, Homo sapien
atactttatctagcgtacgtgacgc

SEQ ID NO: 5860350 - DNA, 25 bp, Homo sapien
aatgggtatactccgcgttgaatac

SEQ ID NO: 5860351 - DNA, 25 bp, Homo sapien
tctactagttggtacgcgttagtga

SEQ ID NO: 5860352 - DNA, 25 bp, Homo sapien
tcttaccacccgttatacgactcat

SEQ ID NO: 5860353 - DNA, 25 bp, Homo sapien
gatttagcgcgaataacggaacaca

SEQ ID NO: 5860354 - DNA, 25 bp, Homo sapien
cgcaaataacatacgacgcaaagga

SEQ ID NO: 5860355 - DNA, 25 bp, Homo sapien
gatcctatcgttcgcgatagctaat

SEQ ID NO: 5860356 - DNA, 25 bp, Homo sapien
tttaaattagccggtacgctcgttc

SEQ ID NO: 5860357 - DNA, 25 bp, Homo sapien
tagacgttacgcgtaggattaagct

SEQ ID NO: 5860358 - DNA, 25 bp, Homo sapien
ccttattatacgcgttccgtagttg

SEQ ID NO: 5860359 - DNA, 25 bp, Homo sapien
ataattttacgcgcgtagtcaaggg

SEQ ID NO: 5860360 - DNA, 25 bp, Homo sapien
atgtatgaatcgcgatacaggagca

SEQ ID NO: 5860361 - DNA, 25 bp, Homo sapien
tgactaagtactaacgcgtgctcaa

SEQ ID NO: 5860362 - DNA, 25 bp, Homo sapien
tccgaagcgcgtataaggatatagt

SEQ ID NO: 5860363 - DNA, 25 bp, Homo sapien
ggatatacatatccgcggttgagtt

SEQ ID NO: 5860364 - DNA, 25 bp, Homo sapien
attcaatatccgtacgcgtaagtgg

SEQ ID NO: 5860365 - DNA, 25 bp, Homo sapien
aaataacgttatacacgcggacacc

SEQ ID NO: 5860366 - DNA, 25 bp, Homo sapien
aacatctcgtacgacgcattcaatc

SEQ ID NO: 5860367 - DNA, 25 bp, Homo sapien
tatacctcgcgtagatacgattcac

SEQ ID NO: 5860368 - DNA, 25 bp, Homo sapien
cataatcgccatagatcgataccga

SEQ ID NO: 5860369 - DNA, 25 bp, Homo sapien
tccgatttaatccggacgctacttt

SEQ ID NO: 5860370 - DNA, 25 bp, Homo sapien
taggtgacgcgataacgttctagat

SEQ ID NO: 5860371 - DNA, 25 bp, Homo sapien
gaccgttaccgattacgcgtatata

SEQ ID NO: 5860372 - DNA, 25 bp, Homo sapien
cagtctatagtacgacgcagaaaga

SEQ ID NO: 5860373 - DNA, 25 bp, Homo sapien
ttaagacgtatacctgcgagtaagg

SEQ ID NO: 5860374 - DNA, 25 bp, Homo sapien
tttgatgagccgattaacgtcgaac

SEQ ID NO: 5860375 - DNA, 25 bp, Homo sapien
attgttcgtcggtacgctatgcaaa

SEQ ID NO: 5860376 - DNA, 25 bp, Homo sapien
caggaacgtctagcgaataaccata

SEQ ID NO: 5860377 - DNA, 25 bp, Homo sapien
tagggaacatatcggtcgggtaatt

SEQ ID NO: 5860378 - DNA, 25 bp, Homo sapien
taactccgatatacgcgattcttgg

SEQ ID NO: 5860379 - DNA, 25 bp, Homo sapien
caaaagatattcgggtacgcaactc

SEQ ID NO: 5860380 - DNA, 25 bp, Homo sapien
tgagctgcgttaggctcgataatat

SEQ ID NO: 5860381 - DNA, 25 bp, Homo sapien
caaactcggtgatattcgagacatc

SEQ ID NO: 5860382 - DNA, 25 bp, Homo sapien
aacaataccgcataattcgacaggc

SEQ ID NO: 5860383 - DNA, 25 bp, Homo sapien
aagaactattgcgccgttatagtgg

SEQ ID NO: 5860384 - DNA, 25 bp, Homo sapien
cgtggaagcgcgataatacttacat

SEQ ID NO: 5860385 - DNA, 25 bp, Homo sapien
ccttcatctacgcgatcgtacttta

SEQ ID NO: 5860386 - DNA, 25 bp, Homo sapien
atttgtcgcgtaatcggtactgaag

SEQ ID NO: 5860387 - DNA, 25 bp, Homo sapien
tcaagggtactaagtcgcgtttgaa

SEQ ID NO: 5860388 - DNA, 25 bp, Homo sapien
gattaccgtaatcttacgcagtagc

SEQ ID NO: 5860389 - DNA, 25 bp, Homo sapien
accatatacgatactcgccgctaat

SEQ ID NO: 5860390 - DNA, 25 bp, Homo sapien
atgagctatcttagtcgcgctaaac

SEQ ID NO: 5860391 - DNA, 25 bp, Homo sapien
tatttcatcgcgagtctagcctctt

SEQ ID NO: 5860392 - DNA, 25 bp, Homo sapien
atagcatagcgcttaaccgagtgaa

SEQ ID NO: 5860393 - DNA, 25 bp, Homo sapien
gaattacgagcggtatcctcatact

SEQ ID NO: 5860394 - DNA, 25 bp, Homo sapien
agcaagttaacgcgtcgtagtaagt

SEQ ID NO: 5860395 - DNA, 25 bp, Homo sapien
tttgcgaatcgcgtaacgtgaaaac

SEQ ID NO: 5860396 - DNA, 25 bp, Homo sapien
taacatgtataggttcgcgctggaa

SEQ ID NO: 5860397 - DNA, 25 bp, Homo sapien
tcttgacgcgcgattatacaatctc

SEQ ID NO: 5860398 - DNA, 25 bp, Homo sapien
gtatggttacgaacgctactatacc

SEQ ID NO: 5860399 - DNA, 25 bp, Homo sapien
aatgattacgattgcgcgacaaacc

SEQ ID NO: 5860400 - DNA, 25 bp, Homo sapien
ttgacttcggtacgctagtcatact

SEQ ID NO: 5860401 - DNA, 25 bp, Homo sapien
atatagaaactacgcgacgactgag

SEQ ID NO: 5860402 - DNA, 25 bp, Homo sapien
tgttgtaatcgcgctcttaatccac

SEQ ID NO: 5860403 - DNA, 25 bp, Homo sapien
cgagaacgtcgatagatcagaactt

SEQ ID NO: 5860404 - DNA, 25 bp, Homo sapien
tatttcgatcgtatgcgactcagtg

SEQ ID NO: 5860405 - DNA, 25 bp, Homo sapien
tattgcatcacgcgtcgtagaaaac

SEQ ID NO: 5860406 - DNA, 25 bp, Homo sapien
tacttaccgacgtgtagtagcatct

SEQ ID NO: 5860407 - DNA, 25 bp, Homo sapien
catttgtacgcgatccttaggtaac

SEQ ID NO: 5860408 - DNA, 25 bp, Homo sapien
gctttaatacttcgcggtcgaatca

SEQ ID NO: 5860409 - DNA, 25 bp, Homo sapien
aggttcgtacgtcaattcgccttat

SEQ ID NO: 5860410 - DNA, 25 bp, Homo sapien
ctccatacttagtcgtacgcatact

SEQ ID NO: 5860411 - DNA, 25 bp, Homo sapien
caagtttacgcgttcggtagactta

SEQ ID NO: 5860412 - DNA, 25 bp, Homo sapien
cttctctacgcgacgatcataagat

SEQ ID NO: 5860413 - DNA, 25 bp, Homo sapien
tacatcccgaataacgtcgagaaag

SEQ ID NO: 5860414 - DNA, 25 bp, Homo sapien
accaattctacgcgatactcttcca

SEQ ID NO: 5860415 - DNA, 25 bp, Homo sapien
ggtgctacgatataaggcgttagat

SEQ ID NO: 5860416 - DNA, 25 bp, Homo sapien
tgtttgtaacgcgatgtgaaacgca

SEQ ID NO: 5860417 - DNA, 25 bp, Homo sapien
atacttatcgcgcgtgacttattcc

SEQ ID NO: 5860418 - DNA, 25 bp, Homo sapien
attggataccggttgcgataatctg

SEQ ID NO: 5860419 - DNA, 25 bp, Homo sapien
cctgttttgtaacgagcggaagaat

SEQ ID NO: 5860420 - DNA, 25 bp, Homo sapien
tctactcgtcggatcgttatgctaa

SEQ ID NO: 5860421 - DNA, 25 bp, Homo sapien
attattcgttgacgttacgctagcg

SEQ ID NO: 5860422 - DNA, 25 bp, Homo sapien
actttaagagtctatcgcgacacct

SEQ ID NO: 5860423 - DNA, 25 bp, Homo sapien
aactgggatcgtacgaagttcaaga

SEQ ID NO: 5860424 - DNA, 25 bp, Homo sapien
ttgagatatacgggtccgcagataa

SEQ ID NO: 5860425 - DNA, 25 bp, Homo sapien
atttcaactaacgaccgttgcacct

SEQ ID NO: 5860426 - DNA, 25 bp, Homo sapien
aagaacaattcgacgcgtaaagcag

SEQ ID NO: 5860427 - DNA, 25 bp, Homo sapien
ttaaagtacgatcgggcacgttaca

SEQ ID NO: 5860428 - DNA, 25 bp, Homo sapien
atgggagattagtcgcgtatgatct

SEQ ID NO: 5860429 - DNA, 25 bp, Homo sapien
caacacgtatcgcgacgaaaatagt

SEQ ID NO: 5860430 - DNA, 25 bp, Homo sapien
ctagcttgtttagtcgcgagactat

SEQ ID NO: 5860431 - DNA, 25 bp, Homo sapien
aattgttagtacggcgtcgtcaact

SEQ ID NO: 5860432 - DNA, 25 bp, Homo sapien
cccaatacttatacgcgctgagttt

SEQ ID NO: 5860433 - DNA, 25 bp, Homo sapien
gttgtggttacgcacgaattcattc

SEQ ID NO: 5860434 - DNA, 25 bp, Homo sapien
tagccacgcgtgacgtataaaaatc

SEQ ID NO: 5860435 - DNA, 25 bp, Homo sapien
tttgagacttgcgcgatactctcaa

SEQ ID NO: 5860436 - DNA, 25 bp, Homo sapien
aactctctatcgcgataccgtacaa

SEQ ID NO: 5860437 - DNA, 25 bp, Homo sapien
ctggatcttcgcgagactaaaaaag

SEQ ID NO: 5860438 - DNA, 25 bp, Homo sapien
taagctttagctcgcgtatgagttc

SEQ ID NO: 5860439 - DNA, 25 bp, Homo sapien
aaatactaccggcgatagttcagtg

SEQ ID NO: 5860440 - DNA, 25 bp, Homo sapien
caaacgagtaataccgcggttacta

SEQ ID NO: 5860441 - DNA, 25 bp, Homo sapien
ggatcaagcgatcgtaatgcaaagt

SEQ ID NO: 5860442 - DNA, 25 bp, Homo sapien
ttcaattcgatcggtaacgcgtgtt

SEQ ID NO: 5860443 - DNA, 25 bp, Homo sapien
cctgtgcttatgtatcgcgttcatt

SEQ ID NO: 5860444 - DNA, 25 bp, Homo sapien
ttaacttcgacgtaacacctgtctc

SEQ ID NO: 5860445 - DNA, 25 bp, Homo sapien
cattttcgacgtaattcgcagcgtt

SEQ ID NO: 5860446 - DNA, 25 bp, Homo sapien
ttctgacattcgatacgtcatggca

SEQ ID NO: 5860447 - DNA, 25 bp, Homo sapien
ttcgaccggaccgtcaagaattatt

SEQ ID NO: 5860448 - DNA, 25 bp, Homo sapien
tacttacggtaacgtcgtaaagcga

SEQ ID NO: 5860449 - DNA, 25 bp, Homo sapien
accgttgcgtcgtatgttaagattg

SEQ ID NO: 5860450 - DNA, 25 bp, Homo sapien
tctgctataacgtcgtgaccataca

SEQ ID NO: 5860451 - DNA, 25 bp, Homo sapien
cacgtagtcggtcgttatcctaaat

SEQ ID NO: 5860452 - DNA, 25 bp, Homo sapien
ggatttccggatcgagtaagaaaag

SEQ ID NO: 5860453 - DNA, 25 bp, Homo sapien
tgtatccgtctatcgacgaacacaa

SEQ ID NO: 5860454 - DNA, 25 bp, Homo sapien
gatatgtactagtcgtcggatacac

SEQ ID NO: 5860455 - DNA, 25 bp, Homo sapien
ttgagatagttgcgcgttgtgagtt

SEQ ID NO: 5860456 - DNA, 25 bp, Homo sapien
aaactcagctagttacgcgagcaat

SEQ ID NO: 5860457 - DNA, 25 bp, Homo sapien
gttggactatagaccgacgtagaat

SEQ ID NO: 5860458 - DNA, 25 bp, Homo sapien
attttccggacgtgatacgtcgaaa

SEQ ID NO: 5860459 - DNA, 25 bp, Homo sapien
gggtattagcgatcggataagacat

SEQ ID NO: 5860460 - DNA, 25 bp, Homo sapien
ttcgtttacgtcggacataatgtgg

SEQ ID NO: 5860461 - DNA, 25 bp, Homo sapien
cttgtgcgcccgaatacaaaatttg

SEQ ID NO: 5860462 - DNA, 25 bp, Homo sapien
actcaagtatgacgcgagcaattga

SEQ ID NO: 5860463 - DNA, 25 bp, Homo sapien
ttcgtcctccgatactcgatcaaat

SEQ ID NO: 5860464 - DNA, 25 bp, Homo sapien
gattaacgtacgatactcccatcga

SEQ ID NO: 5860465 - DNA, 25 bp, Homo sapien
atctcgcgtataatcgcgagagtta

SEQ ID NO: 5860466 - DNA, 25 bp, Homo sapien
cctaatccgtatacgatacaggtac

SEQ ID NO: 5860467 - DNA, 25 bp, Homo sapien
tagtctcgatgttgtacgagttcac

SEQ ID NO: 5860468 - DNA, 25 bp, Homo sapien
gaccagcgtcgaatatacgttaaca

SEQ ID NO: 5860469 - DNA, 25 bp, Homo sapien
atgtgccgcacgatactacgaaaaa

SEQ ID NO: 5860470 - DNA, 25 bp, Homo sapien
aatgtacgatagtagtgcggaggta

SEQ ID NO: 5860471 - DNA, 25 bp, Homo sapien
gcaatttacgatcgaccccaacata

SEQ ID NO: 5860472 - DNA, 25 bp, Homo sapien
taatatcctcgagcgaatagggtag

SEQ ID NO: 5860473 - DNA, 25 bp, Homo sapien
aagatatattgaccgcggttgaacg

SEQ ID NO: 5860474 - DNA, 25 bp, Homo sapien
gttgaaggtattacgccgagtttga

SEQ ID NO: 5860475 - DNA, 25 bp, Homo sapien
tcagataacgcgtactcgtctttac

SEQ ID NO: 5860476 - DNA, 25 bp, Homo sapien
tgttctacgtctactatcgcgattg

SEQ ID NO: 5860477 - DNA, 25 bp, Homo sapien
tatttccgccgtattacgaatcgag

SEQ ID NO: 5860478 - DNA, 25 bp, Homo sapien
tatcgtggccgatattacgaatctc

SEQ ID NO: 5860479 - DNA, 25 bp, Homo sapien
tgaattcgtcggactactaggttac

SEQ ID NO: 5860480 - DNA, 25 bp, Homo sapien
tcttgagccgattacgttacaaacc

SEQ ID NO: 5860481 - DNA, 25 bp, Homo sapien
gaacctagtcgcttgtacgctaaaa

SEQ ID NO: 5860482 - DNA, 25 bp, Homo sapien
tcgtgatacgttattcgcgccaaat

SEQ ID NO: 5860483 - DNA, 25 bp, Homo sapien
tatacctgatacgtcgtgctgctaa

SEQ ID NO: 5860484 - DNA, 25 bp, Homo sapien
atataccgcgcttaatgtagcacgt

SEQ ID NO: 5860485 - DNA, 25 bp, Homo sapien
ggcgtttactaatcgcgcattagaa

SEQ ID NO: 5860486 - DNA, 25 bp, Homo sapien
atattgatgtcgtatcgcgagtggt

SEQ ID NO: 5860487 - DNA, 25 bp, Homo sapien
gatttgacgcgtaagtagtgctcta

SEQ ID NO: 5860488 - DNA, 25 bp, Homo sapien
ccaagttcgtattacgacgagttac

SEQ ID NO: 5860489 - DNA, 25 bp, Homo sapien
ctgtctataatcggtcgtccatatg

SEQ ID NO: 5860490 - DNA, 25 bp, Homo sapien
tttccgactatcgcgctaagtttgt

SEQ ID NO: 5860491 - DNA, 25 bp, Homo sapien
tttagccgcctaattcgtactgatg

SEQ ID NO: 5860492 - DNA, 25 bp, Homo sapien
ttgcggcgggaacgcatattataaa

SEQ ID NO: 5860493 - DNA, 25 bp, Homo sapien
ttatttgcgactatcgaacgtgacc

SEQ ID NO: 5860494 - DNA, 25 bp, Homo sapien
tatctttcgacactaggcgtcaatg

SEQ ID NO: 5860495 - DNA, 25 bp, Homo sapien
gtaggactatcgtacgcgataacat

SEQ ID NO: 5860496 - DNA, 25 bp, Homo sapien
gtatttcattaaagcgcggcgtttg

SEQ ID NO: 5860497 - DNA, 25 bp, Homo sapien
cttctgtgcgaccgatatactagat

SEQ ID NO: 5860498 - DNA, 25 bp, Homo sapien
ttctcctatgtcgacgcgaaacaaa

SEQ ID NO: 5860499 - DNA, 25 bp, Homo sapien
agtcttaacgcgcgtctatcatttc

SEQ ID NO: 5860500 - DNA, 25 bp, Homo sapien
tctatagcggacgtaattagagcga

SEQ ID NO: 5860501 - DNA, 25 bp, Homo sapien
agctatcggtagtacgaataaaccc

SEQ ID NO: 5860502 - DNA, 25 bp, Homo sapien
agattccgcggtcacgatagatatt

SEQ ID NO: 5860503 - DNA, 25 bp, Homo sapien
catgtgagtcgcgtcagtaatatag

SEQ ID NO: 5860504 - DNA, 25 bp, Homo sapien
catctccgtaagacaatcggcattt

SEQ ID NO: 5860505 - DNA, 25 bp, Homo sapien
gatagatatacgcacgcgaaatagg

SEQ ID NO: 5860506 - DNA, 25 bp, Homo sapien
ctgttacgcagtcgactatttaagc

SEQ ID NO: 5860507 - DNA, 25 bp, Homo sapien
ataaaagatctacgcgctagcgcat

SEQ ID NO: 5860508 - DNA, 25 bp, Homo sapien
taacgttagcgcaaagcgccataat

SEQ ID NO: 5860509 - DNA, 25 bp, Homo sapien
gtggagcgaatagtacggctataaa

SEQ ID NO: 5860510 - DNA, 25 bp, Homo sapien
tgtatcttacgaatcggccagatct

SEQ ID NO: 5860511 - DNA, 25 bp, Homo sapien
aaagctgcgacttaccgatattcgt

SEQ ID NO: 5860512 - DNA, 25 bp, Homo sapien
ataggtattatcagcgcgccgtaat

SEQ ID NO: 5860513 - DNA, 25 bp, Homo sapien
acacaacgcgagttagtagtagtct

SEQ ID NO: 5860514 - DNA, 25 bp, Homo sapien
aaattgagtcgcgtataggaccagt

SEQ ID NO: 5860515 - DNA, 25 bp, Homo sapien
actagtatcgcgcatacgtaattcg

SEQ ID NO: 5860516 - DNA, 25 bp, Homo sapien
ttagtatatacgcacgtcgcgaaac

SEQ ID NO: 5860517 - DNA, 25 bp, Homo sapien
gaaggcgctttcgacgttaatctat

SEQ ID NO: 5860518 - DNA, 25 bp, Homo sapien
atcatgggtaattcgcgactaacgt

SEQ ID NO: 5860519 - DNA, 25 bp, Homo sapien
tagtcctaccgtatcgactcacttt

SEQ ID NO: 5860520 - DNA, 25 bp, Homo sapien
atgacacgtaagacgcgaatacatc

SEQ ID NO: 5860521 - DNA, 25 bp, Homo sapien
taaaagcgcgctaacgtatcctatg

SEQ ID NO: 5860522 - DNA, 25 bp, Homo sapien
ttacaaataaccgcggaccaactca

SEQ ID NO: 5860523 - DNA, 25 bp, Homo sapien
ttttatctacacgcgtcgatgtgag

SEQ ID NO: 5860524 - DNA, 25 bp, Homo sapien
tggactcgcgacatactgtttaaga

SEQ ID NO: 5860525 - DNA, 25 bp, Homo sapien
ttcttaactatcgagtcgctagagc

SEQ ID NO: 5860526 - DNA, 25 bp, Homo sapien
tacgattactccgagcgtagaatga

SEQ ID NO: 5860527 - DNA, 25 bp, Homo sapien
tgtagatcgtcgtaatgcgaaaacc

SEQ ID NO: 5860528 - DNA, 25 bp, Homo sapien
ttgtgacaatcgcgtatcggatctt

SEQ ID NO: 5860529 - DNA, 25 bp, Homo sapien
accgtacgataaacgcgtcaattct

SEQ ID NO: 5860530 - DNA, 25 bp, Homo sapien
gtatgcgtcgtacgaagcatcttaa

SEQ ID NO: 5860531 - DNA, 25 bp, Homo sapien
gaccgataaacttcgcgcacttttt

SEQ ID NO: 5860532 - DNA, 25 bp, Homo sapien
atttttatcgcgacgttacaggtgg

SEQ ID NO: 5860533 - DNA, 25 bp, Homo sapien
tcgacctcgatatccgttataccaa

SEQ ID NO: 5860534 - DNA, 25 bp, Homo sapien
agccttcgcgttatatgcgcattta

SEQ ID NO: 5860535 - DNA, 25 bp, Homo sapien
cctatccgacgagcgtcatataatt

SEQ ID NO: 5860536 - DNA, 25 bp, Homo sapien
ttcttacgcgaggtacgattgcata

SEQ ID NO: 5860537 - DNA, 25 bp, Homo sapien
taaaagcccgttacgcctataactc

SEQ ID NO: 5860538 - DNA, 25 bp, Homo sapien
tcattacgtgttcgcgaattcctac

SEQ ID NO: 5860539 - DNA, 25 bp, Homo sapien
ttagtgacctagtcgcggaattaag

SEQ ID NO: 5860540 - DNA, 25 bp, Homo sapien
gtgctgacgattagtcgtctcttaa

SEQ ID NO: 5860541 - DNA, 25 bp, Homo sapien
ccatactcgacggtatacaacacat

SEQ ID NO: 5860542 - DNA, 25 bp, Homo sapien
ctactctcgcgttatgttgtctaga

SEQ ID NO: 5860543 - DNA, 25 bp, Homo sapien
taatattgcggacgtgttagcggat

SEQ ID NO: 5860544 - DNA, 25 bp, Homo sapien
ttgacacgaaacgtcgtacgtatca

SEQ ID NO: 5860545 - DNA, 25 bp, Homo sapien
aaaagtatcattgcgaccgtctgac

SEQ ID NO: 5860546 - DNA, 25 bp, Homo sapien
atcctgtcgaccgtacgtgtataaa

SEQ ID NO: 5860547 - DNA, 25 bp, Homo sapien
ggatatgctgtacgcgtaatagaca

SEQ ID NO: 5860548 - DNA, 25 bp, Homo sapien
acagcatcgcgttatcggtatacat

SEQ ID NO: 5860549 - DNA, 25 bp, Homo sapien
gggagacgtcggacttgtattatat

SEQ ID NO: 5860550 - DNA, 25 bp, Homo sapien
tctaccaattaacgtcccgaattgg

SEQ ID NO: 5860551 - DNA, 25 bp, Homo sapien
ctgtctcggtgcgctatagatttta

SEQ ID NO: 5860552 - DNA, 25 bp, Homo sapien
agtttagaccgcgaagtatcaccta

SEQ ID NO: 5860553 - DNA, 25 bp, Homo sapien
atataatacggaccgtgatcgctag

SEQ ID NO: 5860554 - DNA, 25 bp, Homo sapien
acgcgtggtcgtaatacgtaataac

SEQ ID NO: 5860555 - DNA, 25 bp, Homo sapien
gaaagttatacgtggcgactaaacc

SEQ ID NO: 5860556 - DNA, 25 bp, Homo sapien
taatctgtacctaccgcgatggaaa

SEQ ID NO: 5860557 - DNA, 25 bp, Homo sapien
agctagcttataacgcgccgtaaat

SEQ ID NO: 5860558 - DNA, 25 bp, Homo sapien
gtaatgtacgttagacgcgtattgg

SEQ ID NO: 5860559 - DNA, 25 bp, Homo sapien
actctagcgtaccgtctattgattc

SEQ ID NO: 5860560 - DNA, 25 bp, Homo sapien
gtggaaacgaaccgtgcgtaataat

SEQ ID NO: 5860561 - DNA, 25 bp, Homo sapien
gttttcgtagattgcgacgaatagg

SEQ ID NO: 5860562 - DNA, 25 bp, Homo sapien
atgttacgcgtacgtagagaaccaa

SEQ ID NO: 5860563 - DNA, 25 bp, Homo sapien
gttaggcgtatatcacgcgacaaat

SEQ ID NO: 5860564 - DNA, 25 bp, Homo sapien
acattgcgataacgctatacggcaa

SEQ ID NO: 5860565 - DNA, 25 bp, Homo sapien
gtgaatatcgttccgacgatggtta

SEQ ID NO: 5860566 - DNA, 25 bp, Homo sapien
gttctgtcgcgtcttagatatacgt

SEQ ID NO: 5860567 - DNA, 25 bp, Homo sapien
gtcctagatccgtcgtatcatagtt

SEQ ID NO: 5860568 - DNA, 25 bp, Homo sapien
aagatggtacgttgatacgatgcgt

SEQ ID NO: 5860569 - DNA, 25 bp, Homo sapien
ttgggatacgtcgcgggaatattat

SEQ ID NO: 5860570 - DNA, 25 bp, Homo sapien
taagactacgccgataacgcactta

SEQ ID NO: 5860571 - DNA, 25 bp, Homo sapien
actatggtcgacgcgataactctat

SEQ ID NO: 5860572 - DNA, 25 bp, Homo sapien
ttactttgacgttcgactaggcaag

SEQ ID NO: 5860573 - DNA, 25 bp, Homo sapien
atcttatcgcatacgccgaatcctt

SEQ ID NO: 5860574 - DNA, 25 bp, Homo sapien
ccttttcgcgctatagtatccaaga

SEQ ID NO: 5860575 - DNA, 25 bp, Homo sapien
ctatctctatgcgacgcaagaatct

SEQ ID NO: 5860576 - DNA, 25 bp, Homo sapien
tgcgtatacgtatttcgcggtttag

SEQ ID NO: 5860577 - DNA, 25 bp, Homo sapien
agaagacgcttagtaacggttctca

SEQ ID NO: 5860578 - DNA, 25 bp, Homo sapien
gcagtactcgcttcgcataattttg

SEQ ID NO: 5860579 - DNA, 25 bp, Homo sapien
ttggcactagttcgtgcgaaatatg

SEQ ID NO: 5860580 - DNA, 25 bp, Homo sapien
tactgctaacgcgacctaatagagt

SEQ ID NO: 5860581 - DNA, 25 bp, Homo sapien
gacatcaactatcgcgtacgttatc

SEQ ID NO: 5860582 - DNA, 25 bp, Homo sapien
atctatcgtcgtatagagcgaactc

SEQ ID NO: 5860583 - DNA, 25 bp, Homo sapien
attcgacagccgatatacgagactt

SEQ ID NO: 5860584 - DNA, 25 bp, Homo sapien
tgtttccggttgatacgcgattcaa

SEQ ID NO: 5860585 - DNA, 25 bp, Homo sapien
tatgttgttatcgcgctatgacagg

SEQ ID NO: 5860586 - DNA, 25 bp, Homo sapien
tgtgcaatcgcgaatagcggtaatt

SEQ ID NO: 5860587 - DNA, 25 bp, Homo sapien
gctcatgtaacatagcgcgattaag

SEQ ID NO: 5860588 - DNA, 25 bp, Homo sapien
ctgtattctcgttatgcgcattgtg

SEQ ID NO: 5860589 - DNA, 25 bp, Homo sapien
ttgaatcgcctatcatacgggtact

SEQ ID NO: 5860590 - DNA, 25 bp, Homo sapien
agtgcctcgacgtaacgcaaaataa

SEQ ID NO: 5860591 - DNA, 25 bp, Homo sapien
ttaagtcgcggtcaatcgttgtact

SEQ ID NO: 5860592 - DNA, 25 bp, Homo sapien
atcaagagccgctacgtatagttac

SEQ ID NO: 5860593 - DNA, 25 bp, Homo sapien
gaattatagtacgccgcctaaggta

SEQ ID NO: 5860594 - DNA, 25 bp, Homo sapien
agcgttggacgttgcgaactaaaaa

SEQ ID NO: 5860595 - DNA, 25 bp, Homo sapien
cattttataatgcgcgctaggggta

SEQ ID NO: 5860596 - DNA, 25 bp, Homo sapien
ccgacaaacctctcgcgatttttta

SEQ ID NO: 5860597 - DNA, 25 bp, Homo sapien
tacaactagatagtcgcggaaggta

SEQ ID NO: 5860598 - DNA, 25 bp, Homo sapien
agcgtaacttataccgcgttcacat

SEQ ID NO: 5860599 - DNA, 25 bp, Homo sapien
tatagccgacgttattcggtacttc

SEQ ID NO: 5860600 - DNA, 25 bp, Homo sapien
ttggaatacgtactcggacttgatg

SEQ ID NO: 5860601 - DNA, 25 bp, Homo sapien
gtatgctacgcgactagtaatcaac

SEQ ID NO: 5860602 - DNA, 25 bp, Homo sapien
gtgttgtattcgagcccgacaatat

SEQ ID NO: 5860603 - DNA, 25 bp, Homo sapien
cattcatcgcgcgaagtaatgaaca

SEQ ID NO: 5860604 - DNA, 25 bp, Homo sapien
ttacgtgtatcagcgtacggatcta

SEQ ID NO: 5860605 - DNA, 25 bp, Homo sapien
attcaagttcgacacgctatgtcgt

SEQ ID NO: 5860606 - DNA, 25 bp, Homo sapien
agacaggtataaccgacgcttatac

SEQ ID NO: 5860607 - DNA, 25 bp, Homo sapien
catttacggcgtaataatctgccag

SEQ ID NO: 5860608 - DNA, 25 bp, Homo sapien
atcaattagatatcgccgctgtgct

SEQ ID NO: 5860609 - DNA, 25 bp, Homo sapien
tctaaattcgactcgaacgtctctc

SEQ ID NO: 5860610 - DNA, 25 bp, Homo sapien
agctaacgtcgcattctagcataga

SEQ ID NO: 5860611 - DNA, 25 bp, Homo sapien
agtattcgatcgcgtattaaccgac

SEQ ID NO: 5860612 - DNA, 25 bp, Homo sapien
attgcagtacgtaacctcgttgagt

SEQ ID NO: 5860613 - DNA, 25 bp, Homo sapien
gcatgactagtcgcgtaacaatagt

SEQ ID NO: 5860614 - DNA, 25 bp, Homo sapien
ctgtttcggagcgaatatgctttgt

SEQ ID NO: 5860615 - DNA, 25 bp, Homo sapien
atagcgtacgtccgatctaaggtta

SEQ ID NO: 5860616 - DNA, 25 bp, Homo sapien
cttgattagcgtagatcgctaacca

SEQ ID NO: 5860617 - DNA, 25 bp, Homo sapien
taaagcgtatcatatcgcgacgtgt

SEQ ID NO: 5860618 - DNA, 25 bp, Homo sapien
cacatctacgacgctatagcaatgt

SEQ ID NO: 5860619 - DNA, 25 bp, Homo sapien
gactttcctaacttacgcgtgtcat

SEQ ID NO: 5860620 - DNA, 25 bp, Homo sapien
tacctccggtataaacgcgattaga

SEQ ID NO: 5860621 - DNA, 25 bp, Homo sapien
ctttcatatcggtcgacgttcatct

SEQ ID NO: 5860622 - DNA, 25 bp, Homo sapien
tgtaaactaaacgttgcggttacgc

SEQ ID NO: 5860623 - DNA, 25 bp, Homo sapien
atcgatcgacgcgttatgaaaacga

SEQ ID NO: 5860624 - DNA, 25 bp, Homo sapien
ataagtcggtatcgcgacatacatg

SEQ ID NO: 5860625 - DNA, 25 bp, Homo sapien
aatgcatcgcgagttatagggtatc

SEQ ID NO: 5860626 - DNA, 25 bp, Homo sapien
tgttcaattagtcgcgaccaggatt

SEQ ID NO: 5860627 - DNA, 25 bp, Homo sapien
tgacccttcgcgttaggtatattct

SEQ ID NO: 5860628 - DNA, 25 bp, Homo sapien
ctagttcgcgtattgcaaccttcta

SEQ ID NO: 5860629 - DNA, 25 bp, Homo sapien
attgtccgtatattcgcgcgtagtt

SEQ ID NO: 5860630 - DNA, 25 bp, Homo sapien
cagatcgtatcgtcggacttaatct

SEQ ID NO: 5860631 - DNA, 25 bp, Homo sapien
tgagagattcttcgacccgagaaaa

SEQ ID NO: 5860632 - DNA, 25 bp, Homo sapien
attaaacgcgcgtataacttgggca

SEQ ID NO: 5860633 - DNA, 25 bp, Homo sapien
cggaaataggttcgaatcgactatg

SEQ ID NO: 5860634 - DNA, 25 bp, Homo sapien
ctcttttcgcgcccaattatagtag

SEQ ID NO: 5860635 - DNA, 25 bp, Homo sapien
acaatacttattagcgcgtccgtac

SEQ ID NO: 5860636 - DNA, 25 bp, Homo sapien
tacatccgcgaaacttatgatgcca

SEQ ID NO: 5860637 - DNA, 25 bp, Homo sapien
aacaatcggcgtaacgactaaatcg

SEQ ID NO: 5860638 - DNA, 25 bp, Homo sapien
tgctctcttaatacggtcgcaactt

SEQ ID NO: 5860639 - DNA, 25 bp, Homo sapien
tatgcagtttatcgcgggatttacc

SEQ ID NO: 5860640 - DNA, 25 bp, Homo sapien
atacacgcttatagcgcgtctacat

SEQ ID NO: 5860641 - DNA, 25 bp, Homo sapien
atattttcatacgtcgtgccgcaca

SEQ ID NO: 5860642 - DNA, 25 bp, Homo sapien
cataaactagtatcgcgacattccg

SEQ ID NO: 5860643 - DNA, 25 bp, Homo sapien
ccatatcgcgcgtaatagtatatgc

SEQ ID NO: 5860644 - DNA, 25 bp, Homo sapien
tgtcattagatcgcgatagtgttgc

SEQ ID NO: 5860645 - DNA, 25 bp, Homo sapien
tcgaatcgcgaacgttactttctag

SEQ ID NO: 5860646 - DNA, 25 bp, Homo sapien
gcggttacgtacgttacgatcatat

SEQ ID NO: 5860647 - DNA, 25 bp, Homo sapien
gcatttttgcgtcgaactattgcca

SEQ ID NO: 5860648 - DNA, 25 bp, Homo sapien
actatacgcgagttagaacgaacgt

SEQ ID NO: 5860649 - DNA, 25 bp, Homo sapien
gtagcccgcgcttagtatatttctt

SEQ ID NO: 5860650 - DNA, 25 bp, Homo sapien
aatcatccctatcgccgatattgac

SEQ ID NO: 5860651 - DNA, 25 bp, Homo sapien
tcaaaggcgtcgtagatctctagaa

SEQ ID NO: 5860652 - DNA, 25 bp, Homo sapien
tcactgagtttcgtccgacatttag

SEQ ID NO: 5860653 - DNA, 25 bp, Homo sapien
atctatacgcctaaacccgtctgta

SEQ ID NO: 5860654 - DNA, 25 bp, Homo sapien
gataatttatcgcgacgtgtcgtac

SEQ ID NO: 5860655 - DNA, 25 bp, Homo sapien
aataaaatcgttcgacacgccgaca

SEQ ID NO: 5860656 - DNA, 25 bp, Homo sapien
gcagatgacgcgaatatcgtttttg

SEQ ID NO: 5860657 - DNA, 25 bp, Homo sapien
tactagcgcgactaagatagactag

SEQ ID NO: 5860658 - DNA, 25 bp, Homo sapien
taacatgccgataccgctagtacat

SEQ ID NO: 5860659 - DNA, 25 bp, Homo sapien
agctgatagcgcgagagtatattct

SEQ ID NO: 5860660 - DNA, 25 bp, Homo sapien
tctagatcgcgcaggttatctatac

SEQ ID NO: 5860661 - DNA, 25 bp, Homo sapien
tccaaggtcgacctaacgacataat

SEQ ID NO: 5860662 - DNA, 25 bp, Homo sapien
atttaccgttactatacgccctgct

SEQ ID NO: 5860663 - DNA, 25 bp, Homo sapien
ttatccatcgcggaatacgagagtt

SEQ ID NO: 5860664 - DNA, 25 bp, Homo sapien
ctatcccgttcgagtatcgtattca

SEQ ID NO: 5860665 - DNA, 25 bp, Homo sapien
taacactcgcgctcttatactttcc

SEQ ID NO: 5860666 - DNA, 25 bp, Homo sapien
taggagtacgttcgcgtagtttcaa

SEQ ID NO: 5860667 - DNA, 25 bp, Homo sapien
catatgaaccgcggttcgttaacaa

SEQ ID NO: 5860668 - DNA, 25 bp, Homo sapien
cttacgcgcgtcaatagttcgtaaa

SEQ ID NO: 5860669 - DNA, 25 bp, Homo sapien
taactccatgttatcgcgagttggt

SEQ ID NO: 5860670 - DNA, 25 bp, Homo sapien
tatttagttagcgtacgacgcaagg

SEQ ID NO: 5860671 - DNA, 25 bp, Homo sapien
atgggcgcgttaaccggtatattta

SEQ ID NO: 5860672 - DNA, 25 bp, Homo sapien
cctactgaccgcgctattatgatta

SEQ ID NO: 5860673 - DNA, 25 bp, Homo sapien
taaacgacgcgaaccgtatactaca

SEQ ID NO: 5860674 - DNA, 25 bp, Homo sapien
tctgtttacgcgctacgtattgatg

SEQ ID NO: 5860675 - DNA, 25 bp, Homo sapien
attgtgtttcgcgtgagacgttttg

SEQ ID NO: 5860676 - DNA, 25 bp, Homo sapien
acaacagttcgacgtacgataatcg

SEQ ID NO: 5860677 - DNA, 25 bp, Homo sapien
tatagactaacgttcgcgttgtctc

SEQ ID NO: 5860678 - DNA, 25 bp, Homo sapien
attatcctaggtcgtcgaatatcgg

SEQ ID NO: 5860679 - DNA, 25 bp, Homo sapien
gcctatgcgctatgtaacgataatg

SEQ ID NO: 5860680 - DNA, 25 bp, Homo sapien
gtatagatcgatcgtaacgacttgc

SEQ ID NO: 5860681 - DNA, 25 bp, Homo sapien
acccatccgacgcaatactttgtta

SEQ ID NO: 5860682 - DNA, 25 bp, Homo sapien
tgtaattagcgtcggaacaggattc

SEQ ID NO: 5860683 - DNA, 25 bp, Homo sapien
ggtaacgtcgatcgtacagtttttc

SEQ ID NO: 5860684 - DNA, 25 bp, Homo sapien
tccgatagcgcgctagtattttaga

SEQ ID NO: 5860685 - DNA, 25 bp, Homo sapien
tctgcttagggtcgcgtaaatgaaa

SEQ ID NO: 5860686 - DNA, 25 bp, Homo sapien
gctgaaagcgcgttataccttatga

SEQ ID NO: 5860687 - DNA, 25 bp, Homo sapien
gagagttacgatcgacctaggttaa

SEQ ID NO: 5860688 - DNA, 25 bp, Homo sapien
ggtcagccgatattcgtacaactaa

SEQ ID NO: 5860689 - DNA, 25 bp, Homo sapien
cattacatcgttgcgactactcgaa

SEQ ID NO: 5860690 - DNA, 25 bp, Homo sapien
aattcacgtccgagctatagcgatt

SEQ ID NO: 5860691 - DNA, 25 bp, Homo sapien
aacttatagacccgcgtatgccaaa

SEQ ID NO: 5860692 - DNA, 25 bp, Homo sapien
caaagtctctactcgcgattttacg

SEQ ID NO: 5860693 - DNA, 25 bp, Homo sapien
ttgaggataagtgcgcgagatcata

SEQ ID NO: 5860694 - DNA, 25 bp, Homo sapien
gtattgtacgtcagtcgcgtgttta

SEQ ID NO: 5860695 - DNA, 25 bp, Homo sapien
gggagttgcgatattcgacatacat

SEQ ID NO: 5860696 - DNA, 25 bp, Homo sapien
attccagcggcgtagtataatcctt

SEQ ID NO: 5860697 - DNA, 25 bp, Homo sapien
aaaagcacgggcgattagtgaactt

SEQ ID NO: 5860698 - DNA, 25 bp, Homo sapien
aaagtctctagttacgccggaattc

SEQ ID NO: 5860699 - DNA, 25 bp, Homo sapien
taggtctcttagacgcgtatattcg

SEQ ID NO: 5860700 - DNA, 25 bp, Homo sapien
ttacattcgcgactactaactcacc

SEQ ID NO: 5860701 - DNA, 25 bp, Homo sapien
agtctgcctataatcggcgcatata

SEQ ID NO: 5860702 - DNA, 25 bp, Homo sapien
aaatgtgctataagtcgcgcaggta

SEQ ID NO: 5860703 - DNA, 25 bp, Homo sapien
ggtttccggcaatacttcggtataa

SEQ ID NO: 5860704 - DNA, 25 bp, Homo sapien
gttatatacgcggcagttaaactcg

SEQ ID NO: 5860705 - DNA, 25 bp, Homo sapien
attcgtctatcatgtcgcgatagag

SEQ ID NO: 5860706 - DNA, 25 bp, Homo sapien
gaccagcgttagagtatcgatgaaa

SEQ ID NO: 5860707 - DNA, 25 bp, Homo sapien
ttttggacggtcgtacaagaagaca

SEQ ID NO: 5860708 - DNA, 25 bp, Homo sapien
gatcgttaattcgcgaccgattagt

SEQ ID NO: 5860709 - DNA, 25 bp, Homo sapien
tcatttgaccttagcgcgaatttcc

SEQ ID NO: 5860710 - DNA, 25 bp, Homo sapien
taataagttacacgactcgtcgcgt

SEQ ID NO: 5860711 - DNA, 25 bp, Homo sapien
tccttaaaacgcgcgagtaattcgt

SEQ ID NO: 5860712 - DNA, 25 bp, Homo sapien
ttagagtaccggttaacgcgttcat

SEQ ID NO: 5860713 - DNA, 25 bp, Homo sapien
tccaaactaccgcgtatgtgattga

SEQ ID NO: 5860714 - DNA, 25 bp, Homo sapien
ctctcttgatattagcgcgcatttg

SEQ ID NO: 5860715 - DNA, 25 bp, Homo sapien
aactttactacgtaccggcttcatg

SEQ ID NO: 5860716 - DNA, 25 bp, Homo sapien
gcaatacggcgtattacgtactgta

SEQ ID NO: 5860717 - DNA, 25 bp, Homo sapien
agtagttcgcgtaagggtagctata

SEQ ID NO: 5860718 - DNA, 25 bp, Homo sapien
gaccttgacgcgagcttaaaaagaa

SEQ ID NO: 5860719 - DNA, 25 bp, Homo sapien
tagatacctaatacgtcggacctgt

SEQ ID NO: 5860720 - DNA, 25 bp, Homo sapien
ggagtcgtcgcgaaacatattaaag

SEQ ID NO: 5860721 - DNA, 25 bp, Homo sapien
tatagatacgtcgtgacgataggag

SEQ ID NO: 5860722 - DNA, 25 bp, Homo sapien
aatgggcgtagaaccgctatatcat

SEQ ID NO: 5860723 - DNA, 25 bp, Homo sapien
gagagactatcgtttagcgtgttgt

SEQ ID NO: 5860724 - DNA, 25 bp, Homo sapien
tcagaggcgacgtaagattagtttc

SEQ ID NO: 5860725 - DNA, 25 bp, Homo sapien
ctaatttatgtcgcggttatcctcc

SEQ ID NO: 5860726 - DNA, 25 bp, Homo sapien
tgtgataacgcgcgaagtacagaat

SEQ ID NO: 5860727 - DNA, 25 bp, Homo sapien
aaagggcgcaacgtagctatttgat

SEQ ID NO: 5860728 - DNA, 25 bp, Homo sapien
atgatacgcacatagttcggctttg

SEQ ID NO: 5860729 - DNA, 25 bp, Homo sapien
agtgcccgctactagtacgattaat

SEQ ID NO: 5860730 - DNA, 25 bp, Homo sapien
tagacaacgcgtgaacgtctttaga

SEQ ID NO: 5860731 - DNA, 25 bp, Homo sapien
gagtatcacgataaccgtatggttg

SEQ ID NO: 5860732 - DNA, 25 bp, Homo sapien
agtgataagtatcgctcgttggaca

SEQ ID NO: 5860733 - DNA, 25 bp, Homo sapien
attgaattcgcacgtcgtagtcgat

SEQ ID NO: 5860734 - DNA, 25 bp, Homo sapien
aactatcgtcgcggcgttattaatg

SEQ ID NO: 5860735 - DNA, 25 bp, Homo sapien
gtgtttgtactccgacgataaaacc

SEQ ID NO: 5860736 - DNA, 25 bp, Homo sapien
gtcgctactataacgcgcgttagta

SEQ ID NO: 5860737 - DNA, 25 bp, Homo sapien
tccacatacgcggtagacctatctt

SEQ ID NO: 5860738 - DNA, 25 bp, Homo sapien
gtcatttatcgcgaaccgttggaag

SEQ ID NO: 5860739 - DNA, 25 bp, Homo sapien
cttaggcacgactacggattagaac

SEQ ID NO: 5860740 - DNA, 25 bp, Homo sapien
tggtaataaagcgccgatcccaaca

SEQ ID NO: 5860741 - DNA, 25 bp, Homo sapien
gatgctcgcgctatttcgattgaca

SEQ ID NO: 5860742 - DNA, 25 bp, Homo sapien
atcttctacgacgtcgctatgccaa

SEQ ID NO: 5860743 - DNA, 25 bp, Homo sapien
tgtttgactaacgcctacgctacgt

SEQ ID NO: 5860744 - DNA, 25 bp, Homo sapien
actaattcgtacgcgagacttgagc

SEQ ID NO: 5860745 - DNA, 25 bp, Homo sapien
tggtaatatcgtggtaccgctgcat

SEQ ID NO: 5860746 - DNA, 25 bp, Homo sapien
caatattactcgcgcgttacaacgg

SEQ ID NO: 5860747 - DNA, 25 bp, Homo sapien
gtaatgcgttaatacgtccacgcac

SEQ ID NO: 5860748 - DNA, 25 bp, Homo sapien
cagcaccgtatcgccgataagaaaa

SEQ ID NO: 5860749 - DNA, 25 bp, Homo sapien
agatctgcgctataagcgagagtca

SEQ ID NO: 5860750 - DNA, 25 bp, Homo sapien
gcatctgagagtccgcgtaagtaat

SEQ ID NO: 5860751 - DNA, 25 bp, Homo sapien
gtcatgtagcgtagtcgatcaaacg

SEQ ID NO: 5860752 - DNA, 25 bp, Homo sapien
ataagataccacgcgtcgaggctta

SEQ ID NO: 5860753 - DNA, 25 bp, Homo sapien
accatcagttacgcgcgtacatctt

SEQ ID NO: 5860754 - DNA, 25 bp, Homo sapien
agctaatgcgtacggtatctaggag

SEQ ID NO: 5860755 - DNA, 25 bp, Homo sapien
ggactgttaacgcggtatgtgtgat

SEQ ID NO: 5860756 - DNA, 25 bp, Homo sapien
aggactacgacgatcgtctcatgtt

SEQ ID NO: 5860757 - DNA, 25 bp, Homo sapien
atatggcgccgataggtattcttcg

SEQ ID NO: 5860758 - DNA, 25 bp, Homo sapien
tgcagcattacgtgcgcgaaacatt

SEQ ID NO: 5860759 - DNA, 25 bp, Homo sapien
aggtaacgctttcggtctatttgcc

SEQ ID NO: 5860760 - DNA, 25 bp, Homo sapien
attgagcgcgtataacgacgaggat

SEQ ID NO: 5860761 - DNA, 25 bp, Homo sapien
ctcgtggcgtaatcgactatgatca

SEQ ID NO: 5860762 - DNA, 25 bp, Homo sapien
taggagcgatccgtcgctaaaattc

SEQ ID NO: 5860763 - DNA, 25 bp, Homo sapien
cgtttactcgctgatcgtacttgtc

SEQ ID NO: 5860764 - DNA, 25 bp, Homo sapien
agcctaatcccgatatacgagctac

SEQ ID NO: 5860765 - DNA, 25 bp, Homo sapien
gcgtgcgcggacgtatatctatata

SEQ ID NO: 5860766 - DNA, 25 bp, Homo sapien
ggcattgcgtagtctgtcgatactt

SEQ ID NO: 5860767 - DNA, 25 bp, Homo sapien
ttcatgtacgaccccgctaagtatg

SEQ ID NO: 5860768 - DNA, 25 bp, Homo sapien
agaatttgataacgtacggccgacc

SEQ ID NO: 5860769 - DNA, 25 bp, Homo sapien
acgtgacgactagcgtgatatatcg

SEQ ID NO: 5860770 - DNA, 25 bp, Homo sapien
tggcctagcgtcgtactacttttga

SEQ ID NO: 5860771 - DNA, 25 bp, Homo sapien
cagatctagagctacgcggtttagt

SEQ ID NO: 5860772 - DNA, 25 bp, Homo sapien
gttcttccggcgtacgttatgaaag

SEQ ID NO: 5860773 - DNA, 25 bp, Homo sapien
cgcattggtatcggtcgaaaatgga

SEQ ID NO: 5860774 - DNA, 25 bp, Homo sapien
gtctcgtacgttcgcgaacaattca

SEQ ID NO: 5860775 - DNA, 25 bp, Homo sapien
cgcgtttcgcgactactaatcttag

SEQ ID NO: 5860776 - DNA, 25 bp, Homo sapien
ctcatgataagtcggcgcgttctta

SEQ ID NO: 5860777 - DNA, 25 bp, Homo sapien
cacggataagtacgttcggtctcta

SEQ ID NO: 5860778 - DNA, 25 bp, Homo sapien
aaagagcaacctaatcgcggcaatc

SEQ ID NO: 5860779 - DNA, 25 bp, Homo sapien
cagtaagcgtaactatcgagactcc

SEQ ID NO: 5860780 - DNA, 25 bp, Homo sapien
ttcgccgcttttaacgcggagttat

SEQ ID NO: 5860781 - DNA, 25 bp, Homo sapien
ttatcctccggacgtaaataggacg

SEQ ID NO: 5860782 - DNA, 25 bp, Homo sapien
aggaatattcgtacgcacgacgagt

SEQ ID NO: 5860783 - DNA, 25 bp, Homo sapien
tagcaagtccgcgtaagttatacgg

SEQ ID NO: 5860784 - DNA, 25 bp, Homo sapien
cgattctgtactacgtcgcgagaat

SEQ ID NO: 5860785 - DNA, 25 bp, Homo sapien
cagataagcggtatgtcgaaggtca

SEQ ID NO: 5860786 - DNA, 25 bp, Homo sapien
cacgttcctatatacgcgccacata

SEQ ID NO: 5860787 - DNA, 25 bp, Homo sapien
tagcaatacgcgattagggactcgt

SEQ ID NO: 5860788 - DNA, 25 bp, Homo sapien
atcagatcgcgttcgaaagccttct

SEQ ID NO: 5860789 - DNA, 25 bp, Homo sapien
tgcaaatacgaccgtatactcgcct

SEQ ID NO: 5860790 - DNA, 25 bp, Homo sapien
agaagccgcgatctattacaacgca

SEQ ID NO: 5860791 - DNA, 25 bp, Homo sapien
aacgaccataggcgcgatacctata

SEQ ID NO: 5860792 - DNA, 25 bp, Homo sapien
atgagaccgatattgcgaggcttac

SEQ ID NO: 5860793 - DNA, 25 bp, Homo sapien
catattcgatataggtccgtagcgg

SEQ ID NO: 5860794 - DNA, 25 bp, Homo sapien
agtgagttccgagcgtagttctcat

SEQ ID NO: 5860795 - DNA, 25 bp, Homo sapien
tctttcgtatacggccgattcacct

SEQ ID NO: 5860796 - DNA, 25 bp, Homo sapien
taacggcgtacgtccgattgctaaa

SEQ ID NO: 5860797 - DNA, 25 bp, Homo sapien
actacagtcgcgaagctactgagaa

SEQ ID NO: 5860798 - DNA, 25 bp, Homo sapien
tcgaacacggttcgtatagtctgag

SEQ ID NO: 5860799 - DNA, 25 bp, Homo sapien
aacagatcgtaatcggtcgtccttc

SEQ ID NO: 5860800 - DNA, 25 bp, Homo sapien
gctgtagtactatcgacgccgatat

SEQ ID NO: 5860801 - DNA, 25 bp, Homo sapien
aacatctaagcgtaacgggctcgta

SEQ ID NO: 5860802 - DNA, 25 bp, Homo sapien
aagatctagtaatcgcgcccgtttg

SEQ ID NO: 5860803 - DNA, 25 bp, Homo sapien
agagaatgcggatagtacgagcgaa

SEQ ID NO: 5860804 - DNA, 25 bp, Homo sapien
agtagcacgctatacgtcgaacgat

SEQ ID NO: 5860805 - DNA, 25 bp, Homo sapien
acactgtacctatagcgcgagtgaa

SEQ ID NO: 5860806 - DNA, 25 bp, Homo sapien
aatcatgtattcgcgtcccagaacc

SEQ ID NO: 5860807 - DNA, 25 bp, Homo sapien
cttgctatactcgccgttacaacag

SEQ ID NO: 5860808 - DNA, 25 bp, Homo sapien
tctacctatcgcgtcgacataactg

SEQ ID NO: 5860809 - DNA, 25 bp, Homo sapien
agttgacgtgatacgcgcaaactag

SEQ ID NO: 5860810 - DNA, 25 bp, Homo sapien
actgatgaaccgtcggttagcgttt

SEQ ID NO: 5860811 - DNA, 25 bp, Homo sapien
atcaactgcgtacgatacggtatcg

SEQ ID NO: 5860812 - DNA, 25 bp, Homo sapien
attaagcagtccgcgctatcaacca

SEQ ID NO: 5860813 - DNA, 25 bp, Homo sapien
gatttggcatacgtcgcgaaagcaa

SEQ ID NO: 5860814 - DNA, 25 bp, Homo sapien
tagagttaacggatcccgttgaggt

SEQ ID NO: 5860815 - DNA, 25 bp, Homo sapien
ttgaccaaggaccgcgtaatagatg

SEQ ID NO: 5860816 - DNA, 25 bp, Homo sapien
tcatcatagcgtaatcgcgtgtacg

SEQ ID NO: 5860817 - DNA, 25 bp, Homo sapien
ctaaacgttcggagttacgatagcc

SEQ ID NO: 5860818 - DNA, 25 bp, Homo sapien
ctttctctacgtctcgacgcataac

SEQ ID NO: 5860819 - DNA, 25 bp, Homo sapien
cttccaaatcgtacacgccagaatg

SEQ ID NO: 5860820 - DNA, 25 bp, Homo sapien
caatttcgaccgtagtactcatgcc

SEQ ID NO: 5860821 - DNA, 25 bp, Homo sapien
gacacgacgtacttaagcgtctaca

SEQ ID NO: 5860822 - DNA, 25 bp, Homo sapien
catcggccctattcgacgattctat

SEQ ID NO: 5860823 - DNA, 25 bp, Homo sapien
gtaagacgcgacgtacctaacttct

SEQ ID NO: 5860824 - DNA, 25 bp, Homo sapien
ctctttggtacgcggactacatttg

SEQ ID NO: 5860825 - DNA, 25 bp, Homo sapien
ttgcccatacgacgcaacctaacta

SEQ ID NO: 5860826 - DNA, 25 bp, Homo sapien
gaacgctcgatacctaccgtaagtt

SEQ ID NO: 5860827 - DNA, 25 bp, Homo sapien
gaaacccgataccgcgttagagtaa

SEQ ID NO: 5860828 - DNA, 25 bp, Homo sapien
taggtataacgggcgctatccgatt

SEQ ID NO: 5860829 - DNA, 25 bp, Homo sapien
atattctgtacgatccgctctacgg

SEQ ID NO: 5860830 - DNA, 25 bp, Homo sapien
ctcgtctaactctcgtcggctataa

SEQ ID NO: 5860831 - DNA, 25 bp, Homo sapien
tttccgaccgttattgcggtagaca

SEQ ID NO: 5860832 - DNA, 25 bp, Homo sapien
acaaagcccttacgcggtatactga

SEQ ID NO: 5860833 - DNA, 25 bp, Homo sapien
tccaagtaggtgcgacgtatgtgta

SEQ ID NO: 5860834 - DNA, 25 bp, Homo sapien
ccaataacggtccgattgtatcgct

SEQ ID NO: 5860835 - DNA, 25 bp, Homo sapien
aacttgcgcgtatactagcacatcc

SEQ ID NO: 5860836 - DNA, 25 bp, Homo sapien
tgttcttcgactaccggatccaaca

SEQ ID NO: 5860837 - DNA, 25 bp, Homo sapien
gagaaccctcgagcgaatactattg

SEQ ID NO: 5860838 - DNA, 25 bp, Homo sapien
gaaacatagttgtcgtgcgattggg

SEQ ID NO: 5860839 - DNA, 25 bp, Homo sapien
cagttcgggcgcgaatctaacataa

SEQ ID NO: 5860840 - DNA, 25 bp, Homo sapien
gaagattaatcgcggacgtccatag

SEQ ID NO: 5860841 - DNA, 25 bp, Homo sapien
cgtttacagtattcgcgtagaaggc

SEQ ID NO: 5860842 - DNA, 25 bp, Homo sapien
taacggcgcggtaagataagtcgta

SEQ ID NO: 5860843 - DNA, 25 bp, Homo sapien
ataggccgttaacgcgattctagtg

SEQ ID NO: 5860844 - DNA, 25 bp, Homo sapien
ctggtacgtactagtacggacatac

SEQ ID NO: 5860845 - DNA, 25 bp, Homo sapien
ctcacacgacatgagtcgattgctt

SEQ ID NO: 5860846 - DNA, 25 bp, Homo sapien
aagtgtcgtcgaatactaggccagt

SEQ ID NO: 5860847 - DNA, 25 bp, Homo sapien
cccctagtcgatacgcgttatgtaa

SEQ ID NO: 5860848 - DNA, 25 bp, Homo sapien
ctggttacgtatgtccgacgattag

SEQ ID NO: 5860849 - DNA, 25 bp, Homo sapien
agactccgaccggtaacattagcta

SEQ ID NO: 5860850 - DNA, 25 bp, Homo sapien
tcctggtataccgcgatcagatgta

SEQ ID NO: 5860851 - DNA, 25 bp, Homo sapien
gaatgggtgtatgacgcgaaagtgt

SEQ ID NO: 5860852 - DNA, 25 bp, Homo sapien
cttgctgtatcgcgcgaaaaccatt

SEQ ID NO: 5860853 - DNA, 25 bp, Homo sapien
aattagttcgcgcgtaaggccatga

SEQ ID NO: 5860854 - DNA, 25 bp, Homo sapien
agtaaatgatacgacgtgcagcagg

SEQ ID NO: 5860855 - DNA, 25 bp, Homo sapien
actccttatcgtaagaccgacacag

SEQ ID NO: 5860856 - DNA, 25 bp, Homo sapien
ttacgatacgtatagaccgaggcga

SEQ ID NO: 5860857 - DNA, 25 bp, Homo sapien
agtctgtagacgcgctactcaattg

SEQ ID NO: 5860858 - DNA, 25 bp, Homo sapien
ctgccattatagttcgcgcgaacaa

SEQ ID NO: 5860859 - DNA, 25 bp, Homo sapien
gtgtgattccgtacgcgagttgttt

SEQ ID NO: 5860860 - DNA, 25 bp, Homo sapien
ttggttatagaccaacgcgcatgga

SEQ ID NO: 5860861 - DNA, 25 bp, Homo sapien
ctcctaggttagttcgcgacagaat

SEQ ID NO: 5860862 - DNA, 25 bp, Homo sapien
tagatgtagtgtacgccgaacgctt

SEQ ID NO: 5860863 - DNA, 25 bp, Homo sapien
cgacaggtatcgcgcaatagtgtat

SEQ ID NO: 5860864 - DNA, 25 bp, Homo sapien
atacaacgacgcactagaccaactc

SEQ ID NO: 5860865 - DNA, 25 bp, Homo sapien
attctgaacgcgcgaagttggctaa

SEQ ID NO: 5860866 - DNA, 25 bp, Homo sapien
tgatggcgtatacgcgagatctgtt

SEQ ID NO: 5860867 - DNA, 25 bp, Homo sapien
aggtagctttcgcggatacactcat

SEQ ID NO: 5860868 - DNA, 25 bp, Homo sapien
agatgctaatcggaacgcgaattgc

SEQ ID NO: 5860869 - DNA, 25 bp, Homo sapien
ggaaatgttcgcgtatacctcacca

SEQ ID NO: 5860870 - DNA, 25 bp, Homo sapien
acaaaagtaccgagcgtaacaccac

SEQ ID NO: 5860871 - DNA, 25 bp, Homo sapien
gaactctgtccgacgcttacatcat

SEQ ID NO: 5860872 - DNA, 25 bp, Homo sapien
ctttcttagcggtcgatcgcaacat

SEQ ID NO: 5860873 - DNA, 25 bp, Homo sapien
gacgttcgacgttcggtatcttttg

SEQ ID NO: 5860874 - DNA, 25 bp, Homo sapien
gttggtttttacgaacgcgagatgg

SEQ ID NO: 5860875 - DNA, 25 bp, Homo sapien
actgttcgatataacgccgatgtcg

SEQ ID NO: 5860876 - DNA, 25 bp, Homo sapien
aagcgtcgtcgcgatgaatttgttc

SEQ ID NO: 5860877 - DNA, 25 bp, Homo sapien
ggcaatcgcgtatcaacgtaatgct

SEQ ID NO: 5860878 - DNA, 25 bp, Homo sapien
ggcgaacatacgatcgtaccaatca

SEQ ID NO: 5860879 - DNA, 25 bp, Homo sapien
atacgctaccgattagcggaaagag

SEQ ID NO: 5860880 - DNA, 25 bp, Homo sapien
acaatctactcgaacgaccccacta

SEQ ID NO: 5860881 - DNA, 25 bp, Homo sapien
atggacactattcgcgtcgttatgc

SEQ ID NO: 5860882 - DNA, 25 bp, Homo sapien
ggataagtaaggtcgcgttgcttca

SEQ ID NO: 5860883 - DNA, 25 bp, Homo sapien
taacacgtcgcgcacatatctacga

SEQ ID NO: 5860884 - DNA, 25 bp, Homo sapien
aaatggtaccgtgcgaacgtagttc

SEQ ID NO: 5860885 - DNA, 25 bp, Homo sapien
gtataactcgctataggcgctcctt

SEQ ID NO: 5860886 - DNA, 25 bp, Homo sapien
aacaaagccgacgagttaatccgag

SEQ ID NO: 5860887 - DNA, 25 bp, Homo sapien
caactttcggcgctaatacggaaag

SEQ ID NO: 5860888 - DNA, 25 bp, Homo sapien
agcggtatcgttacgcgaagtagaa

SEQ ID NO: 5860889 - DNA, 25 bp, Homo sapien
cattatttcgaccgtcgagcatggt

SEQ ID NO: 5860890 - DNA, 25 bp, Homo sapien
ttttctcttatccgtagcgggatgc

SEQ ID NO: 5860891 - DNA, 25 bp, Homo sapien
aatcagaccgtgcgtaatccgattc

SEQ ID NO: 5860892 - DNA, 25 bp, Homo sapien
tctcgtcgtatagctcgacagcaat

SEQ ID NO: 5860893 - DNA, 25 bp, Homo sapien
acagatataccggcgtaactaggtg

SEQ ID NO: 5860894 - DNA, 25 bp, Homo sapien
aatgaaacgcccgttagatttgcgg

SEQ ID NO: 5860895 - DNA, 25 bp, Homo sapien
aattagtcggttatacgggtgccga

SEQ ID NO: 5860896 - DNA, 25 bp, Homo sapien
cattgaccgctatcgagtagccaat

SEQ ID NO: 5860897 - DNA, 25 bp, Homo sapien
cggatagcgcgttgcgtaaaatgaa

SEQ ID NO: 5860898 - DNA, 25 bp, Homo sapien
tctacccgtcggtcctaattagcaa

SEQ ID NO: 5860899 - DNA, 25 bp, Homo sapien
ttagtcaatatgacgcgcgattggc

SEQ ID NO: 5860900 - DNA, 25 bp, Homo sapien
actatcatgcggcgcatagcaatac

SEQ ID NO: 5860901 - DNA, 25 bp, Homo sapien
atgtgtctaagttcgccgtccctaa

SEQ ID NO: 5860902 - DNA, 25 bp, Homo sapien
aaatgcagcggtcgacttagcatag

SEQ ID NO: 5860903 - DNA, 25 bp, Homo sapien
tttccgctaatcgacgaacggtaac

SEQ ID NO: 5860904 - DNA, 25 bp, Homo sapien
attacgtcgcgcacgtataagcgta

SEQ ID NO: 5860905 - DNA, 25 bp, Homo sapien
tgcaaatactagcggaacggaactc

SEQ ID NO: 5860906 - DNA, 25 bp, Homo sapien
acgggattgtatcgtcgcgcaaaaa

SEQ ID NO: 5860907 - DNA, 25 bp, Homo sapien
gacagtttagtcgcggcatatagga

SEQ ID NO: 5860908 - DNA, 25 bp, Homo sapien
tgaatggaactacgtcgcgacattc

SEQ ID NO: 5860909 - DNA, 25 bp, Homo sapien
actaggacgcgattgacgtgtagaa

SEQ ID NO: 5860910 - DNA, 25 bp, Homo sapien
gttacaggttcgcaacgcgaatgaa

SEQ ID NO: 5860911 - DNA, 25 bp, Homo sapien
gcactcaatacacgcggtctattga

SEQ ID NO: 5860912 - DNA, 25 bp, Homo sapien
cagctgactacgcgagagtgataaa

SEQ ID NO: 5860913 - DNA, 25 bp, Homo sapien
ttgtcatacgttcgtacgcgacaac

SEQ ID NO: 5860914 - DNA, 25 bp, Homo sapien
atatatcgtatttcgcggagggctg

SEQ ID NO: 5860915 - DNA, 25 bp, Homo sapien
tacactccgttgtcgcgataaaagc

SEQ ID NO: 5860916 - DNA, 25 bp, Homo sapien
ggaggtcggactaatctcgaagttt

SEQ ID NO: 5860917 - DNA, 25 bp, Homo sapien
cggagaatcccgtaacgcatatctt

SEQ ID NO: 5860918 - DNA, 25 bp, Homo sapien
gaaaatgctacggtacgatccccaa

SEQ ID NO: 5860919 - DNA, 25 bp, Homo sapien
gtttaatttagcgtcgacctcctgc

SEQ ID NO: 5860920 - DNA, 25 bp, Homo sapien
cagaattactcgtgcgacgttgaca

SEQ ID NO: 5860921 - DNA, 25 bp, Homo sapien
gctaagcacgtattgtcgatgatcg

SEQ ID NO: 5860922 - DNA, 25 bp, Homo sapien
atgccatcgttacgctagtatggca

SEQ ID NO: 5860923 - DNA, 25 bp, Homo sapien
gagatgccgcgcgagtaattcaaaa

SEQ ID NO: 5860924 - DNA, 25 bp, Homo sapien
ttacaaacgacatacgtcccgcatg

SEQ ID NO: 5860925 - DNA, 25 bp, Homo sapien
cttgagatatacggtcgagtccaca

SEQ ID NO: 5860926 - DNA, 25 bp, Homo sapien
gcataacttgcgtaacggatcgttg

SEQ ID NO: 5860927 - DNA, 25 bp, Homo sapien
gatccacgagtatacgctactggtt

SEQ ID NO: 5860928 - DNA, 25 bp, Homo sapien
tcgttacgtcgtcgacctattagtg

SEQ ID NO: 5860929 - DNA, 25 bp, Homo sapien
tcaactctacgtatccgcgataacg

SEQ ID NO: 5860930 - DNA, 25 bp, Homo sapien
tattgtctagacgcgtagcagctca

SEQ ID NO: 5860931 - DNA, 25 bp, Homo sapien
ctctcacgcgcaataactcatggta

SEQ ID NO: 5860932 - DNA, 25 bp, Homo sapien
aacggtcgtacgaatagtggactac

SEQ ID NO: 5860933 - DNA, 25 bp, Homo sapien
atgacatatacccgttcgggaatgg

SEQ ID NO: 5860934 - DNA, 25 bp, Homo sapien
tcgcaatactaatccgcgcatcgat

SEQ ID NO: 5860935 - DNA, 25 bp, Homo sapien
tatagctactgacggtcgaaagtcc

SEQ ID NO: 5860936 - DNA, 25 bp, Homo sapien
tatgtccgcgtcactatatagccgt

SEQ ID NO: 5860937 - DNA, 25 bp, Homo sapien
tgatgacatagtacgtcggctactc

SEQ ID NO: 5860938 - DNA, 25 bp, Homo sapien
agcattcgtattgcgcccaaatctc

SEQ ID NO: 5860939 - DNA, 25 bp, Homo sapien
tttggtagtagtcgcgaactcctag

SEQ ID NO: 5860940 - DNA, 25 bp, Homo sapien
tatcgatagacccgcgtactcacat

SEQ ID NO: 5860941 - DNA, 25 bp, Homo sapien
gttagggcgaccgatcataatgtag

SEQ ID NO: 5860942 - DNA, 25 bp, Homo sapien
ccgaggcgatagtaggtcgattttt

SEQ ID NO: 5860943 - DNA, 25 bp, Homo sapien
cggatggttcgcgcgtaattaaaga

SEQ ID NO: 5860944 - DNA, 25 bp, Homo sapien
ggttattcatacgacgcgcctaagt

SEQ ID NO: 5860945 - DNA, 25 bp, Homo sapien
aacttcgtattacgaccgcgcatgt

SEQ ID NO: 5860946 - DNA, 25 bp, Homo sapien
taaggccgcgacttatggatgtgtt

SEQ ID NO: 5860947 - DNA, 25 bp, Homo sapien
ggaaaacgcgacgtatagtagcagt

SEQ ID NO: 5860948 - DNA, 25 bp, Homo sapien
ctaatgtcgtacgataccttgcagg

SEQ ID NO: 5860949 - DNA, 25 bp, Homo sapien
gatcgccgtaaccttcgattcagtt

SEQ ID NO: 5860950 - DNA, 25 bp, Homo sapien
gatctgcgcgcaattagggaattga

SEQ ID NO: 5860951 - DNA, 25 bp, Homo sapien
catacataggtcgccgttatcacga

SEQ ID NO: 5860952 - DNA, 25 bp, Homo sapien
catctccgtatctaacggtggtgta

SEQ ID NO: 5860953 - DNA, 25 bp, Homo sapien
tacgctacgcgcgactagtgtaaat

SEQ ID NO: 5860954 - DNA, 25 bp, Homo sapien
tagtccacgttccgctagtgtacta

SEQ ID NO: 5860955 - DNA, 25 bp, Homo sapien
tgcgcgcgaccattacggtataatt

SEQ ID NO: 5860956 - DNA, 25 bp, Homo sapien
gaggctcggtctagtatcgacaata

SEQ ID NO: 5860957 - DNA, 25 bp, Homo sapien
attgaatcgtacgccgggtgtgaat

SEQ ID NO: 5860958 - DNA, 25 bp, Homo sapien
ggatgtcgttggacgattaggcaaa

SEQ ID NO: 5860959 - DNA, 25 bp, Homo sapien
ccaacgcttatcgcgacgttgaatt

SEQ ID NO: 5860960 - DNA, 25 bp, Homo sapien
gttattcgagattacgcgtggaggt

SEQ ID NO: 5860961 - DNA, 25 bp, Homo sapien
gtattacgaccggtcgaatccatgt

SEQ ID NO: 5860962 - DNA, 25 bp, Homo sapien
aggcatataccactcgcgtagtcat

SEQ ID NO: 5860963 - DNA, 25 bp, Homo sapien
tgaatccgtatatcgcgtcgtagtc

SEQ ID NO: 5860964 - DNA, 25 bp, Homo sapien
tctatgcgctagtcgcgtttcacta

SEQ ID NO: 5860965 - DNA, 25 bp, Homo sapien
gtgaaccggtataaacgcgtgttac

SEQ ID NO: 5860966 - DNA, 25 bp, Homo sapien
ttttcagcgaccgtttacgcacttc

SEQ ID NO: 5860967 - DNA, 25 bp, Homo sapien
agcagtgcgttatctacgctggtat

SEQ ID NO: 5860968 - DNA, 25 bp, Homo sapien
aggtgagcggtcgttagtactgaaa

SEQ ID NO: 5860969 - DNA, 25 bp, Homo sapien
cgagttagcggatcgctagaagtta

SEQ ID NO: 5860970 - DNA, 25 bp, Homo sapien
gtataaatacgcgtcgtaccaccag

SEQ ID NO: 5860971 - DNA, 25 bp, Homo sapien
caaccgtccgcgattaatgcaagaa

SEQ ID NO: 5860972 - DNA, 25 bp, Homo sapien
taggaatactatccgcgccgctatt

SEQ ID NO: 5860973 - DNA, 25 bp, Homo sapien
ggtatacccgtagtacgaaccattg

SEQ ID NO: 5860974 - DNA, 25 bp, Homo sapien
aaggcactttagtatcgcggttgag

SEQ ID NO: 5860975 - DNA, 25 bp, Homo sapien
agctcttaacgcgtatcgtcaagtg

SEQ ID NO: 5860976 - DNA, 25 bp, Homo sapien
gtggaagactagtcgcgaatttcag

SEQ ID NO: 5860977 - DNA, 25 bp, Homo sapien
attcccgtactccgacgtttgctta

SEQ ID NO: 5860978 - DNA, 25 bp, Homo sapien
acttagacgataggtccgaattgcg

SEQ ID NO: 5860979 - DNA, 25 bp, Homo sapien
atcgaacaatgcgtcgtacgctaga

SEQ ID NO: 5860980 - DNA, 25 bp, Homo sapien
gtttcccgccaactatacgactcaa

SEQ ID NO: 5860981 - DNA, 25 bp, Homo sapien
tgataccgtacgtcgtataggatgg

SEQ ID NO: 5860982 - DNA, 25 bp, Homo sapien
atacagcgcggataacgatgtacct

SEQ ID NO: 5860983 - DNA, 25 bp, Homo sapien
tagtgcgttatacgtcgcttcgcat

SEQ ID NO: 5860984 - DNA, 25 bp, Homo sapien
gtgctaccgcgacgtaatatcaatg

SEQ ID NO: 5860985 - DNA, 25 bp, Homo sapien
ccaaataccccgtcgattaatccca

SEQ ID NO: 5860986 - DNA, 25 bp, Homo sapien
gtgggactagcgtaactcgattaca

SEQ ID NO: 5860987 - DNA, 25 bp, Homo sapien
ttcctacgtccggttcgtaatgtag

SEQ ID NO: 5860988 - DNA, 25 bp, Homo sapien
ttgatcaacgctagacggagaacgt

SEQ ID NO: 5860989 - DNA, 25 bp, Homo sapien
aggtacacgtccgataggtcacttt

SEQ ID NO: 5860990 - DNA, 25 bp, Homo sapien
ccattcgagtacgaccgtattggtt

SEQ ID NO: 5860991 - DNA, 25 bp, Homo sapien
cttaacacggactaggtcgtacatc

SEQ ID NO: 5860992 - DNA, 25 bp, Homo sapien
atcgaaaacgcgctagtagagtgac

SEQ ID NO: 5860993 - DNA, 25 bp, Homo sapien
aaaggatcgcgcgatacattcggat

SEQ ID NO: 5860994 - DNA, 25 bp, Homo sapien
accagatatctcgcgaacgtgagaa

SEQ ID NO: 5860995 - DNA, 25 bp, Homo sapien
tgcagcacgttcaatcgggtgatta

SEQ ID NO: 5860996 - DNA, 25 bp, Homo sapien
tttacgttgatcgagcgtgagcgat

SEQ ID NO: 5860997 - DNA, 25 bp, Homo sapien
ccttaagcgtaatacgcccgatatg

SEQ ID NO: 5860998 - DNA, 25 bp, Homo sapien
gagataatacgtccgctaccagcta

SEQ ID NO: 5860999 - DNA, 25 bp, Homo sapien
agaccacgcgtactagtagctaaag

SEQ ID NO: 5861000 - DNA, 25 bp, Homo sapien
aggatcaatataccgcggcgaagtt

SEQ ID NO: 5861001 - DNA, 25 bp, Homo sapien
taagtctcgttcgtacgggcgaata

SEQ ID NO: 5861002 - DNA, 25 bp, Homo sapien
tcggtataacgctacccgtgctttt

SEQ ID NO: 5861003 - DNA, 25 bp, Homo sapien
gtggcttagcgtaaacgcgtctata

SEQ ID NO: 5861004 - DNA, 25 bp, Homo sapien
catgcgtcgcgtagatacgaaagtt

SEQ ID NO: 5861005 - DNA, 25 bp, Homo sapien
ttaagacgatattgacgcgtgcagc

SEQ ID NO: 5861006 - DNA, 25 bp, Homo sapien
agttatcggcgtagtactactaggc

SEQ ID NO: 5861007 - DNA, 25 bp, Homo sapien
catacggattcctcgcgtacgttaa

SEQ ID NO: 5861008 - DNA, 25 bp, Homo sapien
gcttagtatcgcggccagttagaaa

SEQ ID NO: 5861009 - DNA, 25 bp, Homo sapien
acgaattagtatcgcgggtgaagga

SEQ ID NO: 5861010 - DNA, 25 bp, Homo sapien
taccggcgcgttatagcactaaact

SEQ ID NO: 5861011 - DNA, 25 bp, Homo sapien
aataacgttacgcgagtataggccg

SEQ ID NO: 5861012 - DNA, 25 bp, Homo sapien
tgttgcgactgatagcgcgacaaaa

SEQ ID NO: 5861013 - DNA, 25 bp, Homo sapien
tcttaccgttatgctacggggagta

SEQ ID NO: 5861014 - DNA, 25 bp, Homo sapien
gacattgacatacgcaacgctagag

SEQ ID NO: 5861015 - DNA, 25 bp, Homo sapien
gtacttcatacttaacgcggtgtcg

SEQ ID NO: 5861016 - DNA, 25 bp, Homo sapien
gtaacacgtccatacgcgtttttgc

SEQ ID NO: 5861017 - DNA, 25 bp, Homo sapien
ctctttccgcgtataactactgtcc

SEQ ID NO: 5861018 - DNA, 25 bp, Homo sapien
cgctatatactacgtcccgaccaat

SEQ ID NO: 5861019 - DNA, 25 bp, Homo sapien
aagtattacccgtcgtatccaggca

SEQ ID NO: 5861020 - DNA, 25 bp, Homo sapien
tgggattcgttaacgatcgtaggga

SEQ ID NO: 5861021 - DNA, 25 bp, Homo sapien
cctactcggtaatctgacgtgtgta

SEQ ID NO: 5861022 - DNA, 25 bp, Homo sapien
tactaagacatcgtacgcgcttgtg

SEQ ID NO: 5861023 - DNA, 25 bp, Homo sapien
tgtttagtatcgcgcataggccgat

SEQ ID NO: 5861024 - DNA, 25 bp, Homo sapien
ttggcaattgcgttccgactgttac

SEQ ID NO: 5861025 - DNA, 25 bp, Homo sapien
gccttactatacttcgcggaatgac

SEQ ID NO: 5861026 - DNA, 25 bp, Homo sapien
tataggcgcgatatcgttatcgggt

SEQ ID NO: 5861027 - DNA, 25 bp, Homo sapien
agccgatacgcgtattcgaggattt

SEQ ID NO: 5861028 - DNA, 25 bp, Homo sapien
ctatgttatcgcgcgaagttcagag

SEQ ID NO: 5861029 - DNA, 25 bp, Homo sapien
tttgcttcgcggaacgaccataatc

SEQ ID NO: 5861030 - DNA, 25 bp, Homo sapien
cataaatatcgacgcccgacttacg

SEQ ID NO: 5861031 - DNA, 25 bp, Homo sapien
tttggactaagcggacgttacaacc

SEQ ID NO: 5861032 - DNA, 25 bp, Homo sapien
ccttgtcgcgcgatagtaattatgg

SEQ ID NO: 5861033 - DNA, 25 bp, Homo sapien
tctagatctacgtatcgcgcgttca

SEQ ID NO: 5861034 - DNA, 25 bp, Homo sapien
gccatttattcggctacggatgctt

SEQ ID NO: 5861035 - DNA, 25 bp, Homo sapien
tttagccctaatcgtcgacatcgag

SEQ ID NO: 5861036 - DNA, 25 bp, Homo sapien
tctttatgccgtaacgctccgtatc

SEQ ID NO: 5861037 - DNA, 25 bp, Homo sapien
caagaatatacgggtccgccgttta

SEQ ID NO: 5861038 - DNA, 25 bp, Homo sapien
atgagacgcgtaacgtcatgacaca

SEQ ID NO: 5861039 - DNA, 25 bp, Homo sapien
ttacgatgcggacttatcgaggtgt

SEQ ID NO: 5861040 - DNA, 25 bp, Homo sapien
attttaatagggcgtcgattccgcg

SEQ ID NO: 5861041 - DNA, 25 bp, Homo sapien
tgattaacatccgcgacgagatgtg

SEQ ID NO: 5861042 - DNA, 25 bp, Homo sapien
ctaggttattgaatgcgcgtcgtct

SEQ ID NO: 5861043 - DNA, 25 bp, Homo sapien
aatgtagtcgcgctattagtctcgc

SEQ ID NO: 5861044 - DNA, 25 bp, Homo sapien
cttgtacgattcgtaatacgccagg

SEQ ID NO: 5861045 - DNA, 25 bp, Homo sapien
aacacctatccgctctacgaacatc

SEQ ID NO: 5861046 - DNA, 25 bp, Homo sapien
tacaggagaccgatctacggacttt

SEQ ID NO: 5861047 - DNA, 25 bp, Homo sapien
ctgtgtcgcctaattcgtctgagat

SEQ ID NO: 5861048 - DNA, 25 bp, Homo sapien
tctctacgttctagcgacaacaagc

SEQ ID NO: 5861049 - DNA, 25 bp, Homo sapien
gttgtggtagtacgccctatctgta

SEQ ID NO: 5861050 - DNA, 25 bp, Homo sapien
ataagatacgaacgcgagatgcctc

SEQ ID NO: 5861051 - DNA, 25 bp, Homo sapien
tacagaactctaagtcgcgagttcg

SEQ ID NO: 5861052 - DNA, 25 bp, Homo sapien
gttgatgcactaattcgcgactgac

SEQ ID NO: 5861053 - DNA, 25 bp, Homo sapien
cggaattaggcgtccgataaatcgt

SEQ ID NO: 5861054 - DNA, 25 bp, Homo sapien
gattatcggactccgcataaagctg

SEQ ID NO: 5861055 - DNA, 25 bp, Homo sapien
tactgaatatacgaccggtgtctcc

SEQ ID NO: 5861056 - DNA, 25 bp, Homo sapien
agctcatccgtgcgattaaccaaga

SEQ ID NO: 5861057 - DNA, 25 bp, Homo sapien
aagatgctaacgtcgtacgccatgt

SEQ ID NO: 5861058 - DNA, 25 bp, Homo sapien
cttacgattcgcgcgttacatcttg

SEQ ID NO: 5861059 - DNA, 25 bp, Homo sapien
cgactctgggtatacgtcgatatag

SEQ ID NO: 5861060 - DNA, 25 bp, Homo sapien
gatgacacgttatacgcggtactac

SEQ ID NO: 5861061 - DNA, 25 bp, Homo sapien
cgtcatgtataagtcggcgagcatt

SEQ ID NO: 5861062 - DNA, 25 bp, Homo sapien
tcctaaatacatcgcgtcgacaggt

SEQ ID NO: 5861063 - DNA, 25 bp, Homo sapien
gcgacacgcgttaaatacgagactt

SEQ ID NO: 5861064 - DNA, 25 bp, Homo sapien
acgcattataagaccgcgctttacg

SEQ ID NO: 5861065 - DNA, 25 bp, Homo sapien
aatcccacgtcaattcgagattgcc

SEQ ID NO: 5861066 - DNA, 25 bp, Homo sapien
ctcgattacgcgtaggacgataaac

SEQ ID NO: 5861067 - DNA, 25 bp, Homo sapien
tcatttcgtcgagtatagcatcgcc

SEQ ID NO: 5861068 - DNA, 25 bp, Homo sapien
cgctcatatacgagcgtacagcatt

SEQ ID NO: 5861069 - DNA, 25 bp, Homo sapien
ttcgtatcgtattacgacgctgcca

SEQ ID NO: 5861070 - DNA, 25 bp, Homo sapien
tcggctcgtaatacctacgaaccaa

SEQ ID NO: 5861071 - DNA, 25 bp, Homo sapien
aaggtctaatcgcgacgtagtctct

SEQ ID NO: 5861072 - DNA, 25 bp, Homo sapien
attatcccgttctagcgactgtgac

SEQ ID NO: 5861073 - DNA, 25 bp, Homo sapien
agctagtcgcgagacatagaaggta

SEQ ID NO: 5861074 - DNA, 25 bp, Homo sapien
acctatctgtacgcgcgatcattgt

SEQ ID NO: 5861075 - DNA, 25 bp, Homo sapien
agacgatgaccgcgtactattttcg

SEQ ID NO: 5861076 - DNA, 25 bp, Homo sapien
cctagatattacgcgggtgagtttg

SEQ ID NO: 5861077 - DNA, 25 bp, Homo sapien
acaaagttacgtcgctcggcatcta

SEQ ID NO: 5861078 - DNA, 25 bp, Homo sapien
tcagagggactcatacgcgatgaat

SEQ ID NO: 5861079 - DNA, 25 bp, Homo sapien
ttgtctcgacgtaagtaggacactg

SEQ ID NO: 5861080 - DNA, 25 bp, Homo sapien
gcgcgatacaaccggtcgttttatt

SEQ ID NO: 5861081 - DNA, 25 bp, Homo sapien
gcaggaggtctaatcgcgacaaaaa

SEQ ID NO: 5861082 - DNA, 25 bp, Homo sapien
gctggtgtataggacgcgaatgaat

SEQ ID NO: 5861083 - DNA, 25 bp, Homo sapien
gcgatcatcggtatacgcgcttata

SEQ ID NO: 5861084 - DNA, 25 bp, Homo sapien
tgagttctagcgacgtaccagtact

SEQ ID NO: 5861085 - DNA, 25 bp, Homo sapien
actccaatcaacgacgcgtcatttc

SEQ ID NO: 5861086 - DNA, 25 bp, Homo sapien
ttgccacgctcgataggacttttca

SEQ ID NO: 5861087 - DNA, 25 bp, Homo sapien
ttcgttgcgatacgaccgataactc

SEQ ID NO: 5861088 - DNA, 25 bp, Homo sapien
acactcgtatagcgatcgcgtaaag

SEQ ID NO: 5861089 - DNA, 25 bp, Homo sapien
ttgttgcataccggatcgggagtat

SEQ ID NO: 5861090 - DNA, 25 bp, Homo sapien
gttagcgttattccgcggaaggtat

SEQ ID NO: 5861091 - DNA, 25 bp, Homo sapien
ttgttccgatcggaaacgttgttgc

SEQ ID NO: 5861092 - DNA, 25 bp, Homo sapien
ttcgagttcgactatcgcgcattac

SEQ ID NO: 5861093 - DNA, 25 bp, Homo sapien
tagccatcgtaacgggtctaatcag

SEQ ID NO: 5861094 - DNA, 25 bp, Homo sapien
acgtgttcgcgcggatttattcttc

SEQ ID NO: 5861095 - DNA, 25 bp, Homo sapien
gttaattacgcgtccgcaagtacac

SEQ ID NO: 5861096 - DNA, 25 bp, Homo sapien
tatccatagtattcgggcgccaagt

SEQ ID NO: 5861097 - DNA, 25 bp, Homo sapien
caatacatctacgcgcgtttacagc

SEQ ID NO: 5861098 - DNA, 25 bp, Homo sapien
gcgtaccgtactaaacgcgatgtat

SEQ ID NO: 5861099 - DNA, 25 bp, Homo sapien
agaacactacgaacttgcgcacaca

SEQ ID NO: 5861100 - DNA, 25 bp, Homo sapien
cgcaaccatcgttagcggatattag

SEQ ID NO: 5861101 - DNA, 25 bp, Homo sapien
gaaatttatcccgtcgcgatcgtgt

SEQ ID NO: 5861102 - DNA, 25 bp, Homo sapien
taccgatagttaaacggcgactgac

SEQ ID NO: 5861103 - DNA, 25 bp, Homo sapien
acaaaccgacgctcgtatatttcgg

SEQ ID NO: 5861104 - DNA, 25 bp, Homo sapien
cggagtcgacctaatacgcatagtt

SEQ ID NO: 5861105 - DNA, 25 bp, Homo sapien
ttataaacgtattgggtcgccgcct

SEQ ID NO: 5861106 - DNA, 25 bp, Homo sapien
cttgtgtcgttcgggtacgatgttt

SEQ ID NO: 5861107 - DNA, 25 bp, Homo sapien
atttcccgtaaagtcgcgggtcata

SEQ ID NO: 5861108 - DNA, 25 bp, Homo sapien
caatgagatcgcgcataacctagga

SEQ ID NO: 5861109 - DNA, 25 bp, Homo sapien
cagggacgagtcgtatcgttataac

SEQ ID NO: 5861110 - DNA, 25 bp, Homo sapien
tagtatactagtcgtaccgacccct

SEQ ID NO: 5861111 - DNA, 25 bp, Homo sapien
tctctatagtaccgcggctggttat

SEQ ID NO: 5861112 - DNA, 25 bp, Homo sapien
agttttggcgcgttgctaactacga

SEQ ID NO: 5861113 - DNA, 25 bp, Homo sapien
cgggcttcgcctgtatacgttaaaa

SEQ ID NO: 5861114 - DNA, 25 bp, Homo sapien
tcatggtacgcgaatactgaaggtg

SEQ ID NO: 5861115 - DNA, 25 bp, Homo sapien
gtgttatacgacccgtatatgctcc

SEQ ID NO: 5861116 - DNA, 25 bp, Homo sapien
ttgctctcgcggtacgtaatgacaa

SEQ ID NO: 5861117 - DNA, 25 bp, Homo sapien
atcgaacgctgaattaccgtccctt

SEQ ID NO: 5861118 - DNA, 25 bp, Homo sapien
ctaactaatcgaccgcggtttagag

SEQ ID NO: 5861119 - DNA, 25 bp, Homo sapien
cgtgaataatcgaacgggggtattc

SEQ ID NO: 5861120 - DNA, 25 bp, Homo sapien
aaacctgttaatctcgcgacaccgt

SEQ ID NO: 5861121 - DNA, 25 bp, Homo sapien
cgttcgtcggcgtttcgtactatat

SEQ ID NO: 5861122 - DNA, 25 bp, Homo sapien
tcttccgcttaacgtacgccttgtt

SEQ ID NO: 5861123 - DNA, 25 bp, Homo sapien
atttgccgcgtaggtcgtaagtaag

SEQ ID NO: 5861124 - DNA, 25 bp, Homo sapien
ttgtgtcgtctataggtcgtaaccc

SEQ ID NO: 5861125 - DNA, 25 bp, Homo sapien
tggtgttacgcgccggtaaaaaatg

SEQ ID NO: 5861126 - DNA, 25 bp, Homo sapien
atcgaccgtattactccgatatcgc

SEQ ID NO: 5861127 - DNA, 25 bp, Homo sapien
aaggctgcggacaactacgaaagta

SEQ ID NO: 5861128 - DNA, 25 bp, Homo sapien
gggtgtggtctgacgtacgaattaa

SEQ ID NO: 5861129 - DNA, 25 bp, Homo sapien
acttcaaacgtacacgtcgcgatct

SEQ ID NO: 5861130 - DNA, 25 bp, Homo sapien
aactgtagcgcgatacttagatcgg

SEQ ID NO: 5861131 - DNA, 25 bp, Homo sapien
atcctatcgatctagctcggcacaa

SEQ ID NO: 5861132 - DNA, 25 bp, Homo sapien
agcgcctcgcgctcttataaaaaac

SEQ ID NO: 5861133 - DNA, 25 bp, Homo sapien
ttttcctcgcgtgaataccatggca

SEQ ID NO: 5861134 - DNA, 25 bp, Homo sapien
ctaggtcgacgtacgatattgtcgt

SEQ ID NO: 5861135 - DNA, 25 bp, Homo sapien
aagaaagcggtatgatcggtctcac

SEQ ID NO: 5861136 - DNA, 25 bp, Homo sapien
tctttctacgcgcgatcattgaagg

SEQ ID NO: 5861137 - DNA, 25 bp, Homo sapien
tgtatatcgatagcgatcgggtcct

SEQ ID NO: 5861138 - DNA, 25 bp, Homo sapien
aaacgtatacgcggtaggaagaagc

SEQ ID NO: 5861139 - DNA, 25 bp, Homo sapien
cgatgactgcgcgctatatcaaatg

SEQ ID NO: 5861140 - DNA, 25 bp, Homo sapien
gcgataatataacgccggttccatg

SEQ ID NO: 5861141 - DNA, 25 bp, Homo sapien
cgctaacgactcgacgtaaggattt

SEQ ID NO: 5861142 - DNA, 25 bp, Homo sapien
gttgttcgacgcgtatgtttttccc

SEQ ID NO: 5861143 - DNA, 25 bp, Homo sapien
acaatgcgatcgggtatctctcagt

SEQ ID NO: 5861144 - DNA, 25 bp, Homo sapien
tatgataaatccgcgcgacacctag

SEQ ID NO: 5861145 - DNA, 25 bp, Homo sapien
tactgtcggcgcaatactagcatag

SEQ ID NO: 5861146 - DNA, 25 bp, Homo sapien
gtgtggccgatcgtatacgtttaag

SEQ ID NO: 5861147 - DNA, 25 bp, Homo sapien
gctgattactacgcgccgttaatga

SEQ ID NO: 5861148 - DNA, 25 bp, Homo sapien
ttccctcggcgcgaactaacataat

SEQ ID NO: 5861149 - DNA, 25 bp, Homo sapien
tggcatttaaactcgaccgcttcag

SEQ ID NO: 5861150 - DNA, 25 bp, Homo sapien
ctaccatagcgggatacgcaaatag

SEQ ID NO: 5861151 - DNA, 25 bp, Homo sapien
ctcatctaccccgtacgaaaacttg

SEQ ID NO: 5861152 - DNA, 25 bp, Homo sapien
atggctcgcgtagtatgttccgtta

SEQ ID NO: 5861153 - DNA, 25 bp, Homo sapien
tggaactacgcgttcgttgaagaca

SEQ ID NO: 5861154 - DNA, 25 bp, Homo sapien
cctttctttattcgcgcgacacgta

SEQ ID NO: 5861155 - DNA, 25 bp, Homo sapien
caactctatacgcgggatagggtat

SEQ ID NO: 5861156 - DNA, 25 bp, Homo sapien
tgtgaaacatgacgcgtcgggtaaa

SEQ ID NO: 5861157 - DNA, 25 bp, Homo sapien
gttctgcgctaatacgccagcaaat

SEQ ID NO: 5861158 - DNA, 25 bp, Homo sapien
tctacaacgcgaatacgctagtcgt

SEQ ID NO: 5861159 - DNA, 25 bp, Homo sapien
ttgggagtattaacgcgacgaaggt

SEQ ID NO: 5861160 - DNA, 25 bp, Homo sapien
ggaaactacttcgcgtcgtgtgtta

SEQ ID NO: 5861161 - DNA, 25 bp, Homo sapien
gttcagtaggccgcgtatatatagc

SEQ ID NO: 5861162 - DNA, 25 bp, Homo sapien
agtaggcgtggacgtactatttcga

SEQ ID NO: 5861163 - DNA, 25 bp, Homo sapien
tctcaaggtcgtacgacatagtctg

SEQ ID NO: 5861164 - DNA, 25 bp, Homo sapien
aactcagcaacgcgaactaaccaac

SEQ ID NO: 5861165 - DNA, 25 bp, Homo sapien
gattggtaatctaccgcggttgatc

SEQ ID NO: 5861166 - DNA, 25 bp, Homo sapien
tccagactagtaacggtcgtcaact

SEQ ID NO: 5861167 - DNA, 25 bp, Homo sapien
aatagattctacggtcgcgatcacc

SEQ ID NO: 5861168 - DNA, 25 bp, Homo sapien
actagaaatacgccgatacaccgca

SEQ ID NO: 5861169 - DNA, 25 bp, Homo sapien
tcccaaatatcgcgacgcagtttga

SEQ ID NO: 5861170 - DNA, 25 bp, Homo sapien
aaggctcgtacgcagtatcccatat

SEQ ID NO: 5861171 - DNA, 25 bp, Homo sapien
gatttaagcgcgcctattgcgtaca

SEQ ID NO: 5861172 - DNA, 25 bp, Homo sapien
gaagattcgacccgtagtaatcagc

SEQ ID NO: 5861173 - DNA, 25 bp, Homo sapien
gctcctttagtagcgtcgccataat

SEQ ID NO: 5861174 - DNA, 25 bp, Homo sapien
gttgtattcgataccgctctctgca

SEQ ID NO: 5861175 - DNA, 25 bp, Homo sapien
aacggtacgtcgacttacgacatct

SEQ ID NO: 5861176 - DNA, 25 bp, Homo sapien
attgtattcgcgactacacctcacg

SEQ ID NO: 5861177 - DNA, 25 bp, Homo sapien
gtcacgttagtacgttgcgagaatc

SEQ ID NO: 5861178 - DNA, 25 bp, Homo sapien
gtttcttagcgcgatcgacgtacaa

SEQ ID NO: 5861179 - DNA, 25 bp, Homo sapien
catcaatataccggcgccgttgaat

SEQ ID NO: 5861180 - DNA, 25 bp, Homo sapien
aagttgtgtactagcggcgcaaagt

SEQ ID NO: 5861181 - DNA, 25 bp, Homo sapien
gaaatccgctagtagaccgcgtatt

SEQ ID NO: 5861182 - DNA, 25 bp, Homo sapien
ggccttcctacgcgagtacttatat

SEQ ID NO: 5861183 - DNA, 25 bp, Homo sapien
aactggcaatacgcgctagatcaag

SEQ ID NO: 5861184 - DNA, 25 bp, Homo sapien
catctcgtcgcaacgatcaacacaa

SEQ ID NO: 5861185 - DNA, 25 bp, Homo sapien
accatcctatccgcgagtgtatcat

SEQ ID NO: 5861186 - DNA, 25 bp, Homo sapien
ggttgatcgcggaacgttctgaata

SEQ ID NO: 5861187 - DNA, 25 bp, Homo sapien
gttagatcgttcgaccgtgatttgg

SEQ ID NO: 5861188 - DNA, 25 bp, Homo sapien
ctaatttgcgcgaacgttacaacgc

SEQ ID NO: 5861189 - DNA, 25 bp, Homo sapien
gattgctatgtcgcgctaccattct

SEQ ID NO: 5861190 - DNA, 25 bp, Homo sapien
cataacgatagcgtaccgagaacag

SEQ ID NO: 5861191 - DNA, 25 bp, Homo sapien
ttgagaccgaacgattacctgagag

SEQ ID NO: 5861192 - DNA, 25 bp, Homo sapien
ctaataccgcgtcaacctacaagct

SEQ ID NO: 5861193 - DNA, 25 bp, Homo sapien
cctattcgtgtataccggtctgttg

SEQ ID NO: 5861194 - DNA, 25 bp, Homo sapien
taactgtttgcgcgaacgggttcat

SEQ ID NO: 5861195 - DNA, 25 bp, Homo sapien
caaggtgcgtcgccttataaacagt

SEQ ID NO: 5861196 - DNA, 25 bp, Homo sapien
acgtgtcgtatcgcgacgatcaaaa

SEQ ID NO: 5861197 - DNA, 25 bp, Homo sapien
atctgtagcgcgtataacgcctatc

SEQ ID NO: 5861198 - DNA, 25 bp, Homo sapien
cgatgaaccgtcgtacgggttatta

SEQ ID NO: 5861199 - DNA, 25 bp, Homo sapien
ccaggtgcgttccgacgtataaaaa

SEQ ID NO: 5861200 - DNA, 25 bp, Homo sapien
caaaaccgcacgacgataagccatt

SEQ ID NO: 5861201 - DNA, 25 bp, Homo sapien
aacggtcgtcgatcgtaggaatgtt

SEQ ID NO: 5861202 - DNA, 25 bp, Homo sapien
ccatcgtagtaactgcgcgcaatta

SEQ ID NO: 5861203 - DNA, 25 bp, Homo sapien
cgatgaacgtaacgtctcgcctata

SEQ ID NO: 5861204 - DNA, 25 bp, Homo sapien
ttatggtagcgtaacggcgtaacct

SEQ ID NO: 5861205 - DNA, 25 bp, Homo sapien
cacaccaacgcgacgatacaaactt

SEQ ID NO: 5861206 - DNA, 25 bp, Homo sapien
gctgtccgctactagacgttcaatt

SEQ ID NO: 5861207 - DNA, 25 bp, Homo sapien
tagctatcgacgtgttacgggatca

SEQ ID NO: 5861208 - DNA, 25 bp, Homo sapien
acctctatcgtggataccggatgaa

SEQ ID NO: 5861209 - DNA, 25 bp, Homo sapien
catttttacgcccgatagttcgcac

SEQ ID NO: 5861210 - DNA, 25 bp, Homo sapien
gacaaataatcgcgcgtgaccttca

SEQ ID NO: 5861211 - DNA, 25 bp, Homo sapien
aatatcgatcgatagcgaccgccaa

SEQ ID NO: 5861212 - DNA, 25 bp, Homo sapien
ctattacgccgtagcgtaataggtc

SEQ ID NO: 5861213 - DNA, 25 bp, Homo sapien
acgcatgccgcgaagtataagagta

SEQ ID NO: 5861214 - DNA, 25 bp, Homo sapien
tgtgttcgcgacgtagttataggct

SEQ ID NO: 5861215 - DNA, 25 bp, Homo sapien
catcagtcgtataatcggggtctac

SEQ ID NO: 5861216 - DNA, 25 bp, Homo sapien
tcatgtcgtcgacggagtagacatt

SEQ ID NO: 5861217 - DNA, 25 bp, Homo sapien
ttggcgacgggctatcgttacattt

SEQ ID NO: 5861218 - DNA, 25 bp, Homo sapien
cctcaatcgacgtacgaactgaaga

SEQ ID NO: 5861219 - DNA, 25 bp, Homo sapien
gagattacgcgaattcgctgagatg

SEQ ID NO: 5861220 - DNA, 25 bp, Homo sapien
attcacacccggcgtacgattcaat

SEQ ID NO: 5861221 - DNA, 25 bp, Homo sapien
tgaaggtcacgcgcgattatttgtc

SEQ ID NO: 5861222 - DNA, 25 bp, Homo sapien
ttggggatcgtaccgtagcattttc

SEQ ID NO: 5861223 - DNA, 25 bp, Homo sapien
ctggtggtacgacgcgtatttatac

SEQ ID NO: 5861224 - DNA, 25 bp, Homo sapien
gatacggagcgttacggcataaaga

SEQ ID NO: 5861225 - DNA, 25 bp, Homo sapien
tgcctggatacgacgggtaatactt

SEQ ID NO: 5861226 - DNA, 25 bp, Homo sapien
tcttggttaatcgcacggatgagct

SEQ ID NO: 5861227 - DNA, 25 bp, Homo sapien
cgttatcgcggatacgtagagttga

SEQ ID NO: 5861228 - DNA, 25 bp, Homo sapien
atactcccgatccggtatgcaacaa

SEQ ID NO: 5861229 - DNA, 25 bp, Homo sapien
gtagtccactattcgtacgaccgtt

SEQ ID NO: 5861230 - DNA, 25 bp, Homo sapien
cagtgtcctacttacgtcgagacaa

SEQ ID NO: 5861231 - DNA, 25 bp, Homo sapien
ggagtctcgatagttacgcttactg

SEQ ID NO: 5861232 - DNA, 25 bp, Homo sapien
tcgtgataacggcgacctatgtatg

SEQ ID NO: 5861233 - DNA, 25 bp, Homo sapien
tattcagaacgttccgcgatcaacc

SEQ ID NO: 5861234 - DNA, 25 bp, Homo sapien
gctgcacgcgtcaatatcgtcttaa

SEQ ID NO: 5861235 - DNA, 25 bp, Homo sapien
ctttacgcgatcgctatacgagtgt

SEQ ID NO: 5861236 - DNA, 25 bp, Homo sapien
actggcctagtattcgacgacactt

SEQ ID NO: 5861237 - DNA, 25 bp, Homo sapien
aacagatctcgcgtatacgccatca

SEQ ID NO: 5861238 - DNA, 25 bp, Homo sapien
acctcaacgggatccgttaactcta

SEQ ID NO: 5861239 - DNA, 25 bp, Homo sapien
gataggcgttatacgcgctacagat

SEQ ID NO: 5861240 - DNA, 25 bp, Homo sapien
caccttcagtattcgcgtaccatga

SEQ ID NO: 5861241 - DNA, 25 bp, Homo sapien
gtaagcctcgcaatatcggtctcat

SEQ ID NO: 5861242 - DNA, 25 bp, Homo sapien
cttccaacggttcgcgataaatgac

SEQ ID NO: 5861243 - DNA, 25 bp, Homo sapien
tagctggtagcggacgtattatctc

SEQ ID NO: 5861244 - DNA, 25 bp, Homo sapien
ggagacaccggtcgtatattcagta

SEQ ID NO: 5861245 - DNA, 25 bp, Homo sapien
cacttgacgatacgcgttaagagct

SEQ ID NO: 5861246 - DNA, 25 bp, Homo sapien
tatgacccgcgactttacgggaaat

SEQ ID NO: 5861247 - DNA, 25 bp, Homo sapien
cgtcctatttacgtccggaggataa

SEQ ID NO: 5861248 - DNA, 25 bp, Homo sapien
ctacattacgaaccggacgtaggaa

SEQ ID NO: 5861249 - DNA, 25 bp, Homo sapien
tcagtataccgcgtaagggctttgt

SEQ ID NO: 5861250 - DNA, 25 bp, Homo sapien
tggtgaggtatacgcgaacatttcc

SEQ ID NO: 5861251 - DNA, 25 bp, Homo sapien
agtactggtacgtcgctagaactca

SEQ ID NO: 5861252 - DNA, 25 bp, Homo sapien
ccataattactatcgcgcgacaagg

SEQ ID NO: 5861253 - DNA, 25 bp, Homo sapien
ttcatccggtatccacgatagaggt

SEQ ID NO: 5861254 - DNA, 25 bp, Homo sapien
ctcggattaactcgtcggctttgtt

SEQ ID NO: 5861255 - DNA, 25 bp, Homo sapien
tggcagcgtcgtaatacgatacgaa

SEQ ID NO: 5861256 - DNA, 25 bp, Homo sapien
tgtaatcgagttacgctagtcccac

SEQ ID NO: 5861257 - DNA, 25 bp, Homo sapien
tgaaaagtcctatcgagcgtggcaa

SEQ ID NO: 5861258 - DNA, 25 bp, Homo sapien
actgctactatacgtcgcgttttcc

SEQ ID NO: 5861259 - DNA, 25 bp, Homo sapien
gtcagtcgcgaattagtgcatcaac

SEQ ID NO: 5861260 - DNA, 25 bp, Homo sapien
gcctagtagtactacgccgataact

SEQ ID NO: 5861261 - DNA, 25 bp, Homo sapien
tacgagcccgttacgcttagatgtt

SEQ ID NO: 5861262 - DNA, 25 bp, Homo sapien
aactgaatcgaaggttacggcgatc

SEQ ID NO: 5861263 - DNA, 25 bp, Homo sapien
tttagcaatcggacgtacgccgtta

SEQ ID NO: 5861264 - DNA, 25 bp, Homo sapien
taagcctcgacgcgtggtatcttat

SEQ ID NO: 5861265 - DNA, 25 bp, Homo sapien
tacgacttatcttaccgcgccgtta

SEQ ID NO: 5861266 - DNA, 25 bp, Homo sapien
tataggtatcgcgcctatggtcgtt

SEQ ID NO: 5861267 - DNA, 25 bp, Homo sapien
tatatagatatacgtccgcgcacgc

SEQ ID NO: 5861268 - DNA, 25 bp, Homo sapien
acccgataacgatatcgcgcctata

SEQ ID NO: 5861269 - DNA, 25 bp, Homo sapien
aagtatcgacagactacgcaatgcc

SEQ ID NO: 5861270 - DNA, 25 bp, Homo sapien
tcgaaatagtacgtccacgcctact

SEQ ID NO: 5861271 - DNA, 25 bp, Homo sapien
atgtgagtacgcgggtctatcgata

SEQ ID NO: 5861272 - DNA, 25 bp, Homo sapien
aaatgtaacgatagcccgtcgccaa

SEQ ID NO: 5861273 - DNA, 25 bp, Homo sapien
aactttcgtatctacgcgacgcatg

SEQ ID NO: 5861274 - DNA, 25 bp, Homo sapien
caagatgtaacgcgcgaatcgtaag

SEQ ID NO: 5861275 - DNA, 25 bp, Homo sapien
aagtttgtatcgtcgcgttggtgtg

SEQ ID NO: 5861276 - DNA, 25 bp, Homo sapien
gaagaataaatccgcgcgaacacgt

SEQ ID NO: 5861277 - DNA, 25 bp, Homo sapien
ttcattttacgcaacgcgctatccg

SEQ ID NO: 5861278 - DNA, 25 bp, Homo sapien
atcctcgtcgttatacgcgctcaat

SEQ ID NO: 5861279 - DNA, 25 bp, Homo sapien
cgacatcggcgttatatcgaacagt

SEQ ID NO: 5861280 - DNA, 25 bp, Homo sapien
atacatcgcgtttagtacggtacgc

SEQ ID NO: 5861281 - DNA, 25 bp, Homo sapien
attatggcgacgctactaaaggagc

SEQ ID NO: 5861282 - DNA, 25 bp, Homo sapien
ctctttccgctaatcggtagcgtat

SEQ ID NO: 5861283 - DNA, 25 bp, Homo sapien
ccgttgtaacgcgcgagtaatattg

SEQ ID NO: 5861284 - DNA, 25 bp, Homo sapien
tttgcctaatcgtccaacgacatcc

SEQ ID NO: 5861285 - DNA, 25 bp, Homo sapien
gtaatgcgcgatagtcgaactcgaa

SEQ ID NO: 5861286 - DNA, 25 bp, Homo sapien
ctgaaattcgcgactagtcttccac

SEQ ID NO: 5861287 - DNA, 25 bp, Homo sapien
cgacaccgcgttaagtatgaagtac

SEQ ID NO: 5861288 - DNA, 25 bp, Homo sapien
cctgctgcacgtcgtatcatttact

SEQ ID NO: 5861289 - DNA, 25 bp, Homo sapien
atgcgaagcgacgtataacgcacta

SEQ ID NO: 5861290 - DNA, 25 bp, Homo sapien
ggcgatgctatactcgacgaaatga

SEQ ID NO: 5861291 - DNA, 25 bp, Homo sapien
cttacttacgacctacgcggcaaat

SEQ ID NO: 5861292 - DNA, 25 bp, Homo sapien
agagactacgtcgcgattagacctt

SEQ ID NO: 5861293 - DNA, 25 bp, Homo sapien
ctaatatccgctaacgatggttgcg

SEQ ID NO: 5861294 - DNA, 25 bp, Homo sapien
ttagccaacttcgcgcgttcagaat

SEQ ID NO: 5861295 - DNA, 25 bp, Homo sapien
aacttacggtaggtatcgagcgttc

SEQ ID NO: 5861296 - DNA, 25 bp, Homo sapien
tttcagtactaacgaccgctcacct

SEQ ID NO: 5861297 - DNA, 25 bp, Homo sapien
aagatgtacgcgcgtaactgatggt

SEQ ID NO: 5861298 - DNA, 25 bp, Homo sapien
tagtacactagcggaacgtggacta

SEQ ID NO: 5861299 - DNA, 25 bp, Homo sapien
ccgctacggacctatatcgaatatg

SEQ ID NO: 5861300 - DNA, 25 bp, Homo sapien
ctatttgcgtatcccgctatggtag

SEQ ID NO: 5861301 - DNA, 25 bp, Homo sapien
tttttgtcgcgattagacctcctgc

SEQ ID NO: 5861302 - DNA, 25 bp, Homo sapien
agcctataactacgtcgcgaacaca

SEQ ID NO: 5861303 - DNA, 25 bp, Homo sapien
ataaccagccgcggtactatagaga

SEQ ID NO: 5861304 - DNA, 25 bp, Homo sapien
acggctatatagtgacgcggacata

SEQ ID NO: 5861305 - DNA, 25 bp, Homo sapien
catctcagcgaattcgcgtaatctc

SEQ ID NO: 5861306 - DNA, 25 bp, Homo sapien
taacggaacatactacgcgagccat

SEQ ID NO: 5861307 - DNA, 25 bp, Homo sapien
actaaaccgcgtagctctagatctg

SEQ ID NO: 5861308 - DNA, 25 bp, Homo sapien
acgtagcgtaggcgttagtcaaaca

SEQ ID NO: 5861309 - DNA, 25 bp, Homo sapien
tagagaccgaacgtacttatccgtg

SEQ ID NO: 5861310 - DNA, 25 bp, Homo sapien
agaatggtagcgcgacatagcaatc

SEQ ID NO: 5861311 - DNA, 25 bp, Homo sapien
tgtcaacgtcgcacgagtaattctg

SEQ ID NO: 5861312 - DNA, 25 bp, Homo sapien
gggaaaaacatacgcgtcgaacaac

SEQ ID NO: 5861313 - DNA, 25 bp, Homo sapien
gcataacgacgcgaatagtgtccat

SEQ ID NO: 5861314 - DNA, 25 bp, Homo sapien
ctaatcgtcggacatacgtaaccag

SEQ ID NO: 5861315 - DNA, 25 bp, Homo sapien
gagttccgttccgctagtatttgca

SEQ ID NO: 5861316 - DNA, 25 bp, Homo sapien
ctttccgtattagcgccgaaagttg

SEQ ID NO: 5861317 - DNA, 25 bp, Homo sapien
agcttgtaggttgacgcggtattag

SEQ ID NO: 5861318 - DNA, 25 bp, Homo sapien
gtagtaccgcgtataacgtgtcatc

SEQ ID NO: 5861319 - DNA, 25 bp, Homo sapien
ttgctaattaggaccgacgggtaga

SEQ ID NO: 5861320 - DNA, 25 bp, Homo sapien
ttactctaacgcggtatcgggtttc

SEQ ID NO: 5861321 - DNA, 25 bp, Homo sapien
gccttctacgcgaatactgtaaacg

SEQ ID NO: 5861322 - DNA, 25 bp, Homo sapien
gaacaaattcatcgcgacgacgctt

SEQ ID NO: 5861323 - DNA, 25 bp, Homo sapien
tgaccttcgacataccgcttatctg

SEQ ID NO: 5861324 - DNA, 25 bp, Homo sapien
ggacagtagttatacgcggaaagag

SEQ ID NO: 5861325 - DNA, 25 bp, Homo sapien
gacaagtacgatcagcgagtaaacg

SEQ ID NO: 5861326 - DNA, 25 bp, Homo sapien
ttttgatcgtcgcgatacgacacgt

SEQ ID NO: 5861327 - DNA, 25 bp, Homo sapien
ctatatcgacgtatacccagagtcg

SEQ ID NO: 5861328 - DNA, 25 bp, Homo sapien
caaaagataccgaacgtcgaacgtc

SEQ ID NO: 5861329 - DNA, 25 bp, Homo sapien
gattatggtcgttccgcgaagcaaa

SEQ ID NO: 5861330 - DNA, 25 bp, Homo sapien
gatcaaccgcggtagattaccaatc

SEQ ID NO: 5861331 - DNA, 25 bp, Homo sapien
ctaggagttcgcgactactaccaaa

SEQ ID NO: 5861332 - DNA, 25 bp, Homo sapien
actgagagatacccgatcgcattgt

SEQ ID NO: 5861333 - DNA, 25 bp, Homo sapien
ggagcatatacgggtcgtataacac

SEQ ID NO: 5861334 - DNA, 25 bp, Homo sapien
tactcttatacttcgcggcatgcgt

SEQ ID NO: 5861335 - DNA, 25 bp, Homo sapien
gcttcttcctaccgcgtatacgttt

SEQ ID NO: 5861336 - DNA, 25 bp, Homo sapien
catctattacgcggtccttggtcaa

SEQ ID NO: 5861337 - DNA, 25 bp, Homo sapien
taagaacgcgccgacttatcatgag

SEQ ID NO: 5861338 - DNA, 25 bp, Homo sapien
aaagtccgtagatcggtctcctgta

SEQ ID NO: 5861339 - DNA, 25 bp, Homo sapien
acatggattcgaccggtcgtaatac

SEQ ID NO: 5861340 - DNA, 25 bp, Homo sapien
ttggcatagcgacgtcgtagaagat

SEQ ID NO: 5861341 - DNA, 25 bp, Homo sapien
accatgctcgacggtcgaaataatg

SEQ ID NO: 5861342 - DNA, 25 bp, Homo sapien
atacactattgcgcgatacctgtcg

SEQ ID NO: 5861343 - DNA, 25 bp, Homo sapien
tacacatacgtcgcacctacttgga

SEQ ID NO: 5861344 - DNA, 25 bp, Homo sapien
aattataccgtaatggtcgcgcgca

SEQ ID NO: 5861345 - DNA, 25 bp, Homo sapien
attatgttagttcgcgccgagggaa

SEQ ID NO: 5861346 - DNA, 25 bp, Homo sapien
gagatttgggcgcaatacgaatgct

SEQ ID NO: 5861347 - DNA, 25 bp, Homo sapien
atgactacgcgagtggtatatgcct

SEQ ID NO: 5861348 - DNA, 25 bp, Homo sapien
gtcactctactagcgcgttttcgat

SEQ ID NO: 5861349 - DNA, 25 bp, Homo sapien
ttgctttcgcgacgtatgccaaatc

SEQ ID NO: 5861350 - DNA, 25 bp, Homo sapien
attggtcgggacgtagtatatagcg

SEQ ID NO: 5861351 - DNA, 25 bp, Homo sapien
tgtggactcgaccgtatatctcaag

SEQ ID NO: 5861352 - DNA, 25 bp, Homo sapien
atgatacactcgcggataggatggt

SEQ ID NO: 5861353 - DNA, 25 bp, Homo sapien
catatcgggcgtattacgcttaagg

SEQ ID NO: 5861354 - DNA, 25 bp, Homo sapien
gcttttatcgcgacaacggagtgta

SEQ ID NO: 5861355 - DNA, 25 bp, Homo sapien
gttatgcgtcgagacgtagagaaag

SEQ ID NO: 5861356 - DNA, 25 bp, Homo sapien
tagatgccgagcgacgtaactttgt

SEQ ID NO: 5861357 - DNA, 25 bp, Homo sapien
atgaacccgttcgcgcaaacagtta

SEQ ID NO: 5861358 - DNA, 25 bp, Homo sapien
taaacggcggacccgtatattcttg

SEQ ID NO: 5861359 - DNA, 25 bp, Homo sapien
aggggtcggtacgactagtatacta

SEQ ID NO: 5861360 - DNA, 25 bp, Homo sapien
aaaagcacgggtagcgttataccga

SEQ ID NO: 5861361 - DNA, 25 bp, Homo sapien
attcattcgcgtcctatacaccagc

SEQ ID NO: 5861362 - DNA, 25 bp, Homo sapien
tcctatatgccgcgactaaactgtc

SEQ ID NO: 5861363 - DNA, 25 bp, Homo sapien
cgtaaagcgcggtcttataatgcgt

SEQ ID NO: 5861364 - DNA, 25 bp, Homo sapien
ctctagcgttgcgtatgtcaatgtc

SEQ ID NO: 5861365 - DNA, 25 bp, Homo sapien
cgaaaatagtacgcggtcatcgtct

SEQ ID NO: 5861366 - DNA, 25 bp, Homo sapien
tttatcactctcgcgtagtcagctg

SEQ ID NO: 5861367 - DNA, 25 bp, Homo sapien
ataccttccgcggaataacgctaac

SEQ ID NO: 5861368 - DNA, 25 bp, Homo sapien
tagctaatgttaccggtcggagtct

SEQ ID NO: 5861369 - DNA, 25 bp, Homo sapien
tcaatagaccgcgtgtattgagtgc

SEQ ID NO: 5861370 - DNA, 25 bp, Homo sapien
ttcgctcgtactatccgcattctct

SEQ ID NO: 5861371 - DNA, 25 bp, Homo sapien
gacctattacgctacggcgtaatag

SEQ ID NO: 5861372 - DNA, 25 bp, Homo sapien
atgatgtaagcgtcggacagagttc

SEQ ID NO: 5861373 - DNA, 25 bp, Homo sapien
agatcgcgacgtgtacgtttgaagt

SEQ ID NO: 5861374 - DNA, 25 bp, Homo sapien
aacacatccataagtcgcggcctta

SEQ ID NO: 5861375 - DNA, 25 bp, Homo sapien
gtattgctatgcgccgcatgatagt

SEQ ID NO: 5861376 - DNA, 25 bp, Homo sapien
tgcggtgtatcggcgtatttctagt

SEQ ID NO: 5861377 - DNA, 25 bp, Homo sapien
atccgaatgtatcgcgcgatccttt

SEQ ID NO: 5861378 - DNA, 25 bp, Homo sapien
gctgattactacgggtcgaatcttc

SEQ ID NO: 5861379 - DNA, 25 bp, Homo sapien
tatagacgcgtttacgctaagccac

SEQ ID NO: 5861380 - DNA, 25 bp, Homo sapien
ccgtataacttacgcggacttgcta

SEQ ID NO: 5861381 - DNA, 25 bp, Homo sapien
aaacatcgtacccgaacgacacaag

SEQ ID NO: 5861382 - DNA, 25 bp, Homo sapien
tttctaactggccgcgatactaagc

SEQ ID NO: 5861383 - DNA, 25 bp, Homo sapien
catttgatatagcgcgcagtcatcg

SEQ ID NO: 5861384 - DNA, 25 bp, Homo sapien
tcaattccctaattgcgcgcagatc

SEQ ID NO: 5861385 - DNA, 25 bp, Homo sapien
acgatttatcggacgcctaattccg

SEQ ID NO: 5861386 - DNA, 25 bp, Homo sapien
ctctcaggtaatcgttcggtctcaa

SEQ ID NO: 5861387 - DNA, 25 bp, Homo sapien
acgagtccctaatcgcgtattgcta

SEQ ID NO: 5861388 - DNA, 25 bp, Homo sapien
aagcaatcgactcatgtcgtgtgag

SEQ ID NO: 5861389 - DNA, 25 bp, Homo sapien
tgatcccgtaacacgtcgatagcta

SEQ ID NO: 5861390 - DNA, 25 bp, Homo sapien
tgagctgctacgcgtctagacaata

SEQ ID NO: 5861391 - DNA, 25 bp, Homo sapien
ttagggacggcgaacttagacacat

SEQ ID NO: 5861392 - DNA, 25 bp, Homo sapien
actcgtcgtgcgtacgaatattcct

SEQ ID NO: 5861393 - DNA, 25 bp, Homo sapien
aaggagcgcctatagcgagttatac

SEQ ID NO: 5861394 - DNA, 25 bp, Homo sapien
taattgcgcgcagttactacgatgg

SEQ ID NO: 5861395 - DNA, 25 bp, Homo sapien
ttgtgccgagctagatcgataggat

SEQ ID NO: 5861396 - DNA, 25 bp, Homo sapien
aaacaactcgcgtacggaatcacac

SEQ ID NO: 5861397 - DNA, 25 bp, Homo sapien
tataggcgagacgttacgttcatcg

SEQ ID NO: 5861398 - DNA, 25 bp, Homo sapien
ttggttcgtaggtattacgagccga

SEQ ID NO: 5861399 - DNA, 25 bp, Homo sapien
caaacgggcgcgattactagatctt

SEQ ID NO: 5861400 - DNA, 25 bp, Homo sapien
gcgttgtaacgttcgcgcaaattag

SEQ ID NO: 5861401 - DNA, 25 bp, Homo sapien
ggatgtgctagtatacgcgcaagtt

SEQ ID NO: 5861402 - DNA, 25 bp, Homo sapien
aggcgagtatacggtcgtatttgca

SEQ ID NO: 5861403 - DNA, 25 bp, Homo sapien
atgagtgtatccgcgaaagctacct

SEQ ID NO: 5861404 - DNA, 25 bp, Homo sapien
agaaggctttcgaacgcgatctgat

SEQ ID NO: 5861405 - DNA, 25 bp, Homo sapien
gcttgttgtcgctagaacgtagaga

SEQ ID NO: 5861406 - DNA, 25 bp, Homo sapien
aatagcggcgcggatagtattccta

SEQ ID NO: 5861407 - DNA, 25 bp, Homo sapien
acactttcgcgtcatacacccattc

SEQ ID NO: 5861408 - DNA, 25 bp, Homo sapien
cagccctccgcgaaatacgatatat

SEQ ID NO: 5861409 - DNA, 25 bp, Homo sapien
ggactttcgaccgtcagtagctata

SEQ ID NO: 5861410 - DNA, 25 bp, Homo sapien
acgacaatatcgtacgtcgacctag

SEQ ID NO: 5861411 - DNA, 25 bp, Homo sapien
tgttgggatcggcgctttattacca

SEQ ID NO: 5861412 - DNA, 25 bp, Homo sapien
ttctacacgtcaatcgcgtcctagt

SEQ ID NO: 5861413 - DNA, 25 bp, Homo sapien
ccgcaaatctaacgggcgtttcatt

SEQ ID NO: 5861414 - DNA, 25 bp, Homo sapien
gtgtacttgcggacgcgtaattaac

SEQ ID NO: 5861415 - DNA, 25 bp, Homo sapien
attacttacgcggactctcagatgc

SEQ ID NO: 5861416 - DNA, 25 bp, Homo sapien
caaactcacccgcgtaatatctagg

SEQ ID NO: 5861417 - DNA, 25 bp, Homo sapien
aatggttttcgcgcgatacagcaag

SEQ ID NO: 5861418 - DNA, 25 bp, Homo sapien
ccaaatcacggtcgaacgatctaac

SEQ ID NO: 5861419 - DNA, 25 bp, Homo sapien
acatggcgtacgacgttagcatctt

SEQ ID NO: 5861420 - DNA, 25 bp, Homo sapien
atttgctggcgtattagcgcagaac

SEQ ID NO: 5861421 - DNA, 25 bp, Homo sapien
cgcaattcggacctatcgtctaagt

SEQ ID NO: 5861422 - DNA, 25 bp, Homo sapien
ttaacgtacgcgaggaatccgtatg

SEQ ID NO: 5861423 - DNA, 25 bp, Homo sapien
aacatgagacgatcgtcgtagtcct

SEQ ID NO: 5861424 - DNA, 25 bp, Homo sapien
tttttgcgcgacgatacaatcccgt

SEQ ID NO: 5861425 - DNA, 25 bp, Homo sapien
tagttaggttgcgtcgtatgggcaa

SEQ ID NO: 5861426 - DNA, 25 bp, Homo sapien
ctaagattagtagtcgcgaaacgcg

SEQ ID NO: 5861427 - DNA, 25 bp, Homo sapien
cagttatgtcgacgcgataggtaga

SEQ ID NO: 5861428 - DNA, 25 bp, Homo sapien
gggttacgacctatagacgacacaa

SEQ ID NO: 5861429 - DNA, 25 bp, Homo sapien
aaatcctcgaatacgcgtatcggct

SEQ ID NO: 5861430 - DNA, 25 bp, Homo sapien
tgaacgcgcgatacgtagatctaga

SEQ ID NO: 5861431 - DNA, 25 bp, Homo sapien
tctagcgtacgacgcattgttcgat

SEQ ID NO: 5861432 - DNA, 25 bp, Homo sapien
tgtacgcaataggcgcgcttaaatc

SEQ ID NO: 5861433 - DNA, 25 bp, Homo sapien
atataagtactcgcgtaggaaggcc

SEQ ID NO: 5861434 - DNA, 25 bp, Homo sapien
aggttacgccgttacgctaccataa

SEQ ID NO: 5861435 - DNA, 25 bp, Homo sapien
ggcatgagtactacggtcgaaattg

SEQ ID NO: 5861436 - DNA, 25 bp, Homo sapien
gtagaccccgattatacgactgatg

SEQ ID NO: 5861437 - DNA, 25 bp, Homo sapien
ctgttgtaacggcgagtatagcaag

SEQ ID NO: 5861438 - DNA, 25 bp, Homo sapien
ttttaacgtatacaggcgaagcccg

SEQ ID NO: 5861439 - DNA, 25 bp, Homo sapien
ataactccgcgttaaaagcggcgaa

SEQ ID NO: 5861440 - DNA, 25 bp, Homo sapien
tgaattgttcgcgaacgtacgagac

SEQ ID NO: 5861441 - DNA, 25 bp, Homo sapien
cgtacacgcgattacgctatgatga

SEQ ID NO: 5861442 - DNA, 25 bp, Homo sapien
accttcgtcgcgttaatactcccaa

SEQ ID NO: 5861443 - DNA, 25 bp, Homo sapien
aataaaacgaccggttgtatcgcgc

SEQ ID NO: 5861444 - DNA, 25 bp, Homo sapien
ccatcctatacgacgtacggtatca

SEQ ID NO: 5861445 - DNA, 25 bp, Homo sapien
ctgaagcggtcgagtttaaatgcca

SEQ ID NO: 5861446 - DNA, 25 bp, Homo sapien
taccttctatgtctcgcgactagct

SEQ ID NO: 5861447 - DNA, 25 bp, Homo sapien
cgtaagtcgggcgtcgatatttatg

SEQ ID NO: 5861448 - DNA, 25 bp, Homo sapien
tgtgtgcgcaagttcgtagtgttct

SEQ ID NO: 5861449 - DNA, 25 bp, Homo sapien
tccttcacccgcgatactaattcgt

SEQ ID NO: 5861450 - DNA, 25 bp, Homo sapien
caagttttcgtacggggtagatgag

SEQ ID NO: 5861451 - DNA, 25 bp, Homo sapien
ctaggtgtcgcgcggatttatcata

SEQ ID NO: 5861452 - DNA, 25 bp, Homo sapien
gatgttcgtagagcggataggtgtt

SEQ ID NO: 5861453 - DNA, 25 bp, Homo sapien
ggtcggccgtacgttatcaaattct

SEQ ID NO: 5861454 - DNA, 25 bp, Homo sapien
gaattttagcgacggatcgctccta

SEQ ID NO: 5861455 - DNA, 25 bp, Homo sapien
gcaaaaacgcgtatggacgtgttac

SEQ ID NO: 5861456 - DNA, 25 bp, Homo sapien
acctgtcgacgcgatgtatttagga

SEQ ID NO: 5861457 - DNA, 25 bp, Homo sapien
aagatatgcgttacgggattctccg

SEQ ID NO: 5861458 - DNA, 25 bp, Homo sapien
ttatgttagattcgcgcccgaactg

SEQ ID NO: 5861459 - DNA, 25 bp, Homo sapien
cacatctcgtcgcggatgttaatca

SEQ ID NO: 5861460 - DNA, 25 bp, Homo sapien
ctagtttgcgcgtatcacgtcaact

SEQ ID NO: 5861461 - DNA, 25 bp, Homo sapien
aagcgttcggcgtacactacatcta

SEQ ID NO: 5861462 - DNA, 25 bp, Homo sapien
atatgggatactgcgtacgagcctt

SEQ ID NO: 5861463 - DNA, 25 bp, Homo sapien
tacgtgtcgcgcgaataaagaaagg

SEQ ID NO: 5861464 - DNA, 25 bp, Homo sapien
acttaggcgcgtcgtatgaataacc

SEQ ID NO: 5861465 - DNA, 25 bp, Homo sapien
cgaactcgcgacttagagttctgta

SEQ ID NO: 5861466 - DNA, 25 bp, Homo sapien
gttggttagttcgcgttgctgagtt

SEQ ID NO: 5861467 - DNA, 25 bp, Homo sapien
caacgatccgttacgcaagttatgc

SEQ ID NO: 5861468 - DNA, 25 bp, Homo sapien
tgtgtcatgacgttacgcgtctcat

SEQ ID NO: 5861469 - DNA, 25 bp, Homo sapien
aatacgcggtctactagcggatttc

SEQ ID NO: 5861470 - DNA, 25 bp, Homo sapien
aatgctgtacgctcgtatatgagcg

SEQ ID NO: 5861471 - DNA, 25 bp, Homo sapien
agtttagtgctataacgcgccggta

SEQ ID NO: 5861472 - DNA, 25 bp, Homo sapien
acatgcgcggtcgtaatacgaagtt

SEQ ID NO: 5861473 - DNA, 25 bp, Homo sapien
tagtgaaacgcgactagcgcataga

SEQ ID NO: 5861474 - DNA, 25 bp, Homo sapien
tgtcttcaacgaacgcgtagttcca

SEQ ID NO: 5861475 - DNA, 25 bp, Homo sapien
agcgatacaatcggaccgttattgg

SEQ ID NO: 5861476 - DNA, 25 bp, Homo sapien
aaatccttacgtcgagtcgttagcg

SEQ ID NO: 5861477 - DNA, 25 bp, Homo sapien
aagtctcgtatttaacgcgtgtcgc

SEQ ID NO: 5861478 - DNA, 25 bp, Homo sapien
gtgcgaactatcgggcgtaaaaatg

SEQ ID NO: 5861479 - DNA, 25 bp, Homo sapien
catgcgggacgtatgtcgtttgtaa

SEQ ID NO: 5861480 - DNA, 25 bp, Homo sapien
gtaacagtcggaacgcaattgccaa

SEQ ID NO: 5861481 - DNA, 25 bp, Homo sapien
attcatcgcgtatgagtccctctga

SEQ ID NO: 5861482 - DNA, 25 bp, Homo sapien
aggacccgatcgctatcgatataca

SEQ ID NO: 5861483 - DNA, 25 bp, Homo sapien
ttgagtcgtatagttggcgggaaac

SEQ ID NO: 5861484 - DNA, 25 bp, Homo sapien
ctctgaacttcgcgcgataacatag

SEQ ID NO: 5861485 - DNA, 25 bp, Homo sapien
aagcatccgtagccgaataaatggc

SEQ ID NO: 5861486 - DNA, 25 bp, Homo sapien
ccgatctaagtatcgcgctacagtt

SEQ ID NO: 5861487 - DNA, 25 bp, Homo sapien
actttgcgccgctagtacacaactt

SEQ ID NO: 5861488 - DNA, 25 bp, Homo sapien
ctcaaccgcgatactaaagtgcctt

SEQ ID NO: 5861489 - DNA, 25 bp, Homo sapien
caaatgtagtccgcgtaccaaagag

SEQ ID NO: 5861490 - DNA, 25 bp, Homo sapien
tacgcttatacgtgcgcgacgtaat

SEQ ID NO: 5861491 - DNA, 25 bp, Homo sapien
tataagcgcgtataccgatgatcgc

SEQ ID NO: 5861492 - DNA, 25 bp, Homo sapien
ggttctgggacgcgaatacatgatt

SEQ ID NO: 5861493 - DNA, 25 bp, Homo sapien
gttctaatccgtagtcgtgcctaag

SEQ ID NO: 5861494 - DNA, 25 bp, Homo sapien
gtcacagtcgctagaacgggataat

SEQ ID NO: 5861495 - DNA, 25 bp, Homo sapien
taccatgagttattgcgcgtgagag

SEQ ID NO: 5861496 - DNA, 25 bp, Homo sapien
ctttagctactagtacgcgtggtct

SEQ ID NO: 5861497 - DNA, 25 bp, Homo sapien
tcctaggttatgcgcgatctcattg

SEQ ID NO: 5861498 - DNA, 25 bp, Homo sapien
tcgtagatatgtgcgcgacgtgtta

SEQ ID NO: 5861499 - DNA, 25 bp, Homo sapien
cacctagttacgccggtatatctgt

SEQ ID NO: 5861500 - DNA, 25 bp, Homo sapien
tagtggggtcgttcgagtagattgt

SEQ ID NO: 5861501 - DNA, 25 bp, Homo sapien
tgcgttgtaatagatcgcggcttct

SEQ ID NO: 5861502 - DNA, 25 bp, Homo sapien
cttgatctagcgcgtattgccagtt

SEQ ID NO: 5861503 - DNA, 25 bp, Homo sapien
ccgaaatatacgagcgtcggtttgt

SEQ ID NO: 5861504 - DNA, 25 bp, Homo sapien
cttaaacgtatacgatcggccacac

SEQ ID NO: 5861505 - DNA, 25 bp, Homo sapien
cattctggcgtgtacgatttggaag

SEQ ID NO: 5861506 - DNA, 25 bp, Homo sapien
tgggattaatcgacggggtatttgg

SEQ ID NO: 5861507 - DNA, 25 bp, Homo sapien
tgccatactagcgtaacgatggcat

SEQ ID NO: 5861508 - DNA, 25 bp, Homo sapien
aatgtctactccgtcgacgacatga

SEQ ID NO: 5861509 - DNA, 25 bp, Homo sapien
tgttggatccggtagtcgaagaaca

SEQ ID NO: 5861510 - DNA, 25 bp, Homo sapien
tttacccgacgcgtcatgtttcaca

SEQ ID NO: 5861511 - DNA, 25 bp, Homo sapien
ggtgatcgcgaccgtagaatctatt

SEQ ID NO: 5861512 - DNA, 25 bp, Homo sapien
agaagttaggtacgtcgcgtcttac

SEQ ID NO: 5861513 - DNA, 25 bp, Homo sapien
tactccccgtagcataacggtaaga

SEQ ID NO: 5861514 - DNA, 25 bp, Homo sapien
cattgatattacgtcgcggtagcac

SEQ ID NO: 5861515 - DNA, 25 bp, Homo sapien
gtggtgttacgctcggtacttttgt

SEQ ID NO: 5861516 - DNA, 25 bp, Homo sapien
tgaagcaacgcgaccttacttatcc

SEQ ID NO: 5861517 - DNA, 25 bp, Homo sapien
ttcttgcattaatcgcggacggttg

SEQ ID NO: 5861518 - DNA, 25 bp, Homo sapien
tcgcctcggtctatacgtatcgtaa

SEQ ID NO: 5861519 - DNA, 25 bp, Homo sapien
cagctttatgcggagtccgataatc

SEQ ID NO: 5861520 - DNA, 25 bp, Homo sapien
cggcctatactcgcgtaacgttatt

SEQ ID NO: 5861521 - DNA, 25 bp, Homo sapien
tacagatagggcgtactaccacaac

SEQ ID NO: 5861522 - DNA, 25 bp, Homo sapien
gaatcggattacgcacggtctgatt

SEQ ID NO: 5861523 - DNA, 25 bp, Homo sapien
cgtttgatcgactacgctacatgac

SEQ ID NO: 5861524 - DNA, 25 bp, Homo sapien
gtaacacgcgtttataccggttcac

SEQ ID NO: 5861525 - DNA, 25 bp, Homo sapien
gccaatcgcgcgtcatattgactaa

SEQ ID NO: 5861526 - DNA, 25 bp, Homo sapien
gcaattcgcgttccgattagcatct

SEQ ID NO: 5861527 - DNA, 25 bp, Homo sapien
gaaggacgaccgattacgatctgtt

SEQ ID NO: 5861528 - DNA, 25 bp, Homo sapien
cactaataggtcgacgacgtaacga

SEQ ID NO: 5861529 - DNA, 25 bp, Homo sapien
tttttatacgtcggaacgcacctgg

SEQ ID NO: 5861530 - DNA, 25 bp, Homo sapien
gctgtaaacgcgcgtagatgtattg

SEQ ID NO: 5861531 - DNA, 25 bp, Homo sapien
aggcggcgacccaatacgtttataa

SEQ ID NO: 5861532 - DNA, 25 bp, Homo sapien
attctgtcgcgaactaacctaggag

SEQ ID NO: 5861533 - DNA, 25 bp, Homo sapien
ttgttcgcgcgaactataatggcag

SEQ ID NO: 5861534 - DNA, 25 bp, Homo sapien
atctcagacgaattaggcgacacag

SEQ ID NO: 5861535 - DNA, 25 bp, Homo sapien
atatagtacgaaacgccgacgaacg

SEQ ID NO: 5861536 - DNA, 25 bp, Homo sapien
ggctatcgtaactccgaacgtttag

SEQ ID NO: 5861537 - DNA, 25 bp, Homo sapien
caacagaccggtatacacgaatagg

SEQ ID NO: 5861538 - DNA, 25 bp, Homo sapien
agcattacgttgatacgcgattgcc

SEQ ID NO: 5861539 - DNA, 25 bp, Homo sapien
gttttttataagagcgcgaggcgct

SEQ ID NO: 5861540 - DNA, 25 bp, Homo sapien
acgttctccgtctagcgttgatcaa

SEQ ID NO: 5861541 - DNA, 25 bp, Homo sapien
ctgtgtcggtcttacgataaggagt

SEQ ID NO: 5861542 - DNA, 25 bp, Homo sapien
tactttcgtagttgtccgcagcctt

SEQ ID NO: 5861543 - DNA, 25 bp, Homo sapien
aacaaggcgtacgttaagcggaaga

SEQ ID NO: 5861544 - DNA, 25 bp, Homo sapien
gattctcgcaacgtactaacgtgac

SEQ ID NO: 5861545 - DNA, 25 bp, Homo sapien
gtgagaccgatcataccgctttctt

SEQ ID NO: 5861546 - DNA, 25 bp, Homo sapien
acaatgatcgcgcgtacagataggt

SEQ ID NO: 5861547 - DNA, 25 bp, Homo sapien
tgactctcgcttatagcgcagatct

SEQ ID NO: 5861548 - DNA, 25 bp, Homo sapien
aatgtttcgcgcacgtaatgctgca

SEQ ID NO: 5861549 - DNA, 25 bp, Homo sapien
gtttatcgtcctacgcgtaatcgag

SEQ ID NO: 5861550 - DNA, 25 bp, Homo sapien
cgtgaggtgtagtcgcgaatacaat

SEQ ID NO: 5861551 - DNA, 25 bp, Homo sapien
cgatatatcacgctagtcgtcacgt

SEQ ID NO: 5861552 - DNA, 25 bp, Homo sapien
tcttcagttcgtacgtcgattgagg

SEQ ID NO: 5861553 - DNA, 25 bp, Homo sapien
gaatgtcgcgacgtagttccattca

SEQ ID NO: 5861554 - DNA, 25 bp, Homo sapien
tcaaaagtagtacgacgctaggcca

SEQ ID NO: 5861555 - DNA, 25 bp, Homo sapien
aacttcgccgcggtatattgatcct

SEQ ID NO: 5861556 - DNA, 25 bp, Homo sapien
tacatctgatcgcggtataccagga

SEQ ID NO: 5861557 - DNA, 25 bp, Homo sapien
acacctcgataagtccgcatcgtaa

SEQ ID NO: 5861558 - DNA, 25 bp, Homo sapien
gctcaagtctcgcgtacgaattagt

SEQ ID NO: 5861559 - DNA, 25 bp, Homo sapien
cctggcgtattacgaatcgtacaag

SEQ ID NO: 5861560 - DNA, 25 bp, Homo sapien
gtatgtccgtactagtacgtaccag

SEQ ID NO: 5861561 - DNA, 25 bp, Homo sapien
ttatagccgacgagagttagacgag

SEQ ID NO: 5861562 - DNA, 25 bp, Homo sapien
tccatgcgcgttggtctataaccaa

SEQ ID NO: 5861563 - DNA, 25 bp, Homo sapien
caattgagtagcgcgtctacagact

SEQ ID NO: 5861564 - DNA, 25 bp, Homo sapien
atatcggcgtcgatagtactacagc

SEQ ID NO: 5861565 - DNA, 25 bp, Homo sapien
tactaacgcgcgttatagtagcgac

SEQ ID NO: 5861566 - DNA, 25 bp, Homo sapien
gtgcgtggacgtattaacgcattac

SEQ ID NO: 5861567 - DNA, 25 bp, Homo sapien
acacgatcgcgacgggataaatttc

SEQ ID NO: 5861568 - DNA, 25 bp, Homo sapien
gtcagtcgccgtttaactatcggta

SEQ ID NO: 5861569 - DNA, 25 bp, Homo sapien
aatgctcgccgacttatacatgacg

SEQ ID NO: 5861570 - DNA, 25 bp, Homo sapien
agttgacgaccgttactagtctgga

SEQ ID NO: 5861571 - DNA, 25 bp, Homo sapien
gcatcccgctacggataagagaaaa

SEQ ID NO: 5861572 - DNA, 25 bp, Homo sapien
agacgacgcgcattcaataacctag

SEQ ID NO: 5861573 - DNA, 25 bp, Homo sapien
ataccctatcccgcgtatagagttg

SEQ ID NO: 5861574 - DNA, 25 bp, Homo sapien
ttctacttcgcgtaacgataccgct

SEQ ID NO: 5861575 - DNA, 25 bp, Homo sapien
gatgtacgacctagtccgtgttaag

SEQ ID NO: 5861576 - DNA, 25 bp, Homo sapien
gagtagccgacgtactatgtcatca

SEQ ID NO: 5861577 - DNA, 25 bp, Homo sapien
atttacactagtcgcgcgtagcgta

SEQ ID NO: 5861578 - DNA, 25 bp, Homo sapien
ccattcccgaacgggtatatgtcat

SEQ ID NO: 5861579 - DNA, 25 bp, Homo sapien
gcaacaacgtttccgatcggaacaa

SEQ ID NO: 5861580 - DNA, 25 bp, Homo sapien
aacattcctacgatcgacgaccgtt

SEQ ID NO: 5861581 - DNA, 25 bp, Homo sapien
ctgttctcggtacgctatcgttatg

SEQ ID NO: 5861582 - DNA, 25 bp, Homo sapien
ctttcataacgtacgccggaagaac

SEQ ID NO: 5861583 - DNA, 25 bp, Homo sapien
aactatgcgtattaggtcgactccg

SEQ ID NO: 5861584 - DNA, 25 bp, Homo sapien
taatcacccgattgaacgtgctgca

SEQ ID NO: 5861585 - DNA, 25 bp, Homo sapien
cgatcatcgacaatacgtgcttagc

SEQ ID NO: 5861586 - DNA, 25 bp, Homo sapien
ttggcggtcgctatcgatcgatatt

SEQ ID NO: 5861587 - DNA, 25 bp, Homo sapien
ctacattatgatcggtcgccctaac

SEQ ID NO: 5861588 - DNA, 25 bp, Homo sapien
gactacgacgcgatatacggattca

SEQ ID NO: 5861589 - DNA, 25 bp, Homo sapien
ttacataacgcgtatcgactagggg

SEQ ID NO: 5861590 - DNA, 25 bp, Homo sapien
caatggttcgtactacgggtatacc

SEQ ID NO: 5861591 - DNA, 25 bp, Homo sapien
gaactacgttcgcacggtaccattt

SEQ ID NO: 5861592 - DNA, 25 bp, Homo sapien
tcggcacccgtataaccgactaatt

SEQ ID NO: 5861593 - DNA, 25 bp, Homo sapien
catggaaccggcgttatattatcgc

SEQ ID NO: 5861594 - DNA, 25 bp, Homo sapien
ccgtagagcggatcgtacagaatat

SEQ ID NO: 5861595 - DNA, 25 bp, Homo sapien
tacacacgtcagattaccgagtagg

SEQ ID NO: 5861596 - DNA, 25 bp, Homo sapien
ttttgtcgcgctatcagtcgcaaca

SEQ ID NO: 5861597 - DNA, 25 bp, Homo sapien
atcgctcacgctcgatcaacgtaaa

SEQ ID NO: 5861598 - DNA, 25 bp, Homo sapien
gtcattccgcgaagtatagtaaggc

SEQ ID NO: 5861599 - DNA, 25 bp, Homo sapien
gagttatcggtcgtatcgcaacgaa

SEQ ID NO: 5861600 - DNA, 25 bp, Homo sapien
tggttgatagcgcggactgcttaat

SEQ ID NO: 5861601 - DNA, 25 bp, Homo sapien
ataccagcgtagataacgcactgct

SEQ ID NO: 5861602 - DNA, 25 bp, Homo sapien
tccattttcgaccgataccaatgcg

SEQ ID NO: 5861603 - DNA, 25 bp, Homo sapien
ctatgctaagtcgaccgctgcattt

SEQ ID NO: 5861604 - DNA, 25 bp, Homo sapien
gcgagactaatagcgcgactacatt

SEQ ID NO: 5861605 - DNA, 25 bp, Homo sapien
aattgaacgtctagtagcggacagc

SEQ ID NO: 5861606 - DNA, 25 bp, Homo sapien
tgcagagagcggtatcgaatacaac

SEQ ID NO: 5861607 - DNA, 25 bp, Homo sapien
cgataccgtatcgtacgcagttgat

SEQ ID NO: 5861608 - DNA, 25 bp, Homo sapien
cctgcaaggtatcgtacgacattag

SEQ ID NO: 5861609 - DNA, 25 bp, Homo sapien
atcgttcgacgtatagcgtgctact

SEQ ID NO: 5861610 - DNA, 25 bp, Homo sapien
tgtagacgcttaagtacgtcgtgtc

SEQ ID NO: 5861611 - DNA, 25 bp, Homo sapien
taacacacgacgcgaagtagtttcc

SEQ ID NO: 5861612 - DNA, 25 bp, Homo sapien
ctcagactatacgaaccgtgttcga

SEQ ID NO: 5861613 - DNA, 25 bp, Homo sapien
ttcactcgcgctataggtacagtgt

SEQ ID NO: 5861614 - DNA, 25 bp, Homo sapien
aatggcttatcgtcgtgcggttttg

SEQ ID NO: 5861615 - DNA, 25 bp, Homo sapien
ttaattcgtacgtcagaccacaccc

SEQ ID NO: 5861616 - DNA, 25 bp, Homo sapien
ttgtacgtcgatcgcgctaagaaac

SEQ ID NO: 5861617 - DNA, 25 bp, Homo sapien
gaagtgcgtaaacggtcgctgaaaa

SEQ ID NO: 5861618 - DNA, 25 bp, Homo sapien
atagaatcgtcgaatagggccgatg

SEQ ID NO: 5861619 - DNA, 25 bp, Homo sapien
aaaaatcgacctactatcgcctcgg

SEQ ID NO: 5861620 - DNA, 25 bp, Homo sapien
catacttagcggggtcgtacatgaa

SEQ ID NO: 5861621 - DNA, 25 bp, Homo sapien
ccttcaatgatcgcgcgtagaaaga

SEQ ID NO: 5861622 - DNA, 25 bp, Homo sapien
aaccagtagcgtatactcgtggatc

SEQ ID NO: 5861623 - DNA, 25 bp, Homo sapien
ttcattcgcgttgcgaacctgtaac

SEQ ID NO: 5861624 - DNA, 25 bp, Homo sapien
gattgccgcgattaggttgctcttt

SEQ ID NO: 5861625 - DNA, 25 bp, Homo sapien
gaggcatctcgcgttcgtatcttat

SEQ ID NO: 5861626 - DNA, 25 bp, Homo sapien
taagcaaacgtcggagtacgggaat

SEQ ID NO: 5861627 - DNA, 25 bp, Homo sapien
ctctaaaccgcggtcgattagttag

SEQ ID NO: 5861628 - DNA, 25 bp, Homo sapien
tcatggccttacgcgcgaactaatt

SEQ ID NO: 5861629 - DNA, 25 bp, Homo sapien
tgccatggtattcacgcgaggaaaa

SEQ ID NO: 5861630 - DNA, 25 bp, Homo sapien
aggtacatcgttatccgcgctgtat

SEQ ID NO: 5861631 - DNA, 25 bp, Homo sapien
aggtgaatcggccgtatacgaaaga

SEQ ID NO: 5861632 - DNA, 25 bp, Homo sapien
aaacgctaaccgacggttcatcagt

SEQ ID NO: 5861633 - DNA, 25 bp, Homo sapien
atcgatgcgcggattagtattgcga

SEQ ID NO: 5861634 - DNA, 25 bp, Homo sapien
gttgtcgcgtacgaacgtatgacaa

SEQ ID NO: 5861635 - DNA, 25 bp, Homo sapien
gaatacccccgttcgattattcacg

SEQ ID NO: 5861636 - DNA, 25 bp, Homo sapien
gaaatgacgcgtcgttgattggagt

SEQ ID NO: 5861637 - DNA, 25 bp, Homo sapien
ggcaatctcgaattgacgtgggatt

SEQ ID NO: 5861638 - DNA, 25 bp, Homo sapien
atgttgcgatcgaccgctaagaaag

SEQ ID NO: 5861639 - DNA, 25 bp, Homo sapien
cacaagcgcgtacgatgtcttagta

SEQ ID NO: 5861640 - DNA, 25 bp, Homo sapien
ctgattagacccgttacgatggcta

SEQ ID NO: 5861641 - DNA, 25 bp, Homo sapien
gctatatatacgcggcctactgaac

SEQ ID NO: 5861642 - DNA, 25 bp, Homo sapien
atcacacataccgcgttaacagtcc

SEQ ID NO: 5861643 - DNA, 25 bp, Homo sapien
ctcctagataccgtacgcattagct

SEQ ID NO: 5861644 - DNA, 25 bp, Homo sapien
ccatctcgcgttcgtaaaaaccaac

SEQ ID NO: 5861645 - DNA, 25 bp, Homo sapien
tgtctaccgcaataacggtcggaaa

SEQ ID NO: 5861646 - DNA, 25 bp, Homo sapien
ttctcacgttcgcgagatatctggt

SEQ ID NO: 5861647 - DNA, 25 bp, Homo sapien
cgcggaatcgacgccctattaaaat

SEQ ID NO: 5861648 - DNA, 25 bp, Homo sapien
tcattaacggcgcgtagtaatcagc

SEQ ID NO: 5861649 - DNA, 25 bp, Homo sapien
tgatcatagtcgattacgccacgag

SEQ ID NO: 5861650 - DNA, 25 bp, Homo sapien
tatgtggcgcgtatataggaacgtg

SEQ ID NO: 5861651 - DNA, 25 bp, Homo sapien
attcaacggcgccggtatattgatg

SEQ ID NO: 5861652 - DNA, 25 bp, Homo sapien
tattcgcccgtacgaacgagactta

SEQ ID NO: 5861653 - DNA, 25 bp, Homo sapien
gttaccgttcgtcgattagcggaaa

SEQ ID NO: 5861654 - DNA, 25 bp, Homo sapien
cagactatgtcgtacgaccttgaga

SEQ ID NO: 5861655 - DNA, 25 bp, Homo sapien
cattttttaccggcgcgtaacacca

SEQ ID NO: 5861656 - DNA, 25 bp, Homo sapien
ctatgctagtattgcgccgacagta

SEQ ID NO: 5861657 - DNA, 25 bp, Homo sapien
cgaagaatacctatcggcgccatat

SEQ ID NO: 5861658 - DNA, 25 bp, Homo sapien
tccctacgatcgttaacgaatccca

SEQ ID NO: 5861659 - DNA, 25 bp, Homo sapien
tgtcaatcgaaatagcgcgagcatc

SEQ ID NO: 5861660 - DNA, 25 bp, Homo sapien
aaagtgacctatcggacgtgtacct

SEQ ID NO: 5861661 - DNA, 25 bp, Homo sapien
attggctactcgatagcggtcaatg

SEQ ID NO: 5861662 - DNA, 25 bp, Homo sapien
tattgtcgatactagaccgagcctc

SEQ ID NO: 5861663 - DNA, 25 bp, Homo sapien
attctcgcgacgtagtacagaatcg

SEQ ID NO: 5861664 - DNA, 25 bp, Homo sapien
cccaatcgcacgacaactatgtttc

SEQ ID NO: 5861665 - DNA, 25 bp, Homo sapien
tgattggtacgatcgtatgttcgcc

SEQ ID NO: 5861666 - DNA, 25 bp, Homo sapien
ttgtgttgatcgttgcgacgagatg

SEQ ID NO: 5861667 - DNA, 25 bp, Homo sapien
caatagtattcgctcgagggttctc

SEQ ID NO: 5861668 - DNA, 25 bp, Homo sapien
tacaccaccgttagatacggagatg

SEQ ID NO: 5861669 - DNA, 25 bp, Homo sapien
aagataggtctaccgcgtatgtgga

SEQ ID NO: 5861670 - DNA, 25 bp, Homo sapien
taacttctagcgatccgctaactcg

SEQ ID NO: 5861671 - DNA, 25 bp, Homo sapien
acctccacgcgtaatctcgaataac

SEQ ID NO: 5861672 - DNA, 25 bp, Homo sapien
taataacccgtacgacggttcatcg

SEQ ID NO: 5861673 - DNA, 25 bp, Homo sapien
ttttgaattactcgcgcggcatctc

SEQ ID NO: 5861674 - DNA, 25 bp, Homo sapien
ctcgatgtcgacgattagggctaaa

SEQ ID NO: 5861675 - DNA, 25 bp, Homo sapien
gcgatatcggagtaatacggtcgat

SEQ ID NO: 5861676 - DNA, 25 bp, Homo sapien
tcaaactgcgtcgcgatatttggga

SEQ ID NO: 5861677 - DNA, 25 bp, Homo sapien
atgagaactacgctcggaactcact

SEQ ID NO: 5861678 - DNA, 25 bp, Homo sapien
acggtgtcgcgagattaacaggttt

SEQ ID NO: 5861679 - DNA, 25 bp, Homo sapien
acgactagcgtattcgcgttgtaga

SEQ ID NO: 5861680 - DNA, 25 bp, Homo sapien
ctatggacgtccgcgattaatcttc

SEQ ID NO: 5861681 - DNA, 25 bp, Homo sapien
gttataacgatacgactcgtccctg

SEQ ID NO: 5861682 - DNA, 25 bp, Homo sapien
ttgtcattacgtaccgcgagagcaa

SEQ ID NO: 5861683 - DNA, 25 bp, Homo sapien
aaccaatacggtcgtactcgaatgg

SEQ ID NO: 5861684 - DNA, 25 bp, Homo sapien
cactagaatcgcgttaacggcctat

SEQ ID NO: 5861685 - DNA, 25 bp, Homo sapien
gagttggtctagtgcgtcgttgtat

SEQ ID NO: 5861686 - DNA, 25 bp, Homo sapien
ttttcttatcggcgatacggtgctg

SEQ ID NO: 5861687 - DNA, 25 bp, Homo sapien
ttctcagtagcttcgcgactgtagt

SEQ ID NO: 5861688 - DNA, 25 bp, Homo sapien
tctttaattacgcgcgaaccatccg

SEQ ID NO: 5861689 - DNA, 25 bp, Homo sapien
acttggcgcccgaatactatggata

SEQ ID NO: 5861690 - DNA, 25 bp, Homo sapien
gtagctcgtatatcgggattaggct

SEQ ID NO: 5861691 - DNA, 25 bp, Homo sapien
gcaggaggtcgacgctaaattaaac

SEQ ID NO: 5861692 - DNA, 25 bp, Homo sapien
actgtttataaggcgacgcaccttg

SEQ ID NO: 5861693 - DNA, 25 bp, Homo sapien
atgcagcggtaccacgatattacca

SEQ ID NO: 5861694 - DNA, 25 bp, Homo sapien
tcgtagttagcaacgcgccaaaact

SEQ ID NO: 5861695 - DNA, 25 bp, Homo sapien
attgctgtcgagctatacgacgaga

SEQ ID NO: 5861696 - DNA, 25 bp, Homo sapien
aatcggatagcgcccgttataccta

SEQ ID NO: 5861697 - DNA, 25 bp, Homo sapien
atcggcctatgcgcgatactaaaca

SEQ ID NO: 5861698 - DNA, 25 bp, Homo sapien
aattcaacgtcgcgataagcgttgg

SEQ ID NO: 5861699 - DNA, 25 bp, Homo sapien
ggttgtaacgtccgcttagtccaaa

SEQ ID NO: 5861700 - DNA, 25 bp, Homo sapien
aagggacggtaattcagcgttcgat

SEQ ID NO: 5861701 - DNA, 25 bp, Homo sapien
agatgtcgtaagtcgacgtaccgtt

SEQ ID NO: 5861702 - DNA, 25 bp, Homo sapien
aaacttcgagattagtccgacctcc

SEQ ID NO: 5861703 - DNA, 25 bp, Homo sapien
ggcaaatagaccgaaagcgttacct

SEQ ID NO: 5861704 - DNA, 25 bp, Homo sapien
gaagttccgcgtatagacccatgag

SEQ ID NO: 5861705 - DNA, 25 bp, Homo sapien
gagtgaggcgtgacgatactcgtaa

SEQ ID NO: 5861706 - DNA, 25 bp, Homo sapien
gagcccattagcgcgaacgatacat

SEQ ID NO: 5861707 - DNA, 25 bp, Homo sapien
ggttctctcgcgtatagcctgtctt

SEQ ID NO: 5861708 - DNA, 25 bp, Homo sapien
ggttagtcgcgatacacgtcagtca

SEQ ID NO: 5861709 - DNA, 25 bp, Homo sapien
ctctaaactagtccgcggaccattc

SEQ ID NO: 5861710 - DNA, 25 bp, Homo sapien
aagcttattacgtccgacgcgcaac

SEQ ID NO: 5861711 - DNA, 25 bp, Homo sapien
caatagcgcgcgagatctatacacc

SEQ ID NO: 5861712 - DNA, 25 bp, Homo sapien
tataggttgcgctatacgggctggt

SEQ ID NO: 5861713 - DNA, 25 bp, Homo sapien
acgcaacgacgcgcatattcacttg

SEQ ID NO: 5861714 - DNA, 25 bp, Homo sapien
atctggcctatacgcggtagtagac

SEQ ID NO: 5861715 - DNA, 25 bp, Homo sapien
aacaatcgatgtaacgtcgcgcggt

SEQ ID NO: 5861716 - DNA, 25 bp, Homo sapien
agcttctatacggcgtagtcaaccg

SEQ ID NO: 5861717 - DNA, 25 bp, Homo sapien
tgaggcactagtgtcgacgttcgaa

SEQ ID NO: 5861718 - DNA, 25 bp, Homo sapien
aacagtgccgataggcgtattagcg

SEQ ID NO: 5861719 - DNA, 25 bp, Homo sapien
ttgtctttgcgcgttaggtgtaccc

SEQ ID NO: 5861720 - DNA, 25 bp, Homo sapien
gaattacggcgtaacgactgctgga

SEQ ID NO: 5861721 - DNA, 25 bp, Homo sapien
acttcctctaacgtccggagagcat

SEQ ID NO: 5861722 - DNA, 25 bp, Homo sapien
gattttccgacatacgcgagcacgt

SEQ ID NO: 5861723 - DNA, 25 bp, Homo sapien
gtaaactacgcgttccgatgcttcg

SEQ ID NO: 5861724 - DNA, 25 bp, Homo sapien
gatggagtactagcgacgcataagc

SEQ ID NO: 5861725 - DNA, 25 bp, Homo sapien
ctgatggatcctacgcgtacgttca

SEQ ID NO: 5861726 - DNA, 25 bp, Homo sapien
ggttagcgcgaactaagtgtacctc

SEQ ID NO: 5861727 - DNA, 25 bp, Homo sapien
tatctcagactagtcgcgcaggagt

SEQ ID NO: 5861728 - DNA, 25 bp, Homo sapien
aacgctcgactacggtacagctaca

SEQ ID NO: 5861729 - DNA, 25 bp, Homo sapien
agatcattcggcccgcgattttcct

SEQ ID NO: 5861730 - DNA, 25 bp, Homo sapien
aactctcgcgtggtagtctatccct

SEQ ID NO: 5861731 - DNA, 25 bp, Homo sapien
tagggagtacgtatcgcgagttagg

SEQ ID NO: 5861732 - DNA, 25 bp, Homo sapien
tcgattgaattacgctcggtagccg

SEQ ID NO: 5861733 - DNA, 25 bp, Homo sapien
cattgtatgtcgcgacgttgatcgg

SEQ ID NO: 5861734 - DNA, 25 bp, Homo sapien
gtaagctagtatcgctccgtaacgg

SEQ ID NO: 5861735 - DNA, 25 bp, Homo sapien
tcaagcaacggtcggataccagtga

SEQ ID NO: 5861736 - DNA, 25 bp, Homo sapien
ctcaagtcggaccgcactaatgtct

SEQ ID NO: 5861737 - DNA, 25 bp, Homo sapien
tcagccacgtcgtgtaagggtactt

SEQ ID NO: 5861738 - DNA, 25 bp, Homo sapien
aaaagccgttgcgatagacctcacg

SEQ ID NO: 5861739 - DNA, 25 bp, Homo sapien
tcccgttcaaatcgcggacctttct

SEQ ID NO: 5861740 - DNA, 25 bp, Homo sapien
ttccggcgacggtcgaactttatac

SEQ ID NO: 5861741 - DNA, 25 bp, Homo sapien
tgttcggtattccgaccgttgagga

SEQ ID NO: 5861742 - DNA, 25 bp, Homo sapien
gctcacgtatgaacggtcgtagcaa

SEQ ID NO: 5861743 - DNA, 25 bp, Homo sapien
cgttgttatactccgcgttcgacga

SEQ ID NO: 5861744 - DNA, 25 bp, Homo sapien
caaccccgtaacgcgtcgtatgtaa

SEQ ID NO: 5861745 - DNA, 25 bp, Homo sapien
ccgcatgcgtaactatcgttgacct

SEQ ID NO: 5861746 - DNA, 25 bp, Homo sapien
tcgggtgactcgcgtatagagcttt

SEQ ID NO: 5861747 - DNA, 25 bp, Homo sapien
caggaaatcgcgctaggtcatggta

SEQ ID NO: 5861748 - DNA, 25 bp, Homo sapien
actccttacaacggtacgatcccca

SEQ ID NO: 5861749 - DNA, 25 bp, Homo sapien
gacgtctatttacgacgcgagacga

SEQ ID NO: 5861750 - DNA, 25 bp, Homo sapien
cctccatagcggtacgacagtctta

SEQ ID NO: 5861751 - DNA, 25 bp, Homo sapien
aagaatacgtgcggtacgacatggg

SEQ ID NO: 5861752 - DNA, 25 bp, Homo sapien
gattggcaccgtatatcggacgctt

SEQ ID NO: 5861753 - DNA, 25 bp, Homo sapien
gccttggtaatacgcggggattgta

SEQ ID NO: 5861754 - DNA, 25 bp, Homo sapien
cattctgtctagccgtcgagtaagc

SEQ ID NO: 5861755 - DNA, 25 bp, Homo sapien
tgtcatagcgcgacgtttaggcaac

SEQ ID NO: 5861756 - DNA, 25 bp, Homo sapien
ccgaacccgcgctattatgtgtcta

SEQ ID NO: 5861757 - DNA, 25 bp, Homo sapien
agttgacgtggtacgtcgtcttagc

SEQ ID NO: 5861758 - DNA, 25 bp, Homo sapien
cttacgaacgggacgatagatacgc

SEQ ID NO: 5861759 - DNA, 25 bp, Homo sapien
gtccgggtcatatacgccgtagttt

SEQ ID NO: 5861760 - DNA, 25 bp, Homo sapien
cagcgaagaggcgcgtcatcatatt

SEQ ID NO: 5861761 - DNA, 25 bp, Homo sapien
tgttatgtcgcgccgtaatccgaag

SEQ ID NO: 5861762 - DNA, 25 bp, Homo sapien
acctgagttagcgcgcaacggtaaa

SEQ ID NO: 5861763 - DNA, 25 bp, Homo sapien
tctggttaagcgcgtagcgcgatat

SEQ ID NO: 5861764 - DNA, 25 bp, Homo sapien
accgacttaagtccgtcgcactaag

SEQ ID NO: 5861765 - DNA, 25 bp, Homo sapien
ggaattctagggcgtactacagctg

SEQ ID NO: 5861766 - DNA, 25 bp, Homo sapien
cgttagacgaacgttacgcgccata

SEQ ID NO: 5861767 - DNA, 25 bp, Homo sapien
tgctaccgcggccgtattgattaag

SEQ ID NO: 5861768 - DNA, 25 bp, Homo sapien
agtgggcgtatttaacgcgaatgcg

SEQ ID NO: 5861769 - DNA, 25 bp, Homo sapien
ggaggttcgattatacgcgcgtcaa

SEQ ID NO: 5861770 - DNA, 25 bp, Homo sapien
acttacgttacacgactcgccaggt

SEQ ID NO: 5861771 - DNA, 25 bp, Homo sapien
gatacctaacgtccggaacagatcg

SEQ ID NO: 5861772 - DNA, 25 bp, Homo sapien
taagtcgtccgcgaatacgggctaa

SEQ ID NO: 5861773 - DNA, 25 bp, Homo sapien
ccgctggaccgcgatatatatcaag

SEQ ID NO: 5861774 - DNA, 25 bp, Homo sapien
tggagggtacgcgaacttatctcag

SEQ ID NO: 5861775 - DNA, 25 bp, Homo sapien
acccactaacgttcgcgagcacata

SEQ ID NO: 5861776 - DNA, 25 bp, Homo sapien
gacctacaaccattacgcgacttgg

SEQ ID NO: 5861777 - DNA, 25 bp, Homo sapien
taagacctacgcgactgagcagtgt

SEQ ID NO: 5861778 - DNA, 25 bp, Homo sapien
agtttgagtcgcgttcgtctgctga

SEQ ID NO: 5861779 - DNA, 25 bp, Homo sapien
tagccctgcgacgtactgaagagaa

SEQ ID NO: 5861780 - DNA, 25 bp, Homo sapien
tgtactcgtcgtagacccacaatcc

SEQ ID NO: 5861781 - DNA, 25 bp, Homo sapien
gtcttttatgagggtcgcgcgtaac

SEQ ID NO: 5861782 - DNA, 25 bp, Homo sapien
gtcaactaacggttagccgctcgat

SEQ ID NO: 5861783 - DNA, 25 bp, Homo sapien
ctgcagctaggcgtcgatagttaag

SEQ ID NO: 5861784 - DNA, 25 bp, Homo sapien
acacgttataagggtcgcgtgatcc

SEQ ID NO: 5861785 - DNA, 25 bp, Homo sapien
tgatgatatcgtcggactagctggc

SEQ ID NO: 5861786 - DNA, 25 bp, Homo sapien
catacatcgttcgcggacgaagcat

SEQ ID NO: 5861787 - DNA, 25 bp, Homo sapien
gtatggtccgcgaaatacggcatgt

SEQ ID NO: 5861788 - DNA, 25 bp, Homo sapien
tttcgtgcgcgataggtaggtaacc

SEQ ID NO: 5861789 - DNA, 25 bp, Homo sapien
ttggtcacgtcctagcgaagtcgtt

SEQ ID NO: 5861790 - DNA, 25 bp, Homo sapien
tttcgggtaggtcgcgtaatcgact

SEQ ID NO: 5861791 - DNA, 25 bp, Homo sapien
gtggtatacgacctgccgatgtagt

SEQ ID NO: 5861792 - DNA, 25 bp, Homo sapien
acccttcgcgtatcataggtcgttc

SEQ ID NO: 5861793 - DNA, 25 bp, Homo sapien
gtgggctgtccgcgactaaatctta

SEQ ID NO: 5861794 - DNA, 25 bp, Homo sapien
agactggatctaacgcgcgcaaaag

SEQ ID NO: 5861795 - DNA, 25 bp, Homo sapien
atgcattacgggcgacgaatcacct

SEQ ID NO: 5861796 - DNA, 25 bp, Homo sapien
cgtaacgtcgtgcgatagtaaccag

SEQ ID NO: 5861797 - DNA, 25 bp, Homo sapien
cggatttaggaccgcgaatcagact

SEQ ID NO: 5861798 - DNA, 25 bp, Homo sapien
ggtctaggatagcgtcgactgctat

SEQ ID NO: 5861799 - DNA, 25 bp, Homo sapien
tcctgtgacggtccgcgatttttgt

SEQ ID NO: 5861800 - DNA, 25 bp, Homo sapien
acccgagatcccgtatcgtcaatag

SEQ ID NO: 5861801 - DNA, 25 bp, Homo sapien
gtacaccgattcgcgtacttgtagc

SEQ ID NO: 5861802 - DNA, 25 bp, Homo sapien
tatctagcgttacttggcgaccgag

SEQ ID NO: 5861803 - DNA, 25 bp, Homo sapien
gcagattacgtgttacgcgggtaac

SEQ ID NO: 5861804 - DNA, 25 bp, Homo sapien
tcgtatggcgattcgactagggttg

SEQ ID NO: 5861805 - DNA, 25 bp, Homo sapien
cctctggttcgtgacgcgtatacaa

SEQ ID NO: 5861806 - DNA, 25 bp, Homo sapien
acctgcaaccgcgttcgtatttctc

SEQ ID NO: 5861807 - DNA, 25 bp, Homo sapien
ttcacggttacgtcgcgaacctatc

SEQ ID NO: 5861808 - DNA, 25 bp, Homo sapien
tgattctacgcgattagccagcgtg

SEQ ID NO: 5861809 - DNA, 25 bp, Homo sapien
ccacactacgacgtacggtttagtg

SEQ ID NO: 5861810 - DNA, 25 bp, Homo sapien
atcccccctattaagcgcgcaatag

SEQ ID NO: 5861811 - DNA, 25 bp, Homo sapien
gaaacccgcgtactaaagagagtcg

SEQ ID NO: 5861812 - DNA, 25 bp, Homo sapien
gtctactacgtagcgaccgacatca

SEQ ID NO: 5861813 - DNA, 25 bp, Homo sapien
ggctaccaattacgcccgaagagta

SEQ ID NO: 5861814 - DNA, 25 bp, Homo sapien
tcttactagttcgtgcgactccacc

SEQ ID NO: 5861815 - DNA, 25 bp, Homo sapien
agacgatgcgccgttagactaaacg

SEQ ID NO: 5861816 - DNA, 25 bp, Homo sapien
aaaccgctaatcgagcgacgctatg

SEQ ID NO: 5861817 - DNA, 25 bp, Homo sapien
ctgaacgatcgacctcgtaaagacg

SEQ ID NO: 5861818 - DNA, 25 bp, Homo sapien
tgacatcgccctatcgtactacctc

SEQ ID NO: 5861819 - DNA, 25 bp, Homo sapien
gtcaaccacgttcgaactaccactc

SEQ ID NO: 5861820 - DNA, 25 bp, Homo sapien
gcttatcgtaataggcgcgcatgga

SEQ ID NO: 5861821 - DNA, 25 bp, Homo sapien
tgcttgcgctactaaggcgtgtgaa

SEQ ID NO: 5861822 - DNA, 25 bp, Homo sapien
tgcaagagtgtcgcgcatagttggt

SEQ ID NO: 5861823 - DNA, 25 bp, Homo sapien
caatgtcgcggctagtatacctagg

SEQ ID NO: 5861824 - DNA, 25 bp, Homo sapien
gcatggtcaacgggtcgataatacc

SEQ ID NO: 5861825 - DNA, 25 bp, Homo sapien
ttgtgtcgtatcgctccgttgagtg

SEQ ID NO: 5861826 - DNA, 25 bp, Homo sapien
ggtgttacgtaccgtacgagtcact

SEQ ID NO: 5861827 - DNA, 25 bp, Homo sapien
gtcgttccactcgcgtatgagtgtt

SEQ ID NO: 5861828 - DNA, 25 bp, Homo sapien
ccttcaatcggtcgttggactcttc

SEQ ID NO: 5861829 - DNA, 25 bp, Homo sapien
tgtcattcgcgaggatactcccgat

SEQ ID NO: 5861830 - DNA, 25 bp, Homo sapien
cgagaataacgggataccgccctta

SEQ ID NO: 5861831 - DNA, 25 bp, Homo sapien
ggtctaattcagtctcgcgttcagg

SEQ ID NO: 5861832 - DNA, 25 bp, Homo sapien
tgtccccgcgtacgtattgtcatac

SEQ ID NO: 5861833 - DNA, 25 bp, Homo sapien
atggttcgcggaccatatagccctt

SEQ ID NO: 5861834 - DNA, 25 bp, Homo sapien
taaaggtaacgatccgcggcgatgt

SEQ ID NO: 5861835 - DNA, 25 bp, Homo sapien
aacgatattcgcgtcgtggactgga

SEQ ID NO: 5861836 - DNA, 25 bp, Homo sapien
gtaacctcggctaacgcgtcttaca

SEQ ID NO: 5861837 - DNA, 25 bp, Homo sapien
tatatgtactacggccggtgctgtc

SEQ ID NO: 5861838 - DNA, 25 bp, Homo sapien
ctgtttgactaaccggcgtccatca

SEQ ID NO: 5861839 - DNA, 25 bp, Homo sapien
tcggctattcgatacgcggctaaca

SEQ ID NO: 5861840 - DNA, 25 bp, Homo sapien
tagggttggtacgtcgtagttgtgc

SEQ ID NO: 5861841 - DNA, 25 bp, Homo sapien
ccgttcacgcgcgagttagcatata

SEQ ID NO: 5861842 - DNA, 25 bp, Homo sapien
ttcctgcctcgcgttacgtcatact

SEQ ID NO: 5861843 - DNA, 25 bp, Homo sapien
acctaagcgccgattaggaggactt

SEQ ID NO: 5861844 - DNA, 25 bp, Homo sapien
ggagcatctcgcatcgtacgttaac

SEQ ID NO: 5861845 - DNA, 25 bp, Homo sapien
cgcatagagttcgcgttacaggaga

SEQ ID NO: 5861846 - DNA, 25 bp, Homo sapien
gccgtggacgtaattcgccatacta

SEQ ID NO: 5861847 - DNA, 25 bp, Homo sapien
tgataagcgtaatcgcggggaactc

SEQ ID NO: 5861848 - DNA, 25 bp, Homo sapien
caacgacgttggtcgtagatacacc

SEQ ID NO: 5861849 - DNA, 25 bp, Homo sapien
ggataagttagacgcaccgatggga

SEQ ID NO: 5861850 - DNA, 25 bp, Homo sapien
aatcaagtattcggccgtacctgcc

SEQ ID NO: 5861851 - DNA, 25 bp, Homo sapien
ccaccgggtgttaatcgcgaagaat

SEQ ID NO: 5861852 - DNA, 25 bp, Homo sapien
acgttcaagacgattcgcgtcggat

SEQ ID NO: 5861853 - DNA, 25 bp, Homo sapien
agctgaggtaccgtacgacaactac

SEQ ID NO: 5861854 - DNA, 25 bp, Homo sapien
agcatttactaccgtctcgacccga

SEQ ID NO: 5861855 - DNA, 25 bp, Homo sapien
gtacactgatcgcgcgaagtcacat

SEQ ID NO: 5861856 - DNA, 25 bp, Homo sapien
cttgtgtaatcggcctcgctagtga

SEQ ID NO: 5861857 - DNA, 25 bp, Homo sapien
gctagagatacgcgcgaatcgcttt

SEQ ID NO: 5861858 - DNA, 25 bp, Homo sapien
tctagtcaacgcgcgttaggacatg

SEQ ID NO: 5861859 - DNA, 25 bp, Homo sapien
caatgaacccgttacgagaggggta

SEQ ID NO: 5861860 - DNA, 25 bp, Homo sapien
gagatacgtatagcgtccggctagt

SEQ ID NO: 5861861 - DNA, 25 bp, Homo sapien
aatctgctcgcctaatacgcagagc

SEQ ID NO: 5861862 - DNA, 25 bp, Homo sapien
atgtgctcgcgattacccagtagct

SEQ ID NO: 5861863 - DNA, 25 bp, Homo sapien
tgcgagtactcgcgctagttcttca

SEQ ID NO: 5861864 - DNA, 25 bp, Homo sapien
catggatacgatcggtccgcttaac

SEQ ID NO: 5861865 - DNA, 25 bp, Homo sapien
attacgaggtcgacccgtatagcag

SEQ ID NO: 5861866 - DNA, 25 bp, Homo sapien
tcctgtcgcgcgttctgtatgtaga

SEQ ID NO: 5861867 - DNA, 25 bp, Homo sapien
ctagtcgtcgcgagatatccgtgta

SEQ ID NO: 5861868 - DNA, 25 bp, Homo sapien
gatcgccgctagcggtatagaagta

SEQ ID NO: 5861869 - DNA, 25 bp, Homo sapien
cgggacagcgttagtacgcttagat

SEQ ID NO: 5861870 - DNA, 25 bp, Homo sapien
ttctttataggccggacgaggcttg

SEQ ID NO: 5861871 - DNA, 25 bp, Homo sapien
caggagctactacgccgtatttgtg

SEQ ID NO: 5861872 - DNA, 25 bp, Homo sapien
tctccacgttatcgcgacgaacttc

SEQ ID NO: 5861873 - DNA, 25 bp, Homo sapien
gacagatcgttcgccttagcactga

SEQ ID NO: 5861874 - DNA, 25 bp, Homo sapien
tacgtccgatccgcttacgatcgtt

SEQ ID NO: 5861875 - DNA, 25 bp, Homo sapien
aggggtctcccgcgtaatgtttatg

SEQ ID NO: 5861876 - DNA, 25 bp, Homo sapien
agaatccgattagtcgcggtccagt

SEQ ID NO: 5861877 - DNA, 25 bp, Homo sapien
ctttcccattggcgttacgtgcttg

SEQ ID NO: 5861878 - DNA, 25 bp, Homo sapien
gtatagatgctatgcgcgaagcctg

SEQ ID NO: 5861879 - DNA, 25 bp, Homo sapien
acttcaacgattgtgcgcgcttgga

SEQ ID NO: 5861880 - DNA, 25 bp, Homo sapien
tatgctcccttattcgcgtgtcctc

SEQ ID NO: 5861881 - DNA, 25 bp, Homo sapien
tacctacgatccaagcgcgattcct

SEQ ID NO: 5861882 - DNA, 25 bp, Homo sapien
tgtacaccgggtgacgatactctct

SEQ ID NO: 5861883 - DNA, 25 bp, Homo sapien
cggtagtcggagcgaacgttaaaca

SEQ ID NO: 5861884 - DNA, 25 bp, Homo sapien
agccaccgacatactaccgtttgca

SEQ ID NO: 5861885 - DNA, 25 bp, Homo sapien
catcacccttacggccgtaatgtga

SEQ ID NO: 5861886 - DNA, 25 bp, Homo sapien
cgccatcgctctaatacgggaatca

SEQ ID NO: 5861887 - DNA, 25 bp, Homo sapien
gtcttactacgcgtagggtagtcag

SEQ ID NO: 5861888 - DNA, 25 bp, Homo sapien
tgtctttatacggttacgccagcgg

SEQ ID NO: 5861889 - DNA, 25 bp, Homo sapien
gagctgtacgccgtacgttcgaaaa

SEQ ID NO: 5861890 - DNA, 25 bp, Homo sapien
actgcctataccgtcgacagtcagt

SEQ ID NO: 5861891 - DNA, 25 bp, Homo sapien
cgcccgttactcgcgtctaaaatgt

SEQ ID NO: 5861892 - DNA, 25 bp, Homo sapien
cttggacgctgtacgcaacatcttg

SEQ ID NO: 5861893 - DNA, 25 bp, Homo sapien
tagagtggcgctatacgactactgg

SEQ ID NO: 5861894 - DNA, 25 bp, Homo sapien
atccaagttacgcggacaaacgacc

SEQ ID NO: 5861895 - DNA, 25 bp, Homo sapien
atctgtccacggtcgaatatgctgg

SEQ ID NO: 5861896 - DNA, 25 bp, Homo sapien
ctcttactatagcgtcgaggtggac

SEQ ID NO: 5861897 - DNA, 25 bp, Homo sapien
tcggaaatcgattagcgaccttccc

SEQ ID NO: 5861898 - DNA, 25 bp, Homo sapien
gataggacgtcgttcgcgatgcaaa

SEQ ID NO: 5861899 - DNA, 25 bp, Homo sapien
tctgttacgttacgaagcggagctg

SEQ ID NO: 5861900 - DNA, 25 bp, Homo sapien
cgctccttagcgtacgacgacatat

SEQ ID NO: 5861901 - DNA, 25 bp, Homo sapien
aggtgttcgttcgcgacaagactac

SEQ ID NO: 5861902 - DNA, 25 bp, Homo sapien
caaacttacgcggctataagcagcg

SEQ ID NO: 5861903 - DNA, 25 bp, Homo sapien
ggcaggtattgcgtccgacttgaaa

SEQ ID NO: 5861904 - DNA, 25 bp, Homo sapien
agaaggtagcgcggacgtagaaaag

SEQ ID NO: 5861905 - DNA, 25 bp, Homo sapien
gcatcaacgtcgttagcgtaagtcc

SEQ ID NO: 5861906 - DNA, 25 bp, Homo sapien
gcgaggcgtacgatattcgtgctta

SEQ ID NO: 5861907 - DNA, 25 bp, Homo sapien
ggcaaagatacgcgattacccgtct

SEQ ID NO: 5861908 - DNA, 25 bp, Homo sapien
tgagcctctcgccgatagataacac

SEQ ID NO: 5861909 - DNA, 25 bp, Homo sapien
tatttgaactacccgtacgtgggcc

SEQ ID NO: 5861910 - DNA, 25 bp, Homo sapien
gattggcgcgtgatatcacgctaga

SEQ ID NO: 5861911 - DNA, 25 bp, Homo sapien
gttacggtctaaatgcgcgggactt

SEQ ID NO: 5861912 - DNA, 25 bp, Homo sapien
gcatactacggtcgtagacttggag

SEQ ID NO: 5861913 - DNA, 25 bp, Homo sapien
tccactcacgcgaacgtatgagcta

SEQ ID NO: 5861914 - DNA, 25 bp, Homo sapien
ttgatacgccgatgcgtaacctcct

SEQ ID NO: 5861915 - DNA, 25 bp, Homo sapien
atctgccgaaccgtcgttaatgtcg

SEQ ID NO: 5861916 - DNA, 25 bp, Homo sapien
agtagctcgtccgtcgaattgggta

SEQ ID NO: 5861917 - DNA, 25 bp, Homo sapien
gcctctaattacgcgtccgtgagat

SEQ ID NO: 5861918 - DNA, 25 bp, Homo sapien
tgtgtaggtatcggcgtatgggtca

SEQ ID NO: 5861919 - DNA, 25 bp, Homo sapien
gaatcatcgaacgaccgagttgtcg

SEQ ID NO: 5861920 - DNA, 25 bp, Homo sapien
gagctgtacggtcgacctttactct

SEQ ID NO: 5861921 - DNA, 25 bp, Homo sapien
tgtgtacggacgtctaagcaaccca

SEQ ID NO: 5861922 - DNA, 25 bp, Homo sapien
cagcgaatctcgtcgcaagagacta

SEQ ID NO: 5861923 - DNA, 25 bp, Homo sapien
ttgaactcgcgctagcgtcttgtac

SEQ ID NO: 5861924 - DNA, 25 bp, Homo sapien
actcgttatgcgcacgacgtgatct

SEQ ID NO: 5861925 - DNA, 25 bp, Homo sapien
ctttaccccgctcgttacgcacaat

SEQ ID NO: 5861926 - DNA, 25 bp, Homo sapien
ctagatttcgacggtcccagtcaac

SEQ ID NO: 5861927 - DNA, 25 bp, Homo sapien
acctaccggtacatatcgctctagg

SEQ ID NO: 5861928 - DNA, 25 bp, Homo sapien
ctgacgaattagcgcgacgaattcc

SEQ ID NO: 5861929 - DNA, 25 bp, Homo sapien
tctcagttactcgcgcgacaagctt

SEQ ID NO: 5861930 - DNA, 25 bp, Homo sapien
atggatcggacggcctaataacgga

SEQ ID NO: 5861931 - DNA, 25 bp, Homo sapien
tgcttactatacgtagcgcaggctc

SEQ ID NO: 5861932 - DNA, 25 bp, Homo sapien
agaatccatcgtactacgcgagcga

SEQ ID NO: 5861933 - DNA, 25 bp, Homo sapien
ctgttaataacggcgcgcatccaac

SEQ ID NO: 5861934 - DNA, 25 bp, Homo sapien
gcctaaatcgcgacagtcgtcaatg

SEQ ID NO: 5861935 - DNA, 25 bp, Homo sapien
cagaagtaacggctcggtactagtc

SEQ ID NO: 5861936 - DNA, 25 bp, Homo sapien
accttctcgccgaataacgttggag

SEQ ID NO: 5861937 - DNA, 25 bp, Homo sapien
tggggttaacgcgtaagggtgtaca

SEQ ID NO: 5861938 - DNA, 25 bp, Homo sapien
gaagggacgtcgcacgtaggatttt

SEQ ID NO: 5861939 - DNA, 25 bp, Homo sapien
ctcattgatcgcacgacgtaggatc

SEQ ID NO: 5861940 - DNA, 25 bp, Homo sapien
agagcaggttcgcgtaacgcagttt

SEQ ID NO: 5861941 - DNA, 25 bp, Homo sapien
acgatttatcgctcgtacggcccaa

SEQ ID NO: 5861942 - DNA, 25 bp, Homo sapien
aacctggtatacggtcgtcacgttg

SEQ ID NO: 5861943 - DNA, 25 bp, Homo sapien
accaagatatcgcgcacgtcgtttg

SEQ ID NO: 5861944 - DNA, 25 bp, Homo sapien
gtgacatagttcgacgcggttcctt

SEQ ID NO: 5861945 - DNA, 25 bp, Homo sapien
tctgacctaagtatcgcgggtggtt

SEQ ID NO: 5861946 - DNA, 25 bp, Homo sapien
catcgcacgcgtgaacgtcaaacaa

SEQ ID NO: 5861947 - DNA, 25 bp, Homo sapien
catgcgtatctaatgcgcggtacac

SEQ ID NO: 5861948 - DNA, 25 bp, Homo sapien
caccaatacgtccgcaagtagtgtg

SEQ ID NO: 5861949 - DNA, 25 bp, Homo sapien
tttgcgacgcggttcgacgtgtatt

SEQ ID NO: 5861950 - DNA, 25 bp, Homo sapien
tctgtgcgcgataccgtaaaggtag

SEQ ID NO: 5861951 - DNA, 25 bp, Homo sapien
atcttcgtgtatcgaacgcccgaag

SEQ ID NO: 5861952 - DNA, 25 bp, Homo sapien
gatctccgatcggacctagccaata

SEQ ID NO: 5861953 - DNA, 25 bp, Homo sapien
ggctaaagctagcggacgtcatttc

SEQ ID NO: 5861954 - DNA, 25 bp, Homo sapien
tcatcgtgttcgtacgcgatgggaa

SEQ ID NO: 5861955 - DNA, 25 bp, Homo sapien
cgttaaccgcgtcatacgactagga

SEQ ID NO: 5861956 - DNA, 25 bp, Homo sapien
tttcacccgcgatccgttaagagac

SEQ ID NO: 5861957 - DNA, 25 bp, Homo sapien
tacgagtaagcgtccgcgatatacg

SEQ ID NO: 5861958 - DNA, 25 bp, Homo sapien
ctcgttgttcgcgatacctacactc

SEQ ID NO: 5861959 - DNA, 25 bp, Homo sapien
cgaaaagcgcgtcgtaattacacgc

SEQ ID NO: 5861960 - DNA, 25 bp, Homo sapien
gcggaacgtcgtagataggactgat

SEQ ID NO: 5861961 - DNA, 25 bp, Homo sapien
ttctaagcggttacgattgccccgt

SEQ ID NO: 5861962 - DNA, 25 bp, Homo sapien
cgttcagcgtatcgtagtatgcgca

SEQ ID NO: 5861963 - DNA, 25 bp, Homo sapien
tagaagtacgtagcgacgacgtctc

SEQ ID NO: 5861964 - DNA, 25 bp, Homo sapien
gtggcccttattagtcgcgttggtt

SEQ ID NO: 5861965 - DNA, 25 bp, Homo sapien
tagtcagtcgtatagcgaggcctac

SEQ ID NO: 5861966 - DNA, 25 bp, Homo sapien
aagggatagtacgccctagctttgc

SEQ ID NO: 5861967 - DNA, 25 bp, Homo sapien
ctgtaccggtccgtagtataaggtc

SEQ ID NO: 5861968 - DNA, 25 bp, Homo sapien
tagtctgatttaccccgcgcatgtg

SEQ ID NO: 5861969 - DNA, 25 bp, Homo sapien
ttatggcctatacggcgcgagtact

SEQ ID NO: 5861970 - DNA, 25 bp, Homo sapien
ctgggctcgatgtagtacgtcaact

SEQ ID NO: 5861971 - DNA, 25 bp, Homo sapien
taaaacacgcgatatcgtccgtccg

SEQ ID NO: 5861972 - DNA, 25 bp, Homo sapien
gatgattatcccgcgcgaatgttgc

SEQ ID NO: 5861973 - DNA, 25 bp, Homo sapien
tctcctcgcttatacgtcgcgctta

SEQ ID NO: 5861974 - DNA, 25 bp, Homo sapien
accgtacgtcgcgtataggtcattg

SEQ ID NO: 5861975 - DNA, 25 bp, Homo sapien
gtcttccgcggaaccgatttttagc

SEQ ID NO: 5861976 - DNA, 25 bp, Homo sapien
caacagtatcggcacgcgttttcct

SEQ ID NO: 5861977 - DNA, 25 bp, Homo sapien
cactatcgctagtaaaccgccgaag

SEQ ID NO: 5861978 - DNA, 25 bp, Homo sapien
gtgtatcgcgtctagatacgggatc

SEQ ID NO: 5861979 - DNA, 25 bp, Homo sapien
atcaacctattcgcgagactgccct

SEQ ID NO: 5861980 - DNA, 25 bp, Homo sapien
gcttgtatacgcgggaacgctgaat

SEQ ID NO: 5861981 - DNA, 25 bp, Homo sapien
gtcctacgttcggtcgttactcaag

SEQ ID NO: 5861982 - DNA, 25 bp, Homo sapien
gctatcgcgcggtcattgaatcaag

SEQ ID NO: 5861983 - DNA, 25 bp, Homo sapien
tgcttgtcggtacgccgtagatatg

SEQ ID NO: 5861984 - DNA, 25 bp, Homo sapien
ggtacgtacgtcgcgtcagaattct

SEQ ID NO: 5861985 - DNA, 25 bp, Homo sapien
tcttagatcgttgcgggatctgacc

SEQ ID NO: 5861986 - DNA, 25 bp, Homo sapien
tatcgacgtagtcggcctaacgtag

SEQ ID NO: 5861987 - DNA, 25 bp, Homo sapien
gaatgaccgaattcgtaggcctgtc

SEQ ID NO: 5861988 - DNA, 25 bp, Homo sapien
ctcacacgtacgactccgatgaaca

SEQ ID NO: 5861989 - DNA, 25 bp, Homo sapien
ctggttacgaatgacgcgcatctgt

SEQ ID NO: 5861990 - DNA, 25 bp, Homo sapien
aagttatgtcgcgcgctaacacgga

SEQ ID NO: 5861991 - DNA, 25 bp, Homo sapien
caggcaatcggtacggacctaacta

SEQ ID NO: 5861992 - DNA, 25 bp, Homo sapien
tgggattatcgttcggaggcgcaat

SEQ ID NO: 5861993 - DNA, 25 bp, Homo sapien
aacgagacgaactaccgcgaggtta

SEQ ID NO: 5861994 - DNA, 25 bp, Homo sapien
gttaaacaacgtgtcgcgaccctac

SEQ ID NO: 5861995 - DNA, 25 bp, Homo sapien
tacatcgcgctccgtataacctgct

SEQ ID NO: 5861996 - DNA, 25 bp, Homo sapien
gtactacgtccggacacgtgaatgt

SEQ ID NO: 5861997 - DNA, 25 bp, Homo sapien
ttccgattcgcgacctacgggttaa

SEQ ID NO: 5861998 - DNA, 25 bp, Homo sapien
gactgaagttatcgggcgtgtccta

SEQ ID NO: 5861999 - DNA, 25 bp, Homo sapien
aagacactcgcgcagtatatgcctg

SEQ ID NO: 5862000 - DNA, 25 bp, Homo sapien
tgttttgttcgttacgcgaaccggc

SEQ ID NO: 5862001 - DNA, 25 bp, Homo sapien
aaatgccgtcgcgtgagatgaaacg

SEQ ID NO: 5862002 - DNA, 25 bp, Homo sapien
tacattctggacgcgtataggaccg

SEQ ID NO: 5862003 - DNA, 25 bp, Homo sapien
actactctgtatacgcccgtactcc

SEQ ID NO: 5862004 - DNA, 25 bp, Homo sapien
gtcgattttaacggtcgtctaccgc

SEQ ID NO: 5862005 - DNA, 25 bp, Homo sapien
ctggtacgtaattcgtcgccgaaac

SEQ ID NO: 5862006 - DNA, 25 bp, Homo sapien
ttctggcgcgatacgactagctctt

SEQ ID NO: 5862007 - DNA, 25 bp, Homo sapien
tacgtttacgtcgggatcgagacca

SEQ ID NO: 5862008 - DNA, 25 bp, Homo sapien
gaggactagtcgcgctcaaggtaat

SEQ ID NO: 5862009 - DNA, 25 bp, Homo sapien
ccgctgtcgtacgaaaccgcttaat

SEQ ID NO: 5862010 - DNA, 25 bp, Homo sapien
gacgttcatacgcgttcgtaagggt

SEQ ID NO: 5862011 - DNA, 25 bp, Homo sapien
gagaggttaagcgcggtacacattc

SEQ ID NO: 5862012 - DNA, 25 bp, Homo sapien
aatcaccggacttcgcgattggagt

SEQ ID NO: 5862013 - DNA, 25 bp, Homo sapien
ccgacattttcgtacgacgtggaga

SEQ ID NO: 5862014 - DNA, 25 bp, Homo sapien
tgtgcgttacgtgcgcgattgaaga

SEQ ID NO: 5862015 - DNA, 25 bp, Homo sapien
aagtccgcggtatatagcgggtgtt

SEQ ID NO: 5862016 - DNA, 25 bp, Homo sapien
aagatccatacgcgctagaacccga

SEQ ID NO: 5862017 - DNA, 25 bp, Homo sapien
atgacgccgatcgctaactgctgaa

SEQ ID NO: 5862018 - DNA, 25 bp, Homo sapien
tccttccccggtacgactagtaatc

SEQ ID NO: 5862019 - DNA, 25 bp, Homo sapien
tctcatgatcgtcgctagggtcaag

SEQ ID NO: 5862020 - DNA, 25 bp, Homo sapien
ctatagacgacgcgttaagcgaggt

SEQ ID NO: 5862021 - DNA, 25 bp, Homo sapien
agagatcgcgaagtccgattcagtg

SEQ ID NO: 5862022 - DNA, 25 bp, Homo sapien
agatgacgtatgtcgaggggagcta

SEQ ID NO: 5862023 - DNA, 25 bp, Homo sapien
aagttcataggcgactcgccaggat

SEQ ID NO: 5862024 - DNA, 25 bp, Homo sapien
aaagcgtacgggtcgacctcatttc

SEQ ID NO: 5862025 - DNA, 25 bp, Homo sapien
aagcttcccgatgatcgcatcagga

SEQ ID NO: 5862026 - DNA, 25 bp, Homo sapien
atgcgttcgatacgctacgcccttt

SEQ ID NO: 5862027 - DNA, 25 bp, Homo sapien
acacatcggacgttatacgtcgacc

SEQ ID NO: 5862028 - DNA, 25 bp, Homo sapien
aagtgaggctagatcgcgacagact

SEQ ID NO: 5862029 - DNA, 25 bp, Homo sapien
gagtatttcaatcatcgcggccagg

SEQ ID NO: 5862030 - DNA, 25 bp, Homo sapien
tcaagaaccgtcgcatacgcccaat

SEQ ID NO: 5862031 - DNA, 25 bp, Homo sapien
gctatgctctatcgcgtcgagctat

SEQ ID NO: 5862032 - DNA, 25 bp, Homo sapien
gttactaattgggacgtcgggtgtg

SEQ ID NO: 5862033 - DNA, 25 bp, Homo sapien
ggttacatacgtcgaccgaaggtac

SEQ ID NO: 5862034 - DNA, 25 bp, Homo sapien
gaggatagcgtaacgggacaagatc

SEQ ID NO: 5862035 - DNA, 25 bp, Homo sapien
gggcaattcgcgagtaacgtcaaac

SEQ ID NO: 5862036 - DNA, 25 bp, Homo sapien
cgggatcgtataacgcccttgtcat

SEQ ID NO: 5862037 - DNA, 25 bp, Homo sapien
gacagctacgccgcggataatagtt

SEQ ID NO: 5862038 - DNA, 25 bp, Homo sapien
aagatccgccgatactatgaccacg

SEQ ID NO: 5862039 - DNA, 25 bp, Homo sapien
ggggtacataggtccgacgacttta

SEQ ID NO: 5862040 - DNA, 25 bp, Homo sapien
tgcagatcgtgcgcgttcatttcga

SEQ ID NO: 5862041 - DNA, 25 bp, Homo sapien
cctgcaagagtacgccgtactttac

SEQ ID NO: 5862042 - DNA, 25 bp, Homo sapien
gaatttgtccctacgtcgaagctgc

SEQ ID NO: 5862043 - DNA, 25 bp, Homo sapien
cactggtcgtattaagccgcgaact

SEQ ID NO: 5862044 - DNA, 25 bp, Homo sapien
gtcgtgtacgcgttatacggcactt

SEQ ID NO: 5862045 - DNA, 25 bp, Homo sapien
cgactagcatgtcgcgcgaattaac

SEQ ID NO: 5862046 - DNA, 25 bp, Homo sapien
ataatgcgcggaccgattaccgcaa

SEQ ID NO: 5862047 - DNA, 25 bp, Homo sapien
ttctcgtacgcatatcgcccacctt

SEQ ID NO: 5862048 - DNA, 25 bp, Homo sapien
ctagtgcgcgcgatattacatgcga

SEQ ID NO: 5862049 - DNA, 25 bp, Homo sapien
ttgcttcgcgagactagattcggag

SEQ ID NO: 5862050 - DNA, 25 bp, Homo sapien
ctgatctcgtcgcgcttaccttttg

SEQ ID NO: 5862051 - DNA, 25 bp, Homo sapien
tttacacgcgtacaagcgtagaggc

SEQ ID NO: 5862052 - DNA, 25 bp, Homo sapien
catgaatgttcgcgcgatcatcgca

SEQ ID NO: 5862053 - DNA, 25 bp, Homo sapien
tctagatacgtcgagacgccttcgt

SEQ ID NO: 5862054 - DNA, 25 bp, Homo sapien
ggcttaatacgtaagcggagtaggg

SEQ ID NO: 5862055 - DNA, 25 bp, Homo sapien
caacagcggacgttataccacactg

SEQ ID NO: 5862056 - DNA, 25 bp, Homo sapien
ttccaccgcgctataggtcactctt

SEQ ID NO: 5862057 - DNA, 25 bp, Homo sapien
atagttgcgcatatcccgatgtgcc

SEQ ID NO: 5862058 - DNA, 25 bp, Homo sapien
tgatggacgacgctagtaggtggta

SEQ ID NO: 5862059 - DNA, 25 bp, Homo sapien
gcgcgtgtaccgatacgctttgtta

SEQ ID NO: 5862060 - DNA, 25 bp, Homo sapien
catgtttgactatacgcggaacggg

SEQ ID NO: 5862061 - DNA, 25 bp, Homo sapien
gtactaaccgatcgtactaccccac

SEQ ID NO: 5862062 - DNA, 25 bp, Homo sapien
accatagtacgtccgttacacgtgc

SEQ ID NO: 5862063 - DNA, 25 bp, Homo sapien
gtagcggtcgtatcgaccgattaga

SEQ ID NO: 5862064 - DNA, 25 bp, Homo sapien
cgaatatatgatcggcgcgatgcga

SEQ ID NO: 5862065 - DNA, 25 bp, Homo sapien
gcatccctcatacgaccgaactaac

SEQ ID NO: 5862066 - DNA, 25 bp, Homo sapien
atcctgccgcttgcgataacggatt

SEQ ID NO: 5862067 - DNA, 25 bp, Homo sapien
tagcgttagcggttcgttcgaaagg

SEQ ID NO: 5862068 - DNA, 25 bp, Homo sapien
gagtatcccgataccgcgttagtag

SEQ ID NO: 5862069 - DNA, 25 bp, Homo sapien
ggtgagtatagcgcgcgtcgaaaat

SEQ ID NO: 5862070 - DNA, 25 bp, Homo sapien
agctattcttcgacgggtaacccag

SEQ ID NO: 5862071 - DNA, 25 bp, Homo sapien
cgcatcatgtaacgcgtcgttttgg

SEQ ID NO: 5862072 - DNA, 25 bp, Homo sapien
acaaagatcgcggcaggtatcggaa

SEQ ID NO: 5862073 - DNA, 25 bp, Homo sapien
gattgataggcgtcggttacttgcc

SEQ ID NO: 5862074 - DNA, 25 bp, Homo sapien
aggggtcgtcgattacgccattaga

SEQ ID NO: 5862075 - DNA, 25 bp, Homo sapien
gtacgggcatacagcgtcgttcaaa

SEQ ID NO: 5862076 - DNA, 25 bp, Homo sapien
tgcatgggtataccgcgctgagatt

SEQ ID NO: 5862077 - DNA, 25 bp, Homo sapien
acgtttatcgcgcggtctagaacca

SEQ ID NO: 5862078 - DNA, 25 bp, Homo sapien
cctttgcatattacgcgctcctctc

SEQ ID NO: 5862079 - DNA, 25 bp, Homo sapien
catagattcgtacgtcgagcactcc

SEQ ID NO: 5862080 - DNA, 25 bp, Homo sapien
ccaaactatacgcgctcgtcatcca

SEQ ID NO: 5862081 - DNA, 25 bp, Homo sapien
ccacgaactacgaaccgacatccta

SEQ ID NO: 5862082 - DNA, 25 bp, Homo sapien
tttccccggattcgctacgctaact

SEQ ID NO: 5862083 - DNA, 25 bp, Homo sapien
atagaatcgttagatcccgcggcgt

SEQ ID NO: 5862084 - DNA, 25 bp, Homo sapien
aaaggaattctcgcgcgaggtcgtt

SEQ ID NO: 5862085 - DNA, 25 bp, Homo sapien
aaggtacgtatagcggcggcttaag

SEQ ID NO: 5862086 - DNA, 25 bp, Homo sapien
tgtaattaatcggcgcggtgctgca

SEQ ID NO: 5862087 - DNA, 25 bp, Homo sapien
tacccccgcggtcgtctaattatct

SEQ ID NO: 5862088 - DNA, 25 bp, Homo sapien
ttcagttaatccgcgcagttagcgc

SEQ ID NO: 5862089 - DNA, 25 bp, Homo sapien
cttctgacgttacggcgtctttgtg

SEQ ID NO: 5862090 - DNA, 25 bp, Homo sapien
cgttgacgcacgatagtaggtctac

SEQ ID NO: 5862091 - DNA, 25 bp, Homo sapien
gatttaatacgtctgacgccacccc

SEQ ID NO: 5862092 - DNA, 25 bp, Homo sapien
ttgtccgacgtattggtcgactctg

SEQ ID NO: 5862093 - DNA, 25 bp, Homo sapien
ccagactcgcgtcgttctaacacta

SEQ ID NO: 5862094 - DNA, 25 bp, Homo sapien
gagcagcgtttacgcgcattagtct

SEQ ID NO: 5862095 - DNA, 25 bp, Homo sapien
gctacacgatataatgccggtgacg

SEQ ID NO: 5862096 - DNA, 25 bp, Homo sapien
aacttctagtaccgcgaccacgatg

SEQ ID NO: 5862097 - DNA, 25 bp, Homo sapien
ttttccaccgcgtatcgagctgaag

SEQ ID NO: 5862098 - DNA, 25 bp, Homo sapien
agaaaaactaggctcgcgacgacct

SEQ ID NO: 5862099 - DNA, 25 bp, Homo sapien
cgtagtcatcgacctacggtagaag

SEQ ID NO: 5862100 - DNA, 25 bp, Homo sapien
agaactacgccgtatgacgatagcc

SEQ ID NO: 5862101 - DNA, 25 bp, Homo sapien
caagcacggtacgtaggtctaatcc

SEQ ID NO: 5862102 - DNA, 25 bp, Homo sapien
aaactccgcgcgaatgctaccctta

SEQ ID NO: 5862103 - DNA, 25 bp, Homo sapien
gttaacttagcgcgcgagttgtgtg

SEQ ID NO: 5862104 - DNA, 25 bp, Homo sapien
gtaacatgcgcgattacgggcttgt

SEQ ID NO: 5862105 - DNA, 25 bp, Homo sapien
tcaaatcccgcgaactatacccgtc

SEQ ID NO: 5862106 - DNA, 25 bp, Homo sapien
ctaggccgaactagtaccgtagtga

SEQ ID NO: 5862107 - DNA, 25 bp, Homo sapien
gttgaacgcgacctattgtgcgatg

SEQ ID NO: 5862108 - DNA, 25 bp, Homo sapien
cgtcagcgtatcagctacgtggata

SEQ ID NO: 5862109 - DNA, 25 bp, Homo sapien
accacctatacggtccgtatgcatc

SEQ ID NO: 5862110 - DNA, 25 bp, Homo sapien
tgccagcgggtacgtcggtattata

SEQ ID NO: 5862111 - DNA, 25 bp, Homo sapien
atctcgcgcgctaagggtattagag

SEQ ID NO: 5862112 - DNA, 25 bp, Homo sapien
ccatcacgactagcgcatataacgc

SEQ ID NO: 5862113 - DNA, 25 bp, Homo sapien
ctgacagccgacgcgatattgtttg

SEQ ID NO: 5862114 - DNA, 25 bp, Homo sapien
tggactttacgcgcgatcatcaacg

SEQ ID NO: 5862115 - DNA, 25 bp, Homo sapien
gtatggcgttcttacgcgaatcagg

SEQ ID NO: 5862116 - DNA, 25 bp, Homo sapien
cactatgcgtagacgcgttgtcctt

SEQ ID NO: 5862117 - DNA, 25 bp, Homo sapien
caatcccgtgtcgcggttatactgt

SEQ ID NO: 5862118 - DNA, 25 bp, Homo sapien
caatacctcgcgttaacgctaaccc

SEQ ID NO: 5862119 - DNA, 25 bp, Homo sapien
gtgtaaacgcgcgctacattatcgg

SEQ ID NO: 5862120 - DNA, 25 bp, Homo sapien
ttgtagcgcgagattgtcgtcccat

SEQ ID NO: 5862121 - DNA, 25 bp, Homo sapien
aaaccataaccgcgcaacggcatct

SEQ ID NO: 5862122 - DNA, 25 bp, Homo sapien
ctcaatttacgtcgcgagcgtcaga

SEQ ID NO: 5862123 - DNA, 25 bp, Homo sapien
ccgtgtcgcgtaactaacgtgtatc

SEQ ID NO: 5862124 - DNA, 25 bp, Homo sapien
attcccacgcggcatacgttgacta

SEQ ID NO: 5862125 - DNA, 25 bp, Homo sapien
gggaatgatacggtaacgcgggtat

SEQ ID NO: 5862126 - DNA, 25 bp, Homo sapien
cgtcatcgtccgacgttatctcgaa

SEQ ID NO: 5862127 - DNA, 25 bp, Homo sapien
tatgcttttacgcgcccgatgttcg

SEQ ID NO: 5862128 - DNA, 25 bp, Homo sapien
gacttgacggtcgaactagcggtta

SEQ ID NO: 5862129 - DNA, 25 bp, Homo sapien
attccaacgccgtactaggagccat

SEQ ID NO: 5862130 - DNA, 25 bp, Homo sapien
gctaggtacgacgcgcgtataaagt

SEQ ID NO: 5862131 - DNA, 25 bp, Homo sapien
gatcggcgaccgatagcgttttttc

SEQ ID NO: 5862132 - DNA, 25 bp, Homo sapien
atcctatacaggtcgcgactccagt

SEQ ID NO: 5862133 - DNA, 25 bp, Homo sapien
taatgggctatccgacgtccgtaca

SEQ ID NO: 5862134 - DNA, 25 bp, Homo sapien
cctctctcagtacgcgacgaaagaa

SEQ ID NO: 5862135 - DNA, 25 bp, Homo sapien
gcagtcacgttcgaaaccgtacagt

SEQ ID NO: 5862136 - DNA, 25 bp, Homo sapien
ggaaacatagtccgcgtcgttagtc

SEQ ID NO: 5862137 - DNA, 25 bp, Homo sapien
ctgtgccgacgtcacgtacttttgt

SEQ ID NO: 5862138 - DNA, 25 bp, Homo sapien
cttcaactagtcgatcggatccagg

SEQ ID NO: 5862139 - DNA, 25 bp, Homo sapien
tgctcagaaccgtcgataccgacaa

SEQ ID NO: 5862140 - DNA, 25 bp, Homo sapien
ctctgcgcgtaccgtataacatctc

SEQ ID NO: 5862141 - DNA, 25 bp, Homo sapien
gaatctgtacggacgtactgctcac

SEQ ID NO: 5862142 - DNA, 25 bp, Homo sapien
tcattcgattagccgcggtgtatcc

SEQ ID NO: 5862143 - DNA, 25 bp, Homo sapien
atcccgatacgcgacgtagaagtag

SEQ ID NO: 5862144 - DNA, 25 bp, Homo sapien
agtacgatacgtccgaccgactaca

SEQ ID NO: 5862145 - DNA, 25 bp, Homo sapien
cgagtcctactataccgcgaagtga

SEQ ID NO: 5862146 - DNA, 25 bp, Homo sapien
attgcgcgacgtccgtataaccatc

SEQ ID NO: 5862147 - DNA, 25 bp, Homo sapien
cacacgacgttcgacgtatccaaac

SEQ ID NO: 5862148 - DNA, 25 bp, Homo sapien
acatgccgtcgggttactaattggg

SEQ ID NO: 5862149 - DNA, 25 bp, Homo sapien
ttatcccggtatccacgatcctacg

SEQ ID NO: 5862150 - DNA, 25 bp, Homo sapien
ctgtatcgcgtatagtgtgcatcgc

SEQ ID NO: 5862151 - DNA, 25 bp, Homo sapien
cttaggcgtagttcgcgacaaatcc

SEQ ID NO: 5862152 - DNA, 25 bp, Homo sapien
attctaatatcgcggaccccgcaca

SEQ ID NO: 5862153 - DNA, 25 bp, Homo sapien
tggcgagcgccctataacgcaaaat

SEQ ID NO: 5862154 - DNA, 25 bp, Homo sapien
ctatttcgcgacgacagattgtgcc

SEQ ID NO: 5862155 - DNA, 25 bp, Homo sapien
ccgttggcgcattacgctatttcac

SEQ ID NO: 5862156 - DNA, 25 bp, Homo sapien
taccttatgcgcgaagcgtagggta

SEQ ID NO: 5862157 - DNA, 25 bp, Homo sapien
tctgtatggtcgacgctatgacacg

SEQ ID NO: 5862158 - DNA, 25 bp, Homo sapien
tcgttccatgttacgcgagcacaag

SEQ ID NO: 5862159 - DNA, 25 bp, Homo sapien
aggcttgatccgacgtagtaggcta

SEQ ID NO: 5862160 - DNA, 25 bp, Homo sapien
actatcgtagtgcgtatcggtggga

SEQ ID NO: 5862161 - DNA, 25 bp, Homo sapien
gacgagcgcgaacgttactacatct

SEQ ID NO: 5862162 - DNA, 25 bp, Homo sapien
tacagctagtatcgcccgttggttg

SEQ ID NO: 5862163 - DNA, 25 bp, Homo sapien
tcggaaatgttcgcgatcgtaggtc

SEQ ID NO: 5862164 - DNA, 25 bp, Homo sapien
aacggtcgagtcgcgattaatctgg

SEQ ID NO: 5862165 - DNA, 25 bp, Homo sapien
cactacgctgttacgcgaaggagta

SEQ ID NO: 5862166 - DNA, 25 bp, Homo sapien
agcacgacgccggaataacgcttaa

SEQ ID NO: 5862167 - DNA, 25 bp, Homo sapien
tgtcgacgcggtttagtacgttggt

SEQ ID NO: 5862168 - DNA, 25 bp, Homo sapien
ggtcagtgcgtagtatcgcaatgca

SEQ ID NO: 5862169 - DNA, 25 bp, Homo sapien
ctatcacggtcgtcataaccccctt

SEQ ID NO: 5862170 - DNA, 25 bp, Homo sapien
agtgtcagtaacgtaccgattcccg

SEQ ID NO: 5862171 - DNA, 25 bp, Homo sapien
gaggctcgtacgcgtgaaatacaga

SEQ ID NO: 5862172 - DNA, 25 bp, Homo sapien
atagctctacggtccgaccatagac

SEQ ID NO: 5862173 - DNA, 25 bp, Homo sapien
gatgactcactaatcgcgaggtgtc

SEQ ID NO: 5862174 - DNA, 25 bp, Homo sapien
ctttttcgtcacgcgtaaccgatcc

SEQ ID NO: 5862175 - DNA, 25 bp, Homo sapien
gctcgatacgcgtaggatctgacat

SEQ ID NO: 5862176 - DNA, 25 bp, Homo sapien
gatgcggtacgaccgatcgttcaaa

SEQ ID NO: 5862177 - DNA, 25 bp, Homo sapien
tcgaatttagtacgggtcgtcgcac

SEQ ID NO: 5862178 - DNA, 25 bp, Homo sapien
ccatggacggtacgaccgaaaatgt

SEQ ID NO: 5862179 - DNA, 25 bp, Homo sapien
acggatccgtccgttatacagctag

SEQ ID NO: 5862180 - DNA, 25 bp, Homo sapien
cgggccttagttaacgcgcatcatt

SEQ ID NO: 5862181 - DNA, 25 bp, Homo sapien
aagaattcacgttagcgcggcacgt

SEQ ID NO: 5862182 - DNA, 25 bp, Homo sapien
ggttgttagacggtacgtcgatcac

SEQ ID NO: 5862183 - DNA, 25 bp, Homo sapien
gatctgatgactcgcgcaagtgtga

SEQ ID NO: 5862184 - DNA, 25 bp, Homo sapien
atattcggtcggtatgtcggcttcg

SEQ ID NO: 5862185 - DNA, 25 bp, Homo sapien
gttgtatctacgcgcgttccacctt

SEQ ID NO: 5862186 - DNA, 25 bp, Homo sapien
gccaccgtaccgcgcttaataattg

SEQ ID NO: 5862187 - DNA, 25 bp, Homo sapien
gttgcgcgtcggacgtaataagctt

SEQ ID NO: 5862188 - DNA, 25 bp, Homo sapien
accagcccgtatagcgcaacctata

SEQ ID NO: 5862189 - DNA, 25 bp, Homo sapien
tagtctcttgcgacgagattcgctg

SEQ ID NO: 5862190 - DNA, 25 bp, Homo sapien
tgatgtcggtcgctacgtagtagac

SEQ ID NO: 5862191 - DNA, 25 bp, Homo sapien
gtttggatacgtcgaacgtcgtgtg

SEQ ID NO: 5862192 - DNA, 25 bp, Homo sapien
ccctactccgcttacgtattaagcc

SEQ ID NO: 5862193 - DNA, 25 bp, Homo sapien
cttaatcaatacggccgcggtagca

SEQ ID NO: 5862194 - DNA, 25 bp, Homo sapien
cgtttagtctaacggcgcatcgtct

SEQ ID NO: 5862195 - DNA, 25 bp, Homo sapien
atgcttcgtccgcgaacgatgtatg

SEQ ID NO: 5862196 - DNA, 25 bp, Homo sapien
gttgcctaaacgtcgcgctatgaca

SEQ ID NO: 5862197 - DNA, 25 bp, Homo sapien
ccgatcaacgtcgcgacatacaatg

SEQ ID NO: 5862198 - DNA, 25 bp, Homo sapien
agtatgacgtaacgcgaggcaggaa

SEQ ID NO: 5862199 - DNA, 25 bp, Homo sapien
tgacccatacgccgatacctacaca

SEQ ID NO: 5862200 - DNA, 25 bp, Homo sapien
ccagattaatcgcgactcgaccgtt

SEQ ID NO: 5862201 - DNA, 25 bp, Homo sapien
gaaaaaacgctatcggtcgccgatc

SEQ ID NO: 5862202 - DNA, 25 bp, Homo sapien
accaacgtactaaaccgcgtcgaca

SEQ ID NO: 5862203 - DNA, 25 bp, Homo sapien
gtccacctcgacgctatagtaagag

SEQ ID NO: 5862204 - DNA, 25 bp, Homo sapien
cacactacttgcggacgtattggtg

SEQ ID NO: 5862205 - DNA, 25 bp, Homo sapien
cctggatccgatcgactagttgaag

SEQ ID NO: 5862206 - DNA, 25 bp, Homo sapien
tgggttgcttagacgtccgtacaca

SEQ ID NO: 5862207 - DNA, 25 bp, Homo sapien
cagctccgcttcgtaacgtaacaga

SEQ ID NO: 5862208 - DNA, 25 bp, Homo sapien
attcagcgttcccgcgtatacaagc

SEQ ID NO: 5862209 - DNA, 25 bp, Homo sapien
gcgatgcacactatacgcgatacag

SEQ ID NO: 5862210 - DNA, 25 bp, Homo sapien
cgggaatcggtacgttactgacact

SEQ ID NO: 5862211 - DNA, 25 bp, Homo sapien
attaagcggtttcgtacgacagcgg

SEQ ID NO: 5862212 - DNA, 25 bp, Homo sapien
aaggacaacgcgtctacgcatagtg

SEQ ID NO: 5862213 - DNA, 25 bp, Homo sapien
cgatctgttccggacgttaggtatc

SEQ ID NO: 5862214 - DNA, 25 bp, Homo sapien
caacgtgacgaccgtataccaggtt

SEQ ID NO: 5862215 - DNA, 25 bp, Homo sapien
gacaggcctacgaattcggtcattc

SEQ ID NO: 5862216 - DNA, 25 bp, Homo sapien
agacattagtgcggtccgacttgag

SEQ ID NO: 5862217 - DNA, 25 bp, Homo sapien
gaagttcgtcgcgataacgtggaga

SEQ ID NO: 5862218 - DNA, 25 bp, Homo sapien
ttgacgcgcgtataatcgaacctcc

SEQ ID NO: 5862219 - DNA, 25 bp, Homo sapien
ttgtcggtatcgacggttctgagca

SEQ ID NO: 5862220 - DNA, 25 bp, Homo sapien
ggattagacctacgtaccgtgcttg

SEQ ID NO: 5862221 - DNA, 25 bp, Homo sapien
tcacacttgcgcgagtcatcagatc

SEQ ID NO: 5862222 - DNA, 25 bp, Homo sapien
ctgggttacccgtcgaagaatagct

SEQ ID NO: 5862223 - DNA, 25 bp, Homo sapien
gcggtagacgaccgttaaaatcgac

SEQ ID NO: 5862224 - DNA, 25 bp, Homo sapien
tgcagcaccgcgccgattaattaca

SEQ ID NO: 5862225 - DNA, 25 bp, Homo sapien
cgaacatcgggcgcgtaaaagcata

SEQ ID NO: 5862226 - DNA, 25 bp, Homo sapien
ggatcggttacgcgtgacgaaaaag

SEQ ID NO: 5862227 - DNA, 25 bp, Homo sapien
tcgcatgtaatatcgcgcgcactag

SEQ ID NO: 5862228 - DNA, 25 bp, Homo sapien
acgtgccgcgctaacgtgaattctt

SEQ ID NO: 5862229 - DNA, 25 bp, Homo sapien
ccagcatattcgaccgtggacagat

SEQ ID NO: 5862230 - DNA, 25 bp, Homo sapien
gcttatgcgtcgctagtactccatc

SEQ ID NO: 5862231 - DNA, 25 bp, Homo sapien
tctgacgctcgcgacgtaaattgag

SEQ ID NO: 5862232 - DNA, 25 bp, Homo sapien
cacatgcgcggggtaaatcagacta

SEQ ID NO: 5862233 - DNA, 25 bp, Homo sapien
tgtacacccttacgcgttaacccca

SEQ ID NO: 5862234 - DNA, 25 bp, Homo sapien
ttacgagtatcgtcacgcctcactc

SEQ ID NO: 5862235 - DNA, 25 bp, Homo sapien
cgtatatcgcggacgcttactcgta

SEQ ID NO: 5862236 - DNA, 25 bp, Homo sapien
atggctcctagtacggcgttggaat

SEQ ID NO: 5862237 - DNA, 25 bp, Homo sapien
tgtagtcggtcggacgtatcgtact

SEQ ID NO: 5862238 - DNA, 25 bp, Homo sapien
tcctcaacggtcggaataccgaaca

SEQ ID NO: 5862239 - DNA, 25 bp, Homo sapien
actagccggacgctatacgtatctc

SEQ ID NO: 5862240 - DNA, 25 bp, Homo sapien
tgtagctgtaccgtagtcgagcgtt

SEQ ID NO: 5862241 - DNA, 25 bp, Homo sapien
agtcgattacgcgacctacccgaaa

SEQ ID NO: 5862242 - DNA, 25 bp, Homo sapien
tctaatcggtcgatacgaccgctac

SEQ ID NO: 5862243 - DNA, 25 bp, Homo sapien
gctaaaaatcggttccgcggaagac

SEQ ID NO: 5862244 - DNA, 25 bp, Homo sapien
ggttacctacctatcgcgcacgaaa

SEQ ID NO: 5862245 - DNA, 25 bp, Homo sapien
cgtggtcatagtatcggcggatctt

SEQ ID NO: 5862246 - DNA, 25 bp, Homo sapien
aaggtggaacgcgcgtagatacaac

SEQ ID NO: 5862247 - DNA, 25 bp, Homo sapien
cttaactatcgacgcctagctgcag

SEQ ID NO: 5862248 - DNA, 25 bp, Homo sapien
cttgtgctcgcgtaacatggaacga

SEQ ID NO: 5862249 - DNA, 25 bp, Homo sapien
cccatgtcgtaccgcacgtattctt

SEQ ID NO: 5862250 - DNA, 25 bp, Homo sapien
aaaatcctacgtgcgacgtcccttc

SEQ ID NO: 5862251 - DNA, 25 bp, Homo sapien
cctaggtatactagccgcgacattg

SEQ ID NO: 5862252 - DNA, 25 bp, Homo sapien
taagactgtcgtaccgctatggagg

SEQ ID NO: 5862253 - DNA, 25 bp, Homo sapien
tctccacgtcgtacgaaaatgtcgg

SEQ ID NO: 5862254 - DNA, 25 bp, Homo sapien
aagtgccgtataacgcgtacacgac

SEQ ID NO: 5862255 - DNA, 25 bp, Homo sapien
aaggaaccgcgtcgaactatgtcac

SEQ ID NO: 5862256 - DNA, 25 bp, Homo sapien
ttgcggtaatcggtccgcgcattat

SEQ ID NO: 5862257 - DNA, 25 bp, Homo sapien
acggggcaatcgtaaccgcttagaa

SEQ ID NO: 5862258 - DNA, 25 bp, Homo sapien
tactccttcgcgtaacagcgtagtg

SEQ ID NO: 5862259 - DNA, 25 bp, Homo sapien
cttcggcggtttactagcgatagtg

SEQ ID NO: 5862260 - DNA, 25 bp, Homo sapien
ttacatacgacgcgttacggggttg

SEQ ID NO: 5862261 - DNA, 25 bp, Homo sapien
cttgattcaatgaccgcgcgatagc

SEQ ID NO: 5862262 - DNA, 25 bp, Homo sapien
taccatgacctagcgcgatttcctg

SEQ ID NO: 5862263 - DNA, 25 bp, Homo sapien
cggttgactacgccgtatagaagct

SEQ ID NO: 5862264 - DNA, 25 bp, Homo sapien
aagtcctcctaatcggcgcttaggt

SEQ ID NO: 5862265 - DNA, 25 bp, Homo sapien
tcgctcgcgtagtacgatggattct

SEQ ID NO: 5862266 - DNA, 25 bp, Homo sapien
ggtgtatagatctcgcgcgctattg

SEQ ID NO: 5862267 - DNA, 25 bp, Homo sapien
cgtgtcatagcgtcgaccatacaga

SEQ ID NO: 5862268 - DNA, 25 bp, Homo sapien
gagtggtagttcgaacgtggttgac

SEQ ID NO: 5862269 - DNA, 25 bp, Homo sapien
gtaaagtacggcgtactcttgcagg

SEQ ID NO: 5862270 - DNA, 25 bp, Homo sapien
gtttcggcgacgaattacgtaccag

SEQ ID NO: 5862271 - DNA, 25 bp, Homo sapien
cagagtcgaccaatacgtcggacaa

SEQ ID NO: 5862272 - DNA, 25 bp, Homo sapien
tcgggttctagcgcgtatggatctt

SEQ ID NO: 5862273 - DNA, 25 bp, Homo sapien
ggagtacgggcgtatacagagtagt

SEQ ID NO: 5862274 - DNA, 25 bp, Homo sapien
agggatagactaccacgcgagagtt

SEQ ID NO: 5862275 - DNA, 25 bp, Homo sapien
aaccaacgcgactaataagggccac

SEQ ID NO: 5862276 - DNA, 25 bp, Homo sapien
accaactatgcgcgacactcttgca

SEQ ID NO: 5862277 - DNA, 25 bp, Homo sapien
aggtgattcgtcgcccgtaatgcat

SEQ ID NO: 5862278 - DNA, 25 bp, Homo sapien
agcaggttatacggagcgcgatgta

SEQ ID NO: 5862279 - DNA, 25 bp, Homo sapien
ggcaagtaaccgacgcctatcaatc

SEQ ID NO: 5862280 - DNA, 25 bp, Homo sapien
gcgtatctatcgtcccgttcgtaag

SEQ ID NO: 5862281 - DNA, 25 bp, Homo sapien
gcttactcgacggctagacagaatg

SEQ ID NO: 5862282 - DNA, 25 bp, Homo sapien
ctattgcgcgcttaataggggggat

SEQ ID NO: 5862283 - DNA, 25 bp, Homo sapien
gtgaaatagcgtaatgcgccaacgg

SEQ ID NO: 5862284 - DNA, 25 bp, Homo sapien
gcacgtgtaacggacgtactatggt

SEQ ID NO: 5862285 - DNA, 25 bp, Homo sapien
acaagcccgtaatcgcgcatgttac

SEQ ID NO: 5862286 - DNA, 25 bp, Homo sapien
aagtacccttacacgacgtggctga

SEQ ID NO: 5862287 - DNA, 25 bp, Homo sapien
agaaaggtccgcgatttgaacggga

SEQ ID NO: 5862288 - DNA, 25 bp, Homo sapien
tccaagcgcgcacaatcgttgaagt

SEQ ID NO: 5862289 - DNA, 25 bp, Homo sapien
cttttctacgtccgcgctaccttct

SEQ ID NO: 5862290 - DNA, 25 bp, Homo sapien
cacacccgacgtcccaattagtaac

SEQ ID NO: 5862291 - DNA, 25 bp, Homo sapien
atcgagcggctaaccgttagttgac

SEQ ID NO: 5862292 - DNA, 25 bp, Homo sapien
gggttagcgttaacgcgaggtattg

SEQ ID NO: 5862293 - DNA, 25 bp, Homo sapien
atgtcagatcctacgcgtatcgagc

SEQ ID NO: 5862294 - DNA, 25 bp, Homo sapien
tgcattgcgatactacgcactgacc

SEQ ID NO: 5862295 - DNA, 25 bp, Homo sapien
gtaccttcggtcgacgtatgtaacc

SEQ ID NO: 5862296 - DNA, 25 bp, Homo sapien
tgcgcatactacgatacgctgaacg

SEQ ID NO: 5862297 - DNA, 25 bp, Homo sapien
aatacacgtcgaaccgcgtcgcaaa

SEQ ID NO: 5862298 - DNA, 25 bp, Homo sapien
gccagctagtccgacgatatcatca

SEQ ID NO: 5862299 - DNA, 25 bp, Homo sapien
tgatggacgccggttagtcaaacag

SEQ ID NO: 5862300 - DNA, 25 bp, Homo sapien
gtatgacaatacgtacgcggggaca

SEQ ID NO: 5862301 - DNA, 25 bp, Homo sapien
cgtcaccggcattatatcgtgtagc

SEQ ID NO: 5862302 - DNA, 25 bp, Homo sapien
ctccgaatctagtctcgcgaagcaa

SEQ ID NO: 5862303 - DNA, 25 bp, Homo sapien
tagttaggtccgtaccgattgcctg

SEQ ID NO: 5862304 - DNA, 25 bp, Homo sapien
gacagcaccggccgtagtacatata

SEQ ID NO: 5862305 - DNA, 25 bp, Homo sapien
acctggcgagtcgtgtaacgtaagt

SEQ ID NO: 5862306 - DNA, 25 bp, Homo sapien
gttagttcggtcgtatgagggatgc

SEQ ID NO: 5862307 - DNA, 25 bp, Homo sapien
cttttgcgcgcgttagatccagtct

SEQ ID NO: 5862308 - DNA, 25 bp, Homo sapien
tcactacggtactagttcggcctag

SEQ ID NO: 5862309 - DNA, 25 bp, Homo sapien
ttcccatcgcgtacgaacacgatga

SEQ ID NO: 5862310 - DNA, 25 bp, Homo sapien
caagcacgtaacgccaatgggaaag

SEQ ID NO: 5862311 - DNA, 25 bp, Homo sapien
aggtcaacgatagttacgcatgcgg

SEQ ID NO: 5862312 - DNA, 25 bp, Homo sapien
gcagcttcgacgtagggacaaattc

SEQ ID NO: 5862313 - DNA, 25 bp, Homo sapien
attttgcgttatagggcgctcgcca

SEQ ID NO: 5862314 - DNA, 25 bp, Homo sapien
cttcggattacggcgcgacataaca

SEQ ID NO: 5862315 - DNA, 25 bp, Homo sapien
cgactctctttagtacgcgggtttc

SEQ ID NO: 5862316 - DNA, 25 bp, Homo sapien
gattactagtcgtaccggggaagga

SEQ ID NO: 5862317 - DNA, 25 bp, Homo sapien
aagtcccgcgcatttagaccgtaac

SEQ ID NO: 5862318 - DNA, 25 bp, Homo sapien
cggacggacgatatcgcgtgtttta

SEQ ID NO: 5862319 - DNA, 25 bp, Homo sapien
atatgtcgtcgtacgctaaggagcg

SEQ ID NO: 5862320 - DNA, 25 bp, Homo sapien
atgtatcgttcgcgctaatgggctc

SEQ ID NO: 5862321 - DNA, 25 bp, Homo sapien
atcagtcctatctacgacgttccgc

SEQ ID NO: 5862322 - DNA, 25 bp, Homo sapien
taagcgcgacgtataagcgaggaga

SEQ ID NO: 5862323 - DNA, 25 bp, Homo sapien
gacgggtatagttcgcgggatttga

SEQ ID NO: 5862324 - DNA, 25 bp, Homo sapien
agctactgggtaatcgcgagcacat

SEQ ID NO: 5862325 - DNA, 25 bp, Homo sapien
agactaatgcgcgtaaacgctgctc

SEQ ID NO: 5862326 - DNA, 25 bp, Homo sapien
gtagggtcgcgacacgttgtttaac

SEQ ID NO: 5862327 - DNA, 25 bp, Homo sapien
agatcacgtcgtgcgcataacgagt

SEQ ID NO: 5862328 - DNA, 25 bp, Homo sapien
gttgactgggaccgtcgaaatctag

SEQ ID NO: 5862329 - DNA, 25 bp, Homo sapien
tcgtcgaacgcggagtataacaacg

SEQ ID NO: 5862330 - DNA, 25 bp, Homo sapien
aaggtgggcgatatgcgtacgagaa

SEQ ID NO: 5862331 - DNA, 25 bp, Homo sapien
gtagttgtcgtacggtacctcagct

SEQ ID NO: 5862332 - DNA, 25 bp, Homo sapien
taagggtagcattcgcgcggagttt

SEQ ID NO: 5862333 - DNA, 25 bp, Homo sapien
agagtaaaggtcgaccgtacagctc

SEQ ID NO: 5862334 - DNA, 25 bp, Homo sapien
gtctatggtcggaccgtagagctat

SEQ ID NO: 5862335 - DNA, 25 bp, Homo sapien
ttttcgaacgtacggcgtacagctc

SEQ ID NO: 5862336 - DNA, 25 bp, Homo sapien
aatctcagcgcggtatacccatgca

SEQ ID NO: 5862337 - DNA, 25 bp, Homo sapien
atatcgcgctacgcgcttaaccaga

SEQ ID NO: 5862338 - DNA, 25 bp, Homo sapien
tgtacggacgtcggatagcccatta

SEQ ID NO: 5862339 - DNA, 25 bp, Homo sapien
gaacgacctatgatacgcgaagggt

SEQ ID NO: 5862340 - DNA, 25 bp, Homo sapien
agataattagacgaccgcgggggta

SEQ ID NO: 5862341 - DNA, 25 bp, Homo sapien
aacacccgctatataccgcggactt

SEQ ID NO: 5862342 - DNA, 25 bp, Homo sapien
ggctatcgtcatacggcgtagttct

SEQ ID NO: 5862343 - DNA, 25 bp, Homo sapien
tggggatcgtaccgttgtaaggagt

SEQ ID NO: 5862344 - DNA, 25 bp, Homo sapien
gacctacgatcgcgaacatttccga

SEQ ID NO: 5862345 - DNA, 25 bp, Homo sapien
taccacctactagcgtcgtccatca

SEQ ID NO: 5862346 - DNA, 25 bp, Homo sapien
tacttctataccgctagcggcgatc

SEQ ID NO: 5862347 - DNA, 25 bp, Homo sapien
cctgaacgcgagactgaattagacc

SEQ ID NO: 5862348 - DNA, 25 bp, Homo sapien
gggaaggtcgctaatcgatttccga

SEQ ID NO: 5862349 - DNA, 25 bp, Homo sapien
aaccacccgcgatacttaggtcaga

SEQ ID NO: 5862350 - DNA, 25 bp, Homo sapien
cctagagcgatatgtaccggtaggt

SEQ ID NO: 5862351 - DNA, 25 bp, Homo sapien
cccaattagtaacccgacggcatgt

SEQ ID NO: 5862352 - DNA, 25 bp, Homo sapien
taaccgctagttcgaccgtcaagtc

SEQ ID NO: 5862353 - DNA, 25 bp, Homo sapien
atagcagtcgacgctatcctagacc

SEQ ID NO: 5862354 - DNA, 25 bp, Homo sapien
agtgactcgtacggtacgtaacacc

SEQ ID NO: 5862355 - DNA, 25 bp, Homo sapien
tccatgcgcgcctattacgataagc

SEQ ID NO: 5862356 - DNA, 25 bp, Homo sapien
aagggggttatgacgaccgtgatag

SEQ ID NO: 5862357 - DNA, 25 bp, Homo sapien
gatacacgttagttacgcgacacgg

SEQ ID NO: 5862358 - DNA, 25 bp, Homo sapien
gatcccgtatctagacgcgatacac

SEQ ID NO: 5862359 - DNA, 25 bp, Homo sapien
gaggacacgcgaataagggagcata

SEQ ID NO: 5862360 - DNA, 25 bp, Homo sapien
caagtgaatatgcgcgtcgttgcgt

SEQ ID NO: 5862361 - DNA, 25 bp, Homo sapien
cattgacgactgtcgcgatttaggc

SEQ ID NO: 5862362 - DNA, 25 bp, Homo sapien
tctgtatttcacgcgtacgagcctc

SEQ ID NO: 5862363 - DNA, 25 bp, Homo sapien
tgtaagacgcgttagccgaggttac

SEQ ID NO: 5862364 - DNA, 25 bp, Homo sapien
cggtcctatacgcgtccagaatgta

SEQ ID NO: 5862365 - DNA, 25 bp, Homo sapien
atgtgacttcgcgcgatcagtgtac

SEQ ID NO: 5862366 - DNA, 25 bp, Homo sapien
taacctcgcggtagttcgtctcgtt

SEQ ID NO: 5862367 - DNA, 25 bp, Homo sapien
acagtataaccgcgacacgggattg

SEQ ID NO: 5862368 - DNA, 25 bp, Homo sapien
gctacaagtacgcgaatcggtgtac

SEQ ID NO: 5862369 - DNA, 25 bp, Homo sapien
tgtgcggggtccgcgatattagaat

SEQ ID NO: 5862370 - DNA, 25 bp, Homo sapien
ggagtgctcgacgtacgaatctatg

SEQ ID NO: 5862371 - DNA, 25 bp, Homo sapien
tcgcatcgcgccgatcatatattcg

SEQ ID NO: 5862372 - DNA, 25 bp, Homo sapien
tcactggtatccgaccgttgcttga

SEQ ID NO: 5862373 - DNA, 25 bp, Homo sapien
gaccttatactacggaccggtacag

SEQ ID NO: 5862374 - DNA, 25 bp, Homo sapien
caggcatatactgcgcgagtgtctt

SEQ ID NO: 5862375 - DNA, 25 bp, Homo sapien
tatggcgcgtaacgttcgtctaacg

SEQ ID NO: 5862376 - DNA, 25 bp, Homo sapien
tgttcatcggagtcgtacgtgtgag

SEQ ID NO: 5862377 - DNA, 25 bp, Homo sapien
gatcttgtcccgttacgctatcctc

SEQ ID NO: 5862378 - DNA, 25 bp, Homo sapien
caggcttcgcgcatagcatctatac

SEQ ID NO: 5862379 - DNA, 25 bp, Homo sapien
gttaattcgcgcgacatgctagtcg

SEQ ID NO: 5862380 - DNA, 25 bp, Homo sapien
tgaagaactagcgcgagtactcgca

SEQ ID NO: 5862381 - DNA, 25 bp, Homo sapien
ttccgatacctgccgcgatctttgt

SEQ ID NO: 5862382 - DNA, 25 bp, Homo sapien
taggatgtcggttcgtagttcgtgg

SEQ ID NO: 5862383 - DNA, 25 bp, Homo sapien
tgattcccgtattagagcgatggcg

SEQ ID NO: 5862384 - DNA, 25 bp, Homo sapien
tacccctctcgtaacgggttcattg

SEQ ID NO: 5862385 - DNA, 25 bp, Homo sapien
ttctcttcagtacgtcgcagggcta

SEQ ID NO: 5862386 - DNA, 25 bp, Homo sapien
gaagagtccaacgaccgattgaagg

SEQ ID NO: 5862387 - DNA, 25 bp, Homo sapien
gcacaactacgacgtaccaacccta

SEQ ID NO: 5862388 - DNA, 25 bp, Homo sapien
ggtcgacgtataacgtccgatgtgt

SEQ ID NO: 5862389 - DNA, 25 bp, Homo sapien
cacgctggctaatcgcgtagaatca

SEQ ID NO: 5862390 - DNA, 25 bp, Homo sapien
catagcgtcgctcgattagcggttt

SEQ ID NO: 5862391 - DNA, 25 bp, Homo sapien
attgtgcgtaacgagcggggtaaag

SEQ ID NO: 5862392 - DNA, 25 bp, Homo sapien
cagctgtagtacgccctagaattcc

SEQ ID NO: 5862393 - DNA, 25 bp, Homo sapien
gtagtcttgtcgcgaacgaacacct

SEQ ID NO: 5862394 - DNA, 25 bp, Homo sapien
tgcaaacggtagtatgtcggtggct

SEQ ID NO: 5862395 - DNA, 25 bp, Homo sapien
actacatcggcaggtcgtataccac

SEQ ID NO: 5862396 - DNA, 25 bp, Homo sapien
atgggacgacaatctcgcgctacaa

SEQ ID NO: 5862397 - DNA, 25 bp, Homo sapien
gacacctcgcgattagtgagtcatc

SEQ ID NO: 5862398 - DNA, 25 bp, Homo sapien
cgtttcatctcacgcgacggcattt

SEQ ID NO: 5862399 - DNA, 25 bp, Homo sapien
ggtcagatcccgcaacgatctaaga

SEQ ID NO: 5862400 - DNA, 25 bp, Homo sapien
ctgactaccctacgcgtagtaagac

SEQ ID NO: 5862401 - DNA, 25 bp, Homo sapien
acgaaggcgtctcgacgtatctaga

SEQ ID NO: 5862402 - DNA, 25 bp, Homo sapien
ggtcgtttgtccgcgtaacttggat

SEQ ID NO: 5862403 - DNA, 25 bp, Homo sapien
cactaaaccgtacgtcgtagtgtgg

SEQ ID NO: 5862404 - DNA, 25 bp, Homo sapien
atagctcgacgcgatagagcatagc

SEQ ID NO: 5862405 - DNA, 25 bp, Homo sapien
agtactcgcgccgtataggccataa

SEQ ID NO: 5862406 - DNA, 25 bp, Homo sapien
tcagtgctaaggcgaacgatctgtc

SEQ ID NO: 5862407 - DNA, 25 bp, Homo sapien
catgtcctaacgcgcgttgactaga

SEQ ID NO: 5862408 - DNA, 25 bp, Homo sapien
aacactcatacgcgagtggaacgac

SEQ ID NO: 5862409 - DNA, 25 bp, Homo sapien
catatctacggcgtaccgacaagca

SEQ ID NO: 5862410 - DNA, 25 bp, Homo sapien
gaatggtccgcggactagtttagag

SEQ ID NO: 5862411 - DNA, 25 bp, Homo sapien
aatgatgcgcgttaactaaggcccg

SEQ ID NO: 5862412 - DNA, 25 bp, Homo sapien
attgcgcctccgaacgataatccca

SEQ ID NO: 5862413 - DNA, 25 bp, Homo sapien
cactcaacggagcgatacgacacaa

SEQ ID NO: 5862414 - DNA, 25 bp, Homo sapien
acatgccgtatttcgcggaccatac

SEQ ID NO: 5862415 - DNA, 25 bp, Homo sapien
taagggcggtatcccgttattctcg

SEQ ID NO: 5862416 - DNA, 25 bp, Homo sapien
ggcccacgtacgggtagttcaaata

SEQ ID NO: 5862417 - DNA, 25 bp, Homo sapien
cttaagccgccgctatacgtacctt

SEQ ID NO: 5862418 - DNA, 25 bp, Homo sapien
ggaattcgtcgcgctaattcgtcag

SEQ ID NO: 5862419 - DNA, 25 bp, Homo sapien
aacgacttcgctaggacgtgaccaa

SEQ ID NO: 5862420 - DNA, 25 bp, Homo sapien
acattttcggtcgtaccgtccatgg

SEQ ID NO: 5862421 - DNA, 25 bp, Homo sapien
ggtggagtcgcacgaactagtaaga

SEQ ID NO: 5862422 - DNA, 25 bp, Homo sapien
ttaagcgttattccggcgtcgtgct

SEQ ID NO: 5862423 - DNA, 25 bp, Homo sapien
ggggtggcgtcagacgtattaaatc

SEQ ID NO: 5862424 - DNA, 25 bp, Homo sapien
gtgtaccgcgcattagatacgcatg

SEQ ID NO: 5862425 - DNA, 25 bp, Homo sapien
ccgttacggagcgatactagcttac

SEQ ID NO: 5862426 - DNA, 25 bp, Homo sapien
caaccaacgggcgatactagctgta

SEQ ID NO: 5862427 - DNA, 25 bp, Homo sapien
gtgatcgacgtaccgtctaacaacc

SEQ ID NO: 5862428 - DNA, 25 bp, Homo sapien
ctccaagtctacgaccgtagtatgc

SEQ ID NO: 5862429 - DNA, 25 bp, Homo sapien
cctgattcgcgtaagaacgccatac

SEQ ID NO: 5862430 - DNA, 25 bp, Homo sapien
ttcgaacgtcgacactagtgcctca

SEQ ID NO: 5862431 - DNA, 25 bp, Homo sapien
gcgttatatgcgctagtcgtgatgg

SEQ ID NO: 5862432 - DNA, 25 bp, Homo sapien
aggaatcgcgcttggatcgtaggta

SEQ ID NO: 5862433 - DNA, 25 bp, Homo sapien
cgtgaggtctatcgcaacggctttt

SEQ ID NO: 5862434 - DNA, 25 bp, Homo sapien
gatggttatacggacgtcgcgcaat

SEQ ID NO: 5862435 - DNA, 25 bp, Homo sapien
gagtgtaggtatcgcgaacaacgag

SEQ ID NO: 5862436 - DNA, 25 bp, Homo sapien
tcacattacggccgtaagggtgatg

SEQ ID NO: 5862437 - DNA, 25 bp, Homo sapien
cctaactcgcgatacgtactcccta

SEQ ID NO: 5862438 - DNA, 25 bp, Homo sapien
acctcgcttaacgcgtcgtctatag

SEQ ID NO: 5862439 - DNA, 25 bp, Homo sapien
gtttgacgttactcgcgaattgccc

SEQ ID NO: 5862440 - DNA, 25 bp, Homo sapien
tggatgacgagcgcgtatagtttgg

SEQ ID NO: 5862441 - DNA, 25 bp, Homo sapien
tgttagccgcgtatcgaatagccga

SEQ ID NO: 5862442 - DNA, 25 bp, Homo sapien
attaccttgagcgcgactagtcctc

SEQ ID NO: 5862443 - DNA, 25 bp, Homo sapien
actcctgcgcgactagtctgagata

SEQ ID NO: 5862444 - DNA, 25 bp, Homo sapien
gtctactaccgcgtataggccagat

SEQ ID NO: 5862445 - DNA, 25 bp, Homo sapien
aagcttgtcgcgcgagtaactgaga

SEQ ID NO: 5862446 - DNA, 25 bp, Homo sapien
aagggctatatggtccgcgaaccat

SEQ ID NO: 5862447 - DNA, 25 bp, Homo sapien
gttacgcgcgaccctcataaaagac

SEQ ID NO: 5862448 - DNA, 25 bp, Homo sapien
gagacgtcgtcgctacgtacttcta

SEQ ID NO: 5862449 - DNA, 25 bp, Homo sapien
tagacacataatagcgcgggttcgg

SEQ ID NO: 5862450 - DNA, 25 bp, Homo sapien
ctcggtcgccaagtaacgctagata

SEQ ID NO: 5862451 - DNA, 25 bp, Homo sapien
ctgctatacgggtcgacctcgtaat

SEQ ID NO: 5862452 - DNA, 25 bp, Homo sapien
caaacaatatcgcgtcggctgtcag

SEQ ID NO: 5862453 - DNA, 25 bp, Homo sapien
caatgacctatacgcgacgtacggt

SEQ ID NO: 5862454 - DNA, 25 bp, Homo sapien
ctattgacgatacgggatctcgggt

SEQ ID NO: 5862455 - DNA, 25 bp, Homo sapien
acaaaagtacgtgacgtcggcacag

SEQ ID NO: 5862456 - DNA, 25 bp, Homo sapien
cgtaggatcgtggataccgggataa

SEQ ID NO: 5862457 - DNA, 25 bp, Homo sapien
gtgttatctatcggcgagaggctca

SEQ ID NO: 5862458 - DNA, 25 bp, Homo sapien
gagatgttatacggtacgcgcagag

SEQ ID NO: 5862459 - DNA, 25 bp, Homo sapien
atacccgcgttaccgtatcattccc

SEQ ID NO: 5862460 - DNA, 25 bp, Homo sapien
cgcattcgcgttaaatacgcccact

SEQ ID NO: 5862461 - DNA, 25 bp, Homo sapien
aagagtgacctatagcgcggtggaa

SEQ ID NO: 5862462 - DNA, 25 bp, Homo sapien
tctaatggcgtaatcgacgacccct

SEQ ID NO: 5862463 - DNA, 25 bp, Homo sapien
aagcgtccgatatacggtgccaatc

SEQ ID NO: 5862464 - DNA, 25 bp, Homo sapien
catcgtggtcgcggtactagaagtt

SEQ ID NO: 5862465 - DNA, 25 bp, Homo sapien
tcagcagacgaacgcgactcaaact

SEQ ID NO: 5862466 - DNA, 25 bp, Homo sapien
cactgaatcggacttcgcgatctct

SEQ ID NO: 5862467 - DNA, 25 bp, Homo sapien
gtaggcctcgctatacgactgacta

SEQ ID NO: 5862468 - DNA, 25 bp, Homo sapien
ggatacaccgcggctaatcgaatga

SEQ ID NO: 5862469 - DNA, 25 bp, Homo sapien
attttcgacgcgcgctatactcacc

SEQ ID NO: 5862470 - DNA, 25 bp, Homo sapien
gatgcatacggaccgtataggtggt

SEQ ID NO: 5862471 - DNA, 25 bp, Homo sapien
ttgggccgtacgagcgataaatcgt

SEQ ID NO: 5862472 - DNA, 25 bp, Homo sapien
attcttcgcgattaacacccggtgg

SEQ ID NO: 5862473 - DNA, 25 bp, Homo sapien
ggacttacgctaacgacgttgatgc

SEQ ID NO: 5862474 - DNA, 25 bp, Homo sapien
taccctacgcttcgcgcataaggta

SEQ ID NO: 5862475 - DNA, 25 bp, Homo sapien
ggatttgtcgcgaactacgcctaag

SEQ ID NO: 5862476 - DNA, 25 bp, Homo sapien
tctagcgtgatatcacgcgccaatc

SEQ ID NO: 5862477 - DNA, 25 bp, Homo sapien
gtctcttaacggatcgcgggtgaaa

SEQ ID NO: 5862478 - DNA, 25 bp, Homo sapien
tgactgacgtgtatcgcgactaacc

SEQ ID NO: 5862479 - DNA, 25 bp, Homo sapien
ctactaacgcggtatcgggatactc

SEQ ID NO: 5862480 - DNA, 25 bp, Homo sapien
tagctcccctcgacatacgtcatct

SEQ ID NO: 5862481 - DNA, 25 bp, Homo sapien
gagaggagcgcgtaatatgcaaagg

SEQ ID NO: 5862482 - DNA, 25 bp, Homo sapien
tcctagtcgtatgacgcggttaacg

SEQ ID NO: 5862483 - DNA, 25 bp, Homo sapien
tatatgctaactcgcgcgtgaacgg

SEQ ID NO: 5862484 - DNA, 25 bp, Homo sapien
gactagtaccgagccgttacttctg

SEQ ID NO: 5862485 - DNA, 25 bp, Homo sapien
tccgttattaggccgtccgatccat

SEQ ID NO: 5862486 - DNA, 25 bp, Homo sapien
acattttagacgcgagtaacgggcg

SEQ ID NO: 5862487 - DNA, 25 bp, Homo sapien
gggtacacctaacgcgcaaagacaa

SEQ ID NO: 5862488 - DNA, 25 bp, Homo sapien
actttatacgcgcgtcgtacctagc

SEQ ID NO: 5862489 - DNA, 25 bp, Homo sapien
tcccatcggtgcgtctaacttatcc

SEQ ID NO: 5862490 - DNA, 25 bp, Homo sapien
cggctaccgagcgtaattcaatcga

SEQ ID NO: 5862491 - DNA, 25 bp, Homo sapien
ccagtagtcgtatagcgccactcta

SEQ ID NO: 5862492 - DNA, 25 bp, Homo sapien
cgacattaacgacggttcggcagat

SEQ ID NO: 5862493 - DNA, 25 bp, Homo sapien
ttaacccgtaggtcgcgaatcggaa

SEQ ID NO: 5862494 - DNA, 25 bp, Homo sapien
atgacaagggcgttatacgatcccg

SEQ ID NO: 5862495 - DNA, 25 bp, Homo sapien
gcaacattcgcgcgggataatcatc

SEQ ID NO: 5862496 - DNA, 25 bp, Homo sapien
tcccaccgatacgcactacgatagt

SEQ ID NO: 5862497 - DNA, 25 bp, Homo sapien
aggaggttacgcatcggcgtatcaa

SEQ ID NO: 5862498 - DNA, 25 bp, Homo sapien
cacaaagacgccgtaacgtcagaag

SEQ ID NO: 5862499 - DNA, 25 bp, Homo sapien
ctgagataagttcgcgtaccctcca

SEQ ID NO: 5862500 - DNA, 25 bp, Homo sapien
agagagtatcgtcacccggtgtaca

SEQ ID NO: 5862501 - DNA, 25 bp, Homo sapien
gataggttcgcgacgtaaccgtgaa

SEQ ID NO: 5862502 - DNA, 25 bp, Homo sapien
acgccgcgggatctaacgattctat

SEQ ID NO: 5862503 - DNA, 25 bp, Homo sapien
actggaccgcgactaatcggattct

SEQ ID NO: 5862504 - DNA, 25 bp, Homo sapien
actgtacggtttcgaacgtgactgc

SEQ ID NO: 5862505 - DNA, 25 bp, Homo sapien
acccttacgaacgcgtatgaacgtc

SEQ ID NO: 5862506 - DNA, 25 bp, Homo sapien
gagttccccgcgattacgcttatca

SEQ ID NO: 5862507 - DNA, 25 bp, Homo sapien
ttcacacgccttagtagcgcaagca

SEQ ID NO: 5862508 - DNA, 25 bp, Homo sapien
taagatttagtcgcggacagcccac

SEQ ID NO: 5862509 - DNA, 25 bp, Homo sapien
agaattctgacgcgacgtacgtacc

SEQ ID NO: 5862510 - DNA, 25 bp, Homo sapien
ctagctgtataacggacggatccgt

SEQ ID NO: 5862511 - DNA, 25 bp, Homo sapien
caattattaagcgcggtacggtggc

SEQ ID NO: 5862512 - DNA, 25 bp, Homo sapien
gtataaagttcgaccgtcgccggaa

SEQ ID NO: 5862513 - DNA, 25 bp, Homo sapien
ctacctttacggtatcgcgcacaga

SEQ ID NO: 5862514 - DNA, 25 bp, Homo sapien
gttacccgcgtaacacgtaatctgc

SEQ ID NO: 5862515 - DNA, 25 bp, Homo sapien
cgacaactcggtcgttcgatgattc

SEQ ID NO: 5862516 - DNA, 25 bp, Homo sapien
ctacttctacgtcgcgtatcgggat

SEQ ID NO: 5862517 - DNA, 25 bp, Homo sapien
taagcacgaatatcgtacgcctcgc

SEQ ID NO: 5862518 - DNA, 25 bp, Homo sapien
ggtgtatctacgaccaacgtcgttg

SEQ ID NO: 5862519 - DNA, 25 bp, Homo sapien
ttgtttgacgttcacgcgtgcgatg

SEQ ID NO: 5862520 - DNA, 25 bp, Homo sapien
tcgtctcgcgtcgtaaatagacgtc

SEQ ID NO: 5862521 - DNA, 25 bp, Homo sapien
cttcgggcgttcgatacacgaagat

SEQ ID NO: 5862522 - DNA, 25 bp, Homo sapien
accgcgcgacgttacatcgattgtt

SEQ ID NO: 5862523 - DNA, 25 bp, Homo sapien
aactattatccgcggcgtagctgtc

SEQ ID NO: 5862524 - DNA, 25 bp, Homo sapien
gtgcgacgacccgtactaaattcga

SEQ ID NO: 5862525 - DNA, 25 bp, Homo sapien
tttgaacgacgctgtatgcccgtac

SEQ ID NO: 5862526 - DNA, 25 bp, Homo sapien
acaaaaatcgcggaccgtcacagga

SEQ ID NO: 5862527 - DNA, 25 bp, Homo sapien
acatcgccgcggatcgttaccttta

SEQ ID NO: 5862528 - DNA, 25 bp, Homo sapien
tagcctactacgtcggatcaagcct

SEQ ID NO: 5862529 - DNA, 25 bp, Homo sapien
aaactgcgttacgcgaacctgctct

SEQ ID NO: 5862530 - DNA, 25 bp, Homo sapien
tagctcatacgttcgcgtgagtgga

SEQ ID NO: 5862531 - DNA, 25 bp, Homo sapien
gagaaatacgaacgcggttgcaggt

SEQ ID NO: 5862532 - DNA, 25 bp, Homo sapien
atctcacggacgcgtaattagaggc

SEQ ID NO: 5862533 - DNA, 25 bp, Homo sapien
gagcctgcgctacgtatagtaagca

SEQ ID NO: 5862534 - DNA, 25 bp, Homo sapien
tgcgatgatcgcgcgaacattcatg

SEQ ID NO: 5862535 - DNA, 25 bp, Homo sapien
gtgagcagtacgtccgtacagattc

SEQ ID NO: 5862536 - DNA, 25 bp, Homo sapien
cgctgcttatagccgcgtaagtttg

SEQ ID NO: 5862537 - DNA, 25 bp, Homo sapien
aagacaggctatacgcgagagaacc

SEQ ID NO: 5862538 - DNA, 25 bp, Homo sapien
caagatgttgcgtacagcgtccaag

SEQ ID NO: 5862539 - DNA, 25 bp, Homo sapien
cctttcgaacgaaccgctaacgcta

SEQ ID NO: 5862540 - DNA, 25 bp, Homo sapien
tccgtgttagcgcgcgacataactt

SEQ ID NO: 5862541 - DNA, 25 bp, Homo sapien
tcacttcgcggtatagtaggactcg

SEQ ID NO: 5862542 - DNA, 25 bp, Homo sapien
cctggccgcgatgattgaaatactc

SEQ ID NO: 5862543 - DNA, 25 bp, Homo sapien
cgctaatacgcctatcggcactgtt

SEQ ID NO: 5862544 - DNA, 25 bp, Homo sapien
tataataccgacgtacccgctggca

SEQ ID NO: 5862545 - DNA, 25 bp, Homo sapien
ccaaaacgacgcgttacatgatgcg

SEQ ID NO: 5862546 - DNA, 25 bp, Homo sapien
gttaacgtacgatgcgagatgctcc

SEQ ID NO: 5862547 - DNA, 25 bp, Homo sapien
ggatcacgcgacccttataacgtgt

SEQ ID NO: 5862548 - DNA, 25 bp, Homo sapien
tatccacgtagctgatacgctgacg

SEQ ID NO: 5862549 - DNA, 25 bp, Homo sapien
gcgtgtaattacgacgcgcttttcg

SEQ ID NO: 5862550 - DNA, 25 bp, Homo sapien
ccgataatgtagcgcgcgtttacac

SEQ ID NO: 5862551 - DNA, 25 bp, Homo sapien
tattggctaggtccgatcggagatc

SEQ ID NO: 5862552 - DNA, 25 bp, Homo sapien
actccaatcgcgaagtccggtgatt

SEQ ID NO: 5862553 - DNA, 25 bp, Homo sapien
tctcctgtaacgcgaactctatgcg

SEQ ID NO: 5862554 - DNA, 25 bp, Homo sapien
ttcagcagttagcgatcggcgtcat

SEQ ID NO: 5862555 - DNA, 25 bp, Homo sapien
cgaagccgacataccgaccgaatat

SEQ ID NO: 5862556 - DNA, 25 bp, Homo sapien
caaacgacgtgcgcgatatcttggt

SEQ ID NO: 5862557 - DNA, 25 bp, Homo sapien
gaggtacacttagttcgcgctaacc

SEQ ID NO: 5862558 - DNA, 25 bp, Homo sapien
gctctgcgtattaggcgagcagatt

SEQ ID NO: 5862559 - DNA, 25 bp, Homo sapien
agatgccgttgcgcggttatggttt

SEQ ID NO: 5862560 - DNA, 25 bp, Homo sapien
aacgacctcgcgcgagaattccttt

SEQ ID NO: 5862561 - DNA, 25 bp, Homo sapien
ccgctggcgtaaccgtataaagaca

SEQ ID NO: 5862562 - DNA, 25 bp, Homo sapien
cgttgatgatcgcgcgtaaagtcca

SEQ ID NO: 5862563 - DNA, 25 bp, Homo sapien
gtacaagacgctagcgcgagttcaa

SEQ ID NO: 5862564 - DNA, 25 bp, Homo sapien
tcttcaatcgcgcacgtaacgcaca

SEQ ID NO: 5862565 - DNA, 25 bp, Homo sapien
agtctgtcgcgatctagcctcactt

SEQ ID NO: 5862566 - DNA, 25 bp, Homo sapien
tacccaattcgacggacgagctact

SEQ ID NO: 5862567 - DNA, 25 bp, Homo sapien
ggcaggtacggccgaatacttgatt

SEQ ID NO: 5862568 - DNA, 25 bp, Homo sapien
aaagcgattcgcgcgtatctctagc

SEQ ID NO: 5862569 - DNA, 25 bp, Homo sapien
ttgtatacgcgtcacgaaccagagg

SEQ ID NO: 5862570 - DNA, 25 bp, Homo sapien
gcctctacgcttgtacgcgtgtaaa

SEQ ID NO: 5862571 - DNA, 25 bp, Homo sapien
acagatgcgcgtcattcgtaaccag

SEQ ID NO: 5862572 - DNA, 25 bp, Homo sapien
actgactgtcgacggtataggcagt

SEQ ID NO: 5862573 - DNA, 25 bp, Homo sapien
atcctggcgagtcgcctatgaactt

SEQ ID NO: 5862574 - DNA, 25 bp, Homo sapien
ggattgtgggtctacgacgagtaca

SEQ ID NO: 5862575 - DNA, 25 bp, Homo sapien
tgaacgtacgcgtaggatccatcag

SEQ ID NO: 5862576 - DNA, 25 bp, Homo sapien
agttgacgtactacatcgagcccag

SEQ ID NO: 5862577 - DNA, 25 bp, Homo sapien
cttctaccgtaggtcgatgactacg

SEQ ID NO: 5862578 - DNA, 25 bp, Homo sapien
tcctgatgcgatcatcgggaagctt

SEQ ID NO: 5862579 - DNA, 25 bp, Homo sapien
ctcatgggtctatacgcggaacttc

SEQ ID NO: 5862580 - DNA, 25 bp, Homo sapien
tctacatacagaacgcgcgacagga

SEQ ID NO: 5862581 - DNA, 25 bp, Homo sapien
tccagtccacgacgcgaatatcgtt

SEQ ID NO: 5862582 - DNA, 25 bp, Homo sapien
atctaagcgtactaacgctgtcccg

SEQ ID NO: 5862583 - DNA, 25 bp, Homo sapien
acgtgctcgcgtatgtcggaaaatc

SEQ ID NO: 5862584 - DNA, 25 bp, Homo sapien
aagagctagtcgtatcgcgccagaa

SEQ ID NO: 5862585 - DNA, 25 bp, Homo sapien
cccgttccgcgtatagtcaaacatg

SEQ ID NO: 5862586 - DNA, 25 bp, Homo sapien
tagtatggcgaattacgtccacggc

SEQ ID NO: 5862587 - DNA, 25 bp, Homo sapien
caaccctagtcgaatcgccatacga

SEQ ID NO: 5862588 - DNA, 25 bp, Homo sapien
attgggcgtatgcgacggttcttga

SEQ ID NO: 5862589 - DNA, 25 bp, Homo sapien
actggagtcgcgacctgtataggat

SEQ ID NO: 5862590 - DNA, 25 bp, Homo sapien
tttaccgttgcgcgctaactcaggt

SEQ ID NO: 5862591 - DNA, 25 bp, Homo sapien
agggcagtctcgcgaataggttgat

SEQ ID NO: 5862592 - DNA, 25 bp, Homo sapien
caagcctcgtccggcctataaagaa

SEQ ID NO: 5862593 - DNA, 25 bp, Homo sapien
ggcacatcgggatatgcgcaactat

SEQ ID NO: 5862594 - DNA, 25 bp, Homo sapien
catcgcacaataggtcgcgttcaac

SEQ ID NO: 5862595 - DNA, 25 bp, Homo sapien
gctaagacgacgtaccacgtcaact

SEQ ID NO: 5862596 - DNA, 25 bp, Homo sapien
tactcttcgggcgtaattggtagcc

SEQ ID NO: 5862597 - DNA, 25 bp, Homo sapien
agacgggtaatcgcgtatctttgcc

SEQ ID NO: 5862598 - DNA, 25 bp, Homo sapien
cgaagcatcggaacgcgtagtttac

SEQ ID NO: 5862599 - DNA, 25 bp, Homo sapien
gcaaagctagggcgtactatccctt

SEQ ID NO: 5862600 - DNA, 25 bp, Homo sapien
ctggttactatcgcacgacgttacg

SEQ ID NO: 5862601 - DNA, 25 bp, Homo sapien
ttcgagataacgtcggacgatgacg

SEQ ID NO: 5862602 - DNA, 25 bp, Homo sapien
ttgctacgaccgttcatacgtgagc

SEQ ID NO: 5862603 - DNA, 25 bp, Homo sapien
gccggttcgcgtaacgaacaaaaca

SEQ ID NO: 5862604 - DNA, 25 bp, Homo sapien
aatatgatgacgcgcctcttcgctg

SEQ ID NO: 5862605 - DNA, 25 bp, Homo sapien
tatgtgctcgcgaacgttagtgggt

SEQ ID NO: 5862606 - DNA, 25 bp, Homo sapien
gtggggtagtacgatcggttagtac

SEQ ID NO: 5862607 - DNA, 25 bp, Homo sapien
cagtgtggtataacgtccgctgttg

SEQ ID NO: 5862608 - DNA, 25 bp, Homo sapien
aaagggcgtagcgtatcgaacgcat

SEQ ID NO: 5862609 - DNA, 25 bp, Homo sapien
ttagcccgtattcgcggacgactta

SEQ ID NO: 5862610 - DNA, 25 bp, Homo sapien
tttgaacgatcggtcgtaccgcatc

SEQ ID NO: 5862611 - DNA, 25 bp, Homo sapien
ccaagtcgcgtaatggttgtaggtc

SEQ ID NO: 5862612 - DNA, 25 bp, Homo sapien
atccgacgcgaatcgtcttgaacgt

SEQ ID NO: 5862613 - DNA, 25 bp, Homo sapien
gcgctaactgcgcggattaactgaa

SEQ ID NO: 5862614 - DNA, 25 bp, Homo sapien
agatgtagtaacgttcgcgctcgtc

SEQ ID NO: 5862615 - DNA, 25 bp, Homo sapien
atgctctccggacgttagaggaagt

SEQ ID NO: 5862616 - DNA, 25 bp, Homo sapien
gaaatgacgtccgctagctttagcc

SEQ ID NO: 5862617 - DNA, 25 bp, Homo sapien
tggttctagaccgcgcgataaacgt

SEQ ID NO: 5862618 - DNA, 25 bp, Homo sapien
tagtgttagaacgacgcgagtctgg

SEQ ID NO: 5862619 - DNA, 25 bp, Homo sapien
ggtattatcgacccgttgaccatgc

SEQ ID NO: 5862620 - DNA, 25 bp, Homo sapien
tcgggtcgagacggtagtaaatgct

SEQ ID NO: 5862621 - DNA, 25 bp, Homo sapien
cgtctttacgaggtcgatcgttcag

SEQ ID NO: 5862622 - DNA, 25 bp, Homo sapien
taacaaagcgtatcggtacacgcgc

SEQ ID NO: 5862623 - DNA, 25 bp, Homo sapien
gaatgtgtaccgcgcttaacctctc

SEQ ID NO: 5862624 - DNA, 25 bp, Homo sapien
ctacgttaggccgactacgtcgata

SEQ ID NO: 5862625 - DNA, 25 bp, Homo sapien
aggaaaacgcgtgccgatactgttg

SEQ ID NO: 5862626 - DNA, 25 bp, Homo sapien
aacgatcgtaagcggatcggacgta

SEQ ID NO: 5862627 - DNA, 25 bp, Homo sapien
tttcaagtcggacgcaatacctgcc

SEQ ID NO: 5862628 - DNA, 25 bp, Homo sapien
agttagcgtagcgaatccggggaaa

SEQ ID NO: 5862629 - DNA, 25 bp, Homo sapien
aaactacggcgtatatgacccggac

SEQ ID NO: 5862630 - DNA, 25 bp, Homo sapien
agttcgcggcttaatacgaccagtg

SEQ ID NO: 5862631 - DNA, 25 bp, Homo sapien
cttgatatatatcgcggtccagcgg

SEQ ID NO: 5862632 - DNA, 25 bp, Homo sapien
tgtttaacgttcgctccgactaccg

SEQ ID NO: 5862633 - DNA, 25 bp, Homo sapien
gttaagcggaccgatcgtatccatg

SEQ ID NO: 5862634 - DNA, 25 bp, Homo sapien
ctccaacgttattcggcgagaaggt

SEQ ID NO: 5862635 - DNA, 25 bp, Homo sapien
cttagtgcgacggacttaagtcggt

SEQ ID NO: 5862636 - DNA, 25 bp, Homo sapien
cataaacattacgcgggagacccct

SEQ ID NO: 5862637 - DNA, 25 bp, Homo sapien
cttcagctcgatacgcggtggaaaa

SEQ ID NO: 5862638 - DNA, 25 bp, Homo sapien
tggtctcgatcccgacgtaaacgta

SEQ ID NO: 5862639 - DNA, 25 bp, Homo sapien
cttgaccctagcgacgatcatgaga

SEQ ID NO: 5862640 - DNA, 25 bp, Homo sapien
tttgcatcgcgaacgacgtcctatc

SEQ ID NO: 5862641 - DNA, 25 bp, Homo sapien
gtagacctactatcgtgcgtcaacg

SEQ ID NO: 5862642 - DNA, 25 bp, Homo sapien
cacacaactcgcgcgctaagttaac

SEQ ID NO: 5862643 - DNA, 25 bp, Homo sapien
gatcctacgtcgtgcgatcaatgag

SEQ ID NO: 5862644 - DNA, 25 bp, Homo sapien
gaggtagtacgatagggcgatgtca

SEQ ID NO: 5862645 - DNA, 25 bp, Homo sapien
ctctaatacccttagcgcgcgagat

SEQ ID NO: 5862646 - DNA, 25 bp, Homo sapien
tcgaaatgaacgcgcacgatctgca

SEQ ID NO: 5862647 - DNA, 25 bp, Homo sapien
aggaaaatcgcgggccgaatgatct

SEQ ID NO: 5862648 - DNA, 25 bp, Homo sapien
caaaaggtaagcgcgacgagatcag

SEQ ID NO: 5862649 - DNA, 25 bp, Homo sapien
ggcacaatctgtcgtcgcgaaatag

SEQ ID NO: 5862650 - DNA, 25 bp, Homo sapien
cacaaatacggcgtagtagctcctg

SEQ ID NO: 5862651 - DNA, 25 bp, Homo sapien
agtctgattcgcggtcctaaatccg

SEQ ID NO: 5862652 - DNA, 25 bp, Homo sapien
atcgggagtatcctcgcgaatgaca

SEQ ID NO: 5862653 - DNA, 25 bp, Homo sapien
tacacggatatctcgcgacgactag

SEQ ID NO: 5862654 - DNA, 25 bp, Homo sapien
tccagcagtcgttacgccgtaattc

SEQ ID NO: 5862655 - DNA, 25 bp, Homo sapien
aatccgttatcgcaagcggcaggat

SEQ ID NO: 5862656 - DNA, 25 bp, Homo sapien
aggtcgtcgcgagcctagtttttct

SEQ ID NO: 5862657 - DNA, 25 bp, Homo sapien
tacaatccccgcgtattaccaaggc

SEQ ID NO: 5862658 - DNA, 25 bp, Homo sapien
tcactagcgaggccgattacacaag

SEQ ID NO: 5862659 - DNA, 25 bp, Homo sapien
cttgagtaacgaccgaacgtaggac

SEQ ID NO: 5862660 - DNA, 25 bp, Homo sapien
taaagtcgtcggacctatgtacccc

SEQ ID NO: 5862661 - DNA, 25 bp, Homo sapien
taggacacgcccgataacttcagtc

SEQ ID NO: 5862662 - DNA, 25 bp, Homo sapien
gactaacgacgcggactatgtttcc

SEQ ID NO: 5862663 - DNA, 25 bp, Homo sapien
acactgctcagtcgcgtaggtctta

SEQ ID NO: 5862664 - DNA, 25 bp, Homo sapien
ttctttcgtcgcgtactgagagagg

SEQ ID NO: 5862665 - DNA, 25 bp, Homo sapien
acattcacgtgtccggacgtagtac

SEQ ID NO: 5862666 - DNA, 25 bp, Homo sapien
aaagctctatacgcgagtcacccga

SEQ ID NO: 5862667 - DNA, 25 bp, Homo sapien
gaaatgaggtcgacccgtacgcttt

SEQ ID NO: 5862668 - DNA, 25 bp, Homo sapien
gttggatgcgcgccgttattaacag

SEQ ID NO: 5862669 - DNA, 25 bp, Homo sapien
tagtcaacgtatgccgcgtgggaat

SEQ ID NO: 5862670 - DNA, 25 bp, Homo sapien
ccgtgagccgtacgacgaagacatt

SEQ ID NO: 5862671 - DNA, 25 bp, Homo sapien
cccaagacgttacgatcggtccaga

SEQ ID NO: 5862672 - DNA, 25 bp, Homo sapien
ctagccgtctcgcgtacgcgttaat

SEQ ID NO: 5862673 - DNA, 25 bp, Homo sapien
ggttcgtacggtcgattggttgtcc

SEQ ID NO: 5862674 - DNA, 25 bp, Homo sapien
aagacgtcggatagtagcgcaccag

SEQ ID NO: 5862675 - DNA, 25 bp, Homo sapien
tctcgcgtcgcggatatactcttcg

SEQ ID NO: 5862676 - DNA, 25 bp, Homo sapien
gtgctggacgcgcaactaactagag

SEQ ID NO: 5862677 - DNA, 25 bp, Homo sapien
tttgacaagcgcgcgtatcgtcagc

SEQ ID NO: 5862678 - DNA, 25 bp, Homo sapien
ccacctgcgtactagacgatgaggt

SEQ ID NO: 5862679 - DNA, 25 bp, Homo sapien
gcgaaatgatcggtagtcgtgccag

SEQ ID NO: 5862680 - DNA, 25 bp, Homo sapien
ctccgatacgctagcgcgttgttag

SEQ ID NO: 5862681 - DNA, 25 bp, Homo sapien
actaccggcgtacgatacgtcacag

SEQ ID NO: 5862682 - DNA, 25 bp, Homo sapien
cagccttagtacgaaccgcggacta

SEQ ID NO: 5862683 - DNA, 25 bp, Homo sapien
tgtctcgacgcccgatgtactgaga

SEQ ID NO: 5862684 - DNA, 25 bp, Homo sapien
gcaacacgcgttagtacgcactcac

SEQ ID NO: 5862685 - DNA, 25 bp, Homo sapien
tcggccgatacgtctttcgcgtgat

SEQ ID NO: 5862686 - DNA, 25 bp, Homo sapien
aaggtattgaccggggtcggatgac

SEQ ID NO: 5862687 - DNA, 25 bp, Homo sapien
gagttggttgcgcgctaacgagtgt

SEQ ID NO: 5862688 - DNA, 25 bp, Homo sapien
tggtactaccgtacgctagcaggtc

SEQ ID NO: 5862689 - DNA, 25 bp, Homo sapien
agggagtaccgcgattaacacctcc

SEQ ID NO: 5862690 - DNA, 25 bp, Homo sapien
gtgtgacgggtaacgatacacgcgt

SEQ ID NO: 5862691 - DNA, 25 bp, Homo sapien
aagtgagtacgcgttagcgcggaac

SEQ ID NO: 5862692 - DNA, 25 bp, Homo sapien
aggtcctacgcgcgttaggcgatta

SEQ ID NO: 5862693 - DNA, 25 bp, Homo sapien
aaaagcatcggttgcgccctagacc

SEQ ID NO: 5862694 - DNA, 25 bp, Homo sapien
caggctatcggcctaacgcttcgat

SEQ ID NO: 5862695 - DNA, 25 bp, Homo sapien
gaacgctgcgtcgaccgtagaatgt

SEQ ID NO: 5862696 - DNA, 25 bp, Homo sapien
ggtgatcgcgaagttgtacgtaccc

SEQ ID NO: 5862697 - DNA, 25 bp, Homo sapien
tatccgcgtcgatagatggaccagg

SEQ ID NO: 5862698 - DNA, 25 bp, Homo sapien
tcatcaacgagggatcgcggagaag

SEQ ID NO: 5862699 - DNA, 25 bp, Homo sapien
tccagcgtcgtgccgaataactgag

SEQ ID NO: 5862700 - DNA, 25 bp, Homo sapien
aagctttgacggtacgcgtgggaag

SEQ ID NO: 5862701 - DNA, 25 bp, Homo sapien
cttaaacgcccggatacgtcgatgc

SEQ ID NO: 5862702 - DNA, 25 bp, Homo sapien
gggattgcgggtacgtatctagtgg

SEQ ID NO: 5862703 - DNA, 25 bp, Homo sapien
aggaaacgactactcgcgtgctagg

SEQ ID NO: 5862704 - DNA, 25 bp, Homo sapien
atcgtaactgcggtacgacccctca

SEQ ID NO: 5862705 - DNA, 25 bp, Homo sapien
cgtcaacatcgtacgagcgacttcc

SEQ ID NO: 5862706 - DNA, 25 bp, Homo sapien
ggagctactttcgacccgtactctg

SEQ ID NO: 5862707 - DNA, 25 bp, Homo sapien
tgtatccgtcatacgcgggcgaaag

SEQ ID NO: 5862708 - DNA, 25 bp, Homo sapien
gcacaggacgtattagcgctgaacg

SEQ ID NO: 5862709 - DNA, 25 bp, Homo sapien
ctcgttttaatcgcccgcgtactgc

SEQ ID NO: 5862710 - DNA, 25 bp, Homo sapien
tcaagacgcttgatcgacggcggta

SEQ ID NO: 5862711 - DNA, 25 bp, Homo sapien
gaagtcgcgacggttcgtcaaacca

SEQ ID NO: 5862712 - DNA, 25 bp, Homo sapien
cgtcaaggctcgcgtacattcgcta

SEQ ID NO: 5862713 - DNA, 25 bp, Homo sapien
ttggtaaccgttcgcgctaacctcg

SEQ ID NO: 5862714 - DNA, 25 bp, Homo sapien
tgaacccgcgtacgtagagatccga

SEQ ID NO: 5862715 - DNA, 25 bp, Homo sapien
gaatcaatcgcgaccgtctagggag

SEQ ID NO: 5862716 - DNA, 25 bp, Homo sapien
tacggatcatacggcccgaggtgat

SEQ ID NO: 5862717 - DNA, 25 bp, Homo sapien
gcgtcatcggttcgtacgcttagac

SEQ ID NO: 5862718 - DNA, 25 bp, Homo sapien
acagtggcgatacgactactggtgc

SEQ ID NO: 5862719 - DNA, 25 bp, Homo sapien
acatcgccggacgtcatacctggat

SEQ ID NO: 5862720 - DNA, 25 bp, Homo sapien
aatcgtcgaaacgtacgctgacggg

SEQ ID NO: 5862721 - DNA, 25 bp, Homo sapien
atataccgcgtacggctattccccc

SEQ ID NO: 5862722 - DNA, 25 bp, Homo sapien
ctagtcgcgtagtttagcgcccttg

SEQ ID NO: 5862723 - DNA, 25 bp, Homo sapien
aggtagtcgctacgccagaaccaag

SEQ ID NO: 5862724 - DNA, 25 bp, Homo sapien
tacggggctagatcgtcgcatatgc

SEQ ID NO: 5862725 - DNA, 25 bp, Homo sapien
aaagcgaccttaatccgcgcaaccg

SEQ ID NO: 5862726 - DNA, 25 bp, Homo sapien
cttggatctacggtcgacgactacc

SEQ ID NO: 5862727 - DNA, 25 bp, Homo sapien
caagtgacgggttatcgcgtgctga

SEQ ID NO: 5862728 - DNA, 25 bp, Homo sapien
gaaacgttataccgcgcctcagacg

SEQ ID NO: 5862729 - DNA, 25 bp, Homo sapien
cctgtcttagcgctaggcgacctat

SEQ ID NO: 5862730 - DNA, 25 bp, Homo sapien
gccttatacgaccgcctaacagtcg

SEQ ID NO: 5862731 - DNA, 25 bp, Homo sapien
ggggcagcggtacgcactactttta

SEQ ID NO: 5862732 - DNA, 25 bp, Homo sapien
actaacgtgttcgcgacgtccgact

SEQ ID NO: 5862733 - DNA, 25 bp, Homo sapien
tggctacgcgagcgtaagagatgac

SEQ ID NO: 5862734 - DNA, 25 bp, Homo sapien
ccaagggtacgctagccgtttgatg

SEQ ID NO: 5862735 - DNA, 25 bp, Homo sapien
gttacatcgtagtgcgcgtgcgctt

SEQ ID NO: 5862736 - DNA, 25 bp, Homo sapien
tcacgataggatcgtaccgacgcag

SEQ ID NO: 5862737 - DNA, 25 bp, Homo sapien
cgtcatcgcgaaccgttgtaaacgg

SEQ ID NO: 5862738 - DNA, 25 bp, Homo sapien
cgacaattacggcggtacgacagga

SEQ ID NO: 5862739 - DNA, 25 bp, Homo sapien
ttcgcccgctaactcgtaccaacac

SEQ ID NO: 5862740 - DNA, 25 bp, Homo sapien
gtggtctcgcgctagaatcgatacc

SEQ ID NO: 5862741 - DNA, 25 bp, Homo sapien
gatgacatcgcggcatactctcacc

SEQ ID NO: 5862742 - DNA, 25 bp, Homo sapien
ctacgatagcgcgaaacgtatgccg

SEQ ID NO: 5862743 - DNA, 25 bp, Homo sapien
tcattggtcggatcgtccctctagg

SEQ ID NO: 5862744 - DNA, 25 bp, Homo sapien
gcctgccgcgtcaatagttgtgtct

SEQ ID NO: 5862745 - DNA, 25 bp, Homo sapien
aagtgacccttctacgcgaatcccc

SEQ ID NO: 5862746 - DNA, 25 bp, Homo sapien
acagatccgatacgcggtgtgtacg

SEQ ID NO: 5862747 - DNA, 25 bp, Homo sapien
ttcggctgttttcgcgcgagaacac

SEQ ID NO: 5862748 - DNA, 25 bp, Homo sapien
cggattcggactctatcgccagagt

SEQ ID NO: 5862749 - DNA, 25 bp, Homo sapien
agtacgcgtgtcgtaaccgatctgc

SEQ ID NO: 5862750 - DNA, 25 bp, Homo sapien
taagcgctagtcgcgtcgacaatcc

SEQ ID NO: 5862751 - DNA, 25 bp, Homo sapien
tccgaagccggatacgcgatctgtt

SEQ ID NO: 5862752 - DNA, 25 bp, Homo sapien
ggtggctgcgcgactaacatacaga

SEQ ID NO: 5862753 - DNA, 25 bp, Homo sapien
gactgtgcgcttaagaccgaacctg

SEQ ID NO: 5862754 - DNA, 25 bp, Homo sapien
gagtattacgggtcgacgctgctac

SEQ ID NO: 5862755 - DNA, 25 bp, Homo sapien
cttctgacccgcgcttagtccatag

SEQ ID NO: 5862756 - DNA, 25 bp, Homo sapien
cgtgaacgtcctcgtatagtggtgc

SEQ ID NO: 5862757 - DNA, 25 bp, Homo sapien
atccgacggcgcattacgtatgcac

SEQ ID NO: 5862758 - DNA, 25 bp, Homo sapien
aagtgatcggcgcactagagtacgg

SEQ ID NO: 5862759 - DNA, 25 bp, Homo sapien
ggttcccggacgtatagccaatctc

SEQ ID NO: 5862760 - DNA, 25 bp, Homo sapien
ttgccccgtcccgacgaataacaga

SEQ ID NO: 5862761 - DNA, 25 bp, Homo sapien
agaccgctatcgtctagcgtttgcg

SEQ ID NO: 5862762 - DNA, 25 bp, Homo sapien
agggctctacgctcgctaacgtaga

SEQ ID NO: 5862763 - DNA, 25 bp, Homo sapien
catgccacgttacgaacggtagggt

SEQ ID NO: 5862764 - DNA, 25 bp, Homo sapien
agtacaatgtcgtagcgcgaccgac

SEQ ID NO: 5862765 - DNA, 25 bp, Homo sapien
atttcaagcgtacgcgtggcggaca

SEQ ID NO: 5862766 - DNA, 25 bp, Homo sapien
ctactctacggcgcgatatggtcga

SEQ ID NO: 5862767 - DNA, 25 bp, Homo sapien
tccgcgacacgacgcgtaaagaaag

SEQ ID NO: 5862768 - DNA, 25 bp, Homo sapien
actaagagcgaccgtacgactacgg

SEQ ID NO: 5862769 - DNA, 25 bp, Homo sapien
ctgcccttcgcgcggtggtatatat

SEQ ID NO: 5862770 - DNA, 25 bp, Homo sapien
gcaacacgcgacgtagatagtcgag

SEQ ID NO: 5862771 - DNA, 25 bp, Homo sapien
agcatcagcgtacgactaagggcgt

SEQ ID NO: 5862772 - DNA, 25 bp, Homo sapien
actccaataatatgccgcgtgggcg

SEQ ID NO: 5862773 - DNA, 25 bp, Homo sapien
gacagcatagatgcgcgatgggttg

SEQ ID NO: 5862774 - DNA, 25 bp, Homo sapien
ctcaattacgtcggtagcggcctgt

SEQ ID NO: 5862775 - DNA, 25 bp, Homo sapien
gaggaagaccgccgtatagcctcat

SEQ ID NO: 5862776 - DNA, 25 bp, Homo sapien
tagtgtcgactagcgtccaccatcc

SEQ ID NO: 5862777 - DNA, 25 bp, Homo sapien
tcggacactagcgcgtagggaaatg

SEQ ID NO: 5862778 - DNA, 25 bp, Homo sapien
atcgtcttcgcgactagtccccttc

SEQ ID NO: 5862779 - DNA, 25 bp, Homo sapien
aagcagccgagtatagtcggaccac

SEQ ID NO: 5862780 - DNA, 25 bp, Homo sapien
gctcaagccgatatacggtcgtctg

SEQ ID NO: 5862781 - DNA, 25 bp, Homo sapien
atcgtagcgcccgtattaccgcttg

SEQ ID NO: 5862782 - DNA, 25 bp, Homo sapien
taaccggacgtaccgtctatgctgg

SEQ ID NO: 5862783 - DNA, 25 bp, Homo sapien
gattcagccgcgaacgtagggtcaa

SEQ ID NO: 5862784 - DNA, 25 bp, Homo sapien
tacctagttatcccgcgacgagtcg

SEQ ID NO: 5862785 - DNA, 25 bp, Homo sapien
atacgaatgacgcgcggtcgctatg

SEQ ID NO: 5862786 - DNA, 25 bp, Homo sapien
agtgcttgcgacggatagttgcgag

SEQ ID NO: 5862787 - DNA, 25 bp, Homo sapien
gcttcgcgacataggcgacgtactt

SEQ ID NO: 5862788 - DNA, 25 bp, Homo sapien
cacgaactcccgacggatagacgtt

SEQ ID NO: 5862789 - DNA, 25 bp, Homo sapien
acgtcgctagccgttacgcatgtgt

SEQ ID NO: 5862790 - DNA, 25 bp, Homo sapien
gtaacgtataaccggcgcgatgacc

SEQ ID NO: 5862791 - DNA, 25 bp, Homo sapien
agacgcgtcgcgtagtgcgattaac

SEQ ID NO: 5862792 - DNA, 25 bp, Homo sapien
aagcgaatagggtcgtacgacaggc

SEQ ID NO: 5862793 - DNA, 25 bp, Homo sapien
cagagctacgcgcgaaacctaacga

SEQ ID NO: 5862794 - DNA, 25 bp, Homo sapien
aatcactacgtacgcggcctagcgt

SEQ ID NO: 5862795 - DNA, 25 bp, Homo sapien
gtactgtctagccgcgcatagggtt

SEQ ID NO: 5862796 - DNA, 25 bp, Homo sapien
cgtcatcgccgtatagtcgggcaaa

SEQ ID NO: 5862797 - DNA, 25 bp, Homo sapien
acccagattcgcgcgtaacaactcc

SEQ ID NO: 5862798 - DNA, 25 bp, Homo sapien
ttaattccgttaacgcgaggcgccc

SEQ ID NO: 5862799 - DNA, 25 bp, Homo sapien
acccactcgcgttaacggacgagta

SEQ ID NO: 5862800 - DNA, 25 bp, Homo sapien
atcggatgaccgcgatctaaaccgc

SEQ ID NO: 5862801 - DNA, 25 bp, Homo sapien
tggtcccggaccgttacgatatacg

SEQ ID NO: 5862802 - DNA, 25 bp, Homo sapien
gatgggcgtactacctcgcgaacat

SEQ ID NO: 5862803 - DNA, 25 bp, Homo sapien
gctctcatagcgaccgaagcctgat

SEQ ID NO: 5862804 - DNA, 25 bp, Homo sapien
tcctgtcaacgcgtacgggaatgct

SEQ ID NO: 5862805 - DNA, 25 bp, Homo sapien
gcctttgccgacgcgaaatgatcgt

SEQ ID NO: 5862806 - DNA, 25 bp, Homo sapien
cttcatcgaccggcggtaaagacag

SEQ ID NO: 5862807 - DNA, 25 bp, Homo sapien
gctacgagcgcgattgagtgtttgc

SEQ ID NO: 5862808 - DNA, 25 bp, Homo sapien
gatatgacgtaggtcgctagcagcg

SEQ ID NO: 5862809 - DNA, 25 bp, Homo sapien
gcgtagcaatcgacggactcgcaat

SEQ ID NO: 5862810 - DNA, 25 bp, Homo sapien
cacttttcgcgctaagtcgcgtgct

SEQ ID NO: 5862811 - DNA, 25 bp, Homo sapien
gccagccgcgagtacgtaatcaaac

SEQ ID NO: 5862812 - DNA, 25 bp, Homo sapien
tgaggttaccgtatcgtactggcgc

SEQ ID NO: 5862813 - DNA, 25 bp, Homo sapien
tcaatagacgcccgccaattgccgt

SEQ ID NO: 5862814 - DNA, 25 bp, Homo sapien
tccgttaggtcgcgtatagtcgtgc

SEQ ID NO: 5862815 - DNA, 25 bp, Homo sapien
atctgatcgtgctcgcgaactcgct

SEQ ID NO: 5862816 - DNA, 25 bp, Homo sapien
aagtctcgacgcacgatagagcctc

SEQ ID NO: 5862817 - DNA, 25 bp, Homo sapien
tactgctgtaaccgcgacccgtgta

SEQ ID NO: 5862818 - DNA, 25 bp, Homo sapien
tgtctggtagcggtacgctgctaca

SEQ ID NO: 5862819 - DNA, 25 bp, Homo sapien
ccagaaatcgggttggtcgaagcac

SEQ ID NO: 5862820 - DNA, 25 bp, Homo sapien
acaggtagcgtacggtacgtcgtct

SEQ ID NO: 5862821 - DNA, 25 bp, Homo sapien
gactctacctatcgacgcgtcgttc

SEQ ID NO: 5862822 - DNA, 25 bp, Homo sapien
ccctctgtacgccgataacaagcgt

SEQ ID NO: 5862823 - DNA, 25 bp, Homo sapien
tttcttgcgggtccgactaggggta

SEQ ID NO: 5862824 - DNA, 25 bp, Homo sapien
tccgaaatactcgaccgcgtccgaa

SEQ ID NO: 5862825 - DNA, 25 bp, Homo sapien
aatcggactactcgcgccatcgttg

SEQ ID NO: 5862826 - DNA, 25 bp, Homo sapien
cggcggcccgtaacgctaataagat

SEQ ID NO: 5862827 - DNA, 25 bp, Homo sapien
tgactcttgaccgaacgcgtaccca

SEQ ID NO: 5862828 - DNA, 25 bp, Homo sapien
taggacggcgcgctatacgttgcaa

SEQ ID NO: 5862829 - DNA, 25 bp, Homo sapien
cgcaaacgctacgtgcggtatccaa

SEQ ID NO: 5862830 - DNA, 25 bp, Homo sapien
cattcgctagcggtatccgctgtca

SEQ ID NO: 5862831 - DNA, 25 bp, Homo sapien
agcggtcgtatcataacggcccttc

SEQ ID NO: 5862832 - DNA, 25 bp, Homo sapien
gagatgatctaacgcgcgagacacc

SEQ ID NO: 5862833 - DNA, 25 bp, Homo sapien
agcggtgttaggcgcgatatgcaag

SEQ ID NO: 5862834 - DNA, 25 bp, Homo sapien
gagaatcgctacgctaacgtgccac

SEQ ID NO: 5862835 - DNA, 25 bp, Homo sapien
atcgcgtgatacgcgcgtttcctag

SEQ ID NO: 5862836 - DNA, 25 bp, Homo sapien
tagatcatttagtcgcgccccgagc

SEQ ID NO: 5862837 - DNA, 25 bp, Homo sapien
taccgtcgcgatctaatgcgtgtcg

SEQ ID NO: 5862838 - DNA, 25 bp, Homo sapien
tgttccacttatagcggcggcttcg

SEQ ID NO: 5862839 - DNA, 25 bp, Homo sapien
cgatcctgcccggtatacgtgtttc

SEQ ID NO: 5862840 - DNA, 25 bp, Homo sapien
tctgttcggaccgttagcacagagc

SEQ ID NO: 5862841 - DNA, 25 bp, Homo sapien
ggcgatgttacgcgtgacggcaata

SEQ ID NO: 5862842 - DNA, 25 bp, Homo sapien
ggttacctagcgcgactagtggtgt

SEQ ID NO: 5862843 - DNA, 25 bp, Homo sapien
ataccccgatgtaacgggcagaacc

SEQ ID NO: 5862844 - DNA, 25 bp, Homo sapien
atactcacgttacgtcgcggtgcac

SEQ ID NO: 5862845 - DNA, 25 bp, Homo sapien
ctgtactgatcgcgtccgacattcc

SEQ ID NO: 5862846 - DNA, 25 bp, Homo sapien
gcttatataacgcgaccgatggccc

SEQ ID NO: 5862847 - DNA, 25 bp, Homo sapien
ttccgtcgcggtacgaatgaatgcc

SEQ ID NO: 5862848 - DNA, 25 bp, Homo sapien
ttggcgcttgcgcgaactacgttga

SEQ ID NO: 5862849 - DNA, 25 bp, Homo sapien
ttgggttacgcgtcgtccaactcca

SEQ ID NO: 5862850 - DNA, 25 bp, Homo sapien
agagacgtcgtccgacgtatggatg

SEQ ID NO: 5862851 - DNA, 25 bp, Homo sapien
gtagtttcgcgcgacttaactcggc

SEQ ID NO: 5862852 - DNA, 25 bp, Homo sapien
aaggactaatccggacgtcgaagcg

SEQ ID NO: 5862853 - DNA, 25 bp, Homo sapien
aggcgtgtacgatcagacgtttcgg

SEQ ID NO: 5862854 - DNA, 25 bp, Homo sapien
aaagcgccgcgaaccatagacgaac

SEQ ID NO: 5862855 - DNA, 25 bp, Homo sapien
agtgggcgtgcgtacgttacctgtt

SEQ ID NO: 5862856 - DNA, 25 bp, Homo sapien
tgatttcgcgtaccgctatcgtggg

SEQ ID NO: 5862857 - DNA, 25 bp, Homo sapien
tctatgttcgtcgacccgtgtcgac

SEQ ID NO: 5862858 - DNA, 25 bp, Homo sapien
tcgaagacgaccgacgtatcgtgag

SEQ ID NO: 5862859 - DNA, 25 bp, Homo sapien
atcccgtgatcgaacacgcagctca

SEQ ID NO: 5862860 - DNA, 25 bp, Homo sapien
gaagccacgaattaggcgcaaggtg

SEQ ID NO: 5862861 - DNA, 25 bp, Homo sapien
acgctttcgcgtcctatatgggtcc

SEQ ID NO: 5862862 - DNA, 25 bp, Homo sapien
agcccgtcgtcgatgcgtaggatta

SEQ ID NO: 5862863 - DNA, 25 bp, Homo sapien
atggaacgcgcaaccgtatgcagca

SEQ ID NO: 5862864 - DNA, 25 bp, Homo sapien
aggtagtgcgctactagcggatgag

SEQ ID NO: 5862865 - DNA, 25 bp, Homo sapien
ctatgtcggatacgcacggtcacga

SEQ ID NO: 5862866 - DNA, 25 bp, Homo sapien
gaaatgggcgtataccggagtgcac

SEQ ID NO: 5862867 - DNA, 25 bp, Homo sapien
aacgcgccggcgtatgatagtgtca

SEQ ID NO: 5862868 - DNA, 25 bp, Homo sapien
aggtatatgcgatacgtcgccaggc

SEQ ID NO: 5862869 - DNA, 25 bp, Homo sapien
attggttcgcgtacaagcgaccgag

SEQ ID NO: 5862870 - DNA, 25 bp, Homo sapien
gaagtatccgacgcgtatcggtagc

SEQ ID NO: 5862871 - DNA, 25 bp, Homo sapien
gttcctcgttcggtcaagctacgtg

SEQ ID NO: 5862872 - DNA, 25 bp, Homo sapien
cacgacctacctatcgtcgcgtttg

SEQ ID NO: 5862873 - DNA, 25 bp, Homo sapien
gctcgtatcgtacgcggtcttgtag

SEQ ID NO: 5862874 - DNA, 25 bp, Homo sapien
ttccctgcgacgtaggacaggcttt

SEQ ID NO: 5862875 - DNA, 25 bp, Homo sapien
gaaccgatgtacctcgcggaattcg

SEQ ID NO: 5862876 - DNA, 25 bp, Homo sapien
gacgtcttactcgcgggaaactgca

SEQ ID NO: 5862877 - DNA, 25 bp, Homo sapien
tacctacggtcgcacgatttaccgg

SEQ ID NO: 5862878 - DNA, 25 bp, Homo sapien
cgagcacatacgaccgtcgtttgac

SEQ ID NO: 5862879 - DNA, 25 bp, Homo sapien
atgcgtacgcccgataacttgggca

SEQ ID NO: 5862880 - DNA, 25 bp, Homo sapien
gtataaagcgtacgcgcgatgctcc

SEQ ID NO: 5862881 - DNA, 25 bp, Homo sapien
ctccttaacacgcggtcgtggaaac

SEQ ID NO: 5862882 - DNA, 25 bp, Homo sapien
acttgctacggcgcacgttgtgaag

SEQ ID NO: 5862883 - DNA, 25 bp, Homo sapien
attctgtaccgctagtccgagctgg

SEQ ID NO: 5862884 - DNA, 25 bp, Homo sapien
agggggtctatctcgtacgacggaa

SEQ ID NO: 5862885 - DNA, 25 bp, Homo sapien
ctgtggcgcgacgtaacctaagact

SEQ ID NO: 5862886 - DNA, 25 bp, Homo sapien
gcatagcggtccgtaaaaccgcagt

SEQ ID NO: 5862887 - DNA, 25 bp, Homo sapien
acggtaatagggcgccgatctgaag

SEQ ID NO: 5862888 - DNA, 25 bp, Homo sapien
tgcgatttataccggcgcgcactca

SEQ ID NO: 5862889 - DNA, 25 bp, Homo sapien
cgatcttagctcgcgtaacccagct

SEQ ID NO: 5862890 - DNA, 25 bp, Homo sapien
ctctggaatatcgtgcgcgaccagt

SEQ ID NO: 5862891 - DNA, 25 bp, Homo sapien
gtgacatcataccgacgcgacccaa

SEQ ID NO: 5862892 - DNA, 25 bp, Homo sapien
ctctttagggacgtcgctagttcgc

SEQ ID NO: 5862893 - DNA, 25 bp, Homo sapien
caggcttcgcggaccgtcatattag

SEQ ID NO: 5862894 - DNA, 25 bp, Homo sapien
cctgtgatgggtatcgcgagtcgta

SEQ ID NO: 5862895 - DNA, 25 bp, Homo sapien
gctaactagcgtattcgcgcgttgg

SEQ ID NO: 5862896 - DNA, 25 bp, Homo sapien
cgacttcgacgcctagatttcggga

SEQ ID NO: 5862897 - DNA, 25 bp, Homo sapien
agaatacacgcgaagggtcgcagct

SEQ ID NO: 5862898 - DNA, 25 bp, Homo sapien
gccgaacgtaccaatcgggacatct

SEQ ID NO: 5862899 - DNA, 25 bp, Homo sapien
ggaaacgtcgaacgacgtggcactt

SEQ ID NO: 5862900 - DNA, 25 bp, Homo sapien
acgcaaattaggtgccgcgtcgtca

SEQ ID NO: 5862901 - DNA, 25 bp, Homo sapien
tgtgccagtacgttacgcgtgttcc

SEQ ID NO: 5862902 - DNA, 25 bp, Homo sapien
tccagcgtccgccggttaaacagta

SEQ ID NO: 5862903 - DNA, 25 bp, Homo sapien
cttatgctagcgataccggtcgggt

SEQ ID NO: 5862904 - DNA, 25 bp, Homo sapien
acgaggactaacgaggcgcattagg

SEQ ID NO: 5862905 - DNA, 25 bp, Homo sapien
cgatggagtgccggtcgatatgtag

SEQ ID NO: 5862906 - DNA, 25 bp, Homo sapien
caatacatacgctcgacgctgtggg

SEQ ID NO: 5862907 - DNA, 25 bp, Homo sapien
acgtgccgcgctgatctaacctagt

SEQ ID NO: 5862908 - DNA, 25 bp, Homo sapien
actgatcgtaacgctcggagtcgtc

SEQ ID NO: 5862909 - DNA, 25 bp, Homo sapien
tccacaaacgtcggtacggagaggt

SEQ ID NO: 5862910 - DNA, 25 bp, Homo sapien
tctgggatatcgttactcggcgagg

SEQ ID NO: 5862911 - DNA, 25 bp, Homo sapien
ggctcacgcggcctactatagtaac

SEQ ID NO: 5862912 - DNA, 25 bp, Homo sapien
actggtgcgccgcatagtagtccta

SEQ ID NO: 5862913 - DNA, 25 bp, Homo sapien
gtcgagcgagcgttcgacaacaatg

SEQ ID NO: 5862914 - DNA, 25 bp, Homo sapien
tgtgtttagcgttcgcgactgagcg

SEQ ID NO: 5862915 - DNA, 25 bp, Homo sapien
ccgacactatcgtatacgccggtct

SEQ ID NO: 5862916 - DNA, 25 bp, Homo sapien
aggcaacgtacgcgggatatctcag

SEQ ID NO: 5862917 - DNA, 25 bp, Homo sapien
gaagttgtacgcttggtcggtccac

SEQ ID NO: 5862918 - DNA, 25 bp, Homo sapien
gctgctcgtacgttccgctatccaa

SEQ ID NO: 5862919 - DNA, 25 bp, Homo sapien
gccacgggtacggatagcgttctta

SEQ ID NO: 5862920 - DNA, 25 bp, Homo sapien
tatcggatacgctcgcgagtagagc

SEQ ID NO: 5862921 - DNA, 25 bp, Homo sapien
gagtgggtaacgtccgaacgtttgc

SEQ ID NO: 5862922 - DNA, 25 bp, Homo sapien
catattgtacgtagaccgccacgcc

SEQ ID NO: 5862923 - DNA, 25 bp, Homo sapien
gtgcaaaacgtccgcttagatcccc

SEQ ID NO: 5862924 - DNA, 25 bp, Homo sapien
ccatagtcggataacgctagggacc

SEQ ID NO: 5862925 - DNA, 25 bp, Homo sapien
gagctacgcgcctatcttatggagg

SEQ ID NO: 5862926 - DNA, 25 bp, Homo sapien
acagagggtaacgcgatgtgtcgtc

SEQ ID NO: 5862927 - DNA, 25 bp, Homo sapien
taagaaataacgggacgcgcagccc

SEQ ID NO: 5862928 - DNA, 25 bp, Homo sapien
gctcatatacgcgcgacgtcgcaaa

SEQ ID NO: 5862929 - DNA, 25 bp, Homo sapien
cgtagacatacccgcgtacggcttt

SEQ ID NO: 5862930 - DNA, 25 bp, Homo sapien
agcctccgcaaagtacgcgtggaaa

SEQ ID NO: 5862931 - DNA, 25 bp, Homo sapien
gcacttaatccgtacggcgggttac

SEQ ID NO: 5862932 - DNA, 25 bp, Homo sapien
caaaaggcacgacgtcgtatgccct

SEQ ID NO: 5862933 - DNA, 25 bp, Homo sapien
agccgtctacgcgggttagtgacaa

SEQ ID NO: 5862934 - DNA, 25 bp, Homo sapien
agcaaattacgcgccgaacacgcga

SEQ ID NO: 5862935 - DNA, 25 bp, Homo sapien
acacgcatagaccgaccgcagatga

SEQ ID NO: 5862936 - DNA, 25 bp, Homo sapien
ccaaagagcgtcgatcggatgcttc

SEQ ID NO: 5862937 - DNA, 25 bp, Homo sapien
cggatgaacgtacgcgcttgcaagt

SEQ ID NO: 5862938 - DNA, 25 bp, Homo sapien
caaggacgcggattagtaccatcgc

SEQ ID NO: 5862939 - DNA, 25 bp, Homo sapien
aatcaactacgcgagtagctgggcc

SEQ ID NO: 5862940 - DNA, 25 bp, Homo sapien
ggacaacggtgcgtaaccctgtgta

SEQ ID NO: 5862941 - DNA, 25 bp, Homo sapien
tgacctgtctcgaacgtagagagcg

SEQ ID NO: 5862942 - DNA, 25 bp, Homo sapien
gacattatacgtcgccaccgatcgc

SEQ ID NO: 5862943 - DNA, 25 bp, Homo sapien
tagtggccgttcgtgcgatcaaagg

SEQ ID NO: 5862944 - DNA, 25 bp, Homo sapien
tataccacctactagcgcggcggat

SEQ ID NO: 5862945 - DNA, 25 bp, Homo sapien
ggagtggtagcgtactacgagaagg

SEQ ID NO: 5862946 - DNA, 25 bp, Homo sapien
acgaatgttcgacgtagcgttccgc

SEQ ID NO: 5862947 - DNA, 25 bp, Homo sapien
tctgttgtaacgcgcggtaacgagc

SEQ ID NO: 5862948 - DNA, 25 bp, Homo sapien
cccggattacgcgctactgtgcttt

SEQ ID NO: 5862949 - DNA, 25 bp, Homo sapien
aacgtgttaacgcgcaccgagttgc

SEQ ID NO: 5862950 - DNA, 25 bp, Homo sapien
tccggccgtactagatcggacatca

SEQ ID NO: 5862951 - DNA, 25 bp, Homo sapien
aacaggcgatatatccgggggacag

SEQ ID NO: 5862952 - DNA, 25 bp, Homo sapien
atcgccctaggtacgccgtaaacca

SEQ ID NO: 5862953 - DNA, 25 bp, Homo sapien
gctgttccgcgtattacgggtggta

SEQ ID NO: 5862954 - DNA, 25 bp, Homo sapien
tgccagctagtcgtatccgtttccg

SEQ ID NO: 5862955 - DNA, 25 bp, Homo sapien
ccagaaggttgtaacgcgcacgtca

SEQ ID NO: 5862956 - DNA, 25 bp, Homo sapien
gcggaaccgtaggaccgatttcaag

SEQ ID NO: 5862957 - DNA, 25 bp, Homo sapien
ctcgagcgtcgcgtatcgtgtattc

SEQ ID NO: 5862958 - DNA, 25 bp, Homo sapien
ggtggtccgttaggcgatcggttaa

SEQ ID NO: 5862959 - DNA, 25 bp, Homo sapien
agccgtatacgcgcgaactggagat

SEQ ID NO: 5862960 - DNA, 25 bp, Homo sapien
ttccgttcgcgcctactatatcccg

SEQ ID NO: 5862961 - DNA, 25 bp, Homo sapien
ggctcacgaccgcgtctaaagaaca

SEQ ID NO: 5862962 - DNA, 25 bp, Homo sapien
gacaacctagtacgcagcgcgactt

SEQ ID NO: 5862963 - DNA, 25 bp, Homo sapien
accagaatcgcgcgtaccacatgag

SEQ ID NO: 5862964 - DNA, 25 bp, Homo sapien
ggaacagtacggccgctttcaacct

SEQ ID NO: 5862965 - DNA, 25 bp, Homo sapien
atcgaacgccgttagtcatcagccc

SEQ ID NO: 5862966 - DNA, 25 bp, Homo sapien
gacaatctgctaaaccgcggcgtac

SEQ ID NO: 5862967 - DNA, 25 bp, Homo sapien
atagcccccctacgtcgtacttgct

SEQ ID NO: 5862968 - DNA, 25 bp, Homo sapien
acggactaacgcgcgaaccctacaa

SEQ ID NO: 5862969 - DNA, 25 bp, Homo sapien
agatcgacggtaacgtacgcacgag

SEQ ID NO: 5862970 - DNA, 25 bp, Homo sapien
gggctccgtcgtataccgaagttgt

SEQ ID NO: 5862971 - DNA, 25 bp, Homo sapien
aggggccgaacgccccatatcaata

SEQ ID NO: 5862972 - DNA, 25 bp, Homo sapien
cgtgcttcgctacgacatcagccat

SEQ ID NO: 5862973 - DNA, 25 bp, Homo sapien
ctcttgagtcgcggtttagctcctc

SEQ ID NO: 5862974 - DNA, 25 bp, Homo sapien
acaaggtcgcgtaaacaggtgtgcg

SEQ ID NO: 5862975 - DNA, 25 bp, Homo sapien
ctagtttcgtagcgagacggtgggt

SEQ ID NO: 5862976 - DNA, 25 bp, Homo sapien
ctcagatcggacctacgcgctgtat

SEQ ID NO: 5862977 - DNA, 25 bp, Homo sapien
ggacatctcgcgtaagacgagttcc

SEQ ID NO: 5862978 - DNA, 25 bp, Homo sapien
ctaggggcgtacgagataccacaga

SEQ ID NO: 5862979 - DNA, 25 bp, Homo sapien
aaatccctaagcgataccggaggcc

SEQ ID NO: 5862980 - DNA, 25 bp, Homo sapien
gtcctgacgcgtaaccgatacatgc

SEQ ID NO: 5862981 - DNA, 25 bp, Homo sapien
gtgtgcagcgcgtacggaaattcgt

SEQ ID NO: 5862982 - DNA, 25 bp, Homo sapien
gcagatctacggacgtcgtaacggt

SEQ ID NO: 5862983 - DNA, 25 bp, Homo sapien
aagacagtgcgccgattcaaacggg

SEQ ID NO: 5862984 - DNA, 25 bp, Homo sapien
gcgcgtaaccgtatacgcggatcaa

SEQ ID NO: 5862985 - DNA, 25 bp, Homo sapien
tgtgaggtactataccgcgctcgag

SEQ ID NO: 5862986 - DNA, 25 bp, Homo sapien
ggatttcccgtcggacttacacacg

SEQ ID NO: 5862987 - DNA, 25 bp, Homo sapien
aagctgttacgcgcctacgttgcag

SEQ ID NO: 5862988 - DNA, 25 bp, Homo sapien
tcaaccatcggtcctagcgagatgg

SEQ ID NO: 5862989 - DNA, 25 bp, Homo sapien
taaggtctagtatcggcgtccgagc

SEQ ID NO: 5862990 - DNA, 25 bp, Homo sapien
tgtcggattcgcgggtaaccgacaa

SEQ ID NO: 5862991 - DNA, 25 bp, Homo sapien
ggacgaactcgatacgtcgttgtcc

SEQ ID NO: 5862992 - DNA, 25 bp, Homo sapien
cgcaatcccgtcgagtcaattcgga

SEQ ID NO: 5862993 - DNA, 25 bp, Homo sapien
actagcataacgcgtcgctagccag

SEQ ID NO: 5862994 - DNA, 25 bp, Homo sapien
acgtgccgataacgcgaacgtttgg

SEQ ID NO: 5862995 - DNA, 25 bp, Homo sapien
cgacttgaccgttcgcgtacatagc

SEQ ID NO: 5862996 - DNA, 25 bp, Homo sapien
ccggccaccgtcgtaatccattatc

SEQ ID NO: 5862997 - DNA, 25 bp, Homo sapien
acacatcgacggtaccgatacccga

SEQ ID NO: 5862998 - DNA, 25 bp, Homo sapien
tcaacttcgtaaggcgcgcacaagc

SEQ ID NO: 5862999 - DNA, 25 bp, Homo sapien
cactctatcgcgcctatgggcctta

SEQ ID NO: 5863000 - DNA, 25 bp, Homo sapien
tactggcgacgtaacaccgtcgtgt

SEQ ID NO: 5863001 - DNA, 25 bp, Homo sapien
aatcggtacgttgtcggccagctca

SEQ ID NO: 5863002 - DNA, 25 bp, Homo sapien
tatactgaccggtcgcgtactctgg

SEQ ID NO: 5863003 - DNA, 25 bp, Homo sapien
catccccgttcgcgataactcagtg

SEQ ID NO: 5863004 - DNA, 25 bp, Homo sapien
gcggcgagtcgcgtacggtatttaa

SEQ ID NO: 5863005 - DNA, 25 bp, Homo sapien
tagctgagcgtacggtactccgatc

SEQ ID NO: 5863006 - DNA, 25 bp, Homo sapien
atgacacgtttacgtcccgctccac

SEQ ID NO: 5863007 - DNA, 25 bp, Homo sapien
tgtaacagaccgcccgatagctgca

SEQ ID NO: 5863008 - DNA, 25 bp, Homo sapien
catagaatatcgggcggcttgacgc

SEQ ID NO: 5863009 - DNA, 25 bp, Homo sapien
aactgatcgcggacgtacttggtcc

SEQ ID NO: 5863010 - DNA, 25 bp, Homo sapien
gtgtcgccgcgatatagcgcacata

SEQ ID NO: 5863011 - DNA, 25 bp, Homo sapien
tgctcttaccgtcggtcgtactctg

SEQ ID NO: 5863012 - DNA, 25 bp, Homo sapien
cagctgtgagcgtacttcgtactcg

SEQ ID NO: 5863013 - DNA, 25 bp, Homo sapien
gaacctgtaatcgcccggtaccaca

SEQ ID NO: 5863014 - DNA, 25 bp, Homo sapien
ccctgctaatagtctcgcgcggtta

SEQ ID NO: 5863015 - DNA, 25 bp, Homo sapien
tcggaagcgcgttataggaacgcct

SEQ ID NO: 5863016 - DNA, 25 bp, Homo sapien
ttttagcgcgaagcataggccccga

SEQ ID NO: 5863017 - DNA, 25 bp, Homo sapien
tccacctcgacgcgtagactgagta

SEQ ID NO: 5863018 - DNA, 25 bp, Homo sapien
atggtcgttaatcgtcgcgcggtct

SEQ ID NO: 5863019 - DNA, 25 bp, Homo sapien
ctcacctaccgaacgttcgctctag

SEQ ID NO: 5863020 - DNA, 25 bp, Homo sapien
tcaatgtgatagtccgtcgggtcgg

SEQ ID NO: 5863021 - DNA, 25 bp, Homo sapien
aagaaggtcgcgaagcgagtgccaa

SEQ ID NO: 5863022 - DNA, 25 bp, Homo sapien
atacaccgggcgcctaagtatctcc

SEQ ID NO: 5863023 - DNA, 25 bp, Homo sapien
aaagcagggccgcgtacaaagctct

SEQ ID NO: 5863024 - DNA, 25 bp, Homo sapien
ggtcctccggtcgacataatgacgt

SEQ ID NO: 5863025 - DNA, 25 bp, Homo sapien
cggtggtcgcgcgtcctatattagt

SEQ ID NO: 5863026 - DNA, 25 bp, Homo sapien
atcgcgatcgatcgtagcgaactcg

SEQ ID NO: 5863027 - DNA, 25 bp, Homo sapien
agagtaacgcggttacggctcatgc

SEQ ID NO: 5863028 - DNA, 25 bp, Homo sapien
acacacttcgcgtcgacggtcacta

SEQ ID NO: 5863029 - DNA, 25 bp, Homo sapien
gcgcaagatgcgcgatctagtgctt

SEQ ID NO: 5863030 - DNA, 25 bp, Homo sapien
tcagacaggtattcgcgcacacgtc

SEQ ID NO: 5863031 - DNA, 25 bp, Homo sapien
ttatgcatacgcgcaagcgcgtcac

SEQ ID NO: 5863032 - DNA, 25 bp, Homo sapien
ggaagaacgtacgctaacgccaacc

SEQ ID NO: 5863033 - DNA, 25 bp, Homo sapien
ccgacacggtatggcgtacgaatga

SEQ ID NO: 5863034 - DNA, 25 bp, Homo sapien
acatccgcttattcggcgtggccta

SEQ ID NO: 5863035 - DNA, 25 bp, Homo sapien
tgactgtatcgaccgtaggcggaga

SEQ ID NO: 5863036 - DNA, 25 bp, Homo sapien
tcatattgcattacgggcgcgtcgc

SEQ ID NO: 5863037 - DNA, 25 bp, Homo sapien
caccctagtcgattaccggccaaac

SEQ ID NO: 5863038 - DNA, 25 bp, Homo sapien
atactcacggacgatcgtacccacg

SEQ ID NO: 5863039 - DNA, 25 bp, Homo sapien
cccttaagtcgtatggcgaagggct

SEQ ID NO: 5863040 - DNA, 25 bp, Homo sapien
ggtacacgttgcgccgtaatccact

SEQ ID NO: 5863041 - DNA, 25 bp, Homo sapien
ggcaaccggtatactgtcggaacgt

SEQ ID NO: 5863042 - DNA, 25 bp, Homo sapien
gatagaaccggttagtacgcgccag

SEQ ID NO: 5863043 - DNA, 25 bp, Homo sapien
gtaggtcgcgagaactatgtacgcc

SEQ ID NO: 5863044 - DNA, 25 bp, Homo sapien
aggctgactagtcgttcgccgtact

SEQ ID NO: 5863045 - DNA, 25 bp, Homo sapien
acaggagaacgcgcgagtactacag

SEQ ID NO: 5863046 - DNA, 25 bp, Homo sapien
cagagataagtcgcgcatcccagtg

SEQ ID NO: 5863047 - DNA, 25 bp, Homo sapien
tcctacggttcgtgacgcgttggaa

SEQ ID NO: 5863048 - DNA, 25 bp, Homo sapien
ggcacggtcgaattgcgccaatcta

SEQ ID NO: 5863049 - DNA, 25 bp, Homo sapien
ctttaaccgacgcgatgtacggtgg

SEQ ID NO: 5863050 - DNA, 25 bp, Homo sapien
gtagcactacgcgtattcgccagga

SEQ ID NO: 5863051 - DNA, 25 bp, Homo sapien
tcctcagtccggatacgtcaggctt

SEQ ID NO: 5863052 - DNA, 25 bp, Homo sapien
acagcgtgacgtaacggtaagggct

SEQ ID NO: 5863053 - DNA, 25 bp, Homo sapien
ctcaattacatcacgcgaggcgacc

SEQ ID NO: 5863054 - DNA, 25 bp, Homo sapien
gttcaccgcgtactagcttgtccgt

SEQ ID NO: 5863055 - DNA, 25 bp, Homo sapien
ctcagccgcggaatcgtagtagcat

SEQ ID NO: 5863056 - DNA, 25 bp, Homo sapien
gtcacaacgcatcgtaccggagtct

SEQ ID NO: 5863057 - DNA, 25 bp, Homo sapien
gttatctacgctatggtcggtgggg

SEQ ID NO: 5863058 - DNA, 25 bp, Homo sapien
aaagcacgcgggtatacttggcgtc

SEQ ID NO: 5863059 - DNA, 25 bp, Homo sapien
acactaaataggtcgagcgccacgg

SEQ ID NO: 5863060 - DNA, 25 bp, Homo sapien
caagcagtatacgacggacccgttg

SEQ ID NO: 5863061 - DNA, 25 bp, Homo sapien
tgtatgcgtatattcgcgccgcgca

SEQ ID NO: 5863062 - DNA, 25 bp, Homo sapien
cagttattcgcgtacgagcccagca

SEQ ID NO: 5863063 - DNA, 25 bp, Homo sapien
ggtagggccggtcgtataatcccat

SEQ ID NO: 5863064 - DNA, 25 bp, Homo sapien
actggtggacttacgatcggcggtt

SEQ ID NO: 5863065 - DNA, 25 bp, Homo sapien
aggcgcacgtagcgtcgaagtgtat

SEQ ID NO: 5863066 - DNA, 25 bp, Homo sapien
cactcagacgcgcggtagtggttat

SEQ ID NO: 5863067 - DNA, 25 bp, Homo sapien
cttgagccgcgctatcgtagcaaca

SEQ ID NO: 5863068 - DNA, 25 bp, Homo sapien
catggccgcgcgagtaagatgttca

SEQ ID NO: 5863069 - DNA, 25 bp, Homo sapien
tctgggctaatcgtcgcgtaggttc

SEQ ID NO: 5863070 - DNA, 25 bp, Homo sapien
agttgtgattgcgcgtaccaagcgc

SEQ ID NO: 5863071 - DNA, 25 bp, Homo sapien
ctgactactcggcgtcgtaagcttc

SEQ ID NO: 5863072 - DNA, 25 bp, Homo sapien
gtagctacgagcggcctaatatggg

SEQ ID NO: 5863073 - DNA, 25 bp, Homo sapien
tcacctccgactatactcgggcaga

SEQ ID NO: 5863074 - DNA, 25 bp, Homo sapien
gctttctccgtatacgacgcatccg

SEQ ID NO: 5863075 - DNA, 25 bp, Homo sapien
cgaagtcatccgtaccgcgaaaagc

SEQ ID NO: 5863076 - DNA, 25 bp, Homo sapien
acataccctagattacgcggggctc

SEQ ID NO: 5863077 - DNA, 25 bp, Homo sapien
tgtggccgtccgtagcgagatcaat

SEQ ID NO: 5863078 - DNA, 25 bp, Homo sapien
catgcagtcacgcgattacgccgaa

SEQ ID NO: 5863079 - DNA, 25 bp, Homo sapien
ggacctagcgtacgactagcttggt

SEQ ID NO: 5863080 - DNA, 25 bp, Homo sapien
ctcacgccgtacggctagctatcaa

SEQ ID NO: 5863081 - DNA, 25 bp, Homo sapien
cagtagacaacggacgtcgtcggtt

SEQ ID NO: 5863082 - DNA, 25 bp, Homo sapien
ataaccgcgtcgtatcggatgcggt

SEQ ID NO: 5863083 - DNA, 25 bp, Homo sapien
gccccaccgcgaccgaataatactt

SEQ ID NO: 5863084 - DNA, 25 bp, Homo sapien
cggcatcgcgcgtagaatcttacac

SEQ ID NO: 5863085 - DNA, 25 bp, Homo sapien
cgacaagctaatcgcgcgcaggatt

SEQ ID NO: 5863086 - DNA, 25 bp, Homo sapien
tggtgatacgtcgcgtaatccgcct

SEQ ID NO: 5863087 - DNA, 25 bp, Homo sapien
acagaacgtatcggtaccgtacggc

SEQ ID NO: 5863088 - DNA, 25 bp, Homo sapien
aggagtcgccgactcgtagttttcc

SEQ ID NO: 5863089 - DNA, 25 bp, Homo sapien
ccaatctcgtgtaacgacgggaggt

SEQ ID NO: 5863090 - DNA, 25 bp, Homo sapien
aggtgctcgcgtaactcgaacaggt

SEQ ID NO: 5863091 - DNA, 25 bp, Homo sapien
attcagtcgaacgtacgtctcgccg

SEQ ID NO: 5863092 - DNA, 25 bp, Homo sapien
tctccacgatcgtaccggaaccatc

SEQ ID NO: 5863093 - DNA, 25 bp, Homo sapien
gcttaacggtgaacgttcgaggcca

SEQ ID NO: 5863094 - DNA, 25 bp, Homo sapien
ccaacgaatcgcgctcttagaccga

SEQ ID NO: 5863095 - DNA, 25 bp, Homo sapien
ttatggcgacatcgcgtgtcgttcc

SEQ ID NO: 5863096 - DNA, 25 bp, Homo sapien
caatacctaccgtcgtacgctggga

SEQ ID NO: 5863097 - DNA, 25 bp, Homo sapien
gttctgggcgaacgctcgttgacat

SEQ ID NO: 5863098 - DNA, 25 bp, Homo sapien
gccgatgtccgtgacggtattagtc

SEQ ID NO: 5863099 - DNA, 25 bp, Homo sapien
cgggttaggataggtcgcgccataa

SEQ ID NO: 5863100 - DNA, 25 bp, Homo sapien
tgtccccgcacaatcgactgtgcaa

SEQ ID NO: 5863101 - DNA, 25 bp, Homo sapien
accacgcggttcgatagcggcttat

SEQ ID NO: 5863102 - DNA, 25 bp, Homo sapien
acaagagcgtcgatctaacgcggag

SEQ ID NO: 5863103 - DNA, 25 bp, Homo sapien
ctggaccgtactgtcgcgatagttc

SEQ ID NO: 5863104 - DNA, 25 bp, Homo sapien
accctacactacgcgatcgactgtc

SEQ ID NO: 5863105 - DNA, 25 bp, Homo sapien
aggcattacccgatagacgcctcac

SEQ ID NO: 5863106 - DNA, 25 bp, Homo sapien
caactaccctcgttacgattcgccg

SEQ ID NO: 5863107 - DNA, 25 bp, Homo sapien
cagtccatactacgtcgcgggtaca

SEQ ID NO: 5863108 - DNA, 25 bp, Homo sapien
aaccgttcgcacgtcgatgataccc

SEQ ID NO: 5863109 - DNA, 25 bp, Homo sapien
agtagcccgtaggcgctattgtgct

SEQ ID NO: 5863110 - DNA, 25 bp, Homo sapien
tccttcaacctcgcgctagactgca

SEQ ID NO: 5863111 - DNA, 25 bp, Homo sapien
cctatttcgaccgcgcgatgtacct

SEQ ID NO: 5863112 - DNA, 25 bp, Homo sapien
cagtcgctagtgtcgacgcacatag

SEQ ID NO: 5863113 - DNA, 25 bp, Homo sapien
tgccggcgacgcgtagtacatatgt

SEQ ID NO: 5863114 - DNA, 25 bp, Homo sapien
accttaatgtcgcgcgtacctgctg

SEQ ID NO: 5863115 - DNA, 25 bp, Homo sapien
acggaatacgcgggggtaacatctg

SEQ ID NO: 5863116 - DNA, 25 bp, Homo sapien
gaagcaatgtcgtacgacccgtcca

SEQ ID NO: 5863117 - DNA, 25 bp, Homo sapien
catctttcgcgcgtatgtatgccgg

SEQ ID NO: 5863118 - DNA, 25 bp, Homo sapien
gcctcggtacgcgaccgattgatat

SEQ ID NO: 5863119 - DNA, 25 bp, Homo sapien
cattgggcgagcgtaacgccatatc

SEQ ID NO: 5863120 - DNA, 25 bp, Homo sapien
gcaatttccatcggtcggaagggtc

SEQ ID NO: 5863121 - DNA, 25 bp, Homo sapien
tagagtggcgtaccgactaggacgt

SEQ ID NO: 5863122 - DNA, 25 bp, Homo sapien
tccttgcgacgtcctacgagtacga

SEQ ID NO: 5863123 - DNA, 25 bp, Homo sapien
aatccattagtccgcgaccccctgt

SEQ ID NO: 5863124 - DNA, 25 bp, Homo sapien
cccgtctatgtcgtacgggaaggta

SEQ ID NO: 5863125 - DNA, 25 bp, Homo sapien
aagagttgcgtcctagcgtggacgt

SEQ ID NO: 5863126 - DNA, 25 bp, Homo sapien
ttcggaattacatcgcgcggcgagt

SEQ ID NO: 5863127 - DNA, 25 bp, Homo sapien
tcacacgtcggccgtactacatcag

SEQ ID NO: 5863128 - DNA, 25 bp, Homo sapien
ggacggtccgctagacgtagcttaa

SEQ ID NO: 5863129 - DNA, 25 bp, Homo sapien
ctgacgcgacgtaacgtacgtggta

SEQ ID NO: 5863130 - DNA, 25 bp, Homo sapien
cgggaagttagtcgcgcttagacga

SEQ ID NO: 5863131 - DNA, 25 bp, Homo sapien
caacgtgcgcgttcggatagacagt

SEQ ID NO: 5863132 - DNA, 25 bp, Homo sapien
tgctccacccggtacgaattgctgt

SEQ ID NO: 5863133 - DNA, 25 bp, Homo sapien
gaaggttacgcgtcgataccccaac

SEQ ID NO: 5863134 - DNA, 25 bp, Homo sapien
gcgagtctagcgtcgttacactcga

SEQ ID NO: 5863135 - DNA, 25 bp, Homo sapien
attccggatcgacgtaccgagctag

SEQ ID NO: 5863136 - DNA, 25 bp, Homo sapien
gaatacttaggcccgtacggaagcc

SEQ ID NO: 5863137 - DNA, 25 bp, Homo sapien
ccagcatacgaacgcgctatgagac

SEQ ID NO: 5863138 - DNA, 25 bp, Homo sapien
cagactcatgccgctcgtagatacg

SEQ ID NO: 5863139 - DNA, 25 bp, Homo sapien
gagccgccgcgaataaaccatgttc

SEQ ID NO: 5863140 - DNA, 25 bp, Homo sapien
gccctgtaacgcgttcgtaaggtca

SEQ ID NO: 5863141 - DNA, 25 bp, Homo sapien
cgttattcgctacggggtaggccaa

SEQ ID NO: 5863142 - DNA, 25 bp, Homo sapien
gttgcgcgctcgtactaactcttcc

SEQ ID NO: 5863143 - DNA, 25 bp, Homo sapien
aatgcatagacggtgcgtccgatcc

SEQ ID NO: 5863144 - DNA, 25 bp, Homo sapien
cggggagcaatcgcgtatagggaaa

SEQ ID NO: 5863145 - DNA, 25 bp, Homo sapien
gggcctagacgcgcgatattaccta

SEQ ID NO: 5863146 - DNA, 25 bp, Homo sapien
tggctctactgacgcgcgaaaagga

SEQ ID NO: 5863147 - DNA, 25 bp, Homo sapien
cctatgacgcgggtcatacttagcg

SEQ ID NO: 5863148 - DNA, 25 bp, Homo sapien
cgttttcatggtacgcggggacact

SEQ ID NO: 5863149 - DNA, 25 bp, Homo sapien
gccgagttaagtcgcgcgaaactac

SEQ ID NO: 5863150 - DNA, 25 bp, Homo sapien
caccttgcgcctaattcgtggcttc

SEQ ID NO: 5863151 - DNA, 25 bp, Homo sapien
acgctaggccgcgtacgtagtgatt

SEQ ID NO: 5863152 - DNA, 25 bp, Homo sapien
acggcaattggcgggcgtctattga

SEQ ID NO: 5863153 - DNA, 25 bp, Homo sapien
ccgtagtcgtacggtcgctcttagt

SEQ ID NO: 5863154 - DNA, 25 bp, Homo sapien
ttaaccgatcgcctaacggaccacc

SEQ ID NO: 5863155 - DNA, 25 bp, Homo sapien
acttgcaagcgcgtacgttcatccg

SEQ ID NO: 5863156 - DNA, 25 bp, Homo sapien
acctcatcgtctagtacgcaggtgg

SEQ ID NO: 5863157 - DNA, 25 bp, Homo sapien
ggtgtctcgcgcgttagatcatctc

SEQ ID NO: 5863158 - DNA, 25 bp, Homo sapien
atccaggtatgacgtccggcgatgt

SEQ ID NO: 5863159 - DNA, 25 bp, Homo sapien
gcaccactatacgaggacgttcacg

SEQ ID NO: 5863160 - DNA, 25 bp, Homo sapien
tacacgggtcgcggttacagcagta

SEQ ID NO: 5863161 - DNA, 25 bp, Homo sapien
tcaacgtagttcgcgcaagcgccaa

SEQ ID NO: 5863162 - DNA, 25 bp, Homo sapien
cttcacaacgtgcgccgtagcaagt

SEQ ID NO: 5863163 - DNA, 25 bp, Homo sapien
ggtagtcgtcgaccgtagatccaag

SEQ ID NO: 5863164 - DNA, 25 bp, Homo sapien
tccgaattgactcgacgggattgcg

SEQ ID NO: 5863165 - DNA, 25 bp, Homo sapien
ctccgcgttagatcgacgctcttgt

SEQ ID NO: 5863166 - DNA, 25 bp, Homo sapien
atggctgatgtcgtagcgaagcacg

SEQ ID NO: 5863167 - DNA, 25 bp, Homo sapien
cttcccacgcgtaccgtcaaagctt

SEQ ID NO: 5863168 - DNA, 25 bp, Homo sapien
tagcgaatgtacgcgagccttgacg

SEQ ID NO: 5863169 - DNA, 25 bp, Homo sapien
tgaggggtcgtaccgcagttacgat

SEQ ID NO: 5863170 - DNA, 25 bp, Homo sapien
tgaacatcttactcgcgcggccatg

SEQ ID NO: 5863171 - DNA, 25 bp, Homo sapien
aggttgaaagcggccgtactgttcc

SEQ ID NO: 5863172 - DNA, 25 bp, Homo sapien
tgttctttagacgcggtcgtgagcc

SEQ ID NO: 5863173 - DNA, 25 bp, Homo sapien
tctgcccgagtatagtcggaggtga

SEQ ID NO: 5863174 - DNA, 25 bp, Homo sapien
cgctgctagcgacctacgtcatatc

SEQ ID NO: 5863175 - DNA, 25 bp, Homo sapien
caacgatggcgcgagtagtccgatt

SEQ ID NO: 5863176 - DNA, 25 bp, Homo sapien
tggtttacggcgtacctagggcgat

SEQ ID NO: 5863177 - DNA, 25 bp, Homo sapien
taaccgcgcgagactattagcaggg

SEQ ID NO: 5863178 - DNA, 25 bp, Homo sapien
tctggaccgatcgtaacgtcttggg

SEQ ID NO: 5863179 - DNA, 25 bp, Homo sapien
taggccacgccgaataagcggatgt

SEQ ID NO: 5863180 - DNA, 25 bp, Homo sapien
acctgttcgagttacgcgagcacct

SEQ ID NO: 5863181 - DNA, 25 bp, Homo sapien
gggctgatgactaacggcgttcgat

SEQ ID NO: 5863182 - DNA, 25 bp, Homo sapien
gatggttccggtacgatcgtggaga

SEQ ID NO: 5863183 - DNA, 25 bp, Homo sapien
agaccggcgtatacgatagtgtcgg

SEQ ID NO: 5863184 - DNA, 25 bp, Homo sapien
cattgttgtcgaacgctcgctcgac

SEQ ID NO: 5863185 - DNA, 25 bp, Homo sapien
tcggatctctacgtacgcgggttca

SEQ ID NO: 5863186 - DNA, 25 bp, Homo sapien
caagcggtaatacgggcgctacgat

SEQ ID NO: 5863187 - DNA, 25 bp, Homo sapien
tcagcacgcgataacccgtcacttg

SEQ ID NO: 5863188 - DNA, 25 bp, Homo sapien
gccgtacggtaccgatacgttctgt

SEQ ID NO: 5863189 - DNA, 25 bp, Homo sapien
agtacggcgaacgactagtcagcct

SEQ ID NO: 5863190 - DNA, 25 bp, Homo sapien
gacgactccgagcgttacgatcagt

SEQ ID NO: 5863191 - DNA, 25 bp, Homo sapien
caacgggtccgtcgtatactgcttg

SEQ ID NO: 5863192 - DNA, 25 bp, Homo sapien
agctgggttacgcgagctaagatcg

SEQ ID NO: 5863193 - DNA, 25 bp, Homo sapien
caacccatcgcgcatctatgctgtc

SEQ ID NO: 5863194 - DNA, 25 bp, Homo sapien
tgagctggccgacaacgtaccgatt

SEQ ID NO: 5863195 - DNA, 25 bp, Homo sapien
ggaagtcgctcgtacgatgttgacg

SEQ ID NO: 5863196 - DNA, 25 bp, Homo sapien
taccttcccgtacgacatagacggg

SEQ ID NO: 5863197 - DNA, 25 bp, Homo sapien
tgcagtttcccgcgagtaagacgtc

SEQ ID NO: 5863198 - DNA, 25 bp, Homo sapien
ggacaacgacgtatcgagttcgtcc

SEQ ID NO: 5863199 - DNA, 25 bp, Homo sapien
gttactatagtaggccgcgtgagcc

SEQ ID NO: 5863200 - DNA, 25 bp, Homo sapien
aagcctgacgtatccggactgagga

SEQ ID NO: 5863201 - DNA, 25 bp, Homo sapien
tccttttcgcgcgtcagtagagcca

SEQ ID NO: 5863202 - DNA, 25 bp, Homo sapien
gctctgtgctaacggtccgaacaga

SEQ ID NO: 5863203 - DNA, 25 bp, Homo sapien
gaaacacgtataccgggcaggatcg

SEQ ID NO: 5863204 - DNA, 25 bp, Homo sapien
ctggcgcgtactaaccggttctatc

SEQ ID NO: 5863205 - DNA, 25 bp, Homo sapien
acgcccttagtcgtacgctgatgct

SEQ ID NO: 5863206 - DNA, 25 bp, Homo sapien
gcttttcgcggtacggatgacttcg

SEQ ID NO: 5863207 - DNA, 25 bp, Homo sapien
gaggagctaaaccgcgactcaagag

SEQ ID NO: 5863208 - DNA, 25 bp, Homo sapien
ccgtggcgctcgacctatttagtgt

SEQ ID NO: 5863209 - DNA, 25 bp, Homo sapien
cctagcacgcgagtagtcgtttcct

SEQ ID NO: 5863210 - DNA, 25 bp, Homo sapien
cgctcagtcgcgaacgctaaacaca

SEQ ID NO: 5863211 - DNA, 25 bp, Homo sapien
aaagccgtacgcgggtatgtctacg

SEQ ID NO: 5863212 - DNA, 25 bp, Homo sapien
gtctaagcgtacgaaccgatgacgc

SEQ ID NO: 5863213 - DNA, 25 bp, Homo sapien
ctcgtgcgtacgttaccgtcgatct

SEQ ID NO: 5863214 - DNA, 25 bp, Homo sapien
gtttggccggtaatcgactagggtg

SEQ ID NO: 5863215 - DNA, 25 bp, Homo sapien
tgacgtgcgcgttacaaccttctgg

SEQ ID NO: 5863216 - DNA, 25 bp, Homo sapien
tggacgggtcgtacgacattgcttc

SEQ ID NO: 5863217 - DNA, 25 bp, Homo sapien
gaacatggtttattcgcggcggctc

SEQ ID NO: 5863218 - DNA, 25 bp, Homo sapien
tgacagcggataccgctagcgaatg

SEQ ID NO: 5863219 - DNA, 25 bp, Homo sapien
gcctgtcgtacgaccctattcgctt

SEQ ID NO: 5863220 - DNA, 25 bp, Homo sapien
cggttgcgcggattaaggtcgcttt

SEQ ID NO: 5863221 - DNA, 25 bp, Homo sapien
cagacgaccgtatatcggcttgagc

SEQ ID NO: 5863222 - DNA, 25 bp, Homo sapien
cctggtccatctatcgacgcggata

SEQ ID NO: 5863223 - DNA, 25 bp, Homo sapien
ctttctttacgcgtcgtgtcgcgga

SEQ ID NO: 5863224 - DNA, 25 bp, Homo sapien
atgttcgcgaggtagtacgcccatc

SEQ ID NO: 5863225 - DNA, 25 bp, Homo sapien
gcgaactagcgacgtccctaaagag

SEQ ID NO: 5863226 - DNA, 25 bp, Homo sapien
tgcagctatcgggcggtctgttaca

SEQ ID NO: 5863227 - DNA, 25 bp, Homo sapien
taccacccgtaatacgcggaacagc

SEQ ID NO: 5863228 - DNA, 25 bp, Homo sapien
agtcggacgtcgcgaacacgttagt

SEQ ID NO: 5863229 - DNA, 25 bp, Homo sapien
cttgcatatcgcgcctaacaccgct

SEQ ID NO: 5863230 - DNA, 25 bp, Homo sapien
gtttccacgaccgcgtgttaaggag

SEQ ID NO: 5863231 - DNA, 25 bp, Homo sapien
gacctgctagcgtacggtagtacca

SEQ ID NO: 5863232 - DNA, 25 bp, Homo sapien
atacacttcgacgctacgtgcgcct

SEQ ID NO: 5863233 - DNA, 25 bp, Homo sapien
ccactagatacgtacccgcaatccc

SEQ ID NO: 5863234 - DNA, 25 bp, Homo sapien
gcttgtgcgcgccttacgaagttga

SEQ ID NO: 5863235 - DNA, 25 bp, Homo sapien
tagtccgcggttcgtactaaggctg

SEQ ID NO: 5863236 - DNA, 25 bp, Homo sapien
cagatgttacccccgcgtattccgt

SEQ ID NO: 5863237 - DNA, 25 bp, Homo sapien
aaagcacagtagcgcgtaatccggg

SEQ ID NO: 5863238 - DNA, 25 bp, Homo sapien
ccaacgcgcgaatacgctagttagc

SEQ ID NO: 5863239 - DNA, 25 bp, Homo sapien
gcaactcggtgcgcgttaacacgtt

SEQ ID NO: 5863240 - DNA, 25 bp, Homo sapien
tttccctatacgcgattgctccccg

SEQ ID NO: 5863241 - DNA, 25 bp, Homo sapien
tggcctcgaacgttcaccgttaagc

SEQ ID NO: 5863242 - DNA, 25 bp, Homo sapien
gctctactcgcgagcgtatccgata

SEQ ID NO: 5863243 - DNA, 25 bp, Homo sapien
acgtcctagtcggtacgccactcta

SEQ ID NO: 5863244 - DNA, 25 bp, Homo sapien
tgacactatcatacgccggcgcgtt

SEQ ID NO: 5863245 - DNA, 25 bp, Homo sapien
cttgaaatcggtcctacggttccgc

SEQ ID NO: 5863246 - DNA, 25 bp, Homo sapien
gggcgcctcgcgttaacggaattaa

SEQ ID NO: 5863247 - DNA, 25 bp, Homo sapien
attgatctcgctacggacggccaca

SEQ ID NO: 5863248 - DNA, 25 bp, Homo sapien
cctaatgcgcctcgttagtcctcgt

SEQ ID NO: 5863249 - DNA, 25 bp, Homo sapien
gaatacacgatacgcgacgctcgag

SEQ ID NO: 5863250 - DNA, 25 bp, Homo sapien
gttggggtatcgacgcgtaaccttc

SEQ ID NO: 5863251 - DNA, 25 bp, Homo sapien
acaccactagtcgcgctaggtaacc

SEQ ID NO: 5863252 - DNA, 25 bp, Homo sapien
cctagagggacgatccgaccaatga

SEQ ID NO: 5863253 - DNA, 25 bp, Homo sapien
ccaccgtacatcgcgtcggttaaag

SEQ ID NO: 5863254 - DNA, 25 bp, Homo sapien
tcccagcgtacgacggtaggtattg

SEQ ID NO: 5863255 - DNA, 25 bp, Homo sapien
tcgaccatatcgcgccgtagagtag

SEQ ID NO: 5863256 - DNA, 25 bp, Homo sapien
ctgtctttaccgccggtcgatgaag

SEQ ID NO: 5863257 - DNA, 25 bp, Homo sapien
gagattggctatacgtccgggaacc

SEQ ID NO: 5863258 - DNA, 25 bp, Homo sapien
gcgacgcgcccgtaatgcaatatga

SEQ ID NO: 5863259 - DNA, 25 bp, Homo sapien
gctatgtacgcgaacggtcaagtcg

SEQ ID NO: 5863260 - DNA, 25 bp, Homo sapien
tctgtatgttagtcgcgcagccacc

SEQ ID NO: 5863261 - DNA, 25 bp, Homo sapien
tgctgggctcgtacgcgaataactg

SEQ ID NO: 5863262 - DNA, 25 bp, Homo sapien
tggagttggacgacgcgtaacccaa

SEQ ID NO: 5863263 - DNA, 25 bp, Homo sapien
ggaggtgttaatcgcggtactccct

SEQ ID NO: 5863264 - DNA, 25 bp, Homo sapien
ttggataccgcacgtagcgtttgcg

SEQ ID NO: 5863265 - DNA, 25 bp, Homo sapien
attaacgcgtacgcgagacggctag

SEQ ID NO: 5863266 - DNA, 25 bp, Homo sapien
agcccttaccgttacgtcacgctgt

SEQ ID NO: 5863267 - DNA, 25 bp, Homo sapien
gctgacgatacgcgcgcttgtcaaa

SEQ ID NO: 5863268 - DNA, 25 bp, Homo sapien
gacccttccgaccgatggaaattgc

SEQ ID NO: 5863269 - DNA, 25 bp, Homo sapien
acactcgttagcgcgcaaccaactc

SEQ ID NO: 5863270 - DNA, 25 bp, Homo sapien
acccgaccggtatcgctagcataag

SEQ ID NO: 5863271 - DNA, 25 bp, Homo sapien
tcgcgtgttcggcgcgtaatttgct

SEQ ID NO: 5863272 - DNA, 25 bp, Homo sapien
ggaaaactacgagtcggcgactcct

SEQ ID NO: 5863273 - DNA, 25 bp, Homo sapien
cgacacgcattagatcgcgacggta

SEQ ID NO: 5863274 - DNA, 25 bp, Homo sapien
cgagtacgaagtacgctcacagctg

SEQ ID NO: 5863275 - DNA, 25 bp, Homo sapien
catcaaacggctagcgtacccttgg

SEQ ID NO: 5863276 - DNA, 25 bp, Homo sapien
actcgccgcgcgatgtaattccgaa

SEQ ID NO: 5863277 - DNA, 25 bp, Homo sapien
atcttattagcgttacgggccgccg

SEQ ID NO: 5863278 - DNA, 25 bp, Homo sapien
agcaagtacgacgtaggggggctat

SEQ ID NO: 5863279 - DNA, 25 bp, Homo sapien
taagaacgctatccgtacccgtggc

SEQ ID NO: 5863280 - DNA, 25 bp, Homo sapien
acggacaagctagtacgcggtgaac

SEQ ID NO: 5863281 - DNA, 25 bp, Homo sapien
cgactcgtcgcgggataactaggta

SEQ ID NO: 5863282 - DNA, 25 bp, Homo sapien
gtacgccgcggtttagcagattgtc

SEQ ID NO: 5863283 - DNA, 25 bp, Homo sapien
cccatattaggccgctcgtagctac

SEQ ID NO: 5863284 - DNA, 25 bp, Homo sapien
gctcgttaccgcgcgttacaacaga

SEQ ID NO: 5863285 - DNA, 25 bp, Homo sapien
agcccttcgccatacgacttaaggg

SEQ ID NO: 5863286 - DNA, 25 bp, Homo sapien
ctagagcgaacgttcggtaggtgag

SEQ ID NO: 5863287 - DNA, 25 bp, Homo sapien
gtcatctcttacgctcgcgtagcca

SEQ ID NO: 5863288 - DNA, 25 bp, Homo sapien
ttggcactcgcttcgcgaccttctt

SEQ ID NO: 5863289 - DNA, 25 bp, Homo sapien
acagcaattcgtaccgggtggagca

SEQ ID NO: 5863290 - DNA, 25 bp, Homo sapien
acattctacggtcgacgcagcgttc

SEQ ID NO: 5863291 - DNA, 25 bp, Homo sapien
ctgtgacgtatcgtacgccggtagt

SEQ ID NO: 5863292 - DNA, 25 bp, Homo sapien
gcgtcaagccgcccgatattctatg

SEQ ID NO: 5863293 - DNA, 25 bp, Homo sapien
ttgtcggttacccgcgaatccgaca

SEQ ID NO: 5863294 - DNA, 25 bp, Homo sapien
caggttcggtcttaagcgcacagtc

SEQ ID NO: 5863295 - DNA, 25 bp, Homo sapien
taaggcccataggcgcgatagagtg

SEQ ID NO: 5863296 - DNA, 25 bp, Homo sapien
ccatctcgctaggaccgatggttga

SEQ ID NO: 5863297 - DNA, 25 bp, Homo sapien
ggacccatataggacgcgaaagcgt

SEQ ID NO: 5863298 - DNA, 25 bp, Homo sapien
gaactatcgcgacagtacggtccag

SEQ ID NO: 5863299 - DNA, 25 bp, Homo sapien
agaccgcgcgacgattaacgaccat

SEQ ID NO: 5863300 - DNA, 25 bp, Homo sapien
taatcgcctaacgcgcgtaggacct

SEQ ID NO: 5863301 - DNA, 25 bp, Homo sapien
gtcatccgaccccggtcaatacctt

SEQ ID NO: 5863302 - DNA, 25 bp, Homo sapien
aaagcctgtcctacgtcgcagggaa

SEQ ID NO: 5863303 - DNA, 25 bp, Homo sapien
tgagctgcgtgttcgatcacgggat

SEQ ID NO: 5863304 - DNA, 25 bp, Homo sapien
ccagagtacgcgaccggtcagtata

SEQ ID NO: 5863305 - DNA, 25 bp, Homo sapien
cgcacacctgtttacgcgaccttgt

SEQ ID NO: 5863306 - DNA, 25 bp, Homo sapien
cgactgttaggcggtcgtataaggc

SEQ ID NO: 5863307 - DNA, 25 bp, Homo sapien
acgcgtgtatcgttacccgtcacac

SEQ ID NO: 5863308 - DNA, 25 bp, Homo sapien
ctcgcaactatccgtcgcaagcact

SEQ ID NO: 5863309 - DNA, 25 bp, Homo sapien
atgtcaacgagcgttcgcccagaac

SEQ ID NO: 5863310 - DNA, 25 bp, Homo sapien
gttcgtctatggttcgcggcgcttt

SEQ ID NO: 5863311 - DNA, 25 bp, Homo sapien
acgtcattatgtcgaccggaggacc

SEQ ID NO: 5863312 - DNA, 25 bp, Homo sapien
gactaataccgtcacggacatcggc

SEQ ID NO: 5863313 - DNA, 25 bp, Homo sapien
aaccgacgacgtccgttgtctactg

SEQ ID NO: 5863314 - DNA, 25 bp, Homo sapien
ggtcatcgcgccggttatacgttac

SEQ ID NO: 5863315 - DNA, 25 bp, Homo sapien
cgctctctacgttcgagacaggtca

SEQ ID NO: 5863316 - DNA, 25 bp, Homo sapien
ccggcatacatacgcgcgaaagatg

SEQ ID NO: 5863317 - DNA, 25 bp, Homo sapien
ttcggcgtaatcgcgtgactgcatg

SEQ ID NO: 5863318 - DNA, 25 bp, Homo sapien
catttccctacgcgctagtgtccga

SEQ ID NO: 5863319 - DNA, 25 bp, Homo sapien
ctcgagcgcggtatagtacctcaca

SEQ ID NO: 5863320 - DNA, 25 bp, Homo sapien
ctgcaacgtaggcgcgtaacagctt

SEQ ID NO: 5863321 - DNA, 25 bp, Homo sapien
cgtgtgtaagtccgacgggaaatcc

SEQ ID NO: 5863322 - DNA, 25 bp, Homo sapien
gctcggggcgcgactaaatgatcta

SEQ ID NO: 5863323 - DNA, 25 bp, Homo sapien
tgcgcggcgcgaatatacgcataca

SEQ ID NO: 5863324 - DNA, 25 bp, Homo sapien
ggcgtggcggtctacgtacaatatg

SEQ ID NO: 5863325 - DNA, 25 bp, Homo sapien
tttgcccgactatacggcgatgacg

SEQ ID NO: 5863326 - DNA, 25 bp, Homo sapien
aggcgttcctataacgcgcttccga

SEQ ID NO: 5863327 - DNA, 25 bp, Homo sapien
ctggctagcgacgcgttatgctagt

SEQ ID NO: 5863328 - DNA, 25 bp, Homo sapien
gaagcttacgacgccgagtagtcag

SEQ ID NO: 5863329 - DNA, 25 bp, Homo sapien
gtgaggcgtctatcgggtaatgcct

SEQ ID NO: 5863330 - DNA, 25 bp, Homo sapien
cttggttctggcgtagcgactacct

SEQ ID NO: 5863331 - DNA, 25 bp, Homo sapien
tcccgaaatctaggcgtcgaagtcg

SEQ ID NO: 5863332 - DNA, 25 bp, Homo sapien
tcgagtgtaacgacgctagactcgc

SEQ ID NO: 5863333 - DNA, 25 bp, Homo sapien
tgtacccgcgacgtagtatggactg

SEQ ID NO: 5863334 - DNA, 25 bp, Homo sapien
gtggcacgttagcgtagcgattctc

SEQ ID NO: 5863335 - DNA, 25 bp, Homo sapien
ataaccactaccgcgcgtctgagtg

SEQ ID NO: 5863336 - DNA, 25 bp, Homo sapien
gcaaacactcaatcgcgctcgtagc

SEQ ID NO: 5863337 - DNA, 25 bp, Homo sapien
taggtaatatcgcgcgtctaggccc

SEQ ID NO: 5863338 - DNA, 25 bp, Homo sapien
ccaaacgttcgcgttatcggcacgt

SEQ ID NO: 5863339 - DNA, 25 bp, Homo sapien
ctaggaaacgcgcgtatcacgcgat

SEQ ID NO: 5863340 - DNA, 25 bp, Homo sapien
ataagccgctatcgaaccgcgtggt

SEQ ID NO: 5863341 - DNA, 25 bp, Homo sapien
actgtctatccgaacgcgcacgttg

SEQ ID NO: 5863342 - DNA, 25 bp, Homo sapien
atcaggcttcggtcgctatgagagc

SEQ ID NO: 5863343 - DNA, 25 bp, Homo sapien
cgaattccgcgaggtacatcggttc

SEQ ID NO: 5863344 - DNA, 25 bp, Homo sapien
ccttctcgtagtacgctaccactcc

SEQ ID NO: 5863345 - DNA, 25 bp, Homo sapien
cactgggatgcgcgacttatctctg

SEQ ID NO: 5863346 - DNA, 25 bp, Homo sapien
ggacaaccaatcgaccgtacgaacc

SEQ ID NO: 5863347 - DNA, 25 bp, Homo sapien
gcagtacgcgggcgattaaaacgag

SEQ ID NO: 5863348 - DNA, 25 bp, Homo sapien
cgcaaacgctagacgatagcggtct

SEQ ID NO: 5863349 - DNA, 25 bp, Homo sapien
gctaccgatacgcgtcggatacttc

SEQ ID NO: 5863350 - DNA, 25 bp, Homo sapien
taggactactatgcggcgcaccagt

SEQ ID NO: 5863351 - DNA, 25 bp, Homo sapien
ctacaagaccgcgtacgatacgagc

SEQ ID NO: 5863352 - DNA, 25 bp, Homo sapien
acgaatttccgtacgcgctgcacac

SEQ ID NO: 5863353 - DNA, 25 bp, Homo sapien
gcgatggtactaatccgcgtccttg

SEQ ID NO: 5863354 - DNA, 25 bp, Homo sapien
atccgccgcgctagtaggtggtata

SEQ ID NO: 5863355 - DNA, 25 bp, Homo sapien
ctaatatgacggtccgcgaagcctg

SEQ ID NO: 5863356 - DNA, 25 bp, Homo sapien
gtcaaacgacggtcgtatgtgctcg

SEQ ID NO: 5863357 - DNA, 25 bp, Homo sapien
cgctaagtatgacccgcgtcatagg

SEQ ID NO: 5863358 - DNA, 25 bp, Homo sapien
tgagtgcgcgccggtataaatcgca

SEQ ID NO: 5863359 - DNA, 25 bp, Homo sapien
gtgagtgcgtactaacgcgtgttgc

SEQ ID NO: 5863360 - DNA, 25 bp, Homo sapien
gtaacccgccgtacggattaagtgc

SEQ ID NO: 5863361 - DNA, 25 bp, Homo sapien
ctcgactatctacgtcgcgtgttgc

SEQ ID NO: 5863362 - DNA, 25 bp, Homo sapien
gcatgtatcggttacgcgtcaggac

SEQ ID NO: 5863363 - DNA, 25 bp, Homo sapien
acatatgtactacgcgtcgccggca

SEQ ID NO: 5863364 - DNA, 25 bp, Homo sapien
atcacctcgggccgtatgatccgta

SEQ ID NO: 5863365 - DNA, 25 bp, Homo sapien
tgaccttacgaacgcgttacagggc

SEQ ID NO: 5863366 - DNA, 25 bp, Homo sapien
gtgcactccggtatacgcccatttc

SEQ ID NO: 5863367 - DNA, 25 bp, Homo sapien
ctcggtcgcttgtacgcgaaccaat

SEQ ID NO: 5863368 - DNA, 25 bp, Homo sapien
tcgggtatcggtaccgtcgatgtgt

SEQ ID NO: 5863369 - DNA, 25 bp, Homo sapien
tgggtacgcgttcggtcaagagtca

SEQ ID NO: 5863370 - DNA, 25 bp, Homo sapien
cggatgcgtcgtatacggagaaagc

SEQ ID NO: 5863371 - DNA, 25 bp, Homo sapien
gggctgcgcgtcccgttatttctta

SEQ ID NO: 5863372 - DNA, 25 bp, Homo sapien
tcggggcctatgcttcgcgctaaaa

SEQ ID NO: 5863373 - DNA, 25 bp, Homo sapien
acctcccgtcgttacacgagattgg

SEQ ID NO: 5863374 - DNA, 25 bp, Homo sapien
aagtcgcgctgcgtactaggttgtc

SEQ ID NO: 5863375 - DNA, 25 bp, Homo sapien
catccatacgtcggacgacgtctct

SEQ ID NO: 5863376 - DNA, 25 bp, Homo sapien
tgacgacgcggcacctaatttgcgt

SEQ ID NO: 5863377 - DNA, 25 bp, Homo sapien
tagtgaccgtcgacgcgaagtgtgt

SEQ ID NO: 5863378 - DNA, 25 bp, Homo sapien
acgatcatttcgcgtcggcaaaggc

SEQ ID NO: 5863379 - DNA, 25 bp, Homo sapien
tcgtgaccgtgcgtatccgacatag

SEQ ID NO: 5863380 - DNA, 25 bp, Homo sapien
acaacttcggtatacgacggagccc

SEQ ID NO: 5863381 - DNA, 25 bp, Homo sapien
ctttcgcccgcgtatgacggataca

SEQ ID NO: 5863382 - DNA, 25 bp, Homo sapien
ttgcacagtcgattgtgcggggaca

SEQ ID NO: 5863383 - DNA, 25 bp, Homo sapien
gttaatcgcactacgcgacgcgtct

SEQ ID NO: 5863384 - DNA, 25 bp, Homo sapien
acccaccgtctcgctacgaaactag

SEQ ID NO: 5863385 - DNA, 25 bp, Homo sapien
atatcaatcggtcgcgtaccgaggc

SEQ ID NO: 5863386 - DNA, 25 bp, Homo sapien
tcctgtcgtaccgccgtaattgtcg

SEQ ID NO: 5863387 - DNA, 25 bp, Homo sapien
ggggatctaagcggacgttttgcac

SEQ ID NO: 5863388 - DNA, 25 bp, Homo sapien
aagtattattcggtcgcggtggggc

SEQ ID NO: 5863389 - DNA, 25 bp, Homo sapien
gataatggattacgacggtggccgg

SEQ ID NO: 5863390 - DNA, 25 bp, Homo sapien
taccacgtacgttacgtcgcgtcag

SEQ ID NO: 5863391 - DNA, 25 bp, Homo sapien
ggaatgtcggacgcgatcagtacag

SEQ ID NO: 5863392 - DNA, 25 bp, Homo sapien
aagcgcacgcgcactacgatgtaac

SEQ ID NO: 5863393 - DNA, 25 bp, Homo sapien
atcgaagcgttaggccgatagcctg

SEQ ID NO: 5863394 - DNA, 25 bp, Homo sapien
tacgactcgcgatacccatcacagg

SEQ ID NO: 5863395 - DNA, 25 bp, Homo sapien
ataggtcgcctagcgctaagacagg

SEQ ID NO: 5863396 - DNA, 25 bp, Homo sapien
ccccaccgaccatagcgtagataac

SEQ ID NO: 5863397 - DNA, 25 bp, Homo sapien
tacccctagtcggacccgcaagaaa

SEQ ID NO: 5863398 - DNA, 25 bp, Homo sapien
agctgcgacccttcgcgtgtattct

SEQ ID NO: 5863399 - DNA, 25 bp, Homo sapien
tggtttgacgaaccgtcgcgacttc

SEQ ID NO: 5863400 - DNA, 25 bp, Homo sapien
ttggatagcggaacgtacgagcagc

SEQ ID NO: 5863401 - DNA, 25 bp, Homo sapien
ggagttgttacgcgcgaatctgggt

SEQ ID NO: 5863402 - DNA, 25 bp, Homo sapien
tcatctgcggtcggtctatgcgtgt

SEQ ID NO: 5863403 - DNA, 25 bp, Homo sapien
atctccagttcgcgcgtatacggct

SEQ ID NO: 5863404 - DNA, 25 bp, Homo sapien
gggtacgtacaacttcgcgatcacc

SEQ ID NO: 5863405 - DNA, 25 bp, Homo sapien
agtgtccccgcgtaccatgaaaacg

SEQ ID NO: 5863406 - DNA, 25 bp, Homo sapien
gtgacgcgcttgcgcgtatgcataa

SEQ ID NO: 5863407 - DNA, 25 bp, Homo sapien
ttccaacgcgtcacgaaccgtagga

SEQ ID NO: 5863408 - DNA, 25 bp, Homo sapien
cctcgccgagtaacgatatcccaga

SEQ ID NO: 5863409 - DNA, 25 bp, Homo sapien
ttgtcactaacccgcgtagacggct

SEQ ID NO: 5863410 - DNA, 25 bp, Homo sapien
agtcttaggttacgtcgcgccacag

SEQ ID NO: 5863411 - DNA, 25 bp, Homo sapien
gaagggccgttatgatacgaccgct

SEQ ID NO: 5863412 - DNA, 25 bp, Homo sapien
gcacgactatacgcgacctaacgga

SEQ ID NO: 5863413 - DNA, 25 bp, Homo sapien
ggaccaagtacgtccgcgatcagtt

SEQ ID NO: 5863414 - DNA, 25 bp, Homo sapien
ggattgtcgacgcgactagcgctta

SEQ ID NO: 5863415 - DNA, 25 bp, Homo sapien
ctacatatcgaccggcactccatcg

SEQ ID NO: 5863416 - DNA, 25 bp, Homo sapien
ctaacaacgcgctagcgtatcggag

SEQ ID NO: 5863417 - DNA, 25 bp, Homo sapien
tgtagcagcgtaccgctaccagaca

SEQ ID NO: 5863418 - DNA, 25 bp, Homo sapien
gaggctctatcgtgcgtcgagactt

SEQ ID NO: 5863419 - DNA, 25 bp, Homo sapien
ggtctagggcgcaaccgatgctttt

SEQ ID NO: 5863420 - DNA, 25 bp, Homo sapien
acaggccgctaccgacgtaattgag

SEQ ID NO: 5863421 - DNA, 25 bp, Homo sapien
cagagtacgggtcgaaagtagctcc

SEQ ID NO: 5863422 - DNA, 25 bp, Homo sapien
tgtccgccacgcgtacgcttgaaat

SEQ ID NO: 5863423 - DNA, 25 bp, Homo sapien
agactccggtacgatgcgttgtgac

SEQ ID NO: 5863424 - DNA, 25 bp, Homo sapien
ggggattcgcgtagaagggtcactt

SEQ ID NO: 5863425 - DNA, 25 bp, Homo sapien
agacgacgtaccgtacgctacctgt

SEQ ID NO: 5863426 - DNA, 25 bp, Homo sapien
ttggcctaccccgtagcgaataacg

SEQ ID NO: 5863427 - DNA, 25 bp, Homo sapien
cagcaggtacgcgcgacattaaggt

SEQ ID NO: 5863428 - DNA, 25 bp, Homo sapien
tgctgcatacggttgcgcgttccat

SEQ ID NO: 5863429 - DNA, 25 bp, Homo sapien
cgagttcgctacgatcgatcgcgat

SEQ ID NO: 5863430 - DNA, 25 bp, Homo sapien
aatcctgcgcgcgattagcttgtcg

SEQ ID NO: 5863431 - DNA, 25 bp, Homo sapien
gcggaacgctacgtcgaacattcgt

SEQ ID NO: 5863432 - DNA, 25 bp, Homo sapien
ttatggcgcgacctatcctaacccg

SEQ ID NO: 5863433 - DNA, 25 bp, Homo sapien
ggatcggacgcaccgtctatgcatt

SEQ ID NO: 5863434 - DNA, 25 bp, Homo sapien
gcatatgcgacgatctagccccgta

SEQ ID NO: 5863435 - DNA, 25 bp, Homo sapien
cgtacacaccgcgtatcggatctgt

SEQ ID NO: 5863436 - DNA, 25 bp, Homo sapien
gtttgattacgtactcgcggctggc

SEQ ID NO: 5863437 - DNA, 25 bp, Homo sapien
ttgcaacgtatagcgcgccgtccta

SEQ ID NO: 5863438 - DNA, 25 bp, Homo sapien
gtcgacacgggtcgacgaacataga

SEQ ID NO: 5863439 - DNA, 25 bp, Homo sapien
agatgtcccgattggtacgttcggc

SEQ ID NO: 5863440 - DNA, 25 bp, Homo sapien
gtgcatacgtaatgcgccgtcggat

SEQ ID NO: 5863441 - DNA, 25 bp, Homo sapien
ttgggtcgcgtcggtatgatgtcac

SEQ ID NO: 5863442 - DNA, 25 bp, Homo sapien
ggaactcgtcttacgcgagatgtcc

SEQ ID NO: 5863443 - DNA, 25 bp, Homo sapien
cgtgggtacgatcgtccgtgagtat

SEQ ID NO: 5863444 - DNA, 25 bp, Homo sapien
tattgatatggggcgttcggcccct

SEQ ID NO: 5863445 - DNA, 25 bp, Homo sapien
tcattcgtacgccataccgtgtcgg

SEQ ID NO: 5863446 - DNA, 25 bp, Homo sapien
ctccctagacggtcgcgattgattc

SEQ ID NO: 5863447 - DNA, 25 bp, Homo sapien
gtgttctcgcgcgaaaacagccgaa

SEQ ID NO: 5863448 - DNA, 25 bp, Homo sapien
ggcgtacatagttctcgcgacctac

SEQ ID NO: 5863449 - DNA, 25 bp, Homo sapien
gaacctacgcgacgattagcccaga

SEQ ID NO: 5863450 - DNA, 25 bp, Homo sapien
gtcggtcgcgctacgacattgtact

SEQ ID NO: 5863451 - DNA, 25 bp, Homo sapien
aaccgccgatcgtaagtccaccagt

SEQ ID NO: 5863452 - DNA, 25 bp, Homo sapien
caagggcgctaaactacgcgactag

SEQ ID NO: 5863453 - DNA, 25 bp, Homo sapien
tacacagggttacgcaccgttgtcc

SEQ ID NO: 5863454 - DNA, 25 bp, Homo sapien
agagctttgtacgcggccctgcttt

SEQ ID NO: 5863455 - DNA, 25 bp, Homo sapien
agtggattacggcgcaacgtgtacc

SEQ ID NO: 5863456 - DNA, 25 bp, Homo sapien
agacacaactattgacgcggcaggc

SEQ ID NO: 5863457 - DNA, 25 bp, Homo sapien
attgcgagtccgtcgattgctacgc

SEQ ID NO: 5863458 - DNA, 25 bp, Homo sapien
tctacgttagcgagcgtagagccct

SEQ ID NO: 5863459 - DNA, 25 bp, Homo sapien
tttgcgacgtcgcgcgtatatgagc

SEQ ID NO: 5863460 - DNA, 25 bp, Homo sapien
ggaagagttagtacgagcgcgcaac

SEQ ID NO: 5863461 - DNA, 25 bp, Homo sapien
cgaggttagcgcgaacggttaccaa

SEQ ID NO: 5863462 - DNA, 25 bp, Homo sapien
ctcagttattcggcacgacgctgga

SEQ ID NO: 5863463 - DNA, 25 bp, Homo sapien
gatatggcgttacgctcgcccaatg

SEQ ID NO: 5863464 - DNA, 25 bp, Homo sapien
catagcgaccgcgcgtcattcgtat

SEQ ID NO: 5863465 - DNA, 25 bp, Homo sapien
ggcccagctactcgcgtagttgatt

SEQ ID NO: 5863466 - DNA, 25 bp, Homo sapien
cgcccacgcggcatattattggagt

SEQ ID NO: 5863467 - DNA, 25 bp, Homo sapien
gtctcatagcgcgttcgtatgctgg

SEQ ID NO: 5863468 - DNA, 25 bp, Homo sapien
gatcggagtaccgtacgctcagcta

SEQ ID NO: 5863469 - DNA, 25 bp, Homo sapien
acacgacggtgttacgtcgccagta

SEQ ID NO: 5863470 - DNA, 25 bp, Homo sapien
tactcgtccgttaacgcgagtgggt

SEQ ID NO: 5863471 - DNA, 25 bp, Homo sapien
cgggatatagtaggcgcgaacggaa

SEQ ID NO: 5863472 - DNA, 25 bp, Homo sapien
taccgccgtcgatcaagcgtcttga

SEQ ID NO: 5863473 - DNA, 25 bp, Homo sapien
cgcttcgacgtccggattagtcctt

SEQ ID NO: 5863474 - DNA, 25 bp, Homo sapien
tgttgctacgatagcgcggctcaag

SEQ ID NO: 5863475 - DNA, 25 bp, Homo sapien
ctatggactaagcgcgggtcagaag

SEQ ID NO: 5863476 - DNA, 25 bp, Homo sapien
ctgatgtagtacggccgacgtgtga

SEQ ID NO: 5863477 - DNA, 25 bp, Homo sapien
cccacgatagcggtacgcgaaatca

SEQ ID NO: 5863478 - DNA, 25 bp, Homo sapien
tcggtctaagagcgcgattcgttgg

SEQ ID NO: 5863479 - DNA, 25 bp, Homo sapien
cactgagttatcgcgaacggggatg

SEQ ID NO: 5863480 - DNA, 25 bp, Homo sapien
gcgcttggtacgcgcaatcacaact

SEQ ID NO: 5863481 - DNA, 25 bp, Homo sapien
ggcctccggtatcgcttagggattt

SEQ ID NO: 5863482 - DNA, 25 bp, Homo sapien
ctatgtgcgtcgacactagcgactg

SEQ ID NO: 5863483 - DNA, 25 bp, Homo sapien
gacgacacatcgcgttaccctctgt

SEQ ID NO: 5863484 - DNA, 25 bp, Homo sapien
cccacagcgtcgagcgtatgtattg

SEQ ID NO: 5863485 - DNA, 25 bp, Homo sapien
tatgtgcgctatatcgcggcgacac

SEQ ID NO: 5863486 - DNA, 25 bp, Homo sapien
aggtacatcgcgcggtcgaaatagg

SEQ ID NO: 5863487 - DNA, 25 bp, Homo sapien
tcctggcgaatacgcgtagtgctac

SEQ ID NO: 5863488 - DNA, 25 bp, Homo sapien
acgttccgacagtataccggttgcc

SEQ ID NO: 5863489 - DNA, 25 bp, Homo sapien
acgtccacgctaggacgcaactctt

SEQ ID NO: 5863490 - DNA, 25 bp, Homo sapien
gacgtgtgcgcgaatacctgtctga

SEQ ID NO: 5863491 - DNA, 25 bp, Homo sapien
agggcatacgacgtcgtgccttttg

SEQ ID NO: 5863492 - DNA, 25 bp, Homo sapien
aagcactagatcgcgcatcttgcgc

SEQ ID NO: 5863493 - DNA, 25 bp, Homo sapien
tactgtttaaccggcggacgctgga

SEQ ID NO: 5863494 - DNA, 25 bp, Homo sapien
ctgtcccccggatatatcgcctgtt

SEQ ID NO: 5863495 - DNA, 25 bp, Homo sapien
ctcatccgctagtagcgcactacct

SEQ ID NO: 5863496 - DNA, 25 bp, Homo sapien
ccgaaacgtctgatcgtacacgcct

SEQ ID NO: 5863497 - DNA, 25 bp, Homo sapien
ccgtttacaacggttcgcgatgacg

SEQ ID NO: 5863498 - DNA, 25 bp, Homo sapien
gaacgacgcgtcgataggtagagtc

SEQ ID NO: 5863499 - DNA, 25 bp, Homo sapien
cggcgagacgtacgttcgactgaat

SEQ ID NO: 5863500 - DNA, 25 bp, Homo sapien
aagtacgtcgcctatgtcgcgaagc

SEQ ID NO: 5863501 - DNA, 25 bp, Homo sapien
tattgccgtcacgcgtaacatcgcc

SEQ ID NO: 5863502 - DNA, 25 bp, Homo sapien
atcacgcgaaagacgtatcggccga

SEQ ID NO: 5863503 - DNA, 25 bp, Homo sapien
gggtatcatcgacgtgcgaacggtt

SEQ ID NO: 5863504 - DNA, 25 bp, Homo sapien
agcattcccgtacgcgttgacagga

SEQ ID NO: 5863505 - DNA, 25 bp, Homo sapien
cgtctgaggcgcggtataacgtttc

SEQ ID NO: 5863506 - DNA, 25 bp, Homo sapien
accgttacgacgtccgtagatctgc

SEQ ID NO: 5863507 - DNA, 25 bp, Homo sapien
gtggagcgggacgtaaacgtgtcat

SEQ ID NO: 5863508 - DNA, 25 bp, Homo sapien
atgctactacgattccgcggctgag

SEQ ID NO: 5863509 - DNA, 25 bp, Homo sapien
atgggattatacgaccggccctacc

SEQ ID NO: 5863510 - DNA, 25 bp, Homo sapien
cctccataagataggcgcgtagctc

SEQ ID NO: 5863511 - DNA, 25 bp, Homo sapien
ggaacgacacgcgatgtcgccataa

SEQ ID NO: 5863512 - DNA, 25 bp, Homo sapien
cgaagccgccgctataagtggaaca

SEQ ID NO: 5863513 - DNA, 25 bp, Homo sapien
ttaagctacgtctagcggaccgtcc

SEQ ID NO: 5863514 - DNA, 25 bp, Homo sapien
acacatgcgtaacggctagcgacgt

SEQ ID NO: 5863515 - DNA, 25 bp, Homo sapien
gctcggacgccgatactagacctta

SEQ ID NO: 5863516 - DNA, 25 bp, Homo sapien
gtagcagcgtcgacccgtaatactc

SEQ ID NO: 5863517 - DNA, 25 bp, Homo sapien
gaagcatccgatcgacgctctttgg

SEQ ID NO: 5863518 - DNA, 25 bp, Homo sapien
ggcttccgtacgggcctaagtattc

SEQ ID NO: 5863519 - DNA, 25 bp, Homo sapien
tgcccaagttatcgggcgtacgcat

SEQ ID NO: 5863520 - DNA, 25 bp, Homo sapien
gtggtccgactatactcggctgctt

SEQ ID NO: 5863521 - DNA, 25 bp, Homo sapien
ctcacgatacgtcggtcgtcttcga

SEQ ID NO: 5863522 - DNA, 25 bp, Homo sapien
gtgcaccgcgacgtaacgtgagtat

SEQ ID NO: 5863523 - DNA, 25 bp, Homo sapien
aagtgccacgtcgttcgacgtttcc

SEQ ID NO: 5863524 - DNA, 25 bp, Homo sapien
ctctagttagttgcgcgtccagcac

SEQ ID NO: 5863525 - DNA, 25 bp, Homo sapien
cggaaacggatacgactagctggca

SEQ ID NO: 5863526 - DNA, 25 bp, Homo sapien
gcagatcggttacgacacgcgtact

SEQ ID NO: 5863527 - DNA, 25 bp, Homo sapien
aaccctatgcgcggctagacagtac

SEQ ID NO: 5863528 - DNA, 25 bp, Homo sapien
ctcatgtggtacgcgcgattctggt

SEQ ID NO: 5863529 - DNA, 25 bp, Homo sapien
ggcattcattcgtaccgcgacggaa

SEQ ID NO: 5863530 - DNA, 25 bp, Homo sapien
acgcttgttatcggcgtacagaggg

SEQ ID NO: 5863531 - DNA, 25 bp, Homo sapien
ctggtgcgctactatccgacgtctt

SEQ ID NO: 5863532 - DNA, 25 bp, Homo sapien
cggcgaatcgtaacgagggtagttg

SEQ ID NO: 5863533 - DNA, 25 bp, Homo sapien
gggggaatagccgtacgcggtatat

SEQ ID NO: 5863534 - DNA, 25 bp, Homo sapien
gcaaacgttcggacgttacccactc

SEQ ID NO: 5863535 - DNA, 25 bp, Homo sapien
ttgaccctacgttcgcggctgaatc

SEQ ID NO: 5863536 - DNA, 25 bp, Homo sapien
atgaggctatacggcggtcttcctc

SEQ ID NO: 5863537 - DNA, 25 bp, Homo sapien
tactcagtctacgcgtcgaggtgga

SEQ ID NO: 5863538 - DNA, 25 bp, Homo sapien
ttaaataccgtacgcgactcgccgc

SEQ ID NO: 5863539 - DNA, 25 bp, Homo sapien
actggtcgcgcacgatattccagag

SEQ ID NO: 5863540 - DNA, 25 bp, Homo sapien
ggttctgcccgttacatcggggtat

SEQ ID NO: 5863541 - DNA, 25 bp, Homo sapien
caaacgcgacgataggtaggtcgtg

SEQ ID NO: 5863542 - DNA, 25 bp, Homo sapien
cccgtcagcgtacgtttcgacgatt

SEQ ID NO: 5863543 - DNA, 25 bp, Homo sapien
tgatgtccgatctagtacggccgga

SEQ ID NO: 5863544 - DNA, 25 bp, Homo sapien
tagattggcgcaattcgaccgtgcc

SEQ ID NO: 5863545 - DNA, 25 bp, Homo sapien
ctgagatatcccgcgtacgttgcct

SEQ ID NO: 5863546 - DNA, 25 bp, Homo sapien
aatgtcttcgtcgtacggctcacgg

SEQ ID NO: 5863547 - DNA, 25 bp, Homo sapien
tctcagtacatcgggcgtcgagaca

SEQ ID NO: 5863548 - DNA, 25 bp, Homo sapien
ttgatagctagccgtacggcgtgag

SEQ ID NO: 5863549 - DNA, 25 bp, Homo sapien
actaatataggacgcgcgaccaccg

SEQ ID NO: 5863550 - DNA, 25 bp, Homo sapien
ggatggtggacgctagtcgacacta

SEQ ID NO: 5863551 - DNA, 25 bp, Homo sapien
ctagctcggtacgtcgatccggaat

SEQ ID NO: 5863552 - DNA, 25 bp, Homo sapien
atatataccaccgcgcgaagggcag

SEQ ID NO: 5863553 - DNA, 25 bp, Homo sapien
gtgtaagattctacgcgcgatgccg

SEQ ID NO: 5863554 - DNA, 25 bp, Homo sapien
cgaagagtatatccgcgacgcgaga

SEQ ID NO: 5863555 - DNA, 25 bp, Homo sapien
cttcagatcggcgccctattaccgt

SEQ ID NO: 5863556 - DNA, 25 bp, Homo sapien
cgtatatcgtaacggtccgggacca

SEQ ID NO: 5863557 - DNA, 25 bp, Homo sapien
ccagcatagacggtacgtccggtta

SEQ ID NO: 5863558 - DNA, 25 bp, Homo sapien
ggaacacgcgtaacgtactggcaca

SEQ ID NO: 5863559 - DNA, 25 bp, Homo sapien
agcacaatagcgcctacgggctact

SEQ ID NO: 5863560 - DNA, 25 bp, Homo sapien
tctgtggtatctcgtacgcccctag

SEQ ID NO: 5863561 - DNA, 25 bp, Homo sapien
tcgtactcgtaggacgtcgcaagga

SEQ ID NO: 5863562 - DNA, 25 bp, Homo sapien
ccgacccgacggactatcacattga

SEQ ID NO: 5863563 - DNA, 25 bp, Homo sapien
ctggcacgactaccgatcatttcgc

SEQ ID NO: 5863564 - DNA, 25 bp, Homo sapien
ggagcatcgcgcgtacgctttatac

SEQ ID NO: 5863565 - DNA, 25 bp, Homo sapien
agcacgcgacttagcgcgaaaagtg

SEQ ID NO: 5863566 - DNA, 25 bp, Homo sapien
ggtcgcctcgcgtgatgtaattgag

SEQ ID NO: 5863567 - DNA, 25 bp, Homo sapien
gcatcgacgtatccgggcgtttaag

SEQ ID NO: 5863568 - DNA, 25 bp, Homo sapien
cgttcagcgctaatacgtcctgtgc

SEQ ID NO: 5863569 - DNA, 25 bp, Homo sapien
gcaccagtagtcgtatcgccactgt

SEQ ID NO: 5863570 - DNA, 25 bp, Homo sapien
gcgatcggtggcgacgtataatgtc

SEQ ID NO: 5863571 - DNA, 25 bp, Homo sapien
ggtccctagcgttatccgactatgg

SEQ ID NO: 5863572 - DNA, 25 bp, Homo sapien
aggcggattacgcgacgtatcacca

SEQ ID NO: 5863573 - DNA, 25 bp, Homo sapien
tttccacgcgtactttgcggaggct

SEQ ID NO: 5863574 - DNA, 25 bp, Homo sapien
aacgtctatccgtcgggagttcgtg

SEQ ID NO: 5863575 - DNA, 25 bp, Homo sapien
gagccccgcgtaatctagggtatgt

SEQ ID NO: 5863576 - DNA, 25 bp, Homo sapien
acagggggtcgcggactaatggatt

SEQ ID NO: 5863577 - DNA, 25 bp, Homo sapien
gcggtttagatcgcggtcatccgat

SEQ ID NO: 5863578 - DNA, 25 bp, Homo sapien
gttccgcgctaacgcgtactcactt

SEQ ID NO: 5863579 - DNA, 25 bp, Homo sapien
ttcggacgcggtcgagtatttcgga

SEQ ID NO: 5863580 - DNA, 25 bp, Homo sapien
ttgtagggttcgcgcgttagtccgt

SEQ ID NO: 5863581 - DNA, 25 bp, Homo sapien
accgcatccgatacgacgcggttat

SEQ ID NO: 5863582 - DNA, 25 bp, Homo sapien
ctgtagtactcgcgcgttctcctgt

SEQ ID NO: 5863583 - DNA, 25 bp, Homo sapien
ggagatacttaggcgcccggtgtat

SEQ ID NO: 5863584 - DNA, 25 bp, Homo sapien
ttgatccgcgtatacggttacgcgc

SEQ ID NO: 5863585 - DNA, 25 bp, Homo sapien
cgtatctacgagcggcatgagtctg

SEQ ID NO: 5863586 - DNA, 25 bp, Homo sapien
tcgttaggtttcgcgcgtagctctg

SEQ ID NO: 5863587 - DNA, 25 bp, Homo sapien
cacgtagcttgaccgaacgaggaac

SEQ ID NO: 5863588 - DNA, 25 bp, Homo sapien
gcctggcgacgtatcgcatatacct

SEQ ID NO: 5863589 - DNA, 25 bp, Homo sapien
gtggaccgaccaagcgtacaacttc

SEQ ID NO: 5863590 - DNA, 25 bp, Homo sapien
taatcctacgcatcgacgacgggct

SEQ ID NO: 5863591 - DNA, 25 bp, Homo sapien
actgcggttttacggaccgctatgc

SEQ ID NO: 5863592 - DNA, 25 bp, Homo sapien
tctccgcctacggtcgatacagtca

SEQ ID NO: 5863593 - DNA, 25 bp, Homo sapien
ccgtactctagtgcgccgatcactt

SEQ ID NO: 5863594 - DNA, 25 bp, Homo sapien
acctctccgtaccgacgtttgtgga

SEQ ID NO: 5863595 - DNA, 25 bp, Homo sapien
cccgtttgaatcggcgcactgtctt

SEQ ID NO: 5863596 - DNA, 25 bp, Homo sapien
gcgccagtacgatacggtaacctca

SEQ ID NO: 5863597 - DNA, 25 bp, Homo sapien
gtgttggtacgagttagcgggcgaa

SEQ ID NO: 5863598 - DNA, 25 bp, Homo sapien
gacagtcgatcgcgtagtgtagggt

SEQ ID NO: 5863599 - DNA, 25 bp, Homo sapien
ggtatcgattctagcgcgagaccac

SEQ ID NO: 5863600 - DNA, 25 bp, Homo sapien
cttctccgcgatccctcgttgatga

SEQ ID NO: 5863601 - DNA, 25 bp, Homo sapien
aacaggtaacgtacgcacgcccact

SEQ ID NO: 5863602 - DNA, 25 bp, Homo sapien
tcgtctaagcgcgactaacttcccg

SEQ ID NO: 5863603 - DNA, 25 bp, Homo sapien
taaaagtagtgcgtaccgctgcccc

SEQ ID NO: 5863604 - DNA, 25 bp, Homo sapien
ttccgtcgtacgagatagaccccct

SEQ ID NO: 5863605 - DNA, 25 bp, Homo sapien
aacagatcgcgtatccggcttcgga

SEQ ID NO: 5863606 - DNA, 25 bp, Homo sapien
ctgcgtcggtacgatcctatcgtga

SEQ ID NO: 5863607 - DNA, 25 bp, Homo sapien
cctttgatcgcacgaacggccacta

SEQ ID NO: 5863608 - DNA, 25 bp, Homo sapien
gtgcttcgaccaacccgatttctgg

SEQ ID NO: 5863609 - DNA, 25 bp, Homo sapien
gacgccaagtatacccgcgtgcttt

SEQ ID NO: 5863610 - DNA, 25 bp, Homo sapien
accaagctagtcgtacgctaggtcc

SEQ ID NO: 5863611 - DNA, 25 bp, Homo sapien
tgcagtctagcgcgaggttgaagga

SEQ ID NO: 5863612 - DNA, 25 bp, Homo sapien
cggcatacgtttcgcgctatcgtag

SEQ ID NO: 5863613 - DNA, 25 bp, Homo sapien
ccggtaaatcgtgcgaccgtaggta

SEQ ID NO: 5863614 - DNA, 25 bp, Homo sapien
agcgagttcgcgagcacgatcagat

SEQ ID NO: 5863615 - DNA, 25 bp, Homo sapien
cagagtacgaccgacggtaagagca

SEQ ID NO: 5863616 - DNA, 25 bp, Homo sapien
gcatgagccgtaaccgcgttactct

SEQ ID NO: 5863617 - DNA, 25 bp, Homo sapien
gggccatcggtcgcgttatataagc

SEQ ID NO: 5863618 - DNA, 25 bp, Homo sapien
tctgttattcgtcgggacggggcaa

SEQ ID NO: 5863619 - DNA, 25 bp, Homo sapien
ggtgagagtatgccgcgatgtcatc

SEQ ID NO: 5863620 - DNA, 25 bp, Homo sapien
ccagctcggactagcggtacagaat

SEQ ID NO: 5863621 - DNA, 25 bp, Homo sapien
actaggttagatcagcgcggcacgt

SEQ ID NO: 5863622 - DNA, 25 bp, Homo sapien
actctggcgatagagtccgaatccg

SEQ ID NO: 5863623 - DNA, 25 bp, Homo sapien
accctaccgttcgtaacgtggcatg

SEQ ID NO: 5863624 - DNA, 25 bp, Homo sapien
gaaggggactagtcgcgaagacgat

SEQ ID NO: 5863625 - DNA, 25 bp, Homo sapien
tgtggtaccgggcgattacaggttc

SEQ ID NO: 5863626 - DNA, 25 bp, Homo sapien
ggttggcgttagcgtacgttcttcc

SEQ ID NO: 5863627 - DNA, 25 bp, Homo sapien
atacagcgcgtaggtccgatctgag

SEQ ID NO: 5863628 - DNA, 25 bp, Homo sapien
gatccttacgggcggtaactcgcct

SEQ ID NO: 5863629 - DNA, 25 bp, Homo sapien
agcatcacgtcggcgtaacgtcgag

SEQ ID NO: 5863630 - DNA, 25 bp, Homo sapien
ccttcgacgcgcccgatataacagg

SEQ ID NO: 5863631 - DNA, 25 bp, Homo sapien
tgcgtccgcgtgttatacggtcgga

SEQ ID NO: 5863632 - DNA, 25 bp, Homo sapien
tccagttagtcggtcgcgagggcta

SEQ ID NO: 5863633 - DNA, 25 bp, Homo sapien
gcgctgctacggcgttcgatacgtt

SEQ ID NO: 5863634 - DNA, 25 bp, Homo sapien
gtatcgtaaccgcgtgtcgcgctag

SEQ ID NO: 5863635 - DNA, 25 bp, Homo sapien
atgagagcggtcgacgctagctgtg

SEQ ID NO: 5863636 - DNA, 25 bp, Homo sapien
acgctcggtagcgcatcgtaaacgc

SEQ ID NO: 5863637 - DNA, 25 bp, Homo sapien
gtgacgcgcgtaatagacccaggga

SEQ ID NO: 5863638 - DNA, 25 bp, Homo sapien
gcttctctcgcgtcaaacgcgagtc

SEQ ID NO: 5863639 - DNA, 25 bp, Homo sapien
gatacgtaccgatcgaccggcactc

SEQ ID NO: 5863640 - DNA, 25 bp, Homo sapien
tgccgccgtacgacggacatgacta

SEQ ID NO: 5863641 - DNA, 25 bp, Homo sapien
ctgagaggttcgcgtaacccctggt

SEQ ID NO: 5863642 - DNA, 25 bp, Homo sapien
cgtggcgcgtcgtacgcaaatgtca

SEQ ID NO: 5863643 - DNA, 25 bp, Homo sapien
ggtcgcaacgcgagtaagcagagag

SEQ ID NO: 5863644 - DNA, 25 bp, Homo sapien
cgctcccccgttacgtcgttgaatc

SEQ ID NO: 5863645 - DNA, 25 bp, Homo sapien
agactcggttaacgacgcgtgcggt

SEQ ID NO: 5863646 - DNA, 25 bp, Homo sapien
gagcatcgtataggtccgcggatcc

SEQ ID NO: 5863647 - DNA, 25 bp, Homo sapien
acctggtcgcgcaaagtcgtcagtc

SEQ ID NO: 5863648 - DNA, 25 bp, Homo sapien
cgcttacactatatcgcggggggct

SEQ ID NO: 5863649 - DNA, 25 bp, Homo sapien
gcctgttactacggcccggtgtttc

SEQ ID NO: 5863650 - DNA, 25 bp, Homo sapien
ccaaccacatacgacgcgaaggagc

SEQ ID NO: 5863651 - DNA, 25 bp, Homo sapien
tacccaacgtcggccgaactagtgc

SEQ ID NO: 5863652 - DNA, 25 bp, Homo sapien
tgtgcagcgacgtatacggtgcgga

SEQ ID NO: 5863653 - DNA, 25 bp, Homo sapien
tcacaccgagcgcgattgggcacaa

SEQ ID NO: 5863654 - DNA, 25 bp, Homo sapien
agctagaattcgcgcggtcggttgg

SEQ ID NO: 5863655 - DNA, 25 bp, Homo sapien
tcttccctacgtgcgacgaccactg

SEQ ID NO: 5863656 - DNA, 25 bp, Homo sapien
gcgtatgtaacgccgttcgactggg

SEQ ID NO: 5863657 - DNA, 25 bp, Homo sapien
tatcctgcacgacgtcgaggcggat

SEQ ID NO: 5863658 - DNA, 25 bp, Homo sapien
gaacatgactcgccgcgtaggatcc

SEQ ID NO: 5863659 - DNA, 25 bp, Homo sapien
cagtgcccggacgggtactttcgta

SEQ ID NO: 5863660 - DNA, 25 bp, Homo sapien
ggtaatacgtacggccgtagcgctc

SEQ ID NO: 5863661 - DNA, 25 bp, Homo sapien
cagacaccgtcatgcgtatgagcgg

SEQ ID NO: 5863662 - DNA, 25 bp, Homo sapien
ttcgagcggaatagcgtgctacggg

SEQ ID NO: 5863663 - DNA, 25 bp, Homo sapien
cgcattcgcgcgaaggatcctggat

SEQ ID NO: 5863664 - DNA, 25 bp, Homo sapien
tgtccatacgtatcgtcgcgctggc

SEQ ID NO: 5863665 - DNA, 25 bp, Homo sapien
gccgctggttcgtatagcgatcagc

SEQ ID NO: 5863666 - DNA, 25 bp, Homo sapien
gtcctgctacgcgcgttgaattcgc

SEQ ID NO: 5863667 - DNA, 25 bp, Homo sapien
aggcatcgcaactcgtaggtgcgtc

SEQ ID NO: 5863668 - DNA, 25 bp, Homo sapien
ggtgagacccgtacgatcgtcgctt

SEQ ID NO: 5863669 - DNA, 25 bp, Homo sapien
ccttcgcgcgggacgaataccttga

SEQ ID NO: 5863670 - DNA, 25 bp, Homo sapien
tccacacgcggctatatcgtagcgg

SEQ ID NO: 5863671 - DNA, 25 bp, Homo sapien
agtgtccgcgaacctattgggaccc

SEQ ID NO: 5863672 - DNA, 25 bp, Homo sapien
ctcccaacgacgctacatccatgcc

SEQ ID NO: 5863673 - DNA, 25 bp, Homo sapien
agccgaacgtatcgcgacgacttcg

SEQ ID NO: 5863674 - DNA, 25 bp, Homo sapien
cggttctcgtccggcctatctgaca

SEQ ID NO: 5863675 - DNA, 25 bp, Homo sapien
gataccgcgtacgagctgtcaccgt

SEQ ID NO: 5863676 - DNA, 25 bp, Homo sapien
agaacggcggcataatacgcccacc

SEQ ID NO: 5863677 - DNA, 25 bp, Homo sapien
tgtgccaatagcgcgaccgatccac

SEQ ID NO: 5863678 - DNA, 25 bp, Homo sapien
gtgcaacgcgcagttaggtggcatc

SEQ ID NO: 5863679 - DNA, 25 bp, Homo sapien
agacgccgagttagcgcgttcacca

SEQ ID NO: 5863680 - DNA, 25 bp, Homo sapien
tgcatccacgcgcgacttaatgcgg

SEQ ID NO: 5863681 - DNA, 25 bp, Homo sapien
gttaggaaccggcgcgacacgaatg

SEQ ID NO: 5863682 - DNA, 25 bp, Homo sapien
cttccccgcttctacgtcggagagt

SEQ ID NO: 5863683 - DNA, 25 bp, Homo sapien
aagcttgcgttagacgctacccggc

SEQ ID NO: 5863684 - DNA, 25 bp, Homo sapien
tgggggtactagcgcgaccttccta

SEQ ID NO: 5863685 - DNA, 25 bp, Homo sapien
gtaggcatcgcggacgtaggcaatc

SEQ ID NO: 5863686 - DNA, 25 bp, Homo sapien
acaggttccggtacgatcgacggtc

SEQ ID NO: 5863687 - DNA, 25 bp, Homo sapien
ggcttgggtctatacgcgctagcag

SEQ ID NO: 5863688 - DNA, 25 bp, Homo sapien
gcgcatcgtcgcgctatagcagagt

SEQ ID NO: 5863689 - DNA, 25 bp, Homo sapien
cgtcctccgcgacgaagtagtgtca

SEQ ID NO: 5863690 - DNA, 25 bp, Homo sapien
cgcctcagtcgaccgtagactgaca

SEQ ID NO: 5863691 - DNA, 25 bp, Homo sapien
caaggcaggatcgcgcgatcgtcaa

SEQ ID NO: 5863692 - DNA, 25 bp, Homo sapien
atccgcatacgcgcgctacccaatg

SEQ ID NO: 5863693 - DNA, 25 bp, Homo sapien
caggaccgtacgcgatatcgtcacg

SEQ ID NO: 5863694 - DNA, 25 bp, Homo sapien
acgggtcgatacgcctacgacgatg

SEQ ID NO: 5863695 - DNA, 25 bp, Homo sapien
taggtgacctagtcggacggcgtgt

SEQ ID NO: 5863696 - DNA, 25 bp, Homo sapien
cattagtgatcgtgcgtcgctgcgc

SEQ ID NO: 5863697 - DNA, 25 bp, Homo sapien
agcacctagcgccgttcgatatccg

SEQ ID NO: 5863698 - DNA, 25 bp, Homo sapien
cacaggctcgcgtgaccgattagac

SEQ ID NO: 5863699 - DNA, 25 bp, Homo sapien
cgtcgtccgcgtagtatgctcggta

SEQ ID NO: 5863700 - DNA, 25 bp, Homo sapien
gccgggtagtaccggcgaatttctc

SEQ ID NO: 5863701 - DNA, 25 bp, Homo sapien
ggggatcgatacgttaccggtggct

SEQ ID NO: 5863702 - DNA, 25 bp, Homo sapien
agcagcctacgcgacgaagcgtatg

SEQ ID NO: 5863703 - DNA, 25 bp, Homo sapien
gttgtaacgaaggcgcgatctgccc

SEQ ID NO: 5863704 - DNA, 25 bp, Homo sapien
cacctgtcgctccgtacactcggta

SEQ ID NO: 5863705 - DNA, 25 bp, Homo sapien
cctaagatacgcgacggctcgaacc

SEQ ID NO: 5863706 - DNA, 25 bp, Homo sapien
tcagcgcgttagcgagtcagcagac

SEQ ID NO: 5863707 - DNA, 25 bp, Homo sapien
ccatacgttcggcgtatagcgcggt

SEQ ID NO: 5863708 - DNA, 25 bp, Homo sapien
gacttgcgaatcgacgggtcttcgc

SEQ ID NO: 5863709 - DNA, 25 bp, Homo sapien
catcgatagttcgacgcgctggtcg

SEQ ID NO: 5863710 - DNA, 25 bp, Homo sapien
caaggctcgttgtacgcgacgcgat

SEQ ID NO: 5863711 - DNA, 25 bp, Homo sapien
agtcaacatacgagcgcgtctcggc

SEQ ID NO: 5863712 - DNA, 25 bp, Homo sapien
gcacaccgtccgtgtacgaagtggt

SEQ ID NO: 5863713 - DNA, 25 bp, Homo sapien
gaccctgacgtacggcccttatgag

SEQ ID NO: 5863714 - DNA, 25 bp, Homo sapien
gagcaacgacgtccgacctccttac

SEQ ID NO: 5863715 - DNA, 25 bp, Homo sapien
tttctgccgatagcgcgtcgcgtgt

SEQ ID NO: 5863716 - DNA, 25 bp, Homo sapien
cgatgtcccgcgtcgacaatggaag

SEQ ID NO: 5863717 - DNA, 25 bp, Homo sapien
atgctgcgtcgccctatcgccttga

SEQ ID NO: 5863718 - DNA, 25 bp, Homo sapien
gacgggacgtctagtcgcgtgtttg

SEQ ID NO: 5863719 - DNA, 25 bp, Homo sapien
acatgcgatcggccgtcgacaatcg

SEQ ID NO: 5863720 - DNA, 25 bp, Homo sapien
tggagacatccgcgcgtcaagcaga

SEQ ID NO: 5863721 - DNA, 25 bp, Homo sapien
cctctcacgcgtcgtagataccgac

SEQ ID NO: 5863722 - DNA, 25 bp, Homo sapien
gctatacgtagcgacgtgcctgctg

SEQ ID NO: 5863723 - DNA, 25 bp, Homo sapien
gaggtgatactaccgtccgggtgag

SEQ ID NO: 5863724 - DNA, 25 bp, Homo sapien
gaaccgttacgcgcgttgttgcgac

SEQ ID NO: 5863725 - DNA, 25 bp, Homo sapien
ggtctaccgcgacgtacttgtctcc

SEQ ID NO: 5863726 - DNA, 25 bp, Homo sapien
ctgttgctagtccgcgtacgcgagt

SEQ ID NO: 5863727 - DNA, 25 bp, Homo sapien
caagcaagggtacgtcgaaccctcg

SEQ ID NO: 5863728 - DNA, 25 bp, Homo sapien
ttgaccccctacgaaccgctggtag

SEQ ID NO: 5863729 - DNA, 25 bp, Homo sapien
tgcattcgttagcgttcggtcggcc

SEQ ID NO: 5863730 - DNA, 25 bp, Homo sapien
ccgagaattcgcgcacggggttact

SEQ ID NO: 5863731 - DNA, 25 bp, Homo sapien
ccaggtccgtagtcgtgctatgtcg

SEQ ID NO: 5863732 - DNA, 25 bp, Homo sapien
ccggaccatttacgtccgcagctga

SEQ ID NO: 5863733 - DNA, 25 bp, Homo sapien
gatatcatgcgcctcgacgagccgt

SEQ ID NO: 5863734 - DNA, 25 bp, Homo sapien
actgtgttacgacgcgcctccgcta

SEQ ID NO: 5863735 - DNA, 25 bp, Homo sapien
ggggcatacgggccacgacaagaaa

SEQ ID NO: 5863736 - DNA, 25 bp, Homo sapien
ggaccagcccttacgacgcttgtca

SEQ ID NO: 5863737 - DNA, 25 bp, Homo sapien
tgcgtagtatcccgttgcgagggga

SEQ ID NO: 5863738 - DNA, 25 bp, Homo sapien
tggttgggcgcgcaatagtgctctg

SEQ ID NO: 5863739 - DNA, 25 bp, Homo sapien
agatcgatcgtggtacgcgcgacca

SEQ ID NO: 5863740 - DNA, 25 bp, Homo sapien
gaacttgctacgttcgaggggcggt

SEQ ID NO: 5863741 - DNA, 25 bp, Homo sapien
attccgggtcgaacgttcgtgctgg

SEQ ID NO: 5863742 - DNA, 25 bp, Homo sapien
ccagacagtatcgcgacgggtgaac

SEQ ID NO: 5863743 - DNA, 25 bp, Homo sapien
cttgcctacaccgcgtacgaacgtc

SEQ ID NO: 5863744 - DNA, 25 bp, Homo sapien
gaaggcccctatcgcgtaatcctgc

SEQ ID NO: 5863745 - DNA, 25 bp, Homo sapien
cgatgacgcgaggtgttaccgcatc

SEQ ID NO: 5863746 - DNA, 25 bp, Homo sapien
ccggcaggatcatacgcgggatact

SEQ ID NO: 5863747 - DNA, 25 bp, Homo sapien
gcacattcttgaacggtcgggcacg

SEQ ID NO: 5863748 - DNA, 25 bp, Homo sapien
gagtcgtcgtatccgggcgtcgata

SEQ ID NO: 5863749 - DNA, 25 bp, Homo sapien
cgcaggccgagccgcatatcttaga

SEQ ID NO: 5863750 - DNA, 25 bp, Homo sapien
tctcgcgtaatgcgcgacgctatcg

SEQ ID NO: 5863751 - DNA, 25 bp, Homo sapien
ggtctgtagccgcgctatccgcttt

SEQ ID NO: 5863752 - DNA, 25 bp, Homo sapien
ggttcgtcgtatagtgcgcctgtcg

SEQ ID NO: 5863753 - DNA, 25 bp, Homo sapien
catcggtgacgtacgcccggaatag

SEQ ID NO: 5863754 - DNA, 25 bp, Homo sapien
ggccaaatcgatcgggcgctgattg

SEQ ID NO: 5863755 - DNA, 25 bp, Homo sapien
gcgatgccccatcgcgataagggtt

SEQ ID NO: 5863756 - DNA, 25 bp, Homo sapien
tatgcggatcggacgccgttaggac

SEQ ID NO: 5863757 - DNA, 25 bp, Homo sapien
acgacctacgtccgcgtagtctcag

SEQ ID NO: 5863758 - DNA, 25 bp, Homo sapien
gtccgccgcgactaacctagtactc

SEQ ID NO: 5863759 - DNA, 25 bp, Homo sapien
gtacggttggtcgcgcgtacagaca

SEQ ID NO: 5863760 - DNA, 25 bp, Homo sapien
cgcgcttgtcgcgtccgtagatcta

SEQ ID NO: 5863761 - DNA, 25 bp, Homo sapien
cttggtctcgcggcgatacaacctg

SEQ ID NO: 5863762 - DNA, 25 bp, Homo sapien
cgtcgtgacatacggcgtaagcctc

SEQ ID NO: 5863763 - DNA, 25 bp, Homo sapien
cggaggacggttcgcgatatagcgt

SEQ ID NO: 5863764 - DNA, 25 bp, Homo sapien
ccgatggggtatcgcgactcgcttt

SEQ ID NO: 5863765 - DNA, 25 bp, Homo sapien
ataagcgcgtacccccctacgatgg

SEQ ID NO: 5863766 - DNA, 25 bp, Homo sapien
catttccgatgcgcgatagtcggcc

SEQ ID NO: 5863767 - DNA, 25 bp, Homo sapien
gaggtggcgctcgtaagatgtgctc

SEQ ID NO: 5863768 - DNA, 25 bp, Homo sapien
tccagaggtccgcgtcgatctctag

SEQ ID NO: 5863769 - DNA, 25 bp, Homo sapien
agtcccgctacgcatcgcggtttct

SEQ ID NO: 5863770 - DNA, 25 bp, Homo sapien
cttcgcttacgtcgaccgcggtaac

SEQ ID NO: 5863771 - DNA, 25 bp, Homo sapien
ggcgtgcgcgcgaagatacctatca

SEQ ID NO: 5863772 - DNA, 25 bp, Homo sapien
gatccgaattgcgacggggtgatgc

SEQ ID NO: 5863773 - DNA, 25 bp, Homo sapien
gcggaaaacgcgacgtatcccctac

SEQ ID NO: 5863774 - DNA, 25 bp, Homo sapien
gatactaggcgaacgatcccccgtg

SEQ ID NO: 5863775 - DNA, 25 bp, Homo sapien
ctgtggacttcgtacgcgggctaga

SEQ ID NO: 5863776 - DNA, 25 bp, Homo sapien
acacgaccgacctatagcggcacga

SEQ ID NO: 5863777 - DNA, 25 bp, Homo sapien
caccgggtatcggcgcacttttgga

SEQ ID NO: 5863778 - DNA, 25 bp, Homo sapien
aggccatatacgcgaccgtcgcgta

SEQ ID NO: 5863779 - DNA, 25 bp, Homo sapien
atcccgcgcgccttattagaaccgc

SEQ ID NO: 5863780 - DNA, 25 bp, Homo sapien
gcggtagatatcgcgtcccgtacca

SEQ ID NO: 5863781 - DNA, 25 bp, Homo sapien
atcaccctcgcgttcgacactcggt

SEQ ID NO: 5863782 - DNA, 25 bp, Homo sapien
atattcgcgtacgcgctacgcctcc

SEQ ID NO: 5863783 - DNA, 25 bp, Homo sapien
ctgcccgcgtcgtacaagccataga

SEQ ID NO: 5863784 - DNA, 25 bp, Homo sapien
gtgttacgcggtcgagagtcgccat

SEQ ID NO: 5863785 - DNA, 25 bp, Homo sapien
ttgcggcccgtagcggttatcggat

SEQ ID NO: 5863786 - DNA, 25 bp, Homo sapien
gctcggtaggcgcttatcggtaggt

SEQ ID NO: 5863787 - DNA, 25 bp, Homo sapien
ctgtcagcgccaatcgtagcgacag

SEQ ID NO: 5863788 - DNA, 25 bp, Homo sapien
ttcgtgatacgcgttcggtgtcgcg

SEQ ID NO: 5863789 - DNA, 25 bp, Homo sapien
gacgggcgttgggacgagttcatct

SEQ ID NO: 5863790 - DNA, 25 bp, Homo sapien
cctctcctacgccgtaacggctaac

SEQ ID NO: 5863791 - DNA, 25 bp, Homo sapien
ccctcgccgacgtctatactcgaag

SEQ ID NO: 5863792 - DNA, 25 bp, Homo sapien
acgcgcgtcgaaccggtataacctc

SEQ ID NO: 5863793 - DNA, 25 bp, Homo sapien
gcaacgcgatccgcgctacgtaaca

SEQ ID NO: 5863794 - DNA, 25 bp, Homo sapien
tgcgcttagcgctgttcgcaagtgg

SEQ ID NO: 5863795 - DNA, 25 bp, Homo sapien
tgcccgcgatcgttcacgtcagaac

SEQ ID NO: 5863796 - DNA, 25 bp, Homo sapien
gatggccgctagttgcgtcaaccga

SEQ ID NO: 5863797 - DNA, 25 bp, Homo sapien
aggcccaaccgcgctcgtacgattt

SEQ ID NO: 5863798 - DNA, 25 bp, Homo sapien
cgatgtccgtacgacacgttgctcg

SEQ ID NO: 5863799 - DNA, 25 bp, Homo sapien
ctcgacgtgacgccgtaatccgatc

SEQ ID NO: 5863800 - DNA, 25 bp, Homo sapien
gccccatccggacgtatagccgata

SEQ ID NO: 5863801 - DNA, 25 bp, Homo sapien
tctcagggtcgcaccgtatgacgag

SEQ ID NO: 5863802 - DNA, 25 bp, Homo sapien
tcacatgtaacccgtcgcgcctacg

SEQ ID NO: 5863803 - DNA, 25 bp, Homo sapien
ggcaatagtcggcccgataagtggc

SEQ ID NO: 5863804 - DNA, 25 bp, Homo sapien
ggcgtccaatacgccgcggattcat

SEQ ID NO: 5863805 - DNA, 25 bp, Homo sapien
agtgccacgggcgatactatcctgc

SEQ ID NO: 5863806 - DNA, 25 bp, Homo sapien
aatgctaggtgcgatacgccgggtg

SEQ ID NO: 5863807 - DNA, 25 bp, Homo sapien
cctagataatggaccgcgccctgag

SEQ ID NO: 5863808 - DNA, 25 bp, Homo sapien
accgcgcgtagcgactatcctagtc

SEQ ID NO: 5863809 - DNA, 25 bp, Homo sapien
gcccagctagtacgtcggacaacgt

SEQ ID NO: 5863810 - DNA, 25 bp, Homo sapien
cttcgccccggtatcgactgacaag

SEQ ID NO: 5863811 - DNA, 25 bp, Homo sapien
tcggactacgccggacgtatacgac

SEQ ID NO: 5863812 - DNA, 25 bp, Homo sapien
gcgcggtacgcgaaccggtcattat

SEQ ID NO: 5863813 - DNA, 25 bp, Homo sapien
cagcgagtcggacatacgtggcatc

SEQ ID NO: 5863814 - DNA, 25 bp, Homo sapien
gttctcgggtacgaccgtagaccca

SEQ ID NO: 5863815 - DNA, 25 bp, Homo sapien
cgcagtataatcgggtcgtcgggac

SEQ ID NO: 5863816 - DNA, 25 bp, Homo sapien
cacccgccgtcccgaataatcctga

SEQ ID NO: 5863817 - DNA, 25 bp, Homo sapien
tggtgttatcggacgtcgggcactc

SEQ ID NO: 5863818 - DNA, 25 bp, Homo sapien
atgtaaccgtctacgcgagccgcca

SEQ ID NO: 5863819 - DNA, 25 bp, Homo sapien
gaggaccactacggttcgacctgtg

SEQ ID NO: 5863820 - DNA, 25 bp, Homo sapien
catggaccttcgaacgacgcagcga

SEQ ID NO: 5863821 - DNA, 25 bp, Homo sapien
ggtccgcggcgatatgtcgcaatag

SEQ ID NO: 5863822 - DNA, 25 bp, Homo sapien
ggacgactacgcgacgctaggtgta

SEQ ID NO: 5863823 - DNA, 25 bp, Homo sapien
gtgcggttaacgcatagcgggagga

SEQ ID NO: 5863824 - DNA, 25 bp, Homo sapien
ggcaaagtcctaacgcggcggactt

SEQ ID NO: 5863825 - DNA, 25 bp, Homo sapien
accgattgcgtagcgctcgtctcca

SEQ ID NO: 5863826 - DNA, 25 bp, Homo sapien
tcccctgatacccgacacgctggtt

SEQ ID NO: 5863827 - DNA, 25 bp, Homo sapien
tccgcatcgcttaacgtcgcatccc

SEQ ID NO: 5863828 - DNA, 25 bp, Homo sapien
tggcgcgtatacagtcgcgcaacgt

SEQ ID NO: 5863829 - DNA, 25 bp, Homo sapien
ttcggacgtatgcggtcgatgggag

SEQ ID NO: 5863830 - DNA, 25 bp, Homo sapien
acgtcttcggctagcggattcgtgg

SEQ ID NO: 5863831 - DNA, 25 bp, Homo sapien
ttgccatgcgtaggggcgattcacg

SEQ ID NO: 5863832 - DNA, 25 bp, Homo sapien
cggcgcacttcgcggctatgtacta

SEQ ID NO: 5863833 - DNA, 25 bp, Homo sapien
cgtgagctcgtagcgcgtaaacgac

SEQ ID NO: 5863834 - DNA, 25 bp, Homo sapien
attgagactaggcggtacgggaggg

SEQ ID NO: 5863835 - DNA, 25 bp, Homo sapien
tcgacacgcggtataacggtcaggg

SEQ ID NO: 5863836 - DNA, 25 bp, Homo sapien
ctccttttacgcgctaacgcgcgtc

SEQ ID NO: 5863837 - DNA, 25 bp, Homo sapien
gcagcggcgatagagtccgcgatat

SEQ ID NO: 5863838 - DNA, 25 bp, Homo sapien
gtggcgtcgtacgctcgtctcacat

SEQ ID NO: 5863839 - DNA, 25 bp, Homo sapien
acctggccgcgcaaatcgtccttct

SEQ ID NO: 5863840 - DNA, 25 bp, Homo sapien
gcgttacgtcgccgcgtatgacatg

SEQ ID NO: 5863841 - DNA, 25 bp, Homo sapien
cacacggcgcgcatggttatcagag

SEQ ID NO: 5863842 - DNA, 25 bp, Homo sapien
cgcgcaacgccctagcgtattgcaa

SEQ ID NO: 5863843 - DNA, 25 bp, Homo sapien
gttgtccgtattagcgcggcaaggc

SEQ ID NO: 5863844 - DNA, 25 bp, Homo sapien
tcaagaagtatcgacgcggcccagc

SEQ ID NO: 5863845 - DNA, 25 bp, Homo sapien
accgcctaggcgtagacgagcatga

SEQ ID NO: 5863846 - DNA, 25 bp, Homo sapien
agttcccgcatgccgtatagcggag

SEQ ID NO: 5863847 - DNA, 25 bp, Homo sapien
tatccggcgtgatcgcacgttgctc

SEQ ID NO: 5863848 - DNA, 25 bp, Homo sapien
ccccgatcggcgcataacccataac

SEQ ID NO: 5863849 - DNA, 25 bp, Homo sapien
tccgagttcacgatacgcggacctg

SEQ ID NO: 5863850 - DNA, 25 bp, Homo sapien
ctatctcgctagcgtcgatacgggg

SEQ ID NO: 5863851 - DNA, 25 bp, Homo sapien
gcttagcgctcgtatcggccaccta

SEQ ID NO: 5863852 - DNA, 25 bp, Homo sapien
ccgagtacgggatatcgccctgaag

SEQ ID NO: 5863853 - DNA, 25 bp, Homo sapien
gcacgtatcggtcgacgtagcagga

SEQ ID NO: 5863854 - DNA, 25 bp, Homo sapien
ggaccgttagtgcgcgacgatcctt

SEQ ID NO: 5863855 - DNA, 25 bp, Homo sapien
gtaatgaggcggtatgtcggggtgc

SEQ ID NO: 5863856 - DNA, 25 bp, Homo sapien
gagtaccgtcatatcgcgacgaccg

SEQ ID NO: 5863857 - DNA, 25 bp, Homo sapien
accaactatcggcgctagtgcgcag

SEQ ID NO: 5863858 - DNA, 25 bp, Homo sapien
taacgctatcgcgcggacacgagtg

SEQ ID NO: 5863859 - DNA, 25 bp, Homo sapien
ttcacggacgcaacggtcccggatt

SEQ ID NO: 5863860 - DNA, 25 bp, Homo sapien
gtgtcggggcgtctcgataagggaa

SEQ ID NO: 5863861 - DNA, 25 bp, Homo sapien
acctcgccgacgtataccgtaggct

SEQ ID NO: 5863862 - DNA, 25 bp, Homo sapien
tagtagtacgcggacgcttcggggt

SEQ ID NO: 5863863 - DNA, 25 bp, Homo sapien
tgtctcgccctattgcgcgtcgaca

SEQ ID NO: 5863864 - DNA, 25 bp, Homo sapien
gaatgctgattcgcgaccccgatgc

SEQ ID NO: 5863865 - DNA, 25 bp, Homo sapien
agcaggcgcgggtacgatctcttga

SEQ ID NO: 5863866 - DNA, 25 bp, Homo sapien
tcccgatacgcgtcggacaatggtg

SEQ ID NO: 5863867 - DNA, 25 bp, Homo sapien
gcacccaatcgcgcgaacggagtat

SEQ ID NO: 5863868 - DNA, 25 bp, Homo sapien
ctggctcataacccgccgaacaacc

SEQ ID NO: 5863869 - DNA, 25 bp, Homo sapien
aggctcgtacgctagcgcgctagat

SEQ ID NO: 5863870 - DNA, 25 bp, Homo sapien
catgcatggaccgtgcgtatgcagg

SEQ ID NO: 5863871 - DNA, 25 bp, Homo sapien
tgcgtccgcgagcgtatatagctcc

SEQ ID NO: 5863872 - DNA, 25 bp, Homo sapien
tctgggcggcccttatacgctgcaa

SEQ ID NO: 5863873 - DNA, 25 bp, Homo sapien
ctagtggcgaggttaccggaatgcc

SEQ ID NO: 5863874 - DNA, 25 bp, Homo sapien
acggcgtcctcgcgatacgaagaga

SEQ ID NO: 5863875 - DNA, 25 bp, Homo sapien
tctatgcgtcgtgctacgctgcacc

SEQ ID NO: 5863876 - DNA, 25 bp, Homo sapien
tagcgagaccggacgtaatagggcc

SEQ ID NO: 5863877 - DNA, 25 bp, Homo sapien
cagccactagtcgcgtaactacgcg

SEQ ID NO: 5863878 - DNA, 25 bp, Homo sapien
gagaacttgcgtcgtaccgcgaggt

SEQ ID NO: 5863879 - DNA, 25 bp, Homo sapien
tagtcattgacgtagcgcggcgcga

SEQ ID NO: 5863880 - DNA, 25 bp, Homo sapien
gacccagcatgttaccgcgaccttg

SEQ ID NO: 5863881 - DNA, 25 bp, Homo sapien
tttgcacgcgcgttataggcgtggg

SEQ ID NO: 5863882 - DNA, 25 bp, Homo sapien
cagacaggctattcgcgtaagcccc

SEQ ID NO: 5863883 - DNA, 25 bp, Homo sapien
gtcgtacgagtcggtccgaactggt

SEQ ID NO: 5863884 - DNA, 25 bp, Homo sapien
ggtgtgggtacgacgcgtaggagat

SEQ ID NO: 5863885 - DNA, 25 bp, Homo sapien
gactgcgtcgtacgggtcttgcctt

SEQ ID NO: 5863886 - DNA, 25 bp, Homo sapien
cgcgtaattagcgcgacgaaccgtg

SEQ ID NO: 5863887 - DNA, 25 bp, Homo sapien
gaggtcaccggttagtcgcctgcta

SEQ ID NO: 5863888 - DNA, 25 bp, Homo sapien
ggggcaagtgtcgattcgctcaggt

SEQ ID NO: 5863889 - DNA, 25 bp, Homo sapien
aactgtatactaccggcgccacggg

SEQ ID NO: 5863890 - DNA, 25 bp, Homo sapien
agtggtcgttagacccgcgacgact

SEQ ID NO: 5863891 - DNA, 25 bp, Homo sapien
gaggtcccgcgcgactagagtcttt

SEQ ID NO: 5863892 - DNA, 25 bp, Homo sapien
tggtatcggtcgcgcgattcctcct

SEQ ID NO: 5863893 - DNA, 25 bp, Homo sapien
cggatcttagttacgcgcgtggtcg

SEQ ID NO: 5863894 - DNA, 25 bp, Homo sapien
aatgccgcggtcgtacgtttccgtg

SEQ ID NO: 5863895 - DNA, 25 bp, Homo sapien
aacgcctgacgttacgcggttcctc

SEQ ID NO: 5863896 - DNA, 25 bp, Homo sapien
tgccatgtccgacgcgactcatagg

SEQ ID NO: 5863897 - DNA, 25 bp, Homo sapien
tggcatggtcgtctaacgtgaccgg

SEQ ID NO: 5863898 - DNA, 25 bp, Homo sapien
tgtgagagacgcttcgcgcgagtct

SEQ ID NO: 5863899 - DNA, 25 bp, Homo sapien
tcaacacgtagcgcgatagtgccgc

SEQ ID NO: 5863900 - DNA, 25 bp, Homo sapien
cggaccgttatgcgcgggcttttga

SEQ ID NO: 5863901 - DNA, 25 bp, Homo sapien
tgaggcgcgctcgttcgtagcattg

SEQ ID NO: 5863902 - DNA, 25 bp, Homo sapien
atccggtcgcgcgcaagtaacagac

SEQ ID NO: 5863903 - DNA, 25 bp, Homo sapien
ggccagatcgactaacgcgcaagga

SEQ ID NO: 5863904 - DNA, 25 bp, Homo sapien
cgcgcacgtctacgcacgaaaggta

SEQ ID NO: 5863905 - DNA, 25 bp, Homo sapien
agagacgcgcgcgacttactcaggt

SEQ ID NO: 5863906 - DNA, 25 bp, Homo sapien
aacaagatacggtcgcgacggccga

SEQ ID NO: 5863907 - DNA, 25 bp, Homo sapien
gtatgcgcgatatcgaccgtggcag

SEQ ID NO: 5863908 - DNA, 25 bp, Homo sapien
cgctctgagcgtcgcgtaacacgta

SEQ ID NO: 5863909 - DNA, 25 bp, Homo sapien
tctccgttcgcgccgtaccgttctt

SEQ ID NO: 5863910 - DNA, 25 bp, Homo sapien
ggactacgcgttaacgcgacgtgca

SEQ ID NO: 5863911 - DNA, 25 bp, Homo sapien
gcaccaccgcgagcaatgtccttgt

SEQ ID NO: 5863912 - DNA, 25 bp, Homo sapien
cgcaaggcgtagcgctactcttcgt

SEQ ID NO: 5863913 - DNA, 25 bp, Homo sapien
cccaggtcgagacgttacggaccaa

SEQ ID NO: 5863914 - DNA, 25 bp, Homo sapien
atgccgcgcgaattatcggcccatg

SEQ ID NO: 5863915 - DNA, 25 bp, Homo sapien
gacaactcgcgggatcacttcctcg

SEQ ID NO: 5863916 - DNA, 25 bp, Homo sapien
gcatgtgttacgcgccaaggacagg

SEQ ID NO: 5863917 - DNA, 25 bp, Homo sapien
tgcaaccccgttaacgcgataggcg

SEQ ID NO: 5863918 - DNA, 25 bp, Homo sapien
tgcttcctcgcgctactaggttccc

SEQ ID NO: 5863919 - DNA, 25 bp, Homo sapien
ctttcgcgactaacgggctcttgcc

SEQ ID NO: 5863920 - DNA, 25 bp, Homo sapien
attcccgttggtacgcggagcaagc

SEQ ID NO: 5863921 - DNA, 25 bp, Homo sapien
cgctctagtcgatcgcgcctcatgt

SEQ ID NO: 5863922 - DNA, 25 bp, Homo sapien
gactacacgccgtatcgtctggacc

SEQ ID NO: 5863923 - DNA, 25 bp, Homo sapien
aacgcggcgtatagcggatgccgaa

SEQ ID NO: 5863924 - DNA, 25 bp, Homo sapien
cttgggtccgaatacgcaccagacg

SEQ ID NO: 5863925 - DNA, 25 bp, Homo sapien
atgcacctcgcggaacgtatgtggg

SEQ ID NO: 5863926 - DNA, 25 bp, Homo sapien
tgcaccgtcgttgcgctagtcagag

SEQ ID NO: 5863927 - DNA, 25 bp, Homo sapien
ggacctagtacgacgcgcaaagctg

SEQ ID NO: 5863928 - DNA, 25 bp, Homo sapien
gcttcgtcgcgcgtagacaaaggac

SEQ ID NO: 5863929 - DNA, 25 bp, Homo sapien
cggtccgtatacgtccgacaggaga

SEQ ID NO: 5863930 - DNA, 25 bp, Homo sapien
tacagtcgggtcgttgcgtcgaacg

SEQ ID NO: 5863931 - DNA, 25 bp, Homo sapien
gtgtttctaactcgccgaaccggcg

SEQ ID NO: 5863932 - DNA, 25 bp, Homo sapien
ctcatttaccgtgggcgtaggcctg

SEQ ID NO: 5863933 - DNA, 25 bp, Homo sapien
ggttctgcgtacgaccctacacgag

SEQ ID NO: 5863934 - DNA, 25 bp, Homo sapien
gactcccgacccttacgcaaggaag

SEQ ID NO: 5863935 - DNA, 25 bp, Homo sapien
gacttccgatgcgtacgacgacagg

SEQ ID NO: 5863936 - DNA, 25 bp, Homo sapien
agacggcgtaagcgtagtcctggct

SEQ ID NO: 5863937 - DNA, 25 bp, Homo sapien
tcggtggagtactagcgcgtggtga

SEQ ID NO: 5863938 - DNA, 25 bp, Homo sapien
ccccatgtacttcgcgagcagagtc

SEQ ID NO: 5863939 - DNA, 25 bp, Homo sapien
cctccgacgatacgcgctgctaatc

SEQ ID NO: 5863940 - DNA, 25 bp, Homo sapien
tcgctagcgcggtccattagccact

SEQ ID NO: 5863941 - DNA, 25 bp, Homo sapien
ccccggatcgacgcgtaacgtacaa

SEQ ID NO: 5863942 - DNA, 25 bp, Homo sapien
gagggcttacgcgagcgctattgtc

SEQ ID NO: 5863943 - DNA, 25 bp, Homo sapien
ggccgcaatctcgcgtacgtcgtaa

SEQ ID NO: 5863944 - DNA, 25 bp, Homo sapien
atgccgtaggtcgcgcaaaatccgg

SEQ ID NO: 5863945 - DNA, 25 bp, Homo sapien
gttcgcacttacgcgacgcttgtcg

SEQ ID NO: 5863946 - DNA, 25 bp, Homo sapien
gctccctagcgcggttaggtaagga

SEQ ID NO: 5863947 - DNA, 25 bp, Homo sapien
cacagcgacgttcgtgtacgctgca

SEQ ID NO: 5863948 - DNA, 25 bp, Homo sapien
ttccagatccgctatcgcgcgagtg

SEQ ID NO: 5863949 - DNA, 25 bp, Homo sapien
ctctagtcggcgtacactactcccc

SEQ ID NO: 5863950 - DNA, 25 bp, Homo sapien
gggagaagcgacgcgttatgtgggt

SEQ ID NO: 5863951 - DNA, 25 bp, Homo sapien
gaccaaccgcgtcattcgaagccag

SEQ ID NO: 5863952 - DNA, 25 bp, Homo sapien
agtcccactactagcgtcggggtac

SEQ ID NO: 5863953 - DNA, 25 bp, Homo sapien
cagattcttacggtcgcggccactc

SEQ ID NO: 5863954 - DNA, 25 bp, Homo sapien
gtccacaagacgcggtacgttgcag

SEQ ID NO: 5863955 - DNA, 25 bp, Homo sapien
tcgtgcgcgcgaatagccggaacat

SEQ ID NO: 5863956 - DNA, 25 bp, Homo sapien
ccataccggcgtcgaagtagggttg

SEQ ID NO: 5863957 - DNA, 25 bp, Homo sapien
ttgccaccggacgtatagcttgggc

SEQ ID NO: 5863958 - DNA, 25 bp, Homo sapien
ccgacgacgatgacgcgtaaggtct

SEQ ID NO: 5863959 - DNA, 25 bp, Homo sapien
gacaccacgcaatgcgctacgggtt

SEQ ID NO: 5863960 - DNA, 25 bp, Homo sapien
agccaagtcgtatcgtcccacctgg

SEQ ID NO: 5863961 - DNA, 25 bp, Homo sapien
aactcgataccgagtgcgcaaggcg

SEQ ID NO: 5863962 - DNA, 25 bp, Homo sapien
gactcgcctagcgaaccggacttac

SEQ ID NO: 5863963 - DNA, 25 bp, Homo sapien
gtacacgtacatcgctacggccctc

SEQ ID NO: 5863964 - DNA, 25 bp, Homo sapien
ggcgaggagttatacgcgcaacctg

SEQ ID NO: 5863965 - DNA, 25 bp, Homo sapien
atgtccatattcgcgcggtgccctc

SEQ ID NO: 5863966 - DNA, 25 bp, Homo sapien
cgggccgcgccgattagtttgctat

SEQ ID NO: 5863967 - DNA, 25 bp, Homo sapien
ctattccgcgttgcaaccagacggg

SEQ ID NO: 5863968 - DNA, 25 bp, Homo sapien
cctctggctcggcgctatatgaacg

SEQ ID NO: 5863969 - DNA, 25 bp, Homo sapien
acgggtacgctagtcgtcctgttgc

SEQ ID NO: 5863970 - DNA, 25 bp, Homo sapien
ttgacccgcgctactatggggttgg

SEQ ID NO: 5863971 - DNA, 25 bp, Homo sapien
cgctaaggtagtacggtcgtgtccc

SEQ ID NO: 5863972 - DNA, 25 bp, Homo sapien
gcagcgacaacgctacgcgaggtaa

SEQ ID NO: 5863973 - DNA, 25 bp, Homo sapien
tcttgtcgtacgacgacctccccga

SEQ ID NO: 5863974 - DNA, 25 bp, Homo sapien
cgccacaagcccgttacgcccaata

SEQ ID NO: 5863975 - DNA, 25 bp, Homo sapien
gagacacgcgaacgtagttcccctc

SEQ ID NO: 5863976 - DNA, 25 bp, Homo sapien
tcatggaccataccgtcgccactcc

SEQ ID NO: 5863977 - DNA, 25 bp, Homo sapien
ggcaagtactcgcctacgcggcata

SEQ ID NO: 5863978 - DNA, 25 bp, Homo sapien
aggttgttaaccgcgagaccgctgg

SEQ ID NO: 5863979 - DNA, 25 bp, Homo sapien
cggttgtcgcgaccgtatcaaaccc

SEQ ID NO: 5863980 - DNA, 25 bp, Homo sapien
catccgcggtaggtgcgacatcaca

SEQ ID NO: 5863981 - DNA, 25 bp, Homo sapien
actgttcctacgttcgcgtcgccag

SEQ ID NO: 5863982 - DNA, 25 bp, Homo sapien
cctctgtacgcgctatcgtcacacg

SEQ ID NO: 5863983 - DNA, 25 bp, Homo sapien
ctgtgcaatatcgacgcgccgtgag

SEQ ID NO: 5863984 - DNA, 25 bp, Homo sapien
tttctctcgtagcgagcgcgatccc

SEQ ID NO: 5863985 - DNA, 25 bp, Homo sapien
ctcgtcgcgcgactcattccacatg

SEQ ID NO: 5863986 - DNA, 25 bp, Homo sapien
ccgggatggttcgcgactatgcctt

SEQ ID NO: 5863987 - DNA, 25 bp, Homo sapien
taccgggcgaacgtagcgtgttcac

SEQ ID NO: 5863988 - DNA, 25 bp, Homo sapien
ataatgcgctcgttagacgggggcc

SEQ ID NO: 5863989 - DNA, 25 bp, Homo sapien
cccatctgtcgcgtcgatgatggac

SEQ ID NO: 5863990 - DNA, 25 bp, Homo sapien
gaggttccgtcgcgataggtccact

SEQ ID NO: 5863991 - DNA, 25 bp, Homo sapien
acggccacgcgtaggatcgcatttc

SEQ ID NO: 5863992 - DNA, 25 bp, Homo sapien
cacatcacgcgtctacggtaagggg

SEQ ID NO: 5863993 - DNA, 25 bp, Homo sapien
ctggccacccgtatagtcgacgatg

SEQ ID NO: 5863994 - DNA, 25 bp, Homo sapien
agtaacccggtctagtacgctgggc

SEQ ID NO: 5863995 - DNA, 25 bp, Homo sapien
cgctactatcgcgttgcgactcagg

SEQ ID NO: 5863996 - DNA, 25 bp, Homo sapien
cacttctcccgcgaggtacagcaca

SEQ ID NO: 5863997 - DNA, 25 bp, Homo sapien
gcgatggccgatcgacgtagtaagg

SEQ ID NO: 5863998 - DNA, 25 bp, Homo sapien
agctaacgagacgcctagtgagcgc

SEQ ID NO: 5863999 - DNA, 25 bp, Homo sapien
aagctgcgcgtcgcttaggtaccag

SEQ ID NO: 5864000 - DNA, 25 bp, Homo sapien
attcaaggtagttgcgcgagggcgg

SEQ ID NO: 5864001 - DNA, 25 bp, Homo sapien
aggctacgcgacgtatagcgcagct

SEQ ID NO: 5864002 - DNA, 25 bp, Homo sapien
cagcgcccgtttacgaccgtgttag

SEQ ID NO: 5864003 - DNA, 25 bp, Homo sapien
gaccacgtctatcgggcgactgttg

SEQ ID NO: 5864004 - DNA, 25 bp, Homo sapien
ttccgttgtcgtacggcgctatgcg

SEQ ID NO: 5864005 - DNA, 25 bp, Homo sapien
agtacttgacccgccgataacggcg

SEQ ID NO: 5864006 - DNA, 25 bp, Homo sapien
gaagcgagcgtccgcgaaagcgaat

SEQ ID NO: 5864007 - DNA, 25 bp, Homo sapien
ggtctacccctagcgcgttgtgtct

SEQ ID NO: 5864008 - DNA, 25 bp, Homo sapien
cgcttttacgcgtcgcatgaacggg

SEQ ID NO: 5864009 - DNA, 25 bp, Homo sapien
catgcacgtacggactaccccgttc

SEQ ID NO: 5864010 - DNA, 25 bp, Homo sapien
cgagaggggacgccgataaatagcc

SEQ ID NO: 5864011 - DNA, 25 bp, Homo sapien
cacagcgcgcgggatagatggacaa

SEQ ID NO: 5864012 - DNA, 25 bp, Homo sapien
gacagtatcgtaaccgcgcagtgcc

SEQ ID NO: 5864013 - DNA, 25 bp, Homo sapien
tcatcgcagcgcgctactaaaggcc

SEQ ID NO: 5864014 - DNA, 25 bp, Homo sapien
atcctcacgcatatcggccgcctga

SEQ ID NO: 5864015 - DNA, 25 bp, Homo sapien
gggatttcgtacgcgggtagtggtc

SEQ ID NO: 5864016 - DNA, 25 bp, Homo sapien
agcatgcgtatgatcggtctgcggc

SEQ ID NO: 5864017 - DNA, 25 bp, Homo sapien
cgagctcgtttaacgggcgataccc

SEQ ID NO: 5864018 - DNA, 25 bp, Homo sapien
tgagattagccggttcgtctccgcg

SEQ ID NO: 5864019 - DNA, 25 bp, Homo sapien
agtacgtgccgtatacgcggtacgc

SEQ ID NO: 5864020 - DNA, 25 bp, Homo sapien
ggaacccccctagtacgcgctattc

SEQ ID NO: 5864021 - DNA, 25 bp, Homo sapien
gggtcgcgcgtaaccgaacagtttg

SEQ ID NO: 5864022 - DNA, 25 bp, Homo sapien
accatacgcgcgatgtcagcgaacc

SEQ ID NO: 5864023 - DNA, 25 bp, Homo sapien
gtgctcgccgacgtacgaggaaaga

SEQ ID NO: 5864024 - DNA, 25 bp, Homo sapien
cacgatctcgcgtagacgttcgtcc

SEQ ID NO: 5864025 - DNA, 25 bp, Homo sapien
tctacgtggtacgaccgtcgatcgg

SEQ ID NO: 5864026 - DNA, 25 bp, Homo sapien
gtttgacgtattccgcgtgcgctgc

SEQ ID NO: 5864027 - DNA, 25 bp, Homo sapien
atcccccaataccgcgcgacggaat

SEQ ID NO: 5864028 - DNA, 25 bp, Homo sapien
gtgtacgtcgacaccgatagggtgg

SEQ ID NO: 5864029 - DNA, 25 bp, Homo sapien
gcatcggtccaacgcgtatatgccg

SEQ ID NO: 5864030 - DNA, 25 bp, Homo sapien
cgcggcgtcgacatgcggttgaata

SEQ ID NO: 5864031 - DNA, 25 bp, Homo sapien
accgagatacgtactgccggcagtg

SEQ ID NO: 5864032 - DNA, 25 bp, Homo sapien
ctatgtcggttggtcgcgtgcttcc

SEQ ID NO: 5864033 - DNA, 25 bp, Homo sapien
tcgagctgcgcgacgttcactcgaa

SEQ ID NO: 5864034 - DNA, 25 bp, Homo sapien
tctaagagtccggttacgtcgcgcg

SEQ ID NO: 5864035 - DNA, 25 bp, Homo sapien
ggctcacgcgctatagtacccggta

SEQ ID NO: 5864036 - DNA, 25 bp, Homo sapien
gcacttgctcgacataccggtgagc

SEQ ID NO: 5864037 - DNA, 25 bp, Homo sapien
gactgtcacgcggtcgttaccatgc

SEQ ID NO: 5864038 - DNA, 25 bp, Homo sapien
gtcggctgttccgcgcgaatagaag

SEQ ID NO: 5864039 - DNA, 25 bp, Homo sapien
gacccttcggtcgcacgagaggaaa

SEQ ID NO: 5864040 - DNA, 25 bp, Homo sapien
gggtatgcggacataacgtagcgcc

SEQ ID NO: 5864041 - DNA, 25 bp, Homo sapien
cgtactgtctacgaccgtacacccc

SEQ ID NO: 5864042 - DNA, 25 bp, Homo sapien
tcagcgcttagtcgatgcgcgacga

SEQ ID NO: 5864043 - DNA, 25 bp, Homo sapien
ggttgagcgtcggactagcgaatgc

SEQ ID NO: 5864044 - DNA, 25 bp, Homo sapien
taccatcgcctcggtaagtcccgct

SEQ ID NO: 5864045 - DNA, 25 bp, Homo sapien
cactacggaccgatcgtacgggcaa

SEQ ID NO: 5864046 - DNA, 25 bp, Homo sapien
accgaatcgcgtacgcctaatgccc

SEQ ID NO: 5864047 - DNA, 25 bp, Homo sapien
gactctcgacctacgcgtaggacct

SEQ ID NO: 5864048 - DNA, 25 bp, Homo sapien
gagtgcccgtacgcgctaacgtaag

SEQ ID NO: 5864049 - DNA, 25 bp, Homo sapien
aacgggagtactgacgcggagcttc

SEQ ID NO: 5864050 - DNA, 25 bp, Homo sapien
ctcgagcgtccgactgatactggga

SEQ ID NO: 5864051 - DNA, 25 bp, Homo sapien
tgtgccttctaccgcgcgatacagg

SEQ ID NO: 5864052 - DNA, 25 bp, Homo sapien
ggcaacggtgcgactacgagtcact

SEQ ID NO: 5864053 - DNA, 25 bp, Homo sapien
cgaaatcgtccgaactagcacccgc

SEQ ID NO: 5864054 - DNA, 25 bp, Homo sapien
cgccttcgctcttacgacgcggaaa

SEQ ID NO: 5864055 - DNA, 25 bp, Homo sapien
tgcagagaatgttacgcgcgcggca

SEQ ID NO: 5864056 - DNA, 25 bp, Homo sapien
gagctacccgcgtacgaagctgttg

SEQ ID NO: 5864057 - DNA, 25 bp, Homo sapien
gccctccgctatctaacggagcatc

SEQ ID NO: 5864058 - DNA, 25 bp, Homo sapien
gcgtttgaagtacgcgcgagaccga

SEQ ID NO: 5864059 - DNA, 25 bp, Homo sapien
cgccatcgtatcggaacgctctcga

SEQ ID NO: 5864060 - DNA, 25 bp, Homo sapien
gaagcactacgaccgtacgacgacg

SEQ ID NO: 5864061 - DNA, 25 bp, Homo sapien
cctgtcattcaccgtacgcctcacg

SEQ ID NO: 5864062 - DNA, 25 bp, Homo sapien
aatctctatcgggcgcgtccgctca

SEQ ID NO: 5864063 - DNA, 25 bp, Homo sapien
tgatcgaacgtcgaccggtcgacca

SEQ ID NO: 5864064 - DNA, 25 bp, Homo sapien
gctagctatcgtccgatcgcacacg

SEQ ID NO: 5864065 - DNA, 25 bp, Homo sapien
atgctgagtacgcgacctgcaccac

SEQ ID NO: 5864066 - DNA, 25 bp, Homo sapien
gcagcacgcgcgataatccgtcagt

SEQ ID NO: 5864067 - DNA, 25 bp, Homo sapien
ccccttcgtattgcgcccgccaatt

SEQ ID NO: 5864068 - DNA, 25 bp, Homo sapien
ggccgtatacgccggaccattctgt

SEQ ID NO: 5864069 - DNA, 25 bp, Homo sapien
gtcggtctacgaccggataaacggc

SEQ ID NO: 5864070 - DNA, 25 bp, Homo sapien
cgaaggggtccgcacgtaatcacca

SEQ ID NO: 5864071 - DNA, 25 bp, Homo sapien
tgtgtgacgaccgcgctagatccga

SEQ ID NO: 5864072 - DNA, 25 bp, Homo sapien
ttgcactagtcggtacgcccggcta

SEQ ID NO: 5864073 - DNA, 25 bp, Homo sapien
gcgtgtcgcgttgtaccgtagtgtg

SEQ ID NO: 5864074 - DNA, 25 bp, Homo sapien
ggccggtcgtccggtgattattgtc

SEQ ID NO: 5864075 - DNA, 25 bp, Homo sapien
ctccaatacgcgcggcgttcgtcat

SEQ ID NO: 5864076 - DNA, 25 bp, Homo sapien
caccgaacgcgcgaatcatgcttgg

SEQ ID NO: 5864077 - DNA, 25 bp, Homo sapien
aggccttagcgacggacgtggttgt

SEQ ID NO: 5864078 - DNA, 25 bp, Homo sapien
cttgcgtcggtacatccgacgcttc

SEQ ID NO: 5864079 - DNA, 25 bp, Homo sapien
aacaccccgtaagggcgcaaagctc

SEQ ID NO: 5864080 - DNA, 25 bp, Homo sapien
cggaaatcgcgtattgccgccttcg

SEQ ID NO: 5864081 - DNA, 25 bp, Homo sapien
ggaatggatcgtctacgcgccagga

SEQ ID NO: 5864082 - DNA, 25 bp, Homo sapien
ctctctgtagcgtaccgtcttcgcc

SEQ ID NO: 5864083 - DNA, 25 bp, Homo sapien
gaagtgccgcgaagtaacgctgtgc

SEQ ID NO: 5864084 - DNA, 25 bp, Homo sapien
acgtgccggcgctatacgttggtca

SEQ ID NO: 5864085 - DNA, 25 bp, Homo sapien
gttgcgaatcgcgcgctactcagtc

SEQ ID NO: 5864086 - DNA, 25 bp, Homo sapien
tcgcctctatacgcgcgactcagtc

SEQ ID NO: 5864087 - DNA, 25 bp, Homo sapien
tcggtccgaactgcgctagagcagt

SEQ ID NO: 5864088 - DNA, 25 bp, Homo sapien
ctagctctatctagcgcgggctgtc

SEQ ID NO: 5864089 - DNA, 25 bp, Homo sapien
cgtagtacgcgtgcgatacaccgac

SEQ ID NO: 5864090 - DNA, 25 bp, Homo sapien
tacacgccgacgcacgttggccttt

SEQ ID NO: 5864091 - DNA, 25 bp, Homo sapien
ctagcgtcgttcgggcgtaaggttc

SEQ ID NO: 5864092 - DNA, 25 bp, Homo sapien
ttgcaaccctataacgcgccggctc

SEQ ID NO: 5864093 - DNA, 25 bp, Homo sapien
gcgtccaacgccgctaaccgtatga

SEQ ID NO: 5864094 - DNA, 25 bp, Homo sapien
agcggctcgcgcataatggcagtca

SEQ ID NO: 5864095 - DNA, 25 bp, Homo sapien
gccccagtcacggtacgactcgatt

SEQ ID NO: 5864096 - DNA, 25 bp, Homo sapien
accatcgctcgacgtaacggtgcga

SEQ ID NO: 5864097 - DNA, 25 bp, Homo sapien
ccggtgtctagtcgagcgctaatcg

SEQ ID NO: 5864098 - DNA, 25 bp, Homo sapien
gtgcttaggtcgctacgctcggaag

SEQ ID NO: 5864099 - DNA, 25 bp, Homo sapien
gagtgacggtcgcgttatccaacgg

SEQ ID NO: 5864100 - DNA, 25 bp, Homo sapien
cagagtccgtattagggcgcgtcca

SEQ ID NO: 5864101 - DNA, 25 bp, Homo sapien
gcctattacctccggacgacgtgtg

SEQ ID NO: 5864102 - DNA, 25 bp, Homo sapien
ctggagctcgtgcgaccgataatcg

SEQ ID NO: 5864103 - DNA, 25 bp, Homo sapien
gtaccccgacgctagtagtgggact

SEQ ID NO: 5864104 - DNA, 25 bp, Homo sapien
cgcgacaccgaacgcgtatcacgaa

SEQ ID NO: 5864105 - DNA, 25 bp, Homo sapien
aacccgtagcgcattgcgtggtgtc

SEQ ID NO: 5864106 - DNA, 25 bp, Homo sapien
caggttgcgcgtataactcctcgcc

SEQ ID NO: 5864107 - DNA, 25 bp, Homo sapien
ctcgtgtagggtcgtacgcagaacc

SEQ ID NO: 5864108 - DNA, 25 bp, Homo sapien
gcatcggggtcgcgaatcagcattc

SEQ ID NO: 5864109 - DNA, 25 bp, Homo sapien
cgcgtagttacgcgactagtggctg

SEQ ID NO: 5864110 - DNA, 25 bp, Homo sapien
tccgcaccgtatacgtcgctgcaca

SEQ ID NO: 5864111 - DNA, 25 bp, Homo sapien
tgacatttgcgtacgacgcgccacg

SEQ ID NO: 5864112 - DNA, 25 bp, Homo sapien
gcatggtaacgaccgcgtgacagtc

SEQ ID NO: 5864113 - DNA, 25 bp, Homo sapien
atctagcgcgctagcgtacgagcct

SEQ ID NO: 5864114 - DNA, 25 bp, Homo sapien
aggcgagttaccgcccgtaaggatc

SEQ ID NO: 5864115 - DNA, 25 bp, Homo sapien
ggctatttatcggcgtcccctctcg

SEQ ID NO: 5864116 - DNA, 25 bp, Homo sapien
aaggcatagtcgcgaaccatcccgg

SEQ ID NO: 5864117 - DNA, 25 bp, Homo sapien
gttctgacgtgaacgatcgcgggca

SEQ ID NO: 5864118 - DNA, 25 bp, Homo sapien
ctcataagggccgtacgtcagggtc

SEQ ID NO: 5864119 - DNA, 25 bp, Homo sapien
cgtgtgcgatcggacgatagctagc

SEQ ID NO: 5864120 - DNA, 25 bp, Homo sapien
gtaggggatacgtcgcgttttccgc

SEQ ID NO: 5864121 - DNA, 25 bp, Homo sapien
cgattagcgctcgactagacaccgg

SEQ ID NO: 5864122 - DNA, 25 bp, Homo sapien
tatcggctatacgtccggatggggc

SEQ ID NO: 5864123 - DNA, 25 bp, Homo sapien
taccgggtactatagcgcgtgagcc

SEQ ID NO: 5864124 - DNA, 25 bp, Homo sapien
gcggcactatcgcgctacgtgttga

SEQ ID NO: 5864125 - DNA, 25 bp, Homo sapien
aggtcctacgcgtaggtcgagagtc

SEQ ID NO: 5864126 - DNA, 25 bp, Homo sapien
tctcttcgtatcgcgaggacgccgt

SEQ ID NO: 5864127 - DNA, 25 bp, Homo sapien
tcccctcgcaacgggatactacgca

SEQ ID NO: 5864128 - DNA, 25 bp, Homo sapien
tctaagatatgcggctcggcctgcg

SEQ ID NO: 5864129 - DNA, 25 bp, Homo sapien
ataatgaccggttcgcgtaccgcgc

SEQ ID NO: 5864130 - DNA, 25 bp, Homo sapien
ggccctattacgtccggtctcgcta

SEQ ID NO: 5864131 - DNA, 25 bp, Homo sapien
tccttgcgcgttagtcgatctggcc

SEQ ID NO: 5864132 - DNA, 25 bp, Homo sapien
cgccggttcggcgagttagaaacac

SEQ ID NO: 5864133 - DNA, 25 bp, Homo sapien
tcctcccgctatgcgttaaccgcac

SEQ ID NO: 5864134 - DNA, 25 bp, Homo sapien
gtcgcaacaacgcgcgtaacggttc

SEQ ID NO: 5864135 - DNA, 25 bp, Homo sapien
gactgagtagcgcgcgattcgcaac

SEQ ID NO: 5864136 - DNA, 25 bp, Homo sapien
catgtggaatgagtcgcgcgacgag

SEQ ID NO: 5864137 - DNA, 25 bp, Homo sapien
gtcggtatctacgacgcgtgagagg

SEQ ID NO: 5864138 - DNA, 25 bp, Homo sapien
gccgggtagcgtctaacgcaagctt

SEQ ID NO: 5864139 - DNA, 25 bp, Homo sapien
ctaccagcggttcgtagggggtcaa

SEQ ID NO: 5864140 - DNA, 25 bp, Homo sapien
taggtggccgatacgagcgctaagc

SEQ ID NO: 5864141 - DNA, 25 bp, Homo sapien
gactgagtcgcgcgtatagaggcga

SEQ ID NO: 5864142 - DNA, 25 bp, Homo sapien
gaagctccgcgtcagtactcccgtt

SEQ ID NO: 5864143 - DNA, 25 bp, Homo sapien
cagtggtcgtcgcacgtagggaaga

SEQ ID NO: 5864144 - DNA, 25 bp, Homo sapien
caaccctacttcgacgccggtatgg

SEQ ID NO: 5864145 - DNA, 25 bp, Homo sapien
cgccttgcgcactcggtatcgagtt

SEQ ID NO: 5864146 - DNA, 25 bp, Homo sapien
caatgctacgaacgagcgcgcctca

SEQ ID NO: 5864147 - DNA, 25 bp, Homo sapien
ccaaccgaccgcgcgaattctagct

SEQ ID NO: 5864148 - DNA, 25 bp, Homo sapien
caaactgttcggttacgcgcgaccc

SEQ ID NO: 5864149 - DNA, 25 bp, Homo sapien
cctgttatatcgggcgcgtcgaagg

SEQ ID NO: 5864150 - DNA, 25 bp, Homo sapien
ggcgaagacggtacgctacagagag

SEQ ID NO: 5864151 - DNA, 25 bp, Homo sapien
ctgccacggtcgatatcgcgcatac

SEQ ID NO: 5864152 - DNA, 25 bp, Homo sapien
gggtttgatacggtcgcgacaaccg

SEQ ID NO: 5864153 - DNA, 25 bp, Homo sapien
ccctcccgtaccgcctagtctcaat

SEQ ID NO: 5864154 - DNA, 25 bp, Homo sapien
gcccaagctatacgtccggtggcaa

SEQ ID NO: 5864155 - DNA, 25 bp, Homo sapien
cttgtcagtcgataccggggcgaag

SEQ ID NO: 5864156 - DNA, 25 bp, Homo sapien
cgcctatcgcgttaacggggttgca

SEQ ID NO: 5864157 - DNA, 25 bp, Homo sapien
acggctcgtcgaggcgcatgatatc

SEQ ID NO: 5864158 - DNA, 25 bp, Homo sapien
ttcggcatccgctatacgccgcgtt

SEQ ID NO: 5864159 - DNA, 25 bp, Homo sapien
gtcgtttacgcgctacgagctcacg

SEQ ID NO: 5864160 - DNA, 25 bp, Homo sapien
cccagtcgaacggcgttacatacgc

SEQ ID NO: 5864161 - DNA, 25 bp, Homo sapien
gttaccgcggtcgacgtaagcgaag

SEQ ID NO: 5864162 - DNA, 25 bp, Homo sapien
gccagcgcgacgatacgtatggaca

SEQ ID NO: 5864163 - DNA, 25 bp, Homo sapien
accgcgctatacgccgaacgtatgg

SEQ ID NO: 5864164 - DNA, 25 bp, Homo sapien
ccaccctatcggtgtcgacgtacac

SEQ ID NO: 5864165 - DNA, 25 bp, Homo sapien
tattcaaccgcatgtcgacgccgcg

SEQ ID NO: 5864166 - DNA, 25 bp, Homo sapien
ggttgttcggcgggttatgagccag

SEQ ID NO: 5864167 - DNA, 25 bp, Homo sapien
tgaccaacgtatagcgccggcacgt

SEQ ID NO: 5864168 - DNA, 25 bp, Homo sapien
gctccttcgcgtcgtatgtggttgg

SEQ ID NO: 5864169 - DNA, 25 bp, Homo sapien
agaaggacgatttgcgcggccaggt

SEQ ID NO: 5864170 - DNA, 25 bp, Homo sapien
cactcgcgcgatagcggatctggaa

SEQ ID NO: 5864171 - DNA, 25 bp, Homo sapien
agccaccggtaacgtatcgatcccc

SEQ ID NO: 5864172 - DNA, 25 bp, Homo sapien
acgttgcgcgactgtatacgcgcca

SEQ ID NO: 5864173 - DNA, 25 bp, Homo sapien
ctcgacgttacgccgacgtgatgct

SEQ ID NO: 5864174 - DNA, 25 bp, Homo sapien
cgcggagacgaaccggctaatctca

SEQ ID NO: 5864175 - DNA, 25 bp, Homo sapien
gtaagtccggttcgctaggcgagtc

SEQ ID NO: 5864176 - DNA, 25 bp, Homo sapien
tagtcatgtccgtcgtacggcggca

SEQ ID NO: 5864177 - DNA, 25 bp, Homo sapien
cccacgcctataacgcgcgtgcaaa

SEQ ID NO: 5864178 - DNA, 25 bp, Homo sapien
accgagtgtcgaacgcgagggtgat

SEQ ID NO: 5864179 - DNA, 25 bp, Homo sapien
aacgtatcgaacgccgtagcagcgc

SEQ ID NO: 5864180 - DNA, 25 bp, Homo sapien
ttgcccgtacgatcggtccgtagtg

SEQ ID NO: 5864181 - DNA, 25 bp, Homo sapien
gagaaattcgccggtactacccggc

SEQ ID NO: 5864182 - DNA, 25 bp, Homo sapien
ttacgacgtacgcgagattgcggcc

SEQ ID NO: 5864183 - DNA, 25 bp, Homo sapien
tcccagtatcagtcggacgctcgag

SEQ ID NO: 5864184 - DNA, 25 bp, Homo sapien
aaaggccaacgtgcgtcggcgtgta

SEQ ID NO: 5864185 - DNA, 25 bp, Homo sapien
tgttacgtagcgcggatcgcgttgc

SEQ ID NO: 5864186 - DNA, 25 bp, Homo sapien
aggaggaatcgcgcgaccgatacca

SEQ ID NO: 5864187 - DNA, 25 bp, Homo sapien
agctgcgctatacgtcgcgtagcct

SEQ ID NO: 5864188 - DNA, 25 bp, Homo sapien
gaatagcgcgtactaggggggttcc

SEQ ID NO: 5864189 - DNA, 25 bp, Homo sapien
ccgcattaagtcgcgcgtggatgca

SEQ ID NO: 5864190 - DNA, 25 bp, Homo sapien
ctagagatcgacgcggacctctgga

SEQ ID NO: 5864191 - DNA, 25 bp, Homo sapien
gaaccttacgcccgaacgacgctag

SEQ ID NO: 5864192 - DNA, 25 bp, Homo sapien
gactgacgactttgcgcgaccaggt

SEQ ID NO: 5864193 - DNA, 25 bp, Homo sapien
tagccgggcgtaccgactagtgcaa

SEQ ID NO: 5864194 - DNA, 25 bp, Homo sapien
gagggccgtagcgatgtacgtgtac

SEQ ID NO: 5864195 - DNA, 25 bp, Homo sapien
ccaaccccatagtagcgcgggtcaa

SEQ ID NO: 5864196 - DNA, 25 bp, Homo sapien
agacacaacgcgctaggggtagacc

SEQ ID NO: 5864197 - DNA, 25 bp, Homo sapien
cgtgcccgaccgttcaagaatgtgc

SEQ ID NO: 5864198 - DNA, 25 bp, Homo sapien
acccacataacgcgtcgcttctccc

SEQ ID NO: 5864199 - DNA, 25 bp, Homo sapien
gacagcccgcgctagatagagctag

SEQ ID NO: 5864200 - DNA, 25 bp, Homo sapien
cagcaggcacgtcgctacgtatagc

SEQ ID NO: 5864201 - DNA, 25 bp, Homo sapien
ccgatcgacggtcgtaccacgtaga

SEQ ID NO: 5864202 - DNA, 25 bp, Homo sapien
gtctaatcggtcacgcgagcctgtg

SEQ ID NO: 5864203 - DNA, 25 bp, Homo sapien
tgtcagataggccggacgagaaccg

SEQ ID NO: 5864204 - DNA, 25 bp, Homo sapien
tatcgacgcccggatacgacgactc

SEQ ID NO: 5864205 - DNA, 25 bp, Homo sapien
cgacaagcgtcgcgtaagtgcgaac

SEQ ID NO: 5864206 - DNA, 25 bp, Homo sapien
caatcagcgcccgatcgatttggcc

SEQ ID NO: 5864207 - DNA, 25 bp, Homo sapien
gcgtttacgatgcgctaccgagcgt

SEQ ID NO: 5864208 - DNA, 25 bp, Homo sapien
ctcagggcgcggtccattatctagg

SEQ ID NO: 5864209 - DNA, 25 bp, Homo sapien
ctgtcgctacgattggcgctgacag

SEQ ID NO: 5864210 - DNA, 25 bp, Homo sapien
tacgcgacggtcgcgtatatggcct

SEQ ID NO: 5864211 - DNA, 25 bp, Homo sapien
taggaaggtcgcgctagtaccccca

SEQ ID NO: 5864212 - DNA, 25 bp, Homo sapien
tagcaggcgactaaccggtgacctc

SEQ ID NO: 5864213 - DNA, 25 bp, Homo sapien
gttatgggttatgcgccgatcgggg

SEQ ID NO: 5864214 - DNA, 25 bp, Homo sapien
gccttgccgcgctaatacggacaac

SEQ ID NO: 5864215 - DNA, 25 bp, Homo sapien
cgattatcggtcgcacgagctccag

SEQ ID NO: 5864216 - DNA, 25 bp, Homo sapien
gactaggatagtcgctacgcgcggt

SEQ ID NO: 5864217 - DNA, 25 bp, Homo sapien
tcagctgcggacgtaaatggtccgg

SEQ ID NO: 5864218 - DNA, 25 bp, Homo sapien
acaaggacattgctcgcggtggtgc

SEQ ID NO: 5864219 - DNA, 25 bp, Homo sapien
tagccctcgcgaccgactaactgga

SEQ ID NO: 5864220 - DNA, 25 bp, Homo sapien
ccatcgtaggggggtacgcgcttat

SEQ ID NO: 5864221 - DNA, 25 bp, Homo sapien
attccgtcgcgcggtattgggggat

SEQ ID NO: 5864222 - DNA, 25 bp, Homo sapien
gggatgcgacgttaagcgatgcgga

SEQ ID NO: 5864223 - DNA, 25 bp, Homo sapien
atggcgactctcgaccgcgtaacac

SEQ ID NO: 5864224 - DNA, 25 bp, Homo sapien
tcgctgcgtcgttcgaaggtccatg

SEQ ID NO: 5864225 - DNA, 25 bp, Homo sapien
cccgttcatgcgacgcgtaaaagcg

SEQ ID NO: 5864226 - DNA, 25 bp, Homo sapien
tggtacgggacgcgatatctaccgc

SEQ ID NO: 5864227 - DNA, 25 bp, Homo sapien
agaccttacgcgtcatcgtcgtcgg

SEQ ID NO: 5864228 - DNA, 25 bp, Homo sapien
ggcctttagtagcgcgctgcgatga

SEQ ID NO: 5864229 - DNA, 25 bp, Homo sapien
ttgtacgttacgcgtcgatccgggg

SEQ ID NO: 5864230 - DNA, 25 bp, Homo sapien
cgccgttatcggcgggtcaagtact

SEQ ID NO: 5864231 - DNA, 25 bp, Homo sapien
gagtgcccgacgtccgataacacca

SEQ ID NO: 5864232 - DNA, 25 bp, Homo sapien
cacggttcgtcgcgctaattacgcg

SEQ ID NO: 5864233 - DNA, 25 bp, Homo sapien
ggagctatatacgctcgcggacgca

SEQ ID NO: 5864234 - DNA, 25 bp, Homo sapien
aaggcaagacccgtacgacgcagtc

SEQ ID NO: 5864235 - DNA, 25 bp, Homo sapien
accaggggttacgcgaacctctcag

SEQ ID NO: 5864236 - DNA, 25 bp, Homo sapien
tcctggcgcgtagacgatccattcc

SEQ ID NO: 5864237 - DNA, 25 bp, Homo sapien
atccaggatccttcgcgcgaatgcg

SEQ ID NO: 5864238 - DNA, 25 bp, Homo sapien
gactcgcgtttgacgcgagagaagc

SEQ ID NO: 5864239 - DNA, 25 bp, Homo sapien
cttccgagcgtagcgacctaagcac

SEQ ID NO: 5864240 - DNA, 25 bp, Homo sapien
tgagcggacgcgcccgatagagatt

SEQ ID NO: 5864241 - DNA, 25 bp, Homo sapien
ttgcagcgtataagggccgcccaga

SEQ ID NO: 5864242 - DNA, 25 bp, Homo sapien
ctaacacggtcgtaaacgggcgctg

SEQ ID NO: 5864243 - DNA, 25 bp, Homo sapien
gaacggggtagtccgtacgtgcatg

SEQ ID NO: 5864244 - DNA, 25 bp, Homo sapien
gagggcaccgcgcgaatatggacat

SEQ ID NO: 5864245 - DNA, 25 bp, Homo sapien
tgactgccattatgcgcgagccgct

SEQ ID NO: 5864246 - DNA, 25 bp, Homo sapien
tgcacgtcgcgttaacgcgtagtcc

SEQ ID NO: 5864247 - DNA, 25 bp, Homo sapien
gaggggaactacgttcgcgtgtctc

SEQ ID NO: 5864248 - DNA, 25 bp, Homo sapien
ctcccatcgaccgcatacgtccgaa

SEQ ID NO: 5864249 - DNA, 25 bp, Homo sapien
ctccgctatacggcatgcgggaact

SEQ ID NO: 5864250 - DNA, 25 bp, Homo sapien
cgtctggtgcgtattcggacccaag

SEQ ID NO: 5864251 - DNA, 25 bp, Homo sapien
gacgcgcgttagcgcgtaaaaggag

SEQ ID NO: 5864252 - DNA, 25 bp, Homo sapien
tcaaggtattcgtcccgcgcgaagg

SEQ ID NO: 5864253 - DNA, 25 bp, Homo sapien
gcaggattacgcgataggggccttc

SEQ ID NO: 5864254 - DNA, 25 bp, Homo sapien
cgaagtcgtcgcgatacgttcggct

SEQ ID NO: 5864255 - DNA, 25 bp, Homo sapien
gccgagacgcgctcgtatgttgact

SEQ ID NO: 5864256 - DNA, 25 bp, Homo sapien
aatcgagtcgtaccgtgactggggc

SEQ ID NO: 5864257 - DNA, 25 bp, Homo sapien
ttcccttatcgagacgccccgacac

SEQ ID NO: 5864258 - DNA, 25 bp, Homo sapien
acagaatggtccggcgtatacggcc

SEQ ID NO: 5864259 - DNA, 25 bp, Homo sapien
cgagggttcgacgtacccttgcttg

SEQ ID NO: 5864260 - DNA, 25 bp, Homo sapien
tccctgggtctattacgcgcgtcac

SEQ ID NO: 5864261 - DNA, 25 bp, Homo sapien
tcgcaccgttacgtcgagcgatggt

SEQ ID NO: 5864262 - DNA, 25 bp, Homo sapien
atcgcgtcgcgtacaacgagccttg

SEQ ID NO: 5864263 - DNA, 25 bp, Homo sapien
acacgcgacgcgctatcggcagaaa

SEQ ID NO: 5864264 - DNA, 25 bp, Homo sapien
accccgaagcgtccgcgtactacta

SEQ ID NO: 5864265 - DNA, 25 bp, Homo sapien
gagccggcgcgttatagggttgcaa

SEQ ID NO: 5864266 - DNA, 25 bp, Homo sapien
tgtcagtctacggtcgactgaggcg

SEQ ID NO: 5864267 - DNA, 25 bp, Homo sapien
gtcgtatacgtccggcgtagtccga

SEQ ID NO: 5864268 - DNA, 25 bp, Homo sapien
gattgcctacgtccgcgatgcctac

SEQ ID NO: 5864269 - DNA, 25 bp, Homo sapien
gaaacaccgggccgtagtaacaggc

SEQ ID NO: 5864270 - DNA, 25 bp, Homo sapien
tgggtctacggtcgtacccgagaac

SEQ ID NO: 5864271 - DNA, 25 bp, Homo sapien
cctatgagtcgcgtcggacatggca

SEQ ID NO: 5864272 - DNA, 25 bp, Homo sapien
atgttccggctattcgcgcgcacga

SEQ ID NO: 5864273 - DNA, 25 bp, Homo sapien
tgacactacttcgtcgcggaggacg

SEQ ID NO: 5864274 - DNA, 25 bp, Homo sapien
tacctttcgtgcgtagacgtgcgcg

SEQ ID NO: 5864275 - DNA, 25 bp, Homo sapien
tccttacctaaccgcgctagggagc

SEQ ID NO: 5864276 - DNA, 25 bp, Homo sapien
cccacatacgttccgcgaggtgcat

SEQ ID NO: 5864277 - DNA, 25 bp, Homo sapien
gagtggccgcgaccgtaagaatctg

SEQ ID NO: 5864278 - DNA, 25 bp, Homo sapien
atagcaaactaatcggcgcggcccg

SEQ ID NO: 5864279 - DNA, 25 bp, Homo sapien
agtggacctatcgcgacggaacctc

SEQ ID NO: 5864280 - DNA, 25 bp, Homo sapien
atgacgaacgccgcgcgtattggag

SEQ ID NO: 5864281 - DNA, 25 bp, Homo sapien
ggggagtagtgtacgccgactagag

SEQ ID NO: 5864282 - DNA, 25 bp, Homo sapien
aaccagcgtgtcgggtatcagggga

SEQ ID NO: 5864283 - DNA, 25 bp, Homo sapien
catgggccgataattcgcgcggcat

SEQ ID NO: 5864284 - DNA, 25 bp, Homo sapien
caaggtcgcggtaacatgctgggtc

SEQ ID NO: 5864285 - DNA, 25 bp, Homo sapien
cacaggtcgaaccgtagtggtcctc

SEQ ID NO: 5864286 - DNA, 25 bp, Homo sapien
tcgcgccgcgctacgtcaatgacta

SEQ ID NO: 5864287 - DNA, 25 bp, Homo sapien
tcgagagcgttccgatacgatggcg

SEQ ID NO: 5864288 - DNA, 25 bp, Homo sapien
ggacgaacgtctacgcgagatcgtg

SEQ ID NO: 5864289 - DNA, 25 bp, Homo sapien
cgtaggcgcgacgggttacatgtga

SEQ ID NO: 5864290 - DNA, 25 bp, Homo sapien
gctgggccgcgtcgatacttcttga

SEQ ID NO: 5864291 - DNA, 25 bp, Homo sapien
cggatatcgaacggcgctaggtgct

SEQ ID NO: 5864292 - DNA, 25 bp, Homo sapien
gacaatagcgctcgcgtaagccctc

SEQ ID NO: 5864293 - DNA, 25 bp, Homo sapien
ggcccccgtctaacgagcgcattat

SEQ ID NO: 5864294 - DNA, 25 bp, Homo sapien
agccccccgcgatatagtgtaagcg

SEQ ID NO: 5864295 - DNA, 25 bp, Homo sapien
gcactagttcggccgacgttgggta

SEQ ID NO: 5864296 - DNA, 25 bp, Homo sapien
caggttgtatcgccgcgagaccaag

SEQ ID NO: 5864297 - DNA, 25 bp, Homo sapien
tgacaagcgtcgtaagggctggtcc

SEQ ID NO: 5864298 - DNA, 25 bp, Homo sapien
aattggcgggcgcaatacgaagggg

SEQ ID NO: 5864299 - DNA, 25 bp, Homo sapien
accacttcgtacacggacggtgtgc

SEQ ID NO: 5864300 - DNA, 25 bp, Homo sapien
gggatcgcgctcgctacgagagaaa

SEQ ID NO: 5864301 - DNA, 25 bp, Homo sapien
gagctttgcgcccttacggggtgtt

SEQ ID NO: 5864302 - DNA, 25 bp, Homo sapien
tcaggattattcgggacggcgggtg

SEQ ID NO: 5864303 - DNA, 25 bp, Homo sapien
acctgagtaagtcgcgcgcgtctct

SEQ ID NO: 5864304 - DNA, 25 bp, Homo sapien
tgtcgacgcgcaatagggcgagaca

SEQ ID NO: 5864305 - DNA, 25 bp, Homo sapien
tcatgctcgtctacgcctaggcggt

SEQ ID NO: 5864306 - DNA, 25 bp, Homo sapien
cagagcactattgcgcgcccaacca

SEQ ID NO: 5864307 - DNA, 25 bp, Homo sapien
tcatacggttagcggcgttggacgc

SEQ ID NO: 5864308 - DNA, 25 bp, Homo sapien
cattcgtgtcgcgccggttcctaac

SEQ ID NO: 5864309 - DNA, 25 bp, Homo sapien
ggttcgctgacatcgcgcgtatggt

SEQ ID NO: 5864310 - DNA, 25 bp, Homo sapien
acaaccacgtccgtcgctaaggcct

SEQ ID NO: 5864311 - DNA, 25 bp, Homo sapien
gacaataatcaccggacgaccggcc

SEQ ID NO: 5864312 - DNA, 25 bp, Homo sapien
cgattgtcgacggccgatcgcatgt

SEQ ID NO: 5864313 - DNA, 25 bp, Homo sapien
cttccattgtcgacgcgggacatcg

SEQ ID NO: 5864314 - DNA, 25 bp, Homo sapien
ctgctagcgcgtatagacccaagcc

SEQ ID NO: 5864315 - DNA, 25 bp, Homo sapien
gatgcggtaacacctcgcgtcatcg

SEQ ID NO: 5864316 - DNA, 25 bp, Homo sapien
cctgagtcgcaacgcgatagtagcg

SEQ ID NO: 5864317 - DNA, 25 bp, Homo sapien
ctcacggcgcgtcgatattgcacag

SEQ ID NO: 5864318 - DNA, 25 bp, Homo sapien
cgagcaacgtgtcgtacggacatcg

SEQ ID NO: 5864319 - DNA, 25 bp, Homo sapien
ggcaagagcccgttagtcgcgaaag

SEQ ID NO: 5864320 - DNA, 25 bp, Homo sapien
ccctgaccgttataccgcgtgtcga

SEQ ID NO: 5864321 - DNA, 25 bp, Homo sapien
cgaggaagtgatcccgcgagttgtc

SEQ ID NO: 5864322 - DNA, 25 bp, Homo sapien
accgcccctcgaacgtagcaagttc

SEQ ID NO: 5864323 - DNA, 25 bp, Homo sapien
ccgctacgatatagccgcgtgtgga

SEQ ID NO: 5864324 - DNA, 25 bp, Homo sapien
ctggtacctaagcgacgcgcagctt

SEQ ID NO: 5864325 - DNA, 25 bp, Homo sapien
acgaagagtagcgctacgccttgcg

SEQ ID NO: 5864326 - DNA, 25 bp, Homo sapien
gcccagcgtactagaccgggttact

SEQ ID NO: 5864327 - DNA, 25 bp, Homo sapien
agccaggactacgcttacgccgtct

SEQ ID NO: 5864328 - DNA, 25 bp, Homo sapien
acctaccgataagcgcctaccgagc

SEQ ID NO: 5864329 - DNA, 25 bp, Homo sapien
ggtccagacgatacggcgtgtagtc

SEQ ID NO: 5864330 - DNA, 25 bp, Homo sapien
gcaacaggacgactagcgtacccgt

SEQ ID NO: 5864331 - DNA, 25 bp, Homo sapien
ctgcaacgtaccgcgtcttgtggac

SEQ ID NO: 5864332 - DNA, 25 bp, Homo sapien
cggcatatacgcgttggaccgatgc

SEQ ID NO: 5864333 - DNA, 25 bp, Homo sapien
gcattcgctagtccgacgctcaacc

SEQ ID NO: 5864334 - DNA, 25 bp, Homo sapien
tatgccgcgtaggcgagtacttgcc

SEQ ID NO: 5864335 - DNA, 25 bp, Homo sapien
gccacttatcgggccgactattgcc

SEQ ID NO: 5864336 - DNA, 25 bp, Homo sapien
cacacgtcgtccggaggtaataggc

SEQ ID NO: 5864337 - DNA, 25 bp, Homo sapien
tcctgctacgtcgaccgatacgtgc

SEQ ID NO: 5864338 - DNA, 25 bp, Homo sapien
atgaatccgcggcgtattggacgcc

SEQ ID NO: 5864339 - DNA, 25 bp, Homo sapien
tcggggaggtcgtcgtacgacaaga

SEQ ID NO: 5864340 - DNA, 25 bp, Homo sapien
agtggctaatggaccgcgctagcga

SEQ ID NO: 5864341 - DNA, 25 bp, Homo sapien
attcgctttcgcggacgctcgcttc

SEQ ID NO: 5864342 - DNA, 25 bp, Homo sapien
tggtgaacgcgctaactcggcgtct

SEQ ID NO: 5864343 - DNA, 25 bp, Homo sapien
cccgtctggttgcaacgcggaatag

SEQ ID NO: 5864344 - DNA, 25 bp, Homo sapien
ctcgtcatacggtgcgaccctgaga

SEQ ID NO: 5864345 - DNA, 25 bp, Homo sapien
gggtatcgcccgttaaacgagctcg

SEQ ID NO: 5864346 - DNA, 25 bp, Homo sapien
ccaagcatgattcgcgcgttcggtg

SEQ ID NO: 5864347 - DNA, 25 bp, Homo sapien
ggcactgcgcggttacgatactgtc

SEQ ID NO: 5864348 - DNA, 25 bp, Homo sapien
gaagcgtcggatgtaccgacgcaag

SEQ ID NO: 5864349 - DNA, 25 bp, Homo sapien
cacactacggtacaacgcgacacgc

SEQ ID NO: 5864350 - DNA, 25 bp, Homo sapien
agcgggacttaccgaggcgatggta

SEQ ID NO: 5864351 - DNA, 25 bp, Homo sapien
gcaggatagtatcgcccgtggcact

SEQ ID NO: 5864352 - DNA, 25 bp, Homo sapien
tctgcttgacgcgcggatgtctcca

SEQ ID NO: 5864353 - DNA, 25 bp, Homo sapien
tggtcgcgcgtaccacgatcgatct

SEQ ID NO: 5864354 - DNA, 25 bp, Homo sapien
accgcacgcgtcgttaaccgagtct

SEQ ID NO: 5864355 - DNA, 25 bp, Homo sapien
ggcattccggtaacctcgccactag

SEQ ID NO: 5864356 - DNA, 25 bp, Homo sapien
gcatcaccccgtcgcaattcggatc

SEQ ID NO: 5864357 - DNA, 25 bp, Homo sapien
gactctgctcgcgaagtacatgggg

SEQ ID NO: 5864358 - DNA, 25 bp, Homo sapien
gccgcagaccgatcatacgcatgct

SEQ ID NO: 5864359 - DNA, 25 bp, Homo sapien
cagctttgcgcgtcgtactaggtcc

SEQ ID NO: 5864360 - DNA, 25 bp, Homo sapien
gaaatgcgatcctacgcgtggccgt

SEQ ID NO: 5864361 - DNA, 25 bp, Homo sapien
gaggaaccgcgtaacgtcaggcgtt

SEQ ID NO: 5864362 - DNA, 25 bp, Homo sapien
ccacttgcgaacagcgctaagcgca

SEQ ID NO: 5864363 - DNA, 25 bp, Homo sapien
ggttcgagccgtcgcgtatcttagg

SEQ ID NO: 5864364 - DNA, 25 bp, Homo sapien
ggtgcagcgtagcacgacgcataga

SEQ ID NO: 5864365 - DNA, 25 bp, Homo sapien
ggatcctacgcggcgagtcatgttc

SEQ ID NO: 5864366 - DNA, 25 bp, Homo sapien
gggacacgaccgtactaccttagcg

SEQ ID NO: 5864367 - DNA, 25 bp, Homo sapien
ttgcaatacgctagggcgttgcgcg

SEQ ID NO: 5864368 - DNA, 25 bp, Homo sapien
cgtgaatcgcccctacgcatggcaa

SEQ ID NO: 5864369 - DNA, 25 bp, Homo sapien
cacagctagcgtcgaccgctctcat

SEQ ID NO: 5864370 - DNA, 25 bp, Homo sapien
atgtgagacgagcgtacgacgccac

SEQ ID NO: 5864371 - DNA, 25 bp, Homo sapien
caccattgtccgacgcgtatcggga

SEQ ID NO: 5864372 - DNA, 25 bp, Homo sapien
ctggcttcgaatgacgcggttggtc

SEQ ID NO: 5864373 - DNA, 25 bp, Homo sapien
acatgaggcgcgatcgactagagcg

SEQ ID NO: 5864374 - DNA, 25 bp, Homo sapien
gaccgtcgatcgtaccggaacctgt

SEQ ID NO: 5864375 - DNA, 25 bp, Homo sapien
tctcctgtcggacgtatacggaccg

SEQ ID NO: 5864376 - DNA, 25 bp, Homo sapien
ccggtcacgttagacgaccatgcca

SEQ ID NO: 5864377 - DNA, 25 bp, Homo sapien
ggccgaccgaacgctaacgaatgca

SEQ ID NO: 5864378 - DNA, 25 bp, Homo sapien
gatgccacctaactgcgcgttgcac

SEQ ID NO: 5864379 - DNA, 25 bp, Homo sapien
gcagcgcacgcggaatacgtcaaac

SEQ ID NO: 5864380 - DNA, 25 bp, Homo sapien
cattgggtagcgcgcgtatgcggat

SEQ ID NO: 5864381 - DNA, 25 bp, Homo sapien
tacgaaagtacccgtccgggcactg

SEQ ID NO: 5864382 - DNA, 25 bp, Homo sapien
caacagtcgcccgatagacgtggtc

SEQ ID NO: 5864383 - DNA, 25 bp, Homo sapien
tacgtgttacgcgacgctcagagcg

SEQ ID NO: 5864384 - DNA, 25 bp, Homo sapien
cgaaggcggcaatacgcgatttccg

SEQ ID NO: 5864385 - DNA, 25 bp, Homo sapien
gagtactaggttagtcgcggcggac

SEQ ID NO: 5864386 - DNA, 25 bp, Homo sapien
acacgccgtccgactaggtcaccta

SEQ ID NO: 5864387 - DNA, 25 bp, Homo sapien
aagcgacgatcgtacgggtctcacc

SEQ ID NO: 5864388 - DNA, 25 bp, Homo sapien
gagcgctacggccgtacgtattacc

SEQ ID NO: 5864389 - DNA, 25 bp, Homo sapien
actgacggattatcgcgcgtgctgc

SEQ ID NO: 5864390 - DNA, 25 bp, Homo sapien
tcaccacgcgctagtactccaccga

SEQ ID NO: 5864391 - DNA, 25 bp, Homo sapien
cacggaaacgtacgaccgcggcatt

SEQ ID NO: 5864392 - DNA, 25 bp, Homo sapien
gcgaattcaacgcgcgtagcaggac

SEQ ID NO: 5864393 - DNA, 25 bp, Homo sapien
agaaaccgcgatgcgtagcgggact

SEQ ID NO: 5864394 - DNA, 25 bp, Homo sapien
acggtgacagctcgtacgcggtatc

SEQ ID NO: 5864395 - DNA, 25 bp, Homo sapien
ggagtggcgacggtatggtccatga

SEQ ID NO: 5864396 - DNA, 25 bp, Homo sapien
gtaaggaggtcggacgtcgttgctc

SEQ ID NO: 5864397 - DNA, 25 bp, Homo sapien
tgataggtatcttcgcgcgcacgcc

SEQ ID NO: 5864398 - DNA, 25 bp, Homo sapien
tagatctacggacgcgacaagcgcg

SEQ ID NO: 5864399 - DNA, 25 bp, Homo sapien
tcaagagatcgtacccgcgcctgct

SEQ ID NO: 5864400 - DNA, 25 bp, Homo sapien
ttgtgcccaatcgcgctcggtgtga

SEQ ID NO: 5864401 - DNA, 25 bp, Homo sapien
taccgagcatactacgcggacgacg

SEQ ID NO: 5864402 - DNA, 25 bp, Homo sapien
tgccgcgcgcgtaacattctctgca

SEQ ID NO: 5864403 - DNA, 25 bp, Homo sapien
cacccggcgtatcgcacctagcatt

SEQ ID NO: 5864404 - DNA, 25 bp, Homo sapien
tagtacatagccgcgaagtgcgccg

SEQ ID NO: 5864405 - DNA, 25 bp, Homo sapien
gaggcttacgccgtatgtcacgacg

SEQ ID NO: 5864406 - DNA, 25 bp, Homo sapien
acctgagcgaatcgacacttgcccc

SEQ ID NO: 5864407 - DNA, 25 bp, Homo sapien
gggaacctagtagcgcgaggaagca

SEQ ID NO: 5864408 - DNA, 25 bp, Homo sapien
ctctgactagcgcaacgacggtgca

SEQ ID NO: 5864409 - DNA, 25 bp, Homo sapien
cgacatagcacgactacggacctgg

SEQ ID NO: 5864410 - DNA, 25 bp, Homo sapien
tttccgcgtcgtaagagcgaaggcg

SEQ ID NO: 5864411 - DNA, 25 bp, Homo sapien
gattagcagcgcgtatcgtcggagg

SEQ ID NO: 5864412 - DNA, 25 bp, Homo sapien
actctgctatagcgcgacgatgcgc

SEQ ID NO: 5864413 - DNA, 25 bp, Homo sapien
ggaagcacgcgaccaaccgacatag

SEQ ID NO: 5864414 - DNA, 25 bp, Homo sapien
tcaaaagcccgcgcataacggtccg

SEQ ID NO: 5864415 - DNA, 25 bp, Homo sapien
ccggattttgcgcgacctacggcat

SEQ ID NO: 5864416 - DNA, 25 bp, Homo sapien
aaatcgtacgagcgcggttgggcct

SEQ ID NO: 5864417 - DNA, 25 bp, Homo sapien
agcctacggtatacgtcggcgaggt

SEQ ID NO: 5864418 - DNA, 25 bp, Homo sapien
gacgttcgtacgcggtgtaggcaag

SEQ ID NO: 5864419 - DNA, 25 bp, Homo sapien
gttagccgttacggcgtaggagagg

SEQ ID NO: 5864420 - DNA, 25 bp, Homo sapien
gattcaacgacgtaacgggggagcg

SEQ ID NO: 5864421 - DNA, 25 bp, Homo sapien
gaccactacccgcgtacgaaatccc

SEQ ID NO: 5864422 - DNA, 25 bp, Homo sapien
gcgtaccgcgtatacggcacgtact

SEQ ID NO: 5864423 - DNA, 25 bp, Homo sapien
caacagcttcgtacgcgggtagctc

SEQ ID NO: 5864424 - DNA, 25 bp, Homo sapien
tcgtgccgctataggtcggtcgtgt

SEQ ID NO: 5864425 - DNA, 25 bp, Homo sapien
gtggtgcaggtcgcgtactcagcat

SEQ ID NO: 5864426 - DNA, 25 bp, Homo sapien
gatcggattacggcgtcacgtcgag

SEQ ID NO: 5864427 - DNA, 25 bp, Homo sapien
gtcctttgtctacgcgcgacgaagc

SEQ ID NO: 5864428 - DNA, 25 bp, Homo sapien
tcggatctagcgcggtcgtcacaca

SEQ ID NO: 5864429 - DNA, 25 bp, Homo sapien
caggcctacgcccacggtaaatgag

SEQ ID NO: 5864430 - DNA, 25 bp, Homo sapien
gctcaccggtatgtcgagcaagtgc

SEQ ID NO: 5864431 - DNA, 25 bp, Homo sapien
atatcgcggactctatcgccgctgc

SEQ ID NO: 5864432 - DNA, 25 bp, Homo sapien
ccttactacgtcgatcggccatcgc

SEQ ID NO: 5864433 - DNA, 25 bp, Homo sapien
gggcagatcgcgccttcgttacaac

SEQ ID NO: 5864434 - DNA, 25 bp, Homo sapien
ctattgcgacatatcgccgcggacc

SEQ ID NO: 5864435 - DNA, 25 bp, Homo sapien
cgttcatatagcgccgagccagagg

SEQ ID NO: 5864436 - DNA, 25 bp, Homo sapien
cttccttgcgtaagggtcgggagtc

SEQ ID NO: 5864437 - DNA, 25 bp, Homo sapien
gccgtttatccggtcgtagaccgac

SEQ ID NO: 5864438 - DNA, 25 bp, Homo sapien
cttacgttagcgcgtacgggcactc

SEQ ID NO: 5864439 - DNA, 25 bp, Homo sapien
ccgttggataacgcgaccgtcactc

SEQ ID NO: 5864440 - DNA, 25 bp, Homo sapien
ccaggtgggacgatacgacttggct

SEQ ID NO: 5864441 - DNA, 25 bp, Homo sapien
cgtgaggcgtacggtgaatgacagg

SEQ ID NO: 5864442 - DNA, 25 bp, Homo sapien
gcgggtgctagttcggacgatttcg

SEQ ID NO: 5864443 - DNA, 25 bp, Homo sapien
cggtcgtcgcgatatgacggtactc

SEQ ID NO: 5864444 - DNA, 25 bp, Homo sapien
cgtgtgacgatagcgcgtacagagg

SEQ ID NO: 5864445 - DNA, 25 bp, Homo sapien
aacccttatcgcgatggggcatcgc

SEQ ID NO: 5864446 - DNA, 25 bp, Homo sapien
ccacgaatccgctagccgaagacgt

SEQ ID NO: 5864447 - DNA, 25 bp, Homo sapien
ccccttaccgtagacgcgtgatgtg

SEQ ID NO: 5864448 - DNA, 25 bp, Homo sapien
aaggatcgtcgcgcactaacggtcc

SEQ ID NO: 5864449 - DNA, 25 bp, Homo sapien
aaagcgagtcgcgataccccatcgg

SEQ ID NO: 5864450 - DNA, 25 bp, Homo sapien
ctctgataaccatgcgcgccgtgtg

SEQ ID NO: 5864451 - DNA, 25 bp, Homo sapien
cccgtggcgccggtagtatacagtt

SEQ ID NO: 5864452 - DNA, 25 bp, Homo sapien
tgtctgtacgcgcgaccaaccgtac

SEQ ID NO: 5864453 - DNA, 25 bp, Homo sapien
cgcatagcgccgtacgacaacggaa

SEQ ID NO: 5864454 - DNA, 25 bp, Homo sapien
tccaaaagtgcgccgatacccggtg

SEQ ID NO: 5864455 - DNA, 25 bp, Homo sapien
cactcgtgtccgcgcgatagcgtta

SEQ ID NO: 5864456 - DNA, 25 bp, Homo sapien
ggaggcgtagcgcgtacgcgaatat

SEQ ID NO: 5864457 - DNA, 25 bp, Homo sapien
cgtcgtcgtacggtcgtagtgcttc

SEQ ID NO: 5864458 - DNA, 25 bp, Homo sapien
gagcacatcttacgagcgccacctc

SEQ ID NO: 5864459 - DNA, 25 bp, Homo sapien
ttcgagtgaacgtcgcgcagctcga

SEQ ID NO: 5864460 - DNA, 25 bp, Homo sapien
aatccgggaccgttgcgtccgtgaa

SEQ ID NO: 5864461 - DNA, 25 bp, Homo sapien
ccagcggtctcgcggttaacaacct

SEQ ID NO: 5864462 - DNA, 25 bp, Homo sapien
acgctatatcgcgaaccgtcctccg

SEQ ID NO: 5864463 - DNA, 25 bp, Homo sapien
tattgggcgtaacgggcttgtggcg

SEQ ID NO: 5864464 - DNA, 25 bp, Homo sapien
caggtccgcgtatcgtgaactcgga

SEQ ID NO: 5864465 - DNA, 25 bp, Homo sapien
atactccgttcgcgcgattgggtgc

SEQ ID NO: 5864466 - DNA, 25 bp, Homo sapien
ctattccgggcgtacgtcaccgatg

SEQ ID NO: 5864467 - DNA, 25 bp, Homo sapien
cttctattcgcgcggaacagccgac

SEQ ID NO: 5864468 - DNA, 25 bp, Homo sapien
ccgctcatacgcatgacggtgtctg

SEQ ID NO: 5864469 - DNA, 25 bp, Homo sapien
tctatggcttgtacgacgcgggcag

SEQ ID NO: 5864470 - DNA, 25 bp, Homo sapien
tggacgcgccctaatacggactctg

SEQ ID NO: 5864471 - DNA, 25 bp, Homo sapien
cttcagggcgatatcccgtactcgg

SEQ ID NO: 5864472 - DNA, 25 bp, Homo sapien
cgcgcgacgtaaccggactcttaga

SEQ ID NO: 5864473 - DNA, 25 bp, Homo sapien
ggtgggcgtattatgccgccgttct

SEQ ID NO: 5864474 - DNA, 25 bp, Homo sapien
cgacaggcgcactatacgacgaacc

SEQ ID NO: 5864475 - DNA, 25 bp, Homo sapien
gggcattaggcgtacgcgattcggt

SEQ ID NO: 5864476 - DNA, 25 bp, Homo sapien
ttgacgatcgcgcgatcctgccttg

SEQ ID NO: 5864477 - DNA, 25 bp, Homo sapien
tcaaggcgatagggcgacgcagcat

SEQ ID NO: 5864478 - DNA, 25 bp, Homo sapien
agactcgcgcgaagcgtctctcaca

SEQ ID NO: 5864479 - DNA, 25 bp, Homo sapien
cctgcatacgcacggtccatgcatg

SEQ ID NO: 5864480 - DNA, 25 bp, Homo sapien
gcacagcgttacttcgcggcacttc

SEQ ID NO: 5864481 - DNA, 25 bp, Homo sapien
catcgtcgtaggcgtatcgacccgt

SEQ ID NO: 5864482 - DNA, 25 bp, Homo sapien
gtctgttacttgcgcgcgaccggat

SEQ ID NO: 5864483 - DNA, 25 bp, Homo sapien
gacgcacctacgagttgcgatgcct

SEQ ID NO: 5864484 - DNA, 25 bp, Homo sapien
aaagcggatagcgcggctacagacc

SEQ ID NO: 5864485 - DNA, 25 bp, Homo sapien
tgtgctgtacctcgcgggagaagtg

SEQ ID NO: 5864486 - DNA, 25 bp, Homo sapien
ccagcacgaacgttcgacccggaat

SEQ ID NO: 5864487 - DNA, 25 bp, Homo sapien
ccgccctcgcgcaactaccttgaat

SEQ ID NO: 5864488 - DNA, 25 bp, Homo sapien
aagaacggtacggcgcgaacggaga

SEQ ID NO: 5864489 - DNA, 25 bp, Homo sapien
caaacacgcgactagacgtcccgtc

SEQ ID NO: 5864490 - DNA, 25 bp, Homo sapien
gtgaacacgctacgttcgcccggta

SEQ ID NO: 5864491 - DNA, 25 bp, Homo sapien
tggcggctcgcgtagacggttacat

SEQ ID NO: 5864492 - DNA, 25 bp, Homo sapien
tgtgatgtcgcacctaccgcggatg

SEQ ID NO: 5864493 - DNA, 25 bp, Homo sapien
tacacctagcgtcgcgtagtcgtcc

SEQ ID NO: 5864494 - DNA, 25 bp, Homo sapien
gtcggtgtatcgcacgcgtactacg

SEQ ID NO: 5864495 - DNA, 25 bp, Homo sapien
tagcggaggcgcgtcgtaacacagt

SEQ ID NO: 5864496 - DNA, 25 bp, Homo sapien
tcggccgtcgcgaccgtatcttgtt

SEQ ID NO: 5864497 - DNA, 25 bp, Homo sapien
gctgatcgctatacgaaccagcggc

SEQ ID NO: 5864498 - DNA, 25 bp, Homo sapien
tcgtcgcgcatcgactaagcgctga

SEQ ID NO: 5864499 - DNA, 25 bp, Homo sapien
gaggttataccggttcgacgcgcgt

SEQ ID NO: 5864500 - DNA, 25 bp, Homo sapien
tggtgattacgtgcggaccccttcg

SEQ ID NO: 5864501 - DNA, 25 bp, Homo sapien
ggccgactatcgcgcatcggaaatg

SEQ ID NO: 5864502 - DNA, 25 bp, Homo sapien
cctgtccttggcgcgtaacacatgc

SEQ ID NO: 5864503 - DNA, 25 bp, Homo sapien
ctcacccggacggtagtatcacctc

SEQ ID NO: 5864504 - DNA, 25 bp, Homo sapien
actgctctagcgcagttcggaccga

SEQ ID NO: 5864505 - DNA, 25 bp, Homo sapien
actcgcgtacgcggactagcaacag

SEQ ID NO: 5864506 - DNA, 25 bp, Homo sapien
gcaccccgacataccgcctcattac

SEQ ID NO: 5864507 - DNA, 25 bp, Homo sapien
ctctctgcttactcgcgttgcgacc

SEQ ID NO: 5864508 - DNA, 25 bp, Homo sapien
agatgaactcgtcccaacgcccgtc

SEQ ID NO: 5864509 - DNA, 25 bp, Homo sapien
gcgctcactaggcgtctcgttagct

SEQ ID NO: 5864510 - DNA, 25 bp, Homo sapien
taccgagtgtacggagcgacaggtg

SEQ ID NO: 5864511 - DNA, 25 bp, Homo sapien
ctgagactacgcggacgtaggtcgt

SEQ ID NO: 5864512 - DNA, 25 bp, Homo sapien
tctagcccgcgtacgaagtccacag

SEQ ID NO: 5864513 - DNA, 25 bp, Homo sapien
catgtcatacgcggcgacgtaacgc

SEQ ID NO: 5864514 - DNA, 25 bp, Homo sapien
agtgactcgtagtcgcaccgttgcc

SEQ ID NO: 5864515 - DNA, 25 bp, Homo sapien
cgaccagcgcgtcgaactatcgatg

SEQ ID NO: 5864516 - DNA, 25 bp, Homo sapien
cgaccacgcgcgtaactaagatccg

SEQ ID NO: 5864517 - DNA, 25 bp, Homo sapien
tcaggcggccgatatgcgtgaggat

SEQ ID NO: 5864518 - DNA, 25 bp, Homo sapien
cgtgacgatatcgcgtacggtcctg

SEQ ID NO: 5864519 - DNA, 25 bp, Homo sapien
agtcgtcgcgggtctaacgaccact

SEQ ID NO: 5864520 - DNA, 25 bp, Homo sapien
gtcccgacgacccgattatactgcg

SEQ ID NO: 5864521 - DNA, 25 bp, Homo sapien
cgatagcgtcgcgcattacgcgaga

SEQ ID NO: 5864522 - DNA, 25 bp, Homo sapien
tctttcctcgtacgtcggcgagcac

SEQ ID NO: 5864523 - DNA, 25 bp, Homo sapien
ccccgtatcgacgctagcgagatag

SEQ ID NO: 5864524 - DNA, 25 bp, Homo sapien
gtcctaacggcgtccgatccgcata

SEQ ID NO: 5864525 - DNA, 25 bp, Homo sapien
gttcacccgtcgcgatactgtctgg

SEQ ID NO: 5864526 - DNA, 25 bp, Homo sapien
gatgctccgttagatagcggagggc

SEQ ID NO: 5864527 - DNA, 25 bp, Homo sapien
aaagactctagtcgcgcgggacctc

SEQ ID NO: 5864528 - DNA, 25 bp, Homo sapien
cacgggggatcgttcgcctagtatc

SEQ ID NO: 5864529 - DNA, 25 bp, Homo sapien
ggatccgcggacctatacgatgctc

SEQ ID NO: 5864530 - DNA, 25 bp, Homo sapien
cttcgagtatagacgtcggcgaggg

SEQ ID NO: 5864531 - DNA, 25 bp, Homo sapien
ttggtccgtaacgtctcgacctggg

SEQ ID NO: 5864532 - DNA, 25 bp, Homo sapien
tcggttgacgcaactagcggccatc

SEQ ID NO: 5864533 - DNA, 25 bp, Homo sapien
gcgaagacccgtcgattcgcaagtc

SEQ ID NO: 5864534 - DNA, 25 bp, Homo sapien
gcttgctccgcgtaccaacgggaat

SEQ ID NO: 5864535 - DNA, 25 bp, Homo sapien
gtccatcatcgacgcgacagatggg

SEQ ID NO: 5864536 - DNA, 25 bp, Homo sapien
acgttgtccgacgtactagctgggc

SEQ ID NO: 5864537 - DNA, 25 bp, Homo sapien
atccgataaccgctacgggccgcaa

SEQ ID NO: 5864538 - DNA, 25 bp, Homo sapien
catcgtcgactatacgggtggccag

SEQ ID NO: 5864539 - DNA, 25 bp, Homo sapien
ctagcgcgacacgcggttacgatac

SEQ ID NO: 5864540 - DNA, 25 bp, Homo sapien
agtaaccccgtgcgcgaattctcgg

SEQ ID NO: 5864541 - DNA, 25 bp, Homo sapien
ttacctcgcgtagcgttgtcgctgc

SEQ ID NO: 5864542 - DNA, 25 bp, Homo sapien
ggcgctacgttatgtccgcataccc

SEQ ID NO: 5864543 - DNA, 25 bp, Homo sapien
tcggtctcgcgcgtacttcaaacgc

SEQ ID NO: 5864544 - DNA, 25 bp, Homo sapien
cccgtagcacgctattccgctcgaa

SEQ ID NO: 5864545 - DNA, 25 bp, Homo sapien
cctgtatcgcgcggtagaaggcaca

SEQ ID NO: 5864546 - DNA, 25 bp, Homo sapien
cctgtcgtcgtacgcatcggaagtc

SEQ ID NO: 5864547 - DNA, 25 bp, Homo sapien
ggggcttacgcgaatagcctgtctg

SEQ ID NO: 5864548 - DNA, 25 bp, Homo sapien
ggcatggatgtagcgtcgttgggag

SEQ ID NO: 5864549 - DNA, 25 bp, Homo sapien
gtctgctgactcgctaacgcgctga

SEQ ID NO: 5864550 - DNA, 25 bp, Homo sapien
tggagacgagcgctacgcaatcggt

SEQ ID NO: 5864551 - DNA, 25 bp, Homo sapien
tggtcgaccggtcgacgttcgatca

SEQ ID NO: 5864552 - DNA, 25 bp, Homo sapien
tttcctctcgtgcgaccgaagggtc

SEQ ID NO: 5864553 - DNA, 25 bp, Homo sapien
gcggttctaataaggcgcgcgggat

SEQ ID NO: 5864554 - DNA, 25 bp, Homo sapien
aagtccgccgcgttaggactttgcc

SEQ ID NO: 5864555 - DNA, 25 bp, Homo sapien
atccgcctcgacgtcgtgcaggata

SEQ ID NO: 5864556 - DNA, 25 bp, Homo sapien
cgttcgacgcaacgacccgactgta

SEQ ID NO: 5864557 - DNA, 25 bp, Homo sapien
agtatcccgcgtatgatcctgccgg

SEQ ID NO: 5864558 - DNA, 25 bp, Homo sapien
gatgccacgtatgtccgactcgctg

SEQ ID NO: 5864559 - DNA, 25 bp, Homo sapien
ttgtccatctatcccgcgcgctgtg

SEQ ID NO: 5864560 - DNA, 25 bp, Homo sapien
gcgcagcgacgcacgatcactaatg

SEQ ID NO: 5864561 - DNA, 25 bp, Homo sapien
actctccgacgtagaagcggggaag

SEQ ID NO: 5864562 - DNA, 25 bp, Homo sapien
tgcagcgtacacgaacgtcgctgtg

SEQ ID NO: 5864563 - DNA, 25 bp, Homo sapien
gagcaacgtgcgatcacgccggata

SEQ ID NO: 5864564 - DNA, 25 bp, Homo sapien
gagtgccggtcgatcggtacgtatc

SEQ ID NO: 5864565 - DNA, 25 bp, Homo sapien
tttcttgtcgtggcccgtatgcccc

SEQ ID NO: 5864566 - DNA, 25 bp, Homo sapien
gtggatcggtcgcgctattggcaca

SEQ ID NO: 5864567 - DNA, 25 bp, Homo sapien
accagttcggaccgactcgtacgac

SEQ ID NO: 5864568 - DNA, 25 bp, Homo sapien
ctgcgcactagcgccgatagttggt

SEQ ID NO: 5864569 - DNA, 25 bp, Homo sapien
acctcgcggtacgacgcaagttctc

SEQ ID NO: 5864570 - DNA, 25 bp, Homo sapien
ggagacaagtacgtcgcggtagacc

SEQ ID NO: 5864571 - DNA, 25 bp, Homo sapien
catacgcttcgtcgcgtaggctgct

SEQ ID NO: 5864572 - DNA, 25 bp, Homo sapien
gggtcccaataggttcgcggacact

SEQ ID NO: 5864573 - DNA, 25 bp, Homo sapien
tccgaccgtataacacgcggacgca

SEQ ID NO: 5864574 - DNA, 25 bp, Homo sapien
ctggcgacgcgaacgtaggaacagt

SEQ ID NO: 5864575 - DNA, 25 bp, Homo sapien
atctcctacgcgtcgtacccacacc

SEQ ID NO: 5864576 - DNA, 25 bp, Homo sapien
cactgccggcagtacgtatctcggt

SEQ ID NO: 5864577 - DNA, 25 bp, Homo sapien
ggggtgtacggtcgtagacagtacg

SEQ ID NO: 5864578 - DNA, 25 bp, Homo sapien
gatgccactcgatcgtccgtcacgg

SEQ ID NO: 5864579 - DNA, 25 bp, Homo sapien
gtaccagcatcgcgcgtaccatccc

SEQ ID NO: 5864580 - DNA, 25 bp, Homo sapien
gccccttacggtcgcgatccagtag

SEQ ID NO: 5864581 - DNA, 25 bp, Homo sapien
accacgcttacgccgcgtatcccgt

SEQ ID NO: 5864582 - DNA, 25 bp, Homo sapien
ctgacggtaccgcgcgacttggaag

SEQ ID NO: 5864583 - DNA, 25 bp, Homo sapien
aggtcctcgctagcgaacgcagctc

SEQ ID NO: 5864584 - DNA, 25 bp, Homo sapien
gtgaggcgcgcgtagcagacttgag

SEQ ID NO: 5864585 - DNA, 25 bp, Homo sapien
ggcttataccgcgtcgggtggtgga

SEQ ID NO: 5864586 - DNA, 25 bp, Homo sapien
cctcgtgaccgatcacgcttcgcac

SEQ ID NO: 5864587 - DNA, 25 bp, Homo sapien
gtgccacgacgtacatcgtcggctc

SEQ ID NO: 5864588 - DNA, 25 bp, Homo sapien
gctccctcaccgcgtacgggatact

SEQ ID NO: 5864589 - DNA, 25 bp, Homo sapien
aacctcctatcgggtcgcgacggag

SEQ ID NO: 5864590 - DNA, 25 bp, Homo sapien
actcagtaccgcgcgctagggcttc

SEQ ID NO: 5864591 - DNA, 25 bp, Homo sapien
cgcaaggttactagcgccgggctag

SEQ ID NO: 5864592 - DNA, 25 bp, Homo sapien
cgaggttcgactacgaccgagcgag

SEQ ID NO: 5864593 - DNA, 25 bp, Homo sapien
taagcgcgtacgacgctccgtgtgc

SEQ ID NO: 5864594 - DNA, 25 bp, Homo sapien
cctgcagggctattcgcgctctacc

SEQ ID NO: 5864595 - DNA, 25 bp, Homo sapien
gctgcaagtttacgggccgctcagg

SEQ ID NO: 5864596 - DNA, 25 bp, Homo sapien
ggatgctgtcgtacggtcgtgggga

SEQ ID NO: 5864597 - DNA, 25 bp, Homo sapien
tggaactcgactacggaccgccgga

SEQ ID NO: 5864598 - DNA, 25 bp, Homo sapien
tctggcggagcgttacgctccctgt

SEQ ID NO: 5864599 - DNA, 25 bp, Homo sapien
cacttcaccgggcatacgcgtccgt

SEQ ID NO: 5864600 - DNA, 25 bp, Homo sapien
gacgtatcggcatacggcgatgccc

SEQ ID NO: 5864601 - DNA, 25 bp, Homo sapien
gggacctagtcgaccgactcgatgg

SEQ ID NO: 5864602 - DNA, 25 bp, Homo sapien
gcctggcgtcgaacgtcctagtctc

SEQ ID NO: 5864603 - DNA, 25 bp, Homo sapien
attctgacgggatacgcgtcggggc

SEQ ID NO: 5864604 - DNA, 25 bp, Homo sapien
ggaaggtctcgcgatgatcccacgc

SEQ ID NO: 5864605 - DNA, 25 bp, Homo sapien
ggactgcgcgttacgtcaacctccc

SEQ ID NO: 5864606 - DNA, 25 bp, Homo sapien
cccggtcgccgatgtacggtatgac

SEQ ID NO: 5864607 - DNA, 25 bp, Homo sapien
tgacaccgtctagaccgcgggctag

SEQ ID NO: 5864608 - DNA, 25 bp, Homo sapien
acccctgattcgctacgcgcgcaac

SEQ ID NO: 5864609 - DNA, 25 bp, Homo sapien
cctaggctagcgcgaaacgggtcgt

SEQ ID NO: 5864610 - DNA, 25 bp, Homo sapien
gaggcgccgggcgtacgatagtgaa

SEQ ID NO: 5864611 - DNA, 25 bp, Homo sapien
ggggtctatcgcggaggtccttgga

SEQ ID NO: 5864612 - DNA, 25 bp, Homo sapien
ctagggcgcggtcaatcgtgggaag

SEQ ID NO: 5864613 - DNA, 25 bp, Homo sapien
cttagggccggtatgcgacggtcgt

SEQ ID NO: 5864614 - DNA, 25 bp, Homo sapien
gcggaagtaacgtgtcgcgggagca

SEQ ID NO: 5864615 - DNA, 25 bp, Homo sapien
tgcccgatctcgcatcgcgttcggt

SEQ ID NO: 5864616 - DNA, 25 bp, Homo sapien
gggcaatttacgcgacctgcgaggg

SEQ ID NO: 5864617 - DNA, 25 bp, Homo sapien
gaacgccgtagattccccggaccag

SEQ ID NO: 5864618 - DNA, 25 bp, Homo sapien
accagggtatgccgcacgagtgacg

SEQ ID NO: 5864619 - DNA, 25 bp, Homo sapien
acacgctcgtcgcaccataccgtcg

SEQ ID NO: 5864620 - DNA, 25 bp, Homo sapien
caattgagacgtacgcggtgccggg

SEQ ID NO: 5864621 - DNA, 25 bp, Homo sapien
gagggaccgtctaggcgttcgacga

SEQ ID NO: 5864622 - DNA, 25 bp, Homo sapien
tcaaccgcttagtctcgcgctgggg

SEQ ID NO: 5864623 - DNA, 25 bp, Homo sapien
tcccacagtacgtccgtacgggcca

SEQ ID NO: 5864624 - DNA, 25 bp, Homo sapien
agcccgcgagcgggcatatggaaag

SEQ ID NO: 5864625 - DNA, 25 bp, Homo sapien
atgctggactagcccgcgacgtcac

SEQ ID NO: 5864626 - DNA, 25 bp, Homo sapien
tcgtaccgtaggtgcgtcgggctga

SEQ ID NO: 5864627 - DNA, 25 bp, Homo sapien
cagggcctacttcgcgcgttgcgat

SEQ ID NO: 5864628 - DNA, 25 bp, Homo sapien
tacccaactgcgcgtacgagggagg

SEQ ID NO: 5864629 - DNA, 25 bp, Homo sapien
cacgggtgtcgcgcgaaaggatgtc

SEQ ID NO: 5864630 - DNA, 25 bp, Homo sapien
gcgctcacctatttcgcgcacgcgt

SEQ ID NO: 5864631 - DNA, 25 bp, Homo sapien
cggacacgttcgtagaccggctgtg

SEQ ID NO: 5864632 - DNA, 25 bp, Homo sapien
cctctgcgcgacgttaggttccgga

SEQ ID NO: 5864633 - DNA, 25 bp, Homo sapien
gatatgcgttgcgaggacgccggtc

SEQ ID NO: 5864634 - DNA, 25 bp, Homo sapien
gtacgacgactataggccgggccac

SEQ ID NO: 5864635 - DNA, 25 bp, Homo sapien
gcatggtacgcgacgtaggaagccg

SEQ ID NO: 5864636 - DNA, 25 bp, Homo sapien
cgaccacgcgactacgtaggaggtg

SEQ ID NO: 5864637 - DNA, 25 bp, Homo sapien
tacccttcgaatcgcgacctcgccc

SEQ ID NO: 5864638 - DNA, 25 bp, Homo sapien
cgcgcttaacggaccgcgtaagcgt

SEQ ID NO: 5864639 - DNA, 25 bp, Homo sapien
gagccaacctcgtgcgtcgaagcac

SEQ ID NO: 5864640 - DNA, 25 bp, Homo sapien
actctacggcgcgacttagagcccg

SEQ ID NO: 5864641 - DNA, 25 bp, Homo sapien
gagggcgaatactcgcgggccgtta

SEQ ID NO: 5864642 - DNA, 25 bp, Homo sapien
cagttcatctaacgcgggcgcctgg

SEQ ID NO: 5864643 - DNA, 25 bp, Homo sapien
caacagcgtacgtgtcggagctggg

SEQ ID NO: 5864644 - DNA, 25 bp, Homo sapien
tatgccactagacgcggtagcccgc

SEQ ID NO: 5864645 - DNA, 25 bp, Homo sapien
tctcaccgataccgccccgagtgct

SEQ ID NO: 5864646 - DNA, 25 bp, Homo sapien
tgtgagccgcgtcgagtagtcacgc

SEQ ID NO: 5864647 - DNA, 25 bp, Homo sapien
gcggaagcaagtatcgccggtcacg

SEQ ID NO: 5864648 - DNA, 25 bp, Homo sapien
ggcatcccgtcgagtcggtttgcct

SEQ ID NO: 5864649 - DNA, 25 bp, Homo sapien
gcgggaacggtccgacgtaatagcc

SEQ ID NO: 5864650 - DNA, 25 bp, Homo sapien
cgctggcgcgccggtataacgtaac

SEQ ID NO: 5864651 - DNA, 25 bp, Homo sapien
gctgggacccgtcgacgactagatg

SEQ ID NO: 5864652 - DNA, 25 bp, Homo sapien
cgatcgtcgatataccggcccgctc

SEQ ID NO: 5864653 - DNA, 25 bp, Homo sapien
ggggcaccgtgcgtaaacgaacagg

SEQ ID NO: 5864654 - DNA, 25 bp, Homo sapien
cgggatctatcgcgtagcggggtct

SEQ ID NO: 5864655 - DNA, 25 bp, Homo sapien
cgaacgccgcgtagaacgtcgagca

SEQ ID NO: 5864656 - DNA, 25 bp, Homo sapien
atctccgccgttacgactcaggccg

SEQ ID NO: 5864657 - DNA, 25 bp, Homo sapien
gtgacccgcggcgtagaatcctcgt

SEQ ID NO: 5864658 - DNA, 25 bp, Homo sapien
gctttgcgaggtcgtatgccgggac

SEQ ID NO: 5864659 - DNA, 25 bp, Homo sapien
tggcacgtcgagtcgtacgaccgga

SEQ ID NO: 5864660 - DNA, 25 bp, Homo sapien
acgtaccgtcgtggtaccgccatgc

SEQ ID NO: 5864661 - DNA, 25 bp, Homo sapien
tccggctcgtatgtcgcgccgtgaa

SEQ ID NO: 5864662 - DNA, 25 bp, Homo sapien
gtgaggtatcgcgacgcctccctga

SEQ ID NO: 5864663 - DNA, 25 bp, Homo sapien
gcgtgtgtcgcgggtatactgcgtg

SEQ ID NO: 5864664 - DNA, 25 bp, Homo sapien
tcagactactcgcgcgttcgctcgc

SEQ ID NO: 5864665 - DNA, 25 bp, Homo sapien
gcgatggtcgtacgactagcgcgac

SEQ ID NO: 5864666 - DNA, 25 bp, Homo sapien
cctgctgcgcgtattgggctcatcc

SEQ ID NO: 5864667 - DNA, 25 bp, Homo sapien
ccaaccgacgctacttgcgagcacg

SEQ ID NO: 5864668 - DNA, 25 bp, Homo sapien
atggcctcgacgcgcgatatcccac

SEQ ID NO: 5864669 - DNA, 25 bp, Homo sapien
gctgcgctatacgctcgcggtcatg

SEQ ID NO: 5864670 - DNA, 25 bp, Homo sapien
ttggagggcacgcgtacgtggatgg

SEQ ID NO: 5864671 - DNA, 25 bp, Homo sapien
gcagagcggtacgttacgagcggca

SEQ ID NO: 5864672 - DNA, 25 bp, Homo sapien
cgtgacagtccgcgaagacatgccg

SEQ ID NO: 5864673 - DNA, 25 bp, Homo sapien
ggctgcaatcgacgtagggaggagg

SEQ ID NO: 5864674 - DNA, 25 bp, Homo sapien
cagccccgacgctacgttagtcgca

SEQ ID NO: 5864675 - DNA, 25 bp, Homo sapien
aaggagcgcacgttaccgctccgtg

SEQ ID NO: 5864676 - DNA, 25 bp, Homo sapien
agcactccggctcgcaatatccgcg

SEQ ID NO: 5864677 - DNA, 25 bp, Homo sapien
gggggcttacggcgcatgataaccg

SEQ ID NO: 5864678 - DNA, 25 bp, Homo sapien
gggcgccgataccctagcgtaggtt

SEQ ID NO: 5864679 - DNA, 25 bp, Homo sapien
gagggcacgaccaaacgcgcgatca

SEQ ID NO: 5864680 - DNA, 25 bp, Homo sapien
cgccactaccagtgcgcgaagaggt

SEQ ID NO: 5864681 - DNA, 25 bp, Homo sapien
ggagcgacggcgggtatcggtattg

SEQ ID NO: 5864682 - DNA, 25 bp, Homo sapien
cggagacgtaggtcgcgaaggtacc

SEQ ID NO: 5864683 - DNA, 25 bp, Homo sapien
tccgccacgcgacgatcgtacggta

SEQ ID NO: 5864684 - DNA, 25 bp, Homo sapien
ttaccccattgacgcccggtgacgc

SEQ ID NO: 5864685 - DNA, 25 bp, Homo sapien
ggattagtaccgacgcgcaccggag

SEQ ID NO: 5864686 - DNA, 25 bp, Homo sapien
gatcggtccatcggcgcggcatagt

SEQ ID NO: 5864687 - DNA, 25 bp, Homo sapien
tccctgacgttaggtcgcgcctgtg

SEQ ID NO: 5864688 - DNA, 25 bp, Homo sapien
aggttgtacgaggtcgccacgccgt

SEQ ID NO: 5864689 - DNA, 25 bp, Homo sapien
aaagcagctacggtcgacgctcggc

SEQ ID NO: 5864690 - DNA, 25 bp, Homo sapien
agccggcgcgcgtacggattaagct

SEQ ID NO: 5864691 - DNA, 25 bp, Homo sapien
catgctcggtcctacgtcgtcgagc

SEQ ID NO: 5864692 - DNA, 25 bp, Homo sapien
gagcctgtccggacgtatcctcggt

SEQ ID NO: 5864693 - DNA, 25 bp, Homo sapien
cccatccggtcgcgaactagcatgg

SEQ ID NO: 5864694 - DNA, 25 bp, Homo sapien
tggtaggtcggacggtacggcttcc

SEQ ID NO: 5864695 - DNA, 25 bp, Homo sapien
tacgattacgacgcaagcccgcggg

SEQ ID NO: 5864696 - DNA, 25 bp, Homo sapien
gattctccctacgcggatacccggc

SEQ ID NO: 5864697 - DNA, 25 bp, Homo sapien
gcggattcgacataccgctctgccg

SEQ ID NO: 5864698 - DNA, 25 bp, Homo sapien
caacacgcgactaggcgtatgcccg

SEQ ID NO: 5864699 - DNA, 25 bp, Homo sapien
gaacaaggccgtaacgcgtggggca

SEQ ID NO: 5864700 - DNA, 25 bp, Homo sapien
gtcactcgacccgatacctccaggc

SEQ ID NO: 5864701 - DNA, 25 bp, Homo sapien
gttccgcgcggtttacgctggagtc

SEQ ID NO: 5864702 - DNA, 25 bp, Homo sapien
ggtaagcgcgtacggttcctctccc

SEQ ID NO: 5864703 - DNA, 25 bp, Homo sapien
ctgtcgaagcgcgcattgggtaccg

SEQ ID NO: 5864704 - DNA, 25 bp, Homo sapien
cggaacccattcgcgtacgctccag

SEQ ID NO: 5864705 - DNA, 25 bp, Homo sapien
actgcgtaatcggcgcacccgactg

SEQ ID NO: 5864706 - DNA, 25 bp, Homo sapien
tctcacctaggggttcgcgctgtgg

SEQ ID NO: 5864707 - DNA, 25 bp, Homo sapien
tcggtgccgcctatgcgaagtctcg

SEQ ID NO: 5864708 - DNA, 25 bp, Homo sapien
ggagaggcgcgtcgaagtatctggg

SEQ ID NO: 5864709 - DNA, 25 bp, Homo sapien
aaggcatccgcgaatacgcctgggc

SEQ ID NO: 5864710 - DNA, 25 bp, Homo sapien
cacccgtacgcggacgtgcattgtc

SEQ ID NO: 5864711 - DNA, 25 bp, Homo sapien
gccaagatcgttgcgactacggccg

SEQ ID NO: 5864712 - DNA, 25 bp, Homo sapien
ctcgagcggtcggagtaacctaccg

SEQ ID NO: 5864713 - DNA, 25 bp, Homo sapien
ggctactatcggaccgtcgtgtcgc

SEQ ID NO: 5864714 - DNA, 25 bp, Homo sapien
agcactgcgatgcgcgtaccaagcg

SEQ ID NO: 5864715 - DNA, 25 bp, Homo sapien
gcagcccgtacgtcagacccgatag

SEQ ID NO: 5864716 - DNA, 25 bp, Homo sapien
tggcggtcgtcgtacggctctcagt

SEQ ID NO: 5864717 - DNA, 25 bp, Homo sapien
ggtctccgccgacgtaagttacgcg

SEQ ID NO: 5864718 - DNA, 25 bp, Homo sapien
aacgggaacgttcagcgcgaggacc

SEQ ID NO: 5864719 - DNA, 25 bp, Homo sapien
ctggagccgcgcaataacgggagca

SEQ ID NO: 5864720 - DNA, 25 bp, Homo sapien
cggcaaaacgcgtctacgcaccgga

SEQ ID NO: 5864721 - DNA, 25 bp, Homo sapien
ccagctgcgatccccgtattcgctc

SEQ ID NO: 5864722 - DNA, 25 bp, Homo sapien
accgtcaggccgcgtcatacgctga

SEQ ID NO: 5864723 - DNA, 25 bp, Homo sapien
ggaacaggcgatcggtgtacgagcc

SEQ ID NO: 5864724 - DNA, 25 bp, Homo sapien
cccagatacggctcgacacacgcca

SEQ ID NO: 5864725 - DNA, 25 bp, Homo sapien
cggtccaccggcgtacgatcactga

SEQ ID NO: 5864726 - DNA, 25 bp, Homo sapien
gtccagcgtccgcgagtaagtccga

SEQ ID NO: 5864727 - DNA, 25 bp, Homo sapien
cgcgcccgcggtctagtcgtaagat

SEQ ID NO: 5864728 - DNA, 25 bp, Homo sapien
agggggccgacacgtcgttacagct

SEQ ID NO: 5864729 - DNA, 25 bp, Homo sapien
tccgacacgcgagtagtcggtccag

SEQ ID NO: 5864730 - DNA, 25 bp, Homo sapien
ccttgggcgccgttacgtcagcgta

SEQ ID NO: 5864731 - DNA, 25 bp, Homo sapien
agaccgctcgacgtcgtgccagctt

SEQ ID NO: 5864732 - DNA, 25 bp, Homo sapien
gcgccttaaccggacgacaggggta

SEQ ID NO: 5864733 - DNA, 25 bp, Homo sapien
gggaagggcgcgtacgctaactgct

SEQ ID NO: 5864734 - DNA, 25 bp, Homo sapien
gcccaacaatcggtcgcggctagag

SEQ ID NO: 5864735 - DNA, 25 bp, Homo sapien
aatggccgtccgcacgctatgaggc

SEQ ID NO: 5864736 - DNA, 25 bp, Homo sapien
gcgcactattgcgcgggaccttgtc

SEQ ID NO: 5864737 - DNA, 25 bp, Homo sapien
aactgtgcgtacgatcacgccccgg

SEQ ID NO: 5864738 - DNA, 25 bp, Homo sapien
gcagtatcgcgcgtacacctggggt

SEQ ID NO: 5864739 - DNA, 25 bp, Homo sapien
gccaactgaccccgcgtaccgtagt

SEQ ID NO: 5864740 - DNA, 25 bp, Homo sapien
ggtcactccgctatcgacccatggc

SEQ ID NO: 5864741 - DNA, 25 bp, Homo sapien
gaccgcctcgcgtcagacggatcat

SEQ ID NO: 5864742 - DNA, 25 bp, Homo sapien
cagtagagtagaccgcgcgtgcgag

SEQ ID NO: 5864743 - DNA, 25 bp, Homo sapien
caccgtttgcgcgaaacgggctgag

SEQ ID NO: 5864744 - DNA, 25 bp, Homo sapien
ggcctacttcgcgagcgttggatcg

SEQ ID NO: 5864745 - DNA, 25 bp, Homo sapien
agcccgcgcgggaccgaaagttatg

SEQ ID NO: 5864746 - DNA, 25 bp, Homo sapien
agcagtagcgtacgggctatgccgg

SEQ ID NO: 5864747 - DNA, 25 bp, Homo sapien
taacatcgtacgccgcacggcggag

SEQ ID NO: 5864748 - DNA, 25 bp, Homo sapien
gtgccttcgtagtgccggtaacccg

SEQ ID NO: 5864749 - DNA, 25 bp, Homo sapien
agctacgcgcgtcatctaagcgggg

SEQ ID NO: 5864750 - DNA, 25 bp, Homo sapien
tgacacccacgcgtacgaccgctga

SEQ ID NO: 5864751 - DNA, 25 bp, Homo sapien
gatcggtcggtatacggcgaaggcc

SEQ ID NO: 5864752 - DNA, 25 bp, Homo sapien
cgggatgctagataacgcgggggtg

SEQ ID NO: 5864753 - DNA, 25 bp, Homo sapien
ggaaactcgcaaccggtcggaccca

SEQ ID NO: 5864754 - DNA, 25 bp, Homo sapien
acccgcttccgccggtctagtagac

SEQ ID NO: 5864755 - DNA, 25 bp, Homo sapien
ggcttgtcggcgcgatctatcgctc

SEQ ID NO: 5864756 - DNA, 25 bp, Homo sapien
tcttccgtacgcccgctcagacgag

SEQ ID NO: 5864757 - DNA, 25 bp, Homo sapien
acccgctttacgggtcgcgtgtgag

SEQ ID NO: 5864758 - DNA, 25 bp, Homo sapien
aggccgtgcgcgtagggatctagtc

SEQ ID NO: 5864759 - DNA, 25 bp, Homo sapien
gttcaccgcggtaggcaactcgctc

SEQ ID NO: 5864760 - DNA, 25 bp, Homo sapien
gtgtgttctcgtatcgcgggcgtgg

SEQ ID NO: 5864761 - DNA, 25 bp, Homo sapien
tggctcgtcgacgctaccggtgcat

SEQ ID NO: 5864762 - DNA, 25 bp, Homo sapien
ccaagggccgcgtaccgatttctcc

SEQ ID NO: 5864763 - DNA, 25 bp, Homo sapien
ctcttgcgggtctaatgcgggtgcc

SEQ ID NO: 5864764 - DNA, 25 bp, Homo sapien
gcgggccgatccggtatcgtactgt

SEQ ID NO: 5864765 - DNA, 25 bp, Homo sapien
atcccaccggtacgtacgcgcagac

SEQ ID NO: 5864766 - DNA, 25 bp, Homo sapien
tagagcggcgcgccgtgtatcctac

SEQ ID NO: 5864767 - DNA, 25 bp, Homo sapien
caaggactcgtatcgcgggggtgag

SEQ ID NO: 5864768 - DNA, 25 bp, Homo sapien
atgagatacgtccggcgacaccgcc

SEQ ID NO: 5864769 - DNA, 25 bp, Homo sapien
ttacctcgagtctacgtcgcccccg

SEQ ID NO: 5864770 - DNA, 25 bp, Homo sapien
ctggcgccgttagcccgtaagtcca

SEQ ID NO: 5864771 - DNA, 25 bp, Homo sapien
tacggccagtacgaccggagtgagg

SEQ ID NO: 5864772 - DNA, 25 bp, Homo sapien
agcttgcgaccgtacgtagcgggac

SEQ ID NO: 5864773 - DNA, 25 bp, Homo sapien
gcggctgccgatacgtcagtggagt

SEQ ID NO: 5864774 - DNA, 25 bp, Homo sapien
ccctgtcgactcgcgtagaaggagg

SEQ ID NO: 5864775 - DNA, 25 bp, Homo sapien
cagtctacgtataagcccgccgggg

SEQ ID NO: 5864776 - DNA, 25 bp, Homo sapien
ggagtgcgatcgttgacgggagctg

SEQ ID NO: 5864777 - DNA, 25 bp, Homo sapien
tagggtacgttcgcgacactgcgcg

SEQ ID NO: 5864778 - DNA, 25 bp, Homo sapien
ttccagcaccgtcgcgtatggggct

SEQ ID NO: 5864779 - DNA, 25 bp, Homo sapien
cgagcattagccgtacgccgggtag

SEQ ID NO: 5864780 - DNA, 25 bp, Homo sapien
tgcgtctaggttggcgcgtcgagac

SEQ ID NO: 5864781 - DNA, 25 bp, Homo sapien
acaccccgcggttcgacattgtcgg

SEQ ID NO: 5864782 - DNA, 25 bp, Homo sapien
cgtgtctcgcgtacggatgtgaggc

SEQ ID NO: 5864783 - DNA, 25 bp, Homo sapien
gaccaccgcgtatcagacgcgttcc

SEQ ID NO: 5864784 - DNA, 25 bp, Homo sapien
tcgcgcggtataacgtccggacctg

SEQ ID NO: 5864785 - DNA, 25 bp, Homo sapien
cgcgcttcgcgaacaaacgcccaag

SEQ ID NO: 5864786 - DNA, 25 bp, Homo sapien
atgcacctacgcccgtagcatggcg

SEQ ID NO: 5864787 - DNA, 25 bp, Homo sapien
cgcaaggcgcgttcgactacagcac

SEQ ID NO: 5864788 - DNA, 25 bp, Homo sapien
tctgggatcgcgtaaccgccaagcc

SEQ ID NO: 5864789 - DNA, 25 bp, Homo sapien
agctcgaacccgcgatacgcgaagc

SEQ ID NO: 5864790 - DNA, 25 bp, Homo sapien
tccaagttgccgcgccctaaggtcc

SEQ ID NO: 5864791 - DNA, 25 bp, Homo sapien
gatgtgaggcgatccggtaagccgc

SEQ ID NO: 5864792 - DNA, 25 bp, Homo sapien
tgacagcggttacgccttgctccgc

SEQ ID NO: 5864793 - DNA, 25 bp, Homo sapien
ggccctggttcgcgatagtcgacca

SEQ ID NO: 5864794 - DNA, 25 bp, Homo sapien
ccatcctaggtcgcggcatcatccc

SEQ ID NO: 5864795 - DNA, 25 bp, Homo sapien
cgacgtagtcgtggtacgcgttccg

SEQ ID NO: 5864796 - DNA, 25 bp, Homo sapien
gacctgcgtacacgacgctgacgtc

SEQ ID NO: 5864797 - DNA, 25 bp, Homo sapien
cagaggtatccgcgctaggctcgct

SEQ ID NO: 5864798 - DNA, 25 bp, Homo sapien
acgtcgggtcgccccgtatgaggat

SEQ ID NO: 5864799 - DNA, 25 bp, Homo sapien
tggctcggacggtaatccggagcga

SEQ ID NO: 5864800 - DNA, 25 bp, Homo sapien
ccgaaccctatgatcggcgcaggag

SEQ ID NO: 5864801 - DNA, 25 bp, Homo sapien
atctccatactcgcgcgaggagcgc

SEQ ID NO: 5864802 - DNA, 25 bp, Homo sapien
cggaaacgcagcgtcgaacgttccg

SEQ ID NO: 5864803 - DNA, 25 bp, Homo sapien
aggcgggacgcgtagttagagagcg

SEQ ID NO: 5864804 - DNA, 25 bp, Homo sapien
gacgcattgtccgggtacgtcaggg

SEQ ID NO: 5864805 - DNA, 25 bp, Homo sapien
agggtaactgtcgtacgcgctccgc

SEQ ID NO: 5864806 - DNA, 25 bp, Homo sapien
ctgatggttaccgacggggggcgaa

SEQ ID NO: 5864807 - DNA, 25 bp, Homo sapien
cgagctacgatcgcgacgtcaccac

SEQ ID NO: 5864808 - DNA, 25 bp, Homo sapien
tagggggcgtataggcccgggtatg

SEQ ID NO: 5864809 - DNA, 25 bp, Homo sapien
tcgagaacgcgcgagtatcgccgct

SEQ ID NO: 5864810 - DNA, 25 bp, Homo sapien
gtgctgcgtccggacgtttgcgact

SEQ ID NO: 5864811 - DNA, 25 bp, Homo sapien
gtgccatgtacgcgacggtaacgcg

SEQ ID NO: 5864812 - DNA, 25 bp, Homo sapien
tgtcaggctagcggtcgttggaccc

SEQ ID NO: 5864813 - DNA, 25 bp, Homo sapien
ccgtgctaccgtcggtagaccagtc

SEQ ID NO: 5864814 - DNA, 25 bp, Homo sapien
gaagggtcgacgaatcgggcatgcg

SEQ ID NO: 5864815 - DNA, 25 bp, Homo sapien
caacgccgtcgagacgcgttgttgc

SEQ ID NO: 5864816 - DNA, 25 bp, Homo sapien
caccgatagtcggatcgcgggttcc

SEQ ID NO: 5864817 - DNA, 25 bp, Homo sapien
ggaaggttcgcgtaacagcgaccgg

SEQ ID NO: 5864818 - DNA, 25 bp, Homo sapien
cgagcttaatccgtacgcggctgcg

SEQ ID NO: 5864819 - DNA, 25 bp, Homo sapien
cgcctccgtacggctccgtagttac

SEQ ID NO: 5864820 - DNA, 25 bp, Homo sapien
cccgacgcttcgcgcgtactgaaac

SEQ ID NO: 5864821 - DNA, 25 bp, Homo sapien
aggaaccgcgcgagacatagggggt

SEQ ID NO: 5864822 - DNA, 25 bp, Homo sapien
cctacgcgcgagactatggacgtgc

SEQ ID NO: 5864823 - DNA, 25 bp, Homo sapien
gagggacacgtcggactagacccca

SEQ ID NO: 5864824 - DNA, 25 bp, Homo sapien
tcgtaccgtctagcgtacggtccgg

SEQ ID NO: 5864825 - DNA, 25 bp, Homo sapien
ttgcacccttatgtcgcggcggcac

SEQ ID NO: 5864826 - DNA, 25 bp, Homo sapien
gcccgacggtacggcgacttttagc

SEQ ID NO: 5864827 - DNA, 25 bp, Homo sapien
aggtgcgttcggtacgcgcctggta

SEQ ID NO: 5864828 - DNA, 25 bp, Homo sapien
ctcggtggtcgacgtatcgccacga

SEQ ID NO: 5864829 - DNA, 25 bp, Homo sapien
ccttggacgatgcgcgttccttgcc

SEQ ID NO: 5864830 - DNA, 25 bp, Homo sapien
gtccggaacgtagcgccgcaatcga

SEQ ID NO: 5864831 - DNA, 25 bp, Homo sapien
tgtgccatcggtccgagcgtggact

SEQ ID NO: 5864832 - DNA, 25 bp, Homo sapien
ttcgcttacgtcgaccggcggtgct

SEQ ID NO: 5864833 - DNA, 25 bp, Homo sapien
atgctaagctcgcgcggtaggacgg

SEQ ID NO: 5864834 - DNA, 25 bp, Homo sapien
ggtcgacgtgtccgaacgttcgagc

SEQ ID NO: 5864835 - DNA, 25 bp, Homo sapien
tgcaggcggttacgcgaccggcaat

SEQ ID NO: 5864836 - DNA, 25 bp, Homo sapien
caagacaacccgtcgtacggccagg

SEQ ID NO: 5864837 - DNA, 25 bp, Homo sapien
ctgtgcagactacgcgcgagctcgt

SEQ ID NO: 5864838 - DNA, 25 bp, Homo sapien
cgtacagcggccgtcgatatacccg

SEQ ID NO: 5864839 - DNA, 25 bp, Homo sapien
caggcacgtcatactgcgaccgcca

SEQ ID NO: 5864840 - DNA, 25 bp, Homo sapien
tcagatctacgcccgtagagcgccg

SEQ ID NO: 5864841 - DNA, 25 bp, Homo sapien
agcatccgcgtaccgactccacacc

SEQ ID NO: 5864842 - DNA, 25 bp, Homo sapien
ggaaccggcgcgtacgtaacctcca

SEQ ID NO: 5864843 - DNA, 25 bp, Homo sapien
ggcgtgtatcgtccgcgaacgcaac

SEQ ID NO: 5864844 - DNA, 25 bp, Homo sapien
gagggagcctacgcgaactgactcc

SEQ ID NO: 5864845 - DNA, 25 bp, Homo sapien
gtgaccgtcgatcgaggggcaagca

SEQ ID NO: 5864846 - DNA, 25 bp, Homo sapien
gtaggctatcgaccgcgctctagcc

SEQ ID NO: 5864847 - DNA, 25 bp, Homo sapien
cgccttttagatccgtcggccctgc

SEQ ID NO: 5864848 - DNA, 25 bp, Homo sapien
ccctgtcgcgtcgtaatgcctcgag

SEQ ID NO: 5864849 - DNA, 25 bp, Homo sapien
agtaacctacgcgcgacgtcacggg

SEQ ID NO: 5864850 - DNA, 25 bp, Homo sapien
cctagataggcgtcgcgaccgggta

SEQ ID NO: 5864851 - DNA, 25 bp, Homo sapien
tgtgagcgcgatatctcgcgggctg

SEQ ID NO: 5864852 - DNA, 25 bp, Homo sapien
ccagggactcgcgtatcgggctttg

SEQ ID NO: 5864853 - DNA, 25 bp, Homo sapien
acgggcgtaactagcggcggagtct

SEQ ID NO: 5864854 - DNA, 25 bp, Homo sapien
gccctcacgatagcgcgactgttcg

SEQ ID NO: 5864855 - DNA, 25 bp, Homo sapien
tcgggtcgcgaccgactaactgtgg

SEQ ID NO: 5864856 - DNA, 25 bp, Homo sapien
gtcgacccgttacgcgagaccacct

SEQ ID NO: 5864857 - DNA, 25 bp, Homo sapien
cgggcatcgcgctatacgctgctca

SEQ ID NO: 5864858 - DNA, 25 bp, Homo sapien
tgtgcatggtcgcgcctagagggca

SEQ ID NO: 5864859 - DNA, 25 bp, Homo sapien
gatcggtgcacgcgtaggactgcga

SEQ ID NO: 5864860 - DNA, 25 bp, Homo sapien
ccagcacgtaaacgcgttggcccac

SEQ ID NO: 5864861 - DNA, 25 bp, Homo sapien
gattccgctacgtaccgaccgccct

SEQ ID NO: 5864862 - DNA, 25 bp, Homo sapien
catcgggaccgatcgtaaccgagcg

SEQ ID NO: 5864863 - DNA, 25 bp, Homo sapien
atgccccgttacgcgcgttcttggc

SEQ ID NO: 5864864 - DNA, 25 bp, Homo sapien
gtccccgacggtatacgcgtgagtc

SEQ ID NO: 5864865 - DNA, 25 bp, Homo sapien
gcgactgtacgttacgtcgcccggt

SEQ ID NO: 5864866 - DNA, 25 bp, Homo sapien
cgcccgtatcggctcgtaggtaacc

SEQ ID NO: 5864867 - DNA, 25 bp, Homo sapien
tcgggagtcgttcgcaacgtcccct

SEQ ID NO: 5864868 - DNA, 25 bp, Homo sapien
ttcggaaagggccgatcgcgctgca

SEQ ID NO: 5864869 - DNA, 25 bp, Homo sapien
tgcctgggcgttatacgaggcccac

SEQ ID NO: 5864870 - DNA, 25 bp, Homo sapien
tgcgccgttagcgggtacggggtta

SEQ ID NO: 5864871 - DNA, 25 bp, Homo sapien
gccaatcgaccccggtgtagctagc

SEQ ID NO: 5864872 - DNA, 25 bp, Homo sapien
cacgctgcctaaccggtcgatgcgt

SEQ ID NO: 5864873 - DNA, 25 bp, Homo sapien
tcgcttggcgcggtcgatagttggc

SEQ ID NO: 5864874 - DNA, 25 bp, Homo sapien
acccacgtatcgattccgcgcacgg

SEQ ID NO: 5864875 - DNA, 25 bp, Homo sapien
ctacagcttaaccggcgcggcgaga

SEQ ID NO: 5864876 - DNA, 25 bp, Homo sapien
gtcgcgctagtccggacgtgagaac

SEQ ID NO: 5864877 - DNA, 25 bp, Homo sapien
ctggtgcgacaccgtacgccatgct

SEQ ID NO: 5864878 - DNA, 25 bp, Homo sapien
aggattccgcgccgatatgcgctgg

SEQ ID NO: 5864879 - DNA, 25 bp, Homo sapien
aggctggtagttcgagcgcctcgac

SEQ ID NO: 5864880 - DNA, 25 bp, Homo sapien
cgcgccgcgacacgtcataagttcc

SEQ ID NO: 5864881 - DNA, 25 bp, Homo sapien
agggggtacgcgacgacgtgaatcc

SEQ ID NO: 5864882 - DNA, 25 bp, Homo sapien
gcggtacgccttcgcgctaccatca

SEQ ID NO: 5864883 - DNA, 25 bp, Homo sapien
cgccgtcgttgatagggcgttgcga

SEQ ID NO: 5864884 - DNA, 25 bp, Homo sapien
ccgatgctaacgtacggcggacgag

SEQ ID NO: 5864885 - DNA, 25 bp, Homo sapien
ccattgcgaccggtcgtactcccga

SEQ ID NO: 5864886 - DNA, 25 bp, Homo sapien
tgctccatccgtcgcgtagcgccat

SEQ ID NO: 5864887 - DNA, 25 bp, Homo sapien
gtgaggaggtacgacgcgtactggg

SEQ ID NO: 5864888 - DNA, 25 bp, Homo sapien
cacgactcgcgggtacgttccgtca

SEQ ID NO: 5864889 - DNA, 25 bp, Homo sapien
tagcgacgcctactcgcgtgacagg

SEQ ID NO: 5864890 - DNA, 25 bp, Homo sapien
ctgtgagttcgcggtcgacgctgga

SEQ ID NO: 5864891 - DNA, 25 bp, Homo sapien
tcctgctttagcgggctcgatgcgc

SEQ ID NO: 5864892 - DNA, 25 bp, Homo sapien
tgcagccgtacgactaggctccctg

SEQ ID NO: 5864893 - DNA, 25 bp, Homo sapien
agcaggcgtcctacgatcgacgagg

SEQ ID NO: 5864894 - DNA, 25 bp, Homo sapien
cccccgtgatcgcgcgtagatatgg

SEQ ID NO: 5864895 - DNA, 25 bp, Homo sapien
ttcggagtctcgcgccgtaagccag

SEQ ID NO: 5864896 - DNA, 25 bp, Homo sapien
tgcggggttagcgcgatagtcgtcc

SEQ ID NO: 5864897 - DNA, 25 bp, Homo sapien
ggtgggccgcgatatagtggcagtg

SEQ ID NO: 5864898 - DNA, 25 bp, Homo sapien
catcggcttcgacctgacgggtcct

SEQ ID NO: 5864899 - DNA, 25 bp, Homo sapien
cagaccttacggccgtacgactggc

SEQ ID NO: 5864900 - DNA, 25 bp, Homo sapien
gcacccatagcgcgttcgttccacc

SEQ ID NO: 5864901 - DNA, 25 bp, Homo sapien
aggcctctcggccgtagatgagcac

SEQ ID NO: 5864902 - DNA, 25 bp, Homo sapien
ctaagctcacggtcgatcggggctg

SEQ ID NO: 5864903 - DNA, 25 bp, Homo sapien
cggttccgcatacggtcgggtccta

SEQ ID NO: 5864904 - DNA, 25 bp, Homo sapien
tagagttcctcgcgcggtagcctcc

SEQ ID NO: 5864905 - DNA, 25 bp, Homo sapien
agccctgacgcgtagcgttcctagc

SEQ ID NO: 5864906 - DNA, 25 bp, Homo sapien
cagcctggcgatacgcgagtcagtg

SEQ ID NO: 5864907 - DNA, 25 bp, Homo sapien
gaccgtattcgcgcggttgcactgc

SEQ ID NO: 5864908 - DNA, 25 bp, Homo sapien
ggaaccatgcgcccgtactacccga

SEQ ID NO: 5864909 - DNA, 25 bp, Homo sapien
gcctctgtacgcccgatagtaggcg

SEQ ID NO: 5864910 - DNA, 25 bp, Homo sapien
cgattgacgccgtcgacttcctcgg

SEQ ID NO: 5864911 - DNA, 25 bp, Homo sapien
cgagagtactaacggggcgagaggc

SEQ ID NO: 5864912 - DNA, 25 bp, Homo sapien
acgtcgcgcggacgtctaacaggtc

SEQ ID NO: 5864913 - DNA, 25 bp, Homo sapien
cgctcttcgtcggtacgtgcgaagc

SEQ ID NO: 5864914 - DNA, 25 bp, Homo sapien
gcgcctgcttaacgttgcgtgccga

SEQ ID NO: 5864915 - DNA, 25 bp, Homo sapien
tgcccgctaactcgcgcagaagacg

SEQ ID NO: 5864916 - DNA, 25 bp, Homo sapien
aacccagatatcgcacccggccgtc

SEQ ID NO: 5864917 - DNA, 25 bp, Homo sapien
tttcgattccgtccgcgcaggccga

SEQ ID NO: 5864918 - DNA, 25 bp, Homo sapien
aggaagcggcgtgacataccgccca

SEQ ID NO: 5864919 - DNA, 25 bp, Homo sapien
ccgttgtcgcggttaggtcaggtcc

SEQ ID NO: 5864920 - DNA, 25 bp, Homo sapien
gctcgacgacgtacccgaagaccca

SEQ ID NO: 5864921 - DNA, 25 bp, Homo sapien
ctcggtgcgacgatacgggcgttga

SEQ ID NO: 5864922 - DNA, 25 bp, Homo sapien
ggacaccggtacgaaccgacccatc

SEQ ID NO: 5864923 - DNA, 25 bp, Homo sapien
cctgcgatgtcgcgcaaccgtggta

SEQ ID NO: 5864924 - DNA, 25 bp, Homo sapien
gtcagagtccgcgccctatggtacg

SEQ ID NO: 5864925 - DNA, 25 bp, Homo sapien
gtgcgataagcgcgcaacccagagg

SEQ ID NO: 5864926 - DNA, 25 bp, Homo sapien
gagattcagacgtgtcgcgggggag

SEQ ID NO: 5864927 - DNA, 25 bp, Homo sapien
ggggcgagcctaacggtcgaaagca

SEQ ID NO: 5864928 - DNA, 25 bp, Homo sapien
cgagccgtacggttcgacggttcag

SEQ ID NO: 5864929 - DNA, 25 bp, Homo sapien
gctctagtatcgcgggcgagggtga

SEQ ID NO: 5864930 - DNA, 25 bp, Homo sapien
caactgctcgcgcgtatgagcaggg

SEQ ID NO: 5864931 - DNA, 25 bp, Homo sapien
tcccgacgatgcgcgatacttgcgc

SEQ ID NO: 5864932 - DNA, 25 bp, Homo sapien
gactaccgggtcgtcacaacggtcc

SEQ ID NO: 5864933 - DNA, 25 bp, Homo sapien
acgcagcctagcgcggatagatggg

SEQ ID NO: 5864934 - DNA, 25 bp, Homo sapien
cactgttccgtgcgtagcgttgcgg

SEQ ID NO: 5864935 - DNA, 25 bp, Homo sapien
tacagaacgcgtctaagcccgccgc

SEQ ID NO: 5864936 - DNA, 25 bp, Homo sapien
gctggaatcgtgcgtcgagtccctc

SEQ ID NO: 5864937 - DNA, 25 bp, Homo sapien
ctgggggtcgcgttcgaccacaaac

SEQ ID NO: 5864938 - DNA, 25 bp, Homo sapien
cggatggtcggcccgatagcgagaa

SEQ ID NO: 5864939 - DNA, 25 bp, Homo sapien
cgcaggttgcgcgggctatattcgc

SEQ ID NO: 5864940 - DNA, 25 bp, Homo sapien
ttcggacgaaccgtcggaccctcac

SEQ ID NO: 5864941 - DNA, 25 bp, Homo sapien
cgtgaaagcggttacgcgagccgca

SEQ ID NO: 5864942 - DNA, 25 bp, Homo sapien
gtcttaggtcggaccgtcacctcgc

SEQ ID NO: 5864943 - DNA, 25 bp, Homo sapien
ccgaccgacgtatcccgcactctga

SEQ ID NO: 5864944 - DNA, 25 bp, Homo sapien
cacccacgtgataccgcggacggat

SEQ ID NO: 5864945 - DNA, 25 bp, Homo sapien
acgagttgcgcgtcggtacacaggg

SEQ ID NO: 5864946 - DNA, 25 bp, Homo sapien
gacaaacggcgccgaactacccgac

SEQ ID NO: 5864947 - DNA, 25 bp, Homo sapien
acgcacaacgggtctcgcgatgtgc

SEQ ID NO: 5864948 - DNA, 25 bp, Homo sapien
cgagtacgtccgtgcgaacccatcc

SEQ ID NO: 5864949 - DNA, 25 bp, Homo sapien
gtgtgctttaagcgcgcgggccatg

SEQ ID NO: 5864950 - DNA, 25 bp, Homo sapien
ggggaaacagtcgcgcgtacgcatc

SEQ ID NO: 5864951 - DNA, 25 bp, Homo sapien
cggatggaccatacggcgcgcaaca

SEQ ID NO: 5864952 - DNA, 25 bp, Homo sapien
gcctgcaacggcgcacgataatggc

SEQ ID NO: 5864953 - DNA, 25 bp, Homo sapien
cagggacggtttacgaccgcccaca

SEQ ID NO: 5864954 - DNA, 25 bp, Homo sapien
atcggctcgcgtcatagcgggcagt

SEQ ID NO: 5864955 - DNA, 25 bp, Homo sapien
gagccgcaataacgggcgtcaccct

SEQ ID NO: 5864956 - DNA, 25 bp, Homo sapien
cgaagtgtctcgcgcgatggccact

SEQ ID NO: 5864957 - DNA, 25 bp, Homo sapien
ctggtccggtagcgggctacagact

SEQ ID NO: 5864958 - DNA, 25 bp, Homo sapien
tctccgcgcgataggatacgacccg

SEQ ID NO: 5864959 - DNA, 25 bp, Homo sapien
tggcccgcgcggactgatcctatac

SEQ ID NO: 5864960 - DNA, 25 bp, Homo sapien
gagggggcacgatacgtaggtacgc

SEQ ID NO: 5864961 - DNA, 25 bp, Homo sapien
cagtggtcgcgcggagtatcgtcct

SEQ ID NO: 5864962 - DNA, 25 bp, Homo sapien
acgcgttaggcattcgcggggctca

SEQ ID NO: 5864963 - DNA, 25 bp, Homo sapien
cggcggatacgagggtcgttggatc

SEQ ID NO: 5864964 - DNA, 25 bp, Homo sapien
gaggcatcgctcgtgatacgagcgc

SEQ ID NO: 5864965 - DNA, 25 bp, Homo sapien
gcgcaccgcacgatacgactcaacg

SEQ ID NO: 5864966 - DNA, 25 bp, Homo sapien
gtggccacgcgaggaacgatatccc

SEQ ID NO: 5864967 - DNA, 25 bp, Homo sapien
gccaaggcgtatcgggacttgggtc

SEQ ID NO: 5864968 - DNA, 25 bp, Homo sapien
cgtcgctcgatagacgcgtcaagcg

SEQ ID NO: 5864969 - DNA, 25 bp, Homo sapien
gcttgtcgacgctagtcgacgcgct

SEQ ID NO: 5864970 - DNA, 25 bp, Homo sapien
tgttgtccgcgaccgatatggcggc

SEQ ID NO: 5864971 - DNA, 25 bp, Homo sapien
tcttcgcctagcgcgtacggcgtga

SEQ ID NO: 5864972 - DNA, 25 bp, Homo sapien
gaccgctacgttgcgcgcacctgtt

SEQ ID NO: 5864973 - DNA, 25 bp, Homo sapien
gcggcttatagcggtcgcgttcgtg

SEQ ID NO: 5864974 - DNA, 25 bp, Homo sapien
agacggacgtctcgttcgacggagg

SEQ ID NO: 5864975 - DNA, 25 bp, Homo sapien
ctccacggtacgcgatcctggaagg

SEQ ID NO: 5864976 - DNA, 25 bp, Homo sapien
ggtctgcgtgttccgcgatctctcg

SEQ ID NO: 5864977 - DNA, 25 bp, Homo sapien
acggcagacgctacgtcgacaacgc

SEQ ID NO: 5864978 - DNA, 25 bp, Homo sapien
gcgggcttacgagaccggacggata

SEQ ID NO: 5864979 - DNA, 25 bp, Homo sapien
gcgagagttacggaacgcgcaagcg

SEQ ID NO: 5864980 - DNA, 25 bp, Homo sapien
ggttgcacgtcggtgtacggagacc

SEQ ID NO: 5864981 - DNA, 25 bp, Homo sapien
cgcatgcccgcacataacgagtgcg

SEQ ID NO: 5864982 - DNA, 25 bp, Homo sapien
gaacctcgtcgagacggtatccccc

SEQ ID NO: 5864983 - DNA, 25 bp, Homo sapien
tcagcgggcttgtacgcgatgtgcg

SEQ ID NO: 5864984 - DNA, 25 bp, Homo sapien
cgaacgtaggcgcttcgcgaggcaa

SEQ ID NO: 5864985 - DNA, 25 bp, Homo sapien
tgaggccggcgagtatccggtaggt

SEQ ID NO: 5864986 - DNA, 25 bp, Homo sapien
gccgacgcgtaccgcgacttggaat

SEQ ID NO: 5864987 - DNA, 25 bp, Homo sapien
ccatctgcgcaagcggtatgcaccg

SEQ ID NO: 5864988 - DNA, 25 bp, Homo sapien
ccgctgccgcgaatagtcacccgat

SEQ ID NO: 5864989 - DNA, 25 bp, Homo sapien
gcgagtgatcggtccgactcccgtt

SEQ ID NO: 5864990 - DNA, 25 bp, Homo sapien
ttgcccagcgcgttggtcgggttag

SEQ ID NO: 5864991 - DNA, 25 bp, Homo sapien
ggggagggccgtactcgactctttg

SEQ ID NO: 5864992 - DNA, 25 bp, Homo sapien
cagaggactcgctacgcgacggaac

SEQ ID NO: 5864993 - DNA, 25 bp, Homo sapien
tgaagggcgacttagcgtaggcggg

SEQ ID NO: 5864994 - DNA, 25 bp, Homo sapien
tagtcgacgcgacgtcaaggcccac

SEQ ID NO: 5864995 - DNA, 25 bp, Homo sapien
caggatgcgacgccggtataagccc

SEQ ID NO: 5864996 - DNA, 25 bp, Homo sapien
tggcgaactagtatccgcgccccct

SEQ ID NO: 5864997 - DNA, 25 bp, Homo sapien
agggggcgacgcaccctaaagcgta

SEQ ID NO: 5864998 - DNA, 25 bp, Homo sapien
ggcaacgaagcgtcgcaacatcccg

SEQ ID NO: 5864999 - DNA, 25 bp, Homo sapien
gagtctgatacgtcgggacgcacgc

SEQ ID NO: 5865000 - DNA, 25 bp, Homo sapien
gaccgtcggcgtatagcgactgagc

SEQ ID NO: 5865001 - DNA, 25 bp, Homo sapien
tacggagaacgacgtaccgcgcacc

SEQ ID NO: 5865002 - DNA, 25 bp, Homo sapien
ggaccggtaagacgacgcgtcaggt

SEQ ID NO: 5865003 - DNA, 25 bp, Homo sapien
cttgacataactcgcgcgggcgcag

SEQ ID NO: 5865004 - DNA, 25 bp, Homo sapien
cgcttcataccgatcgcgccaacgg

SEQ ID NO: 5865005 - DNA, 25 bp, Homo sapien
cccggaccgtccggactcgatatga

SEQ ID NO: 5865006 - DNA, 25 bp, Homo sapien
caagggcagtcgcgtacgctcggtt

SEQ ID NO: 5865007 - DNA, 25 bp, Homo sapien
ctgcagcgtatgcgcgcttcgcgaa

SEQ ID NO: 5865008 - DNA, 25 bp, Homo sapien
agccctgtcatacgcccgagcgaga

SEQ ID NO: 5865009 - DNA, 25 bp, Homo sapien
gtctgcacgctatcggtcgctgtgc

SEQ ID NO: 5865010 - DNA, 25 bp, Homo sapien
ttcacactcgcgaccgacgggtagg

SEQ ID NO: 5865011 - DNA, 25 bp, Homo sapien
gccttttagacgctacccgtgggcg

SEQ ID NO: 5865012 - DNA, 25 bp, Homo sapien
cagctacgacgtacaccgggcgtct

SEQ ID NO: 5865013 - DNA, 25 bp, Homo sapien
ttgccggatgtcgtatcgcggtggc

SEQ ID NO: 5865014 - DNA, 25 bp, Homo sapien
cctggcggcgacctcgtatgacaca

SEQ ID NO: 5865015 - DNA, 25 bp, Homo sapien
ggaattgacggatcgcgtacgcgcc

SEQ ID NO: 5865016 - DNA, 25 bp, Homo sapien
gcaatcgaatcacgcgtcgaggccc

SEQ ID NO: 5865017 - DNA, 25 bp, Homo sapien
tctgacgtcgggcgaacgtccccat

SEQ ID NO: 5865018 - DNA, 25 bp, Homo sapien
gactgcgaacgccgttcgtggacct

SEQ ID NO: 5865019 - DNA, 25 bp, Homo sapien
cccctgtacgcggctaacgagttgg

SEQ ID NO: 5865020 - DNA, 25 bp, Homo sapien
gccggacgtatgcgcttcgtttggc

SEQ ID NO: 5865021 - DNA, 25 bp, Homo sapien
cagcaaaatcgcgcgggtagggctc

SEQ ID NO: 5865022 - DNA, 25 bp, Homo sapien
cctccgcggcgtacgtaacggctaa

SEQ ID NO: 5865023 - DNA, 25 bp, Homo sapien
tggaaccgtaggttcgcgcgaccct

SEQ ID NO: 5865024 - DNA, 25 bp, Homo sapien
tccattgccgaccggcatacctcgg

SEQ ID NO: 5865025 - DNA, 25 bp, Homo sapien
gcgtgtgcgccgtatgtaggggaac

SEQ ID NO: 5865026 - DNA, 25 bp, Homo sapien
agtcaccgcgcgatagtctcgggct

SEQ ID NO: 5865027 - DNA, 25 bp, Homo sapien
atccgcagcgtcggtaccgatagcg

SEQ ID NO: 5865028 - DNA, 25 bp, Homo sapien
ggctggcgcgtcgtaccatataccc

SEQ ID NO: 5865029 - DNA, 25 bp, Homo sapien
gggcgtgtcgcgcttagcgtgtcaa

SEQ ID NO: 5865030 - DNA, 25 bp, Homo sapien
cctgccttggcgagtaccgaaccct

SEQ ID NO: 5865031 - DNA, 25 bp, Homo sapien
gagcccggtgaatcgacgccgtttg

SEQ ID NO: 5865032 - DNA, 25 bp, Homo sapien
gggtcagtcggtacccgtatagggc

SEQ ID NO: 5865033 - DNA, 25 bp, Homo sapien
cccccgaggtcgtcgcgtaatggta

SEQ ID NO: 5865034 - DNA, 25 bp, Homo sapien
ggcgcccggcataccgctataagca

SEQ ID NO: 5865035 - DNA, 25 bp, Homo sapien
agtggcacgcgtccgatacgggcat

SEQ ID NO: 5865036 - DNA, 25 bp, Homo sapien
cgaggatcgtaagccgcacaggctc

SEQ ID NO: 5865037 - DNA, 25 bp, Homo sapien
tggatgagcgtactaccgcctgggg

SEQ ID NO: 5865038 - DNA, 25 bp, Homo sapien
tcccgacgtaacgtctcggccgcat

SEQ ID NO: 5865039 - DNA, 25 bp, Homo sapien
cgacgatcacgcggtacgacttggg

SEQ ID NO: 5865040 - DNA, 25 bp, Homo sapien
cgagtccgcgtccgatcaagttcgg

SEQ ID NO: 5865041 - DNA, 25 bp, Homo sapien
ctcgtggtacgcaaccgacaccgac

SEQ ID NO: 5865042 - DNA, 25 bp, Homo sapien
ctctcggcggactaaacgcagcgtg

SEQ ID NO: 5865043 - DNA, 25 bp, Homo sapien
gatgcgggtacgcgtagcgcgaaga

SEQ ID NO: 5865044 - DNA, 25 bp, Homo sapien
acatgtctatacgcggacgggccgc

SEQ ID NO: 5865045 - DNA, 25 bp, Homo sapien
ggacagacgtaccgcgcaagaacgg

SEQ ID NO: 5865046 - DNA, 25 bp, Homo sapien
gttcggacgtagcgaccgtgccaca

SEQ ID NO: 5865047 - DNA, 25 bp, Homo sapien
tagacgaatccgcggcgtaggtgcc

SEQ ID NO: 5865048 - DNA, 25 bp, Homo sapien
gaggcaggcgctagaacggccatct

SEQ ID NO: 5865049 - DNA, 25 bp, Homo sapien
aactgtcgcgtaatccggggtcggc

SEQ ID NO: 5865050 - DNA, 25 bp, Homo sapien
ttgggcacgggattacgcggcatcc

SEQ ID NO: 5865051 - DNA, 25 bp, Homo sapien
tcggcgcgctacgggcctaatgaca

SEQ ID NO: 5865052 - DNA, 25 bp, Homo sapien
gtggtgatgatcgcgcgcctcatgg

SEQ ID NO: 5865053 - DNA, 25 bp, Homo sapien
gtgtcctcgtggacgcgtacttggg

SEQ ID NO: 5865054 - DNA, 25 bp, Homo sapien
ctgtccccgtcgcgttaacgtcctc

SEQ ID NO: 5865055 - DNA, 25 bp, Homo sapien
tgcgtaccgtcgcgagagtcggaag

SEQ ID NO: 5865056 - DNA, 25 bp, Homo sapien
gtacacctacgcgtgcgaaccgacg

SEQ ID NO: 5865057 - DNA, 25 bp, Homo sapien
gctaagttgtcgcgcgtacggcacc

SEQ ID NO: 5865058 - DNA, 25 bp, Homo sapien
gaggttcgtccggttgacgcctcgt

SEQ ID NO: 5865059 - DNA, 25 bp, Homo sapien
accaggcgactcgcccgttctgaca

SEQ ID NO: 5865060 - DNA, 25 bp, Homo sapien
tgggggccagaccgatcgagtgttg

SEQ ID NO: 5865061 - DNA, 25 bp, Homo sapien
accgggcgacgtaacgtacagtcgc

SEQ ID NO: 5865062 - DNA, 25 bp, Homo sapien
gtgcgaagcgtgatcggtcacgagg

SEQ ID NO: 5865063 - DNA, 25 bp, Homo sapien
tgcgactaacgtagcgtcggggctg

SEQ ID NO: 5865064 - DNA, 25 bp, Homo sapien
cgggtatatcgacggccgctgtacg

SEQ ID NO: 5865065 - DNA, 25 bp, Homo sapien
ggacctgacctaaccgcgacaacgg

SEQ ID NO: 5865066 - DNA, 25 bp, Homo sapien
ggccttcgccgtataccgaccgatc

SEQ ID NO: 5865067 - DNA, 25 bp, Homo sapien
cgtcactcgtgcggcataccctggt

SEQ ID NO: 5865068 - DNA, 25 bp, Homo sapien
cccgcgggcttgcgtcgtaatcgta

SEQ ID NO: 5865069 - DNA, 25 bp, Homo sapien
caacactcgatcggtctggccccca

SEQ ID NO: 5865070 - DNA, 25 bp, Homo sapien
tcgcaacgccctatcaacgacggcg

SEQ ID NO: 5865071 - DNA, 25 bp, Homo sapien
ccctgtgtaccgacgcgcaactcgt

SEQ ID NO: 5865072 - DNA, 25 bp, Homo sapien
ctcaagtctgctacgcgcgcctcac

SEQ ID NO: 5865073 - DNA, 25 bp, Homo sapien
cgggttaccggcactacgaaggcac

SEQ ID NO: 5865074 - DNA, 25 bp, Homo sapien
cacgcagtatacccgcgacacacgc

SEQ ID NO: 5865075 - DNA, 25 bp, Homo sapien
cgtcttctgcgcgagttagcgggca

SEQ ID NO: 5865076 - DNA, 25 bp, Homo sapien
gggtatatggtacgacgcgccagcc

SEQ ID NO: 5865077 - DNA, 25 bp, Homo sapien
tgccctctaggcgcgaccatgcaca

SEQ ID NO: 5865078 - DNA, 25 bp, Homo sapien
gcccaggcgtattcgcggatgcctt

SEQ ID NO: 5865079 - DNA, 25 bp, Homo sapien
gtcccggcatacgacctcgcaaagc

SEQ ID NO: 5865080 - DNA, 25 bp, Homo sapien
cgtgctcgcaagtagcgtcggttgg

SEQ ID NO: 5865081 - DNA, 25 bp, Homo sapien
ctcgtctgagcgggcgtacggaaga

SEQ ID NO: 5865082 - DNA, 25 bp, Homo sapien
ctaacccgaccaacgcgctgggcaa

SEQ ID NO: 5865083 - DNA, 25 bp, Homo sapien
ctatcgggtctgacgtacgggctgc

SEQ ID NO: 5865084 - DNA, 25 bp, Homo sapien
gacaaggtcccgcgcaatagtgcgc

SEQ ID NO: 5865085 - DNA, 25 bp, Homo sapien
gggtccaacgaccgctagcctgaca

SEQ ID NO: 5865086 - DNA, 25 bp, Homo sapien
cacagccggtctacgaacgtgtccg

SEQ ID NO: 5865087 - DNA, 25 bp, Homo sapien
gactccagcgtaaaccgcgcggaac

SEQ ID NO: 5865088 - DNA, 25 bp, Homo sapien
gcgtacctacgtatcgtgccccctc

SEQ ID NO: 5865089 - DNA, 25 bp, Homo sapien
gcctctcgccccgttagtactctcg

SEQ ID NO: 5865090 - DNA, 25 bp, Homo sapien
accccctatgtctcgcgcggttcct

SEQ ID NO: 5865091 - DNA, 25 bp, Homo sapien
actccactgacgtatcggcagccgc

SEQ ID NO: 5865092 - DNA, 25 bp, Homo sapien
ttcacggcgcgacatacgagccgga

SEQ ID NO: 5865093 - DNA, 25 bp, Homo sapien
gccgccatatcggtcgcggacaaca

SEQ ID NO: 5865094 - DNA, 25 bp, Homo sapien
gtcccgctacgtacggtcgcaagct

SEQ ID NO: 5865095 - DNA, 25 bp, Homo sapien
ggtgtggagtcggtacgcggatgct

SEQ ID NO: 5865096 - DNA, 25 bp, Homo sapien
ccgtcctaccgcgcgagcttagcat

SEQ ID NO: 5865097 - DNA, 25 bp, Homo sapien
tgcggctcgcgtaaccgctttcacg

SEQ ID NO: 5865098 - DNA, 25 bp, Homo sapien
gagccctacccgcgcgattttgctg

SEQ ID NO: 5865099 - DNA, 25 bp, Homo sapien
gaccggcgtcctcgcaacgcatatc

SEQ ID NO: 5865100 - DNA, 25 bp, Homo sapien
cgaacagtcgcgctatcgtgagggc

SEQ ID NO: 5865101 - DNA, 25 bp, Homo sapien
atccgtccgcggtatcacgtgggtg

SEQ ID NO: 5865102 - DNA, 25 bp, Homo sapien
gcgtgggatcatcgcgagaccttcc

SEQ ID NO: 5865103 - DNA, 25 bp, Homo sapien
agtctgtagcccgctaccggaccag

SEQ ID NO: 5865104 - DNA, 25 bp, Homo sapien
aggggacgttgcgaacgactcccga

SEQ ID NO: 5865105 - DNA, 25 bp, Homo sapien
gggcctcgacgcgtgattcgattgc

SEQ ID NO: 5865106 - DNA, 25 bp, Homo sapien
acgacccgtttcgcgctagcctagg

SEQ ID NO: 5865107 - DNA, 25 bp, Homo sapien
tgacggaacgtacccgcgagtcgtg

SEQ ID NO: 5865108 - DNA, 25 bp, Homo sapien
ggtagagcgcgaatagccctgcagg

SEQ ID NO: 5865109 - DNA, 25 bp, Homo sapien
gctaggaacgctacgcgtcagggct

SEQ ID NO: 5865110 - DNA, 25 bp, Homo sapien
ctccgtcgcgacccgataggaggtt

SEQ ID NO: 5865111 - DNA, 25 bp, Homo sapien
ggtgccgtacgcgcgacaacttagc

SEQ ID NO: 5865112 - DNA, 25 bp, Homo sapien
ggaggctaccgcgcgaggaactcta

SEQ ID NO: 5865113 - DNA, 25 bp, Homo sapien
gatccaacgaccctcgtatccgccg

SEQ ID NO: 5865114 - DNA, 25 bp, Homo sapien
cgccatgctacgggcgtaggtgcat

SEQ ID NO: 5865115 - DNA, 25 bp, Homo sapien
gccccgacgcgtatcccgtcagaat

SEQ ID NO: 5865116 - DNA, 25 bp, Homo sapien
gctaaaagtcgccgtaccgtcgggc

SEQ ID NO: 5865117 - DNA, 25 bp, Homo sapien
tcatatcgagtccggacggtccggg

SEQ ID NO: 5865118 - DNA, 25 bp, Homo sapien
caaagcccgatacgcgagtccctgg

SEQ ID NO: 5865119 - DNA, 25 bp, Homo sapien
gcgaatatagcccgcgcaacctgcg

SEQ ID NO: 5865120 - DNA, 25 bp, Homo sapien
agaccccgctacgcgatagatcccg

SEQ ID NO: 5865121 - DNA, 25 bp, Homo sapien
ccatatctacgcgcgatcacggggg

SEQ ID NO: 5865122 - DNA, 25 bp, Homo sapien
tctcgctcgggcgtatgacagggct

SEQ ID NO: 5865123 - DNA, 25 bp, Homo sapien
tcagggaggcgtcgcgatacctcac

SEQ ID NO: 5865124 - DNA, 25 bp, Homo sapien
cctccctcgtacgcgcagttgggta

SEQ ID NO: 5865125 - DNA, 25 bp, Homo sapien
gcttcgcacgtaccgacgaagagcg

SEQ ID NO: 5865126 - DNA, 25 bp, Homo sapien
tgtgtcatacgaggtcgccgccagg

SEQ ID NO: 5865127 - DNA, 25 bp, Homo sapien
cctcctccctacgtcgattgcagcc

SEQ ID NO: 5865128 - DNA, 25 bp, Homo sapien
gcaacaacgcgtctcgacggcgttg

SEQ ID NO: 5865129 - DNA, 25 bp, Homo sapien
tccggtcgtacgactcgacgtgcca

SEQ ID NO: 5865130 - DNA, 25 bp, Homo sapien
gagcgggccggtatatcgacgatcg

SEQ ID NO: 5865131 - DNA, 25 bp, Homo sapien
ttcgccccccgtcggtaaccatcag

SEQ ID NO: 5865132 - DNA, 25 bp, Homo sapien
tacgctgacgtaacggcgcccaagg

SEQ ID NO: 5865133 - DNA, 25 bp, Homo sapien
ggcacccgcattagacccgcaagag

SEQ ID NO: 5865134 - DNA, 25 bp, Homo sapien
cacgctgcgtttagtccgccgagag

SEQ ID NO: 5865135 - DNA, 25 bp, Homo sapien
taggacccgaccgtatgcggaaccg

SEQ ID NO: 5865136 - DNA, 25 bp, Homo sapien
tatccgtccggtctcgtaagcccgc

SEQ ID NO: 5865137 - DNA, 25 bp, Homo sapien
aggtggtctcgcgtaacgggtcgac

SEQ ID NO: 5865138 - DNA, 25 bp, Homo sapien
gccgagcgtcgaccgtagctgcttt

SEQ ID NO: 5865139 - DNA, 25 bp, Homo sapien
cctggccgtacgacgggttgtcttg

SEQ ID NO: 5865140 - DNA, 25 bp, Homo sapien
cgctcggttacgatcggtcccgatg

SEQ ID NO: 5865141 - DNA, 25 bp, Homo sapien
tgcttatagcggtatgccgggcgcc

SEQ ID NO: 5865142 - DNA, 25 bp, Homo sapien
gtgggccaacgcgtttacgtgctgg

SEQ ID NO: 5865143 - DNA, 25 bp, Homo sapien
cgcgtaacttacgtcggcggagacc

SEQ ID NO: 5865144 - DNA, 25 bp, Homo sapien
ctcccccgcgacacgtctgaatctc

SEQ ID NO: 5865145 - DNA, 25 bp, Homo sapien
ccctgctcatacgcgcgagcagttg

SEQ ID NO: 5865146 - DNA, 25 bp, Homo sapien
ctggtccggggaatctacggcgttc

SEQ ID NO: 5865147 - DNA, 25 bp, Homo sapien
ggatgagcccaatacgcgcagcagg

SEQ ID NO: 5865148 - DNA, 25 bp, Homo sapien
ggctattacgtcggaccgttcccgc

SEQ ID NO: 5865149 - DNA, 25 bp, Homo sapien
gcctggaggtatcgggtcgagtgac

SEQ ID NO: 5865150 - DNA, 25 bp, Homo sapien
ggatgccgcgtaatcccgtgcccaa

SEQ ID NO: 5865151 - DNA, 25 bp, Homo sapien
tccggtgcgtagacgcgttttgccg

SEQ ID NO: 5865152 - DNA, 25 bp, Homo sapien
cccaagtacgcgtccacgaggacac

SEQ ID NO: 5865153 - DNA, 25 bp, Homo sapien
gcggcttaccggatcgcctcacatc

SEQ ID NO: 5865154 - DNA, 25 bp, Homo sapien
ccgttggcgcgatcggtatgaagcg

SEQ ID NO: 5865155 - DNA, 25 bp, Homo sapien
tacccggtcgcgacgcctatctagg

SEQ ID NO: 5865156 - DNA, 25 bp, Homo sapien
tggaggttacgtacgcgccggttcc

SEQ ID NO: 5865157 - DNA, 25 bp, Homo sapien
ctccgccgtgcggcgtacgatgtta

SEQ ID NO: 5865158 - DNA, 25 bp, Homo sapien
gtgccgccgcgacataagggtgcaa

SEQ ID NO: 5865159 - DNA, 25 bp, Homo sapien
gcacagcgaccgatagcgtgcagac

SEQ ID NO: 5865160 - DNA, 25 bp, Homo sapien
ggcaaggaacgcgcatcgtccaagg

SEQ ID NO: 5865161 - DNA, 25 bp, Homo sapien
gtcataccgtacatcggcgaccggg

SEQ ID NO: 5865162 - DNA, 25 bp, Homo sapien
cccgtgacgtcgcgcgtaggttact

SEQ ID NO: 5865163 - DNA, 25 bp, Homo sapien
gggggataccgtctcgacgaggttc

SEQ ID NO: 5865164 - DNA, 25 bp, Homo sapien
ccggaccgtacgctagacggtacga

SEQ ID NO: 5865165 - DNA, 25 bp, Homo sapien
cgcccacgggtagcgtctaaaaggc

SEQ ID NO: 5865166 - DNA, 25 bp, Homo sapien
cgcactcgttatgtgcgggcatgcg

SEQ ID NO: 5865167 - DNA, 25 bp, Homo sapien
gacgtcagcgtcgtgtacgcaggtc

SEQ ID NO: 5865168 - DNA, 25 bp, Homo sapien
ccatgctagttcgcgaccggatggg

SEQ ID NO: 5865169 - DNA, 25 bp, Homo sapien
gcctcacatccgtacgcgagacacg

SEQ ID NO: 5865170 - DNA, 25 bp, Homo sapien
tcgtggcgatacgtcgaccaccgag

SEQ ID NO: 5865171 - DNA, 25 bp, Homo sapien
caaagagtcgagtacggccctcccc

SEQ ID NO: 5865172 - DNA, 25 bp, Homo sapien
cacccccgcgttatctagcatcccg

SEQ ID NO: 5865173 - DNA, 25 bp, Homo sapien
atcctcatacggggcgacccgacgt

SEQ ID NO: 5865174 - DNA, 25 bp, Homo sapien
agggtcgcgcgaacctacggttcca

SEQ ID NO: 5865175 - DNA, 25 bp, Homo sapien
cacggagcggtaacgtgcgctcctt

SEQ ID NO: 5865176 - DNA, 25 bp, Homo sapien
atggcgctacgcgacggatggagca

SEQ ID NO: 5865177 - DNA, 25 bp, Homo sapien
tggcggtcgcagtatgacgtgcctg

SEQ ID NO: 5865178 - DNA, 25 bp, Homo sapien
gagcgatagatcgcgccgacaagcc

SEQ ID NO: 5865179 - DNA, 25 bp, Homo sapien
gcacacggagcgtcgtacgcgctta

SEQ ID NO: 5865180 - DNA, 25 bp, Homo sapien
gtcgaggcgctcgaactaccagcct

SEQ ID NO: 5865181 - DNA, 25 bp, Homo sapien
ctggaccgactactcgcgtgtcgga

SEQ ID NO: 5865182 - DNA, 25 bp, Homo sapien
cgacggtatggtgcgacgagcgtgt

SEQ ID NO: 5865183 - DNA, 25 bp, Homo sapien
tggcgtgtgtcgagccgtatctggg

SEQ ID NO: 5865184 - DNA, 25 bp, Homo sapien
aggtccacgaacggcgttcgcagtc

SEQ ID NO: 5865185 - DNA, 25 bp, Homo sapien
ctggcttacggcgcgagactccgaa

SEQ ID NO: 5865186 - DNA, 25 bp, Homo sapien
tgctttcgaccgttaggctcgcccc

SEQ ID NO: 5865187 - DNA, 25 bp, Homo sapien
gtctcgacgcgccaacctagacgca

SEQ ID NO: 5865188 - DNA, 25 bp, Homo sapien
agcatggcgtacggtgtcgcaccag

SEQ ID NO: 5865189 - DNA, 25 bp, Homo sapien
ctttccatatgcccgctcgcgggct

SEQ ID NO: 5865190 - DNA, 25 bp, Homo sapien
gtgagggtccgacggttcgtccgaa

SEQ ID NO: 5865191 - DNA, 25 bp, Homo sapien
tgccgctcgtaacgtaccgctctgc

SEQ ID NO: 5865192 - DNA, 25 bp, Homo sapien
ggagaaatcggtacgcggcccttgg

SEQ ID NO: 5865193 - DNA, 25 bp, Homo sapien
ggctagagcgcggtcgatagcctac

SEQ ID NO: 5865194 - DNA, 25 bp, Homo sapien
gacatcctttcgcgcgacacccgtg

SEQ ID NO: 5865195 - DNA, 25 bp, Homo sapien
ggatgggttcgcacggacgtactcg

SEQ ID NO: 5865196 - DNA, 25 bp, Homo sapien
cctgagcggcccgtaaacttgcagc

SEQ ID NO: 5865197 - DNA, 25 bp, Homo sapien
ctacccggcgtacggctaatgctcg

SEQ ID NO: 5865198 - DNA, 25 bp, Homo sapien
gcctcatagcgtgcggacggccatt

SEQ ID NO: 5865199 - DNA, 25 bp, Homo sapien
tgatggtagcgcgaaggcgtaccgc

SEQ ID NO: 5865200 - DNA, 25 bp, Homo sapien
gagctgcgttcgctagcgaggacct

SEQ ID NO: 5865201 - DNA, 25 bp, Homo sapien
tgagccccgcgaatgcctaacgcgt

SEQ ID NO: 5865202 - DNA, 25 bp, Homo sapien
gttgcgcgcgtagcgaatcaggggt

SEQ ID NO: 5865203 - DNA, 25 bp, Homo sapien
acgggatacgcggcgtaagcgtggt

SEQ ID NO: 5865204 - DNA, 25 bp, Homo sapien
agtatcccgtacgcggtgagggagc

SEQ ID NO: 5865205 - DNA, 25 bp, Homo sapien
gcggagcaaggcgtaaccgctgtca

SEQ ID NO: 5865206 - DNA, 25 bp, Homo sapien
gagactaggacgttcgacgccaggc

SEQ ID NO: 5865207 - DNA, 25 bp, Homo sapien
gcacatcgcgagacccgttgtgcgt

SEQ ID NO: 5865208 - DNA, 25 bp, Homo sapien
gcgttgtcgacgtagcgtctgccgt

SEQ ID NO: 5865209 - DNA, 25 bp, Homo sapien
cagccccgatcgaccgtgagcttag

SEQ ID NO: 5865210 - DNA, 25 bp, Homo sapien
ggaacttatgacgtgtcgcggcgcg

SEQ ID NO: 5865211 - DNA, 25 bp, Homo sapien
atggggacgttcgcccgacgtcaga

SEQ ID NO: 5865212 - DNA, 25 bp, Homo sapien
cagggagcctagtcgtacggctgca

SEQ ID NO: 5865213 - DNA, 25 bp, Homo sapien
actgagagccgtacgacgaccgcca

SEQ ID NO: 5865214 - DNA, 25 bp, Homo sapien
ctactggatcgcgaccgtaaggggc

SEQ ID NO: 5865215 - DNA, 25 bp, Homo sapien
acgaggcgtcaaccggacgaacctc

SEQ ID NO: 5865216 - DNA, 25 bp, Homo sapien
catggcccgcgcgcttaaagcacac

SEQ ID NO: 5865217 - DNA, 25 bp, Homo sapien
tgttgcgcgccgtatggtccatccg

SEQ ID NO: 5865218 - DNA, 25 bp, Homo sapien
gaggacgttaacgcgacggggacag

SEQ ID NO: 5865219 - DNA, 25 bp, Homo sapien
cccagatacttcgacgcgcctctcc

SEQ ID NO: 5865220 - DNA, 25 bp, Homo sapien
cgggctctaagtcgcgccgtagagt

SEQ ID NO: 5865221 - DNA, 25 bp, Homo sapien
ggaacgcgtctgatacgcggtggtc

SEQ ID NO: 5865222 - DNA, 25 bp, Homo sapien
cgtcggttcgcacgcgtaggtgtac

SEQ ID NO: 5865223 - DNA, 25 bp, Homo sapien
tcggacttactcgcggacgctggac

SEQ ID NO: 5865224 - DNA, 25 bp, Homo sapien
ctgcgcccgcgcgagttatgtcaag

SEQ ID NO: 5865225 - DNA, 25 bp, Homo sapien
ccatcgagtcggtcgactaggtccc

SEQ ID NO: 5865226 - DNA, 25 bp, Homo sapien
ggtctccgtacaccgacgtgcaacc

SEQ ID NO: 5865227 - DNA, 25 bp, Homo sapien
tcagagtgcgggatacgtcggtcgg

SEQ ID NO: 5865228 - DNA, 25 bp, Homo sapien
tggacttacgggctaacggcgccag

SEQ ID NO: 5865229 - DNA, 25 bp, Homo sapien
aacaggtgcgcgcaacgtagcggtc

SEQ ID NO: 5865230 - DNA, 25 bp, Homo sapien
gacaatgcacgtccgcgtacgggtg

SEQ ID NO: 5865231 - DNA, 25 bp, Homo sapien
acgaggattctacgccgcgggtcac

SEQ ID NO: 5865232 - DNA, 25 bp, Homo sapien
tgtggcacggtcgctacgtccgaac

SEQ ID NO: 5865233 - DNA, 25 bp, Homo sapien
tccaaggacctccgcgatagacccc

SEQ ID NO: 5865234 - DNA, 25 bp, Homo sapien
ccttccaggatcgcgtaccgtggag

SEQ ID NO: 5865235 - DNA, 25 bp, Homo sapien
tcagcggtcgtacgcgtgggtgtca

SEQ ID NO: 5865236 - DNA, 25 bp, Homo sapien
gtgggatatcgcgcgtcgaggccat

SEQ ID NO: 5865237 - DNA, 25 bp, Homo sapien
aagctggcacgacgtcgagcggtct

SEQ ID NO: 5865238 - DNA, 25 bp, Homo sapien
ccacgcccgcgatacgagaacacac

SEQ ID NO: 5865239 - DNA, 25 bp, Homo sapien
gtaggatacacggcgcgccgctcta

SEQ ID NO: 5865240 - DNA, 25 bp, Homo sapien
tcgggagtacgaccggtcgcaatgg

SEQ ID NO: 5865241 - DNA, 25 bp, Homo sapien
ctcgcacgcgcggtctactctactg

SEQ ID NO: 5865242 - DNA, 25 bp, Homo sapien
cgggtcgtatcctatcgcgcggaga

SEQ ID NO: 5865243 - DNA, 25 bp, Homo sapien
cccagctccgacacgtacgctgttg

SEQ ID NO: 5865244 - DNA, 25 bp, Homo sapien
gctcgacgacgtaggaccgagcatg

SEQ ID NO: 5865245 - DNA, 25 bp, Homo sapien
cgcgcagtgtcgcgaacgtacccta

SEQ ID NO: 5865246 - DNA, 25 bp, Homo sapien
gttcccctacatacggcgcacacgc

SEQ ID NO: 5865247 - DNA, 25 bp, Homo sapien
ctagcccggcgctagtaaccttgcg

SEQ ID NO: 5865248 - DNA, 25 bp, Homo sapien
acgcttacgcggtccgttaagcgcg

SEQ ID NO: 5865249 - DNA, 25 bp, Homo sapien
ctcgaggcattacgacgcgacaggg

SEQ ID NO: 5865250 - DNA, 25 bp, Homo sapien
cgcctactatcgggcgtacagaggc

SEQ ID NO: 5865251 - DNA, 25 bp, Homo sapien
catctagtcgtcgacgggtcccagc

SEQ ID NO: 5865252 - DNA, 25 bp, Homo sapien
ctggagcgtacgcgaatgggttccg

SEQ ID NO: 5865253 - DNA, 25 bp, Homo sapien
ccggtcgctgttacgcgaaccttcc

SEQ ID NO: 5865254 - DNA, 25 bp, Homo sapien
ctcgctcggtcgtagtcgaacctcg

SEQ ID NO: 5865255 - DNA, 25 bp, Homo sapien
agcgcgtcgactagcgtcgacaagc

SEQ ID NO: 5865256 - DNA, 25 bp, Homo sapien
cccatctatccgcgctaggctgcgt

SEQ ID NO: 5865257 - DNA, 25 bp, Homo sapien
cctctgggttgcgcgcttatcgcac

SEQ ID NO: 5865258 - DNA, 25 bp, Homo sapien
cacgaacgcgaccgctataagccgc

SEQ ID NO: 5865259 - DNA, 25 bp, Homo sapien
ccccagcgcgagactaagcggttga

SEQ ID NO: 5865260 - DNA, 25 bp, Homo sapien
ccgttcttgcgcggtacgtctgtcc

SEQ ID NO: 5865261 - DNA, 25 bp, Homo sapien
tccagcgtcgaccgcgaactcacag

SEQ ID NO: 5865262 - DNA, 25 bp, Homo sapien
tgatcgcgcgtttggtcgtgccctc

SEQ ID NO: 5865263 - DNA, 25 bp, Homo sapien
gggagaggaaccgtacgcgcttacc

SEQ ID NO: 5865264 - DNA, 25 bp, Homo sapien
cctacccgtcggtcgcgagtgtgaa

SEQ ID NO: 5865265 - DNA, 25 bp, Homo sapien
ggacgactatcgcgctaaccccgca

SEQ ID NO: 5865266 - DNA, 25 bp, Homo sapien
cctccgtcgaacgagacgtccgtct

SEQ ID NO: 5865267 - DNA, 25 bp, Homo sapien
gggatggtacgcgcgatgctggtac

SEQ ID NO: 5865268 - DNA, 25 bp, Homo sapien
ggcgcgtacgcgatccgtcaattcc

SEQ ID NO: 5865269 - DNA, 25 bp, Homo sapien
acgagctcgcgcgtagtctgcacag

SEQ ID NO: 5865270 - DNA, 25 bp, Homo sapien
agcagttagcgtacgcgcccttccc

SEQ ID NO: 5865271 - DNA, 25 bp, Homo sapien
tccggcggtccgtagtcgagttcca

SEQ ID NO: 5865272 - DNA, 25 bp, Homo sapien
caggtccggacgttataccgcgcga

SEQ ID NO: 5865273 - DNA, 25 bp, Homo sapien
tcaacgcccgtatcgtcgcaccgag

SEQ ID NO: 5865274 - DNA, 25 bp, Homo sapien
ttgacacgctaagcgcgacacgccc

SEQ ID NO: 5865275 - DNA, 25 bp, Homo sapien
gtcgcgctagtcgtacgaccatcgc

SEQ ID NO: 5865276 - DNA, 25 bp, Homo sapien
ccccggcgggcttatacgtagactg

SEQ ID NO: 5865277 - DNA, 25 bp, Homo sapien
ccatccacgtacgcgtgccctccaa

SEQ ID NO: 5865278 - DNA, 25 bp, Homo sapien
aaccgagcgtacgcgactgcccttg

SEQ ID NO: 5865279 - DNA, 25 bp, Homo sapien
aacctacgctagggtatcggcgccc

SEQ ID NO: 5865280 - DNA, 25 bp, Homo sapien
attccaagtcgcggtacgcgtcggc

SEQ ID NO: 5865281 - DNA, 25 bp, Homo sapien
cctgtcacgcgagtaggcgtcgcta

SEQ ID NO: 5865282 - DNA, 25 bp, Homo sapien
cggtaggttactccgaccgctcgag

SEQ ID NO: 5865283 - DNA, 25 bp, Homo sapien
ccaactcgttagccgcgtacagggg

SEQ ID NO: 5865284 - DNA, 25 bp, Homo sapien
gtctgcgcgtacgtaccggtgggat

SEQ ID NO: 5865285 - DNA, 25 bp, Homo sapien
gagcgaatacggggatcgcagctgg

SEQ ID NO: 5865286 - DNA, 25 bp, Homo sapien
gcgaggtgacggtccgacctaagac

SEQ ID NO: 5865287 - DNA, 25 bp, Homo sapien
cggaacgttcgacgctgcgtttccg

SEQ ID NO: 5865288 - DNA, 25 bp, Homo sapien
gggatgatgccgcgacctaggatgg

SEQ ID NO: 5865289 - DNA, 25 bp, Homo sapien
tggggtctagtccgacgtgtccctc

SEQ ID NO: 5865290 - DNA, 25 bp, Homo sapien
gcacgtccatagtctcgcgcgtagg

SEQ ID NO: 5865291 - DNA, 25 bp, Homo sapien
acgcgtgcgcgaaataggtgagcgc

SEQ ID NO: 5865292 - DNA, 25 bp, Homo sapien
gccgggtatccgcgtagggagaatc

SEQ ID NO: 5865293 - DNA, 25 bp, Homo sapien
gcgtcaccgggcgtcaatggggtaa

SEQ ID NO: 5865294 - DNA, 25 bp, Homo sapien
agactccgccgctagttacgcccgt

SEQ ID NO: 5865295 - DNA, 25 bp, Homo sapien
tcagtgatcgtacgccggtggaccg

SEQ ID NO: 5865296 - DNA, 25 bp, Homo sapien
gggcgaggtcgcgattcgaagggta

SEQ ID NO: 5865297 - DNA, 25 bp, Homo sapien
ccctcgcaggtcgcgtaaattgccc

SEQ ID NO: 5865298 - DNA, 25 bp, Homo sapien
tgccccacgcgttacggccttgttc

SEQ ID NO: 5865299 - DNA, 25 bp, Homo sapien
acggcgtggcgacctcgtacaacct

SEQ ID NO: 5865300 - DNA, 25 bp, Homo sapien
cgcttgacgcgtctatcgagcgacg

SEQ ID NO: 5865301 - DNA, 25 bp, Homo sapien
ggcttggcggttacgcgatcccaga

SEQ ID NO: 5865302 - DNA, 25 bp, Homo sapien
cgctatcggtaccgacgctgcggat

SEQ ID NO: 5865303 - DNA, 25 bp, Homo sapien
cggcctgagtcgtaacggcggagat

SEQ ID NO: 5865304 - DNA, 25 bp, Homo sapien
actgcccgctatgacgcgagccgat

SEQ ID NO: 5865305 - DNA, 25 bp, Homo sapien
cgcagccgcgtacggattaagctcg

SEQ ID NO: 5865306 - DNA, 25 bp, Homo sapien
cactgccactatatcgcggcccacc

SEQ ID NO: 5865307 - DNA, 25 bp, Homo sapien
tcgtcgaacgcctagacggtccctc

SEQ ID NO: 5865308 - DNA, 25 bp, Homo sapien
tcgggtagtacgggcgcatggttcc

SEQ ID NO: 5865309 - DNA, 25 bp, Homo sapien
ggaccgttgtgacgacccggtagtc

SEQ ID NO: 5865310 - DNA, 25 bp, Homo sapien
cctgttcgtttacgcacggtgcccc

SEQ ID NO: 5865311 - DNA, 25 bp, Homo sapien
catacccgggcctatacgcccccta

SEQ ID NO: 5865312 - DNA, 25 bp, Homo sapien
gcggcccgtccgcgtatagacatgt

SEQ ID NO: 5865313 - DNA, 25 bp, Homo sapien
ggctcgtacaccgatcgcctgttcc

SEQ ID NO: 5865314 - DNA, 25 bp, Homo sapien
cacctcctacgtagtcgcgtggtcg

SEQ ID NO: 5865315 - DNA, 25 bp, Homo sapien
ccaggcgcccgcgttagatgaactg

SEQ ID NO: 5865316 - DNA, 25 bp, Homo sapien
cactgactcgcgtatcgccaggctg

SEQ ID NO: 5865317 - DNA, 25 bp, Homo sapien
ccccgcttagatgacgcgcgtagct

SEQ ID NO: 5865318 - DNA, 25 bp, Homo sapien
ctcacccccgcgatacgagtccttg

SEQ ID NO: 5865319 - DNA, 25 bp, Homo sapien
ttcactatcgtacgcccggcgcctc

SEQ ID NO: 5865320 - DNA, 25 bp, Homo sapien
tgggtcttcgggtacgtcgtcgagc

SEQ ID NO: 5865321 - DNA, 25 bp, Homo sapien
ggagtcagttcgcgtaggctccctc

SEQ ID NO: 5865322 - DNA, 25 bp, Homo sapien
gtgggcctcgtataacgcccaggca

SEQ ID NO: 5865323 - DNA, 25 bp, Homo sapien
cggtacccaatgcgcgcttcgacag

SEQ ID NO: 5865324 - DNA, 25 bp, Homo sapien
cgagagatcgcggaacacgcagacc

SEQ ID NO: 5865325 - DNA, 25 bp, Homo sapien
cttgggcgtttgttcgcgaagcgcg

SEQ ID NO: 5865326 - DNA, 25 bp, Homo sapien
ggtgcgcggtacgtcgttctccgta

SEQ ID NO: 5865327 - DNA, 25 bp, Homo sapien
gtggtgacgtcgcgatcgtagctcg

SEQ ID NO: 5865328 - DNA, 25 bp, Homo sapien
gccaactatcgaccgcgccaagcga

SEQ ID NO: 5865329 - DNA, 25 bp, Homo sapien
ctgaaccgtcgaaccgtacggctcg

SEQ ID NO: 5865330 - DNA, 25 bp, Homo sapien
ccgacaatgtcgaaccgcggggtgt

SEQ ID NO: 5865331 - DNA, 25 bp, Homo sapien
tctcgccgcgccggttaagctgtag

SEQ ID NO: 5865332 - DNA, 25 bp, Homo sapien
cctccttctacgcgagtcgacaggg

SEQ ID NO: 5865333 - DNA, 25 bp, Homo sapien
ggttacctacgagccgatacgggcg

SEQ ID NO: 5865334 - DNA, 25 bp, Homo sapien
gttgcgttcgcggacgatacacgcc

SEQ ID NO: 5865335 - DNA, 25 bp, Homo sapien
ccacagcgcgaacccctaggtgaga

SEQ ID NO: 5865336 - DNA, 25 bp, Homo sapien
gtcggtgtcggttgcgtaccacgag

SEQ ID NO: 5865337 - DNA, 25 bp, Homo sapien
gatgggtcggttcgtaccggtgtcc

SEQ ID NO: 5865338 - DNA, 25 bp, Homo sapien
gcgcaagtatcgcgcatcgtcggga

SEQ ID NO: 5865339 - DNA, 25 bp, Homo sapien
ggcggtgtcgccggacgtatctcat

SEQ ID NO: 5865340 - DNA, 25 bp, Homo sapien
agcactcggggcggtatcggtgaga

SEQ ID NO: 5865341 - DNA, 25 bp, Homo sapien
gcagggccgacggatctaaaaggcg

SEQ ID NO: 5865342 - DNA, 25 bp, Homo sapien
ccgtgcgcggaatcgatacgtgggt

SEQ ID NO: 5865343 - DNA, 25 bp, Homo sapien
gccaccgcgatacgacatccggcaa

SEQ ID NO: 5865344 - DNA, 25 bp, Homo sapien
cttccgactctcgcgacggtacgca

SEQ ID NO: 5865345 - DNA, 25 bp, Homo sapien
gtgacgtcgcgggctagtccagcat

SEQ ID NO: 5865346 - DNA, 25 bp, Homo sapien
cgtgaccggcgatacttgcttccgc

SEQ ID NO: 5865347 - DNA, 25 bp, Homo sapien
ccgaggtatgccggtcggcaatgga

SEQ ID NO: 5865348 - DNA, 25 bp, Homo sapien
tcgcagtcctacgcgtgcaccgatc

SEQ ID NO: 5865349 - DNA, 25 bp, Homo sapien
tggtcgactatcgcgaaccagggcc

SEQ ID NO: 5865350 - DNA, 25 bp, Homo sapien
cgcttgcgcgttccgtaactctcgc

SEQ ID NO: 5865351 - DNA, 25 bp, Homo sapien
tgctcccgcgacacgttacttccgc

SEQ ID NO: 5865352 - DNA, 25 bp, Homo sapien
tgtgggcggtcgtaaaccgtccctg

SEQ ID NO: 5865353 - DNA, 25 bp, Homo sapien
atcttacgactagaccgcgggcgcg

SEQ ID NO: 5865354 - DNA, 25 bp, Homo sapien
actacggtacgcggggtcagttggc

SEQ ID NO: 5865355 - DNA, 25 bp, Homo sapien
gactcacgcgtataccgtcggggac

SEQ ID NO: 5865356 - DNA, 25 bp, Homo sapien
agcttaatccgtacgcgcgccggct

SEQ ID NO: 5865357 - DNA, 25 bp, Homo sapien
gactggtctaccgacggtagcacgg

SEQ ID NO: 5865358 - DNA, 25 bp, Homo sapien
atgcaccggtagcgtcgacgagcca

SEQ ID NO: 5865359 - DNA, 25 bp, Homo sapien
gaagccctagcgcgcggtactgagt

SEQ ID NO: 5865360 - DNA, 25 bp, Homo sapien
ctctagccgcgaccgattgttgggc

SEQ ID NO: 5865361 - DNA, 25 bp, Homo sapien
ccctgacgtacccggacaatgcgtc

SEQ ID NO: 5865362 - DNA, 25 bp, Homo sapien
ccagcgcatatcggcgcggaatcct

SEQ ID NO: 5865363 - DNA, 25 bp, Homo sapien
cggtgcataccgcttgcgcagatgg

SEQ ID NO: 5865364 - DNA, 25 bp, Homo sapien
gccatgggtcgatagcggagtgacc

SEQ ID NO: 5865365 - DNA, 25 bp, Homo sapien
ccggggcgtgatcgtacgcacagtt

SEQ ID NO: 5865366 - DNA, 25 bp, Homo sapien
caataccgatacccgccgtcgctcc

SEQ ID NO: 5865367 - DNA, 25 bp, Homo sapien
gctcgaacgttcggacacgtcgacc

SEQ ID NO: 5865368 - DNA, 25 bp, Homo sapien
taaccccgtacccgctaacggcgca

SEQ ID NO: 5865369 - DNA, 25 bp, Homo sapien
acagtacgataccggatcggcccgc

SEQ ID NO: 5865370 - DNA, 25 bp, Homo sapien
gtataggatcagtccgcgcgggcca

SEQ ID NO: 5865371 - DNA, 25 bp, Homo sapien
gacggccgggtgcgatatctgggtt

SEQ ID NO: 5865372 - DNA, 25 bp, Homo sapien
ggtggaacgaacgcgctatgggtgc

SEQ ID NO: 5865373 - DNA, 25 bp, Homo sapien
agatggccgttctagcgcctgcctc

SEQ ID NO: 5865374 - DNA, 25 bp, Homo sapien
tcgctccggattaccgtccgagcca

SEQ ID NO: 5865375 - DNA, 25 bp, Homo sapien
actatgccgcgccgatggaccgatc

SEQ ID NO: 5865376 - DNA, 25 bp, Homo sapien
gcgctcgtatcacgagcgatgcctc

SEQ ID NO: 5865377 - DNA, 25 bp, Homo sapien
agggcggtcggtacgtagcggaatc

SEQ ID NO: 5865378 - DNA, 25 bp, Homo sapien
gcgcatcgagcccgctaaagcagga

SEQ ID NO: 5865379 - DNA, 25 bp, Homo sapien
ccggcatagcccgtacgctactgct

SEQ ID NO: 5865380 - DNA, 25 bp, Homo sapien
tcgattgcggcgctacgttccggac

SEQ ID NO: 5865381 - DNA, 25 bp, Homo sapien
tccaccacccgacgcggtataagcc

SEQ ID NO: 5865382 - DNA, 25 bp, Homo sapien
taccacggttgcgcgacatcgcagg

SEQ ID NO: 5865383 - DNA, 25 bp, Homo sapien
tgcttgcccctcgatcgacggtcac

SEQ ID NO: 5865384 - DNA, 25 bp, Homo sapien
gccaagaacgcgcgtaacggggcat

SEQ ID NO: 5865385 - DNA, 25 bp, Homo sapien
ggaacccgcgatccgactatcggtg

SEQ ID NO: 5865386 - DNA, 25 bp, Homo sapien
atgcggccgagacgttacgtcggga

SEQ ID NO: 5865387 - DNA, 25 bp, Homo sapien
gtgctgtagtcgaacgcgccttgcg

SEQ ID NO: 5865388 - DNA, 25 bp, Homo sapien
cgtaccatagggcgcggactctgac

SEQ ID NO: 5865389 - DNA, 25 bp, Homo sapien
accgaggatacgtccggacaggctc

SEQ ID NO: 5865390 - DNA, 25 bp, Homo sapien
gtgcttcgacgcacgaggttggctc

SEQ ID NO: 5865391 - DNA, 25 bp, Homo sapien
tcaccctcgcccgcgatactagagc

SEQ ID NO: 5865392 - DNA, 25 bp, Homo sapien
cagtcgggtgcgccgattacgcagt

SEQ ID NO: 5865393 - DNA, 25 bp, Homo sapien
gccaaacgaagcgcatacgtccggc

SEQ ID NO: 5865394 - DNA, 25 bp, Homo sapien
gtgctcatctacggccgagaggcct

SEQ ID NO: 5865395 - DNA, 25 bp, Homo sapien
gtaactacggagccgtacggaggcg

SEQ ID NO: 5865396 - DNA, 25 bp, Homo sapien
tgctcccgttattgcgcggctccag

SEQ ID NO: 5865397 - DNA, 25 bp, Homo sapien
agccccatacgcgacggtgctggaa

SEQ ID NO: 5865398 - DNA, 25 bp, Homo sapien
ctcagcccgtttcgcgcaaacggtg

SEQ ID NO: 5865399 - DNA, 25 bp, Homo sapien
cggccgtagtcgcaacgatcttggc

SEQ ID NO: 5865400 - DNA, 25 bp, Homo sapien
aacgggagtcggaccgatcactcgc

SEQ ID NO: 5865401 - DNA, 25 bp, Homo sapien
ggaagccgtaccgtccgacctacca

SEQ ID NO: 5865402 - DNA, 25 bp, Homo sapien
cgcatgcccgattcgtcgacccttc

SEQ ID NO: 5865403 - DNA, 25 bp, Homo sapien
accgaacgcgatgcgagatcgggca

SEQ ID NO: 5865404 - DNA, 25 bp, Homo sapien
cacaggcgcgacctaacgtcaggga

SEQ ID NO: 5865405 - DNA, 25 bp, Homo sapien
ggtaccttcgcgacctacgtctccg

SEQ ID NO: 5865406 - DNA, 25 bp, Homo sapien
gacccaagtcccgatacgccttggc

SEQ ID NO: 5865407 - DNA, 25 bp, Homo sapien
gactagatccctacgcgcacggcct

SEQ ID NO: 5865408 - DNA, 25 bp, Homo sapien
tccggaacctaacgtcgcgcagagg

SEQ ID NO: 5865409 - DNA, 25 bp, Homo sapien
tgagcagcgtatagcgcgatgcccg

SEQ ID NO: 5865410 - DNA, 25 bp, Homo sapien
cccggcaccgcgtacgtctcaattg

SEQ ID NO: 5865411 - DNA, 25 bp, Homo sapien
gggcttataccggcgtcgcatcctg

SEQ ID NO: 5865412 - DNA, 25 bp, Homo sapien
gtgggccttgacgtcgcgtcgacta

SEQ ID NO: 5865413 - DNA, 25 bp, Homo sapien
cggcgctctacgggcgtagatctga

SEQ ID NO: 5865414 - DNA, 25 bp, Homo sapien
gggcatcgccgtatgccgatacgtc

SEQ ID NO: 5865415 - DNA, 25 bp, Homo sapien
acctcttcgcgcactggtagtggcg

SEQ ID NO: 5865416 - DNA, 25 bp, Homo sapien
agcccgagactatcgcgcggtgact

SEQ ID NO: 5865417 - DNA, 25 bp, Homo sapien
agacgcccggtgtacgtcgtagctg

SEQ ID NO: 5865418 - DNA, 25 bp, Homo sapien
acctaccggatactcgccggcctca

SEQ ID NO: 5865419 - DNA, 25 bp, Homo sapien
ccccaggcggtagtacgctcatcca

SEQ ID NO: 5865420 - DNA, 25 bp, Homo sapien
catgaccgcgagcgtatagcgcagc

SEQ ID NO: 5865421 - DNA, 25 bp, Homo sapien
cgcggatattgcgagccggagtgct

SEQ ID NO: 5865422 - DNA, 25 bp, Homo sapien
gcgggctaccgcgtctagtggcata

SEQ ID NO: 5865423 - DNA, 25 bp, Homo sapien
cagctcccgtcaacgatcgcactcc

SEQ ID NO: 5865424 - DNA, 25 bp, Homo sapien
gtggcccggcctatagtcgtcgtac

SEQ ID NO: 5865425 - DNA, 25 bp, Homo sapien
agtggccatcgcgcgagacacttcg

SEQ ID NO: 5865426 - DNA, 25 bp, Homo sapien
gatgcgtacgcgcgactgtttcccc

SEQ ID NO: 5865427 - DNA, 25 bp, Homo sapien
aggacgatactccgcgcgaccactg

SEQ ID NO: 5865428 - DNA, 25 bp, Homo sapien
gccgaccccggattacgcgacagtt

SEQ ID NO: 5865429 - DNA, 25 bp, Homo sapien
caaacggcgtcgattcaccgggctc

SEQ ID NO: 5865430 - DNA, 25 bp, Homo sapien
agggtgacgcccgttattgcggctc

SEQ ID NO: 5865431 - DNA, 25 bp, Homo sapien
cgcttggtacgcgcatcgcagtgct

SEQ ID NO: 5865432 - DNA, 25 bp, Homo sapien
taccattacgcgacgacctcggggg

SEQ ID NO: 5865433 - DNA, 25 bp, Homo sapien
cgcgttaccgtcgcgtacatggcac

SEQ ID NO: 5865434 - DNA, 25 bp, Homo sapien
gcggcgggcttagacgcgttctgta

SEQ ID NO: 5865435 - DNA, 25 bp, Homo sapien
ctcgtccgccgtacgttagcatcgg

SEQ ID NO: 5865436 - DNA, 25 bp, Homo sapien
tcagcccgacgcacctacggtacga

SEQ ID NO: 5865437 - DNA, 25 bp, Homo sapien
gcgctcctcgcgcgagtatggagat

SEQ ID NO: 5865438 - DNA, 25 bp, Homo sapien
gccattatcgtgcgccgttgcaggc

SEQ ID NO: 5865439 - DNA, 25 bp, Homo sapien
ccgcaacgctacgcacggaacagtg

SEQ ID NO: 5865440 - DNA, 25 bp, Homo sapien
ctccggtgcgcgtcggtactaatcc

SEQ ID NO: 5865441 - DNA, 25 bp, Homo sapien
acctgacgcgtcgtcttaccggtcc

SEQ ID NO: 5865442 - DNA, 25 bp, Homo sapien
cgctctctaactacgcgtcccgcct

SEQ ID NO: 5865443 - DNA, 25 bp, Homo sapien
gccagtcgtacggccgtaaggtctg

SEQ ID NO: 5865444 - DNA, 25 bp, Homo sapien
aggacccgtcaggtcgaagccgatg

SEQ ID NO: 5865445 - DNA, 25 bp, Homo sapien
ccgaggaagtcgacggcgtcaatcg

SEQ ID NO: 5865446 - DNA, 25 bp, Homo sapien
gcgtgcgtcccgacgtatcagactc

SEQ ID NO: 5865447 - DNA, 25 bp, Homo sapien
ggtcctcgcgctgaacgttcccgtt

SEQ ID NO: 5865448 - DNA, 25 bp, Homo sapien
gttacgttataccggcgcgccagcg

SEQ ID NO: 5865449 - DNA, 25 bp, Homo sapien
gcagtgcaaccgcgcgaatacggtc

SEQ ID NO: 5865450 - DNA, 25 bp, Homo sapien
cagcccgcgagatatcgcgctcaca

SEQ ID NO: 5865451 - DNA, 25 bp, Homo sapien
agggttcggtactcgccaaggcagg

SEQ ID NO: 5865452 - DNA, 25 bp, Homo sapien
gggatatcgttcctcgcgtggccac

SEQ ID NO: 5865453 - DNA, 25 bp, Homo sapien
gcatggcggtaccacgacggtacgt

SEQ ID NO: 5865454 - DNA, 25 bp, Homo sapien
ccacagttagtcggtcgcgacccga

SEQ ID NO: 5865455 - DNA, 25 bp, Homo sapien
cctcactccggtcgtactggccgta

SEQ ID NO: 5865456 - DNA, 25 bp, Homo sapien
gttctcacgtccggactagcgcgac

SEQ ID NO: 5865457 - DNA, 25 bp, Homo sapien
ttcgcgaagcgcgcatacgctgcag

SEQ ID NO: 5865458 - DNA, 25 bp, Homo sapien
gcgtgactactcgacgcggctcaca

SEQ ID NO: 5865459 - DNA, 25 bp, Homo sapien
atgcccgtatcggacgcgtgccact

SEQ ID NO: 5865460 - DNA, 25 bp, Homo sapien
agctgtaacgacgtgtcggccccct

SEQ ID NO: 5865461 - DNA, 25 bp, Homo sapien
ggattcacgtcgtcgcgtaccccct

SEQ ID NO: 5865462 - DNA, 25 bp, Homo sapien
tgggtccgaccggttgcgagtttcc

SEQ ID NO: 5865463 - DNA, 25 bp, Homo sapien
ggaccttagggcgcggcaacttgga

SEQ ID NO: 5865464 - DNA, 25 bp, Homo sapien
ccgaacttgatcggacgcggactcg

SEQ ID NO: 5865465 - DNA, 25 bp, Homo sapien
cccagtacgcgtcgtacctcctcac

SEQ ID NO: 5865466 - DNA, 25 bp, Homo sapien
agcaccgccggtcgacgtaagcgaa

SEQ ID NO: 5865467 - DNA, 25 bp, Homo sapien
cgagacttcgcataggcggcaccga

SEQ ID NO: 5865468 - DNA, 25 bp, Homo sapien
gctcagtcgctatacgccgacggtc

SEQ ID NO: 5865469 - DNA, 25 bp, Homo sapien
agcggcgatactcgcgcgttctcga

SEQ ID NO: 5865470 - DNA, 25 bp, Homo sapien
gacctgttagacgtccgcgcgacgt

SEQ ID NO: 5865471 - DNA, 25 bp, Homo sapien
gagccgacgatgtacgtcgtggcac

SEQ ID NO: 5865472 - DNA, 25 bp, Homo sapien
cgatccaacgctcgcgaagtaggcc

SEQ ID NO: 5865473 - DNA, 25 bp, Homo sapien
gtttgtggtcgaacgcgacccccag

SEQ ID NO: 5865474 - DNA, 25 bp, Homo sapien
gctagctacaccggggtcgattggc

SEQ ID NO: 5865475 - DNA, 25 bp, Homo sapien
agtcgcaaacgtccggacgcagcac

SEQ ID NO: 5865476 - DNA, 25 bp, Homo sapien
atcgcaacgcgcgaagtaggccctg

SEQ ID NO: 5865477 - DNA, 25 bp, Homo sapien
tgggcggtatgtcacgccgcttcct

SEQ ID NO: 5865478 - DNA, 25 bp, Homo sapien
acggacgcgtatgcccggtgaagtg

SEQ ID NO: 5865479 - DNA, 25 bp, Homo sapien
gcttcgcgtatcgcgggttcgagct

SEQ ID NO: 5865480 - DNA, 25 bp, Homo sapien
agcgagcctagcgcggatacctctg

SEQ ID NO: 5865481 - DNA, 25 bp, Homo sapien
tgctcgacgttctacgcggcgttcg

SEQ ID NO: 5865482 - DNA, 25 bp, Homo sapien
cccgcctacgctaagtcgcccttca

SEQ ID NO: 5865483 - DNA, 25 bp, Homo sapien
cgggatgttgcgacgcttcgttgcc

SEQ ID NO: 5865484 - DNA, 25 bp, Homo sapien
taacggcccgcgagtattcgccctc

SEQ ID NO: 5865485 - DNA, 25 bp, Homo sapien
cttcccacgattgaccgcgccctag

SEQ ID NO: 5865486 - DNA, 25 bp, Homo sapien
gcgagcgaacgcgcgagtagtctga

SEQ ID NO: 5865487 - DNA, 25 bp, Homo sapien
aggcaaaccgactcgacgggatgcc

SEQ ID NO: 5865488 - DNA, 25 bp, Homo sapien
acgaccgtcgcataccggccctaag

SEQ ID NO: 5865489 - DNA, 25 bp, Homo sapien
tcggcacgcaacgttaagcaggcgc

SEQ ID NO: 5865490 - DNA, 25 bp, Homo sapien
ttagccgttacgtacgccgcggagg

SEQ ID NO: 5865491 - DNA, 25 bp, Homo sapien
gcgacacgacggtccgatagtagcc

SEQ ID NO: 5865492 - DNA, 25 bp, Homo sapien
ggcacctacgccgcggattcgtcta

SEQ ID NO: 5865493 - DNA, 25 bp, Homo sapien
tcagcgtatgacgcggcctgacggt

SEQ ID NO: 5865494 - DNA, 25 bp, Homo sapien
gtcgggtagttcggcgccgtttgtc

SEQ ID NO: 5865495 - DNA, 25 bp, Homo sapien
acagggagcgtaacgctccgccaga

SEQ ID NO: 5865496 - DNA, 25 bp, Homo sapien
tcttcgcgctacgcgtacccgcatc

SEQ ID NO: 5865497 - DNA, 25 bp, Homo sapien
tgtcattaggcccgtagcgcgccga

SEQ ID NO: 5865498 - DNA, 25 bp, Homo sapien
cgcacatcgcgtacaagcccgctga

SEQ ID NO: 5865499 - DNA, 25 bp, Homo sapien
gttccgtcgcgtagcgagtcctctg

SEQ ID NO: 5865500 - DNA, 25 bp, Homo sapien
ctcacacgcgacccgtaaagcgggt

SEQ ID NO: 5865501 - DNA, 25 bp, Homo sapien
cggttatcatgcgccgtaagccccc

SEQ ID NO: 5865502 - DNA, 25 bp, Homo sapien
gcggagcgcgtacgacagttaccct

SEQ ID NO: 5865503 - DNA, 25 bp, Homo sapien
ttgcctcgcgaagcgcctacgttcg

SEQ ID NO: 5865504 - DNA, 25 bp, Homo sapien
cctcgtcgatcgtaggacgcctgct

SEQ ID NO: 5865505 - DNA, 25 bp, Homo sapien
cggcttcctacgtcgcgtaccatgc

SEQ ID NO: 5865506 - DNA, 25 bp, Homo sapien
cttccaagtcgcgcggtaccgtcag

SEQ ID NO: 5865507 - DNA, 25 bp, Homo sapien
tggcccgtacggacgtactgtggga

SEQ ID NO: 5865508 - DNA, 25 bp, Homo sapien
cggaacgcgtaccacgactacgtcg

SEQ ID NO: 5865509 - DNA, 25 bp, Homo sapien
gccctatacgggtaccgactgaccc

SEQ ID NO: 5865510 - DNA, 25 bp, Homo sapien
tgtcagaacgggcgagtcgcctggt

SEQ ID NO: 5865511 - DNA, 25 bp, Homo sapien
ctcctgcgccgatcatagggttcgg

SEQ ID NO: 5865512 - DNA, 25 bp, Homo sapien
gtttcagtacgcgcgaagcgtcggg

SEQ ID NO: 5865513 - DNA, 25 bp, Homo sapien
gagcgagttgcctaccgcggtgaac

SEQ ID NO: 5865514 - DNA, 25 bp, Homo sapien
agtccacgctcggaccgatggcaca

SEQ ID NO: 5865515 - DNA, 25 bp, Homo sapien
accccaggtgtacgcgcgatactgc

SEQ ID NO: 5865516 - DNA, 25 bp, Homo sapien
tgcagcgcgatcggccctttccgaa

SEQ ID NO: 5865517 - DNA, 25 bp, Homo sapien
tacgctttagggtgcgtcgccccct

SEQ ID NO: 5865518 - DNA, 25 bp, Homo sapien
cccaagtcgtaccgcgtgatcgtcg

SEQ ID NO: 5865519 - DNA, 25 bp, Homo sapien
ctagcccgcggtctagacggtgtca

SEQ ID NO: 5865520 - DNA, 25 bp, Homo sapien
attgccggtcgcgtaaccgcctgca

SEQ ID NO: 5865521 - DNA, 25 bp, Homo sapien
taccgtacgatcgtcgcgtggcgga

SEQ ID NO: 5865522 - DNA, 25 bp, Homo sapien
cgggggcgacgtagactcgaggtaa

SEQ ID NO: 5865523 - DNA, 25 bp, Homo sapien
gagcctgtgcggcttacgatcctcg

SEQ ID NO: 5865524 - DNA, 25 bp, Homo sapien
atgatccgtctgacgcgaggcggtc

SEQ ID NO: 5865525 - DNA, 25 bp, Homo sapien
gagggactcgacgcacgattccagc

SEQ ID NO: 5865526 - DNA, 25 bp, Homo sapien
tcacgccgtacgcgctaggcgaaga

SEQ ID NO: 5865527 - DNA, 25 bp, Homo sapien
cgggcatacgcctagtcgcgtgttg

SEQ ID NO: 5865528 - DNA, 25 bp, Homo sapien
acgcatcgaccggttaggcagcgtg

SEQ ID NO: 5865529 - DNA, 25 bp, Homo sapien
cgttgagtcgtatcgtgcggtgcgc

SEQ ID NO: 5865530 - DNA, 25 bp, Homo sapien
cggcagagcggtatgtcgaatccgc

SEQ ID NO: 5865531 - DNA, 25 bp, Homo sapien
gggaggttgacgtaacgcgcagtcc

SEQ ID NO: 5865532 - DNA, 25 bp, Homo sapien
tacccctgtcgtccggttaaggcgc

SEQ ID NO: 5865533 - DNA, 25 bp, Homo sapien
tccccacgaccgtacgacagcatcc

SEQ ID NO: 5865534 - DNA, 25 bp, Homo sapien
atcgggtgactattcgcggcagcgg

SEQ ID NO: 5865535 - DNA, 25 bp, Homo sapien
agggggcgcggatactagttcgcca

SEQ ID NO: 5865536 - DNA, 25 bp, Homo sapien
ttctcgctatcgggccgaccatccg

SEQ ID NO: 5865537 - DNA, 25 bp, Homo sapien
ccatgaggcgcgcgatcatcaccac

SEQ ID NO: 5865538 - DNA, 25 bp, Homo sapien
cggcatgtcttcgcggactgtcacg

SEQ ID NO: 5865539 - DNA, 25 bp, Homo sapien
cataactttcggtcccgcgcgggct

SEQ ID NO: 5865540 - DNA, 25 bp, Homo sapien
ccgtgacggacgatcgagtggcatc

SEQ ID NO: 5865541 - DNA, 25 bp, Homo sapien
tcggcctgcgcggacggaatcgaaa

SEQ ID NO: 5865542 - DNA, 25 bp, Homo sapien
taccaggcgcgtaccgaacgcacct

SEQ ID NO: 5865543 - DNA, 25 bp, Homo sapien
gtctactagaccggcggaagcgggt

SEQ ID NO: 5865544 - DNA, 25 bp, Homo sapien
gtccgcactatgcgggacgagtggg

SEQ ID NO: 5865545 - DNA, 25 bp, Homo sapien
tcacctaccgtacgcgggtgctccc

SEQ ID NO: 5865546 - DNA, 25 bp, Homo sapien
actcggtcgcccgactagcttggcc

SEQ ID NO: 5865547 - DNA, 25 bp, Homo sapien
cgggctcggtcgactctcgtggagt

SEQ ID NO: 5865548 - DNA, 25 bp, Homo sapien
cccgtgctagtcgtgcggaacggca

SEQ ID NO: 5865549 - DNA, 25 bp, Homo sapien
cagcggcgcgggacgttgtaaacgc

SEQ ID NO: 5865550 - DNA, 25 bp, Homo sapien
cggccccgcgttataggcgccattc

SEQ ID NO: 5865551 - DNA, 25 bp, Homo sapien
cccaacaacgcgggacggtccgatc

SEQ ID NO: 5865552 - DNA, 25 bp, Homo sapien
accacgtccgtcgcgtaggagtggg

SEQ ID NO: 5865553 - DNA, 25 bp, Homo sapien
ggcaggtctccgacgcacgagttgg

SEQ ID NO: 5865554 - DNA, 25 bp, Homo sapien
cgcagccgttccgatacgcacgctg

SEQ ID NO: 5865555 - DNA, 25 bp, Homo sapien
gtctcggtcgccgcatacttcgcgg

SEQ ID NO: 5865556 - DNA, 25 bp, Homo sapien
gagccgtaccgacgctcggcggttt

SEQ ID NO: 5865557 - DNA, 25 bp, Homo sapien
gcccgcaccgcgcgaacgtcaatac

SEQ ID NO: 5865558 - DNA, 25 bp, Homo sapien
ggcgcacgacgcggtcgttaactgc

SEQ ID NO: 5865559 - DNA, 25 bp, Homo sapien
gaagccacgcgctaactcgctgggg

SEQ ID NO: 5865560 - DNA, 25 bp, Homo sapien
cacgtctacctcggacgcgcggaag

SEQ ID NO: 5865561 - DNA, 25 bp, Homo sapien
tggtggccgttgcgacgtagacggg

SEQ ID NO: 5865562 - DNA, 25 bp, Homo sapien
ccccccgtgcgcgatacgatcagca

SEQ ID NO: 5865563 - DNA, 25 bp, Homo sapien
acagcgcgggcgcaatacggtggtg

SEQ ID NO: 5865564 - DNA, 25 bp, Homo sapien
ccctacacccgctaacggtcagcgg

SEQ ID NO: 5865565 - DNA, 25 bp, Homo sapien
ggaggatcgtcgcggtacccacgtc

SEQ ID NO: 5865566 - DNA, 25 bp, Homo sapien
tagcgctcgacgttcgggccccatc

SEQ ID NO: 5865567 - DNA, 25 bp, Homo sapien
actgctcgcgtaaggcgtagccggg

SEQ ID NO: 5865568 - DNA, 25 bp, Homo sapien
gaccgacgcgcgattgactgccgct

SEQ ID NO: 5865569 - DNA, 25 bp, Homo sapien
cagcgggaacggcgcgaatccagca

SEQ ID NO: 5865570 - DNA, 25 bp, Homo sapien
gcgttacgcgtacgcctactcgggc

SEQ ID NO: 5865571 - DNA, 25 bp, Homo sapien
aggacccgtgcgcggaataggggag

SEQ ID NO: 5865572 - DNA, 25 bp, Homo sapien
gcgagccgcgagttagacgtccagc

SEQ ID NO: 5865573 - DNA, 25 bp, Homo sapien
cgcgactcggcgcggtatgggaaga

SEQ ID NO: 5865574 - DNA, 25 bp, Homo sapien
cgcgaacgcgacgtgatgtctgggg

SEQ ID NO: 5865575 - DNA, 25 bp, Homo sapien
gagcagccgagcgcgcatagcgagt

SEQ ID NO: 5865576 - DNA, 25 bp, Homo sapien
ccgcgcacgcgctataggctaccct

SEQ ID NO: 5865577 - DNA, 25 bp, Homo sapien
ctcctcgcgcgaacggtaacgcgag

SEQ ID NO: 5865578 - DNA, 25 bp, Homo sapien
ctgacggtccggtcctacggctacg

SEQ ID NO: 5865579 - DNA, 25 bp, Homo sapien
gcgcgatagcgacgtgcgtcatcgc

SEQ ID NO: 5865580 - DNA, 25 bp, Homo sapien
cctctagtacgttcgcccgcgaggg

SEQ ID NO: 5865581 - DNA, 25 bp, Homo sapien
gctgcccggcactagacgtcgactg

SEQ ID NO: 5865582 - DNA, 25 bp, Homo sapien
atccgccgcgtagcgcactatggcc

SEQ ID NO: 5865583 - DNA, 25 bp, Homo sapien
tggccgcgtaaccggtcgcaaggtc

SEQ ID NO: 5865584 - DNA, 25 bp, Homo sapien
gccacgacgcgcgcggtatactacc

SEQ ID NO: 5865585 - DNA, 25 bp, Homo sapien
ccggacgtcgtatccgtcgcttgcg

SEQ ID NO: 5865586 - DNA, 25 bp, Homo sapien
cggagcctatcggccttcggtgcca

SEQ ID NO: 5865587 - DNA, 25 bp, Homo sapien
tagcaccccgacgcgatatgggcgc

SEQ ID NO: 5865588 - DNA, 25 bp, Homo sapien
acccgggtccgtcgcacgattcgct

SEQ ID NO: 5865589 - DNA, 25 bp, Homo sapien
gtggtgtatgacgggacgccgtccc

SEQ ID NO: 5865590 - DNA, 25 bp, Homo sapien
aacaccgtacgggatcgcggcggct

SEQ ID NO: 5865591 - DNA, 25 bp, Homo sapien
gctgtccgtcgcgctacgccgtatg

SEQ ID NO: 5865592 - DNA, 25 bp, Homo sapien
cgccggcggtcgttcgctaccatag

SEQ ID NO: 5865593 - DNA, 25 bp, Homo sapien
cgcgagcgttgcgcctagctaaccg

SEQ ID NO: 5865594 - DNA, 25 bp, Homo sapien
gcgccatagatcgcgccggtatccg

SEQ ID NO: 5865595 - DNA, 25 bp, Homo sapien
agccgtacgggtcgcgcaagtgctc

SEQ ID NO: 5865596 - DNA, 25 bp, Homo sapien
tgggggcgcgtcgaacgatgtcacc

SEQ ID NO: 5865597 - DNA, 25 bp, Homo sapien
cggcttcccgtcgacgcactgggaa

SEQ ID NO: 5865598 - DNA, 25 bp, Homo sapien
accgggcacggtcaacgcggagagt

SEQ ID NO: 5865599 - DNA, 25 bp, Homo sapien
ggccgggtcgcgcgtacttgtaggt

SEQ ID NO: 5865600 - DNA, 25 bp, Homo sapien
cacggggctaccgaacgcgtgacgt

SEQ ID NO: 5865601 - DNA, 25 bp, Homo sapien
ggtgggccggtccgcgataatctgc

SEQ ID NO: 5865602 - DNA, 25 bp, Homo sapien
gcacttcgtcgcgcgttagggcgag

SEQ ID NO: 5865603 - DNA, 25 bp, Homo sapien
gtgttccccgtcgcgcctacccttc

SEQ ID NO: 5865604 - DNA, 25 bp, Homo sapien
cggccattcgcgagacggctacgga

SEQ ID NO: 5865605 - DNA, 25 bp, Homo sapien
agccaccgtcgattagcgggaccgc

SEQ ID NO: 5865606 - DNA, 25 bp, Homo sapien
ccacacgtagtgcgtacggcgaccc

SEQ ID NO: 5865607 - DNA, 25 bp, Homo sapien
ggactccgctatgcggggtgtgctc

SEQ ID NO: 5865608 - DNA, 25 bp, Homo sapien
ctcggcgcggtcaatcgtcacgcct

SEQ ID NO: 5865609 - DNA, 25 bp, Homo sapien
ggtcgatacgaccgtcggcgtacgc

SEQ ID NO: 5865610 - DNA, 25 bp, Homo sapien
ggttcgcacgtcgcgtacgccaggt

SEQ ID NO: 5865611 - DNA, 25 bp, Homo sapien
caccaggtataccgcgccgtccgga

SEQ ID NO: 5865612 - DNA, 25 bp, Homo sapien
acctccacgcgtacggactccctcc

SEQ ID NO: 5865613 - DNA, 25 bp, Homo sapien
acgcagcgcccgatcgactcttcgc

SEQ ID NO: 5865614 - DNA, 25 bp, Homo sapien
cgagcgcgcgttcggtagccaatcc

SEQ ID NO: 5865615 - DNA, 25 bp, Homo sapien
tgcatcgttaagcgcggtcgccgcc

SEQ ID NO: 5865616 - DNA, 25 bp, Homo sapien
ctcctcataggcgcgcttcgctgcc

SEQ ID NO: 5865617 - DNA, 25 bp, Homo sapien
ggccattctatcgcgcggggaaccg

SEQ ID NO: 5865618 - DNA, 25 bp, Homo sapien
ggcatacgcgacgacccaaaccgcg

SEQ ID NO: 5865619 - DNA, 25 bp, Homo sapien
ggggcgccggcgctattaggtgact

SEQ ID NO: 5865620 - DNA, 25 bp, Homo sapien
ggtgggtacgagcgttcggatgcgg

SEQ ID NO: 5865621 - DNA, 25 bp, Homo sapien
tcgaggcggcgtaccgtgacggaca

SEQ ID NO: 5865622 - DNA, 25 bp, Homo sapien
actgcccgccgcacgactactccga

SEQ ID NO: 5865623 - DNA, 25 bp, Homo sapien
gggtacgtattcgcgccgaaccgcc

SEQ ID NO: 5865624 - DNA, 25 bp, Homo sapien
gcagggactgtcgaccgcgattggg

SEQ ID NO: 5865625 - DNA, 25 bp, Homo sapien
cgctcccgtacccgcgttagcgttc

SEQ ID NO: 5865626 - DNA, 25 bp, Homo sapien
taactgcgcgtacggtcacgccgcc

SEQ ID NO: 5865627 - DNA, 25 bp, Homo sapien
ggtgcgcacggtatacgcgtacggc

SEQ ID NO: 5865628 - DNA, 25 bp, Homo sapien
cctcccgtgacgtacgccgccgaaa

SEQ ID NO: 5865629 - DNA, 25 bp, Homo sapien
gggtcccgtataacggccgtgtgcg

SEQ ID NO: 5865630 - DNA, 25 bp, Homo sapien
caaaccgtgtcgtgcgacggccagc

SEQ ID NO: 5865631 - DNA, 25 bp, Homo sapien
cacggcctagccgacgcgttctgtc

SEQ ID NO: 5865632 - DNA, 25 bp, Homo sapien
gcgttgcggcggataacggatcccc

SEQ ID NO: 5865633 - DNA, 25 bp, Homo sapien
gtattctcgcgcccgtacggggtgg

SEQ ID NO: 5865634 - DNA, 25 bp, Homo sapien
gaagcccgcgctagcgtacgaccca

SEQ ID NO: 5865635 - DNA, 25 bp, Homo sapien
acgatgtcacgggcgcgaaccaggc

SEQ ID NO: 5865636 - DNA, 25 bp, Homo sapien
acgtgcctcgcgggacgttctacgg

SEQ ID NO: 5865637 - DNA, 25 bp, Homo sapien
cgctagcgcgacgtgcgtagcacca

SEQ ID NO: 5865638 - DNA, 25 bp, Homo sapien
ggacccgcgcgcggttgatcatggt

SEQ ID NO: 5865639 - DNA, 25 bp, Homo sapien
gacccaaccgacggtagggtgtgcg

SEQ ID NO: 5865640 - DNA, 25 bp, Homo sapien
cgcatatacgtccgcggcaaggccg

SEQ ID NO: 5865641 - DNA, 25 bp, Homo sapien
ggcctgatcgcgtaagcgcacgagc

SEQ ID NO: 5865642 - DNA, 25 bp, Homo sapien
agccagatcgtatcgccggcgggtc

SEQ ID NO: 5865643 - DNA, 25 bp, Homo sapien
ggtgtgtcggtccggcgtaatggcc

SEQ ID NO: 5865644 - DNA, 25 bp, Homo sapien
gcgggctacgacgcggtagtaggag

SEQ ID NO: 5865645 - DNA, 25 bp, Homo sapien
gtgtgtgtgcgtcgacggaagcggc

SEQ ID NO: 5865646 - DNA, 25 bp, Homo sapien
tcgggacgcgccggtacatcggatc

SEQ ID NO: 5865647 - DNA, 25 bp, Homo sapien
tgggccggcgtaatcgacgtcgcca

SEQ ID NO: 5865648 - DNA, 25 bp, Homo sapien
ggccaatctcgtgacgaccgggacg

SEQ ID NO: 5865649 - DNA, 25 bp, Homo sapien
atggctccccgtagtacgggagccc

SEQ ID NO: 5865650 - DNA, 25 bp, Homo sapien
gtgacaccgcgatagtggaccgcgg

SEQ ID NO: 5865651 - DNA, 25 bp, Homo sapien
gatcggacccgaagtacggccgctc

SEQ ID NO: 5865652 - DNA, 25 bp, Homo sapien
tcgcccctagcggtcgaccctcaga

SEQ ID NO: 5865653 - DNA, 25 bp, Homo sapien
gtgggtcgcacgcattgcgcaggtc

SEQ ID NO: 5865654 - DNA, 25 bp, Homo sapien
cggccgatacgagcggaccgccaat

SEQ ID NO: 5865655 - DNA, 25 bp, Homo sapien
atcttccgtaccgggctagcggggc

SEQ ID NO: 5865656 - DNA, 25 bp, Homo sapien
gaccgttcccgtacgtcgcttccgc

SEQ ID NO: 5865657 - DNA, 25 bp, Homo sapien
acaggcacgcgggctaaacaccggg

SEQ ID NO: 5865658 - DNA, 25 bp, Homo sapien
ccactgacgatctacgcgcgcggct

SEQ ID NO: 5865659 - DNA, 25 bp, Homo sapien
agacgcccggacgcataactcccgc

SEQ ID NO: 5865660 - DNA, 25 bp, Homo sapien
cgcgcccggacaaggcgtaaggtag

SEQ ID NO: 5865661 - DNA, 25 bp, Homo sapien
cggcccgacgcgtaatccgagtggt

SEQ ID NO: 5865662 - DNA, 25 bp, Homo sapien
ggccatgcgcgcacggatacccaga

SEQ ID NO: 5865663 - DNA, 25 bp, Homo sapien
ggacaccgttcgttgcggacggagc

SEQ ID NO: 5865664 - DNA, 25 bp, Homo sapien
gccacgctagtcggcgacgtgcact

SEQ ID NO: 5865665 - DNA, 25 bp, Homo sapien
cctccgggatcgcggtcgacaagtc

SEQ ID NO: 5865666 - DNA, 25 bp, Homo sapien
accgctagggtcgctcgtaccccga

SEQ ID NO: 5865667 - DNA, 25 bp, Homo sapien
cgtgtcgaccttacgcgcgggcaac

SEQ ID NO: 5865668 - DNA, 25 bp, Homo sapien
ggtcgctcgggcgtaacgacactgg

SEQ ID NO: 5865669 - DNA, 25 bp, Homo sapien
tggctccgcgtttcggcagtggctg

SEQ ID NO: 5865670 - DNA, 25 bp, Homo sapien
gcagtccgaatacggtccgcgtccg

SEQ ID NO: 5865671 - DNA, 25 bp, Homo sapien
cctcgcgtctacgccggactgaagc

SEQ ID NO: 5865672 - DNA, 25 bp, Homo sapien
ggggctcgacgatcctaccgcgtag

SEQ ID NO: 5865673 - DNA, 25 bp, Homo sapien
acgcggtatgtcgcgccgtaccgag

SEQ ID NO: 5865674 - DNA, 25 bp, Homo sapien
agcccgcaacgtcgcgacaggctgt

SEQ ID NO: 5865675 - DNA, 25 bp, Homo sapien
ctcgcccgtcgctacgacctaggtg

SEQ ID NO: 5865676 - DNA, 25 bp, Homo sapien
ggtcatgcgactcgcgtagggcagg

SEQ ID NO: 5865677 - DNA, 25 bp, Homo sapien
cgaggacgtacgcgcggtatgcctg

SEQ ID NO: 5865678 - DNA, 25 bp, Homo sapien
tcagctcgtaggccgaccgtgctgc

SEQ ID NO: 5865679 - DNA, 25 bp, Homo sapien
cacgcacgaccggcacctatctcgc

SEQ ID NO: 5865680 - DNA, 25 bp, Homo sapien
gccatcgtcgatcgcgggggttagc

SEQ ID NO: 5865681 - DNA, 25 bp, Homo sapien
cgcatctagcccgtacgaagcgccc

SEQ ID NO: 5865682 - DNA, 25 bp, Homo sapien
gccgtagcccttacgcgcaccccaa

SEQ ID NO: 5865683 - DNA, 25 bp, Homo sapien
cacctgcgacggtacgtagctggcc

SEQ ID NO: 5865684 - DNA, 25 bp, Homo sapien
tgtgacacgcggtctagcgggggga

SEQ ID NO: 5865685 - DNA, 25 bp, Homo sapien
cacgagtccgaccggctacccatcg

SEQ ID NO: 5865686 - DNA, 25 bp, Homo sapien
atccggtaaccgtcgacgcctgcgc

SEQ ID NO: 5865687 - DNA, 25 bp, Homo sapien
tacccggtcacctatcgcgggccgt

SEQ ID NO: 5865688 - DNA, 25 bp, Homo sapien
gagcgagacgcggctagctgcccat

SEQ ID NO: 5865689 - DNA, 25 bp, Homo sapien
gactacgccgtatcgagcggcacgc

SEQ ID NO: 5865690 - DNA, 25 bp, Homo sapien
ttctcgtgcgttacgcggcacgcgc

SEQ ID NO: 5865691 - DNA, 25 bp, Homo sapien
tgcgagatcggtcctgcgcggcaca

SEQ ID NO: 5865692 - DNA, 25 bp, Homo sapien
gcgctggccgctaacgcgtgacagt

SEQ ID NO: 5865693 - DNA, 25 bp, Homo sapien
agcgggcggtgcgtcgtacaagtgg

SEQ ID NO: 5865694 - DNA, 25 bp, Homo sapien
gtgcactacgcccgttcgggtccct

SEQ ID NO: 5865695 - DNA, 25 bp, Homo sapien
cctgtaacggcgtaatgcgggcccg

SEQ ID NO: 5865696 - DNA, 25 bp, Homo sapien
cagtcctacgcgagcgtagccaggc

SEQ ID NO: 5865697 - DNA, 25 bp, Homo sapien
gccagctcgcgatacggggagcttc

SEQ ID NO: 5865698 - DNA, 25 bp, Homo sapien
gcggcgccgcgaccgtagtagtttg

SEQ ID NO: 5865699 - DNA, 25 bp, Homo sapien
ggggacttgcggcgttacgtcgctg

SEQ ID NO: 5865700 - DNA, 25 bp, Homo sapien
acaggtctaaggatcgcgcccgggc

SEQ ID NO: 5865701 - DNA, 25 bp, Homo sapien
cgaccacgggggttcgtagcgacac

SEQ ID NO: 5865702 - DNA, 25 bp, Homo sapien
ggacgacggtgcgatacgcgctacg

SEQ ID NO: 5865703 - DNA, 25 bp, Homo sapien
ggccgctattcgcgaaccgtacccg

SEQ ID NO: 5865704 - DNA, 25 bp, Homo sapien
gcgggtcgatcgtacgaagggggtg

SEQ ID NO: 5865705 - DNA, 25 bp, Homo sapien
aacggccgttgacgcgtaggggcac

SEQ ID NO: 5865706 - DNA, 25 bp, Homo sapien
gtcagcgcccgcgtaccgttgtgca

SEQ ID NO: 5865707 - DNA, 25 bp, Homo sapien
gtgggacgagcgtagacgatcggcg

SEQ ID NO: 5865708 - DNA, 25 bp, Homo sapien
aggtgcctagcgcgtcgctgtccag

SEQ ID NO: 5865709 - DNA, 25 bp, Homo sapien
cgttcctacgacgcggcatctcggc

SEQ ID NO: 5865710 - DNA, 25 bp, Homo sapien
tcgtctgtacgcacgtccgccctcc

SEQ ID NO: 5865711 - DNA, 25 bp, Homo sapien
agcctgtcggacgcgtgaccctcgt

SEQ ID NO: 5865712 - DNA, 25 bp, Homo sapien
tataccgtcgtatgcggggcccggg

SEQ ID NO: 5865713 - DNA, 25 bp, Homo sapien
ccgctgtacgcccgacgcatgctac

SEQ ID NO: 5865714 - DNA, 25 bp, Homo sapien
cgggcttaagtccgacgggcgcatg

SEQ ID NO: 5865715 - DNA, 25 bp, Homo sapien
gagtgtacgagtccggtcgagggcg

SEQ ID NO: 5865716 - DNA, 25 bp, Homo sapien
ctgaccccgcgctatacgccgttcc

SEQ ID NO: 5865717 - DNA, 25 bp, Homo sapien
gaggggaccgtccgcgtaaccagct

SEQ ID NO: 5865718 - DNA, 25 bp, Homo sapien
cttccaacgccgtgcaacggtcgcg

SEQ ID NO: 5865719 - DNA, 25 bp, Homo sapien
gctgcgcgtcgcgacatcacgtctc

SEQ ID NO: 5865720 - DNA, 25 bp, Homo sapien
tggccccatacgcggtcgttcaccc

SEQ ID NO: 5865721 - DNA, 25 bp, Homo sapien
gtggtcctctcgcggtacggcggta

SEQ ID NO: 5865722 - DNA, 25 bp, Homo sapien
gacggagcgaagtcgcgtaccgcca

SEQ ID NO: 5865723 - DNA, 25 bp, Homo sapien
tcccgccaaccgtacgcgtctgacc

SEQ ID NO: 5865724 - DNA, 25 bp, Homo sapien
gggggctatcatgcgcgccgatgca

SEQ ID NO: 5865725 - DNA, 25 bp, Homo sapien
ggcaacgtccggacgtctacaccgg

SEQ ID NO: 5865726 - DNA, 25 bp, Homo sapien
gattgcgacgcacccgctaccggca

SEQ ID NO: 5865727 - DNA, 25 bp, Homo sapien
tggtgtctattcgcaccggcgcccg

SEQ ID NO: 5865728 - DNA, 25 bp, Homo sapien
ccggcccctatgcttcgcggacgaa

SEQ ID NO: 5865729 - DNA, 25 bp, Homo sapien
gggacgcgaccggcgtataagcgct

SEQ ID NO: 5865730 - DNA, 25 bp, Homo sapien
aaccactagacgctcgcgcgcctcg

SEQ ID NO: 5865731 - DNA, 25 bp, Homo sapien
gccacgggacgtcggtcgaagtctc

SEQ ID NO: 5865732 - DNA, 25 bp, Homo sapien
agacggtcggccgaacgtagcaggg

SEQ ID NO: 5865733 - DNA, 25 bp, Homo sapien
atctcggttcgccgactagcggccg

SEQ ID NO: 5865734 - DNA, 25 bp, Homo sapien
tcgagggactagtccgcggtcccca

SEQ ID NO: 5865735 - DNA, 25 bp, Homo sapien
gcagcacgaccgtatacggcggacg

SEQ ID NO: 5865736 - DNA, 25 bp, Homo sapien
tgggtcgactcgatacggcctccgc

SEQ ID NO: 5865737 - DNA, 25 bp, Homo sapien
ggctctgcgtcgtgcgctatcggac

SEQ ID NO: 5865738 - DNA, 25 bp, Homo sapien
tcccccgcggcgtaacggttagcga

SEQ ID NO: 5865739 - DNA, 25 bp, Homo sapien
caccggtagccgacgtacgggtgag

SEQ ID NO: 5865740 - DNA, 25 bp, Homo sapien
acccgaagcgctaggcgtagcggtc

SEQ ID NO: 5865741 - DNA, 25 bp, Homo sapien
ggaagagtacgaccgcgcagtgccg

SEQ ID NO: 5865742 - DNA, 25 bp, Homo sapien
gggcggcgatctacgggtgaacacc

SEQ ID NO: 5865743 - DNA, 25 bp, Homo sapien
acgggcacgagtccgaacgggcact

SEQ ID NO: 5865744 - DNA, 25 bp, Homo sapien
ccttgcaacgttcccgcggctcctc

SEQ ID NO: 5865745 - DNA, 25 bp, Homo sapien
tcacccctcggcgtatcgtcgtcgc

SEQ ID NO: 5865746 - DNA, 25 bp, Homo sapien
caccttcgtgccgatgcgagacggc

SEQ ID NO: 5865747 - DNA, 25 bp, Homo sapien
atggggccggacgtatgcggactgc

SEQ ID NO: 5865748 - DNA, 25 bp, Homo sapien
aggcacataggaccgccggggactg

SEQ ID NO: 5865749 - DNA, 25 bp, Homo sapien
acccgtcgcgacataggggggtgca

SEQ ID NO: 5865750 - DNA, 25 bp, Homo sapien
ggaccatatcgcgcccgttgacgcg

SEQ ID NO: 5865751 - DNA, 25 bp, Homo sapien
tccctcccgtacggcacgtgtgcac

SEQ ID NO: 5865752 - DNA, 25 bp, Homo sapien
cactgagtcgtacgctcgtgggggc

SEQ ID NO: 5865753 - DNA, 25 bp, Homo sapien
ttcggctatccgtgcgcgccacagg

SEQ ID NO: 5865754 - DNA, 25 bp, Homo sapien
gcggaggtcccgtagacgctaccac

SEQ ID NO: 5865755 - DNA, 25 bp, Homo sapien
gccgtctctagcgcgccgaagatgc

SEQ ID NO: 5865756 - DNA, 25 bp, Homo sapien
tgtgctccgcgggggtatacgggtg

SEQ ID NO: 5865757 - DNA, 25 bp, Homo sapien
cccgggtaatgcggacgcgtctgag

SEQ ID NO: 5865758 - DNA, 25 bp, Homo sapien
gccaaaaggcgcgtatgtcgcgggc

SEQ ID NO: 5865759 - DNA, 25 bp, Homo sapien
cgcgactcgatagcggcccaccaga

SEQ ID NO: 5865760 - DNA, 25 bp, Homo sapien
gagcgggtcgcgtcgttacggcgat

SEQ ID NO: 5865761 - DNA, 25 bp, Homo sapien
ccggtcggcgcgtatgagacgaggt

SEQ ID NO: 5865762 - DNA, 25 bp, Homo sapien
tggttctcgttacacgcgggccggc

SEQ ID NO: 5865763 - DNA, 25 bp, Homo sapien
tcggccgggtcgcgtatacagccga

SEQ ID NO: 5865764 - DNA, 25 bp, Homo sapien
gccccatcgacgctaggctcgcaga

SEQ ID NO: 5865765 - DNA, 25 bp, Homo sapien
tccgtttgtacgtcggtcgccgggc

SEQ ID NO: 5865766 - DNA, 25 bp, Homo sapien
cacctgatccgcgccctagacgagc

SEQ ID NO: 5865767 - DNA, 25 bp, Homo sapien
cgcatgcgcggtcaatacgacgccc

SEQ ID NO: 5865768 - DNA, 25 bp, Homo sapien
ttgcggcggtcgtacgcgtgcatcg

SEQ ID NO: 5865769 - DNA, 25 bp, Homo sapien
agggctctcgcgtacgcctgtgacc

SEQ ID NO: 5865770 - DNA, 25 bp, Homo sapien
agagcgacgcgacctacggtcggct

SEQ ID NO: 5865771 - DNA, 25 bp, Homo sapien
cccccacgcgcgatatatccccgca

SEQ ID NO: 5865772 - DNA, 25 bp, Homo sapien
tggtccctacgattccgcgcagcgc

SEQ ID NO: 5865773 - DNA, 25 bp, Homo sapien
ccggggtacggtacgcgtcatcgag

SEQ ID NO: 5865774 - DNA, 25 bp, Homo sapien
cctcgcgcgcgactaggtccaagca

SEQ ID NO: 5865775 - DNA, 25 bp, Homo sapien
cacggcgcgacgtagaccgtatccc

SEQ ID NO: 5865776 - DNA, 25 bp, Homo sapien
ctgacgcgcgagtatactcgggccg

SEQ ID NO: 5865777 - DNA, 25 bp, Homo sapien
cactggctccgcgctatcggggaga

SEQ ID NO: 5865778 - DNA, 25 bp, Homo sapien
cgtatccgcgtacggtacacggcgc

SEQ ID NO: 5865779 - DNA, 25 bp, Homo sapien
gaccggatagggtcgcgctcagcac

SEQ ID NO: 5865780 - DNA, 25 bp, Homo sapien
ccaagaaagcggtcgcgaggtcggc

SEQ ID NO: 5865781 - DNA, 25 bp, Homo sapien
aggagccgggttgacgcacccggat

SEQ ID NO: 5865782 - DNA, 25 bp, Homo sapien
aggtgtcggcgtataagggcggggc

SEQ ID NO: 5865783 - DNA, 25 bp, Homo sapien
gcggagatcgcgcgtaagggcctca

SEQ ID NO: 5865784 - DNA, 25 bp, Homo sapien
gcaacgtcgcccctacgcagcgcta

SEQ ID NO: 5865785 - DNA, 25 bp, Homo sapien
tctgcgacgcggtcgttaaggcccg

SEQ ID NO: 5865786 - DNA, 25 bp, Homo sapien
caccccccgcgatacgcgtgattgg

SEQ ID NO: 5865787 - DNA, 25 bp, Homo sapien
atgggccgggcgccgtactacacct

SEQ ID NO: 5865788 - DNA, 25 bp, Homo sapien
tatgcgccgcgcgacttactgcggg

SEQ ID NO: 5865789 - DNA, 25 bp, Homo sapien
ctggctgactagctacgcgcgaccg

SEQ ID NO: 5865790 - DNA, 25 bp, Homo sapien
ggcggctcgcgcataggtacgcatg

SEQ ID NO: 5865791 - DNA, 25 bp, Homo sapien
gcgccgaactatcgcgcgaacgtgc

SEQ ID NO: 5865792 - DNA, 25 bp, Homo sapien
cgcgattcggtatcacgcggctgcg

SEQ ID NO: 5865793 - DNA, 25 bp, Homo sapien
cggccgctaactcgcgcgtaggttg

SEQ ID NO: 5865794 - DNA, 25 bp, Homo sapien
gcccgtagttacgcgtcgaagcccg

SEQ ID NO: 5865795 - DNA, 25 bp, Homo sapien
tccctgacccgtcatcgcgtacggg

SEQ ID NO: 5865796 - DNA, 25 bp, Homo sapien
cgccctcgtatacggttcggctcgg

SEQ ID NO: 5865797 - DNA, 25 bp, Homo sapien
gactggaacgaccgacgtccgggtc

SEQ ID NO: 5865798 - DNA, 25 bp, Homo sapien
gcggtgacggagcgatacgggtgct

SEQ ID NO: 5865799 - DNA, 25 bp, Homo sapien
ggctgcttaccgtcgttcggtccgc

SEQ ID NO: 5865800 - DNA, 25 bp, Homo sapien
cccccggatccacgaccgatcgaca

SEQ ID NO: 5865801 - DNA, 25 bp, Homo sapien
gaagggtcgcccgtacggagtcgag

SEQ ID NO: 5865802 - DNA, 25 bp, Homo sapien
ccgatccgtctcgcgctagcgatgc

SEQ ID NO: 5865803 - DNA, 25 bp, Homo sapien
gacctgcgcaagtccgctaggacgg

SEQ ID NO: 5865804 - DNA, 25 bp, Homo sapien
gctgcctggttgcgcggtcagcgat

SEQ ID NO: 5865805 - DNA, 25 bp, Homo sapien
ctggcggtatcgggcgcgagtttgc

SEQ ID NO: 5865806 - DNA, 25 bp, Homo sapien
tcgcgccggtcggcgagtagattcc

SEQ ID NO: 5865807 - DNA, 25 bp, Homo sapien
ccttccgactatcggacgcggcctg

SEQ ID NO: 5865808 - DNA, 25 bp, Homo sapien
tcggccgcccgaccgttacgtttgc

SEQ ID NO: 5865809 - DNA, 25 bp, Homo sapien
acaagggtaagtcgtcgcgcggccc

SEQ ID NO: 5865810 - DNA, 25 bp, Homo sapien
ggcctgccgttaagacgcggcgttc

SEQ ID NO: 5865811 - DNA, 25 bp, Homo sapien
ctcccatcattctcgcgcgggggga

SEQ ID NO: 5865812 - DNA, 25 bp, Homo sapien
gcgggatatgcgtcggagggtcgct

SEQ ID NO: 5865813 - DNA, 25 bp, Homo sapien
agcgccccgactatagccgtcggac

SEQ ID NO: 5865814 - DNA, 25 bp, Homo sapien
gagcgtatgcgctagcgggtgctgg

SEQ ID NO: 5865815 - DNA, 25 bp, Homo sapien
ggctaccgagacgcgacgtcgacag

SEQ ID NO: 5865816 - DNA, 25 bp, Homo sapien
gacgctacgtacccgcggaagtccg

SEQ ID NO: 5865817 - DNA, 25 bp, Homo sapien
gacagctaatagcgccgcggcccga

SEQ ID NO: 5865818 - DNA, 25 bp, Homo sapien
ggtggggcctcgcgataaggtgcag

SEQ ID NO: 5865819 - DNA, 25 bp, Homo sapien
gtagcccgtcgcggacatcgccagt

SEQ ID NO: 5865820 - DNA, 25 bp, Homo sapien
ggagccggagcgtcgtacgttggac

SEQ ID NO: 5865821 - DNA, 25 bp, Homo sapien
atttagcgtcaacccggcgccggcc

SEQ ID NO: 5865822 - DNA, 25 bp, Homo sapien
atgccgtcgcggctctacgcacgtg

SEQ ID NO: 5865823 - DNA, 25 bp, Homo sapien
tctcctgtcgttcgcgacggaggcc

SEQ ID NO: 5865824 - DNA, 25 bp, Homo sapien
ccctaacggtctatcgtgcgccggg

SEQ ID NO: 5865825 - DNA, 25 bp, Homo sapien
cggcgcatccgcggtcgatgaccta

SEQ ID NO: 5865826 - DNA, 25 bp, Homo sapien
gggacaacgtactacgcgcgacccg

SEQ ID NO: 5865827 - DNA, 25 bp, Homo sapien
ctagctcgaaggtacgtcgcgggcg

SEQ ID NO: 5865828 - DNA, 25 bp, Homo sapien
gcgcgagcgctagcgtacaccgact

SEQ ID NO: 5865829 - DNA, 25 bp, Homo sapien
cggaccatcgtccgcgcgagtccta

SEQ ID NO: 5865830 - DNA, 25 bp, Homo sapien
aagggccgtcctatatcgcggcccg

SEQ ID NO: 5865831 - DNA, 25 bp, Homo sapien
cctacagcgacccgctatctgcgcg

SEQ ID NO: 5865832 - DNA, 25 bp, Homo sapien
ggatccccgcgtatgtcgtcgcagc

SEQ ID NO: 5865833 - DNA, 25 bp, Homo sapien
gcgcaacgcgttacgtcctccagcg

SEQ ID NO: 5865834 - DNA, 25 bp, Homo sapien
cgcggggtagtacgctcggacgagt

SEQ ID NO: 5865835 - DNA, 25 bp, Homo sapien
agcctgcgcgtcgcgcttacgtacg

SEQ ID NO: 5865836 - DNA, 25 bp, Homo sapien
gttccactaccggtacgcgctgccg

SEQ ID NO: 5865837 - DNA, 25 bp, Homo sapien
ggcgactcgcttcgagcgaacggtg

SEQ ID NO: 5865838 - DNA, 25 bp, Homo sapien
cggtgttccgactaggcgcgctagc

SEQ ID NO: 5865839 - DNA, 25 bp, Homo sapien
gcccaggcaatctagcgcgacctcg

SEQ ID NO: 5865840 - DNA, 25 bp, Homo sapien
ctggccatcgagacgaccgagccac

SEQ ID NO: 5865841 - DNA, 25 bp, Homo sapien
tggtgaggcgtacgagcgttcccgc

SEQ ID NO: 5865842 - DNA, 25 bp, Homo sapien
ccgttcggagtagtcgcgagccacc

SEQ ID NO: 5865843 - DNA, 25 bp, Homo sapien
gcatgatacggcgctacgcggcgca

SEQ ID NO: 5865844 - DNA, 25 bp, Homo sapien
cccgactccacgtaacgcgtcaccg

SEQ ID NO: 5865845 - DNA, 25 bp, Homo sapien
cgtggctacgcgcctaacgaagcgg

SEQ ID NO: 5865846 - DNA, 25 bp, Homo sapien
cgcctccgatccggacgtattccgc

SEQ ID NO: 5865847 - DNA, 25 bp, Homo sapien
cgtgggcccgtatacgcgtcgctac

SEQ ID NO: 5865848 - DNA, 25 bp, Homo sapien
cggacgtcgcgtgtccggtgtaacc

SEQ ID NO: 5865849 - DNA, 25 bp, Homo sapien
ccgccatacggcgtaaggcgctggt

SEQ ID NO: 5865850 - DNA, 25 bp, Homo sapien
tccgcgcttacgtccgacgcagtgc

SEQ ID NO: 5865851 - DNA, 25 bp, Homo sapien
ctgaccccgtcgcgtcctaatccgc

SEQ ID NO: 5865852 - DNA, 25 bp, Homo sapien
gtccctggccgtaccgcgaagatgc

SEQ ID NO: 5865853 - DNA, 25 bp, Homo sapien
ccggacacccgaactagcgtgtgcg

SEQ ID NO: 5865854 - DNA, 25 bp, Homo sapien
ggtgattacggatcgcgcacgcggg

SEQ ID NO: 5865855 - DNA, 25 bp, Homo sapien
cgccttcgtaacggcgagagggtgc

SEQ ID NO: 5865856 - DNA, 25 bp, Homo sapien
atgcggaatcggaccgccgggtgac

SEQ ID NO: 5865857 - DNA, 25 bp, Homo sapien
agcggcgcgtcggtaaccggtactc

SEQ ID NO: 5865858 - DNA, 25 bp, Homo sapien
ttcagccgctacctagtcgggggcg

SEQ ID NO: 5865859 - DNA, 25 bp, Homo sapien
agtcgcacgtccgtacgcgccactc

SEQ ID NO: 5865860 - DNA, 25 bp, Homo sapien
gcccaggttacgcgccttagctccg

SEQ ID NO: 5865861 - DNA, 25 bp, Homo sapien
acggtgcgacgtccggtatcggacc

SEQ ID NO: 5865862 - DNA, 25 bp, Homo sapien
ctgcctcccgtgacgcgaagtctcc

SEQ ID NO: 5865863 - DNA, 25 bp, Homo sapien
ctccggacggcgcttacgtcccaga

SEQ ID NO: 5865864 - DNA, 25 bp, Homo sapien
atgaagcgcgacatcgcgcgcgctg

SEQ ID NO: 5865865 - DNA, 25 bp, Homo sapien
ccgctagtaggtcgcgtacgcgggt

SEQ ID NO: 5865866 - DNA, 25 bp, Homo sapien
ccgcacatcgcgcacgaccctcttc

SEQ ID NO: 5865867 - DNA, 25 bp, Homo sapien
ccacaccagtaccgcgcgtagtggg

SEQ ID NO: 5865868 - DNA, 25 bp, Homo sapien
cccctaccgtaatcgcgctgcggga

SEQ ID NO: 5865869 - DNA, 25 bp, Homo sapien
gctatcatagcgcggtcggggccga

SEQ ID NO: 5865870 - DNA, 25 bp, Homo sapien
ctgaggtttcgtcgtacgcgcgccg

SEQ ID NO: 5865871 - DNA, 25 bp, Homo sapien
aggcgtcgacatttacgcgcgggcc

SEQ ID NO: 5865872 - DNA, 25 bp, Homo sapien
ggcagccgattctacgcgccccagt

SEQ ID NO: 5865873 - DNA, 25 bp, Homo sapien
taggggcgcggtacgcgtaccgaac

SEQ ID NO: 5865874 - DNA, 25 bp, Homo sapien
cgagcttcgcgcgtatccacggacc

SEQ ID NO: 5865875 - DNA, 25 bp, Homo sapien
cggaaccgtgtcgcgctagtgcctc

SEQ ID NO: 5865876 - DNA, 25 bp, Homo sapien
gctggcccgatacgttacgggcgtc

SEQ ID NO: 5865877 - DNA, 25 bp, Homo sapien
ggggctggtcgtacggtcgtctctc

SEQ ID NO: 5865878 - DNA, 25 bp, Homo sapien
cccacgcgttcgcctagatgcggtc

SEQ ID NO: 5865879 - DNA, 25 bp, Homo sapien
cgcggcgtgacgcgcgctactcaaa

SEQ ID NO: 5865880 - DNA, 25 bp, Homo sapien
tctgcccgtcgatcgaccctggtgg

SEQ ID NO: 5865881 - DNA, 25 bp, Homo sapien
cgctacctccgcgatacgtcccctc

SEQ ID NO: 5865882 - DNA, 25 bp, Homo sapien
agctgccgcgctacgagaacgctgc

SEQ ID NO: 5865883 - DNA, 25 bp, Homo sapien
ggtcgagctcacgcgacgactggtg

SEQ ID NO: 5865884 - DNA, 25 bp, Homo sapien
gggagcggtacgaaacgcggagctg

SEQ ID NO: 5865885 - DNA, 25 bp, Homo sapien
cggcctccgtcggaccgatggtgta

SEQ ID NO: 5865886 - DNA, 25 bp, Homo sapien
atcgctatcgacgtagcggggccgc

SEQ ID NO: 5865887 - DNA, 25 bp, Homo sapien
aagcggcgtcgcacctaacccggca

SEQ ID NO: 5865888 - DNA, 25 bp, Homo sapien
tctaacaggtacgaccgcggcggcg

SEQ ID NO: 5865889 - DNA, 25 bp, Homo sapien
tgcgaccgatacgcgtacgtccggc

SEQ ID NO: 5865890 - DNA, 25 bp, Homo sapien
gagagtgcccggtacgtaccggcgt

SEQ ID NO: 5865891 - DNA, 25 bp, Homo sapien
ggcgagtacgccgcacctacgtctg

SEQ ID NO: 5865892 - DNA, 25 bp, Homo sapien
gggttgccgccgtcatacgggttcg

SEQ ID NO: 5865893 - DNA, 25 bp, Homo sapien
ggaccataggcggatccgcccacac

SEQ ID NO: 5865894 - DNA, 25 bp, Homo sapien
ggcgaatcctataggcgcgggcgca

SEQ ID NO: 5865895 - DNA, 25 bp, Homo sapien
cacgcggggtacaccgacgcaatgc

SEQ ID NO: 5865896 - DNA, 25 bp, Homo sapien
cggcacaccgttgtacgcgtgggct

SEQ ID NO: 5865897 - DNA, 25 bp, Homo sapien
tcaggcgcgatacgcgtgagtcggc

SEQ ID NO: 5865898 - DNA, 25 bp, Homo sapien
gcagggccgcgtaacgcaacagggt

SEQ ID NO: 5865899 - DNA, 25 bp, Homo sapien
tcgccgctagccgtcggcagaagag

SEQ ID NO: 5865900 - DNA, 25 bp, Homo sapien
cgcataacggttatcgggggcccgc

SEQ ID NO: 5865901 - DNA, 25 bp, Homo sapien
tgcatgcgttaccgcgcgtgtcggc

SEQ ID NO: 5865902 - DNA, 25 bp, Homo sapien
cgcgcgaagcgcgttccgtttaggg

SEQ ID NO: 5865903 - DNA, 25 bp, Homo sapien
ggacgtgtccggcgtagacaccgac

SEQ ID NO: 5865904 - DNA, 25 bp, Homo sapien
ggtactggtccaatcgcgaggccgc

SEQ ID NO: 5865905 - DNA, 25 bp, Homo sapien
ggtacagtgcgtcgacgggcgcctt

SEQ ID NO: 5865906 - DNA, 25 bp, Homo sapien
gccgtagcgcgagttatcgcggcag

SEQ ID NO: 5865907 - DNA, 25 bp, Homo sapien
tgagccagacgtcttcgcgccctcg

SEQ ID NO: 5865908 - DNA, 25 bp, Homo sapien
ctcggtacgcgcgtccaaggggaga

SEQ ID NO: 5865909 - DNA, 25 bp, Homo sapien
cctccagcgtacgacggtcctcgga

SEQ ID NO: 5865910 - DNA, 25 bp, Homo sapien
cacccttacctcgcgacgagaggcg

SEQ ID NO: 5865911 - DNA, 25 bp, Homo sapien
gagcgcccggatttacgcgacaccc

SEQ ID NO: 5865912 - DNA, 25 bp, Homo sapien
cgcaacgtacgccgtcctaccccac

SEQ ID NO: 5865913 - DNA, 25 bp, Homo sapien
cccggcccggtcgtcaacgtacaga

SEQ ID NO: 5865914 - DNA, 25 bp, Homo sapien
tgcggcccgtcgcgtatcgttaggg

SEQ ID NO: 5865915 - DNA, 25 bp, Homo sapien
gcgtactagccgtcggtcgacgggt

SEQ ID NO: 5865916 - DNA, 25 bp, Homo sapien
atccgtgggtcgtaacgcggggctc

SEQ ID NO: 5865917 - DNA, 25 bp, Homo sapien
acggcacgcctcgagtacggaggtc

SEQ ID NO: 5865918 - DNA, 25 bp, Homo sapien
aggcgagcgaccgtatacgcccctc

SEQ ID NO: 5865919 - DNA, 25 bp, Homo sapien
cgaagctacggcgactaccgccgac

SEQ ID NO: 5865920 - DNA, 25 bp, Homo sapien
gacgcgatatgtcgacgcgcgtcgc

SEQ ID NO: 5865921 - DNA, 25 bp, Homo sapien
gtagggtgtcgcgcgacgacctacc

SEQ ID NO: 5865922 - DNA, 25 bp, Homo sapien
ttgcgcgtctcttacgcgcgctcgc

SEQ ID NO: 5865923 - DNA, 25 bp, Homo sapien
agtggccggccatcctacgcaggct

SEQ ID NO: 5865924 - DNA, 25 bp, Homo sapien
gccggtcgcgcacgacatactgggt

SEQ ID NO: 5865925 - DNA, 25 bp, Homo sapien
cgcctccggtacgactgacgtcgtg

SEQ ID NO: 5865926 - DNA, 25 bp, Homo sapien
ggatcggcgcaccgtacgagctcac

SEQ ID NO: 5865927 - DNA, 25 bp, Homo sapien
gccgtagggttcgcgactcgcaggt

SEQ ID NO: 5865928 - DNA, 25 bp, Homo sapien
gaatcacgccgtccgagtagggcgg

SEQ ID NO: 5865929 - DNA, 25 bp, Homo sapien
tacggtcgtgaacgggccgcaccga

SEQ ID NO: 5865930 - DNA, 25 bp, Homo sapien
cgggttggtacgttagcgctgcgcc

SEQ ID NO: 5865931 - DNA, 25 bp, Homo sapien
cgccagcacgccaaccgtaacccac

SEQ ID NO: 5865932 - DNA, 25 bp, Homo sapien
gagaaggccgcgaactgacccgcct

SEQ ID NO: 5865933 - DNA, 25 bp, Homo sapien
ccccatcgtaacactcgcgcctcgc

SEQ ID NO: 5865934 - DNA, 25 bp, Homo sapien
gcgtgtcgttacggtaggccccctg

SEQ ID NO: 5865935 - DNA, 25 bp, Homo sapien
taccccacggcgcgcgtagctgctt

SEQ ID NO: 5865936 - DNA, 25 bp, Homo sapien
cattgcggcgcgtcgacatgctccc

SEQ ID NO: 5865937 - DNA, 25 bp, Homo sapien
gctccttagcgtcgaccgcagagcc

SEQ ID NO: 5865938 - DNA, 25 bp, Homo sapien
cgaccaccgacgccggtataggctc

SEQ ID NO: 5865939 - DNA, 25 bp, Homo sapien
gacccgctatacgcgcgggccatga

SEQ ID NO: 5865940 - DNA, 25 bp, Homo sapien
cccctcgatacggtcgcgagttggc

SEQ ID NO: 5865941 - DNA, 25 bp, Homo sapien
acctggcgcgtccgaatgagcgacc

SEQ ID NO: 5865942 - DNA, 25 bp, Homo sapien
ggacgctacgtcgacgccaccggta

SEQ ID NO: 5865943 - DNA, 25 bp, Homo sapien
ggaccgaccgttagcgggtgtcacg

SEQ ID NO: 5865944 - DNA, 25 bp, Homo sapien
cacccgccttagtcgaccgccgtac

SEQ ID NO: 5865945 - DNA, 25 bp, Homo sapien
cccggggcgctcgctacgacagatt

SEQ ID NO: 5865946 - DNA, 25 bp, Homo sapien
tcgcgcttccgacggtcgtaggtgg

SEQ ID NO: 5865947 - DNA, 25 bp, Homo sapien
atgcgggacggccgttacggatcgc

SEQ ID NO: 5865948 - DNA, 25 bp, Homo sapien
acccgggacgttacgagcgctgagg

SEQ ID NO: 5865949 - DNA, 25 bp, Homo sapien
gcgagtctacgctggtacgtcgccg

SEQ ID NO: 5865950 - DNA, 25 bp, Homo sapien
gacgggtacgggtcgacgtacgctc

SEQ ID NO: 5865951 - DNA, 25 bp, Homo sapien
cgcccccgtaatccgcggcaggaaa

SEQ ID NO: 5865952 - DNA, 25 bp, Homo sapien
ccctgccgcgataggtgacactccg

SEQ ID NO: 5865953 - DNA, 25 bp, Homo sapien
cggcgcgagtcgtacggccaggaat

SEQ ID NO: 5865954 - DNA, 25 bp, Homo sapien
ggggcgcggcgatccgttagttgga

SEQ ID NO: 5865955 - DNA, 25 bp, Homo sapien
gaaggccgtagtatcgtccgcgccg

SEQ ID NO: 5865956 - DNA, 25 bp, Homo sapien
ccccctgtcccgttacgccagcttc

SEQ ID NO: 5865957 - DNA, 25 bp, Homo sapien
tcaggcacgcggtctcgtaccgggt

SEQ ID NO: 5865958 - DNA, 25 bp, Homo sapien
cacggcaacgggcgcgctacagtag

SEQ ID NO: 5865959 - DNA, 25 bp, Homo sapien
gcgaccacgtatcggctcggctggt

SEQ ID NO: 5865960 - DNA, 25 bp, Homo sapien
accgccataccgcttgcgcgatccg

SEQ ID NO: 5865961 - DNA, 25 bp, Homo sapien
gcgcgcgataccgcgcaaggactct

SEQ ID NO: 5865962 - DNA, 25 bp, Homo sapien
gctccggcgaatagccgtcatcccg

SEQ ID NO: 5865963 - DNA, 25 bp, Homo sapien
accgcgacgcgctagggggtctttg

SEQ ID NO: 5865964 - DNA, 25 bp, Homo sapien
tcccaggacgaaccggctagcccct

SEQ ID NO: 5865965 - DNA, 25 bp, Homo sapien
cgaaggtgtaccgacgcgcggcaga

SEQ ID NO: 5865966 - DNA, 25 bp, Homo sapien
tccggctccgcgtacgctaggacct

SEQ ID NO: 5865967 - DNA, 25 bp, Homo sapien
ttgaggcgaatggcgcgtctcgcgg

SEQ ID NO: 5865968 - DNA, 25 bp, Homo sapien
gggagctacgggaccgtacttggcg

SEQ ID NO: 5865969 - DNA, 25 bp, Homo sapien
ccatgtcgagtcggtacggcagggc

SEQ ID NO: 5865970 - DNA, 25 bp, Homo sapien
caactcacgcgcgccgtatgtcgcc

SEQ ID NO: 5865971 - DNA, 25 bp, Homo sapien
tggcagacgcgcgactagcgtgcct

SEQ ID NO: 5865972 - DNA, 25 bp, Homo sapien
gagcacaggttcgacgcgcgaccac

SEQ ID NO: 5865973 - DNA, 25 bp, Homo sapien
atcgtccttcgccgcgtgacacggc

SEQ ID NO: 5865974 - DNA, 25 bp, Homo sapien
ctaggcacccatagcgcgacccctc

SEQ ID NO: 5865975 - DNA, 25 bp, Homo sapien
tgagcgatcggtgcgacccgatgcc

SEQ ID NO: 5865976 - DNA, 25 bp, Homo sapien
gcctcccgcgctgaacgttgggcat

SEQ ID NO: 5865977 - DNA, 25 bp, Homo sapien
gtcgcgcaattcgctcgggtcgtcg

SEQ ID NO: 5865978 - DNA, 25 bp, Homo sapien
cacctggcgttacgcgcgagtctgg

SEQ ID NO: 5865979 - DNA, 25 bp, Homo sapien
cagacctatcgaccgcggggccact

SEQ ID NO: 5865980 - DNA, 25 bp, Homo sapien
ccctggccggtacgatcgagacacg

SEQ ID NO: 5865981 - DNA, 25 bp, Homo sapien
taccgacggtctcgaccgtaccgcg

SEQ ID NO: 5865982 - DNA, 25 bp, Homo sapien
accggctccgcggtaacgcgatcag

SEQ ID NO: 5865983 - DNA, 25 bp, Homo sapien
cgagaccggcgcgatctactgggct

SEQ ID NO: 5865984 - DNA, 25 bp, Homo sapien
cccgtgcgcggcgtctaacaaccgt

SEQ ID NO: 5865985 - DNA, 25 bp, Homo sapien
tcacctcgcggcatagtcggctggg

SEQ ID NO: 5865986 - DNA, 25 bp, Homo sapien
agggcatcacggtacgccggagtcc

SEQ ID NO: 5865987 - DNA, 25 bp, Homo sapien
aacgagtcgtacgcgacgcccacgc

SEQ ID NO: 5865988 - DNA, 25 bp, Homo sapien
cccggcccgattgacgcgggtatga

SEQ ID NO: 5865989 - DNA, 25 bp, Homo sapien
cgtggacgtaccgcgtcttccggac

SEQ ID NO: 5865990 - DNA, 25 bp, Homo sapien
caggagtcgcgtaccgcctctgctg

SEQ ID NO: 5865991 - DNA, 25 bp, Homo sapien
ttcaggagttaccgccgacgcgccc

SEQ ID NO: 5865992 - DNA, 25 bp, Homo sapien
gaggagtatacccggtcgcgacccc

SEQ ID NO: 5865993 - DNA, 25 bp, Homo sapien
gcgctgcgcgttacgtcgaacgacc

SEQ ID NO: 5865994 - DNA, 25 bp, Homo sapien
cgttgaaggcgcgttaggcgggtcc

SEQ ID NO: 5865995 - DNA, 25 bp, Homo sapien
aaccgtcgacccgatcgtcgctggg

SEQ ID NO: 5865996 - DNA, 25 bp, Homo sapien
cccgcggcgtacgactagactaggg

SEQ ID NO: 5865997 - DNA, 25 bp, Homo sapien
tcggatatacccgcgcgaagccccc

SEQ ID NO: 5865998 - DNA, 25 bp, Homo sapien
agcacccgaaccgcggatgggcaca

SEQ ID NO: 5865999 - DNA, 25 bp, Homo sapien
aggcgattcgcgcgggtatcctggg

SEQ ID NO: 5866000 - DNA, 25 bp, Homo sapien
ttaggctacccgtccgacgcccctg

SEQ ID NO: 5866001 - DNA, 25 bp, Homo sapien
ggggcgaggtcgaccgtattgcgag

SEQ ID NO: 5866002 - DNA, 25 bp, Homo sapien
gagtgtacgcatcggtgcgaggggc

SEQ ID NO: 5866003 - DNA, 25 bp, Homo sapien
cccgcaccgcggttatacgggccaa

SEQ ID NO: 5866004 - DNA, 25 bp, Homo sapien
tactgcacgcgggtctacggagccg

SEQ ID NO: 5866005 - DNA, 25 bp, Homo sapien
tagggccatattcgcgcgggagccg

SEQ ID NO: 5866006 - DNA, 25 bp, Homo sapien
gcccagcgctacggtcgtaggttcg

SEQ ID NO: 5866007 - DNA, 25 bp, Homo sapien
ttgtgcggtacgaacgaccccgcgc

SEQ ID NO: 5866008 - DNA, 25 bp, Homo sapien
gccacggtaggcgacgcgtataggc

SEQ ID NO: 5866009 - DNA, 25 bp, Homo sapien
tagggcacggccgcacgatgtgagc

SEQ ID NO: 5866010 - DNA, 25 bp, Homo sapien
agtcgcgtacgtctcgcgccaacgg

SEQ ID NO: 5866011 - DNA, 25 bp, Homo sapien
ggtcgcccgcgattagcgacgccaa

SEQ ID NO: 5866012 - DNA, 25 bp, Homo sapien
gtctcgtcacgtccgctcgtgctcg

SEQ ID NO: 5866013 - DNA, 25 bp, Homo sapien
ctcgactcggtgcgaccgagtgctg

SEQ ID NO: 5866014 - DNA, 25 bp, Homo sapien
gttctcccgggttgatcggcgggct

SEQ ID NO: 5866015 - DNA, 25 bp, Homo sapien
cgtccgtacggtcggatcggatccg

SEQ ID NO: 5866016 - DNA, 25 bp, Homo sapien
gcgaagagtcgatcgggcgctgcgt

SEQ ID NO: 5866017 - DNA, 25 bp, Homo sapien
aagcagctacgcgcgccgtggggta

SEQ ID NO: 5866018 - DNA, 25 bp, Homo sapien
ggcggcgaccgcgcttaacgatgca

SEQ ID NO: 5866019 - DNA, 25 bp, Homo sapien
tgcatcggcgcgcatgatagccccc

SEQ ID NO: 5866020 - DNA, 25 bp, Homo sapien
ggagacttcgcgtcacgggaggcag

SEQ ID NO: 5866021 - DNA, 25 bp, Homo sapien
gcccgagtaggcgtacgcgtaacgc

SEQ ID NO: 5866022 - DNA, 25 bp, Homo sapien
gaccttgcgaccggttacgcggcca

SEQ ID NO: 5866023 - DNA, 25 bp, Homo sapien
gcagtccgcatacgtccggccccat

SEQ ID NO: 5866024 - DNA, 25 bp, Homo sapien
gtcggcggtagtcgccgtagcttcg

SEQ ID NO: 5866025 - DNA, 25 bp, Homo sapien
cagccactgccgaaacgcggagcca

SEQ ID NO: 5866026 - DNA, 25 bp, Homo sapien
cccagccgactatgccgcgaggtga

SEQ ID NO: 5866027 - DNA, 25 bp, Homo sapien
ggccattacgccggaccgacacacc

SEQ ID NO: 5866028 - DNA, 25 bp, Homo sapien
ccgcggtccactatcgcggtgtcac

SEQ ID NO: 5866029 - DNA, 25 bp, Homo sapien
cggcgcggacgatactacggccttc

SEQ ID NO: 5866030 - DNA, 25 bp, Homo sapien
ccgtcctagcggacttgcgcaggtc

SEQ ID NO: 5866031 - DNA, 25 bp, Homo sapien
ggcggttcggcgcgaatacgtaccc

SEQ ID NO: 5866032 - DNA, 25 bp, Homo sapien
cggctccgtagacccgcgtgcagta

SEQ ID NO: 5866033 - DNA, 25 bp, Homo sapien
ctcggtacggcgcgacataccgcgt

SEQ ID NO: 5866034 - DNA, 25 bp, Homo sapien
aggggctagccggttcgtcctggga

SEQ ID NO: 5866035 - DNA, 25 bp, Homo sapien
cgctggaggacgtaacgcgttgcgc

SEQ ID NO: 5866036 - DNA, 25 bp, Homo sapien
cgggcccgcattacgccgttacagg

SEQ ID NO: 5866037 - DNA, 25 bp, Homo sapien
tttcggcggcgtacgtcacgggagg

SEQ ID NO: 5866038 - DNA, 25 bp, Homo sapien
agcacccgtatcgctccgtcaccgc

SEQ ID NO: 5866039 - DNA, 25 bp, Homo sapien
gggtgtcgcgtaaatccgggcgctc

SEQ ID NO: 5866040 - DNA, 25 bp, Homo sapien
gcccggcgaccgacgtacaaacgga

SEQ ID NO: 5866041 - DNA, 25 bp, Homo sapien
aggcgtgacgattgaccgcgccgag

SEQ ID NO: 5866042 - DNA, 25 bp, Homo sapien
aggtcctagcgtacgcggagccgga

SEQ ID NO: 5866043 - DNA, 25 bp, Homo sapien
cagcagaggcggtacgcgactcctg

SEQ ID NO: 5866044 - DNA, 25 bp, Homo sapien
gggatacggtctacgtcgcgccgtg

SEQ ID NO: 5866045 - DNA, 25 bp, Homo sapien
tgctggattcgcgccgttcccgctg

SEQ ID NO: 5866046 - DNA, 25 bp, Homo sapien
gcagttaacgaccgcgtcgtgcgcc

SEQ ID NO: 5866047 - DNA, 25 bp, Homo sapien
tccgtagccgtctcgcgaatggccg

SEQ ID NO: 5866048 - DNA, 25 bp, Homo sapien
tctgagggtcgaccgctaggggcga

SEQ ID NO: 5866049 - DNA, 25 bp, Homo sapien
gatggggcccgaacgtcgagcgcta

SEQ ID NO: 5866050 - DNA, 25 bp, Homo sapien
ttggcccgtataaccgcggtgcggg

SEQ ID NO: 5866051 - DNA, 25 bp, Homo sapien
gtgctgagcgcgaccctatccggtc

SEQ ID NO: 5866052 - DNA, 25 bp, Homo sapien
ccgccctactcggacggcgtgattc

SEQ ID NO: 5866053 - DNA, 25 bp, Homo sapien
cgcctctcgtcgcgaggtaagggtg

SEQ ID NO: 5866054 - DNA, 25 bp, Homo sapien
cgccgatcgtctacgctcgtcccac

SEQ ID NO: 5866055 - DNA, 25 bp, Homo sapien
tgtcgatcggtcgtggatccggggg

SEQ ID NO: 5866056 - DNA, 25 bp, Homo sapien
ctcgccctaacgcgcgacgaagtgc

SEQ ID NO: 5866057 - DNA, 25 bp, Homo sapien
gaagggtaggcgcgacggggaacac

SEQ ID NO: 5866058 - DNA, 25 bp, Homo sapien
tcgggccgcggcgctattagctgtc

SEQ ID NO: 5866059 - DNA, 25 bp, Homo sapien
actccacgagagtcgaccgagcccg

SEQ ID NO: 5866060 - DNA, 25 bp, Homo sapien
cgccctcgaccggactcgtacactc

SEQ ID NO: 5866061 - DNA, 25 bp, Homo sapien
tccaactaacggatcgccgcgcccc

SEQ ID NO: 5866062 - DNA, 25 bp, Homo sapien
caccaccgtattgcgcccgcgctgt

SEQ ID NO: 5866063 - DNA, 25 bp, Homo sapien
tacaccatcggtccgacggaggccg

SEQ ID NO: 5866064 - DNA, 25 bp, Homo sapien
tggtgctacgcacgtcgcgctagcg

SEQ ID NO: 5866065 - DNA, 25 bp, Homo sapien
gtggggtaggacggcgtacgttgcg

SEQ ID NO: 5866066 - DNA, 25 bp, Homo sapien
ccgcgaagtatgcggcgaccgagac

SEQ ID NO: 5866067 - DNA, 25 bp, Homo sapien
gcggccccgctacgtcgatagcgat

SEQ ID NO: 5866068 - DNA, 25 bp, Homo sapien
ccgcatccgaacgctcgtacccacc

SEQ ID NO: 5866069 - DNA, 25 bp, Homo sapien
gctggacgtctaactcgcggctcgc

SEQ ID NO: 5866070 - DNA, 25 bp, Homo sapien
tctgggacgtaagcgccgtccggag

SEQ ID NO: 5866071 - DNA, 25 bp, Homo sapien
cacctaggtcgtagcgacgggcgag

SEQ ID NO: 5866072 - DNA, 25 bp, Homo sapien
tctccccgatagcgcggagccagtg

SEQ ID NO: 5866073 - DNA, 25 bp, Homo sapien
acccgcgtacgcgacctactagcgg

SEQ ID NO: 5866074 - DNA, 25 bp, Homo sapien
ctcctactaccgcgtcgtagcccgc

SEQ ID NO: 5866075 - DNA, 25 bp, Homo sapien
tgaggcccttacgcgcgatctccgc

SEQ ID NO: 5866076 - DNA, 25 bp, Homo sapien
cgggatgacggctattcgccggagc

SEQ ID NO: 5866077 - DNA, 25 bp, Homo sapien
gggacggcgtcccgtcatacaccac

SEQ ID NO: 5866078 - DNA, 25 bp, Homo sapien
agccgcgcgcgtagatcgtcagtgg

SEQ ID NO: 5866079 - DNA, 25 bp, Homo sapien
gatcggaccgtcccgcgttgttggg

SEQ ID NO: 5866080 - DNA, 25 bp, Homo sapien
gcccgcgacatacgcgccttttggc

SEQ ID NO: 5866081 - DNA, 25 bp, Homo sapien
cggatcgcgcaagcggtatggcggt

SEQ ID NO: 5866082 - DNA, 25 bp, Homo sapien
ggccaagctagtcgggcgaccgagt

SEQ ID NO: 5866083 - DNA, 25 bp, Homo sapien
gcatcttcgcggtacggccagggac

SEQ ID NO: 5866084 - DNA, 25 bp, Homo sapien
ggaatctactcgccgaccggcgcga

SEQ ID NO: 5866085 - DNA, 25 bp, Homo sapien
gcgagataggtgccggtcgtgcgtg

SEQ ID NO: 5866086 - DNA, 25 bp, Homo sapien
tgccggtagcgggtgcgtcgcaatc

SEQ ID NO: 5866087 - DNA, 25 bp, Homo sapien
ccctcgcgggcgaacgtactagagg

SEQ ID NO: 5866088 - DNA, 25 bp, Homo sapien
agcccgccgatcaacccgggagaac

SEQ ID NO: 5866089 - DNA, 25 bp, Homo sapien
ctactgtagcgcgcccgttgccgtg

SEQ ID NO: 5866090 - DNA, 25 bp, Homo sapien
catgcgcccgtcggacttaagcccg

SEQ ID NO: 5866091 - DNA, 25 bp, Homo sapien
atcgccgtaacgacgcgacccgctc

SEQ ID NO: 5866092 - DNA, 25 bp, Homo sapien
caaagaccccctagcgcgtcgcggt

SEQ ID NO: 5866093 - DNA, 25 bp, Homo sapien
cggatccgatccgaccgtacggacg

SEQ ID NO: 5866094 - DNA, 25 bp, Homo sapien
ctatggtagcgaacgaccgccggcg

SEQ ID NO: 5866095 - DNA, 25 bp, Homo sapien
gagagacgaccgtacgaccagcccc

SEQ ID NO: 5866096 - DNA, 25 bp, Homo sapien
agctggttacgcggacggtcccctc

SEQ ID NO: 5866097 - DNA, 25 bp, Homo sapien
cgccaagtacggtcccgtagctccc

SEQ ID NO: 5866098 - DNA, 25 bp, Homo sapien
gggccgcgcgacgacttacccttgt

SEQ ID NO: 5866099 - DNA, 25 bp, Homo sapien
gcggaagcgacgtacgggaacggtc

SEQ ID NO: 5866100 - DNA, 25 bp, Homo sapien
ctcttctgccgacggctagcggcga

SEQ ID NO: 5866101 - DNA, 25 bp, Homo sapien
gcccctcgcaccgatgcgtacactc

SEQ ID NO: 5866102 - DNA, 25 bp, Homo sapien
gacagaacgcgtcggctaggccgtg

SEQ ID NO: 5866103 - DNA, 25 bp, Homo sapien
tttgagtagcgcgcgtcacgccgcg

SEQ ID NO: 5866104 - DNA, 25 bp, Homo sapien
accatgatcaaccgcgcgcgggtcc

SEQ ID NO: 5866105 - DNA, 25 bp, Homo sapien
cgcacacggccgttatacgggaccc

SEQ ID NO: 5866106 - DNA, 25 bp, Homo sapien
agcccagtagatcgcgccggtctcg

SEQ ID NO: 5866107 - DNA, 25 bp, Homo sapien
cgcagccgcgtgataccgaatcgcg

SEQ ID NO: 5866108 - DNA, 25 bp, Homo sapien
gggagcatgtcgacgcgccgcaatg

SEQ ID NO: 5866109 - DNA, 25 bp, Homo sapien
ttggggtgcgcgtaagggctacggc

SEQ ID NO: 5866110 - DNA, 25 bp, Homo sapien
cccgggccccgcatacgacggtata

SEQ ID NO: 5866111 - DNA, 25 bp, Homo sapien
gacgcccgtaacgtatcgggccagc

SEQ ID NO: 5866112 - DNA, 25 bp, Homo sapien
gccccgctagcccggtacggaagat

SEQ ID NO: 5866113 - DNA, 25 bp, Homo sapien
tccgaggaccgtcgtacgctggagg

SEQ ID NO: 5866114 - DNA, 25 bp, Homo sapien
ctgatcgcgttaccgcggagccggt

SEQ ID NO: 5866115 - DNA, 25 bp, Homo sapien
actcgctatgcgcgctcggctgctc

SEQ ID NO: 5866116 - DNA, 25 bp, Homo sapien
cagcgcgcgcgatgtcgcgcttcat

SEQ ID NO: 5866117 - DNA, 25 bp, Homo sapien
gagcacaccccgcatagcggagtcc

SEQ ID NO: 5866118 - DNA, 25 bp, Homo sapien
gcgggaacgctcgtacgcctcacca

SEQ ID NO: 5866119 - DNA, 25 bp, Homo sapien
gcctggttcgcgcccgtgacatcgt

SEQ ID NO: 5866120 - DNA, 25 bp, Homo sapien
gagcggccgtacttcgggtccgatc

SEQ ID NO: 5866121 - DNA, 25 bp, Homo sapien
gagacttcgaccgacgtcccgtggc

SEQ ID NO: 5866122 - DNA, 25 bp, Homo sapien
ccctagtctagtcgtacgccgcggg

SEQ ID NO: 5866123 - DNA, 25 bp, Homo sapien
gtcggtgtctacgccggacacgtcc

SEQ ID NO: 5866124 - DNA, 25 bp, Homo sapien
acggcccgcgataggtgaccgggta

SEQ ID NO: 5866125 - DNA, 25 bp, Homo sapien
ctcgatgacgcgtaccgtaccccgg

SEQ ID NO: 5866126 - DNA, 25 bp, Homo sapien
tggggaccgcggactagtccctcga

SEQ ID NO: 5866127 - DNA, 25 bp, Homo sapien
acccagtatgtcgtgcgcgaccggc

SEQ ID NO: 5866128 - DNA, 25 bp, Homo sapien
agagtccttgcgcggtatcgcgcgc

SEQ ID NO: 5866129 - DNA, 25 bp, Homo sapien
ctcgcaatacggtcgacctcgcccc

SEQ ID NO: 5866130 - DNA, 25 bp, Homo sapien
gcgctgcgcggaatcgtagggacca

SEQ ID NO: 5866131 - DNA, 25 bp, Homo sapien
acagcctgtcgcgacgttgcgggct

SEQ ID NO: 5866132 - DNA, 25 bp, Homo sapien
aatctgtcgtagcgagcgccccggg

SEQ ID NO: 5866133 - DNA, 25 bp, Homo sapien
agcgcttatacgccggtcgcgtccc

SEQ ID NO: 5866134 - DNA, 25 bp, Homo sapien
gcgggagttatgcgtccgggcgtct

SEQ ID NO: 5866135 - DNA, 25 bp, Homo sapien
ctcgactccgtacgggcgacccttc

SEQ ID NO: 5866136 - DNA, 25 bp, Homo sapien
gcactgcgtcggacgtaagcgcgga

SEQ ID NO: 5866137 - DNA, 25 bp, Homo sapien
ggtagtataccgcgcgcgtcgtggc

SEQ ID NO: 5866138 - DNA, 25 bp, Homo sapien
tgcacaacggtacgcgggcgctgac

SEQ ID NO: 5866139 - DNA, 25 bp, Homo sapien
ctcagacgcgtccgcattacccggg

SEQ ID NO: 5866140 - DNA, 25 bp, Homo sapien
gcgcgtgccgcgtaacgcacgagaa

SEQ ID NO: 5866141 - DNA, 25 bp, Homo sapien
gggagcacccgcgtacggtaggtga

SEQ ID NO: 5866142 - DNA, 25 bp, Homo sapien
tggcgacgtcgattacgccggccca

SEQ ID NO: 5866143 - DNA, 25 bp, Homo sapien
actctccgcgttgaccgtgcccggt

SEQ ID NO: 5866144 - DNA, 25 bp, Homo sapien
ggcctccgtcgcgaacgacaggaga

SEQ ID NO: 5866145 - DNA, 25 bp, Homo sapien
cgggccgcgatataggacggccctt

SEQ ID NO: 5866146 - DNA, 25 bp, Homo sapien
tctggtgggccgctatcgagtcgcg

SEQ ID NO: 5866147 - DNA, 25 bp, Homo sapien
acccggtacgagaccgcgtgcctga

SEQ ID NO: 5866148 - DNA, 25 bp, Homo sapien
cagacgtaggtgcggcgtactcgcc

SEQ ID NO: 5866149 - DNA, 25 bp, Homo sapien
ggtaggtcgtcgcgcgacaccctac

SEQ ID NO: 5866150 - DNA, 25 bp, Homo sapien
gggctcccgtactacggggagccat

SEQ ID NO: 5866151 - DNA, 25 bp, Homo sapien
gtacggcggtcgactaaggcgggtg

SEQ ID NO: 5866152 - DNA, 25 bp, Homo sapien
acgagggtcacgcgtccgacaggct

SEQ ID NO: 5866153 - DNA, 25 bp, Homo sapien
agccgaccgtaggtcgcgtcgctct

SEQ ID NO: 5866154 - DNA, 25 bp, Homo sapien
gagccccgcgttacgacccacggat

SEQ ID NO: 5866155 - DNA, 25 bp, Homo sapien
ttcgtccgcgaagcataggggccgg

SEQ ID NO: 5866156 - DNA, 25 bp, Homo sapien
cacccccttcgtacgatcgacccgc

SEQ ID NO: 5866157 - DNA, 25 bp, Homo sapien
gcgtgggcgtcgcgtacgactcgtt

SEQ ID NO: 5866158 - DNA, 25 bp, Homo sapien
ccccagacatcacgtcgcgttcgcg

SEQ ID NO: 5866159 - DNA, 25 bp, Homo sapien
cccggcgcacgatagaccgttaggg

SEQ ID NO: 5866160 - DNA, 25 bp, Homo sapien
gcgtacgccgacggtcgtatcgacc

SEQ ID NO: 5866161 - DNA, 25 bp, Homo sapien
ggacccgcctaacgcgccttcaacg

SEQ ID NO: 5866162 - DNA, 25 bp, Homo sapien
actggcgatgtccgcgacgggctac

SEQ ID NO: 5866163 - DNA, 25 bp, Homo sapien
gaggggacgtatcgcggaggtagcg

SEQ ID NO: 5866164 - DNA, 25 bp, Homo sapien
tgcgccgcgtagcgccgtatcatgc

SEQ ID NO: 5866165 - DNA, 25 bp, Homo sapien
ggtgttcacccgtagatcgccgccc

SEQ ID NO: 5866166 - DNA, 25 bp, Homo sapien
actgtcacgcgttagcggccagcgc

SEQ ID NO: 5866167 - DNA, 25 bp, Homo sapien
gtggtcgcgcgtcgaacctgtgctc

SEQ ID NO: 5866168 - DNA, 25 bp, Homo sapien
gcctggctacgctcgcgtaggactg

SEQ ID NO: 5866169 - DNA, 25 bp, Homo sapien
ccaatcacgcgtatcgcggggggtg

SEQ ID NO: 5866170 - DNA, 25 bp, Homo sapien
cagcgacgtaacgccgcaagtcccc

SEQ ID NO: 5866171 - DNA, 25 bp, Homo sapien
cacgacgtcagtcgtaccggaggcg

SEQ ID NO: 5866172 - DNA, 25 bp, Homo sapien
ccgtagaacgtcccgcgaggcacgt

SEQ ID NO: 5866173 - DNA, 25 bp, Homo sapien
gcggaatacgtccggatcggaggcg

SEQ ID NO: 5866174 - DNA, 25 bp, Homo sapien
gtggctcggtcgtctcgatggccag

SEQ ID NO: 5866175 - DNA, 25 bp, Homo sapien
gctcacatcgtgcggccgtgcccta

SEQ ID NO: 5866176 - DNA, 25 bp, Homo sapien
agtcggtgtacgctagcgctcgcgc

SEQ ID NO: 5866177 - DNA, 25 bp, Homo sapien
agcccacgcgtacaacggtgtgccg

SEQ ID NO: 5866178 - DNA, 25 bp, Homo sapien
tctccccttggacgcgcgtaccgag

SEQ ID NO: 5866179 - DNA, 25 bp, Homo sapien
caacctacgcgcgagttagcggccg

SEQ ID NO: 5866180 - DNA, 25 bp, Homo sapien
gggggcttcgcgcgggtatatccga

SEQ ID NO: 5866181 - DNA, 25 bp, Homo sapien
gccgacacgcgcggtaacgcatgca

SEQ ID NO: 5866182 - DNA, 25 bp, Homo sapien
ctggacagcgacgcgctaggcacct

SEQ ID NO: 5866183 - DNA, 25 bp, Homo sapien
gcgagcgcgcgtaagagacgcgcaa

SEQ ID NO: 5866184 - DNA, 25 bp, Homo sapien
gtagcgacgcgtatacgggcccacg

SEQ ID NO: 5866185 - DNA, 25 bp, Homo sapien
gtggtagcgtctacgggacctccgc

SEQ ID NO: 5866186 - DNA, 25 bp, Homo sapien
cggacttccgcgggtacgtagcgtc

SEQ ID NO: 5866187 - DNA, 25 bp, Homo sapien
acctggcgtacgcgacgtgcgaacc

SEQ ID NO: 5866188 - DNA, 25 bp, Homo sapien
gagtaccggttaccgacgcgccgct

SEQ ID NO: 5866189 - DNA, 25 bp, Homo sapien
acgccggtacgtaccgggcactctc

SEQ ID NO: 5866190 - DNA, 25 bp, Homo sapien
gacccgccggcgatacgatctggct

SEQ ID NO: 5866191 - DNA, 25 bp, Homo sapien
accagcgccttacgccgtatggcgg

SEQ ID NO: 5866192 - DNA, 25 bp, Homo sapien
gcatcttcggcgcgctagagacggc

SEQ ID NO: 5866193 - DNA, 25 bp, Homo sapien
cgagcacgagcggacgtgacgagac

SEQ ID NO: 5866194 - DNA, 25 bp, Homo sapien
gcttcagtccggcgtagacgcgagg

SEQ ID NO: 5866195 - DNA, 25 bp, Homo sapien
cgggtacggttcgcgaatagcggcc

SEQ ID NO: 5866196 - DNA, 25 bp, Homo sapien
gaagagggtcgtgcgcgatgtgcgg

SEQ ID NO: 5866197 - DNA, 25 bp, Homo sapien
ccctgctacgttcggccgaccgtct

SEQ ID NO: 5866198 - DNA, 25 bp, Homo sapien
cgcggtacggtcgagaccgtcggta

SEQ ID NO: 5866199 - DNA, 25 bp, Homo sapien
tcggggtacgagcgaccctagcggt

SEQ ID NO: 5866200 - DNA, 25 bp, Homo sapien
ctgccgcgataactcgcgctacggc

SEQ ID NO: 5866201 - DNA, 25 bp, Homo sapien
ggggtcgcgaccgggtatactcctc

SEQ ID NO: 5866202 - DNA, 25 bp, Homo sapien
gcggaccgaacgacggtaagcagcc

SEQ ID NO: 5866203 - DNA, 25 bp, Homo sapien
gcgtgccgctcgatacggcgtagtc

SEQ ID NO: 5866204 - DNA, 25 bp, Homo sapien
cccggctacgccttacgcgagcagt

SEQ ID NO: 5866205 - DNA, 25 bp, Homo sapien
cgcggtttgggtcgtcgcgtatgcc

SEQ ID NO: 5866206 - DNA, 25 bp, Homo sapien
gagtggcgcgtacggacgtgcgact

SEQ ID NO: 5866207 - DNA, 25 bp, Homo sapien
gggtcgccgtacgcactacgtgtgg

SEQ ID NO: 5866208 - DNA, 25 bp, Homo sapien
cacgtgcgtagagccgcgacggcat

SEQ ID NO: 5866209 - DNA, 25 bp, Homo sapien
cgcgcagatagcgggtcgctgtagg

SEQ ID NO: 5866210 - DNA, 25 bp, Homo sapien
ggccggcgccgggttgacgctaaat

SEQ ID NO: 5866211 - DNA, 25 bp, Homo sapien
gctaacccccgcgatcgacgatggc

SEQ ID NO: 5866212 - DNA, 25 bp, Homo sapien
cccgcgtgcgcgatccgtaatcacc

SEQ ID NO: 5866213 - DNA, 25 bp, Homo sapien
cttccgcgcgtccgaggtagacgtg

SEQ ID NO: 5866214 - DNA, 25 bp, Homo sapien
cgggccttaacgaccgcgtcgcaga

SEQ ID NO: 5866215 - DNA, 25 bp, Homo sapien
cccggtgtttagcccgcgtgcctgt

SEQ ID NO: 5866216 - DNA, 25 bp, Homo sapien
agccgccgcgatcccgtacggtgtt

SEQ ID NO: 5866217 - DNA, 25 bp, Homo sapien
ggaacggcgtatagcgcggggtcag

SEQ ID NO: 5866218 - DNA, 25 bp, Homo sapien
tccccccgcgcgagaatgatgggag

SEQ ID NO: 5866219 - DNA, 25 bp, Homo sapien
acctacaagtacgcgcgacccggcc

SEQ ID NO: 5866220 - DNA, 25 bp, Homo sapien
ttcccagtgcgtcgacgggaagccg

SEQ ID NO: 5866221 - DNA, 25 bp, Homo sapien
cgaggcgcgcgagcgtctagtggtt

SEQ ID NO: 5866222 - DNA, 25 bp, Homo sapien
gcctatacgcgtcgcctaccgtggc

SEQ ID NO: 5866223 - DNA, 25 bp, Homo sapien
gtgggttacggttggcgtgctggcg

SEQ ID NO: 5866224 - DNA, 25 bp, Homo sapien
cggcgacgtaccagcgtagactcgc

SEQ ID NO: 5866225 - DNA, 25 bp, Homo sapien
gtgtgggcggatccgcctatggtcc

SEQ ID NO: 5866226 - DNA, 25 bp, Homo sapien
ccacctacgaccgtcggaagcgcga

SEQ ID NO: 5866227 - DNA, 25 bp, Homo sapien
ccaccagggtcgatcgacgggcaga

SEQ ID NO: 5866228 - DNA, 25 bp, Homo sapien
tgtccgtcacggtacgccgcctcga

SEQ ID NO: 5866229 - DNA, 25 bp, Homo sapien
accagccgagccgatacgtggtcgc

SEQ ID NO: 5866230 - DNA, 25 bp, Homo sapien
gccgcttccgtcgacgcacacacac

SEQ ID NO: 5866231 - DNA, 25 bp, Homo sapien
cccaatcgcggtcgacagtccctgc

SEQ ID NO: 5866232 - DNA, 25 bp, Homo sapien
cggccgctagtcggcgaaccgagat

SEQ ID NO: 5866233 - DNA, 25 bp, Homo sapien
tggcggtacgcgacttcgctccgtc

SEQ ID NO: 5866234 - DNA, 25 bp, Homo sapien
ggccatagtgcgctacgcggcggat

SEQ ID NO: 5866235 - DNA, 25 bp, Homo sapien
gaacgccgcgtcttaacggcaggcc

SEQ ID NO: 5866236 - DNA, 25 bp, Homo sapien
acctcgtctcatacgcgccgaccgg

SEQ ID NO: 5866237 - DNA, 25 bp, Homo sapien
agggacccgaacgggcgtagtgcac

SEQ ID NO: 5866238 - DNA, 25 bp, Homo sapien
actggggcgcgtagaatcggctgcc

SEQ ID NO: 5866239 - DNA, 25 bp, Homo sapien
cctgtggcgcgcacggatagccgaa

SEQ ID NO: 5866240 - DNA, 25 bp, Homo sapien
gctggccgtcgcacgacacggtttg

SEQ ID NO: 5866241 - DNA, 25 bp, Homo sapien
ctcgcgttaccgttcgcgcgaggag

SEQ ID NO: 5866242 - DNA, 25 bp, Homo sapien
gcgggcccccgataaccgttatgcg

SEQ ID NO: 5866243 - DNA, 25 bp, Homo sapien
ggtccgtggatacgcgcgaagctcg

SEQ ID NO: 5866244 - DNA, 25 bp, Homo sapien
gctccgtccgcaacgaacggtgtcc

SEQ ID NO: 5866245 - DNA, 25 bp, Homo sapien
taccggtggcgtcgacgtagcgtcc

SEQ ID NO: 5866246 - DNA, 25 bp, Homo sapien
gcagattatcgcggaccggcccacc

SEQ ID NO: 5866247 - DNA, 25 bp, Homo sapien
tgtgcccatccgcggttcgggtgct

SEQ ID NO: 5866248 - DNA, 25 bp, Homo sapien
tcggagtagtcgtgcggcgggcagt

SEQ ID NO: 5866249 - DNA, 25 bp, Homo sapien
gaccgctacgcctagcgcttcgggt

SEQ ID NO: 5866250 - DNA, 25 bp, Homo sapien
ggactccggcgtaccgtgatgccct

SEQ ID NO: 5866251 - DNA, 25 bp, Homo sapien
ccctaaacggaacgcgcttcgcgcg

SEQ ID NO: 5866252 - DNA, 25 bp, Homo sapien
attggcggtccgctcgtatcggccg

SEQ ID NO: 5866253 - DNA, 25 bp, Homo sapien
gcggtcccgctaatcgacggtggct

SEQ ID NO: 5866254 - DNA, 25 bp, Homo sapien
acggttgttagacgccgcgcacggg

SEQ ID NO: 5866255 - DNA, 25 bp, Homo sapien
caggcataccgcgcgtacgtcctcg

SEQ ID NO: 5866256 - DNA, 25 bp, Homo sapien
gagcctataccggcgtcggtggtcg

SEQ ID NO: 5866257 - DNA, 25 bp, Homo sapien
gcaaacgtaacggtcgggcggccga

SEQ ID NO: 5866258 - DNA, 25 bp, Homo sapien
cctgccctacgcgagtcgcatgacc

SEQ ID NO: 5866259 - DNA, 25 bp, Homo sapien
tccggacggcgcggtatacctggtg

SEQ ID NO: 5866260 - DNA, 25 bp, Homo sapien
tccccccgctagaccgcgtgtcaca

SEQ ID NO: 5866261 - DNA, 25 bp, Homo sapien
taggtcatcgaccgcggatgcgccg

SEQ ID NO: 5866262 - DNA, 25 bp, Homo sapien
accctgttgcgttacgcggccctgc

SEQ ID NO: 5866263 - DNA, 25 bp, Homo sapien
gcatcgctagcgcgagacggatcgg

SEQ ID NO: 5866264 - DNA, 25 bp, Homo sapien
ggcgcagcgctaacgtaccaacccg

SEQ ID NO: 5866265 - DNA, 25 bp, Homo sapien
tcggctgtatacgcgacccggccga

SEQ ID NO: 5866266 - DNA, 25 bp, Homo sapien
ggcgacatacggcgcgcgtgagttg

SEQ ID NO: 5866267 - DNA, 25 bp, Homo sapien
tcgctaaccgttacgccgcggggga

SEQ ID NO: 5866268 - DNA, 25 bp, Homo sapien
gttcggtacgcgtaccgcgccccta

SEQ ID NO: 5866269 - DNA, 25 bp, Homo sapien
cgggtcgcgcgtagtacgttgtccc

SEQ ID NO: 5866270 - DNA, 25 bp, Homo sapien
cggttccccgcgcgatagaatggcc

SEQ ID NO: 5866271 - DNA, 25 bp, Homo sapien
ctcccctattccgcgcacgggtcct

SEQ ID NO: 5866272 - DNA, 25 bp, Homo sapien
cggttagctaggcgcaacgctcgcg

SEQ ID NO: 5866273 - DNA, 25 bp, Homo sapien
cgcacaccctaccgtcggttgggtc

SEQ ID NO: 5866274 - DNA, 25 bp, Homo sapien
ccctaacgatacgcgacgggccgca

SEQ ID NO: 5866275 - DNA, 25 bp, Homo sapien
cgaggtcgcgctagattgcctgggc

SEQ ID NO: 5866276 - DNA, 25 bp, Homo sapien
ctacgcggtaggatcgtcgagcccc

SEQ ID NO: 5866277 - DNA, 25 bp, Homo sapien
cgggcttcgacgcgtaactacgggc

SEQ ID NO: 5866278 - DNA, 25 bp, Homo sapien
gcgcccatatcgcgtcggggtgcta

SEQ ID NO: 5866279 - DNA, 25 bp, Homo sapien
cagctccgcgtttcgtaccgctccc

SEQ ID NO: 5866280 - DNA, 25 bp, Homo sapien
ccagtgtcgttacgcccgagcgacc

SEQ ID NO: 5866281 - DNA, 25 bp, Homo sapien
gagcacttgcgcgacccgtacggct

SEQ ID NO: 5866282 - DNA, 25 bp, Homo sapien
tgggtcgtacgctagcgcgggcttc

SEQ ID NO: 5866283 - DNA, 25 bp, Homo sapien
tcatggcccgcgcgtatagcgggtc

SEQ ID NO: 5866284 - DNA, 25 bp, Homo sapien
ccgcgagacgcgccattcgcctcaa

SEQ ID NO: 5866285 - DNA, 25 bp, Homo sapien
gccgtgtcacgcggcgaaggacgat

SEQ ID NO: 5866286 - DNA, 25 bp, Homo sapien
agtgcccgttcggactcgtgcccgt

SEQ ID NO: 5866287 - DNA, 25 bp, Homo sapien
ctaccttacgccttgtccgggcgcg

SEQ ID NO: 5866288 - DNA, 25 bp, Homo sapien
cgaacccgtatgacggcggcaaccc

SEQ ID NO: 5866289 - DNA, 25 bp, Homo sapien
atgggcagctagccgcgtctcgctc

SEQ ID NO: 5866290 - DNA, 25 bp, Homo sapien
acgtcacgcgttcggtagccccgtg

SEQ ID NO: 5866291 - DNA, 25 bp, Homo sapien
gtgtcgctacgaacccccgtggtcg

SEQ ID NO: 5866292 - DNA, 25 bp, Homo sapien
ccgcttcgttaggcgcgtagccacg

SEQ ID NO: 5866293 - DNA, 25 bp, Homo sapien
tgctgatcgtatcgcgcacgggggg

SEQ ID NO: 5866294 - DNA, 25 bp, Homo sapien
cccaggatacccgcgcgaatcgcct

SEQ ID NO: 5866295 - DNA, 25 bp, Homo sapien
agtcacctaatagcgccggcgcccc

SEQ ID NO: 5866296 - DNA, 25 bp, Homo sapien
gcccgggcgcgatccttagacctgt

SEQ ID NO: 5866297 - DNA, 25 bp, Homo sapien
tagcgctgcgtaggggcgacgttgc

SEQ ID NO: 5866298 - DNA, 25 bp, Homo sapien
ccagcacccgctagcgcatacgctc

SEQ ID NO: 5866299 - DNA, 25 bp, Homo sapien
cgatgggtagccggtcggactcgtg

SEQ ID NO: 5866300 - DNA, 25 bp, Homo sapien
cagtccccggcggtcctatgtgcct

SEQ ID NO: 5866301 - DNA, 25 bp, Homo sapien
tcttcccataccgcgccgagtcgcg

SEQ ID NO: 5866302 - DNA, 25 bp, Homo sapien
gcaccctctcgccgttacgaaggcg

SEQ ID NO: 5866303 - DNA, 25 bp, Homo sapien
cggacgcggaccgtattcggactgc

SEQ ID NO: 5866304 - DNA, 25 bp, Homo sapien
ggtcagacgcgtacggttggcggga

SEQ ID NO: 5866305 - DNA, 25 bp, Homo sapien
tcccgcagcgcgattacggtagggg

SEQ ID NO: 5866306 - DNA, 25 bp, Homo sapien
cccactcgtcccgcatagtgcggac

SEQ ID NO: 5866307 - DNA, 25 bp, Homo sapien
tgcttggacctagtcgcgcgcgagg

SEQ ID NO: 5866308 - DNA, 25 bp, Homo sapien
ctcacccgtacgtcggctaccggtg

SEQ ID NO: 5866309 - DNA, 25 bp, Homo sapien
gatccgatgtaccggcgcgtcccga

SEQ ID NO: 5866310 - DNA, 25 bp, Homo sapien
gtccggaagacgcggtacgtccacg

SEQ ID NO: 5866311 - DNA, 25 bp, Homo sapien
gacctgcgcaatgcgtgcgacccac

SEQ ID NO: 5866312 - DNA, 25 bp, Homo sapien
gaatggcgcctataacgcggggccg

SEQ ID NO: 5866313 - DNA, 25 bp, Homo sapien
ggtcacaggcgtacgcgagagccct

SEQ ID NO: 5866314 - DNA, 25 bp, Homo sapien
aaaccgccgagcgtcggtacggctc

SEQ ID NO: 5866315 - DNA, 25 bp, Homo sapien
catgcgtacctatgcgcgagccgcc

SEQ ID NO: 5866316 - DNA, 25 bp, Homo sapien
gctagcgcgcctagtcggaacaccg

SEQ ID NO: 5866317 - DNA, 25 bp, Homo sapien
gccgagatgccgcgtcgtaggaacg

SEQ ID NO: 5866318 - DNA, 25 bp, Homo sapien
gaacgctaacgcgggtacgggagcg

SEQ ID NO: 5866319 - DNA, 25 bp, Homo sapien
ccggtgtagacgtccggacgttgcc

SEQ ID NO: 5866320 - DNA, 25 bp, Homo sapien
gaggggcgtatacggtcgctcgcct

SEQ ID NO: 5866321 - DNA, 25 bp, Homo sapien
aaggcgcccgtcgacgcactgtacc

SEQ ID NO: 5866322 - DNA, 25 bp, Homo sapien
cgcccccgactaggtagcggctgaa

SEQ ID NO: 5866323 - DNA, 25 bp, Homo sapien
atcgctgaccgcgcaaccaggcagc

SEQ ID NO: 5866324 - DNA, 25 bp, Homo sapien
gtccgacggctatagtcggggcgct

SEQ ID NO: 5866325 - DNA, 25 bp, Homo sapien
taccgccgtaccgcgagaggaccac

SEQ ID NO: 5866326 - DNA, 25 bp, Homo sapien
ccgttggcgcgagacgtacgcgact

SEQ ID NO: 5866327 - DNA, 25 bp, Homo sapien
cgcgaccgttgcacggcgttggaag

SEQ ID NO: 5866328 - DNA, 25 bp, Homo sapien
gccggcccgcgtgtaacgagaacca

SEQ ID NO: 5866329 - DNA, 25 bp, Homo sapien
gcggaggccgtatcgagtcgaccca

SEQ ID NO: 5866330 - DNA, 25 bp, Homo sapien
caggggcgtcggacgggtagcctaa

SEQ ID NO: 5866331 - DNA, 25 bp, Homo sapien
taggactcgcgcggacgatggtccg

SEQ ID NO: 5866332 - DNA, 25 bp, Homo sapien
cggataccggcgcgatctatggcgc

SEQ ID NO: 5866333 - DNA, 25 bp, Homo sapien
aggcgggtcagttcgcggccttctc

SEQ ID NO: 5866334 - DNA, 25 bp, Homo sapien
atccgggtgcgtcaacccggctcct

SEQ ID NO: 5866335 - DNA, 25 bp, Homo sapien
gggcgtcgtattgaccgcgcatgcg

SEQ ID NO: 5866336 - DNA, 25 bp, Homo sapien
cccgcagtaagtcgcgcggcgcata

SEQ ID NO: 5866337 - DNA, 25 bp, Homo sapien
ggtcgttcgacgtaacgcgcagcgc

SEQ ID NO: 5866338 - DNA, 25 bp, Homo sapien
cccactacgcgcggtactggtgtgg

SEQ ID NO: 5866339 - DNA, 25 bp, Homo sapien
gcgacgacgatacgccgaggggtga

SEQ ID NO: 5866340 - DNA, 25 bp, Homo sapien
caggccgcgtccgatagtcggaagg

SEQ ID NO: 5866341 - DNA, 25 bp, Homo sapien
gacccggacgtcggtcgttccagtc

SEQ ID NO: 5866342 - DNA, 25 bp, Homo sapien
tggcaccgaaggccgataggctccg

SEQ ID NO: 5866343 - DNA, 25 bp, Homo sapien
attcctggccgtacgactcgcgccg

SEQ ID NO: 5866344 - DNA, 25 bp, Homo sapien
ccgagccgaaccgtatacgagggcg

SEQ ID NO: 5866345 - DNA, 25 bp, Homo sapien
tgtgccgcgcaggaccgatctcgca

SEQ ID NO: 5866346 - DNA, 25 bp, Homo sapien
gaagctggcgtaacgggacaggggg

SEQ ID NO: 5866347 - DNA, 25 bp, Homo sapien
cgatgcacgcgtacgaccgccgcaa

SEQ ID NO: 5866348 - DNA, 25 bp, Homo sapien
ggtcgctcattcggacgcgccaggt

SEQ ID NO: 5866349 - DNA, 25 bp, Homo sapien
ggagggagtccgtacgcgtggaggt

SEQ ID NO: 5866350 - DNA, 25 bp, Homo sapien
ggggatccgttatccgccgcaacgc

SEQ ID NO: 5866351 - DNA, 25 bp, Homo sapien
cggcccgagtatactcgcgcgtcag

SEQ ID NO: 5866352 - DNA, 25 bp, Homo sapien
gcgcggggtcgttcgtaccgcacaa

SEQ ID NO: 5866353 - DNA, 25 bp, Homo sapien
ccgctgaccgttagcgggtgtaggg

SEQ ID NO: 5866354 - DNA, 25 bp, Homo sapien
ccagactcgcgcgtaacgccaggtg

SEQ ID NO: 5866355 - DNA, 25 bp, Homo sapien
gaggggtcgcgctatgggtgcctag

SEQ ID NO: 5866356 - DNA, 25 bp, Homo sapien
gaccgcatctaggcgaacgcgtggg

SEQ ID NO: 5866357 - DNA, 25 bp, Homo sapien
agggtagcctatagcgcgtgcgcgg

SEQ ID NO: 5866358 - DNA, 25 bp, Homo sapien
gccaactcgcgaccgtatcgagggg

SEQ ID NO: 5866359 - DNA, 25 bp, Homo sapien
aggtgtagtacggcgcccggcccat

SEQ ID NO: 5866360 - DNA, 25 bp, Homo sapien
catacggcgtagcgcgacggacagc

SEQ ID NO: 5866361 - DNA, 25 bp, Homo sapien
ggttacaccggacacgcgacgtccg

SEQ ID NO: 5866362 - DNA, 25 bp, Homo sapien
agcggcagtcaatcgcgcgtcggtc

SEQ ID NO: 5866363 - DNA, 25 bp, Homo sapien
gcgatgacgcacgtcgctatcgcgc

SEQ ID NO: 5866364 - DNA, 25 bp, Homo sapien
cgcaagcgacggatacgacgtccgg

SEQ ID NO: 5866365 - DNA, 25 bp, Homo sapien
tcggtgcggcccgttcacgaccgta

SEQ ID NO: 5866366 - DNA, 25 bp, Homo sapien
gggcgcttcgtacgggctagatgcg

SEQ ID NO: 5866367 - DNA, 25 bp, Homo sapien
tgcacccccctatgtcgcgacgggt

SEQ ID NO: 5866368 - DNA, 25 bp, Homo sapien
cggtcgcgcgtagctagtcagccag

SEQ ID NO: 5866369 - DNA, 25 bp, Homo sapien
gccctgccgtaccgactcgacatgg

SEQ ID NO: 5866370 - DNA, 25 bp, Homo sapien
gaagctccccgtatcgcgagctggc

SEQ ID NO: 5866371 - DNA, 25 bp, Homo sapien
ggcccgcgcgtaaatgtcgacgcct

SEQ ID NO: 5866372 - DNA, 25 bp, Homo sapien
agtggccccgcggtcgataggtctg

SEQ ID NO: 5866373 - DNA, 25 bp, Homo sapien
cggcagcgcgtaccggtagtggaac

SEQ ID NO: 5866374 - DNA, 25 bp, Homo sapien
gcattgcgtcggtgtaccccgcgtg

SEQ ID NO: 5866375 - DNA, 25 bp, Homo sapien
gacttgtcgaccgcgatcccggagg

SEQ ID NO: 5866376 - DNA, 25 bp, Homo sapien
tctgccgcgcgtcggtacaccttcg

SEQ ID NO: 5866377 - DNA, 25 bp, Homo sapien
ggtccgataccggacgtcgcaccgt

SEQ ID NO: 5866378 - DNA, 25 bp, Homo sapien
cgtccgccgtatacggtcgtgctgc

SEQ ID NO: 5866379 - DNA, 25 bp, Homo sapien
gcgtttacaacgtcccgcgccgctg

SEQ ID NO: 5866380 - DNA, 25 bp, Homo sapien
cagtcgacgtctagtgccgggcagc

SEQ ID NO: 5866381 - DNA, 25 bp, Homo sapien
tcatacccgcgtcaatcgggccggg

SEQ ID NO: 5866382 - DNA, 25 bp, Homo sapien
cgtacgtaagcgcgacgcgcaggct

SEQ ID NO: 5866383 - DNA, 25 bp, Homo sapien
cgtgacacccgctaacggtcggtcc

SEQ ID NO: 5866384 - DNA, 25 bp, Homo sapien
tctgtacgttgacgaccgggccggg

SEQ ID NO: 5866385 - DNA, 25 bp, Homo sapien
cggccttgccgcggacgtatatgcg

SEQ ID NO: 5866386 - DNA, 25 bp, Homo sapien
tcggccccgaccgcgctatgatagc

SEQ ID NO: 5866387 - DNA, 25 bp, Homo sapien
acccgtcgaccgacggctagtacgc

SEQ ID NO: 5866388 - DNA, 25 bp, Homo sapien
cggagctaaggcgcgtaacctgggc

SEQ ID NO: 5866389 - DNA, 25 bp, Homo sapien
gccgtctcgcatcggcacgaaggtg

SEQ ID NO: 5866390 - DNA, 25 bp, Homo sapien
gcgcaggcgtcgacggttaccggat

SEQ ID NO: 5866391 - DNA, 25 bp, Homo sapien
cctcagcgctcgtaacgtcccgggt

SEQ ID NO: 5866392 - DNA, 25 bp, Homo sapien
ttggcgtcgctaatcgcgggcgacc

SEQ ID NO: 5866393 - DNA, 25 bp, Homo sapien
cgcacacgctagttcgggtgtccgg

SEQ ID NO: 5866394 - DNA, 25 bp, Homo sapien
gtccgatagcgcacgacgcagagcc

SEQ ID NO: 5866395 - DNA, 25 bp, Homo sapien
cccgtacgcgatgacgggtcaggga

SEQ ID NO: 5866396 - DNA, 25 bp, Homo sapien
gtgcacacgtgccgtacgggaggga

SEQ ID NO: 5866397 - DNA, 25 bp, Homo sapien
cagcactcggtcgcaccgagtcgag

SEQ ID NO: 5866398 - DNA, 25 bp, Homo sapien
gcaaactcgcgcccgataccgccag

SEQ ID NO: 5866399 - DNA, 25 bp, Homo sapien
gctgcgacgacatacgcggggatcc

SEQ ID NO: 5866400 - DNA, 25 bp, Homo sapien
cggcgcgcgtacgacgaaacctcag

SEQ ID NO: 5866401 - DNA, 25 bp, Homo sapien
cgtcccggtcgtcacgagattggcc

SEQ ID NO: 5866402 - DNA, 25 bp, Homo sapien
ccacttgtacgacgcaccgcccgct

SEQ ID NO: 5866403 - DNA, 25 bp, Homo sapien
agcgaatcgtgcgacggacccgggt

SEQ ID NO: 5866404 - DNA, 25 bp, Homo sapien
ccaccccgtacgggcgcgagaatac

SEQ ID NO: 5866405 - DNA, 25 bp, Homo sapien
gcccccacgagcgtacgactcagtg

SEQ ID NO: 5866406 - DNA, 25 bp, Homo sapien
cgtagcgcgtatcgcaccgtcgtcc

SEQ ID NO: 5866407 - DNA, 25 bp, Homo sapien
gccccgcccttatacgccgacacct

SEQ ID NO: 5866408 - DNA, 25 bp, Homo sapien
cgacgacccgagcgaattgcgcgac

SEQ ID NO: 5866409 - DNA, 25 bp, Homo sapien
ctgcaccttatcgcgaggccccacc

SEQ ID NO: 5866410 - DNA, 25 bp, Homo sapien
tgccgggttaggtgcgacgccgctt

SEQ ID NO: 5866411 - DNA, 25 bp, Homo sapien
gaggcactagcgcgacacggttccg

SEQ ID NO: 5866412 - DNA, 25 bp, Homo sapien
gcagcacggtcggcctacgagctga

SEQ ID NO: 5866413 - DNA, 25 bp, Homo sapien
cgccgccgcggtcgtacctgttaga

SEQ ID NO: 5866414 - DNA, 25 bp, Homo sapien
ggattggctaccgaacgcgcgctcg

SEQ ID NO: 5866415 - DNA, 25 bp, Homo sapien
gccggacgtacgcgtatcggtcgca

SEQ ID NO: 5866416 - DNA, 25 bp, Homo sapien
caccgttcgctcgaagcgagtcgcc

SEQ ID NO: 5866417 - DNA, 25 bp, Homo sapien
cgtgtctcgatcgtaccggccaggg

SEQ ID NO: 5866418 - DNA, 25 bp, Homo sapien
gccgtacgcgtataccgtgcgcacc

SEQ ID NO: 5866419 - DNA, 25 bp, Homo sapien
cacccgtatacccccgcggagcaca

SEQ ID NO: 5866420 - DNA, 25 bp, Homo sapien
aggcacgctagtcgcgcgtctgcca

SEQ ID NO: 5866421 - DNA, 25 bp, Homo sapien
ggctctgcggtcgacgctaaggagc

SEQ ID NO: 5866422 - DNA, 25 bp, Homo sapien
gacctccgtactcgaggcgtgccgt

SEQ ID NO: 5866423 - DNA, 25 bp, Homo sapien
atgcccaacgttcagcgcgggaggc

SEQ ID NO: 5866424 - DNA, 25 bp, Homo sapien
ctgtcgacgtcgcgtctcggtagcc

SEQ ID NO: 5866425 - DNA, 25 bp, Homo sapien
gctcgtctagggcgcggatcaggtg

SEQ ID NO: 5866426 - DNA, 25 bp, Homo sapien
agtgcacgtcgccgactagcgtggc

SEQ ID NO: 5866427 - DNA, 25 bp, Homo sapien
acctgcgagtcgcgaaccctacggc

SEQ ID NO: 5866428 - DNA, 25 bp, Homo sapien
gcggcctcgcgattggaccagtacc

SEQ ID NO: 5866429 - DNA, 25 bp, Homo sapien
ggcagcgaagcgcgcctatgaggag

SEQ ID NO: 5866430 - DNA, 25 bp, Homo sapien
cgagggcgcgaagacgtctggctca

SEQ ID NO: 5866431 - DNA, 25 bp, Homo sapien
gttgcccgcgcgtaaggtcgacacg

SEQ ID NO: 5866432 - DNA, 25 bp, Homo sapien
gcgaggcgcgagtgttacgatgggg

SEQ ID NO: 5866433 - DNA, 25 bp, Homo sapien
ggtgacatcgttcgacgcgccccca

SEQ ID NO: 5866434 - DNA, 25 bp, Homo sapien
ggcggcgtgaccgtacgcgcagtta

SEQ ID NO: 5866435 - DNA, 25 bp, Homo sapien
agcctgcgtaggatggccggccact

SEQ ID NO: 5866436 - DNA, 25 bp, Homo sapien
gctcgtgcgcttacgcgatcaggcc

SEQ ID NO: 5866437 - DNA, 25 bp, Homo sapien
cgcgtcaacgggcgcgatatggtcc

SEQ ID NO: 5866438 - DNA, 25 bp, Homo sapien
gaggagccgcgggaacgttgcaagg

SEQ ID NO: 5866439 - DNA, 25 bp, Homo sapien
caaactactacggtcgcggcgccgc

SEQ ID NO: 5866440 - DNA, 25 bp, Homo sapien
cccagcgacgatcgggtcgacggtt

SEQ ID NO: 5866441 - DNA, 25 bp, Homo sapien
gggtgaacgaccgcgtatggggcca

SEQ ID NO: 5866442 - DNA, 25 bp, Homo sapien
gcgatccgtaacggccgtcccgcat

SEQ ID NO: 5866443 - DNA, 25 bp, Homo sapien
gtgcccctacgcgtcaacggccgtt

SEQ ID NO: 5866444 - DNA, 25 bp, Homo sapien
cggcactgcgcggtcgtactcttcc

SEQ ID NO: 5866445 - DNA, 25 bp, Homo sapien
ggagggcggacgtgcgtacagacga

SEQ ID NO: 5866446 - DNA, 25 bp, Homo sapien
tgcgcccgcgcctataggattcgcc

SEQ ID NO: 5866447 - DNA, 25 bp, Homo sapien
ggccagctacgtaccgtcgcaggtg

SEQ ID NO: 5866448 - DNA, 25 bp, Homo sapien
ggcatcgggtcgcaccgatcgctca

SEQ ID NO: 5866449 - DNA, 25 bp, Homo sapien
cgtagccgtaggaccggaccgtcag

SEQ ID NO: 5866450 - DNA, 25 bp, Homo sapien
cagggggcctaccgtaacgacacgc

SEQ ID NO: 5866451 - DNA, 25 bp, Homo sapien
gcagcgttctcgtagcgcggcagct

SEQ ID NO: 5866452 - DNA, 25 bp, Homo sapien
tctgggtatccgtgcgcgcatggcc

SEQ ID NO: 5866453 - DNA, 25 bp, Homo sapien
gcgccgtgtaccgtacgcggatacg

SEQ ID NO: 5866454 - DNA, 25 bp, Homo sapien
gtattgacgttcgcgcggtgcgggc

SEQ ID NO: 5866455 - DNA, 25 bp, Homo sapien
cgaacctacgaccgtagcgctgggc

SEQ ID NO: 5866456 - DNA, 25 bp, Homo sapien
cagcgtgcgtatcggaacggctgcg

SEQ ID NO: 5866457 - DNA, 25 bp, Homo sapien
ccaactcgtgcgtcggagacctgcc

SEQ ID NO: 5866458 - DNA, 25 bp, Homo sapien
gtcacccggcggtccgattccgcat

SEQ ID NO: 5866459 - DNA, 25 bp, Homo sapien
gccgacctcgcgaccgctttcttgg

SEQ ID NO: 5866460 - DNA, 25 bp, Homo sapien
gggcgcgtcggcggtaactcctgaa

SEQ ID NO: 5866461 - DNA, 25 bp, Homo sapien
gccgactcacgcgtatcgcgcctga

SEQ ID NO: 5866462 - DNA, 25 bp, Homo sapien
gagcgtacgtcgacccgtacccgtc

SEQ ID NO: 5866463 - DNA, 25 bp, Homo sapien
agcgaccctccgacgcatatcccgc

SEQ ID NO: 5866464 - DNA, 25 bp, Homo sapien
ccccagcgagttagcgcgtggcttc

SEQ ID NO: 5866465 - DNA, 25 bp, Homo sapien
gtccaacgtacgacgctccggctcc

SEQ ID NO: 5866466 - DNA, 25 bp, Homo sapien
cggagtgtcacctatcgcggcaggg

SEQ ID NO: 5866467 - DNA, 25 bp, Homo sapien
tgcggggatatatcgcgcgtggggg

SEQ ID NO: 5866468 - DNA, 25 bp, Homo sapien
ggtggctcgcgactactccgaacgg

SEQ ID NO: 5866469 - DNA, 25 bp, Homo sapien
gtagcatgcgtcgggcgtacagcgg

SEQ ID NO: 5866470 - DNA, 25 bp, Homo sapien
gcacgttcgcgcgatagttcggcgc

SEQ ID NO: 5866471 - DNA, 25 bp, Homo sapien
gagacgtgatgtcgcgacgcgcagc

SEQ ID NO: 5866472 - DNA, 25 bp, Homo sapien
cccactcctacgcgacggacgtggt

SEQ ID NO: 5866473 - DNA, 25 bp, Homo sapien
cggctcccgcgcgaatatggcccta

SEQ ID NO: 5866474 - DNA, 25 bp, Homo sapien
tgccgttccgcacgactagcacggg

SEQ ID NO: 5866475 - DNA, 25 bp, Homo sapien
gacgtgggtaccgcgacgatcctcc

SEQ ID NO: 5866476 - DNA, 25 bp, Homo sapien
cgcccgcgacgtaccttcgagctag

SEQ ID NO: 5866477 - DNA, 25 bp, Homo sapien
cccgtctacgtcgcaacggccacca

SEQ ID NO: 5866478 - DNA, 25 bp, Homo sapien
tctgcgagcctagcgtcgatggggc

SEQ ID NO: 5866479 - DNA, 25 bp, Homo sapien
gtgagctcgtacggtgcgccgatcc

SEQ ID NO: 5866480 - DNA, 25 bp, Homo sapien
cggtgacgcgttacgtggagtcggg

SEQ ID NO: 5866481 - DNA, 25 bp, Homo sapien
caccagtcgtcgcgtgagctcgacc

SEQ ID NO: 5866482 - DNA, 25 bp, Homo sapien
gcgacgcgcgtcgacatatcgcgtc

SEQ ID NO: 5866483 - DNA, 25 bp, Homo sapien
cgggcgccggtgcgaatagacacca

SEQ ID NO: 5866484 - DNA, 25 bp, Homo sapien
accactcggattacgcgtcgggccg

SEQ ID NO: 5866485 - DNA, 25 bp, Homo sapien
gcggattaggacgcgacggggtcag

SEQ ID NO: 5866486 - DNA, 25 bp, Homo sapien
actcgtccgagcgtactaccccgcg

SEQ ID NO: 5866487 - DNA, 25 bp, Homo sapien
tttcctgccgcggattacgggggcg

SEQ ID NO: 5866488 - DNA, 25 bp, Homo sapien
caccgtcgcgcgaagtgacagcgcg

SEQ ID NO: 5866489 - DNA, 25 bp, Homo sapien
ggttgcacggtcgacgtcccagcgc

SEQ ID NO: 5866490 - DNA, 25 bp, Homo sapien
cgggcatacgtccgctacggctggg

SEQ ID NO: 5866491 - DNA, 25 bp, Homo sapien
gcgccacgatacgcccgtccgtcca

SEQ ID NO: 5866492 - DNA, 25 bp, Homo sapien
ccccagaccgtacgctcggacctcc

SEQ ID NO: 5866493 - DNA, 25 bp, Homo sapien
ccgctaacgcgtgcgaagtgccggg

SEQ ID NO: 5866494 - DNA, 25 bp, Homo sapien
ggcaccttacttcgcggcggtgggc

SEQ ID NO: 5866495 - DNA, 25 bp, Homo sapien
tgggatacggtcggcgtcggctggg

SEQ ID NO: 5866496 - DNA, 25 bp, Homo sapien
ttcggaacgctatcggccgcgcgcc

SEQ ID NO: 5866497 - DNA, 25 bp, Homo sapien
acggcccgcttgtacgggccgcgat

SEQ ID NO: 5866498 - DNA, 25 bp, Homo sapien
aggtgccgcttgcgtcgagctgggg

SEQ ID NO: 5866499 - DNA, 25 bp, Homo sapien
gctgaggcgcgtacgaggtgctccc

SEQ ID NO: 5866500 - DNA, 25 bp, Homo sapien
ggagcacgcgttgaacgggacgccg

SEQ ID NO: 5866501 - DNA, 25 bp, Homo sapien
tctagcccgacgcggtcaagccccg

SEQ ID NO: 5866502 - DNA, 25 bp, Homo sapien
ccggcctacttcgcgagacggaccg

SEQ ID NO: 5866503 - DNA, 25 bp, Homo sapien
cgacggatcccccggtacgctctgg

SEQ ID NO: 5866504 - DNA, 25 bp, Homo sapien
ggagcgcctataccgcgggggttgg

SEQ ID NO: 5866505 - DNA, 25 bp, Homo sapien
gcggcgcgtcgcatgacgctcttgg

SEQ ID NO: 5866506 - DNA, 25 bp, Homo sapien
ccacgctagcgtcgcacggccgtga

SEQ ID NO: 5866507 - DNA, 25 bp, Homo sapien
ggggcggcgacggattggctgactc

SEQ ID NO: 5866508 - DNA, 25 bp, Homo sapien
ccgacgcgttagccggtagccgcgt

SEQ ID NO: 5866509 - DNA, 25 bp, Homo sapien
aacccggcggtcggcgtgaggtgtc

SEQ ID NO: 5866510 - DNA, 25 bp, Homo sapien
gcgcacgcgtaacgcggtacggagg

SEQ ID NO: 5866511 - DNA, 25 bp, Homo sapien
gctgcccgcgcgatccgtgtctcct

SEQ ID NO: 5866512 - DNA, 25 bp, Homo sapien
cggtcgtacgccgctaggaggcagc

SEQ ID NO: 5866513 - DNA, 25 bp, Homo sapien
cccgcacgcgagtacgctcgaggtg

SEQ ID NO: 5866514 - DNA, 25 bp, Homo sapien
cccggccgcaccgtatcggatccca

SEQ ID NO: 5866515 - DNA, 25 bp, Homo sapien
ccgcaattacggcgcgcgcacggca

SEQ ID NO: 5866516 - DNA, 25 bp, Homo sapien
cggggcaggggatacgccgctcttg

SEQ ID NO: 5866517 - DNA, 25 bp, Homo sapien
ccaggccgcgtcgcctataccgtcg

SEQ ID NO: 5866518 - DNA, 25 bp, Homo sapien
ccgcaccgacataccgcctcgccgt

SEQ ID NO: 5866519 - DNA, 25 bp, Homo sapien
ggaccaaaggcgcgcaatcggcgcg

SEQ ID NO: 5866520 - DNA, 25 bp, Homo sapien
tgcacgcgtagcgacgaccgggagc

SEQ ID NO: 5866521 - DNA, 25 bp, Homo sapien
ccatccttcgcgacgtcgcgctggc

SEQ ID NO: 5866522 - DNA, 25 bp, Homo sapien
ggctctacgcctagtcgcgcgtcgc

SEQ ID NO: 5866523 - DNA, 25 bp, Homo sapien
cgggggcgacgtctaggcccgattc

SEQ ID NO: 5866524 - DNA, 25 bp, Homo sapien
cgggcgtatcgcgcggctgtcacgt

SEQ ID NO: 5866525 - DNA, 25 bp, Homo sapien
ctccgtgtacgcggcaaccggtcgg

SEQ ID NO: 5866526 - DNA, 25 bp, Homo sapien
cgccccaacggtcgcgctatgtccg

SEQ ID NO: 5866527 - DNA, 25 bp, Homo sapien
cgccctgagggtctacgcgcgccta

SEQ ID NO: 5866528 - DNA, 25 bp, Homo sapien
catgtacggcttacgccccgcggcc

SEQ ID NO: 5866529 - DNA, 25 bp, Homo sapien
ccaacggagtcgacgtgcgcagccc

SEQ ID NO: 5866530 - DNA, 25 bp, Homo sapien
aaccggccgcgagtcgtctaggcgg

SEQ ID NO: 5866531 - DNA, 25 bp, Homo sapien
acgagctatatccggcgcggccgcc

SEQ ID NO: 5866532 - DNA, 25 bp, Homo sapien
cgcgcacggaacgtccgtagtgggc

SEQ ID NO: 5866533 - DNA, 25 bp, Homo sapien
gcccgccgcgtcggtcaaaagggtg

SEQ ID NO: 5866534 - DNA, 25 bp, Homo sapien
gcagggacgcataacggcgaccccc

SEQ ID NO: 5866535 - DNA, 25 bp, Homo sapien
gactccgcgcggacatacggctcgc

SEQ ID NO: 5866536 - DNA, 25 bp, Homo sapien
ctccgggtcgcgctaaacggccctg

SEQ ID NO: 5866537 - DNA, 25 bp, Homo sapien
gtagcccccgtagacgcgtccggga

SEQ ID NO: 5866538 - DNA, 25 bp, Homo sapien
gcgaggaccgagcgctacgggcatg

SEQ ID NO: 5866539 - DNA, 25 bp, Homo sapien
gtgggcgcgcgaccgtttggtcacg

SEQ ID NO: 5866540 - DNA, 25 bp, Homo sapien
gagcgccgtagcgccgaacaggtcc

SEQ ID NO: 5866541 - DNA, 25 bp, Homo sapien
gcaggtgcgccgttatgcgcgcagg

SEQ ID NO: 5866542 - DNA, 25 bp, Homo sapien
ttggggagcgcgggtacgacagcgc

SEQ ID NO: 5866543 - DNA, 25 bp, Homo sapien
ctagtgtaccttcgcgcggcggcgg

SEQ ID NO: 5866544 - DNA, 25 bp, Homo sapien
gcggccactcgcgtgacgcttaccc

SEQ ID NO: 5866545 - DNA, 25 bp, Homo sapien
ccgcacgcgctgctagtcgtccgag

SEQ ID NO: 5866546 - DNA, 25 bp, Homo sapien
agcgtgcgcggaccgagtacctggc

SEQ ID NO: 5866547 - DNA, 25 bp, Homo sapien
gccgcagttacttcgcggcaggggc

SEQ ID NO: 5866548 - DNA, 25 bp, Homo sapien
acgcgccgggtcgtacgcaggtcga

SEQ ID NO: 5866549 - DNA, 25 bp, Homo sapien
cgccccttgcggtccggactcctct

SEQ ID NO: 5866550 - DNA, 25 bp, Homo sapien
tatccgacgtcgcgaacggccgccc

SEQ ID NO: 5866551 - DNA, 25 bp, Homo sapien
acagcagccgtaccggcgatccggg

SEQ ID NO: 5866552 - DNA, 25 bp, Homo sapien
ggtgtccccgcgatcgttgcccctc

SEQ ID NO: 5866553 - DNA, 25 bp, Homo sapien
cccgggcggtgtcgtgcgaatgcac

SEQ ID NO: 5866554 - DNA, 25 bp, Homo sapien
gctcgcctacgcatcgcggttcggg

SEQ ID NO: 5866555 - DNA, 25 bp, Homo sapien
acagccttacgcgttcgggccgccc

SEQ ID NO: 5866556 - DNA, 25 bp, Homo sapien
aggaacactctcgcggaccgcgggg

SEQ ID NO: 5866557 - DNA, 25 bp, Homo sapien
ctgggccgtaccgcggacacctcgt

SEQ ID NO: 5866558 - DNA, 25 bp, Homo sapien
gcgcgttacgacgtagccgggggca

SEQ ID NO: 5866559 - DNA, 25 bp, Homo sapien
cgccccaccgtactacgcggacgtc

SEQ ID NO: 5866560 - DNA, 25 bp, Homo sapien
agcgcttcgacggtaggccccctcc

SEQ ID NO: 5866561 - DNA, 25 bp, Homo sapien
aacggccggggtatcgtcgcctgcc

SEQ ID NO: 5866562 - DNA, 25 bp, Homo sapien
gtgcgacgtacggatgcggcggtgg

SEQ ID NO: 5866563 - DNA, 25 bp, Homo sapien
gcgcgccgctagtaggccgccaaca

SEQ ID NO: 5866564 - DNA, 25 bp, Homo sapien
ggtcgcacgaccgttcgggtcagcg

SEQ ID NO: 5866565 - DNA, 25 bp, Homo sapien
ccgcaccgagacgtacacgggcggt

SEQ ID NO: 5866566 - DNA, 25 bp, Homo sapien
ggggcgtaaaccgtcgcgcgagtgg

SEQ ID NO: 5866567 - DNA, 25 bp, Homo sapien
ccgcagcggtccgatacccatgccg

SEQ ID NO: 5866568 - DNA, 25 bp, Homo sapien
caccggcgacgtacgctcttgggcg

SEQ ID NO: 5866569 - DNA, 25 bp, Homo sapien
tgacaggtcgcatcacgcgcgcccc

SEQ ID NO: 5866570 - DNA, 25 bp, Homo sapien
tccccgctgcgcgcgtaacggagtc

SEQ ID NO: 5866571 - DNA, 25 bp, Homo sapien
gggggcgggtcgctcgtatcaggag

SEQ ID NO: 5866572 - DNA, 25 bp, Homo sapien
gtcgaccacgtcggccgtaccccga

SEQ ID NO: 5866573 - DNA, 25 bp, Homo sapien
aggtcccctatcgcgacgcgccgag

SEQ ID NO: 5866574 - DNA, 25 bp, Homo sapien
gccgtgaccgacgggtcgcgttcgt

SEQ ID NO: 5866575 - DNA, 25 bp, Homo sapien
cgaccggcgccgtaccatgctccct

SEQ ID NO: 5866576 - DNA, 25 bp, Homo sapien
tgggtctagtcggacggcgcccagg

SEQ ID NO: 5866577 - DNA, 25 bp, Homo sapien
accacgccgcgagcgacgtgccgaa

SEQ ID NO: 5866578 - DNA, 25 bp, Homo sapien
ccggcgtcgttacgcgtacctgcgg

SEQ ID NO: 5866579 - DNA, 25 bp, Homo sapien
tcgtcgtattcgccgcgcctgcccc

SEQ ID NO: 5866580 - DNA, 25 bp, Homo sapien
ccgccgggcgccctaatcgctcgaa

SEQ ID NO: 5866581 - DNA, 25 bp, Homo sapien
gtgcctggcgtaccgctacgcagcg

SEQ ID NO: 5866582 - DNA, 25 bp, Homo sapien
cgcgcgactagggcgcgaagaccca

SEQ ID NO: 5866583 - DNA, 25 bp, Homo sapien
cacttcgcgacgtagcgaccgcccc

SEQ ID NO: 5866584 - DNA, 25 bp, Homo sapien
cggcgaccgccgatacacggcctga

SEQ ID NO: 5866585 - DNA, 25 bp, Homo sapien
gcggcaggccgcctattcgctccgt

SEQ ID NO: 5866586 - DNA, 25 bp, Homo sapien
ccttctcggagcgcgcaatcccgcg

SEQ ID NO: 5866587 - DNA, 25 bp, Homo sapien
ccgctgtacgtacacgccggacgcg

SEQ ID NO: 5866588 - DNA, 25 bp, Homo sapien
ccgaggcgacgtcgcgctaccgctt

SEQ ID NO: 5866589 - DNA, 25 bp, Homo sapien
gccgcgtcgtagcggacgcgttgca

SEQ ID NO: 5866590 - DNA, 25 bp, Homo sapien
tcactgtccgcgatcggaccgcccg

SEQ ID NO: 5866591 - DNA, 25 bp, Homo sapien
ccctgggtcgcgagacgctagacgc

SEQ ID NO: 5866592 - DNA, 25 bp, Homo sapien
gggcttacgccatagcgcgcgcacg

SEQ ID NO: 5866593 - DNA, 25 bp, Homo sapien
ccaccgcgtgcggatacgcggcgat

SEQ ID NO: 5866594 - DNA, 25 bp, Homo sapien
gcgcacgtcccgatacgcgcgtctc

SEQ ID NO: 5866595 - DNA, 25 bp, Homo sapien
acggcgcgagcgggctacggcgata

SEQ ID NO: 5866596 - DNA, 25 bp, Homo sapien
cgcgctactccggacgtcgaacggc

SEQ ID NO: 5866597 - DNA, 25 bp, Homo sapien
ggccgcctagtccggcgatgatgcg

SEQ ID NO: 5866598 - DNA, 25 bp, Homo sapien
tcaggctacgtcgacccgcggacgc

SEQ ID NO: 5866599 - DNA, 25 bp, Homo sapien
gggacccgtcgacacgcgtagctgg

SEQ ID NO: 5866600 - DNA, 25 bp, Homo sapien
gcgtggtacttcgcgcgcgcctcgt

SEQ ID NO: 5866601 - DNA, 25 bp, Homo sapien
ctaagcacgacccaacgcgcgccgg

SEQ ID NO: 5866602 - DNA, 25 bp, Homo sapien
cggagcgcgttagccgtcgctgagg

SEQ ID NO: 5866603 - DNA, 25 bp, Homo sapien
cccgccacgcgatcaagcgcgtctg

SEQ ID NO: 5866604 - DNA, 25 bp, Homo sapien
tggcgctacgacgtagcgcgcagcg

SEQ ID NO: 5866605 - DNA, 25 bp, Homo sapien
gccacccgacggaccgtatcggagc

SEQ ID NO: 5866606 - DNA, 25 bp, Homo sapien
gggcgacgactagttcgcgacggcc

SEQ ID NO: 5866607 - DNA, 25 bp, Homo sapien
ccgtcccctatccgcgacgctcgct

SEQ ID NO: 5866608 - DNA, 25 bp, Homo sapien
ccagcgccgtatcggaacgcggtcc

SEQ ID NO: 5866609 - DNA, 25 bp, Homo sapien
gacggaagcgaccgttgggcggctg

SEQ ID NO: 5866610 - DNA, 25 bp, Homo sapien
ccctcctctcgtgtacgcgcccacg

SEQ ID NO: 5866611 - DNA, 25 bp, Homo sapien
ccccaatcgtctcgcgtggacgggg

SEQ ID NO: 5866612 - DNA, 25 bp, Homo sapien
ccctcgacggggcgatactcgagcc

SEQ ID NO: 5866613 - DNA, 25 bp, Homo sapien
cgcgtctagcccgctacggcgacgt

SEQ ID NO: 5866614 - DNA, 25 bp, Homo sapien
cgcccccgtcgtatcggcccaacag

SEQ ID NO: 5866615 - DNA, 25 bp, Homo sapien
gcggatggtacgccgaccgctctgc

SEQ ID NO: 5866616 - DNA, 25 bp, Homo sapien
tcgtcggtaccccggttcggcaggc

SEQ ID NO: 5866617 - DNA, 25 bp, Homo sapien
ggcctacgcggtataggtcggcggc

SEQ ID NO: 5866618 - DNA, 25 bp, Homo sapien
gggagcccgtgctagcgcgcttgga

SEQ ID NO: 5866619 - DNA, 25 bp, Homo sapien
cactcctagcgacccgcgatgcccc

SEQ ID NO: 5866620 - DNA, 25 bp, Homo sapien
ccgtgggcgcggttcgtcagcagac

SEQ ID NO: 5866621 - DNA, 25 bp, Homo sapien
gtctggcgtctacccgcgacccgtg

SEQ ID NO: 5866622 - DNA, 25 bp, Homo sapien
ctgcggtacgtcgcggacgccatcg

SEQ ID NO: 5866623 - DNA, 25 bp, Homo sapien
ggttaccgccggtacgaaggcgcgc

SEQ ID NO: 5866624 - DNA, 25 bp, Homo sapien
gttctgtcgctacacgcggccccgg

SEQ ID NO: 5866625 - DNA, 25 bp, Homo sapien
gggagcgtgcgcgagtaacgcccgt

SEQ ID NO: 5866626 - DNA, 25 bp, Homo sapien
tgccgtcgcgacgttaggctgcggg

SEQ ID NO: 5866627 - DNA, 25 bp, Homo sapien
tcggctaccgcggtacggcaggtgc

SEQ ID NO: 5866628 - DNA, 25 bp, Homo sapien
ccactgcgggtcgacgtgtggggtc

SEQ ID NO: 5866629 - DNA, 25 bp, Homo sapien
ggcgggccgacccggtatggctaac

SEQ ID NO: 5866630 - DNA, 25 bp, Homo sapien
acccacaatccgcgtaggccggccc

SEQ ID NO: 5866631 - DNA, 25 bp, Homo sapien
cgggtcggccgaatctacgacccgc

SEQ ID NO: 5866632 - DNA, 25 bp, Homo sapien
gcggctccgcgcgtacaagaccggt

SEQ ID NO: 5866633 - DNA, 25 bp, Homo sapien
ctgcgccgacgcgtagggatcggac

SEQ ID NO: 5866634 - DNA, 25 bp, Homo sapien
ggtcggacgcgcgtatggcggccat

SEQ ID NO: 5866635 - DNA, 25 bp, Homo sapien
gcagggatcgcgcgacggggaatgg

SEQ ID NO: 5866636 - DNA, 25 bp, Homo sapien
tcgtccgtgcggtcgtacggctggc

SEQ ID NO: 5866637 - DNA, 25 bp, Homo sapien
gcccgcaaccgcgttcggtagaggc

SEQ ID NO: 5866638 - DNA, 25 bp, Homo sapien
gcctcgctacgcgacgtgcccctct

SEQ ID NO: 5866639 - DNA, 25 bp, Homo sapien
gtcccctcgtgcgacacgatgcggg

SEQ ID NO: 5866640 - DNA, 25 bp, Homo sapien
gacggcacgggacgcgtacagacgg

SEQ ID NO: 5866641 - DNA, 25 bp, Homo sapien
cagcccgcgcgcgtaatcgatccgc

SEQ ID NO: 5866642 - DNA, 25 bp, Homo sapien
cgagcgcgtgacgcgtagcgggttc

SEQ ID NO: 5866643 - DNA, 25 bp, Homo sapien
cacgacacgcgtatcgcggccctcc

SEQ ID NO: 5866644 - DNA, 25 bp, Homo sapien
ccgatgctcggtcggaccgggctct

SEQ ID NO: 5866645 - DNA, 25 bp, Homo sapien
gcccggggcatctaacgcgctgggt

SEQ ID NO: 5866646 - DNA, 25 bp, Homo sapien
cctgcaagatcggtcgccccgacgg

SEQ ID NO: 5866647 - DNA, 25 bp, Homo sapien
cccggacaccgtacgctcgctctgc

SEQ ID NO: 5866648 - DNA, 25 bp, Homo sapien
agggcgacgcgcaatagcctcgggg

SEQ ID NO: 5866649 - DNA, 25 bp, Homo sapien
ggatcgggcgcgcggtatagccctc

SEQ ID NO: 5866650 - DNA, 25 bp, Homo sapien
ctgggggttacccgcgacgctgcac

SEQ ID NO: 5866651 - DNA, 25 bp, Homo sapien
cccgacagtccggtcgcgcaccaga

SEQ ID NO: 5866652 - DNA, 25 bp, Homo sapien
cgggatcacgttcgatcggccgcgg

SEQ ID NO: 5866653 - DNA, 25 bp, Homo sapien
cccgacacgtacgcgtgcctgggac

SEQ ID NO: 5866654 - DNA, 25 bp, Homo sapien
ctcgcgtgtgcgatcgcgcgggact

SEQ ID NO: 5866655 - DNA, 25 bp, Homo sapien
ggcgtgtacgggcccgacagcactc

SEQ ID NO: 5866656 - DNA, 25 bp, Homo sapien
ggtgggcggattgtgtcgcgagccg

SEQ ID NO: 5866657 - DNA, 25 bp, Homo sapien
tggcgctaactccgtcgggggacgc

SEQ ID NO: 5866658 - DNA, 25 bp, Homo sapien
ctcacggtcgcggcgttaccgacgg

SEQ ID NO: 5866659 - DNA, 25 bp, Homo sapien
cgctgctacgcgggaacgccgagtc

SEQ ID NO: 5866660 - DNA, 25 bp, Homo sapien
accgtcgctcgcgggtcgaggcaac

SEQ ID NO: 5866661 - DNA, 25 bp, Homo sapien
ggctcctagcgtccgcgaccaccac

SEQ ID NO: 5866662 - DNA, 25 bp, Homo sapien
tgggcgcgtccggtatcgcccacct

SEQ ID NO: 5866663 - DNA, 25 bp, Homo sapien
gctccccgtccatacgcgcggctct

SEQ ID NO: 5866664 - DNA, 25 bp, Homo sapien
tacggccgggctattcgcgcgctcg

SEQ ID NO: 5866665 - DNA, 25 bp, Homo sapien
agagcggacgtgcgcggtttggccg

SEQ ID NO: 5866666 - DNA, 25 bp, Homo sapien
ggctcactccgtacggtcgccgcga

SEQ ID NO: 5866667 - DNA, 25 bp, Homo sapien
tcgggccggccgcgctatacggtga

SEQ ID NO: 5866668 - DNA, 25 bp, Homo sapien
aggccccgacgcgttacgggtgcga

SEQ ID NO: 5866669 - DNA, 25 bp, Homo sapien
cggcctgtgtagcgcgctagggcag

SEQ ID NO: 5866670 - DNA, 25 bp, Homo sapien
gcggcggtacgacgcgaccagagac

SEQ ID NO: 5866671 - DNA, 25 bp, Homo sapien
ccccagtcaacgcgagccggtccga

SEQ ID NO: 5866672 - DNA, 25 bp, Homo sapien
gtgcacaccgttcgtccggggcacg

SEQ ID NO: 5866673 - DNA, 25 bp, Homo sapien
cacagttcggctcgcgagtgggggc

SEQ ID NO: 5866674 - DNA, 25 bp, Homo sapien
ggggcgccgcggttcgctacctaac

SEQ ID NO: 5866675 - DNA, 25 bp, Homo sapien
ctcagccggcgtatcgacgggctcg

SEQ ID NO: 5866676 - DNA, 25 bp, Homo sapien
cccggcgggtcgcgtatgcgaggat

SEQ ID NO: 5866677 - DNA, 25 bp, Homo sapien
gtcgcctgacgttagcgcgccggca

SEQ ID NO: 5866678 - DNA, 25 bp, Homo sapien
gagtgcacctgcgacgtacccggcc

SEQ ID NO: 5866679 - DNA, 25 bp, Homo sapien
cggcagcgggcgtccgtattcggtc

SEQ ID NO: 5866680 - DNA, 25 bp, Homo sapien
gccccgcgcgactgtgtcgctacgt

SEQ ID NO: 5866681 - DNA, 25 bp, Homo sapien
ccgggttcgatacgtggcggcagcg

SEQ ID NO: 5866682 - DNA, 25 bp, Homo sapien
gctcgcctacgcgccaacgcgtgag

SEQ ID NO: 5866683 - DNA, 25 bp, Homo sapien
cggcaatcgtcccggtacgcctggc

SEQ ID NO: 5866684 - DNA, 25 bp, Homo sapien
tccgccacgcgtaccggtggctctc

SEQ ID NO: 5866685 - DNA, 25 bp, Homo sapien
caaggcgctacgttgcgcgacgccc

SEQ ID NO: 5866686 - DNA, 25 bp, Homo sapien
tgcgctggcgttaacgacggccggc

SEQ ID NO: 5866687 - DNA, 25 bp, Homo sapien
tgctgcggccactcgcgtatcgcgc

SEQ ID NO: 5866688 - DNA, 25 bp, Homo sapien
ctagggcgcgtagacccgatggccg

SEQ ID NO: 5866689 - DNA, 25 bp, Homo sapien
gcgactcgcggtcgaccaaccacgc

SEQ ID NO: 5866690 - DNA, 25 bp, Homo sapien
ccctcagagtcggtacgcgcaccgg

SEQ ID NO: 5866691 - DNA, 25 bp, Homo sapien
ggcgtccgacgcaatcccgagctgg

SEQ ID NO: 5866692 - DNA, 25 bp, Homo sapien
ggtccggtggttcgcgcgagttcgc

SEQ ID NO: 5866693 - DNA, 25 bp, Homo sapien
aggcgaacttacgggcccgccgcac

SEQ ID NO: 5866694 - DNA, 25 bp, Homo sapien
gcgtgctcgcgcgagtatccacgcg

SEQ ID NO: 5866695 - DNA, 25 bp, Homo sapien
acagggcagtacgcgccgaagggcc

SEQ ID NO: 5866696 - DNA, 25 bp, Homo sapien
gcgcggcgttcgacgtaagagcggc

SEQ ID NO: 5866697 - DNA, 25 bp, Homo sapien
cgacggcgtacgccgtcaggactcc

SEQ ID NO: 5866698 - DNA, 25 bp, Homo sapien
ctcgggacgacgctacccgtgccga

SEQ ID NO: 5866699 - DNA, 25 bp, Homo sapien
gggccacgctacgcgagcttcgcag

SEQ ID NO: 5866700 - DNA, 25 bp, Homo sapien
gttccgcgcgaacggtagcggctcg

SEQ ID NO: 5866701 - DNA, 25 bp, Homo sapien
agacgcgtccgcggtcgactcgtgg

SEQ ID NO: 5866702 - DNA, 25 bp, Homo sapien
agtccgcgacgcgtaaccggcggtg

SEQ ID NO: 5866703 - DNA, 25 bp, Homo sapien
ggagcgcgcgtctagcgtagcggga

SEQ ID NO: 5866704 - DNA, 25 bp, Homo sapien
atggctcgacgggcggatagcgggc

SEQ ID NO: 5866705 - DNA, 25 bp, Homo sapien
cagcgtcgtagcgcgtcgcccccta

SEQ ID NO: 5866706 - DNA, 25 bp, Homo sapien
gcctcgtcgcgtaccccgaacaccc

SEQ ID NO: 5866707 - DNA, 25 bp, Homo sapien
ggcgggtgcgcgattaacggtgggg

SEQ ID NO: 5866708 - DNA, 25 bp, Homo sapien
tgacgcgtccttcgcgcgtcgacgg

SEQ ID NO: 5866709 - DNA, 25 bp, Homo sapien
gccggataacgtcgcgcctccgctc

SEQ ID NO: 5866710 - DNA, 25 bp, Homo sapien
gcgagccctcgacgcaacgacgtgc

SEQ ID NO: 5866711 - DNA, 25 bp, Homo sapien
gcccctgtgcggcgcgataggctga

SEQ ID NO: 5866712 - DNA, 25 bp, Homo sapien
gccgtgtagatacgcgagcccgggg

SEQ ID NO: 5866713 - DNA, 25 bp, Homo sapien
cgcacacgaccggtcggctacccca

SEQ ID NO: 5866714 - DNA, 25 bp, Homo sapien
ccgactcgcgctacctacgcggggt

SEQ ID NO: 5866715 - DNA, 25 bp, Homo sapien
ctgtgcgggtgctacgacgcgacgg

SEQ ID NO: 5866716 - DNA, 25 bp, Homo sapien
tacctcttgcgacgcgctcccgggg

SEQ ID NO: 5866717 - DNA, 25 bp, Homo sapien
acccccgatcgtcaggtcgagcccg

SEQ ID NO: 5866718 - DNA, 25 bp, Homo sapien
tggggccgtacgggctactcgaccg

SEQ ID NO: 5866719 - DNA, 25 bp, Homo sapien
ccgggatcgtacgaacgcgggcgtc

SEQ ID NO: 5866720 - DNA, 25 bp, Homo sapien
acgccggggcttcgtacgggtgcac

SEQ ID NO: 5866721 - DNA, 25 bp, Homo sapien
ggggtacgcgtcaccgtaggggcca

SEQ ID NO: 5866722 - DNA, 25 bp, Homo sapien
tacgtggccgtaatgcgcgccggcc

SEQ ID NO: 5866723 - DNA, 25 bp, Homo sapien
ctgccggtagtgcgccgcaccgaca

SEQ ID NO: 5866724 - DNA, 25 bp, Homo sapien
ggtggtacgcgtagctcgggtccgc

SEQ ID NO: 5866725 - DNA, 25 bp, Homo sapien
gggcgcccctagtagcgcggacgaa

SEQ ID NO: 5866726 - DNA, 25 bp, Homo sapien
ctcaggcccgaccgatagggagggc

SEQ ID NO: 5866727 - DNA, 25 bp, Homo sapien
ggggagtatgcggggcgtcggtcgt

SEQ ID NO: 5866728 - DNA, 25 bp, Homo sapien
gttgagccgcggacatacgggcgcc

SEQ ID NO: 5866729 - DNA, 25 bp, Homo sapien
gtgacctacgatcggcccccgagcg

SEQ ID NO: 5866730 - DNA, 25 bp, Homo sapien
ttccggcgtagttcgcgcgggctgg

SEQ ID NO: 5866731 - DNA, 25 bp, Homo sapien
gccgaccggtaacgagccgcctagg

SEQ ID NO: 5866732 - DNA, 25 bp, Homo sapien
cggcgcacgattacgacccacgcgc

SEQ ID NO: 5866733 - DNA, 25 bp, Homo sapien
gcttgcgttcgggcgtacgccctgc

SEQ ID NO: 5866734 - DNA, 25 bp, Homo sapien
ccagtgtgtagcggggcgagcaccc

SEQ ID NO: 5866735 - DNA, 25 bp, Homo sapien
gctcggttatgccgcgacgccccgt

SEQ ID NO: 5866736 - DNA, 25 bp, Homo sapien
cccctccatagatcgcgcgggccga

SEQ ID NO: 5866737 - DNA, 25 bp, Homo sapien
ccggggcgtagcttcgtcgggtcga

SEQ ID NO: 5866738 - DNA, 25 bp, Homo sapien
gccgctccggtcgataccgcaagcc

SEQ ID NO: 5866739 - DNA, 25 bp, Homo sapien
tcgggacgacgcctacgcgtggtcg

SEQ ID NO: 5866740 - DNA, 25 bp, Homo sapien
cgcgtctatcgcgcggcgttaggcg

SEQ ID NO: 5866741 - DNA, 25 bp, Homo sapien
cgctatcctacgcgctcgacggggc

SEQ ID NO: 5866742 - DNA, 25 bp, Homo sapien
cgccggaccggtcgacaacggacag

SEQ ID NO: 5866743 - DNA, 25 bp, Homo sapien
ggcaggtcgcgggacgttacgggag

SEQ ID NO: 5866744 - DNA, 25 bp, Homo sapien
ggaagccgttacgcgtgccgctccg

SEQ ID NO: 5866745 - DNA, 25 bp, Homo sapien
tacgcccccgtaacgtgccggggca

SEQ ID NO: 5866746 - DNA, 25 bp, Homo sapien
ccgcccgtgtcgaaccgcctcaacc

SEQ ID NO: 5866747 - DNA, 25 bp, Homo sapien
ccgagcaccttacgcgcgacggctg

SEQ ID NO: 5866748 - DNA, 25 bp, Homo sapien
gcgccggcgtacgacaccgatcgag

SEQ ID NO: 5866749 - DNA, 25 bp, Homo sapien
gcgggtgcgcgcagtatcgccgcta

SEQ ID NO: 5866750 - DNA, 25 bp, Homo sapien
ggggcactggtcgcgagacgggaac

SEQ ID NO: 5866751 - DNA, 25 bp, Homo sapien
acgcgacagtatgcgtcgcggcgcc

SEQ ID NO: 5866752 - DNA, 25 bp, Homo sapien
cactgcatgccgcggtcgacgctgg

SEQ ID NO: 5866753 - DNA, 25 bp, Homo sapien
aggctccatgacgcgtcgccgctgg

SEQ ID NO: 5866754 - DNA, 25 bp, Homo sapien
gcacgcactaggcgtctcgcagcgc

SEQ ID NO: 5866755 - DNA, 25 bp, Homo sapien
gccaggtatcgtcgcggaccagggg

SEQ ID NO: 5866756 - DNA, 25 bp, Homo sapien
gggcgggccgtacggacggactatg

SEQ ID NO: 5866757 - DNA, 25 bp, Homo sapien
gcaccgcgcgttaaacgggggctcc

SEQ ID NO: 5866758 - DNA, 25 bp, Homo sapien
gcgggtctacggccgtaacgccgtg

SEQ ID NO: 5866759 - DNA, 25 bp, Homo sapien
ggcctatccgtacgtcgggcgggac

SEQ ID NO: 5866760 - DNA, 25 bp, Homo sapien
tcccgccccgcgctaatcgagtcgc

SEQ ID NO: 5866761 - DNA, 25 bp, Homo sapien
cacccgcgatcggaccggtacgagc

SEQ ID NO: 5866762 - DNA, 25 bp, Homo sapien
ccaggttaggcgtcggccgacagcc

SEQ ID NO: 5866763 - DNA, 25 bp, Homo sapien
caacaccggtcgtgacgggaccgcg

SEQ ID NO: 5866764 - DNA, 25 bp, Homo sapien
gccggggcgcgtcgtacgacggtta

SEQ ID NO: 5866765 - DNA, 25 bp, Homo sapien
ggccagggcgtaagcgacgctgacc

SEQ ID NO: 5866766 - DNA, 25 bp, Homo sapien
gtactgtacgtccgctccgcggggc

SEQ ID NO: 5866767 - DNA, 25 bp, Homo sapien
cggaagatctacgtcgcgccgggcc

SEQ ID NO: 5866768 - DNA, 25 bp, Homo sapien
gcgcgtcgcgatacgcgaagcgagg

SEQ ID NO: 5866769 - DNA, 25 bp, Homo sapien
ggccccccgtgaacggacgtgcaag

SEQ ID NO: 5866770 - DNA, 25 bp, Homo sapien
gcgggtttcgtgcgtcggctcccac

SEQ ID NO: 5866771 - DNA, 25 bp, Homo sapien
tggccccgcccgtcggtatcgggaa

SEQ ID NO: 5866772 - DNA, 25 bp, Homo sapien
cgccccctcgccttacgcgcggtta

SEQ ID NO: 5866773 - DNA, 25 bp, Homo sapien
gccgaccgcgctcgtaagtgaggcg

SEQ ID NO: 5866774 - DNA, 25 bp, Homo sapien
acggcgcgacatagcgggctgtcgg

SEQ ID NO: 5866775 - DNA, 25 bp, Homo sapien
cccagccaccgattgcgcgggctag

SEQ ID NO: 5866776 - DNA, 25 bp, Homo sapien
gcaccggtcgtacggcgacttcggc

SEQ ID NO: 5866777 - DNA, 25 bp, Homo sapien
tgacgcgatcgcgccgtaacggcgg

SEQ ID NO: 5866778 - DNA, 25 bp, Homo sapien
ccggcgcgacggttaacgctggtcg

SEQ ID NO: 5866779 - DNA, 25 bp, Homo sapien
cgggccccgcgtcgaaccaagagtc

SEQ ID NO: 5866780 - DNA, 25 bp, Homo sapien
gggtccccctacgctaccgcgctac

SEQ ID NO: 5866781 - DNA, 25 bp, Homo sapien
atgatccgaccgcggatgggccccc

SEQ ID NO: 5866782 - DNA, 25 bp, Homo sapien
aagccccgcgccgtgatacccaggg

SEQ ID NO: 5866783 - DNA, 25 bp, Homo sapien
caggaacggtcgcgaggttggcccg

SEQ ID NO: 5866784 - DNA, 25 bp, Homo sapien
aggcggggtacgcgcgtagctgggt

SEQ ID NO: 5866785 - DNA, 25 bp, Homo sapien
cgctcgttcgcgccggtctatccgg

SEQ ID NO: 5866786 - DNA, 25 bp, Homo sapien
gccgcttaccgacgcgtaccccgtg

SEQ ID NO: 5866787 - DNA, 25 bp, Homo sapien
cccctcataccgcgcgatcgggcct

SEQ ID NO: 5866788 - DNA, 25 bp, Homo sapien
ggctcgactgtcgtacgcccggacg

SEQ ID NO: 5866789 - DNA, 25 bp, Homo sapien
gcggtgcgctctcgactcgatcgcc

SEQ ID NO: 5866790 - DNA, 25 bp, Homo sapien
gtccggagaccgtcacgcgctcgga

SEQ ID NO: 5866791 - DNA, 25 bp, Homo sapien
ccctcttacgggcgagctagccgcc

SEQ ID NO: 5866792 - DNA, 25 bp, Homo sapien
tcgtccatgcgtaccgccgcccacg

SEQ ID NO: 5866793 - DNA, 25 bp, Homo sapien
gcggcccgcaacgacggtcaacagg

SEQ ID NO: 5866794 - DNA, 25 bp, Homo sapien
gtcggctcgcgggtcgtaagctccc

SEQ ID NO: 5866795 - DNA, 25 bp, Homo sapien
cgttgctccggtcgagcgaggccac

SEQ ID NO: 5866796 - DNA, 25 bp, Homo sapien
gggtagctagcgcgtcgagccccgt

SEQ ID NO: 5866797 - DNA, 25 bp, Homo sapien
agtcggttacgcgcggaccacgcgg

SEQ ID NO: 5866798 - DNA, 25 bp, Homo sapien
cgtggccgctcgatacggcaaggcg

SEQ ID NO: 5866799 - DNA, 25 bp, Homo sapien
cgggtacgatcgacctgcggcgcct

SEQ ID NO: 5866800 - DNA, 25 bp, Homo sapien
gccgtggggtacgaacgctggctgg

SEQ ID NO: 5866801 - DNA, 25 bp, Homo sapien
gcggcagacgtatccgcgcgtcgag

SEQ ID NO: 5866802 - DNA, 25 bp, Homo sapien
ccccagtaacgtgcggcgggtccca

SEQ ID NO: 5866803 - DNA, 25 bp, Homo sapien
cccgcgcgctatacgtcgtcgctcg

SEQ ID NO: 5866804 - DNA, 25 bp, Homo sapien
acccgcgtccgtcggacgtagtcgc

SEQ ID NO: 5866805 - DNA, 25 bp, Homo sapien
gccggtcgggttcgcggtacacacg

SEQ ID NO: 5866806 - DNA, 25 bp, Homo sapien
cgccgggacgatacgggactctggg

SEQ ID NO: 5866807 - DNA, 25 bp, Homo sapien
cctcaccgcccaatacgcgcctgcg

SEQ ID NO: 5866808 - DNA, 25 bp, Homo sapien
cacgcaatcgggcgtcgaggggcag

SEQ ID NO: 5866809 - DNA, 25 bp, Homo sapien
gcgggcacgcggtgtagcgacaacg

SEQ ID NO: 5866810 - DNA, 25 bp, Homo sapien
cactccataccgcgacgggcctggc

SEQ ID NO: 5866811 - DNA, 25 bp, Homo sapien
ggccctgacgctacgagacgcggtc

SEQ ID NO: 5866812 - DNA, 25 bp, Homo sapien
gcttcggtccgcgagtacgggcgtc

SEQ ID NO: 5866813 - DNA, 25 bp, Homo sapien
ggaaaggcgcgacgcatcaccccgc

SEQ ID NO: 5866814 - DNA, 25 bp, Homo sapien
cagcgccgcgacccgcgtatgaacc

SEQ ID NO: 5866815 - DNA, 25 bp, Homo sapien
ctccagcgcgagttagccgccccga

SEQ ID NO: 5866816 - DNA, 25 bp, Homo sapien
gcgcgcgtcgacgctaggtggtcct

SEQ ID NO: 5866817 - DNA, 25 bp, Homo sapien
ccgggtggttgcgtcgtgctggtgg

SEQ ID NO: 5866818 - DNA, 25 bp, Homo sapien
gaccctcaatgcgctaccgggcccc

SEQ ID NO: 5866819 - DNA, 25 bp, Homo sapien
ggtgtccgcgcgactagtcacccgc

SEQ ID NO: 5866820 - DNA, 25 bp, Homo sapien
gactcttcacgcggcgagtccgccg

SEQ ID NO: 5866821 - DNA, 25 bp, Homo sapien
ctgccagtcgccaatcgcgctgccc

SEQ ID NO: 5866822 - DNA, 25 bp, Homo sapien
ggcgggcatcgcgctagcgaagcct

SEQ ID NO: 5866823 - DNA, 25 bp, Homo sapien
gctgtaatcgcgcgtcgagggcggg

SEQ ID NO: 5866824 - DNA, 25 bp, Homo sapien
ctgcccgcggatactcgctgagccg

SEQ ID NO: 5866825 - DNA, 25 bp, Homo sapien
cccagccgcgctcgacgtatgagcc

SEQ ID NO: 5866826 - DNA, 25 bp, Homo sapien
cacgtccgtctaactcgcggggggc

SEQ ID NO: 5866827 - DNA, 25 bp, Homo sapien
tccggttacctgtcgcgggcggacc

SEQ ID NO: 5866828 - DNA, 25 bp, Homo sapien
cctgtcgatccggtcgaccgcccct

SEQ ID NO: 5866829 - DNA, 25 bp, Homo sapien
cgcttcccgcgacgtagttcccgcc

SEQ ID NO: 5866830 - DNA, 25 bp, Homo sapien
gtggtcacctcgcacgcgaggccga

SEQ ID NO: 5866831 - DNA, 25 bp, Homo sapien
ccccgcacggatcgacgcgtgtagg

SEQ ID NO: 5866832 - DNA, 25 bp, Homo sapien
tcacggttcgacgacccgcgccgac

SEQ ID NO: 5866833 - DNA, 25 bp, Homo sapien
gcgactcgcggcgtcggtaacgcct

SEQ ID NO: 5866834 - DNA, 25 bp, Homo sapien
caagtggcgtcgtacgtcccgccgc

SEQ ID NO: 5866835 - DNA, 25 bp, Homo sapien
ggacgacctagcggtcgagaccggc

SEQ ID NO: 5866836 - DNA, 25 bp, Homo sapien
tggccctaccgacgtgcgtccgacc

SEQ ID NO: 5866837 - DNA, 25 bp, Homo sapien
tgcgttgtagtccgtcgcgcgcggc

SEQ ID NO: 5866838 - DNA, 25 bp, Homo sapien
tccggcccgtacgggagcggtagag

SEQ ID NO: 5866839 - DNA, 25 bp, Homo sapien
cctcgtgtgtcgtaaccgcggggcc

SEQ ID NO: 5866840 - DNA, 25 bp, Homo sapien
cgcggacgagccgatcggtccgaga

SEQ ID NO: 5866841 - DNA, 25 bp, Homo sapien
gcctcggcgttcccgcgtaatcggg

SEQ ID NO: 5866842 - DNA, 25 bp, Homo sapien
agcggccaagtcgcggcgtttcggg

SEQ ID NO: 5866843 - DNA, 25 bp, Homo sapien
gaggcctcgactagagcggccccct

SEQ ID NO: 5866844 - DNA, 25 bp, Homo sapien
cgcgacactagccgtcgcggctcac

SEQ ID NO: 5866845 - DNA, 25 bp, Homo sapien
gcccttcgtacgtgaccggggcagg

SEQ ID NO: 5866846 - DNA, 25 bp, Homo sapien
caccaggcgacgtacccgtcgccca

SEQ ID NO: 5866847 - DNA, 25 bp, Homo sapien
accagggtccgcgatcggagggcag

SEQ ID NO: 5866848 - DNA, 25 bp, Homo sapien
gcggactacgcgaagaccgggggtc

SEQ ID NO: 5866849 - DNA, 25 bp, Homo sapien
gcagtgtcgcgcgacatcgtcgcgc

SEQ ID NO: 5866850 - DNA, 25 bp, Homo sapien
gaggcgacatgcgcgacgggctcac

SEQ ID NO: 5866851 - DNA, 25 bp, Homo sapien
gggcaggacgggaccgctacatcgg

SEQ ID NO: 5866852 - DNA, 25 bp, Homo sapien
cgacggcgtactgcgcgaccctgac

SEQ ID NO: 5866853 - DNA, 25 bp, Homo sapien
ggttcctgtcgcgcggtccggctca

SEQ ID NO: 5866854 - DNA, 25 bp, Homo sapien
cgccacccgtaccgcgataacgcgg

SEQ ID NO: 5866855 - DNA, 25 bp, Homo sapien
ggacgcacgcgccctaggtgggtga

SEQ ID NO: 5866856 - DNA, 25 bp, Homo sapien
tacggggcgacgtcgcgaagcccac

SEQ ID NO: 5866857 - DNA, 25 bp, Homo sapien
gtggggtaccgacgacgcgcaggct

SEQ ID NO: 5866858 - DNA, 25 bp, Homo sapien
ttggtcgccgtacggtcgacgccgc

SEQ ID NO: 5866859 - DNA, 25 bp, Homo sapien
gggtgcgagtagaccgcgccgcaca

SEQ ID NO: 5866860 - DNA, 25 bp, Homo sapien
gaagcgcggtacgcgctacaccggc

SEQ ID NO: 5866861 - DNA, 25 bp, Homo sapien
gcggtccgcggctgatacgccgtac

SEQ ID NO: 5866862 - DNA, 25 bp, Homo sapien
ctcatgctcgcgacggaccgcccag

SEQ ID NO: 5866863 - DNA, 25 bp, Homo sapien
ccatcgcggatcgcacggccgtgtc

SEQ ID NO: 5866864 - DNA, 25 bp, Homo sapien
tggcggtagtaccgcgaggtcccgc

SEQ ID NO: 5866865 - DNA, 25 bp, Homo sapien
gctggggtcgacctaggcgccgtac

SEQ ID NO: 5866866 - DNA, 25 bp, Homo sapien
ggagacctcgcgactacggcgggca

SEQ ID NO: 5866867 - DNA, 25 bp, Homo sapien
ggaggacgcgagtggtcgccgttgc

SEQ ID NO: 5866868 - DNA, 25 bp, Homo sapien
cccaggcgtccgccgggtaactgct

SEQ ID NO: 5866869 - DNA, 25 bp, Homo sapien
cgccgacgccgaacgttgtccggga

SEQ ID NO: 5866870 - DNA, 25 bp, Homo sapien
gagcggcggcctaacgtcgcgatcc

SEQ ID NO: 5866871 - DNA, 25 bp, Homo sapien
ccccccgcgcgagtctatccgttgc

SEQ ID NO: 5866872 - DNA, 25 bp, Homo sapien
cccaccggaccgcggttagctggca

SEQ ID NO: 5866873 - DNA, 25 bp, Homo sapien
gcacggagtacgcgcgaaccagcgc

SEQ ID NO: 5866874 - DNA, 25 bp, Homo sapien
cgccgctcgccctaacgcgacctca

SEQ ID NO: 5866875 - DNA, 25 bp, Homo sapien
gccttcacccgcgttacgtcgcgcg

SEQ ID NO: 5866876 - DNA, 25 bp, Homo sapien
cgtgctacccgacgggctagcgtcg

SEQ ID NO: 5866877 - DNA, 25 bp, Homo sapien
cgcgggcgtagtacgtccgggacca

SEQ ID NO: 5866878 - DNA, 25 bp, Homo sapien
acgcggtacgcgcgggactacgtcc

SEQ ID NO: 5866879 - DNA, 25 bp, Homo sapien
accgcgggtcgcccgatatcacccc

SEQ ID NO: 5866880 - DNA, 25 bp, Homo sapien
tcctctcggctaggcgtcgggcgac

SEQ ID NO: 5866881 - DNA, 25 bp, Homo sapien
ggtcacatcgagcgcgcagcgtccc

SEQ ID NO: 5866882 - DNA, 25 bp, Homo sapien
gtcttcggaccgcgcgacacgtccc

SEQ ID NO: 5866883 - DNA, 25 bp, Homo sapien
ggtgggccgtaggtcgaccggacca

SEQ ID NO: 5866884 - DNA, 25 bp, Homo sapien
tacgctctgcgacgcgtgagcggcc

SEQ ID NO: 5866885 - DNA, 25 bp, Homo sapien
tccgccaccgacggtcgcagggact

SEQ ID NO: 5866886 - DNA, 25 bp, Homo sapien
gggcacccgtacgcgcgttcgaagc

SEQ ID NO: 5866887 - DNA, 25 bp, Homo sapien
cgggtagtcgcgcgtccgttgggac

SEQ ID NO: 5866888 - DNA, 25 bp, Homo sapien
acccgacgctcgcggagtatcgcgc

SEQ ID NO: 5866889 - DNA, 25 bp, Homo sapien
ccgtgctcgcgacggtacgactccc

SEQ ID NO: 5866890 - DNA, 25 bp, Homo sapien
aggccgcgcgctacgacgttgcggt

SEQ ID NO: 5866891 - DNA, 25 bp, Homo sapien
tcgggccttgcgtcgcgaaggcgac

SEQ ID NO: 5866892 - DNA, 25 bp, Homo sapien
acctgcccccgtacgcgtcctgagc

SEQ ID NO: 5866893 - DNA, 25 bp, Homo sapien
tcgaccgtaccgagcgacgggtcgg

SEQ ID NO: 5866894 - DNA, 25 bp, Homo sapien
ggacgcggatcgcgcgctatcgtcg

SEQ ID NO: 5866895 - DNA, 25 bp, Homo sapien
tggccggtacgatcgcgcacccgct

SEQ ID NO: 5866896 - DNA, 25 bp, Homo sapien
cgccagcgaacgcgtagtcgcggag

SEQ ID NO: 5866897 - DNA, 25 bp, Homo sapien
cagcccacccgcgtacggtgaccga

SEQ ID NO: 5866898 - DNA, 25 bp, Homo sapien
agccgcacgatcggaagcggccagc

SEQ ID NO: 5866899 - DNA, 25 bp, Homo sapien
ggtgagtagcggcgtacccggtcgg

SEQ ID NO: 5866900 - DNA, 25 bp, Homo sapien
cggcagcggcgcggatgtaccacgt

SEQ ID NO: 5866901 - DNA, 25 bp, Homo sapien
cgatggaccggtcgtacggcgcacc

SEQ ID NO: 5866902 - DNA, 25 bp, Homo sapien
agctcacgtccgatgccgcgctgcg

SEQ ID NO: 5866903 - DNA, 25 bp, Homo sapien
cgagccccgcgcatcgtgtcgggat

SEQ ID NO: 5866904 - DNA, 25 bp, Homo sapien
cctagggcgcgacatacctgggcgc

SEQ ID NO: 5866905 - DNA, 25 bp, Homo sapien
cccagcctacgtccgacgtgcccac

SEQ ID NO: 5866906 - DNA, 25 bp, Homo sapien
ggggctaggtccgtcggacgggatc

SEQ ID NO: 5866907 - DNA, 25 bp, Homo sapien
atccgcggcgcgtagaacggacccc

SEQ ID NO: 5866908 - DNA, 25 bp, Homo sapien
tggtgcacgtagcgtcgggccgcct

SEQ ID NO: 5866909 - DNA, 25 bp, Homo sapien
gtcggctatggcccgtcggcggctt

SEQ ID NO: 5866910 - DNA, 25 bp, Homo sapien
gggcgggggttactcgtcgctgagc

SEQ ID NO: 5866911 - DNA, 25 bp, Homo sapien
tagccaagcccgtacgacgcccggc

SEQ ID NO: 5866912 - DNA, 25 bp, Homo sapien
agcggcgtatcgaggtccgggcagc

SEQ ID NO: 5866913 - DNA, 25 bp, Homo sapien
cggcagtacgccttgtccgcccgca

SEQ ID NO: 5866914 - DNA, 25 bp, Homo sapien
cgcctggcgctcggttacgccagga

SEQ ID NO: 5866915 - DNA, 25 bp, Homo sapien
gggcggtacgggacggcgccataca

SEQ ID NO: 5866916 - DNA, 25 bp, Homo sapien
gggacgagtttcgcgcgagggcgtg

SEQ ID NO: 5866917 - DNA, 25 bp, Homo sapien
ctggccccgtccggacgtattgggc

SEQ ID NO: 5866918 - DNA, 25 bp, Homo sapien
ccgtcgtcgcgtagacggttgcccg

SEQ ID NO: 5866919 - DNA, 25 bp, Homo sapien
cgctcgccggcgttagacgttgggg

SEQ ID NO: 5866920 - DNA, 25 bp, Homo sapien
ggaacgccgacatgtcgcgccgcag

SEQ ID NO: 5866921 - DNA, 25 bp, Homo sapien
gccccgatgcggcgtaacctaggcc

SEQ ID NO: 5866922 - DNA, 25 bp, Homo sapien
gcgcctctacgcgcgcgatgtggga

SEQ ID NO: 5866923 - DNA, 25 bp, Homo sapien
atcaccgcgcgtggtcgacggctgc

SEQ ID NO: 5866924 - DNA, 25 bp, Homo sapien
acgggaggcgcttggtcgaggcgtg

SEQ ID NO: 5866925 - DNA, 25 bp, Homo sapien
ggcgctcgagtatcgcgccggacag

SEQ ID NO: 5866926 - DNA, 25 bp, Homo sapien
taggccgcgcggtatcctagcccgg

SEQ ID NO: 5866927 - DNA, 25 bp, Homo sapien
catgggcgcgataacccgtggggcc

SEQ ID NO: 5866928 - DNA, 25 bp, Homo sapien
ggggcttgacgcgcgaccaaacccc

SEQ ID NO: 5866929 - DNA, 25 bp, Homo sapien
tgtcgggtcgggacgcgtactgccc

SEQ ID NO: 5866930 - DNA, 25 bp, Homo sapien
ggtgtacgactaacgcgcggcggcc

SEQ ID NO: 5866931 - DNA, 25 bp, Homo sapien
cggcttacgggcccgtatcagccgg

SEQ ID NO: 5866932 - DNA, 25 bp, Homo sapien
ggcaggcggaacgccctagaacccc

SEQ ID NO: 5866933 - DNA, 25 bp, Homo sapien
gcccaagactcgcgtacgcgtgcgc

SEQ ID NO: 5866934 - DNA, 25 bp, Homo sapien
actaccacgatacgccgccgccgcg

SEQ ID NO: 5866935 - DNA, 25 bp, Homo sapien
cggcgcctcgcggacgtaacctgtc

SEQ ID NO: 5866936 - DNA, 25 bp, Homo sapien
ccgtggcgtacgaccggtcagccac

SEQ ID NO: 5866937 - DNA, 25 bp, Homo sapien
cgggcgccgtagggtcgactggtca

SEQ ID NO: 5866938 - DNA, 25 bp, Homo sapien
atgcgcgttacccccgcgaagcccg

SEQ ID NO: 5866939 - DNA, 25 bp, Homo sapien
ggctgatatcggaccgcgccgggca

SEQ ID NO: 5866940 - DNA, 25 bp, Homo sapien
cgccgctgatcgcgcgacgcctgta

SEQ ID NO: 5866941 - DNA, 25 bp, Homo sapien
agggcgtagccgacggtccgatccg

SEQ ID NO: 5866942 - DNA, 25 bp, Homo sapien
gcgcacgcgtacgcgagtcttgggc

SEQ ID NO: 5866943 - DNA, 25 bp, Homo sapien
ctcctgatacgagcgacccgccccc

SEQ ID NO: 5866944 - DNA, 25 bp, Homo sapien
ccaccgccgcatccgtacgtcgcac

SEQ ID NO: 5866945 - DNA, 25 bp, Homo sapien
gacaggttacgtccgcgaggcgccg

SEQ ID NO: 5866946 - DNA, 25 bp, Homo sapien
agggagcatggtacggcgccggtcg

SEQ ID NO: 5866947 - DNA, 25 bp, Homo sapien
gggctgcgcacgtcgactccgttgg

SEQ ID NO: 5866948 - DNA, 25 bp, Homo sapien
tgtcggtgcggcgcactaccggcag

SEQ ID NO: 5866949 - DNA, 25 bp, Homo sapien
ggccgcggggcgtaagccgtacatg

SEQ ID NO: 5866950 - DNA, 25 bp, Homo sapien
ccgcctagacgactcgcggccggtt

SEQ ID NO: 5866951 - DNA, 25 bp, Homo sapien
ccgaccggttgccgcgtacacggag

SEQ ID NO: 5866952 - DNA, 25 bp, Homo sapien
atggccgccatacgcgcgtccgacc

SEQ ID NO: 5866953 - DNA, 25 bp, Homo sapien
tacaggcgtcgcgcgatcagcggcg

SEQ ID NO: 5866954 - DNA, 25 bp, Homo sapien
ccagccagcgttcgtaccccacggc

SEQ ID NO: 5866955 - DNA, 25 bp, Homo sapien
ggcggccgcgccggatatagctcgt

SEQ ID NO: 5866956 - DNA, 25 bp, Homo sapien
caagagcggcgtatcccctgccccg

SEQ ID NO: 5866957 - DNA, 25 bp, Homo sapien
gagacgcgcgtatcgggacgtgcgc

SEQ ID NO: 5866958 - DNA, 25 bp, Homo sapien
ggccgtcgcgaactagtcgtcgccc

SEQ ID NO: 5866959 - DNA, 25 bp, Homo sapien
cccagccgacgccgaccgtatccca

SEQ ID NO: 5866960 - DNA, 25 bp, Homo sapien
agcagttacccggcggacgcctggg

SEQ ID NO: 5866961 - DNA, 25 bp, Homo sapien
gacgcccgcgttcgtacgatcccgg

SEQ ID NO: 5866962 - DNA, 25 bp, Homo sapien
cgctgcgtagcggtacgccaggcac

SEQ ID NO: 5866963 - DNA, 25 bp, Homo sapien
cgcgtccggcgtgtacgtacagcgg

SEQ ID NO: 5866964 - DNA, 25 bp, Homo sapien
ggacctgttcggcgctacggcgctc

SEQ ID NO: 5866965 - DNA, 25 bp, Homo sapien
cgagccgctaccgttcgcgcggaac

SEQ ID NO: 5866966 - DNA, 25 bp, Homo sapien
ggcgcccgtatgtccgcggctcaac

SEQ ID NO: 5866967 - DNA, 25 bp, Homo sapien
cccgcagcctaacgtcgcgacggca

SEQ ID NO: 5866968 - DNA, 25 bp, Homo sapien
ggggtttggtcgcgcgtcaagcccc

SEQ ID NO: 5866969 - DNA, 25 bp, Homo sapien
ccagagcgtaccgggggatccgtcg

SEQ ID NO: 5866970 - DNA, 25 bp, Homo sapien
ccccgcggtccgcgagagtgttcct

SEQ ID NO: 5866971 - DNA, 25 bp, Homo sapien
tcgcggcgaccgtacggagtgagcc

SEQ ID NO: 5866972 - DNA, 25 bp, Homo sapien
tgttggcggcctactagcggcgcgc

SEQ ID NO: 5866973 - DNA, 25 bp, Homo sapien
ggctcgagtatcgccccgtcgaggg

SEQ ID NO: 5866974 - DNA, 25 bp, Homo sapien
cacggggtacgcgtcggtaagcggc

SEQ ID NO: 5866975 - DNA, 25 bp, Homo sapien
cccagccgtagcggacgtatgcccg

SEQ ID NO: 5866976 - DNA, 25 bp, Homo sapien
agggggccgctctagtcgaggcctc

SEQ ID NO: 5866977 - DNA, 25 bp, Homo sapien
cccgattacgcgggaacgccgaggc

SEQ ID NO: 5866978 - DNA, 25 bp, Homo sapien
gcgggtgactagtcgcgcggacacc

SEQ ID NO: 5866979 - DNA, 25 bp, Homo sapien
gcccactacggacgttccgtgcgcg

SEQ ID NO: 5866980 - DNA, 25 bp, Homo sapien
ccgcaggtacgcgtaacgacgccgg

SEQ ID NO: 5866981 - DNA, 25 bp, Homo sapien
gtcagggtcgcgcagtacgccgtcg

SEQ ID NO: 5866982 - DNA, 25 bp, Homo sapien
tgccccggcacgttacgggggcgta

SEQ ID NO: 5866983 - DNA, 25 bp, Homo sapien
gcggcgggacgtacgacgccacttg

SEQ ID NO: 5866984 - DNA, 25 bp, Homo sapien
ccgggctaggataccgcgcggccta

SEQ ID NO: 5866985 - DNA, 25 bp, Homo sapien
agaggagtccggaccgcaaggggcg

SEQ ID NO: 5866986 - DNA, 25 bp, Homo sapien
gggacgtgtcgcgcggtccgaagac

SEQ ID NO: 5866987 - DNA, 25 bp, Homo sapien
cagggccgtttagcgcgacccggag

SEQ ID NO: 5866988 - DNA, 25 bp, Homo sapien
ccgtcgcgtcgtagcacccgcacag

SEQ ID NO: 5866989 - DNA, 25 bp, Homo sapien
tggtcccggacgtactacgcccgcg

SEQ ID NO: 5866990 - DNA, 25 bp, Homo sapien
gccccccgcgagttagacggacgtg

SEQ ID NO: 5866991 - DNA, 25 bp, Homo sapien
cgcgtggatactcgcgcgagcacgc

SEQ ID NO: 5866992 - DNA, 25 bp, Homo sapien
gcgctgcgagacgcctagtgcgtgc

SEQ ID NO: 5866993 - DNA, 25 bp, Homo sapien
gacgtccgcgtagtacggtggggcg

SEQ ID NO: 5866994 - DNA, 25 bp, Homo sapien
cccggcacttcgcacgcgttagcgg

SEQ ID NO: 5866995 - DNA, 25 bp, Homo sapien
ggggtgatatcgggcgacccgcggt

SEQ ID NO: 5866996 - DNA, 25 bp, Homo sapien
gtacggcgtatcagccgcggaccgc

SEQ ID NO: 5866997 - DNA, 25 bp, Homo sapien
ggccgctcacgcgtcgcagagcgta

SEQ ID NO: 5866998 - DNA, 25 bp, Homo sapien
cgatggcgtccgcgacgtaccgcag

SEQ ID NO: 5866999 - DNA, 25 bp, Homo sapien
ccgcgtggtccgcgcgtaaccgact

SEQ ID NO: 5867000 - DNA, 25 bp, Homo sapien
gcggggtgatgcgtcgcgcctttcc

SEQ ID NO: 5867001 - DNA, 25 bp, Homo sapien
ggagtcctgacggcgtacgccgtcg

SEQ ID NO: 5867002 - DNA, 25 bp, Homo sapien
ggtcggacgcacgtcggtagggcca

SEQ ID NO: 5867003 - DNA, 25 bp, Homo sapien
cgctgccgccacgtatcgaacccgg

SEQ ID NO: 5867004 - DNA, 25 bp, Homo sapien
ccgtcggggcgaccgatcttgcagg

SEQ ID NO: 5867005 - DNA, 25 bp, Homo sapien
gcacgtcgttgcgtcgagggctcgc

SEQ ID NO: 5867006 - DNA, 25 bp, Homo sapien
acccagcgcgttagatgccccgggc

SEQ ID NO: 5867007 - DNA, 25 bp, Homo sapien
ggggttctagggcgttccgcctgcc

SEQ ID NO: 5867008 - DNA, 25 bp, Homo sapien
ccccgggagcgcgtcgcaagaggta

SEQ ID NO: 5867009 - DNA, 25 bp, Homo sapien
ggagggggcctaccgtcgaagcgct

SEQ ID NO: 5867010 - DNA, 25 bp, Homo sapien
cgaccagcgttaaccgtcgcgccgg

SEQ ID NO: 5867011 - DNA, 25 bp, Homo sapien
atcgccgcgtatccgcacgcggtgg

SEQ ID NO: 5867012 - DNA, 25 bp, Homo sapien
tcggggtacggccgacgtggtcgac

SEQ ID NO: 5867013 - DNA, 25 bp, Homo sapien
ctgtccggcgcgatactcgagcgcc

SEQ ID NO: 5867014 - DNA, 25 bp, Homo sapien
tggtccggtcgacctacggcccacc

SEQ ID NO: 5867015 - DNA, 25 bp, Homo sapien
ggggcaggcgcggcgaatacgacga

SEQ ID NO: 5867016 - DNA, 25 bp, Homo sapien
cgtccgggcgtacgacagtcgagcc

SEQ ID NO: 5867017 - DNA, 25 bp, Homo sapien
gggtgttcggggtacgcgacgaggc

SEQ ID NO: 5867018 - DNA, 25 bp, Homo sapien
ggagggccgcgatacgcgtgtcgtg

SEQ ID NO: 5867019 - DNA, 25 bp, Homo sapien
tagcggcgatactgcgcgcacccgc

SEQ ID NO: 5867020 - DNA, 25 bp, Homo sapien
ccgacccgtcgctcggtacggtcga

SEQ ID NO: 5867021 - DNA, 25 bp, Homo sapien
gcgcgccttcgtaccggcggtaacc

SEQ ID NO: 5867022 - DNA, 25 bp, Homo sapien
gcccgctatccgcccgtcgagccat

SEQ ID NO: 5867023 - DNA, 25 bp, Homo sapien
gggggcccatccgcggtcggatcat

SEQ ID NO: 5867024 - DNA, 25 bp, Homo sapien
gtgcagcgtcgcgggtaacccccag

SEQ ID NO: 5867025 - DNA, 25 bp, Homo sapien
gcaacggatagactcgcgcgggggg

SEQ ID NO: 5867026 - DNA, 25 bp, Homo sapien
ggggcgcgcgtgatgcgacctgtca

SEQ ID NO: 5867027 - DNA, 25 bp, Homo sapien
tgccggcgcgctaacgtcaggcgac

SEQ ID NO: 5867028 - DNA, 25 bp, Homo sapien
cccgcatcgtgtcgcacgaggggac

SEQ ID NO: 5867029 - DNA, 25 bp, Homo sapien
cggggcttgaccgcgtcgggctaga

SEQ ID NO: 5867030 - DNA, 25 bp, Homo sapien
ccccaccgttaatcgcgcacccgcc

SEQ ID NO: 5867031 - DNA, 25 bp, Homo sapien
ccaccagcacgacgcaaccacccgg

SEQ ID NO: 5867032 - DNA, 25 bp, Homo sapien
tgagccggaccgcgcgacaggaacc

SEQ ID NO: 5867033 - DNA, 25 bp, Homo sapien
cgcgcgacgtaacgcgggtgaaggc

SEQ ID NO: 5867034 - DNA, 25 bp, Homo sapien
gccagccgtacgaccgcacggacga

SEQ ID NO: 5867035 - DNA, 25 bp, Homo sapien
tgcgggcggacaaggcgtactgccg

SEQ ID NO: 5867036 - DNA, 25 bp, Homo sapien
tctggtgcgcgaccggactgtcggg

SEQ ID NO: 5867037 - DNA, 25 bp, Homo sapien
cgcctcacttacgagcgcggtcggc

SEQ ID NO: 5867038 - DNA, 25 bp, Homo sapien
ggtcagcgtcgcttacgccctggcc

SEQ ID NO: 5867039 - DNA, 25 bp, Homo sapien
cggagcggcacgcgtaacggcttcc

SEQ ID NO: 5867040 - DNA, 25 bp, Homo sapien
agtccctgcgaccgtcggtggcgga

SEQ ID NO: 5867041 - DNA, 25 bp, Homo sapien
accgcccgtgtacgtctcggtgcgg

SEQ ID NO: 5867042 - DNA, 25 bp, Homo sapien
gaggggcaacgatcgcggggacacc

SEQ ID NO: 5867043 - DNA, 25 bp, Homo sapien
gcgtcccccgacggagttagcgcca

SEQ ID NO: 5867044 - DNA, 25 bp, Homo sapien
cgtgggcgcgtacacgagaggaggg

SEQ ID NO: 5867045 - DNA, 25 bp, Homo sapien
cgggccaacctcgcgaccgttcctg

SEQ ID NO: 5867046 - DNA, 25 bp, Homo sapien
cgtgggcggcggtacgcatggacga

SEQ ID NO: 5867047 - DNA, 25 bp, Homo sapien
gccaggtactcggtccgcgcacgct

SEQ ID NO: 5867048 - DNA, 25 bp, Homo sapien
acgaccgacgccccgcatactcccc

SEQ ID NO: 5867049 - DNA, 25 bp, Homo sapien
cgcggtcccgtcacgaccggtgttg

SEQ ID NO: 5867050 - DNA, 25 bp, Homo sapien
tgaggtcgcgttagggcgagcggcg

SEQ ID NO: 5867051 - DNA, 25 bp, Homo sapien
gcgcccaggtatgtcgcgccctagg

SEQ ID NO: 5867052 - DNA, 25 bp, Homo sapien
ggcgcgcggccgatagcgttccgaa

SEQ ID NO: 5867053 - DNA, 25 bp, Homo sapien
ccgaccgggtacgccgctactcacc

SEQ ID NO: 5867054 - DNA, 25 bp, Homo sapien
ctgccctagcgcgctacacaggccg

SEQ ID NO: 5867055 - DNA, 25 bp, Homo sapien
ctcggcgcgtcgcgataggggacct

SEQ ID NO: 5867056 - DNA, 25 bp, Homo sapien
ggccgccgcgcgttagtcgtacacc

SEQ ID NO: 5867057 - DNA, 25 bp, Homo sapien
acgtcgccgtagcgggctagacgcg

SEQ ID NO: 5867058 - DNA, 25 bp, Homo sapien
acgtggtacatccgcgccgctgccg

SEQ ID NO: 5867059 - DNA, 25 bp, Homo sapien
ggagcccccgtttaacgcgcggtgc

SEQ ID NO: 5867060 - DNA, 25 bp, Homo sapien
gctcaggacgcgtacgggggcaggt

SEQ ID NO: 5867061 - DNA, 25 bp, Homo sapien
tcggcccgcgcgatctatggagggg

SEQ ID NO: 5867062 - DNA, 25 bp, Homo sapien
acgtgacagccgcgcgatacgcccg

SEQ ID NO: 5867063 - DNA, 25 bp, Homo sapien
ggcgatcgagtcgagagcgcaccgc

SEQ ID NO: 5867064 - DNA, 25 bp, Homo sapien
gctggccgcttccgatcgtgcggct

SEQ ID NO: 5867065 - DNA, 25 bp, Homo sapien
tggacggacgggcgtatcgtggcgc

SEQ ID NO: 5867066 - DNA, 25 bp, Homo sapien
gggcggcccgaacgcgtaaggctgt

SEQ ID NO: 5867067 - DNA, 25 bp, Homo sapien
gaatcgggcctagacgtcgcccccg

SEQ ID NO: 5867068 - DNA, 25 bp, Homo sapien
gtgggagccgacgcacgaaacccgc

SEQ ID NO: 5867069 - DNA, 25 bp, Homo sapien
gagggctataccgcgcgcccgatcc

SEQ ID NO: 5867070 - DNA, 25 bp, Homo sapien
gctcagcgacgagtaacccccgccc

SEQ ID NO: 5867071 - DNA, 25 bp, Homo sapien
cctcgcttcgcgtatcgcgacgcgc

SEQ ID NO: 5867072 - DNA, 25 bp, Homo sapien
ggggtccgttctacgcgccgcggat

SEQ ID NO: 5867073 - DNA, 25 bp, Homo sapien
atcgcggcccgtacaagcgggccgt

SEQ ID NO: 5867074 - DNA, 25 bp, Homo sapien
gccccgtcgagcgcgtaggatagcg

SEQ ID NO: 5867075 - DNA, 25 bp, Homo sapien
cgacgctagcccgtcgggtagcacg

SEQ ID NO: 5867076 - DNA, 25 bp, Homo sapien
ggcgccgcgacgcatactgtcgcgt

SEQ ID NO: 5867077 - DNA, 25 bp, Homo sapien
gggcgtcgcgcaacgtagcgccttg

SEQ ID NO: 5867078 - DNA, 25 bp, Homo sapien
ccggctgatacgggcccgtaagccg

SEQ ID NO: 5867079 - DNA, 25 bp, Homo sapien
cggcatgggtatcggaccgctgcgg

SEQ ID NO: 5867080 - DNA, 25 bp, Homo sapien
cgcggcggcggcgtatcgtggtagt

SEQ ID NO: 5867081 - DNA, 25 bp, Homo sapien
ggtgcgccgtacgaccggtccatcg

SEQ ID NO: 5867082 - DNA, 25 bp, Homo sapien
tcgacccgacgaagctacgccccgg

SEQ ID NO: 5867083 - DNA, 25 bp, Homo sapien
cacctcgagcgtactcgcgtgcggg

SEQ ID NO: 5867084 - DNA, 25 bp, Homo sapien
ctcacgcgttggcgcgtaggcgagc

SEQ ID NO: 5867085 - DNA, 25 bp, Homo sapien
gccggccgtcgttaacgccagcgca

SEQ ID NO: 5867086 - DNA, 25 bp, Homo sapien
cgagcccgtcgatacgccggctgag

SEQ ID NO: 5867087 - DNA, 25 bp, Homo sapien
tgtatggcgccgtcccgtaccgccc

SEQ ID NO: 5867088 - DNA, 25 bp, Homo sapien
cacggcgttacggccgtagacccgc

SEQ ID NO: 5867089 - DNA, 25 bp, Homo sapien
gtcccaacggacgcgcgactacccg

SEQ ID NO: 5867090 - DNA, 25 bp, Homo sapien
tgcccggcgcggtccgatatcagcc

SEQ ID NO: 5867091 - DNA, 25 bp, Homo sapien
gactcttggttcgacgcggggcccg

SEQ ID NO: 5867092 - DNA, 25 bp, Homo sapien
gccgaagtcgccgtacgaccggtgc

SEQ ID NO: 5867093 - DNA, 25 bp, Homo sapien
cggacatagcgcgaccgttggggcg

SEQ ID NO: 5867094 - DNA, 25 bp, Homo sapien
accggtcttgtacgcgcggagccgc

SEQ ID NO: 5867095 - DNA, 25 bp, Homo sapien
gacacggccgtgcgatccgcgatgg

SEQ ID NO: 5867096 - DNA, 25 bp, Homo sapien
gccgcgcgcgacggactacaacgca

SEQ ID NO: 5867097 - DNA, 25 bp, Homo sapien
gactcggcgttcccgcgtagcagcg

SEQ ID NO: 5867098 - DNA, 25 bp, Homo sapien
tgaccagtcgaccctacggcgcccg

SEQ ID NO: 5867099 - DNA, 25 bp, Homo sapien
cctccgtaccgcgttacgcgtgcgc

SEQ ID NO: 5867100 - DNA, 25 bp, Homo sapien
ctcggacgactagcagcgcgtgcgg

SEQ ID NO: 5867101 - DNA, 25 bp, Homo sapien
gcgcgatacgcgagtggccgcagca

SEQ ID NO: 5867102 - DNA, 25 bp, Homo sapien
ctgggcggtccgtcgcgagcatgag

SEQ ID NO: 5867103 - DNA, 25 bp, Homo sapien
ggccccgcggttacgacacacgagg

SEQ ID NO: 5867104 - DNA, 25 bp, Homo sapien
tcggcacgggtagcgtcgtcccgag

SEQ ID NO: 5867105 - DNA, 25 bp, Homo sapien
ccgtcggtaacgccgcgaccgtgag

SEQ ID NO: 5867106 - DNA, 25 bp, Homo sapien
ggcgggaactacgtcgcgggaagcg

SEQ ID NO: 5867107 - DNA, 25 bp, Homo sapien
ctcgacgcgcggatacgtctgccgc

SEQ ID NO: 5867108 - DNA, 25 bp, Homo sapien
gacgcccgtactcgcggaccgaagc

SEQ ID NO: 5867109 - DNA, 25 bp, Homo sapien
gcgtggttggtcgaccgcgagtcgc

SEQ ID NO: 5867110 - DNA, 25 bp, Homo sapien
gcccaatacgtccggacggggccag

SEQ ID NO: 5867111 - DNA, 25 bp, Homo sapien
ttcggcacgtcgctcgcggcgtggt

SEQ ID NO: 5867112 - DNA, 25 bp, Homo sapien
cgcctaacgccgcgcgatagacgcg

SEQ ID NO: 5867113 - DNA, 25 bp, Homo sapien
gcagagcggtcggcgtaccatccgc

SEQ ID NO: 5867114 - DNA, 25 bp, Homo sapien
tcccggacaacgttcggcgtcggcg

SEQ ID NO: 5867115 - DNA, 25 bp, Homo sapien
acggagcgaataggcggcctgccgc

SEQ ID NO: 5867116 - DNA, 25 bp, Homo sapien
ggccgggtacgtcgcaggtgcactc

SEQ ID NO: 5867117 - DNA, 25 bp, Homo sapien
gtccgatccctacgcgtcggcgcag

SEQ ID NO: 5867118 - DNA, 25 bp, Homo sapien
gaacccgctacgcgtcacgcgctcg

SEQ ID NO: 5867119 - DNA, 25 bp, Homo sapien
cctacacgcgtcgatccgtgcgggg

SEQ ID NO: 5867120 - DNA, 25 bp, Homo sapien
gcgaactcgcgcgaaccaccggacc

SEQ ID NO: 5867121 - DNA, 25 bp, Homo sapien
acgaggtgtccgcggtacggcccag

SEQ ID NO: 5867122 - DNA, 25 bp, Homo sapien
taggcgcgcgtagaccctcagggcg

SEQ ID NO: 5867123 - DNA, 25 bp, Homo sapien
gcgggacctcgcggtactaccgcca

SEQ ID NO: 5867124 - DNA, 25 bp, Homo sapien
gcccctgccgcgaagtaactgcggc

SEQ ID NO: 5867125 - DNA, 25 bp, Homo sapien
gctccgatacggtccgtcgggtggc

SEQ ID NO: 5867126 - DNA, 25 bp, Homo sapien
cgggcaaccgtctacgcgacgacgg

SEQ ID NO: 5867127 - DNA, 25 bp, Homo sapien
agagccgcgcgtatggacggggagc

SEQ ID NO: 5867128 - DNA, 25 bp, Homo sapien
tccgagcgcgtgacggtctccggac

SEQ ID NO: 5867129 - DNA, 25 bp, Homo sapien
gtgcggcgggcccgtaagttcgcct

SEQ ID NO: 5867130 - DNA, 25 bp, Homo sapien
ccgtcgacgcgcgaaggacgcgtca

SEQ ID NO: 5867131 - DNA, 25 bp, Homo sapien
cgtgccccggacgaacggtgtgcac

SEQ ID NO: 5867132 - DNA, 25 bp, Homo sapien
gcggcgtcgaccgtacggcgaccaa

SEQ ID NO: 5867133 - DNA, 25 bp, Homo sapien
cacgcctcgaccaagcgcctcccgt

SEQ ID NO: 5867134 - DNA, 25 bp, Homo sapien
tatcgccgtagcccgctcgcgccgt

SEQ ID NO: 5867135 - DNA, 25 bp, Homo sapien
cgagcgcgcgaatagcccggccgta

SEQ ID NO: 5867136 - DNA, 25 bp, Homo sapien
gctcgtaccggtccgatcgcgggtg

SEQ ID NO: 5867137 - DNA, 25 bp, Homo sapien
gtacggcgcctaggtcgaccccagc

SEQ ID NO: 5867138 - DNA, 25 bp, Homo sapien
ggaccgcgttccgatacggcgctgg

SEQ ID NO: 5867139 - DNA, 25 bp, Homo sapien
cccgaaccgcgatgcgtaggcgagc

SEQ ID NO: 5867140 - DNA, 25 bp, Homo sapien
accgcaacgtcgtagcgcgcggcct

SEQ ID NO: 5867141 - DNA, 25 bp, Homo sapien
ccgccgttacggcgcgatcgcgtca

SEQ ID NO: 5867142 - DNA, 25 bp, Homo sapien
cgcatcatcgccggactaggcggcc

SEQ ID NO: 5867143 - DNA, 25 bp, Homo sapien
gctgcctcctagcggcgtacgaccg

SEQ ID NO: 5867144 - DNA, 25 bp, Homo sapien
cctcagcgacggctaacgcgctccg

SEQ ID NO: 5867145 - DNA, 25 bp, Homo sapien
gttaggtagcgaaccgcggcgcccc

SEQ ID NO: 5867146 - DNA, 25 bp, Homo sapien
cggcgtcccgttcaacgcgtgctcc

SEQ ID NO: 5867147 - DNA, 25 bp, Homo sapien
cgcagcgcggcatcggacgtgagct

SEQ ID NO: 5867148 - DNA, 25 bp, Homo sapien
cgggctcgacctgacgatcgggggt

SEQ ID NO: 5867149 - DNA, 25 bp, Homo sapien
tgccgtgcgcgcgccgtaattgcgg

SEQ ID NO: 5867150 - DNA, 25 bp, Homo sapien
tcggtcaccgtacgcgggtgggctg

SEQ ID NO: 5867151 - DNA, 25 bp, Homo sapien
atcccgacacgatgcgcggggctcg

SEQ ID NO: 5867152 - DNA, 25 bp, Homo sapien
tgggacccgccgcacgttactgggg

SEQ ID NO: 5867153 - DNA, 25 bp, Homo sapien
gcgagccgtatgtccgcgcggagtc

SEQ ID NO: 5867154 - DNA, 25 bp, Homo sapien
cgctgcgcgctacgtcgtagcgcca

SEQ ID NO: 5867155 - DNA, 25 bp, Homo sapien
ggcttgcggtatcgaccggagcggc

SEQ ID NO: 5867156 - DNA, 25 bp, Homo sapien
aggcttcgctagcgcgatgcccgcc

SEQ ID NO: 5867157 - DNA, 25 bp, Homo sapien
cgctcgggggccgatcgtaggtcac

SEQ ID NO: 5867158 - DNA, 25 bp, Homo sapien
accccgcgtaggtagcgcgagtcgg

SEQ ID NO: 5867159 - DNA, 25 bp, Homo sapien
gcttcgaacgcgcgtacgggtgccc

SEQ ID NO: 5867160 - DNA, 25 bp, Homo sapien
gactccgttacgcgcgcagcgggga

SEQ ID NO: 5867161 - DNA, 25 bp, Homo sapien
gtggtggtcgcggacgctaggagcc

SEQ ID NO: 5867162 - DNA, 25 bp, Homo sapien
cgacggtataggcgacgcggcctgg

SEQ ID NO: 5867163 - DNA, 25 bp, Homo sapien
agaggggcacgtcgcgtagcgaggc

SEQ ID NO: 5867164 - DNA, 25 bp, Homo sapien
ggccggcgcgcattacggccacgta

SEQ ID NO: 5867165 - DNA, 25 bp, Homo sapien
ccattccccgtcgcgcgatccctgc

SEQ ID NO: 5867166 - DNA, 25 bp, Homo sapien
tcaccgtatagcgcggccggcccga

SEQ ID NO: 5867167 - DNA, 25 bp, Homo sapien
tcggggcggctaactcgcgctggag

SEQ ID NO: 5867168 - DNA, 25 bp, Homo sapien
ggcccttcggcgcgtactgccctgt

SEQ ID NO: 5867169 - DNA, 25 bp, Homo sapien
gacacctcacgccgaccgccgggtt

SEQ ID NO: 5867170 - DNA, 25 bp, Homo sapien
agcgagcgtcgcggataggggacgg

SEQ ID NO: 5867171 - DNA, 25 bp, Homo sapien
ccgacagcccgctatgtcgcgccgt

SEQ ID NO: 5867172 - DNA, 25 bp, Homo sapien
gcgggtcgtagattcggccgacccg

SEQ ID NO: 5867173 - DNA, 25 bp, Homo sapien
gttcccgtctcgcgaccagtgcccc

SEQ ID NO: 5867174 - DNA, 25 bp, Homo sapien
gggggtcgccgttatgcgtccctgc

SEQ ID NO: 5867175 - DNA, 25 bp, Homo sapien
gtgagccgcgacggctagtgtcgcg

SEQ ID NO: 5867176 - DNA, 25 bp, Homo sapien
tgcccgccgtagtcgcgaggtctcc

SEQ ID NO: 5867177 - DNA, 25 bp, Homo sapien
ccagcggcgacgcgtcatggagcct

SEQ ID NO: 5867178 - DNA, 25 bp, Homo sapien
gcacctgccgtaccgcggtagccga

SEQ ID NO: 5867179 - DNA, 25 bp, Homo sapien
ggatcgcgacgttaggccgccgctc

SEQ ID NO: 5867180 - DNA, 25 bp, Homo sapien
aggcgccgcaggtcgatcgtacccg

SEQ ID NO: 5867181 - DNA, 25 bp, Homo sapien
gtcgccttcgcgacgcaaggcccga

SEQ ID NO: 5867182 - DNA, 25 bp, Homo sapien
ggttgaggcggttcgacacgggcgg

SEQ ID NO: 5867183 - DNA, 25 bp, Homo sapien
cgagcgacgacgtatagcgcgcggg

SEQ ID NO: 5867184 - DNA, 25 bp, Homo sapien
gttgcctcgacccgcgagcgacggt

SEQ ID NO: 5867185 - DNA, 25 bp, Homo sapien
tgggcgacgggtacgtcgcctggtg

SEQ ID NO: 5867186 - DNA, 25 bp, Homo sapien
ccggatagaccggcgcgaacgagcg

SEQ ID NO: 5867187 - DNA, 25 bp, Homo sapien
ccaacccccgcggtataggcgctcc

SEQ ID NO: 5867188 - DNA, 25 bp, Homo sapien
tcctggcgtaaccgagcgccaggcg

SEQ ID NO: 5867189 - DNA, 25 bp, Homo sapien
ccgccgccgcgcgaaggtacactag

SEQ ID NO: 5867190 - DNA, 25 bp, Homo sapien
cccagagtcccgtatcgtcccggcg

SEQ ID NO: 5867191 - DNA, 25 bp, Homo sapien
tgccagctaaccgcggtccggtggg

SEQ ID NO: 5867192 - DNA, 25 bp, Homo sapien
cgcgctgtcacttcgcgcgacggtg

SEQ ID NO: 5867193 - DNA, 25 bp, Homo sapien
cgccttgccgtatcgagcggccacg

SEQ ID NO: 5867194 - DNA, 25 bp, Homo sapien
acgaggcgcgcgcgaagtaccacgc

SEQ ID NO: 5867195 - DNA, 25 bp, Homo sapien
gcagccgtcgaccacgcgcggtgat

SEQ ID NO: 5867196 - DNA, 25 bp, Homo sapien
cgcgggattgcgcgctccgagaagg

SEQ ID NO: 5867197 - DNA, 25 bp, Homo sapien
caccgccggttacgcgtcgcggact

SEQ ID NO: 5867198 - DNA, 25 bp, Homo sapien
gagtgctgtcgggcccgtacacgcc

SEQ ID NO: 5867199 - DNA, 25 bp, Homo sapien
ccagcgtcgaccgcggcatgcagtg

SEQ ID NO: 5867200 - DNA, 25 bp, Homo sapien
cgcaggcgcgtattgggcggtgagg

SEQ ID NO: 5867201 - DNA, 25 bp, Homo sapien
gatcccgtccgacggacctagcccc

SEQ ID NO: 5867202 - DNA, 25 bp, Homo sapien
gcgcgatactccgcgagcgtcgggt

SEQ ID NO: 5867203 - DNA, 25 bp, Homo sapien
acgggcgttactcgcgcacgctccc

SEQ ID NO: 5867204 - DNA, 25 bp, Homo sapien
aggcgttaccgacgccgcgagtcgc

SEQ ID NO: 5867205 - DNA, 25 bp, Homo sapien
ttcgagcgattagggcgcccggcgg

SEQ ID NO: 5867206 - DNA, 25 bp, Homo sapien
ggggcatcgcgggtcgctaggagtg

SEQ ID NO: 5867207 - DNA, 25 bp, Homo sapien
aggcccgatcgcgcggtatgagggg

SEQ ID NO: 5867208 - DNA, 25 bp, Homo sapien
tcggcctcgcgtgcgaggtgaccac

SEQ ID NO: 5867209 - DNA, 25 bp, Homo sapien
gccaggcccgtcgcggtatggagtg

SEQ ID NO: 5867210 - DNA, 25 bp, Homo sapien
tagggggcgacgcgctacgacgctg

SEQ ID NO: 5867211 - DNA, 25 bp, Homo sapien
gaccgaatacggacgcccgctgccg

SEQ ID NO: 5867212 - DNA, 25 bp, Homo sapien
ccgtctgtacgcgtcccgtgccgtc

SEQ ID NO: 5867213 - DNA, 25 bp, Homo sapien
gccaggcgtaccgggacgattgccg

SEQ ID NO: 5867214 - DNA, 25 bp, Homo sapien
ctccgcgactacgcgttcgctggcg

SEQ ID NO: 5867215 - DNA, 25 bp, Homo sapien
cgttgtcgctacaccgcgtgcccgc

SEQ ID NO: 5867216 - DNA, 25 bp, Homo sapien
gcggatcgattacgcgcgcgggctg

SEQ ID NO: 5867217 - DNA, 25 bp, Homo sapien
cgtgtgtaccgcgaacccgaccggc

SEQ ID NO: 5867218 - DNA, 25 bp, Homo sapien
gctcccggtcgtcgctacgcgtgca

SEQ ID NO: 5867219 - DNA, 25 bp, Homo sapien
tcgcacccgtaacgcgtcggggcct

SEQ ID NO: 5867220 - DNA, 25 bp, Homo sapien
gtctctggtcgcgtcgtaccgccgc

SEQ ID NO: 5867221 - DNA, 25 bp, Homo sapien
cctgcgcgcataacggcgcacctgc

SEQ ID NO: 5867222 - DNA, 25 bp, Homo sapien
tgggtcttcgcgccctagtcgcgcg

SEQ ID NO: 5867223 - DNA, 25 bp, Homo sapien
cgctgacccgaacggtcgtgcgacc

SEQ ID NO: 5867224 - DNA, 25 bp, Homo sapien
gccggtctcgaccgctaggtcgtcc

SEQ ID NO: 5867225 - DNA, 25 bp, Homo sapien
ctgtccgttgtcgaccggtccggcg

SEQ ID NO: 5867226 - DNA, 25 bp, Homo sapien
ccagctcgggattgcgtcggacgcc

SEQ ID NO: 5867227 - DNA, 25 bp, Homo sapien
tggggtagccgaccggtcgtgtgcg

SEQ ID NO: 5867228 - DNA, 25 bp, Homo sapien
gggagtcgtaccgtcgcgagcacgg

SEQ ID NO: 5867229 - DNA, 25 bp, Homo sapien
acgcggctaccggctaacgcgtcgg

SEQ ID NO: 5867230 - DNA, 25 bp, Homo sapien
tcccggacgcgtctacgggggctac

SEQ ID NO: 5867231 - DNA, 25 bp, Homo sapien
ccgcggccgatcgaacgtgatcccg

SEQ ID NO: 5867232 - DNA, 25 bp, Homo sapien
gcgcgtgggtcgtaatcgtgcgccg

SEQ ID NO: 5867233 - DNA, 25 bp, Homo sapien
gggccggcctacgcggattgtgggt

SEQ ID NO: 5867234 - DNA, 25 bp, Homo sapien
acgtagcgacacagtcgcgcggggc

SEQ ID NO: 5867235 - DNA, 25 bp, Homo sapien
cgtgaccaaacggtcgcgcgcccac

SEQ ID NO: 5867236 - DNA, 25 bp, Homo sapien
gccgctcttacgtcgaacgccgcgc

SEQ ID NO: 5867237 - DNA, 25 bp, Homo sapien
cagccgcccaacggtcgcttccgtc

SEQ ID NO: 5867238 - DNA, 25 bp, Homo sapien
cggatcggaccgtcggctacgccct

SEQ ID NO: 5867239 - DNA, 25 bp, Homo sapien
cagacgcgcttgatcgcgtggcggg

SEQ ID NO: 5867240 - DNA, 25 bp, Homo sapien
tgcaacgcgtccgctacgacgcggc

SEQ ID NO: 5867241 - DNA, 25 bp, Homo sapien
gccctccctatcggtcgggcctgag

SEQ ID NO: 5867242 - DNA, 25 bp, Homo sapien
cccgccctcgacgcgcgattacagc

SEQ ID NO: 5867243 - DNA, 25 bp, Homo sapien
cacgggtcgcgggtagacgccagac

SEQ ID NO: 5867244 - DNA, 25 bp, Homo sapien
gccagcgcgacgtcgcgaaggatgg

SEQ ID NO: 5867245 - DNA, 25 bp, Homo sapien
cggcggactcgccgcgtgaagagtc

SEQ ID NO: 5867246 - DNA, 25 bp, Homo sapien
taaccgtcgtacgacgcgccccggc

SEQ ID NO: 5867247 - DNA, 25 bp, Homo sapien
gctgcccggacctcgatacgccgct

SEQ ID NO: 5867248 - DNA, 25 bp, Homo sapien
cgaccacgcgtaggcgtcgtcccga

SEQ ID NO: 5867249 - DNA, 25 bp, Homo sapien
ccccaacgtctaacgccggcgagcg

SEQ ID NO: 5867250 - DNA, 25 bp, Homo sapien
acggggcgtcgcggcataaccgagc

SEQ ID NO: 5867251 - DNA, 25 bp, Homo sapien
gggcagtacgcgtcccgacccgaca

SEQ ID NO: 5867252 - DNA, 25 bp, Homo sapien
gcgactcgattagcgcggggcggga

SEQ ID NO: 5867253 - DNA, 25 bp, Homo sapien
gcgactacgtccgacggacgcgggt

SEQ ID NO: 5867254 - DNA, 25 bp, Homo sapien
gggcagcgcgattggcgactggcag

SEQ ID NO: 5867255 - DNA, 25 bp, Homo sapien
ccggtgcgcgtaccgactctgaggg

SEQ ID NO: 5867256 - DNA, 25 bp, Homo sapien
gccgttcgacgtccggagtagcgcg

SEQ ID NO: 5867257 - DNA, 25 bp, Homo sapien
acccagctacgcgcgtaccccgcct

SEQ ID NO: 5867258 - DNA, 25 bp, Homo sapien
ctgcgaagctcgcgtagcgtggccc

SEQ ID NO: 5867259 - DNA, 25 bp, Homo sapien
gcgtctagcgtctcgcgacccaggg

SEQ ID NO: 5867260 - DNA, 25 bp, Homo sapien
gtctgctgacgaaccgcgcccacgg

SEQ ID NO: 5867261 - DNA, 25 bp, Homo sapien
ctgcccctcgacgcccgattgcgtg

SEQ ID NO: 5867262 - DNA, 25 bp, Homo sapien
acggcgaggcggtatgtcggtgcgg

SEQ ID NO: 5867263 - DNA, 25 bp, Homo sapien
tcccgctacgctagacgcgcgctcc

SEQ ID NO: 5867264 - DNA, 25 bp, Homo sapien
cgggcggtccgatcgcggacagtga

SEQ ID NO: 5867265 - DNA, 25 bp, Homo sapien
gcggacccgagctacgcgtaccacc

SEQ ID NO: 5867266 - DNA, 25 bp, Homo sapien
catgcccgtagcgctcggtcctcgc

SEQ ID NO: 5867267 - DNA, 25 bp, Homo sapien
aggcggcccgacgctacgtgcacca

SEQ ID NO: 5867268 - DNA, 25 bp, Homo sapien
cctgggcgccgtccgactagaccca

SEQ ID NO: 5867269 - DNA, 25 bp, Homo sapien
ctctaccgctcccgtacgggccgga

SEQ ID NO: 5867270 - DNA, 25 bp, Homo sapien
ccctgggtatcacggcgcggggctt

SEQ ID NO: 5867271 - DNA, 25 bp, Homo sapien
ctgttgggccgatacgacgggggcg

SEQ ID NO: 5867272 - DNA, 25 bp, Homo sapien
cgacgatagcgcgcgatccgcgtcc

SEQ ID NO: 5867273 - DNA, 25 bp, Homo sapien
gtgcacccgtacgaagccccggcgt

SEQ ID NO: 5867274 - DNA, 25 bp, Homo sapien
gtagcgcggtagcgtagggggaccc

SEQ ID NO: 5867275 - DNA, 25 bp, Homo sapien
aagcggtagcgcgacgtcgcctcgg

SEQ ID NO: 5867276 - DNA, 25 bp, Homo sapien
cccctggtccgcgacgatacctggc

SEQ ID NO: 5867277 - DNA, 25 bp, Homo sapien
cgggcttcgcgggggtaacgcgcat

SEQ ID NO: 5867278 - DNA, 25 bp, Homo sapien
tcggaccggctcgcgttgactgggg

SEQ ID NO: 5867279 - DNA, 25 bp, Homo sapien
cgcgccgattgcgcgcctttggtcc

SEQ ID NO: 5867280 - DNA, 25 bp, Homo sapien
tctcggaccgatcggctcgtccgcg

SEQ ID NO: 5867281 - DNA, 25 bp, Homo sapien
tgtgcggcgcggtctactcgcaccc

SEQ ID NO: 5867282 - DNA, 25 bp, Homo sapien
gcgctggttcgcgcgtactccgtgc

SEQ ID NO: 5867283 - DNA, 25 bp, Homo sapien
gtgagcccgtcgcgcatgtcgcctc

SEQ ID NO: 5867284 - DNA, 25 bp, Homo sapien
ggaggtccgagcgtacggtctgggg

SEQ ID NO: 5867285 - DNA, 25 bp, Homo sapien
cttgcacgtccgttcacggggggcc

SEQ ID NO: 5867286 - DNA, 25 bp, Homo sapien
cctgccccggtcacgtacgaagggc

SEQ ID NO: 5867287 - DNA, 25 bp, Homo sapien
ggggcggtcgctacgtcgcgaagtg

SEQ ID NO: 5867288 - DNA, 25 bp, Homo sapien
gaccccacacgtcgacccgcagtgg

SEQ ID NO: 5867289 - DNA, 25 bp, Homo sapien
acggggctcgacgcgctagctaccc

SEQ ID NO: 5867290 - DNA, 25 bp, Homo sapien
ccaagagcgtcatgcgacgcgccgc

SEQ ID NO: 5867291 - DNA, 25 bp, Homo sapien
cagccgtcgcgcgtaaggtgctcgg

SEQ ID NO: 5867292 - DNA, 25 bp, Homo sapien
tcacccacctagggcgcgtgcgtcc

SEQ ID NO: 5867293 - DNA, 25 bp, Homo sapien
gtcgcccgacgcctagccgagagga

SEQ ID NO: 5867294 - DNA, 25 bp, Homo sapien
aggtgggcgataccggacgcgccca

SEQ ID NO: 5867295 - DNA, 25 bp, Homo sapien
cggccaaaccgcgcacgtccgctct

SEQ ID NO: 5867296 - DNA, 25 bp, Homo sapien
gttagccataccgggtcggcccgcc

SEQ ID NO: 5867297 - DNA, 25 bp, Homo sapien
ggcaggcgacgataccccggccgtt

SEQ ID NO: 5867298 - DNA, 25 bp, Homo sapien
aggaccacctagcgtcgacgcgcgc

SEQ ID NO: 5867299 - DNA, 25 bp, Homo sapien
gcgacgcgcgactaggcgtagagcc

SEQ ID NO: 5867300 - DNA, 25 bp, Homo sapien
ggcccggcgcgacgtagatcttccg

SEQ ID NO: 5867301 - DNA, 25 bp, Homo sapien
gcagagcgagcgtacggtgtccggg

SEQ ID NO: 5867302 - DNA, 25 bp, Homo sapien
gcctgccgaaccggggtaccgacga

SEQ ID NO: 5867303 - DNA, 25 bp, Homo sapien
ctgcggcgcgacatgtcggcgttcc

SEQ ID NO: 5867304 - DNA, 25 bp, Homo sapien
ggttcatacgcgggtcgcggcgctg

SEQ ID NO: 5867305 - DNA, 25 bp, Homo sapien
gggtaagcgtcacgcgagtggccgc

SEQ ID NO: 5867306 - DNA, 25 bp, Homo sapien
gagtcagccaatccgtcgccgcccc

SEQ ID NO: 5867307 - DNA, 25 bp, Homo sapien
cggctcagcgagtatccgcgggcag

SEQ ID NO: 5867308 - DNA, 25 bp, Homo sapien
cccgaaacgccgcgacttggccgct

SEQ ID NO: 5867309 - DNA, 25 bp, Homo sapien
agagcccggtccgaccgagcatcgg

SEQ ID NO: 5867310 - DNA, 25 bp, Homo sapien
gggacgctgcgcgctcgatgtgacc

SEQ ID NO: 5867311 - DNA, 25 bp, Homo sapien
gtggcctcgctcgaccggagcaacg

SEQ ID NO: 5867312 - DNA, 25 bp, Homo sapien
gggagcttacgacccgcgagccgac

SEQ ID NO: 5867313 - DNA, 25 bp, Homo sapien
gtgggcttcgcgacgtcgccccgta

SEQ ID NO: 5867314 - DNA, 25 bp, Homo sapien
ggcctaggttacgccgcatcggggc

SEQ ID NO: 5867315 - DNA, 25 bp, Homo sapien
ggacgtagtcccgcgcgtaccgcgt

SEQ ID NO: 5867316 - DNA, 25 bp, Homo sapien
gtggctgaccggtcgtacgccacgg

SEQ ID NO: 5867317 - DNA, 25 bp, Homo sapien
aagccgccgacgggccatagccgac

SEQ ID NO: 5867318 - DNA, 25 bp, Homo sapien
ggtccgcccgcgacaggtaaccgga

SEQ ID NO: 5867319 - DNA, 25 bp, Homo sapien
gccgggcgtcgtacgggcttggcta

SEQ ID NO: 5867320 - DNA, 25 bp, Homo sapien
gggagcacctcgtacgcgcctcagc

SEQ ID NO: 5867321 - DNA, 25 bp, Homo sapien
acgaacgcgacccgtcggtcacggc

SEQ ID NO: 5867322 - DNA, 25 bp, Homo sapien
aggagacacggatcgcgcgggcagc

SEQ ID NO: 5867323 - DNA, 25 bp, Homo sapien
ggctcatacgtcgagcgcggctggg

SEQ ID NO: 5867324 - DNA, 25 bp, Homo sapien
ccgcgttatcgcggtacgggtggcg

SEQ ID NO: 5867325 - DNA, 25 bp, Homo sapien
ctcccgtaacgtcccgcgacctgcc

SEQ ID NO: 5867326 - DNA, 25 bp, Homo sapien
gccgccgacctataccgcgtaggcc

SEQ ID NO: 5867327 - DNA, 25 bp, Homo sapien
agtcccgcgcgatcgcacacgcgag

SEQ ID NO: 5867328 - DNA, 25 bp, Homo sapien
ctcgatcggtgtcgtacgccggcgc

SEQ ID NO: 5867329 - DNA, 25 bp, Homo sapien
gccccgcggagcggacgtacagtac

SEQ ID NO: 5867330 - DNA, 25 bp, Homo sapien
ctagcccgcgcaatcggtggctggg

SEQ ID NO: 5867331 - DNA, 25 bp, Homo sapien
gcagggcgtacgcccgaacgcaagc

SEQ ID NO: 5867332 - DNA, 25 bp, Homo sapien
gggcggccgttcgcgacgtcggata

SEQ ID NO: 5867333 - DNA, 25 bp, Homo sapien
gtgcattcgcacgacaccgcccggg

SEQ ID NO: 5867334 - DNA, 25 bp, Homo sapien
tcaggccgtgtatcggcggtcgccg

SEQ ID NO: 5867335 - DNA, 25 bp, Homo sapien
gcaacggcgaccactcgcgtcctcc

SEQ ID NO: 5867336 - DNA, 25 bp, Homo sapien
ctgccctccgatcgcggaccctggt

SEQ ID NO: 5867337 - DNA, 25 bp, Homo sapien
tcccacatcgcgcgcgtagaggcgc

SEQ ID NO: 5867338 - DNA, 25 bp, Homo sapien
cggccatcgggtctacgcgccctag

SEQ ID NO: 5867339 - DNA, 25 bp, Homo sapien
ccccgaggctattgcgcgtcgccct

SEQ ID NO: 5867340 - DNA, 25 bp, Homo sapien
gtcggcgcgggtcgtcgaaccgtga

SEQ ID NO: 5867341 - DNA, 25 bp, Homo sapien
tcgacctgcgtacgacccggcgcgt

SEQ ID NO: 5867342 - DNA, 25 bp, Homo sapien
gaccgcgtctcgtagcgtcagggcc

SEQ ID NO: 5867343 - DNA, 25 bp, Homo sapien
ttcgtccgcgctactaggggcgccc

SEQ ID NO: 5867344 - DNA, 25 bp, Homo sapien
ccggggccgcgtgtagcgacagaac

SEQ ID NO: 5867345 - DNA, 25 bp, Homo sapien
ccactcgcgcgacggtttacgcccc

SEQ ID NO: 5867346 - DNA, 25 bp, Homo sapien
cggtccgtctcgcgaagtaggccgg

SEQ ID NO: 5867347 - DNA, 25 bp, Homo sapien
ggctgtcggccgacgcctaacctgg

SEQ ID NO: 5867348 - DNA, 25 bp, Homo sapien
tgcccccggctacgtcgtaacgcgc

SEQ ID NO: 5867349 - DNA, 25 bp, Homo sapien
ggccccacgggttatcgcgcccatg

SEQ ID NO: 5867350 - DNA, 25 bp, Homo sapien
cgtgcgcgcgctatggcgtaagccc

SEQ ID NO: 5867351 - DNA, 25 bp, Homo sapien
cacgccctcgcgcgaaactcgtccc

SEQ ID NO: 5867352 - DNA, 25 bp, Homo sapien
gcgtccgcgggtcgacgtagcctga

SEQ ID NO: 5867353 - DNA, 25 bp, Homo sapien
gcccccactcgcgagccgaactgtg

SEQ ID NO: 5867354 - DNA, 25 bp, Homo sapien
atcctcgcatacgcgacccgccggg

SEQ ID NO: 5867355 - DNA, 25 bp, Homo sapien
gagcggaggcgcgacgttatccggc

SEQ ID NO: 5867356 - DNA, 25 bp, Homo sapien
gcgctgtcgtacccgcgctccccaa

SEQ ID NO: 5867357 - DNA, 25 bp, Homo sapien
ccgatgtagcggtcccgtcctgccc

SEQ ID NO: 5867358 - DNA, 25 bp, Homo sapien
agcgggtgcgcgatcgtaccggcca

SEQ ID NO: 5867359 - DNA, 25 bp, Homo sapien
catagtccgtccgtacggcccgccc

SEQ ID NO: 5867360 - DNA, 25 bp, Homo sapien
ggggcccggtagcgcattgagggtc

SEQ ID NO: 5867361 - DNA, 25 bp, Homo sapien
gggtgctcgccccgctacacactgg

SEQ ID NO: 5867362 - DNA, 25 bp, Homo sapien
cgcccaagagcgtacgtcgccggtg

SEQ ID NO: 5867363 - DNA, 25 bp, Homo sapien
ggcggctagctcgcccgtaagaggg

SEQ ID NO: 5867364 - DNA, 25 bp, Homo sapien
ttcccgataccgacgggcggggcca

SEQ ID NO: 5867365 - DNA, 25 bp, Homo sapien
ccacgagtcgaccgcggacgcgtct

SEQ ID NO: 5867366 - DNA, 25 bp, Homo sapien
agcctgcgcgtcgtcggtaccccac

SEQ ID NO: 5867367 - DNA, 25 bp, Homo sapien
ccagcccgcgcgaactacgccggaa

SEQ ID NO: 5867368 - DNA, 25 bp, Homo sapien
tgggatccgatacggtgcggccggg

SEQ ID NO: 5867369 - DNA, 25 bp, Homo sapien
tcacggccgtgcgacgctagcgtgg

SEQ ID NO: 5867370 - DNA, 25 bp, Homo sapien
gcctctaccgaacgcggttgcgggc

SEQ ID NO: 5867371 - DNA, 25 bp, Homo sapien
gccggtgtagcgcgtaccgcgcttc

SEQ ID NO: 5867372 - DNA, 25 bp, Homo sapien
tccaagcgcgctagcacgggctccc

SEQ ID NO: 5867373 - DNA, 25 bp, Homo sapien
gagagccaccggtacgcgtggcgga

SEQ ID NO: 5867374 - DNA, 25 bp, Homo sapien
gacccccggtcttcgcgtagtccgc

SEQ ID NO: 5867375 - DNA, 25 bp, Homo sapien
ccggcgcgcgttgggtcgtgcttag

SEQ ID NO: 5867376 - DNA, 25 bp, Homo sapien
cggctcgcgacacaatccgcccacc

SEQ ID NO: 5867377 - DNA, 25 bp, Homo sapien
ccagctacgcgtgtcgacgggtccc

SEQ ID NO: 5867378 - DNA, 25 bp, Homo sapien
tcagcctatcgcgccgcacaggggc

SEQ ID NO: 5867379 - DNA, 25 bp, Homo sapien
cacccttttgaccgacgcggcgggc

SEQ ID NO: 5867380 - DNA, 25 bp, Homo sapien
cctaggcggctcgttaccggtcggc

SEQ ID NO: 5867381 - DNA, 25 bp, Homo sapien
tggcccctacggtgacgcgtacccc

SEQ ID NO: 5867382 - DNA, 25 bp, Homo sapien
ccccagctcgacgcaagcggcacct

SEQ ID NO: 5867383 - DNA, 25 bp, Homo sapien
gcgcgacgatgtcgcgcgacactgc

SEQ ID NO: 5867384 - DNA, 25 bp, Homo sapien
ccccgtccacgcgagacgattgggg

SEQ ID NO: 5867385 - DNA, 25 bp, Homo sapien
cctgttgaccgtcgttgcgggccgc

SEQ ID NO: 5867386 - DNA, 25 bp, Homo sapien
gtgggcacgtcggacgtaggctggg

SEQ ID NO: 5867387 - DNA, 25 bp, Homo sapien
taaccgcgcgtaaggcgagggggcg

SEQ ID NO: 5867388 - DNA, 25 bp, Homo sapien
gcgctgggacgtcgaccgtgcaacc

SEQ ID NO: 5867389 - DNA, 25 bp, Homo sapien
gtcccgcccgacgtacggataggcc

SEQ ID NO: 5867390 - DNA, 25 bp, Homo sapien
cccggatcgccggtacggctgctgt

SEQ ID NO: 5867391 - DNA, 25 bp, Homo sapien
ccccgggctcgcgtatctacacggc

SEQ ID NO: 5867392 - DNA, 25 bp, Homo sapien
gcccaccgccgcgaagtaaggtgcc

SEQ ID NO: 5867393 - DNA, 25 bp, Homo sapien
aggggcggtcgaccggatcgacagg

SEQ ID NO: 5867394 - DNA, 25 bp, Homo sapien
gtcccaggcacgcgtacgtgtcggg

SEQ ID NO: 5867395 - DNA, 25 bp, Homo sapien
cggtcgagtagcccgtacggcccca

SEQ ID NO: 5867396 - DNA, 25 bp, Homo sapien
gatcgggctagacgaccggcggccc

SEQ ID NO: 5867397 - DNA, 25 bp, Homo sapien
tcgggccgatatgtcggcgccccgc

SEQ ID NO: 5867398 - DNA, 25 bp, Homo sapien
ccgccgcggtaaccgacacgtcggc

SEQ ID NO: 5867399 - DNA, 25 bp, Homo sapien
tcactcgtccgccgtagcgcgggcg

SEQ ID NO: 5867400 - DNA, 25 bp, Homo sapien
cccgagcccaacgggcgagccagtg

SEQ ID NO: 5867401 - DNA, 25 bp, Homo sapien
gcaccgacgcgtcggtacgccccac

SEQ ID NO: 5867402 - DNA, 25 bp, Homo sapien
cggccctcggcgattaggcgcccca

SEQ ID NO: 5867403 - DNA, 25 bp, Homo sapien
gggccccgcgcgactatggtcggag

SEQ ID NO: 5867404 - DNA, 25 bp, Homo sapien
tccgctactcgaccggccgtcgcgg

SEQ ID NO: 5867405 - DNA, 25 bp, Homo sapien
gcgtcgcgtcgctcggactgccctg

SEQ ID NO: 5867406 - DNA, 25 bp, Homo sapien
gggccccgcacgggctatcagccgt

SEQ ID NO: 5867407 - DNA, 25 bp, Homo sapien
cggtgctcgcgacagaccgggggct

SEQ ID NO: 5867408 - DNA, 25 bp, Homo sapien
gtggctcgtagcgcggaccggtccc

SEQ ID NO: 5867409 - DNA, 25 bp, Homo sapien
gccagcactcgcgcggtcgcgatcc

SEQ ID NO: 5867410 - DNA, 25 bp, Homo sapien
gactacccggccgtgtacgcgcgcc

SEQ ID NO: 5867411 - DNA, 25 bp, Homo sapien
gacacgacgggtcgcgagcgccacc

SEQ ID NO: 5867412 - DNA, 25 bp, Homo sapien
tggcgcacgcgcggtcggatcggtc

SEQ ID NO: 5867413 - DNA, 25 bp, Homo sapien
gcacgttcgcgcgcgagaccggagg

SEQ ID NO: 5867414 - DNA, 25 bp, Homo sapien
gccgtcgcggtcggccgatcacgtc

SEQ ID NO: 5867415 - DNA, 25 bp, Homo sapien
tggaggcgcgaccataggggggccc

SEQ ID NO: 5867416 - DNA, 25 bp, Homo sapien
gggcgccgcgcgtaatgcgaggcct

SEQ ID NO: 5867417 - DNA, 25 bp, Homo sapien
gagcgctcctcgcggacgggtgctc

SEQ ID NO: 5867418 - DNA, 25 bp, Homo sapien
ggtgcccggtcgggcgatcggttgg

SEQ ID NO: 5867419 - DNA, 25 bp, Homo sapien
ctcccccgattcgcgaccgtgcccc

SEQ ID NO: 5867420 - DNA, 25 bp, Homo sapien
gccggcgccccgtatagcgcttggc

SEQ ID NO: 5867421 - DNA, 25 bp, Homo sapien
cgcgacgtcgggtcgaagccaccgc

SEQ ID NO: 5867422 - DNA, 25 bp, Homo sapien
cccagccggtcgagaccgttgcggc

SEQ ID NO: 5867423 - DNA, 25 bp, Homo sapien
aggcgcgggtacgcgtcgaggaccg

SEQ ID NO: 5867424 - DNA, 25 bp, Homo sapien
ccctgcgcgtcggcccataacccgg

SEQ ID NO: 5867425 - DNA, 25 bp, Homo sapien
acgtgcgtgcgtcgacccgcggctc

SEQ ID NO: 5867426 - DNA, 25 bp, Homo sapien
tccgagatcgcgcgtctcggccgcc

SEQ ID NO: 5867427 - DNA, 25 bp, Homo sapien
cggccacgtccggtatcggctgccc

SEQ ID NO: 5867428 - DNA, 25 bp, Homo sapien
gccgcgtagccgtcacgcgtccgct

SEQ ID NO: 5867429 - DNA, 25 bp, Homo sapien
gtcccccgcctacggcggtcagacc

SEQ ID NO: 5867430 - DNA, 25 bp, Homo sapien
cagccgctcgggcgcgtatccgcgt

SEQ ID NO: 5867431 - DNA, 25 bp, Homo sapien
ccgcccatcgtccgagcgggctgtc

SEQ ID NO: 5867432 - DNA, 25 bp, Homo sapien
ccccccgtccgcttacgcgtggctg

SEQ ID NO: 5867433 - DNA, 25 bp, Homo sapien
caccaccgtaccggagcgacgccgg

SEQ ID NO: 5867434 - DNA, 25 bp, Homo sapien
gcagggtcggaccgtgcgagccctc

SEQ ID NO: 5867435 - DNA, 25 bp, Homo sapien
gccgcgtcgaccgggctgagtgcgt

SEQ ID NO: 5867436 - DNA, 25 bp, Homo sapien
ggccagcgggcgcgccatatagggc

SEQ ID NO: 5867437 - DNA, 25 bp, Homo sapien
gcccccgacgtcggcgtgcaggaca

SEQ ID NO: 5867438 - DNA, 25 bp, Homo sapien
ctgggcagtccgcgtgtcggtgccc

SEQ ID NO: 5867439 - DNA, 25 bp, Homo sapien
gggttctcgggccgtacgagcccgc

SEQ ID NO: 5867440 - DNA, 25 bp, Homo sapien
cccgcccaccgtacgcgggcgttca

SEQ ID NO: 5867441 - DNA, 25 bp, Homo sapien
tggcgagtatctcgcggcccggggg

SEQ ID NO: 5867442 - DNA, 25 bp, Homo sapien
gcgcgccggtcgacggtactgagcc

SEQ ID NO: 5867443 - DNA, 25 bp, Homo sapien
ggcctcccgcgactacgcgtgcacg

SEQ ID NO: 5867444 - DNA, 25 bp, Homo sapien
tgcccgtgcccgatcgtggcgccgt

SEQ ID NO: 5867445 - DNA, 25 bp, Homo sapien
gagcgccgtgcgctgacgagcacgc

SEQ ID NO: 5867446 - DNA, 25 bp, Homo sapien
tacggccggactcgtaccggggcgc

SEQ ID NO: 5867447 - DNA, 25 bp, Homo sapien
cgggcccgccctaccgacggtctga

SEQ ID NO: 5867448 - DNA, 25 bp, Homo sapien
ggcacggatcgtgcgacggccgctg

SEQ ID NO: 5867449 - DNA, 25 bp, Homo sapien
ccgccgggcataccgcggcctgttc

SEQ ID NO: 5867450 - DNA, 25 bp, Homo sapien
cgcccgcctacggcacgcgctcttg

SEQ ID NO: 5867451 - DNA, 25 bp, Homo sapien
ggggccacgtacttgcgcgggcgag

SEQ ID NO: 5867452 - DNA, 25 bp, Homo sapien
caccaccgcccgagacgtaggcccc

SEQ ID NO: 5867453 - DNA, 25 bp, Homo sapien
gtctccgcgtcgaccctacccgccg

SEQ ID NO: 5867454 - DNA, 25 bp, Homo sapien
ggacgagtaggtcgcgacgggcgcc

SEQ ID NO: 5867455 - DNA, 25 bp, Homo sapien
cggccggttcggccgaacggcagca

SEQ ID NO: 5867456 - DNA, 25 bp, Homo sapien
ccggcgcgcgcgtagtacaaccggg

SEQ ID NO: 5867457 - DNA, 25 bp, Homo sapien
gagggccgtacggcgaccgaagcgg

SEQ ID NO: 5867458 - DNA, 25 bp, Homo sapien
caggccgtacgcgcgatgcaggggc

SEQ ID NO: 5867459 - DNA, 25 bp, Homo sapien
gggcggctaacccgcgtgagtgccc

SEQ ID NO: 5867460 - DNA, 25 bp, Homo sapien
ccgcctgggtacgtcaccgggccac

SEQ ID NO: 5867461 - DNA, 25 bp, Homo sapien
ccccacccgcggcgcgttagaggga

SEQ ID NO: 5867462 - DNA, 25 bp, Homo sapien
cggctgcgaaccggcgtgatccggg

SEQ ID NO: 5867463 - DNA, 25 bp, Homo sapien
gcaccgcgcgatcagacgcgtggcc

SEQ ID NO: 5867464 - DNA, 25 bp, Homo sapien
tctcggacccgggtcgcgtaccgcc

SEQ ID NO: 5867465 - DNA, 25 bp, Homo sapien
acagggagtcccgcgcgtaccgccg

SEQ ID NO: 5867466 - DNA, 25 bp, Homo sapien
agtgcgctcgcgtagacgggcggcg

SEQ ID NO: 5867467 - DNA, 25 bp, Homo sapien
cctagcgtcgcgtcggacacgccgg

SEQ ID NO: 5867468 - DNA, 25 bp, Homo sapien
cctgcccgcgcgaacctactccccg

SEQ ID NO: 5867469 - DNA, 25 bp, Homo sapien
cgggggtaggccgaccgccgcatac

SEQ ID NO: 5867470 - DNA, 25 bp, Homo sapien
gctgctgaccggtaggacgcggggg

SEQ ID NO: 5867471 - DNA, 25 bp, Homo sapien
cgccgccgaccgtacggcgatccct

SEQ ID NO: 5867472 - DNA, 25 bp, Homo sapien
cctgaccgtccgttcacggccgccc

SEQ ID NO: 5867473 - DNA, 25 bp, Homo sapien
ccgtcggcgccgaagtacccgaggc

SEQ ID NO: 5867474 - DNA, 25 bp, Homo sapien
aggcgcaccggcgcgcgtaggatcg

SEQ ID NO: 5867475 - DNA, 25 bp, Homo sapien
gcaccctcggtacgcggggaggctc

SEQ ID NO: 5867476 - DNA, 25 bp, Homo sapien
cggtgcccatgcgcgaatcgcggcc

SEQ ID NO: 5867477 - DNA, 25 bp, Homo sapien
cacgcccgcgtagcggagtcgagcc

SEQ ID NO: 5867478 - DNA, 25 bp, Homo sapien
cggccgattacgtcgcggggcgagg

SEQ ID NO: 5867479 - DNA, 25 bp, Homo sapien
ggcccacggaaccgcgctagaccgc

SEQ ID NO: 5867480 - DNA, 25 bp, Homo sapien
cgtccgcggacgacgcaagaccggg

SEQ ID NO: 5867481 - DNA, 25 bp, Homo sapien
ccgggagcacgccgatactcgccgg

SEQ ID NO: 5867482 - DNA, 25 bp, Homo sapien
gagagcgcggcccgttgacgcgctc

SEQ ID NO: 5867483 - DNA, 25 bp, Homo sapien
tagtgcgtccgacgcgcgtcggggc

SEQ ID NO: 5867484 - DNA, 25 bp, Homo sapien
gctcaccggcgtacgaccacccgcg

SEQ ID NO: 5867485 - DNA, 25 bp, Homo sapien
ggcgcgctagaatcgcgcgctgcgg

SEQ ID NO: 5867486 - DNA, 25 bp, Homo sapien
cgggccgaccgcgcgtcaacggttc

SEQ ID NO: 5867487 - DNA, 25 bp, Homo sapien
tcggccggactctcgaccggagccg

SEQ ID NO: 5867488 - DNA, 25 bp, Homo sapien
tgggcccggtgcgcattcgctgccc

SEQ ID NO: 5867489 - DNA, 25 bp, Homo sapien
tggggggatacgcccgtcggagccg

SEQ ID NO: 5867490 - DNA, 25 bp, Homo sapien
gccccccgttggcgcgtagcaaggg

SEQ ID NO: 5867491 - DNA, 25 bp, Homo sapien
ccatggcgatacgcgcctccgcccg

SEQ ID NO: 5867492 - DNA, 25 bp, Homo sapien
tgcgggcatcgcgcgagaccgggag

SEQ ID NO: 5867493 - DNA, 25 bp, Homo sapien
tacgcgtcgcgaatcggccccccgg

SEQ ID NO: 5867494 - DNA, 25 bp, Homo sapien
ggcaggcgcggcgtatctccggtgc

SEQ ID NO: 5867495 - DNA, 25 bp, Homo sapien
cgggtccgcgacgcttacggctcgc

SEQ ID NO: 5867496 - DNA, 25 bp, Homo sapien
gggctttcgctcccgtacgcgcccc

SEQ ID NO: 5867497 - DNA, 25 bp, Homo sapien
cggccgtcgcacgtaggaccggacc

SEQ ID NO: 5867498 - DNA, 25 bp, Homo sapien
gcctctcgtatcgcgctcgcggggc

SEQ ID NO: 5867499 - DNA, 25 bp, Homo sapien
ctcgcccgctcgtacgtcgaccggg

SEQ ID NO: 5867500 - DNA, 25 bp, Homo sapien
gccttggcgccgtccgctagcggca

SEQ ID NO: 5867501 - DNA, 25 bp, Homo sapien
cggctgcgcttacgccggcgagtcc

SEQ ID NO: 5867502 - DNA, 25 bp, Homo sapien
gccatggcgggtcgtcgaagcggcc

SEQ ID NO: 5867503 - DNA, 25 bp, Homo sapien
cggggccgtctatcgggtcctcgcc

SEQ ID NO: 5867504 - DNA, 25 bp, Homo sapien
cccacgtacgtcggcgcgggcacac

SEQ ID NO: 5867505 - DNA, 25 bp, Homo sapien
cacccctacggcaccgcgtccccga

SEQ ID NO: 5867506 - DNA, 25 bp, Homo sapien
cgcctgtgcgtaacgggctgcggcg

SEQ ID NO: 5867507 - DNA, 25 bp, Homo sapien
ctccgcgcgcgaccgtaggacgcca

SEQ ID NO: 5867508 - DNA, 25 bp, Homo sapien
tgcctgggtacgggtccgcaccccg

SEQ ID NO: 5867509 - DNA, 25 bp, Homo sapien
ccgggcccgtatagggcgtcgcgac

SEQ ID NO: 5867510 - DNA, 25 bp, Homo sapien
ggctagggacgacgcgcgagcgcgt

SEQ ID NO: 5867511 - DNA, 25 bp, Homo sapien
gttgcccgtagtcggtcgggcggcg

SEQ ID NO: 5867512 - DNA, 25 bp, Homo sapien
ctcgccgcgacgaccataccgcgcc

SEQ ID NO: 5867513 - DNA, 25 bp, Homo sapien
gggcgggtccgacgcgccaacagct

SEQ ID NO: 5867514 - DNA, 25 bp, Homo sapien
tggtcggtacgggcgtcgtcggcgg

SEQ ID NO: 5867515 - DNA, 25 bp, Homo sapien
cagccggcgcggtcgatcgtcgctc

SEQ ID NO: 5867516 - DNA, 25 bp, Homo sapien
cgtggctcgccgcgcgtagctaggg

SEQ ID NO: 5867517 - DNA, 25 bp, Homo sapien
cgtcggcggtatcgaccggggcgac

SEQ ID NO: 5867518 - DNA, 25 bp, Homo sapien
tcggcggacgagcgtcggtgcggct

SEQ ID NO: 5867519 - DNA, 25 bp, Homo sapien
tggccctacgcggcgtccgggcttg

SEQ ID NO: 5867520 - DNA, 25 bp, Homo sapien
ctcctccgcgcaagcgatccggccg

SEQ ID NO: 5867521 - DNA, 25 bp, Homo sapien
gccgcgtagcccgcgtcgtctgtgc

SEQ ID NO: 5867522 - DNA, 25 bp, Homo sapien
cgctcgtatacgcgagccgcgcccg

SEQ ID NO: 5867523 - DNA, 25 bp, Homo sapien
gtggcgtcgtaccggcggatgggcg

SEQ ID NO: 5867524 - DNA, 25 bp, Homo sapien
cgaggagcacgttcggacgccgcgg

SEQ ID NO: 5867525 - DNA, 25 bp, Homo sapien
gacgccggtacgatcgccctggcgc

SEQ ID NO: 5867526 - DNA, 25 bp, Homo sapien
ggcagtgtacccgcgtcgtcgcggg

SEQ ID NO: 5867527 - DNA, 25 bp, Homo sapien
gccgcgtagctagtccgcgacccgc

SEQ ID NO: 5867528 - DNA, 25 bp, Homo sapien
tgggccttcgtccgcggctggcctc

SEQ ID NO: 5867529 - DNA, 25 bp, Homo sapien
ggcgcgcatctacgcgcggcagagg

SEQ ID NO: 5867530 - DNA, 25 bp, Homo sapien
cgaaggcctacggtcgcgcggccgt

SEQ ID NO: 5867531 - DNA, 25 bp, Homo sapien
cgcggatccgtcggggcgagcttgc

SEQ ID NO: 5867532 - DNA, 25 bp, Homo sapien
cagcgagtcgcgacacgggacgcgc

SEQ ID NO: 5867533 - DNA, 25 bp, Homo sapien
ctgccgaccgtctacgcgctcggcg

SEQ ID NO: 5867534 - DNA, 25 bp, Homo sapien
ggccgcgacgcttgcgcgagagtgc

SEQ ID NO: 5867535 - DNA, 25 bp, Homo sapien
agggataacgcgcggtccggcgcgc

SEQ ID NO: 5867536 - DNA, 25 bp, Homo sapien
gtcgcagaacgcgcgtacgcgcccg

SEQ ID NO: 5867537 - DNA, 25 bp, Homo sapien
ttggggcgaggccgcgtatccgggg

SEQ ID NO: 5867538 - DNA, 25 bp, Homo sapien
tgcggccgggtacgtcgcccacctg

SEQ ID NO: 5867539 - DNA, 25 bp, Homo sapien
ggagtcgcgcttacgcggtcggccg

SEQ ID NO: 5867540 - DNA, 25 bp, Homo sapien
ggcccggtcgatacccgcgcgctct

SEQ ID NO: 5867541 - DNA, 25 bp, Homo sapien
gggccctacgcgtagggtggtcgcg

SEQ ID NO: 5867542 - DNA, 25 bp, Homo sapien
gcacgccggtcgacctacggcctcg

SEQ ID NO: 5867543 - DNA, 25 bp, Homo sapien
cgcccgcgatacgcgcacggacagg

SEQ ID NO: 5867544 - DNA, 25 bp, Homo sapien
tcccgcgccggcgaccgtaggacca

SEQ ID NO: 5867545 - DNA, 25 bp, Homo sapien
cctgcccgcgggagtcctacgcgct

SEQ ID NO: 5867546 - DNA, 25 bp, Homo sapien
ggtcccgcgcgtattcggggtgccg

SEQ ID NO: 5867547 - DNA, 25 bp, Homo sapien
acgtcgcgcccgtagctcgtgcgcg

SEQ ID NO: 5867548 - DNA, 25 bp, Homo sapien
gctcccgttcgctacgccgggcgca

SEQ ID NO: 5867549 - DNA, 25 bp, Homo sapien
ggaccttcgcacgacgcgtccgggg

SEQ ID NO: 5867550 - DNA, 25 bp, Homo sapien
tgcgggcgtccgtcggaacgggagc

SEQ ID NO: 5867551 - DNA, 25 bp, Homo sapien
ggcccgcgccgaagctaggcagctg

SEQ ID NO: 5867552 - DNA, 25 bp, Homo sapien
gcctgtcgcgcggcatactcggcgc

SEQ ID NO: 5867553 - DNA, 25 bp, Homo sapien
gcgccggcgcatgattgcgtgccgc

SEQ ID NO: 5867554 - DNA, 25 bp, Homo sapien
gacggagtcacgccgcgtagcgggg

SEQ ID NO: 5867555 - DNA, 25 bp, Homo sapien
ggcgtctcgttacgcggccggtggc

SEQ ID NO: 5867556 - DNA, 25 bp, Homo sapien
cccgcccccccgtatcgcgtgtcca

SEQ ID NO: 5867557 - DNA, 25 bp, Homo sapien
cggggctacgaccgccggtagccag

SEQ ID NO: 5867558 - DNA, 25 bp, Homo sapien
cctcgctatccgtcccgggcccgag

SEQ ID NO: 5867559 - DNA, 25 bp, Homo sapien
gccccgcggctagtcgtcgagcacc

SEQ ID NO: 5867560 - DNA, 25 bp, Homo sapien
tgcaccgtcgcgcgctaagggcccg

SEQ ID NO: 5867561 - DNA, 25 bp, Homo sapien
ccggatcgacggccgtagtgcgcgc

SEQ ID NO: 5867562 - DNA, 25 bp, Homo sapien
cccgtcccgcgtaacgcacgtcgcg

SEQ ID NO: 5867563 - DNA, 25 bp, Homo sapien
gggtggcgcgtatcgacgcgcgagc

SEQ ID NO: 5867564 - DNA, 25 bp, Homo sapien
ctggcgtcgcggcgcgtaagcggtc

SEQ ID NO: 5867565 - DNA, 25 bp, Homo sapien
acggcccgtacgcgcgacaggccag

SEQ ID NO: 5867566 - DNA, 25 bp, Homo sapien
caccggcgcgcgtagaccgggtcac

SEQ ID NO: 5867567 - DNA, 25 bp, Homo sapien
gccccgcgtgcgacccgttaagggc

SEQ ID NO: 5867568 - DNA, 25 bp, Homo sapien
accggacatcgcgtcggacccggcc

SEQ ID NO: 5867569 - DNA, 25 bp, Homo sapien
gcgctttaaccgcgcggccctcccg

SEQ ID NO: 5867570 - DNA, 25 bp, Homo sapien
cccggctgtccgcatcgcgcagcga

SEQ ID NO: 5867571 - DNA, 25 bp, Homo sapien
ggtctctatcgcggcgcacgcgggg

SEQ ID NO: 5867572 - DNA, 25 bp, Homo sapien
taggacaacggccgcgcgagcgcgg

SEQ ID NO: 5867573 - DNA, 25 bp, Homo sapien
ccgacgcgtccgactaccggtgcgc

SEQ ID NO: 5867574 - DNA, 25 bp, Homo sapien
cccgcacggtcgcccgtgacggtga

SEQ ID NO: 5867575 - DNA, 25 bp, Homo sapien
aacgcgccctcgcgaacgggcccag

SEQ ID NO: 5867576 - DNA, 25 bp, Homo sapien
tccaggagcgcgcgacgtgcgaccc

SEQ ID NO: 5867577 - DNA, 25 bp, Homo sapien
ctcgccgcccgtagtaccgctggcc

SEQ ID NO: 5867578 - DNA, 25 bp, Homo sapien
acacggacgtctcgagcggccgggg

SEQ ID NO: 5867579 - DNA, 25 bp, Homo sapien
cgctggcccggtcgtacgcccacga

SEQ ID NO: 5867580 - DNA, 25 bp, Homo sapien
gcgggacgcggcacgataggcgtgg

SEQ ID NO: 5867581 - DNA, 25 bp, Homo sapien
ccccgcggcgcgctaacgtgtggag

SEQ ID NO: 5867582 - DNA, 25 bp, Homo sapien
cggtggccgacgtgcgtacccgagc

SEQ ID NO: 5867583 - DNA, 25 bp, Homo sapien
ggtgaagatcgaccggccgcgcgcc

SEQ ID NO: 5867584 - DNA, 25 bp, Homo sapien
ctacgccgtatcgggcgacggcccg

SEQ ID NO: 5867585 - DNA, 25 bp, Homo sapien
accgccccgcaacgtcgctgggctg

SEQ ID NO: 5867586 - DNA, 25 bp, Homo sapien
ctggcgaaggcgtacccgccggtgc

SEQ ID NO: 5867587 - DNA, 25 bp, Homo sapien
catcggagcgcgcgtatgccgccgg

SEQ ID NO: 5867588 - DNA, 25 bp, Homo sapien
ctgccacgcgcaacggttggccggc

SEQ ID NO: 5867589 - DNA, 25 bp, Homo sapien
ggagaccggcgcgacaacccgtggg

SEQ ID NO: 5867590 - DNA, 25 bp, Homo sapien
cgggccttcacgcgtccggcctctc

SEQ ID NO: 5867591 - DNA, 25 bp, Homo sapien
gcttaggcctaaccggcggcgcccc

SEQ ID NO: 5867592 - DNA, 25 bp, Homo sapien
ggcaggcgcgtaatcggcaccggcg

SEQ ID NO: 5867593 - DNA, 25 bp, Homo sapien
cgcacgcacgcgtaacgacgcgggc

SEQ ID NO: 5867594 - DNA, 25 bp, Homo sapien
cgcccgcgatcccgcggttcttcgc

SEQ ID NO: 5867595 - DNA, 25 bp, Homo sapien
gggaccacgatcccgcggtctccgc

SEQ ID NO: 5867596 - DNA, 25 bp, Homo sapien
cctgccgccgtagcccggttagccc

SEQ ID NO: 5867597 - DNA, 25 bp, Homo sapien
gcgcacacggcgtatcgggccggca

SEQ ID NO: 5867598 - DNA, 25 bp, Homo sapien
ctagcgcgcgcgaaccggccccaga

SEQ ID NO: 5867599 - DNA, 25 bp, Homo sapien
ccagcattgcgcgaccgggggggac

SEQ ID NO: 5867600 - DNA, 25 bp, Homo sapien
ccgtggccgaccggtcgaaccgcac

SEQ ID NO: 5867601 - DNA, 25 bp, Homo sapien
ggcgcgtgcgcgcgatacgagacgg

SEQ ID NO: 5867602 - DNA, 25 bp, Homo sapien
gtcggtcgtcggctactcggccggc

SEQ ID NO: 5867603 - DNA, 25 bp, Homo sapien
gtcccacggtcggatagcgggcggg

SEQ ID NO: 5867604 - DNA, 25 bp, Homo sapien
ccgcctcgcgaatacgcccccccag

SEQ ID NO: 5867605 - DNA, 25 bp, Homo sapien
cctggcgtcggaccgcctacacgcc

SEQ ID NO: 5867606 - DNA, 25 bp, Homo sapien
ccgcggcgaacgcgccctaccctgt

SEQ ID NO: 5867607 - DNA, 25 bp, Homo sapien
ctcagctacgggccgtcggagcggg

SEQ ID NO: 5867608 - DNA, 25 bp, Homo sapien
tgccggcgttgcgcgcgatcgaccg

SEQ ID NO: 5867609 - DNA, 25 bp, Homo sapien
gccagccgcgcggctactagggacg

SEQ ID NO: 5867610 - DNA, 25 bp, Homo sapien
ctagctgtgcgatcgcgcgccgcgc

SEQ ID NO: 5867611 - DNA, 25 bp, Homo sapien
cgcggtcggtccgatgcgccgggtt

SEQ ID NO: 5867612 - DNA, 25 bp, Homo sapien
cgagagggcggtcggcctatccccc

SEQ ID NO: 5867613 - DNA, 25 bp, Homo sapien
ctgctctgcgcgcggagtagggccg

SEQ ID NO: 5867614 - DNA, 25 bp, Homo sapien
gccgcgcggcggtcctagtagcctg

SEQ ID NO: 5867615 - DNA, 25 bp, Homo sapien
gaccgccgacgctcgtaccgtcccg

SEQ ID NO: 5867616 - DNA, 25 bp, Homo sapien
gtcggcgcgcctagtcggaggtcgc

SEQ ID NO: 5867617 - DNA, 25 bp, Homo sapien
gcacacgcgtcggtcggacgcgggt

SEQ ID NO: 5867618 - DNA, 25 bp, Homo sapien
gcccgcgtcgttacgcgcgagcctg

SEQ ID NO: 5867619 - DNA, 25 bp, Homo sapien
tgggggccgcgcgaccaaaagggcc

SEQ ID NO: 5867620 - DNA, 25 bp, Homo sapien
tacccgcgaacgtgcgcgaccggcc

SEQ ID NO: 5867621 - DNA, 25 bp, Homo sapien
gggccataccgtgcgaccgcggtgc

SEQ ID NO: 5867622 - DNA, 25 bp, Homo sapien
gccgggacggggacgcgtaggtcca

SEQ ID NO: 5867623 - DNA, 25 bp, Homo sapien
gccagtgccggtaatccgcggcccg

SEQ ID NO: 5867624 - DNA, 25 bp, Homo sapien
cggaggagcgtacgatcgccgggcg

SEQ ID NO: 5867625 - DNA, 25 bp, Homo sapien
ccagcaggcttacgcgcccacgggg

SEQ ID NO: 5867626 - DNA, 25 bp, Homo sapien
gggggcgagcggttgcgcgtaaggg

SEQ ID NO: 5867627 - DNA, 25 bp, Homo sapien
aggccgcgcggcgtcagacccgaca

SEQ ID NO: 5867628 - DNA, 25 bp, Homo sapien
ggcgccgcgcgatcgaacgcagcac

SEQ ID NO: 5867629 - DNA, 25 bp, Homo sapien
cgccgagcgtatccgcacgcccacc

SEQ ID NO: 5867630 - DNA, 25 bp, Homo sapien
acgtcgcgacctaggaccgccgggc

SEQ ID NO: 5867631 - DNA, 25 bp, Homo sapien
ccacgaggtcggatagcggcgcccc

SEQ ID NO: 5867632 - DNA, 25 bp, Homo sapien
gggcaccggtcgcacgacgacaggg

SEQ ID NO: 5867633 - DNA, 25 bp, Homo sapien
tcggggtagcgtgtcgccggccgtg

SEQ ID NO: 5867634 - DNA, 25 bp, Homo sapien
gggggtccgcggtacgaggccacac

SEQ ID NO: 5867635 - DNA, 25 bp, Homo sapien
gtccagttacgcgcgtgggcggcgc

SEQ ID NO: 5867636 - DNA, 25 bp, Homo sapien
cccgtacggcgcgcctacagccagg

SEQ ID NO: 5867637 - DNA, 25 bp, Homo sapien
cccccggtgcgttccgaccgtgcac

SEQ ID NO: 5867638 - DNA, 25 bp, Homo sapien
ggcctgcgccgcgtaacggcgcttc

SEQ ID NO: 5867639 - DNA, 25 bp, Homo sapien
gctgtgagatcgtcgcgcggcgccc

SEQ ID NO: 5867640 - DNA, 25 bp, Homo sapien
gcccgggacctacgcgagcccccaa

SEQ ID NO: 5867641 - DNA, 25 bp, Homo sapien
gcgccatcccgcgaacgacgtgggc

SEQ ID NO: 5867642 - DNA, 25 bp, Homo sapien
ccgccccgcgacacgtctgcagcca

SEQ ID NO: 5867643 - DNA, 25 bp, Homo sapien
tgcccagggtacgtcgcccacgcgc

SEQ ID NO: 5867644 - DNA, 25 bp, Homo sapien
tggggcgcgcacccgttacccacgc

SEQ ID NO: 5867645 - DNA, 25 bp, Homo sapien
gcagggtacgtgccgacgccaggcc

SEQ ID NO: 5867646 - DNA, 25 bp, Homo sapien
gccccgccgtggtatcgcggcgttc

SEQ ID NO: 5867647 - DNA, 25 bp, Homo sapien
gtgggcttcgacgcgtcccggcagg

SEQ ID NO: 5867648 - DNA, 25 bp, Homo sapien
gaagccacccgaccgtacgccggcc

SEQ ID NO: 5867649 - DNA, 25 bp, Homo sapien
acctccgctatgacgcgcggcgccg

SEQ ID NO: 5867650 - DNA, 25 bp, Homo sapien
gggcccgtcgtagccgcgtctgctc

SEQ ID NO: 5867651 - DNA, 25 bp, Homo sapien
cccgtcctacgcgcggcgaggcaga

SEQ ID NO: 5867652 - DNA, 25 bp, Homo sapien
cggggccgtgcctcgatcacgaccg

SEQ ID NO: 5867653 - DNA, 25 bp, Homo sapien
gccagctcgcggacccctaaccccc

SEQ ID NO: 5867654 - DNA, 25 bp, Homo sapien
ccggacacggcataccgcgccgacg

SEQ ID NO: 5867655 - DNA, 25 bp, Homo sapien
accgggcggcggtatcccgggagca

SEQ ID NO: 5867656 - DNA, 25 bp, Homo sapien
cggggccccctatcgcgaacgagcg

SEQ ID NO: 5867657 - DNA, 25 bp, Homo sapien
cggtcctcgtacgcaggtcgggggc

SEQ ID NO: 5867658 - DNA, 25 bp, Homo sapien
cccccgcgtatcgaccgctggcgct

SEQ ID NO: 5867659 - DNA, 25 bp, Homo sapien
gcccccgcgcgtacggtcaacggtg

SEQ ID NO: 5867660 - DNA, 25 bp, Homo sapien
agccctccggggtacgtagccgcgc

SEQ ID NO: 5867661 - DNA, 25 bp, Homo sapien
cgcacggtaggccgcgacgtaccgg

SEQ ID NO: 5867662 - DNA, 25 bp, Homo sapien
ctgagcccgtcgcgcctacgagggc

SEQ ID NO: 5867663 - DNA, 25 bp, Homo sapien
tggcgccgcggacgtcgacgaccac

SEQ ID NO: 5867664 - DNA, 25 bp, Homo sapien
gggagcgcgcgtactggacggcacc

SEQ ID NO: 5867665 - DNA, 25 bp, Homo sapien
ctcgcaaccgttagcgcgcggcgcc

SEQ ID NO: 5867666 - DNA, 25 bp, Homo sapien
tcaggccgtcggacgcgacggaccg

SEQ ID NO: 5867667 - DNA, 25 bp, Homo sapien
ggcggcgtacgaccccggtcacagc

SEQ ID NO: 5867668 - DNA, 25 bp, Homo sapien
tgcgccgtcgggtccgaccgggaac

SEQ ID NO: 5867669 - DNA, 25 bp, Homo sapien
gggccgccgacggtatcgtgctcgc

SEQ ID NO: 5867670 - DNA, 25 bp, Homo sapien
ctgtgccggcgcgaaccgtcccggt

SEQ ID NO: 5867671 - DNA, 25 bp, Homo sapien
tcgccgatcgagcgtgcggccccgt

SEQ ID NO: 5867672 - DNA, 25 bp, Homo sapien
ccccgcacgacgggttgcggacagc

SEQ ID NO: 5867673 - DNA, 25 bp, Homo sapien
gccgtgtcgggccgtaacgggctcc

SEQ ID NO: 5867674 - DNA, 25 bp, Homo sapien
gtggggtccgaccgcgcgtaggcag

SEQ ID NO: 5867675 - DNA, 25 bp, Homo sapien
gtcccccgcacggtcggtgagtcgc

SEQ ID NO: 5867676 - DNA, 25 bp, Homo sapien
gagcggataccggcgcgctcgctgg

SEQ ID NO: 5867677 - DNA, 25 bp, Homo sapien
tcgcgctatcgcgcgagggctgccc

SEQ ID NO: 5867678 - DNA, 25 bp, Homo sapien
aacgtccatcgcgcgtcgccggggc

SEQ ID NO: 5867679 - DNA, 25 bp, Homo sapien
tcctcgcgcgtaccgggtaggcggg

SEQ ID NO: 5867680 - DNA, 25 bp, Homo sapien
gtgcgacgctcccgcgtagcctggg

SEQ ID NO: 5867681 - DNA, 25 bp, Homo sapien
gggatccgccgaccgtgatggcgcc

SEQ ID NO: 5867682 - DNA, 25 bp, Homo sapien
gccacgtgggcgcgcgaatccggct

SEQ ID NO: 5867683 - DNA, 25 bp, Homo sapien
gacagccgtccgcgactgagccggc

SEQ ID NO: 5867684 - DNA, 25 bp, Homo sapien
gcgccttcgcgcggtagagcgggtc

SEQ ID NO: 5867685 - DNA, 25 bp, Homo sapien
caggggcgcggccgtatctggaccc

SEQ ID NO: 5867686 - DNA, 25 bp, Homo sapien
gccccccacgtcgcgcatagcgacc

SEQ ID NO: 5867687 - DNA, 25 bp, Homo sapien
cgtcgctactcggtccgcgggaccg

SEQ ID NO: 5867688 - DNA, 25 bp, Homo sapien
ggctgccgggcgtcggtacgggtgt

SEQ ID NO: 5867689 - DNA, 25 bp, Homo sapien
agccaccggcccgatagcggcccag

SEQ ID NO: 5867690 - DNA, 25 bp, Homo sapien
acccagcgaccgaaccacgggcgcg

SEQ ID NO: 5867691 - DNA, 25 bp, Homo sapien
accaggatacgcggcctcgcggggc

SEQ ID NO: 5867692 - DNA, 25 bp, Homo sapien
ctcccgcgcgacggggtcaaggacc

SEQ ID NO: 5867693 - DNA, 25 bp, Homo sapien
tggacccctaacgcgacgcccgggc

SEQ ID NO: 5867694 - DNA, 25 bp, Homo sapien
gccgcacgcgcgggtctatcgagcg

SEQ ID NO: 5867695 - DNA, 25 bp, Homo sapien
ggccgggtacgcgcggcaatgtgcg

SEQ ID NO: 5867696 - DNA, 25 bp, Homo sapien
ctcgctgcgtcgcgaaggtcggcgg

SEQ ID NO: 5867697 - DNA, 25 bp, Homo sapien
cgcgagcgggtagtacgccgcctgg

SEQ ID NO: 5867698 - DNA, 25 bp, Homo sapien
caggccccggaggtcgatagggcgg

SEQ ID NO: 5867699 - DNA, 25 bp, Homo sapien
ggccgtcggcgcgtcataccgggag

SEQ ID NO: 5867700 - DNA, 25 bp, Homo sapien
gtgggcggggcgcgtatcgcttgcc

SEQ ID NO: 5867701 - DNA, 25 bp, Homo sapien
ccgcagcgctgcgtactagccgccg

SEQ ID NO: 5867702 - DNA, 25 bp, Homo sapien
cccgcgcccgaccgcgttagttggc

SEQ ID NO: 5867703 - DNA, 25 bp, Homo sapien
gagcgaccggttagtcgcgccgcgc

SEQ ID NO: 5867704 - DNA, 25 bp, Homo sapien
gccggcccgtactagcgcgccaacc

SEQ ID NO: 5867705 - DNA, 25 bp, Homo sapien
ggcttgccccggcgtatcgcggtgg

SEQ ID NO: 5867706 - DNA, 25 bp, Homo sapien
cccggcactaccccgcgtactccgc

SEQ ID NO: 5867707 - DNA, 25 bp, Homo sapien
ggccggtgtacgccggacgtccctg

SEQ ID NO: 5867708 - DNA, 25 bp, Homo sapien
cgcgctcggcgcgataccccatggg

SEQ ID NO: 5867709 - DNA, 25 bp, Homo sapien
gtgccggcctatacggcgctcccgc

SEQ ID NO: 5867710 - DNA, 25 bp, Homo sapien
ccagccgccgtagcgtacctgcggc

SEQ ID NO: 5867711 - DNA, 25 bp, Homo sapien
ccccggccgttagtcgcgcatccgg

SEQ ID NO: 5867712 - DNA, 25 bp, Homo sapien
ccggacatgcgccctaccgccgagg

SEQ ID NO: 5867713 - DNA, 25 bp, Homo sapien
gcgttccgcttagcgcgaccgcccc

SEQ ID NO: 5867714 - DNA, 25 bp, Homo sapien
gggcggatcgcgcacccgtctgcag

SEQ ID NO: 5867715 - DNA, 25 bp, Homo sapien
ggggcgagcggtacgtgcggcaacg

SEQ ID NO: 5867716 - DNA, 25 bp, Homo sapien
cggcggcggtagccgttcgagcgtc

SEQ ID NO: 5867717 - DNA, 25 bp, Homo sapien
ctaggcggttatgcgcgggggccgg

SEQ ID NO: 5867718 - DNA, 25 bp, Homo sapien
cgcctcccggtccgcatcggccttg

SEQ ID NO: 5867719 - DNA, 25 bp, Homo sapien
ggccggtcgctatacgccgctccgg

SEQ ID NO: 5867720 - DNA, 25 bp, Homo sapien
gcggggcccgaacgtacgcaagggc

SEQ ID NO: 5867721 - DNA, 25 bp, Homo sapien
cgcagccgcgggtacatcagccggg

SEQ ID NO: 5867722 - DNA, 25 bp, Homo sapien
tcggacgcgtctacgcgcagcgggg

SEQ ID NO: 5867723 - DNA, 25 bp, Homo sapien
tgggctgccgcgtatcggaccccgc

SEQ ID NO: 5867724 - DNA, 25 bp, Homo sapien
gccgcgcgcgcccgatagtcgttcg

SEQ ID NO: 5867725 - DNA, 25 bp, Homo sapien
ggcccccgacccgctagcactcgca

SEQ ID NO: 5867726 - DNA, 25 bp, Homo sapien
gcggcctacgcgcccgtacacggac

SEQ ID NO: 5867727 - DNA, 25 bp, Homo sapien
cgctcacgcggaccgtcttgcgcgg

SEQ ID NO: 5867728 - DNA, 25 bp, Homo sapien
cggctgcccgaacgagcgtccccga

SEQ ID NO: 5867729 - DNA, 25 bp, Homo sapien
gcccccgccgtgcgcgatagagctc

SEQ ID NO: 5867730 - DNA, 25 bp, Homo sapien
cgcccctatcgcggacgaccggcac

SEQ ID NO: 5867731 - DNA, 25 bp, Homo sapien
gcggagttaccgcgacgggggctcc

SEQ ID NO: 5867732 - DNA, 25 bp, Homo sapien
cggaaccggatacctcgcggccgcg

SEQ ID NO: 5867733 - DNA, 25 bp, Homo sapien
gcaggtgtagcgcgaccgagggccc

SEQ ID NO: 5867734 - DNA, 25 bp, Homo sapien
caggggtaggccgcgtcgaggcctg

SEQ ID NO: 5867735 - DNA, 25 bp, Homo sapien
ggcgcacccggacgggtaccccatc

SEQ ID NO: 5867736 - DNA, 25 bp, Homo sapien
caggccaatcgcgcggactgccgcg

SEQ ID NO: 5867737 - DNA, 25 bp, Homo sapien
ccggcccgcgtcgacggactcagtg

SEQ ID NO: 5867738 - DNA, 25 bp, Homo sapien
gtgggctaggctacgcgccccgtcc

SEQ ID NO: 5867739 - DNA, 25 bp, Homo sapien
gggcgccattcgcgcgagcgatggg

SEQ ID NO: 5867740 - DNA, 25 bp, Homo sapien
ccgccaggctaccgcgtcgtccagg

SEQ ID NO: 5867741 - DNA, 25 bp, Homo sapien
tgccgcccactatcgtcgggccgcc

SEQ ID NO: 5867742 - DNA, 25 bp, Homo sapien
tccccctatgcgcgccggggcctag

SEQ ID NO: 5867743 - DNA, 25 bp, Homo sapien
ccggtcttggctcgacgcgggcagc

SEQ ID NO: 5867744 - DNA, 25 bp, Homo sapien
cggacgcgcgcgaaacgtagggcgc

SEQ ID NO: 5867745 - DNA, 25 bp, Homo sapien
ggccctgtcgtaacgcgggccggga

SEQ ID NO: 5867746 - DNA, 25 bp, Homo sapien
caggaggacgggtccgcgtgggacc

SEQ ID NO: 5867747 - DNA, 25 bp, Homo sapien
caccgggcgcgttcgtacgccgcct

SEQ ID NO: 5867748 - DNA, 25 bp, Homo sapien
ttacccgtcgtgtcgcgggcccggc

SEQ ID NO: 5867749 - DNA, 25 bp, Homo sapien
ggcccgccgcggtacgtacctggca

SEQ ID NO: 5867750 - DNA, 25 bp, Homo sapien
gcgcgacgtcgttcgcgagccaccc

SEQ ID NO: 5867751 - DNA, 25 bp, Homo sapien
gacgcaaccggtcgcgctacccccc

SEQ ID NO: 5867752 - DNA, 25 bp, Homo sapien
tcggttccggtagtgcgcggcccgg

SEQ ID NO: 5867753 - DNA, 25 bp, Homo sapien
ggcctctgcccctacgcgtgcgtcc

SEQ ID NO: 5867754 - DNA, 25 bp, Homo sapien
cgcgcgtcaatcgagcgcgccacgg

SEQ ID NO: 5867755 - DNA, 25 bp, Homo sapien
cgggcaaccgcccgatacgcgccca

SEQ ID NO: 5867756 - DNA, 25 bp, Homo sapien
ctgcgtcgccagtcgtgcgcgtcgc

SEQ ID NO: 5867757 - DNA, 25 bp, Homo sapien
cagggcgcgccgattaggcaggcgc

SEQ ID NO: 5867758 - DNA, 25 bp, Homo sapien
gacgtatcgcacggtccgggcggcg

SEQ ID NO: 5867759 - DNA, 25 bp, Homo sapien
cggggcttagtccgcgcctggcgtc

SEQ ID NO: 5867760 - DNA, 25 bp, Homo sapien
gacctcgacgggcgttacggcggcg

SEQ ID NO: 5867761 - DNA, 25 bp, Homo sapien
cacgaccggggaccgtcgacacggc

SEQ ID NO: 5867762 - DNA, 25 bp, Homo sapien
tctcccggcgatcgtacgcggcggg

SEQ ID NO: 5867763 - DNA, 25 bp, Homo sapien
gggtgccctacgcgcggttgcccgt

SEQ ID NO: 5867764 - DNA, 25 bp, Homo sapien
gcgacgccgtacgcgcgaaccccgt

SEQ ID NO: 5867765 - DNA, 25 bp, Homo sapien
cgcggcatacgggccgccgtcagtg

SEQ ID NO: 5867766 - DNA, 25 bp, Homo sapien
ggtaggcccggctcgtacggccgct

SEQ ID NO: 5867767 - DNA, 25 bp, Homo sapien
ggggtcgcgggacgacactcgaggc

SEQ ID NO: 5867768 - DNA, 25 bp, Homo sapien
cgctagcgcgctagcgggtgggctg

SEQ ID NO: 5867769 - DNA, 25 bp, Homo sapien
tggcggcttcgcgcgtaggccgtgc

SEQ ID NO: 5867770 - DNA, 25 bp, Homo sapien
ggctgtcgaccgtgccgaacgccgc

SEQ ID NO: 5867771 - DNA, 25 bp, Homo sapien
ccgggcacccgatccgtcgtctgcc

SEQ ID NO: 5867772 - DNA, 25 bp, Homo sapien
tgggcctaccgatacgcgcgcgggc

SEQ ID NO: 5867773 - DNA, 25 bp, Homo sapien
catggctcgcggacggctaggcgcg

SEQ ID NO: 5867774 - DNA, 25 bp, Homo sapien
cgccggcgaccggtaggacggtctg

SEQ ID NO: 5867775 - DNA, 25 bp, Homo sapien
gtcgcgacgcgcgaaggacccccct

SEQ ID NO: 5867776 - DNA, 25 bp, Homo sapien
gggcatgacgcgtagccgggcgtcg

SEQ ID NO: 5867777 - DNA, 25 bp, Homo sapien
gcgtcgcgatagcggtccggcgcgt

SEQ ID NO: 5867778 - DNA, 25 bp, Homo sapien
gggctgctacccggcacgagtcccg

SEQ ID NO: 5867779 - DNA, 25 bp, Homo sapien
ccctccgcgtcgtaacgcggtgggc

SEQ ID NO: 5867780 - DNA, 25 bp, Homo sapien
ccgcgcgtacgcgcgggtctccgta

SEQ ID NO: 5867781 - DNA, 25 bp, Homo sapien
gccgccagtcgacccgcgtcgggat

SEQ ID NO: 5867782 - DNA, 25 bp, Homo sapien
cgagagggccccgtatcggccgtgc

SEQ ID NO: 5867783 - DNA, 25 bp, Homo sapien
gcgcggcccgtatgcgcgaccgttg

SEQ ID NO: 5867784 - DNA, 25 bp, Homo sapien
cgcgcgaacgccccgcgtatggcga

SEQ ID NO: 5867785 - DNA, 25 bp, Homo sapien
cccccatcgcgcgacgtgccgtacc

SEQ ID NO: 5867786 - DNA, 25 bp, Homo sapien
ggtccggtcgcgtaccgttgcgccg

SEQ ID NO: 5867787 - DNA, 25 bp, Homo sapien
gcggtcgatactgccgcgaggggcc

SEQ ID NO: 5867788 - DNA, 25 bp, Homo sapien
cctcctttgcggtcgcgaggccccg

SEQ ID NO: 5867789 - DNA, 25 bp, Homo sapien
cggcacccgaccgtacgggctgagg

SEQ ID NO: 5867790 - DNA, 25 bp, Homo sapien
cccacacctcggcggtcgacgtcgg

SEQ ID NO: 5867791 - DNA, 25 bp, Homo sapien
cccctgtaccgcgcgtacgggcgac

SEQ ID NO: 5867792 - DNA, 25 bp, Homo sapien
gtctcggacggtcgtgccggcggag

SEQ ID NO: 5867793 - DNA, 25 bp, Homo sapien
gcgctccgggtacgaccgtgcaccc

SEQ ID NO: 5867794 - DNA, 25 bp, Homo sapien
gccggccgcgatagatccgggcgag

SEQ ID NO: 5867795 - DNA, 25 bp, Homo sapien
cacggcccgcatacgaccccgcctc

SEQ ID NO: 5867796 - DNA, 25 bp, Homo sapien
ggcgcgtcgcgggtcgatagaccgc

SEQ ID NO: 5867797 - DNA, 25 bp, Homo sapien
gccctcgacgcgcgtacgggagcct

SEQ ID NO: 5867798 - DNA, 25 bp, Homo sapien
gcgggattcgcggacgcgtctggcg

SEQ ID NO: 5867799 - DNA, 25 bp, Homo sapien
ggggtggcgcgcgttaggtcgcctc

SEQ ID NO: 5867800 - DNA, 25 bp, Homo sapien
cgagcgcgacgatcggcccgagagc

SEQ ID NO: 5867801 - DNA, 25 bp, Homo sapien
gcccgctacccggccgacgtagacg

SEQ ID NO: 5867802 - DNA, 25 bp, Homo sapien
ccgcgacgaacgggcgtagggtcgc

SEQ ID NO: 5867803 - DNA, 25 bp, Homo sapien
atgcggggtctcgcgtcggcctcgg

SEQ ID NO: 5867804 - DNA, 25 bp, Homo sapien
tccgcacgctaggcggcatccgcgg

SEQ ID NO: 5867805 - DNA, 25 bp, Homo sapien
ggacgcgtcggatagcgcgccggtg

SEQ ID NO: 5867806 - DNA, 25 bp, Homo sapien
ctccagtgtaaccggcccggcgggc

SEQ ID NO: 5867807 - DNA, 25 bp, Homo sapien
gagcgccgcgtacgggccaggtagg

SEQ ID NO: 5867808 - DNA, 25 bp, Homo sapien
ttccgcacggtagcgtcgcgcgccc

SEQ ID NO: 5867809 - DNA, 25 bp, Homo sapien
cgctcgagcgttcgacgccagggcg

SEQ ID NO: 5867810 - DNA, 25 bp, Homo sapien
ggggccgtcgcgaacgacaagccgg

SEQ ID NO: 5867811 - DNA, 25 bp, Homo sapien
tgggcccgacggccgatcacccgca

SEQ ID NO: 5867812 - DNA, 25 bp, Homo sapien
ggggcggcgtccgctacgacaaccc

SEQ ID NO: 5867813 - DNA, 25 bp, Homo sapien
gtgcgccgtcgcgcaactcgccagg

SEQ ID NO: 5867814 - DNA, 25 bp, Homo sapien
tccctgtcgcgatgcgagggccggg

SEQ ID NO: 5867815 - DNA, 25 bp, Homo sapien
ctcgcgctactcgtcgcgccaccgg

SEQ ID NO: 5867816 - DNA, 25 bp, Homo sapien
ggcccgccgcggctaacgaagctgc

SEQ ID NO: 5867817 - DNA, 25 bp, Homo sapien
gtctggacgaccggtagccgcgccc

SEQ ID NO: 5867818 - DNA, 25 bp, Homo sapien
tgcgcgcgtcgcgcgactaggtgcc

SEQ ID NO: 5867819 - DNA, 25 bp, Homo sapien
caggggggtgcgctagcgcgcccaa

SEQ ID NO: 5867820 - DNA, 25 bp, Homo sapien
ggccgccttagccggcggtgcgagt

SEQ ID NO: 5867821 - DNA, 25 bp, Homo sapien
catccctcggtacgcgtcccgcgcc

SEQ ID NO: 5867822 - DNA, 25 bp, Homo sapien
agcgggcgcgtcgtcgagttccgcc

SEQ ID NO: 5867823 - DNA, 25 bp, Homo sapien
agcgcgcgcgggacgatagctgggg

SEQ ID NO: 5867824 - DNA, 25 bp, Homo sapien
tcgccgtaggcgcggtccgacgcag

SEQ ID NO: 5867825 - DNA, 25 bp, Homo sapien
cgcgtgggcccgcttacgccacctg

SEQ ID NO: 5867826 - DNA, 25 bp, Homo sapien
gcgggtcgcggactagctacgcggc

SEQ ID NO: 5867827 - DNA, 25 bp, Homo sapien
cgggccgcggattaccggcactggc

SEQ ID NO: 5867828 - DNA, 25 bp, Homo sapien
cccaggctacgcgggagcgtcgcac

SEQ ID NO: 5867829 - DNA, 25 bp, Homo sapien
ggtcgctatgcgcgacgtggggggc

SEQ ID NO: 5867830 - DNA, 25 bp, Homo sapien
ccccgctacgcggcgtgactccgtc

SEQ ID NO: 5867831 - DNA, 25 bp, Homo sapien
cgccagacgcgtccgcgaatcccgc

SEQ ID NO: 5867832 - DNA, 25 bp, Homo sapien
ctccgaccatagtcgcgcggggccc

SEQ ID NO: 5867833 - DNA, 25 bp, Homo sapien
gggcagccgataccggacgtggccg

SEQ ID NO: 5867834 - DNA, 25 bp, Homo sapien
gcggagtacgcggggtagtgccggg

SEQ ID NO: 5867835 - DNA, 25 bp, Homo sapien
ccgcgcaagacggtccgcgtgagcg

SEQ ID NO: 5867836 - DNA, 25 bp, Homo sapien
ggtacggcacgtcgcgcgatggggg

SEQ ID NO: 5867837 - DNA, 25 bp, Homo sapien
gatggggtacccgtccgggtgcgcc

SEQ ID NO: 5867838 - DNA, 25 bp, Homo sapien
ctggctaccggcggtcgtagccccg

SEQ ID NO: 5867839 - DNA, 25 bp, Homo sapien
ccgccgaccttcgcgacgcagcgag

SEQ ID NO: 5867840 - DNA, 25 bp, Homo sapien
caagagcgcgtgccgtaggcgggcg

SEQ ID NO: 5867841 - DNA, 25 bp, Homo sapien
gctgcccgcgtcgagccaagaccgg

SEQ ID NO: 5867842 - DNA, 25 bp, Homo sapien
gacgccaggcgcggactaagccccg

SEQ ID NO: 5867843 - DNA, 25 bp, Homo sapien
gcacggccgatacggggccctctcg

SEQ ID NO: 5867844 - DNA, 25 bp, Homo sapien
acggcgccacgatcgggcacgggca

SEQ ID NO: 5867845 - DNA, 25 bp, Homo sapien
ggggcacggtcgcgaatcgggggag

SEQ ID NO: 5867846 - DNA, 25 bp, Homo sapien
ccgcgacggccggtcgagtagcgga

SEQ ID NO: 5867847 - DNA, 25 bp, Homo sapien
cgcccatccgccggtacgacgccac

SEQ ID NO: 5867848 - DNA, 25 bp, Homo sapien
gccggctcagtcgcggacggctgtc

SEQ ID NO: 5867849 - DNA, 25 bp, Homo sapien
gcccctgcatcgcgcgtacggcctg

SEQ ID NO: 5867850 - DNA, 25 bp, Homo sapien
cgacgcccggctacgcgtcatgccc

SEQ ID NO: 5867851 - DNA, 25 bp, Homo sapien
gaggcggggtcgtatgcgggccgtg

SEQ ID NO: 5867852 - DNA, 25 bp, Homo sapien
cctacctggcccgtacgcggcgctc

SEQ ID NO: 5867853 - DNA, 25 bp, Homo sapien
gggaccggtccgcgctacgagccac

SEQ ID NO: 5867854 - DNA, 25 bp, Homo sapien
cgccggtgccgattacgcgcctgcc

SEQ ID NO: 5867855 - DNA, 25 bp, Homo sapien
cagcccagcgacgttgcggggcggt

SEQ ID NO: 5867856 - DNA, 25 bp, Homo sapien
gcgagcacgataccgtcggcggccc

SEQ ID NO: 5867857 - DNA, 25 bp, Homo sapien
gcccccgacctgcgtacgaggaccg

SEQ ID NO: 5867858 - DNA, 25 bp, Homo sapien
gggttgtcgtagcggacgccgcccc

SEQ ID NO: 5867859 - DNA, 25 bp, Homo sapien
gcgacctccgactaggcgcgccgac

SEQ ID NO: 5867860 - DNA, 25 bp, Homo sapien
cgccgcccgtctacgcgagcgcact

SEQ ID NO: 5867861 - DNA, 25 bp, Homo sapien
cggccctactccgcgcgcagagcag

SEQ ID NO: 5867862 - DNA, 25 bp, Homo sapien
cgtctacgtcggccgggtagcgggc

SEQ ID NO: 5867863 - DNA, 25 bp, Homo sapien
cgcgcctagccgtccgcgagccatg

SEQ ID NO: 5867864 - DNA, 25 bp, Homo sapien
cgatcctacgcgcgccggtgcgcct

SEQ ID NO: 5867865 - DNA, 25 bp, Homo sapien
ctccacacgttagcgcgccgcgggg

SEQ ID NO: 5867866 - DNA, 25 bp, Homo sapien
cccggccctcgcatcgcgacaggga

SEQ ID NO: 5867867 - DNA, 25 bp, Homo sapien
ctccgccggcacgaccgtccgagac

SEQ ID NO: 5867868 - DNA, 25 bp, Homo sapien
caacggtcgcgcatacgggccgcgc

SEQ ID NO: 5867869 - DNA, 25 bp, Homo sapien
gtggtcgtcgacgtccgcggcgcca

SEQ ID NO: 5867870 - DNA, 25 bp, Homo sapien
cggtcgatcgcgcgcaacgccggca

SEQ ID NO: 5867871 - DNA, 25 bp, Homo sapien
caagcccggacgccgcgtagggcca

SEQ ID NO: 5867872 - DNA, 25 bp, Homo sapien
ccgcagcgcgcgattctagcgcgcc

SEQ ID NO: 5867873 - DNA, 25 bp, Homo sapien
gtccgtgtacgggcgcgtaggccgc

SEQ ID NO: 5867874 - DNA, 25 bp, Homo sapien
ggcgaggacccgatagacggccccg

SEQ ID NO: 5867875 - DNA, 25 bp, Homo sapien
gcgcgcactacggccgtcgatccgg

SEQ ID NO: 5867876 - DNA, 25 bp, Homo sapien
ggccagcggtactacgggcggcgag

SEQ ID NO: 5867877 - DNA, 25 bp, Homo sapien
gtggcccggtgacgtacccaggcgg

SEQ ID NO: 5867878 - DNA, 25 bp, Homo sapien
cgccgagcgcgtagacggtcggcag

SEQ ID NO: 5867879 - DNA, 25 bp, Homo sapien
atcccgacgcgggtcgactggcggc

SEQ ID NO: 5867880 - DNA, 25 bp, Homo sapien
gcgcgccggaccgcgcgttatccct

SEQ ID NO: 5867881 - DNA, 25 bp, Homo sapien
cgcccgcgctacggcggacgagtga

SEQ ID NO: 5867882 - DNA, 25 bp, Homo sapien
cgctcgttcgcgatagggggccccg

SEQ ID NO: 5867883 - DNA, 25 bp, Homo sapien
ccggggggccgattcgcgacgcgta

SEQ ID NO: 5867884 - DNA, 25 bp, Homo sapien
gtgctgcgttcgatcgcgcggcgcc

SEQ ID NO: 5867885 - DNA, 25 bp, Homo sapien
agcgccagcggtcgatacgcggggg

SEQ ID NO: 5867886 - DNA, 25 bp, Homo sapien
tcgctgcgcgatgcggacagccggg

SEQ ID NO: 5867887 - DNA, 25 bp, Homo sapien
cccatcgctcgcgcgaatggcgccc

SEQ ID NO: 5867888 - DNA, 25 bp, Homo sapien
ggcccctcgcggcagtatcgaccgc

SEQ ID NO: 5867889 - DNA, 25 bp, Homo sapien
agggatcgccgtacggtcggcggcg

SEQ ID NO: 5867890 - DNA, 25 bp, Homo sapien
cgccctggcgtcgaacgctcgagcg

SEQ ID NO: 5867891 - DNA, 25 bp, Homo sapien
ttgggcgcgctagcgcacccccctg

SEQ ID NO: 5867892 - DNA, 25 bp, Homo sapien
gggtgcacggtcgtacccggagcgc

SEQ ID NO: 5867893 - DNA, 25 bp, Homo sapien
ggctcagtaccgtcgaccggcgcgc

SEQ ID NO: 5867894 - DNA, 25 bp, Homo sapien
gggcagcgaatgcgcaccgggccca

SEQ ID NO: 5867895 - DNA, 25 bp, Homo sapien
gacgctcgaacggctaccgccgccg

SEQ ID NO: 5867896 - DNA, 25 bp, Homo sapien
ggatcgcgaccgcgcgagtgctggc

SEQ ID NO: 5867897 - DNA, 25 bp, Homo sapien
cggcgcaacggtacgcgaccggacc

SEQ ID NO: 5867898 - DNA, 25 bp, Homo sapien
tgcgggtgatcggccgtcgggccca

SEQ ID NO: 5867899 - DNA, 25 bp, Homo sapien
cgccgcccggaccgtgcgatacgtc

SEQ ID NO: 5867900 - DNA, 25 bp, Homo sapien
ccgcggatgccgcctagcgtgcgga

SEQ ID NO: 5867901 - DNA, 25 bp, Homo sapien
cggctccgacgggcgtatcccccca

SEQ ID NO: 5867902 - DNA, 25 bp, Homo sapien
ggcgcgcggccggtcgatcttcacc

SEQ ID NO: 5867903 - DNA, 25 bp, Homo sapien
cccggtcttgcgtcgtccgcggacg

SEQ ID NO: 5867904 - DNA, 25 bp, Homo sapien
caggtggcgtaagcgggcccacgcg

SEQ ID NO: 5867905 - DNA, 25 bp, Homo sapien
cccggttgtactacgcgcgcgccgg

SEQ ID NO: 5867906 - DNA, 25 bp, Homo sapien
aggcctcgcattacgcgcggcgccc

SEQ ID NO: 5867907 - DNA, 25 bp, Homo sapien
gaggcgacctaacgcgcgccacccc

SEQ ID NO: 5867908 - DNA, 25 bp, Homo sapien
cggcggctagtacgcagcgctgcgg

SEQ ID NO: 5867909 - DNA, 25 bp, Homo sapien
gcccaccgcgttacgacgcggaggg

SEQ ID NO: 5867910 - DNA, 25 bp, Homo sapien
cacggccggcgacacgctaccccga

SEQ ID NO: 5867911 - DNA, 25 bp, Homo sapien
cagggcagtccgagcgacgcgacgc

SEQ ID NO: 5867912 - DNA, 25 bp, Homo sapien
gcgcggcgcgcgatcgcacagctag

SEQ ID NO: 5867913 - DNA, 25 bp, Homo sapien
tgctgccgttcggccgaaccggccg

SEQ ID NO: 5867914 - DNA, 25 bp, Homo sapien
ctcgggcccgggacggatagcgagg

SEQ ID NO: 5867915 - DNA, 25 bp, Homo sapien
ccggtacgtcgcggcctaccgtgcg

SEQ ID NO: 5867916 - DNA, 25 bp, Homo sapien
gggcgcggctaccggtcgtccagac

SEQ ID NO: 5867917 - DNA, 25 bp, Homo sapien
ccccgtgggcgcgtaagcctgctgg

SEQ ID NO: 5867918 - DNA, 25 bp, Homo sapien
gggccgccggtcgtctagcccgatc

SEQ ID NO: 5867919 - DNA, 25 bp, Homo sapien
cggtccgtcgcgtccgacggcctga

SEQ ID NO: 5867920 - DNA, 25 bp, Homo sapien
gggcagccctcgcgcgatagcgcga

SEQ ID NO: 5867921 - DNA, 25 bp, Homo sapien
ggtgctcgacgactagccgcggggc

SEQ ID NO: 5867922 - DNA, 25 bp, Homo sapien
gcgtgggtaacgggtgcgcgcccca

SEQ ID NO: 5867923 - DNA, 25 bp, Homo sapien
agcccccggtctgtcgcgagcaccg

SEQ ID NO: 5867924 - DNA, 25 bp, Homo sapien
ccccggacgcgtcgtgcgaaggtcc

SEQ ID NO: 5867925 - DNA, 25 bp, Homo sapien
ccccgcgtgcgccgcgatagagacc

SEQ ID NO: 5867926 - DNA, 25 bp, Homo sapien
gggcggccgtgaacggacggtcagg

SEQ ID NO: 5867927 - DNA, 25 bp, Homo sapien
gccccggcgacgcgcgatggacgtt

SEQ ID NO: 5867928 - DNA, 25 bp, Homo sapien
ggtgccgtccagtacgcgcgctccc

SEQ ID NO: 5867929 - DNA, 25 bp, Homo sapien
cagcggccgtcgcacgatccgtgcc

SEQ ID NO: 5867930 - DNA, 25 bp, Homo sapien
gtcccccccggtcgcgcaatgctgg

SEQ ID NO: 5867931 - DNA, 25 bp, Homo sapien
tgcgcccggcgtagcgaacgggagc

SEQ ID NO: 5867932 - DNA, 25 bp, Homo sapien
acccgcgtccgaccgacgcgtgtgc

SEQ ID NO: 5867933 - DNA, 25 bp, Homo sapien
gagctctatcgcgcacggcgggggc

SEQ ID NO: 5867934 - DNA, 25 bp, Homo sapien
ccccgctgcgcgtagacgcgtccga

SEQ ID NO: 5867935 - DNA, 25 bp, Homo sapien
cgggccgtcgcccgatacggcgtag

SEQ ID NO: 5867936 - DNA, 25 bp, Homo sapien
gaggccagccgcggacgaaggccca

SEQ ID NO: 5867937 - DNA, 25 bp, Homo sapien
acgcggatacgcgcccgagcggctg

SEQ ID NO: 5867938 - DNA, 25 bp, Homo sapien
tcaccgtcacgggcgaccgtgcggg

SEQ ID NO: 5867939 - DNA, 25 bp, Homo sapien
agccggattcgcgcgcccacgtggc

SEQ ID NO: 5867940 - DNA, 25 bp, Homo sapien
caggctactaggaccgccgcgcggc

SEQ ID NO: 5867941 - DNA, 25 bp, Homo sapien
tgtcctgcacgccgacgtcgggggc

SEQ ID NO: 5867942 - DNA, 25 bp, Homo sapien
gggtccagatacggccgcgcccctg

SEQ ID NO: 5867943 - DNA, 25 bp, Homo sapien
ctcccggtatgacgcgccgacggcc

SEQ ID NO: 5867944 - DNA, 25 bp, Homo sapien
aggggggtccttcgcgcgtcgcgac

SEQ ID NO: 5867945 - DNA, 25 bp, Homo sapien
cgttgccgcacgtaccgctcgcccc

SEQ ID NO: 5867946 - DNA, 25 bp, Homo sapien
cccccgggccgcgagatactcgcca

SEQ ID NO: 5867947 - DNA, 25 bp, Homo sapien
gcccggcggtcctaggtcgcgacgt

SEQ ID NO: 5867948 - DNA, 25 bp, Homo sapien
ggcccttttggtcgcgcggccccca

SEQ ID NO: 5867949 - DNA, 25 bp, Homo sapien
agctgttggcgcgtcggacccgccc

SEQ ID NO: 5867950 - DNA, 25 bp, Homo sapien
gcgcaccggtagtcggacgcgtcgg

SEQ ID NO: 5867951 - DNA, 25 bp, Homo sapien
ggccggtcgcgcacgttcgcgggta

SEQ ID NO: 5867952 - DNA, 25 bp, Homo sapien
ggccgcttcgacgacccgccatggc

SEQ ID NO: 5867953 - DNA, 25 bp, Homo sapien
gcgccctacgtttcgcgcgcgtccg

SEQ ID NO: 5867954 - DNA, 25 bp, Homo sapien
ctggcctgtcgcgcgtacgggccgt

SEQ ID NO: 5867955 - DNA, 25 bp, Homo sapien
ctgcgtcggaccgcgcctacggcga

SEQ ID NO: 5867956 - DNA, 25 bp, Homo sapien
ggccacgcgtctgatcgcgcggtgc

SEQ ID NO: 5867957 - DNA, 25 bp, Homo sapien
ggccgggtccgacgcgatgtccggt

SEQ ID NO: 5867958 - DNA, 25 bp, Homo sapien
gagccgcgggtcgacgcacgcacgt

SEQ ID NO: 5867959 - DNA, 25 bp, Homo sapien
ccgtctcgtatcgcgcgcacgcgcc

SEQ ID NO: 5867960 - DNA, 25 bp, Homo sapien
gagcacccgtccgcgaggagcgctc

SEQ ID NO: 5867961 - DNA, 25 bp, Homo sapien
gcgccgcccacgcgcgtaactggac

SEQ ID NO: 5867962 - DNA, 25 bp, Homo sapien
caggtgggcgacgtacccggccgca

SEQ ID NO: 5867963 - DNA, 25 bp, Homo sapien
cggcgccgcgcgtcatagcggaggt

SEQ ID NO: 5867964 - DNA, 25 bp, Homo sapien
cctggacgacgcggtagcctggcgg

SEQ ID NO: 5867965 - DNA, 25 bp, Homo sapien
ggtgggcgtgcggatacgctcggcg

SEQ ID NO: 5867966 - DNA, 25 bp, Homo sapien
gccctatatggcgcgcccgctggcc

SEQ ID NO: 5867967 - DNA, 25 bp, Homo sapien
cccggatcacgccggttcgcagccg

SEQ ID NO: 5867968 - DNA, 25 bp, Homo sapien
gccgacgtgtcggttaccgcggcgg

SEQ ID NO: 5867969 - DNA, 25 bp, Homo sapien
cggcaccccgaatacgcgcgggacc

SEQ ID NO: 5867970 - DNA, 25 bp, Homo sapien
tcggggacgctcgttcgggcagccg

SEQ ID NO: 5867971 - DNA, 25 bp, Homo sapien
ggcggcccgacgatagtgggcggca

SEQ ID NO: 5867972 - DNA, 25 bp, Homo sapien
tcagaccgtcggtagggcgggcccg

SEQ ID NO: 5867973 - DNA, 25 bp, Homo sapien
cggtcccgcggaccgagtagcgacg

SEQ ID NO: 5867974 - DNA, 25 bp, Homo sapien
cactgagtccgtcgacgcgggccgg

SEQ ID NO: 5867975 - DNA, 25 bp, Homo sapien
gtcgcccgtacgcgcggtacagggg

SEQ ID NO: 5867976 - DNA, 25 bp, Homo sapien
gcggtctatcgacccgcgacgcgcc

SEQ ID NO: 5867977 - DNA, 25 bp, Homo sapien
acgcgccggaccgctatcgcgacgc

SEQ ID NO: 5867978 - DNA, 25 bp, Homo sapien
gtatgcggcggtcggcctacccccg

SEQ ID NO: 5867979 - DNA, 25 bp, Homo sapien
ggggcgcgtacgggagcgaaagccc

SEQ ID NO: 5867980 - DNA, 25 bp, Homo sapien
acggggccgcacgctcgatcggcga

SEQ ID NO: 5867981 - DNA, 25 bp, Homo sapien
ccgggttatgggccgacgcgcaggg

SEQ ID NO: 5867982 - DNA, 25 bp, Homo sapien
gcggcacgcaatcatgcgccggcgc

SEQ ID NO: 5867983 - DNA, 25 bp, Homo sapien
gggcactcacgcgggttagccgccc

SEQ ID NO: 5867984 - DNA, 25 bp, Homo sapien
gcggtctagcgcggttccgtgggcc

SEQ ID NO: 5867985 - DNA, 25 bp, Homo sapien
cgggcccttagcgcgcgacggtgca

SEQ ID NO: 5867986 - DNA, 25 bp, Homo sapien
ggtcccacgcggacccgtcctcctg

SEQ ID NO: 5867987 - DNA, 25 bp, Homo sapien
cccacgggttgtcgcgccggtctcc

SEQ ID NO: 5867988 - DNA, 25 bp, Homo sapien
tggggcgcctaatcgccgagggccg

SEQ ID NO: 5867989 - DNA, 25 bp, Homo sapien
ttgggggctcgcgtaggtcccgggc

SEQ ID NO: 5867990 - DNA, 25 bp, Homo sapien
acacccgtaccgacgcccggcagcc

SEQ ID NO: 5867991 - DNA, 25 bp, Homo sapien
gcaccgcggtcgcacggtatggccc

SEQ ID NO: 5867992 - DNA, 25 bp, Homo sapien
gcctcgagtgtcgtcccgcgacccc

SEQ ID NO: 5867993 - DNA, 25 bp, Homo sapien
cccgcccgctatccgaccgtgggac

SEQ ID NO: 5867994 - DNA, 25 bp, Homo sapien
tggcgtcctacggtcgcgcgcggag

SEQ ID NO: 5867995 - DNA, 25 bp, Homo sapien
gccaactaacgcggtcgggcgcggg

SEQ ID NO: 5867996 - DNA, 25 bp, Homo sapien
gccccgcgagcgcgatacgagaggc

SEQ ID NO: 5867997 - DNA, 25 bp, Homo sapien
cccgctccgacggcccgtagctgag

SEQ ID NO: 5867998 - DNA, 25 bp, Homo sapien
ccgggccgcgcactaccggaaccga

SEQ ID NO: 5867999 - DNA, 25 bp, Homo sapien
gcccgcgtcgttacgcgtgcgtgcg

SEQ ID NO: 5868000 - DNA, 25 bp, Homo sapien
cctcagcccgtacggtcgggtgccg

SEQ ID NO: 5868001 - DNA, 25 bp, Homo sapien
gggtggctcgcgaacgacgtcgcgc

SEQ ID NO: 5868002 - DNA, 25 bp, Homo sapien
gctgtccgcaacccgtcgtgcgggg

SEQ ID NO: 5868003 - DNA, 25 bp, Homo sapien
gggccctcggtcgcgctacacctgc

SEQ ID NO: 5868004 - DNA, 25 bp, Homo sapien
ggggggtagcgcgaccggttgcgtc

SEQ ID NO: 5868005 - DNA, 25 bp, Homo sapien
gcccgccgggccggttacactggag

SEQ ID NO: 5868006 - DNA, 25 bp, Homo sapien
gcctcgggtacttcggcgccgacgg

SEQ ID NO: 5868007 - DNA, 25 bp, Homo sapien
gcacggcctacgcgcgaagccgcca

SEQ ID NO: 5868008 - DNA, 25 bp, Homo sapien
gggggataggccgaccgccctctcg

SEQ ID NO: 5868009 - DNA, 25 bp, Homo sapien
tgaacgcccgcgtacggtgggcggg

SEQ ID NO: 5868010 - DNA, 25 bp, Homo sapien
gccccgacgcgcgtcggacgcacta

SEQ ID NO: 5868011 - DNA, 25 bp, Homo sapien
gagcagacgcggctacgacgggccc

SEQ ID NO: 5868012 - DNA, 25 bp, Homo sapien
gagcgacgatcgaccgcgccggctg

SEQ ID NO: 5868013 - DNA, 25 bp, Homo sapien
ggcgccgcgcgctaacggttgcgag

SEQ ID NO: 5868014 - DNA, 25 bp, Homo sapien
cgccgcccgaccgactacgggcaac

SEQ ID NO: 5868015 - DNA, 25 bp, Homo sapien
gggtcgcacgtcgcgcgctcctgga

SEQ ID NO: 5868016 - DNA, 25 bp, Homo sapien
cagctgcctagcttcggcgcgggcc

SEQ ID NO: 5868017 - DNA, 25 bp, Homo sapien
ccggatgcgcgactaacggccgggg

SEQ ID NO: 5868018 - DNA, 25 bp, Homo sapien
ccctgtcgtcgtgcgaccggtgccc

SEQ ID NO: 5868019 - DNA, 25 bp, Homo sapien
ccggcccccgcgcataaccgcctag

SEQ ID NO: 5868020 - DNA, 25 bp, Homo sapien
gcgcggcgcgactaaccggtcgctc

SEQ ID NO: 5868021 - DNA, 25 bp, Homo sapien
caaggccgatgcggaccgggaggcg

SEQ ID NO: 5868022 - DNA, 25 bp, Homo sapien
cgcggccgcgaggtatccggttccg

SEQ ID NO: 5868023 - DNA, 25 bp, Homo sapien
cagggacgtccggcgtacaccggcc

SEQ ID NO: 5868024 - DNA, 25 bp, Homo sapien
gcgactcaccgaccgtgcgggggac

SEQ ID NO: 5868025 - DNA, 25 bp, Homo sapien
cgcacattgccgcgcgtacccggcc

SEQ ID NO: 5868026 - DNA, 25 bp, Homo sapien
cctggctgtaggcgcgccgtacggg

SEQ ID NO: 5868027 - DNA, 25 bp, Homo sapien
tggacctacgcgtccccgtcccggc

SEQ ID NO: 5868028 - DNA, 25 bp, Homo sapien
caggctcgcgcgtaacgacgcgggc

SEQ ID NO: 5868029 - DNA, 25 bp, Homo sapien
cagcccacccgctagcgcgctagcg

SEQ ID NO: 5868030 - DNA, 25 bp, Homo sapien
gcgggagcgccgtataggccggcac

SEQ ID NO: 5868031 - DNA, 25 bp, Homo sapien
ccagcgagcgcgccggtatccgctc

SEQ ID NO: 5868032 - DNA, 25 bp, Homo sapien
agccgcaccgacgctcgtccgccga

SEQ ID NO: 5868033 - DNA, 25 bp, Homo sapien
gtggggcgtaccgacgcgtcggtgc

SEQ ID NO: 5868034 - DNA, 25 bp, Homo sapien
cggcggtacgcgcgggactccctgt

SEQ ID NO: 5868035 - DNA, 25 bp, Homo sapien
gagggctcgcacggtccgaccctgc

SEQ ID NO: 5868036 - DNA, 25 bp, Homo sapien
tggacacgcgatacgggggggcggg

SEQ ID NO: 5868037 - DNA, 25 bp, Homo sapien
gcccttgcgtacgttcgggccccgc

SEQ ID NO: 5868038 - DNA, 25 bp, Homo sapien
ggcctggcgtcggcacgtaccctgc

SEQ ID NO: 5868039 - DNA, 25 bp, Homo sapien
cccggctgatgtacccgcggctgcg

SEQ ID NO: 5868040 - DNA, 25 bp, Homo sapien
gcggagaccgcgggatcgtggtccc

SEQ ID NO: 5868041 - DNA, 25 bp, Homo sapien
ccgtggcgcgctcgattgacgcgcg

SEQ ID NO: 5868042 - DNA, 25 bp, Homo sapien
cccatggggtatcgcgccgagcgcg

SEQ ID NO: 5868043 - DNA, 25 bp, Homo sapien
ctcgcccggatctatcgcggccggc

SEQ ID NO: 5868044 - DNA, 25 bp, Homo sapien
agcgcgtaggactcccgcgggcagg

SEQ ID NO: 5868045 - DNA, 25 bp, Homo sapien
ccggagcggcgtatagcgaccggcc

SEQ ID NO: 5868046 - DNA, 25 bp, Homo sapien
cggccgaccgcgtaagcgcgactcc

SEQ ID NO: 5868047 - DNA, 25 bp, Homo sapien
cggggagtaggttcgcgcgggcagg

SEQ ID NO: 5868048 - DNA, 25 bp, Homo sapien
cgggcggaggcgcgtatcgccatgg

SEQ ID NO: 5868049 - DNA, 25 bp, Homo sapien
tccctctaacgcgccgcgggtgggg

SEQ ID NO: 5868050 - DNA, 25 bp, Homo sapien
gagcgcgtcaacgggccgcgctctc

SEQ ID NO: 5868051 - DNA, 25 bp, Homo sapien
gagaggccggacgcgtgaaggcccg

SEQ ID NO: 5868052 - DNA, 25 bp, Homo sapien
gcccttaacgggtcgcacgcggggc

SEQ ID NO: 5868053 - DNA, 25 bp, Homo sapien
ctgcagacgggtgcgcgatccgccc

SEQ ID NO: 5868054 - DNA, 25 bp, Homo sapien
gccaagcgctatacggggcgccggc

SEQ ID NO: 5868055 - DNA, 25 bp, Homo sapien
caccggcgcgctatccgacgcgtcc

SEQ ID NO: 5868056 - DNA, 25 bp, Homo sapien
gcggggcgccgacatatcggcccga

SEQ ID NO: 5868057 - DNA, 25 bp, Homo sapien
cccttgctacgcgccaacggggggc

SEQ ID NO: 5868058 - DNA, 25 bp, Homo sapien
cgtccctagtagccgcgcggctggc

SEQ ID NO: 5868059 - DNA, 25 bp, Homo sapien
gcgagccgtaagcgtcgcggacccg

SEQ ID NO: 5868060 - DNA, 25 bp, Homo sapien
tctgcctcgccgcgcgtaggacggg

SEQ ID NO: 5868061 - DNA, 25 bp, Homo sapien
tggctgcagacgtgtcgcggggcgg

SEQ ID NO: 5868062 - DNA, 25 bp, Homo sapien
cgggactcgtgccgggtagcagccc

SEQ ID NO: 5868063 - DNA, 25 bp, Homo sapien
tcccggcccgcgttacgacagggcc

SEQ ID NO: 5868064 - DNA, 25 bp, Homo sapien
agcggccgtacgagccgggcctacc

SEQ ID NO: 5868065 - DNA, 25 bp, Homo sapien
cgggcgcggctcgcgtatacgagcg

SEQ ID NO: 5868066 - DNA, 25 bp, Homo sapien
ctcgcccgcgcaagtacgtggcccc

SEQ ID NO: 5868067 - DNA, 25 bp, Homo sapien
ccaaccgatcgcccgaccgggcacc

SEQ ID NO: 5868068 - DNA, 25 bp, Homo sapien
cgcgcccgtggttcggtcgctgggt

SEQ ID NO: 5868069 - DNA, 25 bp, Homo sapien
ggccgcgattcgcgcatgggcaccg

SEQ ID NO: 5868070 - DNA, 25 bp, Homo sapien
gccgcaggtacgctacggcggctgg

SEQ ID NO: 5868071 - DNA, 25 bp, Homo sapien
accgggacggttcgcgccggcacag

SEQ ID NO: 5868072 - DNA, 25 bp, Homo sapien
ggtccggtcctacgtgcgacggccg

SEQ ID NO: 5868073 - DNA, 25 bp, Homo sapien
gtcgccccggtcgataccgccgacg

SEQ ID NO: 5868074 - DNA, 25 bp, Homo sapien
ctgggccgctatcgggccggtggct

SEQ ID NO: 5868075 - DNA, 25 bp, Homo sapien
cctcgccccgcgacgtaatcggccg

SEQ ID NO: 5868076 - DNA, 25 bp, Homo sapien
cccggtcgacgtacgagcgggcgag

SEQ ID NO: 5868077 - DNA, 25 bp, Homo sapien
ccccggatacgcggcctcgccccaa

SEQ ID NO: 5868078 - DNA, 25 bp, Homo sapien
gcgtgctcgtcagcgcacggcgctc

SEQ ID NO: 5868079 - DNA, 25 bp, Homo sapien
ctgggggggcgtattcgcgaggcgg

SEQ ID NO: 5868080 - DNA, 25 bp, Homo sapien
gcgcgtgggcgacgtaccctgggca

SEQ ID NO: 5868081 - DNA, 25 bp, Homo sapien
cctgccgggacgcgtcgaagcccac

SEQ ID NO: 5868082 - DNA, 25 bp, Homo sapien
ccgcgctcgcgcggccgttgtccta

SEQ ID NO: 5868083 - DNA, 25 bp, Homo sapien
gccaccggccgcgtaacgagacgcc

SEQ ID NO: 5868084 - DNA, 25 bp, Homo sapien
cggctccggtcgagagtccggccga

SEQ ID NO: 5868085 - DNA, 25 bp, Homo sapien
cctgtccgtgcgcgtatcgcgggcg

SEQ ID NO: 5868086 - DNA, 25 bp, Homo sapien
gctcccgttccgacggacgcccgca

SEQ ID NO: 5868087 - DNA, 25 bp, Homo sapien
gcccgggcgtcgcgttaggggtcca

SEQ ID NO: 5868088 - DNA, 25 bp, Homo sapien
ccaggcggcgtactacccgctcgcg

SEQ ID NO: 5868089 - DNA, 25 bp, Homo sapien
gcgaagaaccgcgggatcgcgggcg

SEQ ID NO: 5868090 - DNA, 25 bp, Homo sapien
cgggagggccgcgcggttaaagcgc

SEQ ID NO: 5868091 - DNA, 25 bp, Homo sapien
gacagcccgctcggacgatgggcgg

SEQ ID NO: 5868092 - DNA, 25 bp, Homo sapien
tctggggccggttcgcgcgcgctag

SEQ ID NO: 5868093 - DNA, 25 bp, Homo sapien
cgccgcagcccgttacgcacaggcg

SEQ ID NO: 5868094 - DNA, 25 bp, Homo sapien
gcgccgagtatgccgcgcgacaggc

SEQ ID NO: 5868095 - DNA, 25 bp, Homo sapien
cggcgggtagggtcgacgcggagac

SEQ ID NO: 5868096 - DNA, 25 bp, Homo sapien
gaaccgttgacgcgcggtcggcccg

SEQ ID NO: 5868097 - DNA, 25 bp, Homo sapien
gaacaggccgcggtatgcccggcgg

SEQ ID NO: 5868098 - DNA, 25 bp, Homo sapien
gcggcgttcggcacggtcgacagcc

SEQ ID NO: 5868099 - DNA, 25 bp, Homo sapien
gggcgcgcgacgctaccgtgcggaa

SEQ ID NO: 5868100 - DNA, 25 bp, Homo sapien
ggttggcgcgctagtacgggccggc

SEQ ID NO: 5868101 - DNA, 25 bp, Homo sapien
tggtcctacggtcgccggcgcggga

SEQ ID NO: 5868102 - DNA, 25 bp, Homo sapien
tgctcccgggataccgccgcccggt

SEQ ID NO: 5868103 - DNA, 25 bp, Homo sapien
cccgcctacccggtacgcgcgagga

SEQ ID NO: 5868104 - DNA, 25 bp, Homo sapien
ccgcggcgtccgaacgtgctcctcg

SEQ ID NO: 5868105 - DNA, 25 bp, Homo sapien
ggcgtgtaggcggtccgacgccagg

SEQ ID NO: 5868106 - DNA, 25 bp, Homo sapien
gccctcgtaggcgcgacgggctcag

SEQ ID NO: 5868107 - DNA, 25 bp, Homo sapien
gggcccccctatggtcgcgcctcca

SEQ ID NO: 5868108 - DNA, 25 bp, Homo sapien
ctaggccccggcgcgcataggggga

SEQ ID NO: 5868109 - DNA, 25 bp, Homo sapien
ccctagctacgcgcggcgagccacg

SEQ ID NO: 5868110 - DNA, 25 bp, Homo sapien
ggtctgaccgccgtaggcgggggac

SEQ ID NO: 5868111 - DNA, 25 bp, Homo sapien
gagcctccccgcgtaccgagggtgc

SEQ ID NO: 5868112 - DNA, 25 bp, Homo sapien
gcggtggcttcgacccgacgtcgcg

SEQ ID NO: 5868113 - DNA, 25 bp, Homo sapien
aggcggcgtacgaacgcgcccggtg

SEQ ID NO: 5868114 - DNA, 25 bp, Homo sapien
ggcggccgagacgcgcgatctcgga

SEQ ID NO: 5868115 - DNA, 25 bp, Homo sapien
tcgccatacgcggggcgttcgcgcg

SEQ ID NO: 5868116 - DNA, 25 bp, Homo sapien
gccgcaacggtctcgaccggctggg

SEQ ID NO: 5868117 - DNA, 25 bp, Homo sapien
cctggcgagttgcgcgacggcgcac

SEQ ID NO: 5868118 - DNA, 25 bp, Homo sapien
acgcactcagcccggtcgacgcggc

SEQ ID NO: 5868119 - DNA, 25 bp, Homo sapien
ggcgcccgtcgcgacctactcgtcc

SEQ ID NO: 5868120 - DNA, 25 bp, Homo sapien
cgcgacgtgcgttacgcgggacggg

SEQ ID NO: 5868121 - DNA, 25 bp, Homo sapien
tgccggcccgatacgccgtgtgcgc

SEQ ID NO: 5868122 - DNA, 25 bp, Homo sapien
ggcacctagtcgcgcgacgcgcgca

SEQ ID NO: 5868123 - DNA, 25 bp, Homo sapien
tacggagacccgcgcgtacgcgcgg

SEQ ID NO: 5868124 - DNA, 25 bp, Homo sapien
cggggcctcgcgaccgcaaaggagg

SEQ ID NO: 5868125 - DNA, 25 bp, Homo sapien
acggggttcgcgcgtacggcgtcgc

SEQ ID NO: 5868126 - DNA, 25 bp, Homo sapien
gaacgccgcgataccacggcggggc

SEQ ID NO: 5868127 - DNA, 25 bp, Homo sapien
ggcaagcgatacgcgccccgcccac

SEQ ID NO: 5868128 - DNA, 25 bp, Homo sapien
agagcgcgcgggtatcgaccgggcc

SEQ ID NO: 5868129 - DNA, 25 bp, Homo sapien
aggctcccgtacgcgcgtcgagggc

SEQ ID NO: 5868130 - DNA, 25 bp, Homo sapien
cccttacgcgcaaccgctcgccccc

SEQ ID NO: 5868131 - DNA, 25 bp, Homo sapien
gcgggctcgtacggcccgagaaccc

SEQ ID NO: 5868132 - DNA, 25 bp, Homo sapien
gttcccggtcggacccgacggcgca

SEQ ID NO: 5868133 - DNA, 25 bp, Homo sapien
agcggacgcgtgacggctacgcggc

SEQ ID NO: 5868134 - DNA, 25 bp, Homo sapien
cggtcctcgacgcgtacccgcgcct

SEQ ID NO: 5868135 - DNA, 25 bp, Homo sapien
gcacagacgacgcgggctacgcggc

SEQ ID NO: 5868136 - DNA, 25 bp, Homo sapien
cagaccgtcctaccggtcgccggcg

SEQ ID NO: 5868137 - DNA, 25 bp, Homo sapien
gtgtgcccgcgccgacgtacgtggg

SEQ ID NO: 5868138 - DNA, 25 bp, Homo sapien
gaccgatccgaccgcgcgtgcgcca

SEQ ID NO: 5868139 - DNA, 25 bp, Homo sapien
cgtgcacgcgtagtcgcgggaggcc

SEQ ID NO: 5868140 - DNA, 25 bp, Homo sapien
gggcaccgacacgcggactgcccag

SEQ ID NO: 5868141 - DNA, 25 bp, Homo sapien
gcccacgtcgttcgcgggatggcgc

SEQ ID NO: 5868142 - DNA, 25 bp, Homo sapien
gacccgctctaccgcgcgaaggcgc

SEQ ID NO: 5868143 - DNA, 25 bp, Homo sapien
gtgtggcctcgtaccgcggaccccc

SEQ ID NO: 5868144 - DNA, 25 bp, Homo sapien
ggcgcgcgtacacggccgggtagtc

SEQ ID NO: 5868145 - DNA, 25 bp, Homo sapien
cgggcgcgtacgcgcgttctgcgac

SEQ ID NO: 5868146 - DNA, 25 bp, Homo sapien
acagggtagggcgcgttcgccgcgg

SEQ ID NO: 5868147 - DNA, 25 bp, Homo sapien
cgggacggtacgagcgtcggcggtc

SEQ ID NO: 5868148 - DNA, 25 bp, Homo sapien
ggacggggcgcgtagcctagcccac

SEQ ID NO: 5868149 - DNA, 25 bp, Homo sapien
cgaacgactatcgggcgcgcgcggc

SEQ ID NO: 5868150 - DNA, 25 bp, Homo sapien
tgccaggtacgtaccgcggcgggcc

SEQ ID NO: 5868151 - DNA, 25 bp, Homo sapien
gcagcttcgttagccgcggcgggcc

SEQ ID NO: 5868152 - DNA, 25 bp, Homo sapien
ccccagctatcgtcccgcgcgcgct

SEQ ID NO: 5868153 - DNA, 25 bp, Homo sapien
gaccgcttacgcgccgcgacgccag

SEQ ID NO: 5868154 - DNA, 25 bp, Homo sapien
ccgccctatcgacctccggggcctg

SEQ ID NO: 5868155 - DNA, 25 bp, Homo sapien
gtgcggttcgaccggtcggccacgg

SEQ ID NO: 5868156 - DNA, 25 bp, Homo sapien
ggggcggtcgcgctaagcggaacgc

SEQ ID NO: 5868157 - DNA, 25 bp, Homo sapien
cctccggtctcgcgcgcgaacgtgc

SEQ ID NO: 5868158 - DNA, 25 bp, Homo sapien
cgcggcagtccgcgcgattggcctg

SEQ ID NO: 5868159 - DNA, 25 bp, Homo sapien
cactgacggcggcccgtatgccgcg

SEQ ID NO: 5868160 - DNA, 25 bp, Homo sapien
ggtccttgaccccgtcgcgcgggag

SEQ ID NO: 5868161 - DNA, 25 bp, Homo sapien
gccggccgagtagccgacgaccgac

SEQ ID NO: 5868162 - DNA, 25 bp, Homo sapien
cggggtgcggacccgtacccaggca

SEQ ID NO: 5868163 - DNA, 25 bp, Homo sapien
ggcgccatcacggtcggcggatccc

SEQ ID NO: 5868164 - DNA, 25 bp, Homo sapien
gggggttaggggtccgcgagctggc

SEQ ID NO: 5868165 - DNA, 25 bp, Homo sapien
gcaccggcgggtacgccttcgccag

SEQ ID NO: 5868166 - DNA, 25 bp, Homo sapien
cgcccggcgatcgtacgctcctccg

SEQ ID NO: 5868167 - DNA, 25 bp, Homo sapien
ccccggccgctcgagacgtccgtgt

SEQ ID NO: 5868168 - DNA, 25 bp, Homo sapien
gcgaccctacgcccgttcgtcgcgg

SEQ ID NO: 5868169 - DNA, 25 bp, Homo sapien
gaagcgccgttacgcggcgcaggcc

SEQ ID NO: 5868170 - DNA, 25 bp, Homo sapien
ggcgcgggacgcgtaccgagggatg

SEQ ID NO: 5868171 - DNA, 25 bp, Homo sapien
ccgccgacgacgcccgtaccgacca

SEQ ID NO: 5868172 - DNA, 25 bp, Homo sapien
gcgccagggcgatcgtaccggcgtc

SEQ ID NO: 5868173 - DNA, 25 bp, Homo sapien
ccgaggccgacgcgagaccccgcat

SEQ ID NO: 5868174 - DNA, 25 bp, Homo sapien
gtgcacggtcggaacgcaccggggg

SEQ ID NO: 5868175 - DNA, 25 bp, Homo sapien
tgcgagtgctagcgggtcgggggcc

SEQ ID NO: 5868176 - DNA, 25 bp, Homo sapien
gccggccaaccgttgcgcgtggcag

SEQ ID NO: 5868177 - DNA, 25 bp, Homo sapien
ggacgcacgcgtaggggcagaggcc

SEQ ID NO: 5868178 - DNA, 25 bp, Homo sapien
cctctgccgcgcgtagatgcgcgcc

SEQ ID NO: 5868179 - DNA, 25 bp, Homo sapien
ggggcgccgccggttaggcctaagc

SEQ ID NO: 5868180 - DNA, 25 bp, Homo sapien
ctgggcccgttcgcgagggcgcgtt

SEQ ID NO: 5868181 - DNA, 25 bp, Homo sapien
gctcgcgcgtcgatacgcgccaccc

SEQ ID NO: 5868182 - DNA, 25 bp, Homo sapien
ccacgcctatcgtgccgcgtcccgc

SEQ ID NO: 5868183 - DNA, 25 bp, Homo sapien
cgctcgatagacccgcgcgtgcggc

SEQ ID NO: 5868184 - DNA, 25 bp, Homo sapien
gcaccggagatacgccgcgcctgcc

SEQ ID NO: 5868185 - DNA, 25 bp, Homo sapien
acgggcaaccgcgcgtagggcaccc

SEQ ID NO: 5868186 - DNA, 25 bp, Homo sapien
ggagcccgttacggcccgacacggc

SEQ ID NO: 5868187 - DNA, 25 bp, Homo sapien
cccgcgacgacgcgggtacactgcc

SEQ ID NO: 5868188 - DNA, 25 bp, Homo sapien
ggagcccccgtcgcggtaactccgc

SEQ ID NO: 5868189 - DNA, 25 bp, Homo sapien
gtcgcgacgccctatacgggcccgg

SEQ ID NO: 5868190 - DNA, 25 bp, Homo sapien
caccgttgaccgtacgcgcgggggc

SEQ ID NO: 5868191 - DNA, 25 bp, Homo sapien
cctcggcggtagggcgcatgtccgg

SEQ ID NO: 5868192 - DNA, 25 bp, Homo sapien
gggctaaccgggctacggcggcagg

SEQ ID NO: 5868193 - DNA, 25 bp, Homo sapien
ccggcttgtcgttcgcgacggcccc

SEQ ID NO: 5868194 - DNA, 25 bp, Homo sapien
cgtcggcgcggtatgccgtgtccgg

SEQ ID NO: 5868195 - DNA, 25 bp, Homo sapien
gcgccccggtacgagtccggccgta

SEQ ID NO: 5868196 - DNA, 25 bp, Homo sapien
tgtcgggtctgacgccgcgcggcct

SEQ ID NO: 5868197 - DNA, 25 bp, Homo sapien
cgccgccgtaacgcccgtcgaggtc

SEQ ID NO: 5868198 - DNA, 25 bp, Homo sapien
gccgtgtcgacggtccccggtcgtg

SEQ ID NO: 5868199 - DNA, 25 bp, Homo sapien
ccgcttcggtcgccgtacggccctc

SEQ ID NO: 5868200 - DNA, 25 bp, Homo sapien
gctctcgggccgatcgtcgcgctcg

SEQ ID NO: 5868201 - DNA, 25 bp, Homo sapien
cgcgcacgagctacgggcgcgacgt

SEQ ID NO: 5868202 - DNA, 25 bp, Homo sapien
acgcgctcgcgcgtcgtccctagcc

SEQ ID NO: 5868203 - DNA, 25 bp, Homo sapien
tcgtgggcgtacgaccgggccagcg

SEQ ID NO: 5868204 - DNA, 25 bp, Homo sapien
cccgccgcgtacgatcgccgggaga

SEQ ID NO: 5868205 - DNA, 25 bp, Homo sapien
tcggggacgcggtgccgtaggggtg

SEQ ID NO: 5868206 - DNA, 25 bp, Homo sapien
gcaagctcgccccgacggatccgcg

SEQ ID NO: 5868207 - DNA, 25 bp, Homo sapien
gggcgccgcgcgacgatctcacagc

SEQ ID NO: 5868208 - DNA, 25 bp, Homo sapien
gctgtgaccggggtcgtacgccgcc

SEQ ID NO: 5868209 - DNA, 25 bp, Homo sapien
ccggcggcatacgcgcgctccgatg

SEQ ID NO: 5868210 - DNA, 25 bp, Homo sapien
cgcgaccaccctacgcgtagggccc

SEQ ID NO: 5868211 - DNA, 25 bp, Homo sapien
ggtggcgctcgcgacccgtcgtgtc

SEQ ID NO: 5868212 - DNA, 25 bp, Homo sapien
gctcgggtacgcacgtcggccaccg

SEQ ID NO: 5868213 - DNA, 25 bp, Homo sapien
ggcagacgacggatcgggtgcccgg

SEQ ID NO: 5868214 - DNA, 25 bp, Homo sapien
gcgcggctacgtaccccggagggct

SEQ ID NO: 5868215 - DNA, 25 bp, Homo sapien
cggtcgtgatcgaggcacggccccg

SEQ ID NO: 5868216 - DNA, 25 bp, Homo sapien
gcactctcgcgcaagcgtcgcggcc

SEQ ID NO: 5868217 - DNA, 25 bp, Homo sapien
ggcggaactcgacgacgcgcccgct

SEQ ID NO: 5868218 - DNA, 25 bp, Homo sapien
gcccgcgcgcgtatcggtaggccca

SEQ ID NO: 5868219 - DNA, 25 bp, Homo sapien
ccggtggcgcgacgagtagcgcgag

SEQ ID NO: 5868220 - DNA, 25 bp, Homo sapien
gccccgcgaggccgcgtatcctggt

SEQ ID NO: 5868221 - DNA, 25 bp, Homo sapien
caggcctcgacgcggcctacccctg

SEQ ID NO: 5868222 - DNA, 25 bp, Homo sapien
cgaggccgtaggtcgaccggcgtgc

SEQ ID NO: 5868223 - DNA, 25 bp, Homo sapien
ggcggtacgcgacccgggtccgaga

SEQ ID NO: 5868224 - DNA, 25 bp, Homo sapien
cccccgcgtcctaccggtcagcagc

SEQ ID NO: 5868225 - DNA, 25 bp, Homo sapien
ggcgcggtatggtcgtcgcggcgag

SEQ ID NO: 5868226 - DNA, 25 bp, Homo sapien
cggccggatcgcttgcgcggaggag

SEQ ID NO: 5868227 - DNA, 25 bp, Homo sapien
ggctcgactccgctacgcgggcgtg

SEQ ID NO: 5868228 - DNA, 25 bp, Homo sapien
tgccgctagcggacggcgccaaggc

SEQ ID NO: 5868229 - DNA, 25 bp, Homo sapien
cactggctcgcccgttgggctcggg

SEQ ID NO: 5868230 - DNA, 25 bp, Homo sapien
ggactcgccggcgtaagcgcagccg

SEQ ID NO: 5868231 - DNA, 25 bp, Homo sapien
ggggcgccgctatccgacctcgtgg

SEQ ID NO: 5868232 - DNA, 25 bp, Homo sapien
gcgcctgcctaatcggcgcgccctg

SEQ ID NO: 5868233 - DNA, 25 bp, Homo sapien
ggccggcgtacggtcgggtggcttc

SEQ ID NO: 5868234 - DNA, 25 bp, Homo sapien
actcgcaccgccggctaaggcggcc

SEQ ID NO: 5868235 - DNA, 25 bp, Homo sapien
ccggcgtcgctccggtacggtggtg

SEQ ID NO: 5868236 - DNA, 25 bp, Homo sapien
acggctgatagcccgtgcggggccc

SEQ ID NO: 5868237 - DNA, 25 bp, Homo sapien
ctgcctacgcgcggtcggaccccac

SEQ ID NO: 5868238 - DNA, 25 bp, Homo sapien
cagccacgcgtaagcggacgggggg

SEQ ID NO: 5868239 - DNA, 25 bp, Homo sapien
ggggcctacgtctcgggcggtggtg

SEQ ID NO: 5868240 - DNA, 25 bp, Homo sapien
gtgacccggtctacgcgcgccggtg

SEQ ID NO: 5868241 - DNA, 25 bp, Homo sapien
gcgcgtcccgtgtcgcgactcgctg

SEQ ID NO: 5868242 - DNA, 25 bp, Homo sapien
aacccggcgcatcggaccgaccgcg

SEQ ID NO: 5868243 - DNA, 25 bp, Homo sapien
gcgacgcgcacgactggcgacgcag

SEQ ID NO: 5868244 - DNA, 25 bp, Homo sapien
cgcgggtggtcgtacgccggtgagc

SEQ ID NO: 5868245 - DNA, 25 bp, Homo sapien
ccaccgcgatacgccggggcaagcc

SEQ ID NO: 5868246 - DNA, 25 bp, Homo sapien
ctcccggtctcgcgcgatgcccgca

SEQ ID NO: 5868247 - DNA, 25 bp, Homo sapien
acggccgcgcgaccgtaggccttcg

SEQ ID NO: 5868248 - DNA, 25 bp, Homo sapien
gtgccggtcgtccgcgataggggcg

SEQ ID NO: 5868249 - DNA, 25 bp, Homo sapien
gacgtgatcggccgaccgcgacggc

SEQ ID NO: 5868250 - DNA, 25 bp, Homo sapien
tgggcgcgtatcgggcggttgcccg

SEQ ID NO: 5868251 - DNA, 25 bp, Homo sapien
gcggggtccgatacgcggcagccca

SEQ ID NO: 5868252 - DNA, 25 bp, Homo sapien
ccggcgagtatcggcgtgctcccgg

SEQ ID NO: 5868253 - DNA, 25 bp, Homo sapien
ccggcgtgtccgacgcgacgctagg

SEQ ID NO: 5868254 - DNA, 25 bp, Homo sapien
gccgggcccgcgacacgacgggtaa

SEQ ID NO: 5868255 - DNA, 25 bp, Homo sapien
ccgacgtcgaccgccgaggtgtggg

SEQ ID NO: 5868256 - DNA, 25 bp, Homo sapien
cagggccgactatgccgcgcgcgcg

SEQ ID NO: 5868257 - DNA, 25 bp, Homo sapien
gcgccctccgcggtcgacgtcgtgc

SEQ ID NO: 5868258 - DNA, 25 bp, Homo sapien
ccgtccgaaccgacgagcgccggcg

SEQ ID NO: 5868259 - DNA, 25 bp, Homo sapien
gcgccatacgtcggcccgtcgggcc

SEQ ID NO: 5868260 - DNA, 25 bp, Homo sapien
cgggctagtcgcgtgaccgcgcggg

SEQ ID NO: 5868261 - DNA, 25 bp, Homo sapien
ggcgtggcgcatcggaccgcgccca

SEQ ID NO: 5868262 - DNA, 25 bp, Homo sapien
ggggtgcggctagcggagtcgcgcc

SEQ ID NO: 5868263 - DNA, 25 bp, Homo sapien
agcggcgtacccggcggtcgcccca

SEQ ID NO: 5868264 - DNA, 25 bp, Homo sapien
cggagtccgcatacgcggcccgccg

SEQ ID NO: 5868265 - DNA, 25 bp, Homo sapien
cggccccgtactcgaggcgacgccg

SEQ ID NO: 5868266 - DNA, 25 bp, Homo sapien
cccgtaccgtccgacacgcgcgggc

SEQ ID NO: 5868267 - DNA, 25 bp, Homo sapien
ggcacctgttcggagcgcggggcgc

SEQ ID NO: 5868268 - DNA, 25 bp, Homo sapien
tccgggtagcgccgaccgggctgcc

SEQ ID NO: 5868269 - DNA, 25 bp, Homo sapien
ggcctctacgccgtgccgtgccggg

SEQ ID NO: 5868270 - DNA, 25 bp, Homo sapien
tgcgccgcgtcggtacgcggcagcc

SEQ ID NO: 5868271 - DNA, 25 bp, Homo sapien
ccgggctcgccgatacagggcggcc

SEQ ID NO: 5868272 - DNA, 25 bp, Homo sapien
cccggagcgtcgcgccgtaggccct

SEQ ID NO: 5868273 - DNA, 25 bp, Homo sapien
cctgccatcgccggccgtagccggg

SEQ ID NO: 5868274 - DNA, 25 bp, Homo sapien
gcggctgcgtacgacccgcccgcgt

SEQ ID NO: 5868275 - DNA, 25 bp, Homo sapien
ggcctgcgacggtaccgcgccgacg

SEQ ID NO: 5868276 - DNA, 25 bp, Homo sapien
cacctcgcgaccggccgtacccgcg

SEQ ID NO: 5868277 - DNA, 25 bp, Homo sapien
ccctgctgtcgaccgggggcacggc

SEQ ID NO: 5868278 - DNA, 25 bp, Homo sapien
caggaccgcgtcgggcgtacccgcg

SEQ ID NO: 5868279 - DNA, 25 bp, Homo sapien
gagcgctaccgggcggcgtgccgct

SEQ ID NO: 5868280 - DNA, 25 bp, Homo sapien
gccacgccgttacgtgcgcgggcgc

SEQ ID NO: 5868281 - DNA, 25 bp, Homo sapien
ttgcggcgccggctcggtacccggc

SEQ ID NO: 5868282 - DNA, 25 bp, Homo sapien
gagccgcgagcctacggcggacgcg

SEQ ID NO: 5868283 - DNA, 25 bp, Homo sapien
tgcgggacgcggacccgtcgccgtg

SEQ ID NO: 5868284 - DNA, 25 bp, Homo sapien
ccccgccgtaacgcgcgacagcggc

SEQ ID NO: 5868285 - DNA, 25 bp, Homo sapien
ggtcggtcgacggtagcgccgcccg

SEQ ID NO: 5868286 - DNA, 25 bp, Homo sapien
tcgcggatcgcgtgccggtgccggg

SEQ ID NO: 5868287 - DNA, 25 bp, Homo sapien
gcagctacgcgcgtagccggggccc

SEQ ID NO: 5868288 - DNA, 25 bp, Homo sapien
gcgccccgacctacgtccgcgcgag

SEQ ID NO: 5868289 - DNA, 25 bp, Homo sapien
cggtcggcgatacgccgggccgcac

SEQ ID NO: 5868290 - DNA, 25 bp, Homo sapien
gcgccacggcaacgcgctacgcgcc

SEQ ID NO: 5868291 - DNA, 25 bp, Homo sapien
ccggggtcgcgaccctaggcgctgc

SEQ ID NO: 5868292 - DNA, 25 bp, Homo sapien
tcccgtccgcggtacgtcgccgcgc

SEQ ID NO: 5868293 - DNA, 25 bp, Homo sapien
tgcgccctacccgcgtcgagcgggg

SEQ ID NO: 5868294 - DNA, 25 bp, Homo sapien
gtcgcgccgccgtacgacctcgcgg

SEQ ID NO: 5868295 - DNA, 25 bp, Homo sapien
cgtggcctccgtacgcgcgcgctcc

SEQ ID NO: 5868296 - DNA, 25 bp, Homo sapien
gcgcgtccacccgcgtacgcccctc

SEQ ID NO: 5868297 - DNA, 25 bp, Homo sapien
gggcgccgtactaccgtcgccgccc

SEQ ID NO: 5868298 - DNA, 25 bp, Homo sapien
gcgcgacggccgcgtatcgccgcgt

SEQ ID NO: 5868299 - DNA, 25 bp, Homo sapien
gccgaagatcggggtgcgccgccgg

SEQ ID NO: 5868300 - DNA, 25 bp, Homo sapien
ccgcccgcgatcggaccgtcccacg

SEQ ID NO: 5868301 - DNA, 25 bp, Homo sapien
ccgccgccgtcgcgcatactccggg

SEQ ID NO: 5868302 - DNA, 25 bp, Homo sapien
gggtcggggcgatctagcgggcccc

SEQ ID NO: 5868303 - DNA, 25 bp, Homo sapien
cgccgccgtcgcgcgacaggtcagc

SEQ ID NO: 5868304 - DNA, 25 bp, Homo sapien
ccgcgaggtcggccgtcgtccggag

SEQ ID NO: 5868305 - DNA, 25 bp, Homo sapien
gcgggctagtcgcccgacctccggg

SEQ ID NO: 5868306 - DNA, 25 bp, Homo sapien
tcgccgcggcgccgtaccactgccc

SEQ ID NO: 5868307 - DNA, 25 bp, Homo sapien
ccagccgacgtacgccgggccgtcg

SEQ ID NO: 5868308 - DNA, 25 bp, Homo sapien
cccgcgagaccgtcgggcgcagacg

SEQ ID NO: 5868309 - DNA, 25 bp, Homo sapien
aggccggtcgctcgtgcgaccgccg

SEQ ID NO: 5868310 - DNA, 25 bp, Homo sapien
ccagggtatcgcgcgggccggccac

SEQ ID NO: 5868311 - DNA, 25 bp, Homo sapien
cacccaccgtaccggcacggggcgc

SEQ ID NO: 5868312 - DNA, 25 bp, Homo sapien
ccggcacgtatcggacgggcccgcg

SEQ ID NO: 5868313 - DNA, 25 bp, Homo sapien
gggctctacgcggcgtgaccgccgg

SEQ ID NO: 5868314 - DNA, 25 bp, Homo sapien
ccggcgtagcgtcgcgctggcgagc

SEQ ID NO: 5868315 - DNA, 25 bp, Homo sapien
tcgggcttacgtcgcgcccggcgcg

SEQ ID NO: 5868316 - DNA, 25 bp, Homo sapien
gcgcgccgcggacgagttcgggctc

SEQ ID NO: 5868317 - DNA, 25 bp, Homo sapien
cgtgggtcccgcgcgtagtcgcgcc

SEQ ID NO: 5868318 - DNA, 25 bp, Homo sapien
gcatcgcgtcgcaccgggccgacgc

SEQ ID NO: 5868319 - DNA, 25 bp, Homo sapien
ggcggcacgcgcgaacgacgccggt

SEQ ID NO: 5868320 - DNA, 25 bp, Homo sapien
caggggtcgcgtacgaggcggcgcc

SEQ ID NO: 5868321 - DNA, 25 bp, Homo sapien
cgcgccgcccgacgctacggcaggt

SEQ ID NO: 5868322 - DNA, 25 bp, Homo sapien
cgagcgagtacccgcgtcggcgccg

SEQ ID NO: 5868323 - DNA, 25 bp, Homo sapien
ccggcggtacgcgactcgcgcgcga

SEQ ID NO: 5868324 - DNA, 25 bp, Homo sapien
gactggcgtccgcgcacgacgccgg

SEQ ID NO: 5868325 - DNA, 25 bp, Homo sapien
cgcgggggctagcggcacgcgagac

SEQ ID NO: 5868326 - DNA, 25 bp, Homo sapien
cgcgcgcgcggtcattcgcccccgt

SEQ ID NO: 5868327 - DNA, 25 bp, Homo sapien
caggccccgaccgcggtagctgcgg

SEQ ID NO: 5868328 - DNA, 25 bp, Homo sapien
cggtccgcgacgcgcgatgcgacgc

SEQ ID NO: 5868329 - DNA, 25 bp, Homo sapien
cactcgtgcggcgcctagccggccg

SEQ ID NO: 5868330 - DNA, 25 bp, Homo sapien
gcgcaccgcgcgatgcgagcgagcc

SEQ ID NO: 5868331 - DNA, 25 bp, Homo sapien
cccactcgtcgtacgggcggcggcg

SEQ ID NO: 5868332 - DNA, 25 bp, Homo sapien
ggcggtcccgcggtcgtgtcggacg

SEQ ID NO: 5868333 - DNA, 25 bp, Homo sapien
gtgtggcgtcgcaccggtccggcgg

SEQ ID NO: 5868334 - DNA, 25 bp, Homo sapien
gccgcccggcaggctcgtaccggag

SEQ ID NO: 5868335 - DNA, 25 bp, Homo sapien
ccgccacgcgtattgcgccgcggcg

SEQ ID NO: 5868336 - DNA, 25 bp, Homo sapien
tcgccgggtcgacgcgaccagcgcc

SEQ ID NO: 5868337 - DNA, 25 bp, Homo sapien
ggctccttgacgaccgcggcggcgg

SEQ ID NO: 5868338 - DNA, 25 bp, Homo sapien
ggccgtcgtcgcgaaggcagggggc

SEQ ID NO: 5868339 - DNA, 25 bp, Homo sapien
gcgccgctcgcgaacctggctccgg

SEQ ID NO: 5868340 - DNA, 25 bp, Homo sapien
gcggcgcgcgacacgataccgcccg

SEQ ID NO: 5868341 - DNA, 25 bp, Homo sapien
gagccggctagacgacccgccgggc

SEQ ID NO: 5868342 - DNA, 25 bp, Homo sapien
ccgagccccgtcgtacgcgcggacg

SEQ ID NO: 5868343 - DNA, 25 bp, Homo sapien
cgcgggctagcgccgaacgcgcacg

SEQ ID NO: 5868344 - DNA, 25 bp, Homo sapien
cgaccccgctagcggaccgcggcga

SEQ ID NO: 5868345 - DNA, 25 bp, Homo sapien
cgaaggcggtctacgccgcgcgcgc

SEQ ID NO: 5868346 - DNA, 25 bp, Homo sapien
cggcctgtcgcgccgacgactcgcg

SEQ ID NO: 5868347 - DNA, 25 bp, Homo sapien
cccgtatccgcggcacgtcgcgcgc

SEQ ID NO: 5868348 - DNA, 25 bp, Homo sapien
cggctatggccgtacgcgccgcgcc

SEQ ID NO: 5868349 - DNA, 25 bp, Homo sapien
gccgggtgctagcgcgacgacgggg

SEQ ID NO: 5868350 - DNA, 25 bp, Homo sapien
ggttggcgcggtacgcggacgcggg

SEQ ID NO: 5868351 - DNA, 25 bp, Homo sapien
gggggcagtcgccgcgaacggagcc

SEQ ID NO: 5868352 - DNA, 25 bp, Homo sapien
gagcccccccgcgcgactagacgcg

SEQ ID NO: 5868353 - DNA, 25 bp, Homo sapien
ggcggacgacggtacggcgcggctg

SEQ ID NO: 5868354 - DNA, 25 bp, Homo sapien
tccgcgtcgacgcaccccgccccca

SEQ ID NO: 5868355 - DNA, 25 bp, Homo sapien
gccgtgtcggccgtacgcggggtgg

SEQ ID NO: 5868356 - DNA, 25 bp, Homo sapien
ctggcctgcgcgtacgggcgcggac

SEQ ID NO: 5868357 - DNA, 25 bp, Homo sapien
cccgcggttgcgaccgtcgctcccc

SEQ ID NO: 5868358 - DNA, 25 bp, Homo sapien
cggcaccgcggcgcgtaagtcccgg

SEQ ID NO: 5868359 - DNA, 25 bp, Homo sapien
gctcgcgtcggacacgccgcgtcgg

SEQ ID NO: 5868360 - DNA, 25 bp, Homo sapien
ccccgcggtcgacgcgcaaggcggt

SEQ ID NO: 5868361 - DNA, 25 bp, Homo sapien
gcgccgacgggtcgtacggacggcc

SEQ ID NO: 5868362 - DNA, 25 bp, Homo sapien
ccgcgcgcgcgacgagtacggcacg

SEQ ID NO: 5868363 - DNA, 25 bp, Homo sapien
gccgccacgcgcgaccaagcccagg

SEQ ID NO: 5868364 - DNA, 25 bp, Homo sapien
gccgcggcgcgattaccggtgcggg

SEQ ID NO: 5868365 - DNA, 25 bp, Homo sapien
cgctcgtcgcgccgatcggcagggc

SEQ ID NO: 5868366 - DNA, 25 bp, Homo sapien
gtgccctacccgcgtcgtcggcgcc

SEQ ID NO: 5868367 - DNA, 25 bp, Homo sapien
ggcgcggtaggcgcgcgatcgagcc

SEQ ID NO: 5868368 - DNA, 25 bp, Homo sapien
gcctcggcgtcttacgccgccccgg

SEQ ID NO: 5868369 - DNA, 25 bp, Homo sapien
ggagactcgatcgggcgcccgggcc

SEQ ID NO: 5868370 - DNA, 25 bp, Homo sapien
ccgggccacgcgttagcgggggagc

SEQ ID NO: 5868371 - DNA, 25 bp, Homo sapien
ccgcggcatacgcgacccgccgtcc

SEQ ID NO: 5868372 - DNA, 25 bp, Homo sapien
cccgcgcgcgacgtgctagtcggcc

SEQ ID NO: 5868373 - DNA, 25 bp, Homo sapien
gcggcacccgcgcgtaagagcgcgc

SEQ ID NO: 5868374 - DNA, 25 bp, Homo sapien
ggctcccgaccgggcgtagcaggcg

SEQ ID NO: 5868375 - DNA, 25 bp, Homo sapien
ccgccgtcgtccggtgccatggggc

SEQ ID NO: 5868376 - DNA, 25 bp, Homo sapien
cccgccaccgttcggcgggcaccca

SEQ ID NO: 5868377 - DNA, 25 bp, Homo sapien
cgcggcacccatcgcgcgaccgcga

SEQ ID NO: 5868378 - DNA, 25 bp, Homo sapien
cgtgcctatggcgcgcccggggcga

SEQ ID NO: 5868379 - DNA, 25 bp, Homo sapien
ctcgccgtctagcccgacgcccgcc

SEQ ID NO: 5868380 - DNA, 25 bp, Homo sapien
ccctggcccgacgcgcgatgggcct

SEQ ID NO: 5868381 - DNA, 25 bp, Homo sapien
gctagccgaacgggcgcgtggcgcc

SEQ ID NO: 5868382 - DNA, 25 bp, Homo sapien
cccgcgacgcgatcggtcgccaggg

SEQ ID NO: 5868383 - DNA, 25 bp, Homo sapien
gccccggtccgccggtagtcgtggc

SEQ ID NO: 5868384 - DNA, 25 bp, Homo sapien
gggaggtcacgccggttcgcgcccc

SEQ ID NO: 5868385 - DNA, 25 bp, Homo sapien
cggtgcgtagcgtacggcgcgcccg

SEQ ID NO: 5868386 - DNA, 25 bp, Homo sapien
ggagggttcgcgacggtccggcggc

SEQ ID NO: 5868387 - DNA, 25 bp, Homo sapien
gcccggcgtcgcgccgaacaacccg

SEQ ID NO: 5868388 - DNA, 25 bp, Homo sapien
ggccggctcgctacgtcgggctcgg

SEQ ID NO: 5868389 - DNA, 25 bp, Homo sapien
cccgcggtacgaccggtcggcgagc

SEQ ID NO: 5868390 - DNA, 25 bp, Homo sapien
gaggggcgtacgctcgcgctgggcc

SEQ ID NO: 5868391 - DNA, 25 bp, Homo sapien
cgccgcgcgcatctacgcgcacggc

SEQ ID NO: 5868392 - DNA, 25 bp, Homo sapien
cccggcagtacggtcgccggtgccg

SEQ ID NO: 5868393 - DNA, 25 bp, Homo sapien
ggcgccgcatacggtcgcgcggacg

SEQ ID NO: 5868394 - DNA, 25 bp, Homo sapien
cggcacaccggtggccgacgcggtc

SEQ ID NO: 5868395 - DNA, 25 bp, Homo sapien
ccacgccccgcgcgtatccgagggg

SEQ ID NO: 5868396 - DNA, 25 bp, Homo sapien
gccccgcgaccagcgcgtagcggtc

SEQ ID NO: 5868397 - DNA, 25 bp, Homo sapien
gcctggtcgcccgtagcgccgtcgc

SEQ ID NO: 5868398 - DNA, 25 bp, Homo sapien
gtggccgtcggcgcgagtcggggtg

SEQ ID NO: 5868399 - DNA, 25 bp, Homo sapien
gcgggcctagtcgtcgggccgcctg

SEQ ID NO: 5868400 - DNA, 25 bp, Homo sapien
cgggctgttgcgtcccgcgggacgc

SEQ ID NO: 5868401 - DNA, 25 bp, Homo sapien
cggcggtacgccggacggtgtcgcg

SEQ ID NO: 5868402 - DNA, 25 bp, Homo sapien
gctcccggtacgcgaacccgcggcc

SEQ ID NO: 5868403 - DNA, 25 bp, Homo sapien
ggggcccgacgctatgccgtccggc

SEQ ID NO: 5868404 - DNA, 25 bp, Homo sapien
gggccacgtcgcgaggtacggccgg

SEQ ID NO: 5868405 - DNA, 25 bp, Homo sapien
ggcggccgcgaacccgacgtggcct

SEQ ID NO: 5868406 - DNA, 25 bp, Homo sapien
cccaggcgggccgttacgaggcggc

SEQ ID NO: 5868407 - DNA, 25 bp, Homo sapien
cggggccgtccgcgctaccacagcc

SEQ ID NO: 5868408 - DNA, 25 bp, Homo sapien
ctgccggtaggcgcgccgagcctcg

SEQ ID NO: 5868409 - DNA, 25 bp, Homo sapien
tccctcgtcgaccgcggagggcggg

SEQ ID NO: 5868410 - DNA, 25 bp, Homo sapien
aggtcgcggaccgctcgcaccgggc

SEQ ID NO: 5868411 - DNA, 25 bp, Homo sapien
cgcgcagacttcgggcgcgccccag

SEQ ID NO: 5868412 - DNA, 25 bp, Homo sapien
gtcgcgtcgtccgatgcgccggcgg

SEQ ID NO: 5868413 - DNA, 25 bp, Homo sapien
cagcaccgcgcggcataccgcgcgc

SEQ ID NO: 5868414 - DNA, 25 bp, Homo sapien
ccgtcggccgaccgcgcaaggcgca

SEQ ID NO: 5868415 - DNA, 25 bp, Homo sapien
ccagggcgccgttacgagggccggc

SEQ ID NO: 5868416 - DNA, 25 bp, Homo sapien
gagccgccgtacggggcgcactcgc

SEQ ID NO: 5868417 - DNA, 25 bp, Homo sapien
cacggcttgcatccgcgcggccggg

SEQ ID NO: 5868418 - DNA, 25 bp, Homo sapien
cgcaacgcgcgtaccgcaccgggcg

SEQ ID NO: 5868419 - DNA, 25 bp, Homo sapien
ggccggtcgtgcgacgcgcgagcga

SEQ ID NO: 5868420 - DNA, 25 bp, Homo sapien
gcggactacggggcgcccagcgcag

SEQ ID NO: 5868421 - DNA, 25 bp, Homo sapien
cctcccggatcggccgcgatgggcc

SEQ ID NO: 5868422 - DNA, 25 bp, Homo sapien
ccggctggcgtcgtgcgaccgcctc

SEQ ID NO: 5868423 - DNA, 25 bp, Homo sapien
cgcgccgtacggtacgcccgcgcga

SEQ ID NO: 5868424 - DNA, 25 bp, Homo sapien
ggctggtgcacgcgcaacggccggc

SEQ ID NO: 5868425 - DNA, 25 bp, Homo sapien
cacgggtcgcaccggacgacggcgc

SEQ ID NO: 5868426 - DNA, 25 bp, Homo sapien
ccacgcttcggacgggcgtccgggc

SEQ ID NO: 5868427 - DNA, 25 bp, Homo sapien
cgttcggtctcgcgtcgggccgccc

SEQ ID NO: 5868428 - DNA, 25 bp, Homo sapien
gcgcaggtcgccacgcgaccgaggc

SEQ ID NO: 5868429 - DNA, 25 bp, Homo sapien
ccgccgcgttgcgtgccggcccaag

SEQ ID NO: 5868430 - DNA, 25 bp, Homo sapien
cctcactacgcgcccgggaggcccg

SEQ ID NO: 5868431 - DNA, 25 bp, Homo sapien
cggcctcgcgctatcgcgtccggcc

SEQ ID NO: 5868432 - DNA, 25 bp, Homo sapien
cgcccgtagggacgcgacgccaggc

SEQ ID NO: 5868433 - DNA, 25 bp, Homo sapien
tccgcccggctatcccgcgcgcgct

SEQ ID NO: 5868434 - DNA, 25 bp, Homo sapien
ggcggctaagcgggccgccccacgt

SEQ ID NO: 5868435 - DNA, 25 bp, Homo sapien
ccacgctcgcggacgagagccggcc

SEQ ID NO: 5868436 - DNA, 25 bp, Homo sapien
ccaacccgatcgaccgggcccgcgc

SEQ ID NO: 5868437 - DNA, 25 bp, Homo sapien
gacgccccggttacgcgtgcggcgc

SEQ ID NO: 5868438 - DNA, 25 bp, Homo sapien
ggcgcagcgcgtacgccaggctgcc

SEQ ID NO: 5868439 - DNA, 25 bp, Homo sapien
accgcttcggcgagcgtccccgcgc

SEQ ID NO: 5868440 - DNA, 25 bp, Homo sapien
tggcgggcgcgaagcgtctccgccc

SEQ ID NO: 5868441 - DNA, 25 bp, Homo sapien
cgcagcccggtattgcgcgccggcc

SEQ ID NO: 5868442 - DNA, 25 bp, Homo sapien
gcgggacgctaacggcgcgggcctg

SEQ ID NO: 5868443 - DNA, 25 bp, Homo sapien
gcggcgacgcaacgacccggacgcc

SEQ ID NO: 5868444 - DNA, 25 bp, Homo sapien
cggagctaggcgaccggacgggcgg

SEQ ID NO: 5868445 - DNA, 25 bp, Homo sapien
ctaccgccccgatacgcgccgcccg

SEQ ID NO: 5868446 - DNA, 25 bp, Homo sapien
cggcgcgctccgttcgacggcccga

SEQ ID NO: 5868447 - DNA, 25 bp, Homo sapien
accgggacgtccggtcgcgcgcacc

SEQ ID NO: 5868448 - DNA, 25 bp, Homo sapien
gcgcgcctcgcccgaacgggaccca

SEQ ID NO: 5868449 - DNA, 25 bp, Homo sapien
ggcggctagcccgtacgtcggcggg

SEQ ID NO: 5868450 - DNA, 25 bp, Homo sapien
cgcggccgccgatcggtacggcagg

SEQ ID NO: 5868451 - DNA, 25 bp, Homo sapien
gcgcgctccggactcgacgggggtg

SEQ ID NO: 5868452 - DNA, 25 bp, Homo sapien
gcggcgcctacgcggcgatgcggtg

SEQ ID NO: 5868453 - DNA, 25 bp, Homo sapien
ggaggggcgtgccgttgcgggacgg

SEQ ID NO: 5868454 - DNA, 25 bp, Homo sapien
acgccggcgtcgccccgatgtccgc

SEQ ID NO: 5868455 - DNA, 25 bp, Homo sapien
cggcactcgcgcgtcgtggggaccc

SEQ ID NO: 5868456 - DNA, 25 bp, Homo sapien
gctggcggggtcgtacgccacgcgc

SEQ ID NO: 5868457 - DNA, 25 bp, Homo sapien
ggcgcgggtcgaacgagacggcggg

SEQ ID NO: 5868458 - DNA, 25 bp, Homo sapien
acccggcgcgctactacggccgggc

SEQ ID NO: 5868459 - DNA, 25 bp, Homo sapien
gtgccgcgacccgcgttcggggcag

SEQ ID NO: 5868460 - DNA, 25 bp, Homo sapien
cggcgacgcgttacggaggcggccc

SEQ ID NO: 5868461 - DNA, 25 bp, Homo sapien
gggggcgtacgtacgccgctgcccc

SEQ ID NO: 5868462 - DNA, 25 bp, Homo sapien
gctacgcgtacgacgcggcgcgccg

SEQ ID NO: 5868463 - DNA, 25 bp, Homo sapien
agcctgtcgtggcacgccggggcgc

SEQ ID NO: 5868464 - DNA, 25 bp, Homo sapien
gccccccgcgcccgatacggcgtga

SEQ ID NO: 5868465 - DNA, 25 bp, Homo sapien
cggccctcattcgcgggcggccagg

SEQ ID NO: 5868466 - DNA, 25 bp, Homo sapien
cggaaggcatcgcgcgacgcgggcg

SEQ ID NO: 5868467 - DNA, 25 bp, Homo sapien
gggctgcgtcgcggcataggccgcc

SEQ ID NO: 5868468 - DNA, 25 bp, Homo sapien
gcgccaggtcgcggccgtacacgcc

SEQ ID NO: 5868469 - DNA, 25 bp, Homo sapien
gggcgctgaccgtacgcgccagccc

SEQ ID NO: 5868470 - DNA, 25 bp, Homo sapien
gccgtcacggcgttgcgaccggcgg

SEQ ID NO: 5868471 - DNA, 25 bp, Homo sapien
gcccgccgaatcgaccccgcgggac

SEQ ID NO: 5868472 - DNA, 25 bp, Homo sapien
atgcgctcggcgtaccgccccgcgc

SEQ ID NO: 5868473 - DNA, 25 bp, Homo sapien
gccagcacccatcgcgcggctgccg

SEQ ID NO: 5868474 - DNA, 25 bp, Homo sapien
gccccgacgccgcgtaccctccgtc

SEQ ID NO: 5868475 - DNA, 25 bp, Homo sapien
ctgggcatcggtgtccgcggggccc

SEQ ID NO: 5868476 - DNA, 25 bp, Homo sapien
gccttgtcgcggcccgtaccgccgc

SEQ ID NO: 5868477 - DNA, 25 bp, Homo sapien
gcggcacgtcgcccctacggggcct

SEQ ID NO: 5868478 - DNA, 25 bp, Homo sapien
cccggaaccggcgcgacacacgggc

SEQ ID NO: 5868479 - DNA, 25 bp, Homo sapien
cccggccgcgtgtcgtgctcgcagc

SEQ ID NO: 5868480 - DNA, 25 bp, Homo sapien
ccgggggactcccgcgcgacagacg

SEQ ID NO: 5868481 - DNA, 25 bp, Homo sapien
cacggggcggctatccgtccgccgg

SEQ ID NO: 5868482 - DNA, 25 bp, Homo sapien
gcggccctacgcggcggttgcccgt

SEQ ID NO: 5868483 - DNA, 25 bp, Homo sapien
ggcggtcgtcgacagcggtccggcg

SEQ ID NO: 5868484 - DNA, 25 bp, Homo sapien
ccgttccggcgtagcgccacgggcc

SEQ ID NO: 5868485 - DNA, 25 bp, Homo sapien
gacgaggggttcgccgcgagggccg

SEQ ID NO: 5868486 - DNA, 25 bp, Homo sapien
cgcgccgacgggcgcgatagccacc

SEQ ID NO: 5868487 - DNA, 25 bp, Homo sapien
tccccgcggaccgcgcctacgagcg

SEQ ID NO: 5868488 - DNA, 25 bp, Homo sapien
ccgccgtatcgcgcggacccccgtc

SEQ ID NO: 5868489 - DNA, 25 bp, Homo sapien
gaccccgacgccccgcatagggcgg

SEQ ID NO: 5868490 - DNA, 25 bp, Homo sapien
ccccgcatgtaccggcgcggcggga

SEQ ID NO: 5868491 - DNA, 25 bp, Homo sapien
cgccccccggttgcgcgatcccgtc

SEQ ID NO: 5868492 - DNA, 25 bp, Homo sapien
cgtgcccgcgtcggtccatgccggc

SEQ ID NO: 5868493 - DNA, 25 bp, Homo sapien
ctcgcgccggtcacgcgaccccgtg

SEQ ID NO: 5868494 - DNA, 25 bp, Homo sapien
gccctgggtacgcccgcgacgtcgc

SEQ ID NO: 5868495 - DNA, 25 bp, Homo sapien
cccgcagctcgggcgtacggcgggt

SEQ ID NO: 5868496 - DNA, 25 bp, Homo sapien
agcgaccgccttagcggcgcggggc

SEQ ID NO: 5868497 - DNA, 25 bp, Homo sapien
cgggcccgtaaggccgcgactccgc

SEQ ID NO: 5868498 - DNA, 25 bp, Homo sapien
cggggcaacgcttcgcgcggtgcgg

SEQ ID NO: 5868499 - DNA, 25 bp, Homo sapien
agcgcgcgaaccagtccgcgccggc

SEQ ID NO: 5868500 - DNA, 25 bp, Homo sapien
agcccgcgggcgtgctatcgggccc

SEQ ID NO: 5868501 - DNA, 25 bp, Homo sapien
ggcgccgggcgtactcgcgcggttg

SEQ ID NO: 5868502 - DNA, 25 bp, Homo sapien
cgcagccccggtcgcacgaccggtc

SEQ ID NO: 5868503 - DNA, 25 bp, Homo sapien
cccgccgtcgctacgcgtacgggcc

SEQ ID NO: 5868504 - DNA, 25 bp, Homo sapien
acacgccgccgcgggtagtgggccg

SEQ ID NO: 5868505 - DNA, 25 bp, Homo sapien
gcccccccgctatcgtccgcctcgc

SEQ ID NO: 5868506 - DNA, 25 bp, Homo sapien
gcggccggtcgttccgcgaccaggg

SEQ ID NO: 5868507 - DNA, 25 bp, Homo sapien
ggcggcgcgaagaccggtacgggcc

SEQ ID NO: 5868508 - DNA, 25 bp, Homo sapien
gcgcgccggcgcaatacggcgctgg

SEQ ID NO: 5868509 - DNA, 25 bp, Homo sapien
cggcgcgccggttacgcgttccgcc

SEQ ID NO: 5868510 - DNA, 25 bp, Homo sapien
agcggcgtaccgcggccgatgcggc

SEQ ID NO: 5868511 - DNA, 25 bp, Homo sapien
cctcggcggatcgcgtacgggccgg

SEQ ID NO: 5868512 - DNA, 25 bp, Homo sapien
acgccgggtcgcatacgcggggcgg

SEQ ID NO: 5868513 - DNA, 25 bp, Homo sapien
gctggccgtctaacggcgcggggcg

SEQ ID NO: 5868514 - DNA, 25 bp, Homo sapien
cagcggcgcgtttcgaccggcggcg

SEQ ID NO: 5868515 - DNA, 25 bp, Homo sapien
cgcgcgcgaccccgtacgacggctc

SEQ ID NO: 5868516 - DNA, 25 bp, Homo sapien
tccgcgtcgggtagcgcgcccggac

SEQ ID NO: 5868517 - DNA, 25 bp, Homo sapien
gtggcgaggtacgggtccgcccggc

SEQ ID NO: 5868518 - DNA, 25 bp, Homo sapien
gcgcccctactcgcgcccgaggtcc

SEQ ID NO: 5868519 - DNA, 25 bp, Homo sapien
caagggcggaccgcatgcggcggcg

SEQ ID NO: 5868520 - DNA, 25 bp, Homo sapien
cgcccgcgtcgtacgggcctgcgac

SEQ ID NO: 5868521 - DNA, 25 bp, Homo sapien
ggccgctcgtacggggtcggccgga

SEQ ID NO: 5868522 - DNA, 25 bp, Homo sapien
gcgccaacccgatcgcgcggcctcc

SEQ ID NO: 5868523 - DNA, 25 bp, Homo sapien
agcgaggcgtagcgcgtcggccgcc

SEQ ID NO: 5868524 - DNA, 25 bp, Homo sapien
tcggggcgcctaacggacgcccggc

SEQ ID NO: 5868525 - DNA, 25 bp, Homo sapien
ggcaccggatcacgcgcgagccccg

SEQ ID NO: 5868526 - DNA, 25 bp, Homo sapien
cagccgtcgcgcgggtacggccgac

SEQ ID NO: 5868527 - DNA, 25 bp, Homo sapien
ctgcggccgggtgtcgtacgcgccc

SEQ ID NO: 5868528 - DNA, 25 bp, Homo sapien
gaagccgcgcatcgacgcggccggg

SEQ ID NO: 5868529 - DNA, 25 bp, Homo sapien
tgcggccggtacgcgctcgctccgg

SEQ ID NO: 5868530 - DNA, 25 bp, Homo sapien
gcccctccggcgctatcggggcgca

SEQ ID NO: 5868531 - DNA, 25 bp, Homo sapien
cgggcctttcacgcgcggggcgacg

SEQ ID NO: 5868532 - DNA, 25 bp, Homo sapien
gcggcgcggtccggcgaaagcaggc

SEQ ID NO: 5868533 - DNA, 25 bp, Homo sapien
gaaccgcgcgtgccgtaggcgcggg

SEQ ID NO: 5868534 - DNA, 25 bp, Homo sapien
gggtccccgcaacgtcgcggccgtc

SEQ ID NO: 5868535 - DNA, 25 bp, Homo sapien
ccgagggcgcatcgtcacgcgcgcg

SEQ ID NO: 5868536 - DNA, 25 bp, Homo sapien
gctcctggtacgacgcccgggggcc

SEQ ID NO: 5868537 - DNA, 25 bp, Homo sapien
cggggcccggcgcgttgtaggctgg

SEQ ID NO: 5868538 - DNA, 25 bp, Homo sapien
gcagccctagtcgcgggctgccgcg

SEQ ID NO: 5868539 - DNA, 25 bp, Homo sapien
cgggtcgatcggccgaccacgcggc

SEQ ID NO: 5868540 - DNA, 25 bp, Homo sapien
ctcgcgtacgccggacggctccggc

SEQ ID NO: 5868541 - DNA, 25 bp, Homo sapien
gccccgcgcagtacgacggcctcgg

SEQ ID NO: 5868542 - DNA, 25 bp, Homo sapien
gccccctcggcctatacgcggcccc

SEQ ID NO: 5868543 - DNA, 25 bp, Homo sapien
cgggctgcgacgtgcggtacgcggc

SEQ ID NO: 5868544 - DNA, 25 bp, Homo sapien
ccccccgtagcggcgttgcgcgtgg

SEQ ID NO: 5868545 - DNA, 25 bp, Homo sapien
gcggcgtggcgagtcgcgtcgcctc

SEQ ID NO: 5868546 - DNA, 25 bp, Homo sapien
aggcctcgtccgatgcggggcgccg

SEQ ID NO: 5868547 - DNA, 25 bp, Homo sapien
cccgcgtcggacgatcgccgggtcg

SEQ ID NO: 5868548 - DNA, 25 bp, Homo sapien
cgggcgtacggccgttgcggtgggc

SEQ ID NO: 5868549 - DNA, 25 bp, Homo sapien
gtcgccggggcgcgactatgcgccg

SEQ ID NO: 5868550 - DNA, 25 bp, Homo sapien
ccggcgcgaacgctcgaggctcccg

SEQ ID NO: 5868551 - DNA, 25 bp, Homo sapien
cccggcacccgcgacgtacgccgtc

SEQ ID NO: 5868552 - DNA, 25 bp, Homo sapien
tcgctccgacgcggccgttcccccc

SEQ ID NO: 5868553 - DNA, 25 bp, Homo sapien
cgcgcgcgcggacggtactccaggg

SEQ ID NO: 5868554 - DNA, 25 bp, Homo sapien
gcccgtcgctatcgcgggagggcgg

SEQ ID NO: 5868555 - DNA, 25 bp, Homo sapien
cactccggcatacccgcgggcccgg

SEQ ID NO: 5868556 - DNA, 25 bp, Homo sapien
cccccgcgaacgggcgcacgccaac

SEQ ID NO: 5868557 - DNA, 25 bp, Homo sapien
cctcgcacggtaccgacgcgccgcc

SEQ ID NO: 5868558 - DNA, 25 bp, Homo sapien
ccgcccaactcgacgcgcgggcagc

SEQ ID NO: 5868559 - DNA, 25 bp, Homo sapien
gccagggtacgggcgtcggcgccca

SEQ ID NO: 5868560 - DNA, 25 bp, Homo sapien
ccccggggcgcgcccgatagcttcg

SEQ ID NO: 5868561 - DNA, 25 bp, Homo sapien
cccggcttgccgcaacgcggggctc

SEQ ID NO: 5868562 - DNA, 25 bp, Homo sapien
ccgccgctcgtacgggacccctggc

SEQ ID NO: 5868563 - DNA, 25 bp, Homo sapien
gcgaaccgaccgcgcgagtcgcggc

SEQ ID NO: 5868564 - DNA, 25 bp, Homo sapien
cgctggcgcgcgaacgatcggcgcg

SEQ ID NO: 5868565 - DNA, 25 bp, Homo sapien
gcgcagagtaggcccgccgcgcagc

SEQ ID NO: 5868566 - DNA, 25 bp, Homo sapien
gctgcccgctaggtcgagccgcccc

SEQ ID NO: 5868567 - DNA, 25 bp, Homo sapien
cgctgctcgagccgacgcgaggcgg

SEQ ID NO: 5868568 - DNA, 25 bp, Homo sapien
gccccggtccgtctacgcgctggcc

SEQ ID NO: 5868569 - DNA, 25 bp, Homo sapien
tggcgggcgcgcgataagccgcccc

SEQ ID NO: 5868570 - DNA, 25 bp, Homo sapien
cccgcttgacgggcggtcggcggac

SEQ ID NO: 5868571 - DNA, 25 bp, Homo sapien
ccccgtggtcgtacgcggccctgcc

SEQ ID NO: 5868572 - DNA, 25 bp, Homo sapien
cgcaggcgcgcgtatcgtcggcggc

SEQ ID NO: 5868573 - DNA, 25 bp, Homo sapien
ccgcaccgactagacgcgggccccc

SEQ ID NO: 5868574 - DNA, 25 bp, Homo sapien
tcgcgccgcgtgacacgaccgcccc

SEQ ID NO: 5868575 - DNA, 25 bp, Homo sapien
cgggaggtcgacccgctagcgcggc

SEQ ID NO: 5868576 - DNA, 25 bp, Homo sapien
ccctgccgctacggcggaccgcgac

SEQ ID NO: 5868577 - DNA, 25 bp, Homo sapien
gcctgccggcgcgcgtacatggcgc

SEQ ID NO: 5868578 - DNA, 25 bp, Homo sapien
cccccctcggtcggcacgcaccgac

SEQ ID NO: 5868579 - DNA, 25 bp, Homo sapien
aaggcccatcgaccggccgggccgc

SEQ ID NO: 5868580 - DNA, 25 bp, Homo sapien
ccccggtcatacgcccgcggtgcgg

SEQ ID NO: 5868581 - DNA, 25 bp, Homo sapien
gcacaggtcgcgcgggttcgccggg

SEQ ID NO: 5868582 - DNA, 25 bp, Homo sapien
gcagggctcgcgcggtagccggcca

SEQ ID NO: 5868583 - DNA, 25 bp, Homo sapien
ggggcgcccgcgacgtatggcggag

SEQ ID NO: 5868584 - DNA, 25 bp, Homo sapien
ccacggatccgtcgtccgcgcgggc

SEQ ID NO: 5868585 - DNA, 25 bp, Homo sapien
gggggctacgcgtgtccgctcgccc

SEQ ID NO: 5868586 - DNA, 25 bp, Homo sapien
gctggcacggcccttgcgcaccggg

SEQ ID NO: 5868587 - DNA, 25 bp, Homo sapien
ccgcggcgctcggtcgatcggcagg

SEQ ID NO: 5868588 - DNA, 25 bp, Homo sapien
gcggcttccgcgttagcgccggcgc

SEQ ID NO: 5868589 - DNA, 25 bp, Homo sapien
tccgcccgcgcactaccggggccag

SEQ ID NO: 5868590 - DNA, 25 bp, Homo sapien
cggcgcacgtcggcccgagcttccg

SEQ ID NO: 5868591 - DNA, 25 bp, Homo sapien
gccgcccggtcgcggtgtacctccg

SEQ ID NO: 5868592 - DNA, 25 bp, Homo sapien
ccgcgccatcgaacgcgggacccgc

SEQ ID NO: 5868593 - DNA, 25 bp, Homo sapien
tccgggccggcgttacgcgggacgc

SEQ ID NO: 5868594 - DNA, 25 bp, Homo sapien
cacgctgtcgaccgcggtccggcgc

SEQ ID NO: 5868595 - DNA, 25 bp, Homo sapien
gggcgctaccggttgcgcgtcgccg

SEQ ID NO: 5868596 - DNA, 25 bp, Homo sapien
gcacgccgcggccgtgatagcgcgg

SEQ ID NO: 5868597 - DNA, 25 bp, Homo sapien
cgcacccctggcgtacgcgcccgct

SEQ ID NO: 5868598 - DNA, 25 bp, Homo sapien
gcccacctcgcccgttgggtccgcg

SEQ ID NO: 5868599 - DNA, 25 bp, Homo sapien
cgggctcggccgatacgcggcggag

SEQ ID NO: 5868600 - DNA, 25 bp, Homo sapien
ggaggcccgagccggcgtaacgccc

SEQ ID NO: 5868601 - DNA, 25 bp, Homo sapien
gggcaccgcgtaccggacgcacccc

SEQ ID NO: 5868602 - DNA, 25 bp, Homo sapien
gccgagtccgtgcgccggtaccccc

SEQ ID NO: 5868603 - DNA, 25 bp, Homo sapien
ggccggtgaccgatcggcggcggag

SEQ ID NO: 5868604 - DNA, 25 bp, Homo sapien
cgctcgagccgtcgtgcgccgtggc

SEQ ID NO: 5868605 - DNA, 25 bp, Homo sapien
ccgggtacgtcgctcgcgggcggct

SEQ ID NO: 5868606 - DNA, 25 bp, Homo sapien
cgggacaagcgtagcccgcgggccg

SEQ ID NO: 5868607 - DNA, 25 bp, Homo sapien
cccgatcggtcggcgcgtagggccc

SEQ ID NO: 5868608 - DNA, 25 bp, Homo sapien
gccgcgtccgtaccggcgctctggc

SEQ ID NO: 5868609 - DNA, 25 bp, Homo sapien
gtgcgcgtacggtcgggcccctggg

SEQ ID NO: 5868610 - DNA, 25 bp, Homo sapien
gctgtctcggcccgtacgggcgccc

SEQ ID NO: 5868611 - DNA, 25 bp, Homo sapien
gcctgcaccgctcggacgcggcgct

SEQ ID NO: 5868612 - DNA, 25 bp, Homo sapien
gccggcctatgcgcgcgggtccgac

SEQ ID NO: 5868613 - DNA, 25 bp, Homo sapien
gctgccgtacccccccggtggacgc

SEQ ID NO: 5868614 - DNA, 25 bp, Homo sapien
tccccttctcgcgcggtcgggcggg

SEQ ID NO: 5868615 - DNA, 25 bp, Homo sapien
cgtcgcaccgcgcgtccgtcgtccc

SEQ ID NO: 5868616 - DNA, 25 bp, Homo sapien
gcaggccggacgtcgcaccggcgag

SEQ ID NO: 5868617 - DNA, 25 bp, Homo sapien
gcccgggccgtacggcacggagcct

SEQ ID NO: 5868618 - DNA, 25 bp, Homo sapien
gcgcccggaccgccgtagtgctgcc

SEQ ID NO: 5868619 - DNA, 25 bp, Homo sapien
ccgcgtccggcgctagacggctcgc

SEQ ID NO: 5868620 - DNA, 25 bp, Homo sapien
cggcagcggtcgtcggaccgagccc

SEQ ID NO: 5868621 - DNA, 25 bp, Homo sapien
cgcggccgcgccgtaccgtcccact

SEQ ID NO: 5868622 - DNA, 25 bp, Homo sapien
gcgggcgacgtaccggccgttgggc

SEQ ID NO: 5868623 - DNA, 25 bp, Homo sapien
gttcgcatcggggcgcggtggcggc

SEQ ID NO: 5868624 - DNA, 25 bp, Homo sapien
gggccattgaccggcgcacgggggg

SEQ ID NO: 5868625 - DNA, 25 bp, Homo sapien
ccgcggacgtgcggcacgacctgcc

SEQ ID NO: 5868626 - DNA, 25 bp, Homo sapien
ccagccaacccgtcgcgccgcggag

SEQ ID NO: 5868627 - DNA, 25 bp, Homo sapien
gcgcgtcgcgcgtagttccgcccgg

SEQ ID NO: 5868628 - DNA, 25 bp, Homo sapien
gcgcgccgcgaccgtaaggggcgac

SEQ ID NO: 5868629 - DNA, 25 bp, Homo sapien
ggcgcggacgtacgggcgccagcct

SEQ ID NO: 5868630 - DNA, 25 bp, Homo sapien
cacgcctaccggcacggacggccgc

SEQ ID NO: 5868631 - DNA, 25 bp, Homo sapien
cggcggccgacgcgtagtccgccgt

SEQ ID NO: 5868632 - DNA, 25 bp, Homo sapien
ggccgccgtacggtccactgccgcc

SEQ ID NO: 5868633 - DNA, 25 bp, Homo sapien
gccaccgcgatcgcgccgtcccgca

SEQ ID NO: 5868634 - DNA, 25 bp, Homo sapien
gggaggatcgcccggtagcgccccg

SEQ ID NO: 5868635 - DNA, 25 bp, Homo sapien
gcctccgccctatcacgcgcccggc

SEQ ID NO: 5868636 - DNA, 25 bp, Homo sapien
agctcccgaccgtcgccctgggcgc

SEQ ID NO: 5868637 - DNA, 25 bp, Homo sapien
tgggctgcgggaccgatcgcccgcg

SEQ ID NO: 5868638 - DNA, 25 bp, Homo sapien
gcccagcggccgatatgggcggcgc

SEQ ID NO: 5868639 - DNA, 25 bp, Homo sapien
ccgcgcgcgaacggcctacgacccc

SEQ ID NO: 5868640 - DNA, 25 bp, Homo sapien
cgccggctacttcgtccggcgggcg

SEQ ID NO: 5868641 - DNA, 25 bp, Homo sapien
cggcgtcccgataggacgcgccgcg

SEQ ID NO: 5868642 - DNA, 25 bp, Homo sapien
tcccgggtcgggtacgccctggcgc

SEQ ID NO: 5868643 - DNA, 25 bp, Homo sapien
cgcggcgcgcgtacggaccgcgagt

SEQ ID NO: 5868644 - DNA, 25 bp, Homo sapien
cgccgccgcgcgacggttacctgcg

SEQ ID NO: 5868645 - DNA, 25 bp, Homo sapien
ggggcgtcgcgcgtacccatgccgg

SEQ ID NO: 5868646 - DNA, 25 bp, Homo sapien
ggtgcgctaccggtcgcgctggggg

SEQ ID NO: 5868647 - DNA, 25 bp, Homo sapien
tgcggccgacggtctgggtccccgc

SEQ ID NO: 5868648 - DNA, 25 bp, Homo sapien
ctgcccatcgcgcgtacgcgccggg

SEQ ID NO: 5868649 - DNA, 25 bp, Homo sapien
cgcgggtatcgtgcgcgggcccctg

SEQ ID NO: 5868650 - DNA, 25 bp, Homo sapien
gtaggcggggtccgctacgccgcgg

SEQ ID NO: 5868651 - DNA, 25 bp, Homo sapien
ccgggcccgtacgctcgacccgtgc

SEQ ID NO: 5868652 - DNA, 25 bp, Homo sapien
tgcgcacgggacgacgcgtcgggcg

SEQ ID NO: 5868653 - DNA, 25 bp, Homo sapien
gcggctcgccgaccggtggctagcg

SEQ ID NO: 5868654 - DNA, 25 bp, Homo sapien
gacgagggcgacggacgtcgcgcgg

SEQ ID NO: 5868655 - DNA, 25 bp, Homo sapien
ctcccccgaccgcacgcgatgcccg

SEQ ID NO: 5868656 - DNA, 25 bp, Homo sapien
gggccgcgttcgacccgtcgcccga

SEQ ID NO: 5868657 - DNA, 25 bp, Homo sapien
gagctcgctaccgcgcgaggggcgc

SEQ ID NO: 5868658 - DNA, 25 bp, Homo sapien
gcggcccggtacgacgggtgtccgc

SEQ ID NO: 5868659 - DNA, 25 bp, Homo sapien
cccgtgacacgaccgcgggggcctc

SEQ ID NO: 5868660 - DNA, 25 bp, Homo sapien
gccgaccgtgtcgaacgcgggcgcg

SEQ ID NO: 5868661 - DNA, 25 bp, Homo sapien
cgcagggacggtaccgcgcccgcgt

SEQ ID NO: 5868662 - DNA, 25 bp, Homo sapien
gccgcgctagcgggtcgacctcccg

SEQ ID NO: 5868663 - DNA, 25 bp, Homo sapien
cggcagccgcgcgatgggtgctggc

SEQ ID NO: 5868664 - DNA, 25 bp, Homo sapien
gtccgcgcccgtacgcgcaggccag

SEQ ID NO: 5868665 - DNA, 25 bp, Homo sapien
cgcgggcgatcggtcccgcagccca

SEQ ID NO: 5868666 - DNA, 25 bp, Homo sapien
ctccgccgcgtatcggccgagcccg

SEQ ID NO: 5868667 - DNA, 25 bp, Homo sapien
ggcgcggcgcgtacggccatagccg

SEQ ID NO: 5868668 - DNA, 25 bp, Homo sapien
gctcgccagcgcgacgctacgccgg

SEQ ID NO: 5868669 - DNA, 25 bp, Homo sapien
cccgcccgaccgcgcgagaagggga

SEQ ID NO: 5868670 - DNA, 25 bp, Homo sapien
cagccgcgccgtaccgtcgtccgcc

SEQ ID NO: 5868671 - DNA, 25 bp, Homo sapien
gcgcgggcccggtcgatcgggttgg

SEQ ID NO: 5868672 - DNA, 25 bp, Homo sapien
ggcagcactacggcggtccgggcgc

SEQ ID NO: 5868673 - DNA, 25 bp, Homo sapien
gggcagtggtacggcgccgcggcga

SEQ ID NO: 5868674 - DNA, 25 bp, Homo sapien
gcgccccgtgccggtacggtgggtg

SEQ ID NO: 5868675 - DNA, 25 bp, Homo sapien
gccgcctcgtaacggcccgcctggg

SEQ ID NO: 5868676 - DNA, 25 bp, Homo sapien
cgcgccgatcgttcgcgcgccagcg

SEQ ID NO: 5868677 - DNA, 25 bp, Homo sapien
gcgtcggcccggtgcgacgcgatgc

SEQ ID NO: 5868678 - DNA, 25 bp, Homo sapien
tgggcgccgacgcccgtaccctggc

SEQ ID NO: 5868679 - DNA, 25 bp, Homo sapien
acctgccgtagcgtcgggcggcgcg

SEQ ID NO: 5868680 - DNA, 25 bp, Homo sapien
cgcgtccgccgtaggctcgcggctc

SEQ ID NO: 5868681 - DNA, 25 bp, Homo sapien
gcgcggggacgctcgccgaagcggt

SEQ ID NO: 5868682 - DNA, 25 bp, Homo sapien
cggcgacgcgcaaccggtagcgccc

SEQ ID NO: 5868683 - DNA, 25 bp, Homo sapien
ggcccgtggcgctacgccggaacgg

SEQ ID NO: 5868684 - DNA, 25 bp, Homo sapien
ggtggctatcgcgcccgtcggcgcg

SEQ ID NO: 5868685 - DNA, 25 bp, Homo sapien
ccagcgccgtattgcgccggcgcgc

SEQ ID NO: 5868686 - DNA, 25 bp, Homo sapien
caggggcccgcgcacgatacccgcg

SEQ ID NO: 5868687 - DNA, 25 bp, Homo sapien
accgccttgcgcgtcgaccgcgggg

SEQ ID NO: 5868688 - DNA, 25 bp, Homo sapien
ccgtcccgcaacggcacgcccctcc

SEQ ID NO: 5868689 - DNA, 25 bp, Homo sapien
tcgcgcgggcgtaccgtacggcgcg

SEQ ID NO: 5868690 - DNA, 25 bp, Homo sapien
gccggagccgtccggcgtacgcgag

SEQ ID NO: 5868691 - DNA, 25 bp, Homo sapien
ccgccctcccgcgatagcgacgggc

SEQ ID NO: 5868692 - DNA, 25 bp, Homo sapien
ggccgtccgtacgacccgtcggcgc

SEQ ID NO: 5868693 - DNA, 25 bp, Homo sapien
gcccaacggccggtacgtcgcccgc

SEQ ID NO: 5868694 - DNA, 25 bp, Homo sapien
ccgcaccgcgcgaagcgttgccccg

SEQ ID NO: 5868695 - DNA, 25 bp, Homo sapien
gcgcgcgacgtgccgcggatacggg

SEQ ID NO: 5868696 - DNA, 25 bp, Homo sapien
gcggcggtacgggccgcgacaaggc

SEQ ID NO: 5868697 - DNA, 25 bp, Homo sapien
ggctccgttcgcggcgactgccccc

SEQ ID NO: 5868698 - DNA, 25 bp, Homo sapien
acccgccgtacgcccgagctgcggg

SEQ ID NO: 5868699 - DNA, 25 bp, Homo sapien
cccggaggtcgggcgactagcccgc

SEQ ID NO: 5868700 - DNA, 25 bp, Homo sapien
gctgacctgtcgcgcgacggcggcg

SEQ ID NO: 5868701 - DNA, 25 bp, Homo sapien
gcacgacgtcgaccgcggagggcgc

SEQ ID NO: 5868702 - DNA, 25 bp, Homo sapien
cgccgccgcatgcggtccgcccttg

SEQ ID NO: 5868703 - DNA, 25 bp, Homo sapien
gccgccggaccgtcgcgaaccctcc

SEQ ID NO: 5868704 - DNA, 25 bp, Homo sapien
gccgccaccgcgccccgatgcgaac

SEQ ID NO: 5868705 - DNA, 25 bp, Homo sapien
gtccgggcgcgctacccgacgcgga

SEQ ID NO: 5868706 - DNA, 25 bp, Homo sapien
gtccgccgaccgcccgtcaagcggg

SEQ ID NO: 5868707 - DNA, 25 bp, Homo sapien
gcgagtgcgccccgtacggcggctc

SEQ ID NO: 5868708 - DNA, 25 bp, Homo sapien
cccgcgcggtcacgcgactagcccg

SEQ ID NO: 5868709 - DNA, 25 bp, Homo sapien
ccagcctacaacgcgccgggccccg

SEQ ID NO: 5868710 - DNA, 25 bp, Homo sapien
gccgcgtaccgcacgtcgcagcccg

SEQ ID NO: 5868711 - DNA, 25 bp, Homo sapien
ggccggacgcgatagcgcgaggccg

SEQ ID NO: 5868712 - DNA, 25 bp, Homo sapien
caccccgactcgcgccgacggccac

SEQ ID NO: 5868713 - DNA, 25 bp, Homo sapien
gccgggcggacccgtacctcgccac

SEQ ID NO: 5868714 - DNA, 25 bp, Homo sapien
gcgcccctcgcgcggtagcgagctc

SEQ ID NO: 5868715 - DNA, 25 bp, Homo sapien
ggcccgggcgcccgatcgagtctcc

SEQ ID NO: 5868716 - DNA, 25 bp, Homo sapien
ccggggcggcgtaagacgccgaggc

SEQ ID NO: 5868717 - DNA, 25 bp, Homo sapien
gctgcgagcacgacacgcggccggg

SEQ ID NO: 5868718 - DNA, 25 bp, Homo sapien
gcgagccgtctagcgccggacgcgg

SEQ ID NO: 5868719 - DNA, 25 bp, Homo sapien
tcgcggtcgcgcgatgggtgccgcg

SEQ ID NO: 5868720 - DNA, 25 bp, Homo sapien
ggacctcgggcgcgagtaggggcgc

SEQ ID NO: 5868721 - DNA, 25 bp, Homo sapien
ccgccggtcgcaacgccgtgacggc

SEQ ID NO: 5868722 - DNA, 25 bp, Homo sapien
agcgcgcgcgggatagccgggcgga

SEQ ID NO: 5868723 - DNA, 25 bp, Homo sapien
cccgccgtctcgttcgacccgcgcc

SEQ ID NO: 5868724 - DNA, 25 bp, Homo sapien
tccggccgaccccgtacgagcggcc

SEQ ID NO: 5868725 - DNA, 25 bp, Homo sapien
gccgccgacgatacgcgcgcctgcg

SEQ ID NO: 5868726 - DNA, 25 bp, Homo sapien
gcccaccgcaacggccgtacgcccg

SEQ ID NO: 5868727 - DNA, 25 bp, Homo sapien
cgggagcctcgagcgttcgcgccgg

SEQ ID NO: 5868728 - DNA, 25 bp, Homo sapien
ggggcggtcgtgtcacgcggcgcga

SEQ ID NO: 5868729 - DNA, 25 bp, Homo sapien
ggcgggcgtcgggctagacggcgag

SEQ ID NO: 5868730 - DNA, 25 bp, Homo sapien
gcgtcccgcgggacgcaacagcccg

SEQ ID NO: 5868731 - DNA, 25 bp, Homo sapien
gtcgcggtccgccgtagcggcaggg

SEQ ID NO: 5868732 - DNA, 25 bp, Homo sapien
ctggccccggtagtgcgcgggcgga

SEQ ID NO: 5868733 - DNA, 25 bp, Homo sapien
gcgacggcgctacgggcgaccaggc

SEQ ID NO: 5868734 - DNA, 25 bp, Homo sapien
ggcccatcgcggccgatccgggagg

SEQ ID NO: 5868735 - DNA, 25 bp, Homo sapien
gcccggtgcgagcggtccgcgacct

SEQ ID NO: 5868736 - DNA, 25 bp, Homo sapien
cgtctgtcgcgcgggagtcccccgg

SEQ ID NO: 5868737 - DNA, 25 bp, Homo sapien
cgccccgcgccgttagacggccagc

SEQ ID NO: 5868738 - DNA, 25 bp, Homo sapien
gacggccgcgacgttgcggggaccc

SEQ ID NO: 5868739 - DNA, 25 bp, Homo sapien
ggcggccgacgcgctacgcctcgct

SEQ ID NO: 5868740 - DNA, 25 bp, Homo sapien
gagcccgaactcgtccgcggcgcgc

SEQ ID NO: 5868741 - DNA, 25 bp, Homo sapien
ctgcgctgggcgccccgtagtccgc

SEQ ID NO: 5868742 - DNA, 25 bp, Homo sapien
cgcgacaccgtccggcgtaccgccg

SEQ ID NO: 5868743 - DNA, 25 bp, Homo sapien
ccgcggcgtagcggaccccgcctac

SEQ ID NO: 5868744 - DNA, 25 bp, Homo sapien
ggcgccgcctcgtacgcgacccctg

SEQ ID NO: 5868745 - DNA, 25 bp, Homo sapien
gtctcgcgtgccgctagcccccgcg

SEQ ID NO: 5868746 - DNA, 25 bp, Homo sapien
caaccgcgcgagtacgcccggcgcc

SEQ ID NO: 5868747 - DNA, 25 bp, Homo sapien
ggcggcctatgccgcgacgcagccc

SEQ ID NO: 5868748 - DNA, 25 bp, Homo sapien
gtcggccgtacccgcgcgacggctg

SEQ ID NO: 5868749 - DNA, 25 bp, Homo sapien
cccggccgcgcggatgcaagccgtg

SEQ ID NO: 5868750 - DNA, 25 bp, Homo sapien
ggggagcgacggtcgcaaccgcggg

SEQ ID NO: 5868751 - DNA, 25 bp, Homo sapien
gcgtccaccgggggggtacggcagc

SEQ ID NO: 5868752 - DNA, 25 bp, Homo sapien
gcgccccggcgtgccacgacaggct

SEQ ID NO: 5868753 - DNA, 25 bp, Homo sapien
acggcggactacgcgtcggccgccg

SEQ ID NO: 5868754 - DNA, 25 bp, Homo sapien
cgccgcggcgcaatacgcgtggcgg

SEQ ID NO: 5868755 - DNA, 25 bp, Homo sapien
ccggccgtacctcgcgacgtggccc

SEQ ID NO: 5868756 - DNA, 25 bp, Homo sapien
gccgggcgtccgttaggcgccccga

SEQ ID NO: 5868757 - DNA, 25 bp, Homo sapien
gccgtgcccccggtcgacagcaggg

SEQ ID NO: 5868758 - DNA, 25 bp, Homo sapien
ccggcatgggtacgcgcgacgcccc

SEQ ID NO: 5868759 - DNA, 25 bp, Homo sapien
gctcgccgaccggtcgtaccgcggg

SEQ ID NO: 5868760 - DNA, 25 bp, Homo sapien
cgcccgacgcgtcgtcccgtgcgca

SEQ ID NO: 5868761 - DNA, 25 bp, Homo sapien
cgcgagtcgtcggcgcgacaggccg

SEQ ID NO: 5868762 - DNA, 25 bp, Homo sapien
gcagcgcctagggtcgcgaccccgg

SEQ ID NO: 5868763 - DNA, 25 bp, Homo sapien
cgcctgctacgcccggtcgggagcc

SEQ ID NO: 5868764 - DNA, 25 bp, Homo sapien
tgggggcggggtgcgtcgacgcgga

SEQ ID NO: 5868765 - DNA, 25 bp, Homo sapien
ggcccccgggcgtcgtaccaggagc

SEQ ID NO: 5868766 - DNA, 25 bp, Homo sapien
gcacgggtcgagcgtacgggcccgg

SEQ ID NO: 5868767 - DNA, 25 bp, Homo sapien
ccgcaccgcgggcgtatgaccgggg

SEQ ID NO: 5868768 - DNA, 25 bp, Homo sapien
gccggcatggaccgacgcgggcacg

SEQ ID NO: 5868769 - DNA, 25 bp, Homo sapien
gggctggcgcgtacggtcagcgccc

SEQ ID NO: 5868770 - DNA, 25 bp, Homo sapien
ggaggccgcgcgatcgggttggcgc

SEQ ID NO: 5868771 - DNA, 25 bp, Homo sapien
cgacccggcgatcgtccgacgcggg

SEQ ID NO: 5868772 - DNA, 25 bp, Homo sapien
caccgcatcgccgcgtaggcgccgc

SEQ ID NO: 5868773 - DNA, 25 bp, Homo sapien
ggcagcctggcgtacgcgctgcgcc

SEQ ID NO: 5868774 - DNA, 25 bp, Homo sapien
ccccccgtgcgccggtcaatggccc

SEQ ID NO: 5868775 - DNA, 25 bp, Homo sapien
ggggtcgtaggccgttcgcgcgcgg

SEQ ID NO: 5868776 - DNA, 25 bp, Homo sapien
gtggccggcccgcgcgataccctgg

SEQ ID NO: 5868777 - DNA, 25 bp, Homo sapien
cgccggaccgctgtcgacgaccgcc

SEQ ID NO: 5868778 - DNA, 25 bp, Homo sapien
gccccgcgccgctaaggcggtcgct

SEQ ID NO: 5868779 - DNA, 25 bp, Homo sapien
acgcgggcgcggtaccgtccctgcg

SEQ ID NO: 5868780 - DNA, 25 bp, Homo sapien
ccctggcgaccgatcgcgtcgcggg

SEQ ID NO: 5868781 - DNA, 25 bp, Homo sapien
ggcgcgactccgctagccgcacccc

SEQ ID NO: 5868782 - DNA, 25 bp, Homo sapien
gcggagtcgcggccttacgggcccg

SEQ ID NO: 5868783 - DNA, 25 bp, Homo sapien
ggcagggccgcgtacgaccacgggg

SEQ ID NO: 5868784 - DNA, 25 bp, Homo sapien
gccaggggtcccgtacgagcggcgg

SEQ ID NO: 5868785 - DNA, 25 bp, Homo sapien
cccgcaccggtaatcgcgccgcggc

SEQ ID NO: 5868786 - DNA, 25 bp, Homo sapien
tgggtcccgttcgggcgaggcgcgc

SEQ ID NO: 5868787 - DNA, 25 bp, Homo sapien
cgtcggcgcggtaccgtcgcaggcc

SEQ ID NO: 5868788 - DNA, 25 bp, Homo sapien
gccccctgccttcgcgacgacggcc

SEQ ID NO: 5868789 - DNA, 25 bp, Homo sapien
ccgggacttacgcgccgcggtgccg

SEQ ID NO: 5868790 - DNA, 25 bp, Homo sapien
ggccggctctcgtccgcgagcgtgg

SEQ ID NO: 5868791 - DNA, 25 bp, Homo sapien
gggcggagacgcttcgcgcccgcca

SEQ ID NO: 5868792 - DNA, 25 bp, Homo sapien
gcgccgtcgtccggtgcgacccgtg

SEQ ID NO: 5868793 - DNA, 25 bp, Homo sapien
ggcccgacgggccgacgtatggcgc

SEQ ID NO: 5868794 - DNA, 25 bp, Homo sapien
cgaagctatcgggcgcgccccgggg

SEQ ID NO: 5868795 - DNA, 25 bp, Homo sapien
aggctccgtgccgtacggcccgggc

SEQ ID NO: 5868796 - DNA, 25 bp, Homo sapien
ccgggcccgcgggtatgccggagtg

SEQ ID NO: 5868797 - DNA, 25 bp, Homo sapien
agccgcccgcgagcgacgtacccgg

SEQ ID NO: 5868798 - DNA, 25 bp, Homo sapien
agcggcacgccgcccggtagcgctc

SEQ ID NO: 5868799 - DNA, 25 bp, Homo sapien
gcggggacccagaccgtcggccgca

SEQ ID NO: 5868800 - DNA, 25 bp, Homo sapien
ccggagcgagcgcgtaccggccgca

SEQ ID NO: 5868801 - DNA, 25 bp, Homo sapien
ggggcggcttatcgcgcgcccgcca

SEQ ID NO: 5868802 - DNA, 25 bp, Homo sapien
ctgccccgaacgcgggtcgcggcac

SEQ ID NO: 5868803 - DNA, 25 bp, Homo sapien
ggctcgatcgcgcgcctaccgcgcc

SEQ ID NO: 5868804 - DNA, 25 bp, Homo sapien
gggacgacggacgcgcggtgcgacg

SEQ ID NO: 5868805 - DNA, 25 bp, Homo sapien
gccggacggcatagcgtcgggcccc

SEQ ID NO: 5868806 - DNA, 25 bp, Homo sapien
ccgccgccgcggtcgtcaaggagcc

SEQ ID NO: 5868807 - DNA, 25 bp, Homo sapien
ggctcgctcgcatcgcgcggtgcgc

SEQ ID NO: 5868808 - DNA, 25 bp, Homo sapien
ctccgccatacgtcgcgggcgcccc

SEQ ID NO: 5868809 - DNA, 25 bp, Homo sapien
ctggggcgcgcccgaagtctgcgcg

SEQ ID NO: 5868810 - DNA, 25 bp, Homo sapien
cgccgccgcccgtacgacgagtggg

SEQ ID NO: 5868811 - DNA, 25 bp, Homo sapien
ggggggaacggccgcgtcggagcga

SEQ ID NO: 5868812 - DNA, 25 bp, Homo sapien
gaggcggtcgcacgacgccagccgg

SEQ ID NO: 5868813 - DNA, 25 bp, Homo sapien
cgacggcccggcgtacgtcggctgg

SEQ ID NO: 5868814 - DNA, 25 bp, Homo sapien
ggcgccgacgacgcgggtagggcac

SEQ ID NO: 5868815 - DNA, 25 bp, Homo sapien
ggggcgcgaaccggcgtgacctccc

SEQ ID NO: 5868816 - DNA, 25 bp, Homo sapien
tcccgccgcgccggtacatgcgggg

SEQ ID NO: 5868817 - DNA, 25 bp, Homo sapien
ccgcgctatcacggccgcggcgtgc

SEQ ID NO: 5868818 - DNA, 25 bp, Homo sapien
gcgcgctcttacgcgcgggtgccgc

SEQ ID NO: 5868819 - DNA, 25 bp, Homo sapien
cggcggtcgcacgagcgaccggcct

SEQ ID NO: 5868820 - DNA, 25 bp, Homo sapien
tgcgccccgatagcgccggaggggc

SEQ ID NO: 5868821 - DNA, 25 bp, Homo sapien
gggggtaccggcgcacggactcggc

SEQ ID NO: 5868822 - DNA, 25 bp, Homo sapien
cggcgccgacgcgggtactcgctcg

SEQ ID NO: 5868823 - DNA, 25 bp, Homo sapien
gcgccggcgctaacgcggaagccgc

SEQ ID NO: 5868824 - DNA, 25 bp, Homo sapien
gcgacgtcgcgggcgtacccagggc

SEQ ID NO: 5868825 - DNA, 25 bp, Homo sapien
cggggcgctaccgggcgatcctccc

SEQ ID NO: 5868826 - DNA, 25 bp, Homo sapien
cctggccgcccgcgaatgagggccg

SEQ ID NO: 5868827 - DNA, 25 bp, Homo sapien
cggggctcgcgcgtgatccggtgcc

SEQ ID NO: 5868828 - DNA, 25 bp, Homo sapien
cccggagtatgcgcgacggcggcgg

SEQ ID NO: 5868829 - DNA, 25 bp, Homo sapien
cccaggggcccgaccgtacgcgcac

SEQ ID NO: 5868830 - DNA, 25 bp, Homo sapien
tggggcgaccgccgggtacgccgct

SEQ ID NO: 5868831 - DNA, 25 bp, Homo sapien
ccgcgcgacgtccgtcgccctcgtc

SEQ ID NO: 5868832 - DNA, 25 bp, Homo sapien
gcgccccgcgctccgaacaggtgcc

SEQ ID NO: 5868833 - DNA, 25 bp, Homo sapien
ggcagcccggtcggcgctacccgga

SEQ ID NO: 5868834 - DNA, 25 bp, Homo sapien
gcgcgcggtatgccgcgcggtgctg

SEQ ID NO: 5868835 - DNA, 25 bp, Homo sapien
gtgcggcccggcgtatcgccgaccg

SEQ ID NO: 5868836 - DNA, 25 bp, Homo sapien
cggaggtacaccgcgaccgggcggc

SEQ ID NO: 5868837 - DNA, 25 bp, Homo sapien
cccgcgcctacggcacgcgcggttc

SEQ ID NO: 5868838 - DNA, 25 bp, Homo sapien
aggccccgtaggggcgacgtgccgc

SEQ ID NO: 5868839 - DNA, 25 bp, Homo sapien
gggcggcgacggtagtacggcgccc

SEQ ID NO: 5868840 - DNA, 25 bp, Homo sapien
cgtccgacacgaccgcgggaccgcc

SEQ ID NO: 5868841 - DNA, 25 bp, Homo sapien
ccggcggacggatagccgccccgtg

SEQ ID NO: 5868842 - DNA, 25 bp, Homo sapien
tcgcgcgcgagtcgcgtaccgccgg

SEQ ID NO: 5868843 - DNA, 25 bp, Homo sapien
tcgccccgggcgcgccataggcacg

SEQ ID NO: 5868844 - DNA, 25 bp, Homo sapien
gaggggcgtacgcgggtggacgcgc

SEQ ID NO: 5868845 - DNA, 25 bp, Homo sapien
gacggagggtacgcggcgtcggggc

SEQ ID NO: 5868846 - DNA, 25 bp, Homo sapien
cccggcgaacccgcgcgacctgtgc

SEQ ID NO: 5868847 - DNA, 25 bp, Homo sapien
cttgggccggcacgcaacgcggcgg

SEQ ID NO: 5868848 - DNA, 25 bp, Homo sapien
gcgccgcccatatcggccgctgggc

SEQ ID NO: 5868849 - DNA, 25 bp, Homo sapien
gccgcgactcgcgcggtcggttcgc

SEQ ID NO: 5868850 - DNA, 25 bp, Homo sapien
cgcgcccgcgttcgacacggtcggc

SEQ ID NO: 5868851 - DNA, 25 bp, Homo sapien
cgcgggtacgcccgacgcggtcctg

SEQ ID NO: 5868852 - DNA, 25 bp, Homo sapien
ggggtgcgtccggtacgcggtgccc

SEQ ID NO: 5868853 - DNA, 25 bp, Homo sapien
ggcggcgcgtcggtaccgtgcgagg

SEQ ID NO: 5868854 - DNA, 25 bp, Homo sapien
ctccgccgccgatcggtcaccggcc

SEQ ID NO: 5868855 - DNA, 25 bp, Homo sapien
tgcgccttgcgcggtcggccgacgg

SEQ ID NO: 5868856 - DNA, 25 bp, Homo sapien
ggagcgcgcgcgtacggaggccacg

SEQ ID NO: 5868857 - DNA, 25 bp, Homo sapien
gccggcgcggactggttcgcgcgct

SEQ ID NO: 5868858 - DNA, 25 bp, Homo sapien
gccgcgtggtcggccgatcgacccg

SEQ ID NO: 5868859 - DNA, 25 bp, Homo sapien
gcctggcgtcgcgtccctacgggcg

SEQ ID NO: 5868860 - DNA, 25 bp, Homo sapien
cggcgccccgcatcggacgaggcct

SEQ ID NO: 5868861 - DNA, 25 bp, Homo sapien
ggcgtgtacggccgcgacctggcgc

SEQ ID NO: 5868862 - DNA, 25 bp, Homo sapien
ccggcggtcacgccgcgtagagccc

SEQ ID NO: 5868863 - DNA, 25 bp, Homo sapien
cgctagccaccggtcggcgagccgc

SEQ ID NO: 5868864 - DNA, 25 bp, Homo sapien
gcgtcgcatcgcgcgtcgcggaccg

SEQ ID NO: 5868865 - DNA, 25 bp, Homo sapien
ccgacgcggcgtgtccgacgcgagc

SEQ ID NO: 5868866 - DNA, 25 bp, Homo sapien
cacggcgacgggtccgcgtcccgca

SEQ ID NO: 5868867 - DNA, 25 bp, Homo sapien
ggccggcgcgcaataccgggctgcg

SEQ ID NO: 5868868 - DNA, 25 bp, Homo sapien
cggccggctaggcgccgcacgagtg

SEQ ID NO: 5868869 - DNA, 25 bp, Homo sapien
cgcgcgcgtgacgatgcgccctcgg

SEQ ID NO: 5868870 - DNA, 25 bp, Homo sapien
ccggcgtcgtgcgcggacgccagtc

SEQ ID NO: 5868871 - DNA, 25 bp, Homo sapien
ccgagcccgacgtagcgagccggcc

SEQ ID NO: 5868872 - DNA, 25 bp, Homo sapien
gaggcccccgcggtcgtgtcacggg

SEQ ID NO: 5868873 - DNA, 25 bp, Homo sapien
ccgccggaccggtgcgacgccacac

SEQ ID NO: 5868874 - DNA, 25 bp, Homo sapien
aggccacgtcgggttcgcggccgcc

SEQ ID NO: 5868875 - DNA, 25 bp, Homo sapien
tcgggcgacgggtcgaacgcggccc

SEQ ID NO: 5868876 - DNA, 25 bp, Homo sapien
tggccggctaccgcgcgagccctgc

SEQ ID NO: 5868877 - DNA, 25 bp, Homo sapien
cgggcggcgcgtatcggggcggtag

SEQ ID NO: 5868878 - DNA, 25 bp, Homo sapien
gcgccatgtacgcgcgccggcaggc

SEQ ID NO: 5868879 - DNA, 25 bp, Homo sapien
cgctcgtaggcgcggtccgcgggga

SEQ ID NO: 5868880 - DNA, 25 bp, Homo sapien
cgcccggtgcggtacgcgcgttgcg

SEQ ID NO: 5868881 - DNA, 25 bp, Homo sapien
gtcggacccgcgcgcataggccggc

SEQ ID NO: 5868882 - DNA, 25 bp, Homo sapien
gcgcccgcgcacgtaacggcgtggc

SEQ ID NO: 5868883 - DNA, 25 bp, Homo sapien
cggcgcgccgcgtcgtacgcgtagc

SEQ ID NO: 5868884 - DNA, 25 bp, Homo sapien
ggtgcgcgcgaccggacgtcccggt

SEQ ID NO: 5868885 - DNA, 25 bp, Homo sapien
cgccggcgctcgtcggttcggacgg

SEQ ID NO: 5868886 - DNA, 25 bp, Homo sapien
ggcccgtacgcgtagcgacggcggg

SEQ ID NO: 5868887 - DNA, 25 bp, Homo sapien
ggccgactagcacgtcgcgcgcggg

SEQ ID NO: 5868888 - DNA, 25 bp, Homo sapien
cacggggtcgcgtgaccggcgcgag

SEQ ID NO: 5868889 - DNA, 25 bp, Homo sapien
ctcgcgcggacgtaggtcggggcgc

SEQ ID NO: 5868890 - DNA, 25 bp, Homo sapien
ggcccgtaccggtcttcgcgccgcc

SEQ ID NO: 5868891 - DNA, 25 bp, Homo sapien
gtcgcaggcccgtacgacgcgggcg

SEQ ID NO: 5868892 - DNA, 25 bp, Homo sapien
cgcgccgggcgcgacgtaagcccga

SEQ ID NO: 5868893 - DNA, 25 bp, Homo sapien
tgcgggacggcgcgatcgcggtggc

SEQ ID NO: 5868894 - DNA, 25 bp, Homo sapien
acgggggcgaatgaccgcgcgcgcg

SEQ ID NO: 5868895 - DNA, 25 bp, Homo sapien
cgtgggacggtccgatcgcgggcgg

SEQ ID NO: 5868896 - DNA, 25 bp, Homo sapien
gcccgcgcgtgtcggacggtacggg

SEQ ID NO: 5868897 - DNA, 25 bp, Homo sapien
gcccgtgtgtcgcgccggttccggg

SEQ ID NO: 5868898 - DNA, 25 bp, Homo sapien
ccggcggcgcaccccgatcttcggc

SEQ ID NO: 5868899 - DNA, 25 bp, Homo sapien
gggcgcgtacgacacccggccgcag

SEQ ID NO: 5868900 - DNA, 25 bp, Homo sapien
gggctcggtccgacgaccgctgccg

SEQ ID NO: 5868901 - DNA, 25 bp, Homo sapien
gacgggggtccgcgcgatacggcgg

SEQ ID NO: 5868902 - DNA, 25 bp, Homo sapien
ggcgccacgcgcccgttcggctagc

SEQ ID NO: 5868903 - DNA, 25 bp, Homo sapien
gccctgccgatcggcgcgacgagcg

SEQ ID NO: 5868904 - DNA, 25 bp, Homo sapien
agggcctacggcgcgacgctccggg

SEQ ID NO: 5868905 - DNA, 25 bp, Homo sapien
gctgcccgcgcgtcgagttgggcgg

SEQ ID NO: 5868906 - DNA, 25 bp, Homo sapien
gccccatggcaccggacgacggcgg

SEQ ID NO: 5868907 - DNA, 25 bp, Homo sapien
tcgctcgcgcgtcgcacgaccggcc

SEQ ID NO: 5868908 - DNA, 25 bp, Homo sapien
cccggccgcgtcgatgcgcggcttc

SEQ ID NO: 5868909 - DNA, 25 bp, Homo sapien
cccggctacggccggcgatggcagg

SEQ ID NO: 5868910 - DNA, 25 bp, Homo sapien
gggcgcccgtacgggccgagacagc

SEQ ID NO: 5868911 - DNA, 25 bp, Homo sapien
cccgcgtccgcgtaccgcgccaacc

SEQ ID NO: 5868912 - DNA, 25 bp, Homo sapien
aggcccatcgcgcgtcgggccaggg

SEQ ID NO: 5868913 - DNA, 25 bp, Homo sapien
cgtccgcgcgtacgacggggctcgg

SEQ ID NO: 5868914 - DNA, 25 bp, Homo sapien
cgtcgccccgcgcgtgaaaggcccg

SEQ ID NO: 5868915 - DNA, 25 bp, Homo sapien
gaccgctacgcgctggtcgcggggc

SEQ ID NO: 5868916 - DNA, 25 bp, Homo sapien
tgggtgcccgccgaacggtggcggg

SEQ ID NO: 5868917 - DNA, 25 bp, Homo sapien
ccgaggccgtcgtactgcgcggggc

SEQ ID NO: 5868918 - DNA, 25 bp, Homo sapien
gccagagcgccggtacggacgcggc

SEQ ID NO: 5868919 - DNA, 25 bp, Homo sapien
gccacgactaccggcggaccggggc

SEQ ID NO: 5868920 - DNA, 25 bp, Homo sapien
acgtggggcggcccgcttagccgcc

SEQ ID NO: 5868921 - DNA, 25 bp, Homo sapien
ccccgctcgacgcgggtagggcgca

SEQ ID NO: 5868922 - DNA, 25 bp, Homo sapien
cggcgtcgcctcgagtacggggccg

SEQ ID NO: 5868923 - DNA, 25 bp, Homo sapien
ggccagcgcgtagacggaccggggc

SEQ ID NO: 5868924 - DNA, 25 bp, Homo sapien
cccgccgacgtacgggctagccgcc

SEQ ID NO: 5868925 - DNA, 25 bp, Homo sapien
cgggttgttcggcgcgacgccgggc

SEQ ID NO: 5868926 - DNA, 25 bp, Homo sapien
caggcggcccgacgactaggcccgc

SEQ ID NO: 5868927 - DNA, 25 bp, Homo sapien
cccggcaccggcacgcgatccgcga

SEQ ID NO: 5868928 - DNA, 25 bp, Homo sapien
gccacggcgcacgacggctcgagcg

SEQ ID NO: 5868929 - DNA, 25 bp, Homo sapien
ccgccccgcgtatgcgacccggcgt

SEQ ID NO: 5868930 - DNA, 25 bp, Homo sapien
cgtccgcgcgaccgtatgcggcgcc

SEQ ID NO: 5868931 - DNA, 25 bp, Homo sapien
gcccgcgcggacgacggatccgtgg

SEQ ID NO: 5868932 - DNA, 25 bp, Homo sapien
cgcccgccggacgaagtagccggcg

SEQ ID NO: 5868933 - DNA, 25 bp, Homo sapien
gccgcatcggccgcggtacgccgct

SEQ ID NO: 5868934 - DNA, 25 bp, Homo sapien
gggtccccacgacgcgcgagtgccg

SEQ ID NO: 5868935 - DNA, 25 bp, Homo sapien
ggggcagcggcgtacgtacgccccc

SEQ ID NO: 5868936 - DNA, 25 bp, Homo sapien
cgtctgcgcccgacggtctcgcggg

SEQ ID NO: 5868937 - DNA, 25 bp, Homo sapien
cgaggctcggcgcgcctaccggcag

SEQ ID NO: 5868938 - DNA, 25 bp, Homo sapien
agcgggcgcgtacgccaggggtgcg

SEQ ID NO: 5868939 - DNA, 25 bp, Homo sapien
tgggcgcggtccgatgcgccacgcc

SEQ ID NO: 5868940 - DNA, 25 bp, Homo sapien
ccgcccgtccggtcgcctagctccg

SEQ ID NO: 5868941 - DNA, 25 bp, Homo sapien
cggcccactacccgcggcggcgtgt

SEQ ID NO: 5868942 - DNA, 25 bp, Homo sapien
cgcgggtacggccggtcgcgaggtg

SEQ ID NO: 5868943 - DNA, 25 bp, Homo sapien
ccgcagctaccgcggtcggggcctg

SEQ ID NO: 5868944 - DNA, 25 bp, Homo sapien
gaggcgacgcgactcgccacgccgc

SEQ ID NO: 5868945 - DNA, 25 bp, Homo sapien
gcggacatcggggcgacgccggcgt

SEQ ID NO: 5868946 - DNA, 25 bp, Homo sapien
tcgggccgtcgaacggagcgcgccg

SEQ ID NO: 5868947 - DNA, 25 bp, Homo sapien
gcgccgcacgcgtaaccggggcgtc

SEQ ID NO: 5868948 - DNA, 25 bp, Homo sapien
gggccccggctacgcgcgtagctgc

SEQ ID NO: 5868949 - DNA, 25 bp, Homo sapien
ggggcccgctagatcgccccgaccc

SEQ ID NO: 5868950 - DNA, 25 bp, Homo sapien
cgtgccgtactcgtcgcgcgcgcgg

SEQ ID NO: 5868951 - DNA, 25 bp, Homo sapien
gcctgctttcgccggaccgcgccgc

SEQ ID NO: 5868952 - DNA, 25 bp, Homo sapien
ggggcggctcgacctagcgggcagc

SEQ ID NO: 5868953 - DNA, 25 bp, Homo sapien
ctccgcggcgcgacgggttggctgg

SEQ ID NO: 5868954 - DNA, 25 bp, Homo sapien
gtcgccccttacggtcgcggcgcgc

SEQ ID NO: 5868955 - DNA, 25 bp, Homo sapien
ccgcctcgcgtcggctcgagcagcg

SEQ ID NO: 5868956 - DNA, 25 bp, Homo sapien
gcccggcgggtcgtctagccggctc

SEQ ID NO: 5868957 - DNA, 25 bp, Homo sapien
gccggccctcgtaacggcgccctgg

SEQ ID NO: 5868958 - DNA, 25 bp, Homo sapien
gcgccagggcgtacccgacccggga

SEQ ID NO: 5868959 - DNA, 25 bp, Homo sapien
acgcgggcgggtcgtacgcagccgc

SEQ ID NO: 5868960 - DNA, 25 bp, Homo sapien
tcgccgcggtccgctagcggggtcg

SEQ ID NO: 5868961 - DNA, 25 bp, Homo sapien
cgcaggtaaccgtcgcgcggcggcg

SEQ ID NO: 5868962 - DNA, 25 bp, Homo sapien
agtgggacggtacggcgcggccgcg

SEQ ID NO: 5868963 - DNA, 25 bp, Homo sapien
gcgcggggcggtacgccgagcgcat

SEQ ID NO: 5868964 - DNA, 25 bp, Homo sapien
cctgccgtaccgatcggcggccgcg

SEQ ID NO: 5868965 - DNA, 25 bp, Homo sapien
gcgaggcggacgatagcgggggggc

SEQ ID NO: 5868966 - DNA, 25 bp, Homo sapien
gctcccccgctaacgcgtggcccgg

SEQ ID NO: 5868967 - DNA, 25 bp, Homo sapien
gacgggatcgcgcaaccggggggcg

SEQ ID NO: 5868968 - DNA, 25 bp, Homo sapien
gaccgcgtcggccaccggtgtgccg

SEQ ID NO: 5868969 - DNA, 25 bp, Homo sapien
ctccggacgacggccgacctcgcgg

SEQ ID NO: 5868970 - DNA, 25 bp, Homo sapien
gggcgagcggacacgcgtagccccc

SEQ ID NO: 5868971 - DNA, 25 bp, Homo sapien
ggcccagcgcgagcgtacgcccctc

SEQ ID NO: 5868972 - DNA, 25 bp, Homo sapien
cgggcatcgcgtgcggtcgggggag

SEQ ID NO: 5868973 - DNA, 25 bp, Homo sapien
gggccctacgcgccgaccgatcggg

SEQ ID NO: 5868974 - DNA, 25 bp, Homo sapien
gcccggacgcccgtccgaagcgtgg

SEQ ID NO: 5868975 - DNA, 25 bp, Homo sapien
agcgccgcgtccgagcggtgcaggc

SEQ ID NO: 5868976 - DNA, 25 bp, Homo sapien
ggcggaacgcgtaaccggcgcgccg

SEQ ID NO: 5868977 - DNA, 25 bp, Homo sapien
ccaccccgcgtacggccgacacggc

SEQ ID NO: 5868978 - DNA, 25 bp, Homo sapien
gggggcccgcgtctagtcggtgcgg

SEQ ID NO: 5868979 - DNA, 25 bp, Homo sapien
caggcccgcgccgttagcgtcccgc

SEQ ID NO: 5868980 - DNA, 25 bp, Homo sapien
ggcgcgtagcgcgttgccgtggcgc

SEQ ID NO: 5868981 - DNA, 25 bp, Homo sapien
cgcccgcgtcgcgcgatgccttccg

SEQ ID NO: 5868982 - DNA, 25 bp, Homo sapien
cgcgtctagtcgcgcgggggggctc

SEQ ID NO: 5868983 - DNA, 25 bp, Homo sapien
ccgccggcgcatcggacgacgcgac

SEQ ID NO: 5868984 - DNA, 25 bp, Homo sapien
gaccggtcgtgcgaccggggctgcg

SEQ ID NO: 5868985 - DNA, 25 bp, Homo sapien
ggcgcgactacgcgcgggacccacg

SEQ ID NO: 5868986 - DNA, 25 bp, Homo sapien
ggctgccgcgtaccgacgcggcgca

SEQ ID NO: 5868987 - DNA, 25 bp, Homo sapien
acgggcaaccgccgcgtagggccgc

SEQ ID NO: 5868988 - DNA, 25 bp, Homo sapien
cgcggacccaacgggcgaggtgggc

SEQ ID NO: 5868989 - DNA, 25 bp, Homo sapien
cacccccgtcgagtccggagcgcgc

SEQ ID NO: 5868990 - DNA, 25 bp, Homo sapien
gcgcgcgcggcgtagaccgccttcg

SEQ ID NO: 5868991 - DNA, 25 bp, Homo sapien
ggcaggtcgtgccgcacgtccgcgg

SEQ ID NO: 5868992 - DNA, 25 bp, Homo sapien
cggaagctcgggccgacgtgcgccg

SEQ ID NO: 5868993 - DNA, 25 bp, Homo sapien
cgccgccggtcgaaacgcgccgctg

SEQ ID NO: 5868994 - DNA, 25 bp, Homo sapien
cggcgggccgcgtatgcggactccg

SEQ ID NO: 5868995 - DNA, 25 bp, Homo sapien
cgggcgcgccgtacgctacgcaccg

SEQ ID NO: 5868996 - DNA, 25 bp, Homo sapien
gctgcgcggcgggcctactctgcgc

SEQ ID NO: 5868997 - DNA, 25 bp, Homo sapien
tcacgccgtatcgggcgcggggggc

SEQ ID NO: 5868998 - DNA, 25 bp, Homo sapien
ccgccctatgcggggcgtcggggtc

SEQ ID NO: 5868999 - DNA, 25 bp, Homo sapien
gcgcggcgacgtaccgcggacggga

SEQ ID NO: 5869000 - DNA, 25 bp, Homo sapien
gcggacacccgtcgtaccgggccgc

SEQ ID NO: 5869001 - DNA, 25 bp, Homo sapien
acgcggcgatacgcggccgtcgcgc

SEQ ID NO: 5869002 - DNA, 25 bp, Homo sapien
cccgccctccgcggtcgacgaggga

SEQ ID NO: 5869003 - DNA, 25 bp, Homo sapien
ccccgtcgtcgcgctagcacccggc

SEQ ID NO: 5869004 - DNA, 25 bp, Homo sapien
ggggccgcgtataggccgagggggc

SEQ ID NO: 5869005 - DNA, 25 bp, Homo sapien
ggccgccctgtatcggcgagcccgg

SEQ ID NO: 5869006 - DNA, 25 bp, Homo sapien
gggcgttacgccggctcgggcctcc

SEQ ID NO: 5869007 - DNA, 25 bp, Homo sapien
ggcgtccgggtcgttgcgtcgccgc

SEQ ID NO: 5869008 - DNA, 25 bp, Homo sapien
gttggcgtgcgcccgttcgcggggg

SEQ ID NO: 5869009 - DNA, 25 bp, Homo sapien
cccggcgcgtacgcgcgatgggcag

SEQ ID NO: 5869010 - DNA, 25 bp, Homo sapien
cctgccgatcgaccgagcgccgcgg

SEQ ID NO: 5869011 - DNA, 25 bp, Homo sapien
gcgggtcccgcgttcgatggcgcgg

SEQ ID NO: 5869012 - DNA, 25 bp, Homo sapien
cccggcacggcacggcgtagaggcc

SEQ ID NO: 5869013 - DNA, 25 bp, Homo sapien
gcgcgtggcgtacgaccccgccagc

SEQ ID NO: 5869014 - DNA, 25 bp, Homo sapien
gagccgtcgtacggggtcgcgcgcg

SEQ ID NO: 5869015 - DNA, 25 bp, Homo sapien
ccctggagtaccgtccgcgcgcgcg

SEQ ID NO: 5869016 - DNA, 25 bp, Homo sapien
ggctgtggtagcgcggacggccccg

SEQ ID NO: 5869017 - DNA, 25 bp, Homo sapien
gccggccgttgcgcgtgcaccagcc

SEQ ID NO: 5869018 - DNA, 25 bp, Homo sapien
ggccgcgggttcgcgtaccgggagc

SEQ ID NO: 5869019 - DNA, 25 bp, Homo sapien
aggctggcgcccgtacgtccgcgcc

SEQ ID NO: 5869020 - DNA, 25 bp, Homo sapien
cgcgcgcgcggcatagtcggccctg

SEQ ID NO: 5869021 - DNA, 25 bp, Homo sapien
cccctcggatacgcgcggggcgtgg

SEQ ID NO: 5869022 - DNA, 25 bp, Homo sapien
gcctcggtcgcgtggcgacctgcgc

SEQ ID NO: 5869023 - DNA, 25 bp, Homo sapien
cccccagcgcgaccggtagcgcacc

SEQ ID NO: 5869024 - DNA, 25 bp, Homo sapien
ccgcgaggtcgtacggcggcgcgac

SEQ ID NO: 5869025 - DNA, 25 bp, Homo sapien
ccgggcggaactacgcgcgacgcgc

SEQ ID NO: 5869026 - DNA, 25 bp, Homo sapien
cgggcctcccgggcgcgtagtgagg

SEQ ID NO: 5869027 - DNA, 25 bp, Homo sapien
gcggcccggccggtcgatgggcctt

SEQ ID NO: 5869028 - DNA, 25 bp, Homo sapien
cggcccgcgggctacgcttgtcccg

SEQ ID NO: 5869029 - DNA, 25 bp, Homo sapien
ctccggtacgagcctgccgggcggc

SEQ ID NO: 5869030 - DNA, 25 bp, Homo sapien
cgggcggtatcgtgtcgcgcgccgc

SEQ ID NO: 5869031 - DNA, 25 bp, Homo sapien
cgcgggcccgtccgatacgtgccgg

SEQ ID NO: 5869032 - DNA, 25 bp, Homo sapien
gcgcccagggcgacggtcgggagct

SEQ ID NO: 5869033 - DNA, 25 bp, Homo sapien
gccgggcgcgtgatagggcggaggc

SEQ ID NO: 5869034 - DNA, 25 bp, Homo sapien
ccacgcgcaacgccgctacgggggg

SEQ ID NO: 5869035 - DNA, 25 bp, Homo sapien
ccggagccaggttcgcgagcggcgc

SEQ ID NO: 5869036 - DNA, 25 bp, Homo sapien
accggcgtcgttcgcgcgtgccgcc

SEQ ID NO: 5869037 - DNA, 25 bp, Homo sapien
gccgggtaccgagccggcgccgcaa

SEQ ID NO: 5869038 - DNA, 25 bp, Homo sapien
cgtgcgcgttcggcgctagcccgcg

SEQ ID NO: 5869039 - DNA, 25 bp, Homo sapien
cctgggcttggtcgcgcgtggcggc

SEQ ID NO: 5869040 - DNA, 25 bp, Homo sapien
ggcgctggtcgcgtcgacccggcga

SEQ ID NO: 5869041 - DNA, 25 bp, Homo sapien
gcccggccgtagtagcgcgccgggt

SEQ ID NO: 5869042 - DNA, 25 bp, Homo sapien
gtcggtgcgtgccgaccgagggggg

SEQ ID NO: 5869043 - DNA, 25 bp, Homo sapien
cccggtgcgcaagggccgtgccagc

SEQ ID NO: 5869044 - DNA, 25 bp, Homo sapien
actcgcggtccgtacgcgcgccgcg

SEQ ID NO: 5869045 - DNA, 25 bp, Homo sapien
gcgtcccgcgtaacgccggcccgga

SEQ ID NO: 5869046 - DNA, 25 bp, Homo sapien
gggccgcctccgtaacgcgtcgccg

SEQ ID NO: 5869047 - DNA, 25 bp, Homo sapien
gtcccgcggggtcgattcggcgggc

SEQ ID NO: 5869048 - DNA, 25 bp, Homo sapien
ccctggtcgcggaacgaccggccgc

SEQ ID NO: 5869049 - DNA, 25 bp, Homo sapien
gggccccgcggacaccgatgcccag

SEQ ID NO: 5869050 - DNA, 25 bp, Homo sapien
cggccctcgcggcgaacccctcgtc

SEQ ID NO: 5869051 - DNA, 25 bp, Homo sapien
ggacggcgggtcgcgtatgccgcgg

SEQ ID NO: 5869052 - DNA, 25 bp, Homo sapien
ggcggcagtggaccgtacggcggcc

SEQ ID NO: 5869053 - DNA, 25 bp, Homo sapien
ctcgccggtgcgacgtccggcctgc

SEQ ID NO: 5869054 - DNA, 25 bp, Homo sapien
cggcgcatagtcgcgccccggcgac

SEQ ID NO: 5869055 - DNA, 25 bp, Homo sapien
gagccccgcgttgcggcaagccggg

SEQ ID NO: 5869056 - DNA, 25 bp, Homo sapien
gccgtgcgcgtagatgcgcgcggcg

SEQ ID NO: 5869057 - DNA, 25 bp, Homo sapien
gcgccggaccgcggtcgacagcgtg

SEQ ID NO: 5869058 - DNA, 25 bp, Homo sapien
gggcccgatagcacgcccgcgggct

SEQ ID NO: 5869059 - DNA, 25 bp, Homo sapien
gccgctgtcgcgcgttacggcgggg

SEQ ID NO: 5869060 - DNA, 25 bp, Homo sapien
cgcggcagcccgcgactagggctgc

SEQ ID NO: 5869061 - DNA, 25 bp, Homo sapien
cgcggcgcgtcctatcgggacgccg

SEQ ID NO: 5869062 - DNA, 25 bp, Homo sapien
gcggccgtccgtgccggtaggcgtg

SEQ ID NO: 5869063 - DNA, 25 bp, Homo sapien
cggcaccggcgaccgtactgccggg

SEQ ID NO: 5869064 - DNA, 25 bp, Homo sapien
cgggcggcgctaccgtcgaccgacc

SEQ ID NO: 5869065 - DNA, 25 bp, Homo sapien
gggcggcccgacgcgagaccgaacg

SEQ ID NO: 5869066 - DNA, 25 bp, Homo sapien
gacggcgtacgtcgcgggtgccggg

SEQ ID NO: 5869067 - DNA, 25 bp, Homo sapien
ccggcccgtacgcgatccgccgagg

SEQ ID NO: 5869068 - DNA, 25 bp, Homo sapien
gccggccgtatcgggcgcgcaggcg

SEQ ID NO: 5869069 - DNA, 25 bp, Homo sapien
agcgggcggacgtcgcgtgcgccgc

SEQ ID NO: 5869070 - DNA, 25 bp, Homo sapien
gggcctagagcgcgtgcggccgcgc

SEQ ID NO: 5869071 - DNA, 25 bp, Homo sapien
ggccccgcgctacgggcgagcgcac

SEQ ID NO: 5869072 - DNA, 25 bp, Homo sapien
tccgccgctagcgcccggtgccggc

SEQ ID NO: 5869073 - DNA, 25 bp, Homo sapien
gcgcgctcggcgcaccgtcagccgc

SEQ ID NO: 5869074 - DNA, 25 bp, Homo sapien
cctcccacatcggggcgcgggcgcg

SEQ ID NO: 5869075 - DNA, 25 bp, Homo sapien
gccggccggacaacgcccggcaggc

SEQ ID NO: 5869076 - DNA, 25 bp, Homo sapien
ccgggctgggcgctacgcgacgccg

SEQ ID NO: 5869077 - DNA, 25 bp, Homo sapien
cgcacgcggcgggccgatggcagcc

SEQ ID NO: 5869078 - DNA, 25 bp, Homo sapien
cagccagtccgccgccgggcacgcg

SEQ ID NO: 5869079 - DNA, 25 bp, Homo sapien
cagccgaacccgtcgcggggcccgc

SEQ ID NO: 5869080 - DNA, 25 bp, Homo sapien
gcgcgccacgtatcgcgcggggcgc

SEQ ID NO: 5869081 - DNA, 25 bp, Homo sapien
cgtcccggtccggacgagccggcgc

SEQ ID NO: 5869082 - DNA, 25 bp, Homo sapien
ggcgcgcgatatccgcgccgcgggc

SEQ ID NO: 5869083 - DNA, 25 bp, Homo sapien
gcccgccgcgcgggcgatagccgct

SEQ ID NO: 5869084 - DNA, 25 bp, Homo sapien
ggaggctgaccccgtccggccggcg

SEQ ID NO: 5869085 - DNA, 25 bp, Homo sapien
cgcgggggtcgtacgcgctgggccc

SEQ ID NO: 5869086 - DNA, 25 bp, Homo sapien
gcctggcgcgcgtacgtcggggcgc

SEQ ID NO: 5869087 - DNA, 25 bp, Homo sapien
gtgcccacgcaggcgtcgcggggcc

SEQ ID NO: 5869088 - DNA, 25 bp, Homo sapien
gcgccgacgcgtcgaccgggtgggc

SEQ ID NO: 5869089 - DNA, 25 bp, Homo sapien
agaccgcgccggtcgggcgccgacc

SEQ ID NO: 5869090 - DNA, 25 bp, Homo sapien
tgccgctcggtccgtcccgcgcggg

SEQ ID NO: 5869091 - DNA, 25 bp, Homo sapien
gcgccccgtcccgatcggctgcccg

SEQ ID NO: 5869092 - DNA, 25 bp, Homo sapien
cgggccgcgccttcgcgacgcctgc

SEQ ID NO: 5869093 - DNA, 25 bp, Homo sapien
gccgccacgacgcacgggccccacc

SEQ ID NO: 5869094 - DNA, 25 bp, Homo sapien
gccgggttgcgcgggaggcccgcag

SEQ ID NO: 5869095 - DNA, 25 bp, Homo sapien
cccgcctaccgtccgacgcgcccgc

SEQ ID NO: 5869096 - DNA, 25 bp, Homo sapien
cccgcggtgccgttcgcggccgcgt

SEQ ID NO: 5869097 - DNA, 25 bp, Homo sapien
gccgaccagcccgcgttgccgcccg

SEQ ID NO: 5869098 - DNA, 25 bp, Homo sapien
tccgcacgccgctcggggggctccc

SEQ ID NO: 5869099 - DNA, 25 bp, Homo sapien
acgcatcgtccgggcgcgccgccgg

SEQ ID NO: 5869100 - DNA, 25 bp, Homo sapien
cgccccgcgtaccggcccgctcgac

SEQ ID NO: 5869101 - DNA, 25 bp, Homo sapien
ggcgtctcacgcgtcgcgggccgcc

SEQ ID NO: 5869102 - DNA, 25 bp, Homo sapien
cctggcaggcggcgtacccgcgggg

SEQ ID NO: 5869103 - DNA, 25 bp, Homo sapien
ggcggcgcggcgggccttcaggtcc

SEQ ID NO: 5869104 - DNA, 25 bp, Homo sapien
ccgggcccgcggcaccgtaggtgcc

SEQ ID NO: 5869105 - DNA, 25 bp, Homo sapien
gccccggttcgcgaccgcggcggct

SEQ ID NO: 5869106 - DNA, 25 bp, Homo sapien
gccgctacgggcaccggcccccctg

SEQ ID NO: 5869107 - DNA, 25 bp, Homo sapien
gtgtctgggcgcgcccggcagcccg

SEQ ID NO: 5869108 - DNA, 25 bp, Homo sapien
cccagcccccccgatgcgtgcgggg

SEQ ID NO: 5869109 - DNA, 25 bp, Homo sapien
gcggtgcggcgtgcccgtagggggg

SEQ ID NO: 5869110 - DNA, 25 bp, Homo sapien
cgcgcggaacgcgtaccggccgcgc

SEQ ID NO: 5869111 - DNA, 25 bp, Homo sapien
ggcctgcgcgtctagcgcgccggcg

SEQ ID NO: 5869112 - DNA, 25 bp, Homo sapien
tcgggcccgcgctcgtcggcgcgag

SEQ ID NO: 5869113 - DNA, 25 bp, Homo sapien
aggcggtacgggcacgccgcgcgcc

SEQ ID NO: 5869114 - DNA, 25 bp, Homo sapien
gggggcacgcgtcggcggctggagg

SEQ ID NO: 5869115 - DNA, 25 bp, Homo sapien
gggcgccggactaggcgcgccggca

SEQ ID NO: 5869116 - DNA, 25 bp, Homo sapien
gggagatgcgggtcggcccggcgcg

SEQ ID NO: 5869117 - DNA, 25 bp, Homo sapien
ccggcgcgtcgcgaccgtccgagcc

SEQ ID NO: 5869118 - DNA, 25 bp, Homo sapien
gcccggctcgcatcgcgcggctcgc

SEQ ID NO: 5869119 - DNA, 25 bp, Homo sapien
cgccgagcgcgtatcgggggccccg

SEQ ID NO: 5869120 - DNA, 25 bp, Homo sapien
cgagcggcgccccgtacggccgtcg

SEQ ID NO: 5869121 - DNA, 25 bp, Homo sapien
accgccgcgtgacgcgccaccgggc

SEQ ID NO: 5869122 - DNA, 25 bp, Homo sapien
agcgggtccgcgcggcgtacgcggc

SEQ ID NO: 5869123 - DNA, 25 bp, Homo sapien
ggtcagccacccgcgggtcgccccg

SEQ ID NO: 5869124 - DNA, 25 bp, Homo sapien
tggcgtccccgctacgcggggcgcc

SEQ ID NO: 5869125 - DNA, 25 bp, Homo sapien
accgcgcgcgtcgcgaaggcccgcg

SEQ ID NO: 5869126 - DNA, 25 bp, Homo sapien
cgagcgacggcgctcgcgagcgcgc

SEQ ID NO: 5869127 - DNA, 25 bp, Homo sapien
cacggcgacgcccgccagcgcgagc

SEQ ID NO: 5869128 - DNA, 25 bp, Homo sapien
ccgcgccgcgatacgccggtggcgc

SEQ ID NO: 5869129 - DNA, 25 bp, Homo sapien
gccgagcgcgccgaaacgccccgcg

SEQ ID NO: 5869130 - DNA, 25 bp, Homo sapien
gcagggtgaccggtcgcgccgcccc

SEQ ID NO: 5869131 - DNA, 25 bp, Homo sapien
gggccctcgcacggaccgtggcggc

SEQ ID NO: 5869132 - DNA, 25 bp, Homo sapien
gccggcacgggcgtacgcgtcggcc

SEQ ID NO: 5869133 - DNA, 25 bp, Homo sapien
ggcccccgggcggccgatcgctcga

SEQ ID NO: 5869134 - DNA, 25 bp, Homo sapien
gaggccccccgtcgggcgagagcgc

SEQ ID NO: 5869135 - DNA, 25 bp, Homo sapien
accgcgcgaccgcgtggcggccagc

SEQ ID NO: 5869136 - DNA, 25 bp, Homo sapien
ccgggcccggcgtacgatgccgccg

SEQ ID NO: 5869137 - DNA, 25 bp, Homo sapien
gcggcgtccggccgcgctagctcgc

SEQ ID NO: 5869138 - DNA, 25 bp, Homo sapien
ggcgcctagcgcaccggggtcccgc

SEQ ID NO: 5869139 - DNA, 25 bp, Homo sapien
cgcggggttgcgcgccgtcgcgcca

SEQ ID NO: 5869140 - DNA, 25 bp, Homo sapien
cgctcgggcccgtcgaacgcgcccg

SEQ ID NO: 5869141 - DNA, 25 bp, Homo sapien
ccggcgccgcgacgtacggtcggcc

SEQ ID NO: 5869142 - DNA, 25 bp, Homo sapien
cccgggctacgtcgcggccgcgcca

SEQ ID NO: 5869143 - DNA, 25 bp, Homo sapien
cgcggtggcccgttgcgaccgcggg

SEQ ID NO: 5869144 - DNA, 25 bp, Homo sapien
gcccactcggtccgcgcgagccgcc

SEQ ID NO: 5869145 - DNA, 25 bp, Homo sapien
gccgccccccgcgtcgacactcccc

SEQ ID NO: 5869146 - DNA, 25 bp, Homo sapien
ccgcgcacgcggtcgacggctgccc

SEQ ID NO: 5869147 - DNA, 25 bp, Homo sapien
ggcaggcgcgtccggtacgcgccgg

SEQ ID NO: 5869148 - DNA, 25 bp, Homo sapien
ggggccatggcgcggtcgacccccg

SEQ ID NO: 5869149 - DNA, 25 bp, Homo sapien
gccgcgtacgcggcgcgagggcgtc

SEQ ID NO: 5869150 - DNA, 25 bp, Homo sapien
gcccgcgcgaccggattcgccgggc

SEQ ID NO: 5869151 - DNA, 25 bp, Homo sapien
gcccgctccgacggtcgccacgccc

SEQ ID NO: 5869152 - DNA, 25 bp, Homo sapien
ggcgccgacgtcctccctcgcgcgc

SEQ ID NO: 5869153 - DNA, 25 bp, Homo sapien
gcccccgacggcccatcgccaggcg

SEQ ID NO: 5869154 - DNA, 25 bp, Homo sapien
ggggggggcgcgccgtactgacgcg

SEQ ID NO: 5869155 - DNA, 25 bp, Homo sapien
cccgccctacgtcggcgggcgcgga

SEQ ID NO: 5869156 - DNA, 25 bp, Homo sapien
ggccgaccgaccgacgcggcgccgt

SEQ ID NO: 5869157 - DNA, 25 bp, Homo sapien
tccgggggcggtctagcgccgggcg

SEQ ID NO: 5869158 - DNA, 25 bp, Homo sapien
cctggccgggacgtacgcgggcggc

SEQ ID NO: 5869159 - DNA, 25 bp, Homo sapien
ccgcagcggtcgtacggcgcccgcg

SEQ ID NO: 5869160 - DNA, 25 bp, Homo sapien
gcggtgccgaggcggcccgtacgcg

SEQ ID NO: 5869161 - DNA, 25 bp, Homo sapien
ccgcgccgggtcgggacgtgagccc

SEQ ID NO: 5869162 - DNA, 25 bp, Homo sapien
gccgcgggccgtcgtacggggcgga

SEQ ID NO: 5869163 - DNA, 25 bp, Homo sapien
ccgccggcatcacccggcgccggag

SEQ ID NO: 5869164 - DNA, 25 bp, Homo sapien
gcgccggtagcacgccgcggcgtgg

SEQ ID NO: 5869165 - DNA, 25 bp, Homo sapien
cagaccgacgcgccaccggccgggc

SEQ ID NO: 5869166 - DNA, 25 bp, Homo sapien
gcccggtcgcgcgtcgtcccgacgc

SEQ ID NO: 5869167 - DNA, 25 bp, Homo sapien
ggaggggctacgcgtccgcggcgcc

SEQ ID NO: 5869168 - DNA, 25 bp, Homo sapien
ccgccgctggcgcggtaccggcgga

SEQ ID NO: 5869169 - DNA, 25 bp, Homo sapien
cggccgcggtcgggacgaccctgcg

SEQ ID NO: 5869170 - DNA, 25 bp, Homo sapien
ccggcctcgcgcgtccgactggcgg

SEQ ID NO: 5869171 - DNA, 25 bp, Homo sapien
ccggtggcgcgtaccccgtgggcgc

SEQ ID NO: 5869172 - DNA, 25 bp, Homo sapien
agcccccccggcgtatcgcgcgcgg

SEQ ID NO: 5869173 - DNA, 25 bp, Homo sapien
gcacgcccccgtacggtcgcgggcc

SEQ ID NO: 5869174 - DNA, 25 bp, Homo sapien
ccgggggacgcgcggtcgtgccagg

SEQ ID NO: 5869175 - DNA, 25 bp, Homo sapien
cgcggcgtgcgcctacggacccccg

SEQ ID NO: 5869176 - DNA, 25 bp, Homo sapien
cgcaccccgccgcggttaggcgcgc

SEQ ID NO: 5869177 - DNA, 25 bp, Homo sapien
gccccgcgcgcaacggcctgggagg

SEQ ID NO: 5869178 - DNA, 25 bp, Homo sapien
cggggcgggtgcgcgacgagcgacg

SEQ ID NO: 5869179 - DNA, 25 bp, Homo sapien
cgtcgcacgcgcgtcgggagcgccc

SEQ ID NO: 5869180 - DNA, 25 bp, Homo sapien
tcgcgccgctacggcgcgtcggccg

SEQ ID NO: 5869181 - DNA, 25 bp, Homo sapien
ggcggcggccgaccgtacgcgacgc

SEQ ID NO: 5869182 - DNA, 25 bp, Homo sapien
gcgcggccaaccgcgcgtccaccgg

SEQ ID NO: 5869183 - DNA, 25 bp, Homo sapien
gcgccgtaccccgcgacgaggcgcc

SEQ ID NO: 5869184 - DNA, 25 bp, Homo sapien
ccgccccgaccggtaggcgctgcgc

SEQ ID NO: 5869185 - DNA, 25 bp, Homo sapien
ccgcggccgacgcaccgtcacccgg

SEQ ID NO: 5869186 - DNA, 25 bp, Homo sapien
gggccgcgcgcgacgagtacgcgcc

SEQ ID NO: 5869187 - DNA, 25 bp, Homo sapien
cggccccgccgaatggtcgcgcggg

SEQ ID NO: 5869188 - DNA, 25 bp, Homo sapien
agaccccgcgacccgtggggcgcgc

SEQ ID NO: 5869189 - DNA, 25 bp, Homo sapien
cctggcgtccgatcgcgccgccccc

SEQ ID NO: 5869190 - DNA, 25 bp, Homo sapien
gccggcggccgatacgcggggggca

SEQ ID NO: 5869191 - DNA, 25 bp, Homo sapien
cgcactaccccgtcgcggcggccgg

SEQ ID NO: 5869192 - DNA, 25 bp, Homo sapien
cgcctgcggccgcggtacgggctgg

SEQ ID NO: 5869193 - DNA, 25 bp, Homo sapien
ggcgccgcgtcgcgtacggacccgc

SEQ ID NO: 5869194 - DNA, 25 bp, Homo sapien
gcgggcggcgcgtaaggtcccgggc

SEQ ID NO: 5869195 - DNA, 25 bp, Homo sapien
gccgggtcgcgcaacggcccctccc

SEQ ID NO: 5869196 - DNA, 25 bp, Homo sapien
ggcgcgcgacgcccgtaccgcagcg

SEQ ID NO: 5869197 - DNA, 25 bp, Homo sapien
ggggcgcgggacgaccgcacgctcg

SEQ ID NO: 5869198 - DNA, 25 bp, Homo sapien
cggccgacggctcgatgcgcccggg

SEQ ID NO: 5869199 - DNA, 25 bp, Homo sapien
gccccgcggaccgacgcatcccggg

SEQ ID NO: 5869200 - DNA, 25 bp, Homo sapien
gccgcgaacgctcgaccggcccgcc

SEQ ID NO: 5869201 - DNA, 25 bp, Homo sapien
tgccacccggtacgggccgcggggc

SEQ ID NO: 5869202 - DNA, 25 bp, Homo sapien
gcgccccgccgatacagggcgcccc

SEQ ID NO: 5869203 - DNA, 25 bp, Homo sapien
ctcgcctcaccggccgtcgcggccg

SEQ ID NO: 5869204 - DNA, 25 bp, Homo sapien
cgcccggcgtctcgcctcggcgagg

SEQ ID NO: 5869205 - DNA, 25 bp, Homo sapien
gggggcagcgcggtcccgtgggcga

SEQ ID NO: 5869206 - DNA, 25 bp, Homo sapien
gcggacgagtcgcgccagcccggcc

SEQ ID NO: 5869207 - DNA, 25 bp, Homo sapien
ggggggcgcgcggtatgccccaggc

SEQ ID NO: 5869208 - DNA, 25 bp, Homo sapien
gctccggctacgtcgcggcggcccg

SEQ ID NO: 5869209 - DNA, 25 bp, Homo sapien
ggctccatacccgcgcgccccccgc

SEQ ID NO: 5869210 - DNA, 25 bp, Homo sapien
gcgccgagcgccccgtcgtgggtcc

SEQ ID NO: 5869211 - DNA, 25 bp, Homo sapien
cgcggccatgcgcccgacgccggca

SEQ ID NO: 5869212 - DNA, 25 bp, Homo sapien
ccactgcgcccgggaccgcgctcgg

SEQ ID NO: 5869213 - DNA, 25 bp, Homo sapien
ggccgcaatcgcgcgctggggcccc

SEQ ID NO: 5869214 - DNA, 25 bp, Homo sapien
ggcgaccggtcgacgtgcggggcgg

SEQ ID NO: 5869215 - DNA, 25 bp, Homo sapien
cgcggcctggcgcgcatcgcccgtc

SEQ ID NO: 5869216 - DNA, 25 bp, Homo sapien
ccggccccggcggagctgcacaggg

SEQ ID NO: 5869217 - DNA, 25 bp, Homo sapien
gtccgcgtcgggccgcgatggccgg

SEQ ID NO: 5869218 - DNA, 25 bp, Homo sapien
ggcctgtcgtaccgcggccggcccg

SEQ ID NO: 5869219 - DNA, 25 bp, Homo sapien
caggctggcgtacccgcgggggcgg

SEQ ID NO: 5869220 - DNA, 25 bp, Homo sapien
cgggcgcgtcgcgtacgccgaggcg

SEQ ID NO: 5869221 - DNA, 25 bp, Homo sapien
cggggccgtacggccgagccgcagg

SEQ ID NO: 5869222 - DNA, 25 bp, Homo sapien
gcaggccgccctcgaccgaggcccg

SEQ ID NO: 5869223 - DNA, 25 bp, Homo sapien
cccgggcccgcgagcgtacgaggcc

SEQ ID NO: 5869224 - DNA, 25 bp, Homo sapien
cgcccctggcccgtacgcggcgctg

SEQ ID NO: 5869225 - DNA, 25 bp, Homo sapien
cgggcgcggtcgtacgcgcgagcgg

SEQ ID NO: 5869226 - DNA, 25 bp, Homo sapien
cgagccgcggccgagtgcgcgaccg

SEQ ID NO: 5869227 - DNA, 25 bp, Homo sapien
ggggcccgtagggcgcacggcgagc

SEQ ID NO: 5869228 - DNA, 25 bp, Homo sapien
tccggcccccggcgtacgtggcggc

SEQ ID NO: 5869229 - DNA, 25 bp, Homo sapien
ggcccggtccgcgcgacaccgcacc

SEQ ID NO: 5869230 - DNA, 25 bp, Homo sapien
gcgcggacggacaccgcgctccggc

SEQ ID NO: 5869231 - DNA, 25 bp, Homo sapien
gcgaggcgtgcccggtacgcgggcc

SEQ ID NO: 5869232 - DNA, 25 bp, Homo sapien
gcggcgggtttcgcgcgcacggccc

SEQ ID NO: 5869233 - DNA, 25 bp, Homo sapien
cgcaggcgcacgccccgtacgggcg

SEQ ID NO: 5869234 - DNA, 25 bp, Homo sapien
gcaccgccgtcgtaggcgccggggc

SEQ ID NO: 5869235 - DNA, 25 bp, Homo sapien
gccgccccgtcggacggctcccgca

SEQ ID NO: 5869236 - DNA, 25 bp, Homo sapien
gccctgggtcgcgtacggcggcggg

SEQ ID NO: 5869237 - DNA, 25 bp, Homo sapien
ggggccgacggcccgagagccggca

SEQ ID NO: 5869238 - DNA, 25 bp, Homo sapien
gcgccgcgtagggggtcgccggcct

SEQ ID NO: 5869239 - DNA, 25 bp, Homo sapien
ccccgggtacgcgcgtccgcggcca

SEQ ID NO: 5869240 - DNA, 25 bp, Homo sapien
gggggcctggcgcgcgctagtcggc

SEQ ID NO: 5869241 - DNA, 25 bp, Homo sapien
gccgaccgatgcgaccggccggccc

SEQ ID NO: 5869242 - DNA, 25 bp, Homo sapien
cgcacccccggcggtacgaccgcgc

SEQ ID NO: 5869243 - DNA, 25 bp, Homo sapien
gcgcgccgcatcgcgctaggcgccg

SEQ ID NO: 5869244 - DNA, 25 bp, Homo sapien
cgcccgcccaagcggtccgccaggg

SEQ ID NO: 5869245 - DNA, 25 bp, Homo sapien
cgggggcgtcgtgcgacaggccggg

SEQ ID NO: 5869246 - DNA, 25 bp, Homo sapien
ccgccctcacgccgcgtaggccggc

SEQ ID NO: 5869247 - DNA, 25 bp, Homo sapien
cgggccacgggtcgcgcaccccgct

SEQ ID NO: 5869248 - DNA, 25 bp, Homo sapien
cccccgccgtacgcgcgtctggcgg

SEQ ID NO: 5869249 - DNA, 25 bp, Homo sapien
gcgcgcgtacgttcgcggccgccgc

SEQ ID NO: 5869250 - DNA, 25 bp, Homo sapien
cgccgtcgccaggacgccggacccg

SEQ ID NO: 5869251 - DNA, 25 bp, Homo sapien
cgttccgctcgcggcgcagccgggg

SEQ ID NO: 5869252 - DNA, 25 bp, Homo sapien
cgggcggtacgcccgcgctgcgtcc

SEQ ID NO: 5869253 - DNA, 25 bp, Homo sapien
cccgggccgcgagcgatgtcggccg

SEQ ID NO: 5869254 - DNA, 25 bp, Homo sapien
gccggccgcggattgagcccgcgcg

SEQ ID NO: 5869255 - DNA, 25 bp, Homo sapien
cgcgccgtcgcgccgtacggccacg

SEQ ID NO: 5869256 - DNA, 25 bp, Homo sapien
cgccaggcgtacgggacgcccggcg

SEQ ID NO: 5869257 - DNA, 25 bp, Homo sapien
ggccgggttgacgcgccccaggcgg

SEQ ID NO: 5869258 - DNA, 25 bp, Homo sapien
cgcagggctagcgcgcgacccgcgc

SEQ ID NO: 5869259 - DNA, 25 bp, Homo sapien
ggcgcacgtgccggcggtagcccgc

SEQ ID NO: 5869260 - DNA, 25 bp, Homo sapien
gggcgcgcgtgccggtcgaggaccc

SEQ ID NO: 5869261 - DNA, 25 bp, Homo sapien
gagcaggcggcgtgccgcgtgccgc

SEQ ID NO: 5869262 - DNA, 25 bp, Homo sapien
cggaggctaaccggcgcgcggcggg

SEQ ID NO: 5869263 - DNA, 25 bp, Homo sapien
cccgcccgcgcgtacggagcgggac

SEQ ID NO: 5869264 - DNA, 25 bp, Homo sapien
cgcgcgcccgtaacgcgggcccgca

SEQ ID NO: 5869265 - DNA, 25 bp, Homo sapien
ggcgccacgcgcccgtaccggccga

SEQ ID NO: 5869266 - DNA, 25 bp, Homo sapien
ggggccggcgcgcgttacgtgccgg

SEQ ID NO: 5869267 - DNA, 25 bp, Homo sapien
cccccgcctatcgcgacggcgcgcg

SEQ ID NO: 5869268 - DNA, 25 bp, Homo sapien
gcccactccggtccgcgacccggcg

SEQ ID NO: 5869269 - DNA, 25 bp, Homo sapien
gcccgccctctcgcgcgaggggcct

SEQ ID NO: 5869270 - DNA, 25 bp, Homo sapien
ggagcggacgtcgcccggacccgcg

SEQ ID NO: 5869271 - DNA, 25 bp, Homo sapien
aggcgccggggtgcgtcgacccgcg

SEQ ID NO: 5869272 - DNA, 25 bp, Homo sapien
cgcgggaggcgcgatccgagcgccg

SEQ ID NO: 5869273 - DNA, 25 bp, Homo sapien
cgcccctcgcgtaggcgctcgcgcg

SEQ ID NO: 5869274 - DNA, 25 bp, Homo sapien
gcccgggcccgcggcatacgcctgg

SEQ ID NO: 5869275 - DNA, 25 bp, Homo sapien
gccccccgcaacggcgcgtgcgacc

SEQ ID NO: 5869276 - DNA, 25 bp, Homo sapien
gggaggcgtccgacaccgccccgcc

SEQ ID NO: 5869277 - DNA, 25 bp, Homo sapien
ggccgctcggcgaccgtacgggcgc

SEQ ID NO: 5869278 - DNA, 25 bp, Homo sapien
cgcgcccgcgggtcgttcggcggga

SEQ ID NO: 5869279 - DNA, 25 bp, Homo sapien
gcggaagcgccggcaggcgcgaggc

SEQ ID NO: 5869280 - DNA, 25 bp, Homo sapien
gcgctcgccggtatgcggccgggcc

SEQ ID NO: 5869281 - DNA, 25 bp, Homo sapien
gccccgaccggtccgtcggcaggcc

SEQ ID NO: 5869282 - DNA, 25 bp, Homo sapien
cccctccgactaccgcgcgggcgcg

SEQ ID NO: 5869283 - DNA, 25 bp, Homo sapien
gccccggtcgctccggcgtcggtgg

SEQ ID NO: 5869284 - DNA, 25 bp, Homo sapien
gcccccgcgtaagcgggcccgcgca

SEQ ID NO: 5869285 - DNA, 25 bp, Homo sapien
cgcctgcgggcgccttacgccgcgc

SEQ ID NO: 5869286 - DNA, 25 bp, Homo sapien
gcccggcgtccgacggatggcccgc

SEQ ID NO: 5869287 - DNA, 25 bp, Homo sapien
gcgcgggtacggcgggtcgcgagcg

SEQ ID NO: 5869288 - DNA, 25 bp, Homo sapien
gcgcggaccccgcgcgattccggcg

SEQ ID NO: 5869289 - DNA, 25 bp, Homo sapien
ggggcccgggtgcgctactcgggcg

SEQ ID NO: 5869290 - DNA, 25 bp, Homo sapien
ccgctcgtcgcgcgggctacgggcc

SEQ ID NO: 5869291 - DNA, 25 bp, Homo sapien
ccggccccccgcgatcgacgaggcc

SEQ ID NO: 5869292 - DNA, 25 bp, Homo sapien
ccgcgcggtccgaagcgcgcaggcg

SEQ ID NO: 5869293 - DNA, 25 bp, Homo sapien
gggcggcgtcgcgcataggcggggc

SEQ ID NO: 5869294 - DNA, 25 bp, Homo sapien
cgcgaccggttagcggcgcgggcgg

SEQ ID NO: 5869295 - DNA, 25 bp, Homo sapien
cgtaggccccggtgcgtcgcgggcg

SEQ ID NO: 5869296 - DNA, 25 bp, Homo sapien
cggcccgcctacgcgacgcgctcgg

SEQ ID NO: 5869297 - DNA, 25 bp, Homo sapien
gccgcgacgacgggcgtcggagcgc

SEQ ID NO: 5869298 - DNA, 25 bp, Homo sapien
gacccgtacgggcgtcgcgccgcgg

SEQ ID NO: 5869299 - DNA, 25 bp, Homo sapien
cgggccatgcgcgtaccgcggccgc

SEQ ID NO: 5869300 - DNA, 25 bp, Homo sapien
ccgcggatcgcggtcgagcgggcgg

SEQ ID NO: 5869301 - DNA, 25 bp, Homo sapien
ggcccagccgcggtatgccggccgc

SEQ ID NO: 5869302 - DNA, 25 bp, Homo sapien
cgccccaccggaggcgagcccgcct

SEQ ID NO: 5869303 - DNA, 25 bp, Homo sapien
cggggcaggaccgccgcgacgaccc

SEQ ID NO: 5869304 - DNA, 25 bp, Homo sapien
gcggcgccccgcgacgtaggccctg

SEQ ID NO: 5869305 - DNA, 25 bp, Homo sapien
gcggaggcggtacgtcgcggccgcc

SEQ ID NO: 5869306 - DNA, 25 bp, Homo sapien
gcccgggcgcggttacgaggcgccg

SEQ ID NO: 5869307 - DNA, 25 bp, Homo sapien
gccggggtcgcgtccgacggaggcg

SEQ ID NO: 5869308 - DNA, 25 bp, Homo sapien
gcgccctacccgcggcgaagcgcgg

SEQ ID NO: 5869309 - DNA, 25 bp, Homo sapien
gagccctagcgcgcggcagggcggg

SEQ ID NO: 5869310 - DNA, 25 bp, Homo sapien
cgggcgggcggccgtacgcggtcac

SEQ ID NO: 5869311 - DNA, 25 bp, Homo sapien
gggccctacggtgcgccgtgcgcgg

SEQ ID NO: 5869312 - DNA, 25 bp, Homo sapien
gccgcccgtgtcgcgacggcccgtg

SEQ ID NO: 5869313 - DNA, 25 bp, Homo sapien
gggctgcccgatcgtgccgccccgc

SEQ ID NO: 5869314 - DNA, 25 bp, Homo sapien
gagtcgctcggggcggcaccccccc

SEQ ID NO: 5869315 - DNA, 25 bp, Homo sapien
ggctcgacgcgtcgtcccggcgccg

SEQ ID NO: 5869316 - DNA, 25 bp, Homo sapien
ccgccccgttgagcggaccgcccgc

SEQ ID NO: 5869317 - DNA, 25 bp, Homo sapien
ctagcggccggttcgcgcgggggcc

SEQ ID NO: 5869318 - DNA, 25 bp, Homo sapien
ggcggccgccccgtatcgggctgcg

SEQ ID NO: 5869319 - DNA, 25 bp, Homo sapien
cggccggccggtcggtacgctgggc

SEQ ID NO: 5869320 - DNA, 25 bp, Homo sapien
ggcaggaatccgcgggcgccgggcg

SEQ ID NO: 5869321 - DNA, 25 bp, Homo sapien
tgggctcgggacgacggcggccggg

SEQ ID NO: 5869322 - DNA, 25 bp, Homo sapien
tccgcgacggcgcgacctgcccccc

SEQ ID NO: 5869323 - DNA, 25 bp, Homo sapien
tcccgcggactgaccggcccgccgc

SEQ ID NO: 5869324 - DNA, 25 bp, Homo sapien
gccggcgtatccgaccgcgggggcc

SEQ ID NO: 5869325 - DNA, 25 bp, Homo sapien
gcgccccgccgcgtacgatcggggg

SEQ ID NO: 5869326 - DNA, 25 bp, Homo sapien
cccggctaccgctcggtcgcgccgc

SEQ ID NO: 5869327 - DNA, 25 bp, Homo sapien
ggcccccgaccgtgcgcgaacccgc

SEQ ID NO: 5869328 - DNA, 25 bp, Homo sapien
cgcacgcgcggtcgtacgcggcggg

SEQ ID NO: 5869329 - DNA, 25 bp, Homo sapien
cgccctcgcggaccgtcgtcgcggc

SEQ ID NO: 5869330 - DNA, 25 bp, Homo sapien
caggccgccgcgcgtcggcacaccc

SEQ ID NO: 5869331 - DNA, 25 bp, Homo sapien
cgccggcgtaccgggcacggtggcc

SEQ ID NO: 5869332 - DNA, 25 bp, Homo sapien
ccgcgcacgcggcgacacgcccacg

SEQ ID NO: 5869333 - DNA, 25 bp, Homo sapien
gcgcccgcgactagcgccgtccggc

SEQ ID NO: 5869334 - DNA, 25 bp, Homo sapien
gcgcccacggtactgcgcggggggc

SEQ ID NO: 5869335 - DNA, 25 bp, Homo sapien
gccgcggttacgcgagcccgccgcg

SEQ ID NO: 5869336 - DNA, 25 bp, Homo sapien
gaggcgaccggtcgcccgacgccgc

SEQ ID NO: 5869337 - DNA, 25 bp, Homo sapien
cggcccggtcgacgcgtcagcgccg

SEQ ID NO: 5869338 - DNA, 25 bp, Homo sapien
gccgcgcgtacggtcgggcgcgctg

SEQ ID NO: 5869339 - DNA, 25 bp, Homo sapien
ggcgggcgtcggacatcgcggggcc

SEQ ID NO: 5869340 - DNA, 25 bp, Homo sapien
ggcgggcgtaccggcgcgagggacc

SEQ ID NO: 5869341 - DNA, 25 bp, Homo sapien
ccacccgcgtcgtgcggacgggcgg

SEQ ID NO: 5869342 - DNA, 25 bp, Homo sapien
cggggatacgccgcgcggagcgccc

SEQ ID NO: 5869343 - DNA, 25 bp, Homo sapien
cctggccgtatgccggccgcccccc

SEQ ID NO: 5869344 - DNA, 25 bp, Homo sapien
cgacgcgcgccgtcccgtagcgccg

SEQ ID NO: 5869345 - DNA, 25 bp, Homo sapien
cagccgcggacggtacgccggcccc

SEQ ID NO: 5869346 - DNA, 25 bp, Homo sapien
cgcccgtaccgcgtcgcacggcccc

SEQ ID NO: 5869347 - DNA, 25 bp, Homo sapien
ccggggccggcgcgatctagcgcgc

SEQ ID NO: 5869348 - DNA, 25 bp, Homo sapien
gtgggcccggaccgcgcgtgccgac

SEQ ID NO: 5869349 - DNA, 25 bp, Homo sapien
ggccgagcgactacgcgccggcggc

SEQ ID NO: 5869350 - DNA, 25 bp, Homo sapien
gcccggcccgcgcgtatggctcggg

SEQ ID NO: 5869351 - DNA, 25 bp, Homo sapien
ggggccatagcggacggcgcgccgc

SEQ ID NO: 5869352 - DNA, 25 bp, Homo sapien
gcgggcaacgggcgtcgcggtgggc

SEQ ID NO: 5869353 - DNA, 25 bp, Homo sapien
ccgcccccgcggcaacggtagccgc

SEQ ID NO: 5869354 - DNA, 25 bp, Homo sapien
cccgggcgcgtcgcgctacgtccgc

SEQ ID NO: 5869355 - DNA, 25 bp, Homo sapien
gggcggcggacggcggttgcccgac

SEQ ID NO: 5869356 - DNA, 25 bp, Homo sapien
tgggggcgcgtacgcccgtgcccgg

SEQ ID NO: 5869357 - DNA, 25 bp, Homo sapien
gctggacatgccgcgccggcccggc

SEQ ID NO: 5869358 - DNA, 25 bp, Homo sapien
ccccgcgggcgtatcgcgtccggcg

SEQ ID NO: 5869359 - DNA, 25 bp, Homo sapien
ggcccccgtgacggaccgcgcctcc

SEQ ID NO: 5869360 - DNA, 25 bp, Homo sapien
gtgcggcgtcgaccgctcgccgcgg

SEQ ID NO: 5869361 - DNA, 25 bp, Homo sapien
ctgacgcccgcgagccctcgccggg

SEQ ID NO: 5869362 - DNA, 25 bp, Homo sapien
ggcccccgggcgtacgcgtgacggc

SEQ ID NO: 5869363 - DNA, 25 bp, Homo sapien
cgcgaggcgtccgaggccgcgcagc

SEQ ID NO: 5869364 - DNA, 25 bp, Homo sapien
gggcgtgggctaaccgcgccgcgcc

SEQ ID NO: 5869365 - DNA, 25 bp, Homo sapien
ggccccggtcgaccggcagcgcgac

SEQ ID NO: 5869366 - DNA, 25 bp, Homo sapien
ctcccgcgcgtaacgccggggccgc

SEQ ID NO: 5869367 - DNA, 25 bp, Homo sapien
ccccgaggaccgctcccggctggcg

SEQ ID NO: 5869368 - DNA, 25 bp, Homo sapien
cccgctcgcggccgcgtatggcggg

SEQ ID NO: 5869369 - DNA, 25 bp, Homo sapien
cgggcgcgacgcgaaccggcacccc

SEQ ID NO: 5869370 - DNA, 25 bp, Homo sapien
ccgccctcgcggcgaacccgccgag

SEQ ID NO: 5869371 - DNA, 25 bp, Homo sapien
ccggcccgatacggccgcaccgcgg

SEQ ID NO: 5869372 - DNA, 25 bp, Homo sapien
tcgcccccggcgggacgtagcgccg

SEQ ID NO: 5869373 - DNA, 25 bp, Homo sapien
gggccctccaccggccgcgtcgtcg

SEQ ID NO: 5869374 - DNA, 25 bp, Homo sapien
cggcgtcggcgtcggtacgcgccgc

SEQ ID NO: 5869375 - DNA, 25 bp, Homo sapien
ccgggggtcggacgcgcgacgcagc

SEQ ID NO: 5869376 - DNA, 25 bp, Homo sapien
cggggcagtcgcggtacgcgccggg

SEQ ID NO: 5869377 - DNA, 25 bp, Homo sapien
gccccccgcggacgaccatgccgcc

SEQ ID NO: 5869378 - DNA, 25 bp, Homo sapien
tcgggggcgcagcgcccgtcccgga

SEQ ID NO: 5869379 - DNA, 25 bp, Homo sapien
gccggtcgccgcgtaccgagcgggc

SEQ ID NO: 5869380 - DNA, 25 bp, Homo sapien
cgcgctcacgcgacgtccgcggcgc

SEQ ID NO: 5869381 - DNA, 25 bp, Homo sapien
ggggcgcgacacgcgctaggcggcc

SEQ ID NO: 5869382 - DNA, 25 bp, Homo sapien
ctggcgcgcgccggccgagaaccgc

SEQ ID NO: 5869383 - DNA, 25 bp, Homo sapien
cgccgccgggaccgatcgtgccgcc

SEQ ID NO: 5869384 - DNA, 25 bp, Homo sapien
ggcgccccgaccggtcgtcaccgcg

SEQ ID NO: 5869385 - DNA, 25 bp, Homo sapien
ggggcggcgccggtcgcgagcgact

SEQ ID NO: 5869386 - DNA, 25 bp, Homo sapien
gcccgccgccgcgcgtgtacggcca

SEQ ID NO: 5869387 - DNA, 25 bp, Homo sapien
gcccccgctacgcgtgtcggcgggc

SEQ ID NO: 5869388 - DNA, 25 bp, Homo sapien
gaccgaccgtcgaccgcgcgccgcg

SEQ ID NO: 5869389 - DNA, 25 bp, Homo sapien
cacccgcgcatcggcgggcgcgcag

SEQ ID NO: 5869390 - DNA, 25 bp, Homo sapien
cgcccgcgcccgtacgtcgggcacg

SEQ ID NO: 5869391 - DNA, 25 bp, Homo sapien
cggcggggacgctcgccgaacgccg

SEQ ID NO: 5869392 - DNA, 25 bp, Homo sapien
gccgcggcgtactcgcggggctcgc

SEQ ID NO: 5869393 - DNA, 25 bp, Homo sapien
gccccccacgtgcggcacgcgctgc

SEQ ID NO: 5869394 - DNA, 25 bp, Homo sapien
gccgcgacggtccgcgacggtgcgc

SEQ ID NO: 5869395 - DNA, 25 bp, Homo sapien
gccgccggaccgggacgccgcttgc

SEQ ID NO: 5869396 - DNA, 25 bp, Homo sapien
ctgcccgtgcgcgtcagcgccccgg

SEQ ID NO: 5869397 - DNA, 25 bp, Homo sapien
cgccggaccccaccggcggtgctgc

SEQ ID NO: 5869398 - DNA, 25 bp, Homo sapien
gcgcccgcaccgctgcgtcgcgcag

SEQ ID NO: 5869399 - DNA, 25 bp, Homo sapien
gccgggccgcaatgccccgtgcccg

SEQ ID NO: 5869400 - DNA, 25 bp, Homo sapien
ggcgcgccggaccgttgcggggagg

SEQ ID NO: 5869401 - DNA, 25 bp, Homo sapien
acgccggctggcggcgcaccctccc

SEQ ID NO: 5869402 - DNA, 25 bp, Homo sapien
ccggggcccgtacgcgagcagccgg

SEQ ID NO: 5869403 - DNA, 25 bp, Homo sapien
gtgccggttgcgcgcacggcggcgc

SEQ ID NO: 5869404 - DNA, 25 bp, Homo sapien
ccgcgatcgggcgaccgccccgacc

SEQ ID NO: 5869405 - DNA, 25 bp, Homo sapien
cggcggcgctaggcccgtcccgtcg

SEQ ID NO: 5869406 - DNA, 25 bp, Homo sapien
gccctccgggtcacccgcgaggcgc

SEQ ID NO: 5869407 - DNA, 25 bp, Homo sapien
cggcccttgcgaccgagcgggcgcg

SEQ ID NO: 5869408 - DNA, 25 bp, Homo sapien
gcgtggaccggacgcgacgccccgc

SEQ ID NO: 5869409 - DNA, 25 bp, Homo sapien
ggcgcgccggcccggcggtctacgt

SEQ ID NO: 5869410 - DNA, 25 bp, Homo sapien
ggggcgacacgccggatcgccccgc

SEQ ID NO: 5869411 - DNA, 25 bp, Homo sapien
gggaggcggcgggcctactgccccc

SEQ ID NO: 5869412 - DNA, 25 bp, Homo sapien
gccggcgtcgacgcgcgctgtcggg

SEQ ID NO: 5869413 - DNA, 25 bp, Homo sapien
gggccggatccgcgcgtcgctgccc

SEQ ID NO: 5869414 - DNA, 25 bp, Homo sapien
agctaccgcacggcgccgcgccccc

SEQ ID NO: 5869415 - DNA, 25 bp, Homo sapien
gccccgccgggtcgcacccggtcag

SEQ ID NO: 5869416 - DNA, 25 bp, Homo sapien
ggccctcggaccgactcgccgccgg

SEQ ID NO: 5869417 - DNA, 25 bp, Homo sapien
ctccccaccggtcggccgtggccgc

SEQ ID NO: 5869418 - DNA, 25 bp, Homo sapien
cgcctggcgatgggccgtcgggggc

SEQ ID NO: 5869419 - DNA, 25 bp, Homo sapien
gctggccgccacgcggtcgcgcggt

SEQ ID NO: 5869420 - DNA, 25 bp, Homo sapien
cgtgggcgtgtcgccgcgtgcgcgg

SEQ ID NO: 5869421 - DNA, 25 bp, Homo sapien
cgggctgccgggcgcgcccagacac

SEQ ID NO: 5869422 - DNA, 25 bp, Homo sapien
gggcccagcgcgtacgacccccgcg

SEQ ID NO: 5869423 - DNA, 25 bp, Homo sapien
gccggagcgcggtgtccgtccgcgc

SEQ ID NO: 5869424 - DNA, 25 bp, Homo sapien
cctccagccgccgacgcgtgccccc

SEQ ID NO: 5869425 - DNA, 25 bp, Homo sapien
cgcccgtacggggcgtgcgcctgcg

SEQ ID NO: 5869426 - DNA, 25 bp, Homo sapien
gcggcacgcggcacgccgcctgctc

SEQ ID NO: 5869427 - DNA, 25 bp, Homo sapien
gtgcgctcgcccgtagcgcggggcc

SEQ ID NO: 5869428 - DNA, 25 bp, Homo sapien
ccgcgcgcgatacgccgggggggct

SEQ ID NO: 5869429 - DNA, 25 bp, Homo sapien
ccgcccccgcgggtacgccagcctg

SEQ ID NO: 5869430 - DNA, 25 bp, Homo sapien
gggaggggccgttgcgcgacccggc

SEQ ID NO: 5869431 - DNA, 25 bp, Homo sapien
gtcgagcgggccggtacgcggggcg

SEQ ID NO: 5869432 - DNA, 25 bp, Homo sapien
cccggcgcgtaccgcgactgccccg

SEQ ID NO: 5869433 - DNA, 25 bp, Homo sapien
gccgggccggcgcggcatgtccagc

SEQ ID NO: 5869434 - DNA, 25 bp, Homo sapien
ggcgcctcgtcgcggggtacggcgc

SEQ ID NO: 5869435 - DNA, 25 bp, Homo sapien
ggccgacgcgtacgcccgtgccggc

SEQ ID NO: 5869436 - DNA, 25 bp, Homo sapien
ggcgcgtactcgtcgcgcgcggccc

SEQ ID NO: 5869437 - DNA, 25 bp, Homo sapien
gcgggctaccgccggcacgtgcgcc

SEQ ID NO: 5869438 - DNA, 25 bp, Homo sapien
ccgccagacgcgcgtacggcggggg

SEQ ID NO: 5869439 - DNA, 25 bp, Homo sapien
tgccggcgtcgggcgcatggccgcg

SEQ ID NO: 5869440 - DNA, 25 bp, Homo sapien
cggcgcctagcgcgatgcggcgcgc

SEQ ID NO: 5869441 - DNA, 25 bp, Homo sapien
ggcgccgcggacgcgtagcccctcc

SEQ ID NO: 5869442 - DNA, 25 bp, Homo sapien
gcccggtggcgcgtcacgcggcggt

SEQ ID NO: 5869443 - DNA, 25 bp, Homo sapien
cggcgttcggcgagcgtccccgccg

SEQ ID NO: 5869444 - DNA, 25 bp, Homo sapien
ctcggcgggttcgccgcgagggcgg

SEQ ID NO: 5869445 - DNA, 25 bp, Homo sapien
cgtggccgtacggcgcgacggcgcg

SEQ ID NO: 5869446 - DNA, 25 bp, Homo sapien
tcgcccacgggaccgcgctgccccc

SEQ ID NO: 5869447 - DNA, 25 bp, Homo sapien
gcgcgctcgcgagcgccgtcgctcg

SEQ ID NO: 5869448 - DNA, 25 bp, Homo sapien
gccggacggcgctagtcgcgggcgc

SEQ ID NO: 5869449 - DNA, 25 bp, Homo sapien
ggcccgtagcccgcgcgacgagcgg

SEQ ID NO: 5869450 - DNA, 25 bp, Homo sapien
cggtcgcgcactcggccgcggctcg

SEQ ID NO: 5869451 - DNA, 25 bp, Homo sapien
ccaggcgtatgccgcgggcccgggc

SEQ ID NO: 5869452 - DNA, 25 bp, Homo sapien
gcaagcggcgtcccggtccggcggc

SEQ ID NO: 5869453 - DNA, 25 bp, Homo sapien
gcgcccgtacggtcgccgagcggcc

SEQ ID NO: 5869454 - DNA, 25 bp, Homo sapien
cgcccgagtagcgcacccgggcccc

SEQ ID NO: 5869455 - DNA, 25 bp, Homo sapien
gcagcaccgccggtggggtccggcg

SEQ ID NO: 5869456 - DNA, 25 bp, Homo sapien
cccggccgccgtcgtcccgagccca

SEQ ID NO: 5869457 - DNA, 25 bp, Homo sapien
gcgagccgcgcgatgcgagccgggc

SEQ ID NO: 5869458 - DNA, 25 bp, Homo sapien
ggtcggcgcccgaccggcgcggtct

SEQ ID NO: 5869459 - DNA, 25 bp, Homo sapien
gtgaccgcgtacggccgcccgcccg

SEQ ID NO: 5869460 - DNA, 25 bp, Homo sapien
aggcgggctcgcctccggtggggcg

SEQ ID NO: 5869461 - DNA, 25 bp, Homo sapien
cgcgtgcccggcggcggactggctg

SEQ ID NO: 5869462 - DNA, 25 bp, Homo sapien
ccggcacgtaacgcgcgccggcccc

SEQ ID NO: 5869463 - DNA, 25 bp, Homo sapien
aggccggcgaccccctacgcggcgc

SEQ ID NO: 5869464 - DNA, 25 bp, Homo sapien
cgggggtcgaccgcgccatggcccc

SEQ ID NO: 5869465 - DNA, 25 bp, Homo sapien
tccgccccgtacgacggcccgcggc

SEQ ID NO: 5869466 - DNA, 25 bp, Homo sapien
gcccgcggcgcggatatcgcgcgcc

SEQ ID NO: 5869467 - DNA, 25 bp, Homo sapien
cgcggcgggctcgcgtaaccgcggc

SEQ ID NO: 5869468 - DNA, 25 bp, Homo sapien
gcccaccgcgacgcccgttgcccgc

SEQ ID NO: 5869469 - DNA, 25 bp, Homo sapien
gcgcgccccacgggtcgcggggtct

SEQ ID NO: 5869470 - DNA, 25 bp, Homo sapien
gtcgggcaaccgccgtccgccgccc

SEQ ID NO: 5869471 - DNA, 25 bp, Homo sapien
ggggccccagcgcgcgattgcggcc

SEQ ID NO: 5869472 - DNA, 25 bp, Homo sapien
gcgccccgcgcgatacgtggcgcgc

SEQ ID NO: 5869473 - DNA, 25 bp, Homo sapien
cggccgacgcgccgtagcggcgcga

SEQ ID NO: 5869474 - DNA, 25 bp, Homo sapien
gcccgggaccttacgcgccgcccgc

SEQ ID NO: 5869475 - DNA, 25 bp, Homo sapien
cgccggacgcgatacgcccgcgggg

SEQ ID NO: 5869476 - DNA, 25 bp, Homo sapien
cggcgccgggacgacgcgtcgagcc

SEQ ID NO: 5869477 - DNA, 25 bp, Homo sapien
gcgggccccgcgacgggttcggctg

SEQ ID NO: 5869478 - DNA, 25 bp, Homo sapien
tccgggacgggcgctgcgcccccga

SEQ ID NO: 5869479 - DNA, 25 bp, Homo sapien
gcggcgcacgcgacgtccgcccgct

SEQ ID NO: 5869480 - DNA, 25 bp, Homo sapien
gcgcggtcgtaccgccgggggtgcg

SEQ ID NO: 5869481 - DNA, 25 bp, Homo sapien
gggtcgtcgcggcggtcctgccccg

SEQ ID NO: 5869482 - DNA, 25 bp, Homo sapien
gccccccgcgcagtaccgtgggcgc

SEQ ID NO: 5869483 - DNA, 25 bp, Homo sapien
cgccggcgcgctagacgcgcaggcc

SEQ ID NO: 5869484 - DNA, 25 bp, Homo sapien
gcggctgacggtgcgccgagcgcgc

SEQ ID NO: 5869485 - DNA, 25 bp, Homo sapien
cgccagccgggagcggtcctcgggg

SEQ ID NO: 5869486 - DNA, 25 bp, Homo sapien
gcgtcgggacgacgcgcgaccgggc

SEQ ID NO: 5869487 - DNA, 25 bp, Homo sapien
ggggccggcgtaccgtccgcggctg

SEQ ID NO: 5869488 - DNA, 25 bp, Homo sapien
cccccgatcgtacgcggcggggcgc

SEQ ID NO: 5869489 - DNA, 25 bp, Homo sapien
gcctggggcataccgcgcgcccccc

SEQ ID NO: 5869490 - DNA, 25 bp, Homo sapien
agtcgctcgcgaccggcgccgcccc

SEQ ID NO: 5869491 - DNA, 25 bp, Homo sapien
ggggcgccctgtatcggcggggcgc

SEQ ID NO: 5869492 - DNA, 25 bp, Homo sapien
ggcccggccgcataccggcgagcgc

SEQ ID NO: 5869493 - DNA, 25 bp, Homo sapien
cgggcctcggtcgagggcggcctgc

SEQ ID NO: 5869494 - DNA, 25 bp, Homo sapien
tgccggcgcgcctagtccggcgccc

SEQ ID NO: 5869495 - DNA, 25 bp, Homo sapien
gccggcaccgggcgctagcggcgga

SEQ ID NO: 5869496 - DNA, 25 bp, Homo sapien
gcgccggctcgtccggaccgggacg

SEQ ID NO: 5869497 - DNA, 25 bp, Homo sapien
gcgcgcctaaccgcggcggggtgcg

SEQ ID NO: 5869498 - DNA, 25 bp, Homo sapien
acgcggccgcgaacggcaccgcggg

SEQ ID NO: 5869499 - DNA, 25 bp, Homo sapien
cctccccgcaacggtccggcgcgcc

SEQ ID NO: 5869500 - DNA, 25 bp, Homo sapien
cggccgcgacggccggtgaggcgag

SEQ ID NO: 5869501 - DNA, 25 bp, Homo sapien
tggcgcgacggcgcgcaaccccgcg

SEQ ID NO: 5869502 - DNA, 25 bp, Homo sapien
ggggtgccggttcgcgtcgcgcccg

SEQ ID NO: 5869503 - DNA, 25 bp, Homo sapien
acgtagaccgccgggccggcgcgcc

SEQ ID NO: 5869504 - DNA, 25 bp, Homo sapien
cgcgggccttcgcgacgcgcgcggt

SEQ ID NO: 5869505 - DNA, 25 bp, Homo sapien
cgacgggacgggcctagcgccgccg

SEQ ID NO: 5869506 - DNA, 25 bp, Homo sapien
gggcgctccgcgcggcgtatccccg

SEQ ID NO: 5869507 - DNA, 25 bp, Homo sapien
acggcgccgcgtcggtcggtcggcc

SEQ ID NO: 5869508 - DNA, 25 bp, Homo sapien
ggcgcggcgcggttagcccacgccc

SEQ ID NO: 5869509 - DNA, 25 bp, Homo sapien
cgggccgccgcgacgtagccggagc

SEQ ID NO: 5869510 - DNA, 25 bp, Homo sapien
ccggccgccgcgacggggtagtgcg

SEQ ID NO: 5869511 - DNA, 25 bp, Homo sapien
gggagccccccgagcggcgtgcgga

SEQ ID NO: 5869512 - DNA, 25 bp, Homo sapien
tggccgcggacgcgcgtacccgggg

SEQ ID NO: 5869513 - DNA, 25 bp, Homo sapien
cgcctgcgcgcttcggaccgcgcgg

SEQ ID NO: 5869514 - DNA, 25 bp, Homo sapien
cgcgggcgccgtacgaccgctgcgg

SEQ ID NO: 5869515 - DNA, 25 bp, Homo sapien
ggccgaccgtacgtcgcggcgccgg

SEQ ID NO: 5869516 - DNA, 25 bp, Homo sapien
gctgcgtcgcgcgtccgacccccgg

SEQ ID NO: 5869517 - DNA, 25 bp, Homo sapien
ggacgcagcgcgggcgtaccgcccg

SEQ ID NO: 5869518 - DNA, 25 bp, Homo sapien
ggctcggacggtcgcgacgcgccgg

SEQ ID NO: 5869519 - DNA, 25 bp, Homo sapien
ggcccccgcgcgaaccggccgctag

SEQ ID NO: 5869520 - DNA, 25 bp, Homo sapien
ccgcccgctcgaccgcgatccgcgg

SEQ ID NO: 5869521 - DNA, 25 bp, Homo sapien
gcgggccatccgtcggacgccgggc

SEQ ID NO: 5869522 - DNA, 25 bp, Homo sapien
gcagcgcgtgccgcacgtggggggc

SEQ ID NO: 5869523 - DNA, 25 bp, Homo sapien
ggcacctacggtgccgcgggcccgg

SEQ ID NO: 5869524 - DNA, 25 bp, Homo sapien
cgcggtgacgaccggtcggggcgcc

SEQ ID NO: 5869525 - DNA, 25 bp, Homo sapien
cacgggccgtcgcgacacgggcggc

SEQ ID NO: 5869526 - DNA, 25 bp, Homo sapien
ggggggcaggtcgcgccgtcgcgga

SEQ ID NO: 5869527 - DNA, 25 bp, Homo sapien
cggcgctacgtcccgccgggggcga

SEQ ID NO: 5869528 - DNA, 25 bp, Homo sapien
tcggccggtacgggcgcgtggcgcc

SEQ ID NO: 5869529 - DNA, 25 bp, Homo sapien
cccggcctgtcgcacgacgcccccg

SEQ ID NO: 5869530 - DNA, 25 bp, Homo sapien
ccccgcgggtacgccgcctgccagg

SEQ ID NO: 5869531 - DNA, 25 bp, Homo sapien
gcggcggccgcgaacgtacgcgcgc

SEQ ID NO: 5869532 - DNA, 25 bp, Homo sapien
ccgggcacgggcgtacgcgccccca

SEQ ID NO: 5869533 - DNA, 25 bp, Homo sapien
ggggagtgtcgacgcggggggcggc

SEQ ID NO: 5869534 - DNA, 25 bp, Homo sapien
ccgcggtgcggccgtatcgggccgg

SEQ ID NO: 5869535 - DNA, 25 bp, Homo sapien
gcgggtccgtacgcgacgcggcgcc

SEQ ID NO: 5869536 - DNA, 25 bp, Homo sapien
gcggggcgatccggcgtgtcgcccc

SEQ ID NO: 5869537 - DNA, 25 bp, Homo sapien
ccgcgcttcgccgcgggtagggcgc

SEQ ID NO: 5869538 - DNA, 25 bp, Homo sapien
ccggggcgctgacgcgcacgggcag

SEQ ID NO: 5869539 - DNA, 25 bp, Homo sapien
gccgccggcgcgtagtcgctcggcc

SEQ ID NO: 5869540 - DNA, 25 bp, Homo sapien
ccgctcgcgcgtacgaccgcgcccg

SEQ ID NO: 5869541 - DNA, 25 bp, Homo sapien
cccgcgcgggacggaccgagcggca

SEQ ID NO: 5869542 - DNA, 25 bp, Homo sapien
ggcctcgtacgctcgcgggcccggg

SEQ ID NO: 5869543 - DNA, 25 bp, Homo sapien
tccgccggtaccgcgccagcggcgg

SEQ ID NO: 5869544 - DNA, 25 bp, Homo sapien
ccggctgctcgcgtacgggccccgg

SEQ ID NO: 5869545 - DNA, 25 bp, Homo sapien
ggcctcgtcgatcgcggggggccgg

SEQ ID NO: 5869546 - DNA, 25 bp, Homo sapien
cgagcgtgcggtcgtcccgcgcccc

SEQ ID NO: 5869547 - DNA, 25 bp, Homo sapien
cgcctcggcgtacgcgacgcgcccg

SEQ ID NO: 5869548 - DNA, 25 bp, Homo sapien
cggcgcctcgtaaccgcgcccgggc

SEQ ID NO: 5869549 - DNA, 25 bp, Homo sapien
ggccgcctagcgcgtgtcgcgcccc

SEQ ID NO: 5869550 - DNA, 25 bp, Homo sapien
gcgcccacggggtacgcgccaccgg

SEQ ID NO: 5869551 - DNA, 25 bp, Homo sapien
gcggggggcgcgcgggtatggagcc

SEQ ID NO: 5869552 - DNA, 25 bp, Homo sapien
ccggcggcgcgcccggacgatgcgt

SEQ ID NO: 5869553 - DNA, 25 bp, Homo sapien
cccgggcgcatcgagccgtcggccg

SEQ ID NO: 5869554 - DNA, 25 bp, Homo sapien
ggcccgcgaccgtacgggggcgtgc

SEQ ID NO: 5869555 - DNA, 25 bp, Homo sapien
ccgccagtcggacgcgcgaggccgg

SEQ ID NO: 5869556 - DNA, 25 bp, Homo sapien
gctcgccgtgcgccctacgggcccc

SEQ ID NO: 5869557 - DNA, 25 bp, Homo sapien
gcgggaccccggtgcgctaggcgcc

SEQ ID NO: 5869558 - DNA, 25 bp, Homo sapien
cagcgcgcccgaccgtacgcgcggc

SEQ ID NO: 5869559 - DNA, 25 bp, Homo sapien
gcgagccccgcgagtacgccgcggc

SEQ ID NO: 5869560 - DNA, 25 bp, Homo sapien
ccgcggcgcgacgcccgtacgggtc

SEQ ID NO: 5869561 - DNA, 25 bp, Homo sapien
ggccccgcgatgtccgacgcccgcc

SEQ ID NO: 5869562 - DNA, 25 bp, Homo sapien
gcgccccgacgtacgcgcgccaggc

SEQ ID NO: 5869563 - DNA, 25 bp, Homo sapien
gccgcgacgacggtccgcgagggcg

SEQ ID NO: 5869564 - DNA, 25 bp, Homo sapien
ggcgccccgcgtagcggggacgcca

SEQ ID NO: 5869565 - DNA, 25 bp, Homo sapien
gcgggttcgcgcacggtcgggggcc

SEQ ID NO: 5869566 - DNA, 25 bp, Homo sapien
ccggcgcgtaccggacgcgcctgcc

SEQ ID NO: 5869567 - DNA, 25 bp, Homo sapien
cctggcacgaccgcgcgtcccccgg

SEQ ID NO: 5869568 - DNA, 25 bp, Homo sapien
tggcgcggccgcgacgtagcccggg

SEQ ID NO: 5869569 - DNA, 25 bp, Homo sapien
gccccgcctatgcgcgacgccgccc

SEQ ID NO: 5869570 - DNA, 25 bp, Homo sapien
gcgcgctagatcgcgccggccccgg

SEQ ID NO: 5869571 - DNA, 25 bp, Homo sapien
gctgcgcggcctcggacgcctcgcg

SEQ ID NO: 5869572 - DNA, 25 bp, Homo sapien
agcggctatcgcccgcgcggcgggc

SEQ ID NO: 5869573 - DNA, 25 bp, Homo sapien
ggcggccgcgacgtaccgcctccgc

SEQ ID NO: 5869574 - DNA, 25 bp, Homo sapien
caggggggccggtgcccgtagcggc

SEQ ID NO: 5869575 - DNA, 25 bp, Homo sapien
ccctgtgcagctccgccggggccgg

SEQ ID NO: 5869576 - DNA, 25 bp, Homo sapien
cgcgcccgcgccccgatgtgggagg

SEQ ID NO: 5869577 - DNA, 25 bp, Homo sapien
tccgcgcccgccgacgtagggcggg

SEQ ID NO: 5869578 - DNA, 25 bp, Homo sapien
gcaggcgtcgcgaaggcgcggcccg

SEQ ID NO: 5869579 - DNA, 25 bp, Homo sapien
ctgcgcgcccgccgatgcgcgggtg

SEQ ID NO: 5869580 - DNA, 25 bp, Homo sapien
cccgggatgcgtcggtccgcggggc

SEQ ID NO: 5869581 - DNA, 25 bp, Homo sapien
ggtggggcccgtgcgtcgtggcggc

SEQ ID NO: 5869582 - DNA, 25 bp, Homo sapien
gcggcgggccggtcagtccgcggga

SEQ ID NO: 5869583 - DNA, 25 bp, Homo sapien
gcggccggcataccgcggctgggcc

SEQ ID NO: 5869584 - DNA, 25 bp, Homo sapien
gcgccgccgtgcgcgcaaccggcac

SEQ ID NO: 5869585 - DNA, 25 bp, Homo sapien
cccgccatacgcggccgcgagcggg

SEQ ID NO: 5869586 - DNA, 25 bp, Homo sapien
cgcggggcgtttcggcgcgctcggc

SEQ ID NO: 5869587 - DNA, 25 bp, Homo sapien
cgctcgcgacccgccgtacccgcgc

SEQ ID NO: 5869588 - DNA, 25 bp, Homo sapien
gcggccgcggtacgcgcatggcccg

SEQ ID NO: 5869589 - DNA, 25 bp, Homo sapien
cgcctgcgcgcccgatacggccggc

SEQ ID NO: 5869590 - DNA, 25 bp, Homo sapien
gtcccgctccgtacgcgcgggcggg

SEQ ID NO: 5869591 - DNA, 25 bp, Homo sapien
tgccggctctcgggccgtcggcccc

SEQ ID NO: 5869592 - DNA, 25 bp, Homo sapien
cgctgcggtacgggcgtcgcgcgcc

SEQ ID NO: 5869593 - DNA, 25 bp, Homo sapien
gggccggccggtcgcatcggtcggc

SEQ ID NO: 5869594 - DNA, 25 bp, Homo sapien
ccggcggcgagtcggtccgagggcc

SEQ ID NO: 5869595 - DNA, 25 bp, Homo sapien
ccagcccgtaccgcggccgcaggcg

SEQ ID NO: 5869596 - DNA, 25 bp, Homo sapien
ggggcggcgcgaccggtcaccctgc

SEQ ID NO: 5869597 - DNA, 25 bp, Homo sapien
ccgcctggggcgcgtcaacccggcc

SEQ ID NO: 5869598 - DNA, 25 bp, Homo sapien
cgggtccggcgtcctggcgacggcg

SEQ ID NO: 5869599 - DNA, 25 bp, Homo sapien
gcggacgtagcgcgacgcgcccggg

SEQ ID NO: 5869600 - DNA, 25 bp, Homo sapien
cgcgcgggctcaatccgcggccggc

SEQ ID NO: 5869601 - DNA, 25 bp, Homo sapien
cccgccgcgtacgaccgcgcgtgcg

SEQ ID NO: 5869602 - DNA, 25 bp, Homo sapien
ggacccacgacggggcgctcggcgc

SEQ ID NO: 5869603 - DNA, 25 bp, Homo sapien
cgcggcgcgcggtcgacggtcggtc

SEQ ID NO: 5869604 - DNA, 25 bp, Homo sapien
cggggcgacccgcgggtggctgacc

SEQ ID NO: 5869605 - DNA, 25 bp, Homo sapien
ggcggggcggtgtcggacgcctccc

SEQ ID NO: 5869606 - DNA, 25 bp, Homo sapien
gggggcagtaggcccgccgcctccc

SEQ ID NO: 5869607 - DNA, 25 bp, Homo sapien
cctcgccgaggcgagacgccgggcg

SEQ ID NO: 5869608 - DNA, 25 bp, Homo sapien
gcccacccggtcgacgcgtcggcgc

SEQ ID NO: 5869609 - DNA, 25 bp, Homo sapien
cggccgacatcgctcgcggcccggg

SEQ ID NO: 5869610 - DNA, 25 bp, Homo sapien
ctccggcgccgggtgatgccggcgg

SEQ ID NO: 5869611 - DNA, 25 bp, Homo sapien
gccccggcgcctacgacggcggtgc

SEQ ID NO: 5869612 - DNA, 25 bp, Homo sapien
gggggggtgccgccccgagcgactc

SEQ ID NO: 5869613 - DNA, 25 bp, Homo sapien
gcctcgcgcctgccggcgcttccgc

SEQ ID NO: 5869614 - DNA, 25 bp, Homo sapien
cccgagccatacgcgcgggccgggc

SEQ ID NO: 5869615 - DNA, 25 bp, Homo sapien
ggcccccgcggtcggatacgccggc

SEQ ID NO: 5869616 - DNA, 25 bp, Homo sapien
gggtgtgccgacgcgcggcggcctg

SEQ ID NO: 5869617 - DNA, 25 bp, Homo sapien
ggccgggctggcgcgactcgtccgc

SEQ ID NO: 5869618 - DNA, 25 bp, Homo sapien
ctcgcgccgacgagcgcgggcccga

SEQ ID NO: 5869619 - DNA, 25 bp, Homo sapien
cgcgtacgggccgcctcggcaccgc

SEQ ID NO: 5869620 - DNA, 25 bp, Homo sapien
tgccccccgcgtatcggccgccggc

SEQ ID NO: 5869621 - DNA, 25 bp, Homo sapien
gggcgctcccgacgcgcgtgcgacg

SEQ ID NO: 5869622 - DNA, 25 bp, Homo sapien
cggcgctgacgcgtcgaccgggccg

SEQ ID NO: 5869623 - DNA, 25 bp, Homo sapien
cgacggccgtacggggcgccgctcg

SEQ ID NO: 5869624 - DNA, 25 bp, Homo sapien
cgccggaatcgcgcggggtccgcgc

SEQ ID NO: 5869625 - DNA, 25 bp, Homo sapien
gcctgccgggcgttgtccggccggc

SEQ ID NO: 5869626 - DNA, 25 bp, Homo sapien
gccgcccgcgtacgtcccggccagg

SEQ ID NO: 5869627 - DNA, 25 bp, Homo sapien
gcccagcgtaccgaccggccggccg

SEQ ID NO: 5869628 - DNA, 25 bp, Homo sapien
gggcagcgacgcgcggatccggccc

SEQ ID NO: 5869629 - DNA, 25 bp, Homo sapien
gggggcgcggcgccgtgcggtagct

SEQ ID NO: 5869630 - DNA, 25 bp, Homo sapien
ggggggcggccggcatacggccagg

SEQ ID NO: 5869631 - DNA, 25 bp, Homo sapien
agcggggtgcgcgacccgtggcccg

SEQ ID NO: 5869632 - DNA, 25 bp, Homo sapien
ggcggctcgcgcggaccgagtgggc

SEQ ID NO: 5869633 - DNA, 25 bp, Homo sapien
cgggcagccgatcgggacggggcgc

SEQ ID NO: 5869634 - DNA, 25 bp, Homo sapien
gccgcgtacgccgcgcggacccgct

SEQ ID NO: 5869635 - DNA, 25 bp, Homo sapien
gcgcagcgcctaccggtcggggcgg

SEQ ID NO: 5869636 - DNA, 25 bp, Homo sapien
ccggtggacgcgcggttggccgcgc

SEQ ID NO: 5869637 - DNA, 25 bp, Homo sapien
cccgccgccgtacgcgacccagggc

SEQ ID NO: 5869638 - DNA, 25 bp, Homo sapien
cgcagggtcgtcccgaccgcggccg

SEQ ID NO: 5869639 - DNA, 25 bp, Homo sapien
cgcgcccgcgcggtagtcggagggg

SEQ ID NO: 5869640 - DNA, 25 bp, Homo sapien
gggggcggcgcgatcggacgccagg

SEQ ID NO: 5869641 - DNA, 25 bp, Homo sapien
cgcgcccgctcggtcgcaagggccg

SEQ ID NO: 5869642 - DNA, 25 bp, Homo sapien
gcggggcgtcgcgtccggtccacgc

SEQ ID NO: 5869643 - DNA, 25 bp, Homo sapien
gcgggcgcgtcggacggtaggcggg

SEQ ID NO: 5869644 - DNA, 25 bp, Homo sapien
ggtgcggtgtcgcgcggaccgggcc

SEQ ID NO: 5869645 - DNA, 25 bp, Homo sapien
cgggccggccgcggtacgacaggcc

SEQ ID NO: 5869646 - DNA, 25 bp, Homo sapien
ccggccatcgcggcccgacgcggac

SEQ ID NO: 5869647 - DNA, 25 bp, Homo sapien
gcgccgcggacgtcgcgtgagcgcg

SEQ ID NO: 5869648 - DNA, 25 bp, Homo sapien
cgggcgcgttcgacgggcccgagcg

SEQ ID NO: 5869649 - DNA, 25 bp, Homo sapien
gcgcgcgagggaggacgtcggcgcc

SEQ ID NO: 5869650 - DNA, 25 bp, Homo sapien
agccgccgcggtcgcgaaccggggc

SEQ ID NO: 5869651 - DNA, 25 bp, Homo sapien
gcgcctcgcgggtgacccggagggc

SEQ ID NO: 5869652 - DNA, 25 bp, Homo sapien
gtcggcacgcgcggtccgggcccac

SEQ ID NO: 5869653 - DNA, 25 bp, Homo sapien
tcccgccgaacgacccgcgggcgcg

SEQ ID NO: 5869654 - DNA, 25 bp, Homo sapien
ccaccgacgccggagcgaccggggc

SEQ ID NO: 5869655 - DNA, 25 bp, Homo sapien
ggccccgcgacgcctgcgtgggcac

SEQ ID NO: 5869656 - DNA, 25 bp, Homo sapien
cctcccaggccgttgcgcgcggggc

SEQ ID NO: 5869657 - DNA, 25 bp, Homo sapien
ccgcccgcgccgctaaccggtcgcg

SEQ ID NO: 5869658 - DNA, 25 bp, Homo sapien
ccccggctgcgccgcgagcggaacg

SEQ ID NO: 5869659 - DNA, 25 bp, Homo sapien
ccccgcacgcatcgggggggctggg

SEQ ID NO: 5869660 - DNA, 25 bp, Homo sapien
gcgccaccggcgtatcgcggcgcgg

SEQ ID NO: 5869661 - DNA, 25 bp, Homo sapien
ggcggcccgcgacgcgtgagacgcc

SEQ ID NO: 5869662 - DNA, 25 bp, Homo sapien
cccgcgcgaccattcggcggggccg

SEQ ID NO: 5869663 - DNA, 25 bp, Homo sapien
gcgggcggtccgctcaacggggcgg

SEQ ID NO: 5869664 - DNA, 25 bp, Homo sapien
gcgcggcgtaaggcgcccgcaggcg

SEQ ID NO: 5869665 - DNA, 25 bp, Homo sapien
gacgccctcgcgccgcgtacgcggc

SEQ ID NO: 5869666 - DNA, 25 bp, Homo sapien
cccgacagcgcgcgtcgacgccggc

SEQ ID NO: 5869667 - DNA, 25 bp, Homo sapien
cgcgggtcgacgcaccccggcgcct

SEQ ID NO: 5869668 - DNA, 25 bp, Homo sapien
gacgggcgatgcgcgccaggccgcg

SEQ ID NO: 5869669 - DNA, 25 bp, Homo sapien
ggccaccgtgcccggtacgccggcg

SEQ ID NO: 5869670 - DNA, 25 bp, Homo sapien
ccgagcgcgtcgcgtaggcgggccg

SEQ ID NO: 5869671 - DNA, 25 bp, Homo sapien
cgcctccgtcggacgcgaccccggc

SEQ ID NO: 5869672 - DNA, 25 bp, Homo sapien
gcggctaccgttgccgcgggggcgg

SEQ ID NO: 5869673 - DNA, 25 bp, Homo sapien
cgacgacgcggccggtggagggccc

SEQ ID NO: 5869674 - DNA, 25 bp, Homo sapien
ggcggcacgatcggtcccggcggcg

SEQ ID NO: 5869675 - DNA, 25 bp, Homo sapien
gcgagctagcgcggccggacgccgc

SEQ ID NO: 5869676 - DNA, 25 bp, Homo sapien
ctgaccgggtgcgacccggcggggc

SEQ ID NO: 5869677 - DNA, 25 bp, Homo sapien
ccctggcggaccgcttgggcgggcg

SEQ ID NO: 5869678 - DNA, 25 bp, Homo sapien
cagcgccgcgtacgggccaggggcg

SEQ ID NO: 5869679 - DNA, 25 bp, Homo sapien
ggtcgcacgcgccgttgcggggggc

SEQ ID NO: 5869680 - DNA, 25 bp, Homo sapien
gggagggtgcgccgccagccggcgt

SEQ ID NO: 5869681 - DNA, 25 bp, Homo sapien
cgcgggtccgggcgacgtccgctcc

SEQ ID NO: 5869682 - DNA, 25 bp, Homo sapien
gggccgtgcgcgcgaaacccgccgc

SEQ ID NO: 5869683 - DNA, 25 bp, Homo sapien
ccgggtgacggtgcgtcggccgcgg

SEQ ID NO: 5869684 - DNA, 25 bp, Homo sapien
gggcagccgtcgaccgcgtgcgcgg

SEQ ID NO: 5869685 - DNA, 25 bp, Homo sapien
gccgccacggtccgtgcgagggccc

SEQ ID NO: 5869686 - DNA, 25 bp, Homo sapien
cgcagcccgatacggggcggccgcc

SEQ ID NO: 5869687 - DNA, 25 bp, Homo sapien
ggcgcgcggcgtgcccgtaccgcct

SEQ ID NO: 5869688 - DNA, 25 bp, Homo sapien
gcggccccggcgttacgcgcgggag

SEQ ID NO: 5869689 - DNA, 25 bp, Homo sapien
gccgtcacgcgtacgcccgggggcc

SEQ ID NO: 5869690 - DNA, 25 bp, Homo sapien
ggaggcgcggtccgtcacgggggcc

SEQ ID NO: 5869691 - DNA, 25 bp, Homo sapien
cggggcccccgatacgcgctcggcg

SEQ ID NO: 5869692 - DNA, 25 bp, Homo sapien
ggtccctcgcgccggtacgcccgcc

SEQ ID NO: 5869693 - DNA, 25 bp, Homo sapien
gcgctccgacgcccgtcgtcgcggc

SEQ ID NO: 5869694 - DNA, 25 bp, Homo sapien
ggcggcatggtcgtccgcggggggc

SEQ ID NO: 5869695 - DNA, 25 bp, Homo sapien
ccgcggcgagcggtcgacgccgcac

SEQ ID NO: 5869696 - DNA, 25 bp, Homo sapien
tcgagcgatcggccgcccgggggcc

SEQ ID NO: 5869697 - DNA, 25 bp, Homo sapien
cgcgtcagtacggcgcgcccccccc

SEQ ID NO: 5869698 - DNA, 25 bp, Homo sapien
tgcgcgggcccgcttacgcgggggc

SEQ ID NO: 5869699 - DNA, 25 bp, Homo sapien
gggctcacgtcccgacccggcgcgg

SEQ ID NO: 5869700 - DNA, 25 bp, Homo sapien
gcccgctcggtacgcggcgaccggc

SEQ ID NO: 5869701 - DNA, 25 bp, Homo sapien
gccccgcggcccgtaccgggtggca

SEQ ID NO: 5869702 - DNA, 25 bp, Homo sapien
ggtcggggcggtcgcccgatcgcgg

SEQ ID NO: 5869703 - DNA, 25 bp, Homo sapien
cgggcacggggcattgcggcccggc

SEQ ID NO: 5869704 - DNA, 25 bp, Homo sapien
tggccgtacacgcgcggcggcgggc

SEQ ID NO: 5869705 - DNA, 25 bp, Homo sapien
gcccggccggtggcgcgtcggtctg

SEQ ID NO: 5869706 - DNA, 25 bp, Homo sapien
cccccctacgggcacgccgcaccgc

SEQ ID NO: 5869707 - DNA, 25 bp, Homo sapien
gccggcctacgcggcgtgagggcgg

SEQ ID NO: 5869708 - DNA, 25 bp, Homo sapien
ccgagcgcggtcccgggcgcagtgg

SEQ ID NO: 5869709 - DNA, 25 bp, Homo sapien
cgggggtccgtaggcgcacgccgcg

SEQ ID NO: 5869710 - DNA, 25 bp, Homo sapien
ggacctgaaggcccgccgcgccgcc

SEQ ID NO: 5869711 - DNA, 25 bp, Homo sapien
cggcggcatcgtacgccgggcccgg

SEQ ID NO: 5869712 - DNA, 25 bp, Homo sapien
ggcgggccggtcgagcgttcgcggc

SEQ ID NO: 5869713 - DNA, 25 bp, Homo sapien
cgccgggcgtcccgtacgcctggcg

SEQ ID NO: 5869714 - DNA, 25 bp, Homo sapien
gcccgccgacacgcgtagcgggggc

SEQ ID NO: 5869715 - DNA, 25 bp, Homo sapien
ccgcgcacggcgcaccgtagggccc

SEQ ID NO: 5869716 - DNA, 25 bp, Homo sapien
cgcgccgggccgacccgcatctccc

SEQ ID NO: 5869717 - DNA, 25 bp, Homo sapien
ggcccgcgtaccgggcacgcctcgc

SEQ ID NO: 5869718 - DNA, 25 bp, Homo sapien
gcgcggccggtacgcgttccgcgcg

SEQ ID NO: 5869719 - DNA, 25 bp, Homo sapien
cggcgctacgggacggcgcgcgtcg

SEQ ID NO: 5869720 - DNA, 25 bp, Homo sapien
gcccggcgaatccggtcgcgcgggc

SEQ ID NO: 5869721 - DNA, 25 bp, Homo sapien
gcgcgggtcgcgcgctagccctgcg

SEQ ID NO: 5869722 - DNA, 25 bp, Homo sapien
gcgcaccgtcgcggaccgtcgcggc

SEQ ID NO: 5869723 - DNA, 25 bp, Homo sapien
gtcgcgctgccggtcgaccggggcc

SEQ ID NO: 5869724 - DNA, 25 bp, Homo sapien
ggggccgtgcgacgcggtacgggcg

SEQ ID NO: 5869725 - DNA, 25 bp, Homo sapien
gcgcggccgcacgcgctctaggccc

SEQ ID NO: 5869726 - DNA, 25 bp, Homo sapien
cctgcggctcggccgtacggccccg

SEQ ID NO: 5869727 - DNA, 25 bp, Homo sapien
gctcgcgctggcgggcgtcgccgtg

SEQ ID NO: 5869728 - DNA, 25 bp, Homo sapien
cgccgggtcgcggaccggagtgggc

SEQ ID NO: 5869729 - DNA, 25 bp, Homo sapien
ccgcccgtccgcacgacgcgggtgg

SEQ ID NO: 5869730 - DNA, 25 bp, Homo sapien
ccacgccgcggcgtgctaccggcgc

SEQ ID NO: 5869731 - DNA, 25 bp, Homo sapien
gcggttctcggccggcgcgcgccag

SEQ ID NO: 5869732 - DNA, 25 bp, Homo sapien
cgcccggcgcccgcggattcctgcc

SEQ ID NO: 5869733 - DNA, 25 bp, Homo sapien
gcgtcgcgtacggtcggccgccgcc

SEQ ID NO: 5869734 - DNA, 25 bp, Homo sapien
cggcgtcgcgtagcgcccagcccgg

SEQ ID NO: 5869735 - DNA, 25 bp, Homo sapien
cgcgcgccgtcgcgataggcggggg

SEQ ID NO: 5869736 - DNA, 25 bp, Homo sapien
cgccggccggacggggtcagcctcc

SEQ ID NO: 5869737 - DNA, 25 bp, Homo sapien
gcggccacggccgaccggtggggag

SEQ ID NO: 5869738 - DNA, 25 bp, Homo sapien
ggctgccatcggcccgccgcgtgcg

SEQ ID NO: 5869739 - DNA, 25 bp, Homo sapien
tgcgggcccgcgttacgggcgcgcg

SEQ ID NO: 5869740 - DNA, 25 bp, Homo sapien
ctgcgggcctcccgcgcaacccggc

SEQ ID NO: 5869741 - DNA, 25 bp, Homo sapien
gggcgtggcgaccgtcggagcgggc

SEQ ID NO: 5869742 - DNA, 25 bp, Homo sapien
cggcgctcggatcgcgcctcccgcg

SEQ ID NO: 5869743 - DNA, 25 bp, Homo sapien
cccgccgcgcgccggttagcctccg

SEQ ID NO: 5869744 - DNA, 25 bp, Homo sapien
gcggcgtcgggcgaccggtcgcctc

SEQ ID NO: 5869745 - DNA, 25 bp, Homo sapien
gcggggcggcacgatcgggcagccc

SEQ ID NO: 5869746 - DNA, 25 bp, Homo sapien
cagggcctacgtcgcggggcgccgc

SEQ ID NO: 5869747 - DNA, 25 bp, Homo sapien
gccgccacgtacgccgggggccgga

SEQ ID NO: 5869748 - DNA, 25 bp, Homo sapien
cgtgcccgacgtacgggcgcgggcg

SEQ ID NO: 5869749 - DNA, 25 bp, Homo sapien
cgcccgcgacgcaccggggcctacg

SEQ ID NO: 5869750 - DNA, 25 bp, Homo sapien
gggtcctcgaccggcacgcgcgccc

SEQ ID NO: 5869751 - DNA, 25 bp, Homo sapien
cccgccctgccgcgcgctagggctc

SEQ ID NO: 5869752 - DNA, 25 bp, Homo sapien
ccgccccgcacgtcgaccggtcgcc

SEQ ID NO: 5869753 - DNA, 25 bp, Homo sapien
cgcccggcgctagaccgcccccgga

SEQ ID NO: 5869754 - DNA, 25 bp, Homo sapien
cccggcgagggctcgcgggcgtcag

SEQ ID NO: 5869755 - DNA, 25 bp, Homo sapien
cccgcggtcgcaacgggccaccgcg

SEQ ID NO: 5869756 - DNA, 25 bp, Homo sapien
cgggcggcaacgcgggctggtcggc

SEQ ID NO: 5869757 - DNA, 25 bp, Homo sapien
cgtcgctcgtcgcgcacccgccccg

SEQ ID NO: 5869758 - DNA, 25 bp, Homo sapien
gcggcgcgaccgagcggtagccggg

SEQ ID NO: 5869759 - DNA, 25 bp, Homo sapien
gcggcgcgccgtccgctatggcccc

SEQ ID NO: 5869760 - DNA, 25 bp, Homo sapien
tgcgggagccgtccgacggggcggc

SEQ ID NO: 5869761 - DNA, 25 bp, Homo sapien
gcgctctcgcccgacggggggcctc

SEQ ID NO: 5869762 - DNA, 25 bp, Homo sapien
gcggcgcgtaccgacgccgacgccg

SEQ ID NO: 5869763 - DNA, 25 bp, Homo sapien
ctgcgcgacgcagcggtgcgggcgc

SEQ ID NO: 5869764 - DNA, 25 bp, Homo sapien
gccgactagcgcgcgccaggccccc

SEQ ID NO: 5869765 - DNA, 25 bp, Homo sapien
ggcctgccgacggaccggtcggggc

SEQ ID NO: 5869766 - DNA, 25 bp, Homo sapien
cgcgcgagcgcctacgcgaggggcg

SEQ ID NO: 5869767 - DNA, 25 bp, Homo sapien
aggcccctcgcgcgagagggcgggc

SEQ ID NO: 5869768 - DNA, 25 bp, Homo sapien
cgctgcgcccgaaccggcggcccgc

SEQ ID NO: 5869769 - DNA, 25 bp, Homo sapien
tggccgacgcgggcccgccgccgct

SEQ ID NO: 5869770 - DNA, 25 bp, Homo sapien
cggcccaccgggcgggccacgcgga

SEQ ID NO: 5869771 - DNA, 25 bp, Homo sapien
ctgcggtggccccccgcgagccgcg

SEQ ID NO: 5869772 - DNA, 25 bp, Homo sapien
gcgcgcgcgcccccccgcgaccgtt

SEQ ID NO: 5869773 - DNA, 25 bp, Homo sapien
ctggcccagccggcggcggtgcccg

SEQ ID NO: 5869774 - DNA, 25 bp, Homo sapien
ggacgccgtctcggcgggcggccgc

SEQ ID NO: 5869775 - DNA, 25 bp, Homo sapien
cgccgtcgcaggccgcccgcgcgtg

SEQ ID NO: 5869776 - DNA, 25 bp, Homo sapien
cccgtcgagcgcgggcccccagcgg

SEQ ID NO: 5869777 - DNA, 25 bp, Homo sapien
ccaggggcggcgggcgtcggcgctc

SEQ ID NO: 5869778 - DNA, 25 bp, Homo sapien
gccggggggcccacgcacgcgggag

SEQ ID NO: 5869779 - DNA, 25 bp, Homo sapien
cccgcgacgcggcaggcgacccgcg

SEQ ID NO: 5869780 - DNA, 25 bp, Homo sapien
cggtgccgacgcctgcggcccggcg

SEQ ID NO: 5869781 - DNA, 25 bp, Homo sapien
gcgggcggggcacggccgtccgcac

SEQ ID NO: 5869782 - DNA, 25 bp, Homo sapien
cagcgacggcccccccgctgccccg

SEQ ID NO: 5869783 - DNA, 25 bp, Homo sapien
agtcccgcgtcggcggcccgcgggc

SEQ ID NO: 5869784 - DNA, 25 bp, Homo sapien
ctggccgggggccacccgcccctgc

SEQ ID NO: 5869785 - DNA, 25 bp, Homo sapien
gcgggcgaccggccgcggacgggca

SEQ ID NO: 5869786 - DNA, 25 bp, Homo sapien
ccctcggcgagccggccccgctgcc

SEQ ID NO: 5869787 - DNA, 25 bp, Homo sapien
cgcccagcggcgcgcccggtcccga

SEQ ID NO: 5869788 - DNA, 25 bp, Homo sapien
cgggcgccgcttcgcgcgcgccgac

SEQ ID NO: 5869789 - DNA, 25 bp, Homo sapien
ggcccggcccatcgggcgcgtgggc

SEQ ID NO: 5869790 - DNA, 25 bp, Homo sapien
tggcccctcgccgcgcgcggggcca

SEQ ID NO: 5869791 - DNA, 25 bp, Homo sapien
cgcggcgtacggcgggcgcgccgac

SEQ ID NO: 5869792 - DNA, 25 bp, Homo sapien
ccagccacccccgtgcgccggggcg

SEQ ID NO: 5869793 - DNA, 25 bp, Homo sapien
gagccggccgacggcgccccccacc

SEQ ID NO: 5869794 - DNA, 25 bp, Homo sapien
gctcagggggccgaccgccggccgc

SEQ ID NO: 5869795 - DNA, 25 bp, Homo sapien
cccgccgcccgcgcgggcgtaagcc

SEQ ID NO: 5869796 - DNA, 25 bp, Homo sapien
ggggtgcgatcgggccgcgcgcggg

SEQ ID NO: 5869797 - DNA, 25 bp, Homo sapien
gccgaccggcgccacgcacgggggc

SEQ ID NO: 5869798 - DNA, 25 bp, Homo sapien
gccgccacgcccgcgcttccgcccg

SEQ ID NO: 5869799 - DNA, 25 bp, Homo sapien
ggcgcgcgggctggcgaccggcgtg

SEQ ID NO: 5869800 - DNA, 25 bp, Homo sapien
cgccctcgggcgcgtcgcgcgaggg

SEQ ID NO: 5869801 - DNA, 25 bp, Homo sapien
ggagcgccggacgggccggccgcac

SEQ ID NO: 5869802 - DNA, 25 bp, Homo sapien
cgcacccgccgtggagcgcgcgcgc

SEQ ID NO: 5869803 - DNA, 25 bp, Homo sapien
gcgcccggggctcccccggtggctg

SEQ ID NO: 5869804 - DNA, 25 bp, Homo sapien
ggtggccgccggcggcggacgccac

SEQ ID NO: 5869805 - DNA, 25 bp, Homo sapien
gcccggcccgccgtcgactggggcg

SEQ ID NO: 5869806 - DNA, 25 bp, Homo sapien
ccgggggcgcgtcgccgagcccacc

SEQ ID NO: 5869807 - DNA, 25 bp, Homo sapien
cacgccggcgcggccgtcccggacg

SEQ ID NO: 5869808 - DNA, 25 bp, Homo sapien
cccggcgcgccagcggacgagcggg

SEQ ID NO: 5869809 - DNA, 25 bp, Homo sapien
cagggggcggacgcccggcgcaccg

SEQ ID NO: 5869810 - DNA, 25 bp, Homo sapien
gctctcgccgtgccggggcgccgcc

SEQ ID NO: 5869811 - DNA, 25 bp, Homo sapien
gtcccccgcgcgacgggcgctcgcc

SEQ ID NO: 5869812 - DNA, 25 bp, Homo sapien
ggccggcttgcgggccccacgcccg

SEQ ID NO: 5869813 - DNA, 25 bp, Homo sapien
cgccggcccgtgtcggcggggccac

SEQ ID NO: 5869814 - DNA, 25 bp, Homo sapien
gggcaccgtccgggcgcacccgccg

SEQ ID NO: 5869815 - DNA, 25 bp, Homo sapien
gggcgctgcgcgtgccgcggcggca

SEQ ID NO: 5869816 - DNA, 25 bp, Homo sapien
cgccgcgtcgcgagggcgcgaccgc

SEQ ID NO: 5869817 - DNA, 25 bp, Homo sapien
gggcatggccgccgtccccccgccg

SEQ ID NO: 5869818 - DNA, 25 bp, Homo sapien
gaccgcggcgcctcggtccgccccg

SEQ ID NO: 5869819 - DNA, 25 bp, Homo sapien
ggcgcgccgccacggggccggaacg

SEQ ID NO: 5869820 - DNA, 25 bp, Homo sapien
ccccgcgtgcgccgcacccaccgcg

SEQ ID NO: 5869821 - DNA, 25 bp, Homo sapien
ggtggcggcccccctgcgcgaccgc

SEQ ID NO: 5869822 - DNA, 25 bp, Homo sapien
accgctgcgggggggcccacgcggc

SEQ ID NO: 5869823 - DNA, 25 bp, Homo sapien
cggcgaccggccggacgaggcggcg

SEQ ID NO: 5869824 - DNA, 25 bp, Homo sapien
gagggcatgccccgcccgcgcggcc

SEQ ID NO: 5869825 - DNA, 25 bp, Homo sapien
ccgcacgcctgagggcggcccccgg

SEQ ID NO: 5869826 - DNA, 25 bp, Homo sapien
tcgcccgaccggcgtccgccgcggc

SEQ ID NO: 5869827 - DNA, 25 bp, Homo sapien
cgccaggcgacgctgccgcgcggcc

SEQ ID NO: 5869828 - DNA, 25 bp, Homo sapien
ggccgcgctccgaaggcgcccgcgg

SEQ ID NO: 5869829 - DNA, 25 bp, Homo sapien
gccgggcgcgaccgccggccagcag

SEQ ID NO: 5869830 - DNA, 25 bp, Homo sapien
cccgcggcaggcccgcccgtgcagg

SEQ ID NO: 5869831 - DNA, 25 bp, Homo sapien
gggcaccccccgcacgccgaccgcc

SEQ ID NO: 5869832 - DNA, 25 bp, Homo sapien
ccgccgtcgggcgccggccgcaggt

SEQ ID NO: 5869833 - DNA, 25 bp, Homo sapien
gcccgccggctcggcccgagcgcga

SEQ ID NO: 5869834 - DNA, 25 bp, Homo sapien
acggcgtcgcacccggcgggggcgc

SEQ ID NO: 5869835 - DNA, 25 bp, Homo sapien
gcgggacgcgtccggccgcccccca

SEQ ID NO: 5869836 - DNA, 25 bp, Homo sapien
gccccgggcccccgcgcatacgggc

SEQ ID NO: 5869837 - DNA, 25 bp, Homo sapien
gccgggcgcctcgccgcgaccccga

SEQ ID NO: 5869838 - DNA, 25 bp, Homo sapien
cgccccgccggccgcatcgcgggtc

SEQ ID NO: 5869839 - DNA, 25 bp, Homo sapien
gcgcggtcgccccccaccggacgcg

SEQ ID NO: 5869840 - DNA, 25 bp, Homo sapien
ggcctggcacgccggggcggcccca

SEQ ID NO: 5869841 - DNA, 25 bp, Homo sapien
cgggcggaggcgtacgcgccgcggg

SEQ ID NO: 5869842 - DNA, 25 bp, Homo sapien
cagccccccgcggcggacggtgcgg

SEQ ID NO: 5869843 - DNA, 25 bp, Homo sapien
gtcgagcccgccgcgtggccccccg

SEQ ID NO: 5869844 - DNA, 25 bp, Homo sapien
ggcgggacggcgctgcgcgcaggcc

SEQ ID NO: 5869845 - DNA, 25 bp, Homo sapien
cgcccggtacgggccgcgcgccagc

SEQ ID NO: 5869846 - DNA, 25 bp, Homo sapien
gcgcccgccgggcgtccgccgctgt

SEQ ID NO: 5869847 - DNA, 25 bp, Homo sapien
tgcagggcccgcccgcgcgtggcgg

SEQ ID NO: 5869848 - DNA, 25 bp, Homo sapien
gtcccccgcgctggcgcaccgcccg

SEQ ID NO: 5869849 - DNA, 25 bp, Homo sapien
gcgcggcccgaccggcgccgatgcc

SEQ ID NO: 5869850 - DNA, 25 bp, Homo sapien
cgccgtggtccggcacgcgccgggc

SEQ ID NO: 5869851 - DNA, 25 bp, Homo sapien
cgaggcgcgccgctgggccgccgag

SEQ ID NO: 5869852 - DNA, 25 bp, Homo sapien
ccacccgcccacgctcggcgcccgg

SEQ ID NO: 5869853 - DNA, 25 bp, Homo sapien
cccggcgcgtaccccgcggcggtgc

SEQ ID NO: 5869854 - DNA, 25 bp, Homo sapien
cggccgcgccgacgcgtcgctgccg

SEQ ID NO: 5869855 - DNA, 25 bp, Homo sapien
ccgggcggcgctcccgtccgcgcct

SEQ ID NO: 5869856 - DNA, 25 bp, Homo sapien
ggcgccactccggcggggccgggtc

SEQ ID NO: 5869857 - DNA, 25 bp, Homo sapien
ctgcgccccggcgtcgccgggccgt

SEQ ID NO: 5869858 - DNA, 25 bp, Homo sapien
gtgcgcccccccgcgggtgcggagc

SEQ ID NO: 5869859 - DNA, 25 bp, Homo sapien
ggccgcgcgacgccggtagccgcgg

SEQ ID NO: 5869860 - DNA, 25 bp, Homo sapien
gcgctggcccccccctgcgcgtcgg

SEQ ID NO: 5869861 - DNA, 25 bp, Homo sapien
gcgcgtccgccacctccggccgggc

SEQ ID NO: 5869862 - DNA, 25 bp, Homo sapien
gatcgcgccgcaggcggccccgcgc

SEQ ID NO: 5869863 - DNA, 25 bp, Homo sapien
cccgcgcttgggcgccccgtggccc

SEQ ID NO: 5869864 - DNA, 25 bp, Homo sapien
gagcgcgcgcgacgcgccggtgcgc

SEQ ID NO: 5869865 - DNA, 25 bp, Homo sapien
ctgcccggccgtccgccgagggccg

SEQ ID NO: 5869866 - DNA, 25 bp, Homo sapien
ccggggcgcctggtcgcgccagggc

SEQ ID NO: 5869867 - DNA, 25 bp, Homo sapien
tcccccgcggggcatgcgcccgggc

SEQ ID NO: 5869868 - DNA, 25 bp, Homo sapien
cgagcggtcgccagggggccccggc

SEQ ID NO: 5869869 - DNA, 25 bp, Homo sapien
gggcgcccgtctggcggcggcgagc

SEQ ID NO: 5869870 - DNA, 25 bp, Homo sapien
cggcgggccgcgagggccctcaggc

SEQ ID NO: 5869871 - DNA, 25 bp, Homo sapien
tgcagcgtgccgccgcggccggcgc

SEQ ID NO: 5869872 - DNA, 25 bp, Homo sapien
tgcgccgcagtcccgcgggccccgg

SEQ ID NO: 5869873 - DNA, 25 bp, Homo sapien
gcccgcgcgtcgcggccggcagctg

SEQ ID NO: 5869874 - DNA, 25 bp, Homo sapien
gaccgggcgtcgcgccgccaggcgc

SEQ ID NO: 5869875 - DNA, 25 bp, Homo sapien
gggcccttgcgccgccccggggcac

SEQ ID NO: 5869876 - DNA, 25 bp, Homo sapien
tgggcggacgggcgctcgccggcgc

SEQ ID NO: 5869877 - DNA, 25 bp, Homo sapien
tggcgggcccggtcgccccgcaggg

SEQ ID NO: 5869878 - DNA, 25 bp, Homo sapien
tcgccgcgccggacggccctgcgcg

SEQ ID NO: 5869879 - DNA, 25 bp, Homo sapien
gcgcctcgcggcggagcgccgaccc

SEQ ID NO: 5869880 - DNA, 25 bp, Homo sapien
cgcggcggcggtacggcgcggacgc

SEQ ID NO: 5869881 - DNA, 25 bp, Homo sapien
ttcgcgacggcgccgccggcgcccc

SEQ ID NO: 5869882 - DNA, 25 bp, Homo sapien
gcgcccccgtcgccggcgggcggta

SEQ ID NO: 5869883 - DNA, 25 bp, Homo sapien
gcgcgcgaccggccggccaaggccc

SEQ ID NO: 5869884 - DNA, 25 bp, Homo sapien
ccccaccccgcgggaccacgcgcgc

SEQ ID NO: 5869885 - DNA, 25 bp, Homo sapien
gccggtgggcccgccgagcgctccg

SEQ ID NO: 5869886 - DNA, 25 bp, Homo sapien
ccgcgggccgacgtcacggcggcgg

SEQ ID NO: 5869887 - DNA, 25 bp, Homo sapien
gcgcgggccggcgacaggccctccg

SEQ ID NO: 5869888 - DNA, 25 bp, Homo sapien
ccgcggccggccgagcacgccccag

SEQ ID NO: 5869889 - DNA, 25 bp, Homo sapien
gccgccggcacggcgtcccggggtg

SEQ ID NO: 5869890 - DNA, 25 bp, Homo sapien
gcagcgcaacggcgggcccccccgc

SEQ ID NO: 5869891 - DNA, 25 bp, Homo sapien
gcgcgggacgcccccccggagcgtc

SEQ ID NO: 5869892 - DNA, 25 bp, Homo sapien
gcgcttcggggggcgcgacggcccg

SEQ ID NO: 5869893 - DNA, 25 bp, Homo sapien
gcccccggcgcgaaccggccgcgtc

SEQ ID NO: 5869894 - DNA, 25 bp, Homo sapien
ggcgccggcgcgacgccgggcgtca

SEQ ID NO: 5869895 - DNA, 25 bp, Homo sapien
gcggctagggcccacgcgcgggccg

SEQ ID NO: 5869896 - DNA, 25 bp, Homo sapien
cccagcgcggggggcctgccccagc

SEQ ID NO: 5869897 - DNA, 25 bp, Homo sapien
ggtgcccggtcggcggcccccagcc

SEQ ID NO: 5869898 - DNA, 25 bp, Homo sapien
tcccccggccgcacggcggtggggc

SEQ ID NO: 5869899 - DNA, 25 bp, Homo sapien
ggggcccggcgggaccggcactcgc

SEQ ID NO: 5869900 - DNA, 25 bp, Homo sapien
ggccgcgaccgccggccggtggtgg

SEQ ID NO: 5869901 - DNA, 25 bp, Homo sapien
cgcgctgcgtggtcggcgcgggccg

SEQ ID NO: 5869902 - DNA, 25 bp, Homo sapien
gcgtggcgccggccggcgctggtcc

SEQ ID NO: 5869903 - DNA, 25 bp, Homo sapien
gcgctgaggcgcgcccgcggccctc

SEQ ID NO: 5869904 - DNA, 25 bp, Homo sapien
aggcggcggcaccgcgcgccctccg

SEQ ID NO: 5869905 - DNA, 25 bp, Homo sapien
gcacgccggccacggtccgcgggcc

SEQ ID NO: 5869906 - DNA, 25 bp, Homo sapien
cgctcgcacccgggtggccggccgg

SEQ ID NO: 5869907 - DNA, 25 bp, Homo sapien
gcacgcgggcccccggtgacggccc

SEQ ID NO: 5869908 - DNA, 25 bp, Homo sapien
cgacgccgggctggcgacgcgcgcc

SEQ ID NO: 5869909 - DNA, 25 bp, Homo sapien
gcgccggcgctgcgacccgacgcgc

SEQ ID NO: 5869910 - DNA, 25 bp, Homo sapien
ccgcacccccgcgcgagcaggccgg

SEQ ID NO: 5869911 - DNA, 25 bp, Homo sapien
gagggccgtcggccggcctccggcc

SEQ ID NO: 5869912 - DNA, 25 bp, Homo sapien
cgcgccccatgccgcgccggagcgc

SEQ ID NO: 5869913 - DNA, 25 bp, Homo sapien
cgctgccgcgggcgcgcctcgggtg

SEQ ID NO: 5869914 - DNA, 25 bp, Homo sapien
cccgggcgccgcgacgccgggtcca

SEQ ID NO: 5869915 - DNA, 25 bp, Homo sapien
cgccctcgcccgccggcacgctccg

SEQ ID NO: 5869916 - DNA, 25 bp, Homo sapien
gaggccggcgccccacgcggtggcc

SEQ ID NO: 5869917 - DNA, 25 bp, Homo sapien
gcgctcgcgccgcgcgcggagctgg

SEQ ID NO: 5869918 - DNA, 25 bp, Homo sapien
gcgggggtcggcagcgcccgtgccc

SEQ ID NO: 5869919 - DNA, 25 bp, Homo sapien
ctgcgcgcggaccggcgtgcccgcc

SEQ ID NO: 5869920 - DNA, 25 bp, Homo sapien
ggccgtaccgcggccggcgcgacgg

SEQ ID NO: 5869921 - DNA, 25 bp, Homo sapien
cccacgggcacggcgccgaccggcc

SEQ ID NO: 5869922 - DNA, 25 bp, Homo sapien
cggttggccgcgcgcgcgtcggcgc

SEQ ID NO: 5869923 - DNA, 25 bp, Homo sapien
gcggactccgcgcggcgggacggcg

SEQ ID NO: 5869924 - DNA, 25 bp, Homo sapien
ccgcccgcgacgcgttgggccgccc

SEQ ID NO: 5869925 - DNA, 25 bp, Homo sapien
gccgcacgccccgaccgcgcccgga

SEQ ID NO: 5869926 - DNA, 25 bp, Homo sapien
caccccgccgaggcgggccgcgctg

SEQ ID NO: 5869927 - DNA, 25 bp, Homo sapien
tccccgacgccgtccgccggccgcc

SEQ ID NO: 5869928 - DNA, 25 bp, Homo sapien
cctccgccggcggtcgccgagggcc

SEQ ID NO: 5869929 - DNA, 25 bp, Homo sapien
tgccgcctcccggcgacgccgggcg

SEQ ID NO: 5869930 - DNA, 25 bp, Homo sapien
gcccgcgcggacccggccgtcggac

SEQ ID NO: 5869931 - DNA, 25 bp, Homo sapien
ccgccagcggctgctcgcgcggcgg

SEQ ID NO: 5869932 - DNA, 25 bp, Homo sapien
ggccgcgggcgtcggttcggccgcc

SEQ ID NO: 5869933 - DNA, 25 bp, Homo sapien
gagcgcccgcgtcgccgcgcccacc

SEQ ID NO: 5869934 - DNA, 25 bp, Homo sapien
cagcgcccgccgacggccggctccc

SEQ ID NO: 5869935 - DNA, 25 bp, Homo sapien
gggcggcccggcagcgtcgtgcccc

SEQ ID NO: 5869936 - DNA, 25 bp, Homo sapien
agcgccaggggcctgcgccggcgcg

SEQ ID NO: 5869937 - DNA, 25 bp, Homo sapien
aggccacgggcgtccgccgccggcc

SEQ ID NO: 5869938 - DNA, 25 bp, Homo sapien
caggcccggtggaccggcgcggccc

SEQ ID NO: 5869939 - DNA, 25 bp, Homo sapien
cgcggacgctgggcgcggccgcctg

SEQ ID NO: 5869940 - DNA, 25 bp, Homo sapien
cccgggcgccggaccgtcgcgctcc

SEQ ID NO: 5869941 - DNA, 25 bp, Homo sapien
gggaaggccggcgaccgcgcggccg

SEQ ID NO: 5869942 - DNA, 25 bp, Homo sapien
gggcggcccggtcgctcccggcgtc

SEQ ID NO: 5869943 - DNA, 25 bp, Homo sapien
cgccgaccggcggcgtcaccggccg

SEQ ID NO: 5869944 - DNA, 25 bp, Homo sapien
cgccccgcggtggtgccccggcgtc

SEQ ID NO: 5869945 - DNA, 25 bp, Homo sapien
gcgccccggcggtcgccaccgtcgg

SEQ ID NO: 5869946 - DNA, 25 bp, Homo sapien
gcggcgcgcgacggcgcgcctcgtc

SEQ ID NO: 5869947 - DNA, 25 bp, Homo sapien
ccggggccggggcgcgccgtcagca

SEQ ID NO: 5869948 - DNA, 25 bp, Homo sapien
cccacgcccgtggacgcgccgggcc

SEQ ID NO: 5869949 - DNA, 25 bp, Homo sapien
gcgcggccggcgaagcgggcgggag

SEQ ID NO: 5869950 - DNA, 25 bp, Homo sapien
gccggcgtgcgggcgagggcgccac

SEQ ID NO: 5869951 - DNA, 25 bp, Homo sapien
ccggctgcgcgcccccccgcgacag

SEQ ID NO: 5869952 - DNA, 25 bp, Homo sapien
ccacgggcggcgagctgccgggcgg

SEQ ID NO: 5869953 - DNA, 25 bp, Homo sapien
ccagcactcgcggggccgccgccgc

SEQ ID NO: 5869954 - DNA, 25 bp, Homo sapien
cgcccgcgcgacgggggcccacacg

SEQ ID NO: 5869955 - DNA, 25 bp, Homo sapien
atcgggcggcaccccgcgccggggc

SEQ ID NO: 5869956 - DNA, 25 bp, Homo sapien
cggcgccgatcggcccgggccaccc

SEQ ID NO: 5869957 - DNA, 25 bp, Homo sapien
gcggggaccggccgggtccgccgca

SEQ ID NO: 5869958 - DNA, 25 bp, Homo sapien
tcggcccggccgtcgcgcggcacgg

SEQ ID NO: 5869959 - DNA, 25 bp, Homo sapien
ccgctggcggccgggggcgtcccac

SEQ ID NO: 5869960 - DNA, 25 bp, Homo sapien
ccgcgccgggcgcgcgacgccagct

SEQ ID NO: 5869961 - DNA, 25 bp, Homo sapien
gcccgagccgcgtgcccggtccggg

SEQ ID NO: 5869962 - DNA, 25 bp, Homo sapien
ccgcgccccccgctggcgcgctgga

SEQ ID NO: 5869963 - DNA, 25 bp, Homo sapien
cccgccgcggcacccgaggcacggg

SEQ ID NO: 5869964 - DNA, 25 bp, Homo sapien
cagccgcgggcccgcaacggccccc

SEQ ID NO: 5869965 - DNA, 25 bp, Homo sapien
cgagccgagcgtcggcgcccgcggg

SEQ ID NO: 5869966 - DNA, 25 bp, Homo sapien
ggactcgggacgcccggcgcggggc

SEQ ID NO: 5869967 - DNA, 25 bp, Homo sapien
gcgcgcccgccgaacgcggccccca

SEQ ID NO: 5869968 - DNA, 25 bp, Homo sapien
cgccgcgccgcgcccgcggaatggc

SEQ ID NO: 5869969 - DNA, 25 bp, Homo sapien
cgcggccacgcgcgacggacgggcc

SEQ ID NO: 5869970 - DNA, 25 bp, Homo sapien
cgcgccgtccggcccgggcgttcgc

SEQ ID NO: 5869971 - DNA, 25 bp, Homo sapien
cggtgccgcgggccccccgagcctc

SEQ ID NO: 5869972 - DNA, 25 bp, Homo sapien
tgggcggcgatccgcgccggcgcgg

SEQ ID NO: 5869973 - DNA, 25 bp, Homo sapien
gtgcgcacgggccccgccggcaccg

SEQ ID NO: 5869974 - DNA, 25 bp, Homo sapien
gacgcggggtcgcccgcgcccagcc

SEQ ID NO: 5869975 - DNA, 25 bp, Homo sapien
gccgggggggacgcctctcgcgccg

SEQ ID NO: 5869976 - DNA, 25 bp, Homo sapien
gtgccgtgcggggcgccgcccctcg

SEQ ID NO: 5869977 - DNA, 25 bp, Homo sapien
gcgcggcgggtgcaccggcgacggg

SEQ ID NO: 5869978 - DNA, 25 bp, Homo sapien
cgagggtcccggccagcgccccggc

SEQ ID NO: 5869979 - DNA, 25 bp, Homo sapien
cgcgcgccgtgcgccggcgccaacc

SEQ ID NO: 5869980 - DNA, 25 bp, Homo sapien
gcgcgctcgcgccgtggcggtcggc

SEQ ID NO: 5869981 - DNA, 25 bp, Homo sapien
gcccgcgcccgccagtcggcgcgca

SEQ ID NO: 5869982 - DNA, 25 bp, Homo sapien
cgccgcccgcggtctggcggcgcac

SEQ ID NO: 5869983 - DNA, 25 bp, Homo sapien
ggccggcggcgcacgcaccgcgggt

SEQ ID NO: 5869984 - DNA, 25 bp, Homo sapien
tgggaggccgcgaccggcccgcccc

SEQ ID NO: 5869985 - DNA, 25 bp, Homo sapien
ggcgaccgcgcccccgtctcgggcc

SEQ ID NO: 5869986 - DNA, 25 bp, Homo sapien
cccgcccgcggcaccggtcggtcgc

SEQ ID NO: 5869987 - DNA, 25 bp, Homo sapien
catcggcgagggccccccgcccggc

SEQ ID NO: 5869988 - DNA, 25 bp, Homo sapien
ccgcccgccgggccgtcgccaacgc

SEQ ID NO: 5869989 - DNA, 25 bp, Homo sapien
ggctgcgtggcgcgacccgggcccc

SEQ ID NO: 5869990 - DNA, 25 bp, Homo sapien
gtccggcgcgaccccccgcggtgcc

SEQ ID NO: 5869991 - DNA, 25 bp, Homo sapien
gcgccgggggcgcgctgccactggg

SEQ ID NO: 5869992 - DNA, 25 bp, Homo sapien
cagcgctacgggcgggccggcgccg

SEQ ID NO: 5869993 - DNA, 25 bp, Homo sapien
gcggctcccggacgggccacgcccc

SEQ ID NO: 5869994 - DNA, 25 bp, Homo sapien
cccggcggccgcactggcggaggcg

SEQ ID NO: 5869995 - DNA, 25 bp, Homo sapien
actcgcgcggcacgccccggccggg

SEQ ID NO: 5869996 - DNA, 25 bp, Homo sapien
ggctggcgcccacggcggtgcgcgg

SEQ ID NO: 5869997 - DNA, 25 bp, Homo sapien
gtcactgcgccggcccccccgcggc

SEQ ID NO: 5869998 - DNA, 25 bp, Homo sapien
gtgccaggcgcgcccccccggcgtc

SEQ ID NO: 5869999 - DNA, 25 bp, Homo sapien
gccggcgtctagggccccgcccgcc

SEQ ID NO: 5870000 - DNA, 25 bp, Homo sapien
cgcgcgcggcgccggataggggccc

SEQ ID NO: 5870001 - DNA, 25 bp, Homo sapien
gggcccggcccgcaggcgcgcctag

SEQ ID NO: 5870002 - DNA, 25 bp, Homo sapien
tgcgggctcccgcgcgtccgcggcg

SEQ ID NO: 5870003 - DNA, 25 bp, Homo sapien
gaccgcgggcagaccgcccggcccc

SEQ ID NO: 5870004 - DNA, 25 bp, Homo sapien
gggcgggcgcgaccacggacgcccc

SEQ ID NO: 5870005 - DNA, 25 bp, Homo sapien
ggtcggtcgccgcggaggcgcgccg

SEQ ID NO: 5870006 - DNA, 25 bp, Homo sapien
ccgcgcgacggcaacccgccgggcg

SEQ ID NO: 5870007 - DNA, 25 bp, Homo sapien
gagcggcggcggggttgccggcccc

SEQ ID NO: 5870008 - DNA, 25 bp, Homo sapien
gccagccgcgaacgggccgcccccc

SEQ ID NO: 5870009 - DNA, 25 bp, Homo sapien
cacgcggcgtgccgccgggccgacc

SEQ ID NO: 5870010 - DNA, 25 bp, Homo sapien
ggccggaccgggcgagcgccgggct

SEQ ID NO: 5870011 - DNA, 25 bp, Homo sapien
gccgcgggccgcggatccgctcccc

SEQ ID NO: 5870012 - DNA, 25 bp, Homo sapien
cccggccgcatcgccccggacggcg

SEQ ID NO: 5870013 - DNA, 25 bp, Homo sapien
cccgccggccgcccgtcgcgcacag

SEQ ID NO: 5870014 - DNA, 25 bp, Homo sapien
cggggacgccgcgagcccggcaccg

SEQ ID NO: 5870015 - DNA, 25 bp, Homo sapien
gctgcgcgcgacggcgtcgggccgc

SEQ ID NO: 5870016 - DNA, 25 bp, Homo sapien
gggccggcccgcgaccgggctcacg

SEQ ID NO: 5870017 - DNA, 25 bp, Homo sapien
cggctcgccgggccgacgcgggcgt

SEQ ID NO: 5870018 - DNA, 25 bp, Homo sapien
ggccgggcagcccgacggtcgcgcg

SEQ ID NO: 5870019 - DNA, 25 bp, Homo sapien
gcgtggggggcgcgaccgccgggct

SEQ ID NO: 5870020 - DNA, 25 bp, Homo sapien
ggcaggctcgtgcccgggcgccgcg

SEQ ID NO: 5870021 - DNA, 25 bp, Homo sapien
tgcgtggcgcggtcgcggccgccgc

SEQ ID NO: 5870022 - DNA, 25 bp, Homo sapien
ccggcccgcggacgtggcccctgcc

SEQ ID NO: 5870023 - DNA, 25 bp, Homo sapien
ccgccccagcaccggcggagcggcg

SEQ ID NO: 5870024 - DNA, 25 bp, Homo sapien
gtcgggccggcgtcgcacggcgccc

SEQ ID NO: 5870025 - DNA, 25 bp, Homo sapien
gtcgcccccccccgagccggcagcg

SEQ ID NO: 5870026 - DNA, 25 bp, Homo sapien
gagggcgacgcccccccggcgtcgc

SEQ ID NO: 5870027 - DNA, 25 bp, Homo sapien
cgccgggcccgccggcagacggagg

SEQ ID NO: 5870028 - DNA, 25 bp, Homo sapien
ccggacgaccgccaggccgcgcgcg

SEQ ID NO: 5870029 - DNA, 25 bp, Homo sapien
ggcgcgtcgcacgggcccggcgcgt

SEQ ID NO: 5870030 - DNA, 25 bp, Homo sapien
cagccggtcgctgggcgcccccggc

SEQ ID NO: 5870031 - DNA, 25 bp, Homo sapien
ccgtcgctggtgcgccgcggcgccc

SEQ ID NO: 5870032 - DNA, 25 bp, Homo sapien
gtgcgccggcgccgacacgcgcccc

SEQ ID NO: 5870033 - DNA, 25 bp, Homo sapien
ggggcggtgccgccaggcgccaggg

SEQ ID NO: 5870034 - DNA, 25 bp, Homo sapien
gcggggtgccgccccacgccgcctc

SEQ ID NO: 5870035 - DNA, 25 bp, Homo sapien
cggccgttgcggccgcaccccgcgg

SEQ ID NO: 5870036 - DNA, 25 bp, Homo sapien
ccaggcccggcgacgggtgcgccgc

SEQ ID NO: 5870037 - DNA, 25 bp, Homo sapien
tgcgcccgcgggcgagacggccgcg

SEQ ID NO: 5870038 - DNA, 25 bp, Homo sapien
tccccgcgcgacggaggccccgcgg

SEQ ID NO: 5870039 - DNA, 25 bp, Homo sapien
cgcgcgctcggggcgaccgcagccg

SEQ ID NO: 5870040 - DNA, 25 bp, Homo sapien
cccgagccggtgcacgccgcgccgc

SEQ ID NO: 5870041 - DNA, 25 bp, Homo sapien
agccaggcaggccgccggcgcccgg

SEQ ID NO: 5870042 - DNA, 25 bp, Homo sapien
ggggtgcgccgccgggactgcccgg

SEQ ID NO: 5870043 - DNA, 25 bp, Homo sapien
cccgctcgaccgcccgccgcggagg

SEQ ID NO: 5870044 - DNA, 25 bp, Homo sapien
cgggacgcgccgccccgtcgccacc

SEQ ID NO: 5870045 - DNA, 25 bp, Homo sapien
ctcccgggcgcccggccgtcgcagc

SEQ ID NO: 5870046 - DNA, 25 bp, Homo sapien
gcggtccgtgcgcgcgcggtcggcg

SEQ ID NO: 5870047 - DNA, 25 bp, Homo sapien
agcgccctcgcgcgccccccgcacg

SEQ ID NO: 5870048 - DNA, 25 bp, Homo sapien
gggcaacgcgccccccgtcggccgc

SEQ ID NO: 5870049 - DNA, 25 bp, Homo sapien
gagcgcgggccgcagcgggtgcccc

SEQ ID NO: 5870050 - DNA, 25 bp, Homo sapien
ggccgcgggggccgacgcctcgtcg

SEQ ID NO: 5870051 - DNA, 25 bp, Homo sapien
gggcccgcccagtgggccggcgagg

SEQ ID NO: 5870052 - DNA, 25 bp, Homo sapien
ggcgcgaccggtcgcggccgcggag

SEQ ID NO: 5870053 - DNA, 25 bp, Homo sapien
gacgccgccgacgggcgcgcggcca

SEQ ID NO: 5870054 - DNA, 25 bp, Homo sapien
cgcatccgtcgcgcgggcgcggcgc

SEQ ID NO: 5870055 - DNA, 25 bp, Homo sapien
gcggccccgaaccgccgccccacgc

SEQ ID NO: 5870056 - DNA, 25 bp, Homo sapien
gcggggcgcaggccgcgcgaggcac

SEQ ID NO: 5870057 - DNA, 25 bp, Homo sapien
cgtgcggactcgccgcgcggccggg

SEQ ID NO: 5870058 - DNA, 25 bp, Homo sapien
ggccacccggtgccgcgggtcgccg

SEQ ID NO: 5870059 - DNA, 25 bp, Homo sapien
ggcggacgggcaccccgcggcaccg

SEQ ID NO: 5870060 - DNA, 25 bp, Homo sapien
acgcgcgccgcccgggtaggcccgc

SEQ ID NO: 5870061 - DNA, 25 bp, Homo sapien
gcacgccggccggcggacgcagcgg

SEQ ID NO: 5870062 - DNA, 25 bp, Homo sapien
tccggtgcgcgccggggtcgccgcg

SEQ ID NO: 5870063 - DNA, 25 bp, Homo sapien
gccgcccgaagtccgcgcccgcgcc

SEQ ID NO: 5870064 - DNA, 25 bp, Homo sapien
gccgggcgccggcggcagatgccgg

SEQ ID NO: 5870065 - DNA, 25 bp, Homo sapien
cgcgcggcgcgccggtgtcgccgct

SEQ ID NO: 5870066 - DNA, 25 bp, Homo sapien
ggggcggcgcgggcgtagcggtgcc

SEQ ID NO: 5870067 - DNA, 25 bp, Homo sapien
gagcgggacggccgccgaccccgcg

SEQ ID NO: 5870068 - DNA, 25 bp, Homo sapien
ctaggcgcgcctgcgggccgggccc

SEQ ID NO: 5870069 - DNA, 25 bp, Homo sapien
cggtgccgcggggtgcccgtccgcc

SEQ ID NO: 5870070 - DNA, 25 bp, Homo sapien
cacccgaggcgcgcccgcggcagcg

SEQ ID NO: 5870071 - DNA, 25 bp, Homo sapien
cggcccgcgcgtgggccctagccgc

SEQ ID NO: 5870072 - DNA, 25 bp, Homo sapien
gcgccgacgcgcgcgcggccaaccg

SEQ ID NO: 5870073 - DNA, 25 bp, Homo sapien
ctccgcggccgcgaccggtcgcgcc

SEQ ID NO: 5870074 - DNA, 25 bp, Homo sapien
ggccaccgcgtggggcgccggcctc

SEQ ID NO: 5870075 - DNA, 25 bp, Homo sapien
gtgggacgcccccggccgccagcgg

SEQ ID NO: 5870076 - DNA, 25 bp, Homo sapien
ggggccgggcggtctgcccgcggtc

SEQ ID NO: 5870077 - DNA, 25 bp, Homo sapien
tgcgcgccgactggcgggcgcgggc

SEQ ID NO: 5870078 - DNA, 25 bp, Homo sapien
ccgcgcaccgccgtgggcgccagcc

SEQ ID NO: 5870079 - DNA, 25 bp, Homo sapien
gcccggcgcgtgccggaccacggcg

SEQ ID NO: 5870080 - DNA, 25 bp, Homo sapien
tgccgccgcggcacgcgcagcgccc

SEQ ID NO: 5870081 - DNA, 25 bp, Homo sapien
gtccgacggccgggtccgcgcgggc

SEQ ID NO: 5870082 - DNA, 25 bp, Homo sapien
cgcggcgcccgggcacgagcctgcc

SEQ ID NO: 5870083 - DNA, 25 bp, Homo sapien
cgcgcagggccgtccggcgcggcga

SEQ ID NO: 5870084 - DNA, 25 bp, Homo sapien
tggccccgcgcgcggcgaggggcca

SEQ ID NO: 5870085 - DNA, 25 bp, Homo sapien
ccgcggctaccggcgtcgcgcggcc

SEQ ID NO: 5870086 - DNA, 25 bp, Homo sapien
ccgcgggcgccttcggagcgcggcc

SEQ ID NO: 5870087 - DNA, 25 bp, Homo sapien
gacgccggggcaccaccgcggggcg

SEQ ID NO: 5870088 - DNA, 25 bp, Homo sapien
gctggggcaggccccccgcgctggg

SEQ ID NO: 5870089 - DNA, 25 bp, Homo sapien
ctgtcgcgggggggcgcgcagccgg

SEQ ID NO: 5870090 - DNA, 25 bp, Homo sapien
ggggcacccgctgcggcccgcgctc

SEQ ID NO: 5870091 - DNA, 25 bp, Homo sapien
gagcgccgacgcccgccgcccctgg

SEQ ID NO: 5870092 - DNA, 25 bp, Homo sapien
gccccaccgccgtgcggccggggga

SEQ ID NO: 5870093 - DNA, 25 bp, Homo sapien
gcctgagggccctcgcggcccgccg

SEQ ID NO: 5870094 - DNA, 25 bp, Homo sapien
cgcggctcgcggggggccaccgcag

SEQ ID NO: 5870095 - DNA, 25 bp, Homo sapien
ccgcgccggcgcggatcgccgccca

SEQ ID NO: 5870096 - DNA, 25 bp, Homo sapien
gccgcgtgggcccccccgcagcggt

SEQ ID NO: 5870097 - DNA, 25 bp, Homo sapien
cggtgcgccgggcgtccgccccctg

SEQ ID NO: 5870098 - DNA, 25 bp, Homo sapien
cgacgaggcgtcggcccccgcggcc

SEQ ID NO: 5870099 - DNA, 25 bp, Homo sapien
gggcgccgtgcgacgccggcccgac

SEQ ID NO: 5870100 - DNA, 25 bp, Homo sapien
gacgccgggagcgaccgggccgccc

SEQ ID NO: 5870101 - DNA, 25 bp, Homo sapien
cggtgccgggctcgcggcgtccccg

SEQ ID NO: 5870102 - DNA, 25 bp, Homo sapien
ggcggccgaaccgacgcccgcggcc

SEQ ID NO: 5870103 - DNA, 25 bp, Homo sapien
cccgcggcgcgtacgcctccgcccg

SEQ ID NO: 5870104 - DNA, 25 bp, Homo sapien
cgccgaccgcgcgcgcacggaccgc

SEQ ID NO: 5870105 - DNA, 25 bp, Homo sapien
ccgacggtggcgaccgccggggcgc

SEQ ID NO: 5870106 - DNA, 25 bp, Homo sapien
cctccgcggcgggcggtcgagcggg

SEQ ID NO: 5870107 - DNA, 25 bp, Homo sapien
tgcccgtccgcggccggtcgcccgc

SEQ ID NO: 5870108 - DNA, 25 bp, Homo sapien
ctcccgcccgcttcgccggccgcgc

SEQ ID NO: 5870109 - DNA, 25 bp, Homo sapien
gccggggccccctggcgaccgctcg

SEQ ID NO: 5870110 - DNA, 25 bp, Homo sapien
ccgacgcgcaggggggggccagcgc

SEQ ID NO: 5870111 - DNA, 25 bp, Homo sapien
gtgcgccgccagaccgcgggcggcg

SEQ ID NO: 5870112 - DNA, 25 bp, Homo sapien
gccgggcggggggccctcgccgatg

SEQ ID NO: 5870113 - DNA, 25 bp, Homo sapien
gccgaccgccacggcgcgagcgcgc

SEQ ID NO: 5870114 - DNA, 25 bp, Homo sapien
ccaccaccggccggcggtcgcggcc

SEQ ID NO: 5870115 - DNA, 25 bp, Homo sapien
ggggcacgacgctgccgggccgccc

SEQ ID NO: 5870116 - DNA, 25 bp, Homo sapien
gccattccgcgggcgcggcgcggcg

SEQ ID NO: 5870117 - DNA, 25 bp, Homo sapien
gcggcggcggccccgcgagtgctgg

SEQ ID NO: 5870118 - DNA, 25 bp, Homo sapien
cgttccggccccgtggcggcgcgcc

SEQ ID NO: 5870119 - DNA, 25 bp, Homo sapien
gggggccgttgcgggcccgcggctg

SEQ ID NO: 5870120 - DNA, 25 bp, Homo sapien
gcgcccccgccgggtgcgacgccgt

SEQ ID NO: 5870121 - DNA, 25 bp, Homo sapien
ggcaccgctacgcccgcgccgcccc

SEQ ID NO: 5870122 - DNA, 25 bp, Homo sapien
gcgggggggcccgccgttgcgctgc

SEQ ID NO: 5870123 - DNA, 25 bp, Homo sapien
acgcccgcgtcggcccggcgagccg

SEQ ID NO: 5870124 - DNA, 25 bp, Homo sapien
tggggggcggccggacgcgtcccgc

SEQ ID NO: 5870125 - DNA, 25 bp, Homo sapien
gccgggggcgcccagcgaccggctg

SEQ ID NO: 5870126 - DNA, 25 bp, Homo sapien
ggtgggctcggcgacgcgcccccgg

SEQ ID NO: 5870127 - DNA, 25 bp, Homo sapien
gtgcctcgcgcggcctgcgccccgc

SEQ ID NO: 5870128 - DNA, 25 bp, Homo sapien
taccgcccgccggcgacgggggcgc

SEQ ID NO: 5870129 - DNA, 25 bp, Homo sapien
ccggcctgctcgcgcgggggtgcgg

SEQ ID NO: 5870130 - DNA, 25 bp, Homo sapien
gcggcggccgcgaccgcgccacgca

SEQ ID NO: 5870131 - DNA, 25 bp, Homo sapien
gctcgccgccgccagacgggcgccc

SEQ ID NO: 5870132 - DNA, 25 bp, Homo sapien
ccctggcgcctggcggcaccgcccc

SEQ ID NO: 5870133 - DNA, 25 bp, Homo sapien
acagcggcggacgcccggcgggcgc

SEQ ID NO: 5870134 - DNA, 25 bp, Homo sapien
ccgcaccgtccgccgcggggggctg

SEQ ID NO: 5870135 - DNA, 25 bp, Homo sapien
cgcccggcgtcgccgggaggcggca

SEQ ID NO: 5870136 - DNA, 25 bp, Homo sapien
ccgggggccgccctcaggcgtgcgg

SEQ ID NO: 5870137 - DNA, 25 bp, Homo sapien
gccggggcgctggccgggaccctcg

SEQ ID NO: 5870138 - DNA, 25 bp, Homo sapien
ccgtcgcgccggccgcggtacggcc

SEQ ID NO: 5870139 - DNA, 25 bp, Homo sapien
ccgccgcgcgagcagccgctggcgg

SEQ ID NO: 5870140 - DNA, 25 bp, Homo sapien
tggccgcgcgcccgtcggcggcgtc

SEQ ID NO: 5870141 - DNA, 25 bp, Homo sapien
cagccaccgggggagccccgggcgc

SEQ ID NO: 5870142 - DNA, 25 bp, Homo sapien
gccgcggcggacgccggtcgggcga

SEQ ID NO: 5870143 - DNA, 25 bp, Homo sapien
cgcggcgaccccggcgcgcaccgga

SEQ ID NO: 5870144 - DNA, 25 bp, Homo sapien
ggtgggcgcggcgacgcgggcgctc

SEQ ID NO: 5870145 - DNA, 25 bp, Homo sapien
cgctgccggctcgggggggggcgac

SEQ ID NO: 5870146 - DNA, 25 bp, Homo sapien
ccgggcgccggcggcctgcctggct

SEQ ID NO: 5870147 - DNA, 25 bp, Homo sapien
cgcgggtcgcctgccgcgtcgcggg

SEQ ID NO: 5870148 - DNA, 25 bp, Homo sapien
ggcaggggccacgtccgcgggccgg

SEQ ID NO: 5870149 - DNA, 25 bp, Homo sapien
gagggccgcgggcgcgcctcagcgc

SEQ ID NO: 5870150 - DNA, 25 bp, Homo sapien
cccgcgcgcggcccgatcgcacccc

SEQ ID NO: 5870151 - DNA, 25 bp, Homo sapien
cggcgccggcccgcccgtagcgctg

SEQ ID NO: 5870152 - DNA, 25 bp, Homo sapien
cggggcagcgggggggccgtcgctg

SEQ ID NO: 5870153 - DNA, 25 bp, Homo sapien
tgctgacggcgcgccccggccccgg

SEQ ID NO: 5870154 - DNA, 25 bp, Homo sapien
cgcggtgggtgcggcgcacgcgggg

SEQ ID NO: 5870155 - DNA, 25 bp, Homo sapien
gccctggcgcgaccaggcgccccgg

SEQ ID NO: 5870156 - DNA, 25 bp, Homo sapien
ctcccgcgtgcgtgggccccccggc

SEQ ID NO: 5870157 - DNA, 25 bp, Homo sapien
gggccgtcaccgggggcccgcgtgc

SEQ ID NO: 5870158 - DNA, 25 bp, Homo sapien
cggcgcgagaggcgtcccccccggc

SEQ ID NO: 5870159 - DNA, 25 bp, Homo sapien
gtcggcgcgcgcgaagcggcgcccg

SEQ ID NO: 5870160 - DNA, 25 bp, Homo sapien
cccggccgcgcggcgagtccgcacg

SEQ ID NO: 5870161 - DNA, 25 bp, Homo sapien
cggcggggggacggcggccatgccc

SEQ ID NO: 5870162 - DNA, 25 bp, Homo sapien
ggggcccgggtcgcgccacgcagcc

SEQ ID NO: 5870163 - DNA, 25 bp, Homo sapien
cacgcgcgggcggcctgcgacggcg

SEQ ID NO: 5870164 - DNA, 25 bp, Homo sapien
ctcggcggcccagcggcgcgcctcg

SEQ ID NO: 5870165 - DNA, 25 bp, Homo sapien
cggagcgtgccggcgggcgagggcg

SEQ ID NO: 5870166 - DNA, 25 bp, Homo sapien
caccccgggacgccgtgccggcggc

SEQ ID NO: 5870167 - DNA, 25 bp, Homo sapien
gacccggccccgccggagtggcgcc

SEQ ID NO: 5870168 - DNA, 25 bp, Homo sapien
ggcgggcacgccggtccgcgcgcag

SEQ ID NO: 5870169 - DNA, 25 bp, Homo sapien
aacggtcgcgggggggcgcgcgcgc

SEQ ID NO: 5870170 - DNA, 25 bp, Homo sapien
cggcagcgacgcgtcggcgcggccg

SEQ ID NO: 5870171 - DNA, 25 bp, Homo sapien
cgtgagcccggtcgcgggccggccc

SEQ ID NO: 5870172 - DNA, 25 bp, Homo sapien
gcaggggcgggtggcccccggccag

SEQ ID NO: 5870173 - DNA, 25 bp, Homo sapien
gctccgcacccgcgggggggcgcac

SEQ ID NO: 5870174 - DNA, 25 bp, Homo sapien
gccccgcgccgggcgtcccgagtcc

SEQ ID NO: 5870175 - DNA, 25 bp, Homo sapien
cctcgccggcccactgggcgggccc

SEQ ID NO: 5870176 - DNA, 25 bp, Homo sapien
tcgggaccgggcgcgccgctgggcg

SEQ ID NO: 5870177 - DNA, 25 bp, Homo sapien
cagctgccggccgcgacgcgcgggc

SEQ ID NO: 5870178 - DNA, 25 bp, Homo sapien
cgccccggcgcacgggggtggctgg

SEQ ID NO: 5870179 - DNA, 25 bp, Homo sapien
gtgcggacggccgtgccccgcccgc

SEQ ID NO: 5870180 - DNA, 25 bp, Homo sapien
ggccggcggcggacgcccgtggcct

SEQ ID NO: 5870181 - DNA, 25 bp, Homo sapien
cggccggtgacgccgccggtcggcg

SEQ ID NO: 5870182 - DNA, 25 bp, Homo sapien
gggcacgggcgctgccgacccccgc

SEQ ID NO: 5870183 - DNA, 25 bp, Homo sapien
cgcgcgaccgtcgggctgcccggcc

SEQ ID NO: 5870184 - DNA, 25 bp, Homo sapien
ctggggcgtgctcggccggccgcgg

SEQ ID NO: 5870185 - DNA, 25 bp, Homo sapien
tcgcgctcgggccgagccggcgggc

SEQ ID NO: 5870186 - DNA, 25 bp, Homo sapien
cggcgggtgcgcccggacggtgccc

SEQ ID NO: 5870187 - DNA, 25 bp, Homo sapien
ggtggggggcgccgtcggccggctc

SEQ ID NO: 5870188 - DNA, 25 bp, Homo sapien
cacgccggtcgccagcccgcgcgcc

SEQ ID NO: 5870189 - DNA, 25 bp, Homo sapien
cccagtggcagcgcgcccccggcgc

SEQ ID NO: 5870190 - DNA, 25 bp, Homo sapien
cgggcggtgcgccagcgcgggggac

SEQ ID NO: 5870191 - DNA, 25 bp, Homo sapien
ggccggtcggcgccgtgcccgtggg

SEQ ID NO: 5870192 - DNA, 25 bp, Homo sapien
gggagccggccgtcggcgggcgctg

SEQ ID NO: 5870193 - DNA, 25 bp, Homo sapien
gctggcgcgcggcccgtaccgggcg

SEQ ID NO: 5870194 - DNA, 25 bp, Homo sapien
ggcgagcgcccgtcgcgcgggggac

SEQ ID NO: 5870195 - DNA, 25 bp, Homo sapien
gacgccgggggggcgcgcctggcac

SEQ ID NO: 5870196 - DNA, 25 bp, Homo sapien
gcgccggccgcggcggcacgctgca

SEQ ID NO: 5870197 - DNA, 25 bp, Homo sapien
gcggccgacggggggcgcgttgccc

SEQ ID NO: 5870198 - DNA, 25 bp, Homo sapien
gcccccgtgcgtggcgccggtcggc

SEQ ID NO: 5870199 - DNA, 25 bp, Homo sapien
agcccggcgctcgcccggtccggcc

SEQ ID NO: 5870200 - DNA, 25 bp, Homo sapien
ccagctccgcgcgcggcgcgagcgc

SEQ ID NO: 5870201 - DNA, 25 bp, Homo sapien
ggcccggcgcgtccacgggcgtggg

SEQ ID NO: 5870202 - DNA, 25 bp, Homo sapien
cgggcgtggggcccgcaagccggcc

SEQ ID NO: 5870203 - DNA, 25 bp, Homo sapien
ggcctgcgcgcagcgccgtcccgcc

SEQ ID NO: 5870204 - DNA, 25 bp, Homo sapien
tgcggcggacccggccggtccccgc

SEQ ID NO: 5870205 - DNA, 25 bp, Homo sapien
ggaccagcgccggccggcgccacgc

SEQ ID NO: 5870206 - DNA, 25 bp, Homo sapien
gggcgccgcggcgcaccagcgacgg

SEQ ID NO: 5870207 - DNA, 25 bp, Homo sapien
gcggccgcccgccgagacggcgtcc

SEQ ID NO: 5870208 - DNA, 25 bp, Homo sapien
tggacccggcgtcgcggcgcccggg

SEQ ID NO: 5870209 - DNA, 25 bp, Homo sapien
cgggcggaagcgcgggcgtggcggc

SEQ ID NO: 5870210 - DNA, 25 bp, Homo sapien
cccgcgggcgccgacgctcggctcg

SEQ ID NO: 5870211 - DNA, 25 bp, Homo sapien
gcgttggcgacggcccggcgggcgg

SEQ ID NO: 5870212 - DNA, 25 bp, Homo sapien
ggagcgcgacggtccggcgcccggg

SEQ ID NO: 5870213 - DNA, 25 bp, Homo sapien
gacgctccgggggggcgtcccgcgc

SEQ ID NO: 5870214 - DNA, 25 bp, Homo sapien
cccggccggggcgtgccgcgcgagt

SEQ ID NO: 5870215 - DNA, 25 bp, Homo sapien
cggcccgcgccgaccacgcagcgcg

SEQ ID NO: 5870216 - DNA, 25 bp, Homo sapien
gggccgcgccggtccaccgggcctg

SEQ ID NO: 5870217 - DNA, 25 bp, Homo sapien
cgcccggcgggttgccgtcgcgcgg

SEQ ID NO: 5870218 - DNA, 25 bp, Homo sapien
ggcggccggcggacggcgtcgggga

SEQ ID NO: 5870219 - DNA, 25 bp, Homo sapien
ggggcgggccggtcgcggcctccca

SEQ ID NO: 5870220 - DNA, 25 bp, Homo sapien
ggcggtcggcgtgcggggggtgccc

SEQ ID NO: 5870221 - DNA, 25 bp, Homo sapien
cgccccagtcgacggcgggccgggc

SEQ ID NO: 5870222 - DNA, 25 bp, Homo sapien
ggcgggcggggccctagacgccggc

SEQ ID NO: 5870223 - DNA, 25 bp, Homo sapien
cgcgtccggtggggggcgaccgcgc

SEQ ID NO: 5870224 - DNA, 25 bp, Homo sapien
acccgcggtgcgtgcgccgccggcc

SEQ ID NO: 5870225 - DNA, 25 bp, Homo sapien
gccgcgggggggccggcgcagtgac

SEQ ID NO: 5870226 - DNA, 25 bp, Homo sapien
ccgtgccgcgcgacggccgggccga

SEQ ID NO: 5870227 - DNA, 25 bp, Homo sapien
agcggcgacaccggcgcgccgcgcg

SEQ ID NO: 5870228 - DNA, 25 bp, Homo sapien
ggctgggggccgccgaccgggcacc

SEQ ID NO: 5870229 - DNA, 25 bp, Homo sapien
ccgcggggcctccgtcgcgcgggga

SEQ ID NO: 5870230 - DNA, 25 bp, Homo sapien
cgccgtccggggcgatgcggccggg

SEQ ID NO: 5870231 - DNA, 25 bp, Homo sapien
cgtgcggggggcgcgcgagggcgct

SEQ ID NO: 5870232 - DNA, 25 bp, Homo sapien
ggggcgtggcccgtccgggagccgc

SEQ ID NO: 5870233 - DNA, 25 bp, Homo sapien
cggccctcggcggacggccgggcag

SEQ ID NO: 5870234 - DNA, 25 bp, Homo sapien
cctccgtctgccggcgggcccggcg

SEQ ID NO: 5870235 - DNA, 25 bp, Homo sapien
cagcgcggcccgcctcggcggggtg

SEQ ID NO: 5870236 - DNA, 25 bp, Homo sapien
cccgtcgccggtgcacccgccgcgc

SEQ ID NO: 5870237 - DNA, 25 bp, Homo sapien
acggcccggcgacgccggggcgcag

SEQ ID NO: 5870238 - DNA, 25 bp, Homo sapien
cccgtgcctcgggtgccgcggcggg

SEQ ID NO: 5870239 - DNA, 25 bp, Homo sapien
cggccgcgcggtcgccggccttccc

SEQ ID NO: 5870240 - DNA, 25 bp, Homo sapien
gtggcgccctcgcccgcacgccggc

SEQ ID NO: 5870241 - DNA, 25 bp, Homo sapien
gcggcgcacccgtcgccgggcctgg

SEQ ID NO: 5870242 - DNA, 25 bp, Homo sapien
tggggccgccccggcgtgccaggcc

SEQ ID NO: 5870243 - DNA, 25 bp, Homo sapien
cgccgcggacgcgcgggagcccgca

SEQ ID NO: 5870244 - DNA, 25 bp, Homo sapien
ccgcggggtgcggccgcaacggccg

SEQ ID NO: 5870245 - DNA, 25 bp, Homo sapien
gcccgggcgcatgccccgcggggga

SEQ ID NO: 5870246 - DNA, 25 bp, Homo sapien
gcgcaccggcgcgtcgcgcgcgctc

SEQ ID NO: 5870247 - DNA, 25 bp, Homo sapien
cccggaccgggcacgcggctcgggc

SEQ ID NO: 5870248 - DNA, 25 bp, Homo sapien
cctgcacgggcgggcctgccgcggg

SEQ ID NO: 5870249 - DNA, 25 bp, Homo sapien
gcccgcgggccgccgacgcgggact

SEQ ID NO: 5870250 - DNA, 25 bp, Homo sapien
acctgcggccggcgcccgacggcgg

SEQ ID NO: 5870251 - DNA, 25 bp, Homo sapien
ggggcgcgtgtcggcgccggcgcac

SEQ ID NO: 5870252 - DNA, 25 bp, Homo sapien
gcggtcgcgcaggggggccgccacc

SEQ ID NO: 5870253 - DNA, 25 bp, Homo sapien
ccgctgcgtccgccggccggcgtgc

SEQ ID NO: 5870254 - DNA, 25 bp, Homo sapien
gcgcctggcggcgcgacgcccggtc

SEQ ID NO: 5870255 - DNA, 25 bp, Homo sapien
gtgcggccggcccgtccggcgctcc

SEQ ID NO: 5870256 - DNA, 25 bp, Homo sapien
cgggccgtcgcgccccccgaagcgc

SEQ ID NO: 5870257 - DNA, 25 bp, Homo sapien
gcgcggggccgcctgcggcgcgatc

SEQ ID NO: 5870258 - DNA, 25 bp, Homo sapien
ccggccggccacccgggtgcgagcg

SEQ ID NO: 5870259 - DNA, 25 bp, Homo sapien
cggagcgctcggcgggcccaccggc

SEQ ID NO: 5870260 - DNA, 25 bp, Homo sapien
tccgcgtggcccgcccggtgggccg

SEQ ID NO: 5870261 - DNA, 25 bp, Homo sapien
gcccacgcgcccgatgggccgggcc

SEQ ID NO: 5870262 - DNA, 25 bp, Homo sapien
tccgggcgcggtcggggcgtgcggc

SEQ ID NO: 5870263 - DNA, 25 bp, Homo sapien
cggctgcggtcgccccgagcgcgcg

SEQ ID NO: 5870264 - DNA, 25 bp, Homo sapien
ccgctgggggcccgcgctcgacggg

SEQ ID NO: 5870265 - DNA, 25 bp, Homo sapien
ggcccgtccgtcgcgcgtggccgcg

SEQ ID NO: 5870266 - DNA, 25 bp, Homo sapien
tgacgcccggcgtcgcgccggcgcc

SEQ ID NO: 5870267 - DNA, 25 bp, Homo sapien
cgccgggccgcaggcgtcggcaccg

SEQ ID NO: 5870268 - DNA, 25 bp, Homo sapien
gacccgcgatgcggccggcggggcg

SEQ ID NO: 5870269 - DNA, 25 bp, Homo sapien
ggcatcggcgccggtcgggccgcgc

SEQ ID NO: 5870270 - DNA, 25 bp, Homo sapien
gctgcgacggccgggcgcccgggag

SEQ ID NO: 5870271 - DNA, 25 bp, Homo sapien
gcgaacgcccgggccggacggcgcg

SEQ ID NO: 5870272 - DNA, 25 bp, Homo sapien
tgggggccgcgttcggcgggcgcgc

SEQ ID NO: 5870273 - DNA, 25 bp, Homo sapien
ggccgcgcgggcggggcatgccctc

SEQ ID NO: 5870274 - DNA, 25 bp, Homo sapien
cgccgctccgccggtgctggggcgg

SEQ ID NO: 5870275 - DNA, 25 bp, Homo sapien
ccctcgcgcgacgcgcccgagggcg

SEQ ID NO: 5870276 - DNA, 25 bp, Homo sapien
gcgagtgccggtcccgccgggcccc

SEQ ID NO: 5870277 - DNA, 25 bp, Homo sapien
ggggagcggatccgcggcccgcggc

SEQ ID NO: 5870278 - DNA, 25 bp, Homo sapien
gcgccggcgagcgcccgtccgccca

SEQ ID NO: 5870279 - DNA, 25 bp, Homo sapien
cggggcggaccgaggcgccgcggtc

SEQ ID NO: 5870280 - DNA, 25 bp, Homo sapien
gcgccgcgcccgcgcgacggatgcg

SEQ ID NO: 5870281 - DNA, 25 bp, Homo sapien
cgcggccgtctcgcccgcgggcgca

SEQ ID NO: 5870282 - DNA, 25 bp, Homo sapien
ggggggcggcccgttcgcggctggc

SEQ ID NO: 5870283 - DNA, 25 bp, Homo sapien
cgaggggcggcgccccgcacggcac

SEQ ID NO: 5870284 - DNA, 25 bp, Homo sapien
gggcggcccaacgcgtcgcgggcgg

SEQ ID NO: 5870285 - DNA, 25 bp, Homo sapien
ccggggcccgcgggactgcggcgca

SEQ ID NO: 5870286 - DNA, 25 bp, Homo sapien
agcccggcggtcgcgccccccacgc

SEQ ID NO: 5870287 - DNA, 25 bp, Homo sapien
tcggggtcgcggcgaggcgcccggc

SEQ ID NO: 5870288 - DNA, 25 bp, Homo sapien
gggtggcccgggccgatcggcgccg

SEQ ID NO: 5870289 - DNA, 25 bp, Homo sapien
gcgggccgccggttcgggcgcagcg

SEQ ID NO: 5870290 - DNA, 25 bp, Homo sapien
cgcgcgcggcctggcggtcgtccgg

SEQ ID NO: 5870291 - DNA, 25 bp, Homo sapien
gacgcggccggttcgcgccgggggc

SEQ ID NO: 5870292 - DNA, 25 bp, Homo sapien
caggcggccgcgcccagcgtccgcg

SEQ ID NO: 5870293 - DNA, 25 bp, Homo sapien
gggtcggcgctccgccgcgaggcgc

SEQ ID NO: 5870294 - DNA, 25 bp, Homo sapien
gggccttggccggccggtcgcgcgc

SEQ ID NO: 5870295 - DNA, 25 bp, Homo sapien
gcgctccggcgcggcatggggcgcg

SEQ ID NO: 5870296 - DNA, 25 bp, Homo sapien
gacgaggcgcgccgtcgcgcgccgc

SEQ ID NO: 5870297 - DNA, 25 bp, Homo sapien
gtcggcgcgcccgccgtacgccgcg

SEQ ID NO: 5870298 - DNA, 25 bp, Homo sapien
ggcggcgccccggcacggcgagagc

SEQ ID NO: 5870299 - DNA, 25 bp, Homo sapien
cgggcaccgccgccggctgggccag

SEQ ID NO: 5870300 - DNA, 25 bp, Homo sapien
ggccggaggccggccgacggccctc

SEQ ID NO: 5870301 - DNA, 25 bp, Homo sapien
ggtcggcccggcggcacgccgcgtg

SEQ ID NO: 5870302 - DNA, 25 bp, Homo sapien
gccccggcgcggggtgccgcccgat

SEQ ID NO: 5870303 - DNA, 25 bp, Homo sapien
ccgccgccgtgacgtcggcccgcgg

SEQ ID NO: 5870304 - DNA, 25 bp, Homo sapien
cggcgacccgcggcaccgggtggcc

SEQ ID NO: 5870305 - DNA, 25 bp, Homo sapien
ggcgcgcgtcgccagcccggcgtcg

SEQ ID NO: 5870306 - DNA, 25 bp, Homo sapien
ggtggcgacggggcggcgcgtcccg

SEQ ID NO: 5870307 - DNA, 25 bp, Homo sapien
gcggtcgcgccctcgcgacgcggcg

SEQ ID NO: 5870308 - DNA, 25 bp, Homo sapien
gcgcgcgtggtcccgcggggtgggg

SEQ ID NO: 5870309 - DNA, 25 bp, Homo sapien
cgcgccggcgcaggcccctggcgct

SEQ ID NO: 5870310 - DNA, 25 bp, Homo sapien
ggcccgcggaccgtggccggcgtgc

SEQ ID NO: 5870311 - DNA, 25 bp, Homo sapien
gcggcccgacgccgtcgcgcgcagc

SEQ ID NO: 5870312 - DNA, 25 bp, Homo sapien
ggcagcggggccggctcgccgaggg

SEQ ID NO: 5870313 - DNA, 25 bp, Homo sapien
ctgctggccggcggtcgcgcccggc

SEQ ID NO: 5870314 - DNA, 25 bp, Homo sapien
cggggggccacgcggcgggctcgac

SEQ ID NO: 5870315 - DNA, 25 bp, Homo sapien
gcgcgtcgggtcgcagcgccggcgc

SEQ ID NO: 5870316 - DNA, 25 bp, Homo sapien
ctgtgcgcgacgggcggccggcggg

SEQ ID NO: 5870317 - DNA, 25 bp, Homo sapien
gcaccgccgcggggtacgcgccggg

SEQ ID NO: 5870318 - DNA, 25 bp, Homo sapien
ccgggcgccgagcgtgggcgggtgg

SEQ ID NO: 5870319 - DNA, 25 bp, Homo sapien
ccgccacgcgcgggcgggccctgca

SEQ ID NO: 5870320 - DNA, 25 bp, Homo sapien
gggccacggggcgcccaagcgcggg

SEQ ID NO: 5870321 - DNA, 25 bp, Homo sapien
gggcccctatccggcgccgcgcgcg

SEQ ID NO: 5870322 - DNA, 25 bp, Homo sapien
ggcaccgcggggggtcgcgccggac

SEQ ID NO: 5870323 - DNA, 25 bp, Homo sapien
ggccgcgcggcagcgtcgcctggcg

SEQ ID NO: 5870324 - DNA, 25 bp, Homo sapien
aggcgcggacgggagcgccgcccgg

SEQ ID NO: 5870325 - DNA, 25 bp, Homo sapien
ggctgggcgcgggcgaccccgcgtc

SEQ ID NO: 5870326 - DNA, 25 bp, Homo sapien
cgcggggtcggcggccgtcccgctc

SEQ ID NO: 5870327 - DNA, 25 bp, Homo sapien
gcgacgccgggggggcgtcgccctc

SEQ ID NO: 5870328 - DNA, 25 bp, Homo sapien
agctggcgtcgcgcgcccggcgcgg

SEQ ID NO: 5870329 - DNA, 25 bp, Homo sapien
gcgtggggcggcggttcggggccgc

SEQ ID NO: 5870330 - DNA, 25 bp, Homo sapien
ccgggcagtcccggcggcgcacccc

SEQ ID NO: 5870331 - DNA, 25 bp, Homo sapien
cccgctcgtccgctggcgcgccggg

SEQ ID NO: 5870332 - DNA, 25 bp, Homo sapien
gtggcgtccgccgccggcggccacc

SEQ ID NO: 5870333 - DNA, 25 bp, Homo sapien
ggggcgccggcggcgccgtcgcgaa

SEQ ID NO: 5870334 - DNA, 25 bp, Homo sapien
gcgcgcgcgctccacggcgggtgcg

SEQ ID NO: 5870335 - DNA, 25 bp, Homo sapien
gcgaccgaccggtgccgcgggcggg

SEQ ID NO: 5870336 - DNA, 25 bp, Homo sapien
gcggccggcggtcggccccctgagc

SEQ ID NO: 5870337 - DNA, 25 bp, Homo sapien
gcgggcctacccgggcggcgcgcgt

SEQ ID NO: 5870338 - DNA, 25 bp, Homo sapien
ggggccggcaaccccgccgccgctc

SEQ ID NO: 5870339 - DNA, 25 bp, Homo sapien
ggttggcgccggcgcacggcgcgcg

SEQ ID NO: 5870340 - DNA, 25 bp, Homo sapien
tccagcgcgccagcggggggcgcgg

SEQ ID NO: 5870341 - DNA, 25 bp, Homo sapien
gcccggccggaggtggcggacgcgc

SEQ ID NO: 5870342 - DNA, 25 bp, Homo sapien
ggcttacgcccgcgcgggcggcggg

SEQ ID NO: 5870343 - DNA, 25 bp, Homo sapien
cggagggcgcgcggtgccgccgcct

SEQ ID NO: 5870344 - DNA, 25 bp, Homo sapien
cgtgtgggcccccgtcgcgcgggcg

SEQ ID NO: 5870345 - DNA, 25 bp, Homo sapien
gtggccccgccgacacgggccggcg

SEQ ID NO: 5870346 - DNA, 25 bp, Homo sapien
cgccgtcccgccgcgcggagtccgc

SEQ ID NO: 5870347 - DNA, 25 bp, Homo sapien
ggggcgtccgtggtcgcgcccgccc

SEQ ID NO: 5870348 - DNA, 25 bp, Homo sapien
acgcgccgggcccgtgcgacgcgcc

SEQ ID NO: 5870349 - DNA, 25 bp, Homo sapien
ggccctcggcgaccgccggcggagg

SEQ ID NO: 5870350 - DNA, 25 bp, Homo sapien
gcggcgcggcgtgcaccggctcggg

SEQ ID NO: 5870351 - DNA, 25 bp, Homo sapien
ggcgcgggcgcggacttcgggcggc

SEQ ID NO: 5870352 - DNA, 25 bp, Homo sapien
cggagggcctgtcgccggcccgcgc

SEQ ID NO: 5870353 - DNA, 25 bp, Homo sapien
gaggcggcgtggggcggcaccccgc

SEQ ID NO: 5870354 - DNA, 25 bp, Homo sapien
cgcctccgccagtgcggccgccggg

SEQ ID NO: 5870355 - DNA, 25 bp, Homo sapien
ggcccgagacgggggcgcggtcgcc

SEQ ID NO: 5870356 - DNA, 25 bp, Homo sapien
cggtgccggcggggcccgtgcgcac

SEQ ID NO: 5870357 - DNA, 25 bp, Homo sapien
gcccgtatgcgcgggggcccggggc

SEQ ID NO: 5870358 - DNA, 25 bp, Homo sapien
gtgccccggggcggcgcaagggccc

SEQ ID NO: 5870359 - DNA, 25 bp, Homo sapien
ccggcatctgccgccggcgcccggc

SEQ ID NO: 5870360 - DNA, 25 bp, Homo sapien
agcggcggcgggcccgcgtcggcca

SEQ ID NO: 5870361 - DNA, 25 bp, Homo sapien
cgccgcctcgtccggccggtcgccg

SEQ ID NO: 5870362 - DNA, 25 bp, Homo sapien
ccgcccggcagctcgccgcccgtgg

SEQ ID NO: 5870363 - DNA, 25 bp, Homo sapien
cgtccgggacggccgcgccggcgtg

SEQ ID NO: 5870364 - DNA, 25 bp, Homo sapien
gcgtccgcgccgtaccgccgccgcg

SEQ ID NO: 5870365 - DNA, 25 bp, Homo sapien
cggcgcgcctccgcggcgaccgacc

SEQ ID NO: 5870366 - DNA, 25 bp, Homo sapien
gaggctcggggggcccgcggcaccg

SEQ ID NO: 5870367 - DNA, 25 bp, Homo sapien
ccctgcggggcgaccgggcccgcca

SEQ ID NO: 5870368 - DNA, 25 bp, Homo sapien
cgccgggcgccggccgacgcaccgc

SEQ ID NO: 5870369 - DNA, 25 bp, Homo sapien
gggacgggcccgccgcgcgtggcgg

SEQ ID NO: 5870370 - DNA, 25 bp, Homo sapien
gcccccacgcggcgcgcggtggcgg

SEQ ID NO: 5870371 - DNA, 25 bp, Homo sapien
gccgccgccgtgtgcgggggcccgc

SEQ ID NO: 5870372 - DNA, 25 bp, Homo sapien
ggcgccgcccccccggcgctcgctc

SEQ ID NO: 5870373 - DNA, 25 bp, Homo sapien
gcgcccgacccgcctcggcggcgcg

SEQ ID NO: 5870374 - DNA, 25 bp, Homo sapien
ggggcgggccgcggcacggcctgcg

SEQ ID NO: 5870375 - DNA, 25 bp, Homo sapien
cccgcggcgcgccgcccggtggagc

SEQ ID NO: 5870376 - DNA, 25 bp, Homo sapien
gcgcccgcgccagggcgcccacgcg

SEQ ID NO: 5870377 - DNA, 25 bp, Homo sapien
ccgcgcccaccgcgggcgtcggcgc

SEQ ID NO: 5870378 - DNA, 25 bp, Homo sapien
gccgcgtccgccggcgccggtgccc

SEQ ID NO: 5870379 - DNA, 25 bp, Homo sapien
gcgcgacgcccgcgcccggggtcgc

SEQ ID NO: 5870380 - DNA, 25 bp, Homo sapien
caccccgccggccgcgcgaggggcg

SEQ ID NO: 5870381 - DNA, 25 bp, Homo sapien
gcccctccgcggtgcgccggcgggg

SEQ ID NO: 5870382 - DNA, 25 bp, Homo sapien
gggtggggggtgccgcgccgcggcc

SEQ ID NO: 5870383 - DNA, 25 bp, Homo sapien
gggccggcccgccgagccaggcgcg

SEQ ID NO: 5870384 - DNA, 25 bp, Homo sapien
gctcgtcgggcggcccgccggcggc

SEQ ID NO: 5870385 - DNA, 25 bp, Homo sapien
cgcctccccgaggcgcgccggcggc

SEQ ID NO: 5870386 - DNA, 25 bp, Homo sapien
gcccccccccctgcgcgagcgcccc

SEQ ID NO: 5870387 - DNA, 25 bp, Homo sapien
ccggcgccgcgcgcgcgacggcagc

SEQ ID NO: 5870388 - DNA, 25 bp, Homo sapien
gggggcgtcgcgcccggcgagccgc

SEQ ID NO: 5870389 - DNA, 25 bp, Homo sapien
gcgaggcggccggcgtgccgcgcgc

SEQ ID NO: 5870390 - DNA, 25 bp, Homo sapien
gccgcgcctgcccgcgcgtgggccc

SEQ ID NO: 5870391 - DNA, 25 bp, Homo sapien
gcgccgcgcccacgcgccgcctgcg

SEQ ID NO: 5870392 - DNA, 25 bp, Homo sapien
cccgccgccccagcgcgccaggcgg

SEQ ID NO: 5870393 - DNA, 25 bp, Homo sapien
gggcaccccaccgggggcgcggcgc

SEQ ID NO: 5870394 - DNA, 25 bp, Homo sapien
gcgtgggcgccgacgcgccgcgcgc

SEQ ID NO: 5870395 - DNA, 25 bp, Homo sapien
gggcgccccccgtgcaccgcgcccc

SEQ ID NO: 5870396 - DNA, 25 bp, Homo sapien
cccggcgacgcctgccgcggggcgc

SEQ ID NO: 5870397 - DNA, 25 bp, Homo sapien
ggctccgaccggggcgccgccgccg

SEQ ID NO: 5870398 - DNA, 25 bp, Homo sapien
ccgcgaccacggcgcgcgcccgggg

SEQ ID NO: 5870399 - DNA, 25 bp, Homo sapien
gcgccgcgtctcgcgcgccgccgcc

SEQ ID NO: 5870400 - DNA, 25 bp, Homo sapien
cccgcccaccggccggcggctgcgg

SEQ ID NO: 5870401 - DNA, 25 bp, Homo sapien
caccgggcggtcgccgggcgggcgc

SEQ ID NO: 5870402 - DNA, 25 bp, Homo sapien
ggcccaccgggcgtggcgccgcggg

SEQ ID NO: 5870403 - DNA, 25 bp, Homo sapien
cgtgcgcgcgcgaccgccgcccccg

SEQ ID NO: 5870404 - DNA, 25 bp, Homo sapien
gcgcggcggggctctcgcgcgccgg

SEQ ID NO: 5870405 - DNA, 25 bp, Homo sapien
ggccggcgtcgcgggcgtgcccgcg

SEQ ID NO: 5870406 - DNA, 25 bp, Homo sapien
cggggcgtgccacggcgcgcgccgg

SEQ ID NO: 5870407 - DNA, 25 bp, Homo sapien
ggctcgggcccgtcgccgggcggcg

SEQ ID NO: 5870408 - DNA, 25 bp, Homo sapien
cggcgccgtagccgcgcgcgcgggg

SEQ ID NO: 5870409 - DNA, 25 bp, Homo sapien
cgggcgtgcggccggcccccgctgg

SEQ ID NO: 5870410 - DNA, 25 bp, Homo sapien
ggcccgcgcggcccgccggtcggca

SEQ ID NO: 5870411 - DNA, 25 bp, Homo sapien
gccacgcgccgccccggcaccgccc

SEQ ID NO: 5870412 - DNA, 25 bp, Homo sapien
tcgcggtcggcggccgcccgcgcgc

SEQ ID NO: 5870413 - DNA, 25 bp, Homo sapien
acgcgcccgtggcgcgcccggcgcc

SEQ ID NO: 5870414 - DNA, 25 bp, Homo sapien
gcgcccgcccgacggccggcgggtg

SEQ ID NO: 5870415 - DNA, 25 bp, Homo sapien
cggggggcgcgccggccgacggcac

SEQ ID NO: 5870416 - DNA, 25 bp, Homo sapien
ctccccgccgggcgccggcaccggc

SEQ ID NO: 5870417 - DNA, 25 bp, Homo sapien
gcggcccgcctccggcgggcacgcg

SEQ ID NO: 5870418 - DNA, 25 bp, Homo sapien
tgcgcccccggcggtgggcccggcc

SEQ ID NO: 5870419 - DNA, 25 bp, Homo sapien
cgccggggcgacggcccgcccgctg

SEQ ID NO: 5870420 - DNA, 25 bp, Homo sapien
ccggcccggcggtgccggacgcgcg

SEQ ID NO: 5870421 - DNA, 25 bp, Homo sapien
cccgagccccggcacgcccgcgcgg

SEQ ID NO: 5870422 - DNA, 25 bp, Homo sapien
ggcccgcgcccggtgcgccgcagcg

SEQ ID NO: 5870423 - DNA, 25 bp, Homo sapien
cgagcgcgccggcccggcgtgggcc

SEQ ID NO: 5870424 - DNA, 25 bp, Homo sapien
cggctgtcgcccccccggggcgcgc

SEQ ID NO: 5870425 - DNA, 25 bp, Homo sapien
gcccgcacggcggccgcccgggagc

SEQ ID NO: 5870426 - DNA, 25 bp, Homo sapien
cggccaccggcccggcggcctgccc

SEQ ID NO: 5870427 - DNA, 25 bp, Homo sapien
ccccccgcggcgaaggcccgcgcgc

SEQ ID NO: 5870428 - DNA, 25 bp, Homo sapien
ccgcgccacgcgggccgacccggcc

SEQ ID NO: 5870429 - DNA, 25 bp, Homo sapien
ggggcccgctgtcgcggcgcgcccc

SEQ ID NO: 5870430 - DNA, 25 bp, Homo sapien
gcgtcccgcgcggacgcgcccggcc

SEQ ID NO: 5870431 - DNA, 25 bp, Homo sapien
gacgcgcgcccccccgctcggccgg

SEQ ID NO: 5870432 - DNA, 25 bp, Homo sapien
ggccgcgccggtagggcgccggccc

SEQ ID NO: 5870433 - DNA, 25 bp, Homo sapien
ccgcgctccgccgtcgcggcggccg

SEQ ID NO: 5870434 - DNA, 25 bp, Homo sapien
gcgcgccgggcgggtgcccgagccg

SEQ ID NO: 5870435 - DNA, 25 bp, Homo sapien
ggctgccggcggccgtccggggcgg

SEQ ID NO: 5870436 - DNA, 25 bp, Homo sapien
gggccccccgcggcgcgcgagcagg

SEQ ID NO: 5870437 - DNA, 25 bp, Homo sapien
gcgagccgtccggcgccccggcccg

SEQ ID NO: 5870438 - DNA, 25 bp, Homo sapien
ccagcgtcggcccgggccggccggc

SEQ ID NO: 5870439 - DNA, 25 bp, Homo sapien
gccgcggcccgccggccggatggcg

SEQ ID NO: 5870440 - DNA, 25 bp, Homo sapien
cgcgcccgggtgccgcgccggctcc

SEQ ID NO: 5870441 - DNA, 25 bp, Homo sapien
cccccggccgcgaccgcgccgccga

SEQ ID NO: 5870442 - DNA, 25 bp, Homo sapien
accgcgcgcccccccgcaggccggc

SEQ ID NO: 5870443 - DNA, 25 bp, Homo sapien
gcgacccccccgggccggcagcgcg

SEQ ID NO: 5870444 - DNA, 25 bp, Homo sapien
gcctgggcgggccggcggacggcgc

SEQ ID NO: 5870445 - DNA, 25 bp, Homo sapien
cggcggcggcccgggcgtgcgcgct

SEQ ID NO: 5870446 - DNA, 25 bp, Homo sapien
cggcgcgtccgcgggcacgcccggg

SEQ ID NO: 5870447 - DNA, 25 bp, Homo sapien
gcggccgccggccgcgcgacggggt

SEQ ID NO: 5870448 - DNA, 25 bp, Homo sapien
gcgccccgggggtgcgcgccctcgc

SEQ ID NO: 5870449 - DNA, 25 bp, Homo sapien
ctgccggccgtccggcgggccccgc

SEQ ID NO: 5870450 - DNA, 25 bp, Homo sapien
tccggcgcgcgacggccgccgggcg

SEQ ID NO: 5870451 - DNA, 25 bp, Homo sapien
gcacgacggccgcgcccggccccgc

SEQ ID NO: 5870452 - DNA, 25 bp, Homo sapien
cggccgcccggcgcgccggtgccga

SEQ ID NO: 5870453 - DNA, 25 bp, Homo sapien
cgccggcccggcgaccggccgtgcc

SEQ ID NO: 5870454 - DNA, 25 bp, Homo sapien
gcgcctcgccgcgccggcgcacggg

SEQ ID NO: 5870455 - DNA, 25 bp, Homo sapien
gtgggcgtggcgcccgcgcgggccg

SEQ ID NO: 5870456 - DNA, 25 bp, Homo sapien
gcctgggcgcaccggcgcgccggcc

SEQ ID NO: 5870457 - DNA, 25 bp, Homo sapien
cgggcgggccgatccgccgcgcccg

SEQ ID NO: 5870458 - DNA, 25 bp, Homo sapien
gggcgctgcgcgccggtggccggcg

SEQ ID NO: 5870459 - DNA, 25 bp, Homo sapien
gccgcggcggcgcgcgtaccggccg

SEQ ID NO: 5870460 - DNA, 25 bp, Homo sapien
gccgtggcgacccgcggccgggcgg

SEQ ID NO: 5870461 - DNA, 25 bp, Homo sapien
cacgcgggccgcctcgcggccggcc

SEQ ID NO: 5870462 - DNA, 25 bp, Homo sapien
agcgggggccggcccgtcgcgcgcg

SEQ ID NO: 5870463 - DNA, 25 bp, Homo sapien
gtccgcgcccccccgcgtcgcgcgg

SEQ ID NO: 5870464 - DNA, 25 bp, Homo sapien
cccggccccccgcgcgaccgagcgc

SEQ ID NO: 5870465 - DNA, 25 bp, Homo sapien
cgcggcaccgctggccggcgcgccg

SEQ ID NO: 5870466 - DNA, 25 bp, Homo sapien
gctgggctcgccgcgcggcggcgcc

SEQ ID NO: 5870467 - DNA, 25 bp, Homo sapien
ccggcgcgcgggcgtcggccgcgag

SEQ ID NO: 5870468 - DNA, 25 bp, Homo sapien
ccacctgccccccggcgcgccggcc

SEQ ID NO: 5870469 - DNA, 25 bp, Homo sapien
ggagccccccgggcgcgcctgcccc

SEQ ID NO: 5870470 - DNA, 25 bp, Homo sapien
ggagggccgcggcgtcggccggccg

SEQ ID NO: 5870471 - DNA, 25 bp, Homo sapien
cgccgccgcgcaccgggcccggcct

SEQ ID NO: 5870472 - DNA, 25 bp, Homo sapien
ccgcccgcgcgcgtcgggccgtcgg

SEQ ID NO: 5870473 - DNA, 25 bp, Homo sapien
gggcgcgcacgccggcggagggccg

SEQ ID NO: 5870474 - DNA, 25 bp, Homo sapien
cgccggcgtgccccacgcggccggc

SEQ ID NO: 5870475 - DNA, 25 bp, Homo sapien
gccgcgtccggcggcgccccgtcgg

SEQ ID NO: 5870476 - DNA, 25 bp, Homo sapien
gccggccccccgcgtgcgggagcgc

SEQ ID NO: 5870477 - DNA, 25 bp, Homo sapien
ccacggccggccgcgtgccgccggg

SEQ ID NO: 5870478 - DNA, 25 bp, Homo sapien
cgcgggcggccggcgtccgagcccc

SEQ ID NO: 5870479 - DNA, 25 bp, Homo sapien
cccgccgccgcgcgggcgtcagggc

SEQ ID NO: 5870480 - DNA, 25 bp, Homo sapien
cggtgcgcgtcgcgccgcgcgggcg

SEQ ID NO: 5870481 - DNA, 25 bp, Homo sapien
cgcgcacgtgccgcgccggcgcggc

SEQ ID NO: 5870482 - DNA, 25 bp, Homo sapien
gctggccgcgtcggcgccccgcggg

SEQ ID NO: 5870483 - DNA, 25 bp, Homo sapien
ccgcgccgcgcggtgacgccgggcc

SEQ ID NO: 5870484 - DNA, 25 bp, Homo sapien
cccgccggcgctcgagcgggccccc

SEQ ID NO: 5870485 - DNA, 25 bp, Homo sapien
cgctccgcggtccgccggggcgccc

SEQ ID NO: 5870486 - DNA, 25 bp, Homo sapien
agcggccgcggcgccacccgggccg

SEQ ID NO: 5870487 - DNA, 25 bp, Homo sapien
cggccgcggcccggcacgggcccag

SEQ ID NO: 5870488 - DNA, 25 bp, Homo sapien
cggccgcgcgccggggggcacccac

SEQ ID NO: 5870489 - DNA, 25 bp, Homo sapien
cccccgccgcccagccggcgacgcg

SEQ ID NO: 5870490 - DNA, 25 bp, Homo sapien
gcgtgccgggccggtcggcgccccc

SEQ ID NO: 5870491 - DNA, 25 bp, Homo sapien
gcgggcgcgcgggccgcacccgcag

SEQ ID NO: 5870492 - DNA, 25 bp, Homo sapien
gcgcgtcccccgccgtcgcgccggc

SEQ ID NO: 5870493 - DNA, 25 bp, Homo sapien
gcgccccagcggcgcgtccgggcgc

SEQ ID NO: 5870494 - DNA, 25 bp, Homo sapien
tcgcccgccgcggtcgggccccggc

SEQ ID NO: 5870495 - DNA, 25 bp, Homo sapien
tgcggaccgcccgcggcgcgccccc

SEQ ID NO: 5870496 - DNA, 25 bp, Homo sapien
ggcgcgcgggcgcgccggtccggtg

SEQ ID NO: 5870497 - DNA, 25 bp, Homo sapien
gggcgcggggccgctgcggtgccgc

SEQ ID NO: 5870498 - DNA, 25 bp, Homo sapien
gtggccaccggcggcccgccccggc

SEQ ID NO: 5870499 - DNA, 25 bp, Homo sapien
cgggccggcgcgacggtgccccggc

SEQ ID NO: 5870500 - DNA, 25 bp, Homo sapien
cgcgccgccgccacgcggcgcccag

SEQ ID NO: 5870501 - DNA, 25 bp, Homo sapien
gcctccggcccgtcgcgccgggcgc

SEQ ID NO: 5870502 - DNA, 25 bp, Homo sapien
cggctacgcgcccggcgccgccccc

SEQ ID NO: 5870503 - DNA, 25 bp, Homo sapien
ccgggctcgcggcgcggcacgcggc

SEQ ID NO: 5870504 - DNA, 25 bp, Homo sapien
ggccgccgcgcgtgccgcccgccag

SEQ ID NO: 5870505 - DNA, 25 bp, Homo sapien
cggccgtgcggcgtggcggcgcggc

SEQ ID NO: 5870506 - DNA, 25 bp, Homo sapien
cggctacggcgcgccgccccgccgc

SEQ ID NO: 5870507 - DNA, 25 bp, Homo sapien
gcgcgcgtggccgcggcccgctggc

SEQ ID NO: 5870508 - DNA, 25 bp, Homo sapien
cgcccgcgcggcccgtcggctgcgg

SEQ ID NO: 5870509 - DNA, 25 bp, Homo sapien
ctcccgggccgcgcgacggccgcgg

SEQ ID NO: 5870510 - DNA, 25 bp, Homo sapien
gcgcgcggcacgccggccgccaggg

SEQ ID NO: 5870511 - DNA, 25 bp, Homo sapien
ccgccaccgcggcccggcggaggcg

SEQ ID NO: 5870512 - DNA, 25 bp, Homo sapien
gcgcggtcccccccgggcgcgcctc

SEQ ID NO: 5870513 - DNA, 25 bp, Homo sapien
gcgggcaccgacccgcgcgggcccc

SEQ ID NO: 5870514 - DNA, 25 bp, Homo sapien
ggcgctgcggtgcgcgcggcgcggc

SEQ ID NO: 5870515 - DNA, 25 bp, Homo sapien
gccgccggcgggcgccggtcgtcgc

SEQ ID NO: 5870516 - DNA, 25 bp, Homo sapien
ctccggccggcgcgggacgggcgcg

SEQ ID NO: 5870517 - DNA, 25 bp, Homo sapien
tggcgcggtcggccgcggcggcggg

SEQ ID NO: 5870518 - DNA, 25 bp, Homo sapien
ggagcgccggcgcccgtcggcccgg

SEQ ID NO: 5870519 - DNA, 25 bp, Homo sapien
gccggggggcgccccacgccacgcc

SEQ ID NO: 5870520 - DNA, 25 bp, Homo sapien
cggccccgcacgaccccggcgccgc

SEQ ID NO: 5870521 - DNA, 25 bp, Homo sapien
ggccccggcatgcgcggccgcgccg

SEQ ID NO: 5870522 - DNA, 25 bp, Homo sapien
ccggaccgccgcacggcggccccgc

SEQ ID NO: 5870523 - DNA, 25 bp, Homo sapien
agggcgcggcgtgcccggcccggcg

SEQ ID NO: 5870524 - DNA, 25 bp, Homo sapien
cccgggcggcacgcccgcgccgacg

SEQ ID NO: 5870525 - DNA, 25 bp, Homo sapien
ggctgacccgggcgggcccgcggcg

SEQ ID NO: 5870526 - DNA, 25 bp, Homo sapien
gcggcacgggcggccccgggccctg

SEQ ID NO: 5870527 - DNA, 25 bp, Homo sapien
cgcggggtgccgcacggcgcccgcc

SEQ ID NO: 5870528 - DNA, 25 bp, Homo sapien
cgcgtccggccgacggcgcgcgggc

SEQ ID NO: 5870529 - DNA, 25 bp, Homo sapien
ggtgggccggccgtcggccgcgcgc

SEQ ID NO: 5870530 - DNA, 25 bp, Homo sapien
gcgcccgcgggggcccggcaccgga

SEQ ID NO: 5870531 - DNA, 25 bp, Homo sapien
gcggacccggcggacggccgccgcg

SEQ ID NO: 5870532 - DNA, 25 bp, Homo sapien
gcgcgtgcgaccgcgcggccccggc

SEQ ID NO: 5870533 - DNA, 25 bp, Homo sapien
cccgccgccccgctgccggcctggc

SEQ ID NO: 5870534 - DNA, 25 bp, Homo sapien
cggccggcgctcgggcggtcgccgc

SEQ ID NO: 5870535 - DNA, 25 bp, Homo sapien
gcgacgcccgcccgcggacggggcc

SEQ ID NO: 5870536 - DNA, 25 bp, Homo sapien
ccggcgcgccggtcggggcgccctc

SEQ ID NO: 5870537 - DNA, 25 bp, Homo sapien
cgcccgggcggacccgcgcccgctc

SEQ ID NO: 5870538 - DNA, 25 bp, Homo sapien
gccggcgcgcgcgtcgacgcgcccc

SEQ ID NO: 5870539 - DNA, 25 bp, Homo sapien
cggcgcccgacgcgggccccccagc

SEQ ID NO: 5870540 - DNA, 25 bp, Homo sapien
cggcgggcacccccgcgcacccggc

SEQ ID NO: 5870541 - DNA, 25 bp, Homo sapien
gcccgaccgccgggccgccgtccgc

SEQ ID NO: 5870542 - DNA, 25 bp, Homo sapien
cggcgtgcgcgggccccccgcgcgt

SEQ ID NO: 5870543 - DNA, 25 bp, Homo sapien
cggccgcggccgcccgaccgcgcgt

SEQ ID NO: 5870544 - DNA, 25 bp, Homo sapien
cgcgccgacccgccgcgggcctcgg

SEQ ID NO: 5870545 - DNA, 25 bp, Homo sapien
ggtcggcgcgggcgtgccggcgggc

SEQ ID NO: 5870546 - DNA, 25 bp, Homo sapien
gcaccgcgcgacgcggcgcgccgcg

SEQ ID NO: 5870547 - DNA, 25 bp, Homo sapien
cacgccaccgggccggcgcgcgccc

SEQ ID NO: 5870548 - DNA, 25 bp, Homo sapien
cggggcggcgcgccggcgacctggg

SEQ ID NO: 5870549 - DNA, 25 bp, Homo sapien
ggccgccggggggcgtgcccgcgtg

SEQ ID NO: 5870550 - DNA, 25 bp, Homo sapien
gccggggggcgaccgcccgcgcacg

SEQ ID NO: 5870551 - DNA, 25 bp, Homo sapien
gcccgcgcggaccgcggccggcgtg

SEQ ID NO: 5870552 - DNA, 25 bp, Homo sapien
gcggaggtcggccgccggcgcgcgg

SEQ ID NO: 5870553 - DNA, 25 bp, Homo sapien
ccggtgccgcgcgacccggcgccgc

SEQ ID NO: 5870554 - DNA, 25 bp, Homo sapien
ggcgcgggccgaccgggccgggcca

SEQ ID NO: 5870555 - DNA, 25 bp, Homo sapien
gggcgggcagcccgacggcgggccg

SEQ ID NO: 5870556 - DNA, 25 bp, Homo sapien
gcgaggcgtcggccggccccccggc

SEQ ID NO: 5870557 - DNA, 25 bp, Homo sapien
ccggtcgcgcgtccggcggccggcg

SEQ ID NO: 5870558 - DNA, 25 bp, Homo sapien
gcaggccgtcccgggccgcccgcgc

SEQ ID NO: 5870559 - DNA, 25 bp, Homo sapien
ggcgggccacgcggcgccgtcgggc

SEQ ID NO: 5870560 - DNA, 25 bp, Homo sapien
cggcgccgcgcgtgccgtcccgcgc

SEQ ID NO: 5870561 - DNA, 25 bp, Homo sapien
gcgggggccgcgccgtggcgtgcgc

SEQ ID NO: 5870562 - DNA, 25 bp, Homo sapien
gcccgcccgcgcggcacgcggcgga

SEQ ID NO: 5870563 - DNA, 25 bp, Homo sapien
cctcgggccgcggcgtgcgggcgcg

SEQ ID NO: 5870564 - DNA, 25 bp, Homo sapien
gcggccggcgtgccccccgcgggct

SEQ ID NO: 5870565 - DNA, 25 bp, Homo sapien
ggccccggtgcggcgccccgtcgcc

SEQ ID NO: 5870566 - DNA, 25 bp, Homo sapien
caggcccgacgccgccccggcggcc

SEQ ID NO: 5870567 - DNA, 25 bp, Homo sapien
cggcgcgacgcgccgccggcgggct

SEQ ID NO: 5870568 - DNA, 25 bp, Homo sapien
cctcggcgcggccgggcgacccggc

SEQ ID NO: 5870569 - DNA, 25 bp, Homo sapien
gtggccgtcggcgcccccccggcgc

SEQ ID NO: 5870570 - DNA, 25 bp, Homo sapien
cggccgcgccgcgcccgtcgtcggc

SEQ ID NO: 5870571 - DNA, 25 bp, Homo sapien
ggcgggcgccgtgcggcaccccgcg

SEQ ID NO: 5870572 - DNA, 25 bp, Homo sapien
cggccgccgcgacggcggagcgcgg

SEQ ID NO: 5870573 - DNA, 25 bp, Homo sapien
cgccgggccgggcacgccgcgccct

SEQ ID NO: 5870574 - DNA, 25 bp, Homo sapien
cgctgcggcgcaccgggcgcgggcc

SEQ ID NO: 5870575 - DNA, 25 bp, Homo sapien
gccgcgccgcgcgcaccgcagcgcc

SEQ ID NO: 5870576 - DNA, 25 bp, Homo sapien
ccgcggccgtcgcgcggcccgggag

SEQ ID NO: 5870577 - DNA, 25 bp, Homo sapien
cgcctccgccgggccgcggtggcgg

SEQ ID NO: 5870578 - DNA, 25 bp, Homo sapien
gcgcgcggcgcgtcggcgcccacgc

SEQ ID NO: 5870579 - DNA, 25 bp, Homo sapien
cgcgctgccggcccgggggggtcgc

SEQ ID NO: 5870580 - DNA, 25 bp, Homo sapien
ctgggcgccgcgtggcggcggcgcg

SEQ ID NO: 5870581 - DNA, 25 bp, Homo sapien
gcccgccggcacgcccgcgccgacc

SEQ ID NO: 5870582 - DNA, 25 bp, Homo sapien
ccggcgcgcgagagccccgccgcgc

SEQ ID NO: 5870583 - DNA, 25 bp, Homo sapien
gcggtgcgtcggccggcgcccggcg

SEQ ID NO: 5870584 - DNA, 25 bp, Homo sapien
acgcgcggggggcccgcgcacgccg

SEQ ID NO: 5870585 - DNA, 25 bp, Homo sapien
gggccggcgccctaccggcgcggcc

SEQ ID NO: 5870586 - DNA, 25 bp, Homo sapien
gccggtgccggcgcccggcggggag

SEQ ID NO: 5870587 - DNA, 25 bp, Homo sapien
cgcgtgggcgccctggcgcgggcgc

SEQ ID NO: 5870588 - DNA, 25 bp, Homo sapien
cgcgtcgccggctgggcggcggggg

SEQ ID NO: 5870589 - DNA, 25 bp, Homo sapien
ggccggcgcgccggtgcgcccaggc

SEQ ID NO: 5870590 - DNA, 25 bp, Homo sapien
gcgccgacgcccgcggtgggcgcgg

SEQ ID NO: 5870591 - DNA, 25 bp, Homo sapien
gcggctcgccgggcgcgacgccccc

SEQ ID NO: 5870592 - DNA, 25 bp, Homo sapien
ggggctcggacgccggccgcccgcg

SEQ ID NO: 5870593 - DNA, 25 bp, Homo sapien
cctgctcgcgcgccgcggggggccc

SEQ ID NO: 5870594 - DNA, 25 bp, Homo sapien
caccggaccggcgcgcccgcgcgcc

SEQ ID NO: 5870595 - DNA, 25 bp, Homo sapien
cggccggtacgcgcgccgccgcggc

SEQ ID NO: 5870596 - DNA, 25 bp, Homo sapien
gccgggtgcgcgggggtgcccgccg

SEQ ID NO: 5870597 - DNA, 25 bp, Homo sapien
cgcgcccgtcccgcgccggccggag

SEQ ID NO: 5870598 - DNA, 25 bp, Homo sapien
gcgagggcgcgcacccccggggcgc

SEQ ID NO: 5870599 - DNA, 25 bp, Homo sapien
ccgacggggcgccgccggacgcggc

SEQ ID NO: 5870600 - DNA, 25 bp, Homo sapien
ccagcgggggccggccgcacgcccg

SEQ ID NO: 5870601 - DNA, 25 bp, Homo sapien
cgccgcgggcccgcccgggtcagcc

SEQ ID NO: 5870602 - DNA, 25 bp, Homo sapien
ggggcccgcgcgggtcggtgcccgc

SEQ ID NO: 5870603 - DNA, 25 bp, Homo sapien
tggcccggcccggtcggcccgcgcc

SEQ ID NO: 5870604 - DNA, 25 bp, Homo sapien
ctcgcggccgacgcccgcgcgccgg

SEQ ID NO: 5870605 - DNA, 25 bp, Homo sapien
gcggacggcggcccggcggtcgggc

SEQ ID NO: 5870606 - DNA, 25 bp, Homo sapien
gccggccgcgtggggcacgccggcg

SEQ ID NO: 5870607 - DNA, 25 bp, Homo sapien
gccggggcgggccgccggtggccac

SEQ ID NO: 5870608 - DNA, 25 bp, Homo sapien
agcgcgcacgcccgggccgccgccg

SEQ ID NO: 5870609 - DNA, 25 bp, Homo sapien
cgccatccggccggcgggccgcggc

SEQ ID NO: 5870610 - DNA, 25 bp, Homo sapien
gagcgagcgccgggggggcggcgcc

SEQ ID NO: 5870611 - DNA, 25 bp, Homo sapien
gagggcgccccgaccggcgcgccgg

SEQ ID NO: 5870612 - DNA, 25 bp, Homo sapien
gcgcgggcggcccgggacggcctgc

SEQ ID NO: 5870613 - DNA, 25 bp, Homo sapien
gcgcgccccgggggggcgacagccg

SEQ ID NO: 5870614 - DNA, 25 bp, Homo sapien
gcggcgaccgcccgagcgccggccg

SEQ ID NO: 5870615 - DNA, 25 bp, Homo sapien
cgggccggggcgccggacggctcgc

SEQ ID NO: 5870616 - DNA, 25 bp, Homo sapien
cccgcggggcgccgacgcggccagc

SEQ ID NO: 5870617 - DNA, 25 bp, Homo sapien
gccggcctgcgggggggcgcgcggt

SEQ ID NO: 5870618 - DNA, 25 bp, Homo sapien
aggccgggcccggtgcgcggcggcg

SEQ ID NO: 5870619 - DNA, 25 bp, Homo sapien
cccgccgccgcggccgaccgcgcca

SEQ ID NO: 5870620 - DNA, 25 bp, Homo sapien
cgtcggcgcgggcgtgccgcccggg

SEQ ID NO: 5870621 - DNA, 25 bp, Homo sapien
cgcaggccgtgccgcggcccgcccc

SEQ ID NO: 5870622 - DNA, 25 bp, Homo sapien
cacccgccggccgtcgggcgggcgc

SEQ ID NO: 5870623 - DNA, 25 bp, Homo sapien
tccggtgccgggcccccgcgggcgc

SEQ ID NO: 5870624 - DNA, 25 bp, Homo sapien
gcggcggggcggcgcgccgtagccg

SEQ ID NO: 5870625 - DNA, 25 bp, Homo sapien
gggggcggcgccgggcgcgtagccg

SEQ ID NO: 5870626 - DNA, 25 bp, Homo sapien
cgccgcccggcgacgggcccgagcc

SEQ ID NO: 5870627 - DNA, 25 bp, Homo sapien
gccggggcccgaccgcggcgggcga

SEQ ID NO: 5870628 - DNA, 25 bp, Homo sapien
gtgccgtcggccggcgcgccccccg

SEQ ID NO: 5870629 - DNA, 25 bp, Homo sapien
gcgggcccccgcacacggcggcggc

SEQ ID NO: 5870630 - DNA, 25 bp, Homo sapien
gccagcgggccgcggccacgcgcgc

SEQ ID NO: 5870631 - DNA, 25 bp, Homo sapien
gcgccgggggggcgccgacggccac

SEQ ID NO: 5870632 - DNA, 25 bp, Homo sapien
gccggccggcccgggccgacgctgg

SEQ ID NO: 5870633 - DNA, 25 bp, Homo sapien
gcgcgggacggcacgcgcggcgccg

SEQ ID NO: 5870634 - DNA, 25 bp, Homo sapien
gccgcgccgccacgccgcacggccg

SEQ ID NO: 5870635 - DNA, 25 bp, Homo sapien
cgccggccaccggcgcgcagcgccc

SEQ ID NO: 5870636 - DNA, 25 bp, Homo sapien
cggcggcggcgccccggtcggagcc

SEQ ID NO: 5870637 - DNA, 25 bp, Homo sapien
ccctggcggccggcgtgccgcgcgc

SEQ ID NO: 5870638 - DNA, 25 bp, Homo sapien
gggcggtgccggggcggcgcgtggc

SEQ ID NO: 5870639 - DNA, 25 bp, Homo sapien
gcgccgtccgccggcccgcccaggc

SEQ ID NO: 5870640 - DNA, 25 bp, Homo sapien
ccgccccggacggccgccggcagcc

SEQ ID NO: 5870641 - DNA, 25 bp, Homo sapien
gggcgccccggcggaccgcggagcg

SEQ ID NO: 5870642 - DNA, 25 bp, Homo sapien
ggccgggtcggcccgcgtggcgcgg

SEQ ID NO: 5870643 - DNA, 25 bp, Homo sapien
ggcgtggcgtggggcgccccccggc

SEQ ID NO: 5870644 - DNA, 25 bp, Homo sapien
cgcggcggccgtccgccgggtccgc

SEQ ID NO: 5870645 - DNA, 25 bp, Homo sapien
gcccgcgcgccgtcggccggacgcg

SEQ ID NO: 5870646 - DNA, 25 bp, Homo sapien
ggccgggcgcgtccgcgcgggacgc

SEQ ID NO: 5870647 - DNA, 25 bp, Homo sapien
gcggggccgggcgcggccgtcgtgc

SEQ ID NO: 5870648 - DNA, 25 bp, Homo sapien
tccgccgcgtgccgcgcgggcgggc

SEQ ID NO: 5870649 - DNA, 25 bp, Homo sapien
gcgcgcgggcggccgccgaccgcga

SEQ ID NO: 5870650 - DNA, 25 bp, Homo sapien
gcgacgaccggcgcccgccggcggc

SEQ ID NO: 5870651 - DNA, 25 bp, Homo sapien
cgcccctcgcgcggccggcggggtg

SEQ ID NO: 5870652 - DNA, 25 bp, Homo sapien
ccgcgcgccggcggccgacctccgc

SEQ ID NO: 5870653 - DNA, 25 bp, Homo sapien
cagggcccggggccgcccgtgccgc

SEQ ID NO: 5870654 - DNA, 25 bp, Homo sapien
gccgcgccggcgcggcacgtgcgcg

SEQ ID NO: 5870655 - DNA, 25 bp, Homo sapien
gccgccggcgcgcctcggggaggcg

SEQ ID NO: 5870656 - DNA, 25 bp, Homo sapien
ccgcagccgccggccggtgggcggg

SEQ ID NO: 5870657 - DNA, 25 bp, Homo sapien
cgggggcggcggtcgcgcgcgcacg

SEQ ID NO: 5870658 - DNA, 25 bp, Homo sapien
cccgtgcgccggcgcggcgaggcgc

SEQ ID NO: 5870659 - DNA, 25 bp, Homo sapien
ggcccacgccgggccggcgcgctcg

SEQ ID NO: 5870660 - DNA, 25 bp, Homo sapien
gcccgacggcgccgcgtggcccgcc

SEQ ID NO: 5870661 - DNA, 25 bp, Homo sapien
ggggcgcgccgcgacagcgggcccc

SEQ ID NO: 5870662 - DNA, 25 bp, Homo sapien
ggggcgcggtgcacggggggcgccc

SEQ ID NO: 5870663 - DNA, 25 bp, Homo sapien
cccgcggcgccacgcccggtgggcc

SEQ ID NO: 5870664 - DNA, 25 bp, Homo sapien
gcgaccccgggcgcgggcgtcgcgc

SEQ ID NO: 5870665 - DNA, 25 bp, Homo sapien
gggcaggccgccgggccggtggccg

SEQ ID NO: 5870666 - DNA, 25 bp, Homo sapien
cgcggcgcgccgcgtcgcgcggtgc

SEQ ID NO: 5870667 - DNA, 25 bp, Homo sapien
gcgcgcggcacgccggccgcctcgc

SEQ ID NO: 5870668 - DNA, 25 bp, Homo sapien
ccccgccggcgcaccgcggaggggc

SEQ ID NO: 5870669 - DNA, 25 bp, Homo sapien
gggcaccggcgccggcggacgcggc

SEQ ID NO: 5870670 - DNA, 25 bp, Homo sapien
gccggggcaccgtcgcgccggcccg

SEQ ID NO: 5870671 - DNA, 25 bp, Homo sapien
gcggcgccgggtcgcgcggcaccgg

SEQ ID NO: 5870672 - DNA, 25 bp, Homo sapien
gcgccgcgcccccggtggggtgccc

SEQ ID NO: 5870673 - DNA, 25 bp, Homo sapien
ggccgcggcgcggcaccccccaccc

SEQ ID NO: 5870674 - DNA, 25 bp, Homo sapien
cgccggccgccggacgcgcgaccgg

SEQ ID NO: 5870675 - DNA, 25 bp, Homo sapien
gctgccgtcgcgcgcgcggcgccgg

SEQ ID NO: 5870676 - DNA, 25 bp, Homo sapien
ggcgccgccgcgcggcgagcccagc

SEQ ID NO: 5870677 - DNA, 25 bp, Homo sapien
gccctgacgcccgcgcggcggcggg

SEQ ID NO: 5870678 - DNA, 25 bp, Homo sapien
gcgctcccgcacgcggggggccggc

SEQ ID NO: 5870679 - DNA, 25 bp, Homo sapien
ccggccgagcgggggggcgcgcgtc

SEQ ID NO: 5870680 - DNA, 25 bp, Homo sapien
ccgcctggcgcgctggggcggcggg

SEQ ID NO: 5870681 - DNA, 25 bp, Homo sapien
ccgacggcccgacgcgcgcgggcgg

SEQ ID NO: 5870682 - DNA, 25 bp, Homo sapien
gccaggccggcagcggggcggcggg

SEQ ID NO: 5870683 - DNA, 25 bp, Homo sapien
ctgggcccgtgccgggccgcggccg

SEQ ID NO: 5870684 - DNA, 25 bp, Homo sapien
ggggcgcgtcgacgcgcgcgccggc

SEQ ID NO: 5870685 - DNA, 25 bp, Homo sapien
gccgggtcgcccggccgcgccgagg

SEQ ID NO: 5870686 - DNA, 25 bp, Homo sapien
gaggcgcgcccgggggggaccgcgc

SEQ ID NO: 5870687 - DNA, 25 bp, Homo sapien
ctgcgggtgcggcccgcgcgcccgc

SEQ ID NO: 5870688 - DNA, 25 bp, Homo sapien
cgcgggcacgcccgcgacgccggcc

SEQ ID NO: 5870689 - DNA, 25 bp, Homo sapien
cgggcgcggcggatcggcccgcccg

SEQ ID NO: 5870690 - DNA, 25 bp, Homo sapien
cgcgcctggctcggcgggccggccc

SEQ ID NO: 5870691 - DNA, 25 bp, Homo sapien
gcggggccgccgtgcggcggtccgg

SEQ ID NO: 5870692 - DNA, 25 bp, Homo sapien
ggggcgctcgcgcaggggggggggc

SEQ ID NO: 5870693 - DNA, 25 bp, Homo sapien
ggccggcgcgccggggggcaggtgg

SEQ ID NO: 5870694 - DNA, 25 bp, Homo sapien
gcgcccggacgcgccgctggggcgc

SEQ ID NO: 5870695 - DNA, 25 bp, Homo sapien
gcggggcccgccggacggccggcag

SEQ ID NO: 5870696 - DNA, 25 bp, Homo sapien
gtgggtgccccccggcgcgcggccg

SEQ ID NO: 5870697 - DNA, 25 bp, Homo sapien
ccgggccgacgggcgccggcgctcc

SEQ ID NO: 5870698 - DNA, 25 bp, Homo sapien
gggggcccgctcgagcgccggcggg

SEQ ID NO: 5870699 - DNA, 25 bp, Homo sapien
gcgctcggtcgcgcggggggccggg

SEQ ID NO: 5870700 - DNA, 25 bp, Homo sapien
cgcgcgcgacgggccggcccccgct

SEQ ID NO: 5870701 - DNA, 25 bp, Homo sapien
gctccaccgggcggcgcgccgcggg

SEQ ID NO: 5870702 - DNA, 25 bp, Homo sapien
acgcgcggtcgggcggccgcggccg

SEQ ID NO: 5870703 - DNA, 25 bp, Homo sapien
ggccgccggggcggcgtcgggcctg

SEQ ID NO: 5870704 - DNA, 25 bp, Homo sapien
gccgacgacgggcgcggcgcggccg

SEQ ID NO: 5870705 - DNA, 25 bp, Homo sapien
cagcgggcgggccgtcgccccggcg

SEQ ID NO: 5870706 - DNA, 25 bp, Homo sapien
ccgcagccgacgggccgcgcgggcg

SEQ ID NO: 5870707 - DNA, 25 bp, Homo sapien
tcggcaccggcgcgccgggcggccg

SEQ ID NO: 5870708 - DNA, 25 bp, Homo sapien
ggggcaggcgcgcccggggggctcc

SEQ ID NO: 5870709 - DNA, 25 bp, Homo sapien
gggggcgcgccgcgggcggtccgca

SEQ ID NO: 5870710 - DNA, 25 bp, Homo sapien
gccgccggcgggccgcccgacgagc

SEQ ID NO: 5870711 - DNA, 25 bp, Homo sapien
cgcgcccgcacgccgcggcccgagg

SEQ ID NO: 5870712 - DNA, 25 bp, Homo sapien
cgcgccgccgaggcgggtcgggcgc

SEQ ID NO: 5870713 - DNA, 25 bp, Homo sapien
ccccgggcgcgcgccgtggtcgcgg

SEQ ID NO: 5870714 - DNA, 25 bp, Homo sapien
gctggggggcccgcgtcgggcgccg

SEQ ID NO: 5870715 - DNA, 25 bp, Homo sapien
gcggcgccggggtcgtgcggggccg

SEQ ID NO: 5870716 - DNA, 25 bp, Homo sapien
ggccgggcccaccgccgggggcgca

SEQ ID NO: 5870717 - DNA, 25 bp, Homo sapien
tgccgaccggcgggccgcgcgggcc

SEQ ID NO: 5870718 - DNA, 25 bp, Homo sapien
cggcccgcgcgggcgccacgcccac

SEQ ID NO: 5870719 - DNA, 25 bp, Homo sapien
cgcgcgtccggcaccgccgggccgg

SEQ ID NO: 5870720 - DNA, 25 bp, Homo sapien
ccgaggcccgcggcgggtcggcgcg

SEQ ID NO: 5870721 - DNA, 25 bp, Homo sapien
cggcgcgccggccagcggtgccgcg

SEQ ID NO: 5870722 - DNA, 25 bp, Homo sapien
gcgcacgccacggcgcggcccccgc

SEQ ID NO: 5870723 - DNA, 25 bp, Homo sapien
cggccggccgacgccgcggccctcc

SEQ ID NO: 5870724 - DNA, 25 bp, Homo sapien
cgtgcgcgggcggtcgccccccggc

SEQ ID NO: 5870725 - DNA, 25 bp, Homo sapien
gccggggggccggccgacgcctcgc

SEQ ID NO: 5870726 - DNA, 25 bp, Homo sapien
agcccgccggcggcgcgtcgcgccg

SEQ ID NO: 5870727 - DNA, 25 bp, Homo sapien
gggcccacgcgcgggcaggcgcggc

SEQ ID NO: 5870728 - DNA, 25 bp, Homo sapien
cggctcgggcacccgcccggcgcgc

SEQ ID NO: 5870729 - DNA, 25 bp, Homo sapien
tcggcggcgcggtcgcggccggggg

SEQ ID NO: 5870730 - DNA, 25 bp, Homo sapien
ccgcccggccgcgggtcgccacggc

SEQ ID NO: 5870731 - DNA, 25 bp, Homo sapien
cgcccgcgcggcgcgacgcgcaccg

SEQ ID NO: 5870732 - DNA, 25 bp, Homo sapien
ggccggccgcgaggcggcccgcgtg

SEQ ID NO: 5870733 - DNA, 25 bp, Homo sapien
cggcccgggtggcgccgcggccgct

SEQ ID NO: 5870734 - DNA, 25 bp, Homo sapien
ccgcgcgggcgtgccggggctcggg

SEQ ID NO: 5870735 - DNA, 25 bp, Homo sapien
ggcacggccggtcgccgggccggcg

SEQ ID NO: 5870736 - DNA, 25 bp, Homo sapien
ggccccgtccgcgggcgggcgtcgc

SEQ ID NO: 5870737 - DNA, 25 bp, Homo sapien
cccgggcgtgcccgcggacgcgccg

SEQ ID NO: 5870738 - DNA, 25 bp, Homo sapien
gagcgggcgcgggtccgcccgggcg

SEQ ID NO: 5870739 - DNA, 25 bp, Homo sapien
cacgccggccgcggtccgcgcgggc

SEQ ID NO: 5870740 - DNA, 25 bp, Homo sapien
cggcgcggccgcgcatgccggggcc

SEQ ID NO: 5870741 - DNA, 25 bp, Homo sapien
ggcgccgggcgcgccacgggcgcgt

SEQ ID NO: 5870742 - DNA, 25 bp, Homo sapien
gcgccccgcggcaggcgtcgccggg

SEQ ID NO: 5870743 - DNA, 25 bp, Homo sapien
ccgccacgcgcggcgggcccgtccc

SEQ ID NO: 5870744 - DNA, 25 bp, Homo sapien
gcgcgcgggccttcgccgcgggggg

SEQ ID NO: 5870745 - DNA, 25 bp, Homo sapien
ccgccaccgcgcgccgcgtgggggc

SEQ ID NO: 5870746 - DNA, 25 bp, Homo sapien
ggcgacggggcgccgcaccggggcc

SEQ ID NO: 5870747 - DNA, 25 bp, Homo sapien
gcgcccgcccggcgaccgcccggtg

SEQ ID NO: 5870748 - DNA, 25 bp, Homo sapien
accccgtcgcgcggccggcggccgc

SEQ ID NO: 5870749 - DNA, 25 bp, Homo sapien
ggcccggcgtcaccgcgcggcgcgg

SEQ ID NO: 5870750 - DNA, 25 bp, Homo sapien
gggggcgccgaccggcccggcacgc

SEQ ID NO: 5870751 - DNA, 25 bp, Homo sapien
gccggcgcgacggcgggggacgcgc

SEQ ID NO: 5870752 - DNA, 25 bp, Homo sapien
ccccgcgcgcgcggctacggcgccg

SEQ ID NO: 5870753 - DNA, 25 bp, Homo sapien
gccggggccgcgcggtcgcacgcgc

SEQ ID NO: 5870754 - DNA, 25 bp, Homo sapien
ctggcgggcggcacgcgcggcggcc

SEQ ID NO: 5870755 - DNA, 25 bp, Homo sapien
ccgcgcgacgcgggggggcgcggac

SEQ ID NO: 5870756 - DNA, 25 bp, Homo sapien
cccggcggcacgcggccggccgtgg

SEQ ID NO: 5870757 - DNA, 25 bp, Homo sapien
cggcccgccgtcgggctgcccgccc

SEQ ID NO: 5870758 - DNA, 25 bp, Homo sapien
ggcggcggcgcgcgagacgcggcgc

SEQ ID NO: 5870759 - DNA, 25 bp, Homo sapien
cggccctccgccggcgtgcgcgccc

SEQ ID NO: 5870760 - DNA, 25 bp, Homo sapien
gctcccgggcggccgccgtgcgggc

SEQ ID NO: 5870761 - DNA, 25 bp, Homo sapien
gcgcccggcgcgacgggccggaggc

SEQ ID NO: 5870762 - DNA, 25 bp, Homo sapien
agcccgcggggggcacgccggccgc

SEQ ID NO: 5870763 - DNA, 25 bp, Homo sapien
cgcaggcggcgcgtgggcgcggcgc

SEQ ID NO: 5870764 - DNA, 25 bp, Homo sapien
ggagccggcgcggcacccgggcgcg

SEQ ID NO: 5870765 - DNA, 25 bp, Homo sapien
gcggcaccgcagcggccccgcgccc

SEQ ID NO: 5870766 - DNA, 25 bp, Homo sapien
gccgcgtgccgcgccgcgagcccgg

SEQ ID NO: 5870767 - DNA, 25 bp, Homo sapien
gggcgcgcgccggcccggtggcgtg

SEQ ID NO: 5870768 - DNA, 25 bp, Homo sapien
gcgcgcggccgacggccggcccacc

SEQ ID NO: 5870769 - DNA, 25 bp, Homo sapien
cccaggtcgccggcgcgccgccccg

SEQ ID NO: 5870770 - DNA, 25 bp, Homo sapien
ccggcgcgcgccgtggcacgccccg

SEQ ID NO: 5870771 - DNA, 25 bp, Homo sapien
cacgcgggcacgccccccggcggcc

SEQ ID NO: 5870772 - DNA, 25 bp, Homo sapien
cgcgtgcccgccggaggcgggccgc

SEQ ID NO: 5870773 - DNA, 25 bp, Homo sapien
cgcccggcggccgtcgcgcgccgga

SEQ ID NO: 5870774 - DNA, 25 bp, Homo sapien
gcgccggggcgaccgcgccgccggc

SEQ ID NO: 5870775 - DNA, 25 bp, Homo sapien
ggccggcgtcgccgcgcggcgccgc

SEQ ID NO: 5870776 - DNA, 25 bp, Homo sapien
gcgggcgccgtgccggcgggcggcc

SEQ ID NO: 5870777 - DNA, 25 bp, Homo sapien
cggcgacgggcgccccggcgcgggc

SEQ ID NO: 5870778 - DNA, 25 bp, Homo sapien
cggccgcgaccccccgcgccggcgc

SEQ ID NO: 5870779 - DNA, 25 bp, Homo sapien
ggccggcggtgcgccgcccccgccg

SEQ ID NO: 5870780 - DNA, 25 bp, Homo sapien
gcgggcgccggccgtcgccccgcgc

SEQ ID NO: 5870781 - DNA, 25 bp, Homo sapien
cccgcgtcggccgccgcgcgcccgc

SEQ ID NO: 5870782 - DNA, 25 bp, Homo sapien
cgccgcgtgccggccccccgcgggc

SEQ ID NO: 5870783 - DNA, 25 bp, Homo sapien
cggcccggcgccggtcgcgcgcgcc

SEQ ID NO: 5870784 - DNA, 25 bp, Homo sapien
gccgccgcggcgcgccgcgtgcgcc

SEQ ID NO: 5870785 - DNA, 25 bp, Homo sapien
ggcgggcccgccgacgcgcggccgc

SEQ ID NO: 5870786 - DNA, 25 bp, Homo sapien
gcccggccggccgacgccgcccgcg

SEQ ID NO: 5870787 - DNA, 25 bp, Homo sapien
cccggcgcccacgcggcggcggcgc

SEQ ID NO: 5870788 - DNA, 25 bp, Homo sapien
ccggccgcaccgcgggcccgccgcc

SEQ ID NO: 5870789 - DNA, 25 bp, Homo sapien
ccccgcgcgcgtcggcgggccgcgc

SEQ ID NO: 5870790 - DNA, 25 bp, Homo sapien
gggccgccgcgtggcgccgggcgcc

SEQ ID NO: 5870791 - DNA, 25 bp, Homo sapien
ccggcccgcgcaccggcccgcggcc

SEQ ID NO: 5870792 - DNA, 25 bp, Homo sapien
gcgcggggcgcccgtcgcgcgcggg

SEQ ID NO: 5870793 - DNA, 25 bp, Homo sapien
gcccgccgccgcgggccacggcgcg

SEQ ID NO: 5870794 - DNA, 25 bp, Homo sapien
ccgccggcgcgtcggccccgcccgc

SEQ ID NO: 5870795 - DNA, 25 bp, Homo sapien
ggcggcgccggtgcgggccgcccgc

SEQ ID NO: 5870796 - DNA, 25 bp, Homo sapien
gccccgcgcccgacgcgccccgccg

SEQ ID NO: 5870797 - DNA, 25 bp, Homo sapien
ggccggtggcccccgcgcgccgccc

SEQ ID NO: 5870798 - DNA, 25 bp, Homo sapien
cccgggtgcgggcgcgcccgccgcc

SEQ ID NO: 5870799 - DNA, 25 bp, Homo sapien
gggggcccgtgcccgggcgcgcgcc

SEQ ID NO: 5870800 - DNA, 25 bp, Homo sapien
gggcccgcgccgtcgcgcgcgcggg

SEQ ID NO: 5870801 - DNA, 25 bp, Homo sapien
ccccgcgggcacccggcgcgcgcgg

SEQ ID NO: 5870802 - DNA, 25 bp, Homo sapien
cccgcccggcgcggcgccgaccgcc

SEQ ID NO: 5870803 - DNA, 25 bp, Homo sapien
cgggcggcgccgcaccggcgggcgc

SEQ ID NO: 5870804 - DNA, 25 bp, Homo sapien
gcgccggggcgccacccgcgcgcgc

SEQ ID NO: 5870805 - DNA, 25 bp, Homo sapien
cggcggcggccggtccgcgggcgcc

SEQ ID NO: 5870806 - DNA, 25 bp, Homo sapien
gcgccccgccggcgggtcgcccgcc

SEQ ID NO: 5870807 - DNA, 25 bp, Homo sapien
ggggcgccgtcgcccgccggcggcg

SEQ ID NO: 5870808 - DNA, 25 bp, Homo sapien
cgcgcggcgcccgtgcccccgcggg

SEQ ID NO: 5870809 - DNA, 25 bp, Homo sapien
ccggcgtcgccccgggcgcgggcgc

SEQ ID NO: 5870810 - DNA, 25 bp, Homo sapien
gcccgcgtcgcgcgcggcgccgggc

SEQ ID NO: 5870811 - DNA, 25 bp, Homo sapien
cgcccgccgaggcccgcccgggcgc

SEQ ID NO: 5870812 - DNA, 25 bp, Homo sapien
ggcggcgcgcccgcggctgggcccg

SEQ ID NO: 5870813 - DNA, 25 bp, Homo sapien
ggcggcccggcgagggcccggcgcc

SEQ ID NO: 5870814 - DNA, 25 bp, Homo sapien
gcggccggcgcgcgcgtgccccccg

SEQ ID NO: 5870815 - DNA, 25 bp, Homo sapien
ggggggtcggccgcgccgcgcgcgg

SEQ ID NO: 5870816 - DNA, 25 bp, Homo sapien
cgccgctcgcggcccggcgggccgg

SEQ ID NO: 5870817 - DNA, 25 bp, Homo sapien
gggcgggtcgccgccgcgccgggcc

SEQ ID NO: 5870818 - DNA, 25 bp, Homo sapien
cggcccgccccggcgaccggcgcgc

SEQ ID NO: 5870819 - DNA, 25 bp, Homo sapien
cgccccgccgtcggcgcgcccggcc

SEQ ID NO: 5870820 - DNA, 25 bp, Homo sapien
cgggcgcgggccgccgacgcgggcc

SEQ ID NO: 5870821 - DNA, 25 bp, Homo sapien
gccgcgtcgccccgcggcgcccgcc

SEQ ID NO: 5870822 - DNA, 25 bp, Homo sapien
gcccggccgccacgccggcggcccg

SEQ ID NO: 5870823 - DNA, 25 bp, Homo sapien
gcccgcgcggtgggcccgccgcggc

SEQ ID NO: 5870824 - DNA, 25 bp, Homo sapien
gcgcgcgccggtgggcccccggccc

SEQ ID NO: 5870825 - DNA, 25 bp, Homo sapien
cgcccgcccgggcgccagcccggcc

SEQ ID NO: 5870826 - DNA, 25 bp, Homo sapien
gcccggccccggcgggcgtgcgcgg

SEQ ID NO: 5870827 - DNA, 25 bp, Homo sapien
ggccgggcctcccgccggcgccggc

SEQ ID NO: 5870828 - DNA, 25 bp, Homo sapien
gcgcgcgaccccccccggcccgcgc

SEQ ID NO: 5870829 - DNA, 25 bp, Homo sapien
cggcggcgcacccggcgcgcgcgcg

SEQ ID NO: 5870830 - DNA, 25 bp, Homo sapien
gcccgtgggggcgcgccggccggcc

SEQ ID NO: 5870831 - DNA, 25 bp, Homo sapien
cccgcgcgggccagccgccccggcc

SEQ ID NO: 5870832 - DNA, 25 bp, Homo sapien
ggggcccgccggccgcgcgacggcg

SEQ ID NO: 5870833 - DNA, 25 bp, Homo sapien
gcgggccgccggcgggctgccgggc

SEQ ID NO: 5870834 - DNA, 25 bp, Homo sapien
ggcggcgcgacgccggcgcgggccg

SEQ ID NO: 5870835 - DNA, 25 bp, Homo sapien
ccggcgcgtggccggcccgcggcgc

SEQ ID NO: 5870836 - DNA, 25 bp, Homo sapien
ggcgccccgccgcgccggacgcgcg

SEQ ID NO: 5870837 - DNA, 25 bp, Homo sapien
ggcggcgccggggccgtccgccggc

SEQ ID NO: 5870838 - DNA, 25 bp, Homo sapien
cgcgcccgtgccgccgcgggccgcc

SEQ ID NO: 5870839 - DNA, 25 bp, Homo sapien
gcggccgcccccccgcggctgcccc

SEQ ID NO: 5870840 - DNA, 25 bp, Homo sapien
gggcccgcgtgcccccggcgccgcc

SEQ ID NO: 5870841 - DNA, 25 bp, Homo sapien
gcgcccgccgtgcggcgccgggcgg

SEQ ID NO: 5870842 - DNA, 25 bp, Homo sapien
ccggcccgcacgccgcggcccggcg

SEQ ID NO: 5870843 - DNA, 25 bp, Homo sapien
cggggcgccccccggcgctgccggc

SEQ ID NO: 5870844 - DNA, 25 bp, Homo sapien
cgccgccccctcgcgcggcgccggg

SEQ ID NO: 5870845 - DNA, 25 bp, Homo sapien
cgcgggtcgggccgcccgcgccgcc

SEQ ID NO: 5870846 - DNA, 25 bp, Homo sapien
gccgcacggggcgccccgcggcccg

SEQ ID NO: 5870847 - DNA, 25 bp, Homo sapien
gcggcgggccgcgcccccctgccgg

SEQ ID NO: 5870848 - DNA, 25 bp, Homo sapien
cgcggcgcccggcacgccggcgcgc

SEQ ID NO: 5870849 - DNA, 25 bp, Homo sapien
gcgcccgcgggcacggcccgggccg

SEQ ID NO: 5870850 - DNA, 25 bp, Homo sapien
gggccccgccagcggcccgcgccgg

SEQ ID NO: 5870851 - DNA, 25 bp, Homo sapien
ggggccggccggcacgccgccgggc

SEQ ID NO: 5870852 - DNA, 25 bp, Homo sapien
cgcccgggcggcacggcccgcgccg

SEQ ID NO: 5870853 - DNA, 25 bp, Homo sapien
cggccgccggccgcggtcgccgggc

SEQ ID NO: 5870854 - DNA, 25 bp, Homo sapien
gccgccacgcgcggccccccggggc

SEQ ID NO: 5870855 - DNA, 25 bp, Homo sapien
gggcggcgcctgccggcgcgggcgg

SEQ ID NO: 5870856 - DNA, 25 bp, Homo sapien
ggcccgccgccggccggtggcgccg

SEQ ID NO: 5870857 - DNA, 25 bp, Homo sapien
ggcgcgcccgtcgcgccgcgcgccg

SEQ ID NO: 5870858 - DNA, 25 bp, Homo sapien
ccgggccggcccgcacgcgcgggcg

SEQ ID NO: 5870859 - DNA, 25 bp, Homo sapien
ccgcccccgtgcgcggcggcgggcg

SEQ ID NO: 5870860 - DNA, 25 bp, Homo sapien
gcccggcccgtgccgcgcggccgcc

SEQ ID NO: 5870861 - DNA, 25 bp, Homo sapien
cgcgccggtgggcgcgcccgcgccc

SEQ ID NO: 5870862 - DNA, 25 bp, Homo sapien
gcggcctcgggcccgcgcgcgcggc

SEQ ID NO: 5870863 - DNA, 25 bp, Homo sapien
ccgccgacccgccgcgccggcgccg

SEQ ID NO: 5870864 - DNA, 25 bp, Homo sapien
gggccggccccgtcgcgcgcccggc

SEQ ID NO: 5870865 - DNA, 25 bp, Homo sapien
gcgcgccggcgggcgccgtgcgcgg

SEQ ID NO: 5870866 - DNA, 25 bp, Homo sapien
gccccgggcggacgcgcgccgcgcg

SEQ ID NO: 5870867 - DNA, 25 bp, Homo sapien
gcccggccgcggcgggccacgccgc

SEQ ID NO: 5870868 - DNA, 25 bp, Homo sapien
ggcccgcgcgtcgcgccgcggcccc

SEQ ID NO: 5870869 - DNA, 25 bp, Homo sapien
cgcccgcgggcccgcggtcgcgcgc

SEQ ID NO: 5870870 - DNA, 25 bp, Homo sapien
gcccgcggccctcgcgggcgccgcc

SEQ ID NO: 5870871 - DNA, 25 bp, Homo sapien
cggccccacgccgcgcggcgcgccg

SEQ ID NO: 5870872 - DNA, 25 bp, Homo sapien
gcgccccggcgcggcggtccgggcg

SEQ ID NO: 5870873 - DNA, 25 bp, Homo sapien
gcgcccgcccgccccaggcgcggcg

SEQ ID NO: 5870874 - DNA, 25 bp, Homo sapien
cgccccgcgagggcgccgcgccgcc

SEQ ID NO: 5870875 - DNA, 25 bp, Homo sapien
cccgccgggcgcgccgtgcccgccg

SEQ ID NO: 5870876 - DNA, 25 bp, Homo sapien
ggccgcccgccggaccgccgccgcg

SEQ ID NO: 5870877 - DNA, 25 bp, Homo sapien
gccccgcgtccgccggcggcccggc

SEQ ID NO: 5870878 - DNA, 25 bp, Homo sapien
ggcgccgcgtgggcgggccggcccc

SEQ ID NO: 5870879 - DNA, 25 bp, Homo sapien
cgcgcggcccggcgacggcccggcg

SEQ ID NO: 5870880 - DNA, 25 bp, Homo sapien
gcgggccgcccgtcgcgcgcggcgg

SEQ ID NO: 5870881 - DNA, 25 bp, Homo sapien
ccgcgccacgcgccggcgccccggc

SEQ ID NO: 5870882 - DNA, 25 bp, Homo sapien
gcggcgggcgccgctgcgccccggc

SEQ ID NO: 5870883 - DNA, 25 bp, Homo sapien
cgccggcgaccgccgccgcgcgggc

SEQ ID NO: 5870884 - DNA, 25 bp, Homo sapien
gcccgggcgcgccacgggcgccggg

SEQ ID NO: 5870885 - DNA, 25 bp, Homo sapien
cgggcccgggcgcgctgcccgcggg

SEQ ID NO: 5870886 - DNA, 25 bp, Homo sapien
gcgggcggcgcgccccgtcgcgggc

SEQ ID NO: 5870887 - DNA, 25 bp, Homo sapien
gcgcccccgcgccggaccgcgcgcg

SEQ ID NO: 5870888 - DNA, 25 bp, Homo sapien
ccggccggcggccgtgcccgcgccg

SEQ ID NO: 5870889 - DNA, 25 bp, Homo sapien
gcgcgggccggccgcgtccgccgcc

SEQ ID NO: 5870890 - DNA, 25 bp, Homo sapien
ggcgctcgcggcccccgcggccccg

SEQ ID NO: 5870891 - DNA, 25 bp, Homo sapien
cgcgccgggcgtcggcccgcgccgc

SEQ ID NO: 5870892 - DNA, 25 bp, Homo sapien
cgcgccgcggaccccccgcggccgc

SEQ ID NO: 5870893 - DNA, 25 bp, Homo sapien
cgccgtcgggcgcggccgcggccgc

SEQ ID NO: 5870894 - DNA, 25 bp, Homo sapien
gggcgcgccgaccggccgcccgccc

SEQ ID NO: 5870895 - DNA, 25 bp, Homo sapien
gcgccgcgcgcgacggccgcccgcg

SEQ ID NO: 5870896 - DNA, 25 bp, Homo sapien
ggccgcgcgacgggcccccggccgc

SEQ ID NO: 5870897 - DNA, 25 bp, Homo sapien
gccgcggggcccctcgcgcgcgcgg

SEQ ID NO: 5870898 - DNA, 25 bp, Homo sapien
gccccggccgcggcacgcccgcgcc

SEQ ID NO: 5870899 - DNA, 25 bp, Homo sapien
gcgccccgcgagcgcgcccgcgccc

SEQ ID NO: 5870900 - DNA, 25 bp, Homo sapien
cgccgcccccgaccgcgcggcgggc

SEQ ID NO: 5870901 - DNA, 25 bp, Homo sapien
gcgccccggtggcccggcggcgggc

SEQ ID NO: 5870902 - DNA, 25 bp, Homo sapien
cggcgggcgcgtcggcgccccgccc

SEQ ID NO: 5870903 - DNA, 25 bp, Homo sapien
gcgcccgcgccgcgcgacgggccgc

SEQ ID NO: 5870904 - DNA, 25 bp, Homo sapien
ggcgcgtcgccgcgccggcggcggc

SEQ ID NO: 5870905 - DNA, 25 bp, Homo sapien
gcccgcccgggtcgcgcggccgcgg

SEQ ID NO: 5870906 - DNA, 25 bp, Homo sapien
ggcggcgcggcgccctcgcggggcg

SEQ ID NO: 5870907 - DNA, 25 bp, Homo sapien
gcccggcagcccgccggcggcccgc

SEQ ID NO: 5870908 - DNA, 25 bp, Homo sapien
ggccgggcgcgccgacggcggggcg

SEQ ID NO: 5870909 - DNA, 25 bp, Homo sapien
cgcggcggcggtccggcgggcggcc

SEQ ID NO: 5870910 - DNA, 25 bp, Homo sapien
ggcggcgcgggcggcccgacccgcg

SEQ ID NO: 5870911 - DNA, 25 bp, Homo sapien
cccgcgcgcgacgggcgccccgcgc

SEQ ID NO: 5870912 - DNA, 25 bp, Homo sapien
ccgcgcgcgccgggtgcccgcgggg

SEQ ID NO: 5870913 - DNA, 25 bp, Homo sapien
cggggccgcgggggccgcgagcgcc

SEQ ID NO: 5870914 - DNA, 25 bp, Homo sapien
cggcgcgcggcgcgacgggcgcgcc

SEQ ID NO: 5870915 - DNA, 25 bp, Homo sapien
gcggccgggggcccgtcgcgcggcc

SEQ ID NO: 5870916 - DNA, 25 bp, Homo sapien
gcgcccgccggtgcggcgccgcccg

SEQ ID NO: 5870917 - DNA, 25 bp, Homo sapien
gcgcccgcgcccggggcgacgccgg

SEQ ID NO: 5870918 - DNA, 25 bp, Homo sapien
gggcggggcgccgacgcgcccgccg

SEQ ID NO: 5870919 - DNA, 25 bp, Homo sapien
ggcgggcgacccgccggcggggcgc

SEQ ID NO: 5870920 - DNA, 25 bp, Homo sapien
ggcgccgggccctcgccgggccgcc

SEQ ID NO: 5870921 - DNA, 25 bp, Homo sapien
gcccgccgccgggccaccggggcgc

SEQ ID NO: 5870922 - DNA, 25 bp, Homo sapien
gcccggcggcgtgccggccggcccc

SEQ ID NO: 5870923 - DNA, 25 bp, Homo sapien
cgcccggaccgccgcgccggggcgc

SEQ ID NO: 5870924 - DNA, 25 bp, Homo sapien
gcggcgcgggccgacgcccggcgcg

SEQ ID NO: 5870925 - DNA, 25 bp, Homo sapien
gcgggcggggccgacgcgccggcgg

SEQ ID NO: 5870926 - DNA, 25 bp, Homo sapien
ccgcgcacggcgcccgccggcgcgc

SEQ ID NO: 5870927 - DNA, 25 bp, Homo sapien
gcccgcgcggcggcggtcgccggcg

SEQ ID NO: 5870928 - DNA, 25 bp, Homo sapien
ggcgcccgcggaccggccgccgccg

SEQ ID NO: 5870929 - DNA, 25 bp, Homo sapien
gcgccgcgggccggccacgcgccgg

SEQ ID NO: 5870930 - DNA, 25 bp, Homo sapien
ccgcccggcgccgcacggcgggcgc

SEQ ID NO: 5870931 - DNA, 25 bp, Homo sapien
cgcccgcgcgtgcgggccggcccgg

SEQ ID NO: 5870932 - DNA, 25 bp, Homo sapien
cgcgcgtccggcgcggcggggcgcc

SEQ ID NO: 5870933 - DNA, 25 bp, Homo sapien
gcccgccgcgcggtcgggggcggcg

SEQ ID NO: 5870934 - DNA, 25 bp, Homo sapien
cccgcgcgcgcgacggcgcgggccc

SEQ ID NO: 5870935 - DNA, 25 bp, Homo sapien
gcgggcgcgcggcggccgacgcggg

SEQ ID NO: 5870936 - DNA, 25 bp, Homo sapien
cggcccgggccgtgcccgcgggcgc

SEQ ID NO: 5870937 - DNA, 25 bp, Homo sapien
ggcggccgcgcggcacgggccgggc

SEQ ID NO: 5870938 - DNA, 25 bp, Homo sapien
cggcgccggcgcggcgggtcggcgg

SEQ ID NO: 5870939 - DNA, 25 bp, Homo sapien
cgccgggccgcggcgtgcgggccgg

SEQ ID NO: 5870940 - DNA, 25 bp, Homo sapien
ggggccggcccgcccacgcggcgcc

SEQ ID NO: 5870941 - DNA, 25 bp, Homo sapien
gcgcggcccgccgacgcgcgcgggg

SEQ ID NO: 5870942 - DNA, 25 bp, Homo sapien
ggccgcgggccggtgcgcgggccgg

SEQ ID NO: 5870943 - DNA, 25 bp, Homo sapien
gcccgcggggggccggcacgcggcg

SEQ ID NO: 5870944 - DNA, 25 bp, Homo sapien
gccggcgccggcgggaggcccggcc

SEQ ID NO: 5870945 - DNA, 25 bp, Homo sapien
cccggcgcccgtggcgcgcccgggc

SEQ ID NO: 5870946 - DNA, 25 bp, Homo sapien
ccggcccgccgggccgcgagcggcg

SEQ ID NO: 5870947 - DNA, 25 bp, Homo sapien
gggccgggggcccaccggcgcgcgc

SEQ ID NO: 5870948 - DNA, 25 bp, Homo sapien
gcggccgcgcgtcggcgggcccgcc

SEQ ID NO: 5870949 - DNA, 25 bp, Homo sapien
gcgcgggccggggggggtcgcgcgc

SEQ ID NO: 5870950 - DNA, 25 bp, Homo sapien
gccgggcgcgcgacggggccggccc

SEQ ID NO: 5870951 - DNA, 25 bp, Homo sapien
ccggcgcgggccgctggcggggccc

SEQ ID NO: 5870952 - DNA, 25 bp, Homo sapien
ccgcccgcgccggcaggcgccgccc

SEQ ID NO: 5870953 - DNA, 25 bp, Homo sapien
cgggccgcggggcgccccgtgcggc

SEQ ID NO: 5870954 - DNA, 25 bp, Homo sapien
gggcggcgcgcgggggccaccggcc

SEQ ID NO: 5870955 - DNA, 25 bp, Homo sapien
gccggcggcgcggtcgccccggcgc

SEQ ID NO: 5870956 - DNA, 25 bp, Homo sapien
ggcggtcggcgccgcgccgggcggg

SEQ ID NO: 5870957 - DNA, 25 bp, Homo sapien
gccccggggggccgcgcgtggcggc

SEQ ID NO: 5870958 - DNA, 25 bp, Homo sapien
ggggccgcggcgcgacgcgcgggcc

SEQ ID NO: 5870959 - DNA, 25 bp, Homo sapien
cggcgcgggccgtgccgcccgggcg

SEQ ID NO: 5870960 - DNA, 25 bp, Homo sapien
cggcgcgggcacggccgccggccgg

SEQ ID NO: 5870961 - DNA, 25 bp, Homo sapien
gcggccgcggccgcgcccgacggcg

SEQ ID NO: 5870962 - DNA, 25 bp, Homo sapien
cccgcgggggcacgggcgccgcgcg

SEQ ID NO: 5870963 - DNA, 25 bp, Homo sapien
ggcgcgggcgtgccgcggccggggc

SEQ ID NO: 5870964 - DNA, 25 bp, Homo sapien
cggcgggggcggcgcaccgccggcc

SEQ ID NO: 5870965 - DNA, 25 bp, Homo sapien
ggcccggcgcggcggcgacccgccc

SEQ ID NO: 5870966 - DNA, 25 bp, Homo sapien
gcggcgccgcgcggcgacgccggcc

SEQ ID NO: 5870967 - DNA, 25 bp, Homo sapien
cgggccgccggcgtggcggccgggc

SEQ ID NO: 5870968 - DNA, 25 bp, Homo sapien
cgcgcggcgcgcgtccgcccggggc

SEQ ID NO: 5870969 - DNA, 25 bp, Homo sapien
gcggcgtggcccgccgcggccgggc

SEQ ID NO: 5870970 - DNA, 25 bp, Homo sapien
ggcccgcgtcggcggcccgcgcccg

SEQ ID NO: 5870971 - DNA, 25 bp, Homo sapien
ggcgcgcgcgaccggcgccgggccg

SEQ ID NO: 5870972 - DNA, 25 bp, Homo sapien
gcgccggcgcggggggtcgcggccg

SEQ ID NO: 5870973 - DNA, 25 bp, Homo sapien
gcgggcggcccgcaccggcgccgcc

SEQ ID NO: 5870974 - DNA, 25 bp, Homo sapien
gccgggccgccggcggacgcggggc

SEQ ID NO: 5870975 - DNA, 25 bp, Homo sapien
gccggcggacggccccggcgccgcc

SEQ ID NO: 5870976 - DNA, 25 bp, Homo sapien
cccgcgggcagcgcgcccgggcccg

SEQ ID NO: 5870977 - DNA, 25 bp, Homo sapien
cgcgggcggcgtcggccggccgggc

SEQ ID NO: 5870978 - DNA, 25 bp, Homo sapien
gcgcgcgaccgcgggcccgcgggcg

SEQ ID NO: 5870979 - DNA, 25 bp, Homo sapien
cgggcccagccgcgggcgcgccgcc

SEQ ID NO: 5870980 - DNA, 25 bp, Homo sapien
gggcgcgggcgcgctcgcggggcgc

SEQ ID NO: 5870981 - DNA, 25 bp, Homo sapien
cgcgcgcggtccggcgcgggggcgc

SEQ ID NO: 5870982 - DNA, 25 bp, Homo sapien
cggcggggcgcgtcgggcgcggggc

SEQ ID NO: 5870983 - DNA, 25 bp, Homo sapien
cgccgccggcgggcgacggcgcccc

SEQ ID NO: 5870984 - DNA, 25 bp, Homo sapien
gcccggcgaccgcggccggcggccg

SEQ ID NO: 5870985 - DNA, 25 bp, Homo sapien
cgccgcgcctggggcgggcgggcgc

SEQ ID NO: 5870986 - DNA, 25 bp, Homo sapien
gcggcccgtcgcgcggcgcgggcgc

SEQ ID NO: 5870987 - DNA, 25 bp, Homo sapien
ggccggccggcgcgcccccacgggc

SEQ ID NO: 5870988 - DNA, 25 bp, Homo sapien
cggcgccaccggccggcggcgggcc

SEQ ID NO: 5870989 - DNA, 25 bp, Homo sapien
ggcggcccgcggcggcacgggcgcg

SEQ ID NO: 5870990 - DNA, 25 bp, Homo sapien
cggcgcgccgcgcggcgtggggccg

SEQ ID NO: 5870991 - DNA, 25 bp, Homo sapien
ggcggcgccgggggcacgcgggccc

SEQ ID NO: 5870992 - DNA, 25 bp, Homo sapien
ggcgcgcgcccgggcacgggccccc

SEQ ID NO: 5870993 - DNA, 25 bp, Homo sapien
gcggccgcggggggtccgcggcgcg

SEQ ID NO: 5870994 - DNA, 25 bp, Homo sapien
ccgcgcacgcccgccggggccgggc

SEQ ID NO: 5870995 - DNA, 25 bp, Homo sapien
cgccgggccgtcgccgggccgcgcg

SEQ ID NO: 5870996 - DNA, 25 bp, Homo sapien
ggcgcccggcgccacgcggcggccc

SEQ ID NO: 5870997 - DNA, 25 bp, Homo sapien
ccgccgcgcgcgacgggcggcccgc

SEQ ID NO: 5870998 - DNA, 25 bp, Homo sapien
gcccgcgacggggcgcgccgcccgc

SEQ ID NO: 5870999 - DNA, 25 bp, Homo sapien
gcgcgccggtcgccggggcgggccg

SEQ ID NO: 5871000 - DNA, 25 bp, Homo sapien
ggcggcgggcccgcggtgcggccgg

SEQ ID NO: 5871001 - DNA, 25 bp, Homo sapien
gggcgggcggccggtcggcgcgccc

SEQ ID NO: 5871002 - DNA, 25 bp, Homo sapien
ggccgggctggcgcccgggcgggcg

SEQ ID NO: 5871003 - DNA, 25 bp, Homo sapien
ccgcgcgcgcgaggggccccgcggc

SEQ ID NO: 5871004 - DNA, 25 bp, Homo sapien
cgccgtcgcgcggccggcgggcccc

SEQ ID NO: 5871005 - DNA, 25 bp, Homo sapien
ggcgggcgccgcggggcgacgcggc

SEQ ID NO: 5871006 - DNA, 25 bp, Homo sapien
cccggcgccgcgcgagggggcggcg

SEQ ID NO: 5871007 - DNA, 25 bp, Homo sapien
cgcgcgcgcgccgggtgcgccgccg

SEQ ID NO: 5871008 - DNA, 25 bp, Homo sapien
gccgcgcgcgcgggcccgaggccgc

SEQ ID NO: 5871009 - DNA, 25 bp, Homo sapien
cgcgccgtggcccgcggcggcgggc

SEQ ID NO: 5871010 - DNA, 25 bp, Homo sapien
gccggggcgcagcggcgcccgccgc

SEQ ID NO: 5871011 - DNA, 25 bp, Homo sapien
ggcgcacgcggcgcgccgcggcggc

SEQ ID NO: 5871012 - DNA, 25 bp, Homo sapien
cggcccgcgccggcgtcgcgccgcc

SEQ ID NO: 5871013 - DNA, 25 bp, Homo sapien
ggcggcgggcgcgcccgcacccggg

SEQ ID NO: 5871014 - DNA, 25 bp, Homo sapien
gccgcggcgggcccaccgcgcgggc

SEQ ID NO: 5871015 - DNA, 25 bp, Homo sapien
ccggcaggggggcgcggcccgccgc

SEQ ID NO: 5871016 - DNA, 25 bp, Homo sapien
gccggggcgccggcgcgtggcgcgg

SEQ ID NO: 5871017 - DNA, 25 bp, Homo sapien
ggccggggcggctggcccgcgcggg

SEQ ID NO: 5871018 - DNA, 25 bp, Homo sapien
gcccggcgccgcgcgcgacgcgggc

SEQ ID NO: 5871019 - DNA, 25 bp, Homo sapien
gcgcggggcgacggccggcgcccgc

SEQ ID NO: 5871020 - DNA, 25 bp, Homo sapien
gcgcgcgcgggtggcgccccggcgc

SEQ ID NO: 5871021 - DNA, 25 bp, Homo sapien
gcgccgccgccgcgtgggcgccggg

SEQ ID NO: 5871022 - DNA, 25 bp, Homo sapien
ggcggcgcccgcgagggccgcgggc

SEQ ID NO: 5871023 - DNA, 25 bp, Homo sapien
ggggcagccgcgggggggcggccgc

SEQ ID NO: 5871024 - DNA, 25 bp, Homo sapien
ccgcgcgcggcgcggccgacccccc

SEQ ID NO: 5871025 - DNA, 25 bp, Homo sapien
ggccgcccgccggcacggcgcccgc

SEQ ID NO: 5871026 - DNA, 25 bp, Homo sapien
gccgccgccggcgcggcgacgcgcc

SEQ ID NO: 5871027 - DNA, 25 bp, Homo sapien
gccggcagcgccggggggcgccccg

SEQ ID NO: 5871028 - DNA, 25 bp, Homo sapien
cggcgggcacggcgcgcccggcggg

SEQ ID NO: 5871029 - DNA, 25 bp, Homo sapien
ggcggcggacgcggccggcccgcgc

SEQ ID NO: 5871030 - DNA, 25 bp, Homo sapien
gcccgcgccggggcgcccgtcgccg

SEQ ID NO: 5871031 - DNA, 25 bp, Homo sapien
gcgcgccggcgtgccgggcgccgcg

SEQ ID NO: 5871032 - DNA, 25 bp, Homo sapien
cgcgggcggccgtcgcgcgcggcgc

SEQ ID NO: 5871033 - DNA, 25 bp, Homo sapien
gggcgcgggcgcgcccaccggcgcg

SEQ ID NO: 5871034 - DNA, 25 bp, Homo sapien
cgcccgccgccgcgcacgggggcgg

SEQ ID NO: 5871035 - DNA, 25 bp, Homo sapien
gcgcccgggcgggcctcggcgggcg

SEQ ID NO: 5871036 - DNA, 25 bp, Homo sapien
cggggggcacgcgcgcgccggccgc

SEQ ID NO: 5871037 - DNA, 25 bp, Homo sapien
ccgcggccgcgcgacccgggcgggc

SEQ ID NO: 5871038 - DNA, 25 bp, Homo sapien
attttatcgatttattatactaata

SEQ ID NO: 5871039 - DNA, 25 bp, Homo sapien
taaattattaaacttttcgattata

SEQ ID NO: 5871040 - DNA, 25 bp, Homo sapien
aataatcgttataatcaattttaat

SEQ ID NO: 5871041 - DNA, 25 bp, Homo sapien
ttattttccgatattatatattttt

SEQ ID NO: 5871042 - DNA, 25 bp, Homo sapien
aaaaatcgaattactatatatatat

SEQ ID NO: 5871043 - DNA, 25 bp, Homo sapien
tatttattacgattatcttttattt

SEQ ID NO: 5871044 - DNA, 25 bp, Homo sapien
taaattattataaatcgctttttta

SEQ ID NO: 5871045 - DNA, 25 bp, Homo sapien
ataattattaatctaatcgttttat

SEQ ID NO: 5871046 - DNA, 25 bp, Homo sapien
atatattcgatattataacttttta

SEQ ID NO: 5871047 - DNA, 25 bp, Homo sapien
aaaatttcgattaatcattatttat

SEQ ID NO: 5871048 - DNA, 25 bp, Homo sapien
aatattatacttaaatttcgattta

SEQ ID NO: 5871049 - DNA, 25 bp, Homo sapien
ttatttataaatttatcgctttaaa

SEQ ID NO: 5871050 - DNA, 25 bp, Homo sapien
taaattcgattttttatctataata

SEQ ID NO: 5871051 - DNA, 25 bp, Homo sapien
taaaatataatttttcgtcttatta

SEQ ID NO: 5871052 - DNA, 25 bp, Homo sapien
tattatagataaaaaatcgaattta

SEQ ID NO: 5871053 - DNA, 25 bp, Homo sapien
taaaaagttataatatcgaatatat

SEQ ID NO: 5871054 - DNA, 25 bp, Homo sapien
ataaaacgattagattaataattat

SEQ ID NO: 5871055 - DNA, 25 bp, Homo sapien
attaaaattgattataacgattatt

SEQ ID NO: 5871056 - DNA, 25 bp, Homo sapien
ataaataatgattaatcgaaatttt

SEQ ID NO: 5871057 - DNA, 25 bp, Homo sapien
taaatcgaaatttaagtataatatt

SEQ ID NO: 5871058 - DNA, 25 bp, Homo sapien
atatatatatagtaattcgattttt

SEQ ID NO: 5871059 - DNA, 25 bp, Homo sapien
aaataaaagataatcgtaataaata

SEQ ID NO: 5871060 - DNA, 25 bp, Homo sapien
tttaaagcgataaatttataaataa

SEQ ID NO: 5871061 - DNA, 25 bp, Homo sapien
aaaaatatataatatcggaaaataa

SEQ ID NO: 5871062 - DNA, 25 bp, Homo sapien
tataatcgaaaagtttaataattta

SEQ ID NO: 5871063 - DNA, 25 bp, Homo sapien
taaaaaagcgatttataataattta

SEQ ID NO: 5871064 - DNA, 25 bp, Homo sapien
tattagtataataaatcgataaaat

SEQ ID NO: 5871065 - DNA, 25 bp, Homo sapien
taataagacgaaaaattatatttta

SEQ ID NO: 5871066 - DNA, 25 bp, Homo sapien
aatatatcgaactattattttcata

SEQ ID NO: 5871067 - DNA, 25 bp, Homo sapien
tattttatcgataacttataatatg

SEQ ID NO: 5871068 - DNA, 25 bp, Homo sapien
aaaataattaacgcttatatgatta

SEQ ID NO: 5871069 - DNA, 25 bp, Homo sapien
tatattatatcttaatcgtacattt

SEQ ID NO: 5871070 - DNA, 25 bp, Homo sapien
ataaatctaattacgaatttttcat

SEQ ID NO: 5871071 - DNA, 25 bp, Homo sapien
ttatttaattaaattcgagtttcat

SEQ ID NO: 5871072 - DNA, 25 bp, Homo sapien
tgttaattaacgatatatactattt

SEQ ID NO: 5871073 - DNA, 25 bp, Homo sapien
ttttaataattatttcgatcataac

SEQ ID NO: 5871074 - DNA, 25 bp, Homo sapien
ttgtactttatcgattaaattaaaa

SEQ ID NO: 5871075 - DNA, 25 bp, Homo sapien
tctatatattcgattataacttaaa

SEQ ID NO: 5871076 - DNA, 25 bp, Homo sapien
ttaatatcgtaatatttaaccaaat

SEQ ID NO: 5871077 - DNA, 25 bp, Homo sapien
ttaaataattatatagcgatcttat

SEQ ID NO: 5871078 - DNA, 25 bp, Homo sapien
taatgtaattattgcgtatatatat

SEQ ID NO: 5871079 - DNA, 25 bp, Homo sapien
taaaaaaattttcgtagattcatat

SEQ ID NO: 5871080 - DNA, 25 bp, Homo sapien
ataaataatatattctatcgtctta

SEQ ID NO: 5871081 - DNA, 25 bp, Homo sapien
atattatatcattcgataatctatt

SEQ ID NO: 5871082 - DNA, 25 bp, Homo sapien
atattaaattttttacgatcaacta

SEQ ID NO: 5871083 - DNA, 25 bp, Homo sapien
ttaatcattaatattcgtatcttat

SEQ ID NO: 5871084 - DNA, 25 bp, Homo sapien
tttatgtatatcgataatctattat

SEQ ID NO: 5871085 - DNA, 25 bp, Homo sapien
attagatgtttattaacgtataatt

SEQ ID NO: 5871086 - DNA, 25 bp, Homo sapien
taatagtgatcgattaatttataat

SEQ ID NO: 5871087 - DNA, 25 bp, Homo sapien
attaataatgttcgatatcaatatt

SEQ ID NO: 5871088 - DNA, 25 bp, Homo sapien
aattttacgaattatacttattatc

SEQ ID NO: 5871089 - DNA, 25 bp, Homo sapien
tgatatactattttcgaattttaat

SEQ ID NO: 5871090 - DNA, 25 bp, Homo sapien
aatttctaattcgattataaatact

SEQ ID NO: 5871091 - DNA, 25 bp, Homo sapien
ttaatatgacgtaatctattttaat

SEQ ID NO: 5871092 - DNA, 25 bp, Homo sapien
ttaagtatgaatcgttatatttata

SEQ ID NO: 5871093 - DNA, 25 bp, Homo sapien
ttgatgtaattacgttattattatt

SEQ ID NO: 5871094 - DNA, 25 bp, Homo sapien
ttctttattcggttaatattttata

SEQ ID NO: 5871095 - DNA, 25 bp, Homo sapien
agatatcgtattgttatatttattt

SEQ ID NO: 5871096 - DNA, 25 bp, Homo sapien
gtaaataatcataatttcgtttata

SEQ ID NO: 5871097 - DNA, 25 bp, Homo sapien
atttttgtcgattaataattcaaat

SEQ ID NO: 5871098 - DNA, 25 bp, Homo sapien
ttttgcgtaaacttataaatttata

SEQ ID NO: 5871099 - DNA, 25 bp, Homo sapien
tactaattaaattatccgattatta

SEQ ID NO: 5871100 - DNA, 25 bp, Homo sapien
atatatattatcggatttaacatta

SEQ ID NO: 5871101 - DNA, 25 bp, Homo sapien
caaatgaatcgtataattattatta

SEQ ID NO: 5871102 - DNA, 25 bp, Homo sapien
atttaataatattcgttgattactt

SEQ ID NO: 5871103 - DNA, 25 bp, Homo sapien
agattaatcgctatatattatataa

SEQ ID NO: 5871104 - DNA, 25 bp, Homo sapien
taattaatttacgattacaactaat

SEQ ID NO: 5871105 - DNA, 25 bp, Homo sapien
taattgtttcgtataatatttgtaa

SEQ ID NO: 5871106 - DNA, 25 bp, Homo sapien
atttaagttatattaatacgcaaat

SEQ ID NO: 5871107 - DNA, 25 bp, Homo sapien
taaatttttttacgattatctgatt

SEQ ID NO: 5871108 - DNA, 25 bp, Homo sapien
ttacatcatatttcgaataataaaa

SEQ ID NO: 5871109 - DNA, 25 bp, Homo sapien
tttatataattcgttaacttgatta

SEQ ID NO: 5871110 - DNA, 25 bp, Homo sapien
ttcaatattgtatcgaaatttataa

SEQ ID NO: 5871111 - DNA, 25 bp, Homo sapien
aaatatatataagttcgattacata

SEQ ID NO: 5871112 - DNA, 25 bp, Homo sapien
aatttttgtcgtcttatataaaata

SEQ ID NO: 5871113 - DNA, 25 bp, Homo sapien
atgaattaattaatacgatcttatt

SEQ ID NO: 5871114 - DNA, 25 bp, Homo sapien
atgatttcgtattaatactttttta

SEQ ID NO: 5871115 - DNA, 25 bp, Homo sapien
aatctagttcgatatataaatttaa

SEQ ID NO: 5871116 - DNA, 25 bp, Homo sapien
agattcgaattatacttatatttaa

SEQ ID NO: 5871117 - DNA, 25 bp, Homo sapien
ttttttatcgaaatcttaatattga

SEQ ID NO: 5871118 - DNA, 25 bp, Homo sapien
tttaattaatctataccgattttat

SEQ ID NO: 5871119 - DNA, 25 bp, Homo sapien
tattattattaaagattacgtttct

SEQ ID NO: 5871120 - DNA, 25 bp, Homo sapien
taattaacgaacttatattaacatt

SEQ ID NO: 5871121 - DNA, 25 bp, Homo sapien
tttttgttatcgaattatattatga

SEQ ID NO: 5871122 - DNA, 25 bp, Homo sapien
ttttatttattagtatcgaacttat

SEQ ID NO: 5871123 - DNA, 25 bp, Homo sapien
aaatatcgctatataattaacttat

SEQ ID NO: 5871124 - DNA, 25 bp, Homo sapien
aatttattcatatcgattattattg

SEQ ID NO: 5871125 - DNA, 25 bp, Homo sapien
ataacataaattttcgatacattat

SEQ ID NO: 5871126 - DNA, 25 bp, Homo sapien
taaattaaacttatcgttgaattat

SEQ ID NO: 5871127 - DNA, 25 bp, Homo sapien
attttgaatatcgtttattaactta

SEQ ID NO: 5871128 - DNA, 25 bp, Homo sapien
tacaaaaattcgttataatcattat

SEQ ID NO: 5871129 - DNA, 25 bp, Homo sapien
taattatttatattaatccggatta

SEQ ID NO: 5871130 - DNA, 25 bp, Homo sapien
tagtatatacttattacgaattatt

SEQ ID NO: 5871131 - DNA, 25 bp, Homo sapien
tcttttatcgacttaattaattatt

SEQ ID NO: 5871132 - DNA, 25 bp, Homo sapien
taatatacgacgaattttaattatt

SEQ ID NO: 5871133 - DNA, 25 bp, Homo sapien
tatataattattcgactaaaactaa

SEQ ID NO: 5871134 - DNA, 25 bp, Homo sapien
gtatagtcgttaatttatattataa

SEQ ID NO: 5871135 - DNA, 25 bp, Homo sapien
tttatctaatattatgaacgtttat

SEQ ID NO: 5871136 - DNA, 25 bp, Homo sapien
ttaatgtaatttaatcgatattcaa

SEQ ID NO: 5871137 - DNA, 25 bp, Homo sapien
taaatatataaccgtattatcaaat

SEQ ID NO: 5871138 - DNA, 25 bp, Homo sapien
atattatcatattatcgaattaaca

SEQ ID NO: 5871139 - DNA, 25 bp, Homo sapien
taatgttatcgatattacataatta

SEQ ID NO: 5871140 - DNA, 25 bp, Homo sapien
attatttgttcgattaattatatca

SEQ ID NO: 5871141 - DNA, 25 bp, Homo sapien
taattacgaattattatgtttctta

SEQ ID NO: 5871142 - DNA, 25 bp, Homo sapien
gaattctatacgtaatattatattt

SEQ ID NO: 5871143 - DNA, 25 bp, Homo sapien
tttttcgataagatattatactttt

SEQ ID NO: 5871144 - DNA, 25 bp, Homo sapien
tttaatctaattcgtaattttgaat

SEQ ID NO: 5871145 - DNA, 25 bp, Homo sapien
aaatctacgaatactattaatttat

SEQ ID NO: 5871146 - DNA, 25 bp, Homo sapien
catatatcttattcgattattattt

SEQ ID NO: 5871147 - DNA, 25 bp, Homo sapien
attagaacgtatattataacatttt

SEQ ID NO: 5871148 - DNA, 25 bp, Homo sapien
acaatcgactattatttatatattt

SEQ ID NO: 5871149 - DNA, 25 bp, Homo sapien
tatttagctatcgataatattattt

SEQ ID NO: 5871150 - DNA, 25 bp, Homo sapien
tagattcgatttatattagttatat

SEQ ID NO: 5871151 - DNA, 25 bp, Homo sapien
agtttttatatcgacttatatttat

SEQ ID NO: 5871152 - DNA, 25 bp, Homo sapien
atattaataattttagatcgagttt

SEQ ID NO: 5871153 - DNA, 25 bp, Homo sapien
tttctttatatcaaattacgaattt

SEQ ID NO: 5871154 - DNA, 25 bp, Homo sapien
taacttaattatcgtttatcattaa

SEQ ID NO: 5871155 - DNA, 25 bp, Homo sapien
atttatatttttcgtacgataataa

SEQ ID NO: 5871156 - DNA, 25 bp, Homo sapien
ttttgccgttaaataattataataa

SEQ ID NO: 5871157 - DNA, 25 bp, Homo sapien
atttataaaacgatcttaatttcat

SEQ ID NO: 5871158 - DNA, 25 bp, Homo sapien
aatttaattatcgcttataagtaaa

SEQ ID NO: 5871159 - DNA, 25 bp, Homo sapien
aattttatatgatttcgatcttttt

SEQ ID NO: 5871160 - DNA, 25 bp, Homo sapien
taaatttttgatatcgataatctat

SEQ ID NO: 5871161 - DNA, 25 bp, Homo sapien
tttacattacgattagttttaaata

SEQ ID NO: 5871162 - DNA, 25 bp, Homo sapien
tatatttatcgattacaataacaaa

SEQ ID NO: 5871163 - DNA, 25 bp, Homo sapien
tatttttattcaaaattcgatcata

SEQ ID NO: 5871164 - DNA, 25 bp, Homo sapien
ttaataattttgttcgaatatatag

SEQ ID NO: 5871165 - DNA, 25 bp, Homo sapien
tttttcgtatcttaatcaatattat

SEQ ID NO: 5871166 - DNA, 25 bp, Homo sapien
gatattaatatattcgactaatttt

SEQ ID NO: 5871167 - DNA, 25 bp, Homo sapien
aatctaactattaatttcgaataat

SEQ ID NO: 5871168 - DNA, 25 bp, Homo sapien
attattttatatcaatttcgtcata

SEQ ID NO: 5871169 - DNA, 25 bp, Homo sapien
aagttacgatttatcattaatataa

SEQ ID NO: 5871170 - DNA, 25 bp, Homo sapien
caatattatattaaatacgcttttt

SEQ ID NO: 5871171 - DNA, 25 bp, Homo sapien
tattaatatccgctatatttaaaaa

SEQ ID NO: 5871172 - DNA, 25 bp, Homo sapien
ttgaatagatttacgataattttta

SEQ ID NO: 5871173 - DNA, 25 bp, Homo sapien
ttaatataaatttcgcataaactaa

SEQ ID NO: 5871174 - DNA, 25 bp, Homo sapien
aattatactaatcgatgaatttaaa

SEQ ID NO: 5871175 - DNA, 25 bp, Homo sapien
taaatttatatatctaaccgtataa

SEQ ID NO: 5871176 - DNA, 25 bp, Homo sapien
taatcttattatatctatcgtattt

SEQ ID NO: 5871177 - DNA, 25 bp, Homo sapien
tatattttaattatcgaaactttag

SEQ ID NO: 5871178 - DNA, 25 bp, Homo sapien
attgttacttatatattcgaaaaaa

SEQ ID NO: 5871179 - DNA, 25 bp, Homo sapien
ttatatatttagatcgattatcaaa

SEQ ID NO: 5871180 - DNA, 25 bp, Homo sapien
aaaacatgatattattcgattaaaa

SEQ ID NO: 5871181 - DNA, 25 bp, Homo sapien
taataatattaatgcgaattcaaaa

SEQ ID NO: 5871182 - DNA, 25 bp, Homo sapien
tttattcgatattatatactttgat

SEQ ID NO: 5871183 - DNA, 25 bp, Homo sapien
taattttaattgaacgttagtaata

SEQ ID NO: 5871184 - DNA, 25 bp, Homo sapien
taaactattatcgtttaatcaatat

SEQ ID NO: 5871185 - DNA, 25 bp, Homo sapien
tatatatattcgcataaatcaaaaa

SEQ ID NO: 5871186 - DNA, 25 bp, Homo sapien
tgtatagttatattatttcgaaaat

SEQ ID NO: 5871187 - DNA, 25 bp, Homo sapien
tattatattcgaatttagtaacttt

SEQ ID NO: 5871188 - DNA, 25 bp, Homo sapien
ttaactactattattcgaaatatat

SEQ ID NO: 5871189 - DNA, 25 bp, Homo sapien
tatttatttcgacaattaatactaa

SEQ ID NO: 5871190 - DNA, 25 bp, Homo sapien
atatttattccgataataatcattt

SEQ ID NO: 5871191 - DNA, 25 bp, Homo sapien
aacattcgtaatcttttataataat

SEQ ID NO: 5871192 - DNA, 25 bp, Homo sapien
atattttcgacactatttaatatta

SEQ ID NO: 5871193 - DNA, 25 bp, Homo sapien
attatttcgataatactatactttt

SEQ ID NO: 5871194 - DNA, 25 bp, Homo sapien
aattgtatgattaatattcgatatt

SEQ ID NO: 5871195 - DNA, 25 bp, Homo sapien
tgatttattatattcgatctttata

SEQ ID NO: 5871196 - DNA, 25 bp, Homo sapien
taatattatcaatcgttgaattata

SEQ ID NO: 5871197 - DNA, 25 bp, Homo sapien
tatcatagtatcgtattaaatttaa

SEQ ID NO: 5871198 - DNA, 25 bp, Homo sapien
taagaattcgtaattagtatttaat

SEQ ID NO: 5871199 - DNA, 25 bp, Homo sapien
tttttaattttcgaaatctatattc

SEQ ID NO: 5871200 - DNA, 25 bp, Homo sapien
tttatttccgatatattatttattc

SEQ ID NO: 5871201 - DNA, 25 bp, Homo sapien
atttatattacgatcgattatatta

SEQ ID NO: 5871202 - DNA, 25 bp, Homo sapien
aacattatataactttcgaaaatat

SEQ ID NO: 5871203 - DNA, 25 bp, Homo sapien
taaaaacatcgattatttattacta

SEQ ID NO: 5871204 - DNA, 25 bp, Homo sapien
tattcatacgatattattgttattt

SEQ ID NO: 5871205 - DNA, 25 bp, Homo sapien
aaatatatatactaacgatttaact

SEQ ID NO: 5871206 - DNA, 25 bp, Homo sapien
aataccgaattaatataagttatat

SEQ ID NO: 5871207 - DNA, 25 bp, Homo sapien
ataataaatagtataattcgtcttt

SEQ ID NO: 5871208 - DNA, 25 bp, Homo sapien
atttattactattaatcgttcataa

SEQ ID NO: 5871209 - DNA, 25 bp, Homo sapien
atttatacgaaattacttatgtaat

SEQ ID NO: 5871210 - DNA, 25 bp, Homo sapien
ataattttaatctcgataattgtta

SEQ ID NO: 5871211 - DNA, 25 bp, Homo sapien
atagactatttacgaattaatattt

SEQ ID NO: 5871212 - DNA, 25 bp, Homo sapien
aatgaaatttgtcgattatattaat

SEQ ID NO: 5871213 - DNA, 25 bp, Homo sapien
aattatatcgatctaatcataataa

SEQ ID NO: 5871214 - DNA, 25 bp, Homo sapien
attatcatttatcgacaaattatat

SEQ ID NO: 5871215 - DNA, 25 bp, Homo sapien
aatattatacgaattattgtgttta

SEQ ID NO: 5871216 - DNA, 25 bp, Homo sapien
atgataatcgttatctaatttaaaa

SEQ ID NO: 5871217 - DNA, 25 bp, Homo sapien
tatattactacgataatctttaaaa

SEQ ID NO: 5871218 - DNA, 25 bp, Homo sapien
actatattattcgattaaacaaatt

SEQ ID NO: 5871219 - DNA, 25 bp, Homo sapien
aatatatatttcgaaacttctatta

SEQ ID NO: 5871220 - DNA, 25 bp, Homo sapien
tacttatatttagattatcgtatta

SEQ ID NO: 5871221 - DNA, 25 bp, Homo sapien
attaattaaacatcgtacattatta

SEQ ID NO: 5871222 - DNA, 25 bp, Homo sapien
attattatatcttcgtattatgtat

SEQ ID NO: 5871223 - DNA, 25 bp, Homo sapien
taaattaattcgtactatatatcat

SEQ ID NO: 5871224 - DNA, 25 bp, Homo sapien
attatttatagtcgaattttctata

SEQ ID NO: 5871225 - DNA, 25 bp, Homo sapien
taaatcgaatttaaattacatcatt

SEQ ID NO: 5871226 - DNA, 25 bp, Homo sapien
ttattacgaattttttactagatat

SEQ ID NO: 5871227 - DNA, 25 bp, Homo sapien
atttaaatattatcatacgagtaaa

SEQ ID NO: 5871228 - DNA, 25 bp, Homo sapien
tataaagatcgaatataataaatca

SEQ ID NO: 5871229 - DNA, 25 bp, Homo sapien
aaataataatcgaataagatatatg

SEQ ID NO: 5871230 - DNA, 25 bp, Homo sapien
taaacacaataattcgtataatatt

SEQ ID NO: 5871231 - DNA, 25 bp, Homo sapien
taatccggattaatataaataatta

SEQ ID NO: 5871232 - DNA, 25 bp, Homo sapien
aatatcgaatattaatcatacaatt

SEQ ID NO: 5871233 - DNA, 25 bp, Homo sapien
aaatagtatatatcgttaattaaca

SEQ ID NO: 5871234 - DNA, 25 bp, Homo sapien
ttttaatcgaataatatcatgtttt

SEQ ID NO: 5871235 - DNA, 25 bp, Homo sapien
atataacttatattaattcggtatt

SEQ ID NO: 5871236 - DNA, 25 bp, Homo sapien
ttttttcgaatatataagtaacaat

SEQ ID NO: 5871237 - DNA, 25 bp, Homo sapien
attttcgaaataatataactataca

SEQ ID NO: 5871238 - DNA, 25 bp, Homo sapien
attcaaaattacgaattagattaaa

SEQ ID NO: 5871239 - DNA, 25 bp, Homo sapien
ataatagattatcgatatacataaa

SEQ ID NO: 5871240 - DNA, 25 bp, Homo sapien
taataatcggataatttaattagta

SEQ ID NO: 5871241 - DNA, 25 bp, Homo sapien
taataataattatacgattcatttg

SEQ ID NO: 5871242 - DNA, 25 bp, Homo sapien
aaaaagcgtatttaatataatattg

SEQ ID NO: 5871243 - DNA, 25 bp, Homo sapien
tatgtaatcgaacttatatatattt

SEQ ID NO: 5871244 - DNA, 25 bp, Homo sapien
ttatgaacgattaatagtaataaat

SEQ ID NO: 5871245 - DNA, 25 bp, Homo sapien
taagttaataaacgatattcaaaat

SEQ ID NO: 5871246 - DNA, 25 bp, Homo sapien
attaatataatcgacaaatttcatt

SEQ ID NO: 5871247 - DNA, 25 bp, Homo sapien
ttagttttagtcgaataattatata

SEQ ID NO: 5871248 - DNA, 25 bp, Homo sapien
ttttaaattagataacgattatcat

SEQ ID NO: 5871249 - DNA, 25 bp, Homo sapien
taaaaaagtattaatacgaaatcat

SEQ ID NO: 5871250 - DNA, 25 bp, Homo sapien
taattatgtaatatcgataacatta

SEQ ID NO: 5871251 - DNA, 25 bp, Homo sapien
tttgataatcgatctaaatatataa

SEQ ID NO: 5871252 - DNA, 25 bp, Homo sapien
aattatacgttaataaacatctaat

SEQ ID NO: 5871253 - DNA, 25 bp, Homo sapien
atttgaattattaatcgacaaaaat

SEQ ID NO: 5871254 - DNA, 25 bp, Homo sapien
ctaaagtttcgataattaaaatata

SEQ ID NO: 5871255 - DNA, 25 bp, Homo sapien
ttttgaattcgcattaatattatta

SEQ ID NO: 5871256 - DNA, 25 bp, Homo sapien
aagtaatcaacgaatattattaaat

SEQ ID NO: 5871257 - DNA, 25 bp, Homo sapien
tgatataattaatcgaacaaataat

SEQ ID NO: 5871258 - DNA, 25 bp, Homo sapien
caataataatcgatatgaataaatt

SEQ ID NO: 5871259 - DNA, 25 bp, Homo sapien
atttggttaaatattacgatattaa

SEQ ID NO: 5871260 - DNA, 25 bp, Homo sapien
taatataatcgatcgtaatataaat

SEQ ID NO: 5871261 - DNA, 25 bp, Homo sapien
ttattataattatttaacggcaaaa

SEQ ID NO: 5871262 - DNA, 25 bp, Homo sapien
tataaatttataagtttacgcaaaa

SEQ ID NO: 5871263 - DNA, 25 bp, Homo sapien
aaatacgatagatataataagatta

SEQ ID NO: 5871264 - DNA, 25 bp, Homo sapien
ttttaatttaatcgataaagtacaa

SEQ ID NO: 5871265 - DNA, 25 bp, Homo sapien
atatgaatctacgaaaattttttta

SEQ ID NO: 5871266 - DNA, 25 bp, Homo sapien
tatagaaaattcgactataaataat

SEQ ID NO: 5871267 - DNA, 25 bp, Homo sapien
aataagatcgtattaattaattcat

SEQ ID NO: 5871268 - DNA, 25 bp, Homo sapien
aataattcgtaataagtatatacta

SEQ ID NO: 5871269 - DNA, 25 bp, Homo sapien
ttattatcgtacgaaaaatataaat

SEQ ID NO: 5871270 - DNA, 25 bp, Homo sapien
attacataagtaatttcgtataaat

SEQ ID NO: 5871271 - DNA, 25 bp, Homo sapien
tatgacgaaattgatataaaataat

SEQ ID NO: 5871272 - DNA, 25 bp, Homo sapien
aaagacgaattatactatttattat

SEQ ID NO: 5871273 - DNA, 25 bp, Homo sapien
aaataatattatcgatagctaaata

SEQ ID NO: 5871274 - DNA, 25 bp, Homo sapien
aaatgattattatcggaataaatat

SEQ ID NO: 5871275 - DNA, 25 bp, Homo sapien
agaaacgtaatctttaataataata

SEQ ID NO: 5871276 - DNA, 25 bp, Homo sapien
atataactaatataaatcgaatcta

SEQ ID NO: 5871277 - DNA, 25 bp, Homo sapien
aaataacaataatatcgtatgaata

SEQ ID NO: 5871278 - DNA, 25 bp, Homo sapien
ttaatgataaacgataattaagtta

SEQ ID NO: 5871279 - DNA, 25 bp, Homo sapien
ttttaaagattatcgtagtaatata

SEQ ID NO: 5871280 - DNA, 25 bp, Homo sapien
aaattcgtaatttgatataaagaaa

SEQ ID NO: 5871281 - DNA, 25 bp, Homo sapien
ttttattattcgaaatatgatgtaa

SEQ ID NO: 5871282 - DNA, 25 bp, Homo sapien
ataatgattataacgaatttttgta

SEQ ID NO: 5871283 - DNA, 25 bp, Homo sapien
gaataaataatatatcggaaataaa

SEQ ID NO: 5871284 - DNA, 25 bp, Homo sapien
taatcatataagcgttaattatttt

SEQ ID NO: 5871285 - DNA, 25 bp, Homo sapien
taagacgatagaatatattatttat

SEQ ID NO: 5871286 - DNA, 25 bp, Homo sapien
ttattatgattagatcgatataatt

SEQ ID NO: 5871287 - DNA, 25 bp, Homo sapien
ataatattgattaagatacgaaaaa

SEQ ID NO: 5871288 - DNA, 25 bp, Homo sapien
attaaaattcgaaaatagtatatca

SEQ ID NO: 5871289 - DNA, 25 bp, Homo sapien
ataatgtatcgaaaatttatgttat

SEQ ID NO: 5871290 - DNA, 25 bp, Homo sapien
aaatataatattacgtatagaattc

SEQ ID NO: 5871291 - DNA, 25 bp, Homo sapien
ataaaatcggtatagattaattaaa

SEQ ID NO: 5871292 - DNA, 25 bp, Homo sapien
aaataaatataacaatacgatatct

SEQ ID NO: 5871293 - DNA, 25 bp, Homo sapien
agtatttataatcgaattagaaatt

SEQ ID NO: 5871294 - DNA, 25 bp, Homo sapien
aaagttactaaattcgaatataata

SEQ ID NO: 5871295 - DNA, 25 bp, Homo sapien
tagtaataaataatcgatgttttta

SEQ ID NO: 5871296 - DNA, 25 bp, Homo sapien
tatgatcgaattttgaataaaaata

SEQ ID NO: 5871297 - DNA, 25 bp, Homo sapien
aaaattagtcgaatatattaatatc

SEQ ID NO: 5871298 - DNA, 25 bp, Homo sapien
catattataagttatcgataaaata

SEQ ID NO: 5871299 - DNA, 25 bp, Homo sapien
attaaatactaattacgaattctta

SEQ ID NO: 5871300 - DNA, 25 bp, Homo sapien
atatctagtaaaaaattcgtaataa

SEQ ID NO: 5871301 - DNA, 25 bp, Homo sapien
taataatgtacgatgtttaattaat

SEQ ID NO: 5871302 - DNA, 25 bp, Homo sapien
aataattaattaagtcgataaaaga

SEQ ID NO: 5871303 - DNA, 25 bp, Homo sapien
atatatttcgaataatagtagttaa

SEQ ID NO: 5871304 - DNA, 25 bp, Homo sapien
atatatatacgcaataattacatta

SEQ ID NO: 5871305 - DNA, 25 bp, Homo sapien
aaaagtatagtattatcgaaataat

SEQ ID NO: 5871306 - DNA, 25 bp, Homo sapien
aaatattaattcgtaaatagtctat

SEQ ID NO: 5871307 - DNA, 25 bp, Homo sapien
tttactcgtatgataatatttaaat

SEQ ID NO: 5871308 - DNA, 25 bp, Homo sapien
atgaaaaattcgtaattagatttat

SEQ ID NO: 5871309 - DNA, 25 bp, Homo sapien
ttaaatataagtataattcgaatct

SEQ ID NO: 5871310 - DNA, 25 bp, Homo sapien
ttatattaatgataaatcgtaactt

SEQ ID NO: 5871311 - DNA, 25 bp, Homo sapien
aaatatataaataatagtcgattgt

SEQ ID NO: 5871312 - DNA, 25 bp, Homo sapien
aataataataacgtaattacatcaa

SEQ ID NO: 5871313 - DNA, 25 bp, Homo sapien
ataaattaatagtattcgtagattt

SEQ ID NO: 5871314 - DNA, 25 bp, Homo sapien
tttaaattcatcgattagtataatt

SEQ ID NO: 5871315 - DNA, 25 bp, Homo sapien
taatagaagtttcgaaatatatatt

SEQ ID NO: 5871316 - DNA, 25 bp, Homo sapien
aaactcgatctaaaattattaatat

SEQ ID NO: 5871317 - DNA, 25 bp, Homo sapien
ttagtattaattgtcgaaataaata

SEQ ID NO: 5871318 - DNA, 25 bp, Homo sapien
tttaagttataatcgaatatataga

SEQ ID NO: 5871319 - DNA, 25 bp, Homo sapien
ataaatataagtcgatataaaaact

SEQ ID NO: 5871320 - DNA, 25 bp, Homo sapien
ttataatataaattaacgactatac

SEQ ID NO: 5871321 - DNA, 25 bp, Homo sapien
atgaaactcgaatttaattaaataa

SEQ ID NO: 5871322 - DNA, 25 bp, Homo sapien
ataaacgttcataatattagataaa

SEQ ID NO: 5871323 - DNA, 25 bp, Homo sapien
gaatatagatttcgaaaattaaaaa

SEQ ID NO: 5871324 - DNA, 25 bp, Homo sapien
ataagatacgaatattaatgattaa

SEQ ID NO: 5871325 - DNA, 25 bp, Homo sapien
atataatttgtcgataaatgataat

SEQ ID NO: 5871326 - DNA, 25 bp, Homo sapien
aatgatgtaatttaaattcgattta

SEQ ID NO: 5871327 - DNA, 25 bp, Homo sapien
tagttgatcgtaaaaaatttaatat

SEQ ID NO: 5871328 - DNA, 25 bp, Homo sapien
aaaagtataatatcttatcgaaaaa

SEQ ID NO: 5871329 - DNA, 25 bp, Homo sapien
tataaacgaaattatgattatttac

SEQ ID NO: 5871330 - DNA, 25 bp, Homo sapien
ctatatattcgaacaaaattattaa

SEQ ID NO: 5871331 - DNA, 25 bp, Homo sapien
atgatatatagtacgaattaattta

SEQ ID NO: 5871332 - DNA, 25 bp, Homo sapien
attaaaatagattacgtcatattaa

SEQ ID NO: 5871333 - DNA, 25 bp, Homo sapien
tataattcaacgattgataatatta

SEQ ID NO: 5871334 - DNA, 25 bp, Homo sapien
aatttgtttaatcgaataatatagt

SEQ ID NO: 5871335 - DNA, 25 bp, Homo sapien
taaaaattatcgtaaatctattcaa

SEQ ID NO: 5871336 - DNA, 25 bp, Homo sapien
ttacaaatattatacgaaacaatta

SEQ ID NO: 5871337 - DNA, 25 bp, Homo sapien
taacaattatcgagattaaaattat

SEQ ID NO: 5871338 - DNA, 25 bp, Homo sapien
taatacgataatctaaatataagta

SEQ ID NO: 5871339 - DNA, 25 bp, Homo sapien
tttacttataagcgataattaaatt

SEQ ID NO: 5871340 - DNA, 25 bp, Homo sapien
ttagtttatgcgaaatttatattaa

SEQ ID NO: 5871341 - DNA, 25 bp, Homo sapien
atcaaagtatataatatcgaataaa

SEQ ID NO: 5871342 - DNA, 25 bp, Homo sapien
taatgttaaatccgataatatatat

SEQ ID NO: 5871343 - DNA, 25 bp, Homo sapien
gttatgatcgaaataattattaaaa

SEQ ID NO: 5871344 - DNA, 25 bp, Homo sapien
atacataatacgaagatataataat

SEQ ID NO: 5871345 - DNA, 25 bp, Homo sapien
attagttgtaatcgtaaattaatta

SEQ ID NO: 5871346 - DNA, 25 bp, Homo sapien
atattgattaaacgataatagttta

SEQ ID NO: 5871347 - DNA, 25 bp, Homo sapien
aatgttaatataagttcgttaatta

SEQ ID NO: 5871348 - DNA, 25 bp, Homo sapien
tattttatataagacgacaaaaatt

SEQ ID NO: 5871349 - DNA, 25 bp, Homo sapien
tcataatataattcgataacaaaaa

SEQ ID NO: 5871350 - DNA, 25 bp, Homo sapien
aatattgatatcgaacattattaat

SEQ ID NO: 5871351 - DNA, 25 bp, Homo sapien
ataattcaacgataagtttaattta

SEQ ID NO: 5871352 - DNA, 25 bp, Homo sapien
ataagatcgctatataattatttaa

SEQ ID NO: 5871353 - DNA, 25 bp, Homo sapien
ttatataatatatagcgattaatct

SEQ ID NO: 5871354 - DNA, 25 bp, Homo sapien
tattactaacgttcaattaaaatta

SEQ ID NO: 5871355 - DNA, 25 bp, Homo sapien
atttgcgtattaatataacttaaat

SEQ ID NO: 5871356 - DNA, 25 bp, Homo sapien
taatcaagttaacgaattatataaa

SEQ ID NO: 5871357 - DNA, 25 bp, Homo sapien
tcaatattaagatttcgataaaaaa

SEQ ID NO: 5871358 - DNA, 25 bp, Homo sapien
aaaatgttataatatacgttctaat

SEQ ID NO: 5871359 - DNA, 25 bp, Homo sapien
ttaaatttaatacgatactatgata

SEQ ID NO: 5871360 - DNA, 25 bp, Homo sapien
ttgaatatcgattaaattacattaa

SEQ ID NO: 5871361 - DNA, 25 bp, Homo sapien
tttttaaatatagcggatattaata

SEQ ID NO: 5871362 - DNA, 25 bp, Homo sapien
taagaaacataataattcgtaatta

SEQ ID NO: 5871363 - DNA, 25 bp, Homo sapien
atttgataatacggttatatattta

SEQ ID NO: 5871364 - DNA, 25 bp, Homo sapien
ataagttcgatactaataaataaaa

SEQ ID NO: 5871365 - DNA, 25 bp, Homo sapien
tataaatataacgattcatacttaa

SEQ ID NO: 5871366 - DNA, 25 bp, Homo sapien
tttttgatttatgcgaatatatata

SEQ ID NO: 5871367 - DNA, 25 bp, Homo sapien
atattttcgaaagttatataatgtt

SEQ ID NO: 5871368 - DNA, 25 bp, Homo sapien
tttgttattgtaatcgataaatata

SEQ ID NO: 5871369 - DNA, 25 bp, Homo sapien
aataattaaaattcgtcgtatatta

SEQ ID NO: 5871370 - DNA, 25 bp, Homo sapien
atagattatcgatatcaaaaattta

SEQ ID NO: 5871371 - DNA, 25 bp, Homo sapien
ttataaatttcgatacaatattgaa

SEQ ID NO: 5871372 - DNA, 25 bp, Homo sapien
ttatacggttagatatataaattta

SEQ ID NO: 5871373 - DNA, 25 bp, Homo sapien
aatcagataatcgtaaaaaaattta

SEQ ID NO: 5871374 - DNA, 25 bp, Homo sapien
aaaaagatcgaaatcatataaaatt

SEQ ID NO: 5871375 - DNA, 25 bp, Homo sapien
taatattaaatagtgtcgaaaatat

SEQ ID NO: 5871376 - DNA, 25 bp, Homo sapien
agttaaatcgttagtatatatattt

SEQ ID NO: 5871377 - DNA, 25 bp, Homo sapien
attattataaaagattacgaatgtt

SEQ ID NO: 5871378 - DNA, 25 bp, Homo sapien
aaatgtacgattaagatataatata

SEQ ID NO: 5871379 - DNA, 25 bp, Homo sapien
attataaattaatcgatcactatta

SEQ ID NO: 5871380 - DNA, 25 bp, Homo sapien
tatgaaaataatagttcgatatatt

SEQ ID NO: 5871381 - DNA, 25 bp, Homo sapien
attattcgaaattaatagttagatt

SEQ ID NO: 5871382 - DNA, 25 bp, Homo sapien
gataataagtataattcgtaaaatt

SEQ ID NO: 5871383 - DNA, 25 bp, Homo sapien
atgaaattaagatcgttttataaat

SEQ ID NO: 5871384 - DNA, 25 bp, Homo sapien
tatttaaaactaatcgtaatgtaaa

SEQ ID NO: 5871385 - DNA, 25 bp, Homo sapien
tataaaatattaaccgaataaagaa

SEQ ID NO: 5871386 - DNA, 25 bp, Homo sapien
tgttaattcgataatatgataatat

SEQ ID NO: 5871387 - DNA, 25 bp, Homo sapien
ataagttaattatatagcgatattt

SEQ ID NO: 5871388 - DNA, 25 bp, Homo sapien
aatagattatcgaatgatataatat

SEQ ID NO: 5871389 - DNA, 25 bp, Homo sapien
ttaaatttatatatcgaactagatt

SEQ ID NO: 5871390 - DNA, 25 bp, Homo sapien
ctaacattatatacgaattctatta

SEQ ID NO: 5871391 - DNA, 25 bp, Homo sapien
gtgtaatcaattttcgaatatatat

SEQ ID NO: 5871392 - DNA, 25 bp, Homo sapien
gttaatctaattatatcgctaataa

SEQ ID NO: 5871393 - DNA, 25 bp, Homo sapien
aatttcgtagtaattctatatacat

SEQ ID NO: 5871394 - DNA, 25 bp, Homo sapien
atcattcgttttttcgtaaattata

SEQ ID NO: 5871395 - DNA, 25 bp, Homo sapien
tttattataattactcgaatgacat

SEQ ID NO: 5871396 - DNA, 25 bp, Homo sapien
aagttaattcgtaattaatcttaga

SEQ ID NO: 5871397 - DNA, 25 bp, Homo sapien
atatctatacgatttgttaagaata

SEQ ID NO: 5871398 - DNA, 25 bp, Homo sapien
tacttctatcgacttaattaaatat

SEQ ID NO: 5871399 - DNA, 25 bp, Homo sapien
ttcttttagcgaaatttataatatg

SEQ ID NO: 5871400 - DNA, 25 bp, Homo sapien
taatattagttcgaaatttattgga

SEQ ID NO: 5871401 - DNA, 25 bp, Homo sapien
ttatatacgcagattatcataatta

SEQ ID NO: 5871402 - DNA, 25 bp, Homo sapien
aattcataatttaaactacgagtat

SEQ ID NO: 5871403 - DNA, 25 bp, Homo sapien
ttttaaaatatcgacgatttttcat

SEQ ID NO: 5871404 - DNA, 25 bp, Homo sapien
tagtgaattatcgattaaacttaat

SEQ ID NO: 5871405 - DNA, 25 bp, Homo sapien
aatacttatgcgaatattaaatcat

SEQ ID NO: 5871406 - DNA, 25 bp, Homo sapien
tgatattatacgactaaaactttaa

SEQ ID NO: 5871407 - DNA, 25 bp, Homo sapien
ttgatcgtttataagttttatcaat

SEQ ID NO: 5871408 - DNA, 25 bp, Homo sapien
taacacgatatagtacataaatatt

SEQ ID NO: 5871409 - DNA, 25 bp, Homo sapien
aatgactatttacgattatatatct

SEQ ID NO: 5871410 - DNA, 25 bp, Homo sapien
aatattatgaactatttacgaaaac

SEQ ID NO: 5871411 - DNA, 25 bp, Homo sapien
tgatatcgtattattaaagttatgt

SEQ ID NO: 5871412 - DNA, 25 bp, Homo sapien
taatgtaatatccgaattttgattt

SEQ ID NO: 5871413 - DNA, 25 bp, Homo sapien
gtataaattttcgatctttaatatg

SEQ ID NO: 5871414 - DNA, 25 bp, Homo sapien
ctttttatatattattcgtcgtaaa

SEQ ID NO: 5871415 - DNA, 25 bp, Homo sapien
ttcaatcgtaaatctattattaaga

SEQ ID NO: 5871416 - DNA, 25 bp, Homo sapien
ttatagtatatattaaaccgtaatc

SEQ ID NO: 5871417 - DNA, 25 bp, Homo sapien
ataaatcgactatacatatatactt

SEQ ID NO: 5871418 - DNA, 25 bp, Homo sapien
attaattacaatatgttcgaatatg

SEQ ID NO: 5871419 - DNA, 25 bp, Homo sapien
aattaaagattattcgaattcatag

SEQ ID NO: 5871420 - DNA, 25 bp, Homo sapien
aaatcatattataatagcgtctaaa

SEQ ID NO: 5871421 - DNA, 25 bp, Homo sapien
aagtataattttacgattcatcaat

SEQ ID NO: 5871422 - DNA, 25 bp, Homo sapien
aagttacgttattatataagagata

SEQ ID NO: 5871423 - DNA, 25 bp, Homo sapien
tatgaaaatctttaacgatatcatt

SEQ ID NO: 5871424 - DNA, 25 bp, Homo sapien
tatctctattacgattatatattag

SEQ ID NO: 5871425 - DNA, 25 bp, Homo sapien
taattggtatcggttaattattaaa

SEQ ID NO: 5871426 - DNA, 25 bp, Homo sapien
attgatcgattttacatagtaattt

SEQ ID NO: 5871427 - DNA, 25 bp, Homo sapien
tatagttgtaatcgaatattttttc

SEQ ID NO: 5871428 - DNA, 25 bp, Homo sapien
aaatattcgatattagtttagtcaa

SEQ ID NO: 5871429 - DNA, 25 bp, Homo sapien
ttgactaattcgttaatgtattatt

SEQ ID NO: 5871430 - DNA, 25 bp, Homo sapien
ataatagcggtaatttaagattaaa

SEQ ID NO: 5871431 - DNA, 25 bp, Homo sapien
tttctatttatcgtaaattctcatt

SEQ ID NO: 5871432 - DNA, 25 bp, Homo sapien
ataactgatcaatcgtaataaatta

SEQ ID NO: 5871433 - DNA, 25 bp, Homo sapien
tacatattattaataatccgaacta

SEQ ID NO: 5871434 - DNA, 25 bp, Homo sapien
ttacaagattatataatcgtcttta

SEQ ID NO: 5871435 - DNA, 25 bp, Homo sapien
aaaataatctaattcgattgctaaa

SEQ ID NO: 5871436 - DNA, 25 bp, Homo sapien
atagttaataacgtaattacagaat

SEQ ID NO: 5871437 - DNA, 25 bp, Homo sapien
ttttttataagatcgtactacatta

SEQ ID NO: 5871438 - DNA, 25 bp, Homo sapien
tcgaattattatacgttctaaatta

SEQ ID NO: 5871439 - DNA, 25 bp, Homo sapien
tcataaatatactacgttctttata

SEQ ID NO: 5871440 - DNA, 25 bp, Homo sapien
tgttaatcattattcgtatattctt

SEQ ID NO: 5871441 - DNA, 25 bp, Homo sapien
ccttattcgattaattactataatt

SEQ ID NO: 5871442 - DNA, 25 bp, Homo sapien
aaatgctatttacgaaatatcttat

SEQ ID NO: 5871443 - DNA, 25 bp, Homo sapien
aggaaacgattaataatatctataa

SEQ ID NO: 5871444 - DNA, 25 bp, Homo sapien
agattaattattcgatctaatttga

SEQ ID NO: 5871445 - DNA, 25 bp, Homo sapien
tcttaataagtttcgtaatatagaa

SEQ ID NO: 5871446 - DNA, 25 bp, Homo sapien
atataattataatcgctctattctt

SEQ ID NO: 5871447 - DNA, 25 bp, Homo sapien
tttaattaatctaatcgttagtttc

SEQ ID NO: 5871448 - DNA, 25 bp, Homo sapien
ttgttaattactttcgaacaattat

SEQ ID NO: 5871449 - DNA, 25 bp, Homo sapien
attatttacgattcgaaatatagat

SEQ ID NO: 5871450 - DNA, 25 bp, Homo sapien
atactttatcgtaaaagattttatc

SEQ ID NO: 5871451 - DNA, 25 bp, Homo sapien
aaattgatatagtcgttttattttg

SEQ ID NO: 5871452 - DNA, 25 bp, Homo sapien
tttagtaacttaaatattcgctaaa

SEQ ID NO: 5871453 - DNA, 25 bp, Homo sapien
ttaaaatttacgctagtatttctat

SEQ ID NO: 5871454 - DNA, 25 bp, Homo sapien
ctcaatatttatactaaacgtattt

SEQ ID NO: 5871455 - DNA, 25 bp, Homo sapien
atatatatcggttaatcacatatat

SEQ ID NO: 5871456 - DNA, 25 bp, Homo sapien
ttgactataacttaatacgaaaaat

SEQ ID NO: 5871457 - DNA, 25 bp, Homo sapien
aatcataattatcgatttaggaaat

SEQ ID NO: 5871458 - DNA, 25 bp, Homo sapien
tagatcgataatcaattgttaaatt

SEQ ID NO: 5871459 - DNA, 25 bp, Homo sapien
ttttgattcgttaatctataaaaga

SEQ ID NO: 5871460 - DNA, 25 bp, Homo sapien
aaaccatatattatattcgctaatt

SEQ ID NO: 5871461 - DNA, 25 bp, Homo sapien
attatgttaattgaattcgtaacaa

SEQ ID NO: 5871462 - DNA, 25 bp, Homo sapien
tttattcgaattagatatatgtact

SEQ ID NO: 5871463 - DNA, 25 bp, Homo sapien
aattgtcgactatttaatatcttta

SEQ ID NO: 5871464 - DNA, 25 bp, Homo sapien
aagatgtaatatacgatcattttaa

SEQ ID NO: 5871465 - DNA, 25 bp, Homo sapien
atctatataataacgatgcttatta

SEQ ID NO: 5871466 - DNA, 25 bp, Homo sapien
tttattaatctacgataaatctaca

SEQ ID NO: 5871467 - DNA, 25 bp, Homo sapien
ataaaattatcggtaatacttatgt

SEQ ID NO: 5871468 - DNA, 25 bp, Homo sapien
tcgtatattagattcgataaaattt

SEQ ID NO: 5871469 - DNA, 25 bp, Homo sapien
accattctatatacgatattattat

SEQ ID NO: 5871470 - DNA, 25 bp, Homo sapien
gaatctaaattgattcgtattatta

SEQ ID NO: 5871471 - DNA, 25 bp, Homo sapien
aagtaaacgatatattattcaagat

SEQ ID NO: 5871472 - DNA, 25 bp, Homo sapien
gaatatttattaaattcgacgaaaa

SEQ ID NO: 5871473 - DNA, 25 bp, Homo sapien
tattaaacacttaccgatataataa

SEQ ID NO: 5871474 - DNA, 25 bp, Homo sapien
aaacacatatcgtaattaatttagt

SEQ ID NO: 5871475 - DNA, 25 bp, Homo sapien
aacaaatatacttattacgaattag

SEQ ID NO: 5871476 - DNA, 25 bp, Homo sapien
attaatttcgtaatatattctgttc

SEQ ID NO: 5871477 - DNA, 25 bp, Homo sapien
tagtataatccgtaaattaaagaat

SEQ ID NO: 5871478 - DNA, 25 bp, Homo sapien
attattactaatcttacgtacttaa

SEQ ID NO: 5871479 - DNA, 25 bp, Homo sapien
gaatatcgataattcaactaaattt

SEQ ID NO: 5871480 - DNA, 25 bp, Homo sapien
atatttcgtgttactttatatcaaa

SEQ ID NO: 5871481 - DNA, 25 bp, Homo sapien
tttattttaaaacgtattcgataga

SEQ ID NO: 5871482 - DNA, 25 bp, Homo sapien
tttaaatcttaatctacgatttact

SEQ ID NO: 5871483 - DNA, 25 bp, Homo sapien
actgacgatagattaatatataaaa

SEQ ID NO: 5871484 - DNA, 25 bp, Homo sapien
ttaataaatattttcgcgatgttat

SEQ ID NO: 5871485 - DNA, 25 bp, Homo sapien
taacaatatatcgatagtttatgaa

SEQ ID NO: 5871486 - DNA, 25 bp, Homo sapien
aatttataatcgattattaccagaa

SEQ ID NO: 5871487 - DNA, 25 bp, Homo sapien
tatttcttaatataattacggtaac

SEQ ID NO: 5871488 - DNA, 25 bp, Homo sapien
attgtgcgttatttatataatattc

SEQ ID NO: 5871489 - DNA, 25 bp, Homo sapien
gttatattacgaaaatttacattac

SEQ ID NO: 5871490 - DNA, 25 bp, Homo sapien
aatataagattatcgacgaaatata

SEQ ID NO: 5871491 - DNA, 25 bp, Homo sapien
taattaatatacaacccgattaata

SEQ ID NO: 5871492 - DNA, 25 bp, Homo sapien
tgtattacgactaaaatttataaga

SEQ ID NO: 5871493 - DNA, 25 bp, Homo sapien
aaactttatatagtaatcgtattga

SEQ ID NO: 5871494 - DNA, 25 bp, Homo sapien
agaatcgttaatcaatatagtaatt

SEQ ID NO: 5871495 - DNA, 25 bp, Homo sapien
ataggcgagaatttattaattaata

SEQ ID NO: 5871496 - DNA, 25 bp, Homo sapien
tttttactaatatgacgaagataaa

SEQ ID NO: 5871497 - DNA, 25 bp, Homo sapien
tgtattaaaactattacgatatttg

SEQ ID NO: 5871498 - DNA, 25 bp, Homo sapien
tttcaatttacgactattaatgaaa

SEQ ID NO: 5871499 - DNA, 25 bp, Homo sapien
attagtgttatatcggtattataaa

SEQ ID NO: 5871500 - DNA, 25 bp, Homo sapien
atattcgccgtaaatttattataaa

SEQ ID NO: 5871501 - DNA, 25 bp, Homo sapien
tacatattccgttataaataatgaa

SEQ ID NO: 5871502 - DNA, 25 bp, Homo sapien
aatgtcgataatcttttattaaact

SEQ ID NO: 5871503 - DNA, 25 bp, Homo sapien
caatacgatagttaatttatatagt

SEQ ID NO: 5871504 - DNA, 25 bp, Homo sapien
atttcattaaacgtagatctattaa

SEQ ID NO: 5871505 - DNA, 25 bp, Homo sapien
ttaatgtacgtatatcaattcaaat

SEQ ID NO: 5871506 - DNA, 25 bp, Homo sapien
aatgagtattatgacgaattataaa

SEQ ID NO: 5871507 - DNA, 25 bp, Homo sapien
agttgtacgaataatcaattttaat

SEQ ID NO: 5871508 - DNA, 25 bp, Homo sapien
tatttctaattataaacgattcttg

SEQ ID NO: 5871509 - DNA, 25 bp, Homo sapien
aattgtattaacgattacgtataaa

SEQ ID NO: 5871510 - DNA, 25 bp, Homo sapien
atcttttcgaataattgatttttac

SEQ ID NO: 5871511 - DNA, 25 bp, Homo sapien
taaaatacgtacttaatcttactta

SEQ ID NO: 5871512 - DNA, 25 bp, Homo sapien
atcataaatataacggttacattat

SEQ ID NO: 5871513 - DNA, 25 bp, Homo sapien
tgatgttaatactaaatcgaattat

SEQ ID NO: 5871514 - DNA, 25 bp, Homo sapien
gatattgattataagttcgaattat

SEQ ID NO: 5871515 - DNA, 25 bp, Homo sapien
cagtttcgattttaatatacatatt

SEQ ID NO: 5871516 - DNA, 25 bp, Homo sapien
agtaaataattaatcgagtaatcta

SEQ ID NO: 5871517 - DNA, 25 bp, Homo sapien
tttttcgcgattataattttaatgt

SEQ ID NO: 5871518 - DNA, 25 bp, Homo sapien
attctttatcgtagttaaattagta

SEQ ID NO: 5871519 - DNA, 25 bp, Homo sapien
tattacaggatataattcgataaat

SEQ ID NO: 5871520 - DNA, 25 bp, Homo sapien
attaatatcattcgttaatagctaa

SEQ ID NO: 5871521 - DNA, 25 bp, Homo sapien
taaaatagttagacttatcgtatat

SEQ ID NO: 5871522 - DNA, 25 bp, Homo sapien
cttatattaataattttcgcaaaag

SEQ ID NO: 5871523 - DNA, 25 bp, Homo sapien
ttttacgattcattaatattgttgt

SEQ ID NO: 5871524 - DNA, 25 bp, Homo sapien
taatttttcgagtaatagtacaaat

SEQ ID NO: 5871525 - DNA, 25 bp, Homo sapien
gaaaataattgtaatcgaatgtaat

SEQ ID NO: 5871526 - DNA, 25 bp, Homo sapien
ttaaaaattacttatcgtattagac

SEQ ID NO: 5871527 - DNA, 25 bp, Homo sapien
aatagatcggaattagatatattta

SEQ ID NO: 5871528 - DNA, 25 bp, Homo sapien
ttagtcgaaatataatatacagtat

SEQ ID NO: 5871529 - DNA, 25 bp, Homo sapien
cataagaaaattcgtatatattcaa

SEQ ID NO: 5871530 - DNA, 25 bp, Homo sapien
atactcgattagatataataagatt

SEQ ID NO: 5871531 - DNA, 25 bp, Homo sapien
atatcacgaccttttaattattata

SEQ ID NO: 5871532 - DNA, 25 bp, Homo sapien
aatatacgcaactttttatcaaata

SEQ ID NO: 5871533 - DNA, 25 bp, Homo sapien
tttattattgacgattaattcatag

SEQ ID NO: 5871534 - DNA, 25 bp, Homo sapien
atatgagattacgttacatataatt

SEQ ID NO: 5871535 - DNA, 25 bp, Homo sapien
aatctttcgacaatatatattagaa

SEQ ID NO: 5871536 - DNA, 25 bp, Homo sapien
aactattatacgaaattgatatact

SEQ ID NO: 5871537 - DNA, 25 bp, Homo sapien
atgttgttacgaatcaatatatata

SEQ ID NO: 5871538 - DNA, 25 bp, Homo sapien
aaatttatatcggatcattatgaat

SEQ ID NO: 5871539 - DNA, 25 bp, Homo sapien
taagatttaatcgacaatattagaa

SEQ ID NO: 5871540 - DNA, 25 bp, Homo sapien
gtatcaattcgatatagatttttta

SEQ ID NO: 5871541 - DNA, 25 bp, Homo sapien
gattaatattcgataattagtttgt

SEQ ID NO: 5871542 - DNA, 25 bp, Homo sapien
aaaatctattgcgtataatagtaat

SEQ ID NO: 5871543 - DNA, 25 bp, Homo sapien
ttctttaacttattatcgatactat

SEQ ID NO: 5871544 - DNA, 25 bp, Homo sapien
atgaatcgttaacaatataaatatc

SEQ ID NO: 5871545 - DNA, 25 bp, Homo sapien
tatcatcaatattagtacgatttta

SEQ ID NO: 5871546 - DNA, 25 bp, Homo sapien
tagattatctctataacgatataat

SEQ ID NO: 5871547 - DNA, 25 bp, Homo sapien
ggatttatcataaattaacgatatt

SEQ ID NO: 5871548 - DNA, 25 bp, Homo sapien
tatatatgtatatttagtcgatttc

SEQ ID NO: 5871549 - DNA, 25 bp, Homo sapien
aaaagcgatacagattaattaataa

SEQ ID NO: 5871550 - DNA, 25 bp, Homo sapien
aattcatcgaattaatagtattaca

SEQ ID NO: 5871551 - DNA, 25 bp, Homo sapien
acaatgatctatcgtaataaaatta

SEQ ID NO: 5871552 - DNA, 25 bp, Homo sapien
aaatatatctttaatcgcattgtta

SEQ ID NO: 5871553 - DNA, 25 bp, Homo sapien
tataactcgtaattaaacatctttt

SEQ ID NO: 5871554 - DNA, 25 bp, Homo sapien
attcaattgttcgataagtaaaaaa

SEQ ID NO: 5871555 - DNA, 25 bp, Homo sapien
taatcaatcttttacgataaaatct

SEQ ID NO: 5871556 - DNA, 25 bp, Homo sapien
gaaaaattacgaaaatctctatatt

SEQ ID NO: 5871557 - DNA, 25 bp, Homo sapien
tattctttttacgcttaaataatct

SEQ ID NO: 5871558 - DNA, 25 bp, Homo sapien
aattttaattattcgatgtatttcg

SEQ ID NO: 5871559 - DNA, 25 bp, Homo sapien
ttagaaattataatgattcgtaagt

SEQ ID NO: 5871560 - DNA, 25 bp, Homo sapien
tcatgcttatatacgaaaattaaat

SEQ ID NO: 5871561 - DNA, 25 bp, Homo sapien
tatttttcgatataattggtgttta

SEQ ID NO: 5871562 - DNA, 25 bp, Homo sapien
cattaactctattaatatcgtaaaa

SEQ ID NO: 5871563 - DNA, 25 bp, Homo sapien
ttctttgaatatctataacgtaaat

SEQ ID NO: 5871564 - DNA, 25 bp, Homo sapien
agaataattcgataatctaacataa

SEQ ID NO: 5871565 - DNA, 25 bp, Homo sapien
aacatcgatataagtatattacaat

SEQ ID NO: 5871566 - DNA, 25 bp, Homo sapien
taaaacgattaatttttcgatctat

SEQ ID NO: 5871567 - DNA, 25 bp, Homo sapien
agtttcattatcgaataatatattg

SEQ ID NO: 5871568 - DNA, 25 bp, Homo sapien
tttaaatattactcttaacgatatg

SEQ ID NO: 5871569 - DNA, 25 bp, Homo sapien
aaataatttcgttattagtaatgca

SEQ ID NO: 5871570 - DNA, 25 bp, Homo sapien
ttattatcgcgaatatattttaaga

SEQ ID NO: 5871571 - DNA, 25 bp, Homo sapien
ttaaaattatattgaaccgaacata

SEQ ID NO: 5871572 - DNA, 25 bp, Homo sapien
tttagatatacaattcgttatagat

SEQ ID NO: 5871573 - DNA, 25 bp, Homo sapien
ttataatactacgctatatcttttt

SEQ ID NO: 5871574 - DNA, 25 bp, Homo sapien
tcatttcgaaattatcaattcataa

SEQ ID NO: 5871575 - DNA, 25 bp, Homo sapien
aaaagtaattagacgatatacatta

SEQ ID NO: 5871576 - DNA, 25 bp, Homo sapien
tttctatataattcgatagtcataa

SEQ ID NO: 5871577 - DNA, 25 bp, Homo sapien
gttgacgattaattataatcttttt

SEQ ID NO: 5871578 - DNA, 25 bp, Homo sapien
gtaattcgtattactattaaaatag

SEQ ID NO: 5871579 - DNA, 25 bp, Homo sapien
ataaatccgaaataatcatatgtta

SEQ ID NO: 5871580 - DNA, 25 bp, Homo sapien
gttgtattatcgataagttattaat

SEQ ID NO: 5871581 - DNA, 25 bp, Homo sapien
tatttatttcgattaatagacatca

SEQ ID NO: 5871582 - DNA, 25 bp, Homo sapien
tcaatcttttaatttacgaatttag

SEQ ID NO: 5871583 - DNA, 25 bp, Homo sapien
aaattcaaacgtaatattactatag

SEQ ID NO: 5871584 - DNA, 25 bp, Homo sapien
atacttatcgaaatttttggaatat

SEQ ID NO: 5871585 - DNA, 25 bp, Homo sapien
atttattatcgttaatctataactg

SEQ ID NO: 5871586 - DNA, 25 bp, Homo sapien
gtattcgaataggatattatttaaa

SEQ ID NO: 5871587 - DNA, 25 bp, Homo sapien
tagattttatatcgaatagacatta

SEQ ID NO: 5871588 - DNA, 25 bp, Homo sapien
aatatttatataagagatcgtgata

SEQ ID NO: 5871589 - DNA, 25 bp, Homo sapien
aatggttaataactattcgattaat

SEQ ID NO: 5871590 - DNA, 25 bp, Homo sapien
taatggatttcgtaatattataaag

SEQ ID NO: 5871591 - DNA, 25 bp, Homo sapien
aactataatctaaattacgaacaat

SEQ ID NO: 5871592 - DNA, 25 bp, Homo sapien
atagaatttcaattatcgataatca

SEQ ID NO: 5871593 - DNA, 25 bp, Homo sapien
agattgaatttattgcgtaatatta

SEQ ID NO: 5871594 - DNA, 25 bp, Homo sapien
gtatataatattacgatagaacaaa

SEQ ID NO: 5871595 - DNA, 25 bp, Homo sapien
aactaactaacgaacattataaata

SEQ ID NO: 5871596 - DNA, 25 bp, Homo sapien
attggaatttatcgatagtataatt

SEQ ID NO: 5871597 - DNA, 25 bp, Homo sapien
aactttatataatagtatcgcataa

SEQ ID NO: 5871598 - DNA, 25 bp, Homo sapien
tcaaatataatttcgtatcgataat

SEQ ID NO: 5871599 - DNA, 25 bp, Homo sapien
aaatttatattagtcgtatatctgt

SEQ ID NO: 5871600 - DNA, 25 bp, Homo sapien
gattatatttatacattacgtgaat

SEQ ID NO: 5871601 - DNA, 25 bp, Homo sapien
agattgttgtcgtaaataatatatt

SEQ ID NO: 5871602 - DNA, 25 bp, Homo sapien
tatacatcgtaacttattaacaatt

SEQ ID NO: 5871603 - DNA, 25 bp, Homo sapien
tagctcgattaaattattctattta

SEQ ID NO: 5871604 - DNA, 25 bp, Homo sapien
agatattcgataataatgtttgatt

SEQ ID NO: 5871605 - DNA, 25 bp, Homo sapien
ttacgttaacgataagtataataaa

SEQ ID NO: 5871606 - DNA, 25 bp, Homo sapien
taagtagttaatttcgatttgatat

SEQ ID NO: 5871607 - DNA, 25 bp, Homo sapien
taattatttcgtacgttattaaatg

SEQ ID NO: 5871608 - DNA, 25 bp, Homo sapien
ttagtaatattatagattcgagaaa

SEQ ID NO: 5871609 - DNA, 25 bp, Homo sapien
agaaatagtcgattaataattttga

SEQ ID NO: 5871610 - DNA, 25 bp, Homo sapien
tatattattaattcgtacgttttgt

SEQ ID NO: 5871611 - DNA, 25 bp, Homo sapien
attttttattatatcgagaagatca

SEQ ID NO: 5871612 - DNA, 25 bp, Homo sapien
taaatatattcgcgttctaaattat

SEQ ID NO: 5871613 - DNA, 25 bp, Homo sapien
aaaaattcgatagatttataagtct

SEQ ID NO: 5871614 - DNA, 25 bp, Homo sapien
tgtctaacgattaatagtaaattat

SEQ ID NO: 5871615 - DNA, 25 bp, Homo sapien
ttctaagtaataatcgtataaattc

SEQ ID NO: 5871616 - DNA, 25 bp, Homo sapien
aatctgtataaatattcgttgtata

SEQ ID NO: 5871617 - DNA, 25 bp, Homo sapien
tattatacaattatagcgatgaaat

SEQ ID NO: 5871618 - DNA, 25 bp, Homo sapien
aactattaatatacgataccaaaat

SEQ ID NO: 5871619 - DNA, 25 bp, Homo sapien
tactaaatgtcgaattaatacaatt

SEQ ID NO: 5871620 - DNA, 25 bp, Homo sapien
ttgaaattatcgattaatcttttct

SEQ ID NO: 5871621 - DNA, 25 bp, Homo sapien
aatataaatagattatcgtacttca

SEQ ID NO: 5871622 - DNA, 25 bp, Homo sapien
aaatccgaattaatagtaatcaatt

SEQ ID NO: 5871623 - DNA, 25 bp, Homo sapien
tttgaaacgattaatctaatttaag

SEQ ID NO: 5871624 - DNA, 25 bp, Homo sapien
aattatcttattctacgattgaaat

SEQ ID NO: 5871625 - DNA, 25 bp, Homo sapien
tatagttatcgtatagttatttcta

SEQ ID NO: 5871626 - DNA, 25 bp, Homo sapien
aataacgttaatatgattagttgaa

SEQ ID NO: 5871627 - DNA, 25 bp, Homo sapien
ctatagattatcttatacgaatttt

SEQ ID NO: 5871628 - DNA, 25 bp, Homo sapien
acctattataaacgacatatattaa

SEQ ID NO: 5871629 - DNA, 25 bp, Homo sapien
taaaattaatttctatatcgtacga

SEQ ID NO: 5871630 - DNA, 25 bp, Homo sapien
taaattatactcgaatttatgaaga

SEQ ID NO: 5871631 - DNA, 25 bp, Homo sapien
ataaataacgatattattacacttg

SEQ ID NO: 5871632 - DNA, 25 bp, Homo sapien
aatgataacgagtttatatttgtta

SEQ ID NO: 5871633 - DNA, 25 bp, Homo sapien
gttaactcgattataaagaaattta

SEQ ID NO: 5871634 - DNA, 25 bp, Homo sapien
ataatatatcgttacttatgattag

SEQ ID NO: 5871635 - DNA, 25 bp, Homo sapien
gatttgattaatcgtaattttttca

SEQ ID NO: 5871636 - DNA, 25 bp, Homo sapien
tgtaaacctatcgaataataaaata

SEQ ID NO: 5871637 - DNA, 25 bp, Homo sapien
tacatatcgatctgttaatattaat

SEQ ID NO: 5871638 - DNA, 25 bp, Homo sapien
attaattatctttggatacgatata

SEQ ID NO: 5871639 - DNA, 25 bp, Homo sapien
cattttatatttacgcttattctat

SEQ ID NO: 5871640 - DNA, 25 bp, Homo sapien
catattcgataacttatatatatac

SEQ ID NO: 5871641 - DNA, 25 bp, Homo sapien
tttcttagatcgtattaaatatttc

SEQ ID NO: 5871642 - DNA, 25 bp, Homo sapien
ttatttatacgaacaattaatacga

SEQ ID NO: 5871643 - DNA, 25 bp, Homo sapien
aaaattataatacttcgataagaac

SEQ ID NO: 5871644 - DNA, 25 bp, Homo sapien
acttatcgatattctataatgtaaa

SEQ ID NO: 5871645 - DNA, 25 bp, Homo sapien
tactgtatatactcgaatttttatt

SEQ ID NO: 5871646 - DNA, 25 bp, Homo sapien
atatattaatctcgtatataagaac

SEQ ID NO: 5871647 - DNA, 25 bp, Homo sapien
ttcttatattcgattagtattttag

SEQ ID NO: 5871648 - DNA, 25 bp, Homo sapien
caaaatatagtattatcgtagttaa

SEQ ID NO: 5871649 - DNA, 25 bp, Homo sapien
aattgcattaatcgaaaaatacatt

SEQ ID NO: 5871650 - DNA, 25 bp, Homo sapien
actttttatagatatcgtatcattt

SEQ ID NO: 5871651 - DNA, 25 bp, Homo sapien
taatttaatcgatattacgttatct

SEQ ID NO: 5871652 - DNA, 25 bp, Homo sapien
tacaaaacaactattttcgatatat

SEQ ID NO: 5871653 - DNA, 25 bp, Homo sapien
tatggcgagaatttatatattttta

SEQ ID NO: 5871654 - DNA, 25 bp, Homo sapien
ttctataataattgcgatttttaag

SEQ ID NO: 5871655 - DNA, 25 bp, Homo sapien
taaagtcgattaactataattatag

SEQ ID NO: 5871656 - DNA, 25 bp, Homo sapien
atcaaacgttattatagcttttaaa

SEQ ID NO: 5871657 - DNA, 25 bp, Homo sapien
gattctcaattattcgataaattta

SEQ ID NO: 5871658 - DNA, 25 bp, Homo sapien
gttgtaatcgtttataatgataata

SEQ ID NO: 5871659 - DNA, 25 bp, Homo sapien
tataaatttatcgcgttataaatga

SEQ ID NO: 5871660 - DNA, 25 bp, Homo sapien
ttatttgtataatttcgcgtaaatt

SEQ ID NO: 5871661 - DNA, 25 bp, Homo sapien
caatacattacgtaataattatcta

SEQ ID NO: 5871662 - DNA, 25 bp, Homo sapien
ataaacgctattattagtctaatta

SEQ ID NO: 5871663 - DNA, 25 bp, Homo sapien
attatggtatagattcgttataaaa

SEQ ID NO: 5871664 - DNA, 25 bp, Homo sapien
aagaaatcatcgatttatatatgat

SEQ ID NO: 5871665 - DNA, 25 bp, Homo sapien
ttttatcgattcttactattgatta

SEQ ID NO: 5871666 - DNA, 25 bp, Homo sapien
tataaattaaattgaacgactattc

SEQ ID NO: 5871667 - DNA, 25 bp, Homo sapien
tgatttgatcatacgattattaaaa

SEQ ID NO: 5871668 - DNA, 25 bp, Homo sapien
acttataatataatgtatcgcttat

SEQ ID NO: 5871669 - DNA, 25 bp, Homo sapien
aaaatgtatcgatcgaatatttaat

SEQ ID NO: 5871670 - DNA, 25 bp, Homo sapien
tttaatatatctaatttacgaacgt

SEQ ID NO: 5871671 - DNA, 25 bp, Homo sapien
tatataatcaatattacgatcgtta

SEQ ID NO: 5871672 - DNA, 25 bp, Homo sapien
atgaattacataaattatcgtttac

SEQ ID NO: 5871673 - DNA, 25 bp, Homo sapien
gtatattaatagttcgtacttttat

SEQ ID NO: 5871674 - DNA, 25 bp, Homo sapien
tagtacgactattaatttattgtta

SEQ ID NO: 5871675 - DNA, 25 bp, Homo sapien
gattataatctaaatcggttaaaat

SEQ ID NO: 5871676 - DNA, 25 bp, Homo sapien
caaatattcgaattaatcttagtaa

SEQ ID NO: 5871677 - DNA, 25 bp, Homo sapien
tattaactatccgtaattgtttaaa

SEQ ID NO: 5871678 - DNA, 25 bp, Homo sapien
tttactattgcgattatcaaattta

SEQ ID NO: 5871679 - DNA, 25 bp, Homo sapien
tataatcgtcgattattatgttaat

SEQ ID NO: 5871680 - DNA, 25 bp, Homo sapien
ttaatcgacttatatattaacacaa

SEQ ID NO: 5871681 - DNA, 25 bp, Homo sapien
tgattgacgtattattaattattca

SEQ ID NO: 5871682 - DNA, 25 bp, Homo sapien
aatattaattagtaaatcgttgtct

SEQ ID NO: 5871683 - DNA, 25 bp, Homo sapien
agattttaattagcgtaatatcttt

SEQ ID NO: 5871684 - DNA, 25 bp, Homo sapien
ttatttaattatctaattcgttgga

SEQ ID NO: 5871685 - DNA, 25 bp, Homo sapien
atgttcaatattttcgattgatatt

SEQ ID NO: 5871686 - DNA, 25 bp, Homo sapien
tatagtattcaacgatataagtata

SEQ ID NO: 5871687 - DNA, 25 bp, Homo sapien
ttagtattcgcaataattaaatgat

SEQ ID NO: 5871688 - DNA, 25 bp, Homo sapien
acgatatcggatttaatattaatat

SEQ ID NO: 5871689 - DNA, 25 bp, Homo sapien
tttttcggaattatataactctatt

SEQ ID NO: 5871690 - DNA, 25 bp, Homo sapien
atatgtaatcgatatacatttagtt

SEQ ID NO: 5871691 - DNA, 25 bp, Homo sapien
taatatttacgatttacgaattgaa

SEQ ID NO: 5871692 - DNA, 25 bp, Homo sapien
atcattcgtacaattataatataga

SEQ ID NO: 5871693 - DNA, 25 bp, Homo sapien
tataatatagcgtttgaataattga

SEQ ID NO: 5871694 - DNA, 25 bp, Homo sapien
tagaattgtattaatgatcgttaat

SEQ ID NO: 5871695 - DNA, 25 bp, Homo sapien
ttcatacataataattcgtttaaac

SEQ ID NO: 5871696 - DNA, 25 bp, Homo sapien
taaagcgtaatctattagaattaat

SEQ ID NO: 5871697 - DNA, 25 bp, Homo sapien
gttaattaacataacgctaaattta

SEQ ID NO: 5871698 - DNA, 25 bp, Homo sapien
atctttattcgcaattattaaagaa

SEQ ID NO: 5871699 - DNA, 25 bp, Homo sapien
tttgataattttcgatacaaaacaa

SEQ ID NO: 5871700 - DNA, 25 bp, Homo sapien
tgttttcgtaatatagataatttct

SEQ ID NO: 5871701 - DNA, 25 bp, Homo sapien
atttccgtataatatcttaaataag

SEQ ID NO: 5871702 - DNA, 25 bp, Homo sapien
aataatactatcgataaatttcatc

SEQ ID NO: 5871703 - DNA, 25 bp, Homo sapien
aatattattaaagcgtctatcataa

SEQ ID NO: 5871704 - DNA, 25 bp, Homo sapien
tctttttacttgttattacgtatta

SEQ ID NO: 5871705 - DNA, 25 bp, Homo sapien
gaatttaatatacgattacagatta

SEQ ID NO: 5871706 - DNA, 25 bp, Homo sapien
ataagcgtaattaatctatttgtat

SEQ ID NO: 5871707 - DNA, 25 bp, Homo sapien
tcaaaacgatactattatatttaag

SEQ ID NO: 5871708 - DNA, 25 bp, Homo sapien
tagatttaattaaacgactattagt

SEQ ID NO: 5871709 - DNA, 25 bp, Homo sapien
tatacatactaatcgaatatttaag

SEQ ID NO: 5871710 - DNA, 25 bp, Homo sapien
agacataaatcgaatttactttaaa

SEQ ID NO: 5871711 - DNA, 25 bp, Homo sapien
gtattttatatacgatacttaaaga

SEQ ID NO: 5871712 - DNA, 25 bp, Homo sapien
gcttaatgttcgatttaatatataa

SEQ ID NO: 5871713 - DNA, 25 bp, Homo sapien
atagatcgagtattaattaatgtat

SEQ ID NO: 5871714 - DNA, 25 bp, Homo sapien
aattttcatcgatagtattattagt

SEQ ID NO: 5871715 - DNA, 25 bp, Homo sapien
cattgttatatcgttaattcaaatt

SEQ ID NO: 5871716 - DNA, 25 bp, Homo sapien
ataattatatacgattagtacatct

SEQ ID NO: 5871717 - DNA, 25 bp, Homo sapien
ttattttaaaattcgcgtatgttat

SEQ ID NO: 5871718 - DNA, 25 bp, Homo sapien
cagaatacgaaatttagttataata

SEQ ID NO: 5871719 - DNA, 25 bp, Homo sapien
taaaataatcttttcgatctattca

SEQ ID NO: 5871720 - DNA, 25 bp, Homo sapien
atatcaaatcggatagtaatttaaa

SEQ ID NO: 5871721 - DNA, 25 bp, Homo sapien
ataatttgttataaatcgattgact

SEQ ID NO: 5871722 - DNA, 25 bp, Homo sapien
aaaaatttcgaattgacatatttct

SEQ ID NO: 5871723 - DNA, 25 bp, Homo sapien
ataatgttattatttacgaataagc

SEQ ID NO: 5871724 - DNA, 25 bp, Homo sapien
tcagatgttaattcgatatattaat

SEQ ID NO: 5871725 - DNA, 25 bp, Homo sapien
attagtaacaatcgttatatttttc

SEQ ID NO: 5871726 - DNA, 25 bp, Homo sapien
gatttaattttcgatatgtagatta

SEQ ID NO: 5871727 - DNA, 25 bp, Homo sapien
ttataatacttcgaagattaatcta

SEQ ID NO: 5871728 - DNA, 25 bp, Homo sapien
gatctattcgttatatatagaattt

SEQ ID NO: 5871729 - DNA, 25 bp, Homo sapien
tttgttcgataattctattaatcta

SEQ ID NO: 5871730 - DNA, 25 bp, Homo sapien
gttaaatataattcgattagacaaa

SEQ ID NO: 5871731 - DNA, 25 bp, Homo sapien
ttttgttcgattagtcaaataaaaa

SEQ ID NO: 5871732 - DNA, 25 bp, Homo sapien
taaaaatattattccgataaagatg

SEQ ID NO: 5871733 - DNA, 25 bp, Homo sapien
atttttatacggatgtaattactaa

SEQ ID NO: 5871734 - DNA, 25 bp, Homo sapien
ctatttctatcgaatactataaaat

SEQ ID NO: 5871735 - DNA, 25 bp, Homo sapien
gaaaaatctattcgaattaaaatgt

SEQ ID NO: 5871736 - DNA, 25 bp, Homo sapien
ttttgatttcgcaataattaaagaa

SEQ ID NO: 5871737 - DNA, 25 bp, Homo sapien
atcttataatcgatattatctcaat

SEQ ID NO: 5871738 - DNA, 25 bp, Homo sapien
tcatttataacgcgataaatttata

SEQ ID NO: 5871739 - DNA, 25 bp, Homo sapien
ttaatatatgtcgtttataataggt

SEQ ID NO: 5871740 - DNA, 25 bp, Homo sapien
acgttcgtaaattagatatattaaa

SEQ ID NO: 5871741 - DNA, 25 bp, Homo sapien
gatgaaatttatcgatagtattatt

SEQ ID NO: 5871742 - DNA, 25 bp, Homo sapien
atgtatatagaattactacgaaatt

SEQ ID NO: 5871743 - DNA, 25 bp, Homo sapien
aattgtattaattcgacatttagta

SEQ ID NO: 5871744 - DNA, 25 bp, Homo sapien
tagaaataactatacgataactata

SEQ ID NO: 5871745 - DNA, 25 bp, Homo sapien
ataagcgatacattatattataagt

SEQ ID NO: 5871746 - DNA, 25 bp, Homo sapien
gaaatatttaatacgatctaagaaa

SEQ ID NO: 5871747 - DNA, 25 bp, Homo sapien
cttatttaagatattatacggaaat

SEQ ID NO: 5871748 - DNA, 25 bp, Homo sapien
tttacattatagaatatcgataagt

SEQ ID NO: 5871749 - DNA, 25 bp, Homo sapien
atttttcgtattaagttatagtcaa

SEQ ID NO: 5871750 - DNA, 25 bp, Homo sapien
taattagactaataatagcgtttat

SEQ ID NO: 5871751 - DNA, 25 bp, Homo sapien
tctaagattaattacgaattaactt

SEQ ID NO: 5871752 - DNA, 25 bp, Homo sapien
tttgatataaagtaacacgaaatat

SEQ ID NO: 5871753 - DNA, 25 bp, Homo sapien
tttattatacttatcgttaacgtaa

SEQ ID NO: 5871754 - DNA, 25 bp, Homo sapien
tagttcggattattaataatatgta

SEQ ID NO: 5871755 - DNA, 25 bp, Homo sapien
ttatgcgatactattatataaagtt

SEQ ID NO: 5871756 - DNA, 25 bp, Homo sapien
ttttaataatcgtatgatcaaatca

SEQ ID NO: 5871757 - DNA, 25 bp, Homo sapien
ttatgaattgataatttcgaaatga

SEQ ID NO: 5871758 - DNA, 25 bp, Homo sapien
ttcattatttataacggaatatgta

SEQ ID NO: 5871759 - DNA, 25 bp, Homo sapien
aaattactatgtaaaatcgatcaat

SEQ ID NO: 5871760 - DNA, 25 bp, Homo sapien
tgatcttctcgatataataaaaaat

SEQ ID NO: 5871761 - DNA, 25 bp, Homo sapien
attgtaatatacttatatcgatgtt

SEQ ID NO: 5871762 - DNA, 25 bp, Homo sapien
tttataattcgtcataatactcatt

SEQ ID NO: 5871763 - DNA, 25 bp, Homo sapien
tattcttaacaaatcgtatagatat

SEQ ID NO: 5871764 - DNA, 25 bp, Homo sapien
ataattcgaacttataatcaatatc

SEQ ID NO: 5871765 - DNA, 25 bp, Homo sapien
attcataatgatccgatataaattt

SEQ ID NO: 5871766 - DNA, 25 bp, Homo sapien
aattatagtaattaatcgaataagg

SEQ ID NO: 5871767 - DNA, 25 bp, Homo sapien
attgatgaatcgtaaaattatactt

SEQ ID NO: 5871768 - DNA, 25 bp, Homo sapien
atatatgtgattaaccgatatatat

SEQ ID NO: 5871769 - DNA, 25 bp, Homo sapien
ctaaattcgtaaattaaaagattga

SEQ ID NO: 5871770 - DNA, 25 bp, Homo sapien
gattacggtttaatatatactataa

SEQ ID NO: 5871771 - DNA, 25 bp, Homo sapien
tgattatcgataattgaaattctat

SEQ ID NO: 5871772 - DNA, 25 bp, Homo sapien
aataatacattaacgaattagtcaa

SEQ ID NO: 5871773 - DNA, 25 bp, Homo sapien
atatatcgaaaatagttgttttgta

SEQ ID NO: 5871774 - DNA, 25 bp, Homo sapien
attaatatatcgaattaacatctga

SEQ ID NO: 5871775 - DNA, 25 bp, Homo sapien
tgatgtctattaatcgaaataaata

SEQ ID NO: 5871776 - DNA, 25 bp, Homo sapien
atttaattttcgtatataagcatga

SEQ ID NO: 5871777 - DNA, 25 bp, Homo sapien
ttatagatattattaatcgtttcct

SEQ ID NO: 5871778 - DNA, 25 bp, Homo sapien
atgatttaatattcgcataagtatt

SEQ ID NO: 5871779 - DNA, 25 bp, Homo sapien
aaaagatgtttaattacgagttata

SEQ ID NO: 5871780 - DNA, 25 bp, Homo sapien
attaagtttaatcgataattcacta

SEQ ID NO: 5871781 - DNA, 25 bp, Homo sapien
ctaattcgtaataagtatatttgtt

SEQ ID NO: 5871782 - DNA, 25 bp, Homo sapien
ataattgttcgaaagtaattaacaa

SEQ ID NO: 5871783 - DNA, 25 bp, Homo sapien
taatgtagtacgatcttataaaaaa

SEQ ID NO: 5871784 - DNA, 25 bp, Homo sapien
tatacaacgaatatttatacagatt

SEQ ID NO: 5871785 - DNA, 25 bp, Homo sapien
taacaatgcgattaaagatatattt

SEQ ID NO: 5871786 - DNA, 25 bp, Homo sapien
taatagaattcgtatataatgttag

SEQ ID NO: 5871787 - DNA, 25 bp, Homo sapien
atttcaatcgtagaataagataatt

SEQ ID NO: 5871788 - DNA, 25 bp, Homo sapien
taatctgtaatcgtatattaaattc

SEQ ID NO: 5871789 - DNA, 25 bp, Homo sapien
tatacttatatcgttgaatactata

SEQ ID NO: 5871790 - DNA, 25 bp, Homo sapien
ttatgactatcgaattatatagaaa

SEQ ID NO: 5871791 - DNA, 25 bp, Homo sapien
gataaaatcttttacgataaagtat

SEQ ID NO: 5871792 - DNA, 25 bp, Homo sapien
atctataacgaattgtatatctaaa

SEQ ID NO: 5871793 - DNA, 25 bp, Homo sapien
tctatattataattgtacgaatgat

SEQ ID NO: 5871794 - DNA, 25 bp, Homo sapien
actaatagtcgtttaattaaatcta

SEQ ID NO: 5871795 - DNA, 25 bp, Homo sapien
attaaatattcgatcgatacatttt

SEQ ID NO: 5871796 - DNA, 25 bp, Homo sapien
atttatcgaattatatcctgtaata

SEQ ID NO: 5871797 - DNA, 25 bp, Homo sapien
atattccaaaaatttcgataagtat

SEQ ID NO: 5871798 - DNA, 25 bp, Homo sapien
attaataacttatcgataatacaac

SEQ ID NO: 5871799 - DNA, 25 bp, Homo sapien
tttaaataatatcctattcgaatac

SEQ ID NO: 5871800 - DNA, 25 bp, Homo sapien
cttaaaaatcgcaattattatagaa

SEQ ID NO: 5871801 - DNA, 25 bp, Homo sapien
atcttgaataatatatcgtttactt

SEQ ID NO: 5871802 - DNA, 25 bp, Homo sapien
aagtatatatgtatagtcgatttat

SEQ ID NO: 5871803 - DNA, 25 bp, Homo sapien
tattataactaaatttcgtattctg

SEQ ID NO: 5871804 - DNA, 25 bp, Homo sapien
gtttaaacgaattattatgtatgaa

SEQ ID NO: 5871805 - DNA, 25 bp, Homo sapien
tataatttacgaaaaaacgaatgat

SEQ ID NO: 5871806 - DNA, 25 bp, Homo sapien
taacatatgattatttcggatttat

SEQ ID NO: 5871807 - DNA, 25 bp, Homo sapien
atagatcgaaaaattaatcgtttta

SEQ ID NO: 5871808 - DNA, 25 bp, Homo sapien
ttatatattaaatcgaacattaagc

SEQ ID NO: 5871809 - DNA, 25 bp, Homo sapien
aaatacgtttagtataaatattgag

SEQ ID NO: 5871810 - DNA, 25 bp, Homo sapien
ataattcgatttagtattaacatca

SEQ ID NO: 5871811 - DNA, 25 bp, Homo sapien
actatataaattaactatcgtattg

SEQ ID NO: 5871812 - DNA, 25 bp, Homo sapien
ttattatatcggtaagtgtttaata

SEQ ID NO: 5871813 - DNA, 25 bp, Homo sapien
agacttataaatctatcgaattttt

SEQ ID NO: 5871814 - DNA, 25 bp, Homo sapien
cagttatagattaacgataataaat

SEQ ID NO: 5871815 - DNA, 25 bp, Homo sapien
attactattatacgcaatagatttt

SEQ ID NO: 5871816 - DNA, 25 bp, Homo sapien
tttagcgaatatttaagttactaaa

SEQ ID NO: 5871817 - DNA, 25 bp, Homo sapien
atagaaatactagcgtaaattttaa

SEQ ID NO: 5871818 - DNA, 25 bp, Homo sapien
tcaaaattattaatcgactatttct

SEQ ID NO: 5871819 - DNA, 25 bp, Homo sapien
cttttgcgaaaattattaatataag

SEQ ID NO: 5871820 - DNA, 25 bp, Homo sapien
aatatattatttacgacaacaatct

SEQ ID NO: 5871821 - DNA, 25 bp, Homo sapien
tgaataattaataatacgtcaatca

SEQ ID NO: 5871822 - DNA, 25 bp, Homo sapien
acagatatacgactaatataaattt

SEQ ID NO: 5871823 - DNA, 25 bp, Homo sapien
taataatacgaatcaatttagattc

SEQ ID NO: 5871824 - DNA, 25 bp, Homo sapien
tcttataaattttagtcgtaataca

SEQ ID NO: 5871825 - DNA, 25 bp, Homo sapien
gttaccgtaattatattaagaaata

SEQ ID NO: 5871826 - DNA, 25 bp, Homo sapien
agattttatcgtaaaagattgatta

SEQ ID NO: 5871827 - DNA, 25 bp, Homo sapien
tactaatttaactacgataaagaat

SEQ ID NO: 5871828 - DNA, 25 bp, Homo sapien
taaatttctttataatcgagttaac

SEQ ID NO: 5871829 - DNA, 25 bp, Homo sapien
taatctacatatcgaaaattaaatc

SEQ ID NO: 5871830 - DNA, 25 bp, Homo sapien
tataaagaacgtagtatatttatga

SEQ ID NO: 5871831 - DNA, 25 bp, Homo sapien
aatttaacaattgattatcgatcta

SEQ ID NO: 5871832 - DNA, 25 bp, Homo sapien
ctaatatataatcgtaatagagata

SEQ ID NO: 5871833 - DNA, 25 bp, Homo sapien
attgagataatatcgattataagat

SEQ ID NO: 5871834 - DNA, 25 bp, Homo sapien
agatatataatcgtaaatagtcatt

SEQ ID NO: 5871835 - DNA, 25 bp, Homo sapien
agaaatatgtcaattcgaaattttt

SEQ ID NO: 5871836 - DNA, 25 bp, Homo sapien
ctaatcataagtaacgatatattat

SEQ ID NO: 5871837 - DNA, 25 bp, Homo sapien
aaaaagattataattaatcgtcaac

SEQ ID NO: 5871838 - DNA, 25 bp, Homo sapien
agattatttaagcgtaaaaagaata

SEQ ID NO: 5871839 - DNA, 25 bp, Homo sapien
ctataattatagttaatcgacttta

SEQ ID NO: 5871840 - DNA, 25 bp, Homo sapien
taatcaatagtaagaatcgataaaa

SEQ ID NO: 5871841 - DNA, 25 bp, Homo sapien
ttctaatatatattgtcgaaagatt

SEQ ID NO: 5871842 - DNA, 25 bp, Homo sapien
aattatactatcgataaattccaat

SEQ ID NO: 5871843 - DNA, 25 bp, Homo sapien
atctatatttcgaatcgtaaataat

SEQ ID NO: 5871844 - DNA, 25 bp, Homo sapien
agatgtactaatcgtatataattat

SEQ ID NO: 5871845 - DNA, 25 bp, Homo sapien
gaaaaatataacgattgttactaat

SEQ ID NO: 5871846 - DNA, 25 bp, Homo sapien
tttagcaatcgaattagattatttt

SEQ ID NO: 5871847 - DNA, 25 bp, Homo sapien
ttgttttgtatcgaaaattatcaaa

SEQ ID NO: 5871848 - DNA, 25 bp, Homo sapien
attatcgatacgaaattatatttga

SEQ ID NO: 5871849 - DNA, 25 bp, Homo sapien
caatatattattcgataatgaaact

SEQ ID NO: 5871850 - DNA, 25 bp, Homo sapien
aattatatgtaacgtaatctcatat

SEQ ID NO: 5871851 - DNA, 25 bp, Homo sapien
gtaaacgataatttatgtaattcat

SEQ ID NO: 5871852 - DNA, 25 bp, Homo sapien
tttataataccgatataacactaat

SEQ ID NO: 5871853 - DNA, 25 bp, Homo sapien
attctttaatttacggattatacta

SEQ ID NO: 5871854 - DNA, 25 bp, Homo sapien
tttttatttgactaatcgaacaaaa

SEQ ID NO: 5871855 - DNA, 25 bp, Homo sapien
taaatagaataatttaatcgagcta

SEQ ID NO: 5871856 - DNA, 25 bp, Homo sapien
atattaatattaaatccgatatcgt

SEQ ID NO: 5871857 - DNA, 25 bp, Homo sapien
attttggtatcgtatattaatagtt

SEQ ID NO: 5871858 - DNA, 25 bp, Homo sapien
tatcacgatctcttatataaatatt

SEQ ID NO: 5871859 - DNA, 25 bp, Homo sapien
ttttatatattaatctatcgtcagt

SEQ ID NO: 5871860 - DNA, 25 bp, Homo sapien
aatatttatgtactatatcgtgtta

SEQ ID NO: 5871861 - DNA, 25 bp, Homo sapien
ttttataacgaatctataccataat

SEQ ID NO: 5871862 - DNA, 25 bp, Homo sapien
caaatatcgtaatagttttaataca

SEQ ID NO: 5871863 - DNA, 25 bp, Homo sapien
gtaaaaatcaattattcgaaaagat

SEQ ID NO: 5871864 - DNA, 25 bp, Homo sapien
taataagcatcgttattatatagat

SEQ ID NO: 5871865 - DNA, 25 bp, Homo sapien
gatatttatattgttaacgattcat

SEQ ID NO: 5871866 - DNA, 25 bp, Homo sapien
gcttattcgtaaataataacattat

SEQ ID NO: 5871867 - DNA, 25 bp, Homo sapien
ttactaagattaattcgaatatttg

SEQ ID NO: 5871868 - DNA, 25 bp, Homo sapien
ttgttacgaattcaattaacataat

SEQ ID NO: 5871869 - DNA, 25 bp, Homo sapien
acaaaacgtacgaattaataatata

SEQ ID NO: 5871870 - DNA, 25 bp, Homo sapien
aaattctatatataacgaatagatc

SEQ ID NO: 5871871 - DNA, 25 bp, Homo sapien
attgttcgtaatttagattatagtt

SEQ ID NO: 5871872 - DNA, 25 bp, Homo sapien
aatatcaatcgaaaatattgaacat

SEQ ID NO: 5871873 - DNA, 25 bp, Homo sapien
ttgactaaactaatatcgaatattt

SEQ ID NO: 5871874 - DNA, 25 bp, Homo sapien
tctttaagtatcgtatataaaatac

SEQ ID NO: 5871875 - DNA, 25 bp, Homo sapien
ttaaaatgatcgtatattacatctt

SEQ ID NO: 5871876 - DNA, 25 bp, Homo sapien
tagattactcgattaattatttact

SEQ ID NO: 5871877 - DNA, 25 bp, Homo sapien
aattactatattgattaacgattct

SEQ ID NO: 5871878 - DNA, 25 bp, Homo sapien
ttaaagttttagtcgtataatatca

SEQ ID NO: 5871879 - DNA, 25 bp, Homo sapien
gaaatcgactaaatatacatatata

SEQ ID NO: 5871880 - DNA, 25 bp, Homo sapien
gtctaatacgataagtaatttttaa

SEQ ID NO: 5871881 - DNA, 25 bp, Homo sapien
taaaatcgtactaatattgatgata

SEQ ID NO: 5871882 - DNA, 25 bp, Homo sapien
gaatttatacgattattacttagaa

SEQ ID NO: 5871883 - DNA, 25 bp, Homo sapien
attaaaattgattattcgtacaact

SEQ ID NO: 5871884 - DNA, 25 bp, Homo sapien
acataactttaataatacgatatca

SEQ ID NO: 5871885 - DNA, 25 bp, Homo sapien
atactgtatattatatttcgactaa

SEQ ID NO: 5871886 - DNA, 25 bp, Homo sapien
tcaattattcaaacgctatattata

SEQ ID NO: 5871887 - DNA, 25 bp, Homo sapien
tcttcataaattcgagtataattta

SEQ ID NO: 5871888 - DNA, 25 bp, Homo sapien
tatatttcgtcgataatcttatatt

SEQ ID NO: 5871889 - DNA, 25 bp, Homo sapien
aagaatatacgaataatgattaaca

SEQ ID NO: 5871890 - DNA, 25 bp, Homo sapien
aatgtatttttcgattaatgcaatt

SEQ ID NO: 5871891 - DNA, 25 bp, Homo sapien
tttctcgaatctataatattactaa

SEQ ID NO: 5871892 - DNA, 25 bp, Homo sapien
taatacgtaataacaagtaaaaaga

SEQ ID NO: 5871893 - DNA, 25 bp, Homo sapien
attctgtaattacgttattaactat

SEQ ID NO: 5871894 - DNA, 25 bp, Homo sapien
atactcgtagtttaaattatgaatt

SEQ ID NO: 5871895 - DNA, 25 bp, Homo sapien
tctatcgaatacgttttaaaataaa

SEQ ID NO: 5871896 - DNA, 25 bp, Homo sapien
ttatgttagattatcgaattattct

SEQ ID NO: 5871897 - DNA, 25 bp, Homo sapien
gaatagtcgttcaatttaatttata

SEQ ID NO: 5871898 - DNA, 25 bp, Homo sapien
attcacgtaatgtataaatataatc

SEQ ID NO: 5871899 - DNA, 25 bp, Homo sapien
attttatagtattcgatagaaatag

SEQ ID NO: 5871900 - DNA, 25 bp, Homo sapien
atttgaattgatatacgtacattaa

SEQ ID NO: 5871901 - DNA, 25 bp, Homo sapien
ttttttacttatcgaacaattgaat

SEQ ID NO: 5871902 - DNA, 25 bp, Homo sapien
ttattagcgatataattagattaac

SEQ ID NO: 5871903 - DNA, 25 bp, Homo sapien
caaaataaaacgactatatcaattt

SEQ ID NO: 5871904 - DNA, 25 bp, Homo sapien
caagaatcgtttataattagaaata

SEQ ID NO: 5871905 - DNA, 25 bp, Homo sapien
aaagatattacgctaattaaaatct

SEQ ID NO: 5871906 - DNA, 25 bp, Homo sapien
tttaaagtaaattcgatttatgtct

SEQ ID NO: 5871907 - DNA, 25 bp, Homo sapien
aatcttattatatctaatcgagtat

SEQ ID NO: 5871908 - DNA, 25 bp, Homo sapien
acaacaatattaatgaatcgtaaaa

SEQ ID NO: 5871909 - DNA, 25 bp, Homo sapien
caagtgtaataatatcgttatttat

SEQ ID NO: 5871910 - DNA, 25 bp, Homo sapien
agtaaatcgtagattaagatttaaa

SEQ ID NO: 5871911 - DNA, 25 bp, Homo sapien
agtttaataaaagattatcgacatt

SEQ ID NO: 5871912 - DNA, 25 bp, Homo sapien
ataatgtaaccgttatatttatgat

SEQ ID NO: 5871913 - DNA, 25 bp, Homo sapien
tttaatcttaaattaccgctattat

SEQ ID NO: 5871914 - DNA, 25 bp, Homo sapien
gttttcgtaaatagttcataatatt

SEQ ID NO: 5871915 - DNA, 25 bp, Homo sapien
cttaaatataatagtatcgttttga

SEQ ID NO: 5871916 - DNA, 25 bp, Homo sapien
ttattaattaatctgtatcgctttt

SEQ ID NO: 5871917 - DNA, 25 bp, Homo sapien
tatttgataaaaagttgcgtatatt

SEQ ID NO: 5871918 - DNA, 25 bp, Homo sapien
gtaatgtaaattttcgtaatataac

SEQ ID NO: 5871919 - DNA, 25 bp, Homo sapien
tcaatacgattactatataaagttt

SEQ ID NO: 5871920 - DNA, 25 bp, Homo sapien
tttagacgctattataatatgattt

SEQ ID NO: 5871921 - DNA, 25 bp, Homo sapien
tatttataatgttcgttagttagtt

SEQ ID NO: 5871922 - DNA, 25 bp, Homo sapien
tttaataattaaccgataccaatta

SEQ ID NO: 5871923 - DNA, 25 bp, Homo sapien
aagaatagagcgattataattatat

SEQ ID NO: 5871924 - DNA, 25 bp, Homo sapien
tattttattattcgataggtttaca

SEQ ID NO: 5871925 - DNA, 25 bp, Homo sapien
ataataatatcgtatatagaatggt

SEQ ID NO: 5871926 - DNA, 25 bp, Homo sapien
tttacgacgaataatatataaaaag

SEQ ID NO: 5871927 - DNA, 25 bp, Homo sapien
atatttaattaagtcgatagaagta

SEQ ID NO: 5871928 - DNA, 25 bp, Homo sapien
aaatcaaaattcggatattacatta

SEQ ID NO: 5871929 - DNA, 25 bp, Homo sapien
tgaatagatcgaaaagattatttta

SEQ ID NO: 5871930 - DNA, 25 bp, Homo sapien
tttataataaatttacggcgaatat

SEQ ID NO: 5871931 - DNA, 25 bp, Homo sapien
ataacatacgcgaattttaaaataa

SEQ ID NO: 5871932 - DNA, 25 bp, Homo sapien
atttcctaaatcgataattatgatt

SEQ ID NO: 5871933 - DNA, 25 bp, Homo sapien
ttgtgttaatatataagtcgattaa

SEQ ID NO: 5871934 - DNA, 25 bp, Homo sapien
tagattaatagaattatcgaacaaa

SEQ ID NO: 5871935 - DNA, 25 bp, Homo sapien
atcatatataaatcgatgatttctt

SEQ ID NO: 5871936 - DNA, 25 bp, Homo sapien
atagaataagcgtaaatataaaatg

SEQ ID NO: 5871937 - DNA, 25 bp, Homo sapien
aatttgaattaacgatataacaatg

SEQ ID NO: 5871938 - DNA, 25 bp, Homo sapien
tatatatattgattcgtaacaacat

SEQ ID NO: 5871939 - DNA, 25 bp, Homo sapien
attttaaccgatttagattataatc

SEQ ID NO: 5871940 - DNA, 25 bp, Homo sapien
tgaaaaaattacgattaatcaaatc

SEQ ID NO: 5871941 - DNA, 25 bp, Homo sapien
attgataaaacttataaacgatcaa

SEQ ID NO: 5871942 - DNA, 25 bp, Homo sapien
tatgttcggttcaatataattttaa

SEQ ID NO: 5871943 - DNA, 25 bp, Homo sapien
taaatatatctaattccgatctatt

SEQ ID NO: 5871944 - DNA, 25 bp, Homo sapien
ctttataatattacgaaatccatta

SEQ ID NO: 5871945 - DNA, 25 bp, Homo sapien
taaagacgattatataatcttgtaa

SEQ ID NO: 5871946 - DNA, 25 bp, Homo sapien
agacaacgatttactaattaatatt

SEQ ID NO: 5871947 - DNA, 25 bp, Homo sapien
ctatgaattaatcgtcaataataaa

SEQ ID NO: 5871948 - DNA, 25 bp, Homo sapien
agtcaatcgatttataacaaattat

SEQ ID NO: 5871949 - DNA, 25 bp, Homo sapien
cttaaattagattaatcgtttcaaa

SEQ ID NO: 5871950 - DNA, 25 bp, Homo sapien
atgtcattcgagtaattataataaa

SEQ ID NO: 5871951 - DNA, 25 bp, Homo sapien
taaacaccaattatatcgaaaaata

SEQ ID NO: 5871952 - DNA, 25 bp, Homo sapien
tagattaatcttcgaagtattataa

SEQ ID NO: 5871953 - DNA, 25 bp, Homo sapien
tccaacgaattagataattaaataa

SEQ ID NO: 5871954 - DNA, 25 bp, Homo sapien
aatttacgcgaaattatacaaataa

SEQ ID NO: 5871955 - DNA, 25 bp, Homo sapien
ctatagtaatattacgtttgaattt

SEQ ID NO: 5871956 - DNA, 25 bp, Homo sapien
catctttatcggaataatattttta

SEQ ID NO: 5871957 - DNA, 25 bp, Homo sapien
tattaatcgggttgtatattaatta

SEQ ID NO: 5871958 - DNA, 25 bp, Homo sapien
ttcaactaatcatattaacgttatt

SEQ ID NO: 5871959 - DNA, 25 bp, Homo sapien
acattaaaattataatcgcgaaaaa

SEQ ID NO: 5871960 - DNA, 25 bp, Homo sapien
tataataattaaaaggtcgtgatat

SEQ ID NO: 5871961 - DNA, 25 bp, Homo sapien
tttatcttcgtcatattagtaaaaa

SEQ ID NO: 5871962 - DNA, 25 bp, Homo sapien
tgtagatttatcgtagattaataaa

SEQ ID NO: 5871963 - DNA, 25 bp, Homo sapien
aatagagttatataattccgaaaaa

SEQ ID NO: 5871964 - DNA, 25 bp, Homo sapien
gaatattatataaataacgcacaat

SEQ ID NO: 5871965 - DNA, 25 bp, Homo sapien
gttcttatatacgagattaatatat

SEQ ID NO: 5871966 - DNA, 25 bp, Homo sapien
tagataattattacgtaatgtattg

SEQ ID NO: 5871967 - DNA, 25 bp, Homo sapien
gttcttatcgaagtattataatttt

SEQ ID NO: 5871968 - DNA, 25 bp, Homo sapien
ttaactacgataatactatattttg

SEQ ID NO: 5871969 - DNA, 25 bp, Homo sapien
taattttattacgatagatcattgt

SEQ ID NO: 5871970 - DNA, 25 bp, Homo sapien
aattgattactattaattcggattt

SEQ ID NO: 5871971 - DNA, 25 bp, Homo sapien
atttcatcgctataattgtataata

SEQ ID NO: 5871972 - DNA, 25 bp, Homo sapien
attacattcgattacaattattttc

SEQ ID NO: 5871973 - DNA, 25 bp, Homo sapien
ttcataaactatcgatatattgtta

SEQ ID NO: 5871974 - DNA, 25 bp, Homo sapien
tgtaatactattaattcgatgaatt

SEQ ID NO: 5871975 - DNA, 25 bp, Homo sapien
agtatatcaatttcgtataatagtt

SEQ ID NO: 5871976 - DNA, 25 bp, Homo sapien
taaagatattaaatagtcgacaatt

SEQ ID NO: 5871977 - DNA, 25 bp, Homo sapien
tatatcgtatccaaagataattaat

SEQ ID NO: 5871978 - DNA, 25 bp, Homo sapien
taatttagaacgtataataattcga

SEQ ID NO: 5871979 - DNA, 25 bp, Homo sapien
aattgttaataagttacgatgtata

SEQ ID NO: 5871980 - DNA, 25 bp, Homo sapien
cttaaatattcgattagtatgtata

SEQ ID NO: 5871981 - DNA, 25 bp, Homo sapien
taaatttgataatcgcaatagtaaa

SEQ ID NO: 5871982 - DNA, 25 bp, Homo sapien
taatattacgcaataaattcaatct

SEQ ID NO: 5871983 - DNA, 25 bp, Homo sapien
tttatacgtaatcgttaatacaatt

SEQ ID NO: 5871984 - DNA, 25 bp, Homo sapien
tattatcattataaacgattacaac

SEQ ID NO: 5871985 - DNA, 25 bp, Homo sapien
ttagctattaacgaatgatattaat

SEQ ID NO: 5871986 - DNA, 25 bp, Homo sapien
aaatttagttgaattatcgatattc

SEQ ID NO: 5871987 - DNA, 25 bp, Homo sapien
taatgtctattcgatataaaatcta

SEQ ID NO: 5871988 - DNA, 25 bp, Homo sapien
ctattttaatagtaatacgaattac

SEQ ID NO: 5871989 - DNA, 25 bp, Homo sapien
aataaaaattcgagtatatacagta

SEQ ID NO: 5871990 - DNA, 25 bp, Homo sapien
ataatttactattaatcgttagaca

SEQ ID NO: 5871991 - DNA, 25 bp, Homo sapien
taacaataaattaatagtcgtacta

SEQ ID NO: 5871992 - DNA, 25 bp, Homo sapien
tatctcttatataataacgtaactt

SEQ ID NO: 5871993 - DNA, 25 bp, Homo sapien
aaattttatcgaatctaatatacga

SEQ ID NO: 5871994 - DNA, 25 bp, Homo sapien
atatatattcgaaaattgattacac

SEQ ID NO: 5871995 - DNA, 25 bp, Homo sapien
ataagatatttcgtaaatagcattt

SEQ ID NO: 5871996 - DNA, 25 bp, Homo sapien
gtatatatataagttatcgaatatg

SEQ ID NO: 5871997 - DNA, 25 bp, Homo sapien
taacgatcgtaatattgattatata

SEQ ID NO: 5871998 - DNA, 25 bp, Homo sapien
tttgtctaatcgaattatatttaac

SEQ ID NO: 5871999 - DNA, 25 bp, Homo sapien
taaaaaatctatatcgaattgatac

SEQ ID NO: 5872000 - DNA, 25 bp, Homo sapien
tcgtattaattgttcgtataaataa

SEQ ID NO: 5872001 - DNA, 25 bp, Homo sapien
taatttattacgattgatcagttat

SEQ ID NO: 5872002 - DNA, 25 bp, Homo sapien
tttcattaatagtcgtaaattgaaa

SEQ ID NO: 5872003 - DNA, 25 bp, Homo sapien
tcaaattagatcgaataattaatct

SEQ ID NO: 5872004 - DNA, 25 bp, Homo sapien
tttaaacaattacggatagttaata

SEQ ID NO: 5872005 - DNA, 25 bp, Homo sapien
ttaatagatctacgtttaatgaaat

SEQ ID NO: 5872006 - DNA, 25 bp, Homo sapien
ttgaatatatacgaattttcttatg

SEQ ID NO: 5872007 - DNA, 25 bp, Homo sapien
ttaagtacgtaagattagtaataat

SEQ ID NO: 5872008 - DNA, 25 bp, Homo sapien
tccaataaatttcgaactaatatta

SEQ ID NO: 5872009 - DNA, 25 bp, Homo sapien
catattataaatttcgctaaaagaa

SEQ ID NO: 5872010 - DNA, 25 bp, Homo sapien
agtacatatatctaattcgaataaa

SEQ ID NO: 5872011 - DNA, 25 bp, Homo sapien
taaaaatatataaattctcgccata

SEQ ID NO: 5872012 - DNA, 25 bp, Homo sapien
atcatttaattattgcgaatactaa

SEQ ID NO: 5872013 - DNA, 25 bp, Homo sapien
ttcaattcgtaaatcgtaaatatta

SEQ ID NO: 5872014 - DNA, 25 bp, Homo sapien
tttgttctatcgtaatattatatac

SEQ ID NO: 5872015 - DNA, 25 bp, Homo sapien
aatatgtatattaaaatcgaaactg

SEQ ID NO: 5872016 - DNA, 25 bp, Homo sapien
ttttcgtcgaatttaataaatattc

SEQ ID NO: 5872017 - DNA, 25 bp, Homo sapien
taatgtatatcgtctaattactttt

SEQ ID NO: 5872018 - DNA, 25 bp, Homo sapien
aattagcgaatataatatatggttt

SEQ ID NO: 5872019 - DNA, 25 bp, Homo sapien
atttgtactattactcgaaaaatta

SEQ ID NO: 5872020 - DNA, 25 bp, Homo sapien
catttaataacgtacgaaataatta

SEQ ID NO: 5872021 - DNA, 25 bp, Homo sapien
ttctggtaataatcgattataaatt

SEQ ID NO: 5872022 - DNA, 25 bp, Homo sapien
ttatgatagacgctttaataatatt

SEQ ID NO: 5872023 - DNA, 25 bp, Homo sapien
agataacgtaatatcgattaaatta

SEQ ID NO: 5872024 - DNA, 25 bp, Homo sapien
attaacataataatcgacgattata

SEQ ID NO: 5872025 - DNA, 25 bp, Homo sapien
acataagtattaccgataattttat

SEQ ID NO: 5872026 - DNA, 25 bp, Homo sapien
aatgagaatttacgataaatagaaa

SEQ ID NO: 5872027 - DNA, 25 bp, Homo sapien
ttctaatattgtcgattaaatctta

SEQ ID NO: 5872028 - DNA, 25 bp, Homo sapien
aatatcgttaatttatgataaatcc

SEQ ID NO: 5872029 - DNA, 25 bp, Homo sapien
ctatgaattcgaataatctttaatt

SEQ ID NO: 5872030 - DNA, 25 bp, Homo sapien
aactaaatgtatatcgattacatat

SEQ ID NO: 5872031 - DNA, 25 bp, Homo sapien
atacattaattaatactcgatctat

SEQ ID NO: 5872032 - DNA, 25 bp, Homo sapien
ataacatcgcgaaaatatttattaa

SEQ ID NO: 5872033 - DNA, 25 bp, Homo sapien
aaatgatacgatatctataaaaagt

SEQ ID NO: 5872034 - DNA, 25 bp, Homo sapien
ataatttagaacgcgaatatattta

SEQ ID NO: 5872035 - DNA, 25 bp, Homo sapien
gaacagaatatattacgaaattaat

SEQ ID NO: 5872036 - DNA, 25 bp, Homo sapien
agaaattatctatattacgaaaaca

SEQ ID NO: 5872037 - DNA, 25 bp, Homo sapien
acttacgaatcattataatttctaa

SEQ ID NO: 5872038 - DNA, 25 bp, Homo sapien
taaatttatcgaataattgagaatc

SEQ ID NO: 5872039 - DNA, 25 bp, Homo sapien
catattcgaacatattgtaattaat

SEQ ID NO: 5872040 - DNA, 25 bp, Homo sapien
tgaagtacgataatctatttatatt

SEQ ID NO: 5872041 - DNA, 25 bp, Homo sapien
tttaaaagctataataacgtttgat

SEQ ID NO: 5872042 - DNA, 25 bp, Homo sapien
taattatgataatctgcgtatataa

SEQ ID NO: 5872043 - DNA, 25 bp, Homo sapien
aaaattcgtataagataatctatag

SEQ ID NO: 5872044 - DNA, 25 bp, Homo sapien
atacaaatagattaattacgcttat

SEQ ID NO: 5872045 - DNA, 25 bp, Homo sapien
tcttaataatagatttacgattgaa

SEQ ID NO: 5872046 - DNA, 25 bp, Homo sapien
tcgtacgatatagaaattaatttta

SEQ ID NO: 5872047 - DNA, 25 bp, Homo sapien
attatatcgttatagagataatcta

SEQ ID NO: 5872048 - DNA, 25 bp, Homo sapien
taacaaatataaactcgttatcatt

SEQ ID NO: 5872049 - DNA, 25 bp, Homo sapien
atatcaaatcgaaattaactactta

SEQ ID NO: 5872050 - DNA, 25 bp, Homo sapien
tcttaaaatatattcgcgataataa

SEQ ID NO: 5872051 - DNA, 25 bp, Homo sapien
gaaaaaatattcgattacaactata

SEQ ID NO: 5872052 - DNA, 25 bp, Homo sapien
atagtatcgataataagttaaagaa

SEQ ID NO: 5872053 - DNA, 25 bp, Homo sapien
ttctttaattattgcgaaatcaaaa

SEQ ID NO: 5872054 - DNA, 25 bp, Homo sapien
attaattctaatagattacgcttta

SEQ ID NO: 5872055 - DNA, 25 bp, Homo sapien
catatcgttaagagtaatatttaaa

SEQ ID NO: 5872056 - DNA, 25 bp, Homo sapien
ttagtaattacatccgtataaaaat

SEQ ID NO: 5872057 - DNA, 25 bp, Homo sapien
tcttttatagattaacgaatcaaaa

SEQ ID NO: 5872058 - DNA, 25 bp, Homo sapien
acattttaattcgaatagatttttc

SEQ ID NO: 5872059 - DNA, 25 bp, Homo sapien
ctaaaatactaatcgaatataagaa

SEQ ID NO: 5872060 - DNA, 25 bp, Homo sapien
atatacgataagtctaactatttta

SEQ ID NO: 5872061 - DNA, 25 bp, Homo sapien
atgaaaaatcgtcgatattttaaaa

SEQ ID NO: 5872062 - DNA, 25 bp, Homo sapien
attaacgatcattaatacaattcta

SEQ ID NO: 5872063 - DNA, 25 bp, Homo sapien
aatgatatcgttaaagattttcata

SEQ ID NO: 5872064 - DNA, 25 bp, Homo sapien
catattaaagatcgaaaatttatac

SEQ ID NO: 5872065 - DNA, 25 bp, Homo sapien
acaaactaattatcgaatattaatc

SEQ ID NO: 5872066 - DNA, 25 bp, Homo sapien
ttttacgatattaatagagttaatg

SEQ ID NO: 5872067 - DNA, 25 bp, Homo sapien
cgaaatacatcgaataattaaaatt

SEQ ID NO: 5872068 - DNA, 25 bp, Homo sapien
tttaaattactatccgatttgatat

SEQ ID NO: 5872069 - DNA, 25 bp, Homo sapien
gaaactaacgattagattaattaaa

SEQ ID NO: 5872070 - DNA, 25 bp, Homo sapien
tgcattactaataacgaaattattt

SEQ ID NO: 5872071 - DNA, 25 bp, Homo sapien
taaatttagcgttatgttaattaac

SEQ ID NO: 5872072 - DNA, 25 bp, Homo sapien
ttctatattacgaaacttattaaga

SEQ ID NO: 5872073 - DNA, 25 bp, Homo sapien
attaatcgaatagttattaaccatt

SEQ ID NO: 5872074 - DNA, 25 bp, Homo sapien
actaataatactatcgatgaaaatt

SEQ ID NO: 5872075 - DNA, 25 bp, Homo sapien
aaaaagatatagcgtagtattataa

SEQ ID NO: 5872076 - DNA, 25 bp, Homo sapien
actaaattaattacgatatgtgttt

SEQ ID NO: 5872077 - DNA, 25 bp, Homo sapien
aatatagagattttcgtaatttttc

SEQ ID NO: 5872078 - DNA, 25 bp, Homo sapien
taagtaagattaagtacgtatttta

SEQ ID NO: 5872079 - DNA, 25 bp, Homo sapien
tattaattaataaattctcgcctat

SEQ ID NO: 5872080 - DNA, 25 bp, Homo sapien
ataaaagtacgaactattaatatac

SEQ ID NO: 5872081 - DNA, 25 bp, Homo sapien
agaaaagattaatcgataatttcaa

SEQ ID NO: 5872082 - DNA, 25 bp, Homo sapien
ttctttaataattgcgaataaagat

SEQ ID NO: 5872083 - DNA, 25 bp, Homo sapien
aatcaaacattattatcgaatatct

SEQ ID NO: 5872084 - DNA, 25 bp, Homo sapien
attaatattaacagatcgatatgta

SEQ ID NO: 5872085 - DNA, 25 bp, Homo sapien
atttacgttatagatattcaaagaa

SEQ ID NO: 5872086 - DNA, 25 bp, Homo sapien
ccaaatatacataaatcgactatta

SEQ ID NO: 5872087 - DNA, 25 bp, Homo sapien
tataatcgtatcaatttaatcagtg

SEQ ID NO: 5872088 - DNA, 25 bp, Homo sapien
tttaatacggaattatactatacac

SEQ ID NO: 5872089 - DNA, 25 bp, Homo sapien
taatgacaatttcgacaataacttt

SEQ ID NO: 5872090 - DNA, 25 bp, Homo sapien
ttattatcaaattatcgatatgagg

SEQ ID NO: 5872091 - DNA, 25 bp, Homo sapien
tagaataatcgatttgtatacaaca

SEQ ID NO: 5872092 - DNA, 25 bp, Homo sapien
gataaaacttattaagtgcgttaat

SEQ ID NO: 5872093 - DNA, 25 bp, Homo sapien
agcgaattcgataatatgataaaaa

SEQ ID NO: 5872094 - DNA, 25 bp, Homo sapien
taaactattatagataatcgcgaat

SEQ ID NO: 5872095 - DNA, 25 bp, Homo sapien
tatgaaaatcttttacgatacgatt

SEQ ID NO: 5872096 - DNA, 25 bp, Homo sapien
ctatctatgtcgattaataagaaaa

SEQ ID NO: 5872097 - DNA, 25 bp, Homo sapien
aaaataatccgataactaatctgat

SEQ ID NO: 5872098 - DNA, 25 bp, Homo sapien
acgttaatttaacgatcctattata

SEQ ID NO: 5872099 - DNA, 25 bp, Homo sapien
taaagcgttattctatataattcca

SEQ ID NO: 5872100 - DNA, 25 bp, Homo sapien
ttttgtttacgattagtacaattca

SEQ ID NO: 5872101 - DNA, 25 bp, Homo sapien
tatccacatcgttatataattcata

SEQ ID NO: 5872102 - DNA, 25 bp, Homo sapien
tcctaataacgctaatttaaagatt

SEQ ID NO: 5872103 - DNA, 25 bp, Homo sapien
attaaatcgcaattattcaattgca

SEQ ID NO: 5872104 - DNA, 25 bp, Homo sapien
tatttcgctactaataaattttcag

SEQ ID NO: 5872105 - DNA, 25 bp, Homo sapien
acgttcgattatatactattagtat

SEQ ID NO: 5872106 - DNA, 25 bp, Homo sapien
taaatatttcgatttacgtaaatgg

SEQ ID NO: 5872107 - DNA, 25 bp, Homo sapien
tatagcgattaataacttaatcagt

SEQ ID NO: 5872108 - DNA, 25 bp, Homo sapien
atagttaattcaatacgctatatct

SEQ ID NO: 5872109 - DNA, 25 bp, Homo sapien
gttttatcagtacgatacaatttat

SEQ ID NO: 5872110 - DNA, 25 bp, Homo sapien
gtgtaattattatagtcgaattgta

SEQ ID NO: 5872111 - DNA, 25 bp, Homo sapien
gtatgtacgaattagtaaactattt

SEQ ID NO: 5872112 - DNA, 25 bp, Homo sapien
agaagttcgatagtatattattact

SEQ ID NO: 5872113 - DNA, 25 bp, Homo sapien
atcattaatattcgtacgtaacaaa

SEQ ID NO: 5872114 - DNA, 25 bp, Homo sapien
ttagccgaattaatatcgttattta

SEQ ID NO: 5872115 - DNA, 25 bp, Homo sapien
catagaatttattgtcgttatagaa

SEQ ID NO: 5872116 - DNA, 25 bp, Homo sapien
cttgacgattacgaaattaataatt

SEQ ID NO: 5872117 - DNA, 25 bp, Homo sapien
tagcatcggtagtaataataattaa

SEQ ID NO: 5872118 - DNA, 25 bp, Homo sapien
atagaaaattcgttctattaatcag

SEQ ID NO: 5872119 - DNA, 25 bp, Homo sapien
gtgatgctattattcgaattattat

SEQ ID NO: 5872120 - DNA, 25 bp, Homo sapien
tattaatgtattatccgattccatt

SEQ ID NO: 5872121 - DNA, 25 bp, Homo sapien
agattttaatatgataatcgcgaaa

SEQ ID NO: 5872122 - DNA, 25 bp, Homo sapien
gtacttaatttcgatcgtataaata

SEQ ID NO: 5872123 - DNA, 25 bp, Homo sapien
agagacgtttaataaactaattaca

SEQ ID NO: 5872124 - DNA, 25 bp, Homo sapien
aaagattatatttcgcttaatgaag

SEQ ID NO: 5872125 - DNA, 25 bp, Homo sapien
tttaccgttgtttaatacttcatta

SEQ ID NO: 5872126 - DNA, 25 bp, Homo sapien
aaaatagatcttatatcgcatactt

SEQ ID NO: 5872127 - DNA, 25 bp, Homo sapien
ctcatcaagcgtaataatattataa

SEQ ID NO: 5872128 - DNA, 25 bp, Homo sapien
tgtcattatttcgtaatctaatttc

SEQ ID NO: 5872129 - DNA, 25 bp, Homo sapien
taatacaagcgaaagttatactatt

SEQ ID NO: 5872130 - DNA, 25 bp, Homo sapien
tatttgaacatatacgaagttcata

SEQ ID NO: 5872131 - DNA, 25 bp, Homo sapien
ttagaaactttaatcgttatcatac

SEQ ID NO: 5872132 - DNA, 25 bp, Homo sapien
attagattacgacgattataattga

SEQ ID NO: 5872133 - DNA, 25 bp, Homo sapien
cacaatcgtttaatatagaagaatt

SEQ ID NO: 5872134 - DNA, 25 bp, Homo sapien
ttaatttaaagtaacgcatcctata

SEQ ID NO: 5872135 - DNA, 25 bp, Homo sapien
ggtactattaaatcgaacattattt

SEQ ID NO: 5872136 - DNA, 25 bp, Homo sapien
caagttattaatatcgaatctattg

SEQ ID NO: 5872137 - DNA, 25 bp, Homo sapien
aaaattatataatcgcgttacgtat

SEQ ID NO: 5872138 - DNA, 25 bp, Homo sapien
gtctttatattcaatcgtacaaata

SEQ ID NO: 5872139 - DNA, 25 bp, Homo sapien
tgatctattcgcaaaattatttagt

SEQ ID NO: 5872140 - DNA, 25 bp, Homo sapien
agattgatatcgcataatataatca

SEQ ID NO: 5872141 - DNA, 25 bp, Homo sapien
tatactagctatcggataatattat

SEQ ID NO: 5872142 - DNA, 25 bp, Homo sapien
aatagtacggttattattctttaca

SEQ ID NO: 5872143 - DNA, 25 bp, Homo sapien
tatcatagagatttacgtcattttt

SEQ ID NO: 5872144 - DNA, 25 bp, Homo sapien
attattattactaaattgcgcgttt

SEQ ID NO: 5872145 - DNA, 25 bp, Homo sapien
tttaattacgtaagtaagacacatt

SEQ ID NO: 5872146 - DNA, 25 bp, Homo sapien
ttgtatataatagcacgatattctt

SEQ ID NO: 5872147 - DNA, 25 bp, Homo sapien
tttttatagcgatacctatttatgt

SEQ ID NO: 5872148 - DNA, 25 bp, Homo sapien
aatactatccttaattcgatcatta

SEQ ID NO: 5872149 - DNA, 25 bp, Homo sapien
aggttaacattatatcgattttatc

SEQ ID NO: 5872150 - DNA, 25 bp, Homo sapien
ataacattagcgtaatactagtttt

SEQ ID NO: 5872151 - DNA, 25 bp, Homo sapien
ataaaattatatcgttaccgttatc

SEQ ID NO: 5872152 - DNA, 25 bp, Homo sapien
attattaatttcgcatcttatcgat

SEQ ID NO: 5872153 - DNA, 25 bp, Homo sapien
tatgacgaacgaataaattacaaaa

SEQ ID NO: 5872154 - DNA, 25 bp, Homo sapien
atttcaattaatattaccgcatttg

SEQ ID NO: 5872155 - DNA, 25 bp, Homo sapien
ctttgttattaatcgacatagaaaa

SEQ ID NO: 5872156 - DNA, 25 bp, Homo sapien
tctctatacttatttagacgatttt

SEQ ID NO: 5872157 - DNA, 25 bp, Homo sapien
tgattaattcgaataatacgttatc

SEQ ID NO: 5872158 - DNA, 25 bp, Homo sapien
aattgataacgatataacgtagaat

SEQ ID NO: 5872159 - DNA, 25 bp, Homo sapien
gaaataacgcgtttataattattag

SEQ ID NO: 5872160 - DNA, 25 bp, Homo sapien
acaaaattacgcattagctttttaa

SEQ ID NO: 5872161 - DNA, 25 bp, Homo sapien
aaataagctcgaactatatatgtta

SEQ ID NO: 5872162 - DNA, 25 bp, Homo sapien
atacagtactcgacaatatataaaa

SEQ ID NO: 5872163 - DNA, 25 bp, Homo sapien
tcatataattcgtcctaaaatcttt

SEQ ID NO: 5872164 - DNA, 25 bp, Homo sapien
cttattataattacgacaagtcttt

SEQ ID NO: 5872165 - DNA, 25 bp, Homo sapien
taagcctaattaacgatctttaata

SEQ ID NO: 5872166 - DNA, 25 bp, Homo sapien
tacataatagatatcttacgatgta

SEQ ID NO: 5872167 - DNA, 25 bp, Homo sapien
aataggtcattaaaaattcgatttg

SEQ ID NO: 5872168 - DNA, 25 bp, Homo sapien
ttacaatctaacgaatattatgatc

SEQ ID NO: 5872169 - DNA, 25 bp, Homo sapien
atgcgcgatatatagtttaatataa

SEQ ID NO: 5872170 - DNA, 25 bp, Homo sapien
taaaagaagtattacgtcttatgta

SEQ ID NO: 5872171 - DNA, 25 bp, Homo sapien
actattcgatcttataataaagatg

SEQ ID NO: 5872172 - DNA, 25 bp, Homo sapien
ttttgctatattaattcgaaccttt

SEQ ID NO: 5872173 - DNA, 25 bp, Homo sapien
ttacacttaatcgtatcatatatga

SEQ ID NO: 5872174 - DNA, 25 bp, Homo sapien
ttcaatatccttcgtatactttaat

SEQ ID NO: 5872175 - DNA, 25 bp, Homo sapien
tatccgaattaatacgaaataaagt

SEQ ID NO: 5872176 - DNA, 25 bp, Homo sapien
aatcgatatcgttatataagactta

SEQ ID NO: 5872177 - DNA, 25 bp, Homo sapien
acataaaacaacggattattattag

SEQ ID NO: 5872178 - DNA, 25 bp, Homo sapien
accagataatctatttcgtatatat

SEQ ID NO: 5872179 - DNA, 25 bp, Homo sapien
attatgattttgtaatcgattgcat

SEQ ID NO: 5872180 - DNA, 25 bp, Homo sapien
aaaactaacatgtcgaatataagtt

SEQ ID NO: 5872181 - DNA, 25 bp, Homo sapien
ccaatcgacgtattataaaaaatat

SEQ ID NO: 5872182 - DNA, 25 bp, Homo sapien
catagtatttcggaaactatataat

SEQ ID NO: 5872183 - DNA, 25 bp, Homo sapien
attgtaatcacgataaattagatgt

SEQ ID NO: 5872184 - DNA, 25 bp, Homo sapien
tcaattaattctatcgaacagaaaa

SEQ ID NO: 5872185 - DNA, 25 bp, Homo sapien
taaatgtttacgataagttcacaaa

SEQ ID NO: 5872186 - DNA, 25 bp, Homo sapien
gttgataatcaattacgtaacataa

SEQ ID NO: 5872187 - DNA, 25 bp, Homo sapien
caataattcgtattgtacgataaaa

SEQ ID NO: 5872188 - DNA, 25 bp, Homo sapien
tatcctgtaatcgtatattatatca

SEQ ID NO: 5872189 - DNA, 25 bp, Homo sapien
aagattatacgaaatagttacctat

SEQ ID NO: 5872190 - DNA, 25 bp, Homo sapien
attgatcttatcgaataatatatcg

SEQ ID NO: 5872191 - DNA, 25 bp, Homo sapien
gttaatatcggaactattatctaaa

SEQ ID NO: 5872192 - DNA, 25 bp, Homo sapien
actcaaatcggttattaatactaat

SEQ ID NO: 5872193 - DNA, 25 bp, Homo sapien
acgttgaatttatacgaagaaaata

SEQ ID NO: 5872194 - DNA, 25 bp, Homo sapien
tatatttcgcttgtaatttaaagac

SEQ ID NO: 5872195 - DNA, 25 bp, Homo sapien
acaagtatgattaatcatcgtttta

SEQ ID NO: 5872196 - DNA, 25 bp, Homo sapien
aaacatatgcgataatcattaagaa

SEQ ID NO: 5872197 - DNA, 25 bp, Homo sapien
ctaaatatagattgcgaaatgttat

SEQ ID NO: 5872198 - DNA, 25 bp, Homo sapien
ttaagtacgagattgaatttacata

SEQ ID NO: 5872199 - DNA, 25 bp, Homo sapien
ctctacttatcgtactataattttt

SEQ ID NO: 5872200 - DNA, 25 bp, Homo sapien
tagcgaaatctacgatattaaattt

SEQ ID NO: 5872201 - DNA, 25 bp, Homo sapien
agttatgttatcgaatgatattcat

SEQ ID NO: 5872202 - DNA, 25 bp, Homo sapien
ttgtagcgtacttaaattattatga

SEQ ID NO: 5872203 - DNA, 25 bp, Homo sapien
tgaaatgtttaatcgaaattagcaa

SEQ ID NO: 5872204 - DNA, 25 bp, Homo sapien
cctatattaacgtcgtaatatttaa

SEQ ID NO: 5872205 - DNA, 25 bp, Homo sapien
aagtagatatcgtaaatttatcaac

SEQ ID NO: 5872206 - DNA, 25 bp, Homo sapien
ttactcgaattctattaactacata

SEQ ID NO: 5872207 - DNA, 25 bp, Homo sapien
caaatgatcgagaatttttacttta

SEQ ID NO: 5872208 - DNA, 25 bp, Homo sapien
ttgacttatcatcgaagattaaatt

SEQ ID NO: 5872209 - DNA, 25 bp, Homo sapien
tccattataaggatttacgatttaa

SEQ ID NO: 5872210 - DNA, 25 bp, Homo sapien
gcaattaaccgataaattaaataac

SEQ ID NO: 5872211 - DNA, 25 bp, Homo sapien
aacatttagtattatccgatgttat

SEQ ID NO: 5872212 - DNA, 25 bp, Homo sapien
atttgaaattcgatgtattgaacat

SEQ ID NO: 5872213 - DNA, 25 bp, Homo sapien
tgatattataattgattacgtagct

SEQ ID NO: 5872214 - DNA, 25 bp, Homo sapien
atatatactgtaaaacgatatgcaa

SEQ ID NO: 5872215 - DNA, 25 bp, Homo sapien
taacacgctataacaattgaattat

SEQ ID NO: 5872216 - DNA, 25 bp, Homo sapien
caaatattctcgataacaaattact

SEQ ID NO: 5872217 - DNA, 25 bp, Homo sapien
taatttacgattatataacggatgt

SEQ ID NO: 5872218 - DNA, 25 bp, Homo sapien
attgaatttcgaacttagattcatt

SEQ ID NO: 5872219 - DNA, 25 bp, Homo sapien
aggtgactaattaatcgaaataaat

SEQ ID NO: 5872220 - DNA, 25 bp, Homo sapien
ataaacggataattgttcaacaaaa

SEQ ID NO: 5872221 - DNA, 25 bp, Homo sapien
tatgataattcgtaataagtcagtt

SEQ ID NO: 5872222 - DNA, 25 bp, Homo sapien
tacaaaaacgaatttacgataagat

SEQ ID NO: 5872223 - DNA, 25 bp, Homo sapien
gtattataaacgacatattatagtc

SEQ ID NO: 5872224 - DNA, 25 bp, Homo sapien
ttaagcgaaattacgataaaatcta

SEQ ID NO: 5872225 - DNA, 25 bp, Homo sapien
gcttatagattaatcgaatttcatt

SEQ ID NO: 5872226 - DNA, 25 bp, Homo sapien
atacgtattaactaatcgacatatt

SEQ ID NO: 5872227 - DNA, 25 bp, Homo sapien
tattgcgttatattaggtaatgtaa

SEQ ID NO: 5872228 - DNA, 25 bp, Homo sapien
tattttcgtcgaacataaatcatat

SEQ ID NO: 5872229 - DNA, 25 bp, Homo sapien
agtactgtacgattataataatgtt

SEQ ID NO: 5872230 - DNA, 25 bp, Homo sapien
attagataactatagcgaataatac

SEQ ID NO: 5872231 - DNA, 25 bp, Homo sapien
taacacaataattttcgattattcc

SEQ ID NO: 5872232 - DNA, 25 bp, Homo sapien
gaataaaattcgatcgaatacttat

SEQ ID NO: 5872233 - DNA, 25 bp, Homo sapien
tagttaattcgcactatatataaga

SEQ ID NO: 5872234 - DNA, 25 bp, Homo sapien
taaatatatttacgttaacggcaat

SEQ ID NO: 5872235 - DNA, 25 bp, Homo sapien
ttttggtttatgatcggtataatat

SEQ ID NO: 5872236 - DNA, 25 bp, Homo sapien
aatctgatttttatcgtataagtct

SEQ ID NO: 5872237 - DNA, 25 bp, Homo sapien
ctactttagtaaatcgaatataact

SEQ ID NO: 5872238 - DNA, 25 bp, Homo sapien
ataagatagtatatcgtttatttcc

SEQ ID NO: 5872239 - DNA, 25 bp, Homo sapien
taattactaatagatatacgagtct

SEQ ID NO: 5872240 - DNA, 25 bp, Homo sapien
attgtttactttatcgtagataact

SEQ ID NO: 5872241 - DNA, 25 bp, Homo sapien
tgcgataatataagatcgtttattt

SEQ ID NO: 5872242 - DNA, 25 bp, Homo sapien
tcaatttacgatattctaatcacaa

SEQ ID NO: 5872243 - DNA, 25 bp, Homo sapien
acaagttaatgtataatcgtgaata

SEQ ID NO: 5872244 - DNA, 25 bp, Homo sapien
gatgtttcgaattgaatataagata

SEQ ID NO: 5872245 - DNA, 25 bp, Homo sapien
ataaatataatcgtatagggcaata

SEQ ID NO: 5872246 - DNA, 25 bp, Homo sapien
aataataacttatattatcgtcggt

SEQ ID NO: 5872247 - DNA, 25 bp, Homo sapien
cacttaattaattaatagcgcaata

SEQ ID NO: 5872248 - DNA, 25 bp, Homo sapien
tgatttatcgtagttctaactataa

SEQ ID NO: 5872249 - DNA, 25 bp, Homo sapien
ttactatcgaataacgaaatttgaa

SEQ ID NO: 5872250 - DNA, 25 bp, Homo sapien
aaatacgattaacacctttatagaa

SEQ ID NO: 5872251 - DNA, 25 bp, Homo sapien
tgtaataacgagatcaatataaatc

SEQ ID NO: 5872252 - DNA, 25 bp, Homo sapien
tctatatcgatacgtatttaagata

SEQ ID NO: 5872253 - DNA, 25 bp, Homo sapien
gttaataaaaacgttcgtatatatc

SEQ ID NO: 5872254 - DNA, 25 bp, Homo sapien
ttaagtgcgataagttaattaatca

SEQ ID NO: 5872255 - DNA, 25 bp, Homo sapien
ctacaagttacgataaattattgaa

SEQ ID NO: 5872256 - DNA, 25 bp, Homo sapien
ggttagaatcgtaattaattacata

SEQ ID NO: 5872257 - DNA, 25 bp, Homo sapien
atcattgatgttaccgattatttat

SEQ ID NO: 5872258 - DNA, 25 bp, Homo sapien
atcttcgttattttattacgtgaat

SEQ ID NO: 5872259 - DNA, 25 bp, Homo sapien
taaacatgacgatcttttattttac

SEQ ID NO: 5872260 - DNA, 25 bp, Homo sapien
aataattattcgatgattcgtttga

SEQ ID NO: 5872261 - DNA, 25 bp, Homo sapien
taaatgaaacgacattaaacacaat

SEQ ID NO: 5872262 - DNA, 25 bp, Homo sapien
acaatattattacgatactaagcta

SEQ ID NO: 5872263 - DNA, 25 bp, Homo sapien
tatagcattttaatcgaatatttcg

SEQ ID NO: 5872264 - DNA, 25 bp, Homo sapien
tattgattgtcgcaatataaaagat

SEQ ID NO: 5872265 - DNA, 25 bp, Homo sapien
aaaaatcgtacattcaattgttaca

SEQ ID NO: 5872266 - DNA, 25 bp, Homo sapien
aagattttcgaaaactaatatagtc

SEQ ID NO: 5872267 - DNA, 25 bp, Homo sapien
ttttgaaaatcgaaatatagaagtc

SEQ ID NO: 5872268 - DNA, 25 bp, Homo sapien
taaaaatcagatattaatcgaccaa

SEQ ID NO: 5872269 - DNA, 25 bp, Homo sapien
tatttatattaaatagtcgatctgg

SEQ ID NO: 5872270 - DNA, 25 bp, Homo sapien
aaagaatcgaactatatacaactaa

SEQ ID NO: 5872271 - DNA, 25 bp, Homo sapien
gataattcgaaatttattcgatgat

SEQ ID NO: 5872272 - DNA, 25 bp, Homo sapien
gaatttataatggttcgataatttg

SEQ ID NO: 5872273 - DNA, 25 bp, Homo sapien
ttagaataacgatataagttcttca

SEQ ID NO: 5872274 - DNA, 25 bp, Homo sapien
agaaaaaacatactataacgcatta

SEQ ID NO: 5872275 - DNA, 25 bp, Homo sapien
ttaaacggttagatatatgtatctt

SEQ ID NO: 5872276 - DNA, 25 bp, Homo sapien
aaatcatattcgcaagtataatttg

SEQ ID NO: 5872277 - DNA, 25 bp, Homo sapien
aagtagatacgcattattataaatg

SEQ ID NO: 5872278 - DNA, 25 bp, Homo sapien
aataatagcgaattactatcgattt

SEQ ID NO: 5872279 - DNA, 25 bp, Homo sapien
actttcgtaactaatgaaacattat

SEQ ID NO: 5872280 - DNA, 25 bp, Homo sapien
aaatactatttcgcttataaacgat

SEQ ID NO: 5872281 - DNA, 25 bp, Homo sapien
tagtatactagtttttacgaaacat

SEQ ID NO: 5872282 - DNA, 25 bp, Homo sapien
agttctacttcgattaattatcaaa

SEQ ID NO: 5872283 - DNA, 25 bp, Homo sapien
tacattttaagcgttaattcaagaa

SEQ ID NO: 5872284 - DNA, 25 bp, Homo sapien
gtaatgttatcgatataatactaag

SEQ ID NO: 5872285 - DNA, 25 bp, Homo sapien
tacctattacgattaagtattaaca

SEQ ID NO: 5872286 - DNA, 25 bp, Homo sapien
taattattctaaattatcgacacag

SEQ ID NO: 5872287 - DNA, 25 bp, Homo sapien
actatgacgtattataataactgtt

SEQ ID NO: 5872288 - DNA, 25 bp, Homo sapien
tgatgttaattcgaaacgtaaatta

SEQ ID NO: 5872289 - DNA, 25 bp, Homo sapien
gaataatatcgctattcgatattaa

SEQ ID NO: 5872290 - DNA, 25 bp, Homo sapien
acttttatacttagatcgaagattt

SEQ ID NO: 5872291 - DNA, 25 bp, Homo sapien
taatatagctaacgattatacttca

SEQ ID NO: 5872292 - DNA, 25 bp, Homo sapien
ttagtttacgataagttataacgaa

SEQ ID NO: 5872293 - DNA, 25 bp, Homo sapien
ttatataatattatcgaaacctagg

SEQ ID NO: 5872294 - DNA, 25 bp, Homo sapien
tagtataatacggattattgtattc

SEQ ID NO: 5872295 - DNA, 25 bp, Homo sapien
tatactataatactcgatagcataa

SEQ ID NO: 5872296 - DNA, 25 bp, Homo sapien
atgtacctatttcgctatatatttt

SEQ ID NO: 5872297 - DNA, 25 bp, Homo sapien
cagagatcataatataacgaatata

SEQ ID NO: 5872298 - DNA, 25 bp, Homo sapien
atagtttagattacgatattaccaa

SEQ ID NO: 5872299 - DNA, 25 bp, Homo sapien
aaagatcaaactaactatcgtaaat

SEQ ID NO: 5872300 - DNA, 25 bp, Homo sapien
taccgaattcgtataataagaataa

SEQ ID NO: 5872301 - DNA, 25 bp, Homo sapien
aatacattgattacgaaattcttac

SEQ ID NO: 5872302 - DNA, 25 bp, Homo sapien
attaccgagtaattgattacataaa

SEQ ID NO: 5872303 - DNA, 25 bp, Homo sapien
tttaaagacgctatttaataactgt

SEQ ID NO: 5872304 - DNA, 25 bp, Homo sapien
tatttgtttcgtattcaataatcct

SEQ ID NO: 5872305 - DNA, 25 bp, Homo sapien
aaagtatatgattagcgatataaac

SEQ ID NO: 5872306 - DNA, 25 bp, Homo sapien
aggaaataatatcgacataatacaa

SEQ ID NO: 5872307 - DNA, 25 bp, Homo sapien
ttacttagattatatcgagttttga

SEQ ID NO: 5872308 - DNA, 25 bp, Homo sapien
ctgattatttagattacgagtaaat

SEQ ID NO: 5872309 - DNA, 25 bp, Homo sapien
tcaacgcgtaaattaatattcattt

SEQ ID NO: 5872310 - DNA, 25 bp, Homo sapien
tttcaatacgtattaattcgctttt

SEQ ID NO: 5872311 - DNA, 25 bp, Homo sapien
aatttgactaactaacgattatgat

SEQ ID NO: 5872312 - DNA, 25 bp, Homo sapien
tatacattactaattatcgctgtta

SEQ ID NO: 5872313 - DNA, 25 bp, Homo sapien
agtattagattaacgataatagtct

SEQ ID NO: 5872314 - DNA, 25 bp, Homo sapien
ataatacttatgatcgaaacaaagt

SEQ ID NO: 5872315 - DNA, 25 bp, Homo sapien
attcctttatacgatagttaaatag

SEQ ID NO: 5872316 - DNA, 25 bp, Homo sapien
atacctttactattattcgaatcat

SEQ ID NO: 5872317 - DNA, 25 bp, Homo sapien
attacttagatcgtttatgatattg

SEQ ID NO: 5872318 - DNA, 25 bp, Homo sapien
ttaataatttgcgaacttaatgact

SEQ ID NO: 5872319 - DNA, 25 bp, Homo sapien
attcgttatagtataaatcgtagat

SEQ ID NO: 5872320 - DNA, 25 bp, Homo sapien
ttgaagatacataattatcgtattc

SEQ ID NO: 5872321 - DNA, 25 bp, Homo sapien
tgttaacgacttattagttaaatac

SEQ ID NO: 5872322 - DNA, 25 bp, Homo sapien
taaataattttttcgatcgattcag

SEQ ID NO: 5872323 - DNA, 25 bp, Homo sapien
taaggtagtatattatttcggaata

SEQ ID NO: 5872324 - DNA, 25 bp, Homo sapien
tttagacgataacttaatattatgc

SEQ ID NO: 5872325 - DNA, 25 bp, Homo sapien
gtaaacgaaaatcataatatgtgta

SEQ ID NO: 5872326 - DNA, 25 bp, Homo sapien
attatatatcgtacgttattacgaa

SEQ ID NO: 5872327 - DNA, 25 bp, Homo sapien
actaataatctattcgaataactga

SEQ ID NO: 5872328 - DNA, 25 bp, Homo sapien
tacttttataagtcgcattttttct

SEQ ID NO: 5872329 - DNA, 25 bp, Homo sapien
tttttttatattcgtttcgattcac

SEQ ID NO: 5872330 - DNA, 25 bp, Homo sapien
caatacaatattacgattaaaacct

SEQ ID NO: 5872331 - DNA, 25 bp, Homo sapien
atggtgtttaactttcgttataata

SEQ ID NO: 5872332 - DNA, 25 bp, Homo sapien
tatagtaggatcgtaattaatttac

SEQ ID NO: 5872333 - DNA, 25 bp, Homo sapien
atgttaatcgaacgataaatttttg

SEQ ID NO: 5872334 - DNA, 25 bp, Homo sapien
taacttcgtcagatttattaataac

SEQ ID NO: 5872335 - DNA, 25 bp, Homo sapien
aaaaatttaatgcgaagtagagtta

SEQ ID NO: 5872336 - DNA, 25 bp, Homo sapien
gtttgatcgatactaattcatttta

SEQ ID NO: 5872337 - DNA, 25 bp, Homo sapien
catgtatgtttcgtaaaaaatatag

SEQ ID NO: 5872338 - DNA, 25 bp, Homo sapien
aagctactaaacgtaatacattaat

SEQ ID NO: 5872339 - DNA, 25 bp, Homo sapien
atatttataggacgatttgaaacta

SEQ ID NO: 5872340 - DNA, 25 bp, Homo sapien
atttatagcgaattaatagttgcta

SEQ ID NO: 5872341 - DNA, 25 bp, Homo sapien
attttcgtacattgttaagatctat

SEQ ID NO: 5872342 - DNA, 25 bp, Homo sapien
ttctattataactaatccgcaaaat

SEQ ID NO: 5872343 - DNA, 25 bp, Homo sapien
ttattttagcgttatactataactg

SEQ ID NO: 5872344 - DNA, 25 bp, Homo sapien
taacacttatacgcaagttaataat

SEQ ID NO: 5872345 - DNA, 25 bp, Homo sapien
tggaattccgaatattaatatgaat

SEQ ID NO: 5872346 - DNA, 25 bp, Homo sapien
gattagtacgaattagtattttctt

SEQ ID NO: 5872347 - DNA, 25 bp, Homo sapien
attatccaatttaacgcattaagta

SEQ ID NO: 5872348 - DNA, 25 bp, Homo sapien
aattacgtaaagtatgttatgtttg

SEQ ID NO: 5872349 - DNA, 25 bp, Homo sapien
ataagaaactatatcgaatctgatt

SEQ ID NO: 5872350 - DNA, 25 bp, Homo sapien
ctatttaataattcgccatattttc

SEQ ID NO: 5872351 - DNA, 25 bp, Homo sapien
ataaagtactacgtataagtaatct

SEQ ID NO: 5872352 - DNA, 25 bp, Homo sapien
tttcacgactatataataattcaga

SEQ ID NO: 5872353 - DNA, 25 bp, Homo sapien
aatatcgtaaacaattaatctagca

SEQ ID NO: 5872354 - DNA, 25 bp, Homo sapien
tgaaatcgtcgatttaataacaatt

SEQ ID NO: 5872355 - DNA, 25 bp, Homo sapien
gacaagaatcgaattatatactatt

SEQ ID NO: 5872356 - DNA, 25 bp, Homo sapien
gacaccgactatttaatattaatta

SEQ ID NO: 5872357 - DNA, 25 bp, Homo sapien
taacattattaatcgcgtttttgtt

SEQ ID NO: 5872358 - DNA, 25 bp, Homo sapien
ttattaaattacgcgttatgatcaa

SEQ ID NO: 5872359 - DNA, 25 bp, Homo sapien
gtaatatcgatatataatgcaagta

SEQ ID NO: 5872360 - DNA, 25 bp, Homo sapien
tgttttaacattattacgccttatt

SEQ ID NO: 5872361 - DNA, 25 bp, Homo sapien
agttatagattggacgattttaaat

SEQ ID NO: 5872362 - DNA, 25 bp, Homo sapien
attggaatttatatttcgcgttatt

SEQ ID NO: 5872363 - DNA, 25 bp, Homo sapien
atcattaatatactatcgaataacg

SEQ ID NO: 5872364 - DNA, 25 bp, Homo sapien
tagttttcgtattaattcgatatag

SEQ ID NO: 5872365 - DNA, 25 bp, Homo sapien
attttaaatcggataatcctataca

SEQ ID NO: 5872366 - DNA, 25 bp, Homo sapien
ggatcataatcgattcttataaaaa

SEQ ID NO: 5872367 - DNA, 25 bp, Homo sapien
tagtattgaacaaccgaatataata

SEQ ID NO: 5872368 - DNA, 25 bp, Homo sapien
taatatcgtatcgtaattttacttc

SEQ ID NO: 5872369 - DNA, 25 bp, Homo sapien
tttatatattgtcgttggaataaac

SEQ ID NO: 5872370 - DNA, 25 bp, Homo sapien
tttcttcgaaaaaatatgtctttag

SEQ ID NO: 5872371 - DNA, 25 bp, Homo sapien
atgtcgttacgataaaattgtataa

SEQ ID NO: 5872372 - DNA, 25 bp, Homo sapien
gaaattagaacgatttaaatctgtt

SEQ ID NO: 5872373 - DNA, 25 bp, Homo sapien
ataatgttcatataattcgggattt

SEQ ID NO: 5872374 - DNA, 25 bp, Homo sapien
tgaaatcgacattaatataagttac

SEQ ID NO: 5872375 - DNA, 25 bp, Homo sapien
aagtggcgatatattattaaaatct

SEQ ID NO: 5872376 - DNA, 25 bp, Homo sapien
ctaaattatcacgaattgatgaaat

SEQ ID NO: 5872377 - DNA, 25 bp, Homo sapien
attgttacgatttatcgttattcaa

SEQ ID NO: 5872378 - DNA, 25 bp, Homo sapien
tatgcatagcgttaataagttaatt

SEQ ID NO: 5872379 - DNA, 25 bp, Homo sapien
tgataattatcgtaatatcgttttc

SEQ ID NO: 5872380 - DNA, 25 bp, Homo sapien
tttgattacgtaattcgttttcaat

SEQ ID NO: 5872381 - DNA, 25 bp, Homo sapien
agaatataacgatctatatagagaa

SEQ ID NO: 5872382 - DNA, 25 bp, Homo sapien
atatcttcgcgaataattattgatt

SEQ ID NO: 5872383 - DNA, 25 bp, Homo sapien
attggattaaattgatacgatgttt

SEQ ID NO: 5872384 - DNA, 25 bp, Homo sapien
cgtaaatcgcaaatttattgtttat

SEQ ID NO: 5872385 - DNA, 25 bp, Homo sapien
tttagagattactcgtaaatattac

SEQ ID NO: 5872386 - DNA, 25 bp, Homo sapien
taaaaatatattatacgcgaaacca

SEQ ID NO: 5872387 - DNA, 25 bp, Homo sapien
taatgttacattatatcgaaacttc

SEQ ID NO: 5872388 - DNA, 25 bp, Homo sapien
aatataaattggcgttaacaattag

SEQ ID NO: 5872389 - DNA, 25 bp, Homo sapien
atttatgacgtaaatttgtcaaagt

SEQ ID NO: 5872390 - DNA, 25 bp, Homo sapien
tcaaatacctatatcacgattaaaa

SEQ ID NO: 5872391 - DNA, 25 bp, Homo sapien
atgtgctattcgtttataagaataa

SEQ ID NO: 5872392 - DNA, 25 bp, Homo sapien
atctaatccgattataattaactag

SEQ ID NO: 5872393 - DNA, 25 bp, Homo sapien
aaatttaattacgaataccacatca

SEQ ID NO: 5872394 - DNA, 25 bp, Homo sapien
aatggtatctaatcgaattaatttc

SEQ ID NO: 5872395 - DNA, 25 bp, Homo sapien
tcagttataagtcgatataaactta

SEQ ID NO: 5872396 - DNA, 25 bp, Homo sapien
gtatatcgaatatacattataacga

SEQ ID NO: 5872397 - DNA, 25 bp, Homo sapien
gtaatattatcacgcgattataata

SEQ ID NO: 5872398 - DNA, 25 bp, Homo sapien
tttataaagcgtgtactatacaatt

SEQ ID NO: 5872399 - DNA, 25 bp, Homo sapien
gttatattcgtgttataataggtta

SEQ ID NO: 5872400 - DNA, 25 bp, Homo sapien
taaatatcgcgtaataatatttacc

SEQ ID NO: 5872401 - DNA, 25 bp, Homo sapien
gataaatttagttcgaataatccta

SEQ ID NO: 5872402 - DNA, 25 bp, Homo sapien
aaaacttattcgtataatcacatga

SEQ ID NO: 5872403 - DNA, 25 bp, Homo sapien
attgaatcaacttacgattattaga

SEQ ID NO: 5872404 - DNA, 25 bp, Homo sapien
aattgatttcgtaattatgtggttt

SEQ ID NO: 5872405 - DNA, 25 bp, Homo sapien
tacaatgaaccgttataatcaattt

SEQ ID NO: 5872406 - DNA, 25 bp, Homo sapien
tattatattcgaacatcaaaacaag

SEQ ID NO: 5872407 - DNA, 25 bp, Homo sapien
ttttattagatgtcgtaaactaact

SEQ ID NO: 5872408 - DNA, 25 bp, Homo sapien
aattaattgtaatcgaataatacgc

SEQ ID NO: 5872409 - DNA, 25 bp, Homo sapien
caatctaacgaaattgattagttaa

SEQ ID NO: 5872410 - DNA, 25 bp, Homo sapien
ctacatacgattaattgttaacttt

SEQ ID NO: 5872411 - DNA, 25 bp, Homo sapien
gactatttacgacaattatagtata

SEQ ID NO: 5872412 - DNA, 25 bp, Homo sapien
caatgtaaatttcgatatacaatgt

SEQ ID NO: 5872413 - DNA, 25 bp, Homo sapien
taaaggtaattaatacgacataatg

SEQ ID NO: 5872414 - DNA, 25 bp, Homo sapien
gaatttaaaaatccgctattactaa

SEQ ID NO: 5872415 - DNA, 25 bp, Homo sapien
agaatgatacgactaattataagaa

SEQ ID NO: 5872416 - DNA, 25 bp, Homo sapien
tatttatacatcttatgcgtctata

SEQ ID NO: 5872417 - DNA, 25 bp, Homo sapien
tatgagaattttatgcgatttaaag

SEQ ID NO: 5872418 - DNA, 25 bp, Homo sapien
tcattactgaattatcgataagtaa

SEQ ID NO: 5872419 - DNA, 25 bp, Homo sapien
ctaattaataactattcgaagtaag

SEQ ID NO: 5872420 - DNA, 25 bp, Homo sapien
taacattattcgataaagatgatgt

SEQ ID NO: 5872421 - DNA, 25 bp, Homo sapien
atttaacttattagagatcgaacaa

SEQ ID NO: 5872422 - DNA, 25 bp, Homo sapien
tacgataacgctaactaattttaaa

SEQ ID NO: 5872423 - DNA, 25 bp, Homo sapien
ttaatcgtcgtttatatgtttatct

SEQ ID NO: 5872424 - DNA, 25 bp, Homo sapien
cttgtatcgtcgttaattaataaaa

SEQ ID NO: 5872425 - DNA, 25 bp, Homo sapien
tacaataaatcgttaatcataatgg

SEQ ID NO: 5872426 - DNA, 25 bp, Homo sapien
ctttagtcgcaaatataattgatta

SEQ ID NO: 5872427 - DNA, 25 bp, Homo sapien
attgctttaacgaattatgatatac

SEQ ID NO: 5872428 - DNA, 25 bp, Homo sapien
tatatatacatgtcgaattatcagt

SEQ ID NO: 5872429 - DNA, 25 bp, Homo sapien
tagatttatatcaactcacgtaata

SEQ ID NO: 5872430 - DNA, 25 bp, Homo sapien
gattcataatttatgtcgtatttgt

SEQ ID NO: 5872431 - DNA, 25 bp, Homo sapien
ttttcattaatccgcaaacttttat

SEQ ID NO: 5872432 - DNA, 25 bp, Homo sapien
ttcaagtaatttatatcgttttcag

SEQ ID NO: 5872433 - DNA, 25 bp, Homo sapien
tgattcgattcgtatttaatttgaa

SEQ ID NO: 5872434 - DNA, 25 bp, Homo sapien
gttttattgcgaattatatgttaag

SEQ ID NO: 5872435 - DNA, 25 bp, Homo sapien
tattattacgaatactaatcttctc

SEQ ID NO: 5872436 - DNA, 25 bp, Homo sapien
ttgattcaatacgttattcgatatt

SEQ ID NO: 5872437 - DNA, 25 bp, Homo sapien
aatggtcgttaaatctattacattt

SEQ ID NO: 5872438 - DNA, 25 bp, Homo sapien
cttcaatttaccgatattataaaac

SEQ ID NO: 5872439 - DNA, 25 bp, Homo sapien
taacattaattagtattacgtccta

SEQ ID NO: 5872440 - DNA, 25 bp, Homo sapien
cttgttaatacgttactataaaaca

SEQ ID NO: 5872441 - DNA, 25 bp, Homo sapien
tatgagctatattttcgaaaagtat

SEQ ID NO: 5872442 - DNA, 25 bp, Homo sapien
tggtatatagtaacgtattaaatgt

SEQ ID NO: 5872443 - DNA, 25 bp, Homo sapien
gaggattatatatcgcaatattatt

SEQ ID NO: 5872444 - DNA, 25 bp, Homo sapien
ttatgtaagaattataacgcttagt

SEQ ID NO: 5872445 - DNA, 25 bp, Homo sapien
tctacttatacgattgaaatacaat

SEQ ID NO: 5872446 - DNA, 25 bp, Homo sapien
tacttatgttatatcgtacaaagta

SEQ ID NO: 5872447 - DNA, 25 bp, Homo sapien
ctcactctaatcgataattaaaaaa

SEQ ID NO: 5872448 - DNA, 25 bp, Homo sapien
aaaatttagtaacaattcgacagta

SEQ ID NO: 5872449 - DNA, 25 bp, Homo sapien
ttagttagtttttcgattaagcaat

SEQ ID NO: 5872450 - DNA, 25 bp, Homo sapien
ttagataataacgcggatttattaa

SEQ ID NO: 5872451 - DNA, 25 bp, Homo sapien
actgataacgttaataattcatgta

SEQ ID NO: 5872452 - DNA, 25 bp, Homo sapien
acatttgacgcattataaattcttt

SEQ ID NO: 5872453 - DNA, 25 bp, Homo sapien
cactcaatgttatattatcgattaa

SEQ ID NO: 5872454 - DNA, 25 bp, Homo sapien
cacaaatcgtaatatataacactta

SEQ ID NO: 5872455 - DNA, 25 bp, Homo sapien
atcatcgtatatttttcgatgttta

SEQ ID NO: 5872456 - DNA, 25 bp, Homo sapien
ataactaatcaattattacgggata

SEQ ID NO: 5872457 - DNA, 25 bp, Homo sapien
tttactatttattgtcggattaaag

SEQ ID NO: 5872458 - DNA, 25 bp, Homo sapien
atgcattcgttaattataagaaaga

SEQ ID NO: 5872459 - DNA, 25 bp, Homo sapien
ttcgtttcgttaataggttatatta

SEQ ID NO: 5872460 - DNA, 25 bp, Homo sapien
cagttatatgtcgtttataacattt

SEQ ID NO: 5872461 - DNA, 25 bp, Homo sapien
tgcatcaaatatcgtaatataatca

SEQ ID NO: 5872462 - DNA, 25 bp, Homo sapien
ttgtgtatgtatactattcgttaat

SEQ ID NO: 5872463 - DNA, 25 bp, Homo sapien
aatagtaataacgaagttattccaa

SEQ ID NO: 5872464 - DNA, 25 bp, Homo sapien
tgatagattaatatcgatttgttca

SEQ ID NO: 5872465 - DNA, 25 bp, Homo sapien
tttaactaggtcgataatattttca

SEQ ID NO: 5872466 - DNA, 25 bp, Homo sapien
aatgattaatcaatcgtataaggat

SEQ ID NO: 5872467 - DNA, 25 bp, Homo sapien
tttagttattatttgcggaaattca

SEQ ID NO: 5872468 - DNA, 25 bp, Homo sapien
gtgttcgttaattatcatataatct

SEQ ID NO: 5872469 - DNA, 25 bp, Homo sapien
tatgacttcgatataatttgatttc

SEQ ID NO: 5872470 - DNA, 25 bp, Homo sapien
aattcattatatcgactaatttcga

SEQ ID NO: 5872471 - DNA, 25 bp, Homo sapien
tataaaagtcgtgatctaattttca

SEQ ID NO: 5872472 - DNA, 25 bp, Homo sapien
cacaagttattaaattacgacattt

SEQ ID NO: 5872473 - DNA, 25 bp, Homo sapien
gaataatatttcgttcactcattaa

SEQ ID NO: 5872474 - DNA, 25 bp, Homo sapien
acattattacgtataatgatcaact

SEQ ID NO: 5872475 - DNA, 25 bp, Homo sapien
tataatcgatctaagaatatcatct

SEQ ID NO: 5872476 - DNA, 25 bp, Homo sapien
ttatccaatataatttcgagaattc

SEQ ID NO: 5872477 - DNA, 25 bp, Homo sapien
aaaatatcaattattgcgctttaga

SEQ ID NO: 5872478 - DNA, 25 bp, Homo sapien
ttctgtcaattatacgaaataacaa

SEQ ID NO: 5872479 - DNA, 25 bp, Homo sapien
tcttttcgataataatactttgaga

SEQ ID NO: 5872480 - DNA, 25 bp, Homo sapien
ataaattatattaacgattccttcg

SEQ ID NO: 5872481 - DNA, 25 bp, Homo sapien
agtgttttcgaatatgttaataaca

SEQ ID NO: 5872482 - DNA, 25 bp, Homo sapien
gtttaacttcgtatagtaaatatga

SEQ ID NO: 5872483 - DNA, 25 bp, Homo sapien
tatttcttatatacgaatcaatgct

SEQ ID NO: 5872484 - DNA, 25 bp, Homo sapien
aaataattcgcatatacaatcaact

SEQ ID NO: 5872485 - DNA, 25 bp, Homo sapien
gacgttaaatcgttatcatattaat

SEQ ID NO: 5872486 - DNA, 25 bp, Homo sapien
caaagattactacgttaatcataat

SEQ ID NO: 5872487 - DNA, 25 bp, Homo sapien
tcaatatttacgttaatacaaaagc

SEQ ID NO: 5872488 - DNA, 25 bp, Homo sapien
gaagatatataatacgatagttttc

SEQ ID NO: 5872489 - DNA, 25 bp, Homo sapien
tggatagtctaatacgataattatt

SEQ ID NO: 5872490 - DNA, 25 bp, Homo sapien
atatataatgcgatacgtaattatc

SEQ ID NO: 5872491 - DNA, 25 bp, Homo sapien
agattttaatctgcgaattatcatt

SEQ ID NO: 5872492 - DNA, 25 bp, Homo sapien
accttacgaattatagtattgatat

SEQ ID NO: 5872493 - DNA, 25 bp, Homo sapien
agtactattacttattaacgaattg

SEQ ID NO: 5872494 - DNA, 25 bp, Homo sapien
aagtggtcgtataataaattaagaa

SEQ ID NO: 5872495 - DNA, 25 bp, Homo sapien
aaataatcttcgcttattatagatg

SEQ ID NO: 5872496 - DNA, 25 bp, Homo sapien
atacaataattatgcatcgcaatta

SEQ ID NO: 5872497 - DNA, 25 bp, Homo sapien
tttcccgtaaatttatcatatttct

SEQ ID NO: 5872498 - DNA, 25 bp, Homo sapien
attagttcgactatataacattagt

SEQ ID NO: 5872499 - DNA, 25 bp, Homo sapien
taacacaattaccttcgaatttaaa

SEQ ID NO: 5872500 - DNA, 25 bp, Homo sapien
tgcatttttacgatacgatatttta

SEQ ID NO: 5872501 - DNA, 25 bp, Homo sapien
ttaatcgaaccttatattgtatagt

SEQ ID NO: 5872502 - DNA, 25 bp, Homo sapien
agacagatactatcgaatattattt

SEQ ID NO: 5872503 - DNA, 25 bp, Homo sapien
gttcacgtaacatattagataaaat

SEQ ID NO: 5872504 - DNA, 25 bp, Homo sapien
gaaatcgacaatttttagtattgaa

SEQ ID NO: 5872505 - DNA, 25 bp, Homo sapien
ataaatactattctatcgatgtgaa

SEQ ID NO: 5872506 - DNA, 25 bp, Homo sapien
tctgaattcgctaatataattagaa

SEQ ID NO: 5872507 - DNA, 25 bp, Homo sapien
actacaatatatcgaatagtgtaat

SEQ ID NO: 5872508 - DNA, 25 bp, Homo sapien
aaatacgggataaatcaattttcta

SEQ ID NO: 5872509 - DNA, 25 bp, Homo sapien
taataataacgattatccattaggt

SEQ ID NO: 5872510 - DNA, 25 bp, Homo sapien
agttgataatttcggtttatatatg

SEQ ID NO: 5872511 - DNA, 25 bp, Homo sapien
actactaatctaataatcgtatgta

SEQ ID NO: 5872512 - DNA, 25 bp, Homo sapien
catattagattactcgaatacattt

SEQ ID NO: 5872513 - DNA, 25 bp, Homo sapien
aatgtattgaattacgttatgtgaa

SEQ ID NO: 5872514 - DNA, 25 bp, Homo sapien
ttgtataaatttactattcgagttg

SEQ ID NO: 5872515 - DNA, 25 bp, Homo sapien
aaataatcgaattataagtatccag

SEQ ID NO: 5872516 - DNA, 25 bp, Homo sapien
cataaacttcaataagtcgaattat

SEQ ID NO: 5872517 - DNA, 25 bp, Homo sapien
tcataataatttaagtacgctacaa

SEQ ID NO: 5872518 - DNA, 25 bp, Homo sapien
tgcaattgaataattgcgatttaat

SEQ ID NO: 5872519 - DNA, 25 bp, Homo sapien
gttatttaatttatcggttaattgc

SEQ ID NO: 5872520 - DNA, 25 bp, Homo sapien
tattaaagatcgttaattaggctta

SEQ ID NO: 5872521 - DNA, 25 bp, Homo sapien
tttaaaattagttagcgttatcgta

SEQ ID NO: 5872522 - DNA, 25 bp, Homo sapien
aatcgtatcgtaaaagattttcata

SEQ ID NO: 5872523 - DNA, 25 bp, Homo sapien
ttgttatttcgtataattgacagaa

SEQ ID NO: 5872524 - DNA, 25 bp, Homo sapien
tgttgtatacaaatcgattattcta

SEQ ID NO: 5872525 - DNA, 25 bp, Homo sapien
atctacgatttatactataacgaat

SEQ ID NO: 5872526 - DNA, 25 bp, Homo sapien
aaatgtaatagatttaacgaccatt

SEQ ID NO: 5872527 - DNA, 25 bp, Homo sapien
gatatatacgaacgtttttattaac

SEQ ID NO: 5872528 - DNA, 25 bp, Homo sapien
tcaaaactcgatataatctaagtaa

SEQ ID NO: 5872529 - DNA, 25 bp, Homo sapien
aataacgcgaaatataaattccaat

SEQ ID NO: 5872530 - DNA, 25 bp, Homo sapien
aaatttaatatcgtagatttcgcta

SEQ ID NO: 5872531 - DNA, 25 bp, Homo sapien
gtaaattaattacgatcctactata

SEQ ID NO: 5872532 - DNA, 25 bp, Homo sapien
atccttatacgattgattaatcatt

SEQ ID NO: 5872533 - DNA, 25 bp, Homo sapien
tgaagaacttatatcgttattctaa

SEQ ID NO: 5872534 - DNA, 25 bp, Homo sapien
aatcaataattattcgcgaagatat

SEQ ID NO: 5872535 - DNA, 25 bp, Homo sapien
gtgaatcgaaacgaatataaaaaaa

SEQ ID NO: 5872536 - DNA, 25 bp, Homo sapien
ctatattttttacgaaacatacatg

SEQ ID NO: 5872537 - DNA, 25 bp, Homo sapien
tgaattgtactaatcgtaaacaaaa

SEQ ID NO: 5872538 - DNA, 25 bp, Homo sapien
atatcaatactataattcgtaaggt

SEQ ID NO: 5872539 - DNA, 25 bp, Homo sapien
caattcgttaataagtaatagtact

SEQ ID NO: 5872540 - DNA, 25 bp, Homo sapien
gaaaactatcgtattatatatcttc

SEQ ID NO: 5872541 - DNA, 25 bp, Homo sapien
ttctataaaggtgttaatcgtattt

SEQ ID NO: 5872542 - DNA, 25 bp, Homo sapien
aaatgtattcgagtaatctaatatg

SEQ ID NO: 5872543 - DNA, 25 bp, Homo sapien
gcataatattaagttatcgtctaaa

SEQ ID NO: 5872544 - DNA, 25 bp, Homo sapien
tatgtagttaatagaattcgagtaa

SEQ ID NO: 5872545 - DNA, 25 bp, Homo sapien
aaatcgatagtaattcgctattatt

SEQ ID NO: 5872546 - DNA, 25 bp, Homo sapien
ttgcatatcgttttacagtatatat

SEQ ID NO: 5872547 - DNA, 25 bp, Homo sapien
atcgtttataagcgaaatagtattt

SEQ ID NO: 5872548 - DNA, 25 bp, Homo sapien
aatttaatcttcgatgataagtcaa

SEQ ID NO: 5872549 - DNA, 25 bp, Homo sapien
ttttttaattatcgattagagtgag

SEQ ID NO: 5872550 - DNA, 25 bp, Homo sapien
actgataattcgacatgtatatata

SEQ ID NO: 5872551 - DNA, 25 bp, Homo sapien
agtaataatatactatcgaacttct

SEQ ID NO: 5872552 - DNA, 25 bp, Homo sapien
ttttatatattgtcgagtactgtat

SEQ ID NO: 5872553 - DNA, 25 bp, Homo sapien
ttgtgattagaatatcgtaaattga

SEQ ID NO: 5872554 - DNA, 25 bp, Homo sapien
taaagtaaaaattctcgatcatttg

SEQ ID NO: 5872555 - DNA, 25 bp, Homo sapien
tttgataattaatcgaagtagaact

SEQ ID NO: 5872556 - DNA, 25 bp, Homo sapien
ctgaatcgatcgaaaaaattattta

SEQ ID NO: 5872557 - DNA, 25 bp, Homo sapien
attttgcggattagttataatagaa

SEQ ID NO: 5872558 - DNA, 25 bp, Homo sapien
agttatctacgataaagtaaacaat

SEQ ID NO: 5872559 - DNA, 25 bp, Homo sapien
taattgcgatgcataattattgtat

SEQ ID NO: 5872560 - DNA, 25 bp, Homo sapien
aatagtataactttcgcttgtatta

SEQ ID NO: 5872561 - DNA, 25 bp, Homo sapien
tgaagtataatcgttagctatatta

SEQ ID NO: 5872562 - DNA, 25 bp, Homo sapien
aaataaacgatcttatattatcgca

SEQ ID NO: 5872563 - DNA, 25 bp, Homo sapien
aaaatatatagcgaaataggtacat

SEQ ID NO: 5872564 - DNA, 25 bp, Homo sapien
aaattgattataacggttcattgta

SEQ ID NO: 5872565 - DNA, 25 bp, Homo sapien
tcttatatatagtgcgaattaacta

SEQ ID NO: 5872566 - DNA, 25 bp, Homo sapien
caaattatacttgcgaatatgattt

SEQ ID NO: 5872567 - DNA, 25 bp, Homo sapien
ttttgttgaacaattatccgtttat

SEQ ID NO: 5872568 - DNA, 25 bp, Homo sapien
taatgaagtattaaacaacggtaaa

SEQ ID NO: 5872569 - DNA, 25 bp, Homo sapien
tgttattaacatattcgaaaacact

SEQ ID NO: 5872570 - DNA, 25 bp, Homo sapien
ataaaagtttgcggattaatgaaaa

SEQ ID NO: 5872571 - DNA, 25 bp, Homo sapien
caatatcataaacgatctaagtaat

SEQ ID NO: 5872572 - DNA, 25 bp, Homo sapien
acatcatctttatcgaataatgtta

SEQ ID NO: 5872573 - DNA, 25 bp, Homo sapien
gtaatatttacgagtaatctctaaa

SEQ ID NO: 5872574 - DNA, 25 bp, Homo sapien
gttgataaatttacgatatctactt

SEQ ID NO: 5872575 - DNA, 25 bp, Homo sapien
attgtatttcaatcgtataagtaga

SEQ ID NO: 5872576 - DNA, 25 bp, Homo sapien
ttctaattatattagcgaattcaga

SEQ ID NO: 5872577 - DNA, 25 bp, Homo sapien
attacactattcgatatattgtagt

SEQ ID NO: 5872578 - DNA, 25 bp, Homo sapien
agattatatgataattaacgaacac

SEQ ID NO: 5872579 - DNA, 25 bp, Homo sapien
tattcacgattatacattaacttgt

SEQ ID NO: 5872580 - DNA, 25 bp, Homo sapien
tatttatacgatcgaaattaagtac

SEQ ID NO: 5872581 - DNA, 25 bp, Homo sapien
actttatttcgtattaattcggata

SEQ ID NO: 5872582 - DNA, 25 bp, Homo sapien
tagaaaattgatttatcccgtattt

SEQ ID NO: 5872583 - DNA, 25 bp, Homo sapien
acattgtatatcgaaatttacattg

SEQ ID NO: 5872584 - DNA, 25 bp, Homo sapien
acatttaatacgttactatatacca

SEQ ID NO: 5872585 - DNA, 25 bp, Homo sapien
tatagacgcataagatgtataaata

SEQ ID NO: 5872586 - DNA, 25 bp, Homo sapien
atcttatcgtaaattcgtttttgta

SEQ ID NO: 5872587 - DNA, 25 bp, Homo sapien
tatgaacttcgtatatgttcaaata

SEQ ID NO: 5872588 - DNA, 25 bp, Homo sapien
taaataacgatattaattcggctaa

SEQ ID NO: 5872589 - DNA, 25 bp, Homo sapien
ctaataataatccgttgttttatgt

SEQ ID NO: 5872590 - DNA, 25 bp, Homo sapien
cttcattaagcgaaatataatcttt

SEQ ID NO: 5872591 - DNA, 25 bp, Homo sapien
catttataataatgcgtatctactt

SEQ ID NO: 5872592 - DNA, 25 bp, Homo sapien
tacatgaattattaacgttatcagt

SEQ ID NO: 5872593 - DNA, 25 bp, Homo sapien
ttaaatcgtaaatccttataatgga

SEQ ID NO: 5872594 - DNA, 25 bp, Homo sapien
taatgatcgaattaaggatagtatt

SEQ ID NO: 5872595 - DNA, 25 bp, Homo sapien
attcacgtaataaaataacgaagat

SEQ ID NO: 5872596 - DNA, 25 bp, Homo sapien
attaacgcacttaataagttttatc

SEQ ID NO: 5872597 - DNA, 25 bp, Homo sapien
aaatagtttactaattcgtacatac

SEQ ID NO: 5872598 - DNA, 25 bp, Homo sapien
tatactataattgtcgtaaatagtc

SEQ ID NO: 5872599 - DNA, 25 bp, Homo sapien
ctaataattataaacgcgttatttc

SEQ ID NO: 5872600 - DNA, 25 bp, Homo sapien
tacataagacgtaatacttctttta

SEQ ID NO: 5872601 - DNA, 25 bp, Homo sapien
ataataattcgaataatagcatcac

SEQ ID NO: 5872602 - DNA, 25 bp, Homo sapien
aatatgtcgattagttaatacgtat

SEQ ID NO: 5872603 - DNA, 25 bp, Homo sapien
cttacttcgaatagttattaattag

SEQ ID NO: 5872604 - DNA, 25 bp, Homo sapien
tctaataatcgtaagttgattcaat

SEQ ID NO: 5872605 - DNA, 25 bp, Homo sapien
tttttataagaatcgattatgatcc

SEQ ID NO: 5872606 - DNA, 25 bp, Homo sapien
tctttcttataattaacgaatgcat

SEQ ID NO: 5872607 - DNA, 25 bp, Homo sapien
taactctacttcgcattaaattttt

SEQ ID NO: 5872608 - DNA, 25 bp, Homo sapien
ttcgtaataacgtacgatatataat

SEQ ID NO: 5872609 - DNA, 25 bp, Homo sapien
acaaatacgacataaattatgaatc

SEQ ID NO: 5872610 - DNA, 25 bp, Homo sapien
acctaatggataatcgttattatta

SEQ ID NO: 5872611 - DNA, 25 bp, Homo sapien
atttactcgtaatctaaataatcag

SEQ ID NO: 5872612 - DNA, 25 bp, Homo sapien
ttttaatcgtgatataggtatttga

SEQ ID NO: 5872613 - DNA, 25 bp, Homo sapien
gatcataatattcgttagattgtaa

SEQ ID NO: 5872614 - DNA, 25 bp, Homo sapien
tctgaattattatatagtcgtgaaa

SEQ ID NO: 5872615 - DNA, 25 bp, Homo sapien
aaagacttgtcgtaattataataag

SEQ ID NO: 5872616 - DNA, 25 bp, Homo sapien
tattatattcggttgttcaatacta

SEQ ID NO: 5872617 - DNA, 25 bp, Homo sapien
ttcttataattagtcgtatcattct

SEQ ID NO: 5872618 - DNA, 25 bp, Homo sapien
caactcgaatagtaaatttatacaa

SEQ ID NO: 5872619 - DNA, 25 bp, Homo sapien
tctcaaagtattattatcgaaaaga

SEQ ID NO: 5872620 - DNA, 25 bp, Homo sapien
tacatacgattattagattagtagt

SEQ ID NO: 5872621 - DNA, 25 bp, Homo sapien
aggttttaatcgtaatattgtattg

SEQ ID NO: 5872622 - DNA, 25 bp, Homo sapien
aacttatattcgacatgttagtttt

SEQ ID NO: 5872623 - DNA, 25 bp, Homo sapien
actaatgttatatagtcgaactaat

SEQ ID NO: 5872624 - DNA, 25 bp, Homo sapien
tgttaatacttaatcgtaataggta

SEQ ID NO: 5872625 - DNA, 25 bp, Homo sapien
ttaatcgataatataacattgagtg

SEQ ID NO: 5872626 - DNA, 25 bp, Homo sapien
attaatatgataacgatttaacgtc

SEQ ID NO: 5872627 - DNA, 25 bp, Homo sapien
tagcaactattaattcgctataaat

SEQ ID NO: 5872628 - DNA, 25 bp, Homo sapien
gataattacgtatcgcattatatat

SEQ ID NO: 5872629 - DNA, 25 bp, Homo sapien
gaatacaataatccgtattatacta

SEQ ID NO: 5872630 - DNA, 25 bp, Homo sapien
ttggaataacttcgttattactatt

SEQ ID NO: 5872631 - DNA, 25 bp, Homo sapien
caaacataacatactttacgtaatt

SEQ ID NO: 5872632 - DNA, 25 bp, Homo sapien
aattgttattaaatcgacgatttca

SEQ ID NO: 5872633 - DNA, 25 bp, Homo sapien
tgatgtggtattcgtaattaaattt

SEQ ID NO: 5872634 - DNA, 25 bp, Homo sapien
tacatcgtaagatatctattatgta

SEQ ID NO: 5872635 - DNA, 25 bp, Homo sapien
tgaatttccgcaaataataactaaa

SEQ ID NO: 5872636 - DNA, 25 bp, Homo sapien
ggaaataaacgatatactatcttat

SEQ ID NO: 5872637 - DNA, 25 bp, Homo sapien
aatggaatcggataatacattaata

SEQ ID NO: 5872638 - DNA, 25 bp, Homo sapien
taaaatgaattagtatcgatcaaac

SEQ ID NO: 5872639 - DNA, 25 bp, Homo sapien
gcttttgtattaacgtaaatattga

SEQ ID NO: 5872640 - DNA, 25 bp, Homo sapien
aaaggttcgaattaatatagcaaaa

SEQ ID NO: 5872641 - DNA, 25 bp, Homo sapien
aattgtatagtacacgctttataaa

SEQ ID NO: 5872642 - DNA, 25 bp, Homo sapien
tgaaaatattatcgacctagttaaa

SEQ ID NO: 5872643 - DNA, 25 bp, Homo sapien
agatgatattcttagatcgattata

SEQ ID NO: 5872644 - DNA, 25 bp, Homo sapien
agtaatttgttatcgagaatatttg

SEQ ID NO: 5872645 - DNA, 25 bp, Homo sapien
ataacatcggataatactaaatgtt

SEQ ID NO: 5872646 - DNA, 25 bp, Homo sapien
ttgctaatttcgattaaacatttca

SEQ ID NO: 5872647 - DNA, 25 bp, Homo sapien
atgtttcgtaaaaactagtatacta

SEQ ID NO: 5872648 - DNA, 25 bp, Homo sapien
caaaaatttatcgttcgattaacat

SEQ ID NO: 5872649 - DNA, 25 bp, Homo sapien
ttcttgaattaacgcttaaaatgta

SEQ ID NO: 5872650 - DNA, 25 bp, Homo sapien
ttctataacgacaataaattctatg

SEQ ID NO: 5872651 - DNA, 25 bp, Homo sapien
caaatcgaatttttaatgacctatt

SEQ ID NO: 5872652 - DNA, 25 bp, Homo sapien
ttcaaattaaatacgaatcgaatca

SEQ ID NO: 5872653 - DNA, 25 bp, Homo sapien
ttttatcgtacaatacgaattattg

SEQ ID NO: 5872654 - DNA, 25 bp, Homo sapien
atgcaatcgattacaaaatcataat

SEQ ID NO: 5872655 - DNA, 25 bp, Homo sapien
ataattcaattgttatagcgtgtta

SEQ ID NO: 5872656 - DNA, 25 bp, Homo sapien
tatgaattatataacgatgtggata

SEQ ID NO: 5872657 - DNA, 25 bp, Homo sapien
gtatatcataattcgttaaagcaat

SEQ ID NO: 5872658 - DNA, 25 bp, Homo sapien
gtctttaaattacaagcgaaatata

SEQ ID NO: 5872659 - DNA, 25 bp, Homo sapien
tcatatttactatacgaagttaaac

SEQ ID NO: 5872660 - DNA, 25 bp, Homo sapien
aatagtatataattcgattcttgtc

SEQ ID NO: 5872661 - DNA, 25 bp, Homo sapien
atgttcaatacatcgaatttcaaat

SEQ ID NO: 5872662 - DNA, 25 bp, Homo sapien
gtattattcgctatagttatctaat

SEQ ID NO: 5872663 - DNA, 25 bp, Homo sapien
ctgattaatagaacgaattttctat

SEQ ID NO: 5872664 - DNA, 25 bp, Homo sapien
ctaattgttaacgccaatttatatt

SEQ ID NO: 5872665 - DNA, 25 bp, Homo sapien
aatgaaattcgattaatctataagc

SEQ ID NO: 5872666 - DNA, 25 bp, Homo sapien
ctagttaattataatcggattagat

SEQ ID NO: 5872667 - DNA, 25 bp, Homo sapien
gtaacttatattaatgtcgatttca

SEQ ID NO: 5872668 - DNA, 25 bp, Homo sapien
aaaatcgtctaaataagtatagaga

SEQ ID NO: 5872669 - DNA, 25 bp, Homo sapien
tgatataatatacgattacaggata

SEQ ID NO: 5872670 - DNA, 25 bp, Homo sapien
actttgacaaatttacgtcataaat

SEQ ID NO: 5872671 - DNA, 25 bp, Homo sapien
aagatacatatatctaaccgtttaa

SEQ ID NO: 5872672 - DNA, 25 bp, Homo sapien
tattgccctatacgattatatttat

SEQ ID NO: 5872673 - DNA, 25 bp, Homo sapien
ataattcgacttattgaagtttatg

SEQ ID NO: 5872674 - DNA, 25 bp, Homo sapien
tatattcgttatattatgatctctg

SEQ ID NO: 5872675 - DNA, 25 bp, Homo sapien
aataatattgcgatatataatcctc

SEQ ID NO: 5872676 - DNA, 25 bp, Homo sapien
ttttctatgtcgattaataacaaag

SEQ ID NO: 5872677 - DNA, 25 bp, Homo sapien
gataacgtattattcgaattaatca

SEQ ID NO: 5872678 - DNA, 25 bp, Homo sapien
atttatttcgattaattagtcacct

SEQ ID NO: 5872679 - DNA, 25 bp, Homo sapien
ttacattacctaatataacgcaata

SEQ ID NO: 5872680 - DNA, 25 bp, Homo sapien
ttcacatcgatagaatagtatttat

SEQ ID NO: 5872681 - DNA, 25 bp, Homo sapien
ttattcttattatacgaattcggta

SEQ ID NO: 5872682 - DNA, 25 bp, Homo sapien
ttttattaattaacgacgatacaag

SEQ ID NO: 5872683 - DNA, 25 bp, Homo sapien
atttaaaatcgtccaatctataact

SEQ ID NO: 5872684 - DNA, 25 bp, Homo sapien
ccagatcgactatttaatataaata

SEQ ID NO: 5872685 - DNA, 25 bp, Homo sapien
ttattcttataaacgaatagcacat

SEQ ID NO: 5872686 - DNA, 25 bp, Homo sapien
taacatatatagttcgagcttattt

SEQ ID NO: 5872687 - DNA, 25 bp, Homo sapien
ttaactaatcaatttcgttagattg

SEQ ID NO: 5872688 - DNA, 25 bp, Homo sapien
tcatgtgattatacgaataagtttt

SEQ ID NO: 5872689 - DNA, 25 bp, Homo sapien
ttttctgttcgatagaattaattga

SEQ ID NO: 5872690 - DNA, 25 bp, Homo sapien
tcaattataatcgtcgtaatctaat

SEQ ID NO: 5872691 - DNA, 25 bp, Homo sapien
taatataacctattaacgaaacgaa

SEQ ID NO: 5872692 - DNA, 25 bp, Homo sapien
cattatgtcgtattaattaccttta

SEQ ID NO: 5872693 - DNA, 25 bp, Homo sapien
attaacgaatagtatacatacacaa

SEQ ID NO: 5872694 - DNA, 25 bp, Homo sapien
aaacatcgtatcaatttaatccaat

SEQ ID NO: 5872695 - DNA, 25 bp, Homo sapien
atcagattagttatcggattatttt

SEQ ID NO: 5872696 - DNA, 25 bp, Homo sapien
gcgtattattcgattacaattaatt

SEQ ID NO: 5872697 - DNA, 25 bp, Homo sapien
tggtttcgcgtataatatattttta

SEQ ID NO: 5872698 - DNA, 25 bp, Homo sapien
atcgataagatgcgaaattaataat

SEQ ID NO: 5872699 - DNA, 25 bp, Homo sapien
agttatattcgatttactaaagtag

SEQ ID NO: 5872700 - DNA, 25 bp, Homo sapien
agaaaaaatgcgacttataaaagta

SEQ ID NO: 5872701 - DNA, 25 bp, Homo sapien
ctaaagacatattttttcgaagaaa

SEQ ID NO: 5872702 - DNA, 25 bp, Homo sapien
aatgaatctaagttcgaaattcaat

SEQ ID NO: 5872703 - DNA, 25 bp, Homo sapien
tctaaagcgcaataattgatatttt

SEQ ID NO: 5872704 - DNA, 25 bp, Homo sapien
aagtatgcgatataagatctatttt

SEQ ID NO: 5872705 - DNA, 25 bp, Homo sapien
aaagaatttataatgcgtcaaatgt

SEQ ID NO: 5872706 - DNA, 25 bp, Homo sapien
ctgtgtcgataatttagaataatta

SEQ ID NO: 5872707 - DNA, 25 bp, Homo sapien
aaatgtcgtaatttaataacttgtg

SEQ ID NO: 5872708 - DNA, 25 bp, Homo sapien
caatagattcgatattaataacttg

SEQ ID NO: 5872709 - DNA, 25 bp, Homo sapien
cgaaatattcgattaaaatgctata

SEQ ID NO: 5872710 - DNA, 25 bp, Homo sapien
ataaattgtatcgtactgataaaac

SEQ ID NO: 5872711 - DNA, 25 bp, Homo sapien
attgaaaacgaattacgtaatcaaa

SEQ ID NO: 5872712 - DNA, 25 bp, Homo sapien
tttcgcgattatcatattaaaatct

SEQ ID NO: 5872713 - DNA, 25 bp, Homo sapien
aatgataattcgcagattaaaatct

SEQ ID NO: 5872714 - DNA, 25 bp, Homo sapien
aacagatttaaatcgttctaatttc

SEQ ID NO: 5872715 - DNA, 25 bp, Homo sapien
aatctttaaattagcgttattagga

SEQ ID NO: 5872716 - DNA, 25 bp, Homo sapien
gatttatattgatctcgttattaca

SEQ ID NO: 5872717 - DNA, 25 bp, Homo sapien
gaaaatatggcgaattattaaatag

SEQ ID NO: 5872718 - DNA, 25 bp, Homo sapien
aaatcccgaattatatgaacattat

SEQ ID NO: 5872719 - DNA, 25 bp, Homo sapien
agattttaataatatatcgccactt

SEQ ID NO: 5872720 - DNA, 25 bp, Homo sapien
tattttcttcgtataaattcaacgt

SEQ ID NO: 5872721 - DNA, 25 bp, Homo sapien
tttagataatagttccgatattaac

SEQ ID NO: 5872722 - DNA, 25 bp, Homo sapien
tgttttatagtaacgtattaacaag

SEQ ID NO: 5872723 - DNA, 25 bp, Homo sapien
cgaaggaatcgttaatataatttat

SEQ ID NO: 5872724 - DNA, 25 bp, Homo sapien
aggattattgaatacgaaacaaata

SEQ ID NO: 5872725 - DNA, 25 bp, Homo sapien
agctacgtaatcaattataatatca

SEQ ID NO: 5872726 - DNA, 25 bp, Homo sapien
ttggtaatatcgtaatctaaactat

SEQ ID NO: 5872727 - DNA, 25 bp, Homo sapien
taaaacgatgattaatcatacttgt

SEQ ID NO: 5872728 - DNA, 25 bp, Homo sapien
aaataatgttcgatttaatagtacc

SEQ ID NO: 5872729 - DNA, 25 bp, Homo sapien
cttaacatataattcgcaataaaac

SEQ ID NO: 5872730 - DNA, 25 bp, Homo sapien
ctgaaaatttattagtagcgaaata

SEQ ID NO: 5872731 - DNA, 25 bp, Homo sapien
gtaaaataaaagatcgtcatgttta

SEQ ID NO: 5872732 - DNA, 25 bp, Homo sapien
aaagttattgtcgaaattgtcatta

SEQ ID NO: 5872733 - DNA, 25 bp, Homo sapien
atattataccgatcataaaccaaaa

SEQ ID NO: 5872734 - DNA, 25 bp, Homo sapien
agactattatcgttaatctaatact

SEQ ID NO: 5872735 - DNA, 25 bp, Homo sapien
ttctctatatagatcgttatattct

SEQ ID NO: 5872736 - DNA, 25 bp, Homo sapien
gactatattagttttcgaaaatctt

SEQ ID NO: 5872737 - DNA, 25 bp, Homo sapien
atattttttataatacgtcgattgg

SEQ ID NO: 5872738 - DNA, 25 bp, Homo sapien
aataaggcgtaataatgttaaaaca

SEQ ID NO: 5872739 - DNA, 25 bp, Homo sapien
acagttattaaatagcgtctttaaa

SEQ ID NO: 5872740 - DNA, 25 bp, Homo sapien
tgtaacaattgaatgtacgattttt

SEQ ID NO: 5872741 - DNA, 25 bp, Homo sapien
ttaattattattactaccgatgcta

SEQ ID NO: 5872742 - DNA, 25 bp, Homo sapien
taaaatatcgtatcgtaaaaatgca

SEQ ID NO: 5872743 - DNA, 25 bp, Homo sapien
tgtaattagtttattaaacgtctct

SEQ ID NO: 5872744 - DNA, 25 bp, Homo sapien
taatttacgtttcgaattaacatca

SEQ ID NO: 5872745 - DNA, 25 bp, Homo sapien
taaacatcgaaaaatatacgatgat

SEQ ID NO: 5872746 - DNA, 25 bp, Homo sapien
ttatagttagaactacgataaatca

SEQ ID NO: 5872747 - DNA, 25 bp, Homo sapien
taatagtcgatttatgtatatttgg

SEQ ID NO: 5872748 - DNA, 25 bp, Homo sapien
tttatgtaatcaattactcggtaat

SEQ ID NO: 5872749 - DNA, 25 bp, Homo sapien
ttataatattattacgcttgatgag

SEQ ID NO: 5872750 - DNA, 25 bp, Homo sapien
gaagtttcgatataatgtaacatta

SEQ ID NO: 5872751 - DNA, 25 bp, Homo sapien
taggacgtaatactaattaatgtta

SEQ ID NO: 5872752 - DNA, 25 bp, Homo sapien
actttgtttcgatcataagtattat

SEQ ID NO: 5872753 - DNA, 25 bp, Homo sapien
tatcttatattcaattcgaaacatc

SEQ ID NO: 5872754 - DNA, 25 bp, Homo sapien
gttttataatatcggtaaattgaag

SEQ ID NO: 5872755 - DNA, 25 bp, Homo sapien
aattattaatttcgtaatcgtcaag

SEQ ID NO: 5872756 - DNA, 25 bp, Homo sapien
aagaatatcgtgctattatatacaa

SEQ ID NO: 5872757 - DNA, 25 bp, Homo sapien
ttcaataatttatcgtaacttgtag

SEQ ID NO: 5872758 - DNA, 25 bp, Homo sapien
aaagttaacaattaatcgtatgtag

SEQ ID NO: 5872759 - DNA, 25 bp, Homo sapien
atcttttatattgcgacaatcaata

SEQ ID NO: 5872760 - DNA, 25 bp, Homo sapien
aactgacttattacgaattatcata

SEQ ID NO: 5872761 - DNA, 25 bp, Homo sapien
aaacgcgcaatttagtaataataat

SEQ ID NO: 5872762 - DNA, 25 bp, Homo sapien
tactgtcgaattgttactaaatttt

SEQ ID NO: 5872763 - DNA, 25 bp, Homo sapien
tactttgtacgatataacataagta

SEQ ID NO: 5872764 - DNA, 25 bp, Homo sapien
ttcaatactaaaaattgtcgatttc

SEQ ID NO: 5872765 - DNA, 25 bp, Homo sapien
actatacaatataaggttcgattaa

SEQ ID NO: 5872766 - DNA, 25 bp, Homo sapien
ttaatgagtgaacgaaatattattc

SEQ ID NO: 5872767 - DNA, 25 bp, Homo sapien
ttggtcgattaatatctgattttta

SEQ ID NO: 5872768 - DNA, 25 bp, Homo sapien
agataaacatataaacgacgattaa

SEQ ID NO: 5872769 - DNA, 25 bp, Homo sapien
ataggtaactatttcgtataatctt

SEQ ID NO: 5872770 - DNA, 25 bp, Homo sapien
attctacgttatatcgttatcaatt

SEQ ID NO: 5872771 - DNA, 25 bp, Homo sapien
ctgaaaacgatataaattacttgaa

SEQ ID NO: 5872772 - DNA, 25 bp, Homo sapien
tgattatattatgcgatatcaatct

SEQ ID NO: 5872773 - DNA, 25 bp, Homo sapien
taagtttatatcgacttataactga

SEQ ID NO: 5872774 - DNA, 25 bp, Homo sapien
atacgtaacgcgattatataatttt

SEQ ID NO: 5872775 - DNA, 25 bp, Homo sapien
aattcttctatattaaacgattgtg

SEQ ID NO: 5872776 - DNA, 25 bp, Homo sapien
atatgatttatgttcgacgaaaata

SEQ ID NO: 5872777 - DNA, 25 bp, Homo sapien
aacagttattataatacgtcatagt

SEQ ID NO: 5872778 - DNA, 25 bp, Homo sapien
ctatatcgaattaatacgaaaacta

SEQ ID NO: 5872779 - DNA, 25 bp, Homo sapien
atacttttcgaaaatatagctcata

SEQ ID NO: 5872780 - DNA, 25 bp, Homo sapien
agttgatcattatacgtaataatgt

SEQ ID NO: 5872781 - DNA, 25 bp, Homo sapien
aacaaaaacgcgattaataatgtta

SEQ ID NO: 5872782 - DNA, 25 bp, Homo sapien
ttacttatcgataattcagtaatga

SEQ ID NO: 5872783 - DNA, 25 bp, Homo sapien
aagaaaatactaattcgtactaatc

SEQ ID NO: 5872784 - DNA, 25 bp, Homo sapien
taatcaattatatttgcgactaaag

SEQ ID NO: 5872785 - DNA, 25 bp, Homo sapien
agattacttatacgtagtactttat

SEQ ID NO: 5872786 - DNA, 25 bp, Homo sapien
aaaccacataattacgaaatcaatt

SEQ ID NO: 5872787 - DNA, 25 bp, Homo sapien
agtcattaagttcgcaaattattaa

SEQ ID NO: 5872788 - DNA, 25 bp, Homo sapien
ttgtattatgtcgatattatttcct

SEQ ID NO: 5872789 - DNA, 25 bp, Homo sapien
ctttaaatcgcataaaattctcata

SEQ ID NO: 5872790 - DNA, 25 bp, Homo sapien
ttttgtaatttattcgttcgtcata

SEQ ID NO: 5872791 - DNA, 25 bp, Homo sapien
ttaaaaagctaatgcgtaattttgt

SEQ ID NO: 5872792 - DNA, 25 bp, Homo sapien
tttttatcatattatcgaattcgct

SEQ ID NO: 5872793 - DNA, 25 bp, Homo sapien
cctaggtttcgataatattatataa

SEQ ID NO: 5872794 - DNA, 25 bp, Homo sapien
accgacgataatataagttattatt

SEQ ID NO: 5872795 - DNA, 25 bp, Homo sapien
agactcgtatatctattagtaatta

SEQ ID NO: 5872796 - DNA, 25 bp, Homo sapien
tgaaaattagatcacgacttttata

SEQ ID NO: 5872797 - DNA, 25 bp, Homo sapien
atgaatatcattcgataacataact

SEQ ID NO: 5872798 - DNA, 25 bp, Homo sapien
ttaatatcgaatagcgatattattc

SEQ ID NO: 5872799 - DNA, 25 bp, Homo sapien
tttgttacgtacgaatattaatgat

SEQ ID NO: 5872800 - DNA, 25 bp, Homo sapien
cttgttttgatgttcgaatataata

SEQ ID NO: 5872801 - DNA, 25 bp, Homo sapien
tgattaattaacttatcgcacttaa

SEQ ID NO: 5872802 - DNA, 25 bp, Homo sapien
aaatgttataaacgacatataactg

SEQ ID NO: 5872803 - DNA, 25 bp, Homo sapien
caaattatcgaaccattataaattc

SEQ ID NO: 5872804 - DNA, 25 bp, Homo sapien
ttaaatattacgacgttaatatagg

SEQ ID NO: 5872805 - DNA, 25 bp, Homo sapien
taattaatattaaatagtcggtgtc

SEQ ID NO: 5872806 - DNA, 25 bp, Homo sapien
ttcttaatttattatacgaccactt

SEQ ID NO: 5872807 - DNA, 25 bp, Homo sapien
ttgatcataacgcgtaatttaataa

SEQ ID NO: 5872808 - DNA, 25 bp, Homo sapien
gaaatcaaattatatcgaagtcata

SEQ ID NO: 5872809 - DNA, 25 bp, Homo sapien
ttgttcgatctctaataagttaaat

SEQ ID NO: 5872810 - DNA, 25 bp, Homo sapien
agcattgattcgtatataagaaata

SEQ ID NO: 5872811 - DNA, 25 bp, Homo sapien
aacattattataatcgtacagtact

SEQ ID NO: 5872812 - DNA, 25 bp, Homo sapien
ataacatttcgcaatctatatttag

SEQ ID NO: 5872813 - DNA, 25 bp, Homo sapien
atttcatcaattcgtgataatttag

SEQ ID NO: 5872814 - DNA, 25 bp, Homo sapien
caaatgcggtaatattaattgaaat

SEQ ID NO: 5872815 - DNA, 25 bp, Homo sapien
gtatttaactaataagtcgttaaca

SEQ ID NO: 5872816 - DNA, 25 bp, Homo sapien
ttatgctatcgagtattatagtata

SEQ ID NO: 5872817 - DNA, 25 bp, Homo sapien
catctttattataagatcgaatagt

SEQ ID NO: 5872818 - DNA, 25 bp, Homo sapien
cagttatagtataacgctaaaataa

SEQ ID NO: 5872819 - DNA, 25 bp, Homo sapien
ggaataatcgaaaattattgtgtta

SEQ ID NO: 5872820 - DNA, 25 bp, Homo sapien
tagcttagtatcgtaataatattgt

SEQ ID NO: 5872821 - DNA, 25 bp, Homo sapien
tcgaaattagtcgatataatgaatt

SEQ ID NO: 5872822 - DNA, 25 bp, Homo sapien
ttatattaaactatatatcgcgcat

SEQ ID NO: 5872823 - DNA, 25 bp, Homo sapien
atatatacgaaatagattatctggt

SEQ ID NO: 5872824 - DNA, 25 bp, Homo sapien
aaatgaatattaatttacgcgttga

SEQ ID NO: 5872825 - DNA, 25 bp, Homo sapien
tattccgaaataatatactacctta

SEQ ID NO: 5872826 - DNA, 25 bp, Homo sapien
tataggatgcgttactttaaattaa

SEQ ID NO: 5872827 - DNA, 25 bp, Homo sapien
cttagtattatatcgataacattac

SEQ ID NO: 5872828 - DNA, 25 bp, Homo sapien
tatcccgtaataattgattagttat

SEQ ID NO: 5872829 - DNA, 25 bp, Homo sapien
gtaagaatttcgtaatcaatgtatt

SEQ ID NO: 5872830 - DNA, 25 bp, Homo sapien
attatgattaacgtagtaatctttg

SEQ ID NO: 5872831 - DNA, 25 bp, Homo sapien
ataatgtttcattagttacgaaagt

SEQ ID NO: 5872832 - DNA, 25 bp, Homo sapien
ttagtaatagcggatttttaaattc

SEQ ID NO: 5872833 - DNA, 25 bp, Homo sapien
tattacgtgagttgatataaatcta

SEQ ID NO: 5872834 - DNA, 25 bp, Homo sapien
ccattatgattaacgatttattgta

SEQ ID NO: 5872835 - DNA, 25 bp, Homo sapien
attcgcgattatctataatagttta

SEQ ID NO: 5872836 - DNA, 25 bp, Homo sapien
actaagcgttataattcttacataa

SEQ ID NO: 5872837 - DNA, 25 bp, Homo sapien
gaatacgataattatgtatcttcaa

SEQ ID NO: 5872838 - DNA, 25 bp, Homo sapien
acatctaatttatcgtgattacaat

SEQ ID NO: 5872839 - DNA, 25 bp, Homo sapien
ctatttaactatcgtataaaggaat

SEQ ID NO: 5872840 - DNA, 25 bp, Homo sapien
attgtgtttaatgtcgtttcattta

SEQ ID NO: 5872841 - DNA, 25 bp, Homo sapien
agttagtttacgacatctaataaaa

SEQ ID NO: 5872842 - DNA, 25 bp, Homo sapien
atagatcttaacaatgtacgaaaat

SEQ ID NO: 5872843 - DNA, 25 bp, Homo sapien
cctcatatcgataatttgataataa

SEQ ID NO: 5872844 - DNA, 25 bp, Homo sapien
aaaaattatagtacgataagtagag

SEQ ID NO: 5872845 - DNA, 25 bp, Homo sapien
tgaacaaatcgatattaatctatca

SEQ ID NO: 5872846 - DNA, 25 bp, Homo sapien
attatatagtttccgaaatactatg

SEQ ID NO: 5872847 - DNA, 25 bp, Homo sapien
gttattaataaatctgacgaagtta

SEQ ID NO: 5872848 - DNA, 25 bp, Homo sapien
tatttgtacgattgaatataaagac

SEQ ID NO: 5872849 - DNA, 25 bp, Homo sapien
gaaaacgatattacgataattatca

SEQ ID NO: 5872850 - DNA, 25 bp, Homo sapien
aaataatattcgatagtatctgtct

SEQ ID NO: 5872851 - DNA, 25 bp, Homo sapien
ggtaaatattattacgcgatattta

SEQ ID NO: 5872852 - DNA, 25 bp, Homo sapien
tacttgcattatatatcgatattac

SEQ ID NO: 5872853 - DNA, 25 bp, Homo sapien
tgctagattaattgtttacgatatt

SEQ ID NO: 5872854 - DNA, 25 bp, Homo sapien
tttgtgaacttatcgtaaacattta

SEQ ID NO: 5872855 - DNA, 25 bp, Homo sapien
cactgattaaattgatacgattata

SEQ ID NO: 5872856 - DNA, 25 bp, Homo sapien
ttagttgtatatagttcgattcttt

SEQ ID NO: 5872857 - DNA, 25 bp, Homo sapien
taagtgttatatattacgatttgtg

SEQ ID NO: 5872858 - DNA, 25 bp, Homo sapien
agatatagcgtattgaattaactat

SEQ ID NO: 5872859 - DNA, 25 bp, Homo sapien
ttaataaatccgcgttattatctaa

SEQ ID NO: 5872860 - DNA, 25 bp, Homo sapien
ttcgttataacttatcgtaaactaa

SEQ ID NO: 5872861 - DNA, 25 bp, Homo sapien
tattataatcgcgtgataatattac

SEQ ID NO: 5872862 - DNA, 25 bp, Homo sapien
tattgcgctattaattaattaagtg

SEQ ID NO: 5872863 - DNA, 25 bp, Homo sapien
attgcttaatcgaaaaactaactaa

SEQ ID NO: 5872864 - DNA, 25 bp, Homo sapien
tatgtaattaattacgattctaacc

SEQ ID NO: 5872865 - DNA, 25 bp, Homo sapien
gtttattccaacgacaatatataaa

SEQ ID NO: 5872866 - DNA, 25 bp, Homo sapien
aaaagcgaattaatacgtattgaaa

SEQ ID NO: 5872867 - DNA, 25 bp, Homo sapien
tacacatattatgattttcgtttac

SEQ ID NO: 5872868 - DNA, 25 bp, Homo sapien
gacttctatatttcgattttcaaaa

SEQ ID NO: 5872869 - DNA, 25 bp, Homo sapien
atactaatagtatataatcgaacgt

SEQ ID NO: 5872870 - DNA, 25 bp, Homo sapien
ttcttaatgattatcgcatatgttt

SEQ ID NO: 5872871 - DNA, 25 bp, Homo sapien
aattaacttattaacgctatgcata

SEQ ID NO: 5872872 - DNA, 25 bp, Homo sapien
taggattattcgaactaaatttatc

SEQ ID NO: 5872873 - DNA, 25 bp, Homo sapien
tcgttataatgtatattcgatatac

SEQ ID NO: 5872874 - DNA, 25 bp, Homo sapien
taacctattataacacgaatataac

SEQ ID NO: 5872875 - DNA, 25 bp, Homo sapien
acatccgttatataatcgtaaatta

SEQ ID NO: 5872876 - DNA, 25 bp, Homo sapien
gactataatatgtcgtttataatac

SEQ ID NO: 5872877 - DNA, 25 bp, Homo sapien
aaaaatgacgtaaatctctatgata

SEQ ID NO: 5872878 - DNA, 25 bp, Homo sapien
tacaattcgactataataattacac

SEQ ID NO: 5872879 - DNA, 25 bp, Homo sapien
tataataggatcgttaaattaacgt

SEQ ID NO: 5872880 - DNA, 25 bp, Homo sapien
ttatacaattttatcgtaacgacat

SEQ ID NO: 5872881 - DNA, 25 bp, Homo sapien
gataaaatcgatataatgttaacct

SEQ ID NO: 5872882 - DNA, 25 bp, Homo sapien
tgtataggattatccgatttaaaat

SEQ ID NO: 5872883 - DNA, 25 bp, Homo sapien
cgatatattattcgataagatcaat

SEQ ID NO: 5872884 - DNA, 25 bp, Homo sapien
taacagcgataattagtaatgtata

SEQ ID NO: 5872885 - DNA, 25 bp, Homo sapien
gaagtaaaattacgatacgatatta

SEQ ID NO: 5872886 - DNA, 25 bp, Homo sapien
gataacggtaacgatataattttat

SEQ ID NO: 5872887 - DNA, 25 bp, Homo sapien
ataagtattcgatcgaattttattc

SEQ ID NO: 5872888 - DNA, 25 bp, Homo sapien
taatgcgttatagtatgttttttct

SEQ ID NO: 5872889 - DNA, 25 bp, Homo sapien
gagaagattagtattcgtaataata

SEQ ID NO: 5872890 - DNA, 25 bp, Homo sapien
ttcacataacgtaattcaatacatt

SEQ ID NO: 5872891 - DNA, 25 bp, Homo sapien
attattaacttgcgtataagtgtta

SEQ ID NO: 5872892 - DNA, 25 bp, Homo sapien
catatataaaccgaaattatcaact

SEQ ID NO: 5872893 - DNA, 25 bp, Homo sapien
attagtattaataaccgatttgagt

SEQ ID NO: 5872894 - DNA, 25 bp, Homo sapien
attttatctaatatgttacgtgaac

SEQ ID NO: 5872895 - DNA, 25 bp, Homo sapien
attgccgttaacgtaaatatattta

SEQ ID NO: 5872896 - DNA, 25 bp, Homo sapien
ataatattatccgatagctagtata

SEQ ID NO: 5872897 - DNA, 25 bp, Homo sapien
cgttattcgatagtatattaatgat

SEQ ID NO: 5872898 - DNA, 25 bp, Homo sapien
gtttatatcgctaatcatatacttt

SEQ ID NO: 5872899 - DNA, 25 bp, Homo sapien
agacttatacgataaaaatcagatt

SEQ ID NO: 5872900 - DNA, 25 bp, Homo sapien
actaaataattttgcgaatagatca

SEQ ID NO: 5872901 - DNA, 25 bp, Homo sapien
tttaaattcgaaggtaattgtgtta

SEQ ID NO: 5872902 - DNA, 25 bp, Homo sapien
ccatttacgtaaatcgaaatattta

SEQ ID NO: 5872903 - DNA, 25 bp, Homo sapien
tgattatattacgatatttgatgca

SEQ ID NO: 5872904 - DNA, 25 bp, Homo sapien
ttgaataacgataaatcgtaacaat

SEQ ID NO: 5872905 - DNA, 25 bp, Homo sapien
ttttcttattaatcgacatagatag

SEQ ID NO: 5872906 - DNA, 25 bp, Homo sapien
tatcttaaatacgtatcgatataga

SEQ ID NO: 5872907 - DNA, 25 bp, Homo sapien
aatatcgaataacgtattgaatcaa

SEQ ID NO: 5872908 - DNA, 25 bp, Homo sapien
aaagattttaggacgaattatatga

SEQ ID NO: 5872909 - DNA, 25 bp, Homo sapien
gtgtatagtataattccgtattaaa

SEQ ID NO: 5872910 - DNA, 25 bp, Homo sapien
ttatgttacgtaattgattatcaac

SEQ ID NO: 5872911 - DNA, 25 bp, Homo sapien
atcataatcgttagttagtcaaatt

SEQ ID NO: 5872912 - DNA, 25 bp, Homo sapien
gtatgataacgattaaagtttctaa

SEQ ID NO: 5872913 - DNA, 25 bp, Homo sapien
aataattatcgtattagactatcca

SEQ ID NO: 5872914 - DNA, 25 bp, Homo sapien
attaaagtatacgaaggatattgaa

SEQ ID NO: 5872915 - DNA, 25 bp, Homo sapien
tgtaaagaataataaccgtactatt

SEQ ID NO: 5872916 - DNA, 25 bp, Homo sapien
aaatcttcgatctaagtataaaagt

SEQ ID NO: 5872917 - DNA, 25 bp, Homo sapien
gaaattagattacgaaataatgaca

SEQ ID NO: 5872918 - DNA, 25 bp, Homo sapien
atcatcgaataaatttcgaattatc

SEQ ID NO: 5872919 - DNA, 25 bp, Homo sapien
ataaacaataaatttgcgatttacg

SEQ ID NO: 5872920 - DNA, 25 bp, Homo sapien
ctggatacttataattcgattattt

SEQ ID NO: 5872921 - DNA, 25 bp, Homo sapien
tcatatatgatacgattaagtgtaa

SEQ ID NO: 5872922 - DNA, 25 bp, Homo sapien
catctataataagcgaagattattt

SEQ ID NO: 5872923 - DNA, 25 bp, Homo sapien
tcaaacgaatcatcgaataattatt

SEQ ID NO: 5872924 - DNA, 25 bp, Homo sapien
ttcaaatttcgttattcgatagtaa

SEQ ID NO: 5872925 - DNA, 25 bp, Homo sapien
tagattttatcgtaatttcgcttaa

SEQ ID NO: 5872926 - DNA, 25 bp, Homo sapien
tggaattatatagaataacgcttta

SEQ ID NO: 5872927 - DNA, 25 bp, Homo sapien
ataaataatcggtaacatcaatgat

SEQ ID NO: 5872928 - DNA, 25 bp, Homo sapien
tatgtaaattcaatctcgtacttaa

SEQ ID NO: 5872929 - DNA, 25 bp, Homo sapien
acataaataggtatcgctataaaaa

SEQ ID NO: 5872930 - DNA, 25 bp, Homo sapien
actgattaagttattaatcgctata

SEQ ID NO: 5872931 - DNA, 25 bp, Homo sapien
aaaactagtattacgctaatgttat

SEQ ID NO: 5872932 - DNA, 25 bp, Homo sapien
atttacgatagttagtttgatcttt

SEQ ID NO: 5872933 - DNA, 25 bp, Homo sapien
ctttaatccgacaataaatagtaaa

SEQ ID NO: 5872934 - DNA, 25 bp, Homo sapien
agaaatatgataaatttacgggaaa

SEQ ID NO: 5872935 - DNA, 25 bp, Homo sapien
tcagttattcgaatagattattagt

SEQ ID NO: 5872936 - DNA, 25 bp, Homo sapien
aatgtgtcttacttacgtaattaaa

SEQ ID NO: 5872937 - DNA, 25 bp, Homo sapien
tacttaatgcgttaaattggataat

SEQ ID NO: 5872938 - DNA, 25 bp, Homo sapien
tagtttcaaatcgtcctataaatat

SEQ ID NO: 5872939 - DNA, 25 bp, Homo sapien
tattataacgaaagttaaacaccat

SEQ ID NO: 5872940 - DNA, 25 bp, Homo sapien
atgattcgaataatagtaaaggtat

SEQ ID NO: 5872941 - DNA, 25 bp, Homo sapien
taagtcttatataacgatatcgatt

SEQ ID NO: 5872942 - DNA, 25 bp, Homo sapien
attaatgtattacgtttagtagctt

SEQ ID NO: 5872943 - DNA, 25 bp, Homo sapien
agttgattgtatatgcgaattattt

SEQ ID NO: 5872944 - DNA, 25 bp, Homo sapien
gaattctcgaaattatattggataa

SEQ ID NO: 5872945 - DNA, 25 bp, Homo sapien
aatcagattcgatatagtttcttat

SEQ ID NO: 5872946 - DNA, 25 bp, Homo sapien
gaaattaattcgattagataccatt

SEQ ID NO: 5872947 - DNA, 25 bp, Homo sapien
attcatattaatattcggaattcca

SEQ ID NO: 5872948 - DNA, 25 bp, Homo sapien
gttaaatatatcgcaagaataacga

SEQ ID NO: 5872949 - DNA, 25 bp, Homo sapien
tattaaagctcgtaagaatttcctt

SEQ ID NO: 5872950 - DNA, 25 bp, Homo sapien
taatcccgtatataggtaattatag

SEQ ID NO: 5872951 - DNA, 25 bp, Homo sapien
tgattctaataacgtatcctataca

SEQ ID NO: 5872952 - DNA, 25 bp, Homo sapien
tgaatcgctatattgagataaatct

SEQ ID NO: 5872953 - DNA, 25 bp, Homo sapien
tggacatttaatagtaaacgtatac

SEQ ID NO: 5872954 - DNA, 25 bp, Homo sapien
tcccatacgcataatatgaatttta

SEQ ID NO: 5872955 - DNA, 25 bp, Homo sapien
catccgataataatttcgaagaata

SEQ ID NO: 5872956 - DNA, 25 bp, Homo sapien
catataacgcgtataaataaactag

SEQ ID NO: 5872957 - DNA, 25 bp, Homo sapien
ttatacatgtcgaattactatcatg

SEQ ID NO: 5872958 - DNA, 25 bp, Homo sapien
actgttcttatgagttcgaaattaa

SEQ ID NO: 5872959 - DNA, 25 bp, Homo sapien
acggttgaataatatagcgatttta

SEQ ID NO: 5872960 - DNA, 25 bp, Homo sapien
ataaaattcaatgaatcgctgagtt

SEQ ID NO: 5872961 - DNA, 25 bp, Homo sapien
ttgatcattatttagtcgtcttagt

SEQ ID NO: 5872962 - DNA, 25 bp, Homo sapien
ctgttgattactatcgtataaatga

SEQ ID NO: 5872963 - DNA, 25 bp, Homo sapien
attggcgatataacttttacatctt

SEQ ID NO: 5872964 - DNA, 25 bp, Homo sapien
aatgaataagttattcgatagccaa

SEQ ID NO: 5872965 - DNA, 25 bp, Homo sapien
taataatcgattatagtgtagttgc

SEQ ID NO: 5872966 - DNA, 25 bp, Homo sapien
tcagatcgtataaactatacttaga

SEQ ID NO: 5872967 - DNA, 25 bp, Homo sapien
tttaatatcttcgcaagattagcat

SEQ ID NO: 5872968 - DNA, 25 bp, Homo sapien
cttacattaattattgcgttattcg

SEQ ID NO: 5872969 - DNA, 25 bp, Homo sapien
atcgaatccgatataacattcttta

SEQ ID NO: 5872970 - DNA, 25 bp, Homo sapien
caacatactagttttcgttactata

SEQ ID NO: 5872971 - DNA, 25 bp, Homo sapien
tgctattaaacgattcgatatatct

SEQ ID NO: 5872972 - DNA, 25 bp, Homo sapien
atagatgatccgcaataaataaatg

SEQ ID NO: 5872973 - DNA, 25 bp, Homo sapien
tgtaaatatgataaatcggtatgtg

SEQ ID NO: 5872974 - DNA, 25 bp, Homo sapien
taataacgatttaacaatagtgagc

SEQ ID NO: 5872975 - DNA, 25 bp, Homo sapien
caatgattttaatctcgtagttagt

SEQ ID NO: 5872976 - DNA, 25 bp, Homo sapien
aatgctagataattatcgtagtcaa

SEQ ID NO: 5872977 - DNA, 25 bp, Homo sapien
taaaagtatatcatcgacatactag

SEQ ID NO: 5872978 - DNA, 25 bp, Homo sapien
aggaacgtttattctaatatgtttc

SEQ ID NO: 5872979 - DNA, 25 bp, Homo sapien
aaacttatttatccgaaaacagaca

SEQ ID NO: 5872980 - DNA, 25 bp, Homo sapien
gaatgatatattaattccgagtcaa

SEQ ID NO: 5872981 - DNA, 25 bp, Homo sapien
acatgatttaatatcgtaccctata

SEQ ID NO: 5872982 - DNA, 25 bp, Homo sapien
gctaaatttaaatcgattgtacact

SEQ ID NO: 5872983 - DNA, 25 bp, Homo sapien
gtttatcgatatgtctagtatcatt

SEQ ID NO: 5872984 - DNA, 25 bp, Homo sapien
attttttatatttatcgacgctacg

SEQ ID NO: 5872985 - DNA, 25 bp, Homo sapien
gatagcgctcgattttattaaataa

SEQ ID NO: 5872986 - DNA, 25 bp, Homo sapien
gatataaatttcgcaatgtttactg

SEQ ID NO: 5872987 - DNA, 25 bp, Homo sapien
ataattcaaattatcgtatgacgtc

SEQ ID NO: 5872988 - DNA, 25 bp, Homo sapien
tagtccgtattgatattaattagct

SEQ ID NO: 5872989 - DNA, 25 bp, Homo sapien
tgcgaattcgatatcataacaataa

SEQ ID NO: 5872990 - DNA, 25 bp, Homo sapien
aagttaattgcgaagaatatcgaat

SEQ ID NO: 5872991 - DNA, 25 bp, Homo sapien
gttaggacgcataatttaattatgt

SEQ ID NO: 5872992 - DNA, 25 bp, Homo sapien
tgcaaaacactatcgttaatgtttt

SEQ ID NO: 5872993 - DNA, 25 bp, Homo sapien
gatgcgttattaattctacgttaat

SEQ ID NO: 5872994 - DNA, 25 bp, Homo sapien
tacgtcgatctatgttattagaaaa

SEQ ID NO: 5872995 - DNA, 25 bp, Homo sapien
acaataataatcgatttcgtcaagt

SEQ ID NO: 5872996 - DNA, 25 bp, Homo sapien
caccgattcgagaattaatttatta

SEQ ID NO: 5872997 - DNA, 25 bp, Homo sapien
aaaggatagtctaacgtatgtaata

SEQ ID NO: 5872998 - DNA, 25 bp, Homo sapien
cacttgtatattattacgaacgaaa

SEQ ID NO: 5872999 - DNA, 25 bp, Homo sapien
atgttttaactcgattcgaaatact

SEQ ID NO: 5873000 - DNA, 25 bp, Homo sapien
agtagaaacttatcgataattctgt

SEQ ID NO: 5873001 - DNA, 25 bp, Homo sapien
aactcgtattacgattatatagttg

SEQ ID NO: 5873002 - DNA, 25 bp, Homo sapien
tctatcgatccatatattgtataag

SEQ ID NO: 5873003 - DNA, 25 bp, Homo sapien
taaattttcgatcatatcgacttag

SEQ ID NO: 5873004 - DNA, 25 bp, Homo sapien
tagtccgctaaaataagtattagta

SEQ ID NO: 5873005 - DNA, 25 bp, Homo sapien
actctaatttcatataacggagttt

SEQ ID NO: 5873006 - DNA, 25 bp, Homo sapien
taaagcttaattgataaccgttagt

SEQ ID NO: 5873007 - DNA, 25 bp, Homo sapien
acatcaccgaatacatcataattat

SEQ ID NO: 5873008 - DNA, 25 bp, Homo sapien
cttgagtttaatcgtcatatgtatt

SEQ ID NO: 5873009 - DNA, 25 bp, Homo sapien
tggaaaagacgtatatactaataga

SEQ ID NO: 5873010 - DNA, 25 bp, Homo sapien
tattttctagcgtttatgtatgagt

SEQ ID NO: 5873011 - DNA, 25 bp, Homo sapien
ttagattacttatcgagaacacata

SEQ ID NO: 5873012 - DNA, 25 bp, Homo sapien
caaatatacgataagtacataagtc

SEQ ID NO: 5873013 - DNA, 25 bp, Homo sapien
tatattataaaaatcgtcgaggatc

SEQ ID NO: 5873014 - DNA, 25 bp, Homo sapien
ctactaaatcttacgattatgaaac

SEQ ID NO: 5873015 - DNA, 25 bp, Homo sapien
atcgttcgctaaactttaatttaga

SEQ ID NO: 5873016 - DNA, 25 bp, Homo sapien
catttgatttatcgcattatttacg

SEQ ID NO: 5873017 - DNA, 25 bp, Homo sapien
tgcgttaacgaaactaatattaatc

SEQ ID NO: 5873018 - DNA, 25 bp, Homo sapien
tagagaatgatattagtcgtttcta

SEQ ID NO: 5873019 - DNA, 25 bp, Homo sapien
gtacagattgatataacgagattat

SEQ ID NO: 5873020 - DNA, 25 bp, Homo sapien
gacgtaactaattcgaataaatact

SEQ ID NO: 5873021 - DNA, 25 bp, Homo sapien
cttaatgtatcgataaagatgtgta

SEQ ID NO: 5873022 - DNA, 25 bp, Homo sapien
actctaattgcgataagatagtttt

SEQ ID NO: 5873023 - DNA, 25 bp, Homo sapien
ctcttatcgtaaatagagtttactt

SEQ ID NO: 5873024 - DNA, 25 bp, Homo sapien
gcattttaataacgtacgatcatta

SEQ ID NO: 5873025 - DNA, 25 bp, Homo sapien
tcccaactaattatcgaattagaat

SEQ ID NO: 5873026 - DNA, 25 bp, Homo sapien
ttgttttagatcgaaatttcatgca

SEQ ID NO: 5873027 - DNA, 25 bp, Homo sapien
ctcaattagtataacgtaatcagta

SEQ ID NO: 5873028 - DNA, 25 bp, Homo sapien
gactgataatgatatcgaaaaacta

SEQ ID NO: 5873029 - DNA, 25 bp, Homo sapien
catcgattacttatcgtatttacat

SEQ ID NO: 5873030 - DNA, 25 bp, Homo sapien
aaagcatagcgagtaaattactatt

SEQ ID NO: 5873031 - DNA, 25 bp, Homo sapien
acgaatatcgagtttatacacttat

SEQ ID NO: 5873032 - DNA, 25 bp, Homo sapien
atgaagtattctaaatcgagttact

SEQ ID NO: 5873033 - DNA, 25 bp, Homo sapien
gttaattatcgacaattagtgaatc

SEQ ID NO: 5873034 - DNA, 25 bp, Homo sapien
gtaattactcgcataaaagattaca

SEQ ID NO: 5873035 - DNA, 25 bp, Homo sapien
acgtttaatttcgattagatatgga

SEQ ID NO: 5873036 - DNA, 25 bp, Homo sapien
tgagcaaaacgcataatatgtatta

SEQ ID NO: 5873037 - DNA, 25 bp, Homo sapien
taaatttcgattcgctataacagta

SEQ ID NO: 5873038 - DNA, 25 bp, Homo sapien
tcagcattattaatcgtacaaatca

SEQ ID NO: 5873039 - DNA, 25 bp, Homo sapien
aggtaatcttataacgattataggt

SEQ ID NO: 5873040 - DNA, 25 bp, Homo sapien
taatacgaaaataggtcatatgatc

SEQ ID NO: 5873041 - DNA, 25 bp, Homo sapien
atttgagcgttgaataaattagtga

SEQ ID NO: 5873042 - DNA, 25 bp, Homo sapien
gtttaaaagctatattcgataacca

SEQ ID NO: 5873043 - DNA, 25 bp, Homo sapien
ttaatcggatatctactaatgcaaa

SEQ ID NO: 5873044 - DNA, 25 bp, Homo sapien
atggtgttaatctcgtatatcataa

SEQ ID NO: 5873045 - DNA, 25 bp, Homo sapien
tttggcaatagtcgtataaatcttt

SEQ ID NO: 5873046 - DNA, 25 bp, Homo sapien
attatgtttaaattgatcgagcatc

SEQ ID NO: 5873047 - DNA, 25 bp, Homo sapien
gtctttcgttattaggatttataag

SEQ ID NO: 5873048 - DNA, 25 bp, Homo sapien
atgttataccgataactttacaatg

SEQ ID NO: 5873049 - DNA, 25 bp, Homo sapien
gaattttgtcatataacggattaca

SEQ ID NO: 5873050 - DNA, 25 bp, Homo sapien
agtctttgatacttattacgagatt

SEQ ID NO: 5873051 - DNA, 25 bp, Homo sapien
taatatttatacgattcacgtgact

SEQ ID NO: 5873052 - DNA, 25 bp, Homo sapien
ttctaatactgactacgttataaac

SEQ ID NO: 5873053 - DNA, 25 bp, Homo sapien
aactacgtactaaatacttcagaaa

SEQ ID NO: 5873054 - DNA, 25 bp, Homo sapien
aaaattacgactatcagtaaagaac

SEQ ID NO: 5873055 - DNA, 25 bp, Homo sapien
ggcgagacgaataatatataaattt

SEQ ID NO: 5873056 - DNA, 25 bp, Homo sapien
cttactatagcgattaatctatgtt

SEQ ID NO: 5873057 - DNA, 25 bp, Homo sapien
tgaattcgtgaaattgatatgatga

SEQ ID NO: 5873058 - DNA, 25 bp, Homo sapien
aaaatgtcgtattactattatgacc

SEQ ID NO: 5873059 - DNA, 25 bp, Homo sapien
gaaattgtatacgcaattatcgttt

SEQ ID NO: 5873060 - DNA, 25 bp, Homo sapien
gaaaaaataatatatcgaacggtga

SEQ ID NO: 5873061 - DNA, 25 bp, Homo sapien
aaacatacaacgaaaatcgaaacaa

SEQ ID NO: 5873062 - DNA, 25 bp, Homo sapien
ttagtatgataacttaagcgtatct

SEQ ID NO: 5873063 - DNA, 25 bp, Homo sapien
tcacgagtaaatccgtattatataa

SEQ ID NO: 5873064 - DNA, 25 bp, Homo sapien
caattctattacgtacgatttatga

SEQ ID NO: 5873065 - DNA, 25 bp, Homo sapien
ttgaataagaatcgcgaaaatacta

SEQ ID NO: 5873066 - DNA, 25 bp, Homo sapien
attctaattcgcgattaatagcaaa

SEQ ID NO: 5873067 - DNA, 25 bp, Homo sapien
ttggatttacgtattatacgtgata

SEQ ID NO: 5873068 - DNA, 25 bp, Homo sapien
gtatcatactaattactcgatatca

SEQ ID NO: 5873069 - DNA, 25 bp, Homo sapien
catgataatttgtatactcgtatct

SEQ ID NO: 5873070 - DNA, 25 bp, Homo sapien
atctgtattcgttgttaatccttat

SEQ ID NO: 5873071 - DNA, 25 bp, Homo sapien
atacttaaagatttgaatcggttca

SEQ ID NO: 5873072 - DNA, 25 bp, Homo sapien
aatgattcgattttttcgacattag

SEQ ID NO: 5873073 - DNA, 25 bp, Homo sapien
tttgtgaatcgtattactattaacc

SEQ ID NO: 5873074 - DNA, 25 bp, Homo sapien
acatcttcgagtaataatactgtta

SEQ ID NO: 5873075 - DNA, 25 bp, Homo sapien
aataaacaagcgttatatgtcagat

SEQ ID NO: 5873076 - DNA, 25 bp, Homo sapien
ttactatcgattaataatccgtcat

SEQ ID NO: 5873077 - DNA, 25 bp, Homo sapien
tagtatcgcatcatattattatgag

SEQ ID NO: 5873078 - DNA, 25 bp, Homo sapien
gatgtaaaactacgaataacttatg

SEQ ID NO: 5873079 - DNA, 25 bp, Homo sapien
taaatataatcaattgcgacttgga

SEQ ID NO: 5873080 - DNA, 25 bp, Homo sapien
ttttttatgttatgatcggtcaagt

SEQ ID NO: 5873081 - DNA, 25 bp, Homo sapien
aagatttacttatcggactagattt

SEQ ID NO: 5873082 - DNA, 25 bp, Homo sapien
gtaccactattacgatttaataaga

SEQ ID NO: 5873083 - DNA, 25 bp, Homo sapien
aacaataggttaaaatgcgatttgt

SEQ ID NO: 5873084 - DNA, 25 bp, Homo sapien
gagagactaatcgaaattacaatat

SEQ ID NO: 5873085 - DNA, 25 bp, Homo sapien
tctgatattacgataatcacgtatt

SEQ ID NO: 5873086 - DNA, 25 bp, Homo sapien
ggtattatcgtaaatacgtaatgaa

SEQ ID NO: 5873087 - DNA, 25 bp, Homo sapien
cgtaattacgtctaatataagtagt

SEQ ID NO: 5873088 - DNA, 25 bp, Homo sapien
ccttaaattatcgtactttgtgatt

SEQ ID NO: 5873089 - DNA, 25 bp, Homo sapien
ttaacttatttatccgattccagaa

SEQ ID NO: 5873090 - DNA, 25 bp, Homo sapien
taaggaattacgttacgaatcaaat

SEQ ID NO: 5873091 - DNA, 25 bp, Homo sapien
aaattcgattacatatgagtcatac

SEQ ID NO: 5873092 - DNA, 25 bp, Homo sapien
caatgtacgttagacatgaaataat

SEQ ID NO: 5873093 - DNA, 25 bp, Homo sapien
atagtctatttcaaccgttaatgaa

SEQ ID NO: 5873094 - DNA, 25 bp, Homo sapien
tccattaacggtaagtttatattga

SEQ ID NO: 5873095 - DNA, 25 bp, Homo sapien
tctttatattcgagtaacaatagag

SEQ ID NO: 5873096 - DNA, 25 bp, Homo sapien
aaattctatgttctcgattaatacg

SEQ ID NO: 5873097 - DNA, 25 bp, Homo sapien
ctcattaacgataaaaaatccatca

SEQ ID NO: 5873098 - DNA, 25 bp, Homo sapien
cattgttaatcgatataatccagta

SEQ ID NO: 5873099 - DNA, 25 bp, Homo sapien
cttcatatcgtaataataaggtctt

SEQ ID NO: 5873100 - DNA, 25 bp, Homo sapien
caaaggatagatttataacgattag

SEQ ID NO: 5873101 - DNA, 25 bp, Homo sapien
ttgctgcgaaaatttagttaatgaa

SEQ ID NO: 5873102 - DNA, 25 bp, Homo sapien
gtttacgattactattagtcaaact

SEQ ID NO: 5873103 - DNA, 25 bp, Homo sapien
gtaaaatcgaagttaatatctcttc

SEQ ID NO: 5873104 - DNA, 25 bp, Homo sapien
ttttaacatcattatcgataagcca

SEQ ID NO: 5873105 - DNA, 25 bp, Homo sapien
ttagttagattattgtcgtaacctt

SEQ ID NO: 5873106 - DNA, 25 bp, Homo sapien
aattcactaacttaagcgaacaaaa

SEQ ID NO: 5873107 - DNA, 25 bp, Homo sapien
tcttacgataattttaggattaagg

SEQ ID NO: 5873108 - DNA, 25 bp, Homo sapien
catgtttcgagtaaagtaaattcat

SEQ ID NO: 5873109 - DNA, 25 bp, Homo sapien
aaactatatacgcttagaacactat

SEQ ID NO: 5873110 - DNA, 25 bp, Homo sapien
tgctaaatcgtttagtattgctaat

SEQ ID NO: 5873111 - DNA, 25 bp, Homo sapien
ttcactattaacgaattatccgttt

SEQ ID NO: 5873112 - DNA, 25 bp, Homo sapien
caaaccgtatataattgttagactt

SEQ ID NO: 5873113 - DNA, 25 bp, Homo sapien
tttagtcgtaaataataacggtaga

SEQ ID NO: 5873114 - DNA, 25 bp, Homo sapien
cacatcgcgaaatatataatatgaa

SEQ ID NO: 5873115 - DNA, 25 bp, Homo sapien
ttcttataattcgtcaattcgctat

SEQ ID NO: 5873116 - DNA, 25 bp, Homo sapien
tcttatatttcgccatataggtatt

SEQ ID NO: 5873117 - DNA, 25 bp, Homo sapien
taacagttaatcgttcaattagagt

SEQ ID NO: 5873118 - DNA, 25 bp, Homo sapien
aagtgactaatcctatatcgttatt

SEQ ID NO: 5873119 - DNA, 25 bp, Homo sapien
cgagtatgcgaataaaattataaga

SEQ ID NO: 5873120 - DNA, 25 bp, Homo sapien
tttataatggattactaacggagta

SEQ ID NO: 5873121 - DNA, 25 bp, Homo sapien
ctgatcgaataattaatcgtcaata

SEQ ID NO: 5873122 - DNA, 25 bp, Homo sapien
acatattagcgtatcaacaatatgt

SEQ ID NO: 5873123 - DNA, 25 bp, Homo sapien
atttgtgacgtctattatattccaa

SEQ ID NO: 5873124 - DNA, 25 bp, Homo sapien
attgctaaacgtaacataagtgatt

SEQ ID NO: 5873125 - DNA, 25 bp, Homo sapien
cgaaagatctaattacgatataaga

SEQ ID NO: 5873126 - DNA, 25 bp, Homo sapien
caaatattaacgaacttatagtcag

SEQ ID NO: 5873127 - DNA, 25 bp, Homo sapien
gttttgacgaactgttataaaatag

SEQ ID NO: 5873128 - DNA, 25 bp, Homo sapien
gtactttattgcgaacttattagat

SEQ ID NO: 5873129 - DNA, 25 bp, Homo sapien
ttttgattctatatcgatgttgaca

SEQ ID NO: 5873130 - DNA, 25 bp, Homo sapien
cataataatattaactgcggagaaa

SEQ ID NO: 5873131 - DNA, 25 bp, Homo sapien
taaattagttaatacgatatccgca

SEQ ID NO: 5873132 - DNA, 25 bp, Homo sapien
taatcgatatcgagatacaattact

SEQ ID NO: 5873133 - DNA, 25 bp, Homo sapien
attcctttcgtcatataatcaaaag

SEQ ID NO: 5873134 - DNA, 25 bp, Homo sapien
ttaagttacatttacgatcatctca

SEQ ID NO: 5873135 - DNA, 25 bp, Homo sapien
tgtattactatcgataattttccct

SEQ ID NO: 5873136 - DNA, 25 bp, Homo sapien
aagcattttttggataatcggatta

SEQ ID NO: 5873137 - DNA, 25 bp, Homo sapien
atattaacgcgatatgaatttaggt

SEQ ID NO: 5873138 - DNA, 25 bp, Homo sapien
tacaccgactaattgattgttttaa

SEQ ID NO: 5873139 - DNA, 25 bp, Homo sapien
gtacataaagttacgatagacatat

SEQ ID NO: 5873140 - DNA, 25 bp, Homo sapien
gtatataactaattagcggttcaat

SEQ ID NO: 5873141 - DNA, 25 bp, Homo sapien
tatcctctaaccgatgaatattttt

SEQ ID NO: 5873142 - DNA, 25 bp, Homo sapien
atctattaaatgagtacgagttaca

SEQ ID NO: 5873143 - DNA, 25 bp, Homo sapien
ctttacttacaagcgaaattaaatg

SEQ ID NO: 5873144 - DNA, 25 bp, Homo sapien
ttttcatcgtatgataagttacact

SEQ ID NO: 5873145 - DNA, 25 bp, Homo sapien
tacatacgtcgaacttataattcaa

SEQ ID NO: 5873146 - DNA, 25 bp, Homo sapien
gttgagttaattcgaaattttactg

SEQ ID NO: 5873147 - DNA, 25 bp, Homo sapien
agtttaataacgagttgctaaagat

SEQ ID NO: 5873148 - DNA, 25 bp, Homo sapien
ttatggatagttacgagtataagta

SEQ ID NO: 5873149 - DNA, 25 bp, Homo sapien
aaatgatcgaatttcgatacaagaa

SEQ ID NO: 5873150 - DNA, 25 bp, Homo sapien
aataccgataattaacgaatactac

SEQ ID NO: 5873151 - DNA, 25 bp, Homo sapien
aacctattaattctattcgtacgaa

SEQ ID NO: 5873152 - DNA, 25 bp, Homo sapien
tctaagtctaatgtcgtaaaattgt

SEQ ID NO: 5873153 - DNA, 25 bp, Homo sapien
aatggaattttcgttaatcaaatcc

SEQ ID NO: 5873154 - DNA, 25 bp, Homo sapien
agaaaattcagtaatcgaatttgga

SEQ ID NO: 5873155 - DNA, 25 bp, Homo sapien
ctatataacgattcgttatctaaga

SEQ ID NO: 5873156 - DNA, 25 bp, Homo sapien
cacatacgattaataacgtattcaa

SEQ ID NO: 5873157 - DNA, 25 bp, Homo sapien
atatcgatcggaatttttacaatgt

SEQ ID NO: 5873158 - DNA, 25 bp, Homo sapien
tattcatcgcgctataaatactttt

SEQ ID NO: 5873159 - DNA, 25 bp, Homo sapien
cttgtaacatttcgcgtaatttata

SEQ ID NO: 5873160 - DNA, 25 bp, Homo sapien
atgtggtaattaacgctactattaa

SEQ ID NO: 5873161 - DNA, 25 bp, Homo sapien
aatccctatcgattatgtactaaat

SEQ ID NO: 5873162 - DNA, 25 bp, Homo sapien
atttttacgagtactatctagcatt

SEQ ID NO: 5873163 - DNA, 25 bp, Homo sapien
tttcgtagaatttaattcgaagatc

SEQ ID NO: 5873164 - DNA, 25 bp, Homo sapien
accataactttattaacacgacaat

SEQ ID NO: 5873165 - DNA, 25 bp, Homo sapien
aatccgaattattaagatcgaattc

SEQ ID NO: 5873166 - DNA, 25 bp, Homo sapien
tgaataatgcgtataggtaattaac

SEQ ID NO: 5873167 - DNA, 25 bp, Homo sapien
acacttctaacataacgaatgttaa

SEQ ID NO: 5873168 - DNA, 25 bp, Homo sapien
tttgttctaaatgcgtatagagata

SEQ ID NO: 5873169 - DNA, 25 bp, Homo sapien
ggattgttaaatcgcaatactaaat

SEQ ID NO: 5873170 - DNA, 25 bp, Homo sapien
tgacaaaatcgcatatcgttaatat

SEQ ID NO: 5873171 - DNA, 25 bp, Homo sapien
tgaactatatattgtacgacacttt

SEQ ID NO: 5873172 - DNA, 25 bp, Homo sapien
ttatttatctaggtacgattgagaa

SEQ ID NO: 5873173 - DNA, 25 bp, Homo sapien
atatattataattcgcggatggtat

SEQ ID NO: 5873174 - DNA, 25 bp, Homo sapien
tacgtcaatccgaaattaataatca

SEQ ID NO: 5873175 - DNA, 25 bp, Homo sapien
gtgtatcgttcgaaaaacattttaa

SEQ ID NO: 5873176 - DNA, 25 bp, Homo sapien
ctggaatattactacgattaattag

SEQ ID NO: 5873177 - DNA, 25 bp, Homo sapien
tctctattgatatcgtataacttca

SEQ ID NO: 5873178 - DNA, 25 bp, Homo sapien
gtaatcatatgacgattatatacct

SEQ ID NO: 5873179 - DNA, 25 bp, Homo sapien
acaagagatcgatataattgcatta

SEQ ID NO: 5873180 - DNA, 25 bp, Homo sapien
gtatttcgattaattacagtaatgg

SEQ ID NO: 5873181 - DNA, 25 bp, Homo sapien
caataaatagtcgtaatcagcataa

SEQ ID NO: 5873182 - DNA, 25 bp, Homo sapien
taaatcaatttagaacgtagattgg

SEQ ID NO: 5873183 - DNA, 25 bp, Homo sapien
atataatcgcgttaaagatttctca

SEQ ID NO: 5873184 - DNA, 25 bp, Homo sapien
gactttagcgttaattgataaatct

SEQ ID NO: 5873185 - DNA, 25 bp, Homo sapien
aaatctaatattactagcgattagg

SEQ ID NO: 5873186 - DNA, 25 bp, Homo sapien
aattactcgtttagacattaactct

SEQ ID NO: 5873187 - DNA, 25 bp, Homo sapien
tgagaaatacttagtcgcaatttta

SEQ ID NO: 5873188 - DNA, 25 bp, Homo sapien
ttaacgttaattctcgataacacta

SEQ ID NO: 5873189 - DNA, 25 bp, Homo sapien
atgaattaatataaggatcgtggtt

SEQ ID NO: 5873190 - DNA, 25 bp, Homo sapien
tagaatgaacgaatatcaacacttt

SEQ ID NO: 5873191 - DNA, 25 bp, Homo sapien
tgaaaattcgtataactagtgagaa

SEQ ID NO: 5873192 - DNA, 25 bp, Homo sapien
aaatgatcttattcttctcgttgaa

SEQ ID NO: 5873193 - DNA, 25 bp, Homo sapien
atgaacgatatcaatacgatgatta

SEQ ID NO: 5873194 - DNA, 25 bp, Homo sapien
tttcataacgctatatctaaaagac

SEQ ID NO: 5873195 - DNA, 25 bp, Homo sapien
ataattatagtcgaactaaacgagt

SEQ ID NO: 5873196 - DNA, 25 bp, Homo sapien
aatttcgtgaactattaatcatgga

SEQ ID NO: 5873197 - DNA, 25 bp, Homo sapien
actgagatcgaagtatataaagttt

SEQ ID NO: 5873198 - DNA, 25 bp, Homo sapien
aatattataatcgttattcgaggag

SEQ ID NO: 5873199 - DNA, 25 bp, Homo sapien
ctatgcgttaagattaatggaataa

SEQ ID NO: 5873200 - DNA, 25 bp, Homo sapien
ttatcgttttctaatactcgttctt

SEQ ID NO: 5873201 - DNA, 25 bp, Homo sapien
catattccgaaaaaatcaattgttc

SEQ ID NO: 5873202 - DNA, 25 bp, Homo sapien
tgaagattgtaatttcgatccaaaa

SEQ ID NO: 5873203 - DNA, 25 bp, Homo sapien
atgtgtaactatcgaattatcttag

SEQ ID NO: 5873204 - DNA, 25 bp, Homo sapien
tcaggacgtatactacaataaatat

SEQ ID NO: 5873205 - DNA, 25 bp, Homo sapien
taatatcaacgacgtttaattgcat

SEQ ID NO: 5873206 - DNA, 25 bp, Homo sapien
ctaaagtttacgcaaatctttcatt

SEQ ID NO: 5873207 - DNA, 25 bp, Homo sapien
tcttttaaattcgataagtgatcag

SEQ ID NO: 5873208 - DNA, 25 bp, Homo sapien
aatatgattcggacataaattacgt

SEQ ID NO: 5873209 - DNA, 25 bp, Homo sapien
cctaatcataagtattcgtatatca

SEQ ID NO: 5873210 - DNA, 25 bp, Homo sapien
aattacgcgtaaatacaaatcattg

SEQ ID NO: 5873211 - DNA, 25 bp, Homo sapien
ttgttatactaatacgagtattgag

SEQ ID NO: 5873212 - DNA, 25 bp, Homo sapien
gaaatatttagaactatcgatttgc

SEQ ID NO: 5873213 - DNA, 25 bp, Homo sapien
ctgaaataagactatcgtattacta

SEQ ID NO: 5873214 - DNA, 25 bp, Homo sapien
tccagatcgtataaaagattcatat

SEQ ID NO: 5873215 - DNA, 25 bp, Homo sapien
atgattcgtaaaatacttacgagat

SEQ ID NO: 5873216 - DNA, 25 bp, Homo sapien
atgctattacggttagaacatattt

SEQ ID NO: 5873217 - DNA, 25 bp, Homo sapien
caagttacgggattaatttatcata

SEQ ID NO: 5873218 - DNA, 25 bp, Homo sapien
tgctatatatgttcgctaactattt

SEQ ID NO: 5873219 - DNA, 25 bp, Homo sapien
taacgaatttttcgattaagaccta

SEQ ID NO: 5873220 - DNA, 25 bp, Homo sapien
ttaagatctatacgattatttgggt

SEQ ID NO: 5873221 - DNA, 25 bp, Homo sapien
aagttttatattcgaagcgatatac

SEQ ID NO: 5873222 - DNA, 25 bp, Homo sapien
taggccaaacttattacgttataaa

SEQ ID NO: 5873223 - DNA, 25 bp, Homo sapien
aattacgaaatccgtaattattgct

SEQ ID NO: 5873224 - DNA, 25 bp, Homo sapien
tttgaatctaatgatccgtaaaatg

SEQ ID NO: 5873225 - DNA, 25 bp, Homo sapien
aatacattaaatcgaacgtatctgt

SEQ ID NO: 5873226 - DNA, 25 bp, Homo sapien
ttacgtcgtcatagtataatctatt

SEQ ID NO: 5873227 - DNA, 25 bp, Homo sapien
attgctaatagttcggataaaaact

SEQ ID NO: 5873228 - DNA, 25 bp, Homo sapien
ttcgttatcggatgatataactata

SEQ ID NO: 5873229 - DNA, 25 bp, Homo sapien
acataacgtaatatatcgacaacat

SEQ ID NO: 5873230 - DNA, 25 bp, Homo sapien
agtaagatccgtaattaataatgtg

SEQ ID NO: 5873231 - DNA, 25 bp, Homo sapien
agaaacgagattaactagttatagt

SEQ ID NO: 5873232 - DNA, 25 bp, Homo sapien
tatactcgaaagttgcttaaataca

SEQ ID NO: 5873233 - DNA, 25 bp, Homo sapien
tattttgataatcgtacgatggtaa

SEQ ID NO: 5873234 - DNA, 25 bp, Homo sapien
taaagattgaacgtaagcttatatg

SEQ ID NO: 5873235 - DNA, 25 bp, Homo sapien
taaatatacgtaaacgatatggtga

SEQ ID NO: 5873236 - DNA, 25 bp, Homo sapien
aatacgtacgtaatttattacactg

SEQ ID NO: 5873237 - DNA, 25 bp, Homo sapien
attgttcgataagatcttaacttca

SEQ ID NO: 5873238 - DNA, 25 bp, Homo sapien
tgatctgtgtaaataatcgataaca

SEQ ID NO: 5873239 - DNA, 25 bp, Homo sapien
attcgacgtaattaacgattataga

SEQ ID NO: 5873240 - DNA, 25 bp, Homo sapien
ctacatattacgataagtaagctta

SEQ ID NO: 5873241 - DNA, 25 bp, Homo sapien
tcttttataatataattcggttcgc

SEQ ID NO: 5873242 - DNA, 25 bp, Homo sapien
tgacgtaaagatcgaaaattttcta

SEQ ID NO: 5873243 - DNA, 25 bp, Homo sapien
atgaggcgattaatatatggaaata

SEQ ID NO: 5873244 - DNA, 25 bp, Homo sapien
aagaatgattaagttacgtcattct

SEQ ID NO: 5873245 - DNA, 25 bp, Homo sapien
gttatataattgtaggtcgtatatg

SEQ ID NO: 5873246 - DNA, 25 bp, Homo sapien
tagatttcaacggattttaagcttt

SEQ ID NO: 5873247 - DNA, 25 bp, Homo sapien
taactttcgcaataattaatggctt

SEQ ID NO: 5873248 - DNA, 25 bp, Homo sapien
attattatactaaggtcgaaaagag

SEQ ID NO: 5873249 - DNA, 25 bp, Homo sapien
agtgttcgcactacatttaaaaata

SEQ ID NO: 5873250 - DNA, 25 bp, Homo sapien
tacagctatattcgcataataagta

SEQ ID NO: 5873251 - DNA, 25 bp, Homo sapien
gtaactatatgtcgaattacaaact

SEQ ID NO: 5873252 - DNA, 25 bp, Homo sapien
aatctaattatcgtatcgaacgtaa

SEQ ID NO: 5873253 - DNA, 25 bp, Homo sapien
tgatgaatttcgtaataacattctc

SEQ ID NO: 5873254 - DNA, 25 bp, Homo sapien
atcaatattagaatttcgtaagctg

SEQ ID NO: 5873255 - DNA, 25 bp, Homo sapien
gtgtaaaagttcgacaaattcattt

SEQ ID NO: 5873256 - DNA, 25 bp, Homo sapien
taacgcgaaaaattaatatcttgag

SEQ ID NO: 5873257 - DNA, 25 bp, Homo sapien
tattaatttatcgattcgttcatgg

SEQ ID NO: 5873258 - DNA, 25 bp, Homo sapien
taccagatcgttagtaaaaaatagt

SEQ ID NO: 5873259 - DNA, 25 bp, Homo sapien
tcaaaatattaacgtatagcatgtc

SEQ ID NO: 5873260 - DNA, 25 bp, Homo sapien
ggttaaatatttaattcgcgatttc

SEQ ID NO: 5873261 - DNA, 25 bp, Homo sapien
ctacatatttaacacggttaataca

SEQ ID NO: 5873262 - DNA, 25 bp, Homo sapien
gcatgtctaatcacgatatttttta

SEQ ID NO: 5873263 - DNA, 25 bp, Homo sapien
gaactaattgatttcgtcatatttg

SEQ ID NO: 5873264 - DNA, 25 bp, Homo sapien
atctgaatcgaacattaagatcaaa

SEQ ID NO: 5873265 - DNA, 25 bp, Homo sapien
atataaaaactattatcgcagttgg

SEQ ID NO: 5873266 - DNA, 25 bp, Homo sapien
ttattcatttagtctatcgatggtt

SEQ ID NO: 5873267 - DNA, 25 bp, Homo sapien
tttaaattaggttacgcatacatga

SEQ ID NO: 5873268 - DNA, 25 bp, Homo sapien
ctatcatcgcatttagtatattaac

SEQ ID NO: 5873269 - DNA, 25 bp, Homo sapien
tatcagattcgttaaactatagttc

SEQ ID NO: 5873270 - DNA, 25 bp, Homo sapien
tataaattacgatcctaacttatcc

SEQ ID NO: 5873271 - DNA, 25 bp, Homo sapien
atgcctaatacgatatcaagaataa

SEQ ID NO: 5873272 - DNA, 25 bp, Homo sapien
agatgtaataattacgaactagtca

SEQ ID NO: 5873273 - DNA, 25 bp, Homo sapien
atctacgattcaacttatagattga

SEQ ID NO: 5873274 - DNA, 25 bp, Homo sapien
tgtagtattaatcgttagacataag

SEQ ID NO: 5873275 - DNA, 25 bp, Homo sapien
ccttattatataaatgtcgtcaaag

SEQ ID NO: 5873276 - DNA, 25 bp, Homo sapien
caattacgtttattcgataacaaac

SEQ ID NO: 5873277 - DNA, 25 bp, Homo sapien
ttatagattcgactatagttacaac

SEQ ID NO: 5873278 - DNA, 25 bp, Homo sapien
ttacaaattaaacggatcaaggata

SEQ ID NO: 5873279 - DNA, 25 bp, Homo sapien
actacaatcaaacttttcgtaaatg

SEQ ID NO: 5873280 - DNA, 25 bp, Homo sapien
ataactctttagtcgaataacaaac

SEQ ID NO: 5873281 - DNA, 25 bp, Homo sapien
ttactgaacgtattacaaatacact

SEQ ID NO: 5873282 - DNA, 25 bp, Homo sapien
tatcacgaattatattgcatagaca

SEQ ID NO: 5873283 - DNA, 25 bp, Homo sapien
tattgtaattccatatcgatgagtt

SEQ ID NO: 5873284 - DNA, 25 bp, Homo sapien
atagcttacgaaattagtgtattct

SEQ ID NO: 5873285 - DNA, 25 bp, Homo sapien
cacgattatcgcgtaaattatttaa

SEQ ID NO: 5873286 - DNA, 25 bp, Homo sapien
attagtaacgtacgtattctcattt

SEQ ID NO: 5873287 - DNA, 25 bp, Homo sapien
tatatttcaataattgtgcgttgtc

SEQ ID NO: 5873288 - DNA, 25 bp, Homo sapien
attgaatagttcgattgaaaagatc

SEQ ID NO: 5873289 - DNA, 25 bp, Homo sapien
atcgatcggacgaattaattatata

SEQ ID NO: 5873290 - DNA, 25 bp, Homo sapien
taaattttaactgcgatacaaagca

SEQ ID NO: 5873291 - DNA, 25 bp, Homo sapien
tgtgttgtatcgaatattaggttat

SEQ ID NO: 5873292 - DNA, 25 bp, Homo sapien
aactttctaacgatgatatacagtt

SEQ ID NO: 5873293 - DNA, 25 bp, Homo sapien
tcatttttcgcgtattataaagtca

SEQ ID NO: 5873294 - DNA, 25 bp, Homo sapien
taagcctatgtttcgacatttaata

SEQ ID NO: 5873295 - DNA, 25 bp, Homo sapien
tttaataaattgagtttcgctaagc

SEQ ID NO: 5873296 - DNA, 25 bp, Homo sapien
gaagatattaagtaacggtcaaatt

SEQ ID NO: 5873297 - DNA, 25 bp, Homo sapien
ctagcattaacgattttcgtaaaaa

SEQ ID NO: 5873298 - DNA, 25 bp, Homo sapien
gcaatttacttaatcgatatacaac

SEQ ID NO: 5873299 - DNA, 25 bp, Homo sapien
aaatgattcgattgatagaatgaca

SEQ ID NO: 5873300 - DNA, 25 bp, Homo sapien
atactcgatataatttaaccggtat

SEQ ID NO: 5873301 - DNA, 25 bp, Homo sapien
ccctgtaactaatttatacgattta

SEQ ID NO: 5873302 - DNA, 25 bp, Homo sapien
ttctacttattcgttagaacatatc

SEQ ID NO: 5873303 - DNA, 25 bp, Homo sapien
tgttgcgatttataggttaaaaatg

SEQ ID NO: 5873304 - DNA, 25 bp, Homo sapien
aatgtcaatcgaaatatcgtactta

SEQ ID NO: 5873305 - DNA, 25 bp, Homo sapien
ccgaccaattattcgaataatatta

SEQ ID NO: 5873306 - DNA, 25 bp, Homo sapien
ttcttatatgcgatcaattagaaga

SEQ ID NO: 5873307 - DNA, 25 bp, Homo sapien
tataacgcatttagactaatacgat

SEQ ID NO: 5873308 - DNA, 25 bp, Homo sapien
agtgtatccgttacctattataaaa

SEQ ID NO: 5873309 - DNA, 25 bp, Homo sapien
tagtagttaatcgtttattacagtg

SEQ ID NO: 5873310 - DNA, 25 bp, Homo sapien
taattaattcgttgattgtattcgg

SEQ ID NO: 5873311 - DNA, 25 bp, Homo sapien
atgtatataaataatcgtcccctta

SEQ ID NO: 5873312 - DNA, 25 bp, Homo sapien
atatatacgacgaatatatctgcta

SEQ ID NO: 5873313 - DNA, 25 bp, Homo sapien
gtatcaatttagcgtctattattac

SEQ ID NO: 5873314 - DNA, 25 bp, Homo sapien
atgtatattctaatcgacttagcat

SEQ ID NO: 5873315 - DNA, 25 bp, Homo sapien
aggattataaaaattcggtcaattc

SEQ ID NO: 5873316 - DNA, 25 bp, Homo sapien
aatatacgatctttattgatccgtt

SEQ ID NO: 5873317 - DNA, 25 bp, Homo sapien
caatgatgctatattatacgatctt

SEQ ID NO: 5873318 - DNA, 25 bp, Homo sapien
agaaggtcgtaaattaatatagttg

SEQ ID NO: 5873319 - DNA, 25 bp, Homo sapien
gaagactcgataactaattttaaag

SEQ ID NO: 5873320 - DNA, 25 bp, Homo sapien
caagatacgataaatatatctagca

SEQ ID NO: 5873321 - DNA, 25 bp, Homo sapien
gttttatttagataagtacgttgga

SEQ ID NO: 5873322 - DNA, 25 bp, Homo sapien
tttagttattgacgcgaaataaaac

SEQ ID NO: 5873323 - DNA, 25 bp, Homo sapien
tacgaggtaatagtcgaaatatata

SEQ ID NO: 5873324 - DNA, 25 bp, Homo sapien
tacgcaatctaaatcgattatctta

SEQ ID NO: 5873325 - DNA, 25 bp, Homo sapien
agcatttattatacgcgattgaatt

SEQ ID NO: 5873326 - DNA, 25 bp, Homo sapien
tcaatttataccgtaaagattgatg

SEQ ID NO: 5873327 - DNA, 25 bp, Homo sapien
gttatcttaatttatgcgagtagtt

SEQ ID NO: 5873328 - DNA, 25 bp, Homo sapien
ataaccgtatgtagaattaagatac

SEQ ID NO: 5873329 - DNA, 25 bp, Homo sapien
ttctccgattatgttatggaattaa

SEQ ID NO: 5873330 - DNA, 25 bp, Homo sapien
atcgacctaatagcgtattaaatta

SEQ ID NO: 5873331 - DNA, 25 bp, Homo sapien
atattatattttaaccgctatgcca

SEQ ID NO: 5873332 - DNA, 25 bp, Homo sapien
cttgttcataataccgtacaaaata

SEQ ID NO: 5873333 - DNA, 25 bp, Homo sapien
agtatatcggaatgatctaatctta

SEQ ID NO: 5873334 - DNA, 25 bp, Homo sapien
tttatatacgaggagtaatagagat

SEQ ID NO: 5873335 - DNA, 25 bp, Homo sapien
acatgttatctaattaacggtattc

SEQ ID NO: 5873336 - DNA, 25 bp, Homo sapien
tgtcgagatgatattattcgttatt

SEQ ID NO: 5873337 - DNA, 25 bp, Homo sapien
ttttcattagacttcgcaattcttt

SEQ ID NO: 5873338 - DNA, 25 bp, Homo sapien
ccaagttggattcgtaatatttatt

SEQ ID NO: 5873339 - DNA, 25 bp, Homo sapien
tgtaatataatcgggtaattagcaa

SEQ ID NO: 5873340 - DNA, 25 bp, Homo sapien
ttaaagagttcgtataattgtctac

SEQ ID NO: 5873341 - DNA, 25 bp, Homo sapien
gatctattcgtattgcgtaatataa

SEQ ID NO: 5873342 - DNA, 25 bp, Homo sapien
tttttctttactataaacgcacgta

SEQ ID NO: 5873343 - DNA, 25 bp, Homo sapien
gacttgtatcaaacgaatatgtata

SEQ ID NO: 5873344 - DNA, 25 bp, Homo sapien
taatatatatataacgacgatggtg

SEQ ID NO: 5873345 - DNA, 25 bp, Homo sapien
gtcttatagtcttaattcgatctat

SEQ ID NO: 5873346 - DNA, 25 bp, Homo sapien
acacacaattaattagtcgaataga

SEQ ID NO: 5873347 - DNA, 25 bp, Homo sapien
tgaactacacataatatcgttgtat

SEQ ID NO: 5873348 - DNA, 25 bp, Homo sapien
tgtatttgcgcgttaattaaatatg

SEQ ID NO: 5873349 - DNA, 25 bp, Homo sapien
ttatcacaaaacgcgataatacaaa

SEQ ID NO: 5873350 - DNA, 25 bp, Homo sapien
tcaataaaataatcgtacgttgagt

SEQ ID NO: 5873351 - DNA, 25 bp, Homo sapien
aaatctttacgaataaatcgatgct

SEQ ID NO: 5873352 - DNA, 25 bp, Homo sapien
atgataggatttaaatcgttctact

SEQ ID NO: 5873353 - DNA, 25 bp, Homo sapien
tgtttcttatcgattaatgatatgg

SEQ ID NO: 5873354 - DNA, 25 bp, Homo sapien
tttgaatattagcgatttacgttag

SEQ ID NO: 5873355 - DNA, 25 bp, Homo sapien
tgcttatcgataaaaaatcgtatac

SEQ ID NO: 5873356 - DNA, 25 bp, Homo sapien
cacattaaatagtattgtcgtttga

SEQ ID NO: 5873357 - DNA, 25 bp, Homo sapien
ttgcttaaaattcgatagttgtgaa

SEQ ID NO: 5873358 - DNA, 25 bp, Homo sapien
atgtcattaatcgcatataaccaaa

SEQ ID NO: 5873359 - DNA, 25 bp, Homo sapien
gggtttcaattcgaattgaaattta

SEQ ID NO: 5873360 - DNA, 25 bp, Homo sapien
aataaatataacgacgataaatcgc

SEQ ID NO: 5873361 - DNA, 25 bp, Homo sapien
aatctatatacgtaaaatcgccatt

SEQ ID NO: 5873362 - DNA, 25 bp, Homo sapien
agatggaatcgttattaagaataca

SEQ ID NO: 5873363 - DNA, 25 bp, Homo sapien
ttgtttattatctcaatcgtaacct

SEQ ID NO: 5873364 - DNA, 25 bp, Homo sapien
tttataaattacgattccgacgtta

SEQ ID NO: 5873365 - DNA, 25 bp, Homo sapien
gattttgtaattacgaatcgtgttt

SEQ ID NO: 5873366 - DNA, 25 bp, Homo sapien
ttaagacttatgttcgataaaaagg

SEQ ID NO: 5873367 - DNA, 25 bp, Homo sapien
ttcgtaattttcgattatgatcaac

SEQ ID NO: 5873368 - DNA, 25 bp, Homo sapien
gaagatactaaattcgaatagtaac

SEQ ID NO: 5873369 - DNA, 25 bp, Homo sapien
ctgaattatacgatgtacatataag

SEQ ID NO: 5873370 - DNA, 25 bp, Homo sapien
gaatgtataagccgctaaaaatata

SEQ ID NO: 5873371 - DNA, 25 bp, Homo sapien
cttcaattcattttttgcgatatag

SEQ ID NO: 5873372 - DNA, 25 bp, Homo sapien
agtattgtttgataatcgcaatgat

SEQ ID NO: 5873373 - DNA, 25 bp, Homo sapien
atttagatattgttttaccgcgaat

SEQ ID NO: 5873374 - DNA, 25 bp, Homo sapien
tttttcttatcgtagagattgagtt

SEQ ID NO: 5873375 - DNA, 25 bp, Homo sapien
caatataatgcgaatacttgtttct

SEQ ID NO: 5873376 - DNA, 25 bp, Homo sapien
gaatcaatagtatataatcgatctc

SEQ ID NO: 5873377 - DNA, 25 bp, Homo sapien
agtattacaataatacgcatgatac

SEQ ID NO: 5873378 - DNA, 25 bp, Homo sapien
tttacagcgaaatagtgataattca

SEQ ID NO: 5873379 - DNA, 25 bp, Homo sapien
gttccattgacgtataaaactatta

SEQ ID NO: 5873380 - DNA, 25 bp, Homo sapien
ttaatagtcgtaaatggttacgata

SEQ ID NO: 5873381 - DNA, 25 bp, Homo sapien
taattacgataaattgttgggagtt

SEQ ID NO: 5873382 - DNA, 25 bp, Homo sapien
ttttacgaataattatgattctgcc

SEQ ID NO: 5873383 - DNA, 25 bp, Homo sapien
acgaacgatttcgtaaaaaatgata

SEQ ID NO: 5873384 - DNA, 25 bp, Homo sapien
atttctaccgtttcgataataatgt

SEQ ID NO: 5873385 - DNA, 25 bp, Homo sapien
ttttcaaattaacgaatcgatatcg

SEQ ID NO: 5873386 - DNA, 25 bp, Homo sapien
atatagttatctatgcgattactct

SEQ ID NO: 5873387 - DNA, 25 bp, Homo sapien
aaatgtctgatttatccgatttagt

SEQ ID NO: 5873388 - DNA, 25 bp, Homo sapien
gatcattattacgattaaacgtgat

SEQ ID NO: 5873389 - DNA, 25 bp, Homo sapien
tactctacgattcgataatattagt

SEQ ID NO: 5873390 - DNA, 25 bp, Homo sapien
tattgcatctatatcgtatgatcta

SEQ ID NO: 5873391 - DNA, 25 bp, Homo sapien
cctaatcgtaatcaacattagtaaa

SEQ ID NO: 5873392 - DNA, 25 bp, Homo sapien
aaaacatatccaattgtcgagatta

SEQ ID NO: 5873393 - DNA, 25 bp, Homo sapien
gtttcaacaattaatcgattaggaa

SEQ ID NO: 5873394 - DNA, 25 bp, Homo sapien
tttttcgtttaatttaagtcgcatg

SEQ ID NO: 5873395 - DNA, 25 bp, Homo sapien
ttcatatatatttcgataacaaggg

SEQ ID NO: 5873396 - DNA, 25 bp, Homo sapien
atgcaattagattattatcgactgt

SEQ ID NO: 5873397 - DNA, 25 bp, Homo sapien
cttaacgtaactaactgatttaatg

SEQ ID NO: 5873398 - DNA, 25 bp, Homo sapien
tctagtcgaatatataagtaagcaa

SEQ ID NO: 5873399 - DNA, 25 bp, Homo sapien
caagacgattactataatataatgc

SEQ ID NO: 5873400 - DNA, 25 bp, Homo sapien
aaaacgcttaaacgagaatatatac

SEQ ID NO: 5873401 - DNA, 25 bp, Homo sapien
ttgtaataacttcgatcaacaacaa

SEQ ID NO: 5873402 - DNA, 25 bp, Homo sapien
tcacaatcgatttgacgattaatta

SEQ ID NO: 5873403 - DNA, 25 bp, Homo sapien
atatatattcgttaatcgtaggtga

SEQ ID NO: 5873404 - DNA, 25 bp, Homo sapien
atttaattcgttatttcgtagttgc

SEQ ID NO: 5873405 - DNA, 25 bp, Homo sapien
gaagttcgttacgtataaaattgta

SEQ ID NO: 5873406 - DNA, 25 bp, Homo sapien
aaatttatatattattcgtctcgcc

SEQ ID NO: 5873407 - DNA, 25 bp, Homo sapien
tcacctacgattaacgaatatatat

SEQ ID NO: 5873408 - DNA, 25 bp, Homo sapien
tactgttatagcgaatcgaaattta

SEQ ID NO: 5873409 - DNA, 25 bp, Homo sapien
ataccggttaaattatatcgagtat

SEQ ID NO: 5873410 - DNA, 25 bp, Homo sapien
acaattttacgacattagacttaga

SEQ ID NO: 5873411 - DNA, 25 bp, Homo sapien
tgactttataatacgcgaaaaatga

SEQ ID NO: 5873412 - DNA, 25 bp, Homo sapien
taaggggacgattatttatatacat

SEQ ID NO: 5873413 - DNA, 25 bp, Homo sapien
tttggttatatgcgattaatgacat

SEQ ID NO: 5873414 - DNA, 25 bp, Homo sapien
tactggattatatcgattaacaatg

SEQ ID NO: 5873415 - DNA, 25 bp, Homo sapien
ttattccattaatcttaacgcatag

SEQ ID NO: 5873416 - DNA, 25 bp, Homo sapien
ctttgacgacatttatataataagg

SEQ ID NO: 5873417 - DNA, 25 bp, Homo sapien
tactccgttagtaatccattataaa

SEQ ID NO: 5873418 - DNA, 25 bp, Homo sapien
catatacgacctacaattatataac

SEQ ID NO: 5873419 - DNA, 25 bp, Homo sapien
aatagtaatttactcgctatgcttt

SEQ ID NO: 5873420 - DNA, 25 bp, Homo sapien
actaaatcggataaatcagacattt

SEQ ID NO: 5873421 - DNA, 25 bp, Homo sapien
ttcctaatcgattaattgttgaaac

SEQ ID NO: 5873422 - DNA, 25 bp, Homo sapien
tactaatacttattttagcggacta

SEQ ID NO: 5873423 - DNA, 25 bp, Homo sapien
cgtagcgtcgataaatataaaaaat

SEQ ID NO: 5873424 - DNA, 25 bp, Homo sapien
acctataatcgttataagattacct

SEQ ID NO: 5873425 - DNA, 25 bp, Homo sapien
gaagagatattaacttcgattttac

SEQ ID NO: 5873426 - DNA, 25 bp, Homo sapien
atgaatttactttactcgaaacatg

SEQ ID NO: 5873427 - DNA, 25 bp, Homo sapien
agctaattaatatcaatacggacta

SEQ ID NO: 5873428 - DNA, 25 bp, Homo sapien
gtttgttattcgactaaagagttat

SEQ ID NO: 5873429 - DNA, 25 bp, Homo sapien
taatgcaattatatcgatctcttgt

SEQ ID NO: 5873430 - DNA, 25 bp, Homo sapien
gcttagcgaaactcaatttattaaa

SEQ ID NO: 5873431 - DNA, 25 bp, Homo sapien
atgttgtcgatatattacgttatgt

SEQ ID NO: 5873432 - DNA, 25 bp, Homo sapien
ctctattgttactcgaatataaaga

SEQ ID NO: 5873433 - DNA, 25 bp, Homo sapien
aagaacgagtattagaaaacgataa

SEQ ID NO: 5873434 - DNA, 25 bp, Homo sapien
tattgacgattaattattcgatcag

SEQ ID NO: 5873435 - DNA, 25 bp, Homo sapien
gaacaattgattttttcggaatatg

SEQ ID NO: 5873436 - DNA, 25 bp, Homo sapien
ctataattacctatatacgggatta

SEQ ID NO: 5873437 - DNA, 25 bp, Homo sapien
atatgtctatcgtaactttatgtac

SEQ ID NO: 5873438 - DNA, 25 bp, Homo sapien
tctataatcgttaattacgtcgaat

SEQ ID NO: 5873439 - DNA, 25 bp, Homo sapien
gttactattcgaatttagtatcttc

SEQ ID NO: 5873440 - DNA, 25 bp, Homo sapien
gtagacaattatacgaactctttaa

SEQ ID NO: 5873441 - DNA, 25 bp, Homo sapien
cagtgtaataaattacgtacgtatt

SEQ ID NO: 5873442 - DNA, 25 bp, Homo sapien
ttctcaatcgtacctagataaataa

SEQ ID NO: 5873443 - DNA, 25 bp, Homo sapien
gcaaatcgatagttctaaatatttc

SEQ ID NO: 5873444 - DNA, 25 bp, Homo sapien
catcaatctttacggtataaattga

SEQ ID NO: 5873445 - DNA, 25 bp, Homo sapien
tccaaattcgattactgaattttct

SEQ ID NO: 5873446 - DNA, 25 bp, Homo sapien
agatttatctcaatatagcgattca

SEQ ID NO: 5873447 - DNA, 25 bp, Homo sapien
aacatagattaatcgctatagtaag

SEQ ID NO: 5873448 - DNA, 25 bp, Homo sapien
caccatcgtcgttatatatatatta

SEQ ID NO: 5873449 - DNA, 25 bp, Homo sapien
ataaggattaacaacgaatacagat

SEQ ID NO: 5873450 - DNA, 25 bp, Homo sapien
tcttctaattgatcgcatataagaa

SEQ ID NO: 5873451 - DNA, 25 bp, Homo sapien
ttatgatatacgagattaacaccat

SEQ ID NO: 5873452 - DNA, 25 bp, Homo sapien
gtagtattcgttaattatcggtatt

SEQ ID NO: 5873453 - DNA, 25 bp, Homo sapien
aatgctagatagtactcgtaaaaat

SEQ ID NO: 5873454 - DNA, 25 bp, Homo sapien
tgtaactcgtactcatttaatagat

SEQ ID NO: 5873455 - DNA, 25 bp, Homo sapien
aaatatgttctaaccgtaatagcat

SEQ ID NO: 5873456 - DNA, 25 bp, Homo sapien
caactatataatcgtaatacgagtt

SEQ ID NO: 5873457 - DNA, 25 bp, Homo sapien
atctaataagttcgcaataaagtac

SEQ ID NO: 5873458 - DNA, 25 bp, Homo sapien
ttttataataggtaacggatacact

SEQ ID NO: 5873459 - DNA, 25 bp, Homo sapien
catttaatttcgcttgtaagtaaag

SEQ ID NO: 5873460 - DNA, 25 bp, Homo sapien
tatatttttagcggcttatacattc

SEQ ID NO: 5873461 - DNA, 25 bp, Homo sapien
ctgatcacttatcgaatttaaaaga

SEQ ID NO: 5873462 - DNA, 25 bp, Homo sapien
aaactttatatacttcgatctcagt

SEQ ID NO: 5873463 - DNA, 25 bp, Homo sapien
aaagcttaaaatccgttgaaatcta

SEQ ID NO: 5873464 - DNA, 25 bp, Homo sapien
ataattatgatgtattcggtgatgt

SEQ ID NO: 5873465 - DNA, 25 bp, Homo sapien
tccaagtcgcaattgattatattta

SEQ ID NO: 5873466 - DNA, 25 bp, Homo sapien
ttaaaatgtttttcgaacgatacac

SEQ ID NO: 5873467 - DNA, 25 bp, Homo sapien
aaactccgttatatgaaattagagt

SEQ ID NO: 5873468 - DNA, 25 bp, Homo sapien
ataatctcgttatatcaatctgtac

SEQ ID NO: 5873469 - DNA, 25 bp, Homo sapien
ttggaatataatagacgtcacaaat

SEQ ID NO: 5873470 - DNA, 25 bp, Homo sapien
ctatatcgcaaaaaatgaattgaag

SEQ ID NO: 5873471 - DNA, 25 bp, Homo sapien
aagaccttattattacgatatgaag

SEQ ID NO: 5873472 - DNA, 25 bp, Homo sapien
atttgattcgtaacgtaattcctta

SEQ ID NO: 5873473 - DNA, 25 bp, Homo sapien
agtatttattcgaattagttacgtc

SEQ ID NO: 5873474 - DNA, 25 bp, Homo sapien
tgaaccgattcaaatctttaagtat

SEQ ID NO: 5873475 - DNA, 25 bp, Homo sapien
ctcctcgaataacgattataatatt

SEQ ID NO: 5873476 - DNA, 25 bp, Homo sapien
gttaatatactaaatgcgatgatag

SEQ ID NO: 5873477 - DNA, 25 bp, Homo sapien
tttgctattaatcgcgaattagaat

SEQ ID NO: 5873478 - DNA, 25 bp, Homo sapien
tttataacgtaataagtttggccta

SEQ ID NO: 5873479 - DNA, 25 bp, Homo sapien
gttttatttcgcgtcaataactaaa

SEQ ID NO: 5873480 - DNA, 25 bp, Homo sapien
aaatctagtccgataagtaaatctt

SEQ ID NO: 5873481 - DNA, 25 bp, Homo sapien
tagtttttcgatatcattatcagtc

SEQ ID NO: 5873482 - DNA, 25 bp, Homo sapien
catttttaacctataaatcgcaaca

SEQ ID NO: 5873483 - DNA, 25 bp, Homo sapien
aatacgtgattatcgtaatatcaga

SEQ ID NO: 5873484 - DNA, 25 bp, Homo sapien
acccaaataatcgtatagatcttaa

SEQ ID NO: 5873485 - DNA, 25 bp, Homo sapien
attctaattcgataattagttggga

SEQ ID NO: 5873486 - DNA, 25 bp, Homo sapien
ttgactcggaattaatatatcattc

SEQ ID NO: 5873487 - DNA, 25 bp, Homo sapien
aagatgtaaaagttatatcgccaat

SEQ ID NO: 5873488 - DNA, 25 bp, Homo sapien
ttatgctgattacgactatttattg

SEQ ID NO: 5873489 - DNA, 25 bp, Homo sapien
tgtattcttaataacgattccatct

SEQ ID NO: 5873490 - DNA, 25 bp, Homo sapien
taatccgattatccaaaaaatgctt

SEQ ID NO: 5873491 - DNA, 25 bp, Homo sapien
ttaaaacaatcaattagtcggtgta

SEQ ID NO: 5873492 - DNA, 25 bp, Homo sapien
cccttgttatcgaaatatatatgaa

SEQ ID NO: 5873493 - DNA, 25 bp, Homo sapien
tatttccatatattaatcgcctcat

SEQ ID NO: 5873494 - DNA, 25 bp, Homo sapien
actcaacgtacgattattttattga

SEQ ID NO: 5873495 - DNA, 25 bp, Homo sapien
acttgaccgatcataacataaaaaa

SEQ ID NO: 5873496 - DNA, 25 bp, Homo sapien
catttacgaaaagtttgattgtagt

SEQ ID NO: 5873497 - DNA, 25 bp, Homo sapien
aaatgaatttgtcgaacttttacac

SEQ ID NO: 5873498 - DNA, 25 bp, Homo sapien
atgacggattattaatcgatagtaa

SEQ ID NO: 5873499 - DNA, 25 bp, Homo sapien
tacacatctttatcgatacattaag

SEQ ID NO: 5873500 - DNA, 25 bp, Homo sapien
atattaacgatatgcgattttgtca

SEQ ID NO: 5873501 - DNA, 25 bp, Homo sapien
agaatgacgtaacttaatcattctt

SEQ ID NO: 5873502 - DNA, 25 bp, Homo sapien
gatcttttcaatcgaactattcaat

SEQ ID NO: 5873503 - DNA, 25 bp, Homo sapien
ggataagttaggatcgtaatttata

SEQ ID NO: 5873504 - DNA, 25 bp, Homo sapien
tttgatcttaatgttcgattcagat

SEQ ID NO: 5873505 - DNA, 25 bp, Homo sapien
aattcaatcgcgtataataaatgct

SEQ ID NO: 5873506 - DNA, 25 bp, Homo sapien
caactatattaatttacgaccttct

SEQ ID NO: 5873507 - DNA, 25 bp, Homo sapien
cttatgtctaacgattaatactaca

SEQ ID NO: 5873508 - DNA, 25 bp, Homo sapien
gatcttcgaattaaattctacgaaa

SEQ ID NO: 5873509 - DNA, 25 bp, Homo sapien
aataaatattacgaatccaacttgg

SEQ ID NO: 5873510 - DNA, 25 bp, Homo sapien
aggttacgattgagataataaacaa

SEQ ID NO: 5873511 - DNA, 25 bp, Homo sapien
tcaccatatcgtttacgtatattta

SEQ ID NO: 5873512 - DNA, 25 bp, Homo sapien
gaaatcgcgaattaaatatttaacc

SEQ ID NO: 5873513 - DNA, 25 bp, Homo sapien
agggaaaattatcgatagtaataca

SEQ ID NO: 5873514 - DNA, 25 bp, Homo sapien
acagtcgataataatctaattgcat

SEQ ID NO: 5873515 - DNA, 25 bp, Homo sapien
tccatgattaatagttcacgaaatt

SEQ ID NO: 5873516 - DNA, 25 bp, Homo sapien
ataacctaatattcgatacaacaca

SEQ ID NO: 5873517 - DNA, 25 bp, Homo sapien
cacattattaattacggatcttact

SEQ ID NO: 5873518 - DNA, 25 bp, Homo sapien
tatagtaacgaaaactagtatgttg

SEQ ID NO: 5873519 - DNA, 25 bp, Homo sapien
tcttattaaatcgtaatagtggtac

SEQ ID NO: 5873520 - DNA, 25 bp, Homo sapien
taatcatcgtattgatatcgttcat

SEQ ID NO: 5873521 - DNA, 25 bp, Homo sapien
agcatcgatttattcgtaaagattt

SEQ ID NO: 5873522 - DNA, 25 bp, Homo sapien
agtttgtaattcgacatatagttac

SEQ ID NO: 5873523 - DNA, 25 bp, Homo sapien
aatcacaaagtacgataatttaagg

SEQ ID NO: 5873524 - DNA, 25 bp, Homo sapien
agtttgactaatagtaatcgtaaac

SEQ ID NO: 5873525 - DNA, 25 bp, Homo sapien
ggttaatagtaatacgattcacaaa

SEQ ID NO: 5873526 - DNA, 25 bp, Homo sapien
gatcatatgacctattttcgtatta

SEQ ID NO: 5873527 - DNA, 25 bp, Homo sapien
tatcattttttacgaaatcgttcgt

SEQ ID NO: 5873528 - DNA, 25 bp, Homo sapien
cagtaaaatttcgaattaactcaac

SEQ ID NO: 5873529 - DNA, 25 bp, Homo sapien
tcaatataaacttaccgttaatgga

SEQ ID NO: 5873530 - DNA, 25 bp, Homo sapien
catataagcttacgttcaatcttta

SEQ ID NO: 5873531 - DNA, 25 bp, Homo sapien
gatatgttctaacgaataagtagaa

SEQ ID NO: 5873532 - DNA, 25 bp, Homo sapien
agcaataattacggatttcgtaatt

SEQ ID NO: 5873533 - DNA, 25 bp, Homo sapien
ttacgttcgatacgataattagatt

SEQ ID NO: 5873534 - DNA, 25 bp, Homo sapien
tatatatttcgactattacctcgta

SEQ ID NO: 5873535 - DNA, 25 bp, Homo sapien
tcataaatcgtacgtaatagaattg

SEQ ID NO: 5873536 - DNA, 25 bp, Homo sapien
actaacggttatcaattaagcttta

SEQ ID NO: 5873537 - DNA, 25 bp, Homo sapien
aaatgagaatacgtacgttactaat

SEQ ID NO: 5873538 - DNA, 25 bp, Homo sapien
ctcataataatatgatgcgatacta

SEQ ID NO: 5873539 - DNA, 25 bp, Homo sapien
agagttaatgtctaaacgagtaatt

SEQ ID NO: 5873540 - DNA, 25 bp, Homo sapien
cttataaatcctaataacgaaagac

SEQ ID NO: 5873541 - DNA, 25 bp, Homo sapien
tagcagatatattcgtcgtatatat

SEQ ID NO: 5873542 - DNA, 25 bp, Homo sapien
taatgatcgtacgttattaaaatgc

SEQ ID NO: 5873543 - DNA, 25 bp, Homo sapien
cctaatcgctagtaatattagattt

SEQ ID NO: 5873544 - DNA, 25 bp, Homo sapien
tcatcatatcaatttcacgaattca

SEQ ID NO: 5873545 - DNA, 25 bp, Homo sapien
actataactagttaatctcgtttct

SEQ ID NO: 5873546 - DNA, 25 bp, Homo sapien
tgtatttaagcaactttcgagtata

SEQ ID NO: 5873547 - DNA, 25 bp, Homo sapien
tacttattatgcgaatatagctgta

SEQ ID NO: 5873548 - DNA, 25 bp, Homo sapien
aactgtatatcatcgttagaaagtt

SEQ ID NO: 5873549 - DNA, 25 bp, Homo sapien
atctttagcaactcgttattaaact

SEQ ID NO: 5873550 - DNA, 25 bp, Homo sapien
taacgtcggaatcgtaatttataaa

SEQ ID NO: 5873551 - DNA, 25 bp, Homo sapien
gttgtatatcgattaagtaaattgc

SEQ ID NO: 5873552 - DNA, 25 bp, Homo sapien
gatgctcgatcaatttaaacataat

SEQ ID NO: 5873553 - DNA, 25 bp, Homo sapien
actattttttactaacgatctggta

SEQ ID NO: 5873554 - DNA, 25 bp, Homo sapien
aaccacgatccttatattaattcat

SEQ ID NO: 5873555 - DNA, 25 bp, Homo sapien
ctattttataacagttcgtcaaaac

SEQ ID NO: 5873556 - DNA, 25 bp, Homo sapien
taaagaatgttatatcggattcgat

SEQ ID NO: 5873557 - DNA, 25 bp, Homo sapien
ttggctatcgaataacttattcatt

SEQ ID NO: 5873558 - DNA, 25 bp, Homo sapien
tggttatcgaatatagcttttaaac

SEQ ID NO: 5873559 - DNA, 25 bp, Homo sapien
tgatatacgaatacttatgattagg

SEQ ID NO: 5873560 - DNA, 25 bp, Homo sapien
aatacctatatggcgaaatataaga

SEQ ID NO: 5873561 - DNA, 25 bp, Homo sapien
actcgtttagttcgactataattat

SEQ ID NO: 5873562 - DNA, 25 bp, Homo sapien
ctagtatgtcgatgatatactttta

SEQ ID NO: 5873563 - DNA, 25 bp, Homo sapien
tcatgtatgcgtaacctaatttaaa

SEQ ID NO: 5873564 - DNA, 25 bp, Homo sapien
acattgtaaaaattccgatcgatat

SEQ ID NO: 5873565 - DNA, 25 bp, Homo sapien
gtcttttagatatagcgttatgaaa

SEQ ID NO: 5873566 - DNA, 25 bp, Homo sapien
cattgtaaagttatcggtataacat

SEQ ID NO: 5873567 - DNA, 25 bp, Homo sapien
ttcattaacggttgaaatagactat

SEQ ID NO: 5873568 - DNA, 25 bp, Homo sapien
aaaacattaacgatagtgttttgca

SEQ ID NO: 5873569 - DNA, 25 bp, Homo sapien
acgtaatttatgtccgaatcatatt

SEQ ID NO: 5873570 - DNA, 25 bp, Homo sapien
taatctcgacaattggatatgtttt

SEQ ID NO: 5873571 - DNA, 25 bp, Homo sapien
ctgactataagttcgttaatatttg

SEQ ID NO: 5873572 - DNA, 25 bp, Homo sapien
gtatatattctcgtttaagcgtttt

SEQ ID NO: 5873573 - DNA, 25 bp, Homo sapien
tccaacgtacttatctaaataaaac

SEQ ID NO: 5873574 - DNA, 25 bp, Homo sapien
aatggcgattttacgtatatagatt

SEQ ID NO: 5873575 - DNA, 25 bp, Homo sapien
acatattgttgatacgctaatatgt

SEQ ID NO: 5873576 - DNA, 25 bp, Homo sapien
aataacgaataatatcatctcgaca

SEQ ID NO: 5873577 - DNA, 25 bp, Homo sapien
tacttatactcgtaactatccataa

SEQ ID NO: 5873578 - DNA, 25 bp, Homo sapien
taatattattcgaataattggtcgg

SEQ ID NO: 5873579 - DNA, 25 bp, Homo sapien
gagaatgttattacgaaattcatca

SEQ ID NO: 5873580 - DNA, 25 bp, Homo sapien
tgcatgaaatttcgatctaaaacaa

SEQ ID NO: 5873581 - DNA, 25 bp, Homo sapien
agtatttcgaatcgagttaaaacat

SEQ ID NO: 5873582 - DNA, 25 bp, Homo sapien
cagtaaacattgcgaaatttatatc

SEQ ID NO: 5873583 - DNA, 25 bp, Homo sapien
catgatagtaattcgacatgtataa

SEQ ID NO: 5873584 - DNA, 25 bp, Homo sapien
taattaatcgtcaaatcgattgtga

SEQ ID NO: 5873585 - DNA, 25 bp, Homo sapien
gttgtaactatagtcgaatctataa

SEQ ID NO: 5873586 - DNA, 25 bp, Homo sapien
ttcattacgtatttacgataatacc

SEQ ID NO: 5873587 - DNA, 25 bp, Homo sapien
gaaacatattagaataaacgttcct

SEQ ID NO: 5873588 - DNA, 25 bp, Homo sapien
tgtataggatacgttattagaatca

SEQ ID NO: 5873589 - DNA, 25 bp, Homo sapien
cagcttacgaaattctaatattgat

SEQ ID NO: 5873590 - DNA, 25 bp, Homo sapien
aatctcgtaataagtatcaaagact

SEQ ID NO: 5873591 - DNA, 25 bp, Homo sapien
attcgcggtaaaacaatatctaaat

SEQ ID NO: 5873592 - DNA, 25 bp, Homo sapien
tattacatacgttagactatccttt

SEQ ID NO: 5873593 - DNA, 25 bp, Homo sapien
tgatatcgagtaattagtatgatac

SEQ ID NO: 5873594 - DNA, 25 bp, Homo sapien
actaactacgagattaaaatcattg

SEQ ID NO: 5873595 - DNA, 25 bp, Homo sapien
gtatacgattttttatcgataagca

SEQ ID NO: 5873596 - DNA, 25 bp, Homo sapien
agtttttatccgaactattagcaat

SEQ ID NO: 5873597 - DNA, 25 bp, Homo sapien
ttgctaattacccgattatattaca

SEQ ID NO: 5873598 - DNA, 25 bp, Homo sapien
agtaactcgatttagaatacttcat

SEQ ID NO: 5873599 - DNA, 25 bp, Homo sapien
tttgtattatcgcgttttgtgataa

SEQ ID NO: 5873600 - DNA, 25 bp, Homo sapien
gacaacgcacaattattgaaatata

SEQ ID NO: 5873601 - DNA, 25 bp, Homo sapien
tttctgaagtatttagtacgtagtt

SEQ ID NO: 5873602 - DNA, 25 bp, Homo sapien
gtttataacgtagtcagtattagaa

SEQ ID NO: 5873603 - DNA, 25 bp, Homo sapien
taagattagatcattccgatatact

SEQ ID NO: 5873604 - DNA, 25 bp, Homo sapien
tagtattttcgcgattcttattcaa

SEQ ID NO: 5873605 - DNA, 25 bp, Homo sapien
gattcactaattgtcgataattaac

SEQ ID NO: 5873606 - DNA, 25 bp, Homo sapien
ttttgttcgcttaagttagtgaatt

SEQ ID NO: 5873607 - DNA, 25 bp, Homo sapien
ttgaatacgttattaatcgtatgtg

SEQ ID NO: 5873608 - DNA, 25 bp, Homo sapien
tttttacgaaaatcgttaatgctag

SEQ ID NO: 5873609 - DNA, 25 bp, Homo sapien
atgctaatcttgcgaagatattaaa

SEQ ID NO: 5873610 - DNA, 25 bp, Homo sapien
tagaaacgactaatatcattctcta

SEQ ID NO: 5873611 - DNA, 25 bp, Homo sapien
tagtaatacgatagtcttatttcag

SEQ ID NO: 5873612 - DNA, 25 bp, Homo sapien
ttgcttacttatatattcgactaga

SEQ ID NO: 5873613 - DNA, 25 bp, Homo sapien
ccaactgcgataatagtttttatat

SEQ ID NO: 5873614 - DNA, 25 bp, Homo sapien
ggcagaatcataattattcgtaaaa

SEQ ID NO: 5873615 - DNA, 25 bp, Homo sapien
ccattactgtaattaatcgaaatac

SEQ ID NO: 5873616 - DNA, 25 bp, Homo sapien
tatcgtaaccatttacgactattaa

SEQ ID NO: 5873617 - DNA, 25 bp, Homo sapien
tttctccgcagttaatattattatg

SEQ ID NO: 5873618 - DNA, 25 bp, Homo sapien
taaaattgcgactaagtatttctca

SEQ ID NO: 5873619 - DNA, 25 bp, Homo sapien
tcttatatcgtaattagatctttcg

SEQ ID NO: 5873620 - DNA, 25 bp, Homo sapien
agtagaacgatttaaatcctatcat

SEQ ID NO: 5873621 - DNA, 25 bp, Homo sapien
cataagttattcgtagttttacatc

SEQ ID NO: 5873622 - DNA, 25 bp, Homo sapien
tatgataaattaatcccgtaacttg

SEQ ID NO: 5873623 - DNA, 25 bp, Homo sapien
tgaagttatacgatatcaatagaga

SEQ ID NO: 5873624 - DNA, 25 bp, Homo sapien
tatagggtacgatattaaatcatgt

SEQ ID NO: 5873625 - DNA, 25 bp, Homo sapien
aactcaatctctacgataagaaaaa

SEQ ID NO: 5873626 - DNA, 25 bp, Homo sapien
tgtcaacatcgatatagaatcaaaa

SEQ ID NO: 5873627 - DNA, 25 bp, Homo sapien
ttctggaatcggataaataagttaa

SEQ ID NO: 5873628 - DNA, 25 bp, Homo sapien
ttattgttatgatatcgaattcgca

SEQ ID NO: 5873629 - DNA, 25 bp, Homo sapien
ataagtgtataaactcgatattcgt

SEQ ID NO: 5873630 - DNA, 25 bp, Homo sapien
tggcatagcggttaaaatataatat

SEQ ID NO: 5873631 - DNA, 25 bp, Homo sapien
aaaactatcttatcgcaattagagt

SEQ ID NO: 5873632 - DNA, 25 bp, Homo sapien
tcaatctataagttgaatcgtagat

SEQ ID NO: 5873633 - DNA, 25 bp, Homo sapien
taaatcgtataaattagttacaggg

SEQ ID NO: 5873634 - DNA, 25 bp, Homo sapien
gcgaaccgaattatattataaaaga

SEQ ID NO: 5873635 - DNA, 25 bp, Homo sapien
ttttggatcgaaattacaatcttca

SEQ ID NO: 5873636 - DNA, 25 bp, Homo sapien
tctattcgactaattaattgtgtgt

SEQ ID NO: 5873637 - DNA, 25 bp, Homo sapien
tgtattaaccgtgttaaatatgtag

SEQ ID NO: 5873638 - DNA, 25 bp, Homo sapien
aactactcgcataaattaagataac

SEQ ID NO: 5873639 - DNA, 25 bp, Homo sapien
atttagtattgcgatttaacaatcc

SEQ ID NO: 5873640 - DNA, 25 bp, Homo sapien
atctctattactcctcgtatataaa

SEQ ID NO: 5873641 - DNA, 25 bp, Homo sapien
aatcacttatgttacgtttagcaat

SEQ ID NO: 5873642 - DNA, 25 bp, Homo sapien
aacggatcaataaagatcgtatatt

SEQ ID NO: 5873643 - DNA, 25 bp, Homo sapien
gcattatattatagtaatcgtcttg

SEQ ID NO: 5873644 - DNA, 25 bp, Homo sapien
atctcgtaagtattttacgaatcat

SEQ ID NO: 5873645 - DNA, 25 bp, Homo sapien
cgtattaatcgagaacatagaattt

SEQ ID NO: 5873646 - DNA, 25 bp, Homo sapien
catgcgacttaaattaaacgaaaaa

SEQ ID NO: 5873647 - DNA, 25 bp, Homo sapien
tatccttgatccgtttaatttgtaa

SEQ ID NO: 5873648 - DNA, 25 bp, Homo sapien
tagaaaattttcgatctttacgtca

SEQ ID NO: 5873649 - DNA, 25 bp, Homo sapien
gtatcatgcgtattattgtaatact

SEQ ID NO: 5873650 - DNA, 25 bp, Homo sapien
agaaacaagtattcgcattatattg

SEQ ID NO: 5873651 - DNA, 25 bp, Homo sapien
ttaccatcgtacgattatcaaaata

SEQ ID NO: 5873652 - DNA, 25 bp, Homo sapien
ctaattaatcgtagtaatattccag

SEQ ID NO: 5873653 - DNA, 25 bp, Homo sapien
tagtgttatcgagaattaacgttaa

SEQ ID NO: 5873654 - DNA, 25 bp, Homo sapien
ttcatattatatatttcgcgatgtg

SEQ ID NO: 5873655 - DNA, 25 bp, Homo sapien
tctattagtatatacgtcttttcca

SEQ ID NO: 5873656 - DNA, 25 bp, Homo sapien
aatgatactagacatatcgataaac

SEQ ID NO: 5873657 - DNA, 25 bp, Homo sapien
gaataccgttaattagataacatgt

SEQ ID NO: 5873658 - DNA, 25 bp, Homo sapien
gaattgaccgaatttttataatcct

SEQ ID NO: 5873659 - DNA, 25 bp, Homo sapien
tgagatgatcgtaaatgtaacttaa

SEQ ID NO: 5873660 - DNA, 25 bp, Homo sapien
agtgtacaatcgatttaaatttagc

SEQ ID NO: 5873661 - DNA, 25 bp, Homo sapien
tattaaatgtcgaaacataggctta

SEQ ID NO: 5873662 - DNA, 25 bp, Homo sapien
tccatatctaatcgaaattaaacgt

SEQ ID NO: 5873663 - DNA, 25 bp, Homo sapien
aaacacgattcgtaattacaaaatc

SEQ ID NO: 5873664 - DNA, 25 bp, Homo sapien
tacaattttatacgtaacgaacttc

SEQ ID NO: 5873665 - DNA, 25 bp, Homo sapien
actcatacataaacgctagaaaata

SEQ ID NO: 5873666 - DNA, 25 bp, Homo sapien
tatctctatacgcatttagaacaaa

SEQ ID NO: 5873667 - DNA, 25 bp, Homo sapien
agatatatcgaatcgtttaatagca

SEQ ID NO: 5873668 - DNA, 25 bp, Homo sapien
ttaaataatttacgcgataatcgtg

SEQ ID NO: 5873669 - DNA, 25 bp, Homo sapien
ccgaatacaatcaacgaattaatta

SEQ ID NO: 5873670 - DNA, 25 bp, Homo sapien
ctcttttcgaccttagtataataat

SEQ ID NO: 5873671 - DNA, 25 bp, Homo sapien
tctaccgttattatttacgactaaa

SEQ ID NO: 5873672 - DNA, 25 bp, Homo sapien
attgaaccgctaattagttatatac

SEQ ID NO: 5873673 - DNA, 25 bp, Homo sapien
atcattgcgattatcaaacaatact

SEQ ID NO: 5873674 - DNA, 25 bp, Homo sapien
tgtaatccgttatatgacaaaattc

SEQ ID NO: 5873675 - DNA, 25 bp, Homo sapien
gttctttactgatagtcgtaatttt

SEQ ID NO: 5873676 - DNA, 25 bp, Homo sapien
aagatcgtataatatagcatcattg

SEQ ID NO: 5873677 - DNA, 25 bp, Homo sapien
actaagacgactaaataatgatcaa

SEQ ID NO: 5873678 - DNA, 25 bp, Homo sapien
tagatcatacgatatagatgcaata

SEQ ID NO: 5873679 - DNA, 25 bp, Homo sapien
agtcacgtgaatcgtataaatatta

SEQ ID NO: 5873680 - DNA, 25 bp, Homo sapien
gattaatattagtttcgttaacgca

SEQ ID NO: 5873681 - DNA, 25 bp, Homo sapien
ctagtttatttatacgcgttatatg

SEQ ID NO: 5873682 - DNA, 25 bp, Homo sapien
aatttgaccgttacttaatatcttc

SEQ ID NO: 5873683 - DNA, 25 bp, Homo sapien
ttgactacgataattatctagcatt

SEQ ID NO: 5873684 - DNA, 25 bp, Homo sapien
tcaaacgacaatactatttaatgtg

SEQ ID NO: 5873685 - DNA, 25 bp, Homo sapien
attatttcatgtctaacgtacattg

SEQ ID NO: 5873686 - DNA, 25 bp, Homo sapien
agatttatcaattaacgctaaagtc

SEQ ID NO: 5873687 - DNA, 25 bp, Homo sapien
acctaaattcatatcgcgttaatat

SEQ ID NO: 5873688 - DNA, 25 bp, Homo sapien
taaatttcaattcgaattgaaaccc

SEQ ID NO: 5873689 - DNA, 25 bp, Homo sapien
atgcaattaaacgtcgttgatatta

SEQ ID NO: 5873690 - DNA, 25 bp, Homo sapien
aactcatcgatatggaattacaata

SEQ ID NO: 5873691 - DNA, 25 bp, Homo sapien
ttattcttgatatcgtattaggcat

SEQ ID NO: 5873692 - DNA, 25 bp, Homo sapien
cctttttatcgaacataagtcttaa

SEQ ID NO: 5873693 - DNA, 25 bp, Homo sapien
aagtaaactctatttacgataagag

SEQ ID NO: 5873694 - DNA, 25 bp, Homo sapien
atattgtaatttcgattagtctctc

SEQ ID NO: 5873695 - DNA, 25 bp, Homo sapien
tgattattaatttcggattgacgta

SEQ ID NO: 5873696 - DNA, 25 bp, Homo sapien
tatcacgtataatacgtaaatccaa

SEQ ID NO: 5873697 - DNA, 25 bp, Homo sapien
ctaagataattcgatagttacacat

SEQ ID NO: 5873698 - DNA, 25 bp, Homo sapien
atagtgttctaagcgtatatagttt

SEQ ID NO: 5873699 - DNA, 25 bp, Homo sapien
cattaaatcagttagttacgttaag

SEQ ID NO: 5873700 - DNA, 25 bp, Homo sapien
ccttaatcctaaaattatcgtaaga

SEQ ID NO: 5873701 - DNA, 25 bp, Homo sapien
acttgacgaaatcgattattattgt

SEQ ID NO: 5873702 - DNA, 25 bp, Homo sapien
gagatcgattatatactattgattc

SEQ ID NO: 5873703 - DNA, 25 bp, Homo sapien
actctaattgaacgattaactgtta

SEQ ID NO: 5873704 - DNA, 25 bp, Homo sapien
caaatatgacgaaatcaattagttc

SEQ ID NO: 5873705 - DNA, 25 bp, Homo sapien
gaactatagtttaacgaatctgata

SEQ ID NO: 5873706 - DNA, 25 bp, Homo sapien
acataattaaattatgcgtcctaac

SEQ ID NO: 5873707 - DNA, 25 bp, Homo sapien
catatttaattaacgcgcaaataca

SEQ ID NO: 5873708 - DNA, 25 bp, Homo sapien
tgttatcgattatttacacagatca

SEQ ID NO: 5873709 - DNA, 25 bp, Homo sapien
tgtctatgcaatataattcgtgata

SEQ ID NO: 5873710 - DNA, 25 bp, Homo sapien
aatgaaagatttgcgtaaactttag

SEQ ID NO: 5873711 - DNA, 25 bp, Homo sapien
tacgtgcgtttatagtaaagaaaaa

SEQ ID NO: 5873712 - DNA, 25 bp, Homo sapien
ataccatccgcgaattataatatat

SEQ ID NO: 5873713 - DNA, 25 bp, Homo sapien
taggtcttaatcgaaaaattcgtta

SEQ ID NO: 5873714 - DNA, 25 bp, Homo sapien
gcgatttatcgtcgttatatttatt

SEQ ID NO: 5873715 - DNA, 25 bp, Homo sapien
ttatttaataaaatcgagcgctatc

SEQ ID NO: 5873716 - DNA, 25 bp, Homo sapien
tattcttcgaaattattatcggatg

SEQ ID NO: 5873717 - DNA, 25 bp, Homo sapien
cactgtaataaacgattaactacta

SEQ ID NO: 5873718 - DNA, 25 bp, Homo sapien
aagtctaacaattatatacggtttg

SEQ ID NO: 5873719 - DNA, 25 bp, Homo sapien
tgtctgttttcggataaataagttt

SEQ ID NO: 5873720 - DNA, 25 bp, Homo sapien
ttaattccataacataatcggagaa

SEQ ID NO: 5873721 - DNA, 25 bp, Homo sapien
atcacgtttaatcgtaataatgatc

SEQ ID NO: 5873722 - DNA, 25 bp, Homo sapien
atgctaagtcgattagaatatacat

SEQ ID NO: 5873723 - DNA, 25 bp, Homo sapien
attagcaatactaaacgatttagca

SEQ ID NO: 5873724 - DNA, 25 bp, Homo sapien
tgaattatcactatttcgctgtaaa

SEQ ID NO: 5873725 - DNA, 25 bp, Homo sapien
taatacatattatgcgttttgctca

SEQ ID NO: 5873726 - DNA, 25 bp, Homo sapien
aagccattaattattgcgaaagtta

SEQ ID NO: 5873727 - DNA, 25 bp, Homo sapien
attcgatattcttcgcaattaactt

SEQ ID NO: 5873728 - DNA, 25 bp, Homo sapien
aaagtgttgatattcgttcattcta

SEQ ID NO: 5873729 - DNA, 25 bp, Homo sapien
gttgatcataatcgaaaattacgaa

SEQ ID NO: 5873730 - DNA, 25 bp, Homo sapien
taataaattaattctcgaatcggtg

SEQ ID NO: 5873731 - DNA, 25 bp, Homo sapien
atgtaaatacgataagtaatcgatg

SEQ ID NO: 5873732 - DNA, 25 bp, Homo sapien
tataaattacgcgaaatgttacaag

SEQ ID NO: 5873733 - DNA, 25 bp, Homo sapien
gacttatgtacttatcgtatatttg

SEQ ID NO: 5873734 - DNA, 25 bp, Homo sapien
cgtaaataatgcgataaatcaaatg

SEQ ID NO: 5873735 - DNA, 25 bp, Homo sapien
gctcactattgttaaatcgttatta

SEQ ID NO: 5873736 - DNA, 25 bp, Homo sapien
acagatacgttcgatttaatgtatt

SEQ ID NO: 5873737 - DNA, 25 bp, Homo sapien
agtgtatttgtaatacgttcagtaa

SEQ ID NO: 5873738 - DNA, 25 bp, Homo sapien
ttcattaactaaattttcgcagcaa

SEQ ID NO: 5873739 - DNA, 25 bp, Homo sapien
caatgatttgtatttacgcgtaatt

SEQ ID NO: 5873740 - DNA, 25 bp, Homo sapien
attgtcgtgttaataaagttatggt

SEQ ID NO: 5873741 - DNA, 25 bp, Homo sapien
taaaattcatattatgcgtatggga

SEQ ID NO: 5873742 - DNA, 25 bp, Homo sapien
aaccatcgatagactaaatgaataa

SEQ ID NO: 5873743 - DNA, 25 bp, Homo sapien
ttaatagtagcgttaattaccacat

SEQ ID NO: 5873744 - DNA, 25 bp, Homo sapien
aggtatataatcgtcatatgattac

SEQ ID NO: 5873745 - DNA, 25 bp, Homo sapien
cttatacaatatatggatcgataga

SEQ ID NO: 5873746 - DNA, 25 bp, Homo sapien
ttgtttcgattttcgttgtatgttt

SEQ ID NO: 5873747 - DNA, 25 bp, Homo sapien
acaaatcgcattttaacctattgtt

SEQ ID NO: 5873748 - DNA, 25 bp, Homo sapien
agagtaatcgcatagataactatat

SEQ ID NO: 5873749 - DNA, 25 bp, Homo sapien
taacagtattattactcgaagatgt

SEQ ID NO: 5873750 - DNA, 25 bp, Homo sapien
atttagtacataatcgatagggatt

SEQ ID NO: 5873751 - DNA, 25 bp, Homo sapien
aaacgataattgcgtatacaatttc

SEQ ID NO: 5873752 - DNA, 25 bp, Homo sapien
atagatcgaattaagactataagac

SEQ ID NO: 5873753 - DNA, 25 bp, Homo sapien
agatacgcttaagttatcatactaa

SEQ ID NO: 5873754 - DNA, 25 bp, Homo sapien
cttttgattatatgacgaaaggaat

SEQ ID NO: 5873755 - DNA, 25 bp, Homo sapien
tcgttattcttgcgatatatttaac

SEQ ID NO: 5873756 - DNA, 25 bp, Homo sapien
aaaaatattcatcggttagaggata

SEQ ID NO: 5873757 - DNA, 25 bp, Homo sapien
cgaataacgcaataattaatgtaag

SEQ ID NO: 5873758 - DNA, 25 bp, Homo sapien
ccaatctacgttctaaattgattta

SEQ ID NO: 5873759 - DNA, 25 bp, Homo sapien
gcaactacactataatcgattatta

SEQ ID NO: 5873760 - DNA, 25 bp, Homo sapien
aactcccaacaatttatcgtaatta

SEQ ID NO: 5873761 - DNA, 25 bp, Homo sapien
atagcgaattgacgaattataagaa

SEQ ID NO: 5873762 - DNA, 25 bp, Homo sapien
ttgttgttgatcgaagttattacaa

SEQ ID NO: 5873763 - DNA, 25 bp, Homo sapien
gtaataatagacgctaaattgatac

SEQ ID NO: 5873764 - DNA, 25 bp, Homo sapien
aatagattatactatgacgacgtaa

SEQ ID NO: 5873765 - DNA, 25 bp, Homo sapien
tatagttatatcatccgataacgaa

SEQ ID NO: 5873766 - DNA, 25 bp, Homo sapien
gtttcataatcgtaagatttagtag

SEQ ID NO: 5873767 - DNA, 25 bp, Homo sapien
agaatacactaatttcgtaagctat

SEQ ID NO: 5873768 - DNA, 25 bp, Homo sapien
taagtacgatatttcgattgacatt

SEQ ID NO: 5873769 - DNA, 25 bp, Homo sapien
aaacggataattcgttaatagtgaa

SEQ ID NO: 5873770 - DNA, 25 bp, Homo sapien
aaatagttagcgaacatatatagca

SEQ ID NO: 5873771 - DNA, 25 bp, Homo sapien
aactcagcgattcattgaattttat

SEQ ID NO: 5873772 - DNA, 25 bp, Homo sapien
actaatattatcgaatcgtagagta

SEQ ID NO: 5873773 - DNA, 25 bp, Homo sapien
tggcttatcgataatgatgttaaaa

SEQ ID NO: 5873774 - DNA, 25 bp, Homo sapien
aaggttacgacaataatctaactaa

SEQ ID NO: 5873775 - DNA, 25 bp, Homo sapien
gaattcgatcttaataattcggatt

SEQ ID NO: 5873776 - DNA, 25 bp, Homo sapien
attaacgtagaattaataacgcatc

SEQ ID NO: 5873777 - DNA, 25 bp, Homo sapien
tgatttgtacgattaataatgctga

SEQ ID NO: 5873778 - DNA, 25 bp, Homo sapien
tcatttatacgatagtaatcaacag

SEQ ID NO: 5873779 - DNA, 25 bp, Homo sapien
aaggaaattcttacgagctttaata

SEQ ID NO: 5873780 - DNA, 25 bp, Homo sapien
tttcgttcgtaataatatacaagtg

SEQ ID NO: 5873781 - DNA, 25 bp, Homo sapien
actacttatattagacgtaattacg

SEQ ID NO: 5873782 - DNA, 25 bp, Homo sapien
gttaattacctatacgcattattca

SEQ ID NO: 5873783 - DNA, 25 bp, Homo sapien
tatttttaaatgtagtgcgaacact

SEQ ID NO: 5873784 - DNA, 25 bp, Homo sapien
tatataattaattcgtccgatcgat

SEQ ID NO: 5873785 - DNA, 25 bp, Homo sapien
cacataccgatttatcatatttaca

SEQ ID NO: 5873786 - DNA, 25 bp, Homo sapien
cgatatcgattcgttaatttgaaaa

SEQ ID NO: 5873787 - DNA, 25 bp, Homo sapien
taaaaaatatcgtgattagacatgc

SEQ ID NO: 5873788 - DNA, 25 bp, Homo sapien
ccatatcattaatcgataagaaaca

SEQ ID NO: 5873789 - DNA, 25 bp, Homo sapien
ccatgaacgaatcgataaattaata

SEQ ID NO: 5873790 - DNA, 25 bp, Homo sapien
taatagttttatacgtcaatggaac

SEQ ID NO: 5873791 - DNA, 25 bp, Homo sapien
tctaaattaaagtttagcgaacgat

SEQ ID NO: 5873792 - DNA, 25 bp, Homo sapien
ttaatttcgaactcataagaacagt

SEQ ID NO: 5873793 - DNA, 25 bp, Homo sapien
tgctagatatatttatcgtatcttg

SEQ ID NO: 5873794 - DNA, 25 bp, Homo sapien
gtatatcgcttcgaatataaaactt

SEQ ID NO: 5873795 - DNA, 25 bp, Homo sapien
gtatcttaattctacatacggttat

SEQ ID NO: 5873796 - DNA, 25 bp, Homo sapien
aataacgatataggattagtcactt

SEQ ID NO: 5873797 - DNA, 25 bp, Homo sapien
tcaccgttcgatatattattttttc

SEQ ID NO: 5873798 - DNA, 25 bp, Homo sapien
aaagtgtcgtacaatatatagttca

SEQ ID NO: 5873799 - DNA, 25 bp, Homo sapien
tgatggattttttatcgttaatgag

SEQ ID NO: 5873800 - DNA, 25 bp, Homo sapien
gtatacgtttactattaaatgtcca

SEQ ID NO: 5873801 - DNA, 25 bp, Homo sapien
tactgattacgttatactaattgag

SEQ ID NO: 5873802 - DNA, 25 bp, Homo sapien
catttatttattgcggatcatctat

SEQ ID NO: 5873803 - DNA, 25 bp, Homo sapien
taagataatcgatttagattgcgta

SEQ ID NO: 5873804 - DNA, 25 bp, Homo sapien
cttatatgtacatcgtataattcag

SEQ ID NO: 5873805 - DNA, 25 bp, Homo sapien
ttatataatacggatttactcgtga

SEQ ID NO: 5873806 - DNA, 25 bp, Homo sapien
tatgtgttctcgataagtaatctaa

SEQ ID NO: 5873807 - DNA, 25 bp, Homo sapien
tattttgtacggtattatgaacaag

SEQ ID NO: 5873808 - DNA, 25 bp, Homo sapien
cattttacggatcattagattcaaa

SEQ ID NO: 5873809 - DNA, 25 bp, Homo sapien
atatgaatcttttatacgatctgga

SEQ ID NO: 5873810 - DNA, 25 bp, Homo sapien
tcttataattttattcgcatactcg

SEQ ID NO: 5873811 - DNA, 25 bp, Homo sapien
tgctttgtatcgcagttaaaattta

SEQ ID NO: 5873812 - DNA, 25 bp, Homo sapien
gtatgactcatatgtaatcgaattt

SEQ ID NO: 5873813 - DNA, 25 bp, Homo sapien
ctaagtcgatatgatcgaaaattta

SEQ ID NO: 5873814 - DNA, 25 bp, Homo sapien
acagaattatcgataagtttctact

SEQ ID NO: 5873815 - DNA, 25 bp, Homo sapien
agatacgagtatacaaattatcatg

SEQ ID NO: 5873816 - DNA, 25 bp, Homo sapien
tttgcattagtagatatccgattaa

SEQ ID NO: 5873817 - DNA, 25 bp, Homo sapien
ctaatgtcgaaaaaatcgaatcatt

SEQ ID NO: 5873818 - DNA, 25 bp, Homo sapien
ttcttgtatcgaaattcgatcattt

SEQ ID NO: 5873819 - DNA, 25 bp, Homo sapien
tctaagtatagtttatacgatctga

SEQ ID NO: 5873820 - DNA, 25 bp, Homo sapien
tcttagataacgaatcgttatatag

SEQ ID NO: 5873821 - DNA, 25 bp, Homo sapien
ggatttgattaacgaaaattccatt

SEQ ID NO: 5873822 - DNA, 25 bp, Homo sapien
tgagaaatctttaacgcgattatat

SEQ ID NO: 5873823 - DNA, 25 bp, Homo sapien
ttcaacgagaagaataagatcattt

SEQ ID NO: 5873824 - DNA, 25 bp, Homo sapien
taaaatcgctatattattcaaccgt

SEQ ID NO: 5873825 - DNA, 25 bp, Homo sapien
atctgacatataacgcttgtttatt

SEQ ID NO: 5873826 - DNA, 25 bp, Homo sapien
tgtcattctatcaatcgaatcattt

SEQ ID NO: 5873827 - DNA, 25 bp, Homo sapien
tgtaatcttttatgcgagtaattac

SEQ ID NO: 5873828 - DNA, 25 bp, Homo sapien
ctcaatactcgtattagtataacaa

SEQ ID NO: 5873829 - DNA, 25 bp, Homo sapien
acattattatcgaaacggtagaaat

SEQ ID NO: 5873830 - DNA, 25 bp, Homo sapien
ctaatcgttataaatctatcctttg

SEQ ID NO: 5873831 - DNA, 25 bp, Homo sapien
ttctcactagttatacgaattttca

SEQ ID NO: 5873832 - DNA, 25 bp, Homo sapien
tgactagttcgtaattattacatct

SEQ ID NO: 5873833 - DNA, 25 bp, Homo sapien
ttcgtacgaatagaattaataggtt

SEQ ID NO: 5873834 - DNA, 25 bp, Homo sapien
taatttaatacgctattaggtcgat

SEQ ID NO: 5873835 - DNA, 25 bp, Homo sapien
tatacatattcgtttgatacaagtc

SEQ ID NO: 5873836 - DNA, 25 bp, Homo sapien
tgaagttaagatcttatcgaacaat

SEQ ID NO: 5873837 - DNA, 25 bp, Homo sapien
taagcttacttatcgtaatatgtag

SEQ ID NO: 5873838 - DNA, 25 bp, Homo sapien
aaagaattgcgaagtctaatgaaaa

SEQ ID NO: 5873839 - DNA, 25 bp, Homo sapien
aaaagtatttatagcgcgatgaata

SEQ ID NO: 5873840 - DNA, 25 bp, Homo sapien
ctaacgtaaatcgctaatattcaaa

SEQ ID NO: 5873841 - DNA, 25 bp, Homo sapien
gacgtcatacgataatttgaattat

SEQ ID NO: 5873842 - DNA, 25 bp, Homo sapien
ctttaaaattagttatcgagtcttc

SEQ ID NO: 5873843 - DNA, 25 bp, Homo sapien
atcgtattagtctaaatgcgttata

SEQ ID NO: 5873844 - DNA, 25 bp, Homo sapien
gatcctcgacgatttttataatata

SEQ ID NO: 5873845 - DNA, 25 bp, Homo sapien
ctcaagatattaatttttcgcgtta

SEQ ID NO: 5873846 - DNA, 25 bp, Homo sapien
ttaacattcgttatgttagaagtgt

SEQ ID NO: 5873847 - DNA, 25 bp, Homo sapien
aaagatttatacgactattgccaaa

SEQ ID NO: 5873848 - DNA, 25 bp, Homo sapien
agtgtaacttatcatacgatgaaaa

SEQ ID NO: 5873849 - DNA, 25 bp, Homo sapien
agtaattgtatctcgatatcgatta

SEQ ID NO: 5873850 - DNA, 25 bp, Homo sapien
ttatattacgcaatacgaatagatc

SEQ ID NO: 5873851 - DNA, 25 bp, Homo sapien
tcactaatttattcaacgctcaaat

SEQ ID NO: 5873852 - DNA, 25 bp, Homo sapien
tttactaatgttgattacgattagg

SEQ ID NO: 5873853 - DNA, 25 bp, Homo sapien
tgcggatatcgtattaactaattta

SEQ ID NO: 5873854 - DNA, 25 bp, Homo sapien
gacatgctatacgttaatattttga

SEQ ID NO: 5873855 - DNA, 25 bp, Homo sapien
aatacatatgacgattaaactcaag

SEQ ID NO: 5873856 - DNA, 25 bp, Homo sapien
gcaactacgaaataacgaattaaat

SEQ ID NO: 5873857 - DNA, 25 bp, Homo sapien
ttttctaataacatagatcgacgta

SEQ ID NO: 5873858 - DNA, 25 bp, Homo sapien
gtttgttatcgaataaacgtaattg

SEQ ID NO: 5873859 - DNA, 25 bp, Homo sapien
atacaacgatattatgtgtagttca

SEQ ID NO: 5873860 - DNA, 25 bp, Homo sapien
ttgaattataagttcgacgtatgta

SEQ ID NO: 5873861 - DNA, 25 bp, Homo sapien
ttcacaactatcgaattttaagcaa

SEQ ID NO: 5873862 - DNA, 25 bp, Homo sapien
atatttattgtagtatacgtcctga

SEQ ID NO: 5873863 - DNA, 25 bp, Homo sapien
ggtcataatagtaatacgacatttt

SEQ ID NO: 5873864 - DNA, 25 bp, Homo sapien
actaattattagatcgatcatgagc

SEQ ID NO: 5873865 - DNA, 25 bp, Homo sapien
atgtgtttcataaatcgagcgattt

SEQ ID NO: 5873866 - DNA, 25 bp, Homo sapien
aacattatacgattagtctctcgta

SEQ ID NO: 5873867 - DNA, 25 bp, Homo sapien
ttctgaccgatacaattaacatcaa

SEQ ID NO: 5873868 - DNA, 25 bp, Homo sapien
gaataaaacgatacgtataatctcg

SEQ ID NO: 5873869 - DNA, 25 bp, Homo sapien
gttggcgtcgaataatatatttaga

SEQ ID NO: 5873870 - DNA, 25 bp, Homo sapien
actgttttaatacgcgatgacattt

SEQ ID NO: 5873871 - DNA, 25 bp, Homo sapien
gtctacgtaacgtaaatagagtatt

SEQ ID NO: 5873872 - DNA, 25 bp, Homo sapien
agtttacgcaaacgataattctaag

SEQ ID NO: 5873873 - DNA, 25 bp, Homo sapien
tcgagtataacggatatttaggata

SEQ ID NO: 5873874 - DNA, 25 bp, Homo sapien
ttctttcgattagttgataacgact

SEQ ID NO: 5873875 - DNA, 25 bp, Homo sapien
atccatttccggtatcataatactt

SEQ ID NO: 5873876 - DNA, 25 bp, Homo sapien
tttcattgatctcgcatataaagca

SEQ ID NO: 5873877 - DNA, 25 bp, Homo sapien
gacatttccgatctaatgaatcatt

SEQ ID NO: 5873878 - DNA, 25 bp, Homo sapien
aagagacgcgaattttgaattaatg

SEQ ID NO: 5873879 - DNA, 25 bp, Homo sapien
tatctgatccgcataaaatttcgat

SEQ ID NO: 5873880 - DNA, 25 bp, Homo sapien
acgaattacgtatattgtcgttaga

SEQ ID NO: 5873881 - DNA, 25 bp, Homo sapien
gttcacgatataacgtaataatgga

SEQ ID NO: 5873882 - DNA, 25 bp, Homo sapien
tttgatgacgaaccttataagtgaa

SEQ ID NO: 5873883 - DNA, 25 bp, Homo sapien
gattttgattcgctaatgatttggt

SEQ ID NO: 5873884 - DNA, 25 bp, Homo sapien
accaagaatataacggagtactata

SEQ ID NO: 5873885 - DNA, 25 bp, Homo sapien
ggataagaaaacgcgtttaattaca

SEQ ID NO: 5873886 - DNA, 25 bp, Homo sapien
atcttggaacgatatattacacctt

SEQ ID NO: 5873887 - DNA, 25 bp, Homo sapien
tttcttcgctaattctctatgtatg

SEQ ID NO: 5873888 - DNA, 25 bp, Homo sapien
tttccacgaaattaataagatccca

SEQ ID NO: 5873889 - DNA, 25 bp, Homo sapien
agatatcgtttacgaattatagtgc

SEQ ID NO: 5873890 - DNA, 25 bp, Homo sapien
caatttacttacgaccaatttcgta

SEQ ID NO: 5873891 - DNA, 25 bp, Homo sapien
ttacaacccgtaaatatagttgttg

SEQ ID NO: 5873892 - DNA, 25 bp, Homo sapien
taaagttcgactattaacagcatca

SEQ ID NO: 5873893 - DNA, 25 bp, Homo sapien
atcatttcatttacgatcgtaagga

SEQ ID NO: 5873894 - DNA, 25 bp, Homo sapien
ttgcattcggtacttttaacatttg

SEQ ID NO: 5873895 - DNA, 25 bp, Homo sapien
actaatctaattacgagttctgtag

SEQ ID NO: 5873896 - DNA, 25 bp, Homo sapien
atggactaaattatcgagacaatac

SEQ ID NO: 5873897 - DNA, 25 bp, Homo sapien
aattgatcgtatatggtacacaatg

SEQ ID NO: 5873898 - DNA, 25 bp, Homo sapien
agtaagaaattacgttcgttgaaca

SEQ ID NO: 5873899 - DNA, 25 bp, Homo sapien
cttatcgtattgtatcattgagtca

SEQ ID NO: 5873900 - DNA, 25 bp, Homo sapien
tcatgtagaattctagtacgagtaa

SEQ ID NO: 5873901 - DNA, 25 bp, Homo sapien
tatcgtcaattcgttcgatttatag

SEQ ID NO: 5873902 - DNA, 25 bp, Homo sapien
aactgatggtcgtattgtaaataga

SEQ ID NO: 5873903 - DNA, 25 bp, Homo sapien
ttgtttggtaattgttcgttcatga

SEQ ID NO: 5873904 - DNA, 25 bp, Homo sapien
atctggtccatacgatataaattac

SEQ ID NO: 5873905 - DNA, 25 bp, Homo sapien
ccaaacgatatatatcttgttgtct

SEQ ID NO: 5873906 - DNA, 25 bp, Homo sapien
atagcaattaaccgaattatcagca

SEQ ID NO: 5873907 - DNA, 25 bp, Homo sapien
atcgaaattgtcaattcgttcaagt

SEQ ID NO: 5873908 - DNA, 25 bp, Homo sapien
tcaagtatcgctaaaacagatctaa

SEQ ID NO: 5873909 - DNA, 25 bp, Homo sapien
gtctaatagccgacttattaataga

SEQ ID NO: 5873910 - DNA, 25 bp, Homo sapien
tacggctaagatcgaacatatatta

SEQ ID NO: 5873911 - DNA, 25 bp, Homo sapien
tagagctaagttaaacgagtatagt

SEQ ID NO: 5873912 - DNA, 25 bp, Homo sapien
aaagtcgatgaatattcgaatgctt

SEQ ID NO: 5873913 - DNA, 25 bp, Homo sapien
tagtccgattagtagttaacctata

SEQ ID NO: 5873914 - DNA, 25 bp, Homo sapien
acgatatcgttgaatgtattcgata

SEQ ID NO: 5873915 - DNA, 25 bp, Homo sapien
ggcattattttcgaaattcggtatt

SEQ ID NO: 5873916 - DNA, 25 bp, Homo sapien
atgaatcaattgttcgtatagagga

SEQ ID NO: 5873917 - DNA, 25 bp, Homo sapien
taaagagtatcgacaatagtcgata

SEQ ID NO: 5873918 - DNA, 25 bp, Homo sapien
aaatcttgaatgtccgaaattacgt

SEQ ID NO: 5873919 - DNA, 25 bp, Homo sapien
tgccttctatccgtatattaaaaga

SEQ ID NO: 5873920 - DNA, 25 bp, Homo sapien
atcgagtattggtatcgtaagaatt

SEQ ID NO: 5873921 - DNA, 25 bp, Homo sapien
tgccatctatcgtaatactattact

SEQ ID NO: 5873922 - DNA, 25 bp, Homo sapien
atgtgaaacgttattcgaaattcag

SEQ ID NO: 5873923 - DNA, 25 bp, Homo sapien
gttagttacttatacgtgataacga

SEQ ID NO: 5873924 - DNA, 25 bp, Homo sapien
gtataacgcttatcaaatactgaac

SEQ ID NO: 5873925 - DNA, 25 bp, Homo sapien
tagctctaaggtattaaacgtaaag

SEQ ID NO: 5873926 - DNA, 25 bp, Homo sapien
aagcgtttatacgtaaaacgatcaa

SEQ ID NO: 5873927 - DNA, 25 bp, Homo sapien
aaaggtacttatataaatcggcttg

SEQ ID NO: 5873928 - DNA, 25 bp, Homo sapien
tgatttattaacgttctagacttcg

SEQ ID NO: 5873929 - DNA, 25 bp, Homo sapien
gagtattttaacgataaacgatgga

SEQ ID NO: 5873930 - DNA, 25 bp, Homo sapien
taaactcttgccgaattataaggaa

SEQ ID NO: 5873931 - DNA, 25 bp, Homo sapien
atgcgaaaaaatttgcgtcgtattt

SEQ ID NO: 5873932 - DNA, 25 bp, Homo sapien
ttagtatcaatttcgttcgtgcaaa

SEQ ID NO: 5873933 - DNA, 25 bp, Homo sapien
ataatagtaatcgtaaagttggcga

SEQ ID NO: 5873934 - DNA, 25 bp, Homo sapien
tgtgacgcgttaattaatatgctat

SEQ ID NO: 5873935 - DNA, 25 bp, Homo sapien
ctaaatatatcgcgttacatccaaa

SEQ ID NO: 5873936 - DNA, 25 bp, Homo sapien
acgaatagtctaattatcgtttgct

SEQ ID NO: 5873937 - DNA, 25 bp, Homo sapien
ttatgtttcggaatattcgagtagt

SEQ ID NO: 5873938 - DNA, 25 bp, Homo sapien
caaaataacttcgtattcgatcaga

SEQ ID NO: 5873939 - DNA, 25 bp, Homo sapien
cattaatactttcgtacgaagattc

SEQ ID NO: 5873940 - DNA, 25 bp, Homo sapien
cttactagataatttgcgaattcct

SEQ ID NO: 5873941 - DNA, 25 bp, Homo sapien
tggttcgcttaatatacaatctttc

SEQ ID NO: 5873942 - DNA, 25 bp, Homo sapien
tacagcgtaatctagatttcaaaac

SEQ ID NO: 5873943 - DNA, 25 bp, Homo sapien
gatcttcatcgtatcgtaaacataa

SEQ ID NO: 5873944 - DNA, 25 bp, Homo sapien
ctatgttataatgcgacttaaagag

SEQ ID NO: 5873945 - DNA, 25 bp, Homo sapien
taacgcgaatcgtttactaatcaaa

SEQ ID NO: 5873946 - DNA, 25 bp, Homo sapien
ctcagaattggtaacgatttctaaa

SEQ ID NO: 5873947 - DNA, 25 bp, Homo sapien
gaagtgtatcggatttaaacaagat

SEQ ID NO: 5873948 - DNA, 25 bp, Homo sapien
gttttgatactcgctaatatatgct

SEQ ID NO: 5873949 - DNA, 25 bp, Homo sapien
agcaccgtataacttattaaaacga

SEQ ID NO: 5873950 - DNA, 25 bp, Homo sapien
aacacaagtaattcgcttatcagaa

SEQ ID NO: 5873951 - DNA, 25 bp, Homo sapien
tgaaaaacttgtttacgatctgttc

SEQ ID NO: 5873952 - DNA, 25 bp, Homo sapien
ttctgtcgcgtaataaatatgtagt

SEQ ID NO: 5873953 - DNA, 25 bp, Homo sapien
taacttacataactttgacggaact

SEQ ID NO: 5873954 - DNA, 25 bp, Homo sapien
gtaaaacttcgattattggtttgca

SEQ ID NO: 5873955 - DNA, 25 bp, Homo sapien
tgcacatcgaattatttaactggaa

SEQ ID NO: 5873956 - DNA, 25 bp, Homo sapien
ttcggtgaccgaatttaatctaatt

SEQ ID NO: 5873957 - DNA, 25 bp, Homo sapien
tttcattcgtcgtattattttctcg

SEQ ID NO: 5873958 - DNA, 25 bp, Homo sapien
gattagcgatctttatatcttgaga

SEQ ID NO: 5873959 - DNA, 25 bp, Homo sapien
aaatggtttagcggttatttctgta

SEQ ID NO: 5873960 - DNA, 25 bp, Homo sapien
ggggtcgattagattcattatatat

SEQ ID NO: 5873961 - DNA, 25 bp, Homo sapien
atcgtacgatcttatagtgttagta

SEQ ID NO: 5873962 - DNA, 25 bp, Homo sapien
atagccattaaatttcgactaacga

SEQ ID NO: 5873963 - DNA, 25 bp, Homo sapien
agataaccttatatgtcgtacatca

SEQ ID NO: 5873964 - DNA, 25 bp, Homo sapien
gataataagatatcgtctaactgga

SEQ ID NO: 5873965 - DNA, 25 bp, Homo sapien
atcagcattagcttaaacgttgttt

SEQ ID NO: 5873966 - DNA, 25 bp, Homo sapien
tattatgactcgcaaattttggtac

SEQ ID NO: 5873967 - DNA, 25 bp, Homo sapien
gcacggcgaatctatatatttatat

SEQ ID NO: 5873968 - DNA, 25 bp, Homo sapien
tgatataacattcgagtgtagtgtt

SEQ ID NO: 5873969 - DNA, 25 bp, Homo sapien
atccttaataatttagctcgacatc

SEQ ID NO: 5873970 - DNA, 25 bp, Homo sapien
agctgttggtcgaaatgataaattt

SEQ ID NO: 5873971 - DNA, 25 bp, Homo sapien
cttattgataaacggtttatccatc

SEQ ID NO: 5873972 - DNA, 25 bp, Homo sapien
agcacacgatattactacaattcat

SEQ ID NO: 5873973 - DNA, 25 bp, Homo sapien
tacttatacgtttacaagagtcgat

SEQ ID NO: 5873974 - DNA, 25 bp, Homo sapien
ctatgctatcgtaatttaattcagc

SEQ ID NO: 5873975 - DNA, 25 bp, Homo sapien
tattgatttcgaacgttataggttc

SEQ ID NO: 5873976 - DNA, 25 bp, Homo sapien
ttttgtaagtatgtcgattcaacac

SEQ ID NO: 5873977 - DNA, 25 bp, Homo sapien
gactaagtttttcggacataagaat

SEQ ID NO: 5873978 - DNA, 25 bp, Homo sapien
atttctcggtataaatcttacttgg

SEQ ID NO: 5873979 - DNA, 25 bp, Homo sapien
ctcttgataaacattatacggtttc

SEQ ID NO: 5873980 - DNA, 25 bp, Homo sapien
tagtttcgatattacttaatgaccc

SEQ ID NO: 5873981 - DNA, 25 bp, Homo sapien
aatcaaatacgaatattacgggtca

SEQ ID NO: 5873982 - DNA, 25 bp, Homo sapien
ttagttcgtatcgaaattttcgatg

SEQ ID NO: 5873983 - DNA, 25 bp, Homo sapien
cgataataacgactcgtatttttca

SEQ ID NO: 5873984 - DNA, 25 bp, Homo sapien
atgtaatagcgatgtacatttcttg

SEQ ID NO: 5873985 - DNA, 25 bp, Homo sapien
ggttgtaagttacgttacttattca

SEQ ID NO: 5873986 - DNA, 25 bp, Homo sapien
tttgattgcgtgataatcaaatcag

SEQ ID NO: 5873987 - DNA, 25 bp, Homo sapien
ttagttaacgatagcttgatgtaga

SEQ ID NO: 5873988 - DNA, 25 bp, Homo sapien
ataaaatgaagttttaccgatctcc

SEQ ID NO: 5873989 - DNA, 25 bp, Homo sapien
ctcgaaactaattcgttagactatt

SEQ ID NO: 5873990 - DNA, 25 bp, Homo sapien
gatcaatatattaacgggtaagtgt

SEQ ID NO: 5873991 - DNA, 25 bp, Homo sapien
ttattttggattaacgacaatagcg

SEQ ID NO: 5873992 - DNA, 25 bp, Homo sapien
tgtagagaacgtctatcttatattc

SEQ ID NO: 5873993 - DNA, 25 bp, Homo sapien
aatccacgttactatatcgagtata

SEQ ID NO: 5873994 - DNA, 25 bp, Homo sapien
agctggtcttttttcgaattgaata

SEQ ID NO: 5873995 - DNA, 25 bp, Homo sapien
aaggctaacgaacataatcgataaa

SEQ ID NO: 5873996 - DNA, 25 bp, Homo sapien
tgatgtatcaaatagacgatatctg

SEQ ID NO: 5873997 - DNA, 25 bp, Homo sapien
cttcataattaatgcgtaacgattc

SEQ ID NO: 5873998 - DNA, 25 bp, Homo sapien
tgctatatgtaacgtaatctgagaa

SEQ ID NO: 5873999 - DNA, 25 bp, Homo sapien
gcttgaataatataatcggcattct

SEQ ID NO: 5874000 - DNA, 25 bp, Homo sapien
ctgttaaatttatatgtccgctttc

SEQ ID NO: 5874001 - DNA, 25 bp, Homo sapien
agcattaattcgcgtttctttgata

SEQ ID NO: 5874002 - DNA, 25 bp, Homo sapien
ttacttatcgtttagtaattcgcca

SEQ ID NO: 5874003 - DNA, 25 bp, Homo sapien
taataggatcatcgatttattctcc

SEQ ID NO: 5874004 - DNA, 25 bp, Homo sapien
ttagccaacctaatatcgtttatga

SEQ ID NO: 5874005 - DNA, 25 bp, Homo sapien
atcgtaaattcgattacggaataac

SEQ ID NO: 5874006 - DNA, 25 bp, Homo sapien
gcgtttacatttcgtctattttgta

SEQ ID NO: 5874007 - DNA, 25 bp, Homo sapien
ggccaaacatatcttatcgttattt

SEQ ID NO: 5874008 - DNA, 25 bp, Homo sapien
catatacgcgtagttaaataatcag

SEQ ID NO: 5874009 - DNA, 25 bp, Homo sapien
aggatatattacgcttaacttctca

SEQ ID NO: 5874010 - DNA, 25 bp, Homo sapien
tttcttcgatagttgatgaagtact

SEQ ID NO: 5874011 - DNA, 25 bp, Homo sapien
atcgcacgataatcctatttgtaat

SEQ ID NO: 5874012 - DNA, 25 bp, Homo sapien
aataatctagcgacttataagcaga

SEQ ID NO: 5874013 - DNA, 25 bp, Homo sapien
tacagtatgattatcgctaagtaga

SEQ ID NO: 5874014 - DNA, 25 bp, Homo sapien
aacgaatcgtcgtattctaacttat

SEQ ID NO: 5874015 - DNA, 25 bp, Homo sapien
agaccttattaatcctacgaaatca

SEQ ID NO: 5874016 - DNA, 25 bp, Homo sapien
tgtatcatacgagtataaatagcac

SEQ ID NO: 5874017 - DNA, 25 bp, Homo sapien
tatgaatcaaattaacgcgaatcag

SEQ ID NO: 5874018 - DNA, 25 bp, Homo sapien
aaaaattcaatcggaattctcagtc

SEQ ID NO: 5874019 - DNA, 25 bp, Homo sapien
tagtcatatacgatatcctaagtag

SEQ ID NO: 5874020 - DNA, 25 bp, Homo sapien
ttgtaattaacgcgcatattacttg

SEQ ID NO: 5874021 - DNA, 25 bp, Homo sapien
catacgttataatatcgtcgttatg

SEQ ID NO: 5874022 - DNA, 25 bp, Homo sapien
gaccatatgacgtgttataatgtaa

SEQ ID NO: 5874023 - DNA, 25 bp, Homo sapien
atatcaaactatattaccgatgcgt

SEQ ID NO: 5874024 - DNA, 25 bp, Homo sapien
ggctaggatacgatataatataagt

SEQ ID NO: 5874025 - DNA, 25 bp, Homo sapien
atcataatattcgcggatttattcg

SEQ ID NO: 5874026 - DNA, 25 bp, Homo sapien
catgcgcgaataattaagttaaaac

SEQ ID NO: 5874027 - DNA, 25 bp, Homo sapien
tcgttaaacttcgacgtattattgt

SEQ ID NO: 5874028 - DNA, 25 bp, Homo sapien
atgtactacgaacatgtttatggtt

SEQ ID NO: 5874029 - DNA, 25 bp, Homo sapien
attttgaacgtaccaaattatgtgg

SEQ ID NO: 5874030 - DNA, 25 bp, Homo sapien
cggtagcgttcctaaattaaatata

SEQ ID NO: 5874031 - DNA, 25 bp, Homo sapien
cacctgattgcgaaaatcatattaa

SEQ ID NO: 5874032 - DNA, 25 bp, Homo sapien
ttgtgatatgctataacgttctttc

SEQ ID NO: 5874033 - DNA, 25 bp, Homo sapien
tattttaaatacgatgtcgtcgaca

SEQ ID NO: 5874034 - DNA, 25 bp, Homo sapien
ctcaatagtaaagttatacgcatag

SEQ ID NO: 5874035 - DNA, 25 bp, Homo sapien
agtttagttgcgtcaatattaagac

SEQ ID NO: 5874036 - DNA, 25 bp, Homo sapien
gctaatcgtaattatgttcgaatca

SEQ ID NO: 5874037 - DNA, 25 bp, Homo sapien
tttcagttcgttttatcaattccga

SEQ ID NO: 5874038 - DNA, 25 bp, Homo sapien
tgctagtatacgttcgaaaaagtta

SEQ ID NO: 5874039 - DNA, 25 bp, Homo sapien
ctattctaattatagcggaatatgc

SEQ ID NO: 5874040 - DNA, 25 bp, Homo sapien
gataaatttgatatcttcgaagtcg

SEQ ID NO: 5874041 - DNA, 25 bp, Homo sapien
aacagttctaagattatgcggatta

SEQ ID NO: 5874042 - DNA, 25 bp, Homo sapien
tacagaattgatcgactaacagtta

SEQ ID NO: 5874043 - DNA, 25 bp, Homo sapien
aacagacgacttataatcaaagaga

SEQ ID NO: 5874044 - DNA, 25 bp, Homo sapien
ttaaaataagataactccgtctagc

SEQ ID NO: 5874045 - DNA, 25 bp, Homo sapien
aagtgcgaatttactgttaaagatc

SEQ ID NO: 5874046 - DNA, 25 bp, Homo sapien
ctaactcgtaaattagcatttaggt

SEQ ID NO: 5874047 - DNA, 25 bp, Homo sapien
gcaagtatcgataagtgtattatca

SEQ ID NO: 5874048 - DNA, 25 bp, Homo sapien
ttagttacgcttataggaatttgct

SEQ ID NO: 5874049 - DNA, 25 bp, Homo sapien
cgataacgagtttaacgaatgaata

SEQ ID NO: 5874050 - DNA, 25 bp, Homo sapien
catggtataacgataattgttgtgt

SEQ ID NO: 5874051 - DNA, 25 bp, Homo sapien
tcttatagtaaaaaaccgctgatga

SEQ ID NO: 5874052 - DNA, 25 bp, Homo sapien
tcacaaatctagcggataatatgta

SEQ ID NO: 5874053 - DNA, 25 bp, Homo sapien
agagcataatggcgtattgaaaatt

SEQ ID NO: 5874054 - DNA, 25 bp, Homo sapien
ttagttatcgttaaatcaacgtcag

SEQ ID NO: 5874055 - DNA, 25 bp, Homo sapien
aaacaaaccgcactatataatcctt

SEQ ID NO: 5874056 - DNA, 25 bp, Homo sapien
ttagtaattccgacatatgttcagt

SEQ ID NO: 5874057 - DNA, 25 bp, Homo sapien
gactgatagtcgtaaattttcatca

SEQ ID NO: 5874058 - DNA, 25 bp, Homo sapien
tccattcgaacatctatattgaaca

SEQ ID NO: 5874059 - DNA, 25 bp, Homo sapien
atttcatcacaacgacttatatgga

SEQ ID NO: 5874060 - DNA, 25 bp, Homo sapien
aacaccatcgacgttataattcaat

SEQ ID NO: 5874061 - DNA, 25 bp, Homo sapien
gatattacatctaagcgatatagtc

SEQ ID NO: 5874062 - DNA, 25 bp, Homo sapien
actgtttagattaacgattcgaaca

SEQ ID NO: 5874063 - DNA, 25 bp, Homo sapien
ccacgttacgattgatattattatg

SEQ ID NO: 5874064 - DNA, 25 bp, Homo sapien
aagacatttaatcgttcgttgcaat

SEQ ID NO: 5874065 - DNA, 25 bp, Homo sapien
taggaaatcgattacgaaattacca

SEQ ID NO: 5874066 - DNA, 25 bp, Homo sapien
tttgacgttaatattcgaagatcga

SEQ ID NO: 5874067 - DNA, 25 bp, Homo sapien
ttacggcgctattttacttattcta

SEQ ID NO: 5874068 - DNA, 25 bp, Homo sapien
taatcaattacggataacacatgtg

SEQ ID NO: 5874069 - DNA, 25 bp, Homo sapien
acaaatatatatcatttcgcgcaga

SEQ ID NO: 5874070 - DNA, 25 bp, Homo sapien
caagtcatcggtatattattgagaa

SEQ ID NO: 5874071 - DNA, 25 bp, Homo sapien
tttccttactccgatattaatggta

SEQ ID NO: 5874072 - DNA, 25 bp, Homo sapien
gtttatcggaattatatactctcca

SEQ ID NO: 5874073 - DNA, 25 bp, Homo sapien
agtgagatatatcgtaatcttctgt

SEQ ID NO: 5874074 - DNA, 25 bp, Homo sapien
ataaatttcaatgcgatcatacgag

SEQ ID NO: 5874075 - DNA, 25 bp, Homo sapien
ttgcttattacgattaagattgagg

SEQ ID NO: 5874076 - DNA, 25 bp, Homo sapien
ttatcgtcgaattactcaatgtgat

SEQ ID NO: 5874077 - DNA, 25 bp, Homo sapien
gaaaatgacatatagatcgaatcac

SEQ ID NO: 5874078 - DNA, 25 bp, Homo sapien
gtgtgttatctattacgaaaacatg

SEQ ID NO: 5874079 - DNA, 25 bp, Homo sapien
tatcaacatcgctatattgattagg

SEQ ID NO: 5874080 - DNA, 25 bp, Homo sapien
gctttaattaattgaaccgttcgaa

SEQ ID NO: 5874081 - DNA, 25 bp, Homo sapien
ggtagctaattaagattcgaattag

SEQ ID NO: 5874082 - DNA, 25 bp, Homo sapien
actgaatctaattgactcgttaatg

SEQ ID NO: 5874083 - DNA, 25 bp, Homo sapien
ttttatattagattgtcgtctggtc

SEQ ID NO: 5874084 - DNA, 25 bp, Homo sapien
ctacaattcgttatattcgcagttt

SEQ ID NO: 5874085 - DNA, 25 bp, Homo sapien
cgttgataaattatcgcgttgttaa

SEQ ID NO: 5874086 - DNA, 25 bp, Homo sapien
atgaaatttcgttcgtgattgaaca

SEQ ID NO: 5874087 - DNA, 25 bp, Homo sapien
tttattacgaatggagttatacgtg

SEQ ID NO: 5874088 - DNA, 25 bp, Homo sapien
cccaatataacgaatacgttacaat

SEQ ID NO: 5874089 - DNA, 25 bp, Homo sapien
agatattactacacgtaatctagct

SEQ ID NO: 5874090 - DNA, 25 bp, Homo sapien
catctaaatcgtacgaaattatagg

SEQ ID NO: 5874091 - DNA, 25 bp, Homo sapien
aggtaaaatccgtagatatgaacta

SEQ ID NO: 5874092 - DNA, 25 bp, Homo sapien
gagcacgatatatcattttacagtt

SEQ ID NO: 5874093 - DNA, 25 bp, Homo sapien
aggtgataccggattatattataac

SEQ ID NO: 5874094 - DNA, 25 bp, Homo sapien
tttcatgatcgatttttcgagtgat

SEQ ID NO: 5874095 - DNA, 25 bp, Homo sapien
ctacacatcttttacgattcaagaa

SEQ ID NO: 5874096 - DNA, 25 bp, Homo sapien
gctagtagattatgtacgtcattta

SEQ ID NO: 5874097 - DNA, 25 bp, Homo sapien
actattcgttaacaaaatcgcacta

SEQ ID NO: 5874098 - DNA, 25 bp, Homo sapien
ccaaagtttcaatacatcgatcata

SEQ ID NO: 5874099 - DNA, 25 bp, Homo sapien
ggatccgactgatctaatatatttt

SEQ ID NO: 5874100 - DNA, 25 bp, Homo sapien
cagttaattaagttagtgcgaagta

SEQ ID NO: 5874101 - DNA, 25 bp, Homo sapien
taaaattcgcttaataagaagctcc

SEQ ID NO: 5874102 - DNA, 25 bp, Homo sapien
aagaatatccgactatatatgagct

SEQ ID NO: 5874103 - DNA, 25 bp, Homo sapien
gtgagtcgtattaatgtaacacaat

SEQ ID NO: 5874104 - DNA, 25 bp, Homo sapien
aagagtattaagttgacacgacaat

SEQ ID NO: 5874105 - DNA, 25 bp, Homo sapien
caccattattgtattacgaacattc

SEQ ID NO: 5874106 - DNA, 25 bp, Homo sapien
taattcgaaaaattactggtatccc

SEQ ID NO: 5874107 - DNA, 25 bp, Homo sapien
tgttgacgcttataatgatagtaac

SEQ ID NO: 5874108 - DNA, 25 bp, Homo sapien
ttagtctttaacgatagagtgacta

SEQ ID NO: 5874109 - DNA, 25 bp, Homo sapien
gcttcaaatactataattcgctgtt

SEQ ID NO: 5874110 - DNA, 25 bp, Homo sapien
ggtattttaacacgccaatagttta

SEQ ID NO: 5874111 - DNA, 25 bp, Homo sapien
ttctgtcgttcgtattctaacaata

SEQ ID NO: 5874112 - DNA, 25 bp, Homo sapien
acctcatatcgtttaaactaaggat

SEQ ID NO: 5874113 - DNA, 25 bp, Homo sapien
aacataattatgatcgtagtggact

SEQ ID NO: 5874114 - DNA, 25 bp, Homo sapien
tgattatataataagttacggaccc

SEQ ID NO: 5874115 - DNA, 25 bp, Homo sapien
tgtatattcgagtattatcaatccc

SEQ ID NO: 5874116 - DNA, 25 bp, Homo sapien
actaaattgtcgagtaatacagtct

SEQ ID NO: 5874117 - DNA, 25 bp, Homo sapien
ccctaatcgtagttaattgcaattt

SEQ ID NO: 5874118 - DNA, 25 bp, Homo sapien
gagtgatgaaattacgcgtatttta

SEQ ID NO: 5874119 - DNA, 25 bp, Homo sapien
tatatgacttagatattcgatgtgc

SEQ ID NO: 5874120 - DNA, 25 bp, Homo sapien
cagttgatcttattacgagaatcat

SEQ ID NO: 5874121 - DNA, 25 bp, Homo sapien
cataacgcgcattatttaataagct

SEQ ID NO: 5874122 - DNA, 25 bp, Homo sapien
cctgtgattaaatttacgtagcaat

SEQ ID NO: 5874123 - DNA, 25 bp, Homo sapien
ttcgattagtttagacgcaatagat

SEQ ID NO: 5874124 - DNA, 25 bp, Homo sapien
gctcgtcgaattgttactaaatatt

SEQ ID NO: 5874125 - DNA, 25 bp, Homo sapien
gctttcggttatgataatttattcc

SEQ ID NO: 5874126 - DNA, 25 bp, Homo sapien
gctcacgaatatagctataacaaaa

SEQ ID NO: 5874127 - DNA, 25 bp, Homo sapien
tcaataataatattcgaactcgacg

SEQ ID NO: 5874128 - DNA, 25 bp, Homo sapien
gcatacgttaataagtaatatcgac

SEQ ID NO: 5874129 - DNA, 25 bp, Homo sapien
tgtaactaatcgttattaaggcgtt

SEQ ID NO: 5874130 - DNA, 25 bp, Homo sapien
tagtactattagctcgttaaaactc

SEQ ID NO: 5874131 - DNA, 25 bp, Homo sapien
gctaggacgaaatagtttaataatc

SEQ ID NO: 5874132 - DNA, 25 bp, Homo sapien
gtatttcgtactgctaatttgtttg

SEQ ID NO: 5874133 - DNA, 25 bp, Homo sapien
acttacgtataaattatctagtcgc

SEQ ID NO: 5874134 - DNA, 25 bp, Homo sapien
cctaaacgatcttatgttgataaag

SEQ ID NO: 5874135 - DNA, 25 bp, Homo sapien
tgtcatacgacaactatgtaatcaa

SEQ ID NO: 5874136 - DNA, 25 bp, Homo sapien
gcatttatagcaagtacgttcataa

SEQ ID NO: 5874137 - DNA, 25 bp, Homo sapien
aatgtatataatttccgacaggatg

SEQ ID NO: 5874138 - DNA, 25 bp, Homo sapien
tatcatcaacgaagttagttttgtc

SEQ ID NO: 5874139 - DNA, 25 bp, Homo sapien
aggatttgaatcgataacgacaaat

SEQ ID NO: 5874140 - DNA, 25 bp, Homo sapien
tgttttgtcgactcttatattgttg

SEQ ID NO: 5874141 - DNA, 25 bp, Homo sapien
cttcccgataatagtaaacttcaat

SEQ ID NO: 5874142 - DNA, 25 bp, Homo sapien
atttgtgtaatagtatcggactgaa

SEQ ID NO: 5874143 - DNA, 25 bp, Homo sapien
atacaaatacaacgatagaaccaca

SEQ ID NO: 5874144 - DNA, 25 bp, Homo sapien
gttacgtaatagaatcgtttagtct

SEQ ID NO: 5874145 - DNA, 25 bp, Homo sapien
gatcggtatataatcgatttgtctt

SEQ ID NO: 5874146 - DNA, 25 bp, Homo sapien
ccttttgatctcgattaatagcatt

SEQ ID NO: 5874147 - DNA, 25 bp, Homo sapien
gcctactaaaagtcgattacttaat

SEQ ID NO: 5874148 - DNA, 25 bp, Homo sapien
gcttttttagacgcacttaattgtt

SEQ ID NO: 5874149 - DNA, 25 bp, Homo sapien
gctattattacctttgtcgattaag

SEQ ID NO: 5874150 - DNA, 25 bp, Homo sapien
ctaacattcgtgtagttagattcat

SEQ ID NO: 5874151 - DNA, 25 bp, Homo sapien
aatcggatactttacgattatttgg

SEQ ID NO: 5874152 - DNA, 25 bp, Homo sapien
ttcatatacgttcatcgttaacgaa

SEQ ID NO: 5874153 - DNA, 25 bp, Homo sapien
atatcgtaaattctaccgtttccat

SEQ ID NO: 5874154 - DNA, 25 bp, Homo sapien
tacgatatcgttacgttaaatctga

SEQ ID NO: 5874155 - DNA, 25 bp, Homo sapien
acacgaatagatatcgtatttgtga

SEQ ID NO: 5874156 - DNA, 25 bp, Homo sapien
agtccaatcgtagcttaatattatc

SEQ ID NO: 5874157 - DNA, 25 bp, Homo sapien
aaacaattcgtaatgcgaaagtttg

SEQ ID NO: 5874158 - DNA, 25 bp, Homo sapien
taactacgtcgcaaataaataagga

SEQ ID NO: 5874159 - DNA, 25 bp, Homo sapien
taggatgtaacgtcaatttgtgaat

SEQ ID NO: 5874160 - DNA, 25 bp, Homo sapien
atccatcagcgaatagatattagat

SEQ ID NO: 5874161 - DNA, 25 bp, Homo sapien
attcgtttcgcacaaacaatataga

SEQ ID NO: 5874162 - DNA, 25 bp, Homo sapien
tgcaccgaattattccatagaaata

SEQ ID NO: 5874163 - DNA, 25 bp, Homo sapien
ataagcgtaaaaccgatatagcttt

SEQ ID NO: 5874164 - DNA, 25 bp, Homo sapien
actagtataatcgatctatacctct

SEQ ID NO: 5874165 - DNA, 25 bp, Homo sapien
acgtactagatattctaacggattt

SEQ ID NO: 5874166 - DNA, 25 bp, Homo sapien
ctctttcgacaaatcgaaaatgata

SEQ ID NO: 5874167 - DNA, 25 bp, Homo sapien
acttataatcgttgcactaaagctt

SEQ ID NO: 5874168 - DNA, 25 bp, Homo sapien
aagttacaactatgcgataaagtct

SEQ ID NO: 5874169 - DNA, 25 bp, Homo sapien
gtactttcgtatataacaagtactc

SEQ ID NO: 5874170 - DNA, 25 bp, Homo sapien
attaaccgataatctaaatctggct

SEQ ID NO: 5874171 - DNA, 25 bp, Homo sapien
agaaatgaacgtatgttgttttcac

SEQ ID NO: 5874172 - DNA, 25 bp, Homo sapien
tgggtttcgcgtaataaaagattaa

SEQ ID NO: 5874173 - DNA, 25 bp, Homo sapien
aattctacgtcgttaaaagacatag

SEQ ID NO: 5874174 - DNA, 25 bp, Homo sapien
tacgggatatcgtaacaaacttaaa

SEQ ID NO: 5874175 - DNA, 25 bp, Homo sapien
tctgtctaaaaatataacgcgtaca

SEQ ID NO: 5874176 - DNA, 25 bp, Homo sapien
ctctttcggaattatcatagaaact

SEQ ID NO: 5874177 - DNA, 25 bp, Homo sapien
ttgtatattatatacggtcgtacac

SEQ ID NO: 5874178 - DNA, 25 bp, Homo sapien
tatcctttcgatagcaattaatagc

SEQ ID NO: 5874179 - DNA, 25 bp, Homo sapien
ttaagcaataaagagtcgtaatcgt

SEQ ID NO: 5874180 - DNA, 25 bp, Homo sapien
aacgtcgatgttactaagttcattt

SEQ ID NO: 5874181 - DNA, 25 bp, Homo sapien
acaatataaatagccgtagtgaaga

SEQ ID NO: 5874182 - DNA, 25 bp, Homo sapien
ctgtctacgacttataacatacaat

SEQ ID NO: 5874183 - DNA, 25 bp, Homo sapien
agatcctatataattgtcgaaagca

SEQ ID NO: 5874184 - DNA, 25 bp, Homo sapien
agggtacgcaatatgataaaaattc

SEQ ID NO: 5874185 - DNA, 25 bp, Homo sapien
ttgaagacgttataaaggttaagac

SEQ ID NO: 5874186 - DNA, 25 bp, Homo sapien
aaagccgattgtcttgataatatgt

SEQ ID NO: 5874187 - DNA, 25 bp, Homo sapien
ctaagttgtccgtagaatatttctt

SEQ ID NO: 5874188 - DNA, 25 bp, Homo sapien
tttctaattcgaagcgaatttactc

SEQ ID NO: 5874189 - DNA, 25 bp, Homo sapien
acatatatacgtcgaaagaaggtta

SEQ ID NO: 5874190 - DNA, 25 bp, Homo sapien
atactatatacttcgaatccagatc

SEQ ID NO: 5874191 - DNA, 25 bp, Homo sapien
taacctagatactcgtagttttgaa

SEQ ID NO: 5874192 - DNA, 25 bp, Homo sapien
atatgatcgacaattagtttaccag

SEQ ID NO: 5874193 - DNA, 25 bp, Homo sapien
gtagcgacgttttaatcgataaaaa

SEQ ID NO: 5874194 - DNA, 25 bp, Homo sapien
tctatttcatatcgattgtctgctt

SEQ ID NO: 5874195 - DNA, 25 bp, Homo sapien
tagctaacttatctttacgcaatga

SEQ ID NO: 5874196 - DNA, 25 bp, Homo sapien
atctatagattcggatgataaatgc

SEQ ID NO: 5874197 - DNA, 25 bp, Homo sapien
tagccccgattgtctataaaattaa

SEQ ID NO: 5874198 - DNA, 25 bp, Homo sapien
gtaggttactaattcgaataagagt

SEQ ID NO: 5874199 - DNA, 25 bp, Homo sapien
tgtccatacgttatagctaactttt

SEQ ID NO: 5874200 - DNA, 25 bp, Homo sapien
agaaatacgatactatctagagtca

SEQ ID NO: 5874201 - DNA, 25 bp, Homo sapien
catacaaactctactcgtaagataa

SEQ ID NO: 5874202 - DNA, 25 bp, Homo sapien
tgaccattcgtacaaattacaattg

SEQ ID NO: 5874203 - DNA, 25 bp, Homo sapien
ttcttaaacgaaacgatctatccta

SEQ ID NO: 5874204 - DNA, 25 bp, Homo sapien
tttgtatatataaggacggtgtaca

SEQ ID NO: 5874205 - DNA, 25 bp, Homo sapien
aggagagattaacttatcgttcaaa

SEQ ID NO: 5874206 - DNA, 25 bp, Homo sapien
tgttactaaaaagatgtcgaagaac

SEQ ID NO: 5874207 - DNA, 25 bp, Homo sapien
cacatgtctaataacgttacaattc

SEQ ID NO: 5874208 - DNA, 25 bp, Homo sapien
agcattaaatcggatagtaagagta

SEQ ID NO: 5874209 - DNA, 25 bp, Homo sapien
aagattcgacaacgtaattatacga

SEQ ID NO: 5874210 - DNA, 25 bp, Homo sapien
gttcccccgattcataattatatat

SEQ ID NO: 5874211 - DNA, 25 bp, Homo sapien
gctttcaaatatgttcgatctatga

SEQ ID NO: 5874212 - DNA, 25 bp, Homo sapien
tacatgtaacttataagcgttagca

SEQ ID NO: 5874213 - DNA, 25 bp, Homo sapien
actcctataacgaatttatgtagac

SEQ ID NO: 5874214 - DNA, 25 bp, Homo sapien
gatagatcttaaattagcgagtaca

SEQ ID NO: 5874215 - DNA, 25 bp, Homo sapien
tgatgcgatttaataccgatagtaa

SEQ ID NO: 5874216 - DNA, 25 bp, Homo sapien
caggattagtattacgatagatcaa

SEQ ID NO: 5874217 - DNA, 25 bp, Homo sapien
gaataatatatcgtttcgataccag

SEQ ID NO: 5874218 - DNA, 25 bp, Homo sapien
atatgaatatcgcttcaatatgcca

SEQ ID NO: 5874219 - DNA, 25 bp, Homo sapien
tcgaacataaattcgataccaaagt

SEQ ID NO: 5874220 - DNA, 25 bp, Homo sapien
aatgctcaatcgtttagatgacata

SEQ ID NO: 5874221 - DNA, 25 bp, Homo sapien
aactttcgtaaatgttatacaggtc

SEQ ID NO: 5874222 - DNA, 25 bp, Homo sapien
ttttacgtgtaattttcgaactcac

SEQ ID NO: 5874223 - DNA, 25 bp, Homo sapien
atcggataattgcgttatagagtaa

SEQ ID NO: 5874224 - DNA, 25 bp, Homo sapien
aacgttagttatatccgaattagct

SEQ ID NO: 5874225 - DNA, 25 bp, Homo sapien
gcatgtactaatatcgtattaaagg

SEQ ID NO: 5874226 - DNA, 25 bp, Homo sapien
aaaaaagtaagagattacgagagct

SEQ ID NO: 5874227 - DNA, 25 bp, Homo sapien
gtagagaaatagcggttaatgaaat

SEQ ID NO: 5874228 - DNA, 25 bp, Homo sapien
atgacatacatcgttatgacatttg

SEQ ID NO: 5874229 - DNA, 25 bp, Homo sapien
gaagaaacagcttattcgatattga

SEQ ID NO: 5874230 - DNA, 25 bp, Homo sapien
gaaagtacgctaaatcattaagaac

SEQ ID NO: 5874231 - DNA, 25 bp, Homo sapien
gtaatcgaaccaattttaatcgctt

SEQ ID NO: 5874232 - DNA, 25 bp, Homo sapien
attccaatggcgtataagtatatac

SEQ ID NO: 5874233 - DNA, 25 bp, Homo sapien
tgtgccaattcgatttatgcatttt

SEQ ID NO: 5874234 - DNA, 25 bp, Homo sapien
aagattcgttatctacgtaacaatc

SEQ ID NO: 5874235 - DNA, 25 bp, Homo sapien
tgagcaactataattcgtatcaact

SEQ ID NO: 5874236 - DNA, 25 bp, Homo sapien
caggttactcgatataataacgtta

SEQ ID NO: 5874237 - DNA, 25 bp, Homo sapien
cgagtttacgaaccgaatattaata

SEQ ID NO: 5874238 - DNA, 25 bp, Homo sapien
tatgttatcgtcaaataagcaccat

SEQ ID NO: 5874239 - DNA, 25 bp, Homo sapien
attggaaaaaagcggaatagtgaat

SEQ ID NO: 5874240 - DNA, 25 bp, Homo sapien
ttcggaactaaatcgaacatttgaa

SEQ ID NO: 5874241 - DNA, 25 bp, Homo sapien
gcaacataagcgcttataatttgaa

SEQ ID NO: 5874242 - DNA, 25 bp, Homo sapien
tatctcatgaatttcgttagaacct

SEQ ID NO: 5874243 - DNA, 25 bp, Homo sapien
cttacgttatcgtaccattaagtta

SEQ ID NO: 5874244 - DNA, 25 bp, Homo sapien
gcttttatttacgatatcaaatcgc

SEQ ID NO: 5874245 - DNA, 25 bp, Homo sapien
gttgatatcgtaactatacgtttac

SEQ ID NO: 5874246 - DNA, 25 bp, Homo sapien
aaagatacgtaatattcgtcagact

SEQ ID NO: 5874247 - DNA, 25 bp, Homo sapien
tccatcgaaacactaattagattca

SEQ ID NO: 5874248 - DNA, 25 bp, Homo sapien
aaatgtaatcgtactagatggtttc

SEQ ID NO: 5874249 - DNA, 25 bp, Homo sapien
tgcataatttcacagatcgtacaaa

SEQ ID NO: 5874250 - DNA, 25 bp, Homo sapien
tgatgtatttacccttatcgataag

SEQ ID NO: 5874251 - DNA, 25 bp, Homo sapien
cagtcaacgctttttcttacataat

SEQ ID NO: 5874252 - DNA, 25 bp, Homo sapien
agatgtaataattcgtacgactttg

SEQ ID NO: 5874253 - DNA, 25 bp, Homo sapien
gttaagattagaatcgcttaaaagc

SEQ ID NO: 5874254 - DNA, 25 bp, Homo sapien
tctgagatccaatcgttataattga

SEQ ID NO: 5874255 - DNA, 25 bp, Homo sapien
ggattaataagattaacgcttggaa

SEQ ID NO: 5874256 - DNA, 25 bp, Homo sapien
aggcttgtatctagtatcgattata

SEQ ID NO: 5874257 - DNA, 25 bp, Homo sapien
ctatacgaatatataagtgtccatc

SEQ ID NO: 5874258 - DNA, 25 bp, Homo sapien
tccttatatcatcgatatccaatca

SEQ ID NO: 5874259 - DNA, 25 bp, Homo sapien
cttataatatgttcgttcaaccgat

SEQ ID NO: 5874260 - DNA, 25 bp, Homo sapien
cttcataatgcgtaacttatcactt

SEQ ID NO: 5874261 - DNA, 25 bp, Homo sapien
cagtggttatatggattcgtaataa

SEQ ID NO: 5874262 - DNA, 25 bp, Homo sapien
atctgtaatttcgatttcggtgtat

SEQ ID NO: 5874263 - DNA, 25 bp, Homo sapien
ttttgtatataattcgattcccgtc

SEQ ID NO: 5874264 - DNA, 25 bp, Homo sapien
tttcgatatattctattcgctgcta

SEQ ID NO: 5874265 - DNA, 25 bp, Homo sapien
aacagagatatatcatcgactgttt

SEQ ID NO: 5874266 - DNA, 25 bp, Homo sapien
aggtgccatacgattaataaatgtt

SEQ ID NO: 5874267 - DNA, 25 bp, Homo sapien
ttatgctcgtcaagaaattaacctt

SEQ ID NO: 5874268 - DNA, 25 bp, Homo sapien
agacatacataataattcgtgttcg

SEQ ID NO: 5874269 - DNA, 25 bp, Homo sapien
taagatgaatacgacacataagaga

SEQ ID NO: 5874270 - DNA, 25 bp, Homo sapien
gttgtcttaataacgcaatctatac

SEQ ID NO: 5874271 - DNA, 25 bp, Homo sapien
tggtgcgttttacgagataaatata

SEQ ID NO: 5874272 - DNA, 25 bp, Homo sapien
ggattaatataggttacgaactaca

SEQ ID NO: 5874273 - DNA, 25 bp, Homo sapien
tgctagttgttcgtttataaaacgt

SEQ ID NO: 5874274 - DNA, 25 bp, Homo sapien
catgtcgacattttcatatctgtta

SEQ ID NO: 5874275 - DNA, 25 bp, Homo sapien
ataggataatctattacgctaagtg

SEQ ID NO: 5874276 - DNA, 25 bp, Homo sapien
ataaaatataagatacgtcctccgt

SEQ ID NO: 5874277 - DNA, 25 bp, Homo sapien
aataatgagtaagtacgtatcctct

SEQ ID NO: 5874278 - DNA, 25 bp, Homo sapien
aaagttgttgtcttcgataagtctt

SEQ ID NO: 5874279 - DNA, 25 bp, Homo sapien
gaagcctaattaatatccgaacatt

SEQ ID NO: 5874280 - DNA, 25 bp, Homo sapien
atagcacgagtataatttgaacaag

SEQ ID NO: 5874281 - DNA, 25 bp, Homo sapien
aatggtaacattcgatttacgtcta

SEQ ID NO: 5874282 - DNA, 25 bp, Homo sapien
aatgatttgcgctatttagaagcat

SEQ ID NO: 5874283 - DNA, 25 bp, Homo sapien
tcataatccgtcaaatttctctatc

SEQ ID NO: 5874284 - DNA, 25 bp, Homo sapien
tcaaatcgataacataatacaggtg

SEQ ID NO: 5874285 - DNA, 25 bp, Homo sapien
gacacgtttaatttatcggcaaatt

SEQ ID NO: 5874286 - DNA, 25 bp, Homo sapien
agagtaacgctaattaagtaagaca

SEQ ID NO: 5874287 - DNA, 25 bp, Homo sapien
gggaaagacgtcattttagtaataa

SEQ ID NO: 5874288 - DNA, 25 bp, Homo sapien
ccttccgaataatcatatagtattc

SEQ ID NO: 5874289 - DNA, 25 bp, Homo sapien
tagatgacgttatgcatattaggat

SEQ ID NO: 5874290 - DNA, 25 bp, Homo sapien
tgacacgtttaatcgaaatttgaac

SEQ ID NO: 5874291 - DNA, 25 bp, Homo sapien
cctctaatttcgattatactttgga

SEQ ID NO: 5874292 - DNA, 25 bp, Homo sapien
tctactaagttcgatagaagcaatt

SEQ ID NO: 5874293 - DNA, 25 bp, Homo sapien
gaatgaattcgtatacgtatcaact

SEQ ID NO: 5874294 - DNA, 25 bp, Homo sapien
gctcttaatttcgctataatacagt

SEQ ID NO: 5874295 - DNA, 25 bp, Homo sapien
tataagtgtaaaagattacgacacg

SEQ ID NO: 5874296 - DNA, 25 bp, Homo sapien
cgttacgtatataacgtgttgttat

SEQ ID NO: 5874297 - DNA, 25 bp, Homo sapien
taagagattcaattttgtcgagttc

SEQ ID NO: 5874298 - DNA, 25 bp, Homo sapien
ttgaatcatattacgttaacacgtc

SEQ ID NO: 5874299 - DNA, 25 bp, Homo sapien
aaatatgaggacgtaatataccatc

SEQ ID NO: 5874300 - DNA, 25 bp, Homo sapien
gataccgcgataatatttttttacg

SEQ ID NO: 5874301 - DNA, 25 bp, Homo sapien
tataaacggattgtaattaatcggc

SEQ ID NO: 5874302 - DNA, 25 bp, Homo sapien
tctgtatatcggtattagaaaatgc

SEQ ID NO: 5874303 - DNA, 25 bp, Homo sapien
tttttataagctgttcgtaaaggct

SEQ ID NO: 5874304 - DNA, 25 bp, Homo sapien
agaacgattatcaacgtatgaattc

SEQ ID NO: 5874305 - DNA, 25 bp, Homo sapien
aacagcgttatcgaatatgtttagt

SEQ ID NO: 5874306 - DNA, 25 bp, Homo sapien
ctactattattccgaattagtagga

SEQ ID NO: 5874307 - DNA, 25 bp, Homo sapien
aaccatattcggtctataatagttc

SEQ ID NO: 5874308 - DNA, 25 bp, Homo sapien
ctggctaaccggtttataattatat

SEQ ID NO: 5874309 - DNA, 25 bp, Homo sapien
tggtatatcgcaaaaatttggagta

SEQ ID NO: 5874310 - DNA, 25 bp, Homo sapien
atgatgacgttaattagtcaatctg

SEQ ID NO: 5874311 - DNA, 25 bp, Homo sapien
aaaacatggtatgtacgattacgta

SEQ ID NO: 5874312 - DNA, 25 bp, Homo sapien
tgtcatggcgaatgtaattacttat

SEQ ID NO: 5874313 - DNA, 25 bp, Homo sapien
agaacattttcgtaatgcgtatcat

SEQ ID NO: 5874314 - DNA, 25 bp, Homo sapien
ctgatttgtcggaagattaacaaaa

SEQ ID NO: 5874315 - DNA, 25 bp, Homo sapien
acacttttatcgataaccatcttga

SEQ ID NO: 5874316 - DNA, 25 bp, Homo sapien
gaagaaaattcggctagtataacaa

SEQ ID NO: 5874317 - DNA, 25 bp, Homo sapien
ctaaactctaattaattgcggtcta

SEQ ID NO: 5874318 - DNA, 25 bp, Homo sapien
gtaggtctacgattttagtatatca

SEQ ID NO: 5874319 - DNA, 25 bp, Homo sapien
taatcagatattacttaacgtccac

SEQ ID NO: 5874320 - DNA, 25 bp, Homo sapien
catacattacgacgaatactttagt

SEQ ID NO: 5874321 - DNA, 25 bp, Homo sapien
tcaataatccgcatatattgaaagc

SEQ ID NO: 5874322 - DNA, 25 bp, Homo sapien
ttatcgtaatgcgtttataagcact

SEQ ID NO: 5874323 - DNA, 25 bp, Homo sapien
ttaagactagtatgcgaaaagtact

SEQ ID NO: 5874324 - DNA, 25 bp, Homo sapien
ggcaacaatgatataacgattaaac

SEQ ID NO: 5874325 - DNA, 25 bp, Homo sapien
ctctttagtattctttcgtatgaca

SEQ ID NO: 5874326 - DNA, 25 bp, Homo sapien
gatagttttcgtatcgtatatatcc

SEQ ID NO: 5874327 - DNA, 25 bp, Homo sapien
aacgcatcgatagatcgttattaat

SEQ ID NO: 5874328 - DNA, 25 bp, Homo sapien
gactatcgaataatgtacacaatca

SEQ ID NO: 5874329 - DNA, 25 bp, Homo sapien
tgtagatcgtcgttacatataatag

SEQ ID NO: 5874330 - DNA, 25 bp, Homo sapien
agcatcatcttagatcgattactaa

SEQ ID NO: 5874331 - DNA, 25 bp, Homo sapien
aagagctacatcacgatataatcaa

SEQ ID NO: 5874332 - DNA, 25 bp, Homo sapien
aagctctaatattacgagtagacaa

SEQ ID NO: 5874333 - DNA, 25 bp, Homo sapien
gatgattcgatcaaatagtgtgaaa

SEQ ID NO: 5874334 - DNA, 25 bp, Homo sapien
tatggcaatacatcatacgttcttt

SEQ ID NO: 5874335 - DNA, 25 bp, Homo sapien
attagtttcgtaatttacgacgatc

SEQ ID NO: 5874336 - DNA, 25 bp, Homo sapien
aaacaccgattagtaaaatctgtac

SEQ ID NO: 5874337 - DNA, 25 bp, Homo sapien
taagaaatagatagtcggtaaagtg

SEQ ID NO: 5874338 - DNA, 25 bp, Homo sapien
gtacatgccgataatattcttacta

SEQ ID NO: 5874339 - DNA, 25 bp, Homo sapien
atcagtgttacgacgttaatttgat

SEQ ID NO: 5874340 - DNA, 25 bp, Homo sapien
atcgttcgtattaaatcaggctaaa

SEQ ID NO: 5874341 - DNA, 25 bp, Homo sapien
ttgttatactagccgaattttcttc

SEQ ID NO: 5874342 - DNA, 25 bp, Homo sapien
agccagatttagattatcggttaat

SEQ ID NO: 5874343 - DNA, 25 bp, Homo sapien
atcctaatatgcataacgtcatcta

SEQ ID NO: 5874344 - DNA, 25 bp, Homo sapien
tacttcgcactaacttaattaactg

SEQ ID NO: 5874345 - DNA, 25 bp, Homo sapien
tccattattacgttatatcgtgaac

SEQ ID NO: 5874346 - DNA, 25 bp, Homo sapien
atgattctcgtaataagatcaactg

SEQ ID NO: 5874347 - DNA, 25 bp, Homo sapien
gggtcattaagtaatatcgaaacta

SEQ ID NO: 5874348 - DNA, 25 bp, Homo sapien
gaatcttcgtacgaaagtattaatg

SEQ ID NO: 5874349 - DNA, 25 bp, Homo sapien
actatactcgtttaacttagctcta

SEQ ID NO: 5874350 - DNA, 25 bp, Homo sapien
tgctgataattcggttaattgctat

SEQ ID NO: 5874351 - DNA, 25 bp, Homo sapien
cattgtgtaccatatacgatcaatt

SEQ ID NO: 5874352 - DNA, 25 bp, Homo sapien
aagaaatattctacggacaacttag

SEQ ID NO: 5874353 - DNA, 25 bp, Homo sapien
gaacctataacgttcgaaatcaata

SEQ ID NO: 5874354 - DNA, 25 bp, Homo sapien
tacaaaatagacgaaatgtaaacgc

SEQ ID NO: 5874355 - DNA, 25 bp, Homo sapien
tggcgaattactaaacgataagtaa

SEQ ID NO: 5874356 - DNA, 25 bp, Homo sapien
tctacatcaagctatcgttaactaa

SEQ ID NO: 5874357 - DNA, 25 bp, Homo sapien
tgtacgcgttatatttttagacaga

SEQ ID NO: 5874358 - DNA, 25 bp, Homo sapien
gaatttttatcatattgcgtaccct

SEQ ID NO: 5874359 - DNA, 25 bp, Homo sapien
tattcattcgttaaactcgttatcg

SEQ ID NO: 5874360 - DNA, 25 bp, Homo sapien
agtcgttatcaactaatcgaaagaa

SEQ ID NO: 5874361 - DNA, 25 bp, Homo sapien
gtgaaaacaacatacgttcatttct

SEQ ID NO: 5874362 - DNA, 25 bp, Homo sapien
ctgacgttgatttaacgataactaa

SEQ ID NO: 5874363 - DNA, 25 bp, Homo sapien
attcactattccgcttttttccaat

SEQ ID NO: 5874364 - DNA, 25 bp, Homo sapien
ttttgttaatcttccgacaaatcag

SEQ ID NO: 5874365 - DNA, 25 bp, Homo sapien
aatgttcggatattaattaggcttc

SEQ ID NO: 5874366 - DNA, 25 bp, Homo sapien
acagaagattacgatatatctcact

SEQ ID NO: 5874367 - DNA, 25 bp, Homo sapien
ataagtaattacattcgccatgaca

SEQ ID NO: 5874368 - DNA, 25 bp, Homo sapien
tttgaacgataagttaatctctcct

SEQ ID NO: 5874369 - DNA, 25 bp, Homo sapien
tgaaaaatacgagtcgttattatcg

SEQ ID NO: 5874370 - DNA, 25 bp, Homo sapien
tataggttaactactaatcggacta

SEQ ID NO: 5874371 - DNA, 25 bp, Homo sapien
gatggacacttatatattcgtatag

SEQ ID NO: 5874372 - DNA, 25 bp, Homo sapien
acaataatacgtcgaagtttaacga

SEQ ID NO: 5874373 - DNA, 25 bp, Homo sapien
aaggattatatagtgcggtttgttt

SEQ ID NO: 5874374 - DNA, 25 bp, Homo sapien
aaatccgttagaatatctagtacgt

SEQ ID NO: 5874375 - DNA, 25 bp, Homo sapien
gacctgtataacatttacgaaagtt

SEQ ID NO: 5874376 - DNA, 25 bp, Homo sapien
tatatttatctcgtaaaacgcacca

SEQ ID NO: 5874377 - DNA, 25 bp, Homo sapien
caacaatataagagtcgacaaaaca

SEQ ID NO: 5874378 - DNA, 25 bp, Homo sapien
ttatgtttacgatacgatgaagatc

SEQ ID NO: 5874379 - DNA, 25 bp, Homo sapien
tcttcactacggctatttatattgt

SEQ ID NO: 5874380 - DNA, 25 bp, Homo sapien
ccacataatttggtacgttcaaaat

SEQ ID NO: 5874381 - DNA, 25 bp, Homo sapien
tacgtaatcgtacataccatgtttt

SEQ ID NO: 5874382 - DNA, 25 bp, Homo sapien
cacttagcgtaatagattatcctat

SEQ ID NO: 5874383 - DNA, 25 bp, Homo sapien
gacgggaatcgaattatatacaaaa

SEQ ID NO: 5874384 - DNA, 25 bp, Homo sapien
ctattatatgtaacgacgatctaca

SEQ ID NO: 5874385 - DNA, 25 bp, Homo sapien
tacgaaattggtcgtaagtaaattg

SEQ ID NO: 5874386 - DNA, 25 bp, Homo sapien
taggatagatcgtttcgtttaagaa

SEQ ID NO: 5874387 - DNA, 25 bp, Homo sapien
ttcaaattataagcgcttatgttgc

SEQ ID NO: 5874388 - DNA, 25 bp, Homo sapien
ggaataaattatcataaccgaaagc

SEQ ID NO: 5874389 - DNA, 25 bp, Homo sapien
tgattcgaacataattacgattagc

SEQ ID NO: 5874390 - DNA, 25 bp, Homo sapien
aactgtaaaatgatatatcgtgctc

SEQ ID NO: 5874391 - DNA, 25 bp, Homo sapien
aggaattcgcaaattatctagtaag

SEQ ID NO: 5874392 - DNA, 25 bp, Homo sapien
tttagcctgatttaatacgaacgat

SEQ ID NO: 5874393 - DNA, 25 bp, Homo sapien
atgcttctaaatagcgcaaatcatt

SEQ ID NO: 5874394 - DNA, 25 bp, Homo sapien
gcactataattcgtaaacgatatct

SEQ ID NO: 5874395 - DNA, 25 bp, Homo sapien
ttgatgttaattgtatcggtcagaa

SEQ ID NO: 5874396 - DNA, 25 bp, Homo sapien
tctatattgtttgtgcgaaacgaat

SEQ ID NO: 5874397 - DNA, 25 bp, Homo sapien
tgtcatacgaaagaatactaaagag

SEQ ID NO: 5874398 - DNA, 25 bp, Homo sapien
agtccactacgatcataattatgtt

SEQ ID NO: 5874399 - DNA, 25 bp, Homo sapien
atgaatctaactacacgaatgttag

SEQ ID NO: 5874400 - DNA, 25 bp, Homo sapien
ctctttaagtcgcattataacatag

SEQ ID NO: 5874401 - DNA, 25 bp, Homo sapien
attaagtaatcgacttttagtaggc

SEQ ID NO: 5874402 - DNA, 25 bp, Homo sapien
aattgcttctatcgaacttagtaga

SEQ ID NO: 5874403 - DNA, 25 bp, Homo sapien
atggaaacggtagaatttacgatat

SEQ ID NO: 5874404 - DNA, 25 bp, Homo sapien
tgataatacacttatcgatacttgc

SEQ ID NO: 5874405 - DNA, 25 bp, Homo sapien
gaatcgttacgcattaattatgaag

SEQ ID NO: 5874406 - DNA, 25 bp, Homo sapien
aagtgataagttacgcattatgaag

SEQ ID NO: 5874407 - DNA, 25 bp, Homo sapien
ttcagtccgatactattacacaaat

SEQ ID NO: 5874408 - DNA, 25 bp, Homo sapien
cctttaatacgatattagtacatgc

SEQ ID NO: 5874409 - DNA, 25 bp, Homo sapien
gtgttgaatcgacatacttacaaaa

SEQ ID NO: 5874410 - DNA, 25 bp, Homo sapien
ggagaataaatcgatgatcctatta

SEQ ID NO: 5874411 - DNA, 25 bp, Homo sapien
gccgattaattacaatccgtttata

SEQ ID NO: 5874412 - DNA, 25 bp, Homo sapien
tctattaataagtcggctattagac

SEQ ID NO: 5874413 - DNA, 25 bp, Homo sapien
gaatataagatagacgttctctaca

SEQ ID NO: 5874414 - DNA, 25 bp, Homo sapien
ggatatatacgatacgaaaactatc

SEQ ID NO: 5874415 - DNA, 25 bp, Homo sapien
tctaacgacaatatacgtaattcgt

SEQ ID NO: 5874416 - DNA, 25 bp, Homo sapien
taaatgacgtacataatctactagc

SEQ ID NO: 5874417 - DNA, 25 bp, Homo sapien
ttcacttataaggttcgtcatcaaa

SEQ ID NO: 5874418 - DNA, 25 bp, Homo sapien
tagtcactctatcgttaaagactaa

SEQ ID NO: 5874419 - DNA, 25 bp, Homo sapien
gtttaatcgttatatcattgttgcc

SEQ ID NO: 5874420 - DNA, 25 bp, Homo sapien
gggattgataatactcgaatataca

SEQ ID NO: 5874421 - DNA, 25 bp, Homo sapien
agcatatattagcgagtatcaaaac

SEQ ID NO: 5874422 - DNA, 25 bp, Homo sapien
aattcttacgataccaatactcgat

SEQ ID NO: 5874423 - DNA, 25 bp, Homo sapien
aaggtgtaatatatcgttccaagat

SEQ ID NO: 5874424 - DNA, 25 bp, Homo sapien
aaacaacgtttaagctaatgctgat

SEQ ID NO: 5874425 - DNA, 25 bp, Homo sapien
ttcgttaacgatgaacgtatatgaa

SEQ ID NO: 5874426 - DNA, 25 bp, Homo sapien
gatggtatattacgtcctcatattt

SEQ ID NO: 5874427 - DNA, 25 bp, Homo sapien
agaggatacgtacttactcattatt

SEQ ID NO: 5874428 - DNA, 25 bp, Homo sapien
attatgtaagaaaaagcgttgactg

SEQ ID NO: 5874429 - DNA, 25 bp, Homo sapien
gactatatcgcttagatgtaatatc

SEQ ID NO: 5874430 - DNA, 25 bp, Homo sapien
agctcatatatagtcggatattctt

SEQ ID NO: 5874431 - DNA, 25 bp, Homo sapien
gaccagacgacaatctaatataaaa

SEQ ID NO: 5874432 - DNA, 25 bp, Homo sapien
gtgtacgaccgtatataatatacaa

SEQ ID NO: 5874433 - DNA, 25 bp, Homo sapien
catacatagagaattagcgaagaaa

SEQ ID NO: 5874434 - DNA, 25 bp, Homo sapien
cttatcgataagggtaaatacatca

SEQ ID NO: 5874435 - DNA, 25 bp, Homo sapien
gaactattatagaccgaatatggtt

SEQ ID NO: 5874436 - DNA, 25 bp, Homo sapien
atgatacgcattacgaaaatgttct

SEQ ID NO: 5874437 - DNA, 25 bp, Homo sapien
atggtgcttatttgacgataacata

SEQ ID NO: 5874438 - DNA, 25 bp, Homo sapien
gaaagcggacatataaatttaacag

SEQ ID NO: 5874439 - DNA, 25 bp, Homo sapien
caaactttcgcattacgaattgttt

SEQ ID NO: 5874440 - DNA, 25 bp, Homo sapien
aaagctatatcggttttacgcttat

SEQ ID NO: 5874441 - DNA, 25 bp, Homo sapien
aattttcaatacgccattatgctct

SEQ ID NO: 5874442 - DNA, 25 bp, Homo sapien
gggtccgtaacttattatataatca

SEQ ID NO: 5874443 - DNA, 25 bp, Homo sapien
tgtggttctatcgttgtatttgtat

SEQ ID NO: 5874444 - DNA, 25 bp, Homo sapien
agtttctatgataattccgaaagag

SEQ ID NO: 5874445 - DNA, 25 bp, Homo sapien
aacagcgaattatagtatttgaagc

SEQ ID NO: 5874446 - DNA, 25 bp, Homo sapien
tacgagagactaatcgtataatgtt

SEQ ID NO: 5874447 - DNA, 25 bp, Homo sapien
ttcgaacggttcaattaattaaagc

SEQ ID NO: 5874448 - DNA, 25 bp, Homo sapien
taacgttattatatcgagtaacctg

SEQ ID NO: 5874449 - DNA, 25 bp, Homo sapien
agactgtattactcgacaatttagt

SEQ ID NO: 5874450 - DNA, 25 bp, Homo sapien
tcaagatggttatcgataaaagtgt

SEQ ID NO: 5874451 - DNA, 25 bp, Homo sapien
agactaaacgattctattacgtaac

SEQ ID NO: 5874452 - DNA, 25 bp, Homo sapien
tagacgtaaatcgaatgttaccatt

SEQ ID NO: 5874453 - DNA, 25 bp, Homo sapien
gttcttaatgatttagcgtactttc

SEQ ID NO: 5874454 - DNA, 25 bp, Homo sapien
aaatgaacttagtaacatcgacgtt

SEQ ID NO: 5874455 - DNA, 25 bp, Homo sapien
tagtaagaatattatcggcatgtac

SEQ ID NO: 5874456 - DNA, 25 bp, Homo sapien
tactcttactatccgatttaatgct

SEQ ID NO: 5874457 - DNA, 25 bp, Homo sapien
gatcgtcgtaaattacgaaactaat

SEQ ID NO: 5874458 - DNA, 25 bp, Homo sapien
tttgtacgatctgtgaaattatgca

SEQ ID NO: 5874459 - DNA, 25 bp, Homo sapien
cagattgactaattaacgtcatcat

SEQ ID NO: 5874460 - DNA, 25 bp, Homo sapien
tataatcgatactagatacaagcct

SEQ ID NO: 5874461 - DNA, 25 bp, Homo sapien
gaattgtaacgttattagacatgtg

SEQ ID NO: 5874462 - DNA, 25 bp, Homo sapien
actcttattcgaattagtaacctac

SEQ ID NO: 5874463 - DNA, 25 bp, Homo sapien
atacaccgaaatcgaaattacagat

SEQ ID NO: 5874464 - DNA, 25 bp, Homo sapien
acttgaacgaattgacaatttcgat

SEQ ID NO: 5874465 - DNA, 25 bp, Homo sapien
aagtattatgataccggaaatggat

SEQ ID NO: 5874466 - DNA, 25 bp, Homo sapien
gctgaattaaattacgatagcatag

SEQ ID NO: 5874467 - DNA, 25 bp, Homo sapien
caacaactatatttacgggttgtaa

SEQ ID NO: 5874468 - DNA, 25 bp, Homo sapien
tgaatctaattagtgtttcgatgga

SEQ ID NO: 5874469 - DNA, 25 bp, Homo sapien
gtaaacgtatagttacgatatcaac

SEQ ID NO: 5874470 - DNA, 25 bp, Homo sapien
aaatttatcatttcgaccaacagct

SEQ ID NO: 5874471 - DNA, 25 bp, Homo sapien
tatatttaatttaggaacgctaccg

SEQ ID NO: 5874472 - DNA, 25 bp, Homo sapien
agacaacaagatatatatcgtttgg

SEQ ID NO: 5874473 - DNA, 25 bp, Homo sapien
cgaagtctagaacgttaataaatca

SEQ ID NO: 5874474 - DNA, 25 bp, Homo sapien
cacatgtgttatccgtaattgatta

SEQ ID NO: 5874475 - DNA, 25 bp, Homo sapien
tgactctagatagtatcgtatttct

SEQ ID NO: 5874476 - DNA, 25 bp, Homo sapien
ttcaaatgttcgatttagttccgaa

SEQ ID NO: 5874477 - DNA, 25 bp, Homo sapien
tccttatttatttgcgacgtagtta

SEQ ID NO: 5874478 - DNA, 25 bp, Homo sapien
cgtaaaaaaatattatcgcggtatc

SEQ ID NO: 5874479 - DNA, 25 bp, Homo sapien
cgagaaaataatacgacgaatgaaa

SEQ ID NO: 5874480 - DNA, 25 bp, Homo sapien
tatcctaaatatccgttatactcga

SEQ ID NO: 5874481 - DNA, 25 bp, Homo sapien
acggaggacgtatcttatattttat

SEQ ID NO: 5874482 - DNA, 25 bp, Homo sapien
aattagattaaattcggtcaccgaa

SEQ ID NO: 5874483 - DNA, 25 bp, Homo sapien
agctctcgtaatctcttactttttt

SEQ ID NO: 5874484 - DNA, 25 bp, Homo sapien
ttctgataagcgaattacttgtgtt

SEQ ID NO: 5874485 - DNA, 25 bp, Homo sapien
gcgatttgatatcgtaaataaaagc

SEQ ID NO: 5874486 - DNA, 25 bp, Homo sapien
ctataaatcgaacgaattgacgata

SEQ ID NO: 5874487 - DNA, 25 bp, Homo sapien
tgatgtacgacatataaggttatct

SEQ ID NO: 5874488 - DNA, 25 bp, Homo sapien
aacgccttaataacgattagttaca

SEQ ID NO: 5874489 - DNA, 25 bp, Homo sapien
tgatgctgttaatagtcgaacttta

SEQ ID NO: 5874490 - DNA, 25 bp, Homo sapien
tcctctatacgaacaattgattcat

SEQ ID NO: 5874491 - DNA, 25 bp, Homo sapien
tctgatcgaatacgaagttattttg

SEQ ID NO: 5874492 - DNA, 25 bp, Homo sapien
aacatttattaatcgtatggcacct

SEQ ID NO: 5874493 - DNA, 25 bp, Homo sapien
ttactatcggtattaaatcgcatca

SEQ ID NO: 5874494 - DNA, 25 bp, Homo sapien
ctggtaaactaattgtcgatcatat

SEQ ID NO: 5874495 - DNA, 25 bp, Homo sapien
ttacattataacacgtcatatggtc

SEQ ID NO: 5874496 - DNA, 25 bp, Homo sapien
aaaatatattagatcagtcggatcc

SEQ ID NO: 5874497 - DNA, 25 bp, Homo sapien
tattaatattcggttcgtaaactcg

SEQ ID NO: 5874498 - DNA, 25 bp, Homo sapien
caaatgtcataacgatgtatgtcat

SEQ ID NO: 5874499 - DNA, 25 bp, Homo sapien
attacaaataggattatcgtgcgat

SEQ ID NO: 5874500 - DNA, 25 bp, Homo sapien
gactgagaattccgattgaattttt

SEQ ID NO: 5874501 - DNA, 25 bp, Homo sapien
tattgttagaatacgaacgacagaa

SEQ ID NO: 5874502 - DNA, 25 bp, Homo sapien
actacatatttattacgcgacagaa

SEQ ID NO: 5874503 - DNA, 25 bp, Homo sapien
gttttaacttaattattcgcgcatg

SEQ ID NO: 5874504 - DNA, 25 bp, Homo sapien
ctcgtatgatcgcattgaaatttat

SEQ ID NO: 5874505 - DNA, 25 bp, Homo sapien
aatactctatttacgttacgtagac

SEQ ID NO: 5874506 - DNA, 25 bp, Homo sapien
aatgctattaatcgagatcaaaagg

SEQ ID NO: 5874507 - DNA, 25 bp, Homo sapien
cgaacacgaattattatgtatgtct

SEQ ID NO: 5874508 - DNA, 25 bp, Homo sapien
ctgaatttcgaataacgtttcacat

SEQ ID NO: 5874509 - DNA, 25 bp, Homo sapien
tctcttatgtgtcgtattcatctta

SEQ ID NO: 5874510 - DNA, 25 bp, Homo sapien
gaaagaacgttatagcatatcacaa

SEQ ID NO: 5874511 - DNA, 25 bp, Homo sapien
attaataacgatctatcgatgcgtt

SEQ ID NO: 5874512 - DNA, 25 bp, Homo sapien
gagttttaacgagctaatagtacta

SEQ ID NO: 5874513 - DNA, 25 bp, Homo sapien
tcattgcgtaaagataagttagcta

SEQ ID NO: 5874514 - DNA, 25 bp, Homo sapien
tcatcagcggttttttactataaga

SEQ ID NO: 5874515 - DNA, 25 bp, Homo sapien
atcactcgaaaaatcgatcatgaaa

SEQ ID NO: 5874516 - DNA, 25 bp, Homo sapien
atatataatgaatctaatcgacccc

SEQ ID NO: 5874517 - DNA, 25 bp, Homo sapien
cataataatatcaatcgtaacgtgg

SEQ ID NO: 5874518 - DNA, 25 bp, Homo sapien
aagctttagtgcaacgattataagt

SEQ ID NO: 5874519 - DNA, 25 bp, Homo sapien
tcaatatcgaataagctgtttcttc

SEQ ID NO: 5874520 - DNA, 25 bp, Homo sapien
tcgttatcacgtataagtaactaac

SEQ ID NO: 5874521 - DNA, 25 bp, Homo sapien
tctatttacaatacgaccatcagtt

SEQ ID NO: 5874522 - DNA, 25 bp, Homo sapien
atcttgtttaaatccgatacacttc

SEQ ID NO: 5874523 - DNA, 25 bp, Homo sapien
atataattataaaccggttagccag

SEQ ID NO: 5874524 - DNA, 25 bp, Homo sapien
tctcaagatataaagatcgctaatc

SEQ ID NO: 5874525 - DNA, 25 bp, Homo sapien
atcaaattaacgtcgtaacactgat

SEQ ID NO: 5874526 - DNA, 25 bp, Homo sapien
tttagaaatcgttaccaattctgag

SEQ ID NO: 5874527 - DNA, 25 bp, Homo sapien
aagcgattaaaattggttcgattac

SEQ ID NO: 5874528 - DNA, 25 bp, Homo sapien
cctcaatcttaatcgtaataagcaa

SEQ ID NO: 5874529 - DNA, 25 bp, Homo sapien
aatatttagtaacaattcgacgagc

SEQ ID NO: 5874530 - DNA, 25 bp, Homo sapien
atcgaaattttatgcggatcagata

SEQ ID NO: 5874531 - DNA, 25 bp, Homo sapien
tgtcttacttaattagcgttactct

SEQ ID NO: 5874532 - DNA, 25 bp, Homo sapien
ttccagttaaataattcgatgtgca

SEQ ID NO: 5874533 - DNA, 25 bp, Homo sapien
atcacattgagtaattcgacgataa

SEQ ID NO: 5874534 - DNA, 25 bp, Homo sapien
gttataatataatccggtatcacct

SEQ ID NO: 5874535 - DNA, 25 bp, Homo sapien
acatattatcaagacaatcggcttt

SEQ ID NO: 5874536 - DNA, 25 bp, Homo sapien
attgctacgtaaatttaatcacagg

SEQ ID NO: 5874537 - DNA, 25 bp, Homo sapien
cactttaccgactatctatttctta

SEQ ID NO: 5874538 - DNA, 25 bp, Homo sapien
aagacaaatcgattatataccgatc

SEQ ID NO: 5874539 - DNA, 25 bp, Homo sapien
agttgatacgtatacgaattcattc

SEQ ID NO: 5874540 - DNA, 25 bp, Homo sapien
agactttatcgcatagttgtaactt

SEQ ID NO: 5874541 - DNA, 25 bp, Homo sapien
ttaatcttttattacgcgaaaccca

SEQ ID NO: 5874542 - DNA, 25 bp, Homo sapien
tgtacaccgtccttatatatacaaa

SEQ ID NO: 5874543 - DNA, 25 bp, Homo sapien
taatccgcataatcttagaactgtt

SEQ ID NO: 5874544 - DNA, 25 bp, Homo sapien
attcacaaattgacgttacatccta

SEQ ID NO: 5874545 - DNA, 25 bp, Homo sapien
taatatatgttcgatcttagccgta

SEQ ID NO: 5874546 - DNA, 25 bp, Homo sapien
atctaatatctattcgctgatggat

SEQ ID NO: 5874547 - DNA, 25 bp, Homo sapien
tgttcaacgaacgtaatttcttact

SEQ ID NO: 5874548 - DNA, 25 bp, Homo sapien
caaatgttaaaagtaccgaatgcaa

SEQ ID NO: 5874549 - DNA, 25 bp, Homo sapien
aggttctaacgaaattcatgagata

SEQ ID NO: 5874550 - DNA, 25 bp, Homo sapien
tgattgtgtacattattcgatagtc

SEQ ID NO: 5874551 - DNA, 25 bp, Homo sapien
cgtgtcgtaatcttttacacttata

SEQ ID NO: 5874552 - DNA, 25 bp, Homo sapien
tgattggatatcgatgatataagga

SEQ ID NO: 5874553 - DNA, 25 bp, Homo sapien
gttattccgtaatcgaatttacgat

SEQ ID NO: 5874554 - DNA, 25 bp, Homo sapien
atttcattaaccgctatttctctac

SEQ ID NO: 5874555 - DNA, 25 bp, Homo sapien
tgactcaatgatacaatacgataag

SEQ ID NO: 5874556 - DNA, 25 bp, Homo sapien
attgaattataacgtcgatggtgtt

SEQ ID NO: 5874557 - DNA, 25 bp, Homo sapien
agaggtatagatcgattatactagt

SEQ ID NO: 5874558 - DNA, 25 bp, Homo sapien
tttggatgtaacgcgatatatttag

SEQ ID NO: 5874559 - DNA, 25 bp, Homo sapien
taaaatacgcgtaatttcatcactc

SEQ ID NO: 5874560 - DNA, 25 bp, Homo sapien
gttttgaaatctagattacgctgta

SEQ ID NO: 5874561 - DNA, 25 bp, Homo sapien
acgtaatttcggacattcaagattt

SEQ ID NO: 5874562 - DNA, 25 bp, Homo sapien
gacgtgttaacgtaatatgattcaa

SEQ ID NO: 5874563 - DNA, 25 bp, Homo sapien
gtgctatttatactcgtatgataca

SEQ ID NO: 5874564 - DNA, 25 bp, Homo sapien
atagcatattaattaacgcgtcaca

SEQ ID NO: 5874565 - DNA, 25 bp, Homo sapien
atccttagtttaaacgatatgaggt

SEQ ID NO: 5874566 - DNA, 25 bp, Homo sapien
gagtaaattcgcttcgaattagaaa

SEQ ID NO: 5874567 - DNA, 25 bp, Homo sapien
gtcgatattacttattaacgtatgc

SEQ ID NO: 5874568 - DNA, 25 bp, Homo sapien
caaagtcgtacgaattattacatct

SEQ ID NO: 5874569 - DNA, 25 bp, Homo sapien
gaatgttcgtaatacaataatggtg

SEQ ID NO: 5874570 - DNA, 25 bp, Homo sapien
gatctggattcgaagtatatagtat

SEQ ID NO: 5874571 - DNA, 25 bp, Homo sapien
tcgtataattacgttgtcgaatctt

SEQ ID NO: 5874572 - DNA, 25 bp, Homo sapien
ataagttagaatacgacgattcgtt

SEQ ID NO: 5874573 - DNA, 25 bp, Homo sapien
tcatgaacgaacaattaccaaacaa

SEQ ID NO: 5874574 - DNA, 25 bp, Homo sapien
gcgactagataatttatacgtaagt

SEQ ID NO: 5874575 - DNA, 25 bp, Homo sapien
gtaatttatatcgtatggaccagat

SEQ ID NO: 5874576 - DNA, 25 bp, Homo sapien
tgttcaatatagatgttcgaatgga

SEQ ID NO: 5874577 - DNA, 25 bp, Homo sapien
gaattcatacgttgataatcgttct

SEQ ID NO: 5874578 - DNA, 25 bp, Homo sapien
cttagaattatcgtttgcgtaaact

SEQ ID NO: 5874579 - DNA, 25 bp, Homo sapien
ttaacaacgcgataatttatcaacg

SEQ ID NO: 5874580 - DNA, 25 bp, Homo sapien
tggcatattgaagcgatattcatat

SEQ ID NO: 5874581 - DNA, 25 bp, Homo sapien
tcggaattgataaaacgaactgaaa

SEQ ID NO: 5874582 - DNA, 25 bp, Homo sapien
ttgtctactcgtaatattagagctt

SEQ ID NO: 5874583 - DNA, 25 bp, Homo sapien
cattaacgagtcaattagattcagt

SEQ ID NO: 5874584 - DNA, 25 bp, Homo sapien
caagtaatatgcgcgttaattacaa

SEQ ID NO: 5874585 - DNA, 25 bp, Homo sapien
acgttttataaacgaacaactagca

SEQ ID NO: 5874586 - DNA, 25 bp, Homo sapien
tgtcgacgacatcgtatttaaaata

SEQ ID NO: 5874587 - DNA, 25 bp, Homo sapien
gaaaccgtataatgtttatcaagag

SEQ ID NO: 5874588 - DNA, 25 bp, Homo sapien
actgaacatatgtcggaattactaa

SEQ ID NO: 5874589 - DNA, 25 bp, Homo sapien
tactccaaatttttgcgatatacca

SEQ ID NO: 5874590 - DNA, 25 bp, Homo sapien
tgggatcttattaatttcgtggaaa

SEQ ID NO: 5874591 - DNA, 25 bp, Homo sapien
ataacaacacgttatatacgtaacg

SEQ ID NO: 5874592 - DNA, 25 bp, Homo sapien
tattcaattcgaaaaaagaccagct

SEQ ID NO: 5874593 - DNA, 25 bp, Homo sapien
gattgttacgtagataacgaatctt

SEQ ID NO: 5874594 - DNA, 25 bp, Homo sapien
actaaacatattcgataacgctgtt

SEQ ID NO: 5874595 - DNA, 25 bp, Homo sapien
actaaagtattcgtcgtaatgtatg

SEQ ID NO: 5874596 - DNA, 25 bp, Homo sapien
aaccataaacatgttcgtagtacat

SEQ ID NO: 5874597 - DNA, 25 bp, Homo sapien
ttagatctgttttagcgatacttga

SEQ ID NO: 5874598 - DNA, 25 bp, Homo sapien
aatagtctaacgaattagtttcgag

SEQ ID NO: 5874599 - DNA, 25 bp, Homo sapien
tcataaacgatattaggttggctaa

SEQ ID NO: 5874600 - DNA, 25 bp, Homo sapien
tatcattttcgatttgtcgaaagag

SEQ ID NO: 5874601 - DNA, 25 bp, Homo sapien
agcaaacgataattagactattcgt

SEQ ID NO: 5874602 - DNA, 25 bp, Homo sapien
tggagagtatataattccgataaac

SEQ ID NO: 5874603 - DNA, 25 bp, Homo sapien
ttattactaaaatgacgtctttccc

SEQ ID NO: 5874604 - DNA, 25 bp, Homo sapien
gataatattaagctacgattggact

SEQ ID NO: 5874605 - DNA, 25 bp, Homo sapien
tagttcatatctacggattttacct

SEQ ID NO: 5874606 - DNA, 25 bp, Homo sapien
ctgattcgcgttaatttgattcata

SEQ ID NO: 5874607 - DNA, 25 bp, Homo sapien
atatataattatgaatcgggggaac

SEQ ID NO: 5874608 - DNA, 25 bp, Homo sapien
tcgccaactttacgattactattat

SEQ ID NO: 5874609 - DNA, 25 bp, Homo sapien
gctagacggagttatcttattttaa

SEQ ID NO: 5874610 - DNA, 25 bp, Homo sapien
atataaatatatagattcgccgtgc

SEQ ID NO: 5874611 - DNA, 25 bp, Homo sapien
ttcaaaactacgagtatctaggtta

SEQ ID NO: 5874612 - DNA, 25 bp, Homo sapien
cgctattgtcgttaatccaaaataa

SEQ ID NO: 5874613 - DNA, 25 bp, Homo sapien
tcacaaatacgatatctattcgtgt

SEQ ID NO: 5874614 - DNA, 25 bp, Homo sapien
tccatcgtttatcgttaaaatactc

SEQ ID NO: 5874615 - DNA, 25 bp, Homo sapien
tgaataagtaacgtaacttacaacc

SEQ ID NO: 5874616 - DNA, 25 bp, Homo sapien
gtcttaacctttataacgtcttcaa

SEQ ID NO: 5874617 - DNA, 25 bp, Homo sapien
ctggtatcgaaacgatatattattc

SEQ ID NO: 5874618 - DNA, 25 bp, Homo sapien
tgctttcgacaattatataggatct

SEQ ID NO: 5874619 - DNA, 25 bp, Homo sapien
aaatcgctcgatttatgaaacacat

SEQ ID NO: 5874620 - DNA, 25 bp, Homo sapien
cgaataaatccgcgaatattatgat

SEQ ID NO: 5874621 - DNA, 25 bp, Homo sapien
cattaattcaaaattcgcgtctctt

SEQ ID NO: 5874622 - DNA, 25 bp, Homo sapien
acacttacccgttaatatattgatc

SEQ ID NO: 5874623 - DNA, 25 bp, Homo sapien
gcttttaagcgattctaatcttaac

SEQ ID NO: 5874624 - DNA, 25 bp, Homo sapien
tcgatcttcgaatattaacgtcaaa

SEQ ID NO: 5874625 - DNA, 25 bp, Homo sapien
aaactgcgaatataacgaattgtag

SEQ ID NO: 5874626 - DNA, 25 bp, Homo sapien
tcttttaatatacggatagaaggca

SEQ ID NO: 5874627 - DNA, 25 bp, Homo sapien
ctatgtcttttaacgacgtagaatt

SEQ ID NO: 5874628 - DNA, 25 bp, Homo sapien
tctaaatatattattcgacgccaac

SEQ ID NO: 5874629 - DNA, 25 bp, Homo sapien
attcttatgtccgaaaaacttagtc

SEQ ID NO: 5874630 - DNA, 25 bp, Homo sapien
ttgattatatcgtgatgtagctctt

SEQ ID NO: 5874631 - DNA, 25 bp, Homo sapien
tttcacactatttgatcgaatcatc

SEQ ID NO: 5874632 - DNA, 25 bp, Homo sapien
gaatactatatgattattcggaagg

SEQ ID NO: 5874633 - DNA, 25 bp, Homo sapien
gaacagatcgtaaacaagtttttca

SEQ ID NO: 5874634 - DNA, 25 bp, Homo sapien
aacactacactcgaatgttatatca

SEQ ID NO: 5874635 - DNA, 25 bp, Homo sapien
ctacttaggatatcgtatatgacta

SEQ ID NO: 5874636 - DNA, 25 bp, Homo sapien
acgcatcggtaatatagtttgatat

SEQ ID NO: 5874637 - DNA, 25 bp, Homo sapien
cataacgacgatattataacgtatg

SEQ ID NO: 5874638 - DNA, 25 bp, Homo sapien
gcatttatcatccgaatctatagat

SEQ ID NO: 5874639 - DNA, 25 bp, Homo sapien
tcagatttaacgtaacgatatcgta

SEQ ID NO: 5874640 - DNA, 25 bp, Homo sapien
gtatatacttatacgccattggaat

SEQ ID NO: 5874641 - DNA, 25 bp, Homo sapien
aagcagacaatcgatatgaaataga

SEQ ID NO: 5874642 - DNA, 25 bp, Homo sapien
acgattacgactctttattgcttaa

SEQ ID NO: 5874643 - DNA, 25 bp, Homo sapien
cttaatcgacaaaggtaataatagc

SEQ ID NO: 5874644 - DNA, 25 bp, Homo sapien
agtacttttcgcatactagtcttaa

SEQ ID NO: 5874645 - DNA, 25 bp, Homo sapien
tttttatcgattaaaacgtcgctac

SEQ ID NO: 5874646 - DNA, 25 bp, Homo sapien
tgatatactaaaatcgtagacctac

SEQ ID NO: 5874647 - DNA, 25 bp, Homo sapien
attgtgttacattaatacgactcac

SEQ ID NO: 5874648 - DNA, 25 bp, Homo sapien
ttaatatgattttcgcaatcaggtg

SEQ ID NO: 5874649 - DNA, 25 bp, Homo sapien
gattattaaactatttcgtcctagc

SEQ ID NO: 5874650 - DNA, 25 bp, Homo sapien
tatttctatggaataattcggtgca

SEQ ID NO: 5874651 - DNA, 25 bp, Homo sapien
aaggttaatttcttgacgagcataa

SEQ ID NO: 5874652 - DNA, 25 bp, Homo sapien
attgtatgttataagtcgtagacag

SEQ ID NO: 5874653 - DNA, 25 bp, Homo sapien
acacaacaattatcgttataccatg

SEQ ID NO: 5874654 - DNA, 25 bp, Homo sapien
ctgattatttaactacgcgtatatg

SEQ ID NO: 5874655 - DNA, 25 bp, Homo sapien
ttcttgaatcgtaaaagatgtgtag

SEQ ID NO: 5874656 - DNA, 25 bp, Homo sapien
tatgatcgatgtattgaaactttgg

SEQ ID NO: 5874657 - DNA, 25 bp, Homo sapien
catgttttcgtaatagataacacac

SEQ ID NO: 5874658 - DNA, 25 bp, Homo sapien
ctttatcaacataagatcgtttagg

SEQ ID NO: 5874659 - DNA, 25 bp, Homo sapien
agctagattacgtgtagtaatatct

SEQ ID NO: 5874660 - DNA, 25 bp, Homo sapien
tagaccgcaattaattagagtttag

SEQ ID NO: 5874661 - DNA, 25 bp, Homo sapien
tctgcgcgaaatgatatatatttgt

SEQ ID NO: 5874662 - DNA, 25 bp, Homo sapien
gcattttctaataccgatatacaga

SEQ ID NO: 5874663 - DNA, 25 bp, Homo sapien
tctctttgattataagtcgtctgtt

SEQ ID NO: 5874664 - DNA, 25 bp, Homo sapien
atgaattgtagtaatatcgtgtgct

SEQ ID NO: 5874665 - DNA, 25 bp, Homo sapien
atcgactcttgtaaacgtataagta

SEQ ID NO: 5874666 - DNA, 25 bp, Homo sapien
gtattgtctcgataatttagtccat

SEQ ID NO: 5874667 - DNA, 25 bp, Homo sapien
actactcgaatattccgaaacataa

SEQ ID NO: 5874668 - DNA, 25 bp, Homo sapien
tatactcgatatagtaacgtggatt

SEQ ID NO: 5874669 - DNA, 25 bp, Homo sapien
cacctgtattatgttatcgatttga

SEQ ID NO: 5874670 - DNA, 25 bp, Homo sapien
aaacagtcgatgatatatctctgtt

SEQ ID NO: 5874671 - DNA, 25 bp, Homo sapien
gcatattccgctataattagaatag

SEQ ID NO: 5874672 - DNA, 25 bp, Homo sapien
aatgattcattagatcggaaatgtc

SEQ ID NO: 5874673 - DNA, 25 bp, Homo sapien
tctgcttataagtcgctagattatt

SEQ ID NO: 5874674 - DNA, 25 bp, Homo sapien
agttgatacgaattatagttgctca

SEQ ID NO: 5874675 - DNA, 25 bp, Homo sapien
gtatagattgcgttattaagacaac

SEQ ID NO: 5874676 - DNA, 25 bp, Homo sapien
ttctcaataatataccgatgacttg

SEQ ID NO: 5874677 - DNA, 25 bp, Homo sapien
gttcagtatttgataagcgttatac

SEQ ID NO: 5874678 - DNA, 25 bp, Homo sapien
ttagtaatcgatctaagatgatgct

SEQ ID NO: 5874679 - DNA, 25 bp, Homo sapien
tatcgaatacattcaacgatatcgt

SEQ ID NO: 5874680 - DNA, 25 bp, Homo sapien
ttactcgtactagaattctacatga

SEQ ID NO: 5874681 - DNA, 25 bp, Homo sapien
gggataccagtaatttttcgaatta

SEQ ID NO: 5874682 - DNA, 25 bp, Homo sapien
gtctacataaattcgttataggagt

SEQ ID NO: 5874683 - DNA, 25 bp, Homo sapien
gatctttaacagtaaattcgcactt

SEQ ID NO: 5874684 - DNA, 25 bp, Homo sapien
taactgttagtcgatcaattctgta

SEQ ID NO: 5874685 - DNA, 25 bp, Homo sapien
agtacttcatcaactatcgaagaaa

SEQ ID NO: 5874686 - DNA, 25 bp, Homo sapien
taaccttctttcgacgtatatatgt

SEQ ID NO: 5874687 - DNA, 25 bp, Homo sapien
tgacccgtaatattcgtatttgatt

SEQ ID NO: 5874688 - DNA, 25 bp, Homo sapien
gctttcaatatatgcggattattga

SEQ ID NO: 5874689 - DNA, 25 bp, Homo sapien
aaatacgacgcaaattttttcgcat

SEQ ID NO: 5874690 - DNA, 25 bp, Homo sapien
tcgttttaataagttatacggtgct

SEQ ID NO: 5874691 - DNA, 25 bp, Homo sapien
tccatataagtcgttgtgatgaaat

SEQ ID NO: 5874692 - DNA, 25 bp, Homo sapien
cttgttcaaattatactcgtgctat

SEQ ID NO: 5874693 - DNA, 25 bp, Homo sapien
ttctcagattacgttacatatagca

SEQ ID NO: 5874694 - DNA, 25 bp, Homo sapien
tgtagttcgtaacctatattaatcc

SEQ ID NO: 5874695 - DNA, 25 bp, Homo sapien
ttccaagcgttaatcttattaatcc

SEQ ID NO: 5874696 - DNA, 25 bp, Homo sapien
tttgcacgaacgaaattgatactaa

SEQ ID NO: 5874697 - DNA, 25 bp, Homo sapien
ttccttataattcggcaagagttta

SEQ ID NO: 5874698 - DNA, 25 bp, Homo sapien
tactaacactataagatcgtacgat

SEQ ID NO: 5874699 - DNA, 25 bp, Homo sapien
agcaaattcctataagcgtaactaa

SEQ ID NO: 5874700 - DNA, 25 bp, Homo sapien
caagccgatttatataagtaccttt

SEQ ID NO: 5874701 - DNA, 25 bp, Homo sapien
gttcaaatttcgattaaacgtgtca

SEQ ID NO: 5874702 - DNA, 25 bp, Homo sapien
ttgattacatagttgtcgtatgaca

SEQ ID NO: 5874703 - DNA, 25 bp, Homo sapien
aaataacgataagatatgtttggcc

SEQ ID NO: 5874704 - DNA, 25 bp, Homo sapien
ttattacgaatccatataaccactg

SEQ ID NO: 5874705 - DNA, 25 bp, Homo sapien
ctacagaactcgtaattagattagt

SEQ ID NO: 5874706 - DNA, 25 bp, Homo sapien
agcttattaaataatgcgcgttatg

SEQ ID NO: 5874707 - DNA, 25 bp, Homo sapien
agctaattcggatataactaacgtt

SEQ ID NO: 5874708 - DNA, 25 bp, Homo sapien
gaaagattgtatattaagcgaacca

SEQ ID NO: 5874709 - DNA, 25 bp, Homo sapien
tagcagcgaatagaatatatcgaaa

SEQ ID NO: 5874710 - DNA, 25 bp, Homo sapien
tttatcgattatgttcgttagcctt

SEQ ID NO: 5874711 - DNA, 25 bp, Homo sapien
aaagaacgtatgatgtattgccata

SEQ ID NO: 5874712 - DNA, 25 bp, Homo sapien
actgtattatagcgaaattaagagc

SEQ ID NO: 5874713 - DNA, 25 bp, Homo sapien
tcaattataacgattggatctcaga

SEQ ID NO: 5874714 - DNA, 25 bp, Homo sapien
aaattgcaattaactacgattaggg

SEQ ID NO: 5874715 - DNA, 25 bp, Homo sapien
tgctaacgcttataagttacatgta

SEQ ID NO: 5874716 - DNA, 25 bp, Homo sapien
ttgatcgttttacgtataaacgctt

SEQ ID NO: 5874717 - DNA, 25 bp, Homo sapien
gtcttaatattgacgcaactaaact

SEQ ID NO: 5874718 - DNA, 25 bp, Homo sapien
cgacttcgaagatatcaaatttatc

SEQ ID NO: 5874719 - DNA, 25 bp, Homo sapien
aagcattcgaatattcatcgacttt

SEQ ID NO: 5874720 - DNA, 25 bp, Homo sapien
gtgattcgatctatatgtcattttc

SEQ ID NO: 5874721 - DNA, 25 bp, Homo sapien
taaactattggcgtgttaaaatacc

SEQ ID NO: 5874722 - DNA, 25 bp, Homo sapien
agtaatagtattacgatagatggca

SEQ ID NO: 5874723 - DNA, 25 bp, Homo sapien
agttccgtcaaagttatgtaagtta

SEQ ID NO: 5874724 - DNA, 25 bp, Homo sapien
tcctactaattcggaataatagtag

SEQ ID NO: 5874725 - DNA, 25 bp, Homo sapien
ggagatcggtaaaacttcattttat

SEQ ID NO: 5874726 - DNA, 25 bp, Homo sapien
tagaataagtaaaatagcgccgtaa

SEQ ID NO: 5874727 - DNA, 25 bp, Homo sapien
cctaatcaatatagcgatgttgata

SEQ ID NO: 5874728 - DNA, 25 bp, Homo sapien
tacatattatccgctagatttgtga

SEQ ID NO: 5874729 - DNA, 25 bp, Homo sapien
taactttttcgaacgtatactagca

SEQ ID NO: 5874730 - DNA, 25 bp, Homo sapien
ttactctataacgcaattatccgat

SEQ ID NO: 5874731 - DNA, 25 bp, Homo sapien
actttggtatcgaatttatgttcga

SEQ ID NO: 5874732 - DNA, 25 bp, Homo sapien
acttatattatatcgtatcctagcc

SEQ ID NO: 5874733 - DNA, 25 bp, Homo sapien
tatcgactattgtcgatactcttta

SEQ ID NO: 5874734 - DNA, 25 bp, Homo sapien
tcgttagtcgaaatttaatggctat

SEQ ID NO: 5874735 - DNA, 25 bp, Homo sapien
ggagcttcttattaagcgaatttta

SEQ ID NO: 5874736 - DNA, 25 bp, Homo sapien
caagaaatgtacatcgctattacat

SEQ ID NO: 5874737 - DNA, 25 bp, Homo sapien
catcctgtcggaaattatatacatt

SEQ ID NO: 5874738 - DNA, 25 bp, Homo sapien
aaaatgcataaatcgaattggcaca

SEQ ID NO: 5874739 - DNA, 25 bp, Homo sapien
gtggacgttaagtaatatctgatta

SEQ ID NO: 5874740 - DNA, 25 bp, Homo sapien
taacttaatggtacgataacgtaag

SEQ ID NO: 5874741 - DNA, 25 bp, Homo sapien
tgctttatatgcgagatcaatgaaa

SEQ ID NO: 5874742 - DNA, 25 bp, Homo sapien
gatagagaaatttgacggattatga

SEQ ID NO: 5874743 - DNA, 25 bp, Homo sapien
ccaaataatcgtaaagtatccgatt

SEQ ID NO: 5874744 - DNA, 25 bp, Homo sapien
tatagtactccgttatattcttggt

SEQ ID NO: 5874745 - DNA, 25 bp, Homo sapien
gttactatcattataagcgtcaaca

SEQ ID NO: 5874746 - DNA, 25 bp, Homo sapien
atctattgcgtctaaactaatcgaa

SEQ ID NO: 5874747 - DNA, 25 bp, Homo sapien
gatggataaaccgtttatcaataag

SEQ ID NO: 5874748 - DNA, 25 bp, Homo sapien
tccttacgatcgtaaatgaaatgat

SEQ ID NO: 5874749 - DNA, 25 bp, Homo sapien
tgagaagttaagcgtaatatatcct

SEQ ID NO: 5874750 - DNA, 25 bp, Homo sapien
atttgtcgttatcgattcaaatcct

SEQ ID NO: 5874751 - DNA, 25 bp, Homo sapien
acctaaatgctaatttacgagttag

SEQ ID NO: 5874752 - DNA, 25 bp, Homo sapien
agtgcttataaacgcattacgataa

SEQ ID NO: 5874753 - DNA, 25 bp, Homo sapien
tggtaatttcgtaatcgatttccta

SEQ ID NO: 5874754 - DNA, 25 bp, Homo sapien
ttttgttatagctatattcgtgagc

SEQ ID NO: 5874755 - DNA, 25 bp, Homo sapien
taacagatatgaaaatgtcgacatg

SEQ ID NO: 5874756 - DNA, 25 bp, Homo sapien
accaaatcattagcgaatcaaaatc

SEQ ID NO: 5874757 - DNA, 25 bp, Homo sapien
gtacagattttactaatcggtgttt

SEQ ID NO: 5874758 - DNA, 25 bp, Homo sapien
cagatatcgtctatttgatacatca

SEQ ID NO: 5874759 - DNA, 25 bp, Homo sapien
tttaagtttgttacgatatcccgta

SEQ ID NO: 5874760 - DNA, 25 bp, Homo sapien
ctatgcgtataactttactattgag

SEQ ID NO: 5874761 - DNA, 25 bp, Homo sapien
agaatgccgattatattattcaagc

SEQ ID NO: 5874762 - DNA, 25 bp, Homo sapien
gcacatcgaatatctaagtcatata

SEQ ID NO: 5874763 - DNA, 25 bp, Homo sapien
gatgtcgagctaaattattaaggat

SEQ ID NO: 5874764 - DNA, 25 bp, Homo sapien
tacagaaataaccgctaaaccattt

SEQ ID NO: 5874765 - DNA, 25 bp, Homo sapien
aaaagttagctataacgtatggaca

SEQ ID NO: 5874766 - DNA, 25 bp, Homo sapien
gctcatgatcgatctaataattagt

SEQ ID NO: 5874767 - DNA, 25 bp, Homo sapien
tgtactcgctaatttaagatctatc

SEQ ID NO: 5874768 - DNA, 25 bp, Homo sapien
aagacttatcgaagacaacaacttt

SEQ ID NO: 5874769 - DNA, 25 bp, Homo sapien
ttgatctatcgtaatactaatcctg

SEQ ID NO: 5874770 - DNA, 25 bp, Homo sapien
tcatagatcgaacatatttgaaagc

SEQ ID NO: 5874771 - DNA, 25 bp, Homo sapien
tctacttagcgataatcatactgta

SEQ ID NO: 5874772 - DNA, 25 bp, Homo sapien
attgtaacgtattcgttatattggg

SEQ ID NO: 5874773 - DNA, 25 bp, Homo sapien
gacaaaactaacttcgttgatgata

SEQ ID NO: 5874774 - DNA, 25 bp, Homo sapien
attgtcgtgtcaacttaatactctt

SEQ ID NO: 5874775 - DNA, 25 bp, Homo sapien
atcggttgaacgaacatattataag

SEQ ID NO: 5874776 - DNA, 25 bp, Homo sapien
cgtcgagttcgaatattattattga

SEQ ID NO: 5874777 - DNA, 25 bp, Homo sapien
cctataatttcgtacgatttagatg

SEQ ID NO: 5874778 - DNA, 25 bp, Homo sapien
gagtacttgttatatacgaaagtac

SEQ ID NO: 5874779 - DNA, 25 bp, Homo sapien
tgtaattaaacgcgttttcttatcc

SEQ ID NO: 5874780 - DNA, 25 bp, Homo sapien
agcctttacgaacagcttataaaaa

SEQ ID NO: 5874781 - DNA, 25 bp, Homo sapien
aataccgaatttcgaaaataatgcc

SEQ ID NO: 5874782 - DNA, 25 bp, Homo sapien
aacaattaagtgcgtctaaaaaagc

SEQ ID NO: 5874783 - DNA, 25 bp, Homo sapien
tgttcgaatcgttaatctaaacagt

SEQ ID NO: 5874784 - DNA, 25 bp, Homo sapien
ttatgaacgtacttgctataaatgc

SEQ ID NO: 5874785 - DNA, 25 bp, Homo sapien
gctattaattgctatcgaaaggata

SEQ ID NO: 5874786 - DNA, 25 bp, Homo sapien
ctgatttgattatcacgcaatcaaa

SEQ ID NO: 5874787 - DNA, 25 bp, Homo sapien
tgatttcgtaggattaataaggtct

SEQ ID NO: 5874788 - DNA, 25 bp, Homo sapien
agtctgacgaatattacgtatcttt

SEQ ID NO: 5874789 - DNA, 25 bp, Homo sapien
gtgagttcgaaaattacacgtaaaa

SEQ ID NO: 5874790 - DNA, 25 bp, Homo sapien
cgagattatacgtatcgttttattc

SEQ ID NO: 5874791 - DNA, 25 bp, Homo sapien
gtaccaaaatttgcgagtcataata

SEQ ID NO: 5874792 - DNA, 25 bp, Homo sapien
caaacaaattagcagtacgaaatac

SEQ ID NO: 5874793 - DNA, 25 bp, Homo sapien
ttaattttatagacaatcggggcta

SEQ ID NO: 5874794 - DNA, 25 bp, Homo sapien
tttgattagtaaacgattcgcgtta

SEQ ID NO: 5874795 - DNA, 25 bp, Homo sapien
aaatgtcatcgcgtattaaaacagt

SEQ ID NO: 5874796 - DNA, 25 bp, Homo sapien
ctaattcgaatcttaattagctacc

SEQ ID NO: 5874797 - DNA, 25 bp, Homo sapien
tatgtcatctaaacgattgagcatt

SEQ ID NO: 5874798 - DNA, 25 bp, Homo sapien
tagtgcgattttgttaacgaatagt

SEQ ID NO: 5874799 - DNA, 25 bp, Homo sapien
tccaaagtataatcgaaattagagg

SEQ ID NO: 5874800 - DNA, 25 bp, Homo sapien
tatcaaagaaacgcgaattaatgct

SEQ ID NO: 5874801 - DNA, 25 bp, Homo sapien
tgatgaaaatttacgactatcagtc

SEQ ID NO: 5874802 - DNA, 25 bp, Homo sapien
attgcaacgaacgattaaatgtctt

SEQ ID NO: 5874803 - DNA, 25 bp, Homo sapien
ttatcttacgagtagagtttgtatg

SEQ ID NO: 5874804 - DNA, 25 bp, Homo sapien
ccaagtaagatttataccgagaaat

SEQ ID NO: 5874805 - DNA, 25 bp, Homo sapien
catcgaaaatttcgatacgaactaa

SEQ ID NO: 5874806 - DNA, 25 bp, Homo sapien
cacgtataactccattcgtaataaa

SEQ ID NO: 5874807 - DNA, 25 bp, Homo sapien
aatttgccgataaattaaacgtgtc

SEQ ID NO: 5874808 - DNA, 25 bp, Homo sapien
caattgtaatttgtacgaatggtca

SEQ ID NO: 5874809 - DNA, 25 bp, Homo sapien
gttcttcgacatctttttagtaaca

SEQ ID NO: 5874810 - DNA, 25 bp, Homo sapien
taccattaatatcggagtaaggaaa

SEQ ID NO: 5874811 - DNA, 25 bp, Homo sapien
tgttcaatcacgaacgaaatttcat

SEQ ID NO: 5874812 - DNA, 25 bp, Homo sapien
attgaagtttactattatcgggaag

SEQ ID NO: 5874813 - DNA, 25 bp, Homo sapien
tccagttagacgatatcttattatc

SEQ ID NO: 5874814 - DNA, 25 bp, Homo sapien
gaactcgacaaaattgaatctctta

SEQ ID NO: 5874815 - DNA, 25 bp, Homo sapien
gaaaccatctagtacgattacattt

SEQ ID NO: 5874816 - DNA, 25 bp, Homo sapien
tgcaaaccaataatcgaagttttac

SEQ ID NO: 5874817 - DNA, 25 bp, Homo sapien
ctttacgtttaataccttagagcta

SEQ ID NO: 5874818 - DNA, 25 bp, Homo sapien
gcaaatccgaaatatcgtatttcct

SEQ ID NO: 5874819 - DNA, 25 bp, Homo sapien
tgattcgactattcaataacgttcg

SEQ ID NO: 5874820 - DNA, 25 bp, Homo sapien
aaggattatatacgaggattgtacg

SEQ ID NO: 5874821 - DNA, 25 bp, Homo sapien
attattcattaatagcggattcgcg

SEQ ID NO: 5874822 - DNA, 25 bp, Homo sapien
ggtattcgattgactatatcgcatt

SEQ ID NO: 5874823 - DNA, 25 bp, Homo sapien
cgcgaacgattaaatgtttgcttta

SEQ ID NO: 5874824 - DNA, 25 bp, Homo sapien
tgcacaatcgcgtgtataaattcta

SEQ ID NO: 5874825 - DNA, 25 bp, Homo sapien
caattgcgtatcgataaatttcgtc

SEQ ID NO: 5874826 - DNA, 25 bp, Homo sapien
gtctttccgaatttaaacagtgtca

SEQ ID NO: 5874827 - DNA, 25 bp, Homo sapien
ccgagtattcgaatcaagtgaattt

SEQ ID NO: 5874828 - DNA, 25 bp, Homo sapien
tctaccgttactcaaattaacctga

SEQ ID NO: 5874829 - DNA, 25 bp, Homo sapien
ttgtgatatagtacacatcgtaggt

SEQ ID NO: 5874830 - DNA, 25 bp, Homo sapien
gggtttacgcgtaagaataatagaa

SEQ ID NO: 5874831 - DNA, 25 bp, Homo sapien
tcaccctaatttagattcgacgatt

SEQ ID NO: 5874832 - DNA, 25 bp, Homo sapien
tacattcctcgaatttacatctctc

SEQ ID NO: 5874833 - DNA, 25 bp, Homo sapien
tcatgatatccgaatgtcaaagtga

SEQ ID NO: 5874834 - DNA, 25 bp, Homo sapien
ataaatatgcaaatcgtactagggc

SEQ ID NO: 5874835 - DNA, 25 bp, Homo sapien
gtcaagaactaatttcgaatgtctc

SEQ ID NO: 5874836 - DNA, 25 bp, Homo sapien
ttacagaaactaaatctacggaacg

SEQ ID NO: 5874837 - DNA, 25 bp, Homo sapien
gcgctttttacgataagtacttgta

SEQ ID NO: 5874838 - DNA, 25 bp, Homo sapien
atagcattcttaagctcgaatagtg

SEQ ID NO: 5874839 - DNA, 25 bp, Homo sapien
gttcacatataatatcttcgtcgac

SEQ ID NO: 5874840 - DNA, 25 bp, Homo sapien
cgttgatttgacgctaaaatgtgat

SEQ ID NO: 5874841 - DNA, 25 bp, Homo sapien
caattttacacgttatcgatcttgg

SEQ ID NO: 5874842 - DNA, 25 bp, Homo sapien
gtactaacgtaaacacgattgctaa

SEQ ID NO: 5874843 - DNA, 25 bp, Homo sapien
tccaaacgatatcgtaaaaggacta

SEQ ID NO: 5874844 - DNA, 25 bp, Homo sapien
gagattatcgtatgatgaagagtca

SEQ ID NO: 5874845 - DNA, 25 bp, Homo sapien
gcgatcgaattttatactcgagtaa

SEQ ID NO: 5874846 - DNA, 25 bp, Homo sapien
tgattaatataagattacgccccac

SEQ ID NO: 5874847 - DNA, 25 bp, Homo sapien
ggcactatattgttaacacgcttta

SEQ ID NO: 5874848 - DNA, 25 bp, Homo sapien
ttccatgataaacctcgatattagc

SEQ ID NO: 5874849 - DNA, 25 bp, Homo sapien
gattacagtcgtatattagattgcg

SEQ ID NO: 5874850 - DNA, 25 bp, Homo sapien
tacacgtctaagttcgattagtatg

SEQ ID NO: 5874851 - DNA, 25 bp, Homo sapien
cagtacgtataagaattcgttgttg

SEQ ID NO: 5874852 - DNA, 25 bp, Homo sapien
atcttcgattaaggttgattagtcc

SEQ ID NO: 5874853 - DNA, 25 bp, Homo sapien
attctgatactctacgtttagttgc

SEQ ID NO: 5874854 - DNA, 25 bp, Homo sapien
gatgcgataaaaaccgatagtgttt

SEQ ID NO: 5874855 - DNA, 25 bp, Homo sapien
gagattattcatctacgatactgag

SEQ ID NO: 5874856 - DNA, 25 bp, Homo sapien
gcaacctttttgcgaaattatagct

SEQ ID NO: 5874857 - DNA, 25 bp, Homo sapien
attacactaaatacgttcgaacgga

SEQ ID NO: 5874858 - DNA, 25 bp, Homo sapien
agtcgacgtacgaattgttatattg

SEQ ID NO: 5874859 - DNA, 25 bp, Homo sapien
gaggattagacgaacgttaatagaa

SEQ ID NO: 5874860 - DNA, 25 bp, Homo sapien
tatcattttcgattcgtcttaagcc

SEQ ID NO: 5874861 - DNA, 25 bp, Homo sapien
ttgaacgttaatatcgttagctacg

SEQ ID NO: 5874862 - DNA, 25 bp, Homo sapien
ccacttcgtactattatacgttctt

SEQ ID NO: 5874863 - DNA, 25 bp, Homo sapien
ttacatttataggcgactatgctac

SEQ ID NO: 5874864 - DNA, 25 bp, Homo sapien
acaaatataaacattccgacccaac

SEQ ID NO: 5874865 - DNA, 25 bp, Homo sapien
cagtatattagtaaccggaacatac

SEQ ID NO: 5874866 - DNA, 25 bp, Homo sapien
aggttgttgttgacgttatactaag

SEQ ID NO: 5874867 - DNA, 25 bp, Homo sapien
ttcgatcgtcattaattaactctcg

SEQ ID NO: 5874868 - DNA, 25 bp, Homo sapien
gcctacataacagaatcgatctaaa

SEQ ID NO: 5874869 - DNA, 25 bp, Homo sapien
acactacgcttataaagttacgaag

SEQ ID NO: 5874870 - DNA, 25 bp, Homo sapien
tcattgatttacgacttaagcgctt

SEQ ID NO: 5874871 - DNA, 25 bp, Homo sapien
tagtgtaacgatttgagctttcaag

SEQ ID NO: 5874872 - DNA, 25 bp, Homo sapien
actcattgtcggataataagtcaag

SEQ ID NO: 5874873 - DNA, 25 bp, Homo sapien
aggttttgcgttatttcgtatgact

SEQ ID NO: 5874874 - DNA, 25 bp, Homo sapien
acgttcgtatattcaatcctttcag

SEQ ID NO: 5874875 - DNA, 25 bp, Homo sapien
gcggtatcgagtaatagttaattga

SEQ ID NO: 5874876 - DNA, 25 bp, Homo sapien
tgactacactatcgtaacaaagcaa

SEQ ID NO: 5874877 - DNA, 25 bp, Homo sapien
ccgtaccttattattacgctatgat

SEQ ID NO: 5874878 - DNA, 25 bp, Homo sapien
gataacctatcgaaataagtagtcc

SEQ ID NO: 5874879 - DNA, 25 bp, Homo sapien
ggtcaattatgaatcgtcgttcaat

SEQ ID NO: 5874880 - DNA, 25 bp, Homo sapien
tagaattattcgtcttcgtataggg

SEQ ID NO: 5874881 - DNA, 25 bp, Homo sapien
aatgtatattagtacaacgacctcc

SEQ ID NO: 5874882 - DNA, 25 bp, Homo sapien
tgtctacacgatatacgaatgttag

SEQ ID NO: 5874883 - DNA, 25 bp, Homo sapien
ccgacattacgcatataactatagt

SEQ ID NO: 5874884 - DNA, 25 bp, Homo sapien
ccgtttactaattcgcatagtgatt

SEQ ID NO: 5874885 - DNA, 25 bp, Homo sapien
tcgtcattcgaatatacggttaaga

SEQ ID NO: 5874886 - DNA, 25 bp, Homo sapien
ggtattgattcgatgtagtaagtac

SEQ ID NO: 5874887 - DNA, 25 bp, Homo sapien
cgctatactagcataatcgtgataa

SEQ ID NO: 5874888 - DNA, 25 bp, Homo sapien
tatagatcgtcatagacttaccaga

SEQ ID NO: 5874889 - DNA, 25 bp, Homo sapien
ttcgcgtcttataatattcggacaa

SEQ ID NO: 5874890 - DNA, 25 bp, Homo sapien
ttttaatcgtcgaaaatagaagcgg

SEQ ID NO: 5874891 - DNA, 25 bp, Homo sapien
cactaacttcgtgatataacatgca

SEQ ID NO: 5874892 - DNA, 25 bp, Homo sapien
taacaatttaagccgactaatcgct

SEQ ID NO: 5874893 - DNA, 25 bp, Homo sapien
gttgctaacaattaatccgagtaag

SEQ ID NO: 5874894 - DNA, 25 bp, Homo sapien
tctacatagtttacgaaacgtcgta

SEQ ID NO: 5874895 - DNA, 25 bp, Homo sapien
gacgatgcgtattatacaagattct

SEQ ID NO: 5874896 - DNA, 25 bp, Homo sapien
ctggttaatacgcgtattattctag

SEQ ID NO: 5874897 - DNA, 25 bp, Homo sapien
taattccgtataattcgtttgcagg

SEQ ID NO: 5874898 - DNA, 25 bp, Homo sapien
gaaacaatgcgattaggtattttcc

SEQ ID NO: 5874899 - DNA, 25 bp, Homo sapien
gtatcattgttatacgacagcagtt

SEQ ID NO: 5874900 - DNA, 25 bp, Homo sapien
gtttactaaatcgtacattatcccc

SEQ ID NO: 5874901 - DNA, 25 bp, Homo sapien
attcgatcgtttttcgttaagactc

SEQ ID NO: 5874902 - DNA, 25 bp, Homo sapien
tgcaataacgaactattacccgaat

SEQ ID NO: 5874903 - DNA, 25 bp, Homo sapien
agattaaattggttatcggtcgaag

SEQ ID NO: 5874904 - DNA, 25 bp, Homo sapien
cgctttagataaaacgttcgtagaa

SEQ ID NO: 5874905 - DNA, 25 bp, Homo sapien
tacacttatcgttaaacgatggcaa

SEQ ID NO: 5874906 - DNA, 25 bp, Homo sapien
aatgataatcgtaccgtaaagacgt

SEQ ID NO: 5874907 - DNA, 25 bp, Homo sapien
ggtaacgcatattttacgatttagg

SEQ ID NO: 5874908 - DNA, 25 bp, Homo sapien
gctttaacgtttcatacgatatgga

SEQ ID NO: 5874909 - DNA, 25 bp, Homo sapien
gtttctagaacgaattaagccttga

SEQ ID NO: 5874910 - DNA, 25 bp, Homo sapien
ttcgttttatcgtgtatcgatacag

SEQ ID NO: 5874911 - DNA, 25 bp, Homo sapien
gttactatagctaactcgtaaggat

SEQ ID NO: 5874912 - DNA, 25 bp, Homo sapien
gcgttgtataatcttatccgatttg

SEQ ID NO: 5874913 - DNA, 25 bp, Homo sapien
tcttaaattccggactattagagga

SEQ ID NO: 5874914 - DNA, 25 bp, Homo sapien
tatcgctaataagttgacgagatag

SEQ ID NO: 5874915 - DNA, 25 bp, Homo sapien
taaggttcaattcgatccaaagtgt

SEQ ID NO: 5874916 - DNA, 25 bp, Homo sapien
taggatacattcgtataacgtaagg

SEQ ID NO: 5874917 - DNA, 25 bp, Homo sapien
cgtgtttaagcgaagttgttattag

SEQ ID NO: 5874918 - DNA, 25 bp, Homo sapien
tgtctcgcaagataatagatgtaca

SEQ ID NO: 5874919 - DNA, 25 bp, Homo sapien
tgtatcggcttgaattaatagacct

SEQ ID NO: 5874920 - DNA, 25 bp, Homo sapien
ccaataactaataattccgcacgtt

SEQ ID NO: 5874921 - DNA, 25 bp, Homo sapien
agtactaatatcggctttaggagtt

SEQ ID NO: 5874922 - DNA, 25 bp, Homo sapien
ataggtcgtgtatcaaagatcagaa

SEQ ID NO: 5874923 - DNA, 25 bp, Homo sapien
cattcgcgtaatgttaatagtaacc

SEQ ID NO: 5874924 - DNA, 25 bp, Homo sapien
atggcttagttccgtataatgatag

SEQ ID NO: 5874925 - DNA, 25 bp, Homo sapien
tgtttatttaagtttcgcgacgatc

SEQ ID NO: 5874926 - DNA, 25 bp, Homo sapien
tactgtatgtttcgcttaatctgtg

SEQ ID NO: 5874927 - DNA, 25 bp, Homo sapien
gaacacaatacgacataatgattgc

SEQ ID NO: 5874928 - DNA, 25 bp, Homo sapien
agcgtaaatcgttagtaacaacaac

SEQ ID NO: 5874929 - DNA, 25 bp, Homo sapien
acccatttaataaacgcgttctaga

SEQ ID NO: 5874930 - DNA, 25 bp, Homo sapien
aacgccgaatcttcaattgattgaa

SEQ ID NO: 5874931 - DNA, 25 bp, Homo sapien
tagtgttattcgaccaattggacaa

SEQ ID NO: 5874932 - DNA, 25 bp, Homo sapien
caacttagaaccatattacgactca

SEQ ID NO: 5874933 - DNA, 25 bp, Homo sapien
gctattaatgacgtactttatgtcg

SEQ ID NO: 5874934 - DNA, 25 bp, Homo sapien
tgtcctcaatcttcgattaaaacct

SEQ ID NO: 5874935 - DNA, 25 bp, Homo sapien
aaaactgtgttatcgagtatcgttc

SEQ ID NO: 5874936 - DNA, 25 bp, Homo sapien
taataatgttcgcgtatttacgtcc

SEQ ID NO: 5874937 - DNA, 25 bp, Homo sapien
aacaatcgtcgatatagtttccaga

SEQ ID NO: 5874938 - DNA, 25 bp, Homo sapien
cgattaattagtcgattcaaaagcc

SEQ ID NO: 5874939 - DNA, 25 bp, Homo sapien
tattctgccgatattaaacaaggct

SEQ ID NO: 5874940 - DNA, 25 bp, Homo sapien
gatgatatttggttcgactaatctc

SEQ ID NO: 5874941 - DNA, 25 bp, Homo sapien
acgacaaggtatattccgataacta

SEQ ID NO: 5874942 - DNA, 25 bp, Homo sapien
aatcaatattaatgcgactccgcta

SEQ ID NO: 5874943 - DNA, 25 bp, Homo sapien
aagtacgcgttatagattatagagg

SEQ ID NO: 5874944 - DNA, 25 bp, Homo sapien
ttgtcgttttatatattcgcctctg

SEQ ID NO: 5874945 - DNA, 25 bp, Homo sapien
agagaaattataacgaacgtgtagc

SEQ ID NO: 5874946 - DNA, 25 bp, Homo sapien
gatagcgtcttgtatcaaatgatga

SEQ ID NO: 5874947 - DNA, 25 bp, Homo sapien
ttcaggtaacccgtaattaacttca

SEQ ID NO: 5874948 - DNA, 25 bp, Homo sapien
tacagtaaatcgcattgagttatgc

SEQ ID NO: 5874949 - DNA, 25 bp, Homo sapien
actatcgtaataacgcttatagggt

SEQ ID NO: 5874950 - DNA, 25 bp, Homo sapien
aagggtaacctacgaattacataga

SEQ ID NO: 5874951 - DNA, 25 bp, Homo sapien
atgggattattaattcggacttcca

SEQ ID NO: 5874952 - DNA, 25 bp, Homo sapien
atggttcgattatcaactatgcttc

SEQ ID NO: 5874953 - DNA, 25 bp, Homo sapien
acattgttgaactaaaaacgcttcc

SEQ ID NO: 5874954 - DNA, 25 bp, Homo sapien
tcgttgatttacgatattgataccg

SEQ ID NO: 5874955 - DNA, 25 bp, Homo sapien
tacctattaaggccgaattatgttg

SEQ ID NO: 5874956 - DNA, 25 bp, Homo sapien
gggaacgggatatactattatactt

SEQ ID NO: 5874957 - DNA, 25 bp, Homo sapien
acaggagactaatcgtatattcact

SEQ ID NO: 5874958 - DNA, 25 bp, Homo sapien
actgaactacgcagttaataagcta

SEQ ID NO: 5874959 - DNA, 25 bp, Homo sapien
aatgatcgttaaattcgatcacgca

SEQ ID NO: 5874960 - DNA, 25 bp, Homo sapien
tattcaattgcgtcatttgatggga

SEQ ID NO: 5874961 - DNA, 25 bp, Homo sapien
tactaatagacgaacttatacggac

SEQ ID NO: 5874962 - DNA, 25 bp, Homo sapien
tgtcagtaatatcgtcgaaagtctt

SEQ ID NO: 5874963 - DNA, 25 bp, Homo sapien
atgtttgcggttatagtaaagtgca

SEQ ID NO: 5874964 - DNA, 25 bp, Homo sapien
aacagatttacgtatcgtatttggg

SEQ ID NO: 5874965 - DNA, 25 bp, Homo sapien
catcttaatgtcgattgattgctct

SEQ ID NO: 5874966 - DNA, 25 bp, Homo sapien
atctccgacatataaatacgagcta

SEQ ID NO: 5874967 - DNA, 25 bp, Homo sapien
tagcttcgatacgaattaactgtct

SEQ ID NO: 5874968 - DNA, 25 bp, Homo sapien
ccgatactatcgtaaactagcaaat

SEQ ID NO: 5874969 - DNA, 25 bp, Homo sapien
tcgtatcataaacgtcgaatacttc

SEQ ID NO: 5874970 - DNA, 25 bp, Homo sapien
tacgaacttcctttcgaatagtgtt

SEQ ID NO: 5874971 - DNA, 25 bp, Homo sapien
gtgacacgtacgattaatacctaaa

SEQ ID NO: 5874972 - DNA, 25 bp, Homo sapien
cgttcgatgaaattacacgacataa

SEQ ID NO: 5874973 - DNA, 25 bp, Homo sapien
ggataattcgacttggtaatggtaa

SEQ ID NO: 5874974 - DNA, 25 bp, Homo sapien
attatcatataatgaccgaagtgcg

SEQ ID NO: 5874975 - DNA, 25 bp, Homo sapien
ttgtctagaactaaaagcgaagtga

SEQ ID NO: 5874976 - DNA, 25 bp, Homo sapien
tcgctcttatggtttaacgtagtta

SEQ ID NO: 5874977 - DNA, 25 bp, Homo sapien
ccatatacatcggcttatatcactt

SEQ ID NO: 5874978 - DNA, 25 bp, Homo sapien
gtactcataactctaatcgaaggtt

SEQ ID NO: 5874979 - DNA, 25 bp, Homo sapien
cctcaggtcgtttaattcattatga

SEQ ID NO: 5874980 - DNA, 25 bp, Homo sapien
tctggttcgatcctttattgacaaa

SEQ ID NO: 5874981 - DNA, 25 bp, Homo sapien
actagtagcagatatcgaatagtag

SEQ ID NO: 5874982 - DNA, 25 bp, Homo sapien
gactaattggttacgaaattggtgt

SEQ ID NO: 5874983 - DNA, 25 bp, Homo sapien
ttgtcccataatccgatatatccaa

SEQ ID NO: 5874984 - DNA, 25 bp, Homo sapien
ttttgtattgtcgacaaacagcagt

SEQ ID NO: 5874985 - DNA, 25 bp, Homo sapien
tgaagtaagcgataaattgagagac

SEQ ID NO: 5874986 - DNA, 25 bp, Homo sapien
tatattattagccgatagttctccc

SEQ ID NO: 5874987 - DNA, 25 bp, Homo sapien
ctttcattatttagtcgcgacgata

SEQ ID NO: 5874988 - DNA, 25 bp, Homo sapien
cctcgatcaacaatcgttaaatgtt

SEQ ID NO: 5874989 - DNA, 25 bp, Homo sapien
aacggcgtaaataaagtcgaattca

SEQ ID NO: 5874990 - DNA, 25 bp, Homo sapien
aaagctaacggtggaataataagga

SEQ ID NO: 5874991 - DNA, 25 bp, Homo sapien
atctgatttatacgctgtagtttgc

SEQ ID NO: 5874992 - DNA, 25 bp, Homo sapien
tcgtgataatacgattagttccaca

SEQ ID NO: 5874993 - DNA, 25 bp, Homo sapien
tctcaatattcgatacgaacatcca

SEQ ID NO: 5874994 - DNA, 25 bp, Homo sapien
catatcttcgaggttaattattccc

SEQ ID NO: 5874995 - DNA, 25 bp, Homo sapien
ggatattagccgttattaagaccat

SEQ ID NO: 5874996 - DNA, 25 bp, Homo sapien
taggaccgataatatgacttctgat

SEQ ID NO: 5874997 - DNA, 25 bp, Homo sapien
aagttaaatagacttacgactgtcg

SEQ ID NO: 5874998 - DNA, 25 bp, Homo sapien
acaacaataatgttacgcacatacg

SEQ ID NO: 5874999 - DNA, 25 bp, Homo sapien
ttgatgtataccgttgatatctgct

SEQ ID NO: 5875000 - DNA, 25 bp, Homo sapien
ctctggatcctaaatttacgttaca

SEQ ID NO: 5875001 - DNA, 25 bp, Homo sapien
tctggattcgacgataaaagattct

SEQ ID NO: 5875002 - DNA, 25 bp, Homo sapien
gtcttcgaaaatatttgcgaaaagg

SEQ ID NO: 5875003 - DNA, 25 bp, Homo sapien
taggaaacgagtatattaaccgtga

SEQ ID NO: 5875004 - DNA, 25 bp, Homo sapien
tgatatatagatcgcttatggtctc

SEQ ID NO: 5875005 - DNA, 25 bp, Homo sapien
caatctaacacctttacgtaaagga

SEQ ID NO: 5875006 - DNA, 25 bp, Homo sapien
tcatcaatagccgttttatgttgga

SEQ ID NO: 5875007 - DNA, 25 bp, Homo sapien
actacatatatcgttcgaaaacacc

SEQ ID NO: 5875008 - DNA, 25 bp, Homo sapien
gccttataatagcatttccgtacaa

SEQ ID NO: 5875009 - DNA, 25 bp, Homo sapien
agctattgaagtaatacgtcaggta

SEQ ID NO: 5875010 - DNA, 25 bp, Homo sapien
aacacatactaacgcagattgatca

SEQ ID NO: 5875011 - DNA, 25 bp, Homo sapien
actgtctacgaataacttgtcaatc

SEQ ID NO: 5875012 - DNA, 25 bp, Homo sapien
gtccaaaaatatgcggtagtatatc

SEQ ID NO: 5875013 - DNA, 25 bp, Homo sapien
agccacgtctcataaatttcactaa

SEQ ID NO: 5875014 - DNA, 25 bp, Homo sapien
agagacatcgaattatactacacac

SEQ ID NO: 5875015 - DNA, 25 bp, Homo sapien
agctaacgatctaatatgtttgtcg

SEQ ID NO: 5875016 - DNA, 25 bp, Homo sapien
ttaacctactaaatcgatagtgcac

SEQ ID NO: 5875017 - DNA, 25 bp, Homo sapien
tggtgaaaatcgtagtacgtaatct

SEQ ID NO: 5875018 - DNA, 25 bp, Homo sapien
gaatcttcgataacaattaccgaac

SEQ ID NO: 5875019 - DNA, 25 bp, Homo sapien
atatcatgacgatggatataatggg

SEQ ID NO: 5875020 - DNA, 25 bp, Homo sapien
ttatctcttaacgcgaaatacgtgt

SEQ ID NO: 5875021 - DNA, 25 bp, Homo sapien
tgtttgatcgtattagatttcgtgg

SEQ ID NO: 5875022 - DNA, 25 bp, Homo sapien
gactcttacaattaatcggtctcaa

SEQ ID NO: 5875023 - DNA, 25 bp, Homo sapien
agatgatatactagcaatcgaagag

SEQ ID NO: 5875024 - DNA, 25 bp, Homo sapien
ggacgttaaagatcgactaaatatc

SEQ ID NO: 5875025 - DNA, 25 bp, Homo sapien
acgtatatgtccgagtaattacatg

SEQ ID NO: 5875026 - DNA, 25 bp, Homo sapien
ttctaaaatttcgtcatagaccgtc

SEQ ID NO: 5875027 - DNA, 25 bp, Homo sapien
ttccctttcgaactactatgaaatc

SEQ ID NO: 5875028 - DNA, 25 bp, Homo sapien
gaatattgtatataactcgccggaa

SEQ ID NO: 5875029 - DNA, 25 bp, Homo sapien
atctataattacgcggataagagtg

SEQ ID NO: 5875030 - DNA, 25 bp, Homo sapien
catgaatatgatgtcgtaattcctg

SEQ ID NO: 5875031 - DNA, 25 bp, Homo sapien
tggtaattatcgagcttgatccaat

SEQ ID NO: 5875032 - DNA, 25 bp, Homo sapien
cataaaatagtgtaaagtcgcactc

SEQ ID NO: 5875033 - DNA, 25 bp, Homo sapien
agaaattagtaacgatacgagtgct

SEQ ID NO: 5875034 - DNA, 25 bp, Homo sapien
tctatccgaaattgataaaggtgct

SEQ ID NO: 5875035 - DNA, 25 bp, Homo sapien
tggcttataacgctttttcgatctt

SEQ ID NO: 5875036 - DNA, 25 bp, Homo sapien
caaggttaatatcgcaattctacct

SEQ ID NO: 5875037 - DNA, 25 bp, Homo sapien
catgcaacgcgatattatgaaaaac

SEQ ID NO: 5875038 - DNA, 25 bp, Homo sapien
ctacatctaatcatatcgcagtgaa

SEQ ID NO: 5875039 - DNA, 25 bp, Homo sapien
tgcggagtatattatacgtcagtat

SEQ ID NO: 5875040 - DNA, 25 bp, Homo sapien
tgagactatacgaaaatcgtaccat

SEQ ID NO: 5875041 - DNA, 25 bp, Homo sapien
ttatttatacttgttcggatgaccg

SEQ ID NO: 5875042 - DNA, 25 bp, Homo sapien
ttcgccgtttatcatagatcataca

SEQ ID NO: 5875043 - DNA, 25 bp, Homo sapien
agttccgttcctaattctattactg

SEQ ID NO: 5875044 - DNA, 25 bp, Homo sapien
taccaagtttacagtcgataagaga

SEQ ID NO: 5875045 - DNA, 25 bp, Homo sapien
ggcgtttattcgcataattatagct

SEQ ID NO: 5875046 - DNA, 25 bp, Homo sapien
tcgtgatgaacgtcgattatgataa

SEQ ID NO: 5875047 - DNA, 25 bp, Homo sapien
aatagcgaaaaaatccatagtggac

SEQ ID NO: 5875048 - DNA, 25 bp, Homo sapien
gcgcttaagttattaaccgtacata

SEQ ID NO: 5875049 - DNA, 25 bp, Homo sapien
gacgagcgctctattaatttttttg

SEQ ID NO: 5875050 - DNA, 25 bp, Homo sapien
gatgtttattatcaacgcctatcag

SEQ ID NO: 5875051 - DNA, 25 bp, Homo sapien
tcatcatattattttcgcgcgttca

SEQ ID NO: 5875052 - DNA, 25 bp, Homo sapien
atcagcatatcgattagagaaatcc

SEQ ID NO: 5875053 - DNA, 25 bp, Homo sapien
gtgccttaagttggaatacgattat

SEQ ID NO: 5875054 - DNA, 25 bp, Homo sapien
gttgtactatatctagtcgaattcc

SEQ ID NO: 5875055 - DNA, 25 bp, Homo sapien
gaggaaatgactacgtactattaca

SEQ ID NO: 5875056 - DNA, 25 bp, Homo sapien
tggtaatcataattctcgaaccgta

SEQ ID NO: 5875057 - DNA, 25 bp, Homo sapien
actttttcaacgcgattaatggtgt

SEQ ID NO: 5875058 - DNA, 25 bp, Homo sapien
ttcactcgaatttaattgcgatacg

SEQ ID NO: 5875059 - DNA, 25 bp, Homo sapien
actcttattgatcggacaaaagact

SEQ ID NO: 5875060 - DNA, 25 bp, Homo sapien
aattataatggtcaaatcgagagcg

SEQ ID NO: 5875061 - DNA, 25 bp, Homo sapien
tttagaccggtgtattatttgtgga

SEQ ID NO: 5875062 - DNA, 25 bp, Homo sapien
tggagataggataataagcggatat

SEQ ID NO: 5875063 - DNA, 25 bp, Homo sapien
atacccgaatccgatttatagagat

SEQ ID NO: 5875064 - DNA, 25 bp, Homo sapien
ttgggttcgtacgtattatcaatgt

SEQ ID NO: 5875065 - DNA, 25 bp, Homo sapien
gcttatgacgaagttaatagaggta

SEQ ID NO: 5875066 - DNA, 25 bp, Homo sapien
taatagatcgtaagttaatcgaccg

SEQ ID NO: 5875067 - DNA, 25 bp, Homo sapien
aagatgattaacccgaaatttgtgg

SEQ ID NO: 5875068 - DNA, 25 bp, Homo sapien
agtcgatcaagtaattacgactatg

SEQ ID NO: 5875069 - DNA, 25 bp, Homo sapien
ctaagaatcgatctcagtttgtact

SEQ ID NO: 5875070 - DNA, 25 bp, Homo sapien
tagacgtttgatatcatcgaccaat

SEQ ID NO: 5875071 - DNA, 25 bp, Homo sapien
aggataagctcgaacttataccaat

SEQ ID NO: 5875072 - DNA, 25 bp, Homo sapien
accacattacggtcttaatagaagt

SEQ ID NO: 5875073 - DNA, 25 bp, Homo sapien
tggttcacattcgacaattatgcaa

SEQ ID NO: 5875074 - DNA, 25 bp, Homo sapien
tgggaatttactcgctatacatatg

SEQ ID NO: 5875075 - DNA, 25 bp, Homo sapien
ttcgatttcgaaattgatccctagt

SEQ ID NO: 5875076 - DNA, 25 bp, Homo sapien
ctcgtttatagcggaatacttacaa

SEQ ID NO: 5875077 - DNA, 25 bp, Homo sapien
atacgacataacgtatcgttgaaca

SEQ ID NO: 5875078 - DNA, 25 bp, Homo sapien
aactattctagacgataagtcgtca

SEQ ID NO: 5875079 - DNA, 25 bp, Homo sapien
atctatctcgtataattaagagccg

SEQ ID NO: 5875080 - DNA, 25 bp, Homo sapien
atacagatgtcgattatatagctcc

SEQ ID NO: 5875081 - DNA, 25 bp, Homo sapien
tgatgcgatacaatactataggtct

SEQ ID NO: 5875082 - DNA, 25 bp, Homo sapien
tcctttcgtatcgtattactgactt

SEQ ID NO: 5875083 - DNA, 25 bp, Homo sapien
tggaaaagttattagttcgagaagg

SEQ ID NO: 5875084 - DNA, 25 bp, Homo sapien
caacagatatagtgcgtaaagtatc

SEQ ID NO: 5875085 - DNA, 25 bp, Homo sapien
tttcagcgaataaatctttcctcct

SEQ ID NO: 5875086 - DNA, 25 bp, Homo sapien
gatagcgtatattagaaagtgtcac

SEQ ID NO: 5875087 - DNA, 25 bp, Homo sapien
gaaagtagttctacgagattaagtc

SEQ ID NO: 5875088 - DNA, 25 bp, Homo sapien
gtactgattaaaaattcgtccttcc

SEQ ID NO: 5875089 - DNA, 25 bp, Homo sapien
cttagtaaagttccttcgtagcatt

SEQ ID NO: 5875090 - DNA, 25 bp, Homo sapien
tcgaagtcgctttttttatagtgca

SEQ ID NO: 5875091 - DNA, 25 bp, Homo sapien
attagccgaataaatagtcatgcga

SEQ ID NO: 5875092 - DNA, 25 bp, Homo sapien
atacgggttaattagacgtaactca

SEQ ID NO: 5875093 - DNA, 25 bp, Homo sapien
gacagtaatctgatccgttattcta

SEQ ID NO: 5875094 - DNA, 25 bp, Homo sapien
gcgttctttatacgcaataactgtt

SEQ ID NO: 5875095 - DNA, 25 bp, Homo sapien
aatcgtatcgaattactacgatcag

SEQ ID NO: 5875096 - DNA, 25 bp, Homo sapien
atctctacgaaccattaattgaagc

SEQ ID NO: 5875097 - DNA, 25 bp, Homo sapien
gtaaggtatatgattgcgattagtc

SEQ ID NO: 5875098 - DNA, 25 bp, Homo sapien
gtcagaacaaataatcgttcacgta

SEQ ID NO: 5875099 - DNA, 25 bp, Homo sapien
gtgtattatgaagaagatcgttcca

SEQ ID NO: 5875100 - DNA, 25 bp, Homo sapien
aaagattgtttcgttattcgctcgt

SEQ ID NO: 5875101 - DNA, 25 bp, Homo sapien
gaagagccgtttaataactagaaac

SEQ ID NO: 5875102 - DNA, 25 bp, Homo sapien
ggacgataacgacttctataagata

SEQ ID NO: 5875103 - DNA, 25 bp, Homo sapien
ttctgatgacttatcgtactcttag

SEQ ID NO: 5875104 - DNA, 25 bp, Homo sapien
tctatatcgaactatagtagctcgt

SEQ ID NO: 5875105 - DNA, 25 bp, Homo sapien
tcacgtcgaataagattgaacctat

SEQ ID NO: 5875106 - DNA, 25 bp, Homo sapien
atagataaatttatacgacggggtc

SEQ ID NO: 5875107 - DNA, 25 bp, Homo sapien
atccagatttacgtgattgatccta

SEQ ID NO: 5875108 - DNA, 25 bp, Homo sapien
gcaacttcgtctaatattaggcaat

SEQ ID NO: 5875109 - DNA, 25 bp, Homo sapien
taggcataacgaatttcgacacaat

SEQ ID NO: 5875110 - DNA, 25 bp, Homo sapien
actagtaatcttccgtatgaactct

SEQ ID NO: 5875111 - DNA, 25 bp, Homo sapien
tagacataacgagcttaacaactgt

SEQ ID NO: 5875112 - DNA, 25 bp, Homo sapien
tcccaatacgaataacttagatagg

SEQ ID NO: 5875113 - DNA, 25 bp, Homo sapien
tcactcgatatatcttagatttcgg

SEQ ID NO: 5875114 - DNA, 25 bp, Homo sapien
gtacgtaatctacgcttaacaaatc

SEQ ID NO: 5875115 - DNA, 25 bp, Homo sapien
gatgctggtcgaactatatatatgt

SEQ ID NO: 5875116 - DNA, 25 bp, Homo sapien
gatgcatcgtattgttatatgcaag

SEQ ID NO: 5875117 - DNA, 25 bp, Homo sapien
tctagctctatgttatcgttacctt

SEQ ID NO: 5875118 - DNA, 25 bp, Homo sapien
tcttctttcgcgattacaaacattc

SEQ ID NO: 5875119 - DNA, 25 bp, Homo sapien
cacaaaattgacatttacgctcctt

SEQ ID NO: 5875120 - DNA, 25 bp, Homo sapien
ccgttctaataacggatgtatatac

SEQ ID NO: 5875121 - DNA, 25 bp, Homo sapien
tgagattatcgattagcaaccatac

SEQ ID NO: 5875122 - DNA, 25 bp, Homo sapien
cttgcagatatttcatccgtttttg

SEQ ID NO: 5875123 - DNA, 25 bp, Homo sapien
tctctaataggttaacggttagagt

SEQ ID NO: 5875124 - DNA, 25 bp, Homo sapien
cctacctacgtgaaatgttaataac

SEQ ID NO: 5875125 - DNA, 25 bp, Homo sapien
cgatgtcgtaaatttaacgattgag

SEQ ID NO: 5875126 - DNA, 25 bp, Homo sapien
aacaccgagttagtatctaatttgg

SEQ ID NO: 5875127 - DNA, 25 bp, Homo sapien
tgtggcgtaaaatgacatactagta

SEQ ID NO: 5875128 - DNA, 25 bp, Homo sapien
gctttagcgtaccattaatttaacg

SEQ ID NO: 5875129 - DNA, 25 bp, Homo sapien
atacttaatcatatcaaacgagggg

SEQ ID NO: 5875130 - DNA, 25 bp, Homo sapien
ctatttaaatcgaattcacgtaggc

SEQ ID NO: 5875131 - DNA, 25 bp, Homo sapien
gttccatttccgatatatcgcaaaa

SEQ ID NO: 5875132 - DNA, 25 bp, Homo sapien
ctcattatttcgtagcttttgggtt

SEQ ID NO: 5875133 - DNA, 25 bp, Homo sapien
ctgtgacgcgtttttaattatcatg

SEQ ID NO: 5875134 - DNA, 25 bp, Homo sapien
attatctacttaaatccgatccctc

SEQ ID NO: 5875135 - DNA, 25 bp, Homo sapien
aatgcactatacttgtcgtagcatt

SEQ ID NO: 5875136 - DNA, 25 bp, Homo sapien
tctttagtcgtcaattaatacaggg

SEQ ID NO: 5875137 - DNA, 25 bp, Homo sapien
accataacgtaataagctgtaccaa

SEQ ID NO: 5875138 - DNA, 25 bp, Homo sapien
tggacgattaaacgtatcgtagtat

SEQ ID NO: 5875139 - DNA, 25 bp, Homo sapien
accagcgttagatcaagttaatgat

SEQ ID NO: 5875140 - DNA, 25 bp, Homo sapien
ctagttacggaattattgtacggaa

SEQ ID NO: 5875141 - DNA, 25 bp, Homo sapien
tcgtcttttacgcgtgtatattatc

SEQ ID NO: 5875142 - DNA, 25 bp, Homo sapien
attgaagcattactattacgaagcc

SEQ ID NO: 5875143 - DNA, 25 bp, Homo sapien
cttaaattatgtcgtcaatgaggac

SEQ ID NO: 5875144 - DNA, 25 bp, Homo sapien
agatgcgtagtgatataagttccaa

SEQ ID NO: 5875145 - DNA, 25 bp, Homo sapien
attcgagtatgattttcgactacgt

SEQ ID NO: 5875146 - DNA, 25 bp, Homo sapien
cacgaattggataacgatatagttg

SEQ ID NO: 5875147 - DNA, 25 bp, Homo sapien
tggacattaatcgattatcctaacc

SEQ ID NO: 5875148 - DNA, 25 bp, Homo sapien
tacatcgtaaatcttatatcgctcg

SEQ ID NO: 5875149 - DNA, 25 bp, Homo sapien
ggataagtatagaacgataagtgac

SEQ ID NO: 5875150 - DNA, 25 bp, Homo sapien
acaactaccagcgtttataactgtt

SEQ ID NO: 5875151 - DNA, 25 bp, Homo sapien
gaaagtagattcgttagaagctatc

SEQ ID NO: 5875152 - DNA, 25 bp, Homo sapien
gacattttaacgatggtctatgatc

SEQ ID NO: 5875153 - DNA, 25 bp, Homo sapien
gaccatcgcgaattacttattaatc

SEQ ID NO: 5875154 - DNA, 25 bp, Homo sapien
agattagttaacataacgcttgcga

SEQ ID NO: 5875155 - DNA, 25 bp, Homo sapien
tccgtactacgcatattgaatatga

SEQ ID NO: 5875156 - DNA, 25 bp, Homo sapien
tgtcctctatttacgatcctattgt

SEQ ID NO: 5875157 - DNA, 25 bp, Homo sapien
cttaacgaaatatcgacattgttcg

SEQ ID NO: 5875158 - DNA, 25 bp, Homo sapien
cgtaaaatcgaaaaattcgtccaca

SEQ ID NO: 5875159 - DNA, 25 bp, Homo sapien
attcataatcgaactgagtagtgtg

SEQ ID NO: 5875160 - DNA, 25 bp, Homo sapien
ctgtagacgtcaataatgtttgatg

SEQ ID NO: 5875161 - DNA, 25 bp, Homo sapien
gttgtctcgttatttacgaaaaagc

SEQ ID NO: 5875162 - DNA, 25 bp, Homo sapien
cacatgtccttattacgaaacaaac

SEQ ID NO: 5875163 - DNA, 25 bp, Homo sapien
ggaacatgcaattgtaacgagttat

SEQ ID NO: 5875164 - DNA, 25 bp, Homo sapien
cgacttacgcgaacaattaattgtt

SEQ ID NO: 5875165 - DNA, 25 bp, Homo sapien
tgtgttatagagcgtaagatgtctt

SEQ ID NO: 5875166 - DNA, 25 bp, Homo sapien
gttgaagacaacgatataatacctg

SEQ ID NO: 5875167 - DNA, 25 bp, Homo sapien
agtatatcggtatattagatcagcc

SEQ ID NO: 5875168 - DNA, 25 bp, Homo sapien
attcaatccgttcttaactacgtca

SEQ ID NO: 5875169 - DNA, 25 bp, Homo sapien
tacacttttggtaatagcgtgaatc

SEQ ID NO: 5875170 - DNA, 25 bp, Homo sapien
atacgcgtagaaatcgaattgtaca

SEQ ID NO: 5875171 - DNA, 25 bp, Homo sapien
gctacagcgactaaattaactcaaa

SEQ ID NO: 5875172 - DNA, 25 bp, Homo sapien
tcccactatatcggttttacaacaa

SEQ ID NO: 5875173 - DNA, 25 bp, Homo sapien
cctcctaaaaggatcgatcaaatat

SEQ ID NO: 5875174 - DNA, 25 bp, Homo sapien
acaactttaattcgtacgaccatca

SEQ ID NO: 5875175 - DNA, 25 bp, Homo sapien
acaacgatatcgttttatcgcactt

SEQ ID NO: 5875176 - DNA, 25 bp, Homo sapien
acatgagtcgaaaaaatcgtcaaag

SEQ ID NO: 5875177 - DNA, 25 bp, Homo sapien
agcagtatccgttaatagtttatgg

SEQ ID NO: 5875178 - DNA, 25 bp, Homo sapien
actgttatggttctcgataaagaac

SEQ ID NO: 5875179 - DNA, 25 bp, Homo sapien
gtatgcttactcgattaagactgat

SEQ ID NO: 5875180 - DNA, 25 bp, Homo sapien
tggtcttagtacgtttaactgcata

SEQ ID NO: 5875181 - DNA, 25 bp, Homo sapien
tataacgttacttcaacaatcccct

SEQ ID NO: 5875182 - DNA, 25 bp, Homo sapien
cgccttcgacctttatattatgtat

SEQ ID NO: 5875183 - DNA, 25 bp, Homo sapien
agatgagatatattacggctgagta

SEQ ID NO: 5875184 - DNA, 25 bp, Homo sapien
atcgtacggttatttaatctaacgc

SEQ ID NO: 5875185 - DNA, 25 bp, Homo sapien
ggaaaatctattttatacgcgtctg

SEQ ID NO: 5875186 - DNA, 25 bp, Homo sapien
atctataaatactaccgtcaacagg

SEQ ID NO: 5875187 - DNA, 25 bp, Homo sapien
attatatattagtctgcgaagtgcc

SEQ ID NO: 5875188 - DNA, 25 bp, Homo sapien
cggatagtcaacgaagtttagatat

SEQ ID NO: 5875189 - DNA, 25 bp, Homo sapien
aagcttatattatcgatacgtcgtg

SEQ ID NO: 5875190 - DNA, 25 bp, Homo sapien
tgtcgtattatactacgaatacctg

SEQ ID NO: 5875191 - DNA, 25 bp, Homo sapien
aagaattatgcggttatgtagtgtc

SEQ ID NO: 5875192 - DNA, 25 bp, Homo sapien
acgtgttattgtcaatacgatgatc

SEQ ID NO: 5875193 - DNA, 25 bp, Homo sapien
tcaccttaaagaaaatcgcgttttc

SEQ ID NO: 5875194 - DNA, 25 bp, Homo sapien
cgggtgcgttaagtattagataaaa

SEQ ID NO: 5875195 - DNA, 25 bp, Homo sapien
ccttctgtaaaatcgacgaagaaaa

SEQ ID NO: 5875196 - DNA, 25 bp, Homo sapien
acgagaatatagagtagtcgaatga

SEQ ID NO: 5875197 - DNA, 25 bp, Homo sapien
tatacagtgtattgacgattggtgt

SEQ ID NO: 5875198 - DNA, 25 bp, Homo sapien
gtaacgaattcgtatagatatcagc

SEQ ID NO: 5875199 - DNA, 25 bp, Homo sapien
ctcagtccggcaatattaatactat

SEQ ID NO: 5875200 - DNA, 25 bp, Homo sapien
gacggtagccgaatcaaataaataa

SEQ ID NO: 5875201 - DNA, 25 bp, Homo sapien
caagttcgtaattttactcgtagag

SEQ ID NO: 5875202 - DNA, 25 bp, Homo sapien
gctttaatttactcgtcgataatcg

SEQ ID NO: 5875203 - DNA, 25 bp, Homo sapien
cgagattcgacaaagtagtattagt

SEQ ID NO: 5875204 - DNA, 25 bp, Homo sapien
cctcttacgattcgaatcattcttt

SEQ ID NO: 5875205 - DNA, 25 bp, Homo sapien
gcaccttgataaattaacggaacaa

SEQ ID NO: 5875206 - DNA, 25 bp, Homo sapien
agatataatacgcgatctatacacc

SEQ ID NO: 5875207 - DNA, 25 bp, Homo sapien
acgatatacgcgtttcaataagtca

SEQ ID NO: 5875208 - DNA, 25 bp, Homo sapien
atccgtcggttttaagatcatgttt

SEQ ID NO: 5875209 - DNA, 25 bp, Homo sapien
gaggttactaatcgagttttagttg

SEQ ID NO: 5875210 - DNA, 25 bp, Homo sapien
cagtacgcaataataccatacgtat

SEQ ID NO: 5875211 - DNA, 25 bp, Homo sapien
actggaattagcattatccgattca

SEQ ID NO: 5875212 - DNA, 25 bp, Homo sapien
tttagctcgtcgtatatataatggc

SEQ ID NO: 5875213 - DNA, 25 bp, Homo sapien
atcgctatattaatcgttgctcaac

SEQ ID NO: 5875214 - DNA, 25 bp, Homo sapien
atcgacgctttcataatatatggac

SEQ ID NO: 5875215 - DNA, 25 bp, Homo sapien
aatatcatactatcgaattctcgcc

SEQ ID NO: 5875216 - DNA, 25 bp, Homo sapien
tgtctatctttcgtatactcgtact

SEQ ID NO: 5875217 - DNA, 25 bp, Homo sapien
ttgtcttcgtatatgtttcgaacgt

SEQ ID NO: 5875218 - DNA, 25 bp, Homo sapien
aggtcgtgaatctatcgtaaaaaac

SEQ ID NO: 5875219 - DNA, 25 bp, Homo sapien
cagtatttagtataagatcggcaca

SEQ ID NO: 5875220 - DNA, 25 bp, Homo sapien
aatccgttaactatatgcgaaatcg

SEQ ID NO: 5875221 - DNA, 25 bp, Homo sapien
atacaataatcaacgctatagcgct

SEQ ID NO: 5875222 - DNA, 25 bp, Homo sapien
tccaataacaactagttcgagagta

SEQ ID NO: 5875223 - DNA, 25 bp, Homo sapien
tcctaatctaaatttaccgagagct

SEQ ID NO: 5875224 - DNA, 25 bp, Homo sapien
cctataccgagatgaataattccat

SEQ ID NO: 5875225 - DNA, 25 bp, Homo sapien
tgagattgatacaaccgtatttagg

SEQ ID NO: 5875226 - DNA, 25 bp, Homo sapien
ccagtcgttaaaacgaacaatttca

SEQ ID NO: 5875227 - DNA, 25 bp, Homo sapien
acgaaattcgacgcatatatggatt

SEQ ID NO: 5875228 - DNA, 25 bp, Homo sapien
attcgtatcgaacgatattttccac

SEQ ID NO: 5875229 - DNA, 25 bp, Homo sapien
cagtttattcgaatatctcgcagat

SEQ ID NO: 5875230 - DNA, 25 bp, Homo sapien
acctatattgttacgagtgatcgaa

SEQ ID NO: 5875231 - DNA, 25 bp, Homo sapien
ccgcataattatacaaatcgcagat

SEQ ID NO: 5875232 - DNA, 25 bp, Homo sapien
gatattcgaataccatactatcctc

SEQ ID NO: 5875233 - DNA, 25 bp, Homo sapien
ggaaattagcgtagatgattcaaca

SEQ ID NO: 5875234 - DNA, 25 bp, Homo sapien
aggcaatgacgtaataatcaaagac

SEQ ID NO: 5875235 - DNA, 25 bp, Homo sapien
attcaaattacgctagtactaccgt

SEQ ID NO: 5875236 - DNA, 25 bp, Homo sapien
actccaagttcgcaagatatacaaa

SEQ ID NO: 5875237 - DNA, 25 bp, Homo sapien
atgagatcatattacgcatatggtc

SEQ ID NO: 5875238 - DNA, 25 bp, Homo sapien
agtcaatgcgattgttgtaaaaagg

SEQ ID NO: 5875239 - DNA, 25 bp, Homo sapien
aaaccttcaagcgatcttatcatct

SEQ ID NO: 5875240 - DNA, 25 bp, Homo sapien
tgcaaatgatactctttacgttggt

SEQ ID NO: 5875241 - DNA, 25 bp, Homo sapien
aattgttcgagtaacgaaaagagag

SEQ ID NO: 5875242 - DNA, 25 bp, Homo sapien
aacgctaattcgtactatctaaagg

SEQ ID NO: 5875243 - DNA, 25 bp, Homo sapien
aacgtcaacggataaatagtctaag

SEQ ID NO: 5875244 - DNA, 25 bp, Homo sapien
gagcataaaaatttcggcgttatct

SEQ ID NO: 5875245 - DNA, 25 bp, Homo sapien
attcatatcgtattcgagttcgtac

SEQ ID NO: 5875246 - DNA, 25 bp, Homo sapien
aagtctgcgagaatatttgacgtat

SEQ ID NO: 5875247 - DNA, 25 bp, Homo sapien
atgaatttactttcgaacgttcgtg

SEQ ID NO: 5875248 - DNA, 25 bp, Homo sapien
gaaaagcgttatatatagagaggct

SEQ ID NO: 5875249 - DNA, 25 bp, Homo sapien
gtcattattatcgcaaatcgtactc

SEQ ID NO: 5875250 - DNA, 25 bp, Homo sapien
cggaatataaactccgacaatatga

SEQ ID NO: 5875251 - DNA, 25 bp, Homo sapien
ttaagattcacgtagtataccagca

SEQ ID NO: 5875252 - DNA, 25 bp, Homo sapien
cttcataaaaaatctacggtcaagc

SEQ ID NO: 5875253 - DNA, 25 bp, Homo sapien
attgcacgaaatctcgtaatgacaa

SEQ ID NO: 5875254 - DNA, 25 bp, Homo sapien
tgccctgattacgaaataagtttac

SEQ ID NO: 5875255 - DNA, 25 bp, Homo sapien
aactcccgttgtagtataaaatgct

SEQ ID NO: 5875256 - DNA, 25 bp, Homo sapien
tcacaatcgctatattggattatgc

SEQ ID NO: 5875257 - DNA, 25 bp, Homo sapien
ggttttcgatattagtccatcactt

SEQ ID NO: 5875258 - DNA, 25 bp, Homo sapien
cactctggtcgattaatgtatatag

SEQ ID NO: 5875259 - DNA, 25 bp, Homo sapien
ccttagaaatttcgatctgaactac

SEQ ID NO: 5875260 - DNA, 25 bp, Homo sapien
gttagaactaacgtaaactgatgac

SEQ ID NO: 5875261 - DNA, 25 bp, Homo sapien
acatcaccgctttagtttttaagtg

SEQ ID NO: 5875262 - DNA, 25 bp, Homo sapien
tgtctatcataaatgattcggtgtg

SEQ ID NO: 5875263 - DNA, 25 bp, Homo sapien
cactaattacaacgaaatcgaagag

SEQ ID NO: 5875264 - DNA, 25 bp, Homo sapien
gcgtaatactgcgacaaatttttac

SEQ ID NO: 5875265 - DNA, 25 bp, Homo sapien
gaagtttaataacgcgcaaactttg

SEQ ID NO: 5875266 - DNA, 25 bp, Homo sapien
gagtttatcgtcctacaattgtaag

SEQ ID NO: 5875267 - DNA, 25 bp, Homo sapien
gcacttttatcgcgtttaacttcta

SEQ ID NO: 5875268 - DNA, 25 bp, Homo sapien
caatatttttacgcctgttacggta

SEQ ID NO: 5875269 - DNA, 25 bp, Homo sapien
tcctttttaataacgtccgagctaa

SEQ ID NO: 5875270 - DNA, 25 bp, Homo sapien
cagtaacaattaacgcaaacaggat

SEQ ID NO: 5875271 - DNA, 25 bp, Homo sapien
tcatttaatttcgtactacgctacc

SEQ ID NO: 5875272 - DNA, 25 bp, Homo sapien
tctgaattaatgtcgtacgttggaa

SEQ ID NO: 5875273 - DNA, 25 bp, Homo sapien
tacctcgacaaaaacgttattatgc

SEQ ID NO: 5875274 - DNA, 25 bp, Homo sapien
aaagtaatagttgcggattaagtgg

SEQ ID NO: 5875275 - DNA, 25 bp, Homo sapien
agcgttacgatttattgcgtatttc

SEQ ID NO: 5875276 - DNA, 25 bp, Homo sapien
cgcagccgattttttgaataatatc

SEQ ID NO: 5875277 - DNA, 25 bp, Homo sapien
tcgacaacttataacgcaagttgtt

SEQ ID NO: 5875278 - DNA, 25 bp, Homo sapien
tggaacaaatatatcgtcctgacat

SEQ ID NO: 5875279 - DNA, 25 bp, Homo sapien
tgactaaattaggtattacgtgctg

SEQ ID NO: 5875280 - DNA, 25 bp, Homo sapien
gaaaaaatattaacgcagacggcta

SEQ ID NO: 5875281 - DNA, 25 bp, Homo sapien
aaacgatatccgtatcgattaggaa

SEQ ID NO: 5875282 - DNA, 25 bp, Homo sapien
gggtaattgcgtaaaaaaagtgaga

SEQ ID NO: 5875283 - DNA, 25 bp, Homo sapien
tgtggttaatcgcgttcatagatta

SEQ ID NO: 5875284 - DNA, 25 bp, Homo sapien
cagaaattactcatacgctaacagt

SEQ ID NO: 5875285 - DNA, 25 bp, Homo sapien
agtaagaactatcgtttctatccag

SEQ ID NO: 5875286 - DNA, 25 bp, Homo sapien
tttcagattatgaacgatacgctag

SEQ ID NO: 5875287 - DNA, 25 bp, Homo sapien
ggaaattcgaaattctacgttcgat

SEQ ID NO: 5875288 - DNA, 25 bp, Homo sapien
agatactggtatcatataagttggc

SEQ ID NO: 5875289 - DNA, 25 bp, Homo sapien
ctaaataatataagccgatttgcgc

SEQ ID NO: 5875290 - DNA, 25 bp, Homo sapien
tactaatgacgatcgtaatagaacc

SEQ ID NO: 5875291 - DNA, 25 bp, Homo sapien
tttcattatatcgactcctatcgac

SEQ ID NO: 5875292 - DNA, 25 bp, Homo sapien
gttacctagtgtcgaataaaaagct

SEQ ID NO: 5875293 - DNA, 25 bp, Homo sapien
cacgacgtatcgataatataagctt

SEQ ID NO: 5875294 - DNA, 25 bp, Homo sapien
taactacgttaaaccataagagcga

SEQ ID NO: 5875295 - DNA, 25 bp, Homo sapien
gctgatatctatacgaattcgttac

SEQ ID NO: 5875296 - DNA, 25 bp, Homo sapien
ccacgaaatctaatacgatcaaaca

SEQ ID NO: 5875297 - DNA, 25 bp, Homo sapien
ggaattcgactagatatagtacaac

SEQ ID NO: 5875298 - DNA, 25 bp, Homo sapien
tagctcgtatttatatgtcggagat

SEQ ID NO: 5875299 - DNA, 25 bp, Homo sapien
ctgatcgtagtaattcgatacgatt

SEQ ID NO: 5875300 - DNA, 25 bp, Homo sapien
gagtcttaacgaaaaacgatcgaat

SEQ ID NO: 5875301 - DNA, 25 bp, Homo sapien
ttccgtacaataattccgtaactag

SEQ ID NO: 5875302 - DNA, 25 bp, Homo sapien
ccctgtattaattgacgactaaaga

SEQ ID NO: 5875303 - DNA, 25 bp, Homo sapien
agctctcggtaaatttagattagga

SEQ ID NO: 5875304 - DNA, 25 bp, Homo sapien
acacgtatttcgcgttaagagataa

SEQ ID NO: 5875305 - DNA, 25 bp, Homo sapien
cttgcatataacaatacgatgcatc

SEQ ID NO: 5875306 - DNA, 25 bp, Homo sapien
ccgcttctattttcgacgattaaaa

SEQ ID NO: 5875307 - DNA, 25 bp, Homo sapien
cggtatcaatatcgtaaatcaacga

SEQ ID NO: 5875308 - DNA, 25 bp, Homo sapien
tcatattcaatatgcgtagtacgga

SEQ ID NO: 5875309 - DNA, 25 bp, Homo sapien
agagcaatcaatcgacattaagatg

SEQ ID NO: 5875310 - DNA, 25 bp, Homo sapien
ttggaacttatatcactacgcatct

SEQ ID NO: 5875311 - DNA, 25 bp, Homo sapien
gtcgacgaagatattatatgtgaac

SEQ ID NO: 5875312 - DNA, 25 bp, Homo sapien
gagggatcggatttaagtagataat

SEQ ID NO: 5875313 - DNA, 25 bp, Homo sapien
tcattcgactactctatattctcgt

SEQ ID NO: 5875314 - DNA, 25 bp, Homo sapien
ggtgtatagatcgcgtattatatct

SEQ ID NO: 5875315 - DNA, 25 bp, Homo sapien
attgcctaatattagacgaagttgc

SEQ ID NO: 5875316 - DNA, 25 bp, Homo sapien
aacagttattgcgtataaagaacgc

SEQ ID NO: 5875317 - DNA, 25 bp, Homo sapien
tagccgtctgcgttaatattttttc

SEQ ID NO: 5875318 - DNA, 25 bp, Homo sapien
atactacgatacgtttaatcgtcca

SEQ ID NO: 5875319 - DNA, 25 bp, Homo sapien
attcgggtaatagttcgttattgca

SEQ ID NO: 5875320 - DNA, 25 bp, Homo sapien
gcaaactacagcgtataaatcagat

SEQ ID NO: 5875321 - DNA, 25 bp, Homo sapien
cctctataatctataacgcgtactt

SEQ ID NO: 5875322 - DNA, 25 bp, Homo sapien
gctttttcgtaaataacgagacaac

SEQ ID NO: 5875323 - DNA, 25 bp, Homo sapien
aagatcgaaaaagcgttataagcca

SEQ ID NO: 5875324 - DNA, 25 bp, Homo sapien
aacactattcgaaaggaagttcgta

SEQ ID NO: 5875325 - DNA, 25 bp, Homo sapien
aactgctgtcgtataacaatgatac

SEQ ID NO: 5875326 - DNA, 25 bp, Homo sapien
acaataggatcgtaaatagaggaca

SEQ ID NO: 5875327 - DNA, 25 bp, Homo sapien
cagaggcgaatatataaaacgacaa

SEQ ID NO: 5875328 - DNA, 25 bp, Homo sapien
tttaggtattaatcgtacgtgtcac

SEQ ID NO: 5875329 - DNA, 25 bp, Homo sapien
acgtagtcgaaaatcatactcgaat

SEQ ID NO: 5875330 - DNA, 25 bp, Homo sapien
aagactttcgacgatattactgaca

SEQ ID NO: 5875331 - DNA, 25 bp, Homo sapien
aatcactatgcgaattagtaaacgg

SEQ ID NO: 5875332 - DNA, 25 bp, Homo sapien
ctatctcgtcaacttattagcgata

SEQ ID NO: 5875333 - DNA, 25 bp, Homo sapien
ggtgttttcgaacgatatatgtagt

SEQ ID NO: 5875334 - DNA, 25 bp, Homo sapien
gcataataacgtttttgtcgaggta

SEQ ID NO: 5875335 - DNA, 25 bp, Homo sapien
ataatcgtattccaacttaaggcac

SEQ ID NO: 5875336 - DNA, 25 bp, Homo sapien
gaccatatgcgtaatatgatctcat

SEQ ID NO: 5875337 - DNA, 25 bp, Homo sapien
atcctgtttgcgttaattgttactg

SEQ ID NO: 5875338 - DNA, 25 bp, Homo sapien
tacgacgtttcgtaaactatgtaga

SEQ ID NO: 5875339 - DNA, 25 bp, Homo sapien
tactctcgaactagttgttattgga

SEQ ID NO: 5875340 - DNA, 25 bp, Homo sapien
aggttttaatcgaagattgaggaca

SEQ ID NO: 5875341 - DNA, 25 bp, Homo sapien
tctggtaagtctatgacgatctata

SEQ ID NO: 5875342 - DNA, 25 bp, Homo sapien
atctctataaatcggattcgggtat

SEQ ID NO: 5875343 - DNA, 25 bp, Homo sapien
gaaatacgcaataaatcgtaacgct

SEQ ID NO: 5875344 - DNA, 25 bp, Homo sapien
taggatcaatcacgtaaatctggat

SEQ ID NO: 5875345 - DNA, 25 bp, Homo sapien
gctaatatcgaggtttatcatggaa

SEQ ID NO: 5875346 - DNA, 25 bp, Homo sapien
aggggattgttgaagtaacgttata

SEQ ID NO: 5875347 - DNA, 25 bp, Homo sapien
atactgacgtataatatactccgca

SEQ ID NO: 5875348 - DNA, 25 bp, Homo sapien
cgtatcgcaattaaattcgagtgaa

SEQ ID NO: 5875349 - DNA, 25 bp, Homo sapien
ggttctattacgatcgtcattagta

SEQ ID NO: 5875350 - DNA, 25 bp, Homo sapien
aatgctacgaaggaactttactaag

SEQ ID NO: 5875351 - DNA, 25 bp, Homo sapien
gtggaaaatatcgttcgatacgaat

SEQ ID NO: 5875352 - DNA, 25 bp, Homo sapien
atctgcgatttgtataattatgcgg

SEQ ID NO: 5875353 - DNA, 25 bp, Homo sapien
atcagtcttaatcgagtaagcatac

SEQ ID NO: 5875354 - DNA, 25 bp, Homo sapien
tgtaacgtaaatttaggatccagag

SEQ ID NO: 5875355 - DNA, 25 bp, Homo sapien
gaccccgtcgtataaatttatctat

SEQ ID NO: 5875356 - DNA, 25 bp, Homo sapien
ggttactattaacattacgcgaatg

SEQ ID NO: 5875357 - DNA, 25 bp, Homo sapien
actatagttatatgcgtaatgtcgg

SEQ ID NO: 5875358 - DNA, 25 bp, Homo sapien
tttagatcgattctgttatgtaggc

SEQ ID NO: 5875359 - DNA, 25 bp, Homo sapien
aagacatcttacgctctataacaca

SEQ ID NO: 5875360 - DNA, 25 bp, Homo sapien
cctaaatacggttgtatcaatctca

SEQ ID NO: 5875361 - DNA, 25 bp, Homo sapien
gtagttcagatcgaaatttctaagg

SEQ ID NO: 5875362 - DNA, 25 bp, Homo sapien
gtccgtataagttcgtctattagta

SEQ ID NO: 5875363 - DNA, 25 bp, Homo sapien
ttatcataatcgacgttcatcacga

SEQ ID NO: 5875364 - DNA, 25 bp, Homo sapien
attgtgtcgaaattcgttatgccta

SEQ ID NO: 5875365 - DNA, 25 bp, Homo sapien
atcacattttagcgtcaaatcaacg

SEQ ID NO: 5875366 - DNA, 25 bp, Homo sapien
agcgctatagcgttgattattgtat

SEQ ID NO: 5875367 - DNA, 25 bp, Homo sapien
tgcgtgatcgaatttaacgatcatt

SEQ ID NO: 5875368 - DNA, 25 bp, Homo sapien
cagacgcgtataaaatagattttcc

SEQ ID NO: 5875369 - DNA, 25 bp, Homo sapien
gacactacataaccgcataattctt

SEQ ID NO: 5875370 - DNA, 25 bp, Homo sapien
cctgttgacggtagtatttatagat

SEQ ID NO: 5875371 - DNA, 25 bp, Homo sapien
tgagtcgtaatatggttctaagttg

SEQ ID NO: 5875372 - DNA, 25 bp, Homo sapien
ggcttcgtaatagtaatgcttcaat

SEQ ID NO: 5875373 - DNA, 25 bp, Homo sapien
taaagcgtgttaacaatatagtgcc

SEQ ID NO: 5875374 - DNA, 25 bp, Homo sapien
ccgaaatctaagatatatcgagtga

SEQ ID NO: 5875375 - DNA, 25 bp, Homo sapien
cactcttatccgcgtaattatagat

SEQ ID NO: 5875376 - DNA, 25 bp, Homo sapien
ttctattaacgttcgtctaatcctc

SEQ ID NO: 5875377 - DNA, 25 bp, Homo sapien
ttaccattaccaagtcgaattatcc

SEQ ID NO: 5875378 - DNA, 25 bp, Homo sapien
cactattcgagcttaagaatgctat

SEQ ID NO: 5875379 - DNA, 25 bp, Homo sapien
cggctcttaattatacgagatagat

SEQ ID NO: 5875380 - DNA, 25 bp, Homo sapien
ctatcattatacggaactaagccat

SEQ ID NO: 5875381 - DNA, 25 bp, Homo sapien
gttcggtaattgttatcgaagattc

SEQ ID NO: 5875382 - DNA, 25 bp, Homo sapien
ttcaatcaattgaagattcggcgtt

SEQ ID NO: 5875383 - DNA, 25 bp, Homo sapien
tcaggttaatttgagtaacggtaga

SEQ ID NO: 5875384 - DNA, 25 bp, Homo sapien
tcgcatgactatttattcggctaat

SEQ ID NO: 5875385 - DNA, 25 bp, Homo sapien
ttatttatttgattcggctaccgtc

SEQ ID NO: 5875386 - DNA, 25 bp, Homo sapien
tgatcaatctgcgttagtatgtgtt

SEQ ID NO: 5875387 - DNA, 25 bp, Homo sapien
gtaaaaatttgtcgcagtattacgc

SEQ ID NO: 5875388 - DNA, 25 bp, Homo sapien
cacagattaagcgaaacatacagta

SEQ ID NO: 5875389 - DNA, 25 bp, Homo sapien
cgttccgtagatttagtttctgtaa

SEQ ID NO: 5875390 - DNA, 25 bp, Homo sapien
tgactcttcatcatacgataatctc

SEQ ID NO: 5875391 - DNA, 25 bp, Homo sapien
acttctattaagaccgtaatgtggt

SEQ ID NO: 5875392 - DNA, 25 bp, Homo sapien
acattgataatacgtacgaacccaa

SEQ ID NO: 5875393 - DNA, 25 bp, Homo sapien
cctatctaagttattcgtattggga

SEQ ID NO: 5875394 - DNA, 25 bp, Homo sapien
cccctcgtttgatatgattaagtat

SEQ ID NO: 5875395 - DNA, 25 bp, Homo sapien
ctaagagtacgataagtcatcagaa

SEQ ID NO: 5875396 - DNA, 25 bp, Homo sapien
gatatttagtcgatctttaacgtcc

SEQ ID NO: 5875397 - DNA, 25 bp, Homo sapien
ttgtccgaatattataagacgcgaa

SEQ ID NO: 5875398 - DNA, 25 bp, Homo sapien
gtggggcgtaatcttatattaatca

SEQ ID NO: 5875399 - DNA, 25 bp, Homo sapien
ctagaataatacgcgtattaaccag

SEQ ID NO: 5875400 - DNA, 25 bp, Homo sapien
cagtaatagaattaggaacggaact

SEQ ID NO: 5875401 - DNA, 25 bp, Homo sapien
accaacgtaaagagtatcatttgca

SEQ ID NO: 5875402 - DNA, 25 bp, Homo sapien
tccacaaataatacaccggtctaaa

SEQ ID NO: 5875403 - DNA, 25 bp, Homo sapien
tcccatcaaatgacgcaattgaata

SEQ ID NO: 5875404 - DNA, 25 bp, Homo sapien
agcactcgtatcgttactaatttct

SEQ ID NO: 5875405 - DNA, 25 bp, Homo sapien
gaaaacgcgattttctttaaggtga

SEQ ID NO: 5875406 - DNA, 25 bp, Homo sapien
tgcatgttatatcacgaagttagtg

SEQ ID NO: 5875407 - DNA, 25 bp, Homo sapien
acctacgatgtgtactatatcacaa

SEQ ID NO: 5875408 - DNA, 25 bp, Homo sapien
ttgccatcgtttaacgataagtgta

SEQ ID NO: 5875409 - DNA, 25 bp, Homo sapien
gatttcatagtagttcgaaagggaa

SEQ ID NO: 5875410 - DNA, 25 bp, Homo sapien
ctcagtatcgtagatgaataatctc

SEQ ID NO: 5875411 - DNA, 25 bp, Homo sapien
ctggatagaaacgatagttcttact

SEQ ID NO: 5875412 - DNA, 25 bp, Homo sapien
gttttttacgatagattcacgacct

SEQ ID NO: 5875413 - DNA, 25 bp, Homo sapien
gattcacgctattaccaaaagtgta

SEQ ID NO: 5875414 - DNA, 25 bp, Homo sapien
tagcttattaactgcgtagttcagt

SEQ ID NO: 5875415 - DNA, 25 bp, Homo sapien
aatgcgatatagtcaatcgaatacc

SEQ ID NO: 5875416 - DNA, 25 bp, Homo sapien
gacgaaatttatcgatacgcaattg

SEQ ID NO: 5875417 - DNA, 25 bp, Homo sapien
atctgcgagatattcgaataaactg

SEQ ID NO: 5875418 - DNA, 25 bp, Homo sapien
attggtcgatgatatcaaacgtcta

SEQ ID NO: 5875419 - DNA, 25 bp, Homo sapien
cacttaaaaactaaagcggtgatgt

SEQ ID NO: 5875420 - DNA, 25 bp, Homo sapien
gacttaatctcgtagaactactttc

SEQ ID NO: 5875421 - DNA, 25 bp, Homo sapien
gaggatagtatggtattcgaatatc

SEQ ID NO: 5875422 - DNA, 25 bp, Homo sapien
atcatagcgtaataataaggtacgg

SEQ ID NO: 5875423 - DNA, 25 bp, Homo sapien
acaccattaatcgcgttgaaaaagt

SEQ ID NO: 5875424 - DNA, 25 bp, Homo sapien
tcaaggcttaattcgttctagaaac

SEQ ID NO: 5875425 - DNA, 25 bp, Homo sapien
caggtattatatcgttgtcttcaac

SEQ ID NO: 5875426 - DNA, 25 bp, Homo sapien
agaatcttttatcgtcgaatccaga

SEQ ID NO: 5875427 - DNA, 25 bp, Homo sapien
gccaacttatatgataccagtatct

SEQ ID NO: 5875428 - DNA, 25 bp, Homo sapien
catgataattaaaaacgcgtcacag

SEQ ID NO: 5875429 - DNA, 25 bp, Homo sapien
tatgtacggttaataacttaagcgc

SEQ ID NO: 5875430 - DNA, 25 bp, Homo sapien
gtcgataggagtcgatataatgaaa

SEQ ID NO: 5875431 - DNA, 25 bp, Homo sapien
ggggataatgtacgatttagtaaac

SEQ ID NO: 5875432 - DNA, 25 bp, Homo sapien
aacaattaattgttcgcgtaagtcg

SEQ ID NO: 5875433 - DNA, 25 bp, Homo sapien
cgaacgttattgaatagtcgaatca

SEQ ID NO: 5875434 - DNA, 25 bp, Homo sapien
gtctttgattattacgtcattgcct

SEQ ID NO: 5875435 - DNA, 25 bp, Homo sapien
cgattatcgacgagtaaattaaagc

SEQ ID NO: 5875436 - DNA, 25 bp, Homo sapien
ttgtcattacgagatttcgtgcaat

SEQ ID NO: 5875437 - DNA, 25 bp, Homo sapien
caaaaaaattaatagagcgctcgtc

SEQ ID NO: 5875438 - DNA, 25 bp, Homo sapien
tttgtcaataaaggatcgaaccaga

SEQ ID NO: 5875439 - DNA, 25 bp, Homo sapien
ccttctcgaactaataacttttcca

SEQ ID NO: 5875440 - DNA, 25 bp, Homo sapien
ctcaatcgttaaatttacgacatcg

SEQ ID NO: 5875441 - DNA, 25 bp, Homo sapien
aaggtaacgataacatagagctaga

SEQ ID NO: 5875442 - DNA, 25 bp, Homo sapien
gaacgatactcgataacacagtttt

SEQ ID NO: 5875443 - DNA, 25 bp, Homo sapien
caacataattcggccttaataggta

SEQ ID NO: 5875444 - DNA, 25 bp, Homo sapien
ttgtacggaaatgctattataaggc

SEQ ID NO: 5875445 - DNA, 25 bp, Homo sapien
caggaattacgacatcatattcatg

SEQ ID NO: 5875446 - DNA, 25 bp, Homo sapien
caaaaacggatgaaatatctgcaag

SEQ ID NO: 5875447 - DNA, 25 bp, Homo sapien
aactcctaaagccgatattagtact

SEQ ID NO: 5875448 - DNA, 25 bp, Homo sapien
actgctgtttgtcgacaatacaaaa

SEQ ID NO: 5875449 - DNA, 25 bp, Homo sapien
ttgttccgttaatttatcaaggtgc

SEQ ID NO: 5875450 - DNA, 25 bp, Homo sapien
agctttttattcgacactaggtaac

SEQ ID NO: 5875451 - DNA, 25 bp, Homo sapien
gagacattcgaaattagttcttgac

SEQ ID NO: 5875452 - DNA, 25 bp, Homo sapien
cccattatatccatcgtcatgatat

SEQ ID NO: 5875453 - DNA, 25 bp, Homo sapien
aaacatgatcttaaaaccgacggat

SEQ ID NO: 5875454 - DNA, 25 bp, Homo sapien
tgacttattgaaacgcgtatatcgt

SEQ ID NO: 5875455 - DNA, 25 bp, Homo sapien
atagtattaatattgccggactgag

SEQ ID NO: 5875456 - DNA, 25 bp, Homo sapien
tcctttacgtaaaggtgttagattg

SEQ ID NO: 5875457 - DNA, 25 bp, Homo sapien
acgttcgaaacatatacgaagacaa

SEQ ID NO: 5875458 - DNA, 25 bp, Homo sapien
tagaatttatacacgcgattgtgca

SEQ ID NO: 5875459 - DNA, 25 bp, Homo sapien
tagttatcggaatataccttgtcgt

SEQ ID NO: 5875460 - DNA, 25 bp, Homo sapien
catactaatcgaacttagacgtgta

SEQ ID NO: 5875461 - DNA, 25 bp, Homo sapien
tagtccttttacgatatcgtttgga

SEQ ID NO: 5875462 - DNA, 25 bp, Homo sapien
caactaaaactcgattagtaacctc

SEQ ID NO: 5875463 - DNA, 25 bp, Homo sapien
ctcttcgatttcgttgtaattagtg

SEQ ID NO: 5875464 - DNA, 25 bp, Homo sapien
aagtgatataagccgatgtatatgg

SEQ ID NO: 5875465 - DNA, 25 bp, Homo sapien
ttagctcggacgttattaaaaagga

SEQ ID NO: 5875466 - DNA, 25 bp, Homo sapien
caacaacgaattcttatacgtactg

SEQ ID NO: 5875467 - DNA, 25 bp, Homo sapien
tagaataacggatcagattactgtc

SEQ ID NO: 5875468 - DNA, 25 bp, Homo sapien
tctagaacgcgtttattaaatgggt

SEQ ID NO: 5875469 - DNA, 25 bp, Homo sapien
gacggtctatgacgaaattttagaa

SEQ ID NO: 5875470 - DNA, 25 bp, Homo sapien
tgtatgatctatgataaacggcgaa

SEQ ID NO: 5875471 - DNA, 25 bp, Homo sapien
ggaaaatacctaatcgcattgtttc

SEQ ID NO: 5875472 - DNA, 25 bp, Homo sapien
gtacttactacatcgaatcaatacc

SEQ ID NO: 5875473 - DNA, 25 bp, Homo sapien
gttattaacatttcacgtaggtagg

SEQ ID NO: 5875474 - DNA, 25 bp, Homo sapien
gtcatcagtttacgttagttctaac

SEQ ID NO: 5875475 - DNA, 25 bp, Homo sapien
tacctctattaacttcgtcataagc

SEQ ID NO: 5875476 - DNA, 25 bp, Homo sapien
ttcactgcgatatgattagatgtag

SEQ ID NO: 5875477 - DNA, 25 bp, Homo sapien
gccctagtacgatttgcatatttat

SEQ ID NO: 5875478 - DNA, 25 bp, Homo sapien
ccacaaatttcgggttaatcatctt

SEQ ID NO: 5875479 - DNA, 25 bp, Homo sapien
acgtctttacggtacgattatcatt

SEQ ID NO: 5875480 - DNA, 25 bp, Homo sapien
cgacagtcgtaagtctatttaactt

SEQ ID NO: 5875481 - DNA, 25 bp, Homo sapien
gattaataagtaattcgcgatggtc

SEQ ID NO: 5875482 - DNA, 25 bp, Homo sapien
ctatatacattaatcgaccagagtg

SEQ ID NO: 5875483 - DNA, 25 bp, Homo sapien
ttatcacgattatgctagtatagcg

SEQ ID NO: 5875484 - DNA, 25 bp, Homo sapien
ttccggcgagttatatacaatattc

SEQ ID NO: 5875485 - DNA, 25 bp, Homo sapien
catatgtatagcgagtaaattccca

SEQ ID NO: 5875486 - DNA, 25 bp, Homo sapien
gtgcactatcgatttagtaggttaa

SEQ ID NO: 5875487 - DNA, 25 bp, Homo sapien
gtcctcattgacgacataatttaag

SEQ ID NO: 5875488 - DNA, 25 bp, Homo sapien
ccctatacgaagacgaataattcta

SEQ ID NO: 5875489 - DNA, 25 bp, Homo sapien
tcactttgacattcggatatcatga

SEQ ID NO: 5875490 - DNA, 25 bp, Homo sapien
tcgcaagcgttatgttaactaatct

SEQ ID NO: 5875491 - DNA, 25 bp, Homo sapien
gtacgaactcgaatacgatatgaat

SEQ ID NO: 5875492 - DNA, 25 bp, Homo sapien
tagaagttaaacgcgataaaagtgc

SEQ ID NO: 5875493 - DNA, 25 bp, Homo sapien
tggaacgatcttcttcataatacac

SEQ ID NO: 5875494 - DNA, 25 bp, Homo sapien
tactagtatgtcattttacgccaca

SEQ ID NO: 5875495 - DNA, 25 bp, Homo sapien
ggcacttcgcagactaatatataat

SEQ ID NO: 5875496 - DNA, 25 bp, Homo sapien
ctagcgtatcgttcataatctgaaa

SEQ ID NO: 5875497 - DNA, 25 bp, Homo sapien
tcataatgaattaaacgacctgagg

SEQ ID NO: 5875498 - DNA, 25 bp, Homo sapien
caggtattcgtagtataatacgaca

SEQ ID NO: 5875499 - DNA, 25 bp, Homo sapien
ctgataggcgttgataataaacatc

SEQ ID NO: 5875500 - DNA, 25 bp, Homo sapien
gtttgtttcgtaataaggacatgtg

SEQ ID NO: 5875501 - DNA, 25 bp, Homo sapien
tttgagttaatttagtcgctgtagc

SEQ ID NO: 5875502 - DNA, 25 bp, Homo sapien
atggtacgattttcgtatagtctca

SEQ ID NO: 5875503 - DNA, 25 bp, Homo sapien
agagttcatacggaagattactagt

SEQ ID NO: 5875504 - DNA, 25 bp, Homo sapien
gcttgaccgtagattttttatgaag

SEQ ID NO: 5875505 - DNA, 25 bp, Homo sapien
tgtggaactaatcgtattatcacga

SEQ ID NO: 5875506 - DNA, 25 bp, Homo sapien
tagcggagtcgcattaatattgatt

SEQ ID NO: 5875507 - DNA, 25 bp, Homo sapien
ccataaactattaacggatactgct

SEQ ID NO: 5875508 - DNA, 25 bp, Homo sapien
cgcgaatccgctattaatgaataat

SEQ ID NO: 5875509 - DNA, 25 bp, Homo sapien
agtcttttgtccgatcaataagagt

SEQ ID NO: 5875510 - DNA, 25 bp, Homo sapien
ggctgatctaatataccgatatact

SEQ ID NO: 5875511 - DNA, 25 bp, Homo sapien
aggaaatacgatatttcggatttgc

SEQ ID NO: 5875512 - DNA, 25 bp, Homo sapien
agacagttaattcgtatcgaagcta

SEQ ID NO: 5875513 - DNA, 25 bp, Homo sapien
ctgaaaggattgaatatacgaacgt

SEQ ID NO: 5875514 - DNA, 25 bp, Homo sapien
ccaaattagatactaactcggtgtt

SEQ ID NO: 5875515 - DNA, 25 bp, Homo sapien
gcctacgtgaattcgatttaaatag

SEQ ID NO: 5875516 - DNA, 25 bp, Homo sapien
gaagcatagttgataatcgaaccat

SEQ ID NO: 5875517 - DNA, 25 bp, Homo sapien
ctttgacgattttttcgactcatgt

SEQ ID NO: 5875518 - DNA, 25 bp, Homo sapien
agcagatatcaacggtatacatcaa

SEQ ID NO: 5875519 - DNA, 25 bp, Homo sapien
agatgataagatcgcttgaaggttt

SEQ ID NO: 5875520 - DNA, 25 bp, Homo sapien
gatattattcaaaaaatcggctgcg

SEQ ID NO: 5875521 - DNA, 25 bp, Homo sapien
aacgtgcggaattattagttattgg

SEQ ID NO: 5875522 - DNA, 25 bp, Homo sapien
cttcgtaactttataagcgtagtgt

SEQ ID NO: 5875523 - DNA, 25 bp, Homo sapien
ttttcttcgtcgattttacagaagg

SEQ ID NO: 5875524 - DNA, 25 bp, Homo sapien
aggtctattaattcaagccgataca

SEQ ID NO: 5875525 - DNA, 25 bp, Homo sapien
tcatcatttgatacaagacgctatc

SEQ ID NO: 5875526 - DNA, 25 bp, Homo sapien
agataacgccgaaatttttatgctc

SEQ ID NO: 5875527 - DNA, 25 bp, Homo sapien
tgaacgcgcgaaaataatatgatga

SEQ ID NO: 5875528 - DNA, 25 bp, Homo sapien
aatgctacgacaagtatagtgcatt

SEQ ID NO: 5875529 - DNA, 25 bp, Homo sapien
catgtaattactcggacatatacgt

SEQ ID NO: 5875530 - DNA, 25 bp, Homo sapien
tgacgtagttaagaacggattgaat

SEQ ID NO: 5875531 - DNA, 25 bp, Homo sapien
attgaacgacgattcataattgacc

SEQ ID NO: 5875532 - DNA, 25 bp, Homo sapien
attggatcaagctcgataattacca

SEQ ID NO: 5875533 - DNA, 25 bp, Homo sapien
cacactactcagttcgattatgaat

SEQ ID NO: 5875534 - DNA, 25 bp, Homo sapien
cttacaattgtaggacgataaactc

SEQ ID NO: 5875535 - DNA, 25 bp, Homo sapien
agccttgtttaatatcggcagaata

SEQ ID NO: 5875536 - DNA, 25 bp, Homo sapien
ctactattcgatatctgctactagt

SEQ ID NO: 5875537 - DNA, 25 bp, Homo sapien
ttttatctaatacttaacgcacccg

SEQ ID NO: 5875538 - DNA, 25 bp, Homo sapien
aaggagcgtaaatgtcaattttgtg

SEQ ID NO: 5875539 - DNA, 25 bp, Homo sapien
ttctacgaacgttttatctaaagcg

SEQ ID NO: 5875540 - DNA, 25 bp, Homo sapien
aatcgtcgaatctaaattagggtga

SEQ ID NO: 5875541 - DNA, 25 bp, Homo sapien
gttgagcaacgattaatatagcgat

SEQ ID NO: 5875542 - DNA, 25 bp, Homo sapien
cctaaatcgtaaaatatgcgttacc

SEQ ID NO: 5875543 - DNA, 25 bp, Homo sapien
atggaattattcatctcggtatagg

SEQ ID NO: 5875544 - DNA, 25 bp, Homo sapien
aacccaaaagctacgaaataatgag

SEQ ID NO: 5875545 - DNA, 25 bp, Homo sapien
caaagtttgcgcgttattaaacttc

SEQ ID NO: 5875546 - DNA, 25 bp, Homo sapien
ttgtaagtattccgctataaacgag

SEQ ID NO: 5875547 - DNA, 25 bp, Homo sapien
atcagaagtcatattatcggtccta

SEQ ID NO: 5875548 - DNA, 25 bp, Homo sapien
gatatactaccgcatatttttggac

SEQ ID NO: 5875549 - DNA, 25 bp, Homo sapien
gagtacgatttgcgataataatgac

SEQ ID NO: 5875550 - DNA, 25 bp, Homo sapien
cttgacttattatccgacaatgagt

SEQ ID NO: 5875551 - DNA, 25 bp, Homo sapien
cctgcaaacgaattatacggaatta

SEQ ID NO: 5875552 - DNA, 25 bp, Homo sapien
gatagcttctaacgaatctactttc

SEQ ID NO: 5875553 - DNA, 25 bp, Homo sapien
agaatcttgtataatacgcatcgtc

SEQ ID NO: 5875554 - DNA, 25 bp, Homo sapien
aacatttaacgattgttgatcgagg

SEQ ID NO: 5875555 - DNA, 25 bp, Homo sapien
catagtcgtaattacttgatcgact

SEQ ID NO: 5875556 - DNA, 25 bp, Homo sapien
aagtataatagtatatcccgttccc

SEQ ID NO: 5875557 - DNA, 25 bp, Homo sapien
cgttaaattaatggtacgctaaagc

SEQ ID NO: 5875558 - DNA, 25 bp, Homo sapien
ttctattattcttacgcgtaaaccc

SEQ ID NO: 5875559 - DNA, 25 bp, Homo sapien
atacgtcaaatattctcgcagactt

SEQ ID NO: 5875560 - DNA, 25 bp, Homo sapien
tgatggtcgtacgaattaaagttgt

SEQ ID NO: 5875561 - DNA, 25 bp, Homo sapien
gcaatcattatgtcgtattgtgttc

SEQ ID NO: 5875562 - DNA, 25 bp, Homo sapien
ataactcgttacaattgcatgttcc

SEQ ID NO: 5875563 - DNA, 25 bp, Homo sapien
tgctggtatactacgtgaatcttaa

SEQ ID NO: 5875564 - DNA, 25 bp, Homo sapien
ttagtgaaatttatgagacgtggct

SEQ ID NO: 5875565 - DNA, 25 bp, Homo sapien
gagagatgtaaattcgaggaatgta

SEQ ID NO: 5875566 - DNA, 25 bp, Homo sapien
accctataagcgttattacgatagt

SEQ ID NO: 5875567 - DNA, 25 bp, Homo sapien
aaattcacttgattcgaatactcgg

SEQ ID NO: 5875568 - DNA, 25 bp, Homo sapien
aggaggaaagatttattcgctgaaa

SEQ ID NO: 5875569 - DNA, 25 bp, Homo sapien
atgtcaggacgatatatttgttcca

SEQ ID NO: 5875570 - DNA, 25 bp, Homo sapien
tgacgacttatcgtctagaatagtt

SEQ ID NO: 5875571 - DNA, 25 bp, Homo sapien
cctttagatagtacgaattagcgtt

SEQ ID NO: 5875572 - DNA, 25 bp, Homo sapien
gttgggtcggaatgtttatatttgt

SEQ ID NO: 5875573 - DNA, 25 bp, Homo sapien
cgatttcgcatatagttaacggatt

SEQ ID NO: 5875574 - DNA, 25 bp, Homo sapien
tcctctaatagtccggaatttaaga

SEQ ID NO: 5875575 - DNA, 25 bp, Homo sapien
agctataattatgcgaataaacgcc

SEQ ID NO: 5875576 - DNA, 25 bp, Homo sapien
tgtacaattcgatttctacgcgtat

SEQ ID NO: 5875577 - DNA, 25 bp, Homo sapien
cttagtataacgtcaacaacaacct

SEQ ID NO: 5875578 - DNA, 25 bp, Homo sapien
tacaagtacttatcgtaaaaagcgc

SEQ ID NO: 5875579 - DNA, 25 bp, Homo sapien
acaccaatttcgtaaccaattagtc

SEQ ID NO: 5875580 - DNA, 25 bp, Homo sapien
cggtcatccgaacaagtataaataa

SEQ ID NO: 5875581 - DNA, 25 bp, Homo sapien
cgctctcgatttgaccattataatt

SEQ ID NO: 5875582 - DNA, 25 bp, Homo sapien
agacctatagtattgtatcgcatca

SEQ ID NO: 5875583 - DNA, 25 bp, Homo sapien
ggagctatataatcgacatctgtat

SEQ ID NO: 5875584 - DNA, 25 bp, Homo sapien
ttctgatctttgatacacgacctat

SEQ ID NO: 5875585 - DNA, 25 bp, Homo sapien
gtctctcaatttatcgcttacttca

SEQ ID NO: 5875586 - DNA, 25 bp, Homo sapien
agctataatttcgcaaaaaggttgc

SEQ ID NO: 5875587 - DNA, 25 bp, Homo sapien
tgaatcggataatgctaattccagt

SEQ ID NO: 5875588 - DNA, 25 bp, Homo sapien
cttcgaccgataaccaatttaatct

SEQ ID NO: 5875589 - DNA, 25 bp, Homo sapien
cgaacaatgtcgatatttcgttaag

SEQ ID NO: 5875590 - DNA, 25 bp, Homo sapien
agcacctttatcaatttcggataga

SEQ ID NO: 5875591 - DNA, 25 bp, Homo sapien
ttccaacgtacgacattaattcaga

SEQ ID NO: 5875592 - DNA, 25 bp, Homo sapien
atcattaacttgatctaacgctggt

SEQ ID NO: 5875593 - DNA, 25 bp, Homo sapien
tgttcaacgatacgttatgtcgtat

SEQ ID NO: 5875594 - DNA, 25 bp, Homo sapien
tgacactgtttaaattcggaaagac

SEQ ID NO: 5875595 - DNA, 25 bp, Homo sapien
gagattagtcgaaccaaatatcatc

SEQ ID NO: 5875596 - DNA, 25 bp, Homo sapien
cgcacttcggtcattatatgataat

SEQ ID NO: 5875597 - DNA, 25 bp, Homo sapien
gttgttgttactaacgatttacgct

SEQ ID NO: 5875598 - DNA, 25 bp, Homo sapien
tttgtatatcttgcgaacttggagt

SEQ ID NO: 5875599 - DNA, 25 bp, Homo sapien
atacataatataaaggtcgaaggcg

SEQ ID NO: 5875600 - DNA, 25 bp, Homo sapien
gtcacttatcgttctatacttatcc

SEQ ID NO: 5875601 - DNA, 25 bp, Homo sapien
cacaccgaatcatttatgatagaca

SEQ ID NO: 5875602 - DNA, 25 bp, Homo sapien
taatctatgaacgcgattaaccaca

SEQ ID NO: 5875603 - DNA, 25 bp, Homo sapien
gtatggttgctaatcgataatctca

SEQ ID NO: 5875604 - DNA, 25 bp, Homo sapien
ttgagaccgattaattgtaagagtc

SEQ ID NO: 5875605 - DNA, 25 bp, Homo sapien
ggatttctctaatcgatatgctgat

SEQ ID NO: 5875606 - DNA, 25 bp, Homo sapien
tgttgaatcatctacgctaatttcc

SEQ ID NO: 5875607 - DNA, 25 bp, Homo sapien
cccaaatacgatacgtaaatctgtt

SEQ ID NO: 5875608 - DNA, 25 bp, Homo sapien
cttactcggattaattgttagcaac

SEQ ID NO: 5875609 - DNA, 25 bp, Homo sapien
cgcaatctaatatacgactgtaatc

SEQ ID NO: 5875610 - DNA, 25 bp, Homo sapien
actgttagcgtatgagtaatttctg

SEQ ID NO: 5875611 - DNA, 25 bp, Homo sapien
actagggatcaatttcgaaatcgaa

SEQ ID NO: 5875612 - DNA, 25 bp, Homo sapien
ctgtatcgatacacgataaaacgaa

SEQ ID NO: 5875613 - DNA, 25 bp, Homo sapien
ggcttaagacgaatcgaaaatgata

SEQ ID NO: 5875614 - DNA, 25 bp, Homo sapien
tacctgacgtattacttcaatagct

SEQ ID NO: 5875615 - DNA, 25 bp, Homo sapien
ttcgatcactcgtaacaatataggt

SEQ ID NO: 5875616 - DNA, 25 bp, Homo sapien
ggactaatcaaccttaatcgaagat

SEQ ID NO: 5875617 - DNA, 25 bp, Homo sapien
ctctcttttcgttactcgaacaatt

SEQ ID NO: 5875618 - DNA, 25 bp, Homo sapien
catcaaacattattgacgtctacag

SEQ ID NO: 5875619 - DNA, 25 bp, Homo sapien
atatttgatcgatccttttaggagg

SEQ ID NO: 5875620 - DNA, 25 bp, Homo sapien
gatcatagaccatcgttaaaatgtc

SEQ ID NO: 5875621 - DNA, 25 bp, Homo sapien
cagcacgtaatacctaatttagtca

SEQ ID NO: 5875622 - DNA, 25 bp, Homo sapien
ggactacttatttcgataggttatc

SEQ ID NO: 5875623 - DNA, 25 bp, Homo sapien
ccttttcgcaaatattttcgaagac

SEQ ID NO: 5875624 - DNA, 25 bp, Homo sapien
taaagcaaacatttaatcgttcgcg

SEQ ID NO: 5875625 - DNA, 25 bp, Homo sapien
tgtacatctattatcttgcgagaca

SEQ ID NO: 5875626 - DNA, 25 bp, Homo sapien
acactttggatcgaattgaacctta

SEQ ID NO: 5875627 - DNA, 25 bp, Homo sapien
ctaacattcgtatatcgtgtagaca

SEQ ID NO: 5875628 - DNA, 25 bp, Homo sapien
tctggaaactatatcgacgattgtt

SEQ ID NO: 5875629 - DNA, 25 bp, Homo sapien
tcatattgtcggagtttatattccg

SEQ ID NO: 5875630 - DNA, 25 bp, Homo sapien
gatttgttaagcgtagattacgtac

SEQ ID NO: 5875631 - DNA, 25 bp, Homo sapien
aagcgcttaagtcgtaaatcaatga

SEQ ID NO: 5875632 - DNA, 25 bp, Homo sapien
aagtcagtaatacgatacgaaagga

SEQ ID NO: 5875633 - DNA, 25 bp, Homo sapien
ttggtacagcttattacgttatggt

SEQ ID NO: 5875634 - DNA, 25 bp, Homo sapien
tccatatcgtatgaaacgttaaagc

SEQ ID NO: 5875635 - DNA, 25 bp, Homo sapien
gattgacaagttattcgtagacagt

SEQ ID NO: 5875636 - DNA, 25 bp, Homo sapien
ttatgtcgtgtaatttcatcgaacg

SEQ ID NO: 5875637 - DNA, 25 bp, Homo sapien
tgtaatagtacgtagtcatttcctc

SEQ ID NO: 5875638 - DNA, 25 bp, Homo sapien
tgcactataaaaaaagcgacttcga

SEQ ID NO: 5875639 - DNA, 25 bp, Homo sapien
tgtgccgatcttatactaaatactg

SEQ ID NO: 5875640 - DNA, 25 bp, Homo sapien
gatcgtcgcgaaacttaaataaaca

SEQ ID NO: 5875641 - DNA, 25 bp, Homo sapien
ggaggtcgttgtactaatatacatt

SEQ ID NO: 5875642 - DNA, 25 bp, Homo sapien
ccttacgttatacgaatgtatccta

SEQ ID NO: 5875643 - DNA, 25 bp, Homo sapien
gtgtgtagtataattcgatgtctct

SEQ ID NO: 5875644 - DNA, 25 bp, Homo sapien
gcgcaaatcggcttatattatttag

SEQ ID NO: 5875645 - DNA, 25 bp, Homo sapien
agcattttatactacaacgggagtt

SEQ ID NO: 5875646 - DNA, 25 bp, Homo sapien
ctaataacaacttcgcttaaacacg

SEQ ID NO: 5875647 - DNA, 25 bp, Homo sapien
ttactcgagtataaaattcgatcgc

SEQ ID NO: 5875648 - DNA, 25 bp, Homo sapien
agattacgtactacgattttcacca

SEQ ID NO: 5875649 - DNA, 25 bp, Homo sapien
agtacgagtatacgaaagatagaca

SEQ ID NO: 5875650 - DNA, 25 bp, Homo sapien
ggttaggataatcgattaatgtcca

SEQ ID NO: 5875651 - DNA, 25 bp, Homo sapien
tctcttatcgactgtaaacttggta

SEQ ID NO: 5875652 - DNA, 25 bp, Homo sapien
gcataatccaatatagcgattgtga

SEQ ID NO: 5875653 - DNA, 25 bp, Homo sapien
cttagactatttatccgttgacgtt

SEQ ID NO: 5875654 - DNA, 25 bp, Homo sapien
agtcatacgaaataacgcaaaacct

SEQ ID NO: 5875655 - DNA, 25 bp, Homo sapien
aatccatatatgcgtcgaatttcgt

SEQ ID NO: 5875656 - DNA, 25 bp, Homo sapien
aagtgatggactaatatcgaaaacc

SEQ ID NO: 5875657 - DNA, 25 bp, Homo sapien
attggtataagttcgagcttatcct

SEQ ID NO: 5875658 - DNA, 25 bp, Homo sapien
acggtagtactagcgtaatttgaat

SEQ ID NO: 5875659 - DNA, 25 bp, Homo sapien
ttgtccaattggtcgaataacacta

SEQ ID NO: 5875660 - DNA, 25 bp, Homo sapien
ttgctttgttacgatagtgtagtca

SEQ ID NO: 5875661 - DNA, 25 bp, Homo sapien
gactaatcgcaatcatataccttac

SEQ ID NO: 5875662 - DNA, 25 bp, Homo sapien
aacagttataaacgctggtagttgt

SEQ ID NO: 5875663 - DNA, 25 bp, Homo sapien
tatgcagttaaacgtactaagacca

SEQ ID NO: 5875664 - DNA, 25 bp, Homo sapien
acagttgttaagctcgttatgtcta

SEQ ID NO: 5875665 - DNA, 25 bp, Homo sapien
gtgacactttctaatatacgctatc

SEQ ID NO: 5875666 - DNA, 25 bp, Homo sapien
gatcatcgtattgacaataacacgt

SEQ ID NO: 5875667 - DNA, 25 bp, Homo sapien
ccacttaatccgcaactattacttt

SEQ ID NO: 5875668 - DNA, 25 bp, Homo sapien
aaacactatcggtttttatcgcatc

SEQ ID NO: 5875669 - DNA, 25 bp, Homo sapien
gttctttatcgagaaccataacagt

SEQ ID NO: 5875670 - DNA, 25 bp, Homo sapien
agcctctctatatataacgcttttc

SEQ ID NO: 5875671 - DNA, 25 bp, Homo sapien
tgaaattgttcgttttaacgactgg

SEQ ID NO: 5875672 - DNA, 25 bp, Homo sapien
tgaagttaattacgggttacctgaa

SEQ ID NO: 5875673 - DNA, 25 bp, Homo sapien
cttgaaagctcaaatcgttacacta

SEQ ID NO: 5875674 - DNA, 25 bp, Homo sapien
ttttgcgatatatcggaaatggaac

SEQ ID NO: 5875675 - DNA, 25 bp, Homo sapien
ggtagcgtagtacgaaattaaatga

SEQ ID NO: 5875676 - DNA, 25 bp, Homo sapien
gtagcatagtcgcctataaatgtaa

SEQ ID NO: 5875677 - DNA, 25 bp, Homo sapien
agtgaatatacgattagtctcctgt

SEQ ID NO: 5875678 - DNA, 25 bp, Homo sapien
gcataactcaatgcgatttactgta

SEQ ID NO: 5875679 - DNA, 25 bp, Homo sapien
gaatgtttgtaatcgcgaaagaaga

SEQ ID NO: 5875680 - DNA, 25 bp, Homo sapien
agcgattagtcggcttaaattgtta

SEQ ID NO: 5875681 - DNA, 25 bp, Homo sapien
gaagtattcgacgtttatgatacga

SEQ ID NO: 5875682 - DNA, 25 bp, Homo sapien
ggcttttgaatcgactaattaatcg

SEQ ID NO: 5875683 - DNA, 25 bp, Homo sapien
gatactttacgcactatatctgttg

SEQ ID NO: 5875684 - DNA, 25 bp, Homo sapien
tgtggacgaatttttcgattttacg

SEQ ID NO: 5875685 - DNA, 25 bp, Homo sapien
gcgttagattaaataaccgtacgat

SEQ ID NO: 5875686 - DNA, 25 bp, Homo sapien
acgagctactatagttcgatataga

SEQ ID NO: 5875687 - DNA, 25 bp, Homo sapien
ggcgagaattcgatagtatgatatt

SEQ ID NO: 5875688 - DNA, 25 bp, Homo sapien
tatcgtcgcgactaaataatgaaag

SEQ ID NO: 5875689 - DNA, 25 bp, Homo sapien
acgagcgaataacgaaacaatcttt

SEQ ID NO: 5875690 - DNA, 25 bp, Homo sapien
ggaagcgtttttagttcaacaatgt

SEQ ID NO: 5875691 - DNA, 25 bp, Homo sapien
atttgctagtttacgatagtatcgg

SEQ ID NO: 5875692 - DNA, 25 bp, Homo sapien
gagtgcgactttacactattttatg

SEQ ID NO: 5875693 - DNA, 25 bp, Homo sapien
ggaaggacgaatttttaatcagtac

SEQ ID NO: 5875694 - DNA, 25 bp, Homo sapien
cacgaacgttcgaaagtaaattcat

SEQ ID NO: 5875695 - DNA, 25 bp, Homo sapien
ctctacgagtaaaattacgaacttg

SEQ ID NO: 5875696 - DNA, 25 bp, Homo sapien
acaccaatcgtcaatacactgtata

SEQ ID NO: 5875697 - DNA, 25 bp, Homo sapien
cgacaaacatattagatcgttagct

SEQ ID NO: 5875698 - DNA, 25 bp, Homo sapien
tccgttcgaacgtatttagtgtaat

SEQ ID NO: 5875699 - DNA, 25 bp, Homo sapien
caactatatcgttatccaattcgtg

SEQ ID NO: 5875700 - DNA, 25 bp, Homo sapien
aagtgcgataaaacgatatcgttgt

SEQ ID NO: 5875701 - DNA, 25 bp, Homo sapien
gtatgttccggttactaatatactg

SEQ ID NO: 5875702 - DNA, 25 bp, Homo sapien
ttgcataattgtcgaatgtgaacca

SEQ ID NO: 5875703 - DNA, 25 bp, Homo sapien
atatccgcttattatcctatctcca

SEQ ID NO: 5875704 - DNA, 25 bp, Homo sapien
tactcagccgtaatatatctcatct

SEQ ID NO: 5875705 - DNA, 25 bp, Homo sapien
gcttcaattaatggttcgtagagat

SEQ ID NO: 5875706 - DNA, 25 bp, Homo sapien
tcacggttaatatactcgtttccta

SEQ ID NO: 5875707 - DNA, 25 bp, Homo sapien
cgagcgatataagatttacgatgta

SEQ ID NO: 5875708 - DNA, 25 bp, Homo sapien
aaccttcgattagagttatgagtac

SEQ ID NO: 5875709 - DNA, 25 bp, Homo sapien
gagaccataagcgatctatatatca

SEQ ID NO: 5875710 - DNA, 25 bp, Homo sapien
actctaaccgttaacctattagaga

SEQ ID NO: 5875711 - DNA, 25 bp, Homo sapien
cgagagttaattaatgacgatcgaa

SEQ ID NO: 5875712 - DNA, 25 bp, Homo sapien
gggaataattaacctcgaagatatg

SEQ ID NO: 5875713 - DNA, 25 bp, Homo sapien
aacaacttgcgttataagttgtcga

SEQ ID NO: 5875714 - DNA, 25 bp, Homo sapien
tctatgtaattcgtaggttaccctt

SEQ ID NO: 5875715 - DNA, 25 bp, Homo sapien
tctcactttttttacgcaattaccc

SEQ ID NO: 5875716 - DNA, 25 bp, Homo sapien
tcaattaactattactcgataccgc

SEQ ID NO: 5875717 - DNA, 25 bp, Homo sapien
ctcttcgattgctagtatatcatct

SEQ ID NO: 5875718 - DNA, 25 bp, Homo sapien
ataggttcaatcttattcgacgtga

SEQ ID NO: 5875719 - DNA, 25 bp, Homo sapien
gccattatatatacgacgagctaaa

SEQ ID NO: 5875720 - DNA, 25 bp, Homo sapien
cgacataaagtacgtcattaatagc

SEQ ID NO: 5875721 - DNA, 25 bp, Homo sapien
tccaacataaaacggctattgatga

SEQ ID NO: 5875722 - DNA, 25 bp, Homo sapien
ttggatatatcggattatgggacaa

SEQ ID NO: 5875723 - DNA, 25 bp, Homo sapien
gataatatacacgcgtaaaagacga

SEQ ID NO: 5875724 - DNA, 25 bp, Homo sapien
tgcactttactataaccgcaaacat

SEQ ID NO: 5875725 - DNA, 25 bp, Homo sapien
cgtatgtgcgtaacattattgttgt

SEQ ID NO: 5875726 - DNA, 25 bp, Homo sapien
atacgtatggtattattgcgtactg

SEQ ID NO: 5875727 - DNA, 25 bp, Homo sapien
tatcttatagaagtcgttatcgtcc

SEQ ID NO: 5875728 - DNA, 25 bp, Homo sapien
cgtacaatcctcgtatataatcctt

SEQ ID NO: 5875729 - DNA, 25 bp, Homo sapien
aaagaatgattcgaatcgtaagagg

SEQ ID NO: 5875730 - DNA, 25 bp, Homo sapien
ccaagatcgataacgtgtaaaattg

SEQ ID NO: 5875731 - DNA, 25 bp, Homo sapien
gtaaacttatttcgtaatcagggca

SEQ ID NO: 5875732 - DNA, 25 bp, Homo sapien
gctacacgttcgttataatttctct

SEQ ID NO: 5875733 - DNA, 25 bp, Homo sapien
tcttaaccgtatattcgaatgacga

SEQ ID NO: 5875734 - DNA, 25 bp, Homo sapien
tggatgttcgtatcgaatattgaga

SEQ ID NO: 5875735 - DNA, 25 bp, Homo sapien
atatctaaacttcgttgactatccg

SEQ ID NO: 5875736 - DNA, 25 bp, Homo sapien
taccgtaacaggcgtaaaaatattg

SEQ ID NO: 5875737 - DNA, 25 bp, Homo sapien
aggtagaattgcgatattaaccttg

SEQ ID NO: 5875738 - DNA, 25 bp, Homo sapien
caaatcggataagattatacaacgc

SEQ ID NO: 5875739 - DNA, 25 bp, Homo sapien
atccttacgagttagctatagtaac

SEQ ID NO: 5875740 - DNA, 25 bp, Homo sapien
tgagttacgtctaattaacccgtat

SEQ ID NO: 5875741 - DNA, 25 bp, Homo sapien
tgaattcgactttatttacgccgtt

SEQ ID NO: 5875742 - DNA, 25 bp, Homo sapien
gggagaactatcggctaataatata

SEQ ID NO: 5875743 - DNA, 25 bp, Homo sapien
atggtcttaataacggctaatatcc

SEQ ID NO: 5875744 - DNA, 25 bp, Homo sapien
cctttttacaacaatcgcattgact

SEQ ID NO: 5875745 - DNA, 25 bp, Homo sapien
gtttttcataatatcgcgttgcatg

SEQ ID NO: 5875746 - DNA, 25 bp, Homo sapien
tacgtgaacgattatttgttctgac

SEQ ID NO: 5875747 - DNA, 25 bp, Homo sapien
tggaagtccgaattaataatcccat

SEQ ID NO: 5875748 - DNA, 25 bp, Homo sapien
cgtagctaacgatattaacgttcaa

SEQ ID NO: 5875749 - DNA, 25 bp, Homo sapien
cggtcgattaacttacgatctatta

SEQ ID NO: 5875750 - DNA, 25 bp, Homo sapien
tccttattattccaccgttagcttt

SEQ ID NO: 5875751 - DNA, 25 bp, Homo sapien
gtttctagttattaaacggctcttc

SEQ ID NO: 5875752 - DNA, 25 bp, Homo sapien
tacggttcgagaattatgattacca

SEQ ID NO: 5875753 - DNA, 25 bp, Homo sapien
atcgaacgtagaatttcgaatttcc

SEQ ID NO: 5875754 - DNA, 25 bp, Homo sapien
ttcctaatcgatacggatatcgttt

SEQ ID NO: 5875755 - DNA, 25 bp, Homo sapien
gtccatatattatgaaagcgtcgat

SEQ ID NO: 5875756 - DNA, 25 bp, Homo sapien
aagaacgtataatagtacgaagtgg

SEQ ID NO: 5875757 - DNA, 25 bp, Homo sapien
gtatatacatccgttattagaacgg

SEQ ID NO: 5875758 - DNA, 25 bp, Homo sapien
ttagcaatcgtgtttacgttagtac

SEQ ID NO: 5875759 - DNA, 25 bp, Homo sapien
ggacgtaaatacgcgaacattatta

SEQ ID NO: 5875760 - DNA, 25 bp, Homo sapien
agtacaaactgagatcgattcttag

SEQ ID NO: 5875761 - DNA, 25 bp, Homo sapien
ttgttgtaaaaccgatatagtggga

SEQ ID NO: 5875762 - DNA, 25 bp, Homo sapien
tcacttcgcttttagttctagacaa

SEQ ID NO: 5875763 - DNA, 25 bp, Homo sapien
acatatatatagttcgaccagcatc

SEQ ID NO: 5875764 - DNA, 25 bp, Homo sapien
caatataacaattcgtacgtcgact

SEQ ID NO: 5875765 - DNA, 25 bp, Homo sapien
gcaactaaacgtagagtatcagaat

SEQ ID NO: 5875766 - DNA, 25 bp, Homo sapien
gtccactatggattttttcgctatt

SEQ ID NO: 5875767 - DNA, 25 bp, Homo sapien
actaatactactttgtcgaatctcg

SEQ ID NO: 5875768 - DNA, 25 bp, Homo sapien
tcagcaggttttatgaaaatactga

SEQ ID NO: 5875769 - DNA, 25 bp, Homo sapien
caagtttaaacggtgctgaattgtc

SEQ ID NO: 5875770 - DNA, 25 bp, Homo sapien
ctactctttgccatctgagttgtat

SEQ ID NO: 5875771 - DNA, 25 bp, Homo sapien
tttaaacggtgctgaattgtcttaa

SEQ ID NO: 5875772 - DNA, 25 bp, Homo sapien
cacgatttaaaaacacttccaattg

SEQ ID NO: 5875773 - DNA, 25 bp, Homo sapien
gtaataaaattacccactttatgta

SEQ ID NO: 5875774 - DNA, 25 bp, Homo sapien
aatattgatgttagacacgtgtgga

SEQ ID NO: 5875775 - DNA, 25 bp, Homo sapien
ttgattatatacatgtatgtttttc

SEQ ID NO: 5875776 - DNA, 25 bp, Homo sapien
gtgggaccgtggtctagctttccta

SEQ ID NO: 5875777 - DNA, 25 bp, Homo sapien
actttagaaataattttgctaacaa

SEQ ID NO: 5875778 - DNA, 25 bp, Homo sapien
ggaagacagcatagttaagtctact

SEQ ID NO: 5875779 - DNA, 25 bp, Homo sapien
aagttccattgaattattcgctagg

SEQ ID NO: 5875780 - DNA, 25 bp, Homo sapien
gaacacagattttgttagccttcaa

SEQ ID NO: 5875781 - DNA, 25 bp, Homo sapien
tctggcttttaaatgtaatttgacc

SEQ ID NO: 5875782 - DNA, 25 bp, Homo sapien
ccatctgagttgtatcatgacatgg

SEQ ID NO: 5875783 - DNA, 25 bp, Homo sapien
tcttcacattttatataactattta

SEQ ID NO: 5875784 - DNA, 25 bp, Homo sapien
gtggtgctctttaaaatattgatgt

SEQ ID NO: 5875785 - DNA, 25 bp, Homo sapien
gtgttcattctctccccattgatca

SEQ ID NO: 5875786 - DNA, 25 bp, Homo sapien
gtatctgttctctgtttaattggtg

SEQ ID NO: 5875787 - DNA, 25 bp, Homo sapien
tcattagtcttcagcaggttttatg

SEQ ID NO: 5875788 - DNA, 25 bp, Homo sapien
tcattaatgtcattgattatataca

SEQ ID NO: 5875789 - DNA, 25 bp, Homo sapien
tagttccaggaaattttcttcacat

SEQ ID NO: 5875790 - DNA, 25 bp, Homo sapien
cagtgggaccgtggtctagctttcc

SEQ ID NO: 5875791 - DNA, 25 bp, Homo sapien
catttttaaattcacatagacaatt

SEQ ID NO: 5875792 - DNA, 25 bp, Homo sapien
aattttgctaacaatatattaagta

SEQ ID NO: 5875793 - DNA, 25 bp, Homo sapien
aaatggaagacagcatagttaagtc

SEQ ID NO: 5875794 - DNA, 25 bp, Homo sapien
gttaaaagtcattaatgtcattgat

SEQ ID NO: 5875795 - DNA, 25 bp, Homo sapien
aaaatacctttcaaatccatggaat

SEQ ID NO: 5875796 - DNA, 25 bp, Homo sapien
cttgattttttttcatttaagtagc

SEQ ID NO: 5875797 - DNA, 25 bp, Homo sapien
ttaaggtttagctcatgggatacac

SEQ ID NO: 5875798 - DNA, 25 bp, Homo sapien
cactattagttgtcatggctatatt

SEQ ID NO: 5875799 - DNA, 25 bp, Homo sapien
caggttttatgaaaatactgagccc

SEQ ID NO: 5875800 - DNA, 25 bp, Homo sapien
gctcatgggatacacacatttaata

SEQ ID NO: 5875801 - DNA, 25 bp, Homo sapien
tgccatctgagttgtatcatgacat

SEQ ID NO: 5875802 - DNA, 25 bp, Homo sapien
ccgtggtctagctttcctagttcca

SEQ ID NO: 5875803 - DNA, 25 bp, Homo sapien
tacccactttatgtatgcttcattt

SEQ ID NO: 5875804 - DNA, 25 bp, Homo sapien
gtgtggacatcattccctgtgttca

SEQ ID NO: 5875805 - DNA, 25 bp, Homo sapien
agacacgtgtggacatcattccctg

SEQ ID NO: 5875806 - DNA, 25 bp, Homo sapien
gacagcatagttaagtctactcttt

SEQ ID NO: 5875807 - DNA, 25 bp, Homo sapien
tttcttcacattttatataactatt

SEQ ID NO: 5875808 - DNA, 25 bp, Homo sapien
aattaaaatacctttcaaatccatg

SEQ ID NO: 5875809 - DNA, 25 bp, Homo sapien
gggtatctgttctctgtttaattgg

SEQ ID NO: 5875810 - DNA, 25 bp, Homo sapien
ttaaatcctgacttaccactttgta

SEQ ID NO: 5875811 - DNA, 25 bp, Homo sapien
gatacacacatttaatatatgactg

SEQ ID NO: 5875812 - DNA, 25 bp, Homo sapien
gtagctatttatttgtaaacatttc

SEQ ID NO: 5875813 - DNA, 25 bp, Homo sapien
tttctaataattaaaatacctttca

SEQ ID NO: 5875814 - DNA, 25 bp, Homo sapien
tgttagacacgtgtggacatcattc

SEQ ID NO: 5875815 - DNA, 25 bp, Homo sapien
ttttgaacacagattttgttagcct

SEQ ID NO: 5875816 - DNA, 25 bp, Homo sapien
cactaacaacggccgtgaagaaatg

SEQ ID NO: 5875817 - DNA, 25 bp, Homo sapien
atagttaagtctactctttgccatc

SEQ ID NO: 5875818 - DNA, 25 bp, Homo sapien
tcattctctccccattgatcattag

SEQ ID NO: 5875819 - DNA, 25 bp, Homo sapien
ttaaaatacctttcaaatccatgga

SEQ ID NO: 5875820 - DNA, 25 bp, Homo sapien
aaagattgtctttacactaacaacg

SEQ ID NO: 5875821 - DNA, 25 bp, Homo sapien
atttaagtagctatttatttgtaaa

SEQ ID NO: 5875822 - DNA, 25 bp, Homo sapien
tagttgtcatggctatattttattt

SEQ ID NO: 5875823 - DNA, 25 bp, Homo sapien
gggaccgtggtctagctttcctagt

SEQ ID NO: 5875824 - DNA, 25 bp, Homo sapien
taattggtgtagaataatgatttta

SEQ ID NO: 5875825 - DNA, 25 bp, Homo sapien
caacggccgtgaagaaatggaagac

SEQ ID NO: 5875826 - DNA, 25 bp, Homo sapien
taaaaatggattaaggtttagctca

SEQ ID NO: 5875827 - DNA, 25 bp, Homo sapien
ttcgctaggcactctttgtaacagt

SEQ ID NO: 5875828 - DNA, 25 bp, Homo sapien
cactttatgtatgcttcatttttaa

SEQ ID NO: 5875829 - DNA, 25 bp, Homo sapien
ctctttaaaatattgatgttagaca

SEQ ID NO: 5875830 - DNA, 25 bp, Homo sapien
tattgatgttagacacgtgtggaca

SEQ ID NO: 5875831 - DNA, 25 bp, Homo sapien
aagtctactctttgccatctgagtt

SEQ ID NO: 5875832 - DNA, 25 bp, Homo sapien
tagtcatgaactactttagaaataa

SEQ ID NO: 5875833 - DNA, 25 bp, Homo sapien
ttaattacaagttccattgaattat

SEQ ID NO: 5875834 - DNA, 25 bp, Homo sapien
atacatgtatgtttttctaataatt

SEQ ID NO: 5875835 - DNA, 25 bp, Homo sapien
aatgtctggcttttaaatgtaattt

SEQ ID NO: 5875836 - DNA, 25 bp, Homo sapien
ttaagtagctatttatttgtaaaca

SEQ ID NO: 5875837 - DNA, 25 bp, Homo sapien
gctatattttattttccaaaaatta

SEQ ID NO: 5875838 - DNA, 25 bp, Homo sapien
attctctccccattgatcattagtc

SEQ ID NO: 5875839 - DNA, 25 bp, Homo sapien
ttgatcattagtcttcagcaggttt

SEQ ID NO: 5875840 - DNA, 25 bp, Homo sapien
actccatcttcagtgggaccgtggt

SEQ ID NO: 5875841 - DNA, 25 bp, Homo sapien
acacgtgtggacatcattccctgtg

SEQ ID NO: 5875842 - DNA, 25 bp, Homo sapien
attagtcttcagcaggttttatgaa

SEQ ID NO: 5875843 - DNA, 25 bp, Homo sapien
tttccacgatttaaaaacacttcca

SEQ ID NO: 5875844 - DNA, 25 bp, Homo sapien
acagtagtgtggtgctctttaaaat

SEQ ID NO: 5875845 - DNA, 25 bp, Homo sapien
ttgctgtgtagtaggggacatgtca

SEQ ID NO: 5875846 - DNA, 25 bp, Homo sapien
aaagatcatcaaagattgtctttac

SEQ ID NO: 5875847 - DNA, 25 bp, Homo sapien
attgtctttacactaacaacggccg

SEQ ID NO: 5875848 - DNA, 25 bp, Homo sapien
taatgtcattgattatatacatgta

SEQ ID NO: 5875849 - DNA, 25 bp, Homo sapien
tagccagcttttgaacacagatttt

SEQ ID NO: 5875850 - DNA, 25 bp, Homo sapien
cgctaggcactctttgtaacagtag

SEQ ID NO: 5875851 - DNA, 25 bp, Homo sapien
tatcatgacatggagactgcagact

SEQ ID NO: 5875852 - DNA, 25 bp, Homo sapien
taacagtagtgtggtgctctttaaa

SEQ ID NO: 5875853 - DNA, 25 bp, Homo sapien
aatcccaagctagtctaaccaaact

SEQ ID NO: 5875854 - DNA, 25 bp, Homo sapien
cacatttaatatatgactgcttgct

SEQ ID NO: 5875855 - DNA, 25 bp, Homo sapien
cagcttttgaacacagattttgtta

SEQ ID NO: 5875856 - DNA, 25 bp, Homo sapien
aagaaatcccaagctagtctaacca

SEQ ID NO: 5875857 - DNA, 25 bp, Homo sapien
tgagcccttagtcatgaactacttt

SEQ ID NO: 5875858 - DNA, 25 bp, Homo sapien
ggccgtgaagaaatggaagacagca

SEQ ID NO: 5875859 - DNA, 25 bp, Homo sapien
atatatgactgcttgctgtgtagta

SEQ ID NO: 5875860 - DNA, 25 bp, Homo sapien
taaattttattcccagctacccaac

SEQ ID NO: 5875861 - DNA, 25 bp, Homo sapien
cccagctacccaacgtcctagccag

SEQ ID NO: 5875862 - DNA, 25 bp, Homo sapien
gaattattcgctaggcactctttgt

SEQ ID NO: 5875863 - DNA, 25 bp, Homo sapien
aatgtaatttgacctttttgcttga

SEQ ID NO: 5875864 - DNA, 25 bp, Homo sapien
tctttgccatctgagttgtatcatg

SEQ ID NO: 5875865 - DNA, 25 bp, Homo sapien
caggaaattttcttcacattttata

SEQ ID NO: 5875866 - DNA, 25 bp, Homo sapien
tatttttgacctttgggtatctgtt

SEQ ID NO: 5875867 - DNA, 25 bp, Homo sapien
tccattgaattattcgctaggcact

SEQ ID NO: 5875868 - DNA, 25 bp, Homo sapien
tttaatatatgactgcttgctgtgt

SEQ ID NO: 5875869 - DNA, 25 bp, Homo sapien
agccttcaagtttaaacggtgctga

SEQ ID NO: 5875870 - DNA, 25 bp, Homo sapien
acacttccaattgactttaaatcct

SEQ ID NO: 5875871 - DNA, 25 bp, Homo sapien
ccgtgaagaaatggaagacagcata

SEQ ID NO: 5875872 - DNA, 25 bp, Homo sapien
tcatggctatattttattttccaaa

SEQ ID NO: 5875873 - DNA, 25 bp, Homo sapien
tcatgacatggagactgcagactcc

SEQ ID NO: 5875874 - DNA, 25 bp, Homo sapien
actctttgccatctgagttgtatca

SEQ ID NO: 5875875 - DNA, 25 bp, Homo sapien
gtttaattggtgtagaataatgatt

SEQ ID NO: 5875876 - DNA, 25 bp, Homo sapien
gtgctgaattgtcttaacttgaatg

SEQ ID NO: 5875877 - DNA, 25 bp, Homo sapien
acaaagatcatcaaagattgtcttt

SEQ ID NO: 5875878 - DNA, 25 bp, Homo sapien
actctttgtaacagtagtgtggtgc

SEQ ID NO: 5875879 - DNA, 25 bp, Homo sapien
tcatgggatacacacatttaatata

SEQ ID NO: 5875880 - DNA, 25 bp, Homo sapien
aaattttcttcacattttatataac

SEQ ID NO: 5875881 - DNA, 25 bp, Homo sapien
agtgagaatgacacaaagatcatca

SEQ ID NO: 5875882 - DNA, 25 bp, Homo sapien
aactatttaattacaagttccattg

SEQ ID NO: 5875883 - DNA, 25 bp, Homo sapien
cattccctgtgttcattctctcccc

SEQ ID NO: 5875884 - DNA, 25 bp, Homo sapien
aaggtttagctcatgggatacacac

SEQ ID NO: 5875885 - DNA, 25 bp, Homo sapien
attattcgctaggcactctttgtaa

SEQ ID NO: 5875886 - DNA, 25 bp, Homo sapien
atctgagttgtatcatgacatggag

SEQ ID NO: 5875887 - DNA, 25 bp, Homo sapien
ttcagtgggaccgtggtctagcttt

SEQ ID NO: 5875888 - DNA, 25 bp, Homo sapien
tctagctttcctagttccaggaaat

SEQ ID NO: 5875889 - DNA, 25 bp, Homo sapien
gtactaagtgagaatgacacaaaga

SEQ ID NO: 5875890 - DNA, 25 bp, Homo sapien
ttgatgttagacacgtgtggacatc

SEQ ID NO: 5875891 - DNA, 25 bp, Homo sapien
cctagccagcttttgaacacagatt

SEQ ID NO: 5875892 - DNA, 25 bp, Homo sapien
agttaagtctactctttgccatctg

SEQ ID NO: 5875893 - DNA, 25 bp, Homo sapien
tgagaatgacacaaagatcatcaaa

SEQ ID NO: 5875894 - DNA, 25 bp, Homo sapien
atgaaaatactgagcccttagtcat

SEQ ID NO: 5875895 - DNA, 25 bp, Homo sapien
tccaggaaattttcttcacatttta

SEQ ID NO: 5875896 - DNA, 25 bp, Homo sapien
tttaaattttattcccagctaccca

SEQ ID NO: 5875897 - DNA, 25 bp, Homo sapien
tgttagccttcaagtttaaacggtg

SEQ ID NO: 5875898 - DNA, 25 bp, Homo sapien
agtagtgtggtgctctttaaaatat

SEQ ID NO: 5875899 - DNA, 25 bp, Homo sapien
tcttcagtgggaccgtggtctagct

SEQ ID NO: 5875900 - DNA, 25 bp, Homo sapien
attagttgtcatggctatattttat

SEQ ID NO: 5875901 - DNA, 25 bp, Homo sapien
ttgggtatctgttctctgtttaatt

SEQ ID NO: 5875902 - DNA, 25 bp, Homo sapien
gcttcatttttaaattcacatagac

SEQ ID NO: 5875903 - DNA, 25 bp, Homo sapien
aattacaagttccattgaattattc

SEQ ID NO: 5875904 - DNA, 25 bp, Homo sapien
cctgacttaccactttgtatttttg

SEQ ID NO: 5875905 - DNA, 25 bp, Homo sapien
atgtcattgattatatacatgtatg

SEQ ID NO: 5875906 - DNA, 25 bp, Homo sapien
ctattagttgtcatggctatatttt

SEQ ID NO: 5875907 - DNA, 25 bp, Homo sapien
gtcatgaactactttagaaataatt

SEQ ID NO: 5875908 - DNA, 25 bp, Homo sapien
tcccaagctagtctaaccaaactct

SEQ ID NO: 5875909 - DNA, 25 bp, Homo sapien
tttttgacctttgggtatctgttct

SEQ ID NO: 5875910 - DNA, 25 bp, Homo sapien
ggacatcattccctgtgttcattct

SEQ ID NO: 5875911 - DNA, 25 bp, Homo sapien
tggcttttaaatgtaatttgacctt

SEQ ID NO: 5875912 - DNA, 25 bp, Homo sapien
tacacacatttaatatatgactgct

SEQ ID NO: 5875913 - DNA, 25 bp, Homo sapien
ttccaattgactttaaatcctgact

SEQ ID NO: 5875914 - DNA, 25 bp, Homo sapien
agattttgttagccttcaagtttaa

SEQ ID NO: 5875915 - DNA, 25 bp, Homo sapien
tttgtaacagtagtgtggtgctctt

SEQ ID NO: 5875916 - DNA, 25 bp, Homo sapien
taatttgacctttttgcttgatttt

SEQ ID NO: 5875917 - DNA, 25 bp, Homo sapien
catttaatatatgactgcttgctgt

SEQ ID NO: 5875918 - DNA, 25 bp, Homo sapien
taaaagtcattaatgtcattgatta

SEQ ID NO: 5875919 - DNA, 25 bp, Homo sapien
ttatgtatgcttcatttttaaattc

SEQ ID NO: 5875920 - DNA, 25 bp, Homo sapien
taaatgtaatttgacctttttgctt

SEQ ID NO: 5875921 - DNA, 25 bp, Homo sapien
ctgttctctgtttaattggtgtaga

SEQ ID NO: 5875922 - DNA, 25 bp, Homo sapien
ttgaattattcgctaggcactcttt

SEQ ID NO: 5875923 - DNA, 25 bp, Homo sapien
gtggacatcattccctgtgttcatt

SEQ ID NO: 5875924 - DNA, 25 bp, Homo sapien
gttcattctctccccattgatcatt

SEQ ID NO: 5875925 - DNA, 25 bp, Homo sapien
ttttaaaagaaatcccaagctagtc

SEQ ID NO: 5875926 - DNA, 25 bp, Homo sapien
gaaatcccaagctagtctaaccaaa

SEQ ID NO: 5875927 - DNA, 25 bp, Homo sapien
cccaacgtcctagccagcttttgaa

SEQ ID NO: 5875928 - DNA, 25 bp, Homo sapien
gctgaattgtcttaacttgaatgta

SEQ ID NO: 5875929 - DNA, 25 bp, Homo sapien
tttgtaaacatttctttcctttcca

SEQ ID NO: 5875930 - DNA, 25 bp, Homo sapien
aagctagtctaaccaaactctaaat

SEQ ID NO: 5875931 - DNA, 25 bp, Homo sapien
atgactgcttgctgtgtagtagggg

SEQ ID NO: 5875932 - DNA, 25 bp, Homo sapien
gtcttaacttgaatgtaaaaatgga

SEQ ID NO: 5875933 - DNA, 25 bp, Homo sapien
ttcctagttccaggaaattttcttc

SEQ ID NO: 5875934 - DNA, 25 bp, Homo sapien
tttacactaacaacggccgtgaaga

SEQ ID NO: 5875935 - DNA, 25 bp, Homo sapien
tgtcatggctatattttattttcca

SEQ ID NO: 5875936 - DNA, 25 bp, Homo sapien
ccttcaagtttaaacggtgctgaat

SEQ ID NO: 5875937 - DNA, 25 bp, Homo sapien
aatacctttcaaatccatggaatgt

SEQ ID NO: 5875938 - DNA, 25 bp, Homo sapien
aggcactctttgtaacagtagtgtg

SEQ ID NO: 5875939 - DNA, 25 bp, Homo sapien
aaatactgagcccttagtcatgaac

SEQ ID NO: 5875940 - DNA, 25 bp, Homo sapien
gagttgtatcatgacatggagactg

SEQ ID NO: 5875941 - DNA, 25 bp, Homo sapien
taagtgagaatgacacaaagatcat

SEQ ID NO: 5875942 - DNA, 25 bp, Homo sapien
ggtgctctttaaaatattgatgtta

SEQ ID NO: 5875943 - DNA, 25 bp, Homo sapien
tctgtttaattggtgtagaataatg

SEQ ID NO: 5875944 - DNA, 25 bp, Homo sapien
gactttaaatcctgacttaccactt

SEQ ID NO: 5875945 - DNA, 25 bp, Homo sapien
ttaaaagaaatcccaagctagtcta

SEQ ID NO: 5875946 - DNA, 25 bp, Homo sapien
atgacatggagactgcagactccat

SEQ ID NO: 5875947 - DNA, 25 bp, Homo sapien
atttaattacaagttccattgaatt

SEQ ID NO: 5875948 - DNA, 25 bp, Homo sapien
ttgactttaaatcctgacttaccac

SEQ ID NO: 5875949 - DNA, 25 bp, Homo sapien
atgcttcatttttaaattcacatag

SEQ ID NO: 5875950 - DNA, 25 bp, Homo sapien
aattgactttaaatcctgacttacc

SEQ ID NO: 5875951 - DNA, 25 bp, Homo sapien
agtttaaacggtgctgaattgtctt

SEQ ID NO: 5875952 - DNA, 25 bp, Homo sapien
atcattccctgtgttcattctctcc

SEQ ID NO: 5875953 - DNA, 25 bp, Homo sapien
cctagttccaggaaattttcttcac

SEQ ID NO: 5875954 - DNA, 25 bp, Homo sapien
tttgccatctgagttgtatcatgac

SEQ ID NO: 5875955 - DNA, 25 bp, Homo sapien
ccctgtgttcattctctccccattg

SEQ ID NO: 5875956 - DNA, 25 bp, Homo sapien
tctctccccattgatcattagtctt

SEQ ID NO: 5875957 - DNA, 25 bp, Homo sapien
tagtcttcagcaggttttatgaaaa

SEQ ID NO: 5875958 - DNA, 25 bp, Homo sapien
gattatatacatgtatgtttttcta

SEQ ID NO: 5875959 - DNA, 25 bp, Homo sapien
ttaaaatattgatgttagacacgtg

SEQ ID NO: 5875960 - DNA, 25 bp, Homo sapien
tctttacactaacaacggccgtgaa

SEQ ID NO: 5875961 - DNA, 25 bp, Homo sapien
aatggattaaggtttagctcatggg

SEQ ID NO: 5875962 - DNA, 25 bp, Homo sapien
ttcaagtttaaacggtgctgaattg

SEQ ID NO: 5875963 - DNA, 25 bp, Homo sapien
tatttgtaaacatttctttcctttc

SEQ ID NO: 5875964 - DNA, 25 bp, Homo sapien
actgagcccttagtcatgaactact

SEQ ID NO: 5875965 - DNA, 25 bp, Homo sapien
tccatcttcagtgggaccgtggtct

SEQ ID NO: 5875966 - DNA, 25 bp, Homo sapien
cccttagtcatgaactactttagaa

SEQ ID NO: 5875967 - DNA, 25 bp, Homo sapien
tagctcatgggatacacacatttaa

SEQ ID NO: 5875968 - DNA, 25 bp, Homo sapien
aaaagaaatcccaagctagtctaac

SEQ ID NO: 5875969 - DNA, 25 bp, Homo sapien
ctttatgtatgcttcatttttaaat

SEQ ID NO: 5875970 - DNA, 25 bp, Homo sapien
tacactaacaacggccgtgaagaaa

SEQ ID NO: 5875971 - DNA, 25 bp, Homo sapien
aaaagtactaagtgagaatgacaca

SEQ ID NO: 5875972 - DNA, 25 bp, Homo sapien
gatgttagacacgtgtggacatcat

SEQ ID NO: 5875973 - DNA, 25 bp, Homo sapien
gttgtcatggctatattttattttc

SEQ ID NO: 5875974 - DNA, 25 bp, Homo sapien
acgtgtggacatcattccctgtgtt

SEQ ID NO: 5875975 - DNA, 25 bp, Homo sapien
ctatttaattacaagttccattgaa

SEQ ID NO: 5875976 - DNA, 25 bp, Homo sapien
tgacttaccactttgtatttttgac

SEQ ID NO: 5875977 - DNA, 25 bp, Homo sapien
agattgtctttacactaacaacggc

SEQ ID NO: 5875978 - DNA, 25 bp, Homo sapien
aacggtgctgaattgtcttaacttg

SEQ ID NO: 5875979 - DNA, 25 bp, Homo sapien
aaacacttccaattgactttaaatc

SEQ ID NO: 5875980 - DNA, 25 bp, Homo sapien
tgtatttttgacctttgggtatctg

SEQ ID NO: 5875981 - DNA, 25 bp, Homo sapien
aagtagctatttatttgtaaacatt

SEQ ID NO: 5875982 - DNA, 25 bp, Homo sapien
acatcattccctgtgttcattctct

SEQ ID NO: 5875983 - DNA, 25 bp, Homo sapien
ctgcttgctgtgtagtaggggacat

SEQ ID NO: 5875984 - DNA, 25 bp, Homo sapien
cccactttatgtatgcttcattttt

SEQ ID NO: 5875985 - DNA, 25 bp, Homo sapien
gctacccaacgtcctagccagcttt

SEQ ID NO: 5875986 - DNA, 25 bp, Homo sapien
tgtaaacatttctttcctttccacg

SEQ ID NO: 5875987 - DNA, 25 bp, Homo sapien
ttttatgaaaatactgagcccttag

SEQ ID NO: 5875988 - DNA, 25 bp, Homo sapien
ctgtgttcattctctccccattgat

SEQ ID NO: 5875989 - DNA, 25 bp, Homo sapien
aaaatattgatgttagacacgtgtg

SEQ ID NO: 5875990 - DNA, 25 bp, Homo sapien
gatcattagtcttcagcaggtttta

SEQ ID NO: 5875991 - DNA, 25 bp, Homo sapien
agactccatcttcagtgggaccgtg

SEQ ID NO: 5875992 - DNA, 25 bp, Homo sapien
agcccttagtcatgaactactttag

SEQ ID NO: 5875993 - DNA, 25 bp, Homo sapien
tgaactactttagaaataattttgc

SEQ ID NO: 5875994 - DNA, 25 bp, Homo sapien
taaaattacccactttatgtatgct

SEQ ID NO: 5875995 - DNA, 25 bp, Homo sapien
atatacatgtatgtttttctaataa

SEQ ID NO: 5875996 - DNA, 25 bp, Homo sapien
tttcaaatccatggaatgtctggct

SEQ ID NO: 5875997 - DNA, 25 bp, Homo sapien
actaagtgagaatgacacaaagatc

SEQ ID NO: 5875998 - DNA, 25 bp, Homo sapien
atgtatgcttcatttttaaattcac

SEQ ID NO: 5875999 - DNA, 25 bp, Homo sapien
tttaaatgtaatttgacctttttgc

SEQ ID NO: 5876000 - DNA, 25 bp, Homo sapien
acgtcctagccagcttttgaacaca

SEQ ID NO: 5876001 - DNA, 25 bp, Homo sapien
cggtgctgaattgtcttaacttgaa

SEQ ID NO: 5876002 - DNA, 25 bp, Homo sapien
tttgtatttttgacctttgggtatc

SEQ ID NO: 5876003 - DNA, 25 bp, Homo sapien
aacaacggccgtgaagaaatggaag

SEQ ID NO: 5876004 - DNA, 25 bp, Homo sapien
tattcccagctacccaacgtcctag

SEQ ID NO: 5876005 - DNA, 25 bp, Homo sapien
ttatgaaaatactgagcccttagtc

SEQ ID NO: 5876006 - DNA, 25 bp, Homo sapien
ctaggcactctttgtaacagtagtg

SEQ ID NO: 5876007 - DNA, 25 bp, Homo sapien
aaagtcattaatgtcattgattata

SEQ ID NO: 5876008 - DNA, 25 bp, Homo sapien
ctatttatttgtaaacatttctttc

SEQ ID NO: 5876009 - DNA, 25 bp, Homo sapien
cttaacttgaatgtaaaaatggatt

SEQ ID NO: 5876010 - DNA, 25 bp, Homo sapien
gtcattgattatatacatgtatgtt

SEQ ID NO: 5876011 - DNA, 25 bp, Homo sapien
gctttcctagttccaggaaattttc

SEQ ID NO: 5876012 - DNA, 25 bp, Homo sapien
aaatccatggaatgtctggctttta

SEQ ID NO: 5876013 - DNA, 25 bp, Homo sapien
gttctctgtttaattggtgtagaat

SEQ ID NO: 5876014 - DNA, 25 bp, Homo sapien
ctttaaaatattgatgttagacacg

SEQ ID NO: 5876015 - DNA, 25 bp, Homo sapien
atcatcaaagattgtctttacacta

SEQ ID NO: 5876016 - DNA, 25 bp, Homo sapien
ccaattgactttaaatcctgactta

SEQ ID NO: 5876017 - DNA, 25 bp, Homo sapien
acatttctttcctttccacgattta

SEQ ID NO: 5876018 - DNA, 25 bp, Homo sapien
atggctatattttattttccaaaaa

SEQ ID NO: 5876019 - DNA, 25 bp, Homo sapien
tggattaaggtttagctcatgggat

SEQ ID NO: 5876020 - DNA, 25 bp, Homo sapien
ttcccagctacccaacgtcctagcc

SEQ ID NO: 5876021 - DNA, 25 bp, Homo sapien
tggagactgcagactccatcttcag

SEQ ID NO: 5876022 - DNA, 25 bp, Homo sapien
atggaagacagcatagttaagtcta

SEQ ID NO: 5876023 - DNA, 25 bp, Homo sapien
catgaactactttagaaataatttt

SEQ ID NO: 5876024 - DNA, 25 bp, Homo sapien
ggaatgtctggcttttaaatgtaat

SEQ ID NO: 5876025 - DNA, 25 bp, Homo sapien
ttccctgtgttcattctctccccat

SEQ ID NO: 5876026 - DNA, 25 bp, Homo sapien
aagtactaagtgagaatgacacaaa

SEQ ID NO: 5876027 - DNA, 25 bp, Homo sapien
gtgaagaaatggaagacagcatagt

SEQ ID NO: 5876028 - DNA, 25 bp, Homo sapien
tctctgtttaattggtgtagaataa

SEQ ID NO: 5876029 - DNA, 25 bp, Homo sapien
ggttttatgaaaatactgagccctt

SEQ ID NO: 5876030 - DNA, 25 bp, Homo sapien
gcttgctgtgtagtaggggacatgt

SEQ ID NO: 5876031 - DNA, 25 bp, Homo sapien
cattgattatatacatgtatgtttt

SEQ ID NO: 5876032 - DNA, 25 bp, Homo sapien
tgtctggcttttaaatgtaatttga

SEQ ID NO: 5876033 - DNA, 25 bp, Homo sapien
atatgactgcttgctgtgtagtagg

SEQ ID NO: 5876034 - DNA, 25 bp, Homo sapien
agatcatcaaagattgtctttacac

SEQ ID NO: 5876035 - DNA, 25 bp, Homo sapien
gactgcttgctgtgtagtaggggac

SEQ ID NO: 5876036 - DNA, 25 bp, Homo sapien
gttccattgaattattcgctaggca

SEQ ID NO: 5876037 - DNA, 25 bp, Homo sapien
gactgcagactccatcttcagtggg

SEQ ID NO: 5876038 - DNA, 25 bp, Homo sapien
caacgtcctagccagcttttgaaca

SEQ ID NO: 5876039 - DNA, 25 bp, Homo sapien
agcaggttttatgaaaatactgagc

SEQ ID NO: 5876040 - DNA, 25 bp, Homo sapien
aagacagcatagttaagtctactct

SEQ ID NO: 5876041 - DNA, 25 bp, Homo sapien
tttgacctttgggtatctgttctct

SEQ ID NO: 5876042 - DNA, 25 bp, Homo sapien
cctttcaaatccatggaatgtctgg

SEQ ID NO: 5876043 - DNA, 25 bp, Homo sapien
tgtctttacactaacaacggccgtg

SEQ ID NO: 5876044 - DNA, 25 bp, Homo sapien
cattgaattattcgctaggcactct

SEQ ID NO: 5876045 - DNA, 25 bp, Homo sapien
tgattttttttcatttaagtagcta

SEQ ID NO: 5876046 - DNA, 25 bp, Homo sapien
aaattacccactttatgtatgcttc

SEQ ID NO: 5876047 - DNA, 25 bp, Homo sapien
ttgtcttaacttgaatgtaaaaatg

SEQ ID NO: 5876048 - DNA, 25 bp, Homo sapien
tttgcttgattttttttcatttaag

SEQ ID NO: 5876049 - DNA, 25 bp, Homo sapien
cccattgatcattagtcttcagcag

SEQ ID NO: 5876050 - DNA, 25 bp, Homo sapien
tgacctttgggtatctgttctctgt

SEQ ID NO: 5876051 - DNA, 25 bp, Homo sapien
acacagattttgttagccttcaagt

SEQ ID NO: 5876052 - DNA, 25 bp, Homo sapien
gtggtctagctttcctagttccagg

SEQ ID NO: 5876053 - DNA, 25 bp, Homo sapien
tttttcatttaagtagctatttatt

SEQ ID NO: 5876054 - DNA, 25 bp, Homo sapien
cacacatttaatatatgactgcttg

SEQ ID NO: 5876055 - DNA, 25 bp, Homo sapien
gtatgcttcatttttaaattcacat

SEQ ID NO: 5876056 - DNA, 25 bp, Homo sapien
gttgtatcatgacatggagactgca

SEQ ID NO: 5876057 - DNA, 25 bp, Homo sapien
aagttaaaagtcattaatgtcattg

SEQ ID NO: 5876058 - DNA, 25 bp, Homo sapien
agtcattaatgtcattgattatata

SEQ ID NO: 5876059 - DNA, 25 bp, Homo sapien
gcagactccatcttcagtgggaccg

SEQ ID NO: 5876060 - DNA, 25 bp, Homo sapien
atcctgacttaccactttgtatttt

SEQ ID NO: 5876061 - DNA, 25 bp, Homo sapien
ggtctagctttcctagttccaggaa

SEQ ID NO: 5876062 - DNA, 25 bp, Homo sapien
gaccgtggtctagctttcctagttc

SEQ ID NO: 5876063 - DNA, 25 bp, Homo sapien
cttcagcaggttttatgaaaatact

SEQ ID NO: 5876064 - DNA, 25 bp, Homo sapien
tagtgtggtgctctttaaaatattg

SEQ ID NO: 5876065 - DNA, 25 bp, Homo sapien
aactactttagaaataattttgcta

SEQ ID NO: 5876066 - DNA, 25 bp, Homo sapien
gtgtggtgctctttaaaatattgat

SEQ ID NO: 5876067 - DNA, 25 bp, Homo sapien
tttttttcatttaagtagctattta

SEQ ID NO: 5876068 - DNA, 25 bp, Homo sapien
ataattaaaatacctttcaaatcca

SEQ ID NO: 5876069 - DNA, 25 bp, Homo sapien
gtcttcagcaggttttatgaaaata

SEQ ID NO: 5876070 - DNA, 25 bp, Homo sapien
aataaaattacccactttatgtatg

SEQ ID NO: 5876071 - DNA, 25 bp, Homo sapien
aaatcctgacttaccactttgtatt

SEQ ID NO: 5876072 - DNA, 25 bp, Homo sapien
taagcactattagttgtcatggcta

SEQ ID NO: 5876073 - DNA, 25 bp, Homo sapien
ttgaacacagattttgttagccttc

SEQ ID NO: 5876074 - DNA, 25 bp, Homo sapien
ggtttagctcatgggatacacacat

SEQ ID NO: 5876075 - DNA, 25 bp, Homo sapien
ttaaaaacacttccaattgacttta

SEQ ID NO: 5876076 - DNA, 25 bp, Homo sapien
tctccccattgatcattagtcttca

SEQ ID NO: 5876077 - DNA, 25 bp, Homo sapien
acatgtatgtttttctaataattaa

SEQ ID NO: 5876078 - DNA, 25 bp, Homo sapien
atctgttctctgtttaattggtgta

SEQ ID NO: 5876079 - DNA, 25 bp, Homo sapien
acttccaattgactttaaatcctga

SEQ ID NO: 5876080 - DNA, 25 bp, Homo sapien
taatatatgactgcttgctgtgtag

SEQ ID NO: 5876081 - DNA, 25 bp, Homo sapien
gaagaaatggaagacagcatagtta

SEQ ID NO: 5876082 - DNA, 25 bp, Homo sapien
catcaaagattgtctttacactaac

SEQ ID NO: 5876083 - DNA, 25 bp, Homo sapien
tacctttcaaatccatggaatgtct

SEQ ID NO: 5876084 - DNA, 25 bp, Homo sapien
tacccaacgtcctagccagcttttg

SEQ ID NO: 5876085 - DNA, 25 bp, Homo sapien
cagctacccaacgtcctagccagct

SEQ ID NO: 5876086 - DNA, 25 bp, Homo sapien
agaaatggaagacagcatagttaag

SEQ ID NO: 5876087 - DNA, 25 bp, Homo sapien
cgatttaaaaacacttccaattgac

SEQ ID NO: 5876088 - DNA, 25 bp, Homo sapien
tttcatttaagtagctatttatttg

SEQ ID NO: 5876089 - DNA, 25 bp, Homo sapien
tgtatcatgacatggagactgcaga

SEQ ID NO: 5876090 - DNA, 25 bp, Homo sapien
agcactattagttgtcatggctata

SEQ ID NO: 5876091 - DNA, 25 bp, Homo sapien
gcttttgaacacagattttgttagc

SEQ ID NO: 5876092 - DNA, 25 bp, Homo sapien
gctgtgtagtaggggacatgtcatt

SEQ ID NO: 5876093 - DNA, 25 bp, Homo sapien
gctagtctaaccaaactctaaattt

SEQ ID NO: 5876094 - DNA, 25 bp, Homo sapien
attttcttcacattttatataacta

SEQ ID NO: 5876095 - DNA, 25 bp, Homo sapien
tagctttcctagttccaggaaattt

SEQ ID NO: 5876096 - DNA, 25 bp, Homo sapien
tttttgcttgattttttttcattta

SEQ ID NO: 5876097 - DNA, 25 bp, Homo sapien
gggatacacacatttaatatatgac

SEQ ID NO: 5876098 - DNA, 25 bp, Homo sapien
gccagcttttgaacacagattttgt

SEQ ID NO: 5876099 - DNA, 25 bp, Homo sapien
atggaatgtctggcttttaaatgta

SEQ ID NO: 5876100 - DNA, 25 bp, Homo sapien
tttattcccagctacccaacgtcct

SEQ ID NO: 5876101 - DNA, 25 bp, Homo sapien
ctactttagaaataattttgctaac

SEQ ID NO: 5876102 - DNA, 25 bp, Homo sapien
gcatagttaagtctactctttgcca

SEQ ID NO: 5876103 - DNA, 25 bp, Homo sapien
cagcatagttaagtctactctttgc

SEQ ID NO: 5876104 - DNA, 25 bp, Homo sapien
tattcgctaggcactctttgtaaca

SEQ ID NO: 5876105 - DNA, 25 bp, Homo sapien
catcttcagtgggaccgtggtctag

SEQ ID NO: 5876106 - DNA, 25 bp, Homo sapien
taaacggtgctgaattgtcttaact

SEQ ID NO: 5876107 - DNA, 25 bp, Homo sapien
taaacatttctttcctttccacgat

SEQ ID NO: 5876108 - DNA, 25 bp, Homo sapien
tcaaagattgtctttacactaacaa

SEQ ID NO: 5876109 - DNA, 25 bp, Homo sapien
cttagtcatgaactactttagaaat

SEQ ID NO: 5876110 - DNA, 25 bp, Homo sapien
acggccgtgaagaaatggaagacag

SEQ ID NO: 5876111 - DNA, 25 bp, Homo sapien
tgtaatttgacctttttgcttgatt

SEQ ID NO: 5876112 - DNA, 25 bp, Homo sapien
ttacaagttccattgaattattcgc

SEQ ID NO: 5876113 - DNA, 25 bp, Homo sapien
aatgattttaaaagaaatcccaagc

SEQ ID NO: 5876114 - DNA, 25 bp, Homo sapien
cattgatcattagtcttcagcaggt

SEQ ID NO: 5876115 - DNA, 25 bp, Homo sapien
gacatggagactgcagactccatct

SEQ ID NO: 5876116 - DNA, 25 bp, Homo sapien
acagattttgttagccttcaagttt

SEQ ID NO: 5876117 - DNA, 25 bp, Homo sapien
gtctactctttgccatctgagttgt

SEQ ID NO: 5876118 - DNA, 25 bp, Homo sapien
gtcctagccagcttttgaacacaga

SEQ ID NO: 5876119 - DNA, 25 bp, Homo sapien
gttccaggaaattttcttcacattt

SEQ ID NO: 5876120 - DNA, 25 bp, Homo sapien
gaaaatactgagcccttagtcatga

SEQ ID NO: 5876121 - DNA, 25 bp, Homo sapien
agaatgacacaaagatcatcaaaga

SEQ ID NO: 5876122 - DNA, 25 bp, Homo sapien
atccatggaatgtctggcttttaaa

SEQ ID NO: 5876123 - DNA, 25 bp, Homo sapien
ttaagttaaaagtcattaatgtcat

SEQ ID NO: 5876124 - DNA, 25 bp, Homo sapien
tctttgtaacagtagtgtggtgctc

SEQ ID NO: 5876125 - DNA, 25 bp, Homo sapien
atactgagcccttagtcatgaacta

SEQ ID NO: 5876126 - DNA, 25 bp, Homo sapien
attacccactttatgtatgcttcat

SEQ ID NO: 5876127 - DNA, 25 bp, Homo sapien
tgacacaaagatcatcaaagattgt

SEQ ID NO: 5876128 - DNA, 25 bp, Homo sapien
tcaaatccatggaatgtctggcttt

SEQ ID NO: 5876129 - DNA, 25 bp, Homo sapien
gagactgcagactccatcttcagtg

SEQ ID NO: 5876130 - DNA, 25 bp, Homo sapien
ctttgggtatctgttctctgtttaa

SEQ ID NO: 5876131 - DNA, 25 bp, Homo sapien
gcactctttgtaacagtagtgtggt

SEQ ID NO: 5876132 - DNA, 25 bp, Homo sapien
tgtaaaaatggattaaggtttagct

SEQ ID NO: 5876133 - DNA, 25 bp, Homo sapien
tgcttgattttttttcatttaagta

SEQ ID NO: 5876134 - DNA, 25 bp, Homo sapien
tgacctttttgcttgattttttttc

SEQ ID NO: 5876135 - DNA, 25 bp, Homo sapien
ctaacaacggccgtgaagaaatgga

SEQ ID NO: 5876136 - DNA, 25 bp, Homo sapien
aaaatggattaaggtttagctcatg

SEQ ID NO: 5876137 - DNA, 25 bp, Homo sapien
catggagactgcagactccatcttc

SEQ ID NO: 5876138 - DNA, 25 bp, Homo sapien
aaaaaagtactaagtgagaatgaca

SEQ ID NO: 5876139 - DNA, 25 bp, Homo sapien
agctatttatttgtaaacatttctt

SEQ ID NO: 5876140 - DNA, 25 bp, Homo sapien
tccccattgatcattagtcttcagc

SEQ ID NO: 5876141 - DNA, 25 bp, Homo sapien
tgattttaaaagaaatcccaagcta

SEQ ID NO: 5876142 - DNA, 25 bp, Homo sapien
atgggatacacacatttaatatatg

SEQ ID NO: 5876143 - DNA, 25 bp, Homo sapien
ttttgctaacaatatattaagtaat

SEQ ID NO: 5876144 - DNA, 25 bp, Homo sapien
ggaaattttcttcacattttatata

SEQ ID NO: 5876145 - DNA, 25 bp, Homo sapien
agaaataattttgctaacaatatat

SEQ ID NO: 5876146 - DNA, 25 bp, Homo sapien
ctttaaatcctgacttaccactttg

SEQ ID NO: 5876147 - DNA, 25 bp, Homo sapien
gattaaggtttagctcatgggatac

SEQ ID NO: 5876148 - DNA, 25 bp, Homo sapien
ctgagttgtatcatgacatggagac

SEQ ID NO: 5876149 - DNA, 25 bp, Homo sapien
tttagctcatgggatacacacattt

SEQ ID NO: 5876150 - DNA, 25 bp, Homo sapien
tcatttaagtagctatttatttgta

SEQ ID NO: 5876151 - DNA, 25 bp, Homo sapien
ttatatacatgtatgtttttctaat

SEQ ID NO: 5876152 - DNA, 25 bp, Homo sapien
ctgcagactccatcttcagtgggac

SEQ ID NO: 5876153 - DNA, 25 bp, Homo sapien
ccatggaatgtctggcttttaaatg

SEQ ID NO: 5876154 - DNA, 25 bp, Homo sapien
attaatgtcattgattatatacatg

SEQ ID NO: 5876155 - DNA, 25 bp, Homo sapien
tgaattgtcttaacttgaatgtaaa

SEQ ID NO: 5876156 - DNA, 25 bp, Homo sapien
ttcatttttaaattcacatagacaa

SEQ ID NO: 5876157 - DNA, 25 bp, Homo sapien
acaagttccattgaattattcgcta

SEQ ID NO: 5876158 - DNA, 25 bp, Homo sapien
tgctctttaaaatattgatgttaga

SEQ ID NO: 5876159 - DNA, 25 bp, Homo sapien
aatgacacaaagatcatcaaagatt

SEQ ID NO: 5876160 - DNA, 25 bp, Homo sapien
acacaaagatcatcaaagattgtct

SEQ ID NO: 5876161 - DNA, 25 bp, Homo sapien
aattgtcttaacttgaatgtaaaaa

SEQ ID NO: 5876162 - DNA, 25 bp, Homo sapien
attttattcccagctacccaacgtc

SEQ ID NO: 5876163 - DNA, 25 bp, Homo sapien
atataactatttaattacaagttcc

SEQ ID NO: 5876164 - DNA, 25 bp, Homo sapien
ttagccttcaagtttaaacggtgct

SEQ ID NO: 5876165 - DNA, 25 bp, Homo sapien
acctttgggtatctgttctctgttt

SEQ ID NO: 5876166 - DNA, 25 bp, Homo sapien
taccactttgtatttttgacctttg

SEQ ID NO: 5876167 - DNA, 25 bp, Homo sapien
tccacgatttaaaaacacttccaat

SEQ ID NO: 5876168 - DNA, 25 bp, Homo sapien
ttaagtctactctttgccatctgag

SEQ ID NO: 5876169 - DNA, 25 bp, Homo sapien
ccaagctagtctaaccaaactctaa

SEQ ID NO: 5876170 - DNA, 25 bp, Homo sapien
ttagacacgtgtggacatcattccc

SEQ ID NO: 5876171 - DNA, 25 bp, Homo sapien
taataattaaaatacctttcaaatc

SEQ ID NO: 5876172 - DNA, 25 bp, Homo sapien
ataactatttaattacaagttccat

SEQ ID NO: 5876173 - DNA, 25 bp, Homo sapien
tgtaacagtagtgtggtgctcttta

SEQ ID NO: 5876174 - DNA, 25 bp, Homo sapien
aatacaaagtggtaagtcaggattt

SEQ ID NO: 5876175 - DNA, 25 bp, Homo sapien
agtctgcagtctccatgtcatgata

SEQ ID NO: 5876176 - DNA, 25 bp, Homo sapien
tgcagtctccatgtcatgatacaac

SEQ ID NO: 5876177 - DNA, 25 bp, Homo sapien
taagtcaggatttaaagtcaattgg

SEQ ID NO: 5876178 - DNA, 25 bp, Homo sapien
tcttcacggccgttgttagtgtaaa

SEQ ID NO: 5876179 - DNA, 25 bp, Homo sapien
ttcctggaactaggaaagctagacc

SEQ ID NO: 5876180 - DNA, 25 bp, Homo sapien
atttagagtttggttagactagctt

SEQ ID NO: 5876181 - DNA, 25 bp, Homo sapien
aagggctcagtattttcataaaacc

SEQ ID NO: 5876182 - DNA, 25 bp, Homo sapien
gagcaccacactactgttacaaaga

SEQ ID NO: 5876183 - DNA, 25 bp, Homo sapien
taaatagctacttaaatgaaaaaaa

SEQ ID NO: 5876184 - DNA, 25 bp, Homo sapien
aatctgtgttcaaaagctggctagg

SEQ ID NO: 5876185 - DNA, 25 bp, Homo sapien
atcccatgagctaaaccttaatcca

SEQ ID NO: 5876186 - DNA, 25 bp, Homo sapien
actaggaaagctagaccacggtccc

SEQ ID NO: 5876187 - DNA, 25 bp, Homo sapien
tataaaatgtgaagaaaatttcctg

SEQ ID NO: 5876188 - DNA, 25 bp, Homo sapien
acagagaacagatacccaaaggtca

SEQ ID NO: 5876189 - DNA, 25 bp, Homo sapien
taaaatgtgaagaaaatttcctgga

SEQ ID NO: 5876190 - DNA, 25 bp, Homo sapien
taaatcgtggaaaggaaagaaatgt

SEQ ID NO: 5876191 - DNA, 25 bp, Homo sapien
tggaaaataaaatatagccatgaca

SEQ ID NO: 5876192 - DNA, 25 bp, Homo sapien
acaaagagtgcctagcgaataattc

SEQ ID NO: 5876193 - DNA, 25 bp, Homo sapien
accacactactgttacaaagagtgc

SEQ ID NO: 5876194 - DNA, 25 bp, Homo sapien
gaaatgtttacaaataaatagctac

SEQ ID NO: 5876195 - DNA, 25 bp, Homo sapien
gtcaattggaagtgtttttaaatcg

SEQ ID NO: 5876196 - DNA, 25 bp, Homo sapien
gatgtccacacgtgtctaacatcaa

SEQ ID NO: 5876197 - DNA, 25 bp, Homo sapien
aatatagccatgacaactaatagtg

SEQ ID NO: 5876198 - DNA, 25 bp, Homo sapien
gtcccactgaagatggagtctgcag

SEQ ID NO: 5876199 - DNA, 25 bp, Homo sapien
caattcagcaccgtttaaacttgaa

SEQ ID NO: 5876200 - DNA, 25 bp, Homo sapien
acacagcaagcagtcatatattaaa

SEQ ID NO: 5876201 - DNA, 25 bp, Homo sapien
gtggtaagtcaggatttaaagtcaa

SEQ ID NO: 5876202 - DNA, 25 bp, Homo sapien
tttacattcaagttaagacaattca

SEQ ID NO: 5876203 - DNA, 25 bp, Homo sapien
aatcattattctacaccaattaaac

SEQ ID NO: 5876204 - DNA, 25 bp, Homo sapien
aatagttatataaaatgtgaagaaa

SEQ ID NO: 5876205 - DNA, 25 bp, Homo sapien
tatagccatgacaactaatagtgct

SEQ ID NO: 5876206 - DNA, 25 bp, Homo sapien
ctaatgatcaatggggagagaatga

SEQ ID NO: 5876207 - DNA, 25 bp, Homo sapien
gaagaaaatttcctggaactaggaa

SEQ ID NO: 5876208 - DNA, 25 bp, Homo sapien
tttaaaagccagacattccatggat

SEQ ID NO: 5876209 - DNA, 25 bp, Homo sapien
gaagcatacataaagtgggtaattt

SEQ ID NO: 5876210 - DNA, 25 bp, Homo sapien
tagcgaataattcaatggaacttgt

SEQ ID NO: 5876211 - DNA, 25 bp, Homo sapien
ggctaggacgttgggtagctgggaa

SEQ ID NO: 5876212 - DNA, 25 bp, Homo sapien
ttcaaaagctggctaggacgttggg

SEQ ID NO: 5876213 - DNA, 25 bp, Homo sapien
gcaaaattatttctaaagtagttca

SEQ ID NO: 5876214 - DNA, 25 bp, Homo sapien
cagggaatgatgtccacacgtgtct

SEQ ID NO: 5876215 - DNA, 25 bp, Homo sapien
tcagcaccgtttaaacttgaaggct

SEQ ID NO: 5876216 - DNA, 25 bp, Homo sapien
tatataaaatgtgaagaaaatttcc

SEQ ID NO: 5876217 - DNA, 25 bp, Homo sapien
tcagtattttcataaaacctgctga

SEQ ID NO: 5876218 - DNA, 25 bp, Homo sapien
gtatcccatgagctaaaccttaatc

SEQ ID NO: 5876219 - DNA, 25 bp, Homo sapien
acaactcagatggcaaagagtagac

SEQ ID NO: 5876220 - DNA, 25 bp, Homo sapien
ctatgtgaatttaaaaatgaagcat

SEQ ID NO: 5876221 - DNA, 25 bp, Homo sapien
aaacagagaacagatacccaaaggt

SEQ ID NO: 5876222 - DNA, 25 bp, Homo sapien
tattttcataaaacctgctgaagac

SEQ ID NO: 5876223 - DNA, 25 bp, Homo sapien
aaagagtagacttaactatgctgtc

SEQ ID NO: 5876224 - DNA, 25 bp, Homo sapien
cacactactgttacaaagagtgcct

SEQ ID NO: 5876225 - DNA, 25 bp, Homo sapien
cagatacccaaaggtcaaaaataca

SEQ ID NO: 5876226 - DNA, 25 bp, Homo sapien
aatcaagcaaaaaggtcaaattaca

SEQ ID NO: 5876227 - DNA, 25 bp, Homo sapien
tctttgtgtcattctcacttagtac

SEQ ID NO: 5876228 - DNA, 25 bp, Homo sapien
ctgtcttccatttcttcacggccgt

SEQ ID NO: 5876229 - DNA, 25 bp, Homo sapien
agcagtcatatattaaatgtgtgta

SEQ ID NO: 5876230 - DNA, 25 bp, Homo sapien
aaattacatttaaaagccagacatt

SEQ ID NO: 5876231 - DNA, 25 bp, Homo sapien
tgcctagcgaataattcaatggaac

SEQ ID NO: 5876232 - DNA, 25 bp, Homo sapien
agatggagtctgcagtctccatgtc

SEQ ID NO: 5876233 - DNA, 25 bp, Homo sapien
taaaacctgctgaagactaatgatc

SEQ ID NO: 5876234 - DNA, 25 bp, Homo sapien
cccatgagctaaaccttaatccatt

SEQ ID NO: 5876235 - DNA, 25 bp, Homo sapien
ctggctaggacgttgggtagctggg

SEQ ID NO: 5876236 - DNA, 25 bp, Homo sapien
agagtttggttagactagcttggga

SEQ ID NO: 5876237 - DNA, 25 bp, Homo sapien
attacatttaaaagccagacattcc

SEQ ID NO: 5876238 - DNA, 25 bp, Homo sapien
atacaactcagatggcaaagagtag

SEQ ID NO: 5876239 - DNA, 25 bp, Homo sapien
ggtaagtcaggatttaaagtcaatt

SEQ ID NO: 5876240 - DNA, 25 bp, Homo sapien
gacttaactatgctgtcttccattt

SEQ ID NO: 5876241 - DNA, 25 bp, Homo sapien
gaactaggaaagctagaccacggtc

SEQ ID NO: 5876242 - DNA, 25 bp, Homo sapien
gggaatgatgtccacacgtgtctaa

SEQ ID NO: 5876243 - DNA, 25 bp, Homo sapien
aacacagggaatgatgtccacacgt

SEQ ID NO: 5876244 - DNA, 25 bp, Homo sapien
taaaatcattattctacaccaatta

SEQ ID NO: 5876245 - DNA, 25 bp, Homo sapien
aattaaacagagaacagatacccaa

SEQ ID NO: 5876246 - DNA, 25 bp, Homo sapien
gaatgatgtccacacgtgtctaaca

SEQ ID NO: 5876247 - DNA, 25 bp, Homo sapien
atgacattaatgacttttaacttaa

SEQ ID NO: 5876248 - DNA, 25 bp, Homo sapien
tgatacaactcagatggcaaagagt

SEQ ID NO: 5876249 - DNA, 25 bp, Homo sapien
ttgaaggctaacaaaatctgtgttc

SEQ ID NO: 5876250 - DNA, 25 bp, Homo sapien
cagtctccatgtcatgatacaactc

SEQ ID NO: 5876251 - DNA, 25 bp, Homo sapien
caatattttaaagagcaccacacta

SEQ ID NO: 5876252 - DNA, 25 bp, Homo sapien
cccctactacacagcaagcagtcat

SEQ ID NO: 5876253 - DNA, 25 bp, Homo sapien
tgttacaaagagtgcctagcgaata

SEQ ID NO: 5876254 - DNA, 25 bp, Homo sapien
atgtgaatttaaaaatgaagcatac

SEQ ID NO: 5876255 - DNA, 25 bp, Homo sapien
ctagaccacggtcccactgaagatg

SEQ ID NO: 5876256 - DNA, 25 bp, Homo sapien
atgtcatgatacaactcagatggca

SEQ ID NO: 5876257 - DNA, 25 bp, Homo sapien
tacattcaagttaagacaattcagc

SEQ ID NO: 5876258 - DNA, 25 bp, Homo sapien
acctgctgaagactaatgatcaatg

SEQ ID NO: 5876259 - DNA, 25 bp, Homo sapien
ctaagggctcagtattttcataaaa

SEQ ID NO: 5876260 - DNA, 25 bp, Homo sapien
atgtgtgtatcccatgagctaaacc

SEQ ID NO: 5876261 - DNA, 25 bp, Homo sapien
taaagagcaccacactactgttaca

SEQ ID NO: 5876262 - DNA, 25 bp, Homo sapien
caaaaatacaaagtggtaagtcagg

SEQ ID NO: 5876263 - DNA, 25 bp, Homo sapien
tgaaaggtattttaattattagaaa

SEQ ID NO: 5876264 - DNA, 25 bp, Homo sapien
aatgtttacaaataaatagctactt

SEQ ID NO: 5876265 - DNA, 25 bp, Homo sapien
ttgtctatgtgaatttaaaaatgaa

SEQ ID NO: 5876266 - DNA, 25 bp, Homo sapien
tgtttacaaataaatagctacttaa

SEQ ID NO: 5876267 - DNA, 25 bp, Homo sapien
cctggaactaggaaagctagaccac

SEQ ID NO: 5876268 - DNA, 25 bp, Homo sapien
tagctacttaaatgaaaaaaaatca

SEQ ID NO: 5876269 - DNA, 25 bp, Homo sapien
tttgtgtcattctcacttagtactt

SEQ ID NO: 5876270 - DNA, 25 bp, Homo sapien
tttaaagagcaccacactactgtta

SEQ ID NO: 5876271 - DNA, 25 bp, Homo sapien
attacttaatatattgttagcaaaa

SEQ ID NO: 5876272 - DNA, 25 bp, Homo sapien
tggaaaggaaagaaatgtttacaaa

SEQ ID NO: 5876273 - DNA, 25 bp, Homo sapien
cggtcccactgaagatggagtctgc

SEQ ID NO: 5876274 - DNA, 25 bp, Homo sapien
catttcttcacggccgttgttagtg

SEQ ID NO: 5876275 - DNA, 25 bp, Homo sapien
caaataaatagctacttaaatgaaa

SEQ ID NO: 5876276 - DNA, 25 bp, Homo sapien
aggctaacaaaatctgtgttcaaaa

SEQ ID NO: 5876277 - DNA, 25 bp, Homo sapien
aagacaattcagcaccgtttaaact

SEQ ID NO: 5876278 - DNA, 25 bp, Homo sapien
tagcttgggatttcttttaaaatca

SEQ ID NO: 5876279 - DNA, 25 bp, Homo sapien
gactaagggctcagtattttcataa

SEQ ID NO: 5876280 - DNA, 25 bp, Homo sapien
atgtcccctactacacagcaagcag

SEQ ID NO: 5876281 - DNA, 25 bp, Homo sapien
agtattttcataaaacctgctgaag

SEQ ID NO: 5876282 - DNA, 25 bp, Homo sapien
aatgaacacagggaatgatgtccac

SEQ ID NO: 5876283 - DNA, 25 bp, Homo sapien
caatgacattaatgacttttaactt

SEQ ID NO: 5876284 - DNA, 25 bp, Homo sapien
tttttggaaaataaaatatagccat

SEQ ID NO: 5876285 - DNA, 25 bp, Homo sapien
agtagttcatgactaagggctcagt

SEQ ID NO: 5876286 - DNA, 25 bp, Homo sapien
gttcatgactaagggctcagtattt

SEQ ID NO: 5876287 - DNA, 25 bp, Homo sapien
aatctttgatgatctttgtgtcatt

SEQ ID NO: 5876288 - DNA, 25 bp, Homo sapien
cacggtcccactgaagatggagtct

SEQ ID NO: 5876289 - DNA, 25 bp, Homo sapien
aaagctggctaggacgttgggtagc

SEQ ID NO: 5876290 - DNA, 25 bp, Homo sapien
tacaccaattaaacagagaacagat

SEQ ID NO: 5876291 - DNA, 25 bp, Homo sapien
aagagcaccacactactgttacaaa

SEQ ID NO: 5876292 - DNA, 25 bp, Homo sapien
agaatgaacacagggaatgatgtcc

SEQ ID NO: 5876293 - DNA, 25 bp, Homo sapien
catttttacattcaagttaagacaa

SEQ ID NO: 5876294 - DNA, 25 bp, Homo sapien
aaaaatgaagcatacataaagtggg

SEQ ID NO: 5876295 - DNA, 25 bp, Homo sapien
tccatttttacattcaagttaagac

SEQ ID NO: 5876296 - DNA, 25 bp, Homo sapien
attcagcaccgtttaaacttgaagg

SEQ ID NO: 5876297 - DNA, 25 bp, Homo sapien
gatacccaaaggtcaaaaatacaaa

SEQ ID NO: 5876298 - DNA, 25 bp, Homo sapien
aaagacaatctttgatgatctttgt

SEQ ID NO: 5876299 - DNA, 25 bp, Homo sapien
gcttgggatttcttttaaaatcatt

SEQ ID NO: 5876300 - DNA, 25 bp, Homo sapien
catggatttgaaaggtattttaatt

SEQ ID NO: 5876301 - DNA, 25 bp, Homo sapien
atcaatggggagagaatgaacacag

SEQ ID NO: 5876302 - DNA, 25 bp, Homo sapien
atttcctggaactaggaaagctaga

SEQ ID NO: 5876303 - DNA, 25 bp, Homo sapien
atggggagagaatgaacacagggaa

SEQ ID NO: 5876304 - DNA, 25 bp, Homo sapien
agctaaaccttaatccatttttaca

SEQ ID NO: 5876305 - DNA, 25 bp, Homo sapien
tgtccacacgtgtctaacatcaata

SEQ ID NO: 5876306 - DNA, 25 bp, Homo sapien
tccacacgtgtctaacatcaatatt

SEQ ID NO: 5876307 - DNA, 25 bp, Homo sapien
actatgctgtcttccatttcttcac

SEQ ID NO: 5876308 - DNA, 25 bp, Homo sapien
caatggaacttgtaattaaatagtt

SEQ ID NO: 5876309 - DNA, 25 bp, Homo sapien
aaaatatagccatgacaactaatag

SEQ ID NO: 5876310 - DNA, 25 bp, Homo sapien
cgtggaaaggaaagaaatgtttaca

SEQ ID NO: 5876311 - DNA, 25 bp, Homo sapien
taacatcaatattttaaagagcacc

SEQ ID NO: 5876312 - DNA, 25 bp, Homo sapien
ggagtctgcagtctccatgtcatga

SEQ ID NO: 5876313 - DNA, 25 bp, Homo sapien
cagatggcaaagagtagacttaact

SEQ ID NO: 5876314 - DNA, 25 bp, Homo sapien
tacatgtatataatcaatgacatta

SEQ ID NO: 5876315 - DNA, 25 bp, Homo sapien
tgttcaaaagctggctaggacgttg

SEQ ID NO: 5876316 - DNA, 25 bp, Homo sapien
atcaatgacattaatgacttttaac

SEQ ID NO: 5876317 - DNA, 25 bp, Homo sapien
ttaaacagagaacagatacccaaag

SEQ ID NO: 5876318 - DNA, 25 bp, Homo sapien
aaataaaatatagccatgacaacta

SEQ ID NO: 5876319 - DNA, 25 bp, Homo sapien
agagtgcctagcgaataattcaatg

SEQ ID NO: 5876320 - DNA, 25 bp, Homo sapien
accacggtcccactgaagatggagt

SEQ ID NO: 5876321 - DNA, 25 bp, Homo sapien
tctgcagtctccatgtcatgataca

SEQ ID NO: 5876322 - DNA, 25 bp, Homo sapien
gtgtatcccatgagctaaaccttaa

SEQ ID NO: 5876323 - DNA, 25 bp, Homo sapien
ttattagaaaaacatacatgtatat

SEQ ID NO: 5876324 - DNA, 25 bp, Homo sapien
aaaatacaaagtggtaagtcaggat

SEQ ID NO: 5876325 - DNA, 25 bp, Homo sapien
cttaactatgctgtcttccatttct

SEQ ID NO: 5876326 - DNA, 25 bp, Homo sapien
tagttcatgactaagggctcagtat

SEQ ID NO: 5876327 - DNA, 25 bp, Homo sapien
gctgaagactaatgatcaatgggga

SEQ ID NO: 5876328 - DNA, 25 bp, Homo sapien
ataaaatatagccatgacaactaat

SEQ ID NO: 5876329 - DNA, 25 bp, Homo sapien
gcaccacactactgttacaaagagt

SEQ ID NO: 5876330 - DNA, 25 bp, Homo sapien
gacaattcagcaccgtttaaacttg

SEQ ID NO: 5876331 - DNA, 25 bp, Homo sapien
caaaagctggctaggacgttgggta

SEQ ID NO: 5876332 - DNA, 25 bp, Homo sapien
tactacacagcaagcagtcatatat

SEQ ID NO: 5876333 - DNA, 25 bp, Homo sapien
gaaaggaaagaaatgtttacaaata

SEQ ID NO: 5876334 - DNA, 25 bp, Homo sapien
ctacacagcaagcagtcatatatta

SEQ ID NO: 5876335 - DNA, 25 bp, Homo sapien
catacataaagtgggtaattttatt

SEQ ID NO: 5876336 - DNA, 25 bp, Homo sapien
aaatgtgaagaaaatttcctggaac

SEQ ID NO: 5876337 - DNA, 25 bp, Homo sapien
gtgtaaagacaatctttgatgatct

SEQ ID NO: 5876338 - DNA, 25 bp, Homo sapien
ggaaagctagaccacggtcccactg

SEQ ID NO: 5876339 - DNA, 25 bp, Homo sapien
caagcagtcatatattaaatgtgtg

SEQ ID NO: 5876340 - DNA, 25 bp, Homo sapien
atgtgaagaaaatttcctggaacta

SEQ ID NO: 5876341 - DNA, 25 bp, Homo sapien
aaatgaagcatacataaagtgggta

SEQ ID NO: 5876342 - DNA, 25 bp, Homo sapien
taaatgaaaaaaaatcaagcaaaaa

SEQ ID NO: 5876343 - DNA, 25 bp, Homo sapien
taaagtcaattggaagtgtttttaa

SEQ ID NO: 5876344 - DNA, 25 bp, Homo sapien
tggcaaagagtagacttaactatgc

SEQ ID NO: 5876345 - DNA, 25 bp, Homo sapien
cggccgttgttagtgtaaagacaat

SEQ ID NO: 5876346 - DNA, 25 bp, Homo sapien
acaatctttgatgatctttgtgtca

SEQ ID NO: 5876347 - DNA, 25 bp, Homo sapien
tagcaaaattatttctaaagtagtt

SEQ ID NO: 5876348 - DNA, 25 bp, Homo sapien
atttctaaagtagttcatgactaag

SEQ ID NO: 5876349 - DNA, 25 bp, Homo sapien
ttcacggccgttgttagtgtaaaga

SEQ ID NO: 5876350 - DNA, 25 bp, Homo sapien
agaacagatacccaaaggtcaaaaa

SEQ ID NO: 5876351 - DNA, 25 bp, Homo sapien
ttcaatggaacttgtaattaaatag

SEQ ID NO: 5876352 - DNA, 25 bp, Homo sapien
gtgaagaaaatttcctggaactagg

SEQ ID NO: 5876353 - DNA, 25 bp, Homo sapien
catttaaaagccagacattccatgg

SEQ ID NO: 5876354 - DNA, 25 bp, Homo sapien
aaacctgctgaagactaatgatcaa

SEQ ID NO: 5876355 - DNA, 25 bp, Homo sapien
gtcatatattaaatgtgtgtatccc

SEQ ID NO: 5876356 - DNA, 25 bp, Homo sapien
aggacgttgggtagctgggaataaa

SEQ ID NO: 5876357 - DNA, 25 bp, Homo sapien
gatttgaaaggtattttaattatta

SEQ ID NO: 5876358 - DNA, 25 bp, Homo sapien
caatggggagagaatgaacacaggg

SEQ ID NO: 5876359 - DNA, 25 bp, Homo sapien
acatcaatattttaaagagcaccac

SEQ ID NO: 5876360 - DNA, 25 bp, Homo sapien
tagaaaaacatacatgtatataatc

SEQ ID NO: 5876361 - DNA, 25 bp, Homo sapien
tgacatgtcccctactacacagcaa

SEQ ID NO: 5876362 - DNA, 25 bp, Homo sapien
tagactagcttgggatttcttttaa

SEQ ID NO: 5876363 - DNA, 25 bp, Homo sapien
tgtctaacatcaatattttaaagag

SEQ ID NO: 5876364 - DNA, 25 bp, Homo sapien
tacttaatatattgttagcaaaatt

SEQ ID NO: 5876365 - DNA, 25 bp, Homo sapien
acatgtcccctactacacagcaagc

SEQ ID NO: 5876366 - DNA, 25 bp, Homo sapien
tacataaagtgggtaattttattac

SEQ ID NO: 5876367 - DNA, 25 bp, Homo sapien
attccatggatttgaaaggtatttt

SEQ ID NO: 5876368 - DNA, 25 bp, Homo sapien
aaaacatacatgtatataatcaatg

SEQ ID NO: 5876369 - DNA, 25 bp, Homo sapien
aatgacatgtcccctactacacagc

SEQ ID NO: 5876370 - DNA, 25 bp, Homo sapien
atcgtggaaaggaaagaaatgttta

SEQ ID NO: 5876371 - DNA, 25 bp, Homo sapien
gccgttgttagtgtaaagacaatct

SEQ ID NO: 5876372 - DNA, 25 bp, Homo sapien
aactcagatggcaaagagtagactt

SEQ ID NO: 5876373 - DNA, 25 bp, Homo sapien
aggatttaaagtcaattggaagtgt

SEQ ID NO: 5876374 - DNA, 25 bp, Homo sapien
agcaagcagtcatatattaaatgtg

SEQ ID NO: 5876375 - DNA, 25 bp, Homo sapien
acttgaaggctaacaaaatctgtgt

SEQ ID NO: 5876376 - DNA, 25 bp, Homo sapien
agacaatctttgatgatctttgtgt

SEQ ID NO: 5876377 - DNA, 25 bp, Homo sapien
aatgatcaatggggagagaatgaac

SEQ ID NO: 5876378 - DNA, 25 bp, Homo sapien
aaggtcaaattacatttaaaagcca

SEQ ID NO: 5876379 - DNA, 25 bp, Homo sapien
gctacttaaatgaaaaaaaatcaag

SEQ ID NO: 5876380 - DNA, 25 bp, Homo sapien
aattcaatggaacttgtaattaaat

SEQ ID NO: 5876381 - DNA, 25 bp, Homo sapien
ctaggacgttgggtagctgggaata

SEQ ID NO: 5876382 - DNA, 25 bp, Homo sapien
agagaacagatacccaaaggtcaaa

SEQ ID NO: 5876383 - DNA, 25 bp, Homo sapien
agctggctaggacgttgggtagctg

SEQ ID NO: 5876384 - DNA, 25 bp, Homo sapien
agccagacattccatggatttgaaa

SEQ ID NO: 5876385 - DNA, 25 bp, Homo sapien
attctacaccaattaaacagagaac

SEQ ID NO: 5876386 - DNA, 25 bp, Homo sapien
tgagctaaaccttaatccattttta

SEQ ID NO: 5876387 - DNA, 25 bp, Homo sapien
agtgcctagcgaataattcaatgga

SEQ ID NO: 5876388 - DNA, 25 bp, Homo sapien
gaaagaaatgtttacaaataaatag

SEQ ID NO: 5876389 - DNA, 25 bp, Homo sapien
tttggttagactagcttgggatttc

SEQ ID NO: 5876390 - DNA, 25 bp, Homo sapien
agctagaccacggtcccactgaaga

SEQ ID NO: 5876391 - DNA, 25 bp, Homo sapien
tccatggatttgaaaggtattttaa

SEQ ID NO: 5876392 - DNA, 25 bp, Homo sapien
agacattccatggatttgaaaggta

SEQ ID NO: 5876393 - DNA, 25 bp, Homo sapien
tctgtgttcaaaagctggctaggac

SEQ ID NO: 5876394 - DNA, 25 bp, Homo sapien
atgatgtccacacgtgtctaacatc

SEQ ID NO: 5876395 - DNA, 25 bp, Homo sapien
tttgatgatctttgtgtcattctca

SEQ ID NO: 5876396 - DNA, 25 bp, Homo sapien
aagtggtaagtcaggatttaaagtc

SEQ ID NO: 5876397 - DNA, 25 bp, Homo sapien
tggttagactagcttgggatttctt

SEQ ID NO: 5876398 - DNA, 25 bp, Homo sapien
tcaaattacatttaaaagccagaca

SEQ ID NO: 5876399 - DNA, 25 bp, Homo sapien
atgaagcatacataaagtgggtaat

SEQ ID NO: 5876400 - DNA, 25 bp, Homo sapien
ttaattattagaaaaacatacatgt

SEQ ID NO: 5876401 - DNA, 25 bp, Homo sapien
tgatcaatggggagagaatgaacac

SEQ ID NO: 5876402 - DNA, 25 bp, Homo sapien
ctcagatggcaaagagtagacttaa

SEQ ID NO: 5876403 - DNA, 25 bp, Homo sapien
gttagtgtaaagacaatctttgatg

SEQ ID NO: 5876404 - DNA, 25 bp, Homo sapien
taaaagccagacattccatggattt

SEQ ID NO: 5876405 - DNA, 25 bp, Homo sapien
tgctgtcttccatttcttcacggcc

SEQ ID NO: 5876406 - DNA, 25 bp, Homo sapien
ttatttctaaagtagttcatgacta

SEQ ID NO: 5876407 - DNA, 25 bp, Homo sapien
cacgtgtctaacatcaatattttaa

SEQ ID NO: 5876408 - DNA, 25 bp, Homo sapien
ctgaagatggagtctgcagtctcca

SEQ ID NO: 5876409 - DNA, 25 bp, Homo sapien
cactgaagatggagtctgcagtctc

SEQ ID NO: 5876410 - DNA, 25 bp, Homo sapien
gggctcagtattttcataaaacctg

SEQ ID NO: 5876411 - DNA, 25 bp, Homo sapien
aaagagtgcctagcgaataattcaa

SEQ ID NO: 5876412 - DNA, 25 bp, Homo sapien
cctactacacagcaagcagtcatat

SEQ ID NO: 5876413 - DNA, 25 bp, Homo sapien
tataatcaatgacattaatgacttt

SEQ ID NO: 5876414 - DNA, 25 bp, Homo sapien
aaatttagagtttggttagactagc

SEQ ID NO: 5876415 - DNA, 25 bp, Homo sapien
aacagatacccaaaggtcaaaaata

SEQ ID NO: 5876416 - DNA, 25 bp, Homo sapien
gttagcaaaattatttctaaagtag

SEQ ID NO: 5876417 - DNA, 25 bp, Homo sapien
ttttcataaaacctgctgaagacta

SEQ ID NO: 5876418 - DNA, 25 bp, Homo sapien
gtctccatgtcatgatacaactcag

SEQ ID NO: 5876419 - DNA, 25 bp, Homo sapien
gtctatgtgaatttaaaaatgaagc

SEQ ID NO: 5876420 - DNA, 25 bp, Homo sapien
agaccacggtcccactgaagatgga

SEQ ID NO: 5876421 - DNA, 25 bp, Homo sapien
aataaatagctacttaaatgaaaaa

SEQ ID NO: 5876422 - DNA, 25 bp, Homo sapien
atgactaagggctcagtattttcat

SEQ ID NO: 5876423 - DNA, 25 bp, Homo sapien
atttaaaaatgaagcatacataaag

SEQ ID NO: 5876424 - DNA, 25 bp, Homo sapien
cttccatttcttcacggccgttgtt

SEQ ID NO: 5876425 - DNA, 25 bp, Homo sapien
tttcttcacggccgttgttagtgta

SEQ ID NO: 5876426 - DNA, 25 bp, Homo sapien
gaaaaaaaatcaagcaaaaaggtca

SEQ ID NO: 5876427 - DNA, 25 bp, Homo sapien
tgatgatctttgtgtcattctcact

SEQ ID NO: 5876428 - DNA, 25 bp, Homo sapien
gaagatggagtctgcagtctccatg

SEQ ID NO: 5876429 - DNA, 25 bp, Homo sapien
tatattaaatgtgtgtatcccatga

SEQ ID NO: 5876430 - DNA, 25 bp, Homo sapien
tacttaaatgaaaaaaaatcaagca

SEQ ID NO: 5876431 - DNA, 25 bp, Homo sapien
atggagtctgcagtctccatgtcat

SEQ ID NO: 5876432 - DNA, 25 bp, Homo sapien
agagtagacttaactatgctgtctt

SEQ ID NO: 5876433 - DNA, 25 bp, Homo sapien
ttaaacttgaaggctaacaaaatct

SEQ ID NO: 5876434 - DNA, 25 bp, Homo sapien
taatttttggaaaataaaatatagc

SEQ ID NO: 5876435 - DNA, 25 bp, Homo sapien
ggtcaaattacatttaaaagccaga

SEQ ID NO: 5876436 - DNA, 25 bp, Homo sapien
cccactgaagatggagtctgcagtc

SEQ ID NO: 5876437 - DNA, 25 bp, Homo sapien
catgatacaactcagatggcaaaga

SEQ ID NO: 5876438 - DNA, 25 bp, Homo sapien
gactaatgatcaatggggagagaat

SEQ ID NO: 5876439 - DNA, 25 bp, Homo sapien
gttagactagcttgggatttctttt

SEQ ID NO: 5876440 - DNA, 25 bp, Homo sapien
ggggagagaatgaacacagggaatg

SEQ ID NO: 5876441 - DNA, 25 bp, Homo sapien
aagcaaaaaggtcaaattacattta

SEQ ID NO: 5876442 - DNA, 25 bp, Homo sapien
taaatagttatataaaatgtgaaga

SEQ ID NO: 5876443 - DNA, 25 bp, Homo sapien
caaaggtcaaaaatacaaagtggta

SEQ ID NO: 5876444 - DNA, 25 bp, Homo sapien
gaaggctaacaaaatctgtgttcaa

SEQ ID NO: 5876445 - DNA, 25 bp, Homo sapien
gaatttaaaaatgaagcatacataa

SEQ ID NO: 5876446 - DNA, 25 bp, Homo sapien
tggaactaggaaagctagaccacgg

SEQ ID NO: 5876447 - DNA, 25 bp, Homo sapien
tatgctgtcttccatttcttcacgg

SEQ ID NO: 5876448 - DNA, 25 bp, Homo sapien
ccatgtcatgatacaactcagatgg

SEQ ID NO: 5876449 - DNA, 25 bp, Homo sapien
aaagccagacattccatggatttga

SEQ ID NO: 5876450 - DNA, 25 bp, Homo sapien
ttcataaaacctgctgaagactaat

SEQ ID NO: 5876451 - DNA, 25 bp, Homo sapien
tagccatgacaactaatagtgctta

SEQ ID NO: 5876452 - DNA, 25 bp, Homo sapien
gtaaagacaatctttgatgatcttt

SEQ ID NO: 5876453 - DNA, 25 bp, Homo sapien
gcgaataattcaatggaacttgtaa

SEQ ID NO: 5876454 - DNA, 25 bp, Homo sapien
agtcaggatttaaagtcaattggaa

SEQ ID NO: 5876455 - DNA, 25 bp, Homo sapien
cactactgttacaaagagtgcctag

SEQ ID NO: 5876456 - DNA, 25 bp, Homo sapien
taggaaagctagaccacggtcccac

SEQ ID NO: 5876457 - DNA, 25 bp, Homo sapien
cacagggaatgatgtccacacgtgt

SEQ ID NO: 5876458 - DNA, 25 bp, Homo sapien
tccatttcttcacggccgttgttag

SEQ ID NO: 5876459 - DNA, 25 bp, Homo sapien
tcatgactaagggctcagtattttc

SEQ ID NO: 5876460 - DNA, 25 bp, Homo sapien
agtttggttagactagcttgggatt

SEQ ID NO: 5876461 - DNA, 25 bp, Homo sapien
tggaagtgtttttaaatcgtggaaa

SEQ ID NO: 5876462 - DNA, 25 bp, Homo sapien
atgatctttgtgtcattctcactta

SEQ ID NO: 5876463 - DNA, 25 bp, Homo sapien
ttaaatgtgtgtatcccatgagcta

SEQ ID NO: 5876464 - DNA, 25 bp, Homo sapien
gctcagtattttcataaaacctgct

SEQ ID NO: 5876465 - DNA, 25 bp, Homo sapien
aaagtagttcatgactaagggctca

SEQ ID NO: 5876466 - DNA, 25 bp, Homo sapien
acagcaagcagtcatatattaaatg

SEQ ID NO: 5876467 - DNA, 25 bp, Homo sapien
gtgtgtatcccatgagctaaacctt

SEQ ID NO: 5876468 - DNA, 25 bp, Homo sapien
gtcaaaaatacaaagtggtaagtca

SEQ ID NO: 5876469 - DNA, 25 bp, Homo sapien
tttttacattcaagttaagacaatt

SEQ ID NO: 5876470 - DNA, 25 bp, Homo sapien
atcaatattttaaagagcaccacac

SEQ ID NO: 5876471 - DNA, 25 bp, Homo sapien
aatccatttttacattcaagttaag

SEQ ID NO: 5876472 - DNA, 25 bp, Homo sapien
aattattagaaaaacatacatgtat

SEQ ID NO: 5876473 - DNA, 25 bp, Homo sapien
gcaaagagtagacttaactatgctg

SEQ ID NO: 5876474 - DNA, 25 bp, Homo sapien
caattggaagtgtttttaaatcgtg

SEQ ID NO: 5876475 - DNA, 25 bp, Homo sapien
ttacaaagagtgcctagcgaataat

SEQ ID NO: 5876476 - DNA, 25 bp, Homo sapien
caaagtggtaagtcaggatttaaag

SEQ ID NO: 5876477 - DNA, 25 bp, Homo sapien
tctttgatgatctttgtgtcattct

SEQ ID NO: 5876478 - DNA, 25 bp, Homo sapien
ccagacattccatggatttgaaagg

SEQ ID NO: 5876479 - DNA, 25 bp, Homo sapien
acaaaatctgtgttcaaaagctggc

SEQ ID NO: 5876480 - DNA, 25 bp, Homo sapien
tgaagactaatgatcaatggggaga

SEQ ID NO: 5876481 - DNA, 25 bp, Homo sapien
gatggcaaagagtagacttaactat

SEQ ID NO: 5876482 - DNA, 25 bp, Homo sapien
tcaagcaaaaaggtcaaattacatt

SEQ ID NO: 5876483 - DNA, 25 bp, Homo sapien
ataattcaatggaacttgtaattaa

SEQ ID NO: 5876484 - DNA, 25 bp, Homo sapien
aattgtctatgtgaatttaaaaatg

SEQ ID NO: 5876485 - DNA, 25 bp, Homo sapien
taacaaaatctgtgttcaaaagctg

SEQ ID NO: 5876486 - DNA, 25 bp, Homo sapien
gactagcttgggatttcttttaaaa

SEQ ID NO: 5876487 - DNA, 25 bp, Homo sapien
aacatacatgtatataatcaatgac

SEQ ID NO: 5876488 - DNA, 25 bp, Homo sapien
agagaatgaacacagggaatgatgt

SEQ ID NO: 5876489 - DNA, 25 bp, Homo sapien
ccaattaaacagagaacagataccc

SEQ ID NO: 5876490 - DNA, 25 bp, Homo sapien
tggatttgaaaggtattttaattat

SEQ ID NO: 5876491 - DNA, 25 bp, Homo sapien
ttgttagtgtaaagacaatctttga

SEQ ID NO: 5876492 - DNA, 25 bp, Homo sapien
tgtgtcattctcacttagtactttt

SEQ ID NO: 5876493 - DNA, 25 bp, Homo sapien
cacggccgttgttagtgtaaagaca

SEQ ID NO: 5876494 - DNA, 25 bp, Homo sapien
ctaaagtagttcatgactaagggct

SEQ ID NO: 5876495 - DNA, 25 bp, Homo sapien
ttgttagcaaaattatttctaaagt

SEQ ID NO: 5876496 - DNA, 25 bp, Homo sapien
cgtgtctaacatcaatattttaaag

SEQ ID NO: 5876497 - DNA, 25 bp, Homo sapien
tacaaataaatagctacttaaatga

SEQ ID NO: 5876498 - DNA, 25 bp, Homo sapien
tagttatataaaatgtgaagaaaat

SEQ ID NO: 5876499 - DNA, 25 bp, Homo sapien
tttggaaaataaaatatagccatga

SEQ ID NO: 5876500 - DNA, 25 bp, Homo sapien
agttaagacaattcagcaccgttta

SEQ ID NO: 5876501 - DNA, 25 bp, Homo sapien
aagaaatgtttacaaataaatagct

SEQ ID NO: 5876502 - DNA, 25 bp, Homo sapien
aaaatctgtgttcaaaagctggcta

SEQ ID NO: 5876503 - DNA, 25 bp, Homo sapien
gtgaatttaaaaatgaagcatacat

SEQ ID NO: 5876504 - DNA, 25 bp, Homo sapien
tgtcattctcacttagtactttttt

SEQ ID NO: 5876505 - DNA, 25 bp, Homo sapien
ggaacttgtaattaaatagttatat

SEQ ID NO: 5876506 - DNA, 25 bp, Homo sapien
gaataattcaatggaacttgtaatt

SEQ ID NO: 5876507 - DNA, 25 bp, Homo sapien
gtcatgatacaactcagatggcaaa

SEQ ID NO: 5876508 - DNA, 25 bp, Homo sapien
cgttgttagtgtaaagacaatcttt

SEQ ID NO: 5876509 - DNA, 25 bp, Homo sapien
tacaaagtggtaagtcaggatttaa

SEQ ID NO: 5876510 - DNA, 25 bp, Homo sapien
actgttacaaagagtgcctagcgaa

SEQ ID NO: 5876511 - DNA, 25 bp, Homo sapien
aaaatcaagcaaaaaggtcaaatta

SEQ ID NO: 5876512 - DNA, 25 bp, Homo sapien
cattcaagttaagacaattcagcac

SEQ ID NO: 5876513 - DNA, 25 bp, Homo sapien
caagttaagacaattcagcaccgtt

SEQ ID NO: 5876514 - DNA, 25 bp, Homo sapien
ctccatgtcatgatacaactcagat

SEQ ID NO: 5876515 - DNA, 25 bp, Homo sapien
aaatttcctggaactaggaaagcta

SEQ ID NO: 5876516 - DNA, 25 bp, Homo sapien
ttagagtttggttagactagcttgg

SEQ ID NO: 5876517 - DNA, 25 bp, Homo sapien
cagtcatatattaaatgtgtgtatc

SEQ ID NO: 5876518 - DNA, 25 bp, Homo sapien
tatataatcaatgacattaatgact

SEQ ID NO: 5876519 - DNA, 25 bp, Homo sapien
gaaaaacatacatgtatataatcaa

SEQ ID NO: 5876520 - DNA, 25 bp, Homo sapien
gctaacaaaatctgtgttcaaaagc

SEQ ID NO: 5876521 - DNA, 25 bp, Homo sapien
agcatacataaagtgggtaatttta

SEQ ID NO: 5876522 - DNA, 25 bp, Homo sapien
ttctaaagtagttcatgactaaggg

SEQ ID NO: 5876523 - DNA, 25 bp, Homo sapien
tgaacacagggaatgatgtccacac

SEQ ID NO: 5876524 - DNA, 25 bp, Homo sapien
attttaaagagcaccacactactgt

SEQ ID NO: 5876525 - DNA, 25 bp, Homo sapien
gaaaatttcctggaactaggaaagc

SEQ ID NO: 5876526 - DNA, 25 bp, Homo sapien
cttaaatgaaaaaaaatcaagcaaa

SEQ ID NO: 5876527 - DNA, 25 bp, Homo sapien
aattatttctaaagtagttcatgac

SEQ ID NO: 5876528 - DNA, 25 bp, Homo sapien
catatattaaatgtgtgtatcccat

SEQ ID NO: 5876529 - DNA, 25 bp, Homo sapien
ttaagacaattcagcaccgtttaaa

SEQ ID NO: 5876530 - DNA, 25 bp, Homo sapien
agtagacttaactatgctgtcttcc

SEQ ID NO: 5876531 - DNA, 25 bp, Homo sapien
cataaaacctgctgaagactaatga

SEQ ID NO: 5876532 - DNA, 25 bp, Homo sapien
aaagctagaccacggtcccactgaa

SEQ ID NO: 5876533 - DNA, 25 bp, Homo sapien
tagacttaactatgctgtcttccat

SEQ ID NO: 5876534 - DNA, 25 bp, Homo sapien
aaatgtgtgtatcccatgagctaaa

SEQ ID NO: 5876535 - DNA, 25 bp, Homo sapien
cacacgtgtctaacatcaatatttt

SEQ ID NO: 5876536 - DNA, 25 bp, Homo sapien
ttattctacaccaattaaacagaga

SEQ ID NO: 5876537 - DNA, 25 bp, Homo sapien
gtcttccatttcttcacggccgttg

SEQ ID NO: 5876538 - DNA, 25 bp, Homo sapien
taactatgctgtcttccatttcttc

SEQ ID NO: 5876539 - DNA, 25 bp, Homo sapien
tattaaatgtgtgtatcccatgagc

SEQ ID NO: 5876540 - DNA, 25 bp, Homo sapien
caccaattaaacagagaacagatac

SEQ ID NO: 5876541 - DNA, 25 bp, Homo sapien
gttgggtagctgggaataaaattta

SEQ ID NO: 5876542 - DNA, 25 bp, Homo sapien
ggagagaatgaacacagggaatgat

SEQ ID NO: 5876543 - DNA, 25 bp, Homo sapien
tacatttaaaagccagacattccat

SEQ ID NO: 5876544 - DNA, 25 bp, Homo sapien
atattttaaagagcaccacactact

SEQ ID NO: 5876545 - DNA, 25 bp, Homo sapien
ctgctgaagactaatgatcaatggg

SEQ ID NO: 5876546 - DNA, 25 bp, Homo sapien
aaacttgaaggctaacaaaatctgt

SEQ ID NO: 5876547 - DNA, 25 bp, Homo sapien
tctacaccaattaaacagagaacag

SEQ ID NO: 5876548 - DNA, 25 bp, Homo sapien
cattattctacaccaattaaacaga

SEQ ID NO: 5876549 - DNA, 25 bp, Homo sapien
gcaaaaaggtcaaattacatttaaa

SEQ ID NO: 5876550 - DNA, 25 bp, Homo sapien
gacgttgggtagctgggaataaaat

SEQ ID NO: 5876551 - DNA, 25 bp, Homo sapien
agcaccgtttaaacttgaaggctaa

SEQ ID NO: 5876552 - DNA, 25 bp, Homo sapien
aagactaatgatcaatggggagaga

SEQ ID NO: 5876553 - DNA, 25 bp, Homo sapien
gtcccctactacacagcaagcagtc

SEQ ID NO: 5876554 - DNA, 25 bp, Homo sapien
tgtgttcaaaagctggctaggacgt

SEQ ID NO: 5876555 - DNA, 25 bp, Homo sapien
acattccatggatttgaaaggtatt

SEQ ID NO: 5876556 - DNA, 25 bp, Homo sapien
tgggtagctgggaataaaatttaaa

SEQ ID NO: 5876557 - DNA, 25 bp, Homo sapien
aaaattatttctaaagtagttcatg

SEQ ID NO: 5876558 - DNA, 25 bp, Homo sapien
cctagcgaataattcaatggaactt

SEQ ID NO: 5876559 - DNA, 25 bp, Homo sapien
ttcaagttaagacaattcagcaccg

SEQ ID NO: 5876560 - DNA, 25 bp, Homo sapien
taatcaatgacattaatgactttta

SEQ ID NO: 5876561 - DNA, 25 bp, Homo sapien
gaaaataaaatatagccatgacaac

SEQ ID NO: 5876562 - DNA, 25 bp, Homo sapien
attggaagtgtttttaaatcgtgga

SEQ ID NO: 5876563 - DNA, 25 bp, Homo sapien
tttacaaataaatagctacttaaat

SEQ ID NO: 5876564 - DNA, 25 bp, Homo sapien
gatttaaagtcaattggaagtgttt

SEQ ID NO: 5876565 - DNA, 25 bp, Homo sapien
caccgtttaaacttgaaggctaaca

SEQ ID NO: 5876566 - DNA, 25 bp, Homo sapien
gttatataaaatgtgaagaaaattt

SEQ ID NO: 5876567 - DNA, 25 bp, Homo sapien
catgagctaaaccttaatccatttt

SEQ ID NO: 5876568 - DNA, 25 bp, Homo sapien
ctactgttacaaagagtgcctagcg

SEQ ID NO: 5876569 - DNA, 25 bp, Homo sapien
tcaggatttaaagtcaattggaagt

SEQ ID NO: 5876570 - DNA, 25 bp, Homo sapien
attagaaaaacatacatgtatataa

SEQ ID NO: 5876571 - DNA, 25 bp, Homo sapien
tgtatataatcaatgacattaatga

SEQ ID NO: 5876572 - DNA, 25 bp, Homo sapien
catgtatataatcaatgacattaat

SEQ ID NO: 5876573 - DNA, 25 bp, Homo sapien
tctaacatcaatattttaaagagca

SEQ ID NO: 5876574 - DNA, 25 bp, Homo sapien
ttaaaaatgaagcatacataaagtg

SEQ ID NO: 5876575 - DNA, 25 bp, Homo sapien
tagtgtaaagacaatctttgatgat

SEQ ID NO: 5876576 - DNA, 25 bp, Homo sapien
atatattgttagcaaaattatttct

SEQ ID NO: 5876577 - DNA, 25 bp, Homo sapien
catacatgtatataatcaatgacat

SEQ ID NO: 5876578 - DNA, 25 bp, Homo sapien
atggaacttgtaattaaatagttat

SEQ ID NO: 5876579 - DNA, 25 bp, Homo sapien
gatctttgtgtcattctcacttagt

SEQ ID NO: 5876580 - DNA, 25 bp, Homo sapien
ctgctccgcacagggaactcaaggc

SEQ ID NO: 5876581 - DNA, 25 bp, Homo sapien
agtttgccccaatggtacgctgttt

SEQ ID NO: 5876582 - DNA, 25 bp, Homo sapien
atcctatttggttgggcacattctc

SEQ ID NO: 5876583 - DNA, 25 bp, Homo sapien
gcataaattgagtttgatttttatt

SEQ ID NO: 5876584 - DNA, 25 bp, Homo sapien
tgaagaaagcaaatgcataggatgg

SEQ ID NO: 5876585 - DNA, 25 bp, Homo sapien
gtttgaagcagaaagtgttcttggc

SEQ ID NO: 5876586 - DNA, 25 bp, Homo sapien
atgtccgatctaggactagctccca

SEQ ID NO: 5876587 - DNA, 25 bp, Homo sapien
ccaaatgatactgtcctgccatcat

SEQ ID NO: 5876588 - DNA, 25 bp, Homo sapien
ggactccagtggacagcaccccagg

SEQ ID NO: 5876589 - DNA, 25 bp, Homo sapien
aagaaagcaaatgcataggatgggt

SEQ ID NO: 5876590 - DNA, 25 bp, Homo sapien
attgccatcagagaaccccgaagag

SEQ ID NO: 5876591 - DNA, 25 bp, Homo sapien
aaatgatactgtcctgccatcattc

SEQ ID NO: 5876592 - DNA, 25 bp, Homo sapien
gcgtggccgtacgcaaatgcagtgt

SEQ ID NO: 5876593 - DNA, 25 bp, Homo sapien
agctgacacggagtggaagttaagg

SEQ ID NO: 5876594 - DNA, 25 bp, Homo sapien
accttccgtgactgattgtttattg

SEQ ID NO: 5876595 - DNA, 25 bp, Homo sapien
cctatttggttgggcacattctcta

SEQ ID NO: 5876596 - DNA, 25 bp, Homo sapien
ggggaagtgtaagtgcatgcagtgc

SEQ ID NO: 5876597 - DNA, 25 bp, Homo sapien
tgtgctagcccagctaagcacagtg

SEQ ID NO: 5876598 - DNA, 25 bp, Homo sapien
caagctggcaggcttaactgaggtg

SEQ ID NO: 5876599 - DNA, 25 bp, Homo sapien
gtcagaagtgtgtcaggtttgaagc

SEQ ID NO: 5876600 - DNA, 25 bp, Homo sapien
gcatcgccctccatgacaactgtgc

SEQ ID NO: 5876601 - DNA, 25 bp, Homo sapien
gtcatgttcatgtgtgtccgtgccc

SEQ ID NO: 5876602 - DNA, 25 bp, Homo sapien
tggttgggcacattctctattggtc

SEQ ID NO: 5876603 - DNA, 25 bp, Homo sapien
ctcacacaaaaggcgtggccgtacg

SEQ ID NO: 5876604 - DNA, 25 bp, Homo sapien
tctagaatgtccgatctaggactag

SEQ ID NO: 5876605 - DNA, 25 bp, Homo sapien
ggctcagtctcctttgggagatgtg

SEQ ID NO: 5876606 - DNA, 25 bp, Homo sapien
ttcaggcggtacttgaatttagcac

SEQ ID NO: 5876607 - DNA, 25 bp, Homo sapien
tgttacgcccacaccgggagctgac

SEQ ID NO: 5876608 - DNA, 25 bp, Homo sapien
gtgcatgcagtgctcacacaaaagg

SEQ ID NO: 5876609 - DNA, 25 bp, Homo sapien
cacagggaactcaaggcctgccacc

SEQ ID NO: 5876610 - DNA, 25 bp, Homo sapien
cacagtgtagaccttctagaatgtc

SEQ ID NO: 5876611 - DNA, 25 bp, Homo sapien
cggagtggaagttaagggctgctcc

SEQ ID NO: 5876612 - DNA, 25 bp, Homo sapien
ccctccatgacaactgtgctagccc

SEQ ID NO: 5876613 - DNA, 25 bp, Homo sapien
gaatttagcaccgtaatcctgtcct

SEQ ID NO: 5876614 - DNA, 25 bp, Homo sapien
gggccaccagaaactgctgtggtgt

SEQ ID NO: 5876615 - DNA, 25 bp, Homo sapien
ccatcattctgatttgactgtttgt

SEQ ID NO: 5876616 - DNA, 25 bp, Homo sapien
agttcgatatatgtggctttatatt

SEQ ID NO: 5876617 - DNA, 25 bp, Homo sapien
gtctcctttgggagatgtggaggac

SEQ ID NO: 5876618 - DNA, 25 bp, Homo sapien
tcggcctccctcttccatcctattt

SEQ ID NO: 5876619 - DNA, 25 bp, Homo sapien
cgggagctgacacggagtggaagtt

SEQ ID NO: 5876620 - DNA, 25 bp, Homo sapien
aagtgcatgcagtgctcacacaaaa

SEQ ID NO: 5876621 - DNA, 25 bp, Homo sapien
gcttcacagtgtagaccttctagaa

SEQ ID NO: 5876622 - DNA, 25 bp, Homo sapien
gtacgtaagctgaccgggggaagtg

SEQ ID NO: 5876623 - DNA, 25 bp, Homo sapien
ggaggacaagctggcaggcttaact

SEQ ID NO: 5876624 - DNA, 25 bp, Homo sapien
tgtggtgagcatcgccctccatgac

SEQ ID NO: 5876625 - DNA, 25 bp, Homo sapien
gagtggaagttaagggctgctccgc

SEQ ID NO: 5876626 - DNA, 25 bp, Homo sapien
tgccatcagagaaccccgaagaggc

SEQ ID NO: 5876627 - DNA, 25 bp, Homo sapien
tgaagaggctttcctgtcacctgag

SEQ ID NO: 5876628 - DNA, 25 bp, Homo sapien
aacgagttcgatatatgtggcttta

SEQ ID NO: 5876629 - DNA, 25 bp, Homo sapien
aggtactcggcctccctcttccatc

SEQ ID NO: 5876630 - DNA, 25 bp, Homo sapien
cacagtggactccagtggacagcac

SEQ ID NO: 5876631 - DNA, 25 bp, Homo sapien
caaactgatggggccaccagaaact

SEQ ID NO: 5876632 - DNA, 25 bp, Homo sapien
aggacaagctggcaggcttaactga

SEQ ID NO: 5876633 - DNA, 25 bp, Homo sapien
gacaggacttttgtcaagtttgccc

SEQ ID NO: 5876634 - DNA, 25 bp, Homo sapien
ccatcagagaaccccgaagaggctt

SEQ ID NO: 5876635 - DNA, 25 bp, Homo sapien
ggagctgacacggagtggaagttaa

SEQ ID NO: 5876636 - DNA, 25 bp, Homo sapien
gcagtgctcacacaaaaggcgtggc

SEQ ID NO: 5876637 - DNA, 25 bp, Homo sapien
ctattggtcagaagtgtgtcaggtt

SEQ ID NO: 5876638 - DNA, 25 bp, Homo sapien
atcgccctccatgacaactgtgcta

SEQ ID NO: 5876639 - DNA, 25 bp, Homo sapien
gtgaggtttcttttcctaaaccaca

SEQ ID NO: 5876640 - DNA, 25 bp, Homo sapien
tatttggttgggcacattctctatt

SEQ ID NO: 5876641 - DNA, 25 bp, Homo sapien
aatgaagaaagcaaatgcataggat

SEQ ID NO: 5876642 - DNA, 25 bp, Homo sapien
gcctgtgacggacaggacttttgtc

SEQ ID NO: 5876643 - DNA, 25 bp, Homo sapien
gatttgactgtttgtggtgagcatc

SEQ ID NO: 5876644 - DNA, 25 bp, Homo sapien
ttccccacaagcaagctcacgttta

SEQ ID NO: 5876645 - DNA, 25 bp, Homo sapien
gtagaccttctagaatgtccgatct

SEQ ID NO: 5876646 - DNA, 25 bp, Homo sapien
ttcctaaaccacagcccaaactgat

SEQ ID NO: 5876647 - DNA, 25 bp, Homo sapien
acttttgtcaagtttgccccaatgg

SEQ ID NO: 5876648 - DNA, 25 bp, Homo sapien
cctaaaccacagcccaaactgatgg

SEQ ID NO: 5876649 - DNA, 25 bp, Homo sapien
agcccaaactgatggggccaccaga

SEQ ID NO: 5876650 - DNA, 25 bp, Homo sapien
catgttcatgtgtgtccgtgccccc

SEQ ID NO: 5876651 - DNA, 25 bp, Homo sapien
cttctagaatgtccgatctaggact

SEQ ID NO: 5876652 - DNA, 25 bp, Homo sapien
gtacttgaatttagcaccgtaatcc

SEQ ID NO: 5876653 - DNA, 25 bp, Homo sapien
tggtacgctgtttgaagaggctttc

SEQ ID NO: 5876654 - DNA, 25 bp, Homo sapien
cttaactgaggtgtgtcatgttcat

SEQ ID NO: 5876655 - DNA, 25 bp, Homo sapien
cccaaactgatggggccaccagaaa

SEQ ID NO: 5876656 - DNA, 25 bp, Homo sapien
gacaactgtgctagcccagctaagc

SEQ ID NO: 5876657 - DNA, 25 bp, Homo sapien
taggactagctcccaaatgatactg

SEQ ID NO: 5876658 - DNA, 25 bp, Homo sapien
ctaggctgccgcttcacagtgtaga

SEQ ID NO: 5876659 - DNA, 25 bp, Homo sapien
tgtgtccgtgcccccgaatcctagg

SEQ ID NO: 5876660 - DNA, 25 bp, Homo sapien
acgtaagctgaccgggggaagtgta

SEQ ID NO: 5876661 - DNA, 25 bp, Homo sapien
tcaaggcctgccaccttccgtgact

SEQ ID NO: 5876662 - DNA, 25 bp, Homo sapien
tttgtggtgagcatcgccctccatg

SEQ ID NO: 5876663 - DNA, 25 bp, Homo sapien
gagtttgatttttattgactgaaaa

SEQ ID NO: 5876664 - DNA, 25 bp, Homo sapien
ggctttcctgtcacctgagcatttg

SEQ ID NO: 5876665 - DNA, 25 bp, Homo sapien
taaggtactcggcctccctcttcca

SEQ ID NO: 5876666 - DNA, 25 bp, Homo sapien
gtgagcatcgccctccatgacaact

SEQ ID NO: 5876667 - DNA, 25 bp, Homo sapien
tccgcacagggaactcaaggcctgc

SEQ ID NO: 5876668 - DNA, 25 bp, Homo sapien
taagggctgctccgcacagggaact

SEQ ID NO: 5876669 - DNA, 25 bp, Homo sapien
gtttacattgccatcagagaacccc

SEQ ID NO: 5876670 - DNA, 25 bp, Homo sapien
tgccgcttcacagtgtagaccttct

SEQ ID NO: 5876671 - DNA, 25 bp, Homo sapien
atcattctgatttgactgtttgtgg

SEQ ID NO: 5876672 - DNA, 25 bp, Homo sapien
ttgtcaagtttgccccaatggtacg

SEQ ID NO: 5876673 - DNA, 25 bp, Homo sapien
agtggacattttccaggagaagggc

SEQ ID NO: 5876674 - DNA, 25 bp, Homo sapien
tgaggtgtgtcatgttcatgtgtgt

SEQ ID NO: 5876675 - DNA, 25 bp, Homo sapien
aagctgaccgggggaagtgtaagtg

SEQ ID NO: 5876676 - DNA, 25 bp, Homo sapien
gagtacgtaagctgaccgggggaag

SEQ ID NO: 5876677 - DNA, 25 bp, Homo sapien
tgggcacattctctattggtcagaa

SEQ ID NO: 5876678 - DNA, 25 bp, Homo sapien
tgtgctctagtttccatctcaagcc

SEQ ID NO: 5876679 - DNA, 25 bp, Homo sapien
ttatattttaaacaccagtggacat

SEQ ID NO: 5876680 - DNA, 25 bp, Homo sapien
tgtcaggtttgaagcagaaagtgtt

SEQ ID NO: 5876681 - DNA, 25 bp, Homo sapien
ttgagtttgatttttattgactgaa

SEQ ID NO: 5876682 - DNA, 25 bp, Homo sapien
attttaaacaccagtggacattttc

SEQ ID NO: 5876683 - DNA, 25 bp, Homo sapien
cagagaaccccgaagaggctttgtt

SEQ ID NO: 5876684 - DNA, 25 bp, Homo sapien
tggtgagcatcgccctccatgacaa

SEQ ID NO: 5876685 - DNA, 25 bp, Homo sapien
cgtgactgattgtttattggggttc

SEQ ID NO: 5876686 - DNA, 25 bp, Homo sapien
tgtttattggggttcttcctgtctt

SEQ ID NO: 5876687 - DNA, 25 bp, Homo sapien
cgatatatgtggctttatattttaa

SEQ ID NO: 5876688 - DNA, 25 bp, Homo sapien
atattttaaacaccagtggacattt

SEQ ID NO: 5876689 - DNA, 25 bp, Homo sapien
agaaactgctgtggtgttcaggcgg

SEQ ID NO: 5876690 - DNA, 25 bp, Homo sapien
tctaaggtactcggcctccctcttc

SEQ ID NO: 5876691 - DNA, 25 bp, Homo sapien
caccagtggacattttccaggagaa

SEQ ID NO: 5876692 - DNA, 25 bp, Homo sapien
cagaagtgtgtcaggtttgaagcag

SEQ ID NO: 5876693 - DNA, 25 bp, Homo sapien
tgctgtggtgttcaggcggtacttg

SEQ ID NO: 5876694 - DNA, 25 bp, Homo sapien
gcccacaccgggagctgacacggag

SEQ ID NO: 5876695 - DNA, 25 bp, Homo sapien
acaccgggagctgacacggagtgga

SEQ ID NO: 5876696 - DNA, 25 bp, Homo sapien
tcctaggctgccgcttcacagtgta

SEQ ID NO: 5876697 - DNA, 25 bp, Homo sapien
caggctcagtctcctttgggagatg

SEQ ID NO: 5876698 - DNA, 25 bp, Homo sapien
ggctctgagtacgtaagctgaccgg

SEQ ID NO: 5876699 - DNA, 25 bp, Homo sapien
gctgtttgaagaggctttcctgtca

SEQ ID NO: 5876700 - DNA, 25 bp, Homo sapien
ccagggtggggttgtgtgctctagt

SEQ ID NO: 5876701 - DNA, 25 bp, Homo sapien
agatgtggaggacaagctggcaggc

SEQ ID NO: 5876702 - DNA, 25 bp, Homo sapien
gtaagtgcatgcagtgctcacacaa

SEQ ID NO: 5876703 - DNA, 25 bp, Homo sapien
tcccaaatgatactgtcctgccatc

SEQ ID NO: 5876704 - DNA, 25 bp, Homo sapien
ccaggagaagggctctgagtacgta

SEQ ID NO: 5876705 - DNA, 25 bp, Homo sapien
gctttgtttcctttaggttgaaaga

SEQ ID NO: 5876706 - DNA, 25 bp, Homo sapien
cggacaggacttttgtcaagtttgc

SEQ ID NO: 5876707 - DNA, 25 bp, Homo sapien
ttcgatatatgtggctttatatttt

SEQ ID NO: 5876708 - DNA, 25 bp, Homo sapien
accttctagaatgtccgatctagga

SEQ ID NO: 5876709 - DNA, 25 bp, Homo sapien
ttacattgccatcagagaaccccga

SEQ ID NO: 5876710 - DNA, 25 bp, Homo sapien
ccaccttccgtgactgattgtttat

SEQ ID NO: 5876711 - DNA, 25 bp, Homo sapien
acgcccacaccgggagctgacacgg

SEQ ID NO: 5876712 - DNA, 25 bp, Homo sapien
gtcctgccatcattctgatttgact

SEQ ID NO: 5876713 - DNA, 25 bp, Homo sapien
cccagctaagcacagtggactccag

SEQ ID NO: 5876714 - DNA, 25 bp, Homo sapien
tgtgtgctctagtttccatctcaag

SEQ ID NO: 5876715 - DNA, 25 bp, Homo sapien
gtggaagttaagggctgctccgcac

SEQ ID NO: 5876716 - DNA, 25 bp, Homo sapien
actgaaaatgaagaaagcaaatgca

SEQ ID NO: 5876717 - DNA, 25 bp, Homo sapien
taagcacagtggactccagtggaca

SEQ ID NO: 5876718 - DNA, 25 bp, Homo sapien
gacaagctggcaggcttaactgagg

SEQ ID NO: 5876719 - DNA, 25 bp, Homo sapien
cattctgatttgactgtttgtggtg

SEQ ID NO: 5876720 - DNA, 25 bp, Homo sapien
gaaagtgttcttggcccaggctcag

SEQ ID NO: 5876721 - DNA, 25 bp, Homo sapien
tagaatgtccgatctaggactagct

SEQ ID NO: 5876722 - DNA, 25 bp, Homo sapien
agtgtgtcaggtttgaagcagaaag

SEQ ID NO: 5876723 - DNA, 25 bp, Homo sapien
ggaagtgtaagtgcatgcagtgctc

SEQ ID NO: 5876724 - DNA, 25 bp, Homo sapien
aattgagtttgatttttattgactg

SEQ ID NO: 5876725 - DNA, 25 bp, Homo sapien
tcttccatcctatttggttgggcac

SEQ ID NO: 5876726 - DNA, 25 bp, Homo sapien
agcaccgtaatcctgtcctcccccc

SEQ ID NO: 5876727 - DNA, 25 bp, Homo sapien
atgcataggatgggtttaagcactt

SEQ ID NO: 5876728 - DNA, 25 bp, Homo sapien
gaactcaaggcctgccaccttccgt

SEQ ID NO: 5876729 - DNA, 25 bp, Homo sapien
atatatgtggctttatattttaaac

SEQ ID NO: 5876730 - DNA, 25 bp, Homo sapien
gctaagcacagtggactccagtgga

SEQ ID NO: 5876731 - DNA, 25 bp, Homo sapien
gttcttcctgtcttttccccacaag

SEQ ID NO: 5876732 - DNA, 25 bp, Homo sapien
ccatcctatttggttgggcacattc

SEQ ID NO: 5876733 - DNA, 25 bp, Homo sapien
gcagtgttacgcccacaccgggagc

SEQ ID NO: 5876734 - DNA, 25 bp, Homo sapien
gtggaggacaagctggcaggcttaa

SEQ ID NO: 5876735 - DNA, 25 bp, Homo sapien
ccgatctaggactagctcccaaatg

SEQ ID NO: 5876736 - DNA, 25 bp, Homo sapien
cacattctctattggtcagaagtgt

SEQ ID NO: 5876737 - DNA, 25 bp, Homo sapien
tgttcaggcggtacttgaatttagc

SEQ ID NO: 5876738 - DNA, 25 bp, Homo sapien
gtgtagaccttctagaatgtccgat

SEQ ID NO: 5876739 - DNA, 25 bp, Homo sapien
ggtgttcaggcggtacttgaattta

SEQ ID NO: 5876740 - DNA, 25 bp, Homo sapien
actcggcctccctcttccatcctat

SEQ ID NO: 5876741 - DNA, 25 bp, Homo sapien
gaagcagaaagtgttcttggcccag

SEQ ID NO: 5876742 - DNA, 25 bp, Homo sapien
ttctgatttgactgtttgtggtgag

SEQ ID NO: 5876743 - DNA, 25 bp, Homo sapien
agcacagtggactccagtggacagc

SEQ ID NO: 5876744 - DNA, 25 bp, Homo sapien
ctggcaggcttaactgaggtgtgtc

SEQ ID NO: 5876745 - DNA, 25 bp, Homo sapien
tgtttgaagaggctttcctgtcacc

SEQ ID NO: 5876746 - DNA, 25 bp, Homo sapien
aatcctaggctgccgcttcacagtg

SEQ ID NO: 5876747 - DNA, 25 bp, Homo sapien
taactgaggtgtgtcatgttcatgt

SEQ ID NO: 5876748 - DNA, 25 bp, Homo sapien
caactgtgctagcccagctaagcac

SEQ ID NO: 5876749 - DNA, 25 bp, Homo sapien
cctttgggagatgtggaggacaagc

SEQ ID NO: 5876750 - DNA, 25 bp, Homo sapien
gtgttcttggcccaggctcagtctc

SEQ ID NO: 5876751 - DNA, 25 bp, Homo sapien
gtgtaagtgcatgcagtgctcacac

SEQ ID NO: 5876752 - DNA, 25 bp, Homo sapien
aggctgccgcttcacagtgtagacc

SEQ ID NO: 5876753 - DNA, 25 bp, Homo sapien
accagttctaaggtactcggcctcc

SEQ ID NO: 5876754 - DNA, 25 bp, Homo sapien
tttggttgggcacattctctattgg

SEQ ID NO: 5876755 - DNA, 25 bp, Homo sapien
agtggacagcaccccagggtggggt

SEQ ID NO: 5876756 - DNA, 25 bp, Homo sapien
aaatgcataggatgggtttaagcac

SEQ ID NO: 5876757 - DNA, 25 bp, Homo sapien
aaactgctgtggtgttcaggcggta

SEQ ID NO: 5876758 - DNA, 25 bp, Homo sapien
gaggctttcctgtcacctgagcatt

SEQ ID NO: 5876759 - DNA, 25 bp, Homo sapien
cagaaagtgttcttggcccaggctc

SEQ ID NO: 5876760 - DNA, 25 bp, Homo sapien
actcaaggcctgccaccttccgtga

SEQ ID NO: 5876761 - DNA, 25 bp, Homo sapien
taaaaacgagttcgatatatgtggc

SEQ ID NO: 5876762 - DNA, 25 bp, Homo sapien
tgggagatgtggaggacaagctggc

SEQ ID NO: 5876763 - DNA, 25 bp, Homo sapien
ggagatgtggaggacaagctggcag

SEQ ID NO: 5876764 - DNA, 25 bp, Homo sapien
ttcatgtgtgtccgtgcccccgaat

SEQ ID NO: 5876765 - DNA, 25 bp, Homo sapien
caggcggtacttgaatttagcaccg

SEQ ID NO: 5876766 - DNA, 25 bp, Homo sapien
aacaccagtggacattttccaggag

SEQ ID NO: 5876767 - DNA, 25 bp, Homo sapien
ctagtttccatctcaagcctgtgac

SEQ ID NO: 5876768 - DNA, 25 bp, Homo sapien
tccagtggacagcaccccagggtgg

SEQ ID NO: 5876769 - DNA, 25 bp, Homo sapien
ctccatgacaactgtgctagcccag

SEQ ID NO: 5876770 - DNA, 25 bp, Homo sapien
ccagaaactgctgtggtgttcaggc

SEQ ID NO: 5876771 - DNA, 25 bp, Homo sapien
ctagcccagctaagcacagtggact

SEQ ID NO: 5876772 - DNA, 25 bp, Homo sapien
tcaggtttgaagcagaaagtgttct

SEQ ID NO: 5876773 - DNA, 25 bp, Homo sapien
tctaggactagctcccaaatgatac

SEQ ID NO: 5876774 - DNA, 25 bp, Homo sapien
agctggcaggcttaactgaggtgtg

SEQ ID NO: 5876775 - DNA, 25 bp, Homo sapien
cacacaaaaggcgtggccgtacgca

SEQ ID NO: 5876776 - DNA, 25 bp, Homo sapien
ctctattggtcagaagtgtgtcagg

SEQ ID NO: 5876777 - DNA, 25 bp, Homo sapien
cctccctcttccatcctatttggtt

SEQ ID NO: 5876778 - DNA, 25 bp, Homo sapien
actgctgtggtgttcaggcggtact

SEQ ID NO: 5876779 - DNA, 25 bp, Homo sapien
ttctctattggtcagaagtgtgtca

SEQ ID NO: 5876780 - DNA, 25 bp, Homo sapien
ttgtttgttaaaaacgagttcgata

SEQ ID NO: 5876781 - DNA, 25 bp, Homo sapien
cccaggctcagtctcctttgggaga

SEQ ID NO: 5876782 - DNA, 25 bp, Homo sapien
cccgaatcctaggctgccgcttcac

SEQ ID NO: 5876783 - DNA, 25 bp, Homo sapien
cctgtcttttccccacaagcaagct

SEQ ID NO: 5876784 - DNA, 25 bp, Homo sapien
ttcttttcctaaaccacagcccaaa

SEQ ID NO: 5876785 - DNA, 25 bp, Homo sapien
tcttcctgtcttttccccacaagca

SEQ ID NO: 5876786 - DNA, 25 bp, Homo sapien
taaattgagtttgatttttattgac

SEQ ID NO: 5876787 - DNA, 25 bp, Homo sapien
tctcaagcctgtgacggacaggact

SEQ ID NO: 5876788 - DNA, 25 bp, Homo sapien
gtggctttatattttaaacaccagt

SEQ ID NO: 5876789 - DNA, 25 bp, Homo sapien
accgggggaagtgtaagtgcatgca

SEQ ID NO: 5876790 - DNA, 25 bp, Homo sapien
ttagcaccgtaatcctgtcctcccc

SEQ ID NO: 5876791 - DNA, 25 bp, Homo sapien
actgtgctagcccagctaagcacag

SEQ ID NO: 5876792 - DNA, 25 bp, Homo sapien
catctcaagcctgtgacggacagga

SEQ ID NO: 5876793 - DNA, 25 bp, Homo sapien
ggaagttaagggctgctccgcacag

SEQ ID NO: 5876794 - DNA, 25 bp, Homo sapien
gatactgtcctgccatcattctgat

SEQ ID NO: 5876795 - DNA, 25 bp, Homo sapien
aggtgtgtcatgttcatgtgtgtcc

SEQ ID NO: 5876796 - DNA, 25 bp, Homo sapien
agtttccatctcaagcctgtgacgg

SEQ ID NO: 5876797 - DNA, 25 bp, Homo sapien
gttgtgtgctctagtttccatctca

SEQ ID NO: 5876798 - DNA, 25 bp, Homo sapien
ctgtcctgccatcattctgatttga

SEQ ID NO: 5876799 - DNA, 25 bp, Homo sapien
ctctgagtacgtaagctgaccgggg

SEQ ID NO: 5876800 - DNA, 25 bp, Homo sapien
cacaaaaggcgtggccgtacgcaaa

SEQ ID NO: 5876801 - DNA, 25 bp, Homo sapien
agaccttctagaatgtccgatctag

SEQ ID NO: 5876802 - DNA, 25 bp, Homo sapien
cctgccatcattctgatttgactgt

SEQ ID NO: 5876803 - DNA, 25 bp, Homo sapien
tgtgtgtccgtgcccccgaatccta

SEQ ID NO: 5876804 - DNA, 25 bp, Homo sapien
aactgatggggccaccagaaactgc

SEQ ID NO: 5876805 - DNA, 25 bp, Homo sapien
gatctaggactagctcccaaatgat

SEQ ID NO: 5876806 - DNA, 25 bp, Homo sapien
gtgtgtcatgttcatgtgtgtccgt

SEQ ID NO: 5876807 - DNA, 25 bp, Homo sapien
gcatgcagtgctcacacaaaaggcg

SEQ ID NO: 5876808 - DNA, 25 bp, Homo sapien
ctgtggtgttcaggcggtacttgaa

SEQ ID NO: 5876809 - DNA, 25 bp, Homo sapien
aaaggcgtggccgtacgcaaatgca

SEQ ID NO: 5876810 - DNA, 25 bp, Homo sapien
tggggttcttcctgtcttttcccca

SEQ ID NO: 5876811 - DNA, 25 bp, Homo sapien
aaggcctgccaccttccgtgactga

SEQ ID NO: 5876812 - DNA, 25 bp, Homo sapien
acaagcaagctcacgtttacattgc

SEQ ID NO: 5876813 - DNA, 25 bp, Homo sapien
cagctaagcacagtggactccagtg

SEQ ID NO: 5876814 - DNA, 25 bp, Homo sapien
gttaagggctgctccgcacagggaa

SEQ ID NO: 5876815 - DNA, 25 bp, Homo sapien
ctgagtacgtaagctgaccggggga

SEQ ID NO: 5876816 - DNA, 25 bp, Homo sapien
agtgctcacacaaaaggcgtggccg

SEQ ID NO: 5876817 - DNA, 25 bp, Homo sapien
aagttaagggctgctccgcacaggg

SEQ ID NO: 5876818 - DNA, 25 bp, Homo sapien
gcaaatgcagtgttacgcccacacc

SEQ ID NO: 5876819 - DNA, 25 bp, Homo sapien
ccacagcccaaactgatggggccac

SEQ ID NO: 5876820 - DNA, 25 bp, Homo sapien
tgaccgggggaagtgtaagtgcatg

SEQ ID NO: 5876821 - DNA, 25 bp, Homo sapien
gttaaaaacgagttcgatatatgtg

SEQ ID NO: 5876822 - DNA, 25 bp, Homo sapien
gagaagggctctgagtacgtaagct

SEQ ID NO: 5876823 - DNA, 25 bp, Homo sapien
gtactcggcctccctcttccatcct

SEQ ID NO: 5876824 - DNA, 25 bp, Homo sapien
aagctcacgtttacattgccatcag

SEQ ID NO: 5876825 - DNA, 25 bp, Homo sapien
tgccatcattctgatttgactgttt

SEQ ID NO: 5876826 - DNA, 25 bp, Homo sapien
aggtttgaagcagaaagtgttcttg

SEQ ID NO: 5876827 - DNA, 25 bp, Homo sapien
gacggacaggacttttgtcaagttt

SEQ ID NO: 5876828 - DNA, 25 bp, Homo sapien
cacggagtggaagttaagggctgct

SEQ ID NO: 5876829 - DNA, 25 bp, Homo sapien
gaagtgtgtcaggtttgaagcagaa

SEQ ID NO: 5876830 - DNA, 25 bp, Homo sapien
ggcccaggctcagtctcctttggga

SEQ ID NO: 5876831 - DNA, 25 bp, Homo sapien
actagctcccaaatgatactgtcct

SEQ ID NO: 5876832 - DNA, 25 bp, Homo sapien
ctcagtctcctttgggagatgtgga

SEQ ID NO: 5876833 - DNA, 25 bp, Homo sapien
ttcacagtgtagaccttctagaatg

SEQ ID NO: 5876834 - DNA, 25 bp, Homo sapien
gctccgcacagggaactcaaggcct

SEQ ID NO: 5876835 - DNA, 25 bp, Homo sapien
gtgacggacaggacttttgtcaagt

SEQ ID NO: 5876836 - DNA, 25 bp, Homo sapien
ctttatattttaaacaccagtggac

SEQ ID NO: 5876837 - DNA, 25 bp, Homo sapien
ttcctgtcttttccccacaagcaag

SEQ ID NO: 5876838 - DNA, 25 bp, Homo sapien
ccacaccgggagctgacacggagtg

SEQ ID NO: 5876839 - DNA, 25 bp, Homo sapien
tccctcttccatcctatttggttgg

SEQ ID NO: 5876840 - DNA, 25 bp, Homo sapien
attggtcagaagtgtgtcaggtttg

SEQ ID NO: 5876841 - DNA, 25 bp, Homo sapien
acattgccatcagagaaccccgaag

SEQ ID NO: 5876842 - DNA, 25 bp, Homo sapien
cagtctcctttgggagatgtggagg

SEQ ID NO: 5876843 - DNA, 25 bp, Homo sapien
ggaccagttctaaggtactcggcct

SEQ ID NO: 5876844 - DNA, 25 bp, Homo sapien
tgttcatgtgtgtccgtgcccccga

SEQ ID NO: 5876845 - DNA, 25 bp, Homo sapien
tggacattttccaggagaagggctc

SEQ ID NO: 5876846 - DNA, 25 bp, Homo sapien
cgagttcgatatatgtggctttata

SEQ ID NO: 5876847 - DNA, 25 bp, Homo sapien
atgatactgtcctgccatcattctg

SEQ ID NO: 5876848 - DNA, 25 bp, Homo sapien
tggggccaccagaaactgctgtggt

SEQ ID NO: 5876849 - DNA, 25 bp, Homo sapien
ggcacattctctattggtcagaagt

SEQ ID NO: 5876850 - DNA, 25 bp, Homo sapien
tcacgtttacattgccatcagagaa

SEQ ID NO: 5876851 - DNA, 25 bp, Homo sapien
tgtgtcaggtttgaagcagaaagtg

SEQ ID NO: 5876852 - DNA, 25 bp, Homo sapien
acgctgtttgaagaggctttcctgt

SEQ ID NO: 5876853 - DNA, 25 bp, Homo sapien
aagtgtaagtgcatgcagtgctcac

SEQ ID NO: 5876854 - DNA, 25 bp, Homo sapien
gctcacgtttacattgccatcagag

SEQ ID NO: 5876855 - DNA, 25 bp, Homo sapien
atttagcaccgtaatcctgtcctcc

SEQ ID NO: 5876856 - DNA, 25 bp, Homo sapien
ggcttaactgaggtgtgtcatgttc

SEQ ID NO: 5876857 - DNA, 25 bp, Homo sapien
gtgtcatgttcatgtgtgtccgtgc

SEQ ID NO: 5876858 - DNA, 25 bp, Homo sapien
ttttccaggagaagggctctgagta

SEQ ID NO: 5876859 - DNA, 25 bp, Homo sapien
gggttgtgtgctctagtttccatct

SEQ ID NO: 5876860 - DNA, 25 bp, Homo sapien
gttgggcacattctctattggtcag

SEQ ID NO: 5876861 - DNA, 25 bp, Homo sapien
ttttcctaaaccacagcccaaactg

SEQ ID NO: 5876862 - DNA, 25 bp, Homo sapien
tttgaagaggctttcctgtcacctg

SEQ ID NO: 5876863 - DNA, 25 bp, Homo sapien
ccaatggtacgctgtttgaagaggc

SEQ ID NO: 5876864 - DNA, 25 bp, Homo sapien
ccggaccagttctaaggtactcggc

SEQ ID NO: 5876865 - DNA, 25 bp, Homo sapien
atgtggctttatattttaaacacca

SEQ ID NO: 5876866 - DNA, 25 bp, Homo sapien
gaaaatgaagaaagcaaatgcatag

SEQ ID NO: 5876867 - DNA, 25 bp, Homo sapien
atgcagtgttacgcccacaccggga

SEQ ID NO: 5876868 - DNA, 25 bp, Homo sapien
ccgcttcacagtgtagaccttctag

SEQ ID NO: 5876869 - DNA, 25 bp, Homo sapien
ggcctgccaccttccgtgactgatt

SEQ ID NO: 5876870 - DNA, 25 bp, Homo sapien
cgggggaagtgtaagtgcatgcagt

SEQ ID NO: 5876871 - DNA, 25 bp, Homo sapien
ccccaatggtacgctgtttgaagag

SEQ ID NO: 5876872 - DNA, 25 bp, Homo sapien
cggtacttgaatttagcaccgtaat

SEQ ID NO: 5876873 - DNA, 25 bp, Homo sapien
gctgaccgggggaagtgtaagtgca

SEQ ID NO: 5876874 - DNA, 25 bp, Homo sapien
ttttccccacaagcaagctcacgtt

SEQ ID NO: 5876875 - DNA, 25 bp, Homo sapien
aaaacgagttcgatatatgtggctt

SEQ ID NO: 5876876 - DNA, 25 bp, Homo sapien
cgcacagggaactcaaggcctgcca

SEQ ID NO: 5876877 - DNA, 25 bp, Homo sapien
agcccagctaagcacagtggactcc

SEQ ID NO: 5876878 - DNA, 25 bp, Homo sapien
tgactgaaaatgaagaaagcaaatg

SEQ ID NO: 5876879 - DNA, 25 bp, Homo sapien
gtacgcaaatgcagtgttacgccca

SEQ ID NO: 5876880 - DNA, 25 bp, Homo sapien
cgtgcccccgaatcctaggctgccg

SEQ ID NO: 5876881 - DNA, 25 bp, Homo sapien
gaatgtccgatctaggactagctcc

SEQ ID NO: 5876882 - DNA, 25 bp, Homo sapien
ttttgtcaagtttgccccaatggta

SEQ ID NO: 5876883 - DNA, 25 bp, Homo sapien
gtggtgttcaggcggtacttgaatt

SEQ ID NO: 5876884 - DNA, 25 bp, Homo sapien
aaccacagcccaaactgatggggcc

SEQ ID NO: 5876885 - DNA, 25 bp, Homo sapien
tagctcccaaatgatactgtcctgc

SEQ ID NO: 5876886 - DNA, 25 bp, Homo sapien
gacacggagtggaagttaagggctg

SEQ ID NO: 5876887 - DNA, 25 bp, Homo sapien
gtcaagtttgccccaatggtacgct

SEQ ID NO: 5876888 - DNA, 25 bp, Homo sapien
actgattgtttattggggttcttcc

SEQ ID NO: 5876889 - DNA, 25 bp, Homo sapien
actgtttgtggtgagcatcgccctc

SEQ ID NO: 5876890 - DNA, 25 bp, Homo sapien
ctgacacggagtggaagttaagggc

SEQ ID NO: 5876891 - DNA, 25 bp, Homo sapien
ggcctccctcttccatcctatttgg

SEQ ID NO: 5876892 - DNA, 25 bp, Homo sapien
ggctgctccgcacagggaactcaag

SEQ ID NO: 5876893 - DNA, 25 bp, Homo sapien
acagcccaaactgatggggccacca

SEQ ID NO: 5876894 - DNA, 25 bp, Homo sapien
ttgaatttagcaccgtaatcctgtc

SEQ ID NO: 5876895 - DNA, 25 bp, Homo sapien
ccatgacaactgtgctagcccagct

SEQ ID NO: 5876896 - DNA, 25 bp, Homo sapien
gtaagctgaccgggggaagtgtaag

SEQ ID NO: 5876897 - DNA, 25 bp, Homo sapien
tccgtgcccccgaatcctaggctgc

SEQ ID NO: 5876898 - DNA, 25 bp, Homo sapien
agggctgctccgcacagggaactca

SEQ ID NO: 5876899 - DNA, 25 bp, Homo sapien
ggacttttgtcaagtttgccccaat

SEQ ID NO: 5876900 - DNA, 25 bp, Homo sapien
cattctctattggtcagaagtgtgt

SEQ ID NO: 5876901 - DNA, 25 bp, Homo sapien
tccatctcaagcctgtgacggacag

SEQ ID NO: 5876902 - DNA, 25 bp, Homo sapien
gagaaccccgaagaggctttgtttc

SEQ ID NO: 5876903 - DNA, 25 bp, Homo sapien
tgccccaatggtacgctgtttgaag

SEQ ID NO: 5876904 - DNA, 25 bp, Homo sapien
ctctagtttccatctcaagcctgtg

SEQ ID NO: 5876905 - DNA, 25 bp, Homo sapien
attgtttattggggttcttcctgtc

SEQ ID NO: 5876906 - DNA, 25 bp, Homo sapien
gttcttggcccaggctcagtctcct

SEQ ID NO: 5876907 - DNA, 25 bp, Homo sapien
aagaggctttcctgtcacctgagca

SEQ ID NO: 5876908 - DNA, 25 bp, Homo sapien
atgacaactgtgctagcccagctaa

SEQ ID NO: 5876909 - DNA, 25 bp, Homo sapien
tgctagcccagctaagcacagtgga

SEQ ID NO: 5876910 - DNA, 25 bp, Homo sapien
taaacaccagtggacattttccagg

SEQ ID NO: 5876911 - DNA, 25 bp, Homo sapien
ctgatggggccaccagaaactgctg

SEQ ID NO: 5876912 - DNA, 25 bp, Homo sapien
atgtggaggacaagctggcaggctt

SEQ ID NO: 5876913 - DNA, 25 bp, Homo sapien
gcaaatgcataggatgggtttaagc

SEQ ID NO: 5876914 - DNA, 25 bp, Homo sapien
ggccgtacgcaaatgcagtgttacg

SEQ ID NO: 5876915 - DNA, 25 bp, Homo sapien
gtttcttttcctaaaccacagccca

SEQ ID NO: 5876916 - DNA, 25 bp, Homo sapien
atgcagtgctcacacaaaaggcgtg

SEQ ID NO: 5876917 - DNA, 25 bp, Homo sapien
agtgttacgcccacaccgggagctg

SEQ ID NO: 5876918 - DNA, 25 bp, Homo sapien
ggcaggcttaactgaggtgtgtcat

SEQ ID NO: 5876919 - DNA, 25 bp, Homo sapien
tcttttccccacaagcaagctcacg

SEQ ID NO: 5876920 - DNA, 25 bp, Homo sapien
tttattgactgaaaatgaagaaagc

SEQ ID NO: 5876921 - DNA, 25 bp, Homo sapien
cagttctaaggtactcggcctccct

SEQ ID NO: 5876922 - DNA, 25 bp, Homo sapien
acgcaaatgcagtgttacgcccaca

SEQ ID NO: 5876923 - DNA, 25 bp, Homo sapien
cgaatcctaggctgccgcttcacag

SEQ ID NO: 5876924 - DNA, 25 bp, Homo sapien
gcaagctcacgtttacattgccatc

SEQ ID NO: 5876925 - DNA, 25 bp, Homo sapien
atcagagaaccccgaagaggctttg

SEQ ID NO: 5876926 - DNA, 25 bp, Homo sapien
gagcatcgccctccatgacaactgt

SEQ ID NO: 5876927 - DNA, 25 bp, Homo sapien
ttccatcctatttggttgggcacat

SEQ ID NO: 5876928 - DNA, 25 bp, Homo sapien
ctgtgacggacaggacttttgtcaa

SEQ ID NO: 5876929 - DNA, 25 bp, Homo sapien
caggcttaactgaggtgtgtcatgt

SEQ ID NO: 5876930 - DNA, 25 bp, Homo sapien
ggctttatattttaaacaccagtgg

SEQ ID NO: 5876931 - DNA, 25 bp, Homo sapien
ccccacaagcaagctcacgtttaca

SEQ ID NO: 5876932 - DNA, 25 bp, Homo sapien
cagtggactccagtggacagcaccc

SEQ ID NO: 5876933 - DNA, 25 bp, Homo sapien
aagcaaatgcataggatgggtttaa

SEQ ID NO: 5876934 - DNA, 25 bp, Homo sapien
aagcaagctcacgtttacattgcca

SEQ ID NO: 5876935 - DNA, 25 bp, Homo sapien
agggctctgagtacgtaagctgacc

SEQ ID NO: 5876936 - DNA, 25 bp, Homo sapien
tattgactgaaaatgaagaaagcaa

SEQ ID NO: 5876937 - DNA, 25 bp, Homo sapien
agggtggggttgtgtgctctagttt

SEQ ID NO: 5876938 - DNA, 25 bp, Homo sapien
cattttccaggagaagggctctgag

SEQ ID NO: 5876939 - DNA, 25 bp, Homo sapien
tgactgattgtttattggggttctt

SEQ ID NO: 5876940 - DNA, 25 bp, Homo sapien
tgtccgtgcccccgaatcctaggct

SEQ ID NO: 5876941 - DNA, 25 bp, Homo sapien
gaaagcaaatgcataggatgggttt

SEQ ID NO: 5876942 - DNA, 25 bp, Homo sapien
ttccaggagaagggctctgagtacg

SEQ ID NO: 5876943 - DNA, 25 bp, Homo sapien
gtggccgtacgcaaatgcagtgtta

SEQ ID NO: 5876944 - DNA, 25 bp, Homo sapien
tttgactgtttgtggtgagcatcgc

SEQ ID NO: 5876945 - DNA, 25 bp, Homo sapien
caagtttgccccaatggtacgctgt

SEQ ID NO: 5876946 - DNA, 25 bp, Homo sapien
tttaaacaccagtggacattttcca

SEQ ID NO: 5876947 - DNA, 25 bp, Homo sapien
gctcccaaatgatactgtcctgcca

SEQ ID NO: 5876948 - DNA, 25 bp, Homo sapien
acttgaatttagcaccgtaatcctg

SEQ ID NO: 5876949 - DNA, 25 bp, Homo sapien
ttattggggttcttcctgtcttttc

SEQ ID NO: 5876950 - DNA, 25 bp, Homo sapien
cctgccaccttccgtgactgattgt

SEQ ID NO: 5876951 - DNA, 25 bp, Homo sapien
tttccatctcaagcctgtgacggac

SEQ ID NO: 5876952 - DNA, 25 bp, Homo sapien
gtttgttaaaaacgagttcgatata

SEQ ID NO: 5876953 - DNA, 25 bp, Homo sapien
aggcgtggccgtacgcaaatgcagt

SEQ ID NO: 5876954 - DNA, 25 bp, Homo sapien
actgaggtgtgtcatgttcatgtgt

SEQ ID NO: 5876955 - DNA, 25 bp, Homo sapien
agcagaaagtgttcttggcccaggc

SEQ ID NO: 5876956 - DNA, 25 bp, Homo sapien
ggcggtacttgaatttagcaccgta

SEQ ID NO: 5876957 - DNA, 25 bp, Homo sapien
tgccaccttccgtgactgattgttt

SEQ ID NO: 5876958 - DNA, 25 bp, Homo sapien
aatggtacgctgtttgaagaggctt

SEQ ID NO: 5876959 - DNA, 25 bp, Homo sapien
catgtgtgtccgtgcccccgaatcc

SEQ ID NO: 5876960 - DNA, 25 bp, Homo sapien
gttctaaggtactcggcctccctct

SEQ ID NO: 5876961 - DNA, 25 bp, Homo sapien
cccccgaatcctaggctgccgcttc

SEQ ID NO: 5876962 - DNA, 25 bp, Homo sapien
ccacaagcaagctcacgtttacatt

SEQ ID NO: 5876963 - DNA, 25 bp, Homo sapien
gtttgatttttattgactgaaaatg

SEQ ID NO: 5876964 - DNA, 25 bp, Homo sapien
tgattgtttattggggttcttcctg

SEQ ID NO: 5876965 - DNA, 25 bp, Homo sapien
gtccgatctaggactagctcccaaa

SEQ ID NO: 5876966 - DNA, 25 bp, Homo sapien
tcttggcccaggctcagtctccttt

SEQ ID NO: 5876967 - DNA, 25 bp, Homo sapien
agaggctttgtttcctttaggttga

SEQ ID NO: 5876968 - DNA, 25 bp, Homo sapien
aggagaagggctctgagtacgtaag

SEQ ID NO: 5876969 - DNA, 25 bp, Homo sapien
tggggttgtgtgctctagtttccat

SEQ ID NO: 5876970 - DNA, 25 bp, Homo sapien
cagggaactcaaggcctgccacctt

SEQ ID NO: 5876971 - DNA, 25 bp, Homo sapien
aaatgcagtgttacgcccacaccgg

SEQ ID NO: 5876972 - DNA, 25 bp, Homo sapien
tttgccccaatggtacgctgtttga

SEQ ID NO: 5876973 - DNA, 25 bp, Homo sapien
tgctctagtttccatctcaagcctg

SEQ ID NO: 5876974 - DNA, 25 bp, Homo sapien
tccgtgactgattgtttattggggt

SEQ ID NO: 5876975 - DNA, 25 bp, Homo sapien
cttccgtgactgattgtttattggg

SEQ ID NO: 5876976 - DNA, 25 bp, Homo sapien
ctcctttgggagatgtggaggacaa

SEQ ID NO: 5876977 - DNA, 25 bp, Homo sapien
ggtggggttgtgtgctctagtttcc

SEQ ID NO: 5876978 - DNA, 25 bp, Homo sapien
caaaaggcgtggccgtacgcaaatg

SEQ ID NO: 5876979 - DNA, 25 bp, Homo sapien
tcaagcctgtgacggacaggacttt

SEQ ID NO: 5876980 - DNA, 25 bp, Homo sapien
gtacgctgtttgaagaggctttcct

SEQ ID NO: 5876981 - DNA, 25 bp, Homo sapien
ttgaagcagaaagtgttcttggccc

SEQ ID NO: 5876982 - DNA, 25 bp, Homo sapien
ttgttaaaaacgagttcgatatatg

SEQ ID NO: 5876983 - DNA, 25 bp, Homo sapien
ttacgcccacaccgggagctgacac

SEQ ID NO: 5876984 - DNA, 25 bp, Homo sapien
gacattttccaggagaagggctctg

SEQ ID NO: 5876985 - DNA, 25 bp, Homo sapien
gaggtttcttttcctaaaccacagc

SEQ ID NO: 5876986 - DNA, 25 bp, Homo sapien
cagtgtagaccttctagaatgtccg

SEQ ID NO: 5876987 - DNA, 25 bp, Homo sapien
atatgtggctttatattttaaacac

SEQ ID NO: 5876988 - DNA, 25 bp, Homo sapien
aagcctgtgacggacaggacttttg

SEQ ID NO: 5876989 - DNA, 25 bp, Homo sapien
tgtttgtggtgagcatcgccctcca

SEQ ID NO: 5876990 - DNA, 25 bp, Homo sapien
ccccagggtggggttgtgtgctcta

SEQ ID NO: 5876991 - DNA, 25 bp, Homo sapien
ctgatttgactgtttgtggtgagca

SEQ ID NO: 5876992 - DNA, 25 bp, Homo sapien
actccagtggacagcaccccagggt

SEQ ID NO: 5876993 - DNA, 25 bp, Homo sapien
tgtcttttccccacaagcaagctca

SEQ ID NO: 5876994 - DNA, 25 bp, Homo sapien
accgggagctgacacggagtggaag

SEQ ID NO: 5876995 - DNA, 25 bp, Homo sapien
gatggggccaccagaaactgctgtg

SEQ ID NO: 5876996 - DNA, 25 bp, Homo sapien
gctgccgcttcacagtgtagacctt

SEQ ID NO: 5876997 - DNA, 25 bp, Homo sapien
gcataggatgggtttaagcactttt

SEQ ID NO: 5876998 - DNA, 25 bp, Homo sapien
tgctcacacaaaaggcgtggccgta

SEQ ID NO: 5876999 - DNA, 25 bp, Homo sapien
ggactagctcccaaatgatactgtc

SEQ ID NO: 5877000 - DNA, 25 bp, Homo sapien
ttggcccaggctcagtctcctttgg

SEQ ID NO: 5877001 - DNA, 25 bp, Homo sapien
cctcttccatcctatttggttgggc

SEQ ID NO: 5877002 - DNA, 25 bp, Homo sapien
taaaccacagcccaaactgatgggg

SEQ ID NO: 5877003 - DNA, 25 bp, Homo sapien
gaagggctctgagtacgtaagctga

SEQ ID NO: 5877004 - DNA, 25 bp, Homo sapien
tttgggagatgtggaggacaagctg

SEQ ID NO: 5877005 - DNA, 25 bp, Homo sapien
ttgtttcctttaggttgaaagaaga

SEQ ID NO: 5877006 - DNA, 25 bp, Homo sapien
ccagtggacattttccaggagaagg

SEQ ID NO: 5877007 - DNA, 25 bp, Homo sapien
gccaccagaaactgctgtggtgttc

SEQ ID NO: 5877008 - DNA, 25 bp, Homo sapien
aagtgttcttggcccaggctcagtc

SEQ ID NO: 5877009 - DNA, 25 bp, Homo sapien
acgtttacattgccatcagagaacc

SEQ ID NO: 5877010 - DNA, 25 bp, Homo sapien
caccagaaactgctgtggtgttcag

SEQ ID NO: 5877011 - DNA, 25 bp, Homo sapien
tgactgtttgtggtgagcatcgccc

SEQ ID NO: 5877012 - DNA, 25 bp, Homo sapien
tggtcagaagtgtgtcaggtttgaa

SEQ ID NO: 5877013 - DNA, 25 bp, Homo sapien
gggaactcaaggcctgccaccttcc

SEQ ID NO: 5877014 - DNA, 25 bp, Homo sapien
cgccctccatgacaactgtgctagc

SEQ ID NO: 5877015 - DNA, 25 bp, Homo sapien
gggttcttcctgtcttttccccaca

SEQ ID NO: 5877016 - DNA, 25 bp, Homo sapien
caggacttttgtcaagtttgcccca

SEQ ID NO: 5877017 - DNA, 25 bp, Homo sapien
tgaaagaagaaaacggttaacgtga

SEQ ID NO: 5877018 - DNA, 25 bp, Homo sapien
ccgtacgcaaatgcagtgttacgcc

SEQ ID NO: 5877019 - DNA, 25 bp, Homo sapien
tgcccccgaatcctaggctgccgct

SEQ ID NO: 5877020 - DNA, 25 bp, Homo sapien
gtggactccagtggacagcacccca

SEQ ID NO: 5877021 - DNA, 25 bp, Homo sapien
tactgtcctgccatcattctgattt

SEQ ID NO: 5877022 - DNA, 25 bp, Homo sapien
gaaagcctcttcaaacagcgtacca

SEQ ID NO: 5877023 - DNA, 25 bp, Homo sapien
gggccaagaacactttctgcttcaa

SEQ ID NO: 5877024 - DNA, 25 bp, Homo sapien
gaccaatagagaatgtgcccaacca

SEQ ID NO: 5877025 - DNA, 25 bp, Homo sapien
tgagttccctgtgcggagcagccct

SEQ ID NO: 5877026 - DNA, 25 bp, Homo sapien
gctttcttcattttcagtcaataaa

SEQ ID NO: 5877027 - DNA, 25 bp, Homo sapien
gggctagcacagttgtcatggaggg

SEQ ID NO: 5877028 - DNA, 25 bp, Homo sapien
cagcttgtcctccacatctcccaaa

SEQ ID NO: 5877029 - DNA, 25 bp, Homo sapien
ccgtcacaggcttgagatggaaact

SEQ ID NO: 5877030 - DNA, 25 bp, Homo sapien
agtccactgtgcttagctgggctag

SEQ ID NO: 5877031 - DNA, 25 bp, Homo sapien
catttgggagctagtcctagatcgg

SEQ ID NO: 5877032 - DNA, 25 bp, Homo sapien
tacggccacgccttttgtgtgagca

SEQ ID NO: 5877033 - DNA, 25 bp, Homo sapien
caggtgacaggaaagcctcttcaaa

SEQ ID NO: 5877034 - DNA, 25 bp, Homo sapien
tcaacctaaaggaaacaaagcctct

SEQ ID NO: 5877035 - DNA, 25 bp, Homo sapien
atgacacacctcagttaagcctgcc

SEQ ID NO: 5877036 - DNA, 25 bp, Homo sapien
acagttgtcatggagggcgatgctc

SEQ ID NO: 5877037 - DNA, 25 bp, Homo sapien
aatcagtcacggaaggtggcaggcc

SEQ ID NO: 5877038 - DNA, 25 bp, Homo sapien
actagagcacacaaccccaccctgg

SEQ ID NO: 5877039 - DNA, 25 bp, Homo sapien
cactggagtccactgtgcttagctg

SEQ ID NO: 5877040 - DNA, 25 bp, Homo sapien
cacagcagtttctggtggccccatc

SEQ ID NO: 5877041 - DNA, 25 bp, Homo sapien
tctcccaaaggagactgagcctggg

SEQ ID NO: 5877042 - DNA, 25 bp, Homo sapien
aaacccatcctatgcatttgctttc

SEQ ID NO: 5877043 - DNA, 25 bp, Homo sapien
atcagtttgggctgtggtttaggaa

SEQ ID NO: 5877044 - DNA, 25 bp, Homo sapien
actggtgtttaaaatataaagccac

SEQ ID NO: 5877045 - DNA, 25 bp, Homo sapien
cacgccttttgtgtgagcactgcat

SEQ ID NO: 5877046 - DNA, 25 bp, Homo sapien
aaggtctacactgtgaagcggcagc

SEQ ID NO: 5877047 - DNA, 25 bp, Homo sapien
gtgcttaaacccatcctatgcattt

SEQ ID NO: 5877048 - DNA, 25 bp, Homo sapien
gcccaaccaaataggatggaagagg

SEQ ID NO: 5877049 - DNA, 25 bp, Homo sapien
gagggcgatgctcaccacaaacagt

SEQ ID NO: 5877050 - DNA, 25 bp, Homo sapien
tgcttgtggggaaaagacaggaaga

SEQ ID NO: 5877051 - DNA, 25 bp, Homo sapien
ggaaactagagcacacaaccccacc

SEQ ID NO: 5877052 - DNA, 25 bp, Homo sapien
aacactttctgcttcaaacctgaca

SEQ ID NO: 5877053 - DNA, 25 bp, Homo sapien
gcaaacttgacaaaagtcctgtccg

SEQ ID NO: 5877054 - DNA, 25 bp, Homo sapien
ggtggcaggccttgagttccctgtg

SEQ ID NO: 5877055 - DNA, 25 bp, Homo sapien
ccattggggcaaacttgacaaaagt

SEQ ID NO: 5877056 - DNA, 25 bp, Homo sapien
ctttctgcttcaaacctgacacact

SEQ ID NO: 5877057 - DNA, 25 bp, Homo sapien
acaggaaagcctcttcaaacagcgt

SEQ ID NO: 5877058 - DNA, 25 bp, Homo sapien
tacacttcccccggtcagcttacgt

SEQ ID NO: 5877059 - DNA, 25 bp, Homo sapien
gcctgaacaccacagcagtttctgg

SEQ ID NO: 5877060 - DNA, 25 bp, Homo sapien
ctggagtccactgtgcttagctggg

SEQ ID NO: 5877061 - DNA, 25 bp, Homo sapien
tccactgtgcttagctgggctagca

SEQ ID NO: 5877062 - DNA, 25 bp, Homo sapien
agggaggccgagtaccttagaactg

SEQ ID NO: 5877063 - DNA, 25 bp, Homo sapien
tcccccggtcagcttacgtactcag

SEQ ID NO: 5877064 - DNA, 25 bp, Homo sapien
agcgtaccattggggcaaacttgac

SEQ ID NO: 5877065 - DNA, 25 bp, Homo sapien
ccggtgtgggcgtaacactgcattt

SEQ ID NO: 5877066 - DNA, 25 bp, Homo sapien
gctgtccactggagtccactgtgct

SEQ ID NO: 5877067 - DNA, 25 bp, Homo sapien
gacacacctcagttaagcctgccag

SEQ ID NO: 5877068 - DNA, 25 bp, Homo sapien
gtcacaggcttgagatggaaactag

SEQ ID NO: 5877069 - DNA, 25 bp, Homo sapien
ccactggtgtttaaaatataaagcc

SEQ ID NO: 5877070 - DNA, 25 bp, Homo sapien
ctgggctagcacagttgtcatggag

SEQ ID NO: 5877071 - DNA, 25 bp, Homo sapien
tccacatctcccaaaggagactgag

SEQ ID NO: 5877072 - DNA, 25 bp, Homo sapien
cttacgtactcagagcccttctcct

SEQ ID NO: 5877073 - DNA, 25 bp, Homo sapien
gcactgcatgcacttacacttcccc

SEQ ID NO: 5877074 - DNA, 25 bp, Homo sapien
actgcatttgcgtacggccacgcct

SEQ ID NO: 5877075 - DNA, 25 bp, Homo sapien
ccacaaacagtcaaatcagaatgat

SEQ ID NO: 5877076 - DNA, 25 bp, Homo sapien
acttctgaccaatagagaatgtgcc

SEQ ID NO: 5877077 - DNA, 25 bp, Homo sapien
acacacttctgaccaatagagaatg

SEQ ID NO: 5877078 - DNA, 25 bp, Homo sapien
tacggtgctaaattcaagtaccgcc

SEQ ID NO: 5877079 - DNA, 25 bp, Homo sapien
cactgtgcttagctgggctagcaca

SEQ ID NO: 5877080 - DNA, 25 bp, Homo sapien
cagctcccggtgtgggcgtaacact

SEQ ID NO: 5877081 - DNA, 25 bp, Homo sapien
tgcacttacacttcccccggtcagc

SEQ ID NO: 5877082 - DNA, 25 bp, Homo sapien
taaagccacatatatcgaactcgtt

SEQ ID NO: 5877083 - DNA, 25 bp, Homo sapien
gaagcggcagcctaggattcggggg

SEQ ID NO: 5877084 - DNA, 25 bp, Homo sapien
gcacagttgtcatggagggcgatgc

SEQ ID NO: 5877085 - DNA, 25 bp, Homo sapien
taaacgtgagcttgcttgtggggaa

SEQ ID NO: 5877086 - DNA, 25 bp, Homo sapien
tggtggccccatcagtttgggctgt

SEQ ID NO: 5877087 - DNA, 25 bp, Homo sapien
ggcttgagatggaaactagagcaca

SEQ ID NO: 5877088 - DNA, 25 bp, Homo sapien
tggcaggacagtatcatttgggagc

SEQ ID NO: 5877089 - DNA, 25 bp, Homo sapien
gtgtttaaaatataaagccacatat

SEQ ID NO: 5877090 - DNA, 25 bp, Homo sapien
ctccgtgtcagctcccggtgtgggc

SEQ ID NO: 5877091 - DNA, 25 bp, Homo sapien
tggcaatgtaaacgtgagcttgctt

SEQ ID NO: 5877092 - DNA, 25 bp, Homo sapien
ccaaaggagactgagcctgggccaa

SEQ ID NO: 5877093 - DNA, 25 bp, Homo sapien
tgtaaacgtgagcttgcttgtgggg

SEQ ID NO: 5877094 - DNA, 25 bp, Homo sapien
gcttaaacccatcctatgcatttgc

SEQ ID NO: 5877095 - DNA, 25 bp, Homo sapien
caggaagaaccccaataaacaatca

SEQ ID NO: 5877096 - DNA, 25 bp, Homo sapien
gagcactgcatgcacttacacttcc

SEQ ID NO: 5877097 - DNA, 25 bp, Homo sapien
catatatcgaactcgtttttaacaa

SEQ ID NO: 5877098 - DNA, 25 bp, Homo sapien
ggtgtgggcgtaacactgcatttgc

SEQ ID NO: 5877099 - DNA, 25 bp, Homo sapien
gtgcggagcagcccttaacttccac

SEQ ID NO: 5877100 - DNA, 25 bp, Homo sapien
caccacaaacagtcaaatcagaatg

SEQ ID NO: 5877101 - DNA, 25 bp, Homo sapien
tgggagctagtcctagatcggacat

SEQ ID NO: 5877102 - DNA, 25 bp, Homo sapien
ggcgtaacactgcatttgcgtacgg

SEQ ID NO: 5877103 - DNA, 25 bp, Homo sapien
ggattacggtgctaaattcaagtac

SEQ ID NO: 5877104 - DNA, 25 bp, Homo sapien
agcctaggattcgggggcacggaca

SEQ ID NO: 5877105 - DNA, 25 bp, Homo sapien
ccaatagagaatgtgcccaaccaaa

SEQ ID NO: 5877106 - DNA, 25 bp, Homo sapien
taccattggggcaaacttgacaaaa

SEQ ID NO: 5877107 - DNA, 25 bp, Homo sapien
gaaccccaataaacaatcagtcacg

SEQ ID NO: 5877108 - DNA, 25 bp, Homo sapien
agtcacggaaggtggcaggccttga

SEQ ID NO: 5877109 - DNA, 25 bp, Homo sapien
ttctagaaggtctacactgtgaagc

SEQ ID NO: 5877110 - DNA, 25 bp, Homo sapien
gggcaaacttgacaaaagtcctgtc

SEQ ID NO: 5877111 - DNA, 25 bp, Homo sapien
gtgctgtccactggagtccactgtg

SEQ ID NO: 5877112 - DNA, 25 bp, Homo sapien
agaaggtctacactgtgaagcggca

SEQ ID NO: 5877113 - DNA, 25 bp, Homo sapien
cctccacatctcccaaaggagactg

SEQ ID NO: 5877114 - DNA, 25 bp, Homo sapien
aggccttgagttccctgtgcggagc

SEQ ID NO: 5877115 - DNA, 25 bp, Homo sapien
ttttgtgtgagcactgcatgcactt

SEQ ID NO: 5877116 - DNA, 25 bp, Homo sapien
agcagcccttaacttccactccgtg

SEQ ID NO: 5877117 - DNA, 25 bp, Homo sapien
cggtgctaaattcaagtaccgcctg

SEQ ID NO: 5877118 - DNA, 25 bp, Homo sapien
gtgcccaaccaaataggatggaaga

SEQ ID NO: 5877119 - DNA, 25 bp, Homo sapien
tcccggtgtgggcgtaacactgcat

SEQ ID NO: 5877120 - DNA, 25 bp, Homo sapien
cctggggtgctgtccactggagtcc

SEQ ID NO: 5877121 - DNA, 25 bp, Homo sapien
taccgcctgaacaccacagcagttt

SEQ ID NO: 5877122 - DNA, 25 bp, Homo sapien
cattctagaaggtctacactgtgaa

SEQ ID NO: 5877123 - DNA, 25 bp, Homo sapien
gcgatgctcaccacaaacagtcaaa

SEQ ID NO: 5877124 - DNA, 25 bp, Homo sapien
gccaagaacactttctgcttcaaac

SEQ ID NO: 5877125 - DNA, 25 bp, Homo sapien
catgcacttacacttcccccggtca

SEQ ID NO: 5877126 - DNA, 25 bp, Homo sapien
agagggaggccgagtaccttagaac

SEQ ID NO: 5877127 - DNA, 25 bp, Homo sapien
gacagtatcatttgggagctagtcc

SEQ ID NO: 5877128 - DNA, 25 bp, Homo sapien
gcccttctcctggaaaatgtccact

SEQ ID NO: 5877129 - DNA, 25 bp, Homo sapien
ccttaacttccactccgtgtcagct

SEQ ID NO: 5877130 - DNA, 25 bp, Homo sapien
aaaggagactgagcctgggccaaga

SEQ ID NO: 5877131 - DNA, 25 bp, Homo sapien
ccttctcctggaaaatgtccactgg

SEQ ID NO: 5877132 - DNA, 25 bp, Homo sapien
cgccttttgtgtgagcactgcatgc

SEQ ID NO: 5877133 - DNA, 25 bp, Homo sapien
tgacacacttctgaccaatagagaa

SEQ ID NO: 5877134 - DNA, 25 bp, Homo sapien
aagtgcttaaacccatcctatgcat

SEQ ID NO: 5877135 - DNA, 25 bp, Homo sapien
gtgagcactgcatgcacttacactt

SEQ ID NO: 5877136 - DNA, 25 bp, Homo sapien
tcctgtccgtcacaggcttgagatg

SEQ ID NO: 5877137 - DNA, 25 bp, Homo sapien
gcaggccttgagttccctgtgcgga

SEQ ID NO: 5877138 - DNA, 25 bp, Homo sapien
ccctgtgcggagcagcccttaactt

SEQ ID NO: 5877139 - DNA, 25 bp, Homo sapien
ccggtcagcttacgtactcagagcc

SEQ ID NO: 5877140 - DNA, 25 bp, Homo sapien
aagcctcttcaaacagcgtaccatt

SEQ ID NO: 5877141 - DNA, 25 bp, Homo sapien
gatgctcaccacaaacagtcaaatc

SEQ ID NO: 5877142 - DNA, 25 bp, Homo sapien
tcagtcacggaaggtggcaggcctt

SEQ ID NO: 5877143 - DNA, 25 bp, Homo sapien
acttgacaaaagtcctgtccgtcac

SEQ ID NO: 5877144 - DNA, 25 bp, Homo sapien
cgtgagcttgcttgtggggaaaaga

SEQ ID NO: 5877145 - DNA, 25 bp, Homo sapien
tcttctttcaacctaaaggaaacaa

SEQ ID NO: 5877146 - DNA, 25 bp, Homo sapien
ttgacaaaagtcctgtccgtcacag

SEQ ID NO: 5877147 - DNA, 25 bp, Homo sapien
ctcaccacaaacagtcaaatcagaa

SEQ ID NO: 5877148 - DNA, 25 bp, Homo sapien
gtggccccatcagtttgggctgtgg

SEQ ID NO: 5877149 - DNA, 25 bp, Homo sapien
gcccttaacttccactccgtgtcag

SEQ ID NO: 5877150 - DNA, 25 bp, Homo sapien
aacgtgagcttgcttgtggggaaaa

SEQ ID NO: 5877151 - DNA, 25 bp, Homo sapien
tatcgaactcgtttttaacaaacaa

SEQ ID NO: 5877152 - DNA, 25 bp, Homo sapien
tgtgggcgtaacactgcatttgcgt

SEQ ID NO: 5877153 - DNA, 25 bp, Homo sapien
gacattctagaaggtctacactgtg

SEQ ID NO: 5877154 - DNA, 25 bp, Homo sapien
gggtgctgtccactggagtccactg

SEQ ID NO: 5877155 - DNA, 25 bp, Homo sapien
gtgaagcggcagcctaggattcggg

SEQ ID NO: 5877156 - DNA, 25 bp, Homo sapien
ctagatcggacattctagaaggtct

SEQ ID NO: 5877157 - DNA, 25 bp, Homo sapien
gtcagctcccggtgtgggcgtaaca

SEQ ID NO: 5877158 - DNA, 25 bp, Homo sapien
accctggggtgctgtccactggagt

SEQ ID NO: 5877159 - DNA, 25 bp, Homo sapien
gcaatgtaaacgtgagcttgcttgt

SEQ ID NO: 5877160 - DNA, 25 bp, Homo sapien
tggcaggccttgagttccctgtgcg

SEQ ID NO: 5877161 - DNA, 25 bp, Homo sapien
tgctcaggtgacaggaaagcctctt

SEQ ID NO: 5877162 - DNA, 25 bp, Homo sapien
tgcatttgcgtacggccacgccttt

SEQ ID NO: 5877163 - DNA, 25 bp, Homo sapien
gtgcttagctgggctagcacagttg

SEQ ID NO: 5877164 - DNA, 25 bp, Homo sapien
gtttaaaatataaagccacatatat

SEQ ID NO: 5877165 - DNA, 25 bp, Homo sapien
tggggtgctgtccactggagtccac

SEQ ID NO: 5877166 - DNA, 25 bp, Homo sapien
aaatcagaatgatggcaggacagta

SEQ ID NO: 5877167 - DNA, 25 bp, Homo sapien
aaacagcgtaccattggggcaaact

SEQ ID NO: 5877168 - DNA, 25 bp, Homo sapien
gacaaaagtcctgtccgtcacaggc

SEQ ID NO: 5877169 - DNA, 25 bp, Homo sapien
gtcctccacatctcccaaaggagac

SEQ ID NO: 5877170 - DNA, 25 bp, Homo sapien
ctgtccgtcacaggcttgagatgga

SEQ ID NO: 5877171 - DNA, 25 bp, Homo sapien
ggagctagtcctagatcggacattc

SEQ ID NO: 5877172 - DNA, 25 bp, Homo sapien
ttctctgatggcaatgtaaacgtga

SEQ ID NO: 5877173 - DNA, 25 bp, Homo sapien
tgggcgtaacactgcatttgcgtac

SEQ ID NO: 5877174 - DNA, 25 bp, Homo sapien
ggagcagcccttaacttccactccg

SEQ ID NO: 5877175 - DNA, 25 bp, Homo sapien
tcggggttctctgatggcaatgtaa

SEQ ID NO: 5877176 - DNA, 25 bp, Homo sapien
caaagcctcttcggggttctctgat

SEQ ID NO: 5877177 - DNA, 25 bp, Homo sapien
catttgctttcttcattttcagtca

SEQ ID NO: 5877178 - DNA, 25 bp, Homo sapien
attacggtgctaaattcaagtaccg

SEQ ID NO: 5877179 - DNA, 25 bp, Homo sapien
gcagcctaggattcgggggcacgga

SEQ ID NO: 5877180 - DNA, 25 bp, Homo sapien
gctgtggtttaggaaaagaaacctc

SEQ ID NO: 5877181 - DNA, 25 bp, Homo sapien
acacacatgaacatgacacacctca

SEQ ID NO: 5877182 - DNA, 25 bp, Homo sapien
atgaacatgacacacctcagttaag

SEQ ID NO: 5877183 - DNA, 25 bp, Homo sapien
tcaaatcagaatgatggcaggacag

SEQ ID NO: 5877184 - DNA, 25 bp, Homo sapien
ttgctttcttcattttcagtcaata

SEQ ID NO: 5877185 - DNA, 25 bp, Homo sapien
aagccacatatatcgaactcgtttt

SEQ ID NO: 5877186 - DNA, 25 bp, Homo sapien
tttgggagctagtcctagatcggac

SEQ ID NO: 5877187 - DNA, 25 bp, Homo sapien
tgacaggaaagcctcttcaaacagc

SEQ ID NO: 5877188 - DNA, 25 bp, Homo sapien
catggagggcgatgctcaccacaaa

SEQ ID NO: 5877189 - DNA, 25 bp, Homo sapien
cggacattctagaaggtctacactg

SEQ ID NO: 5877190 - DNA, 25 bp, Homo sapien
aggacagtatcatttgggagctagt

SEQ ID NO: 5877191 - DNA, 25 bp, Homo sapien
tttctggtggccccatcagtttggg

SEQ ID NO: 5877192 - DNA, 25 bp, Homo sapien
tgcgtacggccacgccttttgtgtg

SEQ ID NO: 5877193 - DNA, 25 bp, Homo sapien
acggaaggtggcaggccttgagttc

SEQ ID NO: 5877194 - DNA, 25 bp, Homo sapien
cgtaacactgcatttgcgtacggcc

SEQ ID NO: 5877195 - DNA, 25 bp, Homo sapien
agtttctggtggccccatcagtttg

SEQ ID NO: 5877196 - DNA, 25 bp, Homo sapien
aatagagaatgtgcccaaccaaata

SEQ ID NO: 5877197 - DNA, 25 bp, Homo sapien
gcctcttcaaacagcgtaccattgg

SEQ ID NO: 5877198 - DNA, 25 bp, Homo sapien
gaacatgacacacctcagttaagcc

SEQ ID NO: 5877199 - DNA, 25 bp, Homo sapien
ggacacacatgaacatgacacacct

SEQ ID NO: 5877200 - DNA, 25 bp, Homo sapien
gcttcaaacctgacacacttctgac

SEQ ID NO: 5877201 - DNA, 25 bp, Homo sapien
acatgaacatgacacacctcagtta

SEQ ID NO: 5877202 - DNA, 25 bp, Homo sapien
atcctatgcatttgctttcttcatt

SEQ ID NO: 5877203 - DNA, 25 bp, Homo sapien
tgcatgcacttacacttcccccggt

SEQ ID NO: 5877204 - DNA, 25 bp, Homo sapien
gcagtttctggtggccccatcagtt

SEQ ID NO: 5877205 - DNA, 25 bp, Homo sapien
tcaaacagcgtaccattggggcaaa

SEQ ID NO: 5877206 - DNA, 25 bp, Homo sapien
ctgcttcaaacctgacacacttctg

SEQ ID NO: 5877207 - DNA, 25 bp, Homo sapien
acggacacacatgaacatgacacac

SEQ ID NO: 5877208 - DNA, 25 bp, Homo sapien
taaattcaagtaccgcctgaacacc

SEQ ID NO: 5877209 - DNA, 25 bp, Homo sapien
gacaggattacggtgctaaattcaa

SEQ ID NO: 5877210 - DNA, 25 bp, Homo sapien
agaacactttctgcttcaaacctga

SEQ ID NO: 5877211 - DNA, 25 bp, Homo sapien
acagcgtaccattggggcaaacttg

SEQ ID NO: 5877212 - DNA, 25 bp, Homo sapien
ccttttgtgtgagcactgcatgcac

SEQ ID NO: 5877213 - DNA, 25 bp, Homo sapien
tgcatttgctttcttcattttcagt

SEQ ID NO: 5877214 - DNA, 25 bp, Homo sapien
acagtcaaatcagaatgatggcagg

SEQ ID NO: 5877215 - DNA, 25 bp, Homo sapien
atcagaatgatggcaggacagtatc

SEQ ID NO: 5877216 - DNA, 25 bp, Homo sapien
ccaaccaaataggatggaagaggga

SEQ ID NO: 5877217 - DNA, 25 bp, Homo sapien
gatggcaggacagtatcatttggga

SEQ ID NO: 5877218 - DNA, 25 bp, Homo sapien
acatgacacacctcagttaagcctg

SEQ ID NO: 5877219 - DNA, 25 bp, Homo sapien
ctcaggtgacaggaaagcctcttca

SEQ ID NO: 5877220 - DNA, 25 bp, Homo sapien
ggtgacaggaaagcctcttcaaaca

SEQ ID NO: 5877221 - DNA, 25 bp, Homo sapien
gaaaagacaggaagaaccccaataa

SEQ ID NO: 5877222 - DNA, 25 bp, Homo sapien
cacacctcagttaagcctgccagct

SEQ ID NO: 5877223 - DNA, 25 bp, Homo sapien
aatataaagccacatatatcgaact

SEQ ID NO: 5877224 - DNA, 25 bp, Homo sapien
agtaccgcctgaacaccacagcagt

SEQ ID NO: 5877225 - DNA, 25 bp, Homo sapien
cctaggattcgggggcacggacaca

SEQ ID NO: 5877226 - DNA, 25 bp, Homo sapien
ggtctacactgtgaagcggcagcct

SEQ ID NO: 5877227 - DNA, 25 bp, Homo sapien
atggaaactagagcacacaacccca

SEQ ID NO: 5877228 - DNA, 25 bp, Homo sapien
ttcagtcaataaaaatcaaactcaa

SEQ ID NO: 5877229 - DNA, 25 bp, Homo sapien
ggttctctgatggcaatgtaaacgt

SEQ ID NO: 5877230 - DNA, 25 bp, Homo sapien
ggccccatcagtttgggctgtggtt

SEQ ID NO: 5877231 - DNA, 25 bp, Homo sapien
tgggctgtggtttaggaaaagaaac

SEQ ID NO: 5877232 - DNA, 25 bp, Homo sapien
attggggcaaacttgacaaaagtcc

SEQ ID NO: 5877233 - DNA, 25 bp, Homo sapien
tagagaatgtgcccaaccaaatagg

SEQ ID NO: 5877234 - DNA, 25 bp, Homo sapien
cttcggggttctctgatggcaatgt

SEQ ID NO: 5877235 - DNA, 25 bp, Homo sapien
agcttgcttgtggggaaaagacagg

SEQ ID NO: 5877236 - DNA, 25 bp, Homo sapien
tgtccactggagtccactgtgctta

SEQ ID NO: 5877237 - DNA, 25 bp, Homo sapien
tcagcttacgtactcagagcccttc

SEQ ID NO: 5877238 - DNA, 25 bp, Homo sapien
cttgagatggaaactagagcacaca

SEQ ID NO: 5877239 - DNA, 25 bp, Homo sapien
acactgcatttgcgtacggccacgc

SEQ ID NO: 5877240 - DNA, 25 bp, Homo sapien
gccttgagttccctgtgcggagcag

SEQ ID NO: 5877241 - DNA, 25 bp, Homo sapien
gaatgtgcccaaccaaataggatgg

SEQ ID NO: 5877242 - DNA, 25 bp, Homo sapien
ggaggacaggattacggtgctaaat

SEQ ID NO: 5877243 - DNA, 25 bp, Homo sapien
ctcctggaaaatgtccactggtgtt

SEQ ID NO: 5877244 - DNA, 25 bp, Homo sapien
tcctagatcggacattctagaaggt

SEQ ID NO: 5877245 - DNA, 25 bp, Homo sapien
aaagtcctgtccgtcacaggcttga

SEQ ID NO: 5877246 - DNA, 25 bp, Homo sapien
tcgggggcacggacacacatgaaca

SEQ ID NO: 5877247 - DNA, 25 bp, Homo sapien
tggggcaaacttgacaaaagtcctg

SEQ ID NO: 5877248 - DNA, 25 bp, Homo sapien
gagactgagcctgggccaagaacac

SEQ ID NO: 5877249 - DNA, 25 bp, Homo sapien
ctagtcctagatcggacattctaga

SEQ ID NO: 5877250 - DNA, 25 bp, Homo sapien
ttttcagtcaataaaaatcaaactc

SEQ ID NO: 5877251 - DNA, 25 bp, Homo sapien
cgtaccattggggcaaacttgacaa

SEQ ID NO: 5877252 - DNA, 25 bp, Homo sapien
agtcctagatcggacattctagaag

SEQ ID NO: 5877253 - DNA, 25 bp, Homo sapien
cttccactccgtgtcagctcccggt

SEQ ID NO: 5877254 - DNA, 25 bp, Homo sapien
gtatcatttgggagctagtcctaga

SEQ ID NO: 5877255 - DNA, 25 bp, Homo sapien
aagcctgccagcttgtcctccacat

SEQ ID NO: 5877256 - DNA, 25 bp, Homo sapien
gcacggacacacatgaacatgacac

SEQ ID NO: 5877257 - DNA, 25 bp, Homo sapien
atcggacattctagaaggtctacac

SEQ ID NO: 5877258 - DNA, 25 bp, Homo sapien
gacaggaagaaccccaataaacaat

SEQ ID NO: 5877259 - DNA, 25 bp, Homo sapien
gccagcttgtcctccacatctccca

SEQ ID NO: 5877260 - DNA, 25 bp, Homo sapien
gctaaattcaagtaccgcctgaaca

SEQ ID NO: 5877261 - DNA, 25 bp, Homo sapien
ttccctgtgcggagcagcccttaac

SEQ ID NO: 5877262 - DNA, 25 bp, Homo sapien
agttccctgtgcggagcagccctta

SEQ ID NO: 5877263 - DNA, 25 bp, Homo sapien
cagcccttaacttccactccgtgtc

SEQ ID NO: 5877264 - DNA, 25 bp, Homo sapien
acaaacagtcaaatcagaatgatgg

SEQ ID NO: 5877265 - DNA, 25 bp, Homo sapien
caaacctgacacacttctgaccaat

SEQ ID NO: 5877266 - DNA, 25 bp, Homo sapien
cagtcaataaaaatcaaactcaatt

SEQ ID NO: 5877267 - DNA, 25 bp, Homo sapien
gtgtgagcactgcatgcacttacac

SEQ ID NO: 5877268 - DNA, 25 bp, Homo sapien
gggggcacggacacacatgaacatg

SEQ ID NO: 5877269 - DNA, 25 bp, Homo sapien
agttaagcctgccagcttgtcctcc

SEQ ID NO: 5877270 - DNA, 25 bp, Homo sapien
ggaggccgagtaccttagaactggt

SEQ ID NO: 5877271 - DNA, 25 bp, Homo sapien
ctgccagcttgtcctccacatctcc

SEQ ID NO: 5877272 - DNA, 25 bp, Homo sapien
cttacacttcccccggtcagcttac

SEQ ID NO: 5877273 - DNA, 25 bp, Homo sapien
tccactccgtgtcagctcccggtgt

SEQ ID NO: 5877274 - DNA, 25 bp, Homo sapien
atgtgcccaaccaaataggatggaa

SEQ ID NO: 5877275 - DNA, 25 bp, Homo sapien
accccaataaacaatcagtcacgga

SEQ ID NO: 5877276 - DNA, 25 bp, Homo sapien
tagcacagttgtcatggagggcgat

SEQ ID NO: 5877277 - DNA, 25 bp, Homo sapien
gtccgtcacaggcttgagatggaaa

SEQ ID NO: 5877278 - DNA, 25 bp, Homo sapien
ctgaccaatagagaatgtgcccaac

SEQ ID NO: 5877279 - DNA, 25 bp, Homo sapien
ttcaagtaccgcctgaacaccacag

SEQ ID NO: 5877280 - DNA, 25 bp, Homo sapien
aagaaccccaataaacaatcagtca

SEQ ID NO: 5877281 - DNA, 25 bp, Homo sapien
aacttccactccgtgtcagctcccg

SEQ ID NO: 5877282 - DNA, 25 bp, Homo sapien
gccacgccttttgtgtgagcactgc

SEQ ID NO: 5877283 - DNA, 25 bp, Homo sapien
ggaaggtggcaggccttgagttccc

SEQ ID NO: 5877284 - DNA, 25 bp, Homo sapien
ctgagcctgggccaagaacactttc

SEQ ID NO: 5877285 - DNA, 25 bp, Homo sapien
ctagaaggtctacactgtgaagcgg

SEQ ID NO: 5877286 - DNA, 25 bp, Homo sapien
aaataggatggaagagggaggccga

SEQ ID NO: 5877287 - DNA, 25 bp, Homo sapien
gggcacggacacacatgaacatgac

SEQ ID NO: 5877288 - DNA, 25 bp, Homo sapien
gcttgtcctccacatctcccaaagg

SEQ ID NO: 5877289 - DNA, 25 bp, Homo sapien
cctgacacacttctgaccaatagag

SEQ ID NO: 5877290 - DNA, 25 bp, Homo sapien
atgtccactggtgtttaaaatataa

SEQ ID NO: 5877291 - DNA, 25 bp, Homo sapien
gtccactggtgtttaaaatataaag

SEQ ID NO: 5877292 - DNA, 25 bp, Homo sapien
gctcccggtgtgggcgtaacactgc

SEQ ID NO: 5877293 - DNA, 25 bp, Homo sapien
cttgagttccctgtgcggagcagcc

SEQ ID NO: 5877294 - DNA, 25 bp, Homo sapien
tggggaaaagacaggaagaacccca

SEQ ID NO: 5877295 - DNA, 25 bp, Homo sapien
gcggagcagcccttaacttccactc

SEQ ID NO: 5877296 - DNA, 25 bp, Homo sapien
accacagcagtttctggtggcccca

SEQ ID NO: 5877297 - DNA, 25 bp, Homo sapien
cgtactcagagcccttctcctggaa

SEQ ID NO: 5877298 - DNA, 25 bp, Homo sapien
tctggtggccccatcagtttgggct

SEQ ID NO: 5877299 - DNA, 25 bp, Homo sapien
ttagctgggctagcacagttgtcat

SEQ ID NO: 5877300 - DNA, 25 bp, Homo sapien
cagtatcatttgggagctagtccta

SEQ ID NO: 5877301 - DNA, 25 bp, Homo sapien
catttgcgtacggccacgccttttg

SEQ ID NO: 5877302 - DNA, 25 bp, Homo sapien
tttgcgtacggccacgccttttgtg

SEQ ID NO: 5877303 - DNA, 25 bp, Homo sapien
ctgaacaccacagcagtttctggtg

SEQ ID NO: 5877304 - DNA, 25 bp, Homo sapien
tcagttaagcctgccagcttgtcct

SEQ ID NO: 5877305 - DNA, 25 bp, Homo sapien
atcatttgggagctagtcctagatc

SEQ ID NO: 5877306 - DNA, 25 bp, Homo sapien
aattcaagtaccgcctgaacaccac

SEQ ID NO: 5877307 - DNA, 25 bp, Homo sapien
gaacaccacagcagtttctggtggc

SEQ ID NO: 5877308 - DNA, 25 bp, Homo sapien
ggtcagcttacgtactcagagccct

SEQ ID NO: 5877309 - DNA, 25 bp, Homo sapien
tgagatggaaactagagcacacaac

SEQ ID NO: 5877310 - DNA, 25 bp, Homo sapien
gcaggacagtatcatttgggagcta

SEQ ID NO: 5877311 - DNA, 25 bp, Homo sapien
gcctgggccaagaacactttctgct

SEQ ID NO: 5877312 - DNA, 25 bp, Homo sapien
tgtggggaaaagacaggaagaaccc

SEQ ID NO: 5877313 - DNA, 25 bp, Homo sapien
caagtaccgcctgaacaccacagca

SEQ ID NO: 5877314 - DNA, 25 bp, Homo sapien
ctcttcggggttctctgatggcaat

SEQ ID NO: 5877315 - DNA, 25 bp, Homo sapien
catctcccaaaggagactgagcctg

SEQ ID NO: 5877316 - DNA, 25 bp, Homo sapien
ttctcctggaaaatgtccactggtg

SEQ ID NO: 5877317 - DNA, 25 bp, Homo sapien
tctttcaacctaaaggaaacaaagc

SEQ ID NO: 5877318 - DNA, 25 bp, Homo sapien
ccatcagtttgggctgtggtttagg

SEQ ID NO: 5877319 - DNA, 25 bp, Homo sapien
aggacaggattacggtgctaaattc

SEQ ID NO: 5877320 - DNA, 25 bp, Homo sapien
aggaaagcctcttcaaacagcgtac

SEQ ID NO: 5877321 - DNA, 25 bp, Homo sapien
agtcctgtccgtcacaggcttgaga

SEQ ID NO: 5877322 - DNA, 25 bp, Homo sapien
atgatggcaggacagtatcatttgg

SEQ ID NO: 5877323 - DNA, 25 bp, Homo sapien
ttctgaccaatagagaatgtgccca

SEQ ID NO: 5877324 - DNA, 25 bp, Homo sapien
cacatctcccaaaggagactgagcc

SEQ ID NO: 5877325 - DNA, 25 bp, Homo sapien
gtgtcagctcccggtgtgggcgtaa

SEQ ID NO: 5877326 - DNA, 25 bp, Homo sapien
agtcaaatcagaatgatggcaggac

SEQ ID NO: 5877327 - DNA, 25 bp, Homo sapien
cacatatatcgaactcgtttttaac

SEQ ID NO: 5877328 - DNA, 25 bp, Homo sapien
cattttcagtcaataaaaatcaaac

SEQ ID NO: 5877329 - DNA, 25 bp, Homo sapien
agcttacgtactcagagcccttctc

SEQ ID NO: 5877330 - DNA, 25 bp, Homo sapien
acaccacagcagtttctggtggccc

SEQ ID NO: 5877331 - DNA, 25 bp, Homo sapien
acacttctgaccaatagagaatgtg

SEQ ID NO: 5877332 - DNA, 25 bp, Homo sapien
gccgagtaccttagaactggtccgg

SEQ ID NO: 5877333 - DNA, 25 bp, Homo sapien
ttcaaacctgacacacttctgacca

SEQ ID NO: 5877334 - DNA, 25 bp, Homo sapien
acccatcctatgcatttgctttctt

SEQ ID NO: 5877335 - DNA, 25 bp, Homo sapien
cctcagttaagcctgccagcttgtc

SEQ ID NO: 5877336 - DNA, 25 bp, Homo sapien
cttgcttgtggggaaaagacaggaa

SEQ ID NO: 5877337 - DNA, 25 bp, Homo sapien
taacactgcatttgcgtacggccac

SEQ ID NO: 5877338 - DNA, 25 bp, Homo sapien
tggtgtttaaaatataaagccacat

SEQ ID NO: 5877339 - DNA, 25 bp, Homo sapien
ttctgcttcaaacctgacacacttc

SEQ ID NO: 5877340 - DNA, 25 bp, Homo sapien
tatatcgaactcgtttttaacaaac

SEQ ID NO: 5877341 - DNA, 25 bp, Homo sapien
gcttagctgggctagcacagttgtc

SEQ ID NO: 5877342 - DNA, 25 bp, Homo sapien
gccacatatatcgaactcgttttta

SEQ ID NO: 5877343 - DNA, 25 bp, Homo sapien
agctagtcctagatcggacattcta

SEQ ID NO: 5877344 - DNA, 25 bp, Homo sapien
caagaacactttctgcttcaaacct

SEQ ID NO: 5877345 - DNA, 25 bp, Homo sapien
ctgtgcttagctgggctagcacagt

SEQ ID NO: 5877346 - DNA, 25 bp, Homo sapien
tggagggcgatgctcaccacaaaca

SEQ ID NO: 5877347 - DNA, 25 bp, Homo sapien
caaatgctcaggtgacaggaaagcc

SEQ ID NO: 5877348 - DNA, 25 bp, Homo sapien
tggaagagggaggccgagtacctta

SEQ ID NO: 5877349 - DNA, 25 bp, Homo sapien
agatggaaactagagcacacaaccc

SEQ ID NO: 5877350 - DNA, 25 bp, Homo sapien
ttgtcatggagggcgatgctcacca

SEQ ID NO: 5877351 - DNA, 25 bp, Homo sapien
ctcagagcccttctcctggaaaatg

SEQ ID NO: 5877352 - DNA, 25 bp, Homo sapien
ttgtcctccacatctcccaaaggag

SEQ ID NO: 5877353 - DNA, 25 bp, Homo sapien
actgcatgcacttacacttcccccg

SEQ ID NO: 5877354 - DNA, 25 bp, Homo sapien
cagagcccttctcctggaaaatgtc

SEQ ID NO: 5877355 - DNA, 25 bp, Homo sapien
tacgtactcagagcccttctcctgg

SEQ ID NO: 5877356 - DNA, 25 bp, Homo sapien
tacactgtgaagcggcagcctagga

SEQ ID NO: 5877357 - DNA, 25 bp, Homo sapien
ccaaataggatggaagagggaggcc

SEQ ID NO: 5877358 - DNA, 25 bp, Homo sapien
accccaccctggggtgctgtccact

SEQ ID NO: 5877359 - DNA, 25 bp, Homo sapien
ggggggaggacaggattacggtgct

SEQ ID NO: 5877360 - DNA, 25 bp, Homo sapien
cttgtggggaaaagacaggaagaac

SEQ ID NO: 5877361 - DNA, 25 bp, Homo sapien
tcccaaaggagactgagcctgggcc

SEQ ID NO: 5877362 - DNA, 25 bp, Homo sapien
aggccgagtaccttagaactggtcc

SEQ ID NO: 5877363 - DNA, 25 bp, Homo sapien
gaagagggaggccgagtaccttaga

SEQ ID NO: 5877364 - DNA, 25 bp, Homo sapien
agatcggacattctagaaggtctac

SEQ ID NO: 5877365 - DNA, 25 bp, Homo sapien
gagcctgggccaagaacactttctg

SEQ ID NO: 5877366 - DNA, 25 bp, Homo sapien
aaacttgacaaaagtcctgtccgtc

SEQ ID NO: 5877367 - DNA, 25 bp, Homo sapien
aggagactgagcctgggccaagaac

SEQ ID NO: 5877368 - DNA, 25 bp, Homo sapien
ccatcctatgcatttgctttcttca

SEQ ID NO: 5877369 - DNA, 25 bp, Homo sapien
tccactggagtccactgtgcttagc

SEQ ID NO: 5877370 - DNA, 25 bp, Homo sapien
ctgggccaagaacactttctgcttc

SEQ ID NO: 5877371 - DNA, 25 bp, Homo sapien
cacctcagttaagcctgccagcttg

SEQ ID NO: 5877372 - DNA, 25 bp, Homo sapien
ttaagcctgccagcttgtcctccac

SEQ ID NO: 5877373 - DNA, 25 bp, Homo sapien
aatgtaaacgtgagcttgcttgtgg

SEQ ID NO: 5877374 - DNA, 25 bp, Homo sapien
ctgtgcggagcagcccttaacttcc

SEQ ID NO: 5877375 - DNA, 25 bp, Homo sapien
acacatgaacatgacacacctcagt

SEQ ID NO: 5877376 - DNA, 25 bp, Homo sapien
ataggatggaagagggaggccgagt

SEQ ID NO: 5877377 - DNA, 25 bp, Homo sapien
cagaatgatggcaggacagtatcat

SEQ ID NO: 5877378 - DNA, 25 bp, Homo sapien
gcctcttcggggttctctgatggca

SEQ ID NO: 5877379 - DNA, 25 bp, Homo sapien
aagcctcttcggggttctctgatgg

SEQ ID NO: 5877380 - DNA, 25 bp, Homo sapien
ctgatggcaatgtaaacgtgagctt

SEQ ID NO: 5877381 - DNA, 25 bp, Homo sapien
cacttcccccggtcagcttacgtac

SEQ ID NO: 5877382 - DNA, 25 bp, Homo sapien
aagacaggaagaaccccaataaaca

SEQ ID NO: 5877383 - DNA, 25 bp, Homo sapien
aaacagtcaaatcagaatgatggca

SEQ ID NO: 5877384 - DNA, 25 bp, Homo sapien
ataaacaatcagtcacggaaggtgg

SEQ ID NO: 5877385 - DNA, 25 bp, Homo sapien
ctatgcatttgctttcttcattttc

SEQ ID NO: 5877386 - DNA, 25 bp, Homo sapien
ccgtgtcagctcccggtgtgggcgt

SEQ ID NO: 5877387 - DNA, 25 bp, Homo sapien
caaaagtcctgtccgtcacaggctt

SEQ ID NO: 5877388 - DNA, 25 bp, Homo sapien
aacctgacacacttctgaccaatag

SEQ ID NO: 5877389 - DNA, 25 bp, Homo sapien
tgagcttgcttgtggggaaaagaca

SEQ ID NO: 5877390 - DNA, 25 bp, Homo sapien
tgtggtttaggaaaagaaacctcac

SEQ ID NO: 5877391 - DNA, 25 bp, Homo sapien
agcggcagcctaggattcgggggca

SEQ ID NO: 5877392 - DNA, 25 bp, Homo sapien
ggggttctctgatggcaatgtaaac

SEQ ID NO: 5877393 - DNA, 25 bp, Homo sapien
aaacaatcagtcacggaaggtggca

SEQ ID NO: 5877394 - DNA, 25 bp, Homo sapien
cagtttgggctgtggtttaggaaaa

SEQ ID NO: 5877395 - DNA, 25 bp, Homo sapien
caggattacggtgctaaattcaagt

SEQ ID NO: 5877396 - DNA, 25 bp, Homo sapien
taggattcgggggcacggacacaca

SEQ ID NO: 5877397 - DNA, 25 bp, Homo sapien
aaaatataaagccacatatatcgaa

SEQ ID NO: 5877398 - DNA, 25 bp, Homo sapien
caataaacaatcagtcacggaaggt

SEQ ID NO: 5877399 - DNA, 25 bp, Homo sapien
tggaaaatgtccactggtgtttaaa

SEQ ID NO: 5877400 - DNA, 25 bp, Homo sapien
ggaagaaccccaataaacaatcagt

SEQ ID NO: 5877401 - DNA, 25 bp, Homo sapien
ctgtgaagcggcagcctaggattcg

SEQ ID NO: 5877402 - DNA, 25 bp, Homo sapien
cactgtgaagcggcagcctaggatt

SEQ ID NO: 5877403 - DNA, 25 bp, Homo sapien
cagcagtttctggtggccccatcag

SEQ ID NO: 5877404 - DNA, 25 bp, Homo sapien
tgctcaccacaaacagtcaaatcag

SEQ ID NO: 5877405 - DNA, 25 bp, Homo sapien
gaaacaaagcctcttcggggttctc

SEQ ID NO: 5877406 - DNA, 25 bp, Homo sapien
gatggaagagggaggccgagtacct

SEQ ID NO: 5877407 - DNA, 25 bp, Homo sapien
gtgctaaattcaagtaccgcctgaa

SEQ ID NO: 5877408 - DNA, 25 bp, Homo sapien
gagcccttctcctggaaaatgtcca

SEQ ID NO: 5877409 - DNA, 25 bp, Homo sapien
agttgtcatggagggcgatgctcac

SEQ ID NO: 5877410 - DNA, 25 bp, Homo sapien
gagaatgtgcccaaccaaataggat

SEQ ID NO: 5877411 - DNA, 25 bp, Homo sapien
ccgcctgaacaccacagcagtttct

SEQ ID NO: 5877412 - DNA, 25 bp, Homo sapien
aatgctcaggtgacaggaaagcctc

SEQ ID NO: 5877413 - DNA, 25 bp, Homo sapien
gcctgccagcttgtcctccacatct

SEQ ID NO: 5877414 - DNA, 25 bp, Homo sapien
agctgggctagcacagttgtcatgg

SEQ ID NO: 5877415 - DNA, 25 bp, Homo sapien
ctctgatggcaatgtaaacgtgagc

SEQ ID NO: 5877416 - DNA, 25 bp, Homo sapien
tcacgttaaccgttttcttctttca

SEQ ID NO: 5877417 - DNA, 25 bp, Homo sapien
cttcaaacagcgtaccattggggca

SEQ ID NO: 5877418 - DNA, 25 bp, Homo sapien
attcgggggcacggacacacatgaa

SEQ ID NO: 5877419 - DNA, 25 bp, Homo sapien
ggagtccactgtgcttagctgggct

SEQ ID NO: 5877420 - DNA, 25 bp, Homo sapien
aaaagtgcttaaacccatcctatgc

SEQ ID NO: 5877421 - DNA, 25 bp, Homo sapien
gctagcacagttgtcatggagggcg

SEQ ID NO: 5877422 - DNA, 25 bp, Homo sapien
gactgagcctgggccaagaacactt

SEQ ID NO: 5877423 - DNA, 25 bp, Homo sapien
aacaaagcctcttcggggttctctg

SEQ ID NO: 5877424 - DNA, 25 bp, Homo sapien
aaggtggcaggccttgagttccctg

SEQ ID NO: 5877425 - DNA, 25 bp, Homo sapien
ggattcgggggcacggacacacatg

SEQ ID NO: 5877426 - DNA, 25 bp, Homo sapien
gggcgatgctcaccacaaacagtca

SEQ ID NO: 5877427 - DNA, 25 bp, Homo sapien
ggggaggacaggattacggtgctaa

SEQ ID NO: 5877428 - DNA, 25 bp, Homo sapien
ccccggtcagcttacgtactcagag

SEQ ID NO: 5877429 - DNA, 25 bp, Homo sapien
cacttacacttcccccggtcagctt

SEQ ID NO: 5877430 - DNA, 25 bp, Homo sapien
cccaataaacaatcagtcacggaag

SEQ ID NO: 5877431 - DNA, 25 bp, Homo sapien
cactccgtgtcagctcccggtgtgg

SEQ ID NO: 5877432 - DNA, 25 bp, Homo sapien
aggatggaagagggaggccgagtac

SEQ ID NO: 5877433 - DNA, 25 bp, Homo sapien
aaccaaataggatggaagagggagg

SEQ ID NO: 5877434 - DNA, 25 bp, Homo sapien
gaaaatgtccactggtgtttaaaat

SEQ ID NO: 5877435 - DNA, 25 bp, Homo sapien
cttcccccggtcagcttacgtactc

SEQ ID NO: 5877436 - DNA, 25 bp, Homo sapien
tactcagagcccttctcctggaaaa

SEQ ID NO: 5877437 - DNA, 25 bp, Homo sapien
aataaaaatcaaactcaatttatgc

SEQ ID NO: 5877438 - DNA, 25 bp, Homo sapien
gaatgatggcaggacagtatcattt

SEQ ID NO: 5877439 - DNA, 25 bp, Homo sapien
ttgtgtgagcactgcatgcacttac

SEQ ID NO: 5877440 - DNA, 25 bp, Homo sapien
ccaccctggggtgctgtccactgga

SEQ ID NO: 5877441 - DNA, 25 bp, Homo sapien
tcacggaaggtggcaggccttgagt

SEQ ID NO: 5877442 - DNA, 25 bp, Homo sapien
gtcatggagggcgatgctcaccaca

SEQ ID NO: 5877443 - DNA, 25 bp, Homo sapien
tataaagccacatatatcgaactcg

SEQ ID NO: 5877444 - DNA, 25 bp, Homo sapien
ttaaaatataaagccacatatatcg

SEQ ID NO: 5877445 - DNA, 25 bp, Homo sapien
aaactagagcacacaaccccaccct

SEQ ID NO: 5877446 - DNA, 25 bp, Homo sapien
acaatcagtcacggaaggtggcagg

SEQ ID NO: 5877447 - DNA, 25 bp, Homo sapien
cgtacggccacgccttttgtgtgag

SEQ ID NO: 5877448 - DNA, 25 bp, Homo sapien
cctggaaaatgtccactggtgttta

SEQ ID NO: 5877449 - DNA, 25 bp, Homo sapien
tttgggctgtggtttaggaaaagaa

SEQ ID NO: 5877450 - DNA, 25 bp, Homo sapien
cacaggcttgagatggaaactagag

SEQ ID NO: 5877451 - DNA, 25 bp, Homo sapien
cggcagcctaggattcgggggcacg

SEQ ID NO: 5877452 - DNA, 25 bp, Homo sapien
cactttctgcttcaaacctgacaca

SEQ ID NO: 5877453 - DNA, 25 bp, Homo sapien
ccccatcagtttgggctgtggttta

SEQ ID NO: 5877454 - DNA, 25 bp, Homo sapien
ttaacttccactccgtgtcagctcc

SEQ ID NO: 5877455 - DNA, 25 bp, Homo sapien
tagagcacacaaccccaccctgggg

SEQ ID NO: 5877456 - DNA, 25 bp, Homo sapien
ctcttcaaacagcgtaccattgggg

SEQ ID NO: 5877457 - DNA, 25 bp, Homo sapien
cggccacgccttttgtgtgagcact

SEQ ID NO: 5877458 - DNA, 25 bp, Homo sapien
gatggcaatgtaaacgtgagcttgc

SEQ ID NO: 5877459 - DNA, 25 bp, Homo sapien
ttaaacccatcctatgcatttgctt

SEQ ID NO: 5877460 - DNA, 25 bp, Homo sapien
gtcaataaaaatcaaactcaattta

SEQ ID NO: 5877461 - DNA, 25 bp, Homo sapien
aaatgtccactggtgtttaaaatat

SEQ ID NO: 5877462 - DNA, 25 bp, Homo sapien
tctacactgtgaagcggcagcctag

SEQ ID NO: 5877463 - DNA, 25 bp, Homo sapien
caggcttgagatggaaactagagca

SEQ ID NO: 5877464 - DNA, 25 bp, Homo sapien
gagccttgtgtctgttccttcatga

SEQ ID NO: 5877465 - DNA, 25 bp, Homo sapien
ttcagagattctaagtctcctagat

SEQ ID NO: 5877466 - DNA, 25 bp, Homo sapien
gctgtcaatctgtgtgtgcataaaa

SEQ ID NO: 5877467 - DNA, 25 bp, Homo sapien
atatttaaagccttggtttcttggc

SEQ ID NO: 5877468 - DNA, 25 bp, Homo sapien
tagaggcataagagaaaagatttct

SEQ ID NO: 5877469 - DNA, 25 bp, Homo sapien
gcccttccttcagagtcctgacact

SEQ ID NO: 5877470 - DNA, 25 bp, Homo sapien
tttgcatagcatattaatgaaaatg

SEQ ID NO: 5877471 - DNA, 25 bp, Homo sapien
agatactcaaaacatgttgatttaa

SEQ ID NO: 5877472 - DNA, 25 bp, Homo sapien
gtagcttggtacctggctgcccttc

SEQ ID NO: 5877473 - DNA, 25 bp, Homo sapien
taactccagacataagatactcaaa

SEQ ID NO: 5877474 - DNA, 25 bp, Homo sapien
acccagtgttgctgtcaatctgtgt

SEQ ID NO: 5877475 - DNA, 25 bp, Homo sapien
aaacccagtgttgctgtcaatctgt

SEQ ID NO: 5877476 - DNA, 25 bp, Homo sapien
tgtgcataaaaatgtacagacaaga

SEQ ID NO: 5877477 - DNA, 25 bp, Homo sapien
acagagggtgaagacatgtggagaa

SEQ ID NO: 5877478 - DNA, 25 bp, Homo sapien
gtccgtgattgaaaacccagtgttg

SEQ ID NO: 5877479 - DNA, 25 bp, Homo sapien
aaagccttggtttcttggctgtaca

SEQ ID NO: 5877480 - DNA, 25 bp, Homo sapien
gacataagatactcaaaacatgttg

SEQ ID NO: 5877481 - DNA, 25 bp, Homo sapien
ccttcagagtcctgacactctatta

SEQ ID NO: 5877482 - DNA, 25 bp, Homo sapien
atatgtttatgtgacatagacataa

SEQ ID NO: 5877483 - DNA, 25 bp, Homo sapien
agtcggtgaatccagattcagagat

SEQ ID NO: 5877484 - DNA, 25 bp, Homo sapien
gtttaagtcatgtgataagcactgt

SEQ ID NO: 5877485 - DNA, 25 bp, Homo sapien
agagaggggggtctgagccttgtgt

SEQ ID NO: 5877486 - DNA, 25 bp, Homo sapien
acacagagggtgaagacatgtggag

SEQ ID NO: 5877487 - DNA, 25 bp, Homo sapien
tatgattttcagaaagatacttaaa

SEQ ID NO: 5877488 - DNA, 25 bp, Homo sapien
cataaaaatgtacagacaagaggta

SEQ ID NO: 5877489 - DNA, 25 bp, Homo sapien
cataaggtagtctgtgctacaccag

SEQ ID NO: 5877490 - DNA, 25 bp, Homo sapien
aggcctggttcgtaagcatactgac

SEQ ID NO: 5877491 - DNA, 25 bp, Homo sapien
ctggttcgtaagcatactgacttta

SEQ ID NO: 5877492 - DNA, 25 bp, Homo sapien
aagtcatgtgataagcactgttgtt

SEQ ID NO: 5877493 - DNA, 25 bp, Homo sapien
gtacctagtcggtgaatccagattc

SEQ ID NO: 5877494 - DNA, 25 bp, Homo sapien
tacattgtttctacaattcagtgta

SEQ ID NO: 5877495 - DNA, 25 bp, Homo sapien
tttttattgtatttttatgtctaat

SEQ ID NO: 5877496 - DNA, 25 bp, Homo sapien
tttttttattgtatttttatgtcta

SEQ ID NO: 5877497 - DNA, 25 bp, Homo sapien
ggcataagagaaaagatttctacag

SEQ ID NO: 5877498 - DNA, 25 bp, Homo sapien
atccacacagcagggccagaacaca

SEQ ID NO: 5877499 - DNA, 25 bp, Homo sapien
ctaatgtgaggcttggattggttta

SEQ ID NO: 5877500 - DNA, 25 bp, Homo sapien
cagagattctaagtctcctagataa

SEQ ID NO: 5877501 - DNA, 25 bp, Homo sapien
cacttagtacctagtcggtgaatcc

SEQ ID NO: 5877502 - DNA, 25 bp, Homo sapien
accataaggtagtctgtgctacacc

SEQ ID NO: 5877503 - DNA, 25 bp, Homo sapien
catgctcaccaacagacagaaggtt

SEQ ID NO: 5877504 - DNA, 25 bp, Homo sapien
cacactttatagaggcataagagaa

SEQ ID NO: 5877505 - DNA, 25 bp, Homo sapien
tatttcttcacatttcccatccaca

SEQ ID NO: 5877506 - DNA, 25 bp, Homo sapien
gccagaacacagagggtgaagacat

SEQ ID NO: 5877507 - DNA, 25 bp, Homo sapien
gtgtatacattgtttctagctgtgt

SEQ ID NO: 5877508 - DNA, 25 bp, Homo sapien
ggtagagaggagttgggttgagggt

SEQ ID NO: 5877509 - DNA, 25 bp, Homo sapien
acaagaggtagagaggagttgggtt

SEQ ID NO: 5877510 - DNA, 25 bp, Homo sapien
aatgtacagacaagaggtagagagg

SEQ ID NO: 5877511 - DNA, 25 bp, Homo sapien
tatagaggcataagagaaaagattt

SEQ ID NO: 5877512 - DNA, 25 bp, Homo sapien
aggaaggtagcttggtacctggctg

SEQ ID NO: 5877513 - DNA, 25 bp, Homo sapien
tttctagctgtgtttttcccattgc

SEQ ID NO: 5877514 - DNA, 25 bp, Homo sapien
acaaagtgaaactggtccgtgattg

SEQ ID NO: 5877515 - DNA, 25 bp, Homo sapien
gcttaagagtaaatatgtttatgtg

SEQ ID NO: 5877516 - DNA, 25 bp, Homo sapien
gtcatgtgataagcactgttgtttc

SEQ ID NO: 5877517 - DNA, 25 bp, Homo sapien
acgcagccagactcttggacggggc

SEQ ID NO: 5877518 - DNA, 25 bp, Homo sapien
ttctttgggatattttaaacatcca

SEQ ID NO: 5877519 - DNA, 25 bp, Homo sapien
ttaacacttagtacctagtcggtga

SEQ ID NO: 5877520 - DNA, 25 bp, Homo sapien
tgaatccagattcagagattctaag

SEQ ID NO: 5877521 - DNA, 25 bp, Homo sapien
tgtatgattttcagaaagatactta

SEQ ID NO: 5877522 - DNA, 25 bp, Homo sapien
gggccagaacacagagggtgaagac

SEQ ID NO: 5877523 - DNA, 25 bp, Homo sapien
accacatgggaaatgtataggcctg

SEQ ID NO: 5877524 - DNA, 25 bp, Homo sapien
gtctaatgtgaggcttggattggtt

SEQ ID NO: 5877525 - DNA, 25 bp, Homo sapien
gcatattaatgaaaatgtaccacat

SEQ ID NO: 5877526 - DNA, 25 bp, Homo sapien
tgataagcactgttgtttctacaca

SEQ ID NO: 5877527 - DNA, 25 bp, Homo sapien
gatttctacagacattctttgggat

SEQ ID NO: 5877528 - DNA, 25 bp, Homo sapien
acttggtgtatacattgtttctaca

SEQ ID NO: 5877529 - DNA, 25 bp, Homo sapien
cagaaggtttgagaatgttttagga

SEQ ID NO: 5877530 - DNA, 25 bp, Homo sapien
acggggcttgtgtgtccagctagag

SEQ ID NO: 5877531 - DNA, 25 bp, Homo sapien
ggtgaagacatgtggagaaacggga

SEQ ID NO: 5877532 - DNA, 25 bp, Homo sapien
tttatttatttcttcacatttccca

SEQ ID NO: 5877533 - DNA, 25 bp, Homo sapien
ttgtttctacacaaagtgaaactgg

SEQ ID NO: 5877534 - DNA, 25 bp, Homo sapien
aaacatccatggaccagcaccataa

SEQ ID NO: 5877535 - DNA, 25 bp, Homo sapien
cgtaagcatactgactttatatttt

SEQ ID NO: 5877536 - DNA, 25 bp, Homo sapien
gcactgttgtttctacacaaagtga

SEQ ID NO: 5877537 - DNA, 25 bp, Homo sapien
tcttggctgtacaatgggcttggta

SEQ ID NO: 5877538 - DNA, 25 bp, Homo sapien
cagattcagagattctaagtctcct

SEQ ID NO: 5877539 - DNA, 25 bp, Homo sapien
gtatacattgtttctacaacttggt

SEQ ID NO: 5877540 - DNA, 25 bp, Homo sapien
taagcatactgactttatattttgt

SEQ ID NO: 5877541 - DNA, 25 bp, Homo sapien
actgttgtttctacacaaagtgaaa

SEQ ID NO: 5877542 - DNA, 25 bp, Homo sapien
tttttcccattgctgtgaccaaaac

SEQ ID NO: 5877543 - DNA, 25 bp, Homo sapien
tgttccttcatgaatgtatgatttt

SEQ ID NO: 5877544 - DNA, 25 bp, Homo sapien
ttaagtcatgtgataagcactgttg

SEQ ID NO: 5877545 - DNA, 25 bp, Homo sapien
cagacattctttgggatattttaaa

SEQ ID NO: 5877546 - DNA, 25 bp, Homo sapien
tgtgataagcactgttgtttctaca

SEQ ID NO: 5877547 - DNA, 25 bp, Homo sapien
acattgtttctacaacttggtgtat

SEQ ID NO: 5877548 - DNA, 25 bp, Homo sapien
tagataactccagacataagatact

SEQ ID NO: 5877549 - DNA, 25 bp, Homo sapien
gatttaaatcagtttatttatttct

SEQ ID NO: 5877550 - DNA, 25 bp, Homo sapien
tgtgtccagctagagagcttaagag

SEQ ID NO: 5877551 - DNA, 25 bp, Homo sapien
agaggggggtctgagccttgtgtct

SEQ ID NO: 5877552 - DNA, 25 bp, Homo sapien
gtgtatacattgtttctacaacttg

SEQ ID NO: 5877553 - DNA, 25 bp, Homo sapien
agagggtgaagacatgtggagaaac

SEQ ID NO: 5877554 - DNA, 25 bp, Homo sapien
cacatttcccatccacacagcaggg

SEQ ID NO: 5877555 - DNA, 25 bp, Homo sapien
tgtcaatctgtgtgtgcataaaaat

SEQ ID NO: 5877556 - DNA, 25 bp, Homo sapien
tgattttcagaaagatacttaaaaa

SEQ ID NO: 5877557 - DNA, 25 bp, Homo sapien
gtatttttatgtctaatgtgaggct

SEQ ID NO: 5877558 - DNA, 25 bp, Homo sapien
gaaaatcatgctcaccaacagacag

SEQ ID NO: 5877559 - DNA, 25 bp, Homo sapien
ttttatgtctaatgtgaggcttgga

SEQ ID NO: 5877560 - DNA, 25 bp, Homo sapien
gagaaacgggagacagacagaaaga

SEQ ID NO: 5877561 - DNA, 25 bp, Homo sapien
gattgaaaacccagtgttgctgtca

SEQ ID NO: 5877562 - DNA, 25 bp, Homo sapien
tccagattcagagattctaagtctc

SEQ ID NO: 5877563 - DNA, 25 bp, Homo sapien
tcttggacggggcttgtgtgtccag

SEQ ID NO: 5877564 - DNA, 25 bp, Homo sapien
aagagtaaatatgtttatgtgacat

SEQ ID NO: 5877565 - DNA, 25 bp, Homo sapien
gataactccagacataagatactca

SEQ ID NO: 5877566 - DNA, 25 bp, Homo sapien
aatgtgaggcttggattggtttaag

SEQ ID NO: 5877567 - DNA, 25 bp, Homo sapien
tttaaatcagtttatttatttcttc

SEQ ID NO: 5877568 - DNA, 25 bp, Homo sapien
ctcaccaacagacagaaggtttgag

SEQ ID NO: 5877569 - DNA, 25 bp, Homo sapien
gtgggaaggaaggtagcttggtacc

SEQ ID NO: 5877570 - DNA, 25 bp, Homo sapien
gacataaatcaactcagtgtataca

SEQ ID NO: 5877571 - DNA, 25 bp, Homo sapien
tcaatctgtgtgtgcataaaaatgt

SEQ ID NO: 5877572 - DNA, 25 bp, Homo sapien
gtagtctgtgctacaccagatgtta

SEQ ID NO: 5877573 - DNA, 25 bp, Homo sapien
ctgactttatattttgtggttgatt

SEQ ID NO: 5877574 - DNA, 25 bp, Homo sapien
tgctacaccagatgttaacacttag

SEQ ID NO: 5877575 - DNA, 25 bp, Homo sapien
ttaaacatccatggaccagcaccat

SEQ ID NO: 5877576 - DNA, 25 bp, Homo sapien
atcatgctcaccaacagacagaagg

SEQ ID NO: 5877577 - DNA, 25 bp, Homo sapien
attgtttctagctgtgtttttccca

SEQ ID NO: 5877578 - DNA, 25 bp, Homo sapien
ggctgcccttccttcagagtcctga

SEQ ID NO: 5877579 - DNA, 25 bp, Homo sapien
acattgtttctagctgtgtttttcc

SEQ ID NO: 5877580 - DNA, 25 bp, Homo sapien
cagatgttaacacttagtacctagt

SEQ ID NO: 5877581 - DNA, 25 bp, Homo sapien
gtgattgaaaacccagtgttgctgt

SEQ ID NO: 5877582 - DNA, 25 bp, Homo sapien
ccatccacacagcagggccagaaca

SEQ ID NO: 5877583 - DNA, 25 bp, Homo sapien
aaaacctgaattcttttgcatagca

SEQ ID NO: 5877584 - DNA, 25 bp, Homo sapien
actccagacataagatactcaaaac

SEQ ID NO: 5877585 - DNA, 25 bp, Homo sapien
tcccatccacacagcagggccagaa

SEQ ID NO: 5877586 - DNA, 25 bp, Homo sapien
agaaaagatttctacagacattctt

SEQ ID NO: 5877587 - DNA, 25 bp, Homo sapien
cagctagagagcttaagagtaaata

SEQ ID NO: 5877588 - DNA, 25 bp, Homo sapien
gggggtgccacactttatagaggca

SEQ ID NO: 5877589 - DNA, 25 bp, Homo sapien
gaaacgggagacagacagaaagaga

SEQ ID NO: 5877590 - DNA, 25 bp, Homo sapien
tagacataaatcaactcagtgtata

SEQ ID NO: 5877591 - DNA, 25 bp, Homo sapien
aggcttggattggtttaagtcatgt

SEQ ID NO: 5877592 - DNA, 25 bp, Homo sapien
gacatgtggagaaacgggagacaga

SEQ ID NO: 5877593 - DNA, 25 bp, Homo sapien
tgaattcttttgcatagcatattaa

SEQ ID NO: 5877594 - DNA, 25 bp, Homo sapien
aaactggtccgtgattgaaaaccca

SEQ ID NO: 5877595 - DNA, 25 bp, Homo sapien
acactctattagcactgaaaatcat

SEQ ID NO: 5877596 - DNA, 25 bp, Homo sapien
ccttggtttcttggctgtacaatgg

SEQ ID NO: 5877597 - DNA, 25 bp, Homo sapien
ttatgtgacatagacataaatcaac

SEQ ID NO: 5877598 - DNA, 25 bp, Homo sapien
tctattagcactgaaaatcatgctc

SEQ ID NO: 5877599 - DNA, 25 bp, Homo sapien
tgctcaccaacagacagaaggtttg

SEQ ID NO: 5877600 - DNA, 25 bp, Homo sapien
cttggtacctggctgcccttccttc

SEQ ID NO: 5877601 - DNA, 25 bp, Homo sapien
cttagtacctagtcggtgaatccag

SEQ ID NO: 5877602 - DNA, 25 bp, Homo sapien
ctgtgaccaaaacctgaattctttt

SEQ ID NO: 5877603 - DNA, 25 bp, Homo sapien
atacattgtttctagctgtgttttt

SEQ ID NO: 5877604 - DNA, 25 bp, Homo sapien
gggtgggaaggaaggtagcttggta

SEQ ID NO: 5877605 - DNA, 25 bp, Homo sapien
gaaaacccagtgttgctgtcaatct

SEQ ID NO: 5877606 - DNA, 25 bp, Homo sapien
ttgtttctacaattcagtgtataca

SEQ ID NO: 5877607 - DNA, 25 bp, Homo sapien
tgacactctattagcactgaaaatc

SEQ ID NO: 5877608 - DNA, 25 bp, Homo sapien
gagagcttaagagtaaatatgttta

SEQ ID NO: 5877609 - DNA, 25 bp, Homo sapien
gaaggtagcttggtacctggctgcc

SEQ ID NO: 5877610 - DNA, 25 bp, Homo sapien
cataaatcaactcagtgtatacatt

SEQ ID NO: 5877611 - DNA, 25 bp, Homo sapien
ttaaagccttggtttcttggctgta

SEQ ID NO: 5877612 - DNA, 25 bp, Homo sapien
tgggaaatgtataggcctggttcgt

SEQ ID NO: 5877613 - DNA, 25 bp, Homo sapien
gaacacagagggtgaagacatgtgg

SEQ ID NO: 5877614 - DNA, 25 bp, Homo sapien
tgtgtgtccagctagagagcttaag

SEQ ID NO: 5877615 - DNA, 25 bp, Homo sapien
ccaaaacctgaattcttttgcatag

SEQ ID NO: 5877616 - DNA, 25 bp, Homo sapien
ggtgaatccagattcagagattcta

SEQ ID NO: 5877617 - DNA, 25 bp, Homo sapien
tctgtgctacaccagatgttaacac

SEQ ID NO: 5877618 - DNA, 25 bp, Homo sapien
ccttcatgaatgtatgattttcaga

SEQ ID NO: 5877619 - DNA, 25 bp, Homo sapien
gacattctttgggatattttaaaca

SEQ ID NO: 5877620 - DNA, 25 bp, Homo sapien
tgttgtttctacacaaagtgaaact

SEQ ID NO: 5877621 - DNA, 25 bp, Homo sapien
gggggggtgccacactttatagagg

SEQ ID NO: 5877622 - DNA, 25 bp, Homo sapien
gggtctgagccttgtgtctgttcct

SEQ ID NO: 5877623 - DNA, 25 bp, Homo sapien
tacagacattctttgggatatttta

SEQ ID NO: 5877624 - DNA, 25 bp, Homo sapien
gtacctggctgcccttccttcagag

SEQ ID NO: 5877625 - DNA, 25 bp, Homo sapien
taaatcagtttatttatttcttcac

SEQ ID NO: 5877626 - DNA, 25 bp, Homo sapien
tgtgtctgttccttcatgaatgtat

SEQ ID NO: 5877627 - DNA, 25 bp, Homo sapien
ccagactcttggacggggcttgtgt

SEQ ID NO: 5877628 - DNA, 25 bp, Homo sapien
catagcatattaatgaaaatgtacc

SEQ ID NO: 5877629 - DNA, 25 bp, Homo sapien
tgttaacacttagtacctagtcggt

SEQ ID NO: 5877630 - DNA, 25 bp, Homo sapien
cacatgggaaatgtataggcctggt

SEQ ID NO: 5877631 - DNA, 25 bp, Homo sapien
acaccagatgttaacacttagtacc

SEQ ID NO: 5877632 - DNA, 25 bp, Homo sapien
aatcaactcagtgtatacattgttt

SEQ ID NO: 5877633 - DNA, 25 bp, Homo sapien
ttcacatttcccatccacacagcag

SEQ ID NO: 5877634 - DNA, 25 bp, Homo sapien
aatctgtgtgtgcataaaaatgtac

SEQ ID NO: 5877635 - DNA, 25 bp, Homo sapien
catgggaaatgtataggcctggttc

SEQ ID NO: 5877636 - DNA, 25 bp, Homo sapien
gtctgagccttgtgtctgttccttc

SEQ ID NO: 5877637 - DNA, 25 bp, Homo sapien
gtataggcctggttcgtaagcatac

SEQ ID NO: 5877638 - DNA, 25 bp, Homo sapien
tgttgctgtcaatctgtgtgtgcat

SEQ ID NO: 5877639 - DNA, 25 bp, Homo sapien
cctgaattcttttgcatagcatatt

SEQ ID NO: 5877640 - DNA, 25 bp, Homo sapien
aacctgaattcttttgcatagcata

SEQ ID NO: 5877641 - DNA, 25 bp, Homo sapien
acacaaagtgaaactggtccgtgat

SEQ ID NO: 5877642 - DNA, 25 bp, Homo sapien
tctagctgtgtttttcccattgctg

SEQ ID NO: 5877643 - DNA, 25 bp, Homo sapien
gcagccagactcttggacggggctt

SEQ ID NO: 5877644 - DNA, 25 bp, Homo sapien
tcaaaacatgttgatttaaatcagt

SEQ ID NO: 5877645 - DNA, 25 bp, Homo sapien
gtttctacacaaagtgaaactggtc

SEQ ID NO: 5877646 - DNA, 25 bp, Homo sapien
gctgtgtttttcccattgctgtgac

SEQ ID NO: 5877647 - DNA, 25 bp, Homo sapien
ctaagtctcctagataactccagac

SEQ ID NO: 5877648 - DNA, 25 bp, Homo sapien
tcggtgaatccagattcagagattc

SEQ ID NO: 5877649 - DNA, 25 bp, Homo sapien
tagagaggagttgggttgagggtgg

SEQ ID NO: 5877650 - DNA, 25 bp, Homo sapien
tgtgaggcttggattggtttaagtc

SEQ ID NO: 5877651 - DNA, 25 bp, Homo sapien
tattttaaacatccatggaccagca

SEQ ID NO: 5877652 - DNA, 25 bp, Homo sapien
tcttcacatttcccatccacacagc

SEQ ID NO: 5877653 - DNA, 25 bp, Homo sapien
ttggctgtacaatgggcttggtaac

SEQ ID NO: 5877654 - DNA, 25 bp, Homo sapien
gaaggtttgagaatgttttaggaca

SEQ ID NO: 5877655 - DNA, 25 bp, Homo sapien
gggatattttaaacatccatggacc

SEQ ID NO: 5877656 - DNA, 25 bp, Homo sapien
ttgggatattttaaacatccatgga

SEQ ID NO: 5877657 - DNA, 25 bp, Homo sapien
ttctacacaaagtgaaactggtccg

SEQ ID NO: 5877658 - DNA, 25 bp, Homo sapien
agcactgaaaatcatgctcaccaac

SEQ ID NO: 5877659 - DNA, 25 bp, Homo sapien
ggtgtatacattgtttctacaattc

SEQ ID NO: 5877660 - DNA, 25 bp, Homo sapien
gttttaggacaataatttgtatggg

SEQ ID NO: 5877661 - DNA, 25 bp, Homo sapien
gtgaccaaaacctgaattcttttgc

SEQ ID NO: 5877662 - DNA, 25 bp, Homo sapien
catagacataaatcaactcagtgta

SEQ ID NO: 5877663 - DNA, 25 bp, Homo sapien
aggtagtctgtgctacaccagatgt

SEQ ID NO: 5877664 - DNA, 25 bp, Homo sapien
tgcatagcatattaatgaaaatgta

SEQ ID NO: 5877665 - DNA, 25 bp, Homo sapien
tgtccagctagagagcttaagagta

SEQ ID NO: 5877666 - DNA, 25 bp, Homo sapien
atactcaaaacatgttgatttaaat

SEQ ID NO: 5877667 - DNA, 25 bp, Homo sapien
atgtgacatagacataaatcaactc

SEQ ID NO: 5877668 - DNA, 25 bp, Homo sapien
gagattctaagtctcctagataact

SEQ ID NO: 5877669 - DNA, 25 bp, Homo sapien
tagctgtgtttttcccattgctgtg

SEQ ID NO: 5877670 - DNA, 25 bp, Homo sapien
tatacattgtttctacaattcagtg

SEQ ID NO: 5877671 - DNA, 25 bp, Homo sapien
gtcctgacactctattagcactgaa

SEQ ID NO: 5877672 - DNA, 25 bp, Homo sapien
ctgagccttgtgtctgttccttcat

SEQ ID NO: 5877673 - DNA, 25 bp, Homo sapien
tgtgtgtgcataaaaatgtacagac

SEQ ID NO: 5877674 - DNA, 25 bp, Homo sapien
gtatacattgtttctagctgtgttt

SEQ ID NO: 5877675 - DNA, 25 bp, Homo sapien
ccaacagacagaaggtttgagaatg

SEQ ID NO: 5877676 - DNA, 25 bp, Homo sapien
catgtggagaaacgggagacagaca

SEQ ID NO: 5877677 - DNA, 25 bp, Homo sapien
gaatgttttaggacaataatttgta

SEQ ID NO: 5877678 - DNA, 25 bp, Homo sapien
atgttttaggacaataatttgtatg

SEQ ID NO: 5877679 - DNA, 25 bp, Homo sapien
gaaggaaggtagcttggtacctggc

SEQ ID NO: 5877680 - DNA, 25 bp, Homo sapien
ccattgctgtgaccaaaacctgaat

SEQ ID NO: 5877681 - DNA, 25 bp, Homo sapien
gagtcctgacactctattagcactg

SEQ ID NO: 5877682 - DNA, 25 bp, Homo sapien
gggggtctgagccttgtgtctgttc

SEQ ID NO: 5877683 - DNA, 25 bp, Homo sapien
ttggacggggcttgtgtgtccagct

SEQ ID NO: 5877684 - DNA, 25 bp, Homo sapien
tttcccatccacacagcagggccag

SEQ ID NO: 5877685 - DNA, 25 bp, Homo sapien
gagtaaatatgtttatgtgacatag

SEQ ID NO: 5877686 - DNA, 25 bp, Homo sapien
taaggtagtctgtgctacaccagat

SEQ ID NO: 5877687 - DNA, 25 bp, Homo sapien
aaatatgtttatgtgacatagacat

SEQ ID NO: 5877688 - DNA, 25 bp, Homo sapien
gtaaatatgtttatgtgacatagac

SEQ ID NO: 5877689 - DNA, 25 bp, Homo sapien
aaaatgtacagacaagaggtagaga

SEQ ID NO: 5877690 - DNA, 25 bp, Homo sapien
ggacggggcttgtgtgtccagctag

SEQ ID NO: 5877691 - DNA, 25 bp, Homo sapien
gacagaaggtttgagaatgttttag

SEQ ID NO: 5877692 - DNA, 25 bp, Homo sapien
tctacaacttggtgtatacattgtt

SEQ ID NO: 5877693 - DNA, 25 bp, Homo sapien
gcctggttcgtaagcatactgactt

SEQ ID NO: 5877694 - DNA, 25 bp, Homo sapien
tatttatttcttcacatttcccatc

SEQ ID NO: 5877695 - DNA, 25 bp, Homo sapien
ataggcctggttcgtaagcatactg

SEQ ID NO: 5877696 - DNA, 25 bp, Homo sapien
ttcttttgcatagcatattaatgaa

SEQ ID NO: 5877697 - DNA, 25 bp, Homo sapien
atacattgtttctacaacttggtgt

SEQ ID NO: 5877698 - DNA, 25 bp, Homo sapien
caccaacagacagaaggtttgagaa

SEQ ID NO: 5877699 - DNA, 25 bp, Homo sapien
ttgaaaacccagtgttgctgtcaat

SEQ ID NO: 5877700 - DNA, 25 bp, Homo sapien
tcccattgctgtgaccaaaacctga

SEQ ID NO: 5877701 - DNA, 25 bp, Homo sapien
cattctttgggatattttaaacatc

SEQ ID NO: 5877702 - DNA, 25 bp, Homo sapien
tcaactcagtgtatacattgtttct

SEQ ID NO: 5877703 - DNA, 25 bp, Homo sapien
taagagaaaagatttctacagacat

SEQ ID NO: 5877704 - DNA, 25 bp, Homo sapien
gaaaatgtaccacatgggaaatgta

SEQ ID NO: 5877705 - DNA, 25 bp, Homo sapien
aacagacagaaggtttgagaatgtt

SEQ ID NO: 5877706 - DNA, 25 bp, Homo sapien
atgtataggcctggttcgtaagcat

SEQ ID NO: 5877707 - DNA, 25 bp, Homo sapien
ttgagaatgttttaggacaataatt

SEQ ID NO: 5877708 - DNA, 25 bp, Homo sapien
acatccatggaccagcaccataagg

SEQ ID NO: 5877709 - DNA, 25 bp, Homo sapien
gattctaagtctcctagataactcc

SEQ ID NO: 5877710 - DNA, 25 bp, Homo sapien
ctcagtgtatacattgtttctacaa

SEQ ID NO: 5877711 - DNA, 25 bp, Homo sapien
ttatgtctaatgtgaggcttggatt

SEQ ID NO: 5877712 - DNA, 25 bp, Homo sapien
ggttgagggtgggaaggaaggtagc

SEQ ID NO: 5877713 - DNA, 25 bp, Homo sapien
tttatttcttcacatttcccatcca

SEQ ID NO: 5877714 - DNA, 25 bp, Homo sapien
gaggagttgggttgagggtgggaag

SEQ ID NO: 5877715 - DNA, 25 bp, Homo sapien
tgaggcttggattggtttaagtcat

SEQ ID NO: 5877716 - DNA, 25 bp, Homo sapien
accagatgttaacacttagtaccta

SEQ ID NO: 5877717 - DNA, 25 bp, Homo sapien
tgtatacattgtttctacaattcag

SEQ ID NO: 5877718 - DNA, 25 bp, Homo sapien
tgtacagacaagaggtagagaggag

SEQ ID NO: 5877719 - DNA, 25 bp, Homo sapien
cagtgtatacattgtttctagctgt

SEQ ID NO: 5877720 - DNA, 25 bp, Homo sapien
catgttgatttaaatcagtttattt

SEQ ID NO: 5877721 - DNA, 25 bp, Homo sapien
ctgaaaatcatgctcaccaacagac

SEQ ID NO: 5877722 - DNA, 25 bp, Homo sapien
aacgggagacagacagaaagagagg

SEQ ID NO: 5877723 - DNA, 25 bp, Homo sapien
gaaagagaggggggtctgagccttg

SEQ ID NO: 5877724 - DNA, 25 bp, Homo sapien
ccagtgttgctgtcaatctgtgtgt

SEQ ID NO: 5877725 - DNA, 25 bp, Homo sapien
tgaaactggtccgtgattgaaaacc

SEQ ID NO: 5877726 - DNA, 25 bp, Homo sapien
atttaaagccttggtttcttggctg

SEQ ID NO: 5877727 - DNA, 25 bp, Homo sapien
tactgactttatattttgtggttga

SEQ ID NO: 5877728 - DNA, 25 bp, Homo sapien
ttctacaattcagtgtatacattgt

SEQ ID NO: 5877729 - DNA, 25 bp, Homo sapien
agtgaaactggtccgtgattgaaaa

SEQ ID NO: 5877730 - DNA, 25 bp, Homo sapien
ggttcgtaagcatactgactttata

SEQ ID NO: 5877731 - DNA, 25 bp, Homo sapien
tggtttaagtcatgtgataagcact

SEQ ID NO: 5877732 - DNA, 25 bp, Homo sapien
tcagtttatttatttcttcacattt

SEQ ID NO: 5877733 - DNA, 25 bp, Homo sapien
ttccttcatgaatgtatgattttca

SEQ ID NO: 5877734 - DNA, 25 bp, Homo sapien
atccatggaccagcaccataaggta

SEQ ID NO: 5877735 - DNA, 25 bp, Homo sapien
gtgccacactttatagaggcataag

SEQ ID NO: 5877736 - DNA, 25 bp, Homo sapien
atttttatgtctaatgtgaggcttg

SEQ ID NO: 5877737 - DNA, 25 bp, Homo sapien
aagatttctacagacattctttggg

SEQ ID NO: 5877738 - DNA, 25 bp, Homo sapien
atggaccagcaccataaggtagtct

SEQ ID NO: 5877739 - DNA, 25 bp, Homo sapien
acctggctgcccttccttcagagtc

SEQ ID NO: 5877740 - DNA, 25 bp, Homo sapien
cagcaccataaggtagtctgtgcta

SEQ ID NO: 5877741 - DNA, 25 bp, Homo sapien
ggaccagcaccataaggtagtctgt

SEQ ID NO: 5877742 - DNA, 25 bp, Homo sapien
aatcagtttatttatttcttcacat

SEQ ID NO: 5877743 - DNA, 25 bp, Homo sapien
ggattggtttaagtcatgtgataag

SEQ ID NO: 5877744 - DNA, 25 bp, Homo sapien
acaattcagtgtatacattgtttct

SEQ ID NO: 5877745 - DNA, 25 bp, Homo sapien
aattcagtgtatacattgtttctag

SEQ ID NO: 5877746 - DNA, 25 bp, Homo sapien
agcttggtacctggctgcccttcct

SEQ ID NO: 5877747 - DNA, 25 bp, Homo sapien
aagaggtagagaggagttgggttga

SEQ ID NO: 5877748 - DNA, 25 bp, Homo sapien
taagatactcaaaacatgttgattt

SEQ ID NO: 5877749 - DNA, 25 bp, Homo sapien
ttgctgtcaatctgtgtgtgcataa

SEQ ID NO: 5877750 - DNA, 25 bp, Homo sapien
cagagtcctgacactctattagcac

SEQ ID NO: 5877751 - DNA, 25 bp, Homo sapien
acctagtcggtgaatccagattcag

SEQ ID NO: 5877752 - DNA, 25 bp, Homo sapien
tacagacaagaggtagagaggagtt

SEQ ID NO: 5877753 - DNA, 25 bp, Homo sapien
gagttgggttgagggtgggaaggaa

SEQ ID NO: 5877754 - DNA, 25 bp, Homo sapien
cctagataactccagacataagata

SEQ ID NO: 5877755 - DNA, 25 bp, Homo sapien
ttctaagtctcctagataactccag

SEQ ID NO: 5877756 - DNA, 25 bp, Homo sapien
tgaatgtatgattttcagaaagata

SEQ ID NO: 5877757 - DNA, 25 bp, Homo sapien
gatgttaacacttagtacctagtcg

SEQ ID NO: 5877758 - DNA, 25 bp, Homo sapien
tgtttctagctgtgtttttcccatt

SEQ ID NO: 5877759 - DNA, 25 bp, Homo sapien
tgtttttcccattgctgtgaccaaa

SEQ ID NO: 5877760 - DNA, 25 bp, Homo sapien
tccagacataagatactcaaaacat

SEQ ID NO: 5877761 - DNA, 25 bp, Homo sapien
ttagcactgaaaatcatgctcacca

SEQ ID NO: 5877762 - DNA, 25 bp, Homo sapien
actctattagcactgaaaatcatgc

SEQ ID NO: 5877763 - DNA, 25 bp, Homo sapien
tctacagacattctttgggatattt

SEQ ID NO: 5877764 - DNA, 25 bp, Homo sapien
tagtacctagtcggtgaatccagat

SEQ ID NO: 5877765 - DNA, 25 bp, Homo sapien
gccacactttatagaggcataagag

SEQ ID NO: 5877766 - DNA, 25 bp, Homo sapien
ttcagtgtatacattgtttctagct

SEQ ID NO: 5877767 - DNA, 25 bp, Homo sapien
tgaagacatgtggagaaacgggaga

SEQ ID NO: 5877768 - DNA, 25 bp, Homo sapien
cttgtgtctgttccttcatgaatgt

SEQ ID NO: 5877769 - DNA, 25 bp, Homo sapien
ttggtgtatacattgtttctacaat

SEQ ID NO: 5877770 - DNA, 25 bp, Homo sapien
ttgtatttttatgtctaatgtgagg

SEQ ID NO: 5877771 - DNA, 25 bp, Homo sapien
catactgactttatattttgtggtt

SEQ ID NO: 5877772 - DNA, 25 bp, Homo sapien
tccagctagagagcttaagagtaaa

SEQ ID NO: 5877773 - DNA, 25 bp, Homo sapien
ggcttgtgtgtccagctagagagct

SEQ ID NO: 5877774 - DNA, 25 bp, Homo sapien
aggtttgagaatgttttaggacaat

SEQ ID NO: 5877775 - DNA, 25 bp, Homo sapien
gcaccataaggtagtctgtgctaca

SEQ ID NO: 5877776 - DNA, 25 bp, Homo sapien
ctacaccagatgttaacacttagta

SEQ ID NO: 5877777 - DNA, 25 bp, Homo sapien
cactgaaaatcatgctcaccaacag

SEQ ID NO: 5877778 - DNA, 25 bp, Homo sapien
tctgtgtgtgcataaaaatgtacag

SEQ ID NO: 5877779 - DNA, 25 bp, Homo sapien
gggaaggaaggtagcttggtacctg

SEQ ID NO: 5877780 - DNA, 25 bp, Homo sapien
gtttctacaattcagtgtatacatt

SEQ ID NO: 5877781 - DNA, 25 bp, Homo sapien
gagaggagttgggttgagggtggga

SEQ ID NO: 5877782 - DNA, 25 bp, Homo sapien
agtgttgctgtcaatctgtgtgtgc

SEQ ID NO: 5877783 - DNA, 25 bp, Homo sapien
ttggtttcttggctgtacaatgggc

SEQ ID NO: 5877784 - DNA, 25 bp, Homo sapien
cagacagaaggtttgagaatgtttt

SEQ ID NO: 5877785 - DNA, 25 bp, Homo sapien
cattgtttctacaattcagtgtata

SEQ ID NO: 5877786 - DNA, 25 bp, Homo sapien
cagacaagaggtagagaggagttgg

SEQ ID NO: 5877787 - DNA, 25 bp, Homo sapien
gtaccacatgggaaatgtataggcc

SEQ ID NO: 5877788 - DNA, 25 bp, Homo sapien
cataagatactcaaaacatgttgat

SEQ ID NO: 5877789 - DNA, 25 bp, Homo sapien
aaaagatttctacagacattctttg

SEQ ID NO: 5877790 - DNA, 25 bp, Homo sapien
ccgtgattgaaaacccagtgttgct

SEQ ID NO: 5877791 - DNA, 25 bp, Homo sapien
aatgtatgattttcagaaagatact

SEQ ID NO: 5877792 - DNA, 25 bp, Homo sapien
aagacatgtggagaaacgggagaca

SEQ ID NO: 5877793 - DNA, 25 bp, Homo sapien
ttaagagtaaatatgtttatgtgac

SEQ ID NO: 5877794 - DNA, 25 bp, Homo sapien
ttcatgaatgtatgattttcagaaa

SEQ ID NO: 5877795 - DNA, 25 bp, Homo sapien
tagcatattaatgaaaatgtaccac

SEQ ID NO: 5877796 - DNA, 25 bp, Homo sapien
ccatggaccagcaccataaggtagt

SEQ ID NO: 5877797 - DNA, 25 bp, Homo sapien
aagcactgttgtttctacacaaagt

SEQ ID NO: 5877798 - DNA, 25 bp, Homo sapien
accagcaccataaggtagtctgtgc

SEQ ID NO: 5877799 - DNA, 25 bp, Homo sapien
tgtttctacaacttggtgtatacat

SEQ ID NO: 5877800 - DNA, 25 bp, Homo sapien
aagtctcctagataactccagacat

SEQ ID NO: 5877801 - DNA, 25 bp, Homo sapien
gattcagagattctaagtctcctag

SEQ ID NO: 5877802 - DNA, 25 bp, Homo sapien
ttttaaacatccatggaccagcacc

SEQ ID NO: 5877803 - DNA, 25 bp, Homo sapien
ataagcactgttgtttctacacaaa

SEQ ID NO: 5877804 - DNA, 25 bp, Homo sapien
tttctacagacattctttgggatat

SEQ ID NO: 5877805 - DNA, 25 bp, Homo sapien
cataagagaaaagatttctacagac

SEQ ID NO: 5877806 - DNA, 25 bp, Homo sapien
tgtggagaaacgggagacagacaga

SEQ ID NO: 5877807 - DNA, 25 bp, Homo sapien
ctacacaaagtgaaactggtccgtg

SEQ ID NO: 5877808 - DNA, 25 bp, Homo sapien
gactttatattttgtggttgatttt

SEQ ID NO: 5877809 - DNA, 25 bp, Homo sapien
tgtctgttccttcatgaatgtatga

SEQ ID NO: 5877810 - DNA, 25 bp, Homo sapien
agggtgaagacatgtggagaaacgg

SEQ ID NO: 5877811 - DNA, 25 bp, Homo sapien
tgtgtgcataaaaatgtacagacaa

SEQ ID NO: 5877812 - DNA, 25 bp, Homo sapien
tggagaaacgggagacagacagaaa

SEQ ID NO: 5877813 - DNA, 25 bp, Homo sapien
attgctgtgaccaaaacctgaattc

SEQ ID NO: 5877814 - DNA, 25 bp, Homo sapien
tggtccgtgattgaaaacccagtgt

SEQ ID NO: 5877815 - DNA, 25 bp, Homo sapien
cagaacacagagggtgaagacatgt

SEQ ID NO: 5877816 - DNA, 25 bp, Homo sapien
agtttatttatttcttcacatttcc

SEQ ID NO: 5877817 - DNA, 25 bp, Homo sapien
attgtttctacaacttggtgtatac

SEQ ID NO: 5877818 - DNA, 25 bp, Homo sapien
atgtctaatgtgaggcttggattgg

SEQ ID NO: 5877819 - DNA, 25 bp, Homo sapien
actcttggacggggcttgtgtgtcc

SEQ ID NO: 5877820 - DNA, 25 bp, Homo sapien
taaaaatgtacagacaagaggtaga

SEQ ID NO: 5877821 - DNA, 25 bp, Homo sapien
aggtagcttggtacctggctgccct

SEQ ID NO: 5877822 - DNA, 25 bp, Homo sapien
ttggattggtttaagtcatgtgata

SEQ ID NO: 5877823 - DNA, 25 bp, Homo sapien
ctacaattcagtgtatacattgttt

SEQ ID NO: 5877824 - DNA, 25 bp, Homo sapien
aaaacatgttgatttaaatcagttt

SEQ ID NO: 5877825 - DNA, 25 bp, Homo sapien
ccacacagcagggccagaacacaga

SEQ ID NO: 5877826 - DNA, 25 bp, Homo sapien
taaatcaactcagtgtatacattgt

SEQ ID NO: 5877827 - DNA, 25 bp, Homo sapien
gtgacatagacataaatcaactcag

SEQ ID NO: 5877828 - DNA, 25 bp, Homo sapien
actggtccgtgattgaaaacccagt

SEQ ID NO: 5877829 - DNA, 25 bp, Homo sapien
tttcttggctgtacaatgggcttgg

SEQ ID NO: 5877830 - DNA, 25 bp, Homo sapien
attggtttaagtcatgtgataagca

SEQ ID NO: 5877831 - DNA, 25 bp, Homo sapien
ttccttcagagtcctgacactctat

SEQ ID NO: 5877832 - DNA, 25 bp, Homo sapien
cctgacactctattagcactgaaaa

SEQ ID NO: 5877833 - DNA, 25 bp, Homo sapien
agtctgtgctacaccagatgttaac

SEQ ID NO: 5877834 - DNA, 25 bp, Homo sapien
agcagggccagaacacagagggtga

SEQ ID NO: 5877835 - DNA, 25 bp, Homo sapien
attaatgaaaatgtaccacatggga

SEQ ID NO: 5877836 - DNA, 25 bp, Homo sapien
taatgaaaatgtaccacatgggaaa

SEQ ID NO: 5877837 - DNA, 25 bp, Homo sapien
tgtgctacaccagatgttaacactt

SEQ ID NO: 5877838 - DNA, 25 bp, Homo sapien
gacatagacataaatcaactcagtg

SEQ ID NO: 5877839 - DNA, 25 bp, Homo sapien
ttcagagtcctgacactctattagc

SEQ ID NO: 5877840 - DNA, 25 bp, Homo sapien
ctggctgcccttccttcagagtcct

SEQ ID NO: 5877841 - DNA, 25 bp, Homo sapien
aacacttagtacctagtcggtgaat

SEQ ID NO: 5877842 - DNA, 25 bp, Homo sapien
cagggccagaacacagagggtgaag

SEQ ID NO: 5877843 - DNA, 25 bp, Homo sapien
tctgttccttcatgaatgtatgatt

SEQ ID NO: 5877844 - DNA, 25 bp, Homo sapien
atgtaccacatgggaaatgtatagg

SEQ ID NO: 5877845 - DNA, 25 bp, Homo sapien
ctcctagataactccagacataaga

SEQ ID NO: 5877846 - DNA, 25 bp, Homo sapien
ctgcccttccttcagagtcctgaca

SEQ ID NO: 5877847 - DNA, 25 bp, Homo sapien
tttctacaacttggtgtatacattg

SEQ ID NO: 5877848 - DNA, 25 bp, Homo sapien
catttcccatccacacagcagggcc

SEQ ID NO: 5877849 - DNA, 25 bp, Homo sapien
agcatactgactttatattttgtgg

SEQ ID NO: 5877850 - DNA, 25 bp, Homo sapien
gaccaaaacctgaattcttttgcat

SEQ ID NO: 5877851 - DNA, 25 bp, Homo sapien
catgtgataagcactgttgtttcta

SEQ ID NO: 5877852 - DNA, 25 bp, Homo sapien
tggtacctggctgcccttccttcag

SEQ ID NO: 5877853 - DNA, 25 bp, Homo sapien
aacatgttgatttaaatcagtttat

SEQ ID NO: 5877854 - DNA, 25 bp, Homo sapien
ctagtcggtgaatccagattcagag

SEQ ID NO: 5877855 - DNA, 25 bp, Homo sapien
aatccagattcagagattctaagtc

SEQ ID NO: 5877856 - DNA, 25 bp, Homo sapien
gctagagagcttaagagtaaatatg

SEQ ID NO: 5877857 - DNA, 25 bp, Homo sapien
atattaatgaaaatgtaccacatgg

SEQ ID NO: 5877858 - DNA, 25 bp, Homo sapien
agactcttggacggggcttgtgtgt

SEQ ID NO: 5877859 - DNA, 25 bp, Homo sapien
agccttggtttcttggctgtacaat

SEQ ID NO: 5877860 - DNA, 25 bp, Homo sapien
ttgagggtgggaaggaaggtagctt

SEQ ID NO: 5877861 - DNA, 25 bp, Homo sapien
tattagcactgaaaatcatgctcac

SEQ ID NO: 5877862 - DNA, 25 bp, Homo sapien
caacttggtgtatacattgtttcta

SEQ ID NO: 5877863 - DNA, 25 bp, Homo sapien
tttcttcacatttcccatccacaca

SEQ ID NO: 5877864 - DNA, 25 bp, Homo sapien
agagaaaagatttctacagacattc

SEQ ID NO: 5877865 - DNA, 25 bp, Homo sapien
ttcgtaagcatactgactttatatt

SEQ ID NO: 5877866 - DNA, 25 bp, Homo sapien
tacaacttggtgtatacattgtttc

SEQ ID NO: 5877867 - DNA, 25 bp, Homo sapien
acacagcagggccagaacacagagg

SEQ ID NO: 5877868 - DNA, 25 bp, Homo sapien
acagcagggccagaacacagagggt

SEQ ID NO: 5877869 - DNA, 25 bp, Homo sapien
gaggcataagagaaaagatttctac

SEQ ID NO: 5877870 - DNA, 25 bp, Homo sapien
gtctcctagataactccagacataa

SEQ ID NO: 5877871 - DNA, 25 bp, Homo sapien
ggtttcttggctgtacaatgggctt

SEQ ID NO: 5877872 - DNA, 25 bp, Homo sapien
ctttgggatattttaaacatccatg

SEQ ID NO: 5877873 - DNA, 25 bp, Homo sapien
gggggggggtgccacactttataga

SEQ ID NO: 5877874 - DNA, 25 bp, Homo sapien
gggtgccacactttatagaggcata

SEQ ID NO: 5877875 - DNA, 25 bp, Homo sapien
tagagagcttaagagtaaatatgtt

SEQ ID NO: 5877876 - DNA, 25 bp, Homo sapien
aactcagtgtatacattgtttctac

SEQ ID NO: 5877877 - DNA, 25 bp, Homo sapien
cactttatagaggcataagagaaaa

SEQ ID NO: 5877878 - DNA, 25 bp, Homo sapien
gtttgagaatgttttaggacaataa

SEQ ID NO: 5877879 - DNA, 25 bp, Homo sapien
gcttggattggtttaagtcatgtga

SEQ ID NO: 5877880 - DNA, 25 bp, Homo sapien
gagaatgttttaggacaataatttg

SEQ ID NO: 5877881 - DNA, 25 bp, Homo sapien
ccttccttcagagtcctgacactct

SEQ ID NO: 5877882 - DNA, 25 bp, Homo sapien
gagcttaagagtaaatatgtttatg

SEQ ID NO: 5877883 - DNA, 25 bp, Homo sapien
ttgtggttgatttttttttattgta

SEQ ID NO: 5877884 - DNA, 25 bp, Homo sapien
aattcttttgcatagcatattaatg

SEQ ID NO: 5877885 - DNA, 25 bp, Homo sapien
gatattttaaacatccatggaccag

SEQ ID NO: 5877886 - DNA, 25 bp, Homo sapien
gccttgtgtctgttccttcatgaat

SEQ ID NO: 5877887 - DNA, 25 bp, Homo sapien
aggggggtctgagccttgtgtctgt

SEQ ID NO: 5877888 - DNA, 25 bp, Homo sapien
atgaaaatgtaccacatgggaaatg

SEQ ID NO: 5877889 - DNA, 25 bp, Homo sapien
tattgtatttttatgtctaatgtga

SEQ ID NO: 5877890 - DNA, 25 bp, Homo sapien
cagtgtatacattgtttctacaact

SEQ ID NO: 5877891 - DNA, 25 bp, Homo sapien
ggaaatgtataggcctggttcgtaa

SEQ ID NO: 5877892 - DNA, 25 bp, Homo sapien
ggggcttgtgtgtccagctagagag

SEQ ID NO: 5877893 - DNA, 25 bp, Homo sapien
tttattgtatttttatgtctaatgt

SEQ ID NO: 5877894 - DNA, 25 bp, Homo sapien
aaatgtaccacatgggaaatgtata

SEQ ID NO: 5877895 - DNA, 25 bp, Homo sapien
cttgtgtgtccagctagagagctta

SEQ ID NO: 5877896 - DNA, 25 bp, Homo sapien
tgctgtgaccaaaacctgaattctt

SEQ ID NO: 5877897 - DNA, 25 bp, Homo sapien
cttttgcatagcatattaatgaaaa

SEQ ID NO: 5877898 - DNA, 25 bp, Homo sapien
cagacataagatactcaaaacatgt

SEQ ID NO: 5877899 - DNA, 25 bp, Homo sapien
catgaatgtatgattttcagaaaga

SEQ ID NO: 5877900 - DNA, 25 bp, Homo sapien
aaagtgaaactggtccgtgattgaa

SEQ ID NO: 5877901 - DNA, 25 bp, Homo sapien
aaatgtataggcctggttcgtaagc

SEQ ID NO: 5877902 - DNA, 25 bp, Homo sapien
actcaaaacatgttgatttaaatca

SEQ ID NO: 5877903 - DNA, 25 bp, Homo sapien
aaatcatgctcaccaacagacagaa

SEQ ID NO: 5877904 - DNA, 25 bp, Homo sapien
tttcccattgctgtgaccaaaacct

SEQ ID NO: 5877905 - DNA, 25 bp, Homo sapien
tgtgtttttcccattgctgtgacca

SEQ ID NO: 5877906 - DNA, 25 bp, Homo sapien
tgcataaaaatgtacagacaagagg

SEQ ID NO: 5877907 - DNA, 25 bp, Homo sapien
agccagactcttggacggggcttgt

SEQ ID NO: 5877908 - DNA, 25 bp, Homo sapien
tgtggatgggaaatgtgaagaaata

SEQ ID NO: 5877909 - DNA, 25 bp, Homo sapien
agcaacactgggttttcaatcacgg

SEQ ID NO: 5877910 - DNA, 25 bp, Homo sapien
gtgagcatgattttcagtgctaata

SEQ ID NO: 5877911 - DNA, 25 bp, Homo sapien
tcccatgtggtacattttcattaat

SEQ ID NO: 5877912 - DNA, 25 bp, Homo sapien
atgtctgtagaaatcttttctctta

SEQ ID NO: 5877913 - DNA, 25 bp, Homo sapien
aggttttggtcacagcaatgggaaa

SEQ ID NO: 5877914 - DNA, 25 bp, Homo sapien
gtgaagaaataaataaactgattta

SEQ ID NO: 5877915 - DNA, 25 bp, Homo sapien
acagcaacactgggttttcaatcac

SEQ ID NO: 5877916 - DNA, 25 bp, Homo sapien
ataaactgatttaaatcaacatgtt

SEQ ID NO: 5877917 - DNA, 25 bp, Homo sapien
catggatgtttaaaatatcccaaag

SEQ ID NO: 5877918 - DNA, 25 bp, Homo sapien
accctctgtgttctggccctgctgt

SEQ ID NO: 5877919 - DNA, 25 bp, Homo sapien
tttcactttgtgtagaaacaacagt

SEQ ID NO: 5877920 - DNA, 25 bp, Homo sapien
tactcttaagctctctagctggaca

SEQ ID NO: 5877921 - DNA, 25 bp, Homo sapien
atttaaatcaacatgttttgagtat

SEQ ID NO: 5877922 - DNA, 25 bp, Homo sapien
aacaatgtatacaccaagttgtaga

SEQ ID NO: 5877923 - DNA, 25 bp, Homo sapien
accgactaggtactaagtgttaaca

SEQ ID NO: 5877924 - DNA, 25 bp, Homo sapien
tagacataaaaatacaataaaaaaa

SEQ ID NO: 5877925 - DNA, 25 bp, Homo sapien
tctctacctcttgtctgtacatttt

SEQ ID NO: 5877926 - DNA, 25 bp, Homo sapien
aaccttctgtctgttggtgagcatg

SEQ ID NO: 5877927 - DNA, 25 bp, Homo sapien
atcccaaagaatgtctgtagaaatc

SEQ ID NO: 5877928 - DNA, 25 bp, Homo sapien
acattagacataaaaatacaataaa

SEQ ID NO: 5877929 - DNA, 25 bp, Homo sapien
atgtggtacattttcattaatatgc

SEQ ID NO: 5877930 - DNA, 25 bp, Homo sapien
tcttatgtctggagttatctaggag

SEQ ID NO: 5877931 - DNA, 25 bp, Homo sapien
aaatatcccaaagaatgtctgtaga

SEQ ID NO: 5877932 - DNA, 25 bp, Homo sapien
tcaggactctgaaggaagggcagcc

SEQ ID NO: 5877933 - DNA, 25 bp, Homo sapien
acaatgtatacactgagttgattta

SEQ ID NO: 5877934 - DNA, 25 bp, Homo sapien
aaactgatttaaatcaacatgtttt

SEQ ID NO: 5877935 - DNA, 25 bp, Homo sapien
aacatatttactcttaagctctcta

SEQ ID NO: 5877936 - DNA, 25 bp, Homo sapien
tggatgtttaaaatatcccaaagaa

SEQ ID NO: 5877937 - DNA, 25 bp, Homo sapien
gtacatttttatgcacacacagatt

SEQ ID NO: 5877938 - DNA, 25 bp, Homo sapien
gttaccaagcccattgtacagccaa

SEQ ID NO: 5877939 - DNA, 25 bp, Homo sapien
tgggttttcaatcacggaccagttt

SEQ ID NO: 5877940 - DNA, 25 bp, Homo sapien
taccttatggtgctggtccatggat

SEQ ID NO: 5877941 - DNA, 25 bp, Homo sapien
ccaatccaagcctcacattagacat

SEQ ID NO: 5877942 - DNA, 25 bp, Homo sapien
ccaccctcaacccaactcctctcta

SEQ ID NO: 5877943 - DNA, 25 bp, Homo sapien
tttctgaaaatcatacattcatgaa

SEQ ID NO: 5877944 - DNA, 25 bp, Homo sapien
gatgtttaaaatatcccaaagaatg

SEQ ID NO: 5877945 - DNA, 25 bp, Homo sapien
gtttctccacatgtcttcaccctct

SEQ ID NO: 5877946 - DNA, 25 bp, Homo sapien
aacaacagtgcttatcacatgactt

SEQ ID NO: 5877947 - DNA, 25 bp, Homo sapien
gccaggtaccaagctaccttccttc

SEQ ID NO: 5877948 - DNA, 25 bp, Homo sapien
tgacagcaacactgggttttcaatc

SEQ ID NO: 5877949 - DNA, 25 bp, Homo sapien
tttcccatgtggtacattttcatta

SEQ ID NO: 5877950 - DNA, 25 bp, Homo sapien
ccagtttcactttgtgtagaaacaa

SEQ ID NO: 5877951 - DNA, 25 bp, Homo sapien
tggtgagcatgattttcagtgctaa

SEQ ID NO: 5877952 - DNA, 25 bp, Homo sapien
cggaccagtttcactttgtgtagaa

SEQ ID NO: 5877953 - DNA, 25 bp, Homo sapien
tggtcacagcaatgggaaaaacaca

SEQ ID NO: 5877954 - DNA, 25 bp, Homo sapien
gtctggagttatctaggagacttag

SEQ ID NO: 5877955 - DNA, 25 bp, Homo sapien
ctaaaacattctcaaaccttctgtc

SEQ ID NO: 5877956 - DNA, 25 bp, Homo sapien
ccacaaaatataaagtcagtatgct

SEQ ID NO: 5877957 - DNA, 25 bp, Homo sapien
aaccaatccaagcctcacattagac

SEQ ID NO: 5877958 - DNA, 25 bp, Homo sapien
atgttttgagtatcttatgtctgga

SEQ ID NO: 5877959 - DNA, 25 bp, Homo sapien
tgtcctaaaacattctcaaaccttc

SEQ ID NO: 5877960 - DNA, 25 bp, Homo sapien
aaataaactgatttaaatcaacatg

SEQ ID NO: 5877961 - DNA, 25 bp, Homo sapien
caaggctcagacccccctctctttc

SEQ ID NO: 5877962 - DNA, 25 bp, Homo sapien
caagcctcacattagacataaaaat

SEQ ID NO: 5877963 - DNA, 25 bp, Homo sapien
tataaagtcagtatgcttacgaacc

SEQ ID NO: 5877964 - DNA, 25 bp, Homo sapien
gtcacataaacatatttactcttaa

SEQ ID NO: 5877965 - DNA, 25 bp, Homo sapien
aagccccgtccaagagtctggctgc

SEQ ID NO: 5877966 - DNA, 25 bp, Homo sapien
cttatcacatgacttaaaccaatcc

SEQ ID NO: 5877967 - DNA, 25 bp, Homo sapien
aagctaccttccttcccaccctcaa

SEQ ID NO: 5877968 - DNA, 25 bp, Homo sapien
tcaggttttggtcacagcaatggga

SEQ ID NO: 5877969 - DNA, 25 bp, Homo sapien
ttttcaatcacggaccagtttcact

SEQ ID NO: 5877970 - DNA, 25 bp, Homo sapien
tgtgtggatgggaaatgtgaagaaa

SEQ ID NO: 5877971 - DNA, 25 bp, Homo sapien
ttttcattaatatgctatgcaaaag

SEQ ID NO: 5877972 - DNA, 25 bp, Homo sapien
gcatgattttcagtgctaatagagt

SEQ ID NO: 5877973 - DNA, 25 bp, Homo sapien
cttatgcctctataaagtgtggcac

SEQ ID NO: 5877974 - DNA, 25 bp, Homo sapien
ccattgtacagccaagaaaccaagg

SEQ ID NO: 5877975 - DNA, 25 bp, Homo sapien
agttatctaggagacttagaatctc

SEQ ID NO: 5877976 - DNA, 25 bp, Homo sapien
tttaaaatatcccaaagaatgtctg

SEQ ID NO: 5877977 - DNA, 25 bp, Homo sapien
gacttaaaccaatccaagcctcaca

SEQ ID NO: 5877978 - DNA, 25 bp, Homo sapien
acacagctagaaacaatgtatacac

SEQ ID NO: 5877979 - DNA, 25 bp, Homo sapien
aatcatacattcatgaaggaacaga

SEQ ID NO: 5877980 - DNA, 25 bp, Homo sapien
ttcattaatatgctatgcaaaagaa

SEQ ID NO: 5877981 - DNA, 25 bp, Homo sapien
ctctctagctggacacacaagcccc

SEQ ID NO: 5877982 - DNA, 25 bp, Homo sapien
attcaccgactaggtactaagtgtt

SEQ ID NO: 5877983 - DNA, 25 bp, Homo sapien
agtttcactttgtgtagaaacaaca

SEQ ID NO: 5877984 - DNA, 25 bp, Homo sapien
atgtctatgtcacataaacatattt

SEQ ID NO: 5877985 - DNA, 25 bp, Homo sapien
aagtcagtatgcttacgaaccaggc

SEQ ID NO: 5877986 - DNA, 25 bp, Homo sapien
tacagccaagaaaccaaggctttaa

SEQ ID NO: 5877987 - DNA, 25 bp, Homo sapien
acagctagaaacaatgtatacactg

SEQ ID NO: 5877988 - DNA, 25 bp, Homo sapien
tgtagaaacaacagtgcttatcaca

SEQ ID NO: 5877989 - DNA, 25 bp, Homo sapien
gaagggcagccaggtaccaagctac

SEQ ID NO: 5877990 - DNA, 25 bp, Homo sapien
tagaaacaatgtatacaccaagttg

SEQ ID NO: 5877991 - DNA, 25 bp, Homo sapien
cctcacattagacataaaaatacaa

SEQ ID NO: 5877992 - DNA, 25 bp, Homo sapien
agaaatcttttctcttatgcctcta

SEQ ID NO: 5877993 - DNA, 25 bp, Homo sapien
tgtttaaaatatcccaaagaatgtc

SEQ ID NO: 5877994 - DNA, 25 bp, Homo sapien
attgtacagccaagaaaccaaggct

SEQ ID NO: 5877995 - DNA, 25 bp, Homo sapien
gtagaaatcttttctcttatgcctc

SEQ ID NO: 5877996 - DNA, 25 bp, Homo sapien
cacggaccagtttcactttgtgtag

SEQ ID NO: 5877997 - DNA, 25 bp, Homo sapien
atcacggaccagtttcactttgtgt

SEQ ID NO: 5877998 - DNA, 25 bp, Homo sapien
atgtcacataaacatatttactctt

SEQ ID NO: 5877999 - DNA, 25 bp, Homo sapien
caaattattgtcctaaaacattctc

SEQ ID NO: 5878000 - DNA, 25 bp, Homo sapien
tcacatgacttaaaccaatccaagc

SEQ ID NO: 5878001 - DNA, 25 bp, Homo sapien
tatcacatgacttaaaccaatccaa

SEQ ID NO: 5878002 - DNA, 25 bp, Homo sapien
agttgtagaaacaatgtatacactg

SEQ ID NO: 5878003 - DNA, 25 bp, Homo sapien
ccacatgtcttcaccctctgtgttc

SEQ ID NO: 5878004 - DNA, 25 bp, Homo sapien
gcacacacagattgacagcaacact

SEQ ID NO: 5878005 - DNA, 25 bp, Homo sapien
acacacagattgacagcaacactgg

SEQ ID NO: 5878006 - DNA, 25 bp, Homo sapien
ctgctgtgtggatgggaaatgtgaa

SEQ ID NO: 5878007 - DNA, 25 bp, Homo sapien
agagtgtcaggactctgaaggaagg

SEQ ID NO: 5878008 - DNA, 25 bp, Homo sapien
atgaaggaacagacacaaggctcag

SEQ ID NO: 5878009 - DNA, 25 bp, Homo sapien
aggaacagacacaaggctcagaccc

SEQ ID NO: 5878010 - DNA, 25 bp, Homo sapien
cactgaattgtagaaacaatgtata

SEQ ID NO: 5878011 - DNA, 25 bp, Homo sapien
gaccagtttcactttgtgtagaaac

SEQ ID NO: 5878012 - DNA, 25 bp, Homo sapien
tgtatacactgagttgatttatgtc

SEQ ID NO: 5878013 - DNA, 25 bp, Homo sapien
tatgctatgcaaaagaattcaggtt

SEQ ID NO: 5878014 - DNA, 25 bp, Homo sapien
gaaggaagggcagccaggtaccaag

SEQ ID NO: 5878015 - DNA, 25 bp, Homo sapien
attcaggttttggtcacagcaatgg

SEQ ID NO: 5878016 - DNA, 25 bp, Homo sapien
tacatttcccatgtggtacattttc

SEQ ID NO: 5878017 - DNA, 25 bp, Homo sapien
ttatggtgctggtccatggatgttt

SEQ ID NO: 5878018 - DNA, 25 bp, Homo sapien
aatgtatacactgaattgtagaaac

SEQ ID NO: 5878019 - DNA, 25 bp, Homo sapien
cctcttgtctgtacatttttatgca

SEQ ID NO: 5878020 - DNA, 25 bp, Homo sapien
aatccaagcctcacattagacataa

SEQ ID NO: 5878021 - DNA, 25 bp, Homo sapien
gtctgtagaaatcttttctcttatg

SEQ ID NO: 5878022 - DNA, 25 bp, Homo sapien
agacacaaggctcagacccccctct

SEQ ID NO: 5878023 - DNA, 25 bp, Homo sapien
cactgagttgatttatgtctatgtc

SEQ ID NO: 5878024 - DNA, 25 bp, Homo sapien
tgtagaaacaatgtatacaccaagt

SEQ ID NO: 5878025 - DNA, 25 bp, Homo sapien
actaggtactaagtgttaacatctg

SEQ ID NO: 5878026 - DNA, 25 bp, Homo sapien
ctcaaaccttctgtctgttggtgag

SEQ ID NO: 5878027 - DNA, 25 bp, Homo sapien
gtcttcaccctctgtgttctggccc

SEQ ID NO: 5878028 - DNA, 25 bp, Homo sapien
ctgaaggaagggcagccaggtacca

SEQ ID NO: 5878029 - DNA, 25 bp, Homo sapien
caggcctatacatttcccatgtggt

SEQ ID NO: 5878030 - DNA, 25 bp, Homo sapien
gaattgtagaaacaatgtatacacc

SEQ ID NO: 5878031 - DNA, 25 bp, Homo sapien
tctttctgaaaatcatacattcatg

SEQ ID NO: 5878032 - DNA, 25 bp, Homo sapien
caacatgttttgagtatcttatgtc

SEQ ID NO: 5878033 - DNA, 25 bp, Homo sapien
ttcagtgctaatagagtgtcaggac

SEQ ID NO: 5878034 - DNA, 25 bp, Homo sapien
gagttgatttatgtctatgtcacat

SEQ ID NO: 5878035 - DNA, 25 bp, Homo sapien
tttctgtctgtctcccgtttctcca

SEQ ID NO: 5878036 - DNA, 25 bp, Homo sapien
tacactgagttgatttatgtctatg

SEQ ID NO: 5878037 - DNA, 25 bp, Homo sapien
atggtgctggtccatggatgtttaa

SEQ ID NO: 5878038 - DNA, 25 bp, Homo sapien
aattattgtcctaaaacattctcaa

SEQ ID NO: 5878039 - DNA, 25 bp, Homo sapien
caatcacggaccagtttcactttgt

SEQ ID NO: 5878040 - DNA, 25 bp, Homo sapien
ctgtagaaatcttttctcttatgcc

SEQ ID NO: 5878041 - DNA, 25 bp, Homo sapien
gaatctggattcaccgactaggtac

SEQ ID NO: 5878042 - DNA, 25 bp, Homo sapien
ggtactaagtgttaacatctggtgt

SEQ ID NO: 5878043 - DNA, 25 bp, Homo sapien
ggtacattttcattaatatgctatg

SEQ ID NO: 5878044 - DNA, 25 bp, Homo sapien
agaaacaatgtatacactgagttga

SEQ ID NO: 5878045 - DNA, 25 bp, Homo sapien
tttttaagtatctttctgaaaatca

SEQ ID NO: 5878046 - DNA, 25 bp, Homo sapien
aatcaaccacaaaatataaagtcag

SEQ ID NO: 5878047 - DNA, 25 bp, Homo sapien
tccaagcctcacattagacataaaa

SEQ ID NO: 5878048 - DNA, 25 bp, Homo sapien
tgtgtagaaacaacagtgcttatca

SEQ ID NO: 5878049 - DNA, 25 bp, Homo sapien
tctcccgtttctccacatgtcttca

SEQ ID NO: 5878050 - DNA, 25 bp, Homo sapien
ttgtagaaacaatgtatacactgag

SEQ ID NO: 5878051 - DNA, 25 bp, Homo sapien
gtctatgtcacataaacatatttac

SEQ ID NO: 5878052 - DNA, 25 bp, Homo sapien
gattttcagtgctaatagagtgtca

SEQ ID NO: 5878053 - DNA, 25 bp, Homo sapien
ctgtacatttttatgcacacacaga

SEQ ID NO: 5878054 - DNA, 25 bp, Homo sapien
acatgacttaaaccaatccaagcct

SEQ ID NO: 5878055 - DNA, 25 bp, Homo sapien
cccatacaaattattgtcctaaaac

SEQ ID NO: 5878056 - DNA, 25 bp, Homo sapien
agcctcacattagacataaaaatac

SEQ ID NO: 5878057 - DNA, 25 bp, Homo sapien
ccttctgtctgttggtgagcatgat

SEQ ID NO: 5878058 - DNA, 25 bp, Homo sapien
tacctcttgtctgtacatttttatg

SEQ ID NO: 5878059 - DNA, 25 bp, Homo sapien
atctggattcaccgactaggtacta

SEQ ID NO: 5878060 - DNA, 25 bp, Homo sapien
gtctgtacatttttatgcacacaca

SEQ ID NO: 5878061 - DNA, 25 bp, Homo sapien
tctgtctgtctcccgtttctccaca

SEQ ID NO: 5878062 - DNA, 25 bp, Homo sapien
tgtcaggactctgaaggaagggcag

SEQ ID NO: 5878063 - DNA, 25 bp, Homo sapien
cattttcattaatatgctatgcaaa

SEQ ID NO: 5878064 - DNA, 25 bp, Homo sapien
ctggagttatctaggagacttagaa

SEQ ID NO: 5878065 - DNA, 25 bp, Homo sapien
tgctatgcaaaagaattcaggtttt

SEQ ID NO: 5878066 - DNA, 25 bp, Homo sapien
aaacaatgtatacactgaattgtag

SEQ ID NO: 5878067 - DNA, 25 bp, Homo sapien
tctctttctgtctgtctcccgtttc

SEQ ID NO: 5878068 - DNA, 25 bp, Homo sapien
ttattgtcctaaaacattctcaaac

SEQ ID NO: 5878069 - DNA, 25 bp, Homo sapien
gttgatttatgtctatgtcacataa

SEQ ID NO: 5878070 - DNA, 25 bp, Homo sapien
gccccgtccaagagtctggctgcgt

SEQ ID NO: 5878071 - DNA, 25 bp, Homo sapien
ttatctaggagacttagaatctctg

SEQ ID NO: 5878072 - DNA, 25 bp, Homo sapien
taagtatctttctgaaaatcataca

SEQ ID NO: 5878073 - DNA, 25 bp, Homo sapien
taccaagcccattgtacagccaaga

SEQ ID NO: 5878074 - DNA, 25 bp, Homo sapien
acgaaccaggcctatacatttccca

SEQ ID NO: 5878075 - DNA, 25 bp, Homo sapien
tgtatacactgaattgtagaaacaa

SEQ ID NO: 5878076 - DNA, 25 bp, Homo sapien
tagcacagactaccttatggtgctg

SEQ ID NO: 5878077 - DNA, 25 bp, Homo sapien
agggcagccaggtaccaagctacct

SEQ ID NO: 5878078 - DNA, 25 bp, Homo sapien
acaagccccgtccaagagtctggct

SEQ ID NO: 5878079 - DNA, 25 bp, Homo sapien
ggtgtagcacagactaccttatggt

SEQ ID NO: 5878080 - DNA, 25 bp, Homo sapien
cttaagctctctagctggacacaca

SEQ ID NO: 5878081 - DNA, 25 bp, Homo sapien
acacacaagccccgtccaagagtct

SEQ ID NO: 5878082 - DNA, 25 bp, Homo sapien
ccttatggtgctggtccatggatgt

SEQ ID NO: 5878083 - DNA, 25 bp, Homo sapien
atttttatgcacacacagattgaca

SEQ ID NO: 5878084 - DNA, 25 bp, Homo sapien
gaattcaggttttggtcacagcaat

SEQ ID NO: 5878085 - DNA, 25 bp, Homo sapien
ggcagccaggtaccaagctaccttc

SEQ ID NO: 5878086 - DNA, 25 bp, Homo sapien
acagtgcttatcacatgacttaaac

SEQ ID NO: 5878087 - DNA, 25 bp, Homo sapien
aaatgtgaagaaataaataaactga

SEQ ID NO: 5878088 - DNA, 25 bp, Homo sapien
ccctgctgtgtggatgggaaatgtg

SEQ ID NO: 5878089 - DNA, 25 bp, Homo sapien
tgctggtccatggatgtttaaaata

SEQ ID NO: 5878090 - DNA, 25 bp, Homo sapien
tgcttatcacatgacttaaaccaat

SEQ ID NO: 5878091 - DNA, 25 bp, Homo sapien
ccatgtggtacattttcattaatat

SEQ ID NO: 5878092 - DNA, 25 bp, Homo sapien
aaccacaaaatataaagtcagtatg

SEQ ID NO: 5878093 - DNA, 25 bp, Homo sapien
ggcctatacatttcccatgtggtac

SEQ ID NO: 5878094 - DNA, 25 bp, Homo sapien
agtgcttatcacatgacttaaacca

SEQ ID NO: 5878095 - DNA, 25 bp, Homo sapien
acaaaatataaagtcagtatgctta

SEQ ID NO: 5878096 - DNA, 25 bp, Homo sapien
ctatgcaaaagaattcaggttttgg

SEQ ID NO: 5878097 - DNA, 25 bp, Homo sapien
accaggcctatacatttcccatgtg

SEQ ID NO: 5878098 - DNA, 25 bp, Homo sapien
actaccttatggtgctggtccatgg

SEQ ID NO: 5878099 - DNA, 25 bp, Homo sapien
ctggtccatggatgtttaaaatatc

SEQ ID NO: 5878100 - DNA, 25 bp, Homo sapien
tagaatctctgaatctggattcacc

SEQ ID NO: 5878101 - DNA, 25 bp, Homo sapien
ttatgtctggagttatctaggagac

SEQ ID NO: 5878102 - DNA, 25 bp, Homo sapien
caagttgtagaaacaatgtatacac

SEQ ID NO: 5878103 - DNA, 25 bp, Homo sapien
tttaagtatctttctgaaaatcata

SEQ ID NO: 5878104 - DNA, 25 bp, Homo sapien
tcaaccacaaaatataaagtcagta

SEQ ID NO: 5878105 - DNA, 25 bp, Homo sapien
aaaatcaaccacaaaatataaagtc

SEQ ID NO: 5878106 - DNA, 25 bp, Homo sapien
taccaagctaccttccttcccaccc

SEQ ID NO: 5878107 - DNA, 25 bp, Homo sapien
ctggattcaccgactaggtactaag

SEQ ID NO: 5878108 - DNA, 25 bp, Homo sapien
ctccacatgtcttcaccctctgtgt

SEQ ID NO: 5878109 - DNA, 25 bp, Homo sapien
ttctcttatgcctctataaagtgtg

SEQ ID NO: 5878110 - DNA, 25 bp, Homo sapien
cttcccaccctcaacccaactcctc

SEQ ID NO: 5878111 - DNA, 25 bp, Homo sapien
ttgtctgtacatttttatgcacaca

SEQ ID NO: 5878112 - DNA, 25 bp, Homo sapien
ttccttcccaccctcaacccaactc

SEQ ID NO: 5878113 - DNA, 25 bp, Homo sapien
atgacttaaaccaatccaagcctca

SEQ ID NO: 5878114 - DNA, 25 bp, Homo sapien
tacaataaaaaaaaatcaaccacaa

SEQ ID NO: 5878115 - DNA, 25 bp, Homo sapien
cccaaagaatgtctgtagaaatctt

SEQ ID NO: 5878116 - DNA, 25 bp, Homo sapien
atctggtgtagcacagactacctta

SEQ ID NO: 5878117 - DNA, 25 bp, Homo sapien
gtggtacattttcattaatatgcta

SEQ ID NO: 5878118 - DNA, 25 bp, Homo sapien
cagtatgcttacgaaccaggcctat

SEQ ID NO: 5878119 - DNA, 25 bp, Homo sapien
cagcaatgggaaaaacacagctaga

SEQ ID NO: 5878120 - DNA, 25 bp, Homo sapien
gtgctaatagagtgtcaggactctg

SEQ ID NO: 5878121 - DNA, 25 bp, Homo sapien
agaaataaataaactgatttaaatc

SEQ ID NO: 5878122 - DNA, 25 bp, Homo sapien
cacataaacatatttactcttaagc

SEQ ID NO: 5878123 - DNA, 25 bp, Homo sapien
tgtacagccaagaaaccaaggcttt

SEQ ID NO: 5878124 - DNA, 25 bp, Homo sapien
actgatttaaatcaacatgttttga

SEQ ID NO: 5878125 - DNA, 25 bp, Homo sapien
tcaccctctgtgttctggccctgct

SEQ ID NO: 5878126 - DNA, 25 bp, Homo sapien
gtcacagcaatgggaaaaacacagc

SEQ ID NO: 5878127 - DNA, 25 bp, Homo sapien
cctctgtgttctggccctgctgtgt

SEQ ID NO: 5878128 - DNA, 25 bp, Homo sapien
gttttggtcacagcaatgggaaaaa

SEQ ID NO: 5878129 - DNA, 25 bp, Homo sapien
ggacacacaagccccgtccaagagt

SEQ ID NO: 5878130 - DNA, 25 bp, Homo sapien
atgcaaaagaattcaggttttggtc

SEQ ID NO: 5878131 - DNA, 25 bp, Homo sapien
taaacatatttactcttaagctctc

SEQ ID NO: 5878132 - DNA, 25 bp, Homo sapien
catatttactcttaagctctctagc

SEQ ID NO: 5878133 - DNA, 25 bp, Homo sapien
acacaaggctcagacccccctctct

SEQ ID NO: 5878134 - DNA, 25 bp, Homo sapien
tgtgttctggccctgctgtgtggat

SEQ ID NO: 5878135 - DNA, 25 bp, Homo sapien
tgggaaaaacacagctagaaacaat

SEQ ID NO: 5878136 - DNA, 25 bp, Homo sapien
atacattcatgaaggaacagacaca

SEQ ID NO: 5878137 - DNA, 25 bp, Homo sapien
tcctaaaacattctcaaaccttctg

SEQ ID NO: 5878138 - DNA, 25 bp, Homo sapien
aaatcttttctcttatgcctctata

SEQ ID NO: 5878139 - DNA, 25 bp, Homo sapien
caacagtgcttatcacatgacttaa

SEQ ID NO: 5878140 - DNA, 25 bp, Homo sapien
gctaccttccttcccaccctcaacc

SEQ ID NO: 5878141 - DNA, 25 bp, Homo sapien
aatgggaaaaacacagctagaaaca

SEQ ID NO: 5878142 - DNA, 25 bp, Homo sapien
aactcctctctacctcttgtctgta

SEQ ID NO: 5878143 - DNA, 25 bp, Homo sapien
actgggttttcaatcacggaccagt

SEQ ID NO: 5878144 - DNA, 25 bp, Homo sapien
tatttactcttaagctctctagctg

SEQ ID NO: 5878145 - DNA, 25 bp, Homo sapien
tatacactgaattgtagaaacaatg

SEQ ID NO: 5878146 - DNA, 25 bp, Homo sapien
aaaagaattcaggttttggtcacag

SEQ ID NO: 5878147 - DNA, 25 bp, Homo sapien
tacaaattattgtcctaaaacattc

SEQ ID NO: 5878148 - DNA, 25 bp, Homo sapien
ggaaatgtgaagaaataaataaact

SEQ ID NO: 5878149 - DNA, 25 bp, Homo sapien
ctctagctggacacacaagccccgt

SEQ ID NO: 5878150 - DNA, 25 bp, Homo sapien
tctacctcttgtctgtacattttta

SEQ ID NO: 5878151 - DNA, 25 bp, Homo sapien
acaccaagttgtagaaacaatgtat

SEQ ID NO: 5878152 - DNA, 25 bp, Homo sapien
ctagaaacaatgtatacactgaatt

SEQ ID NO: 5878153 - DNA, 25 bp, Homo sapien
tcatacattcatgaaggaacagaca

SEQ ID NO: 5878154 - DNA, 25 bp, Homo sapien
gctaatagagtgtcaggactctgaa

SEQ ID NO: 5878155 - DNA, 25 bp, Homo sapien
caggtaccaagctaccttccttccc

SEQ ID NO: 5878156 - DNA, 25 bp, Homo sapien
taaaatatcccaaagaatgtctgta

SEQ ID NO: 5878157 - DNA, 25 bp, Homo sapien
tcacattagacataaaaatacaata

SEQ ID NO: 5878158 - DNA, 25 bp, Homo sapien
cttaaaccaatccaagcctcacatt

SEQ ID NO: 5878159 - DNA, 25 bp, Homo sapien
ggtccatggatgtttaaaatatccc

SEQ ID NO: 5878160 - DNA, 25 bp, Homo sapien
tatcttatgtctggagttatctagg

SEQ ID NO: 5878161 - DNA, 25 bp, Homo sapien
gcccattgtacagccaagaaaccaa

SEQ ID NO: 5878162 - DNA, 25 bp, Homo sapien
cgactaggtactaagtgttaacatc

SEQ ID NO: 5878163 - DNA, 25 bp, Homo sapien
taggtactaagtgttaacatctggt

SEQ ID NO: 5878164 - DNA, 25 bp, Homo sapien
ctctgaaggaagggcagccaggtac

SEQ ID NO: 5878165 - DNA, 25 bp, Homo sapien
agctggacacacaagccccgtccaa

SEQ ID NO: 5878166 - DNA, 25 bp, Homo sapien
tacactgaattgtagaaacaatgta

SEQ ID NO: 5878167 - DNA, 25 bp, Homo sapien
cagccaagaaaccaaggctttaaat

SEQ ID NO: 5878168 - DNA, 25 bp, Homo sapien
ggtaccaagctaccttccttcccac

SEQ ID NO: 5878169 - DNA, 25 bp, Homo sapien
gaaacaacagtgcttatcacatgac

SEQ ID NO: 5878170 - DNA, 25 bp, Homo sapien
ctgagttgatttatgtctatgtcac

SEQ ID NO: 5878171 - DNA, 25 bp, Homo sapien
gaatctctgaatctggattcaccga

SEQ ID NO: 5878172 - DNA, 25 bp, Homo sapien
cacagcaatgggaaaaacacagcta

SEQ ID NO: 5878173 - DNA, 25 bp, Homo sapien
tactaagtgttaacatctggtgtag

SEQ ID NO: 5878174 - DNA, 25 bp, Homo sapien
caatgtatacaccaagttgtagaaa

SEQ ID NO: 5878175 - DNA, 25 bp, Homo sapien
aaaaacacagctagaaacaatgtat

SEQ ID NO: 5878176 - DNA, 25 bp, Homo sapien
tcttgtctgtacatttttatgcaca

SEQ ID NO: 5878177 - DNA, 25 bp, Homo sapien
aagaattcaggttttggtcacagca

SEQ ID NO: 5878178 - DNA, 25 bp, Homo sapien
ggttttcaatcacggaccagtttca

SEQ ID NO: 5878179 - DNA, 25 bp, Homo sapien
atatcccaaagaatgtctgtagaaa

SEQ ID NO: 5878180 - DNA, 25 bp, Homo sapien
atgtgaagaaataaataaactgatt

SEQ ID NO: 5878181 - DNA, 25 bp, Homo sapien
gtgttaacatctggtgtagcacaga

SEQ ID NO: 5878182 - DNA, 25 bp, Homo sapien
gagcatgattttcagtgctaataga

SEQ ID NO: 5878183 - DNA, 25 bp, Homo sapien
ctggacacacaagccccgtccaaga

SEQ ID NO: 5878184 - DNA, 25 bp, Homo sapien
ggtgctggtccatggatgtttaaaa

SEQ ID NO: 5878185 - DNA, 25 bp, Homo sapien
tctgaaaatcatacattcatgaagg

SEQ ID NO: 5878186 - DNA, 25 bp, Homo sapien
tgtctgtctcccgtttctccacatg

SEQ ID NO: 5878187 - DNA, 25 bp, Homo sapien
tgagtatcttatgtctggagttatc

SEQ ID NO: 5878188 - DNA, 25 bp, Homo sapien
aacccaactcctctctacctcttgt

SEQ ID NO: 5878189 - DNA, 25 bp, Homo sapien
agattgacagcaacactgggttttc

SEQ ID NO: 5878190 - DNA, 25 bp, Homo sapien
ctgaattgtagaaacaatgtataca

SEQ ID NO: 5878191 - DNA, 25 bp, Homo sapien
gcaatgggaaaaacacagctagaaa

SEQ ID NO: 5878192 - DNA, 25 bp, Homo sapien
aacattctcaaaccttctgtctgtt

SEQ ID NO: 5878193 - DNA, 25 bp, Homo sapien
atgtctggagttatctaggagactt

SEQ ID NO: 5878194 - DNA, 25 bp, Homo sapien
gcacagactaccttatggtgctggt

SEQ ID NO: 5878195 - DNA, 25 bp, Homo sapien
ctgttggtgagcatgattttcagtg

SEQ ID NO: 5878196 - DNA, 25 bp, Homo sapien
gaatgtctgtagaaatcttttctct

SEQ ID NO: 5878197 - DNA, 25 bp, Homo sapien
ttatgtctatgtcacataaacatat

SEQ ID NO: 5878198 - DNA, 25 bp, Homo sapien
atgcttacgaaccaggcctatacat

SEQ ID NO: 5878199 - DNA, 25 bp, Homo sapien
gttaacatctggtgtagcacagact

SEQ ID NO: 5878200 - DNA, 25 bp, Homo sapien
ttctccacatgtcttcaccctctgt

SEQ ID NO: 5878201 - DNA, 25 bp, Homo sapien
tagaaacaacagtgcttatcacatg

SEQ ID NO: 5878202 - DNA, 25 bp, Homo sapien
agaaacaatgtatacactgaattgt

SEQ ID NO: 5878203 - DNA, 25 bp, Homo sapien
ttcaatcacggaccagtttcacttt

SEQ ID NO: 5878204 - DNA, 25 bp, Homo sapien
atctaggagacttagaatctctgaa

SEQ ID NO: 5878205 - DNA, 25 bp, Homo sapien
cctatacatttcccatgtggtacat

SEQ ID NO: 5878206 - DNA, 25 bp, Homo sapien
gccaagaaaccaaggctttaaatat

SEQ ID NO: 5878207 - DNA, 25 bp, Homo sapien
accctcaacccaactcctctctacc

SEQ ID NO: 5878208 - DNA, 25 bp, Homo sapien
caaagaatgtctgtagaaatctttt

SEQ ID NO: 5878209 - DNA, 25 bp, Homo sapien
gtcagtatgcttacgaaccaggcct

SEQ ID NO: 5878210 - DNA, 25 bp, Homo sapien
acatttttatgcacacacagattga

SEQ ID NO: 5878211 - DNA, 25 bp, Homo sapien
aagtgttaacatctggtgtagcaca

SEQ ID NO: 5878212 - DNA, 25 bp, Homo sapien
cttcaccctctgtgttctggccctg

SEQ ID NO: 5878213 - DNA, 25 bp, Homo sapien
gactctgaaggaagggcagccaggt

SEQ ID NO: 5878214 - DNA, 25 bp, Homo sapien
gacttagaatctctgaatctggatt

SEQ ID NO: 5878215 - DNA, 25 bp, Homo sapien
taaaccaatccaagcctcacattag

SEQ ID NO: 5878216 - DNA, 25 bp, Homo sapien
tgttctggccctgctgtgtggatgg

SEQ ID NO: 5878217 - DNA, 25 bp, Homo sapien
tctttctgtctgtctcccgtttctc

SEQ ID NO: 5878218 - DNA, 25 bp, Homo sapien
tcccgtttctccacatgtcttcacc

SEQ ID NO: 5878219 - DNA, 25 bp, Homo sapien
gtagaaacaatgtatacactgagtt

SEQ ID NO: 5878220 - DNA, 25 bp, Homo sapien
agctagaaacaatgtatacactgaa

SEQ ID NO: 5878221 - DNA, 25 bp, Homo sapien
caacactgggttttcaatcacggac

SEQ ID NO: 5878222 - DNA, 25 bp, Homo sapien
ctagctggacacacaagccccgtcc

SEQ ID NO: 5878223 - DNA, 25 bp, Homo sapien
gctgtgtggatgggaaatgtgaaga

SEQ ID NO: 5878224 - DNA, 25 bp, Homo sapien
agactaccttatggtgctggtccat

SEQ ID NO: 5878225 - DNA, 25 bp, Homo sapien
aatataaagtcagtatgcttacgaa

SEQ ID NO: 5878226 - DNA, 25 bp, Homo sapien
tatgcctctataaagtgtggcaccc

SEQ ID NO: 5878227 - DNA, 25 bp, Homo sapien
aaaatcatacattcatgaaggaaca

SEQ ID NO: 5878228 - DNA, 25 bp, Homo sapien
agtgtcaggactctgaaggaagggc

SEQ ID NO: 5878229 - DNA, 25 bp, Homo sapien
cattaatatgctatgcaaaagaatt

SEQ ID NO: 5878230 - DNA, 25 bp, Homo sapien
cttagaatctctgaatctggattca

SEQ ID NO: 5878231 - DNA, 25 bp, Homo sapien
ttatgcacacacagattgacagcaa

SEQ ID NO: 5878232 - DNA, 25 bp, Homo sapien
gaaggaacagacacaaggctcagac

SEQ ID NO: 5878233 - DNA, 25 bp, Homo sapien
ctggtgtagcacagactaccttatg

SEQ ID NO: 5878234 - DNA, 25 bp, Homo sapien
attgtcctaaaacattctcaaacct

SEQ ID NO: 5878235 - DNA, 25 bp, Homo sapien
accaagttgtagaaacaatgtatac

SEQ ID NO: 5878236 - DNA, 25 bp, Homo sapien
tcaccgactaggtactaagtgttaa

SEQ ID NO: 5878237 - DNA, 25 bp, Homo sapien
cagccaggtaccaagctaccttcct

SEQ ID NO: 5878238 - DNA, 25 bp, Homo sapien
aaacaatgtatacactgagttgatt

SEQ ID NO: 5878239 - DNA, 25 bp, Homo sapien
aggactctgaaggaagggcagccag

SEQ ID NO: 5878240 - DNA, 25 bp, Homo sapien
ttaaatcaacatgttttgagtatct

SEQ ID NO: 5878241 - DNA, 25 bp, Homo sapien
ctgtctgttggtgagcatgattttc

SEQ ID NO: 5878242 - DNA, 25 bp, Homo sapien
ctcttaagctctctagctggacaca

SEQ ID NO: 5878243 - DNA, 25 bp, Homo sapien
ttctggccctgctgtgtggatggga

SEQ ID NO: 5878244 - DNA, 25 bp, Homo sapien
ctgaatctggattcaccgactaggt

SEQ ID NO: 5878245 - DNA, 25 bp, Homo sapien
ctcctctctacctcttgtctgtaca

SEQ ID NO: 5878246 - DNA, 25 bp, Homo sapien
tctataaagtgtggcaccccccccc

SEQ ID NO: 5878247 - DNA, 25 bp, Homo sapien
tccatggatgtttaaaatatcccaa

SEQ ID NO: 5878248 - DNA, 25 bp, Homo sapien
gcaaaagaattcaggttttggtcac

SEQ ID NO: 5878249 - DNA, 25 bp, Homo sapien
gtctgttggtgagcatgattttcag

SEQ ID NO: 5878250 - DNA, 25 bp, Homo sapien
catttcccatgtggtacattttcat

SEQ ID NO: 5878251 - DNA, 25 bp, Homo sapien
tcaacccaactcctctctacctctt

SEQ ID NO: 5878252 - DNA, 25 bp, Homo sapien
atctctgaatctggattcaccgact

SEQ ID NO: 5878253 - DNA, 25 bp, Homo sapien
catacaaattattgtcctaaaacat

SEQ ID NO: 5878254 - DNA, 25 bp, Homo sapien
gttggtgagcatgattttcagtgct

SEQ ID NO: 5878255 - DNA, 25 bp, Homo sapien
cataaacatatttactcttaagctc

SEQ ID NO: 5878256 - DNA, 25 bp, Homo sapien
acacagattgacagcaacactgggt

SEQ ID NO: 5878257 - DNA, 25 bp, Homo sapien
ttacgaaccaggcctatacatttcc

SEQ ID NO: 5878258 - DNA, 25 bp, Homo sapien
atgcacacacagattgacagcaaca

SEQ ID NO: 5878259 - DNA, 25 bp, Homo sapien
ccaagcccattgtacagccaagaaa

SEQ ID NO: 5878260 - DNA, 25 bp, Homo sapien
cctctctacctcttgtctgtacatt

SEQ ID NO: 5878261 - DNA, 25 bp, Homo sapien
attgacagcaacactgggttttcaa

SEQ ID NO: 5878262 - DNA, 25 bp, Homo sapien
agtatcttatgtctggagttatcta

SEQ ID NO: 5878263 - DNA, 25 bp, Homo sapien
acagacacaaggctcagacccccct

SEQ ID NO: 5878264 - DNA, 25 bp, Homo sapien
ctaggagacttagaatctctgaatc

SEQ ID NO: 5878265 - DNA, 25 bp, Homo sapien
atgtatacaccaagttgtagaaaca

SEQ ID NO: 5878266 - DNA, 25 bp, Homo sapien
atacaccaagttgtagaaacaatgt

SEQ ID NO: 5878267 - DNA, 25 bp, Homo sapien
ctaagtgttaacatctggtgtagca

SEQ ID NO: 5878268 - DNA, 25 bp, Homo sapien
atcaacatgttttgagtatcttatg

SEQ ID NO: 5878269 - DNA, 25 bp, Homo sapien
atgtcttcaccctctgtgttctggc

SEQ ID NO: 5878270 - DNA, 25 bp, Homo sapien
tggatgggaaatgtgaagaaataaa

SEQ ID NO: 5878271 - DNA, 25 bp, Homo sapien
agtatctttctgaaaatcatacatt

SEQ ID NO: 5878272 - DNA, 25 bp, Homo sapien
gtatgcttacgaaccaggcctatac

SEQ ID NO: 5878273 - DNA, 25 bp, Homo sapien
acagactaccttatggtgctggtcc

SEQ ID NO: 5878274 - DNA, 25 bp, Homo sapien
tcatgaaggaacagacacaaggctc

SEQ ID NO: 5878275 - DNA, 25 bp, Homo sapien
ggaaaaacacagctagaaacaatgt

SEQ ID NO: 5878276 - DNA, 25 bp, Homo sapien
ttctgtctgttggtgagcatgattt

SEQ ID NO: 5878277 - DNA, 25 bp, Homo sapien
gtatacaccaagttgtagaaacaat

SEQ ID NO: 5878278 - DNA, 25 bp, Homo sapien
acatgttttgagtatcttatgtctg

SEQ ID NO: 5878279 - DNA, 25 bp, Homo sapien
ggccctgctgtgtggatgggaaatg

SEQ ID NO: 5878280 - DNA, 25 bp, Homo sapien
ctggccctgctgtgtggatgggaaa

SEQ ID NO: 5878281 - DNA, 25 bp, Homo sapien
acagattgacagcaacactgggttt

SEQ ID NO: 5878282 - DNA, 25 bp, Homo sapien
aaaatataaagtcagtatgcttacg

SEQ ID NO: 5878283 - DNA, 25 bp, Homo sapien
acactgggttttcaatcacggacca

SEQ ID NO: 5878284 - DNA, 25 bp, Homo sapien
ttctcaaaccttctgtctgttggtg

SEQ ID NO: 5878285 - DNA, 25 bp, Homo sapien
gaaccaggcctatacatttcccatg

SEQ ID NO: 5878286 - DNA, 25 bp, Homo sapien
tgggaaatgtgaagaaataaataaa

SEQ ID NO: 5878287 - DNA, 25 bp, Homo sapien
tgatttaaatcaacatgttttgagt

SEQ ID NO: 5878288 - DNA, 25 bp, Homo sapien
ccaactcctctctacctcttgtctg

SEQ ID NO: 5878289 - DNA, 25 bp, Homo sapien
taacatctggtgtagcacagactac

SEQ ID NO: 5878290 - DNA, 25 bp, Homo sapien
acatgtcttcaccctctgtgttctg

SEQ ID NO: 5878291 - DNA, 25 bp, Homo sapien
ggattcaccgactaggtactaagtg

SEQ ID NO: 5878292 - DNA, 25 bp, Homo sapien
cctctctttctgtctgtctcccgtt

SEQ ID NO: 5878293 - DNA, 25 bp, Homo sapien
tcactttgtgtagaaacaacagtgc

SEQ ID NO: 5878294 - DNA, 25 bp, Homo sapien
taaagtcagtatgcttacgaaccag

SEQ ID NO: 5878295 - DNA, 25 bp, Homo sapien
ggagttatctaggagacttagaatc

SEQ ID NO: 5878296 - DNA, 25 bp, Homo sapien
aaatcaacatgttttgagtatctta

SEQ ID NO: 5878297 - DNA, 25 bp, Homo sapien
caaaccttctgtctgttggtgagca

SEQ ID NO: 5878298 - DNA, 25 bp, Homo sapien
aggagacttagaatctctgaatctg

SEQ ID NO: 5878299 - DNA, 25 bp, Homo sapien
ttttctcttatgcctctataaagtg

SEQ ID NO: 5878300 - DNA, 25 bp, Homo sapien
cattctcaaaccttctgtctgttgg

SEQ ID NO: 5878301 - DNA, 25 bp, Homo sapien
actttgtgtagaaacaacagtgctt

SEQ ID NO: 5878302 - DNA, 25 bp, Homo sapien
acacaagccccgtccaagagtctgg

SEQ ID NO: 5878303 - DNA, 25 bp, Homo sapien
cctctataaagtgtggcaccccccc

SEQ ID NO: 5878304 - DNA, 25 bp, Homo sapien
ttttcagtgctaatagagtgtcagg

SEQ ID NO: 5878305 - DNA, 25 bp, Homo sapien
tacattttcattaatatgctatgca

SEQ ID NO: 5878306 - DNA, 25 bp, Homo sapien
taagctctctagctggacacacaag

SEQ ID NO: 5878307 - DNA, 25 bp, Homo sapien
attcatgaaggaacagacacaaggc

SEQ ID NO: 5878308 - DNA, 25 bp, Homo sapien
acaatgtatacactgaattgtagaa

SEQ ID NO: 5878309 - DNA, 25 bp, Homo sapien
aaaacattctcaaaccttctgtctg

SEQ ID NO: 5878310 - DNA, 25 bp, Homo sapien
ccgtttctccacatgtcttcaccct

SEQ ID NO: 5878311 - DNA, 25 bp, Homo sapien
aagcccattgtacagccaagaaacc

SEQ ID NO: 5878312 - DNA, 25 bp, Homo sapien
aatgtatacactgagttgatttatg

SEQ ID NO: 5878313 - DNA, 25 bp, Homo sapien
gagacttagaatctctgaatctgga

SEQ ID NO: 5878314 - DNA, 25 bp, Homo sapien
taatagagtgtcaggactctgaagg

SEQ ID NO: 5878315 - DNA, 25 bp, Homo sapien
aaacacagctagaaacaatgtatac

SEQ ID NO: 5878316 - DNA, 25 bp, Homo sapien
agctctctagctggacacacaagcc

SEQ ID NO: 5878317 - DNA, 25 bp, Homo sapien
tgcctctataaagtgtggcaccccc

SEQ ID NO: 5878318 - DNA, 25 bp, Homo sapien
ttttatgcacacacagattgacagc

SEQ ID NO: 5878319 - DNA, 25 bp, Homo sapien
tcccaccctcaacccaactcctctc

SEQ ID NO: 5878320 - DNA, 25 bp, Homo sapien
ctatgtcacataaacatatttactc

SEQ ID NO: 5878321 - DNA, 25 bp, Homo sapien
gcttacgaaccaggcctatacattt

SEQ ID NO: 5878322 - DNA, 25 bp, Homo sapien
tgtctcccgtttctccacatgtctt

SEQ ID NO: 5878323 - DNA, 25 bp, Homo sapien
tttggtcacagcaatgggaaaaaca

SEQ ID NO: 5878324 - DNA, 25 bp, Homo sapien
cagtgctaatagagtgtcaggactc

SEQ ID NO: 5878325 - DNA, 25 bp, Homo sapien
gaagaaataaataaactgatttaaa

SEQ ID NO: 5878326 - DNA, 25 bp, Homo sapien
tttgtgtagaaacaacagtgcttat

SEQ ID NO: 5878327 - DNA, 25 bp, Homo sapien
acatctggtgtagcacagactacct

SEQ ID NO: 5878328 - DNA, 25 bp, Homo sapien
tttactcttaagctctctagctgga

SEQ ID NO: 5878329 - DNA, 25 bp, Homo sapien
ctcttatgcctctataaagtgtggc

SEQ ID NO: 5878330 - DNA, 25 bp, Homo sapien
tctgtctcccgtttctccacatgtc

SEQ ID NO: 5878331 - DNA, 25 bp, Homo sapien
atagagtgtcaggactctgaaggaa

SEQ ID NO: 5878332 - DNA, 25 bp, Homo sapien
gaacagacacaaggctcagaccccc

SEQ ID NO: 5878333 - DNA, 25 bp, Homo sapien
tgaaaatcatacattcatgaaggaa

SEQ ID NO: 5878334 - DNA, 25 bp, Homo sapien
gttttgagtatcttatgtctggagt

SEQ ID NO: 5878335 - DNA, 25 bp, Homo sapien
atgattttcagtgctaatagagtgt

SEQ ID NO: 5878336 - DNA, 25 bp, Homo sapien
gaaacaatgtatacaccaagttgta

SEQ ID NO: 5878337 - DNA, 25 bp, Homo sapien
tctgtgttctggccctgctgtgtgg

SEQ ID NO: 5878338 - DNA, 25 bp, Homo sapien
gatgggaaatgtgaagaaataaata

SEQ ID NO: 5878339 - DNA, 25 bp, Homo sapien
attgtagaaacaatgtatacaccaa

SEQ ID NO: 5878340 - DNA, 25 bp, Homo sapien
aggaagggcagccaggtaccaagct

SEQ ID NO: 5878341 - DNA, 25 bp, Homo sapien
tatacatttcccatgtggtacattt

SEQ ID NO: 5878342 - DNA, 25 bp, Homo sapien
tgtagcacagactaccttatggtgc

SEQ ID NO: 5878343 - DNA, 25 bp, Homo sapien
tatacactgagttgatttatgtcta

SEQ ID NO: 5878344 - DNA, 25 bp, Homo sapien
acattcatgaaggaacagacacaag

SEQ ID NO: 5878345 - DNA, 25 bp, Homo sapien
aatatgctatgcaaaagaattcagg

SEQ ID NO: 5878346 - DNA, 25 bp, Homo sapien
ttaatatgctatgcaaaagaattca

SEQ ID NO: 5878347 - DNA, 25 bp, Homo sapien
aagaatgtctgtagaaatcttttct

SEQ ID NO: 5878348 - DNA, 25 bp, Homo sapien
tatctttctgaaaatcatacattca

SEQ ID NO: 5878349 - DNA, 25 bp, Homo sapien
ctctgaatctggattcaccgactag

SEQ ID NO: 5878350 - DNA, 25 bp, Homo sapien
attagacataaaaatacaataaaaa

SEQ ID NO: 5878351 - DNA, 25 bp, Homo sapien
tttgagtatcttatgtctggagtta

SEQ ID NO: 5878352 - DNA, 25 bp, Homo sapien
gggggctcagcagccattctgcgaa

SEQ ID NO: 5878353 - DNA, 25 bp, Homo sapien
ggctcaaagataataaatgtcggtg

SEQ ID NO: 5878354 - DNA, 25 bp, Homo sapien
cggttcctctcgctctgcggagact

SEQ ID NO: 5878355 - DNA, 25 bp, Homo sapien
gacttacgatttcttgtttaaattc

SEQ ID NO: 5878356 - DNA, 25 bp, Homo sapien
gccattctgcgaactaactcagcgg

SEQ ID NO: 5878357 - DNA, 25 bp, Homo sapien
ctggagtacagccgccggaggctga

SEQ ID NO: 5878358 - DNA, 25 bp, Homo sapien
tggcatccagtatggagacgctgcc

SEQ ID NO: 5878359 - DNA, 25 bp, Homo sapien
agtgagctttctttttaaactccca

SEQ ID NO: 5878360 - DNA, 25 bp, Homo sapien
ccctgcactcagtgagctttctttt

SEQ ID NO: 5878361 - DNA, 25 bp, Homo sapien
actcccaggaaatgcagttgtgaat

SEQ ID NO: 5878362 - DNA, 25 bp, Homo sapien
gcagtgtgcaaggaaaatacttaac

SEQ ID NO: 5878363 - DNA, 25 bp, Homo sapien
acggaccccgcggagctgtggcggc

SEQ ID NO: 5878364 - DNA, 25 bp, Homo sapien
ctttctcattgcgttggttaactcc

SEQ ID NO: 5878365 - DNA, 25 bp, Homo sapien
cgcacaagagaatgagctgatgttc

SEQ ID NO: 5878366 - DNA, 25 bp, Homo sapien
aaatgtcggtggtaaatatgtaaag

SEQ ID NO: 5878367 - DNA, 25 bp, Homo sapien
agatcttcctggggaacggtgtaca

SEQ ID NO: 5878368 - DNA, 25 bp, Homo sapien
gtgacacaggttcagcggtgggtcc

SEQ ID NO: 5878369 - DNA, 25 bp, Homo sapien
tactaattggttaacagatgccaga

SEQ ID NO: 5878370 - DNA, 25 bp, Homo sapien
ctgcggtcacctcgacgtacacagg

SEQ ID NO: 5878371 - DNA, 25 bp, Homo sapien
accagccgagaaacctacaatgcgc

SEQ ID NO: 5878372 - DNA, 25 bp, Homo sapien
aggtgcagctggggcactccttgtc

SEQ ID NO: 5878373 - DNA, 25 bp, Homo sapien
tcccacagcacagagccggtgtgac

SEQ ID NO: 5878374 - DNA, 25 bp, Homo sapien
cagccgagaaacctacaatgcgctt

SEQ ID NO: 5878375 - DNA, 25 bp, Homo sapien
gacccctgccccacacgtacccttc

SEQ ID NO: 5878376 - DNA, 25 bp, Homo sapien
gtccttatcctctgcgggaacaaga

SEQ ID NO: 5878377 - DNA, 25 bp, Homo sapien
tgttggttatgcgtatgacccggta

SEQ ID NO: 5878378 - DNA, 25 bp, Homo sapien
tgaagaggctggagtttttactacc

SEQ ID NO: 5878379 - DNA, 25 bp, Homo sapien
acagaaccctgcactcagtgagctt

SEQ ID NO: 5878380 - DNA, 25 bp, Homo sapien
ctgtgacgagaagctactacagagg

SEQ ID NO: 5878381 - DNA, 25 bp, Homo sapien
tctggtgtgaacagccagtgcgttt

SEQ ID NO: 5878382 - DNA, 25 bp, Homo sapien
ttttactaccatcttttctactcgg

SEQ ID NO: 5878383 - DNA, 25 bp, Homo sapien
gacacggccggccaggagcggttca

SEQ ID NO: 5878384 - DNA, 25 bp, Homo sapien
gaagaggctttcatgcagtgtgcaa

SEQ ID NO: 5878385 - DNA, 25 bp, Homo sapien
aaagttacagatatgggacacggcc

SEQ ID NO: 5878386 - DNA, 25 bp, Homo sapien
ataccataggaatggaatttggctc

SEQ ID NO: 5878387 - DNA, 25 bp, Homo sapien
ttggatgccgaccgggaagtcacct

SEQ ID NO: 5878388 - DNA, 25 bp, Homo sapien
cgttaaatccagcttgtgctggcca

SEQ ID NO: 5878389 - DNA, 25 bp, Homo sapien
caaagataataaatgtcggtggtaa

SEQ ID NO: 5878390 - DNA, 25 bp, Homo sapien
gatgcagacccctgccccacacgta

SEQ ID NO: 5878391 - DNA, 25 bp, Homo sapien
ggcgagccagaacatcgtccttatc

SEQ ID NO: 5878392 - DNA, 25 bp, Homo sapien
gtacacaggctccaagtgcacagga

SEQ ID NO: 5878393 - DNA, 25 bp, Homo sapien
gacccggtatgaaaggactctggtg

SEQ ID NO: 5878394 - DNA, 25 bp, Homo sapien
gaggacggaccccgcggagctgtgg

SEQ ID NO: 5878395 - DNA, 25 bp, Homo sapien
accccttttacactgtttctgtgat

SEQ ID NO: 5878396 - DNA, 25 bp, Homo sapien
agaggtgcagctggggcactccttg

SEQ ID NO: 5878397 - DNA, 25 bp, Homo sapien
gaatttggctcaaagataataaatg

SEQ ID NO: 5878398 - DNA, 25 bp, Homo sapien
gttgtgaatgtgagagagcgtgctt

SEQ ID NO: 5878399 - DNA, 25 bp, Homo sapien
aaccagtgcactgactggcgagaac

SEQ ID NO: 5878400 - DNA, 25 bp, Homo sapien
acttaacaaaattgaatcaggtgaa

SEQ ID NO: 5878401 - DNA, 25 bp, Homo sapien
agtatggagacgctgccctgagaca

SEQ ID NO: 5878402 - DNA, 25 bp, Homo sapien
tgcagtcatggacgtgagcgtgctt

SEQ ID NO: 5878403 - DNA, 25 bp, Homo sapien
agacagctgcggtcacctcgacgta

SEQ ID NO: 5878404 - DNA, 25 bp, Homo sapien
tccgagacttacgatttcttgttta

SEQ ID NO: 5878405 - DNA, 25 bp, Homo sapien
agaagctactacagaggtgcagctg

SEQ ID NO: 5878406 - DNA, 25 bp, Homo sapien
ttcctggaaaccagtgcactgactg

SEQ ID NO: 5878407 - DNA, 25 bp, Homo sapien
gaatggcgcagaccgccatgtccga

SEQ ID NO: 5878408 - DNA, 25 bp, Homo sapien
ggcactccttgtctatgacatcacc

SEQ ID NO: 5878409 - DNA, 25 bp, Homo sapien
cccttcacgttccgttaaatccagc

SEQ ID NO: 5878410 - DNA, 25 bp, Homo sapien
ggttatgcgtatgacccggtatgaa

SEQ ID NO: 5878411 - DNA, 25 bp, Homo sapien
gaggatgggctctggcatccagtat

SEQ ID NO: 5878412 - DNA, 25 bp, Homo sapien
agaagtagatcttcctggggaacgg

SEQ ID NO: 5878413 - DNA, 25 bp, Homo sapien
caggagtgtggctgttaggcgcccc

SEQ ID NO: 5878414 - DNA, 25 bp, Homo sapien
actggaccccgagaggatgggctct

SEQ ID NO: 5878415 - DNA, 25 bp, Homo sapien
gccatgtccgagacttacgatttct

SEQ ID NO: 5878416 - DNA, 25 bp, Homo sapien
gaactaactcagcggacagtacctt

SEQ ID NO: 5878417 - DNA, 25 bp, Homo sapien
caggagcggttcaggtctgtgacga

SEQ ID NO: 5878418 - DNA, 25 bp, Homo sapien
ctggcgagaacgtcgaagaggcttt

SEQ ID NO: 5878419 - DNA, 25 bp, Homo sapien
ctgcggagactggaggacggacccc

SEQ ID NO: 5878420 - DNA, 25 bp, Homo sapien
caggttcgcacaagagaatgagctg

SEQ ID NO: 5878421 - DNA, 25 bp, Homo sapien
aggacatgcagtcatggacgtgagc

SEQ ID NO: 5878422 - DNA, 25 bp, Homo sapien
gtcaccttcctcgaagcctccaggt

SEQ ID NO: 5878423 - DNA, 25 bp, Homo sapien
agctgcggtcacctcgacgtacaca

SEQ ID NO: 5878424 - DNA, 25 bp, Homo sapien
gggaactggcaaatcttgcttgctt

SEQ ID NO: 5878425 - DNA, 25 bp, Homo sapien
tcatgcagtgtgcaaggaaaatact

SEQ ID NO: 5878426 - DNA, 25 bp, Homo sapien
ctcattgcgttggttaactcccagg

SEQ ID NO: 5878427 - DNA, 25 bp, Homo sapien
gccggtgtgacatgacagaaccctg

SEQ ID NO: 5878428 - DNA, 25 bp, Homo sapien
ccatcttttctactcggcacagaag

SEQ ID NO: 5878429 - DNA, 25 bp, Homo sapien
ttggttaacagatgccagaatgctg

SEQ ID NO: 5878430 - DNA, 25 bp, Homo sapien
atcttgcttgcttcatcagttcatt

SEQ ID NO: 5878431 - DNA, 25 bp, Homo sapien
ccagtgcactgactggcgagaacgt

SEQ ID NO: 5878432 - DNA, 25 bp, Homo sapien
cctctgcgggaacaagaaggacttg

SEQ ID NO: 5878433 - DNA, 25 bp, Homo sapien
ctgactggcgagaacgtcgaagagg

SEQ ID NO: 5878434 - DNA, 25 bp, Homo sapien
cactgactggcgagaacgtcgaaga

SEQ ID NO: 5878435 - DNA, 25 bp, Homo sapien
atgcagtgtgcaaggaaaatactta

SEQ ID NO: 5878436 - DNA, 25 bp, Homo sapien
cggtgtacactggcagccgggggct

SEQ ID NO: 5878437 - DNA, 25 bp, Homo sapien
ggaggctgaagaggctggagttttt

SEQ ID NO: 5878438 - DNA, 25 bp, Homo sapien
gacgtgagcgtgctttcctccttgt

SEQ ID NO: 5878439 - DNA, 25 bp, Homo sapien
atggcgcagaccgccatgtccgaga

SEQ ID NO: 5878440 - DNA, 25 bp, Homo sapien
ttggctcaaagataataaatgtcgg

SEQ ID NO: 5878441 - DNA, 25 bp, Homo sapien
ggaaaatacttaacaaaattgaatc

SEQ ID NO: 5878442 - DNA, 25 bp, Homo sapien
ttacagatatgggacacggccggcc

SEQ ID NO: 5878443 - DNA, 25 bp, Homo sapien
tttcatgcagtgtgcaaggaaaata

SEQ ID NO: 5878444 - DNA, 25 bp, Homo sapien
acggcccagcacgttcccacagcac

SEQ ID NO: 5878445 - DNA, 25 bp, Homo sapien
ccagaatgctggcgagccagaacat

SEQ ID NO: 5878446 - DNA, 25 bp, Homo sapien
cagcacgttcccacagcacagagcc

SEQ ID NO: 5878447 - DNA, 25 bp, Homo sapien
tgctggccacggcccagcacgttcc

SEQ ID NO: 5878448 - DNA, 25 bp, Homo sapien
gctctggcatccagtatggagacgc

SEQ ID NO: 5878449 - DNA, 25 bp, Homo sapien
catgtccgagacttacgatttcttg

SEQ ID NO: 5878450 - DNA, 25 bp, Homo sapien
cgtgagcgtgctttcctccttgtgt

SEQ ID NO: 5878451 - DNA, 25 bp, Homo sapien
aaggacttggatgccgaccgggaag

SEQ ID NO: 5878452 - DNA, 25 bp, Homo sapien
gctgtggcggcagaatggcgcagac

SEQ ID NO: 5878453 - DNA, 25 bp, Homo sapien
ctttttaaactcccaggaaatgcag

SEQ ID NO: 5878454 - DNA, 25 bp, Homo sapien
tgcaaggaaaatacttaacaaaatt

SEQ ID NO: 5878455 - DNA, 25 bp, Homo sapien
ctacaatgcgcttactaattggtta

SEQ ID NO: 5878456 - DNA, 25 bp, Homo sapien
gaactggaccccgagaggatgggct

SEQ ID NO: 5878457 - DNA, 25 bp, Homo sapien
cattctgcgaactaactcagcggac

SEQ ID NO: 5878458 - DNA, 25 bp, Homo sapien
gcgccccagtgacacaggttcagcg

SEQ ID NO: 5878459 - DNA, 25 bp, Homo sapien
gctactacagaggtgcagctggggc

SEQ ID NO: 5878460 - DNA, 25 bp, Homo sapien
aacgtcgaagaggctttcatgcagt

SEQ ID NO: 5878461 - DNA, 25 bp, Homo sapien
gttccgttaaatccagcttgtgctg

SEQ ID NO: 5878462 - DNA, 25 bp, Homo sapien
cacagagccggtgtgacatgacaga

SEQ ID NO: 5878463 - DNA, 25 bp, Homo sapien
tgctggcgagccagaacatcgtcct

SEQ ID NO: 5878464 - DNA, 25 bp, Homo sapien
ttcctcgaagcctccaggttcgcac

SEQ ID NO: 5878465 - DNA, 25 bp, Homo sapien
atttcttgtttaaattcttggtcat

SEQ ID NO: 5878466 - DNA, 25 bp, Homo sapien
tcctggagtacagccgccggaggct

SEQ ID NO: 5878467 - DNA, 25 bp, Homo sapien
gtagatcttcctggggaacggtgta

SEQ ID NO: 5878468 - DNA, 25 bp, Homo sapien
ttaggcgccccagtgacacaggttc

SEQ ID NO: 5878469 - DNA, 25 bp, Homo sapien
cagtgacacaggttcagcggtgggt

SEQ ID NO: 5878470 - DNA, 25 bp, Homo sapien
ccaggaaatgcagttgtgaatgtga

SEQ ID NO: 5878471 - DNA, 25 bp, Homo sapien
cctccttgtgttggttatgcgtatg

SEQ ID NO: 5878472 - DNA, 25 bp, Homo sapien
cccctgccccacacgtacccttcac

SEQ ID NO: 5878473 - DNA, 25 bp, Homo sapien
aaatccagcttgtgctggccacggc

SEQ ID NO: 5878474 - DNA, 25 bp, Homo sapien
ttctcattgcgttggttaactccca

SEQ ID NO: 5878475 - DNA, 25 bp, Homo sapien
acagctgcggtcacctcgacgtaca

SEQ ID NO: 5878476 - DNA, 25 bp, Homo sapien
ccacagcacagagccggtgtgacat

SEQ ID NO: 5878477 - DNA, 25 bp, Homo sapien
gaccgccatgtccgagacttacgat

SEQ ID NO: 5878478 - DNA, 25 bp, Homo sapien
gtttttactaccatcttttctactc

SEQ ID NO: 5878479 - DNA, 25 bp, Homo sapien
gctccaagtgcacaggagtgtggct

SEQ ID NO: 5878480 - DNA, 25 bp, Homo sapien
ctcaaatcataccataggaatggaa

SEQ ID NO: 5878481 - DNA, 25 bp, Homo sapien
ggcagaatggcgcagaccgccatgt

SEQ ID NO: 5878482 - DNA, 25 bp, Homo sapien
gttcctctcgctctgcggagactgg

SEQ ID NO: 5878483 - DNA, 25 bp, Homo sapien
catcaccagccgagaaacctacaat

SEQ ID NO: 5878484 - DNA, 25 bp, Homo sapien
agctgatgttcctggaaaccagtgc

SEQ ID NO: 5878485 - DNA, 25 bp, Homo sapien
ttatgcgtatgacccggtatgaaag

SEQ ID NO: 5878486 - DNA, 25 bp, Homo sapien
caccttcctcgaagcctccaggttc

SEQ ID NO: 5878487 - DNA, 25 bp, Homo sapien
ccccgagaggatgggctctggcatc

SEQ ID NO: 5878488 - DNA, 25 bp, Homo sapien
ggttaacagatgccagaatgctggc

SEQ ID NO: 5878489 - DNA, 25 bp, Homo sapien
ctcgacgtacacaggctccaagtgc

SEQ ID NO: 5878490 - DNA, 25 bp, Homo sapien
ggagactggaggacggaccccgcgg

SEQ ID NO: 5878491 - DNA, 25 bp, Homo sapien
cgcggagctgtggcggcagaatggc

SEQ ID NO: 5878492 - DNA, 25 bp, Homo sapien
tgagctgatgttcctggaaaccagt

SEQ ID NO: 5878493 - DNA, 25 bp, Homo sapien
gggctcagcagccattctgcgaact

SEQ ID NO: 5878494 - DNA, 25 bp, Homo sapien
gactggcgagaacgtcgaagaggct

SEQ ID NO: 5878495 - DNA, 25 bp, Homo sapien
atgcgtatgacccggtatgaaagga

SEQ ID NO: 5878496 - DNA, 25 bp, Homo sapien
gaaaagaaattcaaagatgactcaa

SEQ ID NO: 5878497 - DNA, 25 bp, Homo sapien
acagcacagagccggtgtgacatga

SEQ ID NO: 5878498 - DNA, 25 bp, Homo sapien
acagaagtagatcttcctggggaac

SEQ ID NO: 5878499 - DNA, 25 bp, Homo sapien
agaagccacatggatgcagacccct

SEQ ID NO: 5878500 - DNA, 25 bp, Homo sapien
agccgggggctcagcagccattctg

SEQ ID NO: 5878501 - DNA, 25 bp, Homo sapien
catcgtccttatcctctgcgggaac

SEQ ID NO: 5878502 - DNA, 25 bp, Homo sapien
gagacgctgccctgagacagctgcg

SEQ ID NO: 5878503 - DNA, 25 bp, Homo sapien
atgactcaaatcataccataggaat

SEQ ID NO: 5878504 - DNA, 25 bp, Homo sapien
ggaacggtgtacactggcagccggg

SEQ ID NO: 5878505 - DNA, 25 bp, Homo sapien
cttgcttgcttcatcagttcattga

SEQ ID NO: 5878506 - DNA, 25 bp, Homo sapien
cagacccctgccccacacgtaccct

SEQ ID NO: 5878507 - DNA, 25 bp, Homo sapien
ggagtacagccgccggaggctgaag

SEQ ID NO: 5878508 - DNA, 25 bp, Homo sapien
atgtcggtggtaaatatgtaaagtt

SEQ ID NO: 5878509 - DNA, 25 bp, Homo sapien
aatgcgcttactaattggttaacag

SEQ ID NO: 5878510 - DNA, 25 bp, Homo sapien
acaatgcgcttactaattggttaac

SEQ ID NO: 5878511 - DNA, 25 bp, Homo sapien
gtctatgacatcaccagccgagaaa

SEQ ID NO: 5878512 - DNA, 25 bp, Homo sapien
aagtagatcttcctggggaacggtg

SEQ ID NO: 5878513 - DNA, 25 bp, Homo sapien
actaccatcttttctactcggcaca

SEQ ID NO: 5878514 - DNA, 25 bp, Homo sapien
gttcccacagcacagagccggtgtg

SEQ ID NO: 5878515 - DNA, 25 bp, Homo sapien
gacgctgccctgagacagctgcggt

SEQ ID NO: 5878516 - DNA, 25 bp, Homo sapien
cattgcgttggttaactcccaggac

SEQ ID NO: 5878517 - DNA, 25 bp, Homo sapien
caaatcataccataggaatggaatt

SEQ ID NO: 5878518 - DNA, 25 bp, Homo sapien
ggaccccgcggagctgtggcggcag

SEQ ID NO: 5878519 - DNA, 25 bp, Homo sapien
cgggaacaagaaggacttggatgcc

SEQ ID NO: 5878520 - DNA, 25 bp, Homo sapien
tccaagtgcacaggagtgtggctgt

SEQ ID NO: 5878521 - DNA, 25 bp, Homo sapien
tcccaggaaatgcagttgtgaatgt

SEQ ID NO: 5878522 - DNA, 25 bp, Homo sapien
accgggaagtcaccttcctcgaagc

SEQ ID NO: 5878523 - DNA, 25 bp, Homo sapien
aatcataccataggaatggaatttg

SEQ ID NO: 5878524 - DNA, 25 bp, Homo sapien
tctactcggcacagaagtagatctt

SEQ ID NO: 5878525 - DNA, 25 bp, Homo sapien
aggaaatgcagttgtgaatgtgaga

SEQ ID NO: 5878526 - DNA, 25 bp, Homo sapien
ctggcgagccagaacatcgtcctta

SEQ ID NO: 5878527 - DNA, 25 bp, Homo sapien
gaacagccagtgcgtttcttattta

SEQ ID NO: 5878528 - DNA, 25 bp, Homo sapien
ctaattggttaacagatgccagaat

SEQ ID NO: 5878529 - DNA, 25 bp, Homo sapien
aattcttggtcatcggaaatgcggg

SEQ ID NO: 5878530 - DNA, 25 bp, Homo sapien
gtatgaaaggactctggtgtgaaca

SEQ ID NO: 5878531 - DNA, 25 bp, Homo sapien
cttttctactcggcacagaagtaga

SEQ ID NO: 5878532 - DNA, 25 bp, Homo sapien
tggcaaatcttgcttgcttcatcag

SEQ ID NO: 5878533 - DNA, 25 bp, Homo sapien
tggaaaccagtgcactgactggcga

SEQ ID NO: 5878534 - DNA, 25 bp, Homo sapien
cacaggagtgtggctgttaggcgcc

SEQ ID NO: 5878535 - DNA, 25 bp, Homo sapien
aaactcccaggaaatgcagttgtga

SEQ ID NO: 5878536 - DNA, 25 bp, Homo sapien
cggacagtacctttagaagccacat

SEQ ID NO: 5878537 - DNA, 25 bp, Homo sapien
tcagcggacagtacctttagaagcc

SEQ ID NO: 5878538 - DNA, 25 bp, Homo sapien
caggttcagcggtgggtcctggagt

SEQ ID NO: 5878539 - DNA, 25 bp, Homo sapien
tactacagaggtgcagctggggcac

SEQ ID NO: 5878540 - DNA, 25 bp, Homo sapien
tggacgtgagcgtgctttcctcctt

SEQ ID NO: 5878541 - DNA, 25 bp, Homo sapien
cggtatgaaaggactctggtgtgaa

SEQ ID NO: 5878542 - DNA, 25 bp, Homo sapien
cgacgtacacaggctccaagtgcac

SEQ ID NO: 5878543 - DNA, 25 bp, Homo sapien
acagaggtgcagctggggcactcct

SEQ ID NO: 5878544 - DNA, 25 bp, Homo sapien
agactggaggacggaccccgcggag

SEQ ID NO: 5878545 - DNA, 25 bp, Homo sapien
tgcagttgtgaatgtgagagagcgt

SEQ ID NO: 5878546 - DNA, 25 bp, Homo sapien
ttcctccttgtgttggttatgcgta

SEQ ID NO: 5878547 - DNA, 25 bp, Homo sapien
tgaatcaggtgaactggaccccgag

SEQ ID NO: 5878548 - DNA, 25 bp, Homo sapien
agccagtgcgtttcttatttaatcc

SEQ ID NO: 5878549 - DNA, 25 bp, Homo sapien
ccagtgcgtttcttatttaatccct

SEQ ID NO: 5878550 - DNA, 25 bp, Homo sapien
cagtcatggacgtgagcgtgctttc

SEQ ID NO: 5878551 - DNA, 25 bp, Homo sapien
gcacgttcccacagcacagagccgg

SEQ ID NO: 5878552 - DNA, 25 bp, Homo sapien
agcgtgctttcctccttgtgttggt

SEQ ID NO: 5878553 - DNA, 25 bp, Homo sapien
aaccctgcactcagtgagctttctt

SEQ ID NO: 5878554 - DNA, 25 bp, Homo sapien
aagataataaatgtcggtggtaaat

SEQ ID NO: 5878555 - DNA, 25 bp, Homo sapien
tgctttcctccttgtgttggttatg

SEQ ID NO: 5878556 - DNA, 25 bp, Homo sapien
atccagcttgtgctggccacggccc

SEQ ID NO: 5878557 - DNA, 25 bp, Homo sapien
ggcccagcacgttcccacagcacag

SEQ ID NO: 5878558 - DNA, 25 bp, Homo sapien
aattggttaacagatgccagaatgc

SEQ ID NO: 5878559 - DNA, 25 bp, Homo sapien
tgagcgtgctttcctccttgtgttg

SEQ ID NO: 5878560 - DNA, 25 bp, Homo sapien
tgcgggaacaagaaggacttggatg

SEQ ID NO: 5878561 - DNA, 25 bp, Homo sapien
cttcctggggaacggtgtacactgg

SEQ ID NO: 5878562 - DNA, 25 bp, Homo sapien
aaattgaatcaggtgaactggaccc

SEQ ID NO: 5878563 - DNA, 25 bp, Homo sapien
gacgagaagctactacagaggtgca

SEQ ID NO: 5878564 - DNA, 25 bp, Homo sapien
aaggactctggtgtgaacagccagt

SEQ ID NO: 5878565 - DNA, 25 bp, Homo sapien
tgctttctcattgcgttggttaact

SEQ ID NO: 5878566 - DNA, 25 bp, Homo sapien
ctttcctccttgtgttggttatgcg

SEQ ID NO: 5878567 - DNA, 25 bp, Homo sapien
tggcggcagaatggcgcagaccgcc

SEQ ID NO: 5878568 - DNA, 25 bp, Homo sapien
gccctgagacagctgcggtcacctc

SEQ ID NO: 5878569 - DNA, 25 bp, Homo sapien
ggaagtcaccttcctcgaagcctcc

SEQ ID NO: 5878570 - DNA, 25 bp, Homo sapien
gcatccagtatggagacgctgccct

SEQ ID NO: 5878571 - DNA, 25 bp, Homo sapien
tgagctttctttttaaactcccagg

SEQ ID NO: 5878572 - DNA, 25 bp, Homo sapien
ccgggggctcagcagccattctgcg

SEQ ID NO: 5878573 - DNA, 25 bp, Homo sapien
gagccggtgtgacatgacagaaccc

SEQ ID NO: 5878574 - DNA, 25 bp, Homo sapien
gaagcctccaggttcgcacaagaga

SEQ ID NO: 5878575 - DNA, 25 bp, Homo sapien
tgcactgactggcgagaacgtcgaa

SEQ ID NO: 5878576 - DNA, 25 bp, Homo sapien
acaggctccaagtgcacaggagtgt

SEQ ID NO: 5878577 - DNA, 25 bp, Homo sapien
gaccccgagaggatgggctctggca

SEQ ID NO: 5878578 - DNA, 25 bp, Homo sapien
aagtcaccttcctcgaagcctccag

SEQ ID NO: 5878579 - DNA, 25 bp, Homo sapien
taataaatgtcggtggtaaatatgt

SEQ ID NO: 5878580 - DNA, 25 bp, Homo sapien
ttcttggtcatcggaaatgcgggaa

SEQ ID NO: 5878581 - DNA, 25 bp, Homo sapien
tgccccacacgtacccttcacgttc

SEQ ID NO: 5878582 - DNA, 25 bp, Homo sapien
aaagatgactcaaatcataccatag

SEQ ID NO: 5878583 - DNA, 25 bp, Homo sapien
ggatgccgaccgggaagtcaccttc

SEQ ID NO: 5878584 - DNA, 25 bp, Homo sapien
ttacgatttcttgtttaaattcttg

SEQ ID NO: 5878585 - DNA, 25 bp, Homo sapien
gtcatcggaaatgcgggaactggca

SEQ ID NO: 5878586 - DNA, 25 bp, Homo sapien
cagagccggtgtgacatgacagaac

SEQ ID NO: 5878587 - DNA, 25 bp, Homo sapien
ctgcactcagtgagctttcttttta

SEQ ID NO: 5878588 - DNA, 25 bp, Homo sapien
tgtccgagacttacgatttcttgtt

SEQ ID NO: 5878589 - DNA, 25 bp, Homo sapien
gtcggtggtaaatatgtaaagttac

SEQ ID NO: 5878590 - DNA, 25 bp, Homo sapien
cgcttactaattggttaacagatgc

SEQ ID NO: 5878591 - DNA, 25 bp, Homo sapien
ccaccccttttacactgtttctgtg

SEQ ID NO: 5878592 - DNA, 25 bp, Homo sapien
ggttcagcggtgggtcctggagtac

SEQ ID NO: 5878593 - DNA, 25 bp, Homo sapien
cttgtgttggttatgcgtatgaccc

SEQ ID NO: 5878594 - DNA, 25 bp, Homo sapien
tgtgttggttatgcgtatgacccgg

SEQ ID NO: 5878595 - DNA, 25 bp, Homo sapien
taactcccaggacatgcagtcatgg

SEQ ID NO: 5878596 - DNA, 25 bp, Homo sapien
aaatgcgggaactggcaaatcttgc

SEQ ID NO: 5878597 - DNA, 25 bp, Homo sapien
aatcaggtgaactggaccccgagag

SEQ ID NO: 5878598 - DNA, 25 bp, Homo sapien
ggacttggatgccgaccgggaagtc

SEQ ID NO: 5878599 - DNA, 25 bp, Homo sapien
tgacagaaccctgcactcagtgagc

SEQ ID NO: 5878600 - DNA, 25 bp, Homo sapien
cgggaagtcaccttcctcgaagcct

SEQ ID NO: 5878601 - DNA, 25 bp, Homo sapien
acgttcccacagcacagagccggtg

SEQ ID NO: 5878602 - DNA, 25 bp, Homo sapien
cccggtatgaaaggactctggtgtg

SEQ ID NO: 5878603 - DNA, 25 bp, Homo sapien
agaggctttcatgcagtgtgcaagg

SEQ ID NO: 5878604 - DNA, 25 bp, Homo sapien
cagccattctgcgaactaactcagc

SEQ ID NO: 5878605 - DNA, 25 bp, Homo sapien
tacagccgccggaggctgaagaggc

SEQ ID NO: 5878606 - DNA, 25 bp, Homo sapien
gtgacgagaagctactacagaggtg

SEQ ID NO: 5878607 - DNA, 25 bp, Homo sapien
cgtgctttctcattgcgttggttaa

SEQ ID NO: 5878608 - DNA, 25 bp, Homo sapien
tgcgcttactaattggttaacagat

SEQ ID NO: 5878609 - DNA, 25 bp, Homo sapien
cagtacctttagaagccacatggat

SEQ ID NO: 5878610 - DNA, 25 bp, Homo sapien
gggctctggcatccagtatggagac

SEQ ID NO: 5878611 - DNA, 25 bp, Homo sapien
agagcgtgctttctcattgcgttgg

SEQ ID NO: 5878612 - DNA, 25 bp, Homo sapien
caagagaatgagctgatgttcctgg

SEQ ID NO: 5878613 - DNA, 25 bp, Homo sapien
tgtgaatgtgagagagcgtgctttc

SEQ ID NO: 5878614 - DNA, 25 bp, Homo sapien
gctttcatgcagtgtgcaaggaaaa

SEQ ID NO: 5878615 - DNA, 25 bp, Homo sapien
ataaatgtcggtggtaaatatgtaa

SEQ ID NO: 5878616 - DNA, 25 bp, Homo sapien
gacatcaccagccgagaaacctaca

SEQ ID NO: 5878617 - DNA, 25 bp, Homo sapien
catggatgcagacccctgccccaca

SEQ ID NO: 5878618 - DNA, 25 bp, Homo sapien
agtgtggctgttaggcgccccagtg

SEQ ID NO: 5878619 - DNA, 25 bp, Homo sapien
tggtgtgaacagccagtgcgtttct

SEQ ID NO: 5878620 - DNA, 25 bp, Homo sapien
cataggaatggaatttggctcaaag

SEQ ID NO: 5878621 - DNA, 25 bp, Homo sapien
gactcaaatcataccataggaatgg

SEQ ID NO: 5878622 - DNA, 25 bp, Homo sapien
agaatgagctgatgttcctggaaac

SEQ ID NO: 5878623 - DNA, 25 bp, Homo sapien
tccttgtgttggttatgcgtatgac

SEQ ID NO: 5878624 - DNA, 25 bp, Homo sapien
aagccacatggatgcagacccctgc

SEQ ID NO: 5878625 - DNA, 25 bp, Homo sapien
ctccttgtctatgacatcaccagcc

SEQ ID NO: 5878626 - DNA, 25 bp, Homo sapien
atatgggacacggccggccaggagc

SEQ ID NO: 5878627 - DNA, 25 bp, Homo sapien
gcgttggttaactcccaggacatgc

SEQ ID NO: 5878628 - DNA, 25 bp, Homo sapien
gcactcagtgagctttctttttaaa

SEQ ID NO: 5878629 - DNA, 25 bp, Homo sapien
tgtggcggcagaatggcgcagaccg

SEQ ID NO: 5878630 - DNA, 25 bp, Homo sapien
cggccggccaggagcggttcaggtc

SEQ ID NO: 5878631 - DNA, 25 bp, Homo sapien
tgttcctggaaaccagtgcactgac

SEQ ID NO: 5878632 - DNA, 25 bp, Homo sapien
tcgtccttatcctctgcgggaacaa

SEQ ID NO: 5878633 - DNA, 25 bp, Homo sapien
ttatcctctgcgggaacaagaagga

SEQ ID NO: 5878634 - DNA, 25 bp, Homo sapien
taactcagcggacagtacctttaga

SEQ ID NO: 5878635 - DNA, 25 bp, Homo sapien
acagatatgggacacggccggccag

SEQ ID NO: 5878636 - DNA, 25 bp, Homo sapien
caagtgcacaggagtgtggctgtta

SEQ ID NO: 5878637 - DNA, 25 bp, Homo sapien
aggcgccccagtgacacaggttcag

SEQ ID NO: 5878638 - DNA, 25 bp, Homo sapien
gctgaagaggctggagtttttacta

SEQ ID NO: 5878639 - DNA, 25 bp, Homo sapien
ggccacggcccagcacgttcccaca

SEQ ID NO: 5878640 - DNA, 25 bp, Homo sapien
agcggacagtacctttagaagccac

SEQ ID NO: 5878641 - DNA, 25 bp, Homo sapien
cctgagacagctgcggtcacctcga

SEQ ID NO: 5878642 - DNA, 25 bp, Homo sapien
atcttttctactcggcacagaagta

SEQ ID NO: 5878643 - DNA, 25 bp, Homo sapien
gtctgtgacgagaagctactacaga

SEQ ID NO: 5878644 - DNA, 25 bp, Homo sapien
atacttaacaaaattgaatcaggtg

SEQ ID NO: 5878645 - DNA, 25 bp, Homo sapien
ccaggacatgcagtcatggacgtga

SEQ ID NO: 5878646 - DNA, 25 bp, Homo sapien
aatggaatttggctcaaagataata

SEQ ID NO: 5878647 - DNA, 25 bp, Homo sapien
tggaatttggctcaaagataataaa

SEQ ID NO: 5878648 - DNA, 25 bp, Homo sapien
ttttaaactcccaggaaatgcagtt

SEQ ID NO: 5878649 - DNA, 25 bp, Homo sapien
taccatcttttctactcggcacaga

SEQ ID NO: 5878650 - DNA, 25 bp, Homo sapien
ggcgagaacgtcgaagaggctttca

SEQ ID NO: 5878651 - DNA, 25 bp, Homo sapien
gcaaatcttgcttgcttcatcagtt

SEQ ID NO: 5878652 - DNA, 25 bp, Homo sapien
ggaatggaatttggctcaaagataa

SEQ ID NO: 5878653 - DNA, 25 bp, Homo sapien
cccagcacgttcccacagcacagag

SEQ ID NO: 5878654 - DNA, 25 bp, Homo sapien
aagaggctggagtttttactaccat

SEQ ID NO: 5878655 - DNA, 25 bp, Homo sapien
cttggtcatcggaaatgcgggaact

SEQ ID NO: 5878656 - DNA, 25 bp, Homo sapien
cacaggttcagcggtgggtcctgga

SEQ ID NO: 5878657 - DNA, 25 bp, Homo sapien
agtgcacaggagtgtggctgttagg

SEQ ID NO: 5878658 - DNA, 25 bp, Homo sapien
aatgctggcgagccagaacatcgtc

SEQ ID NO: 5878659 - DNA, 25 bp, Homo sapien
gggacacggccggccaggagcggtt

SEQ ID NO: 5878660 - DNA, 25 bp, Homo sapien
cgagaaacctacaatgcgcttacta

SEQ ID NO: 5878661 - DNA, 25 bp, Homo sapien
acgttccgttaaatccagcttgtgc

SEQ ID NO: 5878662 - DNA, 25 bp, Homo sapien
aacagatgccagaatgctggcgagc

SEQ ID NO: 5878663 - DNA, 25 bp, Homo sapien
gccacatggatgcagacccctgccc

SEQ ID NO: 5878664 - DNA, 25 bp, Homo sapien
tatggagacgctgccctgagacagc

SEQ ID NO: 5878665 - DNA, 25 bp, Homo sapien
atgggacacggccggccaggagcgg

SEQ ID NO: 5878666 - DNA, 25 bp, Homo sapien
actggaggacggaccccgcggagct

SEQ ID NO: 5878667 - DNA, 25 bp, Homo sapien
actctggtgtgaacagccagtgcgt

SEQ ID NO: 5878668 - DNA, 25 bp, Homo sapien
tactcggcacagaagtagatcttcc

SEQ ID NO: 5878669 - DNA, 25 bp, Homo sapien
gcgaactaactcagcggacagtacc

SEQ ID NO: 5878670 - DNA, 25 bp, Homo sapien
aggctccaagtgcacaggagtgtgg

SEQ ID NO: 5878671 - DNA, 25 bp, Homo sapien
acactggcagccgggggctcagcag

SEQ ID NO: 5878672 - DNA, 25 bp, Homo sapien
accccgcggagctgtggcggcagaa

SEQ ID NO: 5878673 - DNA, 25 bp, Homo sapien
ctggagtttttactaccatcttttc

SEQ ID NO: 5878674 - DNA, 25 bp, Homo sapien
acttggatgccgaccgggaagtcac

SEQ ID NO: 5878675 - DNA, 25 bp, Homo sapien
tgtttaaattcttggtcatcggaaa

SEQ ID NO: 5878676 - DNA, 25 bp, Homo sapien
cagaccgccatgtccgagacttacg

SEQ ID NO: 5878677 - DNA, 25 bp, Homo sapien
taggaatggaatttggctcaaagat

SEQ ID NO: 5878678 - DNA, 25 bp, Homo sapien
gctgttaggcgccccagtgacacag

SEQ ID NO: 5878679 - DNA, 25 bp, Homo sapien
aggtctgtgacgagaagctactaca

SEQ ID NO: 5878680 - DNA, 25 bp, Homo sapien
tgcacaggagtgtggctgttaggcg

SEQ ID NO: 5878681 - DNA, 25 bp, Homo sapien
cgagacttacgatttcttgtttaaa

SEQ ID NO: 5878682 - DNA, 25 bp, Homo sapien
actaactcagcggacagtaccttta

SEQ ID NO: 5878683 - DNA, 25 bp, Homo sapien
tggaggacggaccccgcggagctgt

SEQ ID NO: 5878684 - DNA, 25 bp, Homo sapien
ttgcgttggttaactcccaggacat

SEQ ID NO: 5878685 - DNA, 25 bp, Homo sapien
tttctactcggcacagaagtagatc

SEQ ID NO: 5878686 - DNA, 25 bp, Homo sapien
atccagtatggagacgctgccctga

SEQ ID NO: 5878687 - DNA, 25 bp, Homo sapien
tcaggtctgtgacgagaagctacta

SEQ ID NO: 5878688 - DNA, 25 bp, Homo sapien
tcctctcgctctgcggagactggag

SEQ ID NO: 5878689 - DNA, 25 bp, Homo sapien
gacatgcagtcatggacgtgagcgt

SEQ ID NO: 5878690 - DNA, 25 bp, Homo sapien
cctccaggttcgcacaagagaatga

SEQ ID NO: 5878691 - DNA, 25 bp, Homo sapien
tgagacagctgcggtcacctcgacg

SEQ ID NO: 5878692 - DNA, 25 bp, Homo sapien
ttggttatgcgtatgacccggtatg

SEQ ID NO: 5878693 - DNA, 25 bp, Homo sapien
tttaaattcttggtcatcggaaatg

SEQ ID NO: 5878694 - DNA, 25 bp, Homo sapien
ccagtatggagacgctgccctgaga

SEQ ID NO: 5878695 - DNA, 25 bp, Homo sapien
tggctgttaggcgccccagtgacac

SEQ ID NO: 5878696 - DNA, 25 bp, Homo sapien
cggccaggagcggttcaggtctgtg

SEQ ID NO: 5878697 - DNA, 25 bp, Homo sapien
gaaatgcagttgtgaatgtgagaga

SEQ ID NO: 5878698 - DNA, 25 bp, Homo sapien
ctctcgctctgcggagactggagga

SEQ ID NO: 5878699 - DNA, 25 bp, Homo sapien
tcccaggacatgcagtcatggacgt

SEQ ID NO: 5878700 - DNA, 25 bp, Homo sapien
tggaccccgagaggatgggctctgg

SEQ ID NO: 5878701 - DNA, 25 bp, Homo sapien
cggcacagaagtagatcttcctggg

SEQ ID NO: 5878702 - DNA, 25 bp, Homo sapien
tccaggttcgcacaagagaatgagc

SEQ ID NO: 5878703 - DNA, 25 bp, Homo sapien
tccgttaaatccagcttgtgctggc

SEQ ID NO: 5878704 - DNA, 25 bp, Homo sapien
gccaggagcggttcaggtctgtgac

SEQ ID NO: 5878705 - DNA, 25 bp, Homo sapien
agtacagccgccggaggctgaagag

SEQ ID NO: 5878706 - DNA, 25 bp, Homo sapien
catgacagaaccctgcactcagtga

SEQ ID NO: 5878707 - DNA, 25 bp, Homo sapien
agccagaacatcgtccttatcctct

SEQ ID NO: 5878708 - DNA, 25 bp, Homo sapien
cttactaattggttaacagatgcca

SEQ ID NO: 5878709 - DNA, 25 bp, Homo sapien
gttggttaactcccaggacatgcag

SEQ ID NO: 5878710 - DNA, 25 bp, Homo sapien
gtgtgaacagccagtgcgtttctta

SEQ ID NO: 5878711 - DNA, 25 bp, Homo sapien
ccgagaggatgggctctggcatcca

SEQ ID NO: 5878712 - DNA, 25 bp, Homo sapien
agtgcactgactggcgagaacgtcg

SEQ ID NO: 5878713 - DNA, 25 bp, Homo sapien
tggttaactcccaggacatgcagtc

SEQ ID NO: 5878714 - DNA, 25 bp, Homo sapien
agaacatcgtccttatcctctgcgg

SEQ ID NO: 5878715 - DNA, 25 bp, Homo sapien
cagatgccagaatgctggcgagcca

SEQ ID NO: 5878716 - DNA, 25 bp, Homo sapien
ggactctggtgtgaacagccagtgc

SEQ ID NO: 5878717 - DNA, 25 bp, Homo sapien
ccgccatgtccgagacttacgattt

SEQ ID NO: 5878718 - DNA, 25 bp, Homo sapien
ttaaatccagcttgtgctggccacg

SEQ ID NO: 5878719 - DNA, 25 bp, Homo sapien
gtgacatgacagaaccctgcactca

SEQ ID NO: 5878720 - DNA, 25 bp, Homo sapien
gctcagcagccattctgcgaactaa

SEQ ID NO: 5878721 - DNA, 25 bp, Homo sapien
cgtgctttcctccttgtgttggtta

SEQ ID NO: 5878722 - DNA, 25 bp, Homo sapien
tgttaggcgccccagtgacacaggt

SEQ ID NO: 5878723 - DNA, 25 bp, Homo sapien
gcgggaactggcaaatcttgcttgc

SEQ ID NO: 5878724 - DNA, 25 bp, Homo sapien
caagaaggacttggatgccgaccgg

SEQ ID NO: 5878725 - DNA, 25 bp, Homo sapien
agatgactcaaatcataccatagga

SEQ ID NO: 5878726 - DNA, 25 bp, Homo sapien
ttcagcggtgggtcctggagtacag

SEQ ID NO: 5878727 - DNA, 25 bp, Homo sapien
cggttcaggtctgtgacgagaagct

SEQ ID NO: 5878728 - DNA, 25 bp, Homo sapien
attgaatcaggtgaactggaccccg

SEQ ID NO: 5878729 - DNA, 25 bp, Homo sapien
cgctgccctgagacagctgcggtca

SEQ ID NO: 5878730 - DNA, 25 bp, Homo sapien
gcggtcacctcgacgtacacaggct

SEQ ID NO: 5878731 - DNA, 25 bp, Homo sapien
gcggcagaatggcgcagaccgccat

SEQ ID NO: 5878732 - DNA, 25 bp, Homo sapien
attcaaagatgactcaaatcatacc

SEQ ID NO: 5878733 - DNA, 25 bp, Homo sapien
tcacctcgacgtacacaggctccaa

SEQ ID NO: 5878734 - DNA, 25 bp, Homo sapien
cgccggaggctgaagaggctggagt

SEQ ID NO: 5878735 - DNA, 25 bp, Homo sapien
tgcgtttcttatttaatccctctcc

SEQ ID NO: 5878736 - DNA, 25 bp, Homo sapien
tggtcatcggaaatgcgggaactgg

SEQ ID NO: 5878737 - DNA, 25 bp, Homo sapien
gtgaactggaccccgagaggatggg

SEQ ID NO: 5878738 - DNA, 25 bp, Homo sapien
atgggctctggcatccagtatggag

SEQ ID NO: 5878739 - DNA, 25 bp, Homo sapien
cttgcttcatcagttcattgaaaag

SEQ ID NO: 5878740 - DNA, 25 bp, Homo sapien
catgcagtcatggacgtgagcgtgc

SEQ ID NO: 5878741 - DNA, 25 bp, Homo sapien
aacatcgtccttatcctctgcggga

SEQ ID NO: 5878742 - DNA, 25 bp, Homo sapien
tcaaagatgactcaaatcataccat

SEQ ID NO: 5878743 - DNA, 25 bp, Homo sapien
gtgtacactggcagccgggggctca

SEQ ID NO: 5878744 - DNA, 25 bp, Homo sapien
tcggaaatgcgggaactggcaaatc

SEQ ID NO: 5878745 - DNA, 25 bp, Homo sapien
agaaacctacaatgcgcttactaat

SEQ ID NO: 5878746 - DNA, 25 bp, Homo sapien
gagctgtggcggcagaatggcgcag

SEQ ID NO: 5878747 - DNA, 25 bp, Homo sapien
ctggggaacggtgtacactggcagc

SEQ ID NO: 5878748 - DNA, 25 bp, Homo sapien
cacggccggccaggagcggttcagg

SEQ ID NO: 5878749 - DNA, 25 bp, Homo sapien
tctggcatccagtatggagacgctg

SEQ ID NO: 5878750 - DNA, 25 bp, Homo sapien
gacacaggttcagcggtgggtcctg

SEQ ID NO: 5878751 - DNA, 25 bp, Homo sapien
ggcgcagaccgccatgtccgagact

SEQ ID NO: 5878752 - DNA, 25 bp, Homo sapien
cgagaagctactacagaggtgcagc

SEQ ID NO: 5878753 - DNA, 25 bp, Homo sapien
gtcatggacgtgagcgtgctttcct

SEQ ID NO: 5878754 - DNA, 25 bp, Homo sapien
ccttgtctatgacatcaccagccga

SEQ ID NO: 5878755 - DNA, 25 bp, Homo sapien
ggatgggctctggcatccagtatgg

SEQ ID NO: 5878756 - DNA, 25 bp, Homo sapien
agcggttcaggtctgtgacgagaag

SEQ ID NO: 5878757 - DNA, 25 bp, Homo sapien
ggaacaagaaggacttggatgccga

SEQ ID NO: 5878758 - DNA, 25 bp, Homo sapien
tgccagaatgctggcgagccagaac

SEQ ID NO: 5878759 - DNA, 25 bp, Homo sapien
ccttatcctctgcgggaacaagaag

SEQ ID NO: 5878760 - DNA, 25 bp, Homo sapien
agaaggacttggatgccgaccggga

SEQ ID NO: 5878761 - DNA, 25 bp, Homo sapien
atgcgggaactggcaaatcttgctt

SEQ ID NO: 5878762 - DNA, 25 bp, Homo sapien
tggagacgctgccctgagacagctg

SEQ ID NO: 5878763 - DNA, 25 bp, Homo sapien
agcctccaggttcgcacaagagaat

SEQ ID NO: 5878764 - DNA, 25 bp, Homo sapien
tcgaagaggctttcatgcagtgtgc

SEQ ID NO: 5878765 - DNA, 25 bp, Homo sapien
ccagcttgtgctggccacggcccag

SEQ ID NO: 5878766 - DNA, 25 bp, Homo sapien
ctcaaagataataaatgtcggtggt

SEQ ID NO: 5878767 - DNA, 25 bp, Homo sapien
gccgagaaacctacaatgcgcttac

SEQ ID NO: 5878768 - DNA, 25 bp, Homo sapien
taaattcttggtcatcggaaatgcg

SEQ ID NO: 5878769 - DNA, 25 bp, Homo sapien
aaagaaattcaaagatgactcaaat

SEQ ID NO: 5878770 - DNA, 25 bp, Homo sapien
cccagtgacacaggttcagcggtgg

SEQ ID NO: 5878771 - DNA, 25 bp, Homo sapien
ctggggcactccttgtctatgacat

SEQ ID NO: 5878772 - DNA, 25 bp, Homo sapien
atgacatcaccagccgagaaaccta

SEQ ID NO: 5878773 - DNA, 25 bp, Homo sapien
tcctggggaacggtgtacactggca

SEQ ID NO: 5878774 - DNA, 25 bp, Homo sapien
ccggaggctgaagaggctggagttt

SEQ ID NO: 5878775 - DNA, 25 bp, Homo sapien
aacaaaattgaatcaggtgaactgg

SEQ ID NO: 5878776 - DNA, 25 bp, Homo sapien
aatgcagttgtgaatgtgagagagc

SEQ ID NO: 5878777 - DNA, 25 bp, Homo sapien
aagctactacagaggtgcagctggg

SEQ ID NO: 5878778 - DNA, 25 bp, Homo sapien
actggcagccgggggctcagcagcc

SEQ ID NO: 5878779 - DNA, 25 bp, Homo sapien
agcacagagccggtgtgacatgaca

SEQ ID NO: 5878780 - DNA, 25 bp, Homo sapien
cactccttgtctatgacatcaccag

SEQ ID NO: 5878781 - DNA, 25 bp, Homo sapien
aaatcttgcttgcttcatcagttca

SEQ ID NO: 5878782 - DNA, 25 bp, Homo sapien
acctcgacgtacacaggctccaagt

SEQ ID NO: 5878783 - DNA, 25 bp, Homo sapien
cttgtgctggccacggcccagcacg

SEQ ID NO: 5878784 - DNA, 25 bp, Homo sapien
ttcgcacaagagaatgagctgatgt

SEQ ID NO: 5878785 - DNA, 25 bp, Homo sapien
tgcttcatcagttcattgaaaagaa

SEQ ID NO: 5878786 - DNA, 25 bp, Homo sapien
cgagaacgtcgaagaggctttcatg

SEQ ID NO: 5878787 - DNA, 25 bp, Homo sapien
cgcagaccgccatgtccgagactta

SEQ ID NO: 5878788 - DNA, 25 bp, Homo sapien
atgtaaagttacagatatgggacac

SEQ ID NO: 5878789 - DNA, 25 bp, Homo sapien
gccggccaggagcggttcaggtctg

SEQ ID NO: 5878790 - DNA, 25 bp, Homo sapien
aacaagaaggacttggatgccgacc

SEQ ID NO: 5878791 - DNA, 25 bp, Homo sapien
gttcaggtctgtgacgagaagctac

SEQ ID NO: 5878792 - DNA, 25 bp, Homo sapien
tcatcagttcattgaaaagaaattc

SEQ ID NO: 5878793 - DNA, 25 bp, Homo sapien
acagccagtgcgtttcttatttaat

SEQ ID NO: 5878794 - DNA, 25 bp, Homo sapien
gcggagactggaggacggaccccgc

SEQ ID NO: 5878795 - DNA, 25 bp, Homo sapien
ctcggttcctctcgctctgcggaga

SEQ ID NO: 5878796 - DNA, 25 bp, Homo sapien
atatgtaaagttacagatatgggac

SEQ ID NO: 5878797 - DNA, 25 bp, Homo sapien
acgtacacaggctccaagtgcacag

SEQ ID NO: 5878798 - DNA, 25 bp, Homo sapien
actcccaggacatgcagtcatggac

SEQ ID NO: 5878799 - DNA, 25 bp, Homo sapien
gaggctggagtttttactaccatct

SEQ ID NO: 5878800 - DNA, 25 bp, Homo sapien
ttaaactcccaggaaatgcagttgt

SEQ ID NO: 5878801 - DNA, 25 bp, Homo sapien
ctctgcggagactggaggacggacc

SEQ ID NO: 5878802 - DNA, 25 bp, Homo sapien
ggggaacggtgtacactggcagccg

SEQ ID NO: 5878803 - DNA, 25 bp, Homo sapien
agagagcgtgctttctcattgcgtt

SEQ ID NO: 5878804 - DNA, 25 bp, Homo sapien
tcaggtgaactggaccccgagagga

SEQ ID NO: 5878805 - DNA, 25 bp, Homo sapien
ctggccacggcccagcacgttccca

SEQ ID NO: 5878806 - DNA, 25 bp, Homo sapien
atcttcctggggaacggtgtacact

SEQ ID NO: 5878807 - DNA, 25 bp, Homo sapien
tgtgcaaggaaaatacttaacaaaa

SEQ ID NO: 5878808 - DNA, 25 bp, Homo sapien
tcacgttccgttaaatccagcttgt

SEQ ID NO: 5878809 - DNA, 25 bp, Homo sapien
tacccttcacgttccgttaaatcca

SEQ ID NO: 5878810 - DNA, 25 bp, Homo sapien
ttagaagccacatggatgcagaccc

SEQ ID NO: 5878811 - DNA, 25 bp, Homo sapien
tgaatgtgagagagcgtgctttctc

SEQ ID NO: 5878812 - DNA, 25 bp, Homo sapien
ctttagaagccacatggatgcagac

SEQ ID NO: 5878813 - DNA, 25 bp, Homo sapien
ccttcctcgaagcctccaggttcgc

SEQ ID NO: 5878814 - DNA, 25 bp, Homo sapien
agagaatgagctgatgttcctggaa

SEQ ID NO: 5878815 - DNA, 25 bp, Homo sapien
cgaccgggaagtcaccttcctcgaa

SEQ ID NO: 5878816 - DNA, 25 bp, Homo sapien
tgtggctgttaggcgccccagtgac

SEQ ID NO: 5878817 - DNA, 25 bp, Homo sapien
gtaaagttacagatatgggacacgg

SEQ ID NO: 5878818 - DNA, 25 bp, Homo sapien
agtgcgtttcttatttaatccctct

SEQ ID NO: 5878819 - DNA, 25 bp, Homo sapien
ttcttgtttaaattcttggtcatcg

SEQ ID NO: 5878820 - DNA, 25 bp, Homo sapien
aaatacttaacaaaattgaatcagg

SEQ ID NO: 5878821 - DNA, 25 bp, Homo sapien
aaattcaaagatgactcaaatcata

SEQ ID NO: 5878822 - DNA, 25 bp, Homo sapien
gacatgacagaaccctgcactcagt

SEQ ID NO: 5878823 - DNA, 25 bp, Homo sapien
agcagccattctgcgaactaactca

SEQ ID NO: 5878824 - DNA, 25 bp, Homo sapien
cttcatcagttcattgaaaagaaat

SEQ ID NO: 5878825 - DNA, 25 bp, Homo sapien
actcagtgagctttctttttaaact

SEQ ID NO: 5878826 - DNA, 25 bp, Homo sapien
gatgttcctggaaaccagtgcactg

SEQ ID NO: 5878827 - DNA, 25 bp, Homo sapien
gacagtacctttagaagccacatgg

SEQ ID NO: 5878828 - DNA, 25 bp, Homo sapien
gtatgacccggtatgaaaggactct

SEQ ID NO: 5878829 - DNA, 25 bp, Homo sapien
agaaattcaaagatgactcaaatca

SEQ ID NO: 5878830 - DNA, 25 bp, Homo sapien
ttaacaaaattgaatcaggtgaact

SEQ ID NO: 5878831 - DNA, 25 bp, Homo sapien
tctgcgggaacaagaaggacttgga

SEQ ID NO: 5878832 - DNA, 25 bp, Homo sapien
ttcttatttaatccctctcccccca

SEQ ID NO: 5878833 - DNA, 25 bp, Homo sapien
accataggaatggaatttggctcaa

SEQ ID NO: 5878834 - DNA, 25 bp, Homo sapien
ctcgctctgcggagactggaggacg

SEQ ID NO: 5878835 - DNA, 25 bp, Homo sapien
agcgtgctttctcattgcgttggtt

SEQ ID NO: 5878836 - DNA, 25 bp, Homo sapien
actcagcggacagtacctttagaag

SEQ ID NO: 5878837 - DNA, 25 bp, Homo sapien
gccccagtgacacaggttcagcggt

SEQ ID NO: 5878838 - DNA, 25 bp, Homo sapien
cagcggtgggtcctggagtacagcc

SEQ ID NO: 5878839 - DNA, 25 bp, Homo sapien
tcaccagccgagaaacctacaatgc

SEQ ID NO: 5878840 - DNA, 25 bp, Homo sapien
ttctgcgaactaactcagcggacag

SEQ ID NO: 5878841 - DNA, 25 bp, Homo sapien
tgcagacccctgccccacacgtacc

SEQ ID NO: 5878842 - DNA, 25 bp, Homo sapien
tggcagccgggggctcagcagccat

SEQ ID NO: 5878843 - DNA, 25 bp, Homo sapien
tgagagagcgtgctttctcattgcg

SEQ ID NO: 5878844 - DNA, 25 bp, Homo sapien
aatgtgagagagcgtgctttctcat

SEQ ID NO: 5878845 - DNA, 25 bp, Homo sapien
cagttgtgaatgtgagagagcgtgc

SEQ ID NO: 5878846 - DNA, 25 bp, Homo sapien
agttacagatatgggacacggccgg

SEQ ID NO: 5878847 - DNA, 25 bp, Homo sapien
catggacgtgagcgtgctttcctcc

SEQ ID NO: 5878848 - DNA, 25 bp, Homo sapien
ctgatgttcctggaaaccagtgcac

SEQ ID NO: 5878849 - DNA, 25 bp, Homo sapien
atgccgaccgggaagtcaccttcct

SEQ ID NO: 5878850 - DNA, 25 bp, Homo sapien
ccacggcccagcacgttcccacagc

SEQ ID NO: 5878851 - DNA, 25 bp, Homo sapien
agaacgtcgaagaggctttcatgca

SEQ ID NO: 5878852 - DNA, 25 bp, Homo sapien
agatatgggacacggccggccagga

SEQ ID NO: 5878853 - DNA, 25 bp, Homo sapien
cacaagagaatgagctgatgttcct

SEQ ID NO: 5878854 - DNA, 25 bp, Homo sapien
ggacggaccccgcggagctgtggcg

SEQ ID NO: 5878855 - DNA, 25 bp, Homo sapien
acctacaatgcgcttactaattggt

SEQ ID NO: 5878856 - DNA, 25 bp, Homo sapien
gtgcagctggggcactccttgtcta

SEQ ID NO: 5878857 - DNA, 25 bp, Homo sapien
ttactaccatcttttctactcggca

SEQ ID NO: 5878858 - DNA, 25 bp, Homo sapien
gcagctggggcactccttgtctatg

SEQ ID NO: 5878859 - DNA, 25 bp, Homo sapien
ggggcactccttgtctatgacatca

SEQ ID NO: 5878860 - DNA, 25 bp, Homo sapien
cggtgtgacatgacagaaccctgca

SEQ ID NO: 5878861 - DNA, 25 bp, Homo sapien
cgagccagaacatcgtccttatcct

SEQ ID NO: 5878862 - DNA, 25 bp, Homo sapien
caaaattgaatcaggtgaactggac

SEQ ID NO: 5878863 - DNA, 25 bp, Homo sapien
cccgcggagctgtggcggcagaatg

SEQ ID NO: 5878864 - DNA, 25 bp, Homo sapien
agctggggcactccttgtctatgac

SEQ ID NO: 5878865 - DNA, 25 bp, Homo sapien
ttctttttaaactcccaggaaatgc

SEQ ID NO: 5878866 - DNA, 25 bp, Homo sapien
ctgccctgagacagctgcggtcacc

SEQ ID NO: 5878867 - DNA, 25 bp, Homo sapien
aatgagctgatgttcctggaaacca

SEQ ID NO: 5878868 - DNA, 25 bp, Homo sapien
ggaaatgcgggaactggcaaatctt

SEQ ID NO: 5878869 - DNA, 25 bp, Homo sapien
ttaacagatgccagaatgctggcga

SEQ ID NO: 5878870 - DNA, 25 bp, Homo sapien
cccttttacactgtttctgtgatcc

SEQ ID NO: 5878871 - DNA, 25 bp, Homo sapien
aggctttcatgcagtgtgcaaggaa

SEQ ID NO: 5878872 - DNA, 25 bp, Homo sapien
ggctggagtttttactaccatcttt

SEQ ID NO: 5878873 - DNA, 25 bp, Homo sapien
gcacagaagtagatcttcctgggga

SEQ ID NO: 5878874 - DNA, 25 bp, Homo sapien
ctatgacatcaccagccgagaaacc

SEQ ID NO: 5878875 - DNA, 25 bp, Homo sapien
cctgccccacacgtacccttcacgt

SEQ ID NO: 5878876 - DNA, 25 bp, Homo sapien
gcagccgggggctcagcagccattc

SEQ ID NO: 5878877 - DNA, 25 bp, Homo sapien
tcagcagccattctgcgaactaact

SEQ ID NO: 5878878 - DNA, 25 bp, Homo sapien
atcctctgcgggaacaagaaggact

SEQ ID NO: 5878879 - DNA, 25 bp, Homo sapien
gcgtatgacccggtatgaaaggact

SEQ ID NO: 5878880 - DNA, 25 bp, Homo sapien
ggtgggtcctggagtacagccgccg

SEQ ID NO: 5878881 - DNA, 25 bp, Homo sapien
gcggtgggtcctggagtacagccgc

SEQ ID NO: 5878882 - DNA, 25 bp, Homo sapien
gatgccagaatgctggcgagccaga

SEQ ID NO: 5878883 - DNA, 25 bp, Homo sapien
cacacgtacccttcacgttccgtta

SEQ ID NO: 5878884 - DNA, 25 bp, Homo sapien
gtacactggcagccgggggctcagc

SEQ ID NO: 5878885 - DNA, 25 bp, Homo sapien
agaaccctgcactcagtgagctttc

SEQ ID NO: 5878886 - DNA, 25 bp, Homo sapien
tgcttgcttcatcagttcattgaaa

SEQ ID NO: 5878887 - DNA, 25 bp, Homo sapien
gccgccggaggctgaagaggctgga

SEQ ID NO: 5878888 - DNA, 25 bp, Homo sapien
tcataccataggaatggaatttggc

SEQ ID NO: 5878889 - DNA, 25 bp, Homo sapien
gtgaacagccagtgcgtttcttatt

SEQ ID NO: 5878890 - DNA, 25 bp, Homo sapien
gttaactcccaggacatgcagtcat

SEQ ID NO: 5878891 - DNA, 25 bp, Homo sapien
gaaaggactctggtgtgaacagcca

SEQ ID NO: 5878892 - DNA, 25 bp, Homo sapien
cagccgccggaggctgaagaggctg

SEQ ID NO: 5878893 - DNA, 25 bp, Homo sapien
gagaggatgggctctggcatccagt

SEQ ID NO: 5878894 - DNA, 25 bp, Homo sapien
catcggaaatgcgggaactggcaaa

SEQ ID NO: 5878895 - DNA, 25 bp, Homo sapien
ggagtgtggctgttaggcgccccag

SEQ ID NO: 5878896 - DNA, 25 bp, Homo sapien
atgacccggtatgaaaggactctgg

SEQ ID NO: 5878897 - DNA, 25 bp, Homo sapien
gtacctttagaagccacatggatgc

SEQ ID NO: 5878898 - DNA, 25 bp, Homo sapien
aggtgaactggaccccgagaggatg

SEQ ID NO: 5878899 - DNA, 25 bp, Homo sapien
agcttgtgctggccacggcccagca

SEQ ID NO: 5878900 - DNA, 25 bp, Homo sapien
acctttagaagccacatggatgcag

SEQ ID NO: 5878901 - DNA, 25 bp, Homo sapien
ggagtttttactaccatcttttcta

SEQ ID NO: 5878902 - DNA, 25 bp, Homo sapien
ctcggcacagaagtagatcttcctg

SEQ ID NO: 5878903 - DNA, 25 bp, Homo sapien
actggcaaatcttgcttgcttcatc

SEQ ID NO: 5878904 - DNA, 25 bp, Homo sapien
cagaatggcgcagaccgccatgtcc

SEQ ID NO: 5878905 - DNA, 25 bp, Homo sapien
ttgtctatgacatcaccagccgaga

SEQ ID NO: 5878906 - DNA, 25 bp, Homo sapien
cttcacgttccgttaaatccagctt

SEQ ID NO: 5878907 - DNA, 25 bp, Homo sapien
aaacctacaatgcgcttactaattg

SEQ ID NO: 5878908 - DNA, 25 bp, Homo sapien
cctcgaagcctccaggttcgcacaa

SEQ ID NO: 5878909 - DNA, 25 bp, Homo sapien
gataataaatgtcggtggtaaatat

SEQ ID NO: 5878910 - DNA, 25 bp, Homo sapien
atttggctcaaagataataaatgtc

SEQ ID NO: 5878911 - DNA, 25 bp, Homo sapien
ggagcggttcaggtctgtgacgaga

SEQ ID NO: 5878912 - DNA, 25 bp, Homo sapien
agtgtgcaaggaaaatacttaacaa

SEQ ID NO: 5878913 - DNA, 25 bp, Homo sapien
cacatggatgcagacccctgcccca

SEQ ID NO: 5878914 - DNA, 25 bp, Homo sapien
aacggtgtacactggcagccggggg

SEQ ID NO: 5878915 - DNA, 25 bp, Homo sapien
cttgtttaaattcttggtcatcgga

SEQ ID NO: 5878916 - DNA, 25 bp, Homo sapien
cctggaaaccagtgcactgactggc

SEQ ID NO: 5878917 - DNA, 25 bp, Homo sapien
aggctgaagaggctggagtttttac

SEQ ID NO: 5878918 - DNA, 25 bp, Homo sapien
gaaaccagtgcactgactggcgaga

SEQ ID NO: 5878919 - DNA, 25 bp, Homo sapien
tgggtcctggagtacagccgccgga

SEQ ID NO: 5878920 - DNA, 25 bp, Homo sapien
gaactggcaaatcttgcttgcttca

SEQ ID NO: 5878921 - DNA, 25 bp, Homo sapien
ggtcctggagtacagccgccggagg

SEQ ID NO: 5878922 - DNA, 25 bp, Homo sapien
ccagaacatcgtccttatcctctgc

SEQ ID NO: 5878923 - DNA, 25 bp, Homo sapien
tgtgctggccacggcccagcacgtt

SEQ ID NO: 5878924 - DNA, 25 bp, Homo sapien
ctgcgaactaactcagcggacagta

SEQ ID NO: 5878925 - DNA, 25 bp, Homo sapien
cggagctgtggcggcagaatggcgc

SEQ ID NO: 5878926 - DNA, 25 bp, Homo sapien
tcagtgagctttctttttaaactcc

SEQ ID NO: 5878927 - DNA, 25 bp, Homo sapien
ggtcacctcgacgtacacaggctcc

SEQ ID NO: 5878928 - DNA, 25 bp, Homo sapien
gccgaccgggaagtcaccttcctcg

SEQ ID NO: 5878929 - DNA, 25 bp, Homo sapien
gtgtgacatgacagaaccctgcact

SEQ ID NO: 5878930 - DNA, 25 bp, Homo sapien
agaatgctggcgagccagaacatcg

SEQ ID NO: 5878931 - DNA, 25 bp, Homo sapien
ggttcgcacaagagaatgagctgat

SEQ ID NO: 5878932 - DNA, 25 bp, Homo sapien
tcgaagcctccaggttcgcacaaga

SEQ ID NO: 5878933 - DNA, 25 bp, Homo sapien
cggtggtaaatatgtaaagttacag

SEQ ID NO: 5878934 - DNA, 25 bp, Homo sapien
tgtgagagagcgtgctttctcattg

SEQ ID NO: 5878935 - DNA, 25 bp, Homo sapien
acacaggctccaagtgcacaggagt

SEQ ID NO: 5878936 - DNA, 25 bp, Homo sapien
atgaaaggactctggtgtgaacagc

SEQ ID NO: 5878937 - DNA, 25 bp, Homo sapien
cgtcgaagaggctttcatgcagtgt

SEQ ID NO: 5878938 - DNA, 25 bp, Homo sapien
cgctctgcggagactggaggacgga

SEQ ID NO: 5878939 - DNA, 25 bp, Homo sapien
cttttacactgtttctgtgatccac

SEQ ID NO: 5878940 - DNA, 25 bp, Homo sapien
ctacagaggtgcagctggggcactc

SEQ ID NO: 5878941 - DNA, 25 bp, Homo sapien
tggatgcagacccctgccccacacg

SEQ ID NO: 5878942 - DNA, 25 bp, Homo sapien
cgatttcttgtttaaattcttggtc

SEQ ID NO: 5878943 - DNA, 25 bp, Homo sapien
acctggaggcttcgaggaaggtgac

SEQ ID NO: 5878944 - DNA, 25 bp, Homo sapien
gtctccatactggatgccagagccc

SEQ ID NO: 5878945 - DNA, 25 bp, Homo sapien
tgtggggcaggggtctgcatccatg

SEQ ID NO: 5878946 - DNA, 25 bp, Homo sapien
cttctaaaggtactgtccgctgagt

SEQ ID NO: 5878947 - DNA, 25 bp, Homo sapien
tttccgatgaccaagaatttaaaca

SEQ ID NO: 5878948 - DNA, 25 bp, Homo sapien
tcagcctccggcggctgtactccag

SEQ ID NO: 5878949 - DNA, 25 bp, Homo sapien
gcacttggagcctgtgtacgtcgag

SEQ ID NO: 5878950 - DNA, 25 bp, Homo sapien
gctgtgggaacgtgctgggccgtgg

SEQ ID NO: 5878951 - DNA, 25 bp, Homo sapien
gccgtggccagcacaagctggattt

SEQ ID NO: 5878952 - DNA, 25 bp, Homo sapien
ctttcataccgggtcatacgcataa

SEQ ID NO: 5878953 - DNA, 25 bp, Homo sapien
gaatttcttttcaatgaactgatga

SEQ ID NO: 5878954 - DNA, 25 bp, Homo sapien
cacaccggctctgtgctgtgggaac

SEQ ID NO: 5878955 - DNA, 25 bp, Homo sapien
ggacccaccgctgaacctgtgtcac

SEQ ID NO: 5878956 - DNA, 25 bp, Homo sapien
ggaagatctacttctgtgccgagta

SEQ ID NO: 5878957 - DNA, 25 bp, Homo sapien
cactggggcgcctaacagccacact

SEQ ID NO: 5878958 - DNA, 25 bp, Homo sapien
ccagagcccatcctctcggggtcca

SEQ ID NO: 5878959 - DNA, 25 bp, Homo sapien
caccgttccccaggaagatctactt

SEQ ID NO: 5878960 - DNA, 25 bp, Homo sapien
ctgatgaagcaagcaagatttgcca

SEQ ID NO: 5878961 - DNA, 25 bp, Homo sapien
cctgaaccgctcctggccggccgtg

SEQ ID NO: 5878962 - DNA, 25 bp, Homo sapien
tttattatctttgagccaaattcca

SEQ ID NO: 5878963 - DNA, 25 bp, Homo sapien
taagtattttccttgcacactgcat

SEQ ID NO: 5878964 - DNA, 25 bp, Homo sapien
caagaatttaaacaagaaatcgtaa

SEQ ID NO: 5878965 - DNA, 25 bp, Homo sapien
ccttgcacactgcatgaaagcctct

SEQ ID NO: 5878966 - DNA, 25 bp, Homo sapien
caccgacatttattatctttgagcc

SEQ ID NO: 5878967 - DNA, 25 bp, Homo sapien
aaggaggaaagcacgctcacgtcca

SEQ ID NO: 5878968 - DNA, 25 bp, Homo sapien
tttctcggctggtgatgtcatagac

SEQ ID NO: 5878969 - DNA, 25 bp, Homo sapien
gggttctgtcatgtcacaccggctc

SEQ ID NO: 5878970 - DNA, 25 bp, Homo sapien
tacgtcgaggtgaccgcagctgtct

SEQ ID NO: 5878971 - DNA, 25 bp, Homo sapien
tgggaacgtgctgggccgtggccag

SEQ ID NO: 5878972 - DNA, 25 bp, Homo sapien
tacgcataaccaacacaaggaggaa

SEQ ID NO: 5878973 - DNA, 25 bp, Homo sapien
agtccttcttgttcccgcagaggat

SEQ ID NO: 5878974 - DNA, 25 bp, Homo sapien
tctgtgccgagtagaaaagatggta

SEQ ID NO: 5878975 - DNA, 25 bp, Homo sapien
gctcattctcttgtgcgaacctgga

SEQ ID NO: 5878976 - DNA, 25 bp, Homo sapien
tggccagcacaagctggatttaacg

SEQ ID NO: 5878977 - DNA, 25 bp, Homo sapien
cagcctcttcagcctccggcggctg

SEQ ID NO: 5878978 - DNA, 25 bp, Homo sapien
acactgcatgaaagcctcttcgacg

SEQ ID NO: 5878979 - DNA, 25 bp, Homo sapien
agaaacgcactggctgttcacacca

SEQ ID NO: 5878980 - DNA, 25 bp, Homo sapien
acactcctgtgcacttggagcctgt

SEQ ID NO: 5878981 - DNA, 25 bp, Homo sapien
agtctccgcagagcgagaggaaccg

SEQ ID NO: 5878982 - DNA, 25 bp, Homo sapien
ccgacatttattatctttgagccaa

SEQ ID NO: 5878983 - DNA, 25 bp, Homo sapien
tcattctcttgtgcgaacctggagg

SEQ ID NO: 5878984 - DNA, 25 bp, Homo sapien
tattatctttgagccaaattccatt

SEQ ID NO: 5878985 - DNA, 25 bp, Homo sapien
atgtggcttctaaaggtactgtccg

SEQ ID NO: 5878986 - DNA, 25 bp, Homo sapien
cagctcattctcttgtgcgaacctg

SEQ ID NO: 5878987 - DNA, 25 bp, Homo sapien
tctgtcatgtcacaccggctctgtg

SEQ ID NO: 5878988 - DNA, 25 bp, Homo sapien
aaatcgtaagtctcggacatggcgg

SEQ ID NO: 5878989 - DNA, 25 bp, Homo sapien
ggagtttaaaaagaaagctcactga

SEQ ID NO: 5878990 - DNA, 25 bp, Homo sapien
tcgccagcattctggcatctgttaa

SEQ ID NO: 5878991 - DNA, 25 bp, Homo sapien
ctgctgagcccccggctgccagtgt

SEQ ID NO: 5878992 - DNA, 25 bp, Homo sapien
tcggctggtgatgtcatagacaagg

SEQ ID NO: 5878993 - DNA, 25 bp, Homo sapien
ggctgtactccaggacccaccgctg

SEQ ID NO: 5878994 - DNA, 25 bp, Homo sapien
gttccccaggaagatctacttctgt

SEQ ID NO: 5878995 - DNA, 25 bp, Homo sapien
atttaccaccgacatttattatctt

SEQ ID NO: 5878996 - DNA, 25 bp, Homo sapien
tcttgttcccgcagaggataaggac

SEQ ID NO: 5878997 - DNA, 25 bp, Homo sapien
tcagggcagcgtctccatactggat

SEQ ID NO: 5878998 - DNA, 25 bp, Homo sapien
gcagaggataaggacgatgttctgg

SEQ ID NO: 5878999 - DNA, 25 bp, Homo sapien
acgttctcgccagtcagtgcactgg

SEQ ID NO: 5879000 - DNA, 25 bp, Homo sapien
aagcacgctcacgtccatgactgca

SEQ ID NO: 5879001 - DNA, 25 bp, Homo sapien
agggcagcgtctccatactggatgc

SEQ ID NO: 5879002 - DNA, 25 bp, Homo sapien
tagtagcttctcgtcacagacctga

SEQ ID NO: 5879003 - DNA, 25 bp, Homo sapien
taacagccacactcctgtgcacttg

SEQ ID NO: 5879004 - DNA, 25 bp, Homo sapien
catcctctcggggtccagttcacct

SEQ ID NO: 5879005 - DNA, 25 bp, Homo sapien
tctggctcgccagcattctggcatc

SEQ ID NO: 5879006 - DNA, 25 bp, Homo sapien
atgtcctgggagttaaccaacgcaa

SEQ ID NO: 5879007 - DNA, 25 bp, Homo sapien
ctgtaactttacatatttaccaccg

SEQ ID NO: 5879008 - DNA, 25 bp, Homo sapien
tcccgcagaggataaggacgatgtt

SEQ ID NO: 5879009 - DNA, 25 bp, Homo sapien
cgatgttctggctcgccagcattct

SEQ ID NO: 5879010 - DNA, 25 bp, Homo sapien
agtcctttcataccgggtcatacgc

SEQ ID NO: 5879011 - DNA, 25 bp, Homo sapien
attgtaggtttctcggctggtgatg

SEQ ID NO: 5879012 - DNA, 25 bp, Homo sapien
tccaggacccaccgctgaacctgtg

SEQ ID NO: 5879013 - DNA, 25 bp, Homo sapien
agcttctcgtcacagacctgaaccg

SEQ ID NO: 5879014 - DNA, 25 bp, Homo sapien
cggcggctgtactccaggacccacc

SEQ ID NO: 5879015 - DNA, 25 bp, Homo sapien
agagggattaaataagaaacgcact

SEQ ID NO: 5879016 - DNA, 25 bp, Homo sapien
tcctctcggggtccagttcacctga

SEQ ID NO: 5879017 - DNA, 25 bp, Homo sapien
acatatttaccaccgacatttatta

SEQ ID NO: 5879018 - DNA, 25 bp, Homo sapien
caccagagtcctttcataccgggtc

SEQ ID NO: 5879019 - DNA, 25 bp, Homo sapien
ggggtccgtcctccagtctccgcag

SEQ ID NO: 5879020 - DNA, 25 bp, Homo sapien
ccagagtcctttcataccgggtcat

SEQ ID NO: 5879021 - DNA, 25 bp, Homo sapien
tcacattcacaactgcatttcctgg

SEQ ID NO: 5879022 - DNA, 25 bp, Homo sapien
catacgcataaccaacacaaggagg

SEQ ID NO: 5879023 - DNA, 25 bp, Homo sapien
atttcttttcaatgaactgatgaag

SEQ ID NO: 5879024 - DNA, 25 bp, Homo sapien
tgtacgtcgaggtgaccgcagctgt

SEQ ID NO: 5879025 - DNA, 25 bp, Homo sapien
aagatctacttctgtgccgagtaga

SEQ ID NO: 5879026 - DNA, 25 bp, Homo sapien
gttctgtcatgtcacaccggctctg

SEQ ID NO: 5879027 - DNA, 25 bp, Homo sapien
gttctggctcgccagcattctggca

SEQ ID NO: 5879028 - DNA, 25 bp, Homo sapien
cttcttgttcccgcagaggataagg

SEQ ID NO: 5879029 - DNA, 25 bp, Homo sapien
cttcagcctccggcggctgtactcc

SEQ ID NO: 5879030 - DNA, 25 bp, Homo sapien
gtccgctgagttagttcgcagaatg

SEQ ID NO: 5879031 - DNA, 25 bp, Homo sapien
gcaagcaagatttgccagttcccgc

SEQ ID NO: 5879032 - DNA, 25 bp, Homo sapien
tgatgtcatagacaaggagtgcccc

SEQ ID NO: 5879033 - DNA, 25 bp, Homo sapien
agttagttcgcagaatggctgctga

SEQ ID NO: 5879034 - DNA, 25 bp, Homo sapien
cccggctgccagtgtacaccgttcc

SEQ ID NO: 5879035 - DNA, 25 bp, Homo sapien
ttaaccaacgcaatgagaaagcacg

SEQ ID NO: 5879036 - DNA, 25 bp, Homo sapien
taggtttctcggctggtgatgtcat

SEQ ID NO: 5879037 - DNA, 25 bp, Homo sapien
ctccagtctccgcagagcgagagga

SEQ ID NO: 5879038 - DNA, 25 bp, Homo sapien
agagtcctttcataccgggtcatac

SEQ ID NO: 5879039 - DNA, 25 bp, Homo sapien
ccgttccccaggaagatctacttct

SEQ ID NO: 5879040 - DNA, 25 bp, Homo sapien
cacagacctgaaccgctcctggccg

SEQ ID NO: 5879041 - DNA, 25 bp, Homo sapien
taccgggtcatacgcataaccaaca

SEQ ID NO: 5879042 - DNA, 25 bp, Homo sapien
tcctggccggccgtgtcccatatct

SEQ ID NO: 5879043 - DNA, 25 bp, Homo sapien
gcattctggcatctgttaaccaatt

SEQ ID NO: 5879044 - DNA, 25 bp, Homo sapien
attaaataagaaacgcactggctgt

SEQ ID NO: 5879045 - DNA, 25 bp, Homo sapien
atgttctggctcgccagcattctgg

SEQ ID NO: 5879046 - DNA, 25 bp, Homo sapien
gacgatgttctggctcgccagcatt

SEQ ID NO: 5879047 - DNA, 25 bp, Homo sapien
cacctgattcaattttgttaagtat

SEQ ID NO: 5879048 - DNA, 25 bp, Homo sapien
cacctctgtagtagcttctcgtcac

SEQ ID NO: 5879049 - DNA, 25 bp, Homo sapien
tccggcggctgtactccaggaccca

SEQ ID NO: 5879050 - DNA, 25 bp, Homo sapien
atgtcatagacaaggagtgccccag

SEQ ID NO: 5879051 - DNA, 25 bp, Homo sapien
gcactggctgttcacaccagagtcc

SEQ ID NO: 5879052 - DNA, 25 bp, Homo sapien
cgtggccagcacaagctggatttaa

SEQ ID NO: 5879053 - DNA, 25 bp, Homo sapien
agtgtacaccgttccccaggaagat

SEQ ID NO: 5879054 - DNA, 25 bp, Homo sapien
gtaagcgcattgtaggtttctcggc

SEQ ID NO: 5879055 - DNA, 25 bp, Homo sapien
agttcccgcatttccgatgaccaag

SEQ ID NO: 5879056 - DNA, 25 bp, Homo sapien
cacaccagagtcctttcataccggg

SEQ ID NO: 5879057 - DNA, 25 bp, Homo sapien
actgagtgcagggttctgtcatgtc

SEQ ID NO: 5879058 - DNA, 25 bp, Homo sapien
ggctctgtgctgtgggaacgtgctg

SEQ ID NO: 5879059 - DNA, 25 bp, Homo sapien
tgaagcaagcaagatttgccagttc

SEQ ID NO: 5879060 - DNA, 25 bp, Homo sapien
tggatttaacggaacgtgaagggta

SEQ ID NO: 5879061 - DNA, 25 bp, Homo sapien
ttcgaggaaggtgacttcccggtcg

SEQ ID NO: 5879062 - DNA, 25 bp, Homo sapien
caaggagtgccccagctgcacctct

SEQ ID NO: 5879063 - DNA, 25 bp, Homo sapien
aattccattcctatggtatgatttg

SEQ ID NO: 5879064 - DNA, 25 bp, Homo sapien
acgctcacgtccatgactgcatgtc

SEQ ID NO: 5879065 - DNA, 25 bp, Homo sapien
ttgttcccgcagaggataaggacga

SEQ ID NO: 5879066 - DNA, 25 bp, Homo sapien
ccgtgtcccatatctgtaactttac

SEQ ID NO: 5879067 - DNA, 25 bp, Homo sapien
attcctatggtatgatttgagtcat

SEQ ID NO: 5879068 - DNA, 25 bp, Homo sapien
ctctcggggtccagttcacctgatt

SEQ ID NO: 5879069 - DNA, 25 bp, Homo sapien
ccgcagaggataaggacgatgttct

SEQ ID NO: 5879070 - DNA, 25 bp, Homo sapien
aacaagaaatcgtaagtctcggaca

SEQ ID NO: 5879071 - DNA, 25 bp, Homo sapien
cctgattcaattttgttaagtattt

SEQ ID NO: 5879072 - DNA, 25 bp, Homo sapien
gaaaagatggtagtaaaaactccag

SEQ ID NO: 5879073 - DNA, 25 bp, Homo sapien
ttccttgcacactgcatgaaagcct

SEQ ID NO: 5879074 - DNA, 25 bp, Homo sapien
cgcataaccaacacaaggaggaaag

SEQ ID NO: 5879075 - DNA, 25 bp, Homo sapien
ggtagtaaaaactccagcctcttca

SEQ ID NO: 5879076 - DNA, 25 bp, Homo sapien
gggtctgcatccatgtggcttctaa

SEQ ID NO: 5879077 - DNA, 25 bp, Homo sapien
gaggtgaccgcagctgtctcagggc

SEQ ID NO: 5879078 - DNA, 25 bp, Homo sapien
tgggagtttaaaaagaaagctcact

SEQ ID NO: 5879079 - DNA, 25 bp, Homo sapien
ccggctctgtgctgtgggaacgtgc

SEQ ID NO: 5879080 - DNA, 25 bp, Homo sapien
gctgtctcagggcagcgtctccata

SEQ ID NO: 5879081 - DNA, 25 bp, Homo sapien
gtcactggggcgcctaacagccaca

SEQ ID NO: 5879082 - DNA, 25 bp, Homo sapien
catttattatctttgagccaaattc

SEQ ID NO: 5879083 - DNA, 25 bp, Homo sapien
gtgtcccatatctgtaactttacat

SEQ ID NO: 5879084 - DNA, 25 bp, Homo sapien
tgccgagtagaaaagatggtagtaa

SEQ ID NO: 5879085 - DNA, 25 bp, Homo sapien
tctaaaggtactgtccgctgagtta

SEQ ID NO: 5879086 - DNA, 25 bp, Homo sapien
tagaaaagatggtagtaaaaactcc

SEQ ID NO: 5879087 - DNA, 25 bp, Homo sapien
tcgccagtcagtgcactggtttcca

SEQ ID NO: 5879088 - DNA, 25 bp, Homo sapien
gggccgtggccagcacaagctggat

SEQ ID NO: 5879089 - DNA, 25 bp, Homo sapien
acctgtgtcactggggcgcctaaca

SEQ ID NO: 5879090 - DNA, 25 bp, Homo sapien
gaacgtgaagggtacgtgtggggca

SEQ ID NO: 5879091 - DNA, 25 bp, Homo sapien
cgacgttctcgccagtcagtgcact

SEQ ID NO: 5879092 - DNA, 25 bp, Homo sapien
tgtagtagcttctcgtcacagacct

SEQ ID NO: 5879093 - DNA, 25 bp, Homo sapien
ttacatatttaccaccgacatttat

SEQ ID NO: 5879094 - DNA, 25 bp, Homo sapien
gtttccaggaacatcagctcattct

SEQ ID NO: 5879095 - DNA, 25 bp, Homo sapien
gcgtctccatactggatgccagagc

SEQ ID NO: 5879096 - DNA, 25 bp, Homo sapien
ccatactggatgccagagcccatcc

SEQ ID NO: 5879097 - DNA, 25 bp, Homo sapien
attagtaagcgcattgtaggtttct

SEQ ID NO: 5879098 - DNA, 25 bp, Homo sapien
cctctgtagtagcttctcgtcacag

SEQ ID NO: 5879099 - DNA, 25 bp, Homo sapien
ctatggtatgatttgagtcatcttt

SEQ ID NO: 5879100 - DNA, 25 bp, Homo sapien
gtgcacttggagcctgtgtacgtcg

SEQ ID NO: 5879101 - DNA, 25 bp, Homo sapien
cttctgtgccgagtagaaaagatgg

SEQ ID NO: 5879102 - DNA, 25 bp, Homo sapien
taaataagaaacgcactggctgttc

SEQ ID NO: 5879103 - DNA, 25 bp, Homo sapien
tggtttccaggaacatcagctcatt

SEQ ID NO: 5879104 - DNA, 25 bp, Homo sapien
actccaggacccaccgctgaacctg

SEQ ID NO: 5879105 - DNA, 25 bp, Homo sapien
ttcttttcaatgaactgatgaagca

SEQ ID NO: 5879106 - DNA, 25 bp, Homo sapien
tagtaaaaactccagcctcttcagc

SEQ ID NO: 5879107 - DNA, 25 bp, Homo sapien
gacttcccggtcggcatccaagtcc

SEQ ID NO: 5879108 - DNA, 25 bp, Homo sapien
acaactgcatttcctgggagtttaa

SEQ ID NO: 5879109 - DNA, 25 bp, Homo sapien
tcatgtcacaccggctctgtgctgt

SEQ ID NO: 5879110 - DNA, 25 bp, Homo sapien
ctgtgctgtgggaacgtgctgggcc

SEQ ID NO: 5879111 - DNA, 25 bp, Homo sapien
tctacttctgtgccgagtagaaaag

SEQ ID NO: 5879112 - DNA, 25 bp, Homo sapien
ctgccgccacagctccgcggggtcc

SEQ ID NO: 5879113 - DNA, 25 bp, Homo sapien
cggggtccagttcacctgattcaat

SEQ ID NO: 5879114 - DNA, 25 bp, Homo sapien
aggaaagcacgctcacgtccatgac

SEQ ID NO: 5879115 - DNA, 25 bp, Homo sapien
ctggaggcttcgaggaaggtgactt

SEQ ID NO: 5879116 - DNA, 25 bp, Homo sapien
tgttcacaccagagtcctttcatac

SEQ ID NO: 5879117 - DNA, 25 bp, Homo sapien
agtgcagggttctgtcatgtcacac

SEQ ID NO: 5879118 - DNA, 25 bp, Homo sapien
tcccggtcggcatccaagtccttct

SEQ ID NO: 5879119 - DNA, 25 bp, Homo sapien
ttcacaccagagtcctttcataccg

SEQ ID NO: 5879120 - DNA, 25 bp, Homo sapien
ggagttaaccaacgcaatgagaaag

SEQ ID NO: 5879121 - DNA, 25 bp, Homo sapien
tctcagggcagcgtctccatactgg

SEQ ID NO: 5879122 - DNA, 25 bp, Homo sapien
ggcttctaaaggtactgtccgctga

SEQ ID NO: 5879123 - DNA, 25 bp, Homo sapien
taaccaacacaaggaggaaagcacg

SEQ ID NO: 5879124 - DNA, 25 bp, Homo sapien
acatggcggtctgcgccattctgcc

SEQ ID NO: 5879125 - DNA, 25 bp, Homo sapien
atctgttaaccaattagtaagcgca

SEQ ID NO: 5879126 - DNA, 25 bp, Homo sapien
cgccacagctccgcggggtccgtcc

SEQ ID NO: 5879127 - DNA, 25 bp, Homo sapien
ccggccgtgtcccatatctgtaact

SEQ ID NO: 5879128 - DNA, 25 bp, Homo sapien
tggctgttcacaccagagtcctttc

SEQ ID NO: 5879129 - DNA, 25 bp, Homo sapien
tgtgccgagtagaaaagatggtagt

SEQ ID NO: 5879130 - DNA, 25 bp, Homo sapien
tcctccagtctccgcagagcgagag

SEQ ID NO: 5879131 - DNA, 25 bp, Homo sapien
tcggacatggcggtctgcgccattc

SEQ ID NO: 5879132 - DNA, 25 bp, Homo sapien
tccccaggaagatctacttctgtgc

SEQ ID NO: 5879133 - DNA, 25 bp, Homo sapien
gctcactgagtgcagggttctgtca

SEQ ID NO: 5879134 - DNA, 25 bp, Homo sapien
accgctgaacctgtgtcactggggc

SEQ ID NO: 5879135 - DNA, 25 bp, Homo sapien
tagtaagcgcattgtaggtttctcg

SEQ ID NO: 5879136 - DNA, 25 bp, Homo sapien
ttatctttgagccaaattccattcc

SEQ ID NO: 5879137 - DNA, 25 bp, Homo sapien
taaggacgatgttctggctcgccag

SEQ ID NO: 5879138 - DNA, 25 bp, Homo sapien
ttagttcgcagaatggctgctgagc

SEQ ID NO: 5879139 - DNA, 25 bp, Homo sapien
caagaaatcgtaagtctcggacatg

SEQ ID NO: 5879140 - DNA, 25 bp, Homo sapien
aattttgttaagtattttccttgca

SEQ ID NO: 5879141 - DNA, 25 bp, Homo sapien
agaaatcgtaagtctcggacatggc

SEQ ID NO: 5879142 - DNA, 25 bp, Homo sapien
gtgacttcccggtcggcatccaagt

SEQ ID NO: 5879143 - DNA, 25 bp, Homo sapien
actggctgttcacaccagagtcctt

SEQ ID NO: 5879144 - DNA, 25 bp, Homo sapien
ggtttctcggctggtgatgtcatag

SEQ ID NO: 5879145 - DNA, 25 bp, Homo sapien
atggtagtaaaaactccagcctctt

SEQ ID NO: 5879146 - DNA, 25 bp, Homo sapien
gtggatcacagaaacagtgtaaaag

SEQ ID NO: 5879147 - DNA, 25 bp, Homo sapien
catgaaagcctcttcgacgttctcg

SEQ ID NO: 5879148 - DNA, 25 bp, Homo sapien
gactgcatgtcctgggagttaacca

SEQ ID NO: 5879149 - DNA, 25 bp, Homo sapien
ggattaaataagaaacgcactggct

SEQ ID NO: 5879150 - DNA, 25 bp, Homo sapien
gtcatagacaaggagtgccccagct

SEQ ID NO: 5879151 - DNA, 25 bp, Homo sapien
cccaggaagatctacttctgtgccg

SEQ ID NO: 5879152 - DNA, 25 bp, Homo sapien
ttccattcctatggtatgatttgag

SEQ ID NO: 5879153 - DNA, 25 bp, Homo sapien
gtgaagggtacgtgtggggcagggg

SEQ ID NO: 5879154 - DNA, 25 bp, Homo sapien
tattttccttgcacactgcatgaaa

SEQ ID NO: 5879155 - DNA, 25 bp, Homo sapien
aagcaagcaagatttgccagttccc

SEQ ID NO: 5879156 - DNA, 25 bp, Homo sapien
agttcacctgattcaattttgttaa

SEQ ID NO: 5879157 - DNA, 25 bp, Homo sapien
cagctgcacctctgtagtagcttct

SEQ ID NO: 5879158 - DNA, 25 bp, Homo sapien
gatttgccagttcccgcatttccga

SEQ ID NO: 5879159 - DNA, 25 bp, Homo sapien
ggcgcctaacagccacactcctgtg

SEQ ID NO: 5879160 - DNA, 25 bp, Homo sapien
gcatttcctgggagtttaaaaagaa

SEQ ID NO: 5879161 - DNA, 25 bp, Homo sapien
gcacgctctctcacattcacaactg

SEQ ID NO: 5879162 - DNA, 25 bp, Homo sapien
gctgccagtgtacaccgttccccag

SEQ ID NO: 5879163 - DNA, 25 bp, Homo sapien
gctgagcccccggctgccagtgtac

SEQ ID NO: 5879164 - DNA, 25 bp, Homo sapien
cgtaagtctcggacatggcggtctg

SEQ ID NO: 5879165 - DNA, 25 bp, Homo sapien
acattcacaactgcatttcctggga

SEQ ID NO: 5879166 - DNA, 25 bp, Homo sapien
aaggtactgtccgctgagttagttc

SEQ ID NO: 5879167 - DNA, 25 bp, Homo sapien
gtcccatatctgtaactttacatat

SEQ ID NO: 5879168 - DNA, 25 bp, Homo sapien
accaattagtaagcgcattgtaggt

SEQ ID NO: 5879169 - DNA, 25 bp, Homo sapien
atcagctcattctcttgtgcgaacc

SEQ ID NO: 5879170 - DNA, 25 bp, Homo sapien
ccgcggggtccgtcctccagtctcc

SEQ ID NO: 5879171 - DNA, 25 bp, Homo sapien
cgtgtggggcaggggtctgcatcca

SEQ ID NO: 5879172 - DNA, 25 bp, Homo sapien
tgccagttcccgcatttccgatgac

SEQ ID NO: 5879173 - DNA, 25 bp, Homo sapien
ttctgccgccacagctccgcggggt

SEQ ID NO: 5879174 - DNA, 25 bp, Homo sapien
tctgtagtagcttctcgtcacagac

SEQ ID NO: 5879175 - DNA, 25 bp, Homo sapien
ctgggccgtggccagcacaagctgg

SEQ ID NO: 5879176 - DNA, 25 bp, Homo sapien
caggacccaccgctgaacctgtgtc

SEQ ID NO: 5879177 - DNA, 25 bp, Homo sapien
atcacagaaacagtgtaaaaggggt

SEQ ID NO: 5879178 - DNA, 25 bp, Homo sapien
ggctgctgagcccccggctgccagt

SEQ ID NO: 5879179 - DNA, 25 bp, Homo sapien
aaaagaaagctcactgagtgcaggg

SEQ ID NO: 5879180 - DNA, 25 bp, Homo sapien
cgatgaccaagaatttaaacaagaa

SEQ ID NO: 5879181 - DNA, 25 bp, Homo sapien
agcctcttcgacgttctcgccagtc

SEQ ID NO: 5879182 - DNA, 25 bp, Homo sapien
ccatgtggcttctaaaggtactgtc

SEQ ID NO: 5879183 - DNA, 25 bp, Homo sapien
ttcccgcatttccgatgaccaagaa

SEQ ID NO: 5879184 - DNA, 25 bp, Homo sapien
tgtctcagggcagcgtctccatact

SEQ ID NO: 5879185 - DNA, 25 bp, Homo sapien
gaaggtgacttcccggtcggcatcc

SEQ ID NO: 5879186 - DNA, 25 bp, Homo sapien
agaggataaggacgatgttctggct

SEQ ID NO: 5879187 - DNA, 25 bp, Homo sapien
cgcctaacagccacactcctgtgca

SEQ ID NO: 5879188 - DNA, 25 bp, Homo sapien
gacatttattatctttgagccaaat

SEQ ID NO: 5879189 - DNA, 25 bp, Homo sapien
aacgcaatgagaaagcacgctctct

SEQ ID NO: 5879190 - DNA, 25 bp, Homo sapien
caaattccattcctatggtatgatt

SEQ ID NO: 5879191 - DNA, 25 bp, Homo sapien
gagtagaaaagatggtagtaaaaac

SEQ ID NO: 5879192 - DNA, 25 bp, Homo sapien
gtctgcatccatgtggcttctaaag

SEQ ID NO: 5879193 - DNA, 25 bp, Homo sapien
ccatgactgcatgtcctgggagtta

SEQ ID NO: 5879194 - DNA, 25 bp, Homo sapien
tccgatgaccaagaatttaaacaag

SEQ ID NO: 5879195 - DNA, 25 bp, Homo sapien
gccattctgccgccacagctccgcg

SEQ ID NO: 5879196 - DNA, 25 bp, Homo sapien
gaacctggaggcttcgaggaaggtg

SEQ ID NO: 5879197 - DNA, 25 bp, Homo sapien
tacttctgtgccgagtagaaaagat

SEQ ID NO: 5879198 - DNA, 25 bp, Homo sapien
gctcctggccggccgtgtcccatat

SEQ ID NO: 5879199 - DNA, 25 bp, Homo sapien
tgcatgaaagcctcttcgacgttct

SEQ ID NO: 5879200 - DNA, 25 bp, Homo sapien
aaacgcactggctgttcacaccaga

SEQ ID NO: 5879201 - DNA, 25 bp, Homo sapien
gctgagttagttcgcagaatggctg

SEQ ID NO: 5879202 - DNA, 25 bp, Homo sapien
ccaccgctgaacctgtgtcactggg

SEQ ID NO: 5879203 - DNA, 25 bp, Homo sapien
ctgtactccaggacccaccgctgaa

SEQ ID NO: 5879204 - DNA, 25 bp, Homo sapien
gcacaagctggatttaacggaacgt

SEQ ID NO: 5879205 - DNA, 25 bp, Homo sapien
tggggcaggggtctgcatccatgtg

SEQ ID NO: 5879206 - DNA, 25 bp, Homo sapien
gcaagatttgccagttcccgcattt

SEQ ID NO: 5879207 - DNA, 25 bp, Homo sapien
agttcgcagaatggctgctgagccc

SEQ ID NO: 5879208 - DNA, 25 bp, Homo sapien
gcggggtccgtcctccagtctccgc

SEQ ID NO: 5879209 - DNA, 25 bp, Homo sapien
caccggctctgtgctgtgggaacgt

SEQ ID NO: 5879210 - DNA, 25 bp, Homo sapien
actcctgtgcacttggagcctgtgt

SEQ ID NO: 5879211 - DNA, 25 bp, Homo sapien
tttaaacaagaaatcgtaagtctcg

SEQ ID NO: 5879212 - DNA, 25 bp, Homo sapien
ctggtgatgtcatagacaaggagtg

SEQ ID NO: 5879213 - DNA, 25 bp, Homo sapien
ctgttaaccaattagtaagcgcatt

SEQ ID NO: 5879214 - DNA, 25 bp, Homo sapien
aggataaggacgatgttctggctcg

SEQ ID NO: 5879215 - DNA, 25 bp, Homo sapien
gcaggggtctgcatccatgtggctt

SEQ ID NO: 5879216 - DNA, 25 bp, Homo sapien
ccaggaacatcagctcattctcttg

SEQ ID NO: 5879217 - DNA, 25 bp, Homo sapien
agtattttccttgcacactgcatga

SEQ ID NO: 5879218 - DNA, 25 bp, Homo sapien
gctggatttaacggaacgtgaaggg

SEQ ID NO: 5879219 - DNA, 25 bp, Homo sapien
gtcctgggagttaaccaacgcaatg

SEQ ID NO: 5879220 - DNA, 25 bp, Homo sapien
actccagcctcttcagcctccggcg

SEQ ID NO: 5879221 - DNA, 25 bp, Homo sapien
gcctcttcagcctccggcggctgta

SEQ ID NO: 5879222 - DNA, 25 bp, Homo sapien
gtccatgactgcatgtcctgggagt

SEQ ID NO: 5879223 - DNA, 25 bp, Homo sapien
ctgtccgctgagttagttcgcagaa

SEQ ID NO: 5879224 - DNA, 25 bp, Homo sapien
gtgtcactggggcgcctaacagcca

SEQ ID NO: 5879225 - DNA, 25 bp, Homo sapien
ttgagccaaattccattcctatggt

SEQ ID NO: 5879226 - DNA, 25 bp, Homo sapien
cttcccggtcggcatccaagtcctt

SEQ ID NO: 5879227 - DNA, 25 bp, Homo sapien
tggatgccagagcccatcctctcgg

SEQ ID NO: 5879228 - DNA, 25 bp, Homo sapien
tcggcatccaagtccttcttgttcc

SEQ ID NO: 5879229 - DNA, 25 bp, Homo sapien
gtgctgtgggaacgtgctgggccgt

SEQ ID NO: 5879230 - DNA, 25 bp, Homo sapien
ggtactgtccgctgagttagttcgc

SEQ ID NO: 5879231 - DNA, 25 bp, Homo sapien
taagaaacgcactggctgttcacac

SEQ ID NO: 5879232 - DNA, 25 bp, Homo sapien
gatgaagcaagcaagatttgccagt

SEQ ID NO: 5879233 - DNA, 25 bp, Homo sapien
tctcggctggtgatgtcatagacaa

SEQ ID NO: 5879234 - DNA, 25 bp, Homo sapien
gggcaggggtctgcatccatgtggc

SEQ ID NO: 5879235 - DNA, 25 bp, Homo sapien
ctgtgtcactggggcgcctaacagc

SEQ ID NO: 5879236 - DNA, 25 bp, Homo sapien
ttggagcctgtgtacgtcgaggtga

SEQ ID NO: 5879237 - DNA, 25 bp, Homo sapien
gccagcacaagctggatttaacgga

SEQ ID NO: 5879238 - DNA, 25 bp, Homo sapien
gaacctgtgtcactggggcgcctaa

SEQ ID NO: 5879239 - DNA, 25 bp, Homo sapien
aggaacatcagctcattctcttgtg

SEQ ID NO: 5879240 - DNA, 25 bp, Homo sapien
cattctgccgccacagctccgcggg

SEQ ID NO: 5879241 - DNA, 25 bp, Homo sapien
tactgtccgctgagttagttcgcag

SEQ ID NO: 5879242 - DNA, 25 bp, Homo sapien
cccgcatttccgatgaccaagaatt

SEQ ID NO: 5879243 - DNA, 25 bp, Homo sapien
aaagatggtagtaaaaactccagcc

SEQ ID NO: 5879244 - DNA, 25 bp, Homo sapien
ctgcatgtcctgggagttaaccaac

SEQ ID NO: 5879245 - DNA, 25 bp, Homo sapien
ccacagctccgcggggtccgtcctc

SEQ ID NO: 5879246 - DNA, 25 bp, Homo sapien
gaaagctcactgagtgcagggttct

SEQ ID NO: 5879247 - DNA, 25 bp, Homo sapien
ctccgcggggtccgtcctccagtct

SEQ ID NO: 5879248 - DNA, 25 bp, Homo sapien
ccattcctatggtatgatttgagtc

SEQ ID NO: 5879249 - DNA, 25 bp, Homo sapien
acgtgaagggtacgtgtggggcagg

SEQ ID NO: 5879250 - DNA, 25 bp, Homo sapien
ggacatggcggtctgcgccattctg

SEQ ID NO: 5879251 - DNA, 25 bp, Homo sapien
gtcacagacctgaaccgctcctggc

SEQ ID NO: 5879252 - DNA, 25 bp, Homo sapien
ccacactcctgtgcacttggagcct

SEQ ID NO: 5879253 - DNA, 25 bp, Homo sapien
tggcatctgttaaccaattagtaag

SEQ ID NO: 5879254 - DNA, 25 bp, Homo sapien
agagcccatcctctcggggtccagt

SEQ ID NO: 5879255 - DNA, 25 bp, Homo sapien
gcttcgaggaaggtgacttcccggt

SEQ ID NO: 5879256 - DNA, 25 bp, Homo sapien
cataaccaacacaaggaggaaagca

SEQ ID NO: 5879257 - DNA, 25 bp, Homo sapien
acccaccgctgaacctgtgtcactg

SEQ ID NO: 5879258 - DNA, 25 bp, Homo sapien
gcatccatgtggcttctaaaggtac

SEQ ID NO: 5879259 - DNA, 25 bp, Homo sapien
attctggcatctgttaaccaattag

SEQ ID NO: 5879260 - DNA, 25 bp, Homo sapien
cagacctgaaccgctcctggccggc

SEQ ID NO: 5879261 - DNA, 25 bp, Homo sapien
atgtcacaccggctctgtgctgtgg

SEQ ID NO: 5879262 - DNA, 25 bp, Homo sapien
ctgtgcacttggagcctgtgtacgt

SEQ ID NO: 5879263 - DNA, 25 bp, Homo sapien
tgggagttaaccaacgcaatgagaa

SEQ ID NO: 5879264 - DNA, 25 bp, Homo sapien
tgtgggaacgtgctgggccgtggcc

SEQ ID NO: 5879265 - DNA, 25 bp, Homo sapien
cttttcaatgaactgatgaagcaag

SEQ ID NO: 5879266 - DNA, 25 bp, Homo sapien
ctttgagccaaattccattcctatg

SEQ ID NO: 5879267 - DNA, 25 bp, Homo sapien
aagctggatttaacggaacgtgaag

SEQ ID NO: 5879268 - DNA, 25 bp, Homo sapien
gacctgaaccgctcctggccggccg

SEQ ID NO: 5879269 - DNA, 25 bp, Homo sapien
agctccgcggggtccgtcctccagt

SEQ ID NO: 5879270 - DNA, 25 bp, Homo sapien
tgaccgcagctgtctcagggcagcg

SEQ ID NO: 5879271 - DNA, 25 bp, Homo sapien
gtcatacgcataaccaacacaagga

SEQ ID NO: 5879272 - DNA, 25 bp, Homo sapien
ctgcatttcctgggagtttaaaaag

SEQ ID NO: 5879273 - DNA, 25 bp, Homo sapien
gaatttaaacaagaaatcgtaagtc

SEQ ID NO: 5879274 - DNA, 25 bp, Homo sapien
gaaagcacgctcacgtccatgactg

SEQ ID NO: 5879275 - DNA, 25 bp, Homo sapien
gcacgctcacgtccatgactgcatg

SEQ ID NO: 5879276 - DNA, 25 bp, Homo sapien
ttcgacgttctcgccagtcagtgca

SEQ ID NO: 5879277 - DNA, 25 bp, Homo sapien
gttaaccaattagtaagcgcattgt

SEQ ID NO: 5879278 - DNA, 25 bp, Homo sapien
aagcgcattgtaggtttctcggctg

SEQ ID NO: 5879279 - DNA, 25 bp, Homo sapien
aaaaactccagcctcttcagcctcc

SEQ ID NO: 5879280 - DNA, 25 bp, Homo sapien
acagctccgcggggtccgtcctcca

SEQ ID NO: 5879281 - DNA, 25 bp, Homo sapien
aatgaactgatgaagcaagcaagat

SEQ ID NO: 5879282 - DNA, 25 bp, Homo sapien
ggcggtctgcgccattctgccgcca

SEQ ID NO: 5879283 - DNA, 25 bp, Homo sapien
tctcggacatggcggtctgcgccat

SEQ ID NO: 5879284 - DNA, 25 bp, Homo sapien
tccgtcctccagtctccgcagagcg

SEQ ID NO: 5879285 - DNA, 25 bp, Homo sapien
ttcacctgattcaattttgttaagt

SEQ ID NO: 5879286 - DNA, 25 bp, Homo sapien
acgcactggctgttcacaccagagt

SEQ ID NO: 5879287 - DNA, 25 bp, Homo sapien
ggatcacagaaacagtgtaaaaggg

SEQ ID NO: 5879288 - DNA, 25 bp, Homo sapien
cagtgcactggtttccaggaacatc

SEQ ID NO: 5879289 - DNA, 25 bp, Homo sapien
gggtcatacgcataaccaacacaag

SEQ ID NO: 5879290 - DNA, 25 bp, Homo sapien
cctgggagtttaaaaagaaagctca

SEQ ID NO: 5879291 - DNA, 25 bp, Homo sapien
ttgtgcgaacctggaggcttcgagg

SEQ ID NO: 5879292 - DNA, 25 bp, Homo sapien
tgagtgcagggttctgtcatgtcac

SEQ ID NO: 5879293 - DNA, 25 bp, Homo sapien
cccagctgcacctctgtagtagctt

SEQ ID NO: 5879294 - DNA, 25 bp, Homo sapien
ttgagtcatctttgaatttcttttc

SEQ ID NO: 5879295 - DNA, 25 bp, Homo sapien
ggccggccgtgtcccatatctgtaa

SEQ ID NO: 5879296 - DNA, 25 bp, Homo sapien
taagtctcggacatggcggtctgcg

SEQ ID NO: 5879297 - DNA, 25 bp, Homo sapien
gctgcacctctgtagtagcttctcg

SEQ ID NO: 5879298 - DNA, 25 bp, Homo sapien
ggagagggattaaataagaaacgca

SEQ ID NO: 5879299 - DNA, 25 bp, Homo sapien
cataccgggtcatacgcataaccaa

SEQ ID NO: 5879300 - DNA, 25 bp, Homo sapien
taaccaattagtaagcgcattgtag

SEQ ID NO: 5879301 - DNA, 25 bp, Homo sapien
ctggccggccgtgtcccatatctgt

SEQ ID NO: 5879302 - DNA, 25 bp, Homo sapien
atggcggtctgcgccattctgccgc

SEQ ID NO: 5879303 - DNA, 25 bp, Homo sapien
cagctgtctcagggcagcgtctcca

SEQ ID NO: 5879304 - DNA, 25 bp, Homo sapien
ccgggtcatacgcataaccaacaca

SEQ ID NO: 5879305 - DNA, 25 bp, Homo sapien
tgatttgagtcatctttgaatttct

SEQ ID NO: 5879306 - DNA, 25 bp, Homo sapien
tgagcccccggctgccagtgtacac

SEQ ID NO: 5879307 - DNA, 25 bp, Homo sapien
atttgagtcatctttgaatttcttt

SEQ ID NO: 5879308 - DNA, 25 bp, Homo sapien
gtccagttcacctgattcaattttg

SEQ ID NO: 5879309 - DNA, 25 bp, Homo sapien
tctcgccagtcagtgcactggtttc

SEQ ID NO: 5879310 - DNA, 25 bp, Homo sapien
gcactggtttccaggaacatcagct

SEQ ID NO: 5879311 - DNA, 25 bp, Homo sapien
accaacacaaggaggaaagcacgct

SEQ ID NO: 5879312 - DNA, 25 bp, Homo sapien
atctttgagccaaattccattccta

SEQ ID NO: 5879313 - DNA, 25 bp, Homo sapien
gttaagtattttccttgcacactgc

SEQ ID NO: 5879314 - DNA, 25 bp, Homo sapien
catttccgatgaccaagaatttaaa

SEQ ID NO: 5879315 - DNA, 25 bp, Homo sapien
aagaaagctcactgagtgcagggtt

SEQ ID NO: 5879316 - DNA, 25 bp, Homo sapien
gctcgccagcattctggcatctgtt

SEQ ID NO: 5879317 - DNA, 25 bp, Homo sapien
aagcacgctctctcacattcacaac

SEQ ID NO: 5879318 - DNA, 25 bp, Homo sapien
gatctacttctgtgccgagtagaaa

SEQ ID NO: 5879319 - DNA, 25 bp, Homo sapien
ctcttcagcctccggcggctgtact

SEQ ID NO: 5879320 - DNA, 25 bp, Homo sapien
tgccagagcccatcctctcggggtc

SEQ ID NO: 5879321 - DNA, 25 bp, Homo sapien
taacggaacgtgaagggtacgtgtg

SEQ ID NO: 5879322 - DNA, 25 bp, Homo sapien
acaagctggatttaacggaacgtga

SEQ ID NO: 5879323 - DNA, 25 bp, Homo sapien
ctccatactggatgccagagcccat

SEQ ID NO: 5879324 - DNA, 25 bp, Homo sapien
tctcgtcacagacctgaaccgctcc

SEQ ID NO: 5879325 - DNA, 25 bp, Homo sapien
gcattgtaggtttctcggctggtga

SEQ ID NO: 5879326 - DNA, 25 bp, Homo sapien
aggagtgccccagctgcacctctgt

SEQ ID NO: 5879327 - DNA, 25 bp, Homo sapien
caagtccttcttgttcccgcagagg

SEQ ID NO: 5879328 - DNA, 25 bp, Homo sapien
ggagcctgtgtacgtcgaggtgacc

SEQ ID NO: 5879329 - DNA, 25 bp, Homo sapien
catagacaaggagtgccccagctgc

SEQ ID NO: 5879330 - DNA, 25 bp, Homo sapien
cagaatggctgctgagcccccggct

SEQ ID NO: 5879331 - DNA, 25 bp, Homo sapien
acttggagcctgtgtacgtcgaggt

SEQ ID NO: 5879332 - DNA, 25 bp, Homo sapien
cccatcctctcggggtccagttcac

SEQ ID NO: 5879333 - DNA, 25 bp, Homo sapien
atatttaccaccgacatttattatc

SEQ ID NO: 5879334 - DNA, 25 bp, Homo sapien
tttcaatgaactgatgaagcaagca

SEQ ID NO: 5879335 - DNA, 25 bp, Homo sapien
gatgccagagcccatcctctcgggg

SEQ ID NO: 5879336 - DNA, 25 bp, Homo sapien
tgctgggccgtggccagcacaagct

SEQ ID NO: 5879337 - DNA, 25 bp, Homo sapien
cctgtgtacgtcgaggtgaccgcag

SEQ ID NO: 5879338 - DNA, 25 bp, Homo sapien
gcgccattctgccgccacagctccg

SEQ ID NO: 5879339 - DNA, 25 bp, Homo sapien
cgtgctgggccgtggccagcacaag

SEQ ID NO: 5879340 - DNA, 25 bp, Homo sapien
ctgaacctgtgtcactggggcgcct

SEQ ID NO: 5879341 - DNA, 25 bp, Homo sapien
acagccacactcctgtgcacttgga

SEQ ID NO: 5879342 - DNA, 25 bp, Homo sapien
ttgttaagtattttccttgcacact

SEQ ID NO: 5879343 - DNA, 25 bp, Homo sapien
gagtgccccagctgcacctctgtag

SEQ ID NO: 5879344 - DNA, 25 bp, Homo sapien
taaaaagaaagctcactgagtgcag

SEQ ID NO: 5879345 - DNA, 25 bp, Homo sapien
gaagggtacgtgtggggcaggggtc

SEQ ID NO: 5879346 - DNA, 25 bp, Homo sapien
accgcagctgtctcagggcagcgtc

SEQ ID NO: 5879347 - DNA, 25 bp, Homo sapien
aggaaggtgacttcccggtcggcat

SEQ ID NO: 5879348 - DNA, 25 bp, Homo sapien
aaccgctcctggccggccgtgtccc

SEQ ID NO: 5879349 - DNA, 25 bp, Homo sapien
tcttgtgcgaacctggaggcttcga

SEQ ID NO: 5879350 - DNA, 25 bp, Homo sapien
cagggttctgtcatgtcacaccggc

SEQ ID NO: 5879351 - DNA, 25 bp, Homo sapien
tcctatggtatgatttgagtcatct

SEQ ID NO: 5879352 - DNA, 25 bp, Homo sapien
gccagtcagtgcactggtttccagg

SEQ ID NO: 5879353 - DNA, 25 bp, Homo sapien
ttaccaccgacatttattatctttg

SEQ ID NO: 5879354 - DNA, 25 bp, Homo sapien
gcgaacctggaggcttcgaggaagg

SEQ ID NO: 5879355 - DNA, 25 bp, Homo sapien
gtcagtgcactggtttccaggaaca

SEQ ID NO: 5879356 - DNA, 25 bp, Homo sapien
tacaccgttccccaggaagatctac

SEQ ID NO: 5879357 - DNA, 25 bp, Homo sapien
tgaactgatgaagcaagcaagattt

SEQ ID NO: 5879358 - DNA, 25 bp, Homo sapien
ctgcgccattctgccgccacagctc

SEQ ID NO: 5879359 - DNA, 25 bp, Homo sapien
cctcttcgacgttctcgccagtcag

SEQ ID NO: 5879360 - DNA, 25 bp, Homo sapien
ggggcgcctaacagccacactcctg

SEQ ID NO: 5879361 - DNA, 25 bp, Homo sapien
tcactgagtgcagggttctgtcatg

SEQ ID NO: 5879362 - DNA, 25 bp, Homo sapien
gtggcttctaaaggtactgtccgct

SEQ ID NO: 5879363 - DNA, 25 bp, Homo sapien
aaagcctcttcgacgttctcgccag

SEQ ID NO: 5879364 - DNA, 25 bp, Homo sapien
agttaaccaacgcaatgagaaagca

SEQ ID NO: 5879365 - DNA, 25 bp, Homo sapien
ggtacgtgtggggcaggggtctgca

SEQ ID NO: 5879366 - DNA, 25 bp, Homo sapien
aactgatgaagcaagcaagatttgc

SEQ ID NO: 5879367 - DNA, 25 bp, Homo sapien
tgcagggttctgtcatgtcacaccg

SEQ ID NO: 5879368 - DNA, 25 bp, Homo sapien
agcccatcctctcggggtccagttc

SEQ ID NO: 5879369 - DNA, 25 bp, Homo sapien
ttcataccgggtcatacgcataacc

SEQ ID NO: 5879370 - DNA, 25 bp, Homo sapien
acatcagctcattctcttgtgcgaa

SEQ ID NO: 5879371 - DNA, 25 bp, Homo sapien
aataagaaacgcactggctgttcac

SEQ ID NO: 5879372 - DNA, 25 bp, Homo sapien
atgactgcatgtcctgggagttaac

SEQ ID NO: 5879373 - DNA, 25 bp, Homo sapien
cccccggctgccagtgtacaccgtt

SEQ ID NO: 5879374 - DNA, 25 bp, Homo sapien
cgcagctgtctcagggcagcgtctc

SEQ ID NO: 5879375 - DNA, 25 bp, Homo sapien
cgcaatgagaaagcacgctctctca

SEQ ID NO: 5879376 - DNA, 25 bp, Homo sapien
ggccgtgtcccatatctgtaacttt

SEQ ID NO: 5879377 - DNA, 25 bp, Homo sapien
ccagttcccgcatttccgatgacca

SEQ ID NO: 5879378 - DNA, 25 bp, Homo sapien
actggatgccagagcccatcctctc

SEQ ID NO: 5879379 - DNA, 25 bp, Homo sapien
cttctcgtcacagacctgaaccgct

SEQ ID NO: 5879380 - DNA, 25 bp, Homo sapien
tgtaggtttctcggctggtgatgtc

SEQ ID NO: 5879381 - DNA, 25 bp, Homo sapien
attctcttgtgcgaacctggaggct

SEQ ID NO: 5879382 - DNA, 25 bp, Homo sapien
actgcatgaaagcctcttcgacgtt

SEQ ID NO: 5879383 - DNA, 25 bp, Homo sapien
cgtcctccagtctccgcagagcgag

SEQ ID NO: 5879384 - DNA, 25 bp, Homo sapien
gccgccacagctccgcggggtccgt

SEQ ID NO: 5879385 - DNA, 25 bp, Homo sapien
aagatttgccagttcccgcatttcc

SEQ ID NO: 5879386 - DNA, 25 bp, Homo sapien
aaactccagcctcttcagcctccgg

SEQ ID NO: 5879387 - DNA, 25 bp, Homo sapien
agccacactcctgtgcacttggagc

SEQ ID NO: 5879388 - DNA, 25 bp, Homo sapien
ccagtctccgcagagcgagaggaac

SEQ ID NO: 5879389 - DNA, 25 bp, Homo sapien
ggtgatgtcatagacaaggagtgcc

SEQ ID NO: 5879390 - DNA, 25 bp, Homo sapien
aacgtgctgggccgtggccagcaca

SEQ ID NO: 5879391 - DNA, 25 bp, Homo sapien
tcaatgaactgatgaagcaagcaag

SEQ ID NO: 5879392 - DNA, 25 bp, Homo sapien
aggggtctgcatccatgtggcttct

SEQ ID NO: 5879393 - DNA, 25 bp, Homo sapien
tgaaccgctcctggccggccgtgtc

SEQ ID NO: 5879394 - DNA, 25 bp, Homo sapien
tgaaagcctcttcgacgttctcgcc

SEQ ID NO: 5879395 - DNA, 25 bp, Homo sapien
agcccccggctgccagtgtacaccg

SEQ ID NO: 5879396 - DNA, 25 bp, Homo sapien
gtctgcgccattctgccgccacagc

SEQ ID NO: 5879397 - DNA, 25 bp, Homo sapien
gttcccgcagaggataaggacgatg

SEQ ID NO: 5879398 - DNA, 25 bp, Homo sapien
ggtccgtcctccagtctccgcagag

SEQ ID NO: 5879399 - DNA, 25 bp, Homo sapien
taaacaagaaatcgtaagtctcgga

SEQ ID NO: 5879400 - DNA, 25 bp, Homo sapien
gccagcattctggcatctgttaacc

SEQ ID NO: 5879401 - DNA, 25 bp, Homo sapien
tcctttcataccgggtcatacgcat

SEQ ID NO: 5879402 - DNA, 25 bp, Homo sapien
atgaccaagaatttaaacaagaaat

SEQ ID NO: 5879403 - DNA, 25 bp, Homo sapien
gtaactttacatatttaccaccgac

SEQ ID NO: 5879404 - DNA, 25 bp, Homo sapien
acgtccatgactgcatgtcctggga

SEQ ID NO: 5879405 - DNA, 25 bp, Homo sapien
caatgagaaagcacgctctctcaca

SEQ ID NO: 5879406 - DNA, 25 bp, Homo sapien
tcgaggtgaccgcagctgtctcagg

SEQ ID NO: 5879407 - DNA, 25 bp, Homo sapien
atggtatgatttgagtcatctttga

SEQ ID NO: 5879408 - DNA, 25 bp, Homo sapien
gaccaagaatttaaacaagaaatcg

SEQ ID NO: 5879409 - DNA, 25 bp, Homo sapien
ggcagcgtctccatactggatgcca

SEQ ID NO: 5879410 - DNA, 25 bp, Homo sapien
gccaaattccattcctatggtatga

SEQ ID NO: 5879411 - DNA, 25 bp, Homo sapien
agggtacgtgtggggcaggggtctg

SEQ ID NO: 5879412 - DNA, 25 bp, Homo sapien
aactttacatatttaccaccgacat

SEQ ID NO: 5879413 - DNA, 25 bp, Homo sapien
agtttaaaaagaaagctcactgagt

SEQ ID NO: 5879414 - DNA, 25 bp, Homo sapien
aactgcatttcctgggagtttaaaa

SEQ ID NO: 5879415 - DNA, 25 bp, Homo sapien
tcacgtccatgactgcatgtcctgg

SEQ ID NO: 5879416 - DNA, 25 bp, Homo sapien
gcacactgcatgaaagcctcttcga

SEQ ID NO: 5879417 - DNA, 25 bp, Homo sapien
tcttcgacgttctcgccagtcagtg

SEQ ID NO: 5879418 - DNA, 25 bp, Homo sapien
tacgtgtggggcaggggtctgcatc

SEQ ID NO: 5879419 - DNA, 25 bp, Homo sapien
cggctgccagtgtacaccgttcccc

SEQ ID NO: 5879420 - DNA, 25 bp, Homo sapien
ttttgttaagtattttccttgcaca

SEQ ID NO: 5879421 - DNA, 25 bp, Homo sapien
tgtgtacgtcgaggtgaccgcagct

SEQ ID NO: 5879422 - DNA, 25 bp, Homo sapien
agggattaaataagaaacgcactgg

SEQ ID NO: 5879423 - DNA, 25 bp, Homo sapien
ccgagtagaaaagatggtagtaaaa

SEQ ID NO: 5879424 - DNA, 25 bp, Homo sapien
tccagcctcttcagcctccggcggc

SEQ ID NO: 5879425 - DNA, 25 bp, Homo sapien
tccaagtccttcttgttcccgcaga

SEQ ID NO: 5879426 - DNA, 25 bp, Homo sapien
cctgggagttaaccaacgcaatgag

SEQ ID NO: 5879427 - DNA, 25 bp, Homo sapien
gcggctgtactccaggacccaccgc

SEQ ID NO: 5879428 - DNA, 25 bp, Homo sapien
gataaggacgatgttctggctcgcc

SEQ ID NO: 5879429 - DNA, 25 bp, Homo sapien
tctcttgtgcgaacctggaggcttc

SEQ ID NO: 5879430 - DNA, 25 bp, Homo sapien
gtaaaaactccagcctcttcagcct

SEQ ID NO: 5879431 - DNA, 25 bp, Homo sapien
ctcggggtccagttcacctgattca

SEQ ID NO: 5879432 - DNA, 25 bp, Homo sapien
cagtcagtgcactggtttccaggaa

SEQ ID NO: 5879433 - DNA, 25 bp, Homo sapien
agatggtagtaaaaactccagcctc

SEQ ID NO: 5879434 - DNA, 25 bp, Homo sapien
tctctcacattcacaactgcatttc

SEQ ID NO: 5879435 - DNA, 25 bp, Homo sapien
gcgcattgtaggtttctcggctggt

SEQ ID NO: 5879436 - DNA, 25 bp, Homo sapien
tcacaactgcatttcctgggagttt

SEQ ID NO: 5879437 - DNA, 25 bp, Homo sapien
ccgctgagttagttcgcagaatggc

SEQ ID NO: 5879438 - DNA, 25 bp, Homo sapien
cacagaaacagtgtaaaaggggtgg

SEQ ID NO: 5879439 - DNA, 25 bp, Homo sapien
tccttcttgttcccgcagaggataa

SEQ ID NO: 5879440 - DNA, 25 bp, Homo sapien
ggaggcttcgaggaaggtgacttcc

SEQ ID NO: 5879441 - DNA, 25 bp, Homo sapien
tgcacctctgtagtagcttctcgtc

SEQ ID NO: 5879442 - DNA, 25 bp, Homo sapien
ggtgaccgcagctgtctcagggcag

SEQ ID NO: 5879443 - DNA, 25 bp, Homo sapien
gggtccagttcacctgattcaattt

SEQ ID NO: 5879444 - DNA, 25 bp, Homo sapien
tttgccagttcccgcatttccgatg

SEQ ID NO: 5879445 - DNA, 25 bp, Homo sapien
gaacatcagctcattctcttgtgcg

SEQ ID NO: 5879446 - DNA, 25 bp, Homo sapien
accaccgacatttattatctttgag

SEQ ID NO: 5879447 - DNA, 25 bp, Homo sapien
ttgcacactgcatgaaagcctcttc

SEQ ID NO: 5879448 - DNA, 25 bp, Homo sapien
tgtcatgtcacaccggctctgtgct

SEQ ID NO: 5879449 - DNA, 25 bp, Homo sapien
aagcaagatttgccagttcccgcat

SEQ ID NO: 5879450 - DNA, 25 bp, Homo sapien
actggtttccaggaacatcagctca

SEQ ID NO: 5879451 - DNA, 25 bp, Homo sapien
taaaggtactgtccgctgagttagt

SEQ ID NO: 5879452 - DNA, 25 bp, Homo sapien
ccgctcctggccggccgtgtcccat

SEQ ID NO: 5879453 - DNA, 25 bp, Homo sapien
tgccagtgtacaccgttccccagga

SEQ ID NO: 5879454 - DNA, 25 bp, Homo sapien
ctttacatatttaccaccgacattt

SEQ ID NO: 5879455 - DNA, 25 bp, Homo sapien
cagcattctggcatctgttaaccaa

SEQ ID NO: 5879456 - DNA, 25 bp, Homo sapien
agcctccggcggctgtactccagga

SEQ ID NO: 5879457 - DNA, 25 bp, Homo sapien
cgtcgaggtgaccgcagctgtctca

SEQ ID NO: 5879458 - DNA, 25 bp, Homo sapien
cctaacagccacactcctgtgcact

SEQ ID NO: 5879459 - DNA, 25 bp, Homo sapien
ggaggaaagcacgctcacgtccatg

SEQ ID NO: 5879460 - DNA, 25 bp, Homo sapien
ccagtgtacaccgttccccaggaag

SEQ ID NO: 5879461 - DNA, 25 bp, Homo sapien
gtagcttctcgtcacagacctgaac

SEQ ID NO: 5879462 - DNA, 25 bp, Homo sapien
tctggcatctgttaaccaattagta

SEQ ID NO: 5879463 - DNA, 25 bp, Homo sapien
aggtgacttcccggtcggcatccaa

SEQ ID NO: 5879464 - DNA, 25 bp, Homo sapien
cagcacaagctggatttaacggaac

SEQ ID NO: 5879465 - DNA, 25 bp, Homo sapien
ggtcggcatccaagtccttcttgtt

SEQ ID NO: 5879466 - DNA, 25 bp, Homo sapien
caggaagatctacttctgtgccgag

SEQ ID NO: 5879467 - DNA, 25 bp, Homo sapien
gtgccccagctgcacctctgtagta

SEQ ID NO: 5879468 - DNA, 25 bp, Homo sapien
ttccaggaacatcagctcattctct

SEQ ID NO: 5879469 - DNA, 25 bp, Homo sapien
ttttccttgcacactgcatgaaagc

SEQ ID NO: 5879470 - DNA, 25 bp, Homo sapien
aagctcactgagtgcagggttctgt

SEQ ID NO: 5879471 - DNA, 25 bp, Homo sapien
caattagtaagcgcattgtaggttt

SEQ ID NO: 5879472 - DNA, 25 bp, Homo sapien
ggcatccaagtccttcttgttcccg

SEQ ID NO: 5879473 - DNA, 25 bp, Homo sapien
agcctgtgtacgtcgaggtgaccgc

SEQ ID NO: 5879474 - DNA, 25 bp, Homo sapien
gtgcgaacctggaggcttcgaggaa

SEQ ID NO: 5879475 - DNA, 25 bp, Homo sapien
atccatgtggcttctaaaggtactg

SEQ ID NO: 5879476 - DNA, 25 bp, Homo sapien
gcatctgttaaccaattagtaagcg

SEQ ID NO: 5879477 - DNA, 25 bp, Homo sapien
gttctcgccagtcagtgcactggtt

SEQ ID NO: 5879478 - DNA, 25 bp, Homo sapien
ctggggcgcctaacagccacactcc

SEQ ID NO: 5879479 - DNA, 25 bp, Homo sapien
gccccagctgcacctctgtagtagc

SEQ ID NO: 5879480 - DNA, 25 bp, Homo sapien
ggtatgatttgagtcatctttgaat

SEQ ID NO: 5879481 - DNA, 25 bp, Homo sapien
gcatgtcctgggagttaaccaacgc

SEQ ID NO: 5879482 - DNA, 25 bp, Homo sapien
caacacaaggaggaaagcacgctca

SEQ ID NO: 5879483 - DNA, 25 bp, Homo sapien
cgcagaatggctgctgagcccccgg

SEQ ID NO: 5879484 - DNA, 25 bp, Homo sapien
attcacaactgcatttcctgggagt

SEQ ID NO: 5879485 - DNA, 25 bp, Homo sapien
ggctggtgatgtcatagacaaggag

SEQ ID NO: 5879486 - DNA, 25 bp, Homo sapien
aggcttcgaggaaggtgacttcccg

SEQ ID NO: 5879487 - DNA, 25 bp, Homo sapien
atactggatgccagagcccatcctc

SEQ ID NO: 5879488 - DNA, 25 bp, Homo sapien
acacaaggaggaaagcacgctcacg

SEQ ID NO: 5879489 - DNA, 25 bp, Homo sapien
gtgcactggtttccaggaacatcag

SEQ ID NO: 5879490 - DNA, 25 bp, Homo sapien
atggctgctgagcccccggctgcca

SEQ ID NO: 5879491 - DNA, 25 bp, Homo sapien
ccaacgcaatgagaaagcacgctct

SEQ ID NO: 5879492 - DNA, 25 bp, Homo sapien
gctgttcacaccagagtcctttcat

SEQ ID NO: 5879493 - DNA, 25 bp, Homo sapien
catccaagtccttcttgttcccgca

SEQ ID NO: 5879494 - DNA, 25 bp, Homo sapien
acaaggaggaaagcacgctcacgtc

SEQ ID NO: 5879495 - DNA, 25 bp, Homo sapien
ttcgcagaatggctgctgagccccc

SEQ ID NO: 5879496 - DNA, 25 bp, Homo sapien
gtactccaggacccaccgctgaacc

SEQ ID NO: 5879497 - DNA, 25 bp, Homo sapien
ctgcatccatgtggcttctaaaggt

SEQ ID NO: 5879498 - DNA, 25 bp, Homo sapien
atgagaaagcacgctctctcacatt

SEQ ID NO: 5879499 - DNA, 25 bp, Homo sapien
tatgatttgagtcatctttgaattt

SEQ ID NO: 5879500 - DNA, 25 bp, Homo sapien
tggggggagagggattaaataagaa

SEQ ID NO: 5879501 - DNA, 25 bp, Homo sapien
tagacaaggagtgccccagctgcac

SEQ ID NO: 5879502 - DNA, 25 bp, Homo sapien
atcgtaagtctcggacatggcggtc

SEQ ID NO: 5879503 - DNA, 25 bp, Homo sapien
gagccaaattccattcctatggtat

SEQ ID NO: 5879504 - DNA, 25 bp, Homo sapien
aaccaacgcaatgagaaagcacgct

SEQ ID NO: 5879505 - DNA, 25 bp, Homo sapien
gacaaggagtgccccagctgcacct

SEQ ID NO: 5879506 - DNA, 25 bp, Homo sapien
tctccgcagagcgagaggaaccgag

SEQ ID NO: 5879507 - DNA, 25 bp, Homo sapien
agtctcggacatggcggtctgcgcc

SEQ ID NO: 5879508 - DNA, 25 bp, Homo sapien
cagcgtctccatactggatgccaga

SEQ ID NO: 5879509 - DNA, 25 bp, Homo sapien
gaatggctgctgagcccccggctgc

SEQ ID NO: 5879510 - DNA, 25 bp, Homo sapien
gtcacaccggctctgtgctgtggga

SEQ ID NO: 5879511 - DNA, 25 bp, Homo sapien
tttaaaaagaaagctcactgagtgc

SEQ ID NO: 5879512 - DNA, 25 bp, Homo sapien
tcctgtgcacttggagcctgtgtac

SEQ ID NO: 5879513 - DNA, 25 bp, Homo sapien
tggctcgccagcattctggcatctg

SEQ ID NO: 5879514 - DNA, 25 bp, Homo sapien
cgaggaaggtgacttcccggtcggc

SEQ ID NO: 5879515 - DNA, 25 bp, Homo sapien
tctcacattcacaactgcatttcct

SEQ ID NO: 5879516 - DNA, 25 bp, Homo sapien
tgtacaccgttccccaggaagatct

SEQ ID NO: 5879517 - DNA, 25 bp, Homo sapien
gaaagcacgctctctcacattcaca

SEQ ID NO: 5879518 - DNA, 25 bp, Homo sapien
tcgtcacagacctgaaccgctcctg

SEQ ID NO: 5879519 - DNA, 25 bp, Homo sapien
gagaaagcacgctctctcacattca

SEQ ID NO: 5879520 - DNA, 25 bp, Homo sapien
acgctctctcacattcacaactgca

SEQ ID NO: 5879521 - DNA, 25 bp, Homo sapien
gattcaattttgttaagtattttcc

SEQ ID NO: 5879522 - DNA, 25 bp, Homo sapien
ccggtcggcatccaagtccttcttg

SEQ ID NO: 5879523 - DNA, 25 bp, Homo sapien
gctcacgtccatgactgcatgtcct

SEQ ID NO: 5879524 - DNA, 25 bp, Homo sapien
cgctgaacctgtgtcactggggcgc

SEQ ID NO: 5879525 - DNA, 25 bp, Homo sapien
cggtctgcgccattctgccgccaca

SEQ ID NO: 5879526 - DNA, 25 bp, Homo sapien
tgagttagttcgcagaatggctgct

SEQ ID NO: 5879527 - DNA, 25 bp, Homo sapien
gctctctcacattcacaactgcatt

SEQ ID NO: 5879528 - DNA, 25 bp, Homo sapien
ccagttcacctgattcaattttgtt

SEQ ID NO: 5879529 - DNA, 25 bp, Homo sapien
aggacgatgttctggctcgccagca

SEQ ID NO: 5879530 - DNA, 25 bp, Homo sapien
ctctgtgctgtgggaacgtgctggg

SEQ ID NO: 5879531 - DNA, 25 bp, Homo sapien
cctccggcggctgtactccaggacc

SEQ ID NO: 5879532 - DNA, 25 bp, Homo sapien
cgcatttccgatgaccaagaattta

SEQ ID NO: 5879533 - DNA, 25 bp, Homo sapien
ggaacgtgctgggccgtggccagca

SEQ ID NO: 5879534 - DNA, 25 bp, Homo sapien
atataatcagatgttaacataactt

SEQ ID NO: 5879535 - DNA, 25 bp, Homo sapien
ctatccttggcatatgattgcactt

SEQ ID NO: 5879536 - DNA, 25 bp, Homo sapien
taagagtatttaaggaacatcgttg

SEQ ID NO: 5879537 - DNA, 25 bp, Homo sapien
ttacaaactaaagccaaatactttg

SEQ ID NO: 5879538 - DNA, 25 bp, Homo sapien
ccatagctcatttctcctcaatata

SEQ ID NO: 5879539 - DNA, 25 bp, Homo sapien
cattggcagcaagccatacaagagc

SEQ ID NO: 5879540 - DNA, 25 bp, Homo sapien
gagtaaatacaaggccactttcctg

SEQ ID NO: 5879541 - DNA, 25 bp, Homo sapien
ggcatatgattgcacttgattttgg

SEQ ID NO: 5879542 - DNA, 25 bp, Homo sapien
cttgagtgttattcagactaaattc

SEQ ID NO: 5879543 - DNA, 25 bp, Homo sapien
atgaagcttggatagtatcttagat

SEQ ID NO: 5879544 - DNA, 25 bp, Homo sapien
agaagagttccatatgctggaccac

SEQ ID NO: 5879545 - DNA, 25 bp, Homo sapien
atgacttgagtgttattcagactaa

SEQ ID NO: 5879546 - DNA, 25 bp, Homo sapien
gactgaatcaattacagtttacaaa

SEQ ID NO: 5879547 - DNA, 25 bp, Homo sapien
tttacgagaatgggatgacttgagt

SEQ ID NO: 5879548 - DNA, 25 bp, Homo sapien
cgttgtaggttctcacccatgttag

SEQ ID NO: 5879549 - DNA, 25 bp, Homo sapien
aggttctcacccatgttagttttac

SEQ ID NO: 5879550 - DNA, 25 bp, Homo sapien
gccaaatactttgaagacaatctaa

SEQ ID NO: 5879551 - DNA, 25 bp, Homo sapien
atgttaacataacttaagaggactg

SEQ ID NO: 5879552 - DNA, 25 bp, Homo sapien
agagtatttaaggaacatcgttgta

SEQ ID NO: 5879553 - DNA, 25 bp, Homo sapien
aacttaagaggactgaaggctggtg

SEQ ID NO: 5879554 - DNA, 25 bp, Homo sapien
ggccactttcctgtcatccaggctc

SEQ ID NO: 5879555 - DNA, 25 bp, Homo sapien
ggaaagcgctctccagcagggtccg

SEQ ID NO: 5879556 - DNA, 25 bp, Homo sapien
gtgactgaatcaattacagtttaca

SEQ ID NO: 5879557 - DNA, 25 bp, Homo sapien
tttgttttctactaaagttcctatc

SEQ ID NO: 5879558 - DNA, 25 bp, Homo sapien
ttctgagcaacctatctttattgaa

SEQ ID NO: 5879559 - DNA, 25 bp, Homo sapien
ggctcacatgttctgagtttcaaaa

SEQ ID NO: 5879560 - DNA, 25 bp, Homo sapien
cttctataagggaatatttactttg

SEQ ID NO: 5879561 - DNA, 25 bp, Homo sapien
acaaactaaagccaaatactttgaa

SEQ ID NO: 5879562 - DNA, 25 bp, Homo sapien
tattgtatgttttcggttaagagta

SEQ ID NO: 5879563 - DNA, 25 bp, Homo sapien
aagattctgagcaacctatctttat

SEQ ID NO: 5879564 - DNA, 25 bp, Homo sapien
cccatgcaacacatctctgcagtta

SEQ ID NO: 5879565 - DNA, 25 bp, Homo sapien
tggcatttagggtctggggtttcta

SEQ ID NO: 5879566 - DNA, 25 bp, Homo sapien
aagccaaatactttgaagacaatct

SEQ ID NO: 5879567 - DNA, 25 bp, Homo sapien
tacattatgaagcttggatagtatc

SEQ ID NO: 5879568 - DNA, 25 bp, Homo sapien
ttcactggagatggaaagcgctctc

SEQ ID NO: 5879569 - DNA, 25 bp, Homo sapien
cttgattttggcatttagggtctgg

SEQ ID NO: 5879570 - DNA, 25 bp, Homo sapien
ggatgacttgagtgttattcagact

SEQ ID NO: 5879571 - DNA, 25 bp, Homo sapien
gttcctatccttggcatatgattgc

SEQ ID NO: 5879572 - DNA, 25 bp, Homo sapien
gtttcaaaagtggctcttgtgtgac

SEQ ID NO: 5879573 - DNA, 25 bp, Homo sapien
ctttgcattaccccagtaatacata

SEQ ID NO: 5879574 - DNA, 25 bp, Homo sapien
aatctaatgggccagtgggttaaca

SEQ ID NO: 5879575 - DNA, 25 bp, Homo sapien
catatgctggaccacttctttgtag

SEQ ID NO: 5879576 - DNA, 25 bp, Homo sapien
aggaacatcgttgtaggttctcacc

SEQ ID NO: 5879577 - DNA, 25 bp, Homo sapien
caaatggtaagatgaagaacagtac

SEQ ID NO: 5879578 - DNA, 25 bp, Homo sapien
gtgttgcttctataagggaatattt

SEQ ID NO: 5879579 - DNA, 25 bp, Homo sapien
aggactgaaggctggtgcagtgccc

SEQ ID NO: 5879580 - DNA, 25 bp, Homo sapien
ccccagtaatacataaaagctgtct

SEQ ID NO: 5879581 - DNA, 25 bp, Homo sapien
ctgagcaacctatctttattgaaga

SEQ ID NO: 5879582 - DNA, 25 bp, Homo sapien
actaaagccaaatactttgaagaca

SEQ ID NO: 5879583 - DNA, 25 bp, Homo sapien
tttaatagtgaagattctgagcaac

SEQ ID NO: 5879584 - DNA, 25 bp, Homo sapien
agatggaaagcgctctccagcaggg

SEQ ID NO: 5879585 - DNA, 25 bp, Homo sapien
ctgtcatccaggctcacatgttctg

SEQ ID NO: 5879586 - DNA, 25 bp, Homo sapien
cttctttgtagtcttccccgttatc

SEQ ID NO: 5879587 - DNA, 25 bp, Homo sapien
tgtagtcttccccgttatccaaaac

SEQ ID NO: 5879588 - DNA, 25 bp, Homo sapien
agcgtttcctgaacgtgttgcttct

SEQ ID NO: 5879589 - DNA, 25 bp, Homo sapien
atcaattacagtttacaaactaaag

SEQ ID NO: 5879590 - DNA, 25 bp, Homo sapien
ttctcattggcagcaagccatacaa

SEQ ID NO: 5879591 - DNA, 25 bp, Homo sapien
gtatcttagattacagagcaaatgg

SEQ ID NO: 5879592 - DNA, 25 bp, Homo sapien
tttcctgtcatccaggctcacatgt

SEQ ID NO: 5879593 - DNA, 25 bp, Homo sapien
tatccaaaacctgggcggccagcgt

SEQ ID NO: 5879594 - DNA, 25 bp, Homo sapien
atagctcatttctcctcaatataat

SEQ ID NO: 5879595 - DNA, 25 bp, Homo sapien
tgttttcaagaagagttccatatgc

SEQ ID NO: 5879596 - DNA, 25 bp, Homo sapien
acagagcaaatggtaagatgaagaa

SEQ ID NO: 5879597 - DNA, 25 bp, Homo sapien
taagaggactgaaggctggtgcagt

SEQ ID NO: 5879598 - DNA, 25 bp, Homo sapien
acatttcactggagatggaaagcgc

SEQ ID NO: 5879599 - DNA, 25 bp, Homo sapien
tgttctgagtttcaaaagtggctct

SEQ ID NO: 5879600 - DNA, 25 bp, Homo sapien
taacatttcactggagatggaaagc

SEQ ID NO: 5879601 - DNA, 25 bp, Homo sapien
gaagcttggatagtatcttagatta

SEQ ID NO: 5879602 - DNA, 25 bp, Homo sapien
attgcacttgattttggcatttagg

SEQ ID NO: 5879603 - DNA, 25 bp, Homo sapien
taaagccaaatactttgaagacaat

SEQ ID NO: 5879604 - DNA, 25 bp, Homo sapien
tttgcctgtgagatttcaacattta

SEQ ID NO: 5879605 - DNA, 25 bp, Homo sapien
tgagtgttattcagactaaattctc

SEQ ID NO: 5879606 - DNA, 25 bp, Homo sapien
gtggtacattatgaagcttggatag

SEQ ID NO: 5879607 - DNA, 25 bp, Homo sapien
gagttccatatgctggaccacttct

SEQ ID NO: 5879608 - DNA, 25 bp, Homo sapien
ccccgtcccatgcaacacatctctg

SEQ ID NO: 5879609 - DNA, 25 bp, Homo sapien
tgattttggcatttagggtctgggg

SEQ ID NO: 5879610 - DNA, 25 bp, Homo sapien
aaatacaaggccactttcctgtcat

SEQ ID NO: 5879611 - DNA, 25 bp, Homo sapien
aaggccactttcctgtcatccaggc

SEQ ID NO: 5879612 - DNA, 25 bp, Homo sapien
tctataagggaatatttactttgtt

SEQ ID NO: 5879613 - DNA, 25 bp, Homo sapien
cattttctttgcattaccccagtaa

SEQ ID NO: 5879614 - DNA, 25 bp, Homo sapien
catccaggctcacatgttctgagtt

SEQ ID NO: 5879615 - DNA, 25 bp, Homo sapien
gattacagagcaaatggtaagatga

SEQ ID NO: 5879616 - DNA, 25 bp, Homo sapien
ccccatagctcatttctcctcaata

SEQ ID NO: 5879617 - DNA, 25 bp, Homo sapien
ttggcagcaagccatacaagagcaa

SEQ ID NO: 5879618 - DNA, 25 bp, Homo sapien
tatgattgcacttgattttggcatt

SEQ ID NO: 5879619 - DNA, 25 bp, Homo sapien
cgtttcctgaacgtgttgcttctat

SEQ ID NO: 5879620 - DNA, 25 bp, Homo sapien
gtaggttctcacccatgttagtttt

SEQ ID NO: 5879621 - DNA, 25 bp, Homo sapien
taatgggccagtgggttaacatttc

SEQ ID NO: 5879622 - DNA, 25 bp, Homo sapien
ctgaaggctggtgcagtgccccccg

SEQ ID NO: 5879623 - DNA, 25 bp, Homo sapien
gctgtctcttgttatagtggtacat

SEQ ID NO: 5879624 - DNA, 25 bp, Homo sapien
aggctggtgcagtgccccccgtccc

SEQ ID NO: 5879625 - DNA, 25 bp, Homo sapien
tgtgagatttcaacatttaatagtg

SEQ ID NO: 5879626 - DNA, 25 bp, Homo sapien
cacttctttgtagtcttccccgtta

SEQ ID NO: 5879627 - DNA, 25 bp, Homo sapien
ataacttaagaggactgaaggctgg

SEQ ID NO: 5879628 - DNA, 25 bp, Homo sapien
atctctgcagttagtggagtaaata

SEQ ID NO: 5879629 - DNA, 25 bp, Homo sapien
gtcatccaggctcacatgttctgag

SEQ ID NO: 5879630 - DNA, 25 bp, Homo sapien
tgattgcacttgattttggcattta

SEQ ID NO: 5879631 - DNA, 25 bp, Homo sapien
gagcaacctatctttattgaagaaa

SEQ ID NO: 5879632 - DNA, 25 bp, Homo sapien
ttctgagtttcaaaagtggctcttg

SEQ ID NO: 5879633 - DNA, 25 bp, Homo sapien
gtggctttcttctgttttcaagaag

SEQ ID NO: 5879634 - DNA, 25 bp, Homo sapien
tccaaaacctgggcggccagcgttt

SEQ ID NO: 5879635 - DNA, 25 bp, Homo sapien
ttatgaagcttggatagtatcttag

SEQ ID NO: 5879636 - DNA, 25 bp, Homo sapien
gggttaacatttcactggagatgga

SEQ ID NO: 5879637 - DNA, 25 bp, Homo sapien
agttagtggagtaaatacaaggcca

SEQ ID NO: 5879638 - DNA, 25 bp, Homo sapien
gtctggggtttctattgtatgtttt

SEQ ID NO: 5879639 - DNA, 25 bp, Homo sapien
tgtgtctttgcctgtgagatttcaa

SEQ ID NO: 5879640 - DNA, 25 bp, Homo sapien
acataaaagctgtctcttgttatag

SEQ ID NO: 5879641 - DNA, 25 bp, Homo sapien
ttctttgcattaccccagtaataca

SEQ ID NO: 5879642 - DNA, 25 bp, Homo sapien
aagatgaagaacagtaccaagcccc

SEQ ID NO: 5879643 - DNA, 25 bp, Homo sapien
tgcaacacatctctgcagttagtgg

SEQ ID NO: 5879644 - DNA, 25 bp, Homo sapien
aagcccccatagctcatttctcctc

SEQ ID NO: 5879645 - DNA, 25 bp, Homo sapien
actaaattctcattggcagcaagcc

SEQ ID NO: 5879646 - DNA, 25 bp, Homo sapien
ctgaacgtgttgcttctataaggga

SEQ ID NO: 5879647 - DNA, 25 bp, Homo sapien
agaatgggatgacttgagtgttatt

SEQ ID NO: 5879648 - DNA, 25 bp, Homo sapien
caatataatcagatgttaacataac

SEQ ID NO: 5879649 - DNA, 25 bp, Homo sapien
ttagtggagtaaatacaaggccact

SEQ ID NO: 5879650 - DNA, 25 bp, Homo sapien
acataacttaagaggactgaaggct

SEQ ID NO: 5879651 - DNA, 25 bp, Homo sapien
gctcttgtgtgactgaatcaattac

SEQ ID NO: 5879652 - DNA, 25 bp, Homo sapien
gatgaagaacagtaccaagccccca

SEQ ID NO: 5879653 - DNA, 25 bp, Homo sapien
tctattgtatgttttcggttaagag

SEQ ID NO: 5879654 - DNA, 25 bp, Homo sapien
atagtgaagattctgagcaacctat

SEQ ID NO: 5879655 - DNA, 25 bp, Homo sapien
ctggaccacttctttgtagtcttcc

SEQ ID NO: 5879656 - DNA, 25 bp, Homo sapien
ctttcttctgttttcaagaagagtt

SEQ ID NO: 5879657 - DNA, 25 bp, Homo sapien
aatactttgaagacaatctaatggg

SEQ ID NO: 5879658 - DNA, 25 bp, Homo sapien
ctcattttctttgcattaccccagt

SEQ ID NO: 5879659 - DNA, 25 bp, Homo sapien
tgttttctactaaagttcctatcct

SEQ ID NO: 5879660 - DNA, 25 bp, Homo sapien
atacataaaagctgtctcttgttat

SEQ ID NO: 5879661 - DNA, 25 bp, Homo sapien
tggtaagatgaagaacagtaccaag

SEQ ID NO: 5879662 - DNA, 25 bp, Homo sapien
ctgcagttagtggagtaaatacaag

SEQ ID NO: 5879663 - DNA, 25 bp, Homo sapien
ctactaaagttcctatccttggcat

SEQ ID NO: 5879664 - DNA, 25 bp, Homo sapien
tctcctcaatataatcagatgttaa

SEQ ID NO: 5879665 - DNA, 25 bp, Homo sapien
gtcccatgcaacacatctctgcagt

SEQ ID NO: 5879666 - DNA, 25 bp, Homo sapien
tttggcatttagggtctggggtttc

SEQ ID NO: 5879667 - DNA, 25 bp, Homo sapien
tctttgtagtcttccccgttatcca

SEQ ID NO: 5879668 - DNA, 25 bp, Homo sapien
agtaccaagcccccatagctcattt

SEQ ID NO: 5879669 - DNA, 25 bp, Homo sapien
ttctactaaagttcctatccttggc

SEQ ID NO: 5879670 - DNA, 25 bp, Homo sapien
ctgagtttcaaaagtggctcttgtg

SEQ ID NO: 5879671 - DNA, 25 bp, Homo sapien
agacaatctaatgggccagtgggtt

SEQ ID NO: 5879672 - DNA, 25 bp, Homo sapien
cattatgaagcttggatagtatctt

SEQ ID NO: 5879673 - DNA, 25 bp, Homo sapien
ctcatttctcctcaatataatcaga

SEQ ID NO: 5879674 - DNA, 25 bp, Homo sapien
gacttgagtgttattcagactaaat

SEQ ID NO: 5879675 - DNA, 25 bp, Homo sapien
aagctgtctcttgttatagtggtac

SEQ ID NO: 5879676 - DNA, 25 bp, Homo sapien
taaggaacatcgttgtaggttctca

SEQ ID NO: 5879677 - DNA, 25 bp, Homo sapien
gttttacgagaatgggatgacttga

SEQ ID NO: 5879678 - DNA, 25 bp, Homo sapien
agcagggtccgtggctttcttctgt

SEQ ID NO: 5879679 - DNA, 25 bp, Homo sapien
atgttagttttacgagaatgggatg

SEQ ID NO: 5879680 - DNA, 25 bp, Homo sapien
gtccgtggctttcttctgttttcaa

SEQ ID NO: 5879681 - DNA, 25 bp, Homo sapien
aaagtggctcttgtgtgactgaatc

SEQ ID NO: 5879682 - DNA, 25 bp, Homo sapien
taccaagcccccatagctcatttct

SEQ ID NO: 5879683 - DNA, 25 bp, Homo sapien
aaaagctgtctcttgttatagtggt

SEQ ID NO: 5879684 - DNA, 25 bp, Homo sapien
ttcttctgttttcaagaagagttcc

SEQ ID NO: 5879685 - DNA, 25 bp, Homo sapien
caaaacctgggcggccagcgtttcc

SEQ ID NO: 5879686 - DNA, 25 bp, Homo sapien
aaacctgggcggccagcgtttcctg

SEQ ID NO: 5879687 - DNA, 25 bp, Homo sapien
ttgtgtgactgaatcaattacagtt

SEQ ID NO: 5879688 - DNA, 25 bp, Homo sapien
actttcctgtcatccaggctcacat

SEQ ID NO: 5879689 - DNA, 25 bp, Homo sapien
tctcacccatgttagttttacgaga

SEQ ID NO: 5879690 - DNA, 25 bp, Homo sapien
ttacagagcaaatggtaagatgaag

SEQ ID NO: 5879691 - DNA, 25 bp, Homo sapien
gttatagtggtacattatgaagctt

SEQ ID NO: 5879692 - DNA, 25 bp, Homo sapien
ggagatggaaagcgctctccagcag

SEQ ID NO: 5879693 - DNA, 25 bp, Homo sapien
gggtctggggtttctattgtatgtt

SEQ ID NO: 5879694 - DNA, 25 bp, Homo sapien
ccgttatccaaaacctgggcggcca

SEQ ID NO: 5879695 - DNA, 25 bp, Homo sapien
ttttctactaaagttcctatccttg

SEQ ID NO: 5879696 - DNA, 25 bp, Homo sapien
tggtgcagtgccccccgtcccatgc

SEQ ID NO: 5879697 - DNA, 25 bp, Homo sapien
ttgtatgttttcggttaagagtatt

SEQ ID NO: 5879698 - DNA, 25 bp, Homo sapien
gttaacataacttaagaggactgaa

SEQ ID NO: 5879699 - DNA, 25 bp, Homo sapien
aatcagatgttaacataacttaaga

SEQ ID NO: 5879700 - DNA, 25 bp, Homo sapien
ggtacattatgaagcttggatagta

SEQ ID NO: 5879701 - DNA, 25 bp, Homo sapien
gttgcttctataagggaatatttac

SEQ ID NO: 5879702 - DNA, 25 bp, Homo sapien
tttcctgaacgtgttgcttctataa

SEQ ID NO: 5879703 - DNA, 25 bp, Homo sapien
gaacgtgttgcttctataagggaat

SEQ ID NO: 5879704 - DNA, 25 bp, Homo sapien
ctccagcagggtccgtggctttctt

SEQ ID NO: 5879705 - DNA, 25 bp, Homo sapien
tttagggtctggggtttctattgta

SEQ ID NO: 5879706 - DNA, 25 bp, Homo sapien
gaacagtaccaagcccccatagctc

SEQ ID NO: 5879707 - DNA, 25 bp, Homo sapien
gcatttagggtctggggtttctatt

SEQ ID NO: 5879708 - DNA, 25 bp, Homo sapien
gggtccgtggctttcttctgttttc

SEQ ID NO: 5879709 - DNA, 25 bp, Homo sapien
ctcattggcagcaagccatacaaga

SEQ ID NO: 5879710 - DNA, 25 bp, Homo sapien
gtatgttttcggttaagagtattta

SEQ ID NO: 5879711 - DNA, 25 bp, Homo sapien
tcagatgttaacataacttaagagg

SEQ ID NO: 5879712 - DNA, 25 bp, Homo sapien
atgggccagtgggttaacatttcac

SEQ ID NO: 5879713 - DNA, 25 bp, Homo sapien
tggctcttgtgtgactgaatcaatt

SEQ ID NO: 5879714 - DNA, 25 bp, Homo sapien
gttccatatgctggaccacttcttt

SEQ ID NO: 5879715 - DNA, 25 bp, Homo sapien
acatctctgcagttagtggagtaaa

SEQ ID NO: 5879716 - DNA, 25 bp, Homo sapien
gcagttagtggagtaaatacaaggc

SEQ ID NO: 5879717 - DNA, 25 bp, Homo sapien
acacatctctgcagttagtggagta

SEQ ID NO: 5879718 - DNA, 25 bp, Homo sapien
tgagatttcaacatttaatagtgaa

SEQ ID NO: 5879719 - DNA, 25 bp, Homo sapien
gcaagccatacaagagcaagaaggg

SEQ ID NO: 5879720 - DNA, 25 bp, Homo sapien
ccagtaatacataaaagctgtctct

SEQ ID NO: 5879721 - DNA, 25 bp, Homo sapien
ataatcagatgttaacataacttaa

SEQ ID NO: 5879722 - DNA, 25 bp, Homo sapien
tggagtaaatacaaggccactttcc

SEQ ID NO: 5879723 - DNA, 25 bp, Homo sapien
ccgtcccatgcaacacatctctgca

SEQ ID NO: 5879724 - DNA, 25 bp, Homo sapien
tctaatgggccagtgggttaacatt

SEQ ID NO: 5879725 - DNA, 25 bp, Homo sapien
agatgttaacataacttaagaggac

SEQ ID NO: 5879726 - DNA, 25 bp, Homo sapien
gggtatgaagtgtgtctttgcctgt

SEQ ID NO: 5879727 - DNA, 25 bp, Homo sapien
cagggtccgtggctttcttctgttt

SEQ ID NO: 5879728 - DNA, 25 bp, Homo sapien
ggcagcaagccatacaagagcaaga

SEQ ID NO: 5879729 - DNA, 25 bp, Homo sapien
aatggtaagatgaagaacagtacca

SEQ ID NO: 5879730 - DNA, 25 bp, Homo sapien
tgaagattctgagcaacctatcttt

SEQ ID NO: 5879731 - DNA, 25 bp, Homo sapien
tttctcctcaatataatcagatgtt

SEQ ID NO: 5879732 - DNA, 25 bp, Homo sapien
agctcatttctcctcaatataatca

SEQ ID NO: 5879733 - DNA, 25 bp, Homo sapien
aattctcattggcagcaagccatac

SEQ ID NO: 5879734 - DNA, 25 bp, Homo sapien
tggatagtatcttagattacagagc

SEQ ID NO: 5879735 - DNA, 25 bp, Homo sapien
gctggtgcagtgccccccgtcccat

SEQ ID NO: 5879736 - DNA, 25 bp, Homo sapien
cagtttacaaactaaagccaaatac

SEQ ID NO: 5879737 - DNA, 25 bp, Homo sapien
agtgccccccgtcccatgcaacaca

SEQ ID NO: 5879738 - DNA, 25 bp, Homo sapien
agtgaagattctgagcaacctatct

SEQ ID NO: 5879739 - DNA, 25 bp, Homo sapien
gaaggctggtgcagtgccccccgtc

SEQ ID NO: 5879740 - DNA, 25 bp, Homo sapien
ggaccacttctttgtagtcttcccc

SEQ ID NO: 5879741 - DNA, 25 bp, Homo sapien
attcagactaaattctcattggcag

SEQ ID NO: 5879742 - DNA, 25 bp, Homo sapien
gcattaccccagtaatacataaaag

SEQ ID NO: 5879743 - DNA, 25 bp, Homo sapien
agagcaaatggtaagatgaagaaca

SEQ ID NO: 5879744 - DNA, 25 bp, Homo sapien
caagaagagttccatatgctggacc

SEQ ID NO: 5879745 - DNA, 25 bp, Homo sapien
acctgggcggccagcgtttcctgaa

SEQ ID NO: 5879746 - DNA, 25 bp, Homo sapien
cttctgttttcaagaagagttccat

SEQ ID NO: 5879747 - DNA, 25 bp, Homo sapien
gaatcaattacagtttacaaactaa

SEQ ID NO: 5879748 - DNA, 25 bp, Homo sapien
tgaagaacagtaccaagcccccata

SEQ ID NO: 5879749 - DNA, 25 bp, Homo sapien
ttcaaaagtggctcttgtgtgactg

SEQ ID NO: 5879750 - DNA, 25 bp, Homo sapien
ccatgttagttttacgagaatggga

SEQ ID NO: 5879751 - DNA, 25 bp, Homo sapien
ctctgcagttagtggagtaaataca

SEQ ID NO: 5879752 - DNA, 25 bp, Homo sapien
tagggtctggggtttctattgtatg

SEQ ID NO: 5879753 - DNA, 25 bp, Homo sapien
ctcacatgttctgagtttcaaaagt

SEQ ID NO: 5879754 - DNA, 25 bp, Homo sapien
tccatatgctggaccacttctttgt

SEQ ID NO: 5879755 - DNA, 25 bp, Homo sapien
ctggagatggaaagcgctctccagc

SEQ ID NO: 5879756 - DNA, 25 bp, Homo sapien
tttcaacatttaatagtgaagattc

SEQ ID NO: 5879757 - DNA, 25 bp, Homo sapien
tctgttttcaagaagagttccatat

SEQ ID NO: 5879758 - DNA, 25 bp, Homo sapien
tagattacagagcaaatggtaagat

SEQ ID NO: 5879759 - DNA, 25 bp, Homo sapien
acccatgttagttttacgagaatgg

SEQ ID NO: 5879760 - DNA, 25 bp, Homo sapien
tatttaaggaacatcgttgtaggtt

SEQ ID NO: 5879761 - DNA, 25 bp, Homo sapien
taatacataaaagctgtctcttgtt

SEQ ID NO: 5879762 - DNA, 25 bp, Homo sapien
agtatttaaggaacatcgttgtagg

SEQ ID NO: 5879763 - DNA, 25 bp, Homo sapien
ttgttatagtggtacattatgaagc

SEQ ID NO: 5879764 - DNA, 25 bp, Homo sapien
tcaacatttaatagtgaagattctg

SEQ ID NO: 5879765 - DNA, 25 bp, Homo sapien
tcagactaaattctcattggcagca

SEQ ID NO: 5879766 - DNA, 25 bp, Homo sapien
ccccccgtcccatgcaacacatctc

SEQ ID NO: 5879767 - DNA, 25 bp, Homo sapien
ccagcgtttcctgaacgtgttgctt

SEQ ID NO: 5879768 - DNA, 25 bp, Homo sapien
ccttggcatatgattgcacttgatt

SEQ ID NO: 5879769 - DNA, 25 bp, Homo sapien
caggctcacatgttctgagtttcaa

SEQ ID NO: 5879770 - DNA, 25 bp, Homo sapien
taatagtgaagattctgagcaacct

SEQ ID NO: 5879771 - DNA, 25 bp, Homo sapien
gttagttttacgagaatgggatgac

SEQ ID NO: 5879772 - DNA, 25 bp, Homo sapien
taaagttcctatccttggcatatga

SEQ ID NO: 5879773 - DNA, 25 bp, Homo sapien
gaagacaatctaatgggccagtggg

SEQ ID NO: 5879774 - DNA, 25 bp, Homo sapien
cactggagatggaaagcgctctcca

SEQ ID NO: 5879775 - DNA, 25 bp, Homo sapien
atcttagattacagagcaaatggta

SEQ ID NO: 5879776 - DNA, 25 bp, Homo sapien
caacacatctctgcagttagtggag

SEQ ID NO: 5879777 - DNA, 25 bp, Homo sapien
taacataacttaagaggactgaagg

SEQ ID NO: 5879778 - DNA, 25 bp, Homo sapien
cgctctccagcagggtccgtggctt

SEQ ID NO: 5879779 - DNA, 25 bp, Homo sapien
gttatccaaaacctgggcggccagc

SEQ ID NO: 5879780 - DNA, 25 bp, Homo sapien
agaggggtatgaagtgtgtctttgc

SEQ ID NO: 5879781 - DNA, 25 bp, Homo sapien
ggccagcgtttcctgaacgtgttgc

SEQ ID NO: 5879782 - DNA, 25 bp, Homo sapien
gcaacctatctttattgaagaaaaa

SEQ ID NO: 5879783 - DNA, 25 bp, Homo sapien
aagagttccatatgctggaccactt

SEQ ID NO: 5879784 - DNA, 25 bp, Homo sapien
tagtatcttagattacagagcaaat

SEQ ID NO: 5879785 - DNA, 25 bp, Homo sapien
catgttctgagtttcaaaagtggct

SEQ ID NO: 5879786 - DNA, 25 bp, Homo sapien
cttagattacagagcaaatggtaag

SEQ ID NO: 5879787 - DNA, 25 bp, Homo sapien
agcaaatggtaagatgaagaacagt

SEQ ID NO: 5879788 - DNA, 25 bp, Homo sapien
tcctatccttggcatatgattgcac

SEQ ID NO: 5879789 - DNA, 25 bp, Homo sapien
agtgttattcagactaaattctcat

SEQ ID NO: 5879790 - DNA, 25 bp, Homo sapien
ccactttcctgtcatccaggctcac

SEQ ID NO: 5879791 - DNA, 25 bp, Homo sapien
acaaggccactttcctgtcatccag

SEQ ID NO: 5879792 - DNA, 25 bp, Homo sapien
acgtgttgcttctataagggaatat

SEQ ID NO: 5879793 - DNA, 25 bp, Homo sapien
cagtgggttaacatttcactggaga

SEQ ID NO: 5879794 - DNA, 25 bp, Homo sapien
ctcaatataatcagatgttaacata

SEQ ID NO: 5879795 - DNA, 25 bp, Homo sapien
atgaagtgtgtctttgcctgtgaga

SEQ ID NO: 5879796 - DNA, 25 bp, Homo sapien
gagtttcaaaagtggctcttgtgtg

SEQ ID NO: 5879797 - DNA, 25 bp, Homo sapien
atccttggcatatgattgcacttga

SEQ ID NO: 5879798 - DNA, 25 bp, Homo sapien
caaatactttgaagacaatctaatg

SEQ ID NO: 5879799 - DNA, 25 bp, Homo sapien
agtgtgtctttgcctgtgagatttc

SEQ ID NO: 5879800 - DNA, 25 bp, Homo sapien
caaaagtggctcttgtgtgactgaa

SEQ ID NO: 5879801 - DNA, 25 bp, Homo sapien
atcgttgtaggttctcacccatgtt

SEQ ID NO: 5879802 - DNA, 25 bp, Homo sapien
gccagtgggttaacatttcactgga

SEQ ID NO: 5879803 - DNA, 25 bp, Homo sapien
gtgcagtgccccccgtcccatgcaa

SEQ ID NO: 5879804 - DNA, 25 bp, Homo sapien
gttctcacccatgttagttttacga

SEQ ID NO: 5879805 - DNA, 25 bp, Homo sapien
ccaagcccccatagctcatttctcc

SEQ ID NO: 5879806 - DNA, 25 bp, Homo sapien
aaactaaagccaaatactttgaaga

SEQ ID NO: 5879807 - DNA, 25 bp, Homo sapien
gaagtgtgtctttgcctgtgagatt

SEQ ID NO: 5879808 - DNA, 25 bp, Homo sapien
tgggatgacttgagtgttattcaga

SEQ ID NO: 5879809 - DNA, 25 bp, Homo sapien
ctggggtttctattgtatgttttcg

SEQ ID NO: 5879810 - DNA, 25 bp, Homo sapien
ctctccagcagggtccgtggctttc

SEQ ID NO: 5879811 - DNA, 25 bp, Homo sapien
gtgtgactgaatcaattacagttta

SEQ ID NO: 5879812 - DNA, 25 bp, Homo sapien
cgagaatgggatgacttgagtgtta

SEQ ID NO: 5879813 - DNA, 25 bp, Homo sapien
ctgaatcaattacagtttacaaact

SEQ ID NO: 5879814 - DNA, 25 bp, Homo sapien
ccagcagggtccgtggctttcttct

SEQ ID NO: 5879815 - DNA, 25 bp, Homo sapien
tttgtagtcttccccgttatccaaa

SEQ ID NO: 5879816 - DNA, 25 bp, Homo sapien
ttgaagacaatctaatgggccagtg

SEQ ID NO: 5879817 - DNA, 25 bp, Homo sapien
tcctgaacgtgttgcttctataagg

SEQ ID NO: 5879818 - DNA, 25 bp, Homo sapien
taccccagtaatacataaaagctgt

SEQ ID NO: 5879819 - DNA, 25 bp, Homo sapien
cttggatagtatcttagattacaga

SEQ ID NO: 5879820 - DNA, 25 bp, Homo sapien
aggggtatgaagtgtgtctttgcct

SEQ ID NO: 5879821 - DNA, 25 bp, Homo sapien
ttggcatatgattgcacttgatttt

SEQ ID NO: 5879822 - DNA, 25 bp, Homo sapien
agtggctcttgtgtgactgaatcaa

SEQ ID NO: 5879823 - DNA, 25 bp, Homo sapien
agactaaattctcattggcagcaag

SEQ ID NO: 5879824 - DNA, 25 bp, Homo sapien
ttcggttaagagtatttaaggaaca

SEQ ID NO: 5879825 - DNA, 25 bp, Homo sapien
atttcactggagatggaaagcgctc

SEQ ID NO: 5879826 - DNA, 25 bp, Homo sapien
gttaacatttcactggagatggaaa

SEQ ID NO: 5879827 - DNA, 25 bp, Homo sapien
agaggactgaaggctggtgcagtgc

SEQ ID NO: 5879828 - DNA, 25 bp, Homo sapien
gcggccagcgtttcctgaacgtgtt

SEQ ID NO: 5879829 - DNA, 25 bp, Homo sapien
catgcaacacatctctgcagttagt

SEQ ID NO: 5879830 - DNA, 25 bp, Homo sapien
tctttgcctgtgagatttcaacatt

SEQ ID NO: 5879831 - DNA, 25 bp, Homo sapien
tcttgttatagtggtacattatgaa

SEQ ID NO: 5879832 - DNA, 25 bp, Homo sapien
agtggagtaaatacaaggccacttt

SEQ ID NO: 5879833 - DNA, 25 bp, Homo sapien
acagtaccaagcccccatagctcat

SEQ ID NO: 5879834 - DNA, 25 bp, Homo sapien
taaattctcattggcagcaagccat

SEQ ID NO: 5879835 - DNA, 25 bp, Homo sapien
ggaatatttactttgttttctacta

SEQ ID NO: 5879836 - DNA, 25 bp, Homo sapien
cacttgattttggcatttagggtct

SEQ ID NO: 5879837 - DNA, 25 bp, Homo sapien
aatgggatgacttgagtgttattca

SEQ ID NO: 5879838 - DNA, 25 bp, Homo sapien
actaaagttcctatccttggcatat

SEQ ID NO: 5879839 - DNA, 25 bp, Homo sapien
gcagtgccccccgtcccatgcaaca

SEQ ID NO: 5879840 - DNA, 25 bp, Homo sapien
gaacatcgttgtaggttctcaccca

SEQ ID NO: 5879841 - DNA, 25 bp, Homo sapien
ataaaagctgtctcttgttatagtg

SEQ ID NO: 5879842 - DNA, 25 bp, Homo sapien
gtaagatgaagaacagtaccaagcc

SEQ ID NO: 5879843 - DNA, 25 bp, Homo sapien
gtaaatacaaggccactttcctgtc

SEQ ID NO: 5879844 - DNA, 25 bp, Homo sapien
tacagtttacaaactaaagccaaat

SEQ ID NO: 5879845 - DNA, 25 bp, Homo sapien
ttttctttgcattaccccagtaata

SEQ ID NO: 5879846 - DNA, 25 bp, Homo sapien
tgcacttgattttggcatttagggt

SEQ ID NO: 5879847 - DNA, 25 bp, Homo sapien
atacaaggccactttcctgtcatcc

SEQ ID NO: 5879848 - DNA, 25 bp, Homo sapien
catttctcctcaatataatcagatg

SEQ ID NO: 5879849 - DNA, 25 bp, Homo sapien
ggtttctattgtatgttttcggtta

SEQ ID NO: 5879850 - DNA, 25 bp, Homo sapien
cacatgttctgagtttcaaaagtgg

SEQ ID NO: 5879851 - DNA, 25 bp, Homo sapien
aagaacagtaccaagcccccatagc

SEQ ID NO: 5879852 - DNA, 25 bp, Homo sapien
ccgtggctttcttctgttttcaaga

SEQ ID NO: 5879853 - DNA, 25 bp, Homo sapien
gattctgagcaacctatctttattg

SEQ ID NO: 5879854 - DNA, 25 bp, Homo sapien
agcgctctccagcagggtccgtggc

SEQ ID NO: 5879855 - DNA, 25 bp, Homo sapien
attaccccagtaatacataaaagct

SEQ ID NO: 5879856 - DNA, 25 bp, Homo sapien
tgccccccgtcccatgcaacacatc

SEQ ID NO: 5879857 - DNA, 25 bp, Homo sapien
gactgaaggctggtgcagtgccccc

SEQ ID NO: 5879858 - DNA, 25 bp, Homo sapien
tcctcaatataatcagatgttaaca

SEQ ID NO: 5879859 - DNA, 25 bp, Homo sapien
cagcaagccatacaagagcaagaag

SEQ ID NO: 5879860 - DNA, 25 bp, Homo sapien
ttttcaagaagagttccatatgctg

SEQ ID NO: 5879861 - DNA, 25 bp, Homo sapien
atggaaagcgctctccagcagggtc

SEQ ID NO: 5879862 - DNA, 25 bp, Homo sapien
tgttattcagactaaattctcattg

SEQ ID NO: 5879863 - DNA, 25 bp, Homo sapien
tactttgaagacaatctaatgggcc

SEQ ID NO: 5879864 - DNA, 25 bp, Homo sapien
tacgagaatgggatgacttgagtgt

SEQ ID NO: 5879865 - DNA, 25 bp, Homo sapien
tctcttgttatagtggtacattatg

SEQ ID NO: 5879866 - DNA, 25 bp, Homo sapien
tttaaggaacatcgttgtaggttct

SEQ ID NO: 5879867 - DNA, 25 bp, Homo sapien
ggctttcttctgttttcaagaagag

SEQ ID NO: 5879868 - DNA, 25 bp, Homo sapien
gatagtatcttagattacagagcaa

SEQ ID NO: 5879869 - DNA, 25 bp, Homo sapien
ttcaagaagagttccatatgctgga

SEQ ID NO: 5879870 - DNA, 25 bp, Homo sapien
agatttcaacatttaatagtgaaga

SEQ ID NO: 5879871 - DNA, 25 bp, Homo sapien
cctgtgagatttcaacatttaatag

SEQ ID NO: 5879872 - DNA, 25 bp, Homo sapien
ttattcagactaaattctcattggc

SEQ ID NO: 5879873 - DNA, 25 bp, Homo sapien
catttaatagtgaagattctgagca

SEQ ID NO: 5879874 - DNA, 25 bp, Homo sapien
tcttgtgtgactgaatcaattacag

SEQ ID NO: 5879875 - DNA, 25 bp, Homo sapien
cttaagaggactgaaggctggtgca

SEQ ID NO: 5879876 - DNA, 25 bp, Homo sapien
ttgtaggttctcacccatgttagtt

SEQ ID NO: 5879877 - DNA, 25 bp, Homo sapien
ggagaggggtatgaagtgtgtcttt

SEQ ID NO: 5879878 - DNA, 25 bp, Homo sapien
gtgggttaacatttcactggagatg

SEQ ID NO: 5879879 - DNA, 25 bp, Homo sapien
agtaatacataaaagctgtctcttg

SEQ ID NO: 5879880 - DNA, 25 bp, Homo sapien
tcacccatgttagttttacgagaat

SEQ ID NO: 5879881 - DNA, 25 bp, Homo sapien
tcctgtcatccaggctcacatgttc

SEQ ID NO: 5879882 - DNA, 25 bp, Homo sapien
aaagcgctctccagcagggtccgtg

SEQ ID NO: 5879883 - DNA, 25 bp, Homo sapien
tagtggtacattatgaagcttggat

SEQ ID NO: 5879884 - DNA, 25 bp, Homo sapien
aagttcctatccttggcatatgatt

SEQ ID NO: 5879885 - DNA, 25 bp, Homo sapien
ttgcattaccccagtaatacataaa

SEQ ID NO: 5879886 - DNA, 25 bp, Homo sapien
tttctattgtatgttttcggttaag

SEQ ID NO: 5879887 - DNA, 25 bp, Homo sapien
agcttggatagtatcttagattaca

SEQ ID NO: 5879888 - DNA, 25 bp, Homo sapien
gttaagagtatttaaggaacatcgt

SEQ ID NO: 5879889 - DNA, 25 bp, Homo sapien
aacatttaatagtgaagattctgag

SEQ ID NO: 5879890 - DNA, 25 bp, Homo sapien
gggcggccagcgtttcctgaacgtg

SEQ ID NO: 5879891 - DNA, 25 bp, Homo sapien
catatgattgcacttgattttggca

SEQ ID NO: 5879892 - DNA, 25 bp, Homo sapien
tgcctgtgagatttcaacatttaat

SEQ ID NO: 5879893 - DNA, 25 bp, Homo sapien
gcccccatagctcatttctcctcaa

SEQ ID NO: 5879894 - DNA, 25 bp, Homo sapien
tgcttctataagggaatatttactt

SEQ ID NO: 5879895 - DNA, 25 bp, Homo sapien
gtatgaagtgtgtctttgcctgtga

SEQ ID NO: 5879896 - DNA, 25 bp, Homo sapien
acaatctaatgggccagtgggttaa

SEQ ID NO: 5879897 - DNA, 25 bp, Homo sapien
tgtctcttgttatagtggtacatta

SEQ ID NO: 5879898 - DNA, 25 bp, Homo sapien
cggttaagagtatttaaggaacatc

SEQ ID NO: 5879899 - DNA, 25 bp, Homo sapien
tgctggaccacttctttgtagtctt

SEQ ID NO: 5879900 - DNA, 25 bp, Homo sapien
acatcgttgtaggttctcacccatg

SEQ ID NO: 5879901 - DNA, 25 bp, Homo sapien
tatagtggtacattatgaagcttgg

SEQ ID NO: 5879902 - DNA, 25 bp, Homo sapien
ctgggcggccagcgtttcctgaacg

SEQ ID NO: 5879903 - DNA, 25 bp, Homo sapien
tatgctggaccacttctttgtagtc

SEQ ID NO: 5879904 - DNA, 25 bp, Homo sapien
tgtctttgcctgtgagatttcaaca

SEQ ID NO: 5879905 - DNA, 25 bp, Homo sapien
ctttgaagacaatctaatgggccag

SEQ ID NO: 5879906 - DNA, 25 bp, Homo sapien
gggccagtgggttaacatttcactg

SEQ ID NO: 5879907 - DNA, 25 bp, Homo sapien
attacagtttacaaactaaagccaa

SEQ ID NO: 5879908 - DNA, 25 bp, Homo sapien
tagttttacgagaatgggatgactt

SEQ ID NO: 5879909 - DNA, 25 bp, Homo sapien
caattacagtttacaaactaaagcc

SEQ ID NO: 5879910 - DNA, 25 bp, Homo sapien
tccaggctcacatgttctgagtttc

SEQ ID NO: 5879911 - DNA, 25 bp, Homo sapien
aaaacatacaatagaaaccccagac

SEQ ID NO: 5879912 - DNA, 25 bp, Homo sapien
aagtggtccagcatatggaactctt

SEQ ID NO: 5879913 - DNA, 25 bp, Homo sapien
gccacggaccctgctggagagcgct

SEQ ID NO: 5879914 - DNA, 25 bp, Homo sapien
atatggaactcttcttgaaaacaga

SEQ ID NO: 5879915 - DNA, 25 bp, Homo sapien
gctggagagcgctttccatctccag

SEQ ID NO: 5879916 - DNA, 25 bp, Homo sapien
ctgctggagagcgctttccatctcc

SEQ ID NO: 5879917 - DNA, 25 bp, Homo sapien
tccagtgaaatgttaacccactggc

SEQ ID NO: 5879918 - DNA, 25 bp, Homo sapien
ttcaggaaacgctggccgcccaggt

SEQ ID NO: 5879919 - DNA, 25 bp, Homo sapien
gtactgttcttcatcttaccatttg

SEQ ID NO: 5879920 - DNA, 25 bp, Homo sapien
gcactgcaccagccttcagtcctct

SEQ ID NO: 5879921 - DNA, 25 bp, Homo sapien
agtctgaataacactcaagtcatcc

SEQ ID NO: 5879922 - DNA, 25 bp, Homo sapien
cccttcttgctcttgtatggcttgc

SEQ ID NO: 5879923 - DNA, 25 bp, Homo sapien
aagaaagccacggaccctgctggag

SEQ ID NO: 5879924 - DNA, 25 bp, Homo sapien
gccttgtatttactccactaactgc

SEQ ID NO: 5879925 - DNA, 25 bp, Homo sapien
cttcttgaaaacagaagaaagccac

SEQ ID NO: 5879926 - DNA, 25 bp, Homo sapien
aacatacaatagaaaccccagaccc

SEQ ID NO: 5879927 - DNA, 25 bp, Homo sapien
agaccctaaatgccaaaatcaagtg

SEQ ID NO: 5879928 - DNA, 25 bp, Homo sapien
tagaaaccccagaccctaaatgcca

SEQ ID NO: 5879929 - DNA, 25 bp, Homo sapien
acagcttttatgtattactggggta

SEQ ID NO: 5879930 - DNA, 25 bp, Homo sapien
tactcttaaccgaaaacatacaata

SEQ ID NO: 5879931 - DNA, 25 bp, Homo sapien
tcttcaataaagataggttgctcag

SEQ ID NO: 5879932 - DNA, 25 bp, Homo sapien
ttttgaaactcagaacatgtgagcc

SEQ ID NO: 5879933 - DNA, 25 bp, Homo sapien
gcatatggaactcttcttgaaaaca

SEQ ID NO: 5879934 - DNA, 25 bp, Homo sapien
ttagtttgtaaactgtaattgattc

SEQ ID NO: 5879935 - DNA, 25 bp, Homo sapien
agcttttatgtattactggggtaat

SEQ ID NO: 5879936 - DNA, 25 bp, Homo sapien
acgatgttccttaaatactcttaac

SEQ ID NO: 5879937 - DNA, 25 bp, Homo sapien
tattactggggtaatgcaaagaaaa

SEQ ID NO: 5879938 - DNA, 25 bp, Homo sapien
aactcttcttgaaaacagaagaaag

SEQ ID NO: 5879939 - DNA, 25 bp, Homo sapien
gatgtgttgcatgggacggggggca

SEQ ID NO: 5879940 - DNA, 25 bp, Homo sapien
aacaagagacagcttttatgtatta

SEQ ID NO: 5879941 - DNA, 25 bp, Homo sapien
atggcttgctgccaatgagaattta

SEQ ID NO: 5879942 - DNA, 25 bp, Homo sapien
ttagattgtcttcaaagtatttggc

SEQ ID NO: 5879943 - DNA, 25 bp, Homo sapien
agaagcaacacgttcaggaaacgct

SEQ ID NO: 5879944 - DNA, 25 bp, Homo sapien
taatgtaccactataacaagagaca

SEQ ID NO: 5879945 - DNA, 25 bp, Homo sapien
agagccacttttgaaactcagaaca

SEQ ID NO: 5879946 - DNA, 25 bp, Homo sapien
tatgttaacatctgattatattgag

SEQ ID NO: 5879947 - DNA, 25 bp, Homo sapien
caatgagaatttagtctgaataaca

SEQ ID NO: 5879948 - DNA, 25 bp, Homo sapien
caaggataggaactttagtagaaaa

SEQ ID NO: 5879949 - DNA, 25 bp, Homo sapien
tgtcttcaaagtatttggctttagt

SEQ ID NO: 5879950 - DNA, 25 bp, Homo sapien
gaaactcagaacatgtgagcctgga

SEQ ID NO: 5879951 - DNA, 25 bp, Homo sapien
atagaagcaacacgttcaggaaacg

SEQ ID NO: 5879952 - DNA, 25 bp, Homo sapien
atatgccaaggataggaactttagt

SEQ ID NO: 5879953 - DNA, 25 bp, Homo sapien
aattgattcagtcacacaagagcca

SEQ ID NO: 5879954 - DNA, 25 bp, Homo sapien
atattcccttatagaagcaacacgt

SEQ ID NO: 5879955 - DNA, 25 bp, Homo sapien
tggccgcccaggttttggataacgg

SEQ ID NO: 5879956 - DNA, 25 bp, Homo sapien
cagaatcttcactattaaatgttga

SEQ ID NO: 5879957 - DNA, 25 bp, Homo sapien
aacatgggtgagaacctacaacgat

SEQ ID NO: 5879958 - DNA, 25 bp, Homo sapien
cctacaacgatgttccttaaatact

SEQ ID NO: 5879959 - DNA, 25 bp, Homo sapien
aaacagaagaaagccacggaccctg

SEQ ID NO: 5879960 - DNA, 25 bp, Homo sapien
cattagattgtcttcaaagtatttg

SEQ ID NO: 5879961 - DNA, 25 bp, Homo sapien
tgtgttgcatgggacggggggcact

SEQ ID NO: 5879962 - DNA, 25 bp, Homo sapien
aacacgttcaggaaacgctggccgc

SEQ ID NO: 5879963 - DNA, 25 bp, Homo sapien
aatcaagtgcaatcatatgccaagg

SEQ ID NO: 5879964 - DNA, 25 bp, Homo sapien
caaagtatttggctttagtttgtaa

SEQ ID NO: 5879965 - DNA, 25 bp, Homo sapien
aagccacggaccctgctggagagcg

SEQ ID NO: 5879966 - DNA, 25 bp, Homo sapien
aggttgctcagaatcttcactatta

SEQ ID NO: 5879967 - DNA, 25 bp, Homo sapien
ccaagcttcataatgtaccactata

SEQ ID NO: 5879968 - DNA, 25 bp, Homo sapien
tggccttgtatttactccactaact

SEQ ID NO: 5879969 - DNA, 25 bp, Homo sapien
ttcactattaaatgttgaaatctca

SEQ ID NO: 5879970 - DNA, 25 bp, Homo sapien
caagagccacttttgaaactcagaa

SEQ ID NO: 5879971 - DNA, 25 bp, Homo sapien
ccctgctggagagcgctttccatct

SEQ ID NO: 5879972 - DNA, 25 bp, Homo sapien
aacccactggcccattagattgtct

SEQ ID NO: 5879973 - DNA, 25 bp, Homo sapien
agccttcagtcctcttaagttatgt

SEQ ID NO: 5879974 - DNA, 25 bp, Homo sapien
taaatactcttaaccgaaaacatac

SEQ ID NO: 5879975 - DNA, 25 bp, Homo sapien
tccagcatatggaactcttcttgaa

SEQ ID NO: 5879976 - DNA, 25 bp, Homo sapien
tgcagagatgtgttgcatgggacgg

SEQ ID NO: 5879977 - DNA, 25 bp, Homo sapien
aataacactcaagtcatcccattct

SEQ ID NO: 5879978 - DNA, 25 bp, Homo sapien
ggagaaatgagctatgggggcttgg

SEQ ID NO: 5879979 - DNA, 25 bp, Homo sapien
gagctatgggggcttggtactgttc

SEQ ID NO: 5879980 - DNA, 25 bp, Homo sapien
cacaagagccacttttgaaactcag

SEQ ID NO: 5879981 - DNA, 25 bp, Homo sapien
tctcacaggcaaagacacacttcat

SEQ ID NO: 5879982 - DNA, 25 bp, Homo sapien
gtatttggctttagtttgtaaactg

SEQ ID NO: 5879983 - DNA, 25 bp, Homo sapien
gagatgtgttgcatgggacgggggg

SEQ ID NO: 5879984 - DNA, 25 bp, Homo sapien
ttaagttatgttaacatctgattat

SEQ ID NO: 5879985 - DNA, 25 bp, Homo sapien
atgacaggaaagtggccttgtattt

SEQ ID NO: 5879986 - DNA, 25 bp, Homo sapien
agaagaaagccacggaccctgctgg

SEQ ID NO: 5879987 - DNA, 25 bp, Homo sapien
actgttcttcatcttaccatttgct

SEQ ID NO: 5879988 - DNA, 25 bp, Homo sapien
catctccagtgaaatgttaacccac

SEQ ID NO: 5879989 - DNA, 25 bp, Homo sapien
tcttgtatggcttgctgccaatgag

SEQ ID NO: 5879990 - DNA, 25 bp, Homo sapien
gatgttccttaaatactcttaaccg

SEQ ID NO: 5879991 - DNA, 25 bp, Homo sapien
tatttactccactaactgcagagat

SEQ ID NO: 5879992 - DNA, 25 bp, Homo sapien
gaaaacagaagaaagccacggaccc

SEQ ID NO: 5879993 - DNA, 25 bp, Homo sapien
aagtgcaatcatatgccaaggatag

SEQ ID NO: 5879994 - DNA, 25 bp, Homo sapien
cagaacatgtgagcctggatgacag

SEQ ID NO: 5879995 - DNA, 25 bp, Homo sapien
ccccagaccctaaatgccaaaatca

SEQ ID NO: 5879996 - DNA, 25 bp, Homo sapien
ctttagtttgtaaactgtaattgat

SEQ ID NO: 5879997 - DNA, 25 bp, Homo sapien
atttggctttagtttgtaaactgta

SEQ ID NO: 5879998 - DNA, 25 bp, Homo sapien
aacctacaacgatgttccttaaata

SEQ ID NO: 5879999 - DNA, 25 bp, Homo sapien
ggaagactacaaagaagtggtccag

SEQ ID NO: 5880000 - DNA, 25 bp, Homo sapien
ttcataatgtaccactataacaaga

SEQ ID NO: 5880001 - DNA, 25 bp, Homo sapien
aaaactaacatgggtgagaacctac

SEQ ID NO: 5880002 - DNA, 25 bp, Homo sapien
cctaaatgccaaaatcaagtgcaat

SEQ ID NO: 5880003 - DNA, 25 bp, Homo sapien
taccatttgctctgtaatctaagat

SEQ ID NO: 5880004 - DNA, 25 bp, Homo sapien
tatgtattactggggtaatgcaaag

SEQ ID NO: 5880005 - DNA, 25 bp, Homo sapien
tttcttcaataaagataggttgctc

SEQ ID NO: 5880006 - DNA, 25 bp, Homo sapien
tgcaccagccttcagtcctcttaag

SEQ ID NO: 5880007 - DNA, 25 bp, Homo sapien
atgggacggggggcactgcaccagc

SEQ ID NO: 5880008 - DNA, 25 bp, Homo sapien
tacaatagaaaccccagaccctaaa

SEQ ID NO: 5880009 - DNA, 25 bp, Homo sapien
agtttgtaaactgtaattgattcag

SEQ ID NO: 5880010 - DNA, 25 bp, Homo sapien
agagacagcttttatgtattactgg

SEQ ID NO: 5880011 - DNA, 25 bp, Homo sapien
attatattgaggagaaatgagctat

SEQ ID NO: 5880012 - DNA, 25 bp, Homo sapien
tttactccactaactgcagagatgt

SEQ ID NO: 5880013 - DNA, 25 bp, Homo sapien
cttcttgctcttgtatggcttgctg

SEQ ID NO: 5880014 - DNA, 25 bp, Homo sapien
aactgtaattgattcagtcacacaa

SEQ ID NO: 5880015 - DNA, 25 bp, Homo sapien
gcgctttccatctccagtgaaatgt

SEQ ID NO: 5880016 - DNA, 25 bp, Homo sapien
tgttaacccactggcccattagatt

SEQ ID NO: 5880017 - DNA, 25 bp, Homo sapien
taaatgccaaaatcaagtgcaatca

SEQ ID NO: 5880018 - DNA, 25 bp, Homo sapien
ggaaacgctggccgcccaggttttg

SEQ ID NO: 5880019 - DNA, 25 bp, Homo sapien
gcctggatgacaggaaagtggcctt

SEQ ID NO: 5880020 - DNA, 25 bp, Homo sapien
aatactcttaaccgaaaacatacaa

SEQ ID NO: 5880021 - DNA, 25 bp, Homo sapien
gcaacacgttcaggaaacgctggcc

SEQ ID NO: 5880022 - DNA, 25 bp, Homo sapien
tatgggggcttggtactgttcttca

SEQ ID NO: 5880023 - DNA, 25 bp, Homo sapien
ggatgacaggaaagtggccttgtat

SEQ ID NO: 5880024 - DNA, 25 bp, Homo sapien
aactaacatgggtgagaacctacaa

SEQ ID NO: 5880025 - DNA, 25 bp, Homo sapien
ctgtaattgattcagtcacacaaga

SEQ ID NO: 5880026 - DNA, 25 bp, Homo sapien
tgttccttaaatactcttaaccgaa

SEQ ID NO: 5880027 - DNA, 25 bp, Homo sapien
aaagacacacttcatacccctctcc

SEQ ID NO: 5880028 - DNA, 25 bp, Homo sapien
agtggccttgtatttactccactaa

SEQ ID NO: 5880029 - DNA, 25 bp, Homo sapien
cagtgaaatgttaacccactggccc

SEQ ID NO: 5880030 - DNA, 25 bp, Homo sapien
tgccaaaatcaagtgcaatcatatg

SEQ ID NO: 5880031 - DNA, 25 bp, Homo sapien
cacggaccctgctggagagcgcttt

SEQ ID NO: 5880032 - DNA, 25 bp, Homo sapien
ctcagaatcttcactattaaatgtt

SEQ ID NO: 5880033 - DNA, 25 bp, Homo sapien
tcccattctcgtaaaactaacatgg

SEQ ID NO: 5880034 - DNA, 25 bp, Homo sapien
ttcttcatcttaccatttgctctgt

SEQ ID NO: 5880035 - DNA, 25 bp, Homo sapien
cagtcacacaagagccacttttgaa

SEQ ID NO: 5880036 - DNA, 25 bp, Homo sapien
ccacttttgaaactcagaacatgtg

SEQ ID NO: 5880037 - DNA, 25 bp, Homo sapien
aagcaacacgttcaggaaacgctgg

SEQ ID NO: 5880038 - DNA, 25 bp, Homo sapien
atttagtctgaataacactcaagtc

SEQ ID NO: 5880039 - DNA, 25 bp, Homo sapien
ttgaggagaaatgagctatgggggc

SEQ ID NO: 5880040 - DNA, 25 bp, Homo sapien
cggaccctgctggagagcgctttcc

SEQ ID NO: 5880041 - DNA, 25 bp, Homo sapien
actaactgcagagatgtgttgcatg

SEQ ID NO: 5880042 - DNA, 25 bp, Homo sapien
caacgatgttccttaaatactctta

SEQ ID NO: 5880043 - DNA, 25 bp, Homo sapien
gccaaggataggaactttagtagaa

SEQ ID NO: 5880044 - DNA, 25 bp, Homo sapien
tgtaatctaagatactatccaagct

SEQ ID NO: 5880045 - DNA, 25 bp, Homo sapien
gaatcttcactattaaatgttgaaa

SEQ ID NO: 5880046 - DNA, 25 bp, Homo sapien
gtaccactataacaagagacagctt

SEQ ID NO: 5880047 - DNA, 25 bp, Homo sapien
tttggataacggggaagactacaaa

SEQ ID NO: 5880048 - DNA, 25 bp, Homo sapien
ctattaaatgttgaaatctcacagg

SEQ ID NO: 5880049 - DNA, 25 bp, Homo sapien
aacatctgattatattgaggagaaa

SEQ ID NO: 5880050 - DNA, 25 bp, Homo sapien
gagagcgctttccatctccagtgaa

SEQ ID NO: 5880051 - DNA, 25 bp, Homo sapien
atgagaatttagtctgaataacact

SEQ ID NO: 5880052 - DNA, 25 bp, Homo sapien
aacaaagtaaatattcccttataga

SEQ ID NO: 5880053 - DNA, 25 bp, Homo sapien
ttcagtcctcttaagttatgttaac

SEQ ID NO: 5880054 - DNA, 25 bp, Homo sapien
ttagtctgaataacactcaagtcat

SEQ ID NO: 5880055 - DNA, 25 bp, Homo sapien
tcaagtcatcccattctcgtaaaac

SEQ ID NO: 5880056 - DNA, 25 bp, Homo sapien
gaaagccacggaccctgctggagag

SEQ ID NO: 5880057 - DNA, 25 bp, Homo sapien
tttccatctccagtgaaatgttaac

SEQ ID NO: 5880058 - DNA, 25 bp, Homo sapien
tcatcttaccatttgctctgtaatc

SEQ ID NO: 5880059 - DNA, 25 bp, Homo sapien
ttgtatggcttgctgccaatgagaa

SEQ ID NO: 5880060 - DNA, 25 bp, Homo sapien
cactattaaatgttgaaatctcaca

SEQ ID NO: 5880061 - DNA, 25 bp, Homo sapien
ttgaaactcagaacatgtgagcctg

SEQ ID NO: 5880062 - DNA, 25 bp, Homo sapien
tctgtaatctaagatactatccaag

SEQ ID NO: 5880063 - DNA, 25 bp, Homo sapien
gcttcataatgtaccactataacaa

SEQ ID NO: 5880064 - DNA, 25 bp, Homo sapien
ccactaactgcagagatgtgttgca

SEQ ID NO: 5880065 - DNA, 25 bp, Homo sapien
tactccactaactgcagagatgtgt

SEQ ID NO: 5880066 - DNA, 25 bp, Homo sapien
gtcatcccattctcgtaaaactaac

SEQ ID NO: 5880067 - DNA, 25 bp, Homo sapien
caaagtaaatattcccttatagaag

SEQ ID NO: 5880068 - DNA, 25 bp, Homo sapien
cttaccatttgctctgtaatctaag

SEQ ID NO: 5880069 - DNA, 25 bp, Homo sapien
agaacctacaacgatgttccttaaa

SEQ ID NO: 5880070 - DNA, 25 bp, Homo sapien
ggggcttggtactgttcttcatctt

SEQ ID NO: 5880071 - DNA, 25 bp, Homo sapien
ccattctcgtaaaactaacatgggt

SEQ ID NO: 5880072 - DNA, 25 bp, Homo sapien
gtatggcttgctgccaatgagaatt

SEQ ID NO: 5880073 - DNA, 25 bp, Homo sapien
taacactcaagtcatcccattctcg

SEQ ID NO: 5880074 - DNA, 25 bp, Homo sapien
gctcttgtatggcttgctgccaatg

SEQ ID NO: 5880075 - DNA, 25 bp, Homo sapien
atgagctatgggggcttggtactgt

SEQ ID NO: 5880076 - DNA, 25 bp, Homo sapien
aaaatcaagtgcaatcatatgccaa

SEQ ID NO: 5880077 - DNA, 25 bp, Homo sapien
caagagacagcttttatgtattact

SEQ ID NO: 5880078 - DNA, 25 bp, Homo sapien
gataggaactttagtagaaaacaaa

SEQ ID NO: 5880079 - DNA, 25 bp, Homo sapien
tcaagtgcaatcatatgccaaggat

SEQ ID NO: 5880080 - DNA, 25 bp, Homo sapien
taaatgttgaaatctcacaggcaaa

SEQ ID NO: 5880081 - DNA, 25 bp, Homo sapien
acaaagaagtggtccagcatatgga

SEQ ID NO: 5880082 - DNA, 25 bp, Homo sapien
cttggtactgttcttcatcttacca

SEQ ID NO: 5880083 - DNA, 25 bp, Homo sapien
tgagaacctacaacgatgttcctta

SEQ ID NO: 5880084 - DNA, 25 bp, Homo sapien
gtcctcttaagttatgttaacatct

SEQ ID NO: 5880085 - DNA, 25 bp, Homo sapien
cacgttcaggaaacgctggccgccc

SEQ ID NO: 5880086 - DNA, 25 bp, Homo sapien
ttcaaagtatttggctttagtttgt

SEQ ID NO: 5880087 - DNA, 25 bp, Homo sapien
catacaatagaaaccccagacccta

SEQ ID NO: 5880088 - DNA, 25 bp, Homo sapien
gcatgggacggggggcactgcacca

SEQ ID NO: 5880089 - DNA, 25 bp, Homo sapien
tgtaaactgtaattgattcagtcac

SEQ ID NO: 5880090 - DNA, 25 bp, Homo sapien
gattcagtcacacaagagccacttt

SEQ ID NO: 5880091 - DNA, 25 bp, Homo sapien
accactataacaagagacagctttt

SEQ ID NO: 5880092 - DNA, 25 bp, Homo sapien
ggaaagtggccttgtatttactcca

SEQ ID NO: 5880093 - DNA, 25 bp, Homo sapien
gagcctggatgacaggaaagtggcc

SEQ ID NO: 5880094 - DNA, 25 bp, Homo sapien
cttaaccgaaaacatacaatagaaa

SEQ ID NO: 5880095 - DNA, 25 bp, Homo sapien
ttgctcttgtatggcttgctgccaa

SEQ ID NO: 5880096 - DNA, 25 bp, Homo sapien
tttatgtattactggggtaatgcaa

SEQ ID NO: 5880097 - DNA, 25 bp, Homo sapien
gtaattgattcagtcacacaagagc

SEQ ID NO: 5880098 - DNA, 25 bp, Homo sapien
tcgtaaaactaacatgggtgagaac

SEQ ID NO: 5880099 - DNA, 25 bp, Homo sapien
ggcccattagattgtcttcaaagta

SEQ ID NO: 5880100 - DNA, 25 bp, Homo sapien
ggtgagaacctacaacgatgttcct

SEQ ID NO: 5880101 - DNA, 25 bp, Homo sapien
tctgaataacactcaagtcatccca

SEQ ID NO: 5880102 - DNA, 25 bp, Homo sapien
gttgctcagaatcttcactattaaa

SEQ ID NO: 5880103 - DNA, 25 bp, Homo sapien
tacaacgatgttccttaaatactct

SEQ ID NO: 5880104 - DNA, 25 bp, Homo sapien
gctttccatctccagtgaaatgtta

SEQ ID NO: 5880105 - DNA, 25 bp, Homo sapien
accctaaatgccaaaatcaagtgca

SEQ ID NO: 5880106 - DNA, 25 bp, Homo sapien
attaaatgttgaaatctcacaggca

SEQ ID NO: 5880107 - DNA, 25 bp, Homo sapien
aaagataggttgctcagaatcttca

SEQ ID NO: 5880108 - DNA, 25 bp, Homo sapien
cacacaagagccacttttgaaactc

SEQ ID NO: 5880109 - DNA, 25 bp, Homo sapien
ctccactaactgcagagatgtgttg

SEQ ID NO: 5880110 - DNA, 25 bp, Homo sapien
gatactatccaagcttcataatgta

SEQ ID NO: 5880111 - DNA, 25 bp, Homo sapien
tgtatttactccactaactgcagag

SEQ ID NO: 5880112 - DNA, 25 bp, Homo sapien
attctcgtaaaactaacatgggtga

SEQ ID NO: 5880113 - DNA, 25 bp, Homo sapien
gtgcaatcatatgccaaggatagga

SEQ ID NO: 5880114 - DNA, 25 bp, Homo sapien
taaactgtaattgattcagtcacac

SEQ ID NO: 5880115 - DNA, 25 bp, Homo sapien
tcttaagttatgttaacatctgatt

SEQ ID NO: 5880116 - DNA, 25 bp, Homo sapien
ctggcccattagattgtcttcaaag

SEQ ID NO: 5880117 - DNA, 25 bp, Homo sapien
gactacaaagaagtggtccagcata

SEQ ID NO: 5880118 - DNA, 25 bp, Homo sapien
tcacaggcaaagacacacttcatac

SEQ ID NO: 5880119 - DNA, 25 bp, Homo sapien
ctacaaagaagtggtccagcatatg

SEQ ID NO: 5880120 - DNA, 25 bp, Homo sapien
tcttcaaagtatttggctttagttt

SEQ ID NO: 5880121 - DNA, 25 bp, Homo sapien
ctaagatactatccaagcttcataa

SEQ ID NO: 5880122 - DNA, 25 bp, Homo sapien
ccagaccctaaatgccaaaatcaag

SEQ ID NO: 5880123 - DNA, 25 bp, Homo sapien
actggggtaatgcaaagaaaatgag

SEQ ID NO: 5880124 - DNA, 25 bp, Homo sapien
gttatgttaacatctgattatattg

SEQ ID NO: 5880125 - DNA, 25 bp, Homo sapien
gagcgctttccatctccagtgaaat

SEQ ID NO: 5880126 - DNA, 25 bp, Homo sapien
aagttatgttaacatctgattatat

SEQ ID NO: 5880127 - DNA, 25 bp, Homo sapien
taaccgaaaacatacaatagaaacc

SEQ ID NO: 5880128 - DNA, 25 bp, Homo sapien
ttaacatctgattatattgaggaga

SEQ ID NO: 5880129 - DNA, 25 bp, Homo sapien
aaagaagtggtccagcatatggaac

SEQ ID NO: 5880130 - DNA, 25 bp, Homo sapien
agccacttttgaaactcagaacatg

SEQ ID NO: 5880131 - DNA, 25 bp, Homo sapien
gttttggataacggggaagactaca

SEQ ID NO: 5880132 - DNA, 25 bp, Homo sapien
tcttgctcttgtatggcttgctgcc

SEQ ID NO: 5880133 - DNA, 25 bp, Homo sapien
gaaatgttaacccactggcccatta

SEQ ID NO: 5880134 - DNA, 25 bp, Homo sapien
ccttcagtcctcttaagttatgtta

SEQ ID NO: 5880135 - DNA, 25 bp, Homo sapien
tagtagaaaacaaagtaaatattcc

SEQ ID NO: 5880136 - DNA, 25 bp, Homo sapien
taatctaagatactatccaagcttc

SEQ ID NO: 5880137 - DNA, 25 bp, Homo sapien
gaacatgtgagcctggatgacagga

SEQ ID NO: 5880138 - DNA, 25 bp, Homo sapien
ttaacccactggcccattagattgt

SEQ ID NO: 5880139 - DNA, 25 bp, Homo sapien
aagtaaatattcccttatagaagca

SEQ ID NO: 5880140 - DNA, 25 bp, Homo sapien
aactcagaacatgtgagcctggatg

SEQ ID NO: 5880141 - DNA, 25 bp, Homo sapien
ccttatagaagcaacacgttcagga

SEQ ID NO: 5880142 - DNA, 25 bp, Homo sapien
cagtcctcttaagttatgttaacat

SEQ ID NO: 5880143 - DNA, 25 bp, Homo sapien
ctcttaaccgaaaacatacaataga

SEQ ID NO: 5880144 - DNA, 25 bp, Homo sapien
tggtactgttcttcatcttaccatt

SEQ ID NO: 5880145 - DNA, 25 bp, Homo sapien
cttcatcttaccatttgctctgtaa

SEQ ID NO: 5880146 - DNA, 25 bp, Homo sapien
ttgattcagtcacacaagagccact

SEQ ID NO: 5880147 - DNA, 25 bp, Homo sapien
ggtccagcatatggaactcttcttg

SEQ ID NO: 5880148 - DNA, 25 bp, Homo sapien
cactataacaagagacagcttttat

SEQ ID NO: 5880149 - DNA, 25 bp, Homo sapien
gctatgggggcttggtactgttctt

SEQ ID NO: 5880150 - DNA, 25 bp, Homo sapien
gtaaatattcccttatagaagcaac

SEQ ID NO: 5880151 - DNA, 25 bp, Homo sapien
cataatgtaccactataacaagaga

SEQ ID NO: 5880152 - DNA, 25 bp, Homo sapien
gataacggggaagactacaaagaag

SEQ ID NO: 5880153 - DNA, 25 bp, Homo sapien
caccagccttcagtcctcttaagtt

SEQ ID NO: 5880154 - DNA, 25 bp, Homo sapien
atggaactcttcttgaaaacagaag

SEQ ID NO: 5880155 - DNA, 25 bp, Homo sapien
ctggatgacaggaaagtggccttgt

SEQ ID NO: 5880156 - DNA, 25 bp, Homo sapien
agaagtggtccagcatatggaactc

SEQ ID NO: 5880157 - DNA, 25 bp, Homo sapien
ttcagtcacacaagagccacttttg

SEQ ID NO: 5880158 - DNA, 25 bp, Homo sapien
ctatccaagcttcataatgtaccac

SEQ ID NO: 5880159 - DNA, 25 bp, Homo sapien
gacaggaaagtggccttgtatttac

SEQ ID NO: 5880160 - DNA, 25 bp, Homo sapien
cttgtatttactccactaactgcag

SEQ ID NO: 5880161 - DNA, 25 bp, Homo sapien
atgtaccactataacaagagacagc

SEQ ID NO: 5880162 - DNA, 25 bp, Homo sapien
tctcgtaaaactaacatgggtgaga

SEQ ID NO: 5880163 - DNA, 25 bp, Homo sapien
tctgattatattgaggagaaatgag

SEQ ID NO: 5880164 - DNA, 25 bp, Homo sapien
ttcaataaagataggttgctcagaa

SEQ ID NO: 5880165 - DNA, 25 bp, Homo sapien
cgttcaggaaacgctggccgcccag

SEQ ID NO: 5880166 - DNA, 25 bp, Homo sapien
tgctgccaatgagaatttagtctga

SEQ ID NO: 5880167 - DNA, 25 bp, Homo sapien
ctaacatgggtgagaacctacaacg

SEQ ID NO: 5880168 - DNA, 25 bp, Homo sapien
aagtcatcccattctcgtaaaacta

SEQ ID NO: 5880169 - DNA, 25 bp, Homo sapien
ggggaagactacaaagaagtggtcc

SEQ ID NO: 5880170 - DNA, 25 bp, Homo sapien
attcccttatagaagcaacacgttc

SEQ ID NO: 5880171 - DNA, 25 bp, Homo sapien
gtcacacaagagccacttttgaaac

SEQ ID NO: 5880172 - DNA, 25 bp, Homo sapien
gctggccgcccaggttttggataac

SEQ ID NO: 5880173 - DNA, 25 bp, Homo sapien
gcaaagacacacttcatacccctct

SEQ ID NO: 5880174 - DNA, 25 bp, Homo sapien
ataaagataggttgctcagaatctt

SEQ ID NO: 5880175 - DNA, 25 bp, Homo sapien
aagactacaaagaagtggtccagca

SEQ ID NO: 5880176 - DNA, 25 bp, Homo sapien
ccagccttcagtcctcttaagttat

SEQ ID NO: 5880177 - DNA, 25 bp, Homo sapien
acgctggccgcccaggttttggata

SEQ ID NO: 5880178 - DNA, 25 bp, Homo sapien
tgttgcatgggacggggggcactgc

SEQ ID NO: 5880179 - DNA, 25 bp, Homo sapien
ggcttggtactgttcttcatcttac

SEQ ID NO: 5880180 - DNA, 25 bp, Homo sapien
ctcagaacatgtgagcctggatgac

SEQ ID NO: 5880181 - DNA, 25 bp, Homo sapien
gaaatctcacaggcaaagacacact

SEQ ID NO: 5880182 - DNA, 25 bp, Homo sapien
cggggggcactgcaccagccttcag

SEQ ID NO: 5880183 - DNA, 25 bp, Homo sapien
caggaaagtggccttgtatttactc

SEQ ID NO: 5880184 - DNA, 25 bp, Homo sapien
ctcttcttgaaaacagaagaaagcc

SEQ ID NO: 5880185 - DNA, 25 bp, Homo sapien
aatctcacaggcaaagacacacttc

SEQ ID NO: 5880186 - DNA, 25 bp, Homo sapien
atctaagatactatccaagcttcat

SEQ ID NO: 5880187 - DNA, 25 bp, Homo sapien
tgggggcttggtactgttcttcatc

SEQ ID NO: 5880188 - DNA, 25 bp, Homo sapien
ataacaagagacagcttttatgtat

SEQ ID NO: 5880189 - DNA, 25 bp, Homo sapien
catcccattctcgtaaaactaacat

SEQ ID NO: 5880190 - DNA, 25 bp, Homo sapien
cagagatgtgttgcatgggacgggg

SEQ ID NO: 5880191 - DNA, 25 bp, Homo sapien
gggcactgcaccagccttcagtcct

SEQ ID NO: 5880192 - DNA, 25 bp, Homo sapien
acagaagaaagccacggaccctgct

SEQ ID NO: 5880193 - DNA, 25 bp, Homo sapien
cctcttaagttatgttaacatctga

SEQ ID NO: 5880194 - DNA, 25 bp, Homo sapien
gccaatgagaatttagtctgaataa

SEQ ID NO: 5880195 - DNA, 25 bp, Homo sapien
acactcaagtcatcccattctcgta

SEQ ID NO: 5880196 - DNA, 25 bp, Homo sapien
agattgtcttcaaagtatttggctt

SEQ ID NO: 5880197 - DNA, 25 bp, Homo sapien
tctccagtgaaatgttaacccactg

SEQ ID NO: 5880198 - DNA, 25 bp, Homo sapien
atgccaaggataggaactttagtag

SEQ ID NO: 5880199 - DNA, 25 bp, Homo sapien
aatgttaacccactggcccattaga

SEQ ID NO: 5880200 - DNA, 25 bp, Homo sapien
acatgtgagcctggatgacaggaaa

SEQ ID NO: 5880201 - DNA, 25 bp, Homo sapien
agacagcttttatgtattactgggg

SEQ ID NO: 5880202 - DNA, 25 bp, Homo sapien
cccattagattgtcttcaaagtatt

SEQ ID NO: 5880203 - DNA, 25 bp, Homo sapien
aggcaaagacacacttcatacccct

SEQ ID NO: 5880204 - DNA, 25 bp, Homo sapien
tggataacggggaagactacaaaga

SEQ ID NO: 5880205 - DNA, 25 bp, Homo sapien
agaaatgagctatgggggcttggta

SEQ ID NO: 5880206 - DNA, 25 bp, Homo sapien
agataggttgctcagaatcttcact

SEQ ID NO: 5880207 - DNA, 25 bp, Homo sapien
aatcatatgccaaggataggaactt

SEQ ID NO: 5880208 - DNA, 25 bp, Homo sapien
ttgaaaacagaagaaagccacggac

SEQ ID NO: 5880209 - DNA, 25 bp, Homo sapien
ttatagaagcaacacgttcaggaaa

SEQ ID NO: 5880210 - DNA, 25 bp, Homo sapien
aaagtggccttgtatttactccact

SEQ ID NO: 5880211 - DNA, 25 bp, Homo sapien
tgattatattgaggagaaatgagct

SEQ ID NO: 5880212 - DNA, 25 bp, Homo sapien
gacggggggcactgcaccagccttc

SEQ ID NO: 5880213 - DNA, 25 bp, Homo sapien
gagaatttagtctgaataacactca

SEQ ID NO: 5880214 - DNA, 25 bp, Homo sapien
cactggcccattagattgtcttcaa

SEQ ID NO: 5880215 - DNA, 25 bp, Homo sapien
tggagagcgctttccatctccagtg

SEQ ID NO: 5880216 - DNA, 25 bp, Homo sapien
gctctgtaatctaagatactatcca

SEQ ID NO: 5880217 - DNA, 25 bp, Homo sapien
gtaaaactaacatgggtgagaacct

SEQ ID NO: 5880218 - DNA, 25 bp, Homo sapien
aatgttgaaatctcacaggcaaaga

SEQ ID NO: 5880219 - DNA, 25 bp, Homo sapien
gtgaaatgttaacccactggcccat

SEQ ID NO: 5880220 - DNA, 25 bp, Homo sapien
tcttgaaaacagaagaaagccacgg

SEQ ID NO: 5880221 - DNA, 25 bp, Homo sapien
gtggtccagcatatggaactcttct

SEQ ID NO: 5880222 - DNA, 25 bp, Homo sapien
gggacggggggcactgcaccagcct

SEQ ID NO: 5880223 - DNA, 25 bp, Homo sapien
actgcagagatgtgttgcatgggac

SEQ ID NO: 5880224 - DNA, 25 bp, Homo sapien
tattgaggagaaatgagctatgggg

SEQ ID NO: 5880225 - DNA, 25 bp, Homo sapien
aaatgagctatgggggcttggtact

SEQ ID NO: 5880226 - DNA, 25 bp, Homo sapien
aagcttcataatgtaccactataac

SEQ ID NO: 5880227 - DNA, 25 bp, Homo sapien
tccatctccagtgaaatgttaaccc

SEQ ID NO: 5880228 - DNA, 25 bp, Homo sapien
cttttatgtattactggggtaatgc

SEQ ID NO: 5880229 - DNA, 25 bp, Homo sapien
tatattgaggagaaatgagctatgg

SEQ ID NO: 5880230 - DNA, 25 bp, Homo sapien
ctgccaatgagaatttagtctgaat

SEQ ID NO: 5880231 - DNA, 25 bp, Homo sapien
gtgagcctggatgacaggaaagtgg

SEQ ID NO: 5880232 - DNA, 25 bp, Homo sapien
atgtgagcctggatgacaggaaagt

SEQ ID NO: 5880233 - DNA, 25 bp, Homo sapien
gcaatcatatgccaaggataggaac

SEQ ID NO: 5880234 - DNA, 25 bp, Homo sapien
gggggcactgcaccagccttcagtc

SEQ ID NO: 5880235 - DNA, 25 bp, Homo sapien
aatgccaaaatcaagtgcaatcata

SEQ ID NO: 5880236 - DNA, 25 bp, Homo sapien
tcatatgccaaggataggaacttta

SEQ ID NO: 5880237 - DNA, 25 bp, Homo sapien
atccaagcttcataatgtaccacta

SEQ ID NO: 5880238 - DNA, 25 bp, Homo sapien
gaccctgctggagagcgctttccat

SEQ ID NO: 5880239 - DNA, 25 bp, Homo sapien
catctgattatattgaggagaaatg

SEQ ID NO: 5880240 - DNA, 25 bp, Homo sapien
atttgctctgtaatctaagatacta

SEQ ID NO: 5880241 - DNA, 25 bp, Homo sapien
ttgaaatctcacaggcaaagacaca

SEQ ID NO: 5880242 - DNA, 25 bp, Homo sapien
aggataggaactttagtagaaaaca

SEQ ID NO: 5880243 - DNA, 25 bp, Homo sapien
ttactggggtaatgcaaagaaaatg

SEQ ID NO: 5880244 - DNA, 25 bp, Homo sapien
tgttgaaatctcacaggcaaagaca

SEQ ID NO: 5880245 - DNA, 25 bp, Homo sapien
taacggggaagactacaaagaagtg

SEQ ID NO: 5880246 - DNA, 25 bp, Homo sapien
cagcatatggaactcttcttgaaaa

SEQ ID NO: 5880247 - DNA, 25 bp, Homo sapien
actcaagtcatcccattctcgtaaa

SEQ ID NO: 5880248 - DNA, 25 bp, Homo sapien
aaacgctggccgcccaggttttgga

SEQ ID NO: 5880249 - DNA, 25 bp, Homo sapien
ttgcatgggacggggggcactgcac

SEQ ID NO: 5880250 - DNA, 25 bp, Homo sapien
ttggctttagtttgtaaactgtaat

SEQ ID NO: 5880251 - DNA, 25 bp, Homo sapien
cccactggcccattagattgtcttc

SEQ ID NO: 5880252 - DNA, 25 bp, Homo sapien
taactgcagagatgtgttgcatggg

SEQ ID NO: 5880253 - DNA, 25 bp, Homo sapien
tgaataacactcaagtcatcccatt

SEQ ID NO: 5880254 - DNA, 25 bp, Homo sapien
aagatactatccaagcttcataatg

SEQ ID NO: 5880255 - DNA, 25 bp, Homo sapien
caataaagataggttgctcagaatc

SEQ ID NO: 5880256 - DNA, 25 bp, Homo sapien
cttgctgccaatgagaatttagtct

SEQ ID NO: 5880257 - DNA, 25 bp, Homo sapien
tgctcagaatcttcactattaaatg

SEQ ID NO: 5880258 - DNA, 25 bp, Homo sapien
tttttcttcaataaagataggttgc

SEQ ID NO: 5880259 - DNA, 25 bp, Homo sapien
ataggttgctcagaatcttcactat

SEQ ID NO: 5880260 - DNA, 25 bp, Homo sapien
ctataacaagagacagcttttatgt

SEQ ID NO: 5880261 - DNA, 25 bp, Homo sapien
actgcaccagccttcagtcctctta

SEQ ID NO: 5880262 - DNA, 25 bp, Homo sapien
aaatattcccttatagaagcaacac

SEQ ID NO: 5880263 - DNA, 25 bp, Homo sapien
cgaaaacatacaatagaaaccccag

SEQ ID NO: 5880264 - DNA, 25 bp, Homo sapien
tcccttatagaagcaacacgttcag

SEQ ID NO: 5880265 - DNA, 25 bp, Homo sapien
tgttaacatctgattatattgagga

SEQ ID NO: 5880266 - DNA, 25 bp, Homo sapien
tgttcttcatcttaccatttgctct

SEQ ID NO: 5880267 - DNA, 25 bp, Homo sapien
tgggtgagaacctacaacgatgttc

SEQ ID NO: 5880268 - DNA, 25 bp, Homo sapien
tgtattactggggtaatgcaaagaa

SEQ ID NO: 5880269 - DNA, 25 bp, Homo sapien
gaggagaaatgagctatgggggctt

SEQ ID NO: 5880270 - DNA, 25 bp, Homo sapien
acaggcaaagacacacttcataccc

SEQ ID NO: 5880271 - DNA, 25 bp, Homo sapien
ggcttgctgccaatgagaatttagt

SEQ ID NO: 5880272 - DNA, 25 bp, Homo sapien
tcttcactattaaatgttgaaatct

SEQ ID NO: 5880273 - DNA, 25 bp, Homo sapien
caggaaacgctggccgcccaggttt

SEQ ID NO: 5880274 - DNA, 25 bp, Homo sapien
aatagaaaccccagaccctaaatgc

SEQ ID NO: 5880275 - DNA, 25 bp, Homo sapien
atcttaccatttgctctgtaatcta

SEQ ID NO: 5880276 - DNA, 25 bp, Homo sapien
ggaactcttcttgaaaacagaagaa

SEQ ID NO: 5880277 - DNA, 25 bp, Homo sapien
tactatccaagcttcataatgtacc

SEQ ID NO: 5880278 - DNA, 25 bp, Homo sapien
gaaaccccagaccctaaatgccaaa

SEQ ID NO: 5880279 - DNA, 25 bp, Homo sapien
ttgctctgtaatctaagatactatc

SEQ ID NO: 5880280 - DNA, 25 bp, Homo sapien
catgggtgagaacctacaacgatgt

SEQ ID NO: 5880281 - DNA, 25 bp, Homo sapien
ccatttgctctgtaatctaagatac

SEQ ID NO: 5880282 - DNA, 25 bp, Homo sapien
attgtcttcaaagtatttggcttta

SEQ ID NO: 5880283 - DNA, 25 bp, Homo sapien
gaatttagtctgaataacactcaag

SEQ ID NO: 5880284 - DNA, 25 bp, Homo sapien
ccaaaatcaagtgcaatcatatgcc

SEQ ID NO: 5880285 - DNA, 25 bp, Homo sapien
tttgtaaactgtaattgattcagtc

SEQ ID NO: 5880286 - DNA, 25 bp, Homo sapien
acttttgaaactcagaacatgtgag

SEQ ID NO: 5880287 - DNA, 25 bp, Homo sapien
ggctttagtttgtaaactgtaattg

SEQ ID NO: 5880288 - DNA, 25 bp, Homo sapien
ctgtccaaaaagctgctgctgggca

SEQ ID NO: 5880289 - DNA, 25 bp, Homo sapien
ccttcaggactaggtgcagaatgtc

SEQ ID NO: 5880290 - DNA, 25 bp, Homo sapien
cctctgcttagaaaaagctgtggat

SEQ ID NO: 5880291 - DNA, 25 bp, Homo sapien
tatcgagagaggcttccggcctggc

SEQ ID NO: 5880292 - DNA, 25 bp, Homo sapien
attagtggtccgggcccgggcaggc

SEQ ID NO: 5880293 - DNA, 25 bp, Homo sapien
gccccgcagggtatttgtaaagatg

SEQ ID NO: 5880294 - DNA, 25 bp, Homo sapien
gaggagctgacggagagcgagaggg

SEQ ID NO: 5880295 - DNA, 25 bp, Homo sapien
cgagaagccctacaagtgcaacctg

SEQ ID NO: 5880296 - DNA, 25 bp, Homo sapien
ccttttgcctcctcgtcggagcact

SEQ ID NO: 5880297 - DNA, 25 bp, Homo sapien
tgctgggcagccccagctcgctgag

SEQ ID NO: 5880298 - DNA, 25 bp, Homo sapien
accagtgcatggtttctcttgcaac

SEQ ID NO: 5880299 - DNA, 25 bp, Homo sapien
cttagagagctggcagggaacacgt

SEQ ID NO: 5880300 - DNA, 25 bp, Homo sapien
gtggtccgggcccgggcaggcccag

SEQ ID NO: 5880301 - DNA, 25 bp, Homo sapien
ccaccgctgtccccaggccggccca

SEQ ID NO: 5880302 - DNA, 25 bp, Homo sapien
gcccaccgctgtccccaggccggcc

SEQ ID NO: 5880303 - DNA, 25 bp, Homo sapien
tccaccgccagctccccggaacccg

SEQ ID NO: 5880304 - DNA, 25 bp, Homo sapien
ctaggagacttagagagctggcagg

SEQ ID NO: 5880305 - DNA, 25 bp, Homo sapien
tcgagagaggcttccggcctggcag

SEQ ID NO: 5880306 - DNA, 25 bp, Homo sapien
gggatgagtgcagaatatgccccgc

SEQ ID NO: 5880307 - DNA, 25 bp, Homo sapien
tgctgcggttgaatccaatggctat

SEQ ID NO: 5880308 - DNA, 25 bp, Homo sapien
caggtcacgccagaggatgacgatt

SEQ ID NO: 5880309 - DNA, 25 bp, Homo sapien
tctctccaccgccagctccccggaa

SEQ ID NO: 5880310 - DNA, 25 bp, Homo sapien
tccagacaatcgccttttgcctcct

SEQ ID NO: 5880311 - DNA, 25 bp, Homo sapien
cgccttttgcctcctcgtcggagca

SEQ ID NO: 5880312 - DNA, 25 bp, Homo sapien
tcaacgtcatctagaggaatttgcc

SEQ ID NO: 5880313 - DNA, 25 bp, Homo sapien
taggtgcagaatgtccttcccagcc

SEQ ID NO: 5880314 - DNA, 25 bp, Homo sapien
cgacggtctctccaccgccagctcc

SEQ ID NO: 5880315 - DNA, 25 bp, Homo sapien
aggaggacgacgaggaagaggaaga

SEQ ID NO: 5880316 - DNA, 25 bp, Homo sapien
atttttatcgagcacaaacggaaac

SEQ ID NO: 5880317 - DNA, 25 bp, Homo sapien
gagagctcaagatgtgtggcagttt

SEQ ID NO: 5880318 - DNA, 25 bp, Homo sapien
tcaaatttcagagcaacctggtggt

SEQ ID NO: 5880319 - DNA, 25 bp, Homo sapien
cccagccacctctccatgggattca

SEQ ID NO: 5880320 - DNA, 25 bp, Homo sapien
cagaacactcatggattaagaatct

SEQ ID NO: 5880321 - DNA, 25 bp, Homo sapien
accgctgtccccaggccggcccagc

SEQ ID NO: 5880322 - DNA, 25 bp, Homo sapien
gcgcggccacctggccgaggccgag

SEQ ID NO: 5880323 - DNA, 25 bp, Homo sapien
ggattcatattgcagacaataaccc

SEQ ID NO: 5880324 - DNA, 25 bp, Homo sapien
ccatggatttctctaggagacttag

SEQ ID NO: 5880325 - DNA, 25 bp, Homo sapien
cacttgcgacgaagactcggtggcc

SEQ ID NO: 5880326 - DNA, 25 bp, Homo sapien
ggtgcaccggcgcagccacacgggc

SEQ ID NO: 5880327 - DNA, 25 bp, Homo sapien
tctccaccgccagctccccggaacc

SEQ ID NO: 5880328 - DNA, 25 bp, Homo sapien
cgcccgagcctcttgaagccattct

SEQ ID NO: 5880329 - DNA, 25 bp, Homo sapien
ggacgacgaggaagaggaagaagag

SEQ ID NO: 5880330 - DNA, 25 bp, Homo sapien
accacggcccgttgggagctccaga

SEQ ID NO: 5880331 - DNA, 25 bp, Homo sapien
cggctacgcggcctccaggcagctc

SEQ ID NO: 5880332 - DNA, 25 bp, Homo sapien
gagccccttctctaagcgcatcaag

SEQ ID NO: 5880333 - DNA, 25 bp, Homo sapien
gcaaaggttactgcaaccattccag

SEQ ID NO: 5880334 - DNA, 25 bp, Homo sapien
agaccacggcccgttgggagctcca

SEQ ID NO: 5880335 - DNA, 25 bp, Homo sapien
tggaggttggcatccaggtcacgcc

SEQ ID NO: 5880336 - DNA, 25 bp, Homo sapien
cgacgccccccctccctcctctgca

SEQ ID NO: 5880337 - DNA, 25 bp, Homo sapien
acggtcaagtccgacgacggtctct

SEQ ID NO: 5880338 - DNA, 25 bp, Homo sapien
cgtctagcccaccgctgtccccagg

SEQ ID NO: 5880339 - DNA, 25 bp, Homo sapien
tggctatggagcctcccgccatgga

SEQ ID NO: 5880340 - DNA, 25 bp, Homo sapien
tgcagaatgtccttcccagccacct

SEQ ID NO: 5880341 - DNA, 25 bp, Homo sapien
gagaacgggagcttgcgcttctcca

SEQ ID NO: 5880342 - DNA, 25 bp, Homo sapien
ggggagctggacggagggatctcgg

SEQ ID NO: 5880343 - DNA, 25 bp, Homo sapien
agttctgcggcaagacgttcaaatt

SEQ ID NO: 5880344 - DNA, 25 bp, Homo sapien
tcctcggagaacgggagcttgcgct

SEQ ID NO: 5880345 - DNA, 25 bp, Homo sapien
caccgccagctccccggaacccggc

SEQ ID NO: 5880346 - DNA, 25 bp, Homo sapien
gcactcctcggagaacgggagcttg

SEQ ID NO: 5880347 - DNA, 25 bp, Homo sapien
cacgggcgagaagccctacaagtgc

SEQ ID NO: 5880348 - DNA, 25 bp, Homo sapien
atttgccccaaacaggaacacatag

SEQ ID NO: 5880349 - DNA, 25 bp, Homo sapien
ctcggggggcctgtccaaaaagctg

SEQ ID NO: 5880350 - DNA, 25 bp, Homo sapien
gagggccacagggacacttgcgacg

SEQ ID NO: 5880351 - DNA, 25 bp, Homo sapien
acacttgttcttcacacacccccat

SEQ ID NO: 5880352 - DNA, 25 bp, Homo sapien
ctcgctgagccccttctctaagcgc

SEQ ID NO: 5880353 - DNA, 25 bp, Homo sapien
gccggcccagccctatgcaaaggtt

SEQ ID NO: 5880354 - DNA, 25 bp, Homo sapien
ccaaaaagctgctgctgggcagccc

SEQ ID NO: 5880355 - DNA, 25 bp, Homo sapien
gtccccaggccggcccagccctatg

SEQ ID NO: 5880356 - DNA, 25 bp, Homo sapien
ggatgacgattgtttatcaacgtca

SEQ ID NO: 5880357 - DNA, 25 bp, Homo sapien
cccccaccgcatagagcgcctgggg

SEQ ID NO: 5880358 - DNA, 25 bp, Homo sapien
gagcgagagggtggactacggcttc

SEQ ID NO: 5880359 - DNA, 25 bp, Homo sapien
caccggcgcagccacacgggcgaga

SEQ ID NO: 5880360 - DNA, 25 bp, Homo sapien
cgcagccacacgggcgagaagccct

SEQ ID NO: 5880361 - DNA, 25 bp, Homo sapien
ggagcacgccccatattagtggtcc

SEQ ID NO: 5880362 - DNA, 25 bp, Homo sapien
gagaaggagttcgacctgcccccgg

SEQ ID NO: 5880363 - DNA, 25 bp, Homo sapien
ggccgaggccgagggccacagggac

SEQ ID NO: 5880364 - DNA, 25 bp, Homo sapien
attcttatttttatcgagcacaaac

SEQ ID NO: 5880365 - DNA, 25 bp, Homo sapien
ccagccctatgcaaaggttactgca

SEQ ID NO: 5880366 - DNA, 25 bp, Homo sapien
ccggggagctggacggagggatctc

SEQ ID NO: 5880367 - DNA, 25 bp, Homo sapien
ttgttcttcacacacccccattcgg

SEQ ID NO: 5880368 - DNA, 25 bp, Homo sapien
cgcatcaagctcgagaaggagttcg

SEQ ID NO: 5880369 - DNA, 25 bp, Homo sapien
ccgcaagcaaggcaaaccccagcac

SEQ ID NO: 5880370 - DNA, 25 bp, Homo sapien
ggctgagcctggaggcggcgcgcca

SEQ ID NO: 5880371 - DNA, 25 bp, Homo sapien
acccggcaccagcgacttggtgggc

SEQ ID NO: 5880372 - DNA, 25 bp, Homo sapien
gtgcgaccacgcgtgcacccaggcc

SEQ ID NO: 5880373 - DNA, 25 bp, Homo sapien
cccggccgcgatgcccaacacggag

SEQ ID NO: 5880374 - DNA, 25 bp, Homo sapien
aagcaaggcaaaccccagcacttaa

SEQ ID NO: 5880375 - DNA, 25 bp, Homo sapien
gcctcccgccatggatttctctagg

SEQ ID NO: 5880376 - DNA, 25 bp, Homo sapien
gctatggagcctcccgccatggatt

SEQ ID NO: 5880377 - DNA, 25 bp, Homo sapien
ggacgaggaggaagaggaggacgac

SEQ ID NO: 5880378 - DNA, 25 bp, Homo sapien
tggagctctaatccccacgcctggg

SEQ ID NO: 5880379 - DNA, 25 bp, Homo sapien
aggaagaggaggacgacgaggaaga

SEQ ID NO: 5880380 - DNA, 25 bp, Homo sapien
gaatgtccttcccagccacctctcc

SEQ ID NO: 5880381 - DNA, 25 bp, Homo sapien
gcgccacatgaagacgcacatgcac

SEQ ID NO: 5880382 - DNA, 25 bp, Homo sapien
ctcccgccatggatttctctaggag

SEQ ID NO: 5880383 - DNA, 25 bp, Homo sapien
cttagaaaaagctgtggataagcca

SEQ ID NO: 5880384 - DNA, 25 bp, Homo sapien
tctacttagaaagcgaacacggaag

SEQ ID NO: 5880385 - DNA, 25 bp, Homo sapien
aaggcaaaccccagcacttaagcaa

SEQ ID NO: 5880386 - DNA, 25 bp, Homo sapien
gaagccattcttacagatgatgaac

SEQ ID NO: 5880387 - DNA, 25 bp, Homo sapien
tgtttatcaacgtcatctagaggaa

SEQ ID NO: 5880388 - DNA, 25 bp, Homo sapien
gaccacgcgtgcacccaggccagca

SEQ ID NO: 5880389 - DNA, 25 bp, Homo sapien
ctgggatgagtgcagaatatgcccc

SEQ ID NO: 5880390 - DNA, 25 bp, Homo sapien
caccagcgacttggtgggcagcgcc

SEQ ID NO: 5880391 - DNA, 25 bp, Homo sapien
tccaggtcacgccagaggatgacga

SEQ ID NO: 5880392 - DNA, 25 bp, Homo sapien
cccctcgttctgcacatggagctct

SEQ ID NO: 5880393 - DNA, 25 bp, Homo sapien
gcagggcatggtgctcagctccatg

SEQ ID NO: 5880394 - DNA, 25 bp, Homo sapien
tcgacctgcccccggccgcgatgcc

SEQ ID NO: 5880395 - DNA, 25 bp, Homo sapien
cctcctctgcaatccgcccctcctc

SEQ ID NO: 5880396 - DNA, 25 bp, Homo sapien
gctacacatgtacaacttgcaaaca

SEQ ID NO: 5880397 - DNA, 25 bp, Homo sapien
ccgaggccgagggccacagggacac

SEQ ID NO: 5880398 - DNA, 25 bp, Homo sapien
ctggccacccatcacccgagtgcct

SEQ ID NO: 5880399 - DNA, 25 bp, Homo sapien
cccgccatggatttctctaggagac

SEQ ID NO: 5880400 - DNA, 25 bp, Homo sapien
ccagcagctacacatgtacaacttg

SEQ ID NO: 5880401 - DNA, 25 bp, Homo sapien
gcgtgcacccaggccagcaagctga

SEQ ID NO: 5880402 - DNA, 25 bp, Homo sapien
cgatgcccaacacggagaacgtgta

SEQ ID NO: 5880403 - DNA, 25 bp, Homo sapien
cagccacacgggcgagaagccctac

SEQ ID NO: 5880404 - DNA, 25 bp, Homo sapien
accgagacatcacttggacccccac

SEQ ID NO: 5880405 - DNA, 25 bp, Homo sapien
cggcctggcagaagggcgctttcca

SEQ ID NO: 5880406 - DNA, 25 bp, Homo sapien
tagcagataaacttctgcactggag

SEQ ID NO: 5880407 - DNA, 25 bp, Homo sapien
gcaaggcaaaccccagcacttaagc

SEQ ID NO: 5880408 - DNA, 25 bp, Homo sapien
gcgaccacgcgtgcacccaggccag

SEQ ID NO: 5880409 - DNA, 25 bp, Homo sapien
gccgcccttcctggcgacgcccccc

SEQ ID NO: 5880410 - DNA, 25 bp, Homo sapien
gcgctttccacccactccccccctg

SEQ ID NO: 5880411 - DNA, 25 bp, Homo sapien
tggacccccaccgcatagagcgcct

SEQ ID NO: 5880412 - DNA, 25 bp, Homo sapien
acccatcacccgagtgcctttgaca

SEQ ID NO: 5880413 - DNA, 25 bp, Homo sapien
tctccatgggattcatattgcagac

SEQ ID NO: 5880414 - DNA, 25 bp, Homo sapien
gccagcaagctgaagcgccacatga

SEQ ID NO: 5880415 - DNA, 25 bp, Homo sapien
agcacttaagcaaacgggaattctc

SEQ ID NO: 5880416 - DNA, 25 bp, Homo sapien
gctggacggagggatctcggggcgc

SEQ ID NO: 5880417 - DNA, 25 bp, Homo sapien
cggagaacgtgtactcgcagtggct

SEQ ID NO: 5880418 - DNA, 25 bp, Homo sapien
cgaggccttccaccaggtcctgggc

SEQ ID NO: 5880419 - DNA, 25 bp, Homo sapien
ctgtttagtccaccaccgagacatc

SEQ ID NO: 5880420 - DNA, 25 bp, Homo sapien
acgcagcgacacttgttcttcacac

SEQ ID NO: 5880421 - DNA, 25 bp, Homo sapien
cttccaccaggtcctgggcgagaag

SEQ ID NO: 5880422 - DNA, 25 bp, Homo sapien
cctccctcctctgcaatccgcccct

SEQ ID NO: 5880423 - DNA, 25 bp, Homo sapien
aattctcgcccgagcctcttgaagc

SEQ ID NO: 5880424 - DNA, 25 bp, Homo sapien
aggaggagctgacggagagcgagag

SEQ ID NO: 5880425 - DNA, 25 bp, Homo sapien
ccaacacggagaacgtgtactcgca

SEQ ID NO: 5880426 - DNA, 25 bp, Homo sapien
cctctccatgggattcatattgcag

SEQ ID NO: 5880427 - DNA, 25 bp, Homo sapien
aagcgccacatgaagacgcacatgc

SEQ ID NO: 5880428 - DNA, 25 bp, Homo sapien
agacatcacttggacccccaccgca

SEQ ID NO: 5880429 - DNA, 25 bp, Homo sapien
tacaacttgcaaacagccattcacc

SEQ ID NO: 5880430 - DNA, 25 bp, Homo sapien
acgacgaggaagaggaagaagagga

SEQ ID NO: 5880431 - DNA, 25 bp, Homo sapien
cagcagcgcgctcaagtccgtggtg

SEQ ID NO: 5880432 - DNA, 25 bp, Homo sapien
gttactgcaaccattccagccaggt

SEQ ID NO: 5880433 - DNA, 25 bp, Homo sapien
gaatccaatggctatggagcctccc

SEQ ID NO: 5880434 - DNA, 25 bp, Homo sapien
ggcaaaccccagcacttaagcaaac

SEQ ID NO: 5880435 - DNA, 25 bp, Homo sapien
agtatcgagagaggcttccggcctg

SEQ ID NO: 5880436 - DNA, 25 bp, Homo sapien
aggatcagtatcgagagaggcttcc

SEQ ID NO: 5880437 - DNA, 25 bp, Homo sapien
ggcgcgccaccacgagaacagctcg

SEQ ID NO: 5880438 - DNA, 25 bp, Homo sapien
ctggcagaagggcgctttccaccca

SEQ ID NO: 5880439 - DNA, 25 bp, Homo sapien
agctgctgctgggcagccccagctc

SEQ ID NO: 5880440 - DNA, 25 bp, Homo sapien
cagctacacatgtacaacttgcaaa

SEQ ID NO: 5880441 - DNA, 25 bp, Homo sapien
ccccggtcaagtccaagtcatgcga

SEQ ID NO: 5880442 - DNA, 25 bp, Homo sapien
caggaacacatagcagataaacttc

SEQ ID NO: 5880443 - DNA, 25 bp, Homo sapien
cctcacctgtgggcagtgccagatg

SEQ ID NO: 5880444 - DNA, 25 bp, Homo sapien
cacatgtacaacttgcaaacagcca

SEQ ID NO: 5880445 - DNA, 25 bp, Homo sapien
acttctgcactggaggggcctctcc

SEQ ID NO: 5880446 - DNA, 25 bp, Homo sapien
ggtccgggcccgggcaggcccagct

SEQ ID NO: 5880447 - DNA, 25 bp, Homo sapien
ccttccttagcttcggagactccag

SEQ ID NO: 5880448 - DNA, 25 bp, Homo sapien
tccaccaccgagacatcacttggac

SEQ ID NO: 5880449 - DNA, 25 bp, Homo sapien
tgcaccggcgcagccacacgggcga

SEQ ID NO: 5880450 - DNA, 25 bp, Homo sapien
cgtggtggccaagttcaagagcgag

SEQ ID NO: 5880451 - DNA, 25 bp, Homo sapien
gaccccaacctgatcccggagaacg

SEQ ID NO: 5880452 - DNA, 25 bp, Homo sapien
cgcgccaccacgagaacagctcgcg

SEQ ID NO: 5880453 - DNA, 25 bp, Homo sapien
gcagcgcgctcaagtccgtggtggc

SEQ ID NO: 5880454 - DNA, 25 bp, Homo sapien
ctgagcctggaggcggcgcgccacc

SEQ ID NO: 5880455 - DNA, 25 bp, Homo sapien
atgatgaaccagaccacggcccgtt

SEQ ID NO: 5880456 - DNA, 25 bp, Homo sapien
ggtgggcagcgccagcagcgcgctc

SEQ ID NO: 5880457 - DNA, 25 bp, Homo sapien
aggaatttgccccaaacaggaacac

SEQ ID NO: 5880458 - DNA, 25 bp, Homo sapien
gacgacggtctctccaccgccagct

SEQ ID NO: 5880459 - DNA, 25 bp, Homo sapien
tggccgcggctgctccccgggcgag

SEQ ID NO: 5880460 - DNA, 25 bp, Homo sapien
tgcacatggagctctaatccccacg

SEQ ID NO: 5880461 - DNA, 25 bp, Homo sapien
acaccgcccggggagctggacggag

SEQ ID NO: 5880462 - DNA, 25 bp, Homo sapien
gcccagcagctacacatgtacaact

SEQ ID NO: 5880463 - DNA, 25 bp, Homo sapien
ttctcgcccgagcctcttgaagcca

SEQ ID NO: 5880464 - DNA, 25 bp, Homo sapien
aacgtcatctagaggaatttgcccc

SEQ ID NO: 5880465 - DNA, 25 bp, Homo sapien
ctgtgcgaccacgcgtgcacccagg

SEQ ID NO: 5880466 - DNA, 25 bp, Homo sapien
gaaaaagctgtggataagccacctt

SEQ ID NO: 5880467 - DNA, 25 bp, Homo sapien
cgctcaagtccgtggtggccaagtt

SEQ ID NO: 5880468 - DNA, 25 bp, Homo sapien
tcggagactccagacaatcgccttt

SEQ ID NO: 5880469 - DNA, 25 bp, Homo sapien
cattcggcgtagtacccagagagct

SEQ ID NO: 5880470 - DNA, 25 bp, Homo sapien
cgagtgcctttgacagggtgctgcg

SEQ ID NO: 5880471 - DNA, 25 bp, Homo sapien
gctgtggataagccaccttcccctt

SEQ ID NO: 5880472 - DNA, 25 bp, Homo sapien
cggcgtagtacccagagagctcaag

SEQ ID NO: 5880473 - DNA, 25 bp, Homo sapien
tctcggggcgcagcggcacgggaag

SEQ ID NO: 5880474 - DNA, 25 bp, Homo sapien
gtgggcagtgccagatgaacttccc

SEQ ID NO: 5880475 - DNA, 25 bp, Homo sapien
tcccttcaggactaggtgcagaatg

SEQ ID NO: 5880476 - DNA, 25 bp, Homo sapien
cagccaggtagcaagccgcccttcc

SEQ ID NO: 5880477 - DNA, 25 bp, Homo sapien
agccattcaccagtgcatggtttct

SEQ ID NO: 5880478 - DNA, 25 bp, Homo sapien
ttggtgggcagcgccagcagcgcgc

SEQ ID NO: 5880479 - DNA, 25 bp, Homo sapien
cacatagcagataaacttctgcact

SEQ ID NO: 5880480 - DNA, 25 bp, Homo sapien
acgttcaaatttcagagcaacctgg

SEQ ID NO: 5880481 - DNA, 25 bp, Homo sapien
aggagacttagagagctggcaggga

SEQ ID NO: 5880482 - DNA, 25 bp, Homo sapien
ggaagtggagggagcacgccccata

SEQ ID NO: 5880483 - DNA, 25 bp, Homo sapien
tcaagtccaagtcatgcgagttctg

SEQ ID NO: 5880484 - DNA, 25 bp, Homo sapien
tggagcctcccgccatggatttctc

SEQ ID NO: 5880485 - DNA, 25 bp, Homo sapien
gccgcgatgcccaacacggagaacg

SEQ ID NO: 5880486 - DNA, 25 bp, Homo sapien
gcactggaggggcctctcctcccct

SEQ ID NO: 5880487 - DNA, 25 bp, Homo sapien
cgcgctcaagtccgtggtggccaag

SEQ ID NO: 5880488 - DNA, 25 bp, Homo sapien
gcggcaagacgttcaaatttcagag

SEQ ID NO: 5880489 - DNA, 25 bp, Homo sapien
aacctggtggtgcaccggcgcagcc

SEQ ID NO: 5880490 - DNA, 25 bp, Homo sapien
gttctgcacatggagctctaatccc

SEQ ID NO: 5880491 - DNA, 25 bp, Homo sapien
cccaccgcatagagcgcctgggggc

SEQ ID NO: 5880492 - DNA, 25 bp, Homo sapien
tcatctagaggaatttgccccaaac

SEQ ID NO: 5880493 - DNA, 25 bp, Homo sapien
gccccccctccctcctctgcaatcc

SEQ ID NO: 5880494 - DNA, 25 bp, Homo sapien
cttagaaagcgaacacggaagtccc

SEQ ID NO: 5880495 - DNA, 25 bp, Homo sapien
gacccccaccgcatagagcgcctgg

SEQ ID NO: 5880496 - DNA, 25 bp, Homo sapien
cttcaccaatcgagatgaaaaaagc

SEQ ID NO: 5880497 - DNA, 25 bp, Homo sapien
tacacatgtacaacttgcaaacagc

SEQ ID NO: 5880498 - DNA, 25 bp, Homo sapien
cccttctctaagcgcatcaagctcg

SEQ ID NO: 5880499 - DNA, 25 bp, Homo sapien
aggaggaggaggagctgacggagag

SEQ ID NO: 5880500 - DNA, 25 bp, Homo sapien
gcaacctggtggtgcaccggcgcag

SEQ ID NO: 5880501 - DNA, 25 bp, Homo sapien
gctgaagcgccacatgaagacgcac

SEQ ID NO: 5880502 - DNA, 25 bp, Homo sapien
ggggcggaagagatggccctggcca

SEQ ID NO: 5880503 - DNA, 25 bp, Homo sapien
ccattcttacagatgatgaaccaga

SEQ ID NO: 5880504 - DNA, 25 bp, Homo sapien
atcgagcacaaacggaaacaatgca

SEQ ID NO: 5880505 - DNA, 25 bp, Homo sapien
ttgtaaagatgagcccagcagctac

SEQ ID NO: 5880506 - DNA, 25 bp, Homo sapien
gagctcaagatgtgtggcagttttc

SEQ ID NO: 5880507 - DNA, 25 bp, Homo sapien
aagccctacaagtgcaacctgtgcg

SEQ ID NO: 5880508 - DNA, 25 bp, Homo sapien
agtacccagagagctcaagatgtgt

SEQ ID NO: 5880509 - DNA, 25 bp, Homo sapien
gacaataacccctttaacctgctaa

SEQ ID NO: 5880510 - DNA, 25 bp, Homo sapien
cccccatgacggtcaagtccgacga

SEQ ID NO: 5880511 - DNA, 25 bp, Homo sapien
ccgacgacggtctctccaccgccag

SEQ ID NO: 5880512 - DNA, 25 bp, Homo sapien
agctgacggagagcgagagggtgga

SEQ ID NO: 5880513 - DNA, 25 bp, Homo sapien
tgcagaatatgccccgcagggtatt

SEQ ID NO: 5880514 - DNA, 25 bp, Homo sapien
gaaggagttcgacctgcccccggcc

SEQ ID NO: 5880515 - DNA, 25 bp, Homo sapien
caagacgttcaaatttcagagcaac

SEQ ID NO: 5880516 - DNA, 25 bp, Homo sapien
gcgagagggtggactacggcttcgg

SEQ ID NO: 5880517 - DNA, 25 bp, Homo sapien
ttagtccaccaccgagacatcactt

SEQ ID NO: 5880518 - DNA, 25 bp, Homo sapien
gcgcttctccacaccgcccggggag

SEQ ID NO: 5880519 - DNA, 25 bp, Homo sapien
ctgcaatccgcccctcctccctccc

SEQ ID NO: 5880520 - DNA, 25 bp, Homo sapien
cacctctccatgggattcatattgc

SEQ ID NO: 5880521 - DNA, 25 bp, Homo sapien
atgcagcacttcagcgaggccttcc

SEQ ID NO: 5880522 - DNA, 25 bp, Homo sapien
agtggctcgccggctacgcggcctc

SEQ ID NO: 5880523 - DNA, 25 bp, Homo sapien
atgagcccagcagctacacatgtac

SEQ ID NO: 5880524 - DNA, 25 bp, Homo sapien
ccaggccagcaagctgaagcgccac

SEQ ID NO: 5880525 - DNA, 25 bp, Homo sapien
atcacccgagtgcctttgacagggt

SEQ ID NO: 5880526 - DNA, 25 bp, Homo sapien
gcgaacacggaagtcccctgacccc

SEQ ID NO: 5880527 - DNA, 25 bp, Homo sapien
aggtcctgggcgagaagcataagcg

SEQ ID NO: 5880528 - DNA, 25 bp, Homo sapien
cccgtggaggttggcatccaggtca

SEQ ID NO: 5880529 - DNA, 25 bp, Homo sapien
cggaaacaatgcaatggcagcctct

SEQ ID NO: 5880530 - DNA, 25 bp, Homo sapien
ccgttgggagctccagaaggggatc

SEQ ID NO: 5880531 - DNA, 25 bp, Homo sapien
tccaccaggtcctgggcgagaagca

SEQ ID NO: 5880532 - DNA, 25 bp, Homo sapien
cagaatgtccttcccagccacctct

SEQ ID NO: 5880533 - DNA, 25 bp, Homo sapien
aatggcagcctctgcttagaaaaag

SEQ ID NO: 5880534 - DNA, 25 bp, Homo sapien
gaacgaccccaacctgatcccggag

SEQ ID NO: 5880535 - DNA, 25 bp, Homo sapien
atttgtaaagatgagcccagcagct

SEQ ID NO: 5880536 - DNA, 25 bp, Homo sapien
agggcatggtgctcagctccatgca

SEQ ID NO: 5880537 - DNA, 25 bp, Homo sapien
agctcgctgagccccttctctaagc

SEQ ID NO: 5880538 - DNA, 25 bp, Homo sapien
ctggaggcggcgcgccaccacgaga

SEQ ID NO: 5880539 - DNA, 25 bp, Homo sapien
cgagacatcacttggacccccaccg

SEQ ID NO: 5880540 - DNA, 25 bp, Homo sapien
atgaaaaaagcatccaatcccgtgg

SEQ ID NO: 5880541 - DNA, 25 bp, Homo sapien
ccaccttccccttcaccaatcgaga

SEQ ID NO: 5880542 - DNA, 25 bp, Homo sapien
gctcaagatgtgtggcagttttcgg

SEQ ID NO: 5880543 - DNA, 25 bp, Homo sapien
ccaggtcctgggcgagaagcataag

SEQ ID NO: 5880544 - DNA, 25 bp, Homo sapien
gctctaatccccacgcctgggatga

SEQ ID NO: 5880545 - DNA, 25 bp, Homo sapien
gccagctccccggaacccggcacca

SEQ ID NO: 5880546 - DNA, 25 bp, Homo sapien
agacgttcaaatttcagagcaacct

SEQ ID NO: 5880547 - DNA, 25 bp, Homo sapien
tgggcgagaagcataagcgcggcca

SEQ ID NO: 5880548 - DNA, 25 bp, Homo sapien
ggttgaatccaatggctatggagcc

SEQ ID NO: 5880549 - DNA, 25 bp, Homo sapien
aacaatgcaatggcagcctctgctt

SEQ ID NO: 5880550 - DNA, 25 bp, Homo sapien
ataaacttctgcactggaggggcct

SEQ ID NO: 5880551 - DNA, 25 bp, Homo sapien
gttgggagctccagaaggggatcat

SEQ ID NO: 5880552 - DNA, 25 bp, Homo sapien
gtccttcccagccacctctccatgg

SEQ ID NO: 5880553 - DNA, 25 bp, Homo sapien
gctgctccccgggcgagtcggcctc

SEQ ID NO: 5880554 - DNA, 25 bp, Homo sapien
gctcgcggggcgcggtcgtgggcgt

SEQ ID NO: 5880555 - DNA, 25 bp, Homo sapien
cccccctccctcctctgcaatccgc

SEQ ID NO: 5880556 - DNA, 25 bp, Homo sapien
caggcccagctcaaaagagggcaga

SEQ ID NO: 5880557 - DNA, 25 bp, Homo sapien
gttcaagagcgagaacgaccccaac

SEQ ID NO: 5880558 - DNA, 25 bp, Homo sapien
ggtcaagtccaagtcatgcgagttc

SEQ ID NO: 5880559 - DNA, 25 bp, Homo sapien
cagaagggcgctttccacccactcc

SEQ ID NO: 5880560 - DNA, 25 bp, Homo sapien
ccccctgtttagtccaccaccgaga

SEQ ID NO: 5880561 - DNA, 25 bp, Homo sapien
atttctctaggagacttagagagct

SEQ ID NO: 5880562 - DNA, 25 bp, Homo sapien
gatggaagctcgagagcccttaagt

SEQ ID NO: 5880563 - DNA, 25 bp, Homo sapien
cggatggaagctcgagagcccttaa

SEQ ID NO: 5880564 - DNA, 25 bp, Homo sapien
atcccgtggaggttggcatccaggt

SEQ ID NO: 5880565 - DNA, 25 bp, Homo sapien
cccagcccccggtcaagtccaagtc

SEQ ID NO: 5880566 - DNA, 25 bp, Homo sapien
ggattaagaatctacttagaaagcg

SEQ ID NO: 5880567 - DNA, 25 bp, Homo sapien
ggaggaagaggaggacgacgaggaa

SEQ ID NO: 5880568 - DNA, 25 bp, Homo sapien
gtgcacccaggccagcaagctgaag

SEQ ID NO: 5880569 - DNA, 25 bp, Homo sapien
catggtgctcagctccatgcagcac

SEQ ID NO: 5880570 - DNA, 25 bp, Homo sapien
agaataccaggatcagtatcgagag

SEQ ID NO: 5880571 - DNA, 25 bp, Homo sapien
actgttaatggccgcggctgctccc

SEQ ID NO: 5880572 - DNA, 25 bp, Homo sapien
tcctccctcccagcccccggtcaag

SEQ ID NO: 5880573 - DNA, 25 bp, Homo sapien
acttgttcttcacacacccccattc

SEQ ID NO: 5880574 - DNA, 25 bp, Homo sapien
cctgcccccggccgcgatgcccaac

SEQ ID NO: 5880575 - DNA, 25 bp, Homo sapien
ctgggcagccccagctcgctgagcc

SEQ ID NO: 5880576 - DNA, 25 bp, Homo sapien
acgggagcttgcgcttctccacacc

SEQ ID NO: 5880577 - DNA, 25 bp, Homo sapien
tccgggcccgggcaggcccagctca

SEQ ID NO: 5880578 - DNA, 25 bp, Homo sapien
agcgcgctcaagtccgtggtggcca

SEQ ID NO: 5880579 - DNA, 25 bp, Homo sapien
gccctacaagtgcaacctgtgcgac

SEQ ID NO: 5880580 - DNA, 25 bp, Homo sapien
ggtatcccttcaggactaggtgcag

SEQ ID NO: 5880581 - DNA, 25 bp, Homo sapien
ccaggccggcccagccctatgcaaa

SEQ ID NO: 5880582 - DNA, 25 bp, Homo sapien
aaccattccagccaggtagcaagcc

SEQ ID NO: 5880583 - DNA, 25 bp, Homo sapien
ttagcttcggagactccagacaatc

SEQ ID NO: 5880584 - DNA, 25 bp, Homo sapien
tacggcttcgggctgagcctggagg

SEQ ID NO: 5880585 - DNA, 25 bp, Homo sapien
gagtcggaccgcatagacgatggca

SEQ ID NO: 5880586 - DNA, 25 bp, Homo sapien
ctctaggagacttagagagctggca

SEQ ID NO: 5880587 - DNA, 25 bp, Homo sapien
gatggcactgttaatggccgcggct

SEQ ID NO: 5880588 - DNA, 25 bp, Homo sapien
cagcggcacgggaagtggagggagc

SEQ ID NO: 5880589 - DNA, 25 bp, Homo sapien
ggcacgggaagtggagggagcacgc

SEQ ID NO: 5880590 - DNA, 25 bp, Homo sapien
catgaagacgcacatgcacaaatcg

SEQ ID NO: 5880591 - DNA, 25 bp, Homo sapien
ccacctggccgaggccgagggccac

SEQ ID NO: 5880592 - DNA, 25 bp, Homo sapien
gagacttagagagctggcagggaac

SEQ ID NO: 5880593 - DNA, 25 bp, Homo sapien
cttccggcctggcagaagggcgctt

SEQ ID NO: 5880594 - DNA, 25 bp, Homo sapien
gtcatgcgagttctgcggcaagacg

SEQ ID NO: 5880595 - DNA, 25 bp, Homo sapien
ggggacattcttatttttatcgagc

SEQ ID NO: 5880596 - DNA, 25 bp, Homo sapien
ccccagcacttaagcaaacgggaat

SEQ ID NO: 5880597 - DNA, 25 bp, Homo sapien
acctgctaagaataccaggatcagt

SEQ ID NO: 5880598 - DNA, 25 bp, Homo sapien
tacaagtgcaacctgtgcgaccacg

SEQ ID NO: 5880599 - DNA, 25 bp, Homo sapien
atagacgatggcactgttaatggcc

SEQ ID NO: 5880600 - DNA, 25 bp, Homo sapien
ccagctcgctgagccccttctctaa

SEQ ID NO: 5880601 - DNA, 25 bp, Homo sapien
tgagtgcagaatatgccccgcaggg

SEQ ID NO: 5880602 - DNA, 25 bp, Homo sapien
agaatctacttagaaagcgaacacg

SEQ ID NO: 5880603 - DNA, 25 bp, Homo sapien
taatccccacgcctgggatgagtgc

SEQ ID NO: 5880604 - DNA, 25 bp, Homo sapien
gagttcgacctgcccccggccgcga

SEQ ID NO: 5880605 - DNA, 25 bp, Homo sapien
gtccaaaaagctgctgctgggcagc

SEQ ID NO: 5880606 - DNA, 25 bp, Homo sapien
cacgcacagaacactcatggattaa

SEQ ID NO: 5880607 - DNA, 25 bp, Homo sapien
tcaagatgtgtggcagttttcggat

SEQ ID NO: 5880608 - DNA, 25 bp, Homo sapien
attaagaatctacttagaaagcgaa

SEQ ID NO: 5880609 - DNA, 25 bp, Homo sapien
tagtggtccgggcccgggcaggccc

SEQ ID NO: 5880610 - DNA, 25 bp, Homo sapien
ggggcctctcctcccctcgttctgc

SEQ ID NO: 5880611 - DNA, 25 bp, Homo sapien
tcatggattaagaatctacttagaa

SEQ ID NO: 5880612 - DNA, 25 bp, Homo sapien
gatgagtgcagaatatgccccgcag

SEQ ID NO: 5880613 - DNA, 25 bp, Homo sapien
gcccgttgggagctccagaagggga

SEQ ID NO: 5880614 - DNA, 25 bp, Homo sapien
ggtttctcttgcaacacgcacagaa

SEQ ID NO: 5880615 - DNA, 25 bp, Homo sapien
ccaatggctatggagcctcccgcca

SEQ ID NO: 5880616 - DNA, 25 bp, Homo sapien
catgcacaaatcgtcccccatgacg

SEQ ID NO: 5880617 - DNA, 25 bp, Homo sapien
tgctccccgggcgagtcggcctcgg

SEQ ID NO: 5880618 - DNA, 25 bp, Homo sapien
ctgcggttgaatccaatggctatgg

SEQ ID NO: 5880619 - DNA, 25 bp, Homo sapien
aaagcatccaatcccgtggaggttg

SEQ ID NO: 5880620 - DNA, 25 bp, Homo sapien
gccacacgggcgagaagccctacaa

SEQ ID NO: 5880621 - DNA, 25 bp, Homo sapien
agcacttcagcgaggccttccacca

SEQ ID NO: 5880622 - DNA, 25 bp, Homo sapien
cagcgccagcagcgcgctcaagtcc

SEQ ID NO: 5880623 - DNA, 25 bp, Homo sapien
tcggggcgcagcggcacgggaagtg

SEQ ID NO: 5880624 - DNA, 25 bp, Homo sapien
agccattcttacagatgatgaacca

SEQ ID NO: 5880625 - DNA, 25 bp, Homo sapien
aaagctgctgctgggcagccccagc

SEQ ID NO: 5880626 - DNA, 25 bp, Homo sapien
agaggaggaggaggagctgacggag

SEQ ID NO: 5880627 - DNA, 25 bp, Homo sapien
tctctaagcgcatcaagctcgagaa

SEQ ID NO: 5880628 - DNA, 25 bp, Homo sapien
gctacgcggcctccaggcagctcaa

SEQ ID NO: 5880629 - DNA, 25 bp, Homo sapien
ttgaatccaatggctatggagcctc

SEQ ID NO: 5880630 - DNA, 25 bp, Homo sapien
cccgcagggtatttgtaaagatgag

SEQ ID NO: 5880631 - DNA, 25 bp, Homo sapien
gtagtacccagagagctcaagatgt

SEQ ID NO: 5880632 - DNA, 25 bp, Homo sapien
gggcctgtccaaaaagctgctgctg

SEQ ID NO: 5880633 - DNA, 25 bp, Homo sapien
ttttgcctcctcgtcggagcactcc

SEQ ID NO: 5880634 - DNA, 25 bp, Homo sapien
ccacccatcacccgagtgcctttga

SEQ ID NO: 5880635 - DNA, 25 bp, Homo sapien
aggccagcaagctgaagcgccacat

SEQ ID NO: 5880636 - DNA, 25 bp, Homo sapien
gcgtagtacccagagagctcaagat

SEQ ID NO: 5880637 - DNA, 25 bp, Homo sapien
gcaatccgcccctcctccctcccag

SEQ ID NO: 5880638 - DNA, 25 bp, Homo sapien
gtgcatggtttctcttgcaacacgc

SEQ ID NO: 5880639 - DNA, 25 bp, Homo sapien
ttttatcgagcacaaacggaaacaa

SEQ ID NO: 5880640 - DNA, 25 bp, Homo sapien
ggaattctcgcccgagcctcttgaa

SEQ ID NO: 5880641 - DNA, 25 bp, Homo sapien
cccgagtgcctttgacagggtgctg

SEQ ID NO: 5880642 - DNA, 25 bp, Homo sapien
ctggcgacgccccccctccctcctc

SEQ ID NO: 5880643 - DNA, 25 bp, Homo sapien
tgggattcatattgcagacaataac

SEQ ID NO: 5880644 - DNA, 25 bp, Homo sapien
gaagaggaggaggaggagctgacgg

SEQ ID NO: 5880645 - DNA, 25 bp, Homo sapien
ggggatcatgacctcctcacctgtg

SEQ ID NO: 5880646 - DNA, 25 bp, Homo sapien
tcgtcccccatgacggtcaagtccg

SEQ ID NO: 5880647 - DNA, 25 bp, Homo sapien
gagccgcgccctgcccgacgtcatg

SEQ ID NO: 5880648 - DNA, 25 bp, Homo sapien
accttccccttcaccaatcgagatg

SEQ ID NO: 5880649 - DNA, 25 bp, Homo sapien
gggcagccccagctcgctgagcccc

SEQ ID NO: 5880650 - DNA, 25 bp, Homo sapien
ctccacaccgcccggggagctggac

SEQ ID NO: 5880651 - DNA, 25 bp, Homo sapien
atcgccttttgcctcctcgtcggag

SEQ ID NO: 5880652 - DNA, 25 bp, Homo sapien
gacaatcgccttttgcctcctcgtc

SEQ ID NO: 5880653 - DNA, 25 bp, Homo sapien
catgtacaacttgcaaacagccatt

SEQ ID NO: 5880654 - DNA, 25 bp, Homo sapien
tgtgtggcagttttcggatggaagc

SEQ ID NO: 5880655 - DNA, 25 bp, Homo sapien
agatgaaaaaagcatccaatcccgt

SEQ ID NO: 5880656 - DNA, 25 bp, Homo sapien
cgcggctgctccccgggcgagtcgg

SEQ ID NO: 5880657 - DNA, 25 bp, Homo sapien
cccaaacaggaacacatagcagata

SEQ ID NO: 5880658 - DNA, 25 bp, Homo sapien
cgccatggatttctctaggagactt

SEQ ID NO: 5880659 - DNA, 25 bp, Homo sapien
tgacagggtgctgcggttgaatcca

SEQ ID NO: 5880660 - DNA, 25 bp, Homo sapien
tggcagggaacacgtctagcccacc

SEQ ID NO: 5880661 - DNA, 25 bp, Homo sapien
aaaaagcatccaatcccgtggaggt

SEQ ID NO: 5880662 - DNA, 25 bp, Homo sapien
ggtgcagaatgtccttcccagccac

SEQ ID NO: 5880663 - DNA, 25 bp, Homo sapien
gagcctggaggcggcgcgccaccac

SEQ ID NO: 5880664 - DNA, 25 bp, Homo sapien
ctgcactggaggggcctctcctccc

SEQ ID NO: 5880665 - DNA, 25 bp, Homo sapien
agcttcggagactccagacaatcgc

SEQ ID NO: 5880666 - DNA, 25 bp, Homo sapien
gcaagctgaagcgccacatgaagac

SEQ ID NO: 5880667 - DNA, 25 bp, Homo sapien
aaaaagctgctgctgggcagcccca

SEQ ID NO: 5880668 - DNA, 25 bp, Homo sapien
acgaggaggaagaggaggacgacga

SEQ ID NO: 5880669 - DNA, 25 bp, Homo sapien
tccccggaacccggcaccagcgact

SEQ ID NO: 5880670 - DNA, 25 bp, Homo sapien
ggttggcatccaggtcacgccagag

SEQ ID NO: 5880671 - DNA, 25 bp, Homo sapien
tacttagaaagcgaacacggaagtc

SEQ ID NO: 5880672 - DNA, 25 bp, Homo sapien
tcttgcaacacgcacagaacactca

SEQ ID NO: 5880673 - DNA, 25 bp, Homo sapien
cctcctccctcccagcccccggtca

SEQ ID NO: 5880674 - DNA, 25 bp, Homo sapien
aagtcatgcgagttctgcggcaaga

SEQ ID NO: 5880675 - DNA, 25 bp, Homo sapien
aataccaggatcagtatcgagagag

SEQ ID NO: 5880676 - DNA, 25 bp, Homo sapien
actcctcggagaacgggagcttgcg

SEQ ID NO: 5880677 - DNA, 25 bp, Homo sapien
agctccatgcagcacttcagcgagg

SEQ ID NO: 5880678 - DNA, 25 bp, Homo sapien
gtggactacggcttcgggctgagcc

SEQ ID NO: 5880679 - DNA, 25 bp, Homo sapien
aggagttcgacctgcccccggccgc

SEQ ID NO: 5880680 - DNA, 25 bp, Homo sapien
ggcaggcccagctcaaaagagggca

SEQ ID NO: 5880681 - DNA, 25 bp, Homo sapien
gccggcgagtcggaccgcatagacg

SEQ ID NO: 5880682 - DNA, 25 bp, Homo sapien
cgacgaagactcggtggccggcgag

SEQ ID NO: 5880683 - DNA, 25 bp, Homo sapien
cgtgggcgacgagagccgcgccctg

SEQ ID NO: 5880684 - DNA, 25 bp, Homo sapien
tgcacaaatcgtcccccatgacggt

SEQ ID NO: 5880685 - DNA, 25 bp, Homo sapien
ctcgccgcaagcaaggcaaacccca

SEQ ID NO: 5880686 - DNA, 25 bp, Homo sapien
ggcatggtgctcagctccatgcagc

SEQ ID NO: 5880687 - DNA, 25 bp, Homo sapien
ccaggcagctcaaagatcccttcct

SEQ ID NO: 5880688 - DNA, 25 bp, Homo sapien
aaagatgagcccagcagctacacat

SEQ ID NO: 5880689 - DNA, 25 bp, Homo sapien
accacgagaacagctcgcggggcgc

SEQ ID NO: 5880690 - DNA, 25 bp, Homo sapien
agttttcggatggaagctcgagagc

SEQ ID NO: 5880691 - DNA, 25 bp, Homo sapien
ggtgctgcggttgaatccaatggct

SEQ ID NO: 5880692 - DNA, 25 bp, Homo sapien
cgacacttgttcttcacacaccccc

SEQ ID NO: 5880693 - DNA, 25 bp, Homo sapien
acggtctctccaccgccagctcccc

SEQ ID NO: 5880694 - DNA, 25 bp, Homo sapien
tcatgcagggcatggtgctcagctc

SEQ ID NO: 5880695 - DNA, 25 bp, Homo sapien
tcaagctcgagaaggagttcgacct

SEQ ID NO: 5880696 - DNA, 25 bp, Homo sapien
ggagctccagaaggggatcatgacc

SEQ ID NO: 5880697 - DNA, 25 bp, Homo sapien
ctgcggcaagacgttcaaatttcag

SEQ ID NO: 5880698 - DNA, 25 bp, Homo sapien
ccaccgagacatcacttggaccccc

SEQ ID NO: 5880699 - DNA, 25 bp, Homo sapien
gcagccccagctcgctgagcccctt

SEQ ID NO: 5880700 - DNA, 25 bp, Homo sapien
aagctgtggataagccaccttcccc

SEQ ID NO: 5880701 - DNA, 25 bp, Homo sapien
cgggaagtggagggagcacgcccca

SEQ ID NO: 5880702 - DNA, 25 bp, Homo sapien
gagcgagaacgaccccaacctgatc

SEQ ID NO: 5880703 - DNA, 25 bp, Homo sapien
ggcatccaggtcacgccagaggatg

SEQ ID NO: 5880704 - DNA, 25 bp, Homo sapien
agaggaggacgacgaggaagaggaa

SEQ ID NO: 5880705 - DNA, 25 bp, Homo sapien
ttgcgcttctccacaccgcccgggg

SEQ ID NO: 5880706 - DNA, 25 bp, Homo sapien
tctgcacatggagctctaatcccca

SEQ ID NO: 5880707 - DNA, 25 bp, Homo sapien
ctccaggcagctcaaagatcccttc

SEQ ID NO: 5880708 - DNA, 25 bp, Homo sapien
gagcactcctcggagaacgggagct

SEQ ID NO: 5880709 - DNA, 25 bp, Homo sapien
cgccctgcccgacgtcatgcagggc

SEQ ID NO: 5880710 - DNA, 25 bp, Homo sapien
ggccaagttcaagagcgagaacgac

SEQ ID NO: 5880711 - DNA, 25 bp, Homo sapien
ctagaggaatttgccccaaacagga

SEQ ID NO: 5880712 - DNA, 25 bp, Homo sapien
tggaagctcgagagcccttaagttc

SEQ ID NO: 5880713 - DNA, 25 bp, Homo sapien
cacgagaacagctcgcggggcgcgg

SEQ ID NO: 5880714 - DNA, 25 bp, Homo sapien
gaggacgacgaggaagaggaagaag

SEQ ID NO: 5880715 - DNA, 25 bp, Homo sapien
aagccgcccttcctggcgacgcccc

SEQ ID NO: 5880716 - DNA, 25 bp, Homo sapien
ctctgcaatccgcccctcctccctc

SEQ ID NO: 5880717 - DNA, 25 bp, Homo sapien
ttatcgagcacaaacggaaacaatg

SEQ ID NO: 5880718 - DNA, 25 bp, Homo sapien
tcatattgcagacaataaccccttt

SEQ ID NO: 5880719 - DNA, 25 bp, Homo sapien
tcagctccatgcagcacttcagcga

SEQ ID NO: 5880720 - DNA, 25 bp, Homo sapien
cgagcctcttgaagccattcttaca

SEQ ID NO: 5880721 - DNA, 25 bp, Homo sapien
tcacctgtgggcagtgccagatgaa

SEQ ID NO: 5880722 - DNA, 25 bp, Homo sapien
agtgccagatgaacttcccattggg

SEQ ID NO: 5880723 - DNA, 25 bp, Homo sapien
tcaaaagagggcagacgcagcgaca

SEQ ID NO: 5880724 - DNA, 25 bp, Homo sapien
gagcttgcgcttctccacaccgccc

SEQ ID NO: 5880725 - DNA, 25 bp, Homo sapien
agactcggtggccggcgagtcggac

SEQ ID NO: 5880726 - DNA, 25 bp, Homo sapien
atgacgattgtttatcaacgtcatc

SEQ ID NO: 5880727 - DNA, 25 bp, Homo sapien
ttccttagcttcggagactccagac

SEQ ID NO: 5880728 - DNA, 25 bp, Homo sapien
ggagctgacggagagcgagagggtg

SEQ ID NO: 5880729 - DNA, 25 bp, Homo sapien
attccagccaggtagcaagccgccc

SEQ ID NO: 5880730 - DNA, 25 bp, Homo sapien
ccagaaggggatcatgacctcctca

SEQ ID NO: 5880731 - DNA, 25 bp, Homo sapien
aggccggcccagccctatgcaaagg

SEQ ID NO: 5880732 - DNA, 25 bp, Homo sapien
ttcggatggaagctcgagagccctt

SEQ ID NO: 5880733 - DNA, 25 bp, Homo sapien
tccccttcaccaatcgagatgaaaa

SEQ ID NO: 5880734 - DNA, 25 bp, Homo sapien
ggcgcggtcgtgggcgtgggcgacg

SEQ ID NO: 5880735 - DNA, 25 bp, Homo sapien
gcactgttaatggccgcggctgctc

SEQ ID NO: 5880736 - DNA, 25 bp, Homo sapien
acctgtgcgaccacgcgtgcaccca

SEQ ID NO: 5880737 - DNA, 25 bp, Homo sapien
gaggaggaggagctgacggagagcg

SEQ ID NO: 5880738 - DNA, 25 bp, Homo sapien
gtgctcagctccatgcagcacttca

SEQ ID NO: 5880739 - DNA, 25 bp, Homo sapien
gagcccagcagctacacatgtacaa

SEQ ID NO: 5880740 - DNA, 25 bp, Homo sapien
tgggagctccagaaggggatcatga

SEQ ID NO: 5880741 - DNA, 25 bp, Homo sapien
tcctctgcaatccgcccctcctccc

SEQ ID NO: 5880742 - DNA, 25 bp, Homo sapien
aaaagctgtggataagccaccttcc

SEQ ID NO: 5880743 - DNA, 25 bp, Homo sapien
ggaacacgtctagcccaccgctgtc

SEQ ID NO: 5880744 - DNA, 25 bp, Homo sapien
acatcacttggacccccaccgcata

SEQ ID NO: 5880745 - DNA, 25 bp, Homo sapien
ctcctcacctgtgggcagtgccaga

SEQ ID NO: 5880746 - DNA, 25 bp, Homo sapien
ttgcctcctcgtcggagcactcctc

SEQ ID NO: 5880747 - DNA, 25 bp, Homo sapien
aagcataagcgcggccacctggccg

SEQ ID NO: 5880748 - DNA, 25 bp, Homo sapien
ctgctgctgggcagccccagctcgc

SEQ ID NO: 5880749 - DNA, 25 bp, Homo sapien
tggcagttttcggatggaagctcga

SEQ ID NO: 5880750 - DNA, 25 bp, Homo sapien
gcacccaggccagcaagctgaagcg

SEQ ID NO: 5880751 - DNA, 25 bp, Homo sapien
tttatcaacgtcatctagaggaatt

SEQ ID NO: 5880752 - DNA, 25 bp, Homo sapien
tgtggcagttttcggatggaagctc

SEQ ID NO: 5880753 - DNA, 25 bp, Homo sapien
agcacgccccatattagtggtccgg

SEQ ID NO: 5880754 - DNA, 25 bp, Homo sapien
agaaggggatcatgacctcctcacc

SEQ ID NO: 5880755 - DNA, 25 bp, Homo sapien
acagggtgctgcggttgaatccaat

SEQ ID NO: 5880756 - DNA, 25 bp, Homo sapien
actggaggggcctctcctcccctcg

SEQ ID NO: 5880757 - DNA, 25 bp, Homo sapien
cccggaacccggcaccagcgacttg

SEQ ID NO: 5880758 - DNA, 25 bp, Homo sapien
gcccccggtcaagtccaagtcatgc

SEQ ID NO: 5880759 - DNA, 25 bp, Homo sapien
cccccggccgcgatgcccaacacgg

SEQ ID NO: 5880760 - DNA, 25 bp, Homo sapien
gctcaaaagagggcagacgcagcga

SEQ ID NO: 5880761 - DNA, 25 bp, Homo sapien
tatcccttcaggactaggtgcagaa

SEQ ID NO: 5880762 - DNA, 25 bp, Homo sapien
tcgccggctacgcggcctccaggca

SEQ ID NO: 5880763 - DNA, 25 bp, Homo sapien
gccacagggacacttgcgacgaaga

SEQ ID NO: 5880764 - DNA, 25 bp, Homo sapien
agcgacacttgttcttcacacaccc

SEQ ID NO: 5880765 - DNA, 25 bp, Homo sapien
tcggtggccggcgagtcggaccgca

SEQ ID NO: 5880766 - DNA, 25 bp, Homo sapien
actcggtggccggcgagtcggaccg

SEQ ID NO: 5880767 - DNA, 25 bp, Homo sapien
gcagtggctcgccggctacgcggcc

SEQ ID NO: 5880768 - DNA, 25 bp, Homo sapien
cagtgcatggtttctcttgcaacac

SEQ ID NO: 5880769 - DNA, 25 bp, Homo sapien
actacggcttcgggctgagcctgga

SEQ ID NO: 5880770 - DNA, 25 bp, Homo sapien
cgtgggcgtgggcgacgagagccgc

SEQ ID NO: 5880771 - DNA, 25 bp, Homo sapien
gaggatgacgattgtttatcaacgt

SEQ ID NO: 5880772 - DNA, 25 bp, Homo sapien
gtcccccatgacggtcaagtccgac

SEQ ID NO: 5880773 - DNA, 25 bp, Homo sapien
gtatttgtaaagatgagcccagcag

SEQ ID NO: 5880774 - DNA, 25 bp, Homo sapien
catcaagctcgagaaggagttcgac

SEQ ID NO: 5880775 - DNA, 25 bp, Homo sapien
ttctccacaccgcccggggagctgg

SEQ ID NO: 5880776 - DNA, 25 bp, Homo sapien
ccttagcttcggagactccagacaa

SEQ ID NO: 5880777 - DNA, 25 bp, Homo sapien
aaatttcagagcaacctggtggtgc

SEQ ID NO: 5880778 - DNA, 25 bp, Homo sapien
cggcctccaggcagctcaaagatcc

SEQ ID NO: 5880779 - DNA, 25 bp, Homo sapien
cggaagagatggccctggccaccca

SEQ ID NO: 5880780 - DNA, 25 bp, Homo sapien
tgttaatggccgcggctgctccccg

SEQ ID NO: 5880781 - DNA, 25 bp, Homo sapien
ggcgagaagccctacaagtgcaacc

SEQ ID NO: 5880782 - DNA, 25 bp, Homo sapien
aagagcgagaacgaccccaacctga

SEQ ID NO: 5880783 - DNA, 25 bp, Homo sapien
ggcaccagcgacttggtgggcagcg

SEQ ID NO: 5880784 - DNA, 25 bp, Homo sapien
taagccaccttccccttcaccaatc

SEQ ID NO: 5880785 - DNA, 25 bp, Homo sapien
ttcgggctgagcctggaggcggcgc

SEQ ID NO: 5880786 - DNA, 25 bp, Homo sapien
tgaccccgcgggttggtatcccttc

SEQ ID NO: 5880787 - DNA, 25 bp, Homo sapien
gcagcacttcagcgaggccttccac

SEQ ID NO: 5880788 - DNA, 25 bp, Homo sapien
gaagctcgagagcccttaagttcta

SEQ ID NO: 5880789 - DNA, 25 bp, Homo sapien
tgaagcgccacatgaagacgcacat

SEQ ID NO: 5880790 - DNA, 25 bp, Homo sapien
ccgagggccacagggacacttgcga

SEQ ID NO: 5880791 - DNA, 25 bp, Homo sapien
cccatgacggtcaagtccgacgacg

SEQ ID NO: 5880792 - DNA, 25 bp, Homo sapien
cccccattcggcgtagtacccagag

SEQ ID NO: 5880793 - DNA, 25 bp, Homo sapien
tggcactgttaatggccgcggctgc

SEQ ID NO: 5880794 - DNA, 25 bp, Homo sapien
caataacccctttaacctgctaaga

SEQ ID NO: 5880795 - DNA, 25 bp, Homo sapien
acactcatggattaagaatctactt

SEQ ID NO: 5880796 - DNA, 25 bp, Homo sapien
cgcagggtatttgtaaagatgagcc

SEQ ID NO: 5880797 - DNA, 25 bp, Homo sapien
gaagggcgctttccacccactcccc

SEQ ID NO: 5880798 - DNA, 25 bp, Homo sapien
acgagagccgcgccctgcccgacgt

SEQ ID NO: 5880799 - DNA, 25 bp, Homo sapien
agtccgtggtggccaagttcaagag

SEQ ID NO: 5880800 - DNA, 25 bp, Homo sapien
agctcaaagatcccttccttagctt

SEQ ID NO: 5880801 - DNA, 25 bp, Homo sapien
tgggggacattcttatttttatcga

SEQ ID NO: 5880802 - DNA, 25 bp, Homo sapien
ctcggagaacgggagcttgcgcttc

SEQ ID NO: 5880803 - DNA, 25 bp, Homo sapien
ggcttccggcctggcagaagggcgc

SEQ ID NO: 5880804 - DNA, 25 bp, Homo sapien
tggataagccaccttccccttcacc

SEQ ID NO: 5880805 - DNA, 25 bp, Homo sapien
gcgccagcagcgcgctcaagtccgt

SEQ ID NO: 5880806 - DNA, 25 bp, Homo sapien
tcaagagcgagaacgaccccaacct

SEQ ID NO: 5880807 - DNA, 25 bp, Homo sapien
tgacggtcaagtccgacgacggtct

SEQ ID NO: 5880808 - DNA, 25 bp, Homo sapien
ttcaggactaggtgcagaatgtcct

SEQ ID NO: 5880809 - DNA, 25 bp, Homo sapien
agaggaatttgccccaaacaggaac

SEQ ID NO: 5880810 - DNA, 25 bp, Homo sapien
gctgctgggcagccccagctcgctg

SEQ ID NO: 5880811 - DNA, 25 bp, Homo sapien
gcggttgaatccaatggctatggag

SEQ ID NO: 5880812 - DNA, 25 bp, Homo sapien
ccgccagctccccggaacccggcac

SEQ ID NO: 5880813 - DNA, 25 bp, Homo sapien
ggggcgcggtcgtgggcgtgggcga

SEQ ID NO: 5880814 - DNA, 25 bp, Homo sapien
tggcagcctctgcttagaaaaagct

SEQ ID NO: 5880815 - DNA, 25 bp, Homo sapien
acgaagactcggtggccggcgagtc

SEQ ID NO: 5880816 - DNA, 25 bp, Homo sapien
cgccgcaagcaaggcaaaccccagc

SEQ ID NO: 5880817 - DNA, 25 bp, Homo sapien
ctccagaaggggatcatgacctcct

SEQ ID NO: 5880818 - DNA, 25 bp, Homo sapien
gcagcctctgcttagaaaaagctgt

SEQ ID NO: 5880819 - DNA, 25 bp, Homo sapien
atgcagggcatggtgctcagctcca

SEQ ID NO: 5880820 - DNA, 25 bp, Homo sapien
gcagttttcggatggaagctcgaga

SEQ ID NO: 5880821 - DNA, 25 bp, Homo sapien
catccaatcccgtggaggttggcat

SEQ ID NO: 5880822 - DNA, 25 bp, Homo sapien
tcttatttttatcgagcacaaacgg

SEQ ID NO: 5880823 - DNA, 25 bp, Homo sapien
aacggaaacaatgcaatggcagcct

SEQ ID NO: 5880824 - DNA, 25 bp, Homo sapien
ggcagaagggcgctttccacccact

SEQ ID NO: 5880825 - DNA, 25 bp, Homo sapien
agccaccttccccttcaccaatcga

SEQ ID NO: 5880826 - DNA, 25 bp, Homo sapien
ccagaccacggcccgttgggagctc

SEQ ID NO: 5880827 - DNA, 25 bp, Homo sapien
ggtcaagtccgacgacggtctctcc

SEQ ID NO: 5880828 - DNA, 25 bp, Homo sapien
acgcctgggatgagtgcagaatatg

SEQ ID NO: 5880829 - DNA, 25 bp, Homo sapien
gatcagtatcgagagaggcttccgg

SEQ ID NO: 5880830 - DNA, 25 bp, Homo sapien
cggcgagtcggaccgcatagacgat

SEQ ID NO: 5880831 - DNA, 25 bp, Homo sapien
tctcctcccctcgttctgcacatgg

SEQ ID NO: 5880832 - DNA, 25 bp, Homo sapien
ttttcggatggaagctcgagagccc

SEQ ID NO: 5880833 - DNA, 25 bp, Homo sapien
gtcgtgggcgtgggcgacgagagcc

SEQ ID NO: 5880834 - DNA, 25 bp, Homo sapien
acctcctcacctgtgggcagtgcca

SEQ ID NO: 5880835 - DNA, 25 bp, Homo sapien
ttgcaacacgcacagaacactcatg

SEQ ID NO: 5880836 - DNA, 25 bp, Homo sapien
tacccagagagctcaagatgtgtgg

SEQ ID NO: 5880837 - DNA, 25 bp, Homo sapien
ccaggatcagtatcgagagaggctt

SEQ ID NO: 5880838 - DNA, 25 bp, Homo sapien
aggcagctcaaagatcccttcctta

SEQ ID NO: 5880839 - DNA, 25 bp, Homo sapien
gagagccgcgccctgcccgacgtca

SEQ ID NO: 5880840 - DNA, 25 bp, Homo sapien
gaggggcctctcctcccctcgttct

SEQ ID NO: 5880841 - DNA, 25 bp, Homo sapien
gggcgagtcggcctcggggggcctg

SEQ ID NO: 5880842 - DNA, 25 bp, Homo sapien
gcaagcaaggcaaaccccagcactt

SEQ ID NO: 5880843 - DNA, 25 bp, Homo sapien
cgagaagcataagcgcggccacctg

SEQ ID NO: 5880844 - DNA, 25 bp, Homo sapien
cacccccattcggcgtagtacccag

SEQ ID NO: 5880845 - DNA, 25 bp, Homo sapien
ccagcgacttggtgggcagcgccag

SEQ ID NO: 5880846 - DNA, 25 bp, Homo sapien
cgctgtccccaggccggcccagccc

SEQ ID NO: 5880847 - DNA, 25 bp, Homo sapien
gggcagtgccagatgaacttcccat

SEQ ID NO: 5880848 - DNA, 25 bp, Homo sapien
cgcgggttggtatcccttcaggact

SEQ ID NO: 5880849 - DNA, 25 bp, Homo sapien
cgtggaggttggcatccaggtcacg

SEQ ID NO: 5880850 - DNA, 25 bp, Homo sapien
cctttaacctgctaagaataccagg

SEQ ID NO: 5880851 - DNA, 25 bp, Homo sapien
gaggaggaagaggaggacgacgagg

SEQ ID NO: 5880852 - DNA, 25 bp, Homo sapien
cacacacccccattcggcgtagtac

SEQ ID NO: 5880853 - DNA, 25 bp, Homo sapien
agtgcctttgacagggtgctgcggt

SEQ ID NO: 5880854 - DNA, 25 bp, Homo sapien
ctgcccgacgtcatgcagggcatgg

SEQ ID NO: 5880855 - DNA, 25 bp, Homo sapien
aaccagaccacggcccgttgggagc

SEQ ID NO: 5880856 - DNA, 25 bp, Homo sapien
ggcagcgccagcagcgcgctcaagt

SEQ ID NO: 5880857 - DNA, 25 bp, Homo sapien
gcgagtcggaccgcatagacgatgg

SEQ ID NO: 5880858 - DNA, 25 bp, Homo sapien
tctgcttagaaaaagctgtggataa

SEQ ID NO: 5880859 - DNA, 25 bp, Homo sapien
gaggccgagggccacagggacactt

SEQ ID NO: 5880860 - DNA, 25 bp, Homo sapien
tctaatccccacgcctgggatgagt

SEQ ID NO: 5880861 - DNA, 25 bp, Homo sapien
agcctctgcttagaaaaagctgtgg

SEQ ID NO: 5880862 - DNA, 25 bp, Homo sapien
cagggacacttgcgacgaagactcg

SEQ ID NO: 5880863 - DNA, 25 bp, Homo sapien
acctgtgggcagtgccagatgaact

SEQ ID NO: 5880864 - DNA, 25 bp, Homo sapien
cgtcatctagaggaatttgccccaa

SEQ ID NO: 5880865 - DNA, 25 bp, Homo sapien
gcagcgacacttgttcttcacacac

SEQ ID NO: 5880866 - DNA, 25 bp, Homo sapien
tcacgccagaggatgacgattgttt

SEQ ID NO: 5880867 - DNA, 25 bp, Homo sapien
caggactaggtgcagaatgtccttc

SEQ ID NO: 5880868 - DNA, 25 bp, Homo sapien
caaacaggaacacatagcagataaa

SEQ ID NO: 5880869 - DNA, 25 bp, Homo sapien
tagaaagcgaacacggaagtcccct

SEQ ID NO: 5880870 - DNA, 25 bp, Homo sapien
cgggcgagaagccctacaagtgcaa

SEQ ID NO: 5880871 - DNA, 25 bp, Homo sapien
gtccgacgacggtctctccaccgcc

SEQ ID NO: 5880872 - DNA, 25 bp, Homo sapien
ggtagcaagccgcccttcctggcga

SEQ ID NO: 5880873 - DNA, 25 bp, Homo sapien
cctttgacagggtgctgcggttgaa

SEQ ID NO: 5880874 - DNA, 25 bp, Homo sapien
gatctcggggcgcagcggcacggga

SEQ ID NO: 5880875 - DNA, 25 bp, Homo sapien
aaccccagcacttaagcaaacggga

SEQ ID NO: 5880876 - DNA, 25 bp, Homo sapien
cctgggcgagaagcataagcgcggc

SEQ ID NO: 5880877 - DNA, 25 bp, Homo sapien
tcgcggggcgcggtcgtgggcgtgg

SEQ ID NO: 5880878 - DNA, 25 bp, Homo sapien
cacagggacacttgcgacgaagact

SEQ ID NO: 5880879 - DNA, 25 bp, Homo sapien
caagtccgtggtggccaagttcaag

SEQ ID NO: 5880880 - DNA, 25 bp, Homo sapien
cacgccccatattagtggtccgggc

SEQ ID NO: 5880881 - DNA, 25 bp, Homo sapien
acttggtgggcagcgccagcagcgc

SEQ ID NO: 5880882 - DNA, 25 bp, Homo sapien
gaaacaatgcaatggcagcctctgc

SEQ ID NO: 5880883 - DNA, 25 bp, Homo sapien
cccgggcaggcccagctcaaaagag

SEQ ID NO: 5880884 - DNA, 25 bp, Homo sapien
gctggcagggaacacgtctagccca

SEQ ID NO: 5880885 - DNA, 25 bp, Homo sapien
cctacaagtgcaacctgtgcgacca

SEQ ID NO: 5880886 - DNA, 25 bp, Homo sapien
tgggcgacgagagccgcgccctgcc

SEQ ID NO: 5880887 - DNA, 25 bp, Homo sapien
gatcccttccttagcttcggagact

SEQ ID NO: 5880888 - DNA, 25 bp, Homo sapien
cacgggaagtggagggagcacgccc

SEQ ID NO: 5880889 - DNA, 25 bp, Homo sapien
cgagcacaaacggaaacaatgcaat

SEQ ID NO: 5880890 - DNA, 25 bp, Homo sapien
aagacgcacatgcacaaatcgtccc

SEQ ID NO: 5880891 - DNA, 25 bp, Homo sapien
tgcttagaaaaagctgtggataagc

SEQ ID NO: 5880892 - DNA, 25 bp, Homo sapien
caatcccgtggaggttggcatccag

SEQ ID NO: 5880893 - DNA, 25 bp, Homo sapien
acttgcaaacagccattcaccagtg

SEQ ID NO: 5880894 - DNA, 25 bp, Homo sapien
acgaccccaacctgatcccggagaa

SEQ ID NO: 5880895 - DNA, 25 bp, Homo sapien
ggccgagggccacagggacacttgc

SEQ ID NO: 5880896 - DNA, 25 bp, Homo sapien
ccagcacttaagcaaacgggaattc

SEQ ID NO: 5880897 - DNA, 25 bp, Homo sapien
tggaggggcctctcctcccctcgtt

SEQ ID NO: 5880898 - DNA, 25 bp, Homo sapien
ctcgcccgagcctcttgaagccatt

SEQ ID NO: 5880899 - DNA, 25 bp, Homo sapien
cagccacctctccatgggattcata

SEQ ID NO: 5880900 - DNA, 25 bp, Homo sapien
gcatggtttctcttgcaacacgcac

SEQ ID NO: 5880901 - DNA, 25 bp, Homo sapien
gcccaacacggagaacgtgtactcg

SEQ ID NO: 5880902 - DNA, 25 bp, Homo sapien
cgacttggtgggcagcgccagcagc

SEQ ID NO: 5880903 - DNA, 25 bp, Homo sapien
ctggccgaggccgagggccacaggg

SEQ ID NO: 5880904 - DNA, 25 bp, Homo sapien
tgaacttcccattgggggacattct

SEQ ID NO: 5880905 - DNA, 25 bp, Homo sapien
gcaaccattccagccaggtagcaag

SEQ ID NO: 5880906 - DNA, 25 bp, Homo sapien
tcaccaatcgagatgaaaaaagcat

SEQ ID NO: 5880907 - DNA, 25 bp, Homo sapien
cgacgagagccgcgccctgcccgac

SEQ ID NO: 5880908 - DNA, 25 bp, Homo sapien
taccaggatcagtatcgagagaggc

SEQ ID NO: 5880909 - DNA, 25 bp, Homo sapien
gcggcacgggaagtggagggagcac

SEQ ID NO: 5880910 - DNA, 25 bp, Homo sapien
gttcgacctgcccccggccgcgatg

SEQ ID NO: 5880911 - DNA, 25 bp, Homo sapien
ccattcaccagtgcatggtttctct

SEQ ID NO: 5880912 - DNA, 25 bp, Homo sapien
cacttcagcgaggccttccaccagg

SEQ ID NO: 5880913 - DNA, 25 bp, Homo sapien
cactccccccctgtttagtccacca

SEQ ID NO: 5880914 - DNA, 25 bp, Homo sapien
gagctggcagggaacacgtctagcc

SEQ ID NO: 5880915 - DNA, 25 bp, Homo sapien
catgggattcatattgcagacaata

SEQ ID NO: 5880916 - DNA, 25 bp, Homo sapien
gagctggacggagggatctcggggc

SEQ ID NO: 5880917 - DNA, 25 bp, Homo sapien
aggaagaggaggaggaggagctgac

SEQ ID NO: 5880918 - DNA, 25 bp, Homo sapien
ctgcaaccattccagccaggtagca

SEQ ID NO: 5880919 - DNA, 25 bp, Homo sapien
tgggcagcgccagcagcgcgctcaa

SEQ ID NO: 5880920 - DNA, 25 bp, Homo sapien
atctagaggaatttgccccaaacag

SEQ ID NO: 5880921 - DNA, 25 bp, Homo sapien
atggatttctctaggagacttagag

SEQ ID NO: 5880922 - DNA, 25 bp, Homo sapien
cgagatgaaaaaagcatccaatccc

SEQ ID NO: 5880923 - DNA, 25 bp, Homo sapien
gggatctcggggcgcagcggcacgg

SEQ ID NO: 5880924 - DNA, 25 bp, Homo sapien
gggccacagggacacttgcgacgaa

SEQ ID NO: 5880925 - DNA, 25 bp, Homo sapien
tccgcccctcctccctcccagcccc

SEQ ID NO: 5880926 - DNA, 25 bp, Homo sapien
aatccgcccctcctccctcccagcc

SEQ ID NO: 5880927 - DNA, 25 bp, Homo sapien
ccttcccagccacctctccatggga

SEQ ID NO: 5880928 - DNA, 25 bp, Homo sapien
gagaacgaccccaacctgatcccgg

SEQ ID NO: 5880929 - DNA, 25 bp, Homo sapien
tgcgagttctgcggcaagacgttca

SEQ ID NO: 5880930 - DNA, 25 bp, Homo sapien
tatcaacgtcatctagaggaatttg

SEQ ID NO: 5880931 - DNA, 25 bp, Homo sapien
aacacatagcagataaacttctgca

SEQ ID NO: 5880932 - DNA, 25 bp, Homo sapien
cggagagcgagagggtggactacgg

SEQ ID NO: 5880933 - DNA, 25 bp, Homo sapien
tccaatcccgtggaggttggcatcc

SEQ ID NO: 5880934 - DNA, 25 bp, Homo sapien
gaacccggcaccagcgacttggtgg

SEQ ID NO: 5880935 - DNA, 25 bp, Homo sapien
atccccacgcctgggatgagtgcag

SEQ ID NO: 5880936 - DNA, 25 bp, Homo sapien
ccgcatagacgatggcactgttaat

SEQ ID NO: 5880937 - DNA, 25 bp, Homo sapien
cgcggcctccaggcagctcaaagat

SEQ ID NO: 5880938 - DNA, 25 bp, Homo sapien
ctcaagtccgtggtggccaagttca

SEQ ID NO: 5880939 - DNA, 25 bp, Homo sapien
tctcttgcaacacgcacagaacact

SEQ ID NO: 5880940 - DNA, 25 bp, Homo sapien
gcagggaacacgtctagcccaccgc

SEQ ID NO: 5880941 - DNA, 25 bp, Homo sapien
tctaagcgcatcaagctcgagaagg

SEQ ID NO: 5880942 - DNA, 25 bp, Homo sapien
gccagcagcgcgctcaagtccgtgg

SEQ ID NO: 5880943 - DNA, 25 bp, Homo sapien
ctcctcgtcggagcactcctcggag

SEQ ID NO: 5880944 - DNA, 25 bp, Homo sapien
agtccaccaccgagacatcacttgg

SEQ ID NO: 5880945 - DNA, 25 bp, Homo sapien
tcaagtccgacgacggtctctccac

SEQ ID NO: 5880946 - DNA, 25 bp, Homo sapien
gctcgccggctacgcggcctccagg

SEQ ID NO: 5880947 - DNA, 25 bp, Homo sapien
atgtctcgccgcaagcaaggcaaac

SEQ ID NO: 5880948 - DNA, 25 bp, Homo sapien
tccatgggattcatattgcagacaa

SEQ ID NO: 5880949 - DNA, 25 bp, Homo sapien
cctcgttctgcacatggagctctaa

SEQ ID NO: 5880950 - DNA, 25 bp, Homo sapien
ggactacggcttcgggctgagcctg

SEQ ID NO: 5880951 - DNA, 25 bp, Homo sapien
tcgttctgcacatggagctctaatc

SEQ ID NO: 5880952 - DNA, 25 bp, Homo sapien
gtaaagatgagcccagcagctacac

SEQ ID NO: 5880953 - DNA, 25 bp, Homo sapien
gcccgacgtcatgcagggcatggtg

SEQ ID NO: 5880954 - DNA, 25 bp, Homo sapien
tgtacaacttgcaaacagccattca

SEQ ID NO: 5880955 - DNA, 25 bp, Homo sapien
gaagaggaggacgacgaggaagagg

SEQ ID NO: 5880956 - DNA, 25 bp, Homo sapien
aaggggatcatgacctcctcacctg

SEQ ID NO: 5880957 - DNA, 25 bp, Homo sapien
tcttcacacacccccattcggcgta

SEQ ID NO: 5880958 - DNA, 25 bp, Homo sapien
gtcggagcactcctcggagaacggg

SEQ ID NO: 5880959 - DNA, 25 bp, Homo sapien
gcctcctcgtcggagcactcctcgg

SEQ ID NO: 5880960 - DNA, 25 bp, Homo sapien
agtgcagaatatgccccgcagggta

SEQ ID NO: 5880961 - DNA, 25 bp, Homo sapien
ggtctctccaccgccagctccccgg

SEQ ID NO: 5880962 - DNA, 25 bp, Homo sapien
gcagtgccagatgaacttcccattg

SEQ ID NO: 5880963 - DNA, 25 bp, Homo sapien
cgggttggtatcccttcaggactag

SEQ ID NO: 5880964 - DNA, 25 bp, Homo sapien
gtcctgggcgagaagcataagcgcg

SEQ ID NO: 5880965 - DNA, 25 bp, Homo sapien
ggacattcttatttttatcgagcac

SEQ ID NO: 5880966 - DNA, 25 bp, Homo sapien
tggtgctcagctccatgcagcactt

SEQ ID NO: 5880967 - DNA, 25 bp, Homo sapien
actcgcagtggctcgccggctacgc

SEQ ID NO: 5880968 - DNA, 25 bp, Homo sapien
tttctcttgcaacacgcacagaaca

SEQ ID NO: 5880969 - DNA, 25 bp, Homo sapien
gcataagcgcggccacctggccgag

SEQ ID NO: 5880970 - DNA, 25 bp, Homo sapien
cggcccagccctatgcaaaggttac

SEQ ID NO: 5880971 - DNA, 25 bp, Homo sapien
gatgaaccagaccacggcccgttgg

SEQ ID NO: 5880972 - DNA, 25 bp, Homo sapien
ggcgacgccccccctccctcctctg

SEQ ID NO: 5880973 - DNA, 25 bp, Homo sapien
gggagcttgcgcttctccacaccgc

SEQ ID NO: 5880974 - DNA, 25 bp, Homo sapien
tggtggccaagttcaagagcgagaa

SEQ ID NO: 5880975 - DNA, 25 bp, Homo sapien
aagtccgacgacggtctctccaccg

SEQ ID NO: 5880976 - DNA, 25 bp, Homo sapien
aatctacttagaaagcgaacacgga

SEQ ID NO: 5880977 - DNA, 25 bp, Homo sapien
ttgccccaaacaggaacacatagca

SEQ ID NO: 5880978 - DNA, 25 bp, Homo sapien
ggcctctcctcccctcgttctgcac

SEQ ID NO: 5880979 - DNA, 25 bp, Homo sapien
agcgcatcaagctcgagaaggagtt

SEQ ID NO: 5880980 - DNA, 25 bp, Homo sapien
tactgcaaccattccagccaggtag

SEQ ID NO: 5880981 - DNA, 25 bp, Homo sapien
aagtggagggagcacgccccatatt

SEQ ID NO: 5880982 - DNA, 25 bp, Homo sapien
gacttagagagctggcagggaacac

SEQ ID NO: 5880983 - DNA, 25 bp, Homo sapien
gcagacgcagcgacacttgttcttc

SEQ ID NO: 5880984 - DNA, 25 bp, Homo sapien
aacaggaacacatagcagataaact

SEQ ID NO: 5880985 - DNA, 25 bp, Homo sapien
gagagctggcagggaacacgtctag

SEQ ID NO: 5880986 - DNA, 25 bp, Homo sapien
gagcaacctggtggtgcaccggcgc

SEQ ID NO: 5880987 - DNA, 25 bp, Homo sapien
gcctgtccaaaaagctgctgctggg

SEQ ID NO: 5880988 - DNA, 25 bp, Homo sapien
agggtgctgcggttgaatccaatgg

SEQ ID NO: 5880989 - DNA, 25 bp, Homo sapien
agatggccctggccacccatcaccc

SEQ ID NO: 5880990 - DNA, 25 bp, Homo sapien
cggaccgcatagacgatggcactgt

SEQ ID NO: 5880991 - DNA, 25 bp, Homo sapien
agctccagaaggggatcatgacctc

SEQ ID NO: 5880992 - DNA, 25 bp, Homo sapien
cggccgcgatgcccaacacggagaa

SEQ ID NO: 5880993 - DNA, 25 bp, Homo sapien
catgacctcctcacctgtgggcagt

SEQ ID NO: 5880994 - DNA, 25 bp, Homo sapien
aggccttccaccaggtcctgggcga

SEQ ID NO: 5880995 - DNA, 25 bp, Homo sapien
attcttacagatgatgaaccagacc

SEQ ID NO: 5880996 - DNA, 25 bp, Homo sapien
cagcaagctgaagcgccacatgaag

SEQ ID NO: 5880997 - DNA, 25 bp, Homo sapien
gccttccaccaggtcctgggcgaga

SEQ ID NO: 5880998 - DNA, 25 bp, Homo sapien
gagggcagacgcagcgacacttgtt

SEQ ID NO: 5880999 - DNA, 25 bp, Homo sapien
attcaccagtgcatggtttctcttg

SEQ ID NO: 5881000 - DNA, 25 bp, Homo sapien
cctcttgaagccattcttacagatg

SEQ ID NO: 5881001 - DNA, 25 bp, Homo sapien
agtcggcctcggggggcctgtccaa

SEQ ID NO: 5881002 - DNA, 25 bp, Homo sapien
cgagttctgcggcaagacgttcaaa

SEQ ID NO: 5881003 - DNA, 25 bp, Homo sapien
ccctgcccgacgtcatgcagggcat

SEQ ID NO: 5881004 - DNA, 25 bp, Homo sapien
aggcggcgcgccaccacgagaacag

SEQ ID NO: 5881005 - DNA, 25 bp, Homo sapien
acgccagaggatgacgattgtttat

SEQ ID NO: 5881006 - DNA, 25 bp, Homo sapien
gcttgcgcttctccacaccgcccgg

SEQ ID NO: 5881007 - DNA, 25 bp, Homo sapien
cacacgggcgagaagccctacaagt

SEQ ID NO: 5881008 - DNA, 25 bp, Homo sapien
cccctttaacctgctaagaatacca

SEQ ID NO: 5881009 - DNA, 25 bp, Homo sapien
gcctgggatgagtgcagaatatgcc

SEQ ID NO: 5881010 - DNA, 25 bp, Homo sapien
tttgacagggtgctgcggttgaatc

SEQ ID NO: 5881011 - DNA, 25 bp, Homo sapien
cgcgatgcccaacacggagaacgtg

SEQ ID NO: 5881012 - DNA, 25 bp, Homo sapien
ttctctaggagacttagagagctgg

SEQ ID NO: 5881013 - DNA, 25 bp, Homo sapien
cgggcccgggcaggcccagctcaaa

SEQ ID NO: 5881014 - DNA, 25 bp, Homo sapien
cccgcgggttggtatcccttcagga

SEQ ID NO: 5881015 - DNA, 25 bp, Homo sapien
ctgtgggcagtgccagatgaacttc

SEQ ID NO: 5881016 - DNA, 25 bp, Homo sapien
tgggcgtgggcgacgagagccgcgc

SEQ ID NO: 5881017 - DNA, 25 bp, Homo sapien
agacgcagcgacacttgttcttcac

SEQ ID NO: 5881018 - DNA, 25 bp, Homo sapien
agccccagctcgctgagccccttct

SEQ ID NO: 5881019 - DNA, 25 bp, Homo sapien
gcccagccctatgcaaaggttactg

SEQ ID NO: 5881020 - DNA, 25 bp, Homo sapien
agatgagcccagcagctacacatgt

SEQ ID NO: 5881021 - DNA, 25 bp, Homo sapien
cacatgcacaaatcgtcccccatga

SEQ ID NO: 5881022 - DNA, 25 bp, Homo sapien
aagagggcagacgcagcgacacttg

SEQ ID NO: 5881023 - DNA, 25 bp, Homo sapien
gtctcgccgcaagcaaggcaaaccc

SEQ ID NO: 5881024 - DNA, 25 bp, Homo sapien
tagcaagccgcccttcctggcgacg

SEQ ID NO: 5881025 - DNA, 25 bp, Homo sapien
cgggcaggcccagctcaaaagaggg

SEQ ID NO: 5881026 - DNA, 25 bp, Homo sapien
cccagagagctcaagatgtgtggca

SEQ ID NO: 5881027 - DNA, 25 bp, Homo sapien
tagcccaccgctgtccccaggccgg

SEQ ID NO: 5881028 - DNA, 25 bp, Homo sapien
aatggccgcggctgctccccgggcg

SEQ ID NO: 5881029 - DNA, 25 bp, Homo sapien
caacctgtgcgaccacgcgtgcacc

SEQ ID NO: 5881030 - DNA, 25 bp, Homo sapien
agcaaacgggaattctcgcccgagc

SEQ ID NO: 5881031 - DNA, 25 bp, Homo sapien
ctatgcaaaggttactgcaaccatt

SEQ ID NO: 5881032 - DNA, 25 bp, Homo sapien
gagcctcccgccatggatttctcta

SEQ ID NO: 5881033 - DNA, 25 bp, Homo sapien
gccccaaacaggaacacatagcaga

SEQ ID NO: 5881034 - DNA, 25 bp, Homo sapien
gggcagacgcagcgacacttgttct

SEQ ID NO: 5881035 - DNA, 25 bp, Homo sapien
ggcccgggcaggcccagctcaaaag

SEQ ID NO: 5881036 - DNA, 25 bp, Homo sapien
cagaatatgccccgcagggtatttg

SEQ ID NO: 5881037 - DNA, 25 bp, Homo sapien
cgagtcggcctcggggggcctgtcc

SEQ ID NO: 5881038 - DNA, 25 bp, Homo sapien
gacggagggatctcggggcgcagcg

SEQ ID NO: 5881039 - DNA, 25 bp, Homo sapien
ggagactccagacaatcgccttttg

SEQ ID NO: 5881040 - DNA, 25 bp, Homo sapien
gcggccacctggccgaggccgaggg

SEQ ID NO: 5881041 - DNA, 25 bp, Homo sapien
gggacacttgcgacgaagactcggt

SEQ ID NO: 5881042 - DNA, 25 bp, Homo sapien
gcaatggcagcctctgcttagaaaa

SEQ ID NO: 5881043 - DNA, 25 bp, Homo sapien
aacacgtctagcccaccgctgtccc

SEQ ID NO: 5881044 - DNA, 25 bp, Homo sapien
aacgggaattctcgcccgagcctct

SEQ ID NO: 5881045 - DNA, 25 bp, Homo sapien
tgcctttgacagggtgctgcggttg

SEQ ID NO: 5881046 - DNA, 25 bp, Homo sapien
atccaatggctatggagcctcccgc

SEQ ID NO: 5881047 - DNA, 25 bp, Homo sapien
attgggggacattcttatttttatc

SEQ ID NO: 5881048 - DNA, 25 bp, Homo sapien
gccacctctccatgggattcatatt

SEQ ID NO: 5881049 - DNA, 25 bp, Homo sapien
atgcaatggcagcctctgcttagaa

SEQ ID NO: 5881050 - DNA, 25 bp, Homo sapien
atggattaagaatctacttagaaag

SEQ ID NO: 5881051 - DNA, 25 bp, Homo sapien
gatgtgtggcagttttcggatggaa

SEQ ID NO: 5881052 - DNA, 25 bp, Homo sapien
tgcccccggccgcgatgcccaacac

SEQ ID NO: 5881053 - DNA, 25 bp, Homo sapien
ggactaggtgcagaatgtccttccc

SEQ ID NO: 5881054 - DNA, 25 bp, Homo sapien
gcctccaggcagctcaaagatccct

SEQ ID NO: 5881055 - DNA, 25 bp, Homo sapien
agcctcttgaagccattcttacaga

SEQ ID NO: 5881056 - DNA, 25 bp, Homo sapien
gttcaaatttcagagcaacctggtg

SEQ ID NO: 5881057 - DNA, 25 bp, Homo sapien
ttaatggccgcggctgctccccggg

SEQ ID NO: 5881058 - DNA, 25 bp, Homo sapien
cgctgagccccttctctaagcgcat

SEQ ID NO: 5881059 - DNA, 25 bp, Homo sapien
tgcaacctgtgcgaccacgcgtgca

SEQ ID NO: 5881060 - DNA, 25 bp, Homo sapien
ccacgcctgggatgagtgcagaata

SEQ ID NO: 5881061 - DNA, 25 bp, Homo sapien
gaatttgccccaaacaggaacacat

SEQ ID NO: 5881062 - DNA, 25 bp, Homo sapien
cttctctaagcgcatcaagctcgag

SEQ ID NO: 5881063 - DNA, 25 bp, Homo sapien
cctcgtcggagcactcctcggagaa

SEQ ID NO: 5881064 - DNA, 25 bp, Homo sapien
agataaacttctgcactggaggggc

SEQ ID NO: 5881065 - DNA, 25 bp, Homo sapien
gctccccggaacccggcaccagcga

SEQ ID NO: 5881066 - DNA, 25 bp, Homo sapien
cggctgctccccgggcgagtcggcc

SEQ ID NO: 5881067 - DNA, 25 bp, Homo sapien
caccaccgagacatcacttggaccc

SEQ ID NO: 5881068 - DNA, 25 bp, Homo sapien
aacacggagaacgtgtactcgcagt

SEQ ID NO: 5881069 - DNA, 25 bp, Homo sapien
gacggagagcgagagggtggactac

SEQ ID NO: 5881070 - DNA, 25 bp, Homo sapien
agtgcaacctgtgcgaccacgcgtg

SEQ ID NO: 5881071 - DNA, 25 bp, Homo sapien
cgattgtttatcaacgtcatctaga

SEQ ID NO: 5881072 - DNA, 25 bp, Homo sapien
tagaaaaagctgtggataagccacc

SEQ ID NO: 5881073 - DNA, 25 bp, Homo sapien
cacggagaacgtgtactcgcagtgg

SEQ ID NO: 5881074 - DNA, 25 bp, Homo sapien
tccggcctggcagaagggcgctttc

SEQ ID NO: 5881075 - DNA, 25 bp, Homo sapien
agagatggccctggccacccatcac

SEQ ID NO: 5881076 - DNA, 25 bp, Homo sapien
caggtagcaagccgcccttcctggc

SEQ ID NO: 5881077 - DNA, 25 bp, Homo sapien
catccaggtcacgccagaggatgac

SEQ ID NO: 5881078 - DNA, 25 bp, Homo sapien
tcccattgggggacattcttatttt

SEQ ID NO: 5881079 - DNA, 25 bp, Homo sapien
ccctatgcaaaggttactgcaacca

SEQ ID NO: 5881080 - DNA, 25 bp, Homo sapien
acccaggccagcaagctgaagcgcc

SEQ ID NO: 5881081 - DNA, 25 bp, Homo sapien
cacatgaagacgcacatgcacaaat

SEQ ID NO: 5881082 - DNA, 25 bp, Homo sapien
gaatatgccccgcagggtatttgta

SEQ ID NO: 5881083 - DNA, 25 bp, Homo sapien
tcgcagtggctcgccggctacgcgg

SEQ ID NO: 5881084 - DNA, 25 bp, Homo sapien
cacacccccattcggcgtagtaccc

SEQ ID NO: 5881085 - DNA, 25 bp, Homo sapien
cttaagcaaacgggaattctcgccc

SEQ ID NO: 5881086 - DNA, 25 bp, Homo sapien
ggaacacatagcagataaacttctg

SEQ ID NO: 5881087 - DNA, 25 bp, Homo sapien
caacttgcaaacagccattcaccag

SEQ ID NO: 5881088 - DNA, 25 bp, Homo sapien
acattcttatttttatcgagcacaa

SEQ ID NO: 5881089 - DNA, 25 bp, Homo sapien
gtactcgcagtggctcgccggctac

SEQ ID NO: 5881090 - DNA, 25 bp, Homo sapien
catgcgagttctgcggcaagacgtt

SEQ ID NO: 5881091 - DNA, 25 bp, Homo sapien
gaacagctcgcggggcgcggtcgtg

SEQ ID NO: 5881092 - DNA, 25 bp, Homo sapien
cagctccccggaacccggcaccagc

SEQ ID NO: 5881093 - DNA, 25 bp, Homo sapien
cggaacccggcaccagcgacttggt

SEQ ID NO: 5881094 - DNA, 25 bp, Homo sapien
ccattgggggacattcttattttta

SEQ ID NO: 5881095 - DNA, 25 bp, Homo sapien
ggccacctggccgaggccgagggcc

SEQ ID NO: 5881096 - DNA, 25 bp, Homo sapien
caatcgagatgaaaaaagcatccaa

SEQ ID NO: 5881097 - DNA, 25 bp, Homo sapien
tggccggcgagtcggaccgcataga

SEQ ID NO: 5881098 - DNA, 25 bp, Homo sapien
taagaataccaggatcagtatcgag

SEQ ID NO: 5881099 - DNA, 25 bp, Homo sapien
gtttagtccaccaccgagacatcac

SEQ ID NO: 5881100 - DNA, 25 bp, Homo sapien
gcccttcctggcgacgccccccctc

SEQ ID NO: 5881101 - DNA, 25 bp, Homo sapien
tcccctgaccccgcgggttggtatc

SEQ ID NO: 5881102 - DNA, 25 bp, Homo sapien
tggacggagggatctcggggcgcag

SEQ ID NO: 5881103 - DNA, 25 bp, Homo sapien
cacttggacccccaccgcatagagc

SEQ ID NO: 5881104 - DNA, 25 bp, Homo sapien
atcatgacctcctcacctgtgggca

SEQ ID NO: 5881105 - DNA, 25 bp, Homo sapien
cagcccccggtcaagtccaagtcat

SEQ ID NO: 5881106 - DNA, 25 bp, Homo sapien
agaagcataagcgcggccacctggc

SEQ ID NO: 5881107 - DNA, 25 bp, Homo sapien
atgcaaaggttactgcaaccattcc

SEQ ID NO: 5881108 - DNA, 25 bp, Homo sapien
gtggagggagcacgccccatattag

SEQ ID NO: 5881109 - DNA, 25 bp, Homo sapien
caatcgccttttgcctcctcgtcgg

SEQ ID NO: 5881110 - DNA, 25 bp, Homo sapien
gacctgcccccggccgcgatgccca

SEQ ID NO: 5881111 - DNA, 25 bp, Homo sapien
cacatggagctctaatccccacgcc

SEQ ID NO: 5881112 - DNA, 25 bp, Homo sapien
aggttactgcaaccattccagccag

SEQ ID NO: 5881113 - DNA, 25 bp, Homo sapien
cccattcggcgtagtacccagagag

SEQ ID NO: 5881114 - DNA, 25 bp, Homo sapien
ataagcgcggccacctggccgaggc

SEQ ID NO: 5881115 - DNA, 25 bp, Homo sapien
agactccagacaatcgccttttgcc

SEQ ID NO: 5881116 - DNA, 25 bp, Homo sapien
catagcagataaacttctgcactgg

SEQ ID NO: 5881117 - DNA, 25 bp, Homo sapien
actaggtgcagaatgtccttcccag

SEQ ID NO: 5881118 - DNA, 25 bp, Homo sapien
acgcgtgcacccaggccagcaagct

SEQ ID NO: 5881119 - DNA, 25 bp, Homo sapien
cacaaacggaaacaatgcaatggca

SEQ ID NO: 5881120 - DNA, 25 bp, Homo sapien
gagagaggcttccggcctggcagaa

SEQ ID NO: 5881121 - DNA, 25 bp, Homo sapien
aatggctatggagcctcccgccatg

SEQ ID NO: 5881122 - DNA, 25 bp, Homo sapien
atattgcagacaataacccctttaa

SEQ ID NO: 5881123 - DNA, 25 bp, Homo sapien
gaagactcggtggccggcgagtcgg

SEQ ID NO: 5881124 - DNA, 25 bp, Homo sapien
gaggcttccggcctggcagaagggc

SEQ ID NO: 5881125 - DNA, 25 bp, Homo sapien
acagatgatgaaccagaccacggcc

SEQ ID NO: 5881126 - DNA, 25 bp, Homo sapien
aacttcccattgggggacattctta

SEQ ID NO: 5881127 - DNA, 25 bp, Homo sapien
ttcagagcaacctggtggtgcaccg

SEQ ID NO: 5881128 - DNA, 25 bp, Homo sapien
gcctcggggggcctgtccaaaaagc

SEQ ID NO: 5881129 - DNA, 25 bp, Homo sapien
gtcggaccgcatagacgatggcact

SEQ ID NO: 5881130 - DNA, 25 bp, Homo sapien
aatcgtcccccatgacggtcaagtc

SEQ ID NO: 5881131 - DNA, 25 bp, Homo sapien
attgcagacaataacccctttaacc

SEQ ID NO: 5881132 - DNA, 25 bp, Homo sapien
cacgtctagcccaccgctgtcccca

SEQ ID NO: 5881133 - DNA, 25 bp, Homo sapien
gctcagctccatgcagcacttcagc

SEQ ID NO: 5881134 - DNA, 25 bp, Homo sapien
cggagaacgggagcttgcgcttctc

SEQ ID NO: 5881135 - DNA, 25 bp, Homo sapien
cacttaagcaaacgggaattctcgc

SEQ ID NO: 5881136 - DNA, 25 bp, Homo sapien
ggcgcagccacacgggcgagaagcc

SEQ ID NO: 5881137 - DNA, 25 bp, Homo sapien
tcagcgaggccttccaccaggtcct

SEQ ID NO: 5881138 - DNA, 25 bp, Homo sapien
ccggtcaagtccaagtcatgcgagt

SEQ ID NO: 5881139 - DNA, 25 bp, Homo sapien
cgcgccctgcccgacgtcatgcagg

SEQ ID NO: 5881140 - DNA, 25 bp, Homo sapien
ttcctggcgacgccccccctccctc

SEQ ID NO: 5881141 - DNA, 25 bp, Homo sapien
cgcagcggcacgggaagtggaggga

SEQ ID NO: 5881142 - DNA, 25 bp, Homo sapien
cccttcaccaatcgagatgaaaaaa

SEQ ID NO: 5881143 - DNA, 25 bp, Homo sapien
ggccacccatcacccgagtgccttt

SEQ ID NO: 5881144 - DNA, 25 bp, Homo sapien
agcagctacacatgtacaacttgca

SEQ ID NO: 5881145 - DNA, 25 bp, Homo sapien
aaacagccattcaccagtgcatggt

SEQ ID NO: 5881146 - DNA, 25 bp, Homo sapien
ccctgtttagtccaccaccgagaca

SEQ ID NO: 5881147 - DNA, 25 bp, Homo sapien
ttctgcactggaggggcctctcctc

SEQ ID NO: 5881148 - DNA, 25 bp, Homo sapien
ctgagccccttctctaagcgcatca

SEQ ID NO: 5881149 - DNA, 25 bp, Homo sapien
gggtggactacggcttcgggctgag

SEQ ID NO: 5881150 - DNA, 25 bp, Homo sapien
acagccattcaccagtgcatggttt

SEQ ID NO: 5881151 - DNA, 25 bp, Homo sapien
gagctctaatccccacgcctgggat

SEQ ID NO: 5881152 - DNA, 25 bp, Homo sapien
gaacgggagcttgcgcttctccaca

SEQ ID NO: 5881153 - DNA, 25 bp, Homo sapien
tacgcggcctccaggcagctcaaag

SEQ ID NO: 5881154 - DNA, 25 bp, Homo sapien
atattagtggtccgggcccgggcag

SEQ ID NO: 5881155 - DNA, 25 bp, Homo sapien
gacgtcatgcagggcatggtgctca

SEQ ID NO: 5881156 - DNA, 25 bp, Homo sapien
ggaggaggagctgacggagagcgag

SEQ ID NO: 5881157 - DNA, 25 bp, Homo sapien
cggggggcctgtccaaaaagctgct

SEQ ID NO: 5881158 - DNA, 25 bp, Homo sapien
caatgcaatggcagcctctgcttag

SEQ ID NO: 5881159 - DNA, 25 bp, Homo sapien
gacgcacatgcacaaatcgtccccc

SEQ ID NO: 5881160 - DNA, 25 bp, Homo sapien
caaaccccagcacttaagcaaacgg

SEQ ID NO: 5881161 - DNA, 25 bp, Homo sapien
agcatccaatcccgtggaggttggc

SEQ ID NO: 5881162 - DNA, 25 bp, Homo sapien
aagatgtgtggcagttttcggatgg

SEQ ID NO: 5881163 - DNA, 25 bp, Homo sapien
cgtcatgcagggcatggtgctcagc

SEQ ID NO: 5881164 - DNA, 25 bp, Homo sapien
agcgacttggtgggcagcgccagca

SEQ ID NO: 5881165 - DNA, 25 bp, Homo sapien
ccggcaccagcgacttggtgggcag

SEQ ID NO: 5881166 - DNA, 25 bp, Homo sapien
ggaggcggcgcgccaccacgagaac

SEQ ID NO: 5881167 - DNA, 25 bp, Homo sapien
tccgtggtggccaagttcaagagcg

SEQ ID NO: 5881168 - DNA, 25 bp, Homo sapien
ctgctaagaataccaggatcagtat

SEQ ID NO: 5881169 - DNA, 25 bp, Homo sapien
ggcggaagagatggccctggccacc

SEQ ID NO: 5881170 - DNA, 25 bp, Homo sapien
ccacaccgcccggggagctggacgg

SEQ ID NO: 5881171 - DNA, 25 bp, Homo sapien
ccaagttcaagagcgagaacgaccc

SEQ ID NO: 5881172 - DNA, 25 bp, Homo sapien
cccgagcctcttgaagccattctta

SEQ ID NO: 5881173 - DNA, 25 bp, Homo sapien
acctggccgaggccgagggccacag

SEQ ID NO: 5881174 - DNA, 25 bp, Homo sapien
ccctggccacccatcacccgagtgc

SEQ ID NO: 5881175 - DNA, 25 bp, Homo sapien
ttcacacacccccattcggcgtagt

SEQ ID NO: 5881176 - DNA, 25 bp, Homo sapien
tcgtcggagcactcctcggagaacg

SEQ ID NO: 5881177 - DNA, 25 bp, Homo sapien
cggagcactcctcggagaacgggag

SEQ ID NO: 5881178 - DNA, 25 bp, Homo sapien
tcagtatcgagagaggcttccggcc

SEQ ID NO: 5881179 - DNA, 25 bp, Homo sapien
ggccctggccacccatcacccgagt

SEQ ID NO: 5881180 - DNA, 25 bp, Homo sapien
ggatttctctaggagacttagagag

SEQ ID NO: 5881181 - DNA, 25 bp, Homo sapien
caccaggtcctgggcgagaagcata

SEQ ID NO: 5881182 - DNA, 25 bp, Homo sapien
gaagagatggccctggccacccatc

SEQ ID NO: 5881183 - DNA, 25 bp, Homo sapien
agggagcacgccccatattagtggt

SEQ ID NO: 5881184 - DNA, 25 bp, Homo sapien
tttaacctgctaagaataccaggat

SEQ ID NO: 5881185 - DNA, 25 bp, Homo sapien
cggcttcgggctgagcctggaggcg

SEQ ID NO: 5881186 - DNA, 25 bp, Homo sapien
cgccaccacgagaacagctcgcggg

SEQ ID NO: 5881187 - DNA, 25 bp, Homo sapien
cacggcccgttgggagctccagaag

SEQ ID NO: 5881188 - DNA, 25 bp, Homo sapien
caaatcgtcccccatgacggtcaag

SEQ ID NO: 5881189 - DNA, 25 bp, Homo sapien
gaaagcgaacacggaagtcccctga

SEQ ID NO: 5881190 - DNA, 25 bp, Homo sapien
aagatcccttccttagcttcggaga

SEQ ID NO: 5881191 - DNA, 25 bp, Homo sapien
cctggtggtgcaccggcgcagccac

SEQ ID NO: 5881192 - DNA, 25 bp, Homo sapien
cacccgagtgcctttgacagggtgc

SEQ ID NO: 5881193 - DNA, 25 bp, Homo sapien
agaagccctacaagtgcaacctgtg

SEQ ID NO: 5881194 - DNA, 25 bp, Homo sapien
actccagacaatcgccttttgcctc

SEQ ID NO: 5881195 - DNA, 25 bp, Homo sapien
aaaggttactgcaaccattccagcc

SEQ ID NO: 5881196 - DNA, 25 bp, Homo sapien
gcaaacagccattcaccagtgcatg

SEQ ID NO: 5881197 - DNA, 25 bp, Homo sapien
gccgcgccctgcccgacgtcatgca

SEQ ID NO: 5881198 - DNA, 25 bp, Homo sapien
gcttcgggctgagcctggaggcggc

SEQ ID NO: 5881199 - DNA, 25 bp, Homo sapien
cgccccatattagtggtccgggccc

SEQ ID NO: 5881200 - DNA, 25 bp, Homo sapien
ggcgcagcggcacgggaagtggagg

SEQ ID NO: 5881201 - DNA, 25 bp, Homo sapien
atggccctggccacccatcacccga

SEQ ID NO: 5881202 - DNA, 25 bp, Homo sapien
tcttacagatgatgaaccagaccac

SEQ ID NO: 5881203 - DNA, 25 bp, Homo sapien
ttggcatccaggtcacgccagagga

SEQ ID NO: 5881204 - DNA, 25 bp, Homo sapien
atgtccttcccagccacctctccat

SEQ ID NO: 5881205 - DNA, 25 bp, Homo sapien
caaacggaaacaatgcaatggcagc

SEQ ID NO: 5881206 - DNA, 25 bp, Homo sapien
caaacgggaattctcgcccgagcct

SEQ ID NO: 5881207 - DNA, 25 bp, Homo sapien
gctaagaataccaggatcagtatcg

SEQ ID NO: 5881208 - DNA, 25 bp, Homo sapien
caaagatcccttccttagcttcgga

SEQ ID NO: 5881209 - DNA, 25 bp, Homo sapien
cttcagcgaggccttccaccaggtc

SEQ ID NO: 5881210 - DNA, 25 bp, Homo sapien
gcaacacgcacagaacactcatgga

SEQ ID NO: 5881211 - DNA, 25 bp, Homo sapien
ggtcacgccagaggatgacgattgt

SEQ ID NO: 5881212 - DNA, 25 bp, Homo sapien
cttgcgacgaagactcggtggccgg

SEQ ID NO: 5881213 - DNA, 25 bp, Homo sapien
tggtggtgcaccggcgcagccacac

SEQ ID NO: 5881214 - DNA, 25 bp, Homo sapien
ccctcccagcccccggtcaagtcca

SEQ ID NO: 5881215 - DNA, 25 bp, Homo sapien
aaacttctgcactggaggggcctct

SEQ ID NO: 5881216 - DNA, 25 bp, Homo sapien
ttgaagccattcttacagatgatga

SEQ ID NO: 5881217 - DNA, 25 bp, Homo sapien
tccctcctctgcaatccgcccctcc

SEQ ID NO: 5881218 - DNA, 25 bp, Homo sapien
gaacactcatggattaagaatctac

SEQ ID NO: 5881219 - DNA, 25 bp, Homo sapien
ttatttttatcgagcacaaacggaa

SEQ ID NO: 5881220 - DNA, 25 bp, Homo sapien
cgggctgagcctggaggcggcgcgc

SEQ ID NO: 5881221 - DNA, 25 bp, Homo sapien
ctccatgcagcacttcagcgaggcc

SEQ ID NO: 5881222 - DNA, 25 bp, Homo sapien
gcaagccgcccttcctggcgacgcc

SEQ ID NO: 5881223 - DNA, 25 bp, Homo sapien
tgcgacgaagactcggtggccggcg

SEQ ID NO: 5881224 - DNA, 25 bp, Homo sapien
caagtgcaacctgtgcgaccacgcg

SEQ ID NO: 5881225 - DNA, 25 bp, Homo sapien
ccagatgaacttcccattgggggac

SEQ ID NO: 5881226 - DNA, 25 bp, Homo sapien
atttcagagcaacctggtggtgcac

SEQ ID NO: 5881227 - DNA, 25 bp, Homo sapien
ggcgtgggcgacgagagccgcgccc

SEQ ID NO: 5881228 - DNA, 25 bp, Homo sapien
gccagaggatgacgattgtttatca

SEQ ID NO: 5881229 - DNA, 25 bp, Homo sapien
ttgcaaacagccattcaccagtgca

SEQ ID NO: 5881230 - DNA, 25 bp, Homo sapien
ccccacgcctgggatgagtgcagaa

SEQ ID NO: 5881231 - DNA, 25 bp, Homo sapien
gaacgtgtactcgcagtggctcgcc

SEQ ID NO: 5881232 - DNA, 25 bp, Homo sapien
cttccccttcaccaatcgagatgaa

SEQ ID NO: 5881233 - DNA, 25 bp, Homo sapien
ggcaagacgttcaaatttcagagca

SEQ ID NO: 5881234 - DNA, 25 bp, Homo sapien
actcatggattaagaatctacttag

SEQ ID NO: 5881235 - DNA, 25 bp, Homo sapien
gttcttcacacacccccattcggcg

SEQ ID NO: 5881236 - DNA, 25 bp, Homo sapien
gagaacagctcgcggggcgcggtcg

SEQ ID NO: 5881237 - DNA, 25 bp, Homo sapien
tcctcccctcgttctgcacatggag

SEQ ID NO: 5881238 - DNA, 25 bp, Homo sapien
agacgatggcactgttaatggccgc

SEQ ID NO: 5881239 - DNA, 25 bp, Homo sapien
ggttggtatcccttcaggactaggt

SEQ ID NO: 5881240 - DNA, 25 bp, Homo sapien
ggtggccggcgagtcggaccgcata

SEQ ID NO: 5881241 - DNA, 25 bp, Homo sapien
aagttcaagagcgagaacgacccca

SEQ ID NO: 5881242 - DNA, 25 bp, Homo sapien
ggcgagaagcataagcgcggccacc

SEQ ID NO: 5881243 - DNA, 25 bp, Homo sapien
cgcacatgcacaaatcgtcccccat

SEQ ID NO: 5881244 - DNA, 25 bp, Homo sapien
ttggtatcccttcaggactaggtgc

SEQ ID NO: 5881245 - DNA, 25 bp, Homo sapien
ggatcatgacctcctcacctgtggg

SEQ ID NO: 5881246 - DNA, 25 bp, Homo sapien
gcctggcagaagggcgctttccacc

SEQ ID NO: 5881247 - DNA, 25 bp, Homo sapien
cagagagctcaagatgtgtggcagt

SEQ ID NO: 5881248 - DNA, 25 bp, Homo sapien
ctcccagcccccggtcaagtccaag

SEQ ID NO: 5881249 - DNA, 25 bp, Homo sapien
taagcgcatcaagctcgagaaggag

SEQ ID NO: 5881250 - DNA, 25 bp, Homo sapien
gaccgcatagacgatggcactgtta

SEQ ID NO: 5881251 - DNA, 25 bp, Homo sapien
tgaaccagaccacggcccgttggga

SEQ ID NO: 5881252 - DNA, 25 bp, Homo sapien
cggcccgttgggagctccagaaggg

SEQ ID NO: 5881253 - DNA, 25 bp, Homo sapien
gggggcctgtccaaaaagctgctgc

SEQ ID NO: 5881254 - DNA, 25 bp, Homo sapien
atatgccccgcagggtatttgtaaa

SEQ ID NO: 5881255 - DNA, 25 bp, Homo sapien
gagagcgagagggtggactacggct

SEQ ID NO: 5881256 - DNA, 25 bp, Homo sapien
tcttgaagccattcttacagatgat

SEQ ID NO: 5881257 - DNA, 25 bp, Homo sapien
ccatattagtggtccgggcccgggc

SEQ ID NO: 5881258 - DNA, 25 bp, Homo sapien
taagaatctacttagaaagcgaaca

SEQ ID NO: 5881259 - DNA, 25 bp, Homo sapien
tgtggataagccaccttccccttca

SEQ ID NO: 5881260 - DNA, 25 bp, Homo sapien
ttcccagccacctctccatgggatt

SEQ ID NO: 5881261 - DNA, 25 bp, Homo sapien
cccagctcaaaagagggcagacgca

SEQ ID NO: 5881262 - DNA, 25 bp, Homo sapien
agatgatgaaccagaccacggcccg

SEQ ID NO: 5881263 - DNA, 25 bp, Homo sapien
agcacaaacggaaacaatgcaatgg

SEQ ID NO: 5881264 - DNA, 25 bp, Homo sapien
catggagctctaatccccacgcctg

SEQ ID NO: 5881265 - DNA, 25 bp, Homo sapien
aacacgcacagaacactcatggatt

SEQ ID NO: 5881266 - DNA, 25 bp, Homo sapien
tgacctcctcacctgtgggcagtgc

SEQ ID NO: 5881267 - DNA, 25 bp, Homo sapien
aagctcgagaaggagttcgacctgc

SEQ ID NO: 5881268 - DNA, 25 bp, Homo sapien
cagctcaaaagagggcagacgcagc

SEQ ID NO: 5881269 - DNA, 25 bp, Homo sapien
agggaacacgtctagcccaccgctg

SEQ ID NO: 5881270 - DNA, 25 bp, Homo sapien
cagggtatttgtaaagatgagccca

SEQ ID NO: 5881271 - DNA, 25 bp, Homo sapien
cggtcgtgggcgtgggcgacgagag

SEQ ID NO: 5881272 - DNA, 25 bp, Homo sapien
gcggcgcgccaccacgagaacagct

SEQ ID NO: 5881273 - DNA, 25 bp, Homo sapien
acgccccccctccctcctctgcaat

SEQ ID NO: 5881274 - DNA, 25 bp, Homo sapien
attgtttatcaacgtcatctagagg

SEQ ID NO: 5881275 - DNA, 25 bp, Homo sapien
atcacttggacccccaccgcataga

SEQ ID NO: 5881276 - DNA, 25 bp, Homo sapien
gagaacgtgtactcgcagtggctcg

SEQ ID NO: 5881277 - DNA, 25 bp, Homo sapien
ggagggagcacgccccatattagtg

SEQ ID NO: 5881278 - DNA, 25 bp, Homo sapien
cagacaataacccctttaacctgct

SEQ ID NO: 5881279 - DNA, 25 bp, Homo sapien
tctagcccaccgctgtccccaggcc

SEQ ID NO: 5881280 - DNA, 25 bp, Homo sapien
cacaaatcgtcccccatgacggtca

SEQ ID NO: 5881281 - DNA, 25 bp, Homo sapien
ccccagctcgctgagccccttctct

SEQ ID NO: 5881282 - DNA, 25 bp, Homo sapien
tggctcgccggctacgcggcctcca

SEQ ID NO: 5881283 - DNA, 25 bp, Homo sapien
gcgagaacgaccccaacctgatccc

SEQ ID NO: 5881284 - DNA, 25 bp, Homo sapien
ccgacgtcatgcagggcatggtgct

SEQ ID NO: 5881285 - DNA, 25 bp, Homo sapien
gagagggtggactacggcttcgggc

SEQ ID NO: 5881286 - DNA, 25 bp, Homo sapien
tcaccagtgcatggtttctcttgca

SEQ ID NO: 5881287 - DNA, 25 bp, Homo sapien
ggcccagctcaaaagagggcagacg

SEQ ID NO: 5881288 - DNA, 25 bp, Homo sapien
tcggcctcggggggcctgtccaaaa

SEQ ID NO: 5881289 - DNA, 25 bp, Homo sapien
ttacagatgatgaaccagaccacgg

SEQ ID NO: 5881290 - DNA, 25 bp, Homo sapien
gacacttgcgacgaagactcggtgg

SEQ ID NO: 5881291 - DNA, 25 bp, Homo sapien
gcttctccacaccgcccggggagct

SEQ ID NO: 5881292 - DNA, 25 bp, Homo sapien
gagggatctcggggcgcagcggcac

SEQ ID NO: 5881293 - DNA, 25 bp, Homo sapien
ctgacggagagcgagagggtggact

SEQ ID NO: 5881294 - DNA, 25 bp, Homo sapien
cttcggagactccagacaatcgcct

SEQ ID NO: 5881295 - DNA, 25 bp, Homo sapien
cttggacccccaccgcatagagcgc

SEQ ID NO: 5881296 - DNA, 25 bp, Homo sapien
gaacacggaagtcccctgaccccgc

SEQ ID NO: 5881297 - DNA, 25 bp, Homo sapien
tcgagaaggagttcgacctgccccc

SEQ ID NO: 5881298 - DNA, 25 bp, Homo sapien
gcagctcaaagatcccttccttagc

SEQ ID NO: 5881299 - DNA, 25 bp, Homo sapien
ttcggcgtagtacccagagagctca

SEQ ID NO: 5881300 - DNA, 25 bp, Homo sapien
aagcgaacacggaagtcccctgacc

SEQ ID NO: 5881301 - DNA, 25 bp, Homo sapien
ccggcgcagccacacgggcgagaag

SEQ ID NO: 5881302 - DNA, 25 bp, Homo sapien
taacccctttaacctgctaagaata

SEQ ID NO: 5881303 - DNA, 25 bp, Homo sapien
gagggtggactacggcttcgggctg

SEQ ID NO: 5881304 - DNA, 25 bp, Homo sapien
gagaggcttccggcctggcagaagg

SEQ ID NO: 5881305 - DNA, 25 bp, Homo sapien
cggagggatctcggggcgcagcggc

SEQ ID NO: 5881306 - DNA, 25 bp, Homo sapien
ggggcgcagcggcacgggaagtgga

SEQ ID NO: 5881307 - DNA, 25 bp, Homo sapien
aagcgcggccacctggccgaggccg

SEQ ID NO: 5881308 - DNA, 25 bp, Homo sapien
cagacaatcgccttttgcctcctcg

SEQ ID NO: 5881309 - DNA, 25 bp, Homo sapien
ccccaggccggcccagccctatgca

SEQ ID NO: 5881310 - DNA, 25 bp, Homo sapien
cgcacagaacactcatggattaaga

SEQ ID NO: 5881311 - DNA, 25 bp, Homo sapien
ccaagtcatgcgagttctgcggcaa

SEQ ID NO: 5881312 - DNA, 25 bp, Homo sapien
atgccccgcagggtatttgtaaaga

SEQ ID NO: 5881313 - DNA, 25 bp, Homo sapien
cgcggtcgtgggcgtgggcgacgag

SEQ ID NO: 5881314 - DNA, 25 bp, Homo sapien
gtccaagtcatgcgagttctgcggc

SEQ ID NO: 5881315 - DNA, 25 bp, Homo sapien
tgcagacaataacccctttaacctg

SEQ ID NO: 5881316 - DNA, 25 bp, Homo sapien
cttcccattgggggacattcttatt

SEQ ID NO: 5881317 - DNA, 25 bp, Homo sapien
gccaggtagcaagccgcccttcctg

SEQ ID NO: 5881318 - DNA, 25 bp, Homo sapien
aagtccaagtcatgcgagttctgcg

SEQ ID NO: 5881319 - DNA, 25 bp, Homo sapien
agcgaggccttccaccaggtcctgg

SEQ ID NO: 5881320 - DNA, 25 bp, Homo sapien
tccagccaggtagcaagccgccctt

SEQ ID NO: 5881321 - DNA, 25 bp, Homo sapien
cagaggatgacgattgtttatcaac

SEQ ID NO: 5881322 - DNA, 25 bp, Homo sapien
aagctgaagcgccacatgaagacgc

SEQ ID NO: 5881323 - DNA, 25 bp, Homo sapien
atggtttctcttgcaacacgcacag

SEQ ID NO: 5881324 - DNA, 25 bp, Homo sapien
gcctggaggcggcgcgccaccacga

SEQ ID NO: 5881325 - DNA, 25 bp, Homo sapien
gtggccaagttcaagagcgagaacg

SEQ ID NO: 5881326 - DNA, 25 bp, Homo sapien
acgtgtactcgcagtggctcgccgg

SEQ ID NO: 5881327 - DNA, 25 bp, Homo sapien
gaggttggcatccaggtcacgccag

SEQ ID NO: 5881328 - DNA, 25 bp, Homo sapien
ttctgcggcaagacgttcaaatttc

SEQ ID NO: 5881329 - DNA, 25 bp, Homo sapien
taagcaaacgggaattctcgcccga

SEQ ID NO: 5881330 - DNA, 25 bp, Homo sapien
cccctccctcctctgcaatccgccc

SEQ ID NO: 5881331 - DNA, 25 bp, Homo sapien
taacctgctaagaataccaggatca

SEQ ID NO: 5881332 - DNA, 25 bp, Homo sapien
tgaagacgcacatgcacaaatcgtc

SEQ ID NO: 5881333 - DNA, 25 bp, Homo sapien
ctcccctcgttctgcacatggagct

SEQ ID NO: 5881334 - DNA, 25 bp, Homo sapien
aaaagagggcagacgcagcgacact

SEQ ID NO: 5881335 - DNA, 25 bp, Homo sapien
agatgaacttcccattgggggacat

SEQ ID NO: 5881336 - DNA, 25 bp, Homo sapien
gccgcggctgctccccgggcgagtc

SEQ ID NO: 5881337 - DNA, 25 bp, Homo sapien
tcccttccttagcttcggagactcc

SEQ ID NO: 5881338 - DNA, 25 bp, Homo sapien
gccacatgaagacgcacatgcacaa

SEQ ID NO: 5881339 - DNA, 25 bp, Homo sapien
gcagataaacttctgcactggaggg

SEQ ID NO: 5881340 - DNA, 25 bp, Homo sapien
gaaaaaagcatccaatcccgtggag

SEQ ID NO: 5881341 - DNA, 25 bp, Homo sapien
gccggctacgcggcctccaggcagc

SEQ ID NO: 5881342 - DNA, 25 bp, Homo sapien
ccatcacccgagtgcctttgacagg

SEQ ID NO: 5881343 - DNA, 25 bp, Homo sapien
ccacgcgtgcacccaggccagcaag

SEQ ID NO: 5881344 - DNA, 25 bp, Homo sapien
cacagaacactcatggattaagaat

SEQ ID NO: 5881345 - DNA, 25 bp, Homo sapien
gataagccaccttccccttcaccaa

SEQ ID NO: 5881346 - DNA, 25 bp, Homo sapien
ccatgcagcacttcagcgaggcctt

SEQ ID NO: 5881347 - DNA, 25 bp, Homo sapien
gctcgagaaggagttcgacctgccc

SEQ ID NO: 5881348 - DNA, 25 bp, Homo sapien
atgcccaacacggagaacgtgtact

SEQ ID NO: 5881349 - DNA, 25 bp, Homo sapien
ctgtccccaggccggcccagcccta

SEQ ID NO: 5881350 - DNA, 25 bp, Homo sapien
cagagcaacctggtggtgcaccggc

SEQ ID NO: 5881351 - DNA, 25 bp, Homo sapien
gggtatttgtaaagatgagcccagc

SEQ ID NO: 5881352 - DNA, 25 bp, Homo sapien
gtggtgcaccggcgcagccacacgg

SEQ ID NO: 5881353 - DNA, 25 bp, Homo sapien
accaatcgagatgaaaaaagcatcc

SEQ ID NO: 5881354 - DNA, 25 bp, Homo sapien
gacgattgtttatcaacgtcatcta

SEQ ID NO: 5881355 - DNA, 25 bp, Homo sapien
cctctcctcccctcgttctgcacat

SEQ ID NO: 5881356 - DNA, 25 bp, Homo sapien
tatggagcctcccgccatggatttc

SEQ ID NO: 5881357 - DNA, 25 bp, Homo sapien
ggcgacgagagccgcgccctgcccg

SEQ ID NO: 5881358 - DNA, 25 bp, Homo sapien
cgggaattctcgcccgagcctcttg

SEQ ID NO: 5881359 - DNA, 25 bp, Homo sapien
gcatagacgatggcactgttaatgg

SEQ ID NO: 5881360 - DNA, 25 bp, Homo sapien
ccattccagccaggtagcaagccgc

SEQ ID NO: 5881361 - DNA, 25 bp, Homo sapien
gtgtactcgcagtggctcgccggct

SEQ ID NO: 5881362 - DNA, 25 bp, Homo sapien
catgacggtcaagtccgacgacggt

SEQ ID NO: 5881363 - DNA, 25 bp, Homo sapien
ctcaaagatcccttccttagcttcg

SEQ ID NO: 5881364 - DNA, 25 bp, Homo sapien
attcatattgcagacaataacccct

SEQ ID NO: 5881365 - DNA, 25 bp, Homo sapien
atcgagatgaaaaaagcatccaatc

SEQ ID NO: 5881366 - DNA, 25 bp, Homo sapien
agccctatgcaaaggttactgcaac

SEQ ID NO: 5881367 - DNA, 25 bp, Homo sapien
ctccctcccagcccccggtcaagtc

SEQ ID NO: 5881368 - DNA, 25 bp, Homo sapien
gccccttctctaagcgcatcaagct

SEQ ID NO: 5881369 - DNA, 25 bp, Homo sapien
acgatggcactgttaatggccgcgg

SEQ ID NO: 5881370 - DNA, 25 bp, Homo sapien
tgccagatgaacttcccattggggg

SEQ ID NO: 5881371 - DNA, 25 bp, Homo sapien
tagagagctggcagggaacacgtct

SEQ ID NO: 5881372 - DNA, 25 bp, Homo sapien
acctggatgccaacctccacgggat

SEQ ID NO: 5881373 - DNA, 25 bp, Homo sapien
ggggagctggcggtggagagaccgt

SEQ ID NO: 5881374 - DNA, 25 bp, Homo sapien
gtagtccaccctctcgctctccgtc

SEQ ID NO: 5881375 - DNA, 25 bp, Homo sapien
gcttccatccgaaaactgccacaca

SEQ ID NO: 5881376 - DNA, 25 bp, Homo sapien
ggcggtggagagaccgtcgtcggac

SEQ ID NO: 5881377 - DNA, 25 bp, Homo sapien
aactccttctcgagcttgatgcgct

SEQ ID NO: 5881378 - DNA, 25 bp, Homo sapien
cgcagaactcgcatgacttggactt

SEQ ID NO: 5881379 - DNA, 25 bp, Homo sapien
ctcgctcttgaacttggccaccacg

SEQ ID NO: 5881380 - DNA, 25 bp, Homo sapien
aagtgatgtctcggtggtggactaa

SEQ ID NO: 5881381 - DNA, 25 bp, Homo sapien
tcatgatccccttctggagctccca

SEQ ID NO: 5881382 - DNA, 25 bp, Homo sapien
ctgcactcatcccaggcgtggggat

SEQ ID NO: 5881383 - DNA, 25 bp, Homo sapien
gccaggtggccgcgcttatgcttct

SEQ ID NO: 5881384 - DNA, 25 bp, Homo sapien
gggggacgatttgtgcatgtgcgtc

SEQ ID NO: 5881385 - DNA, 25 bp, Homo sapien
taacagtgccatcgtctatgcggtc

SEQ ID NO: 5881386 - DNA, 25 bp, Homo sapien
gtgtagctgctgggctcatctttac

SEQ ID NO: 5881387 - DNA, 25 bp, Homo sapien
ccgtgttgggcatcgcggccggggg

SEQ ID NO: 5881388 - DNA, 25 bp, Homo sapien
gtagggcttctcgcccgtgtggctg

SEQ ID NO: 5881389 - DNA, 25 bp, Homo sapien
agccgcggccattaacagtgccatc

SEQ ID NO: 5881390 - DNA, 25 bp, Homo sapien
gcggtgtggagaagcgcaagctccc

SEQ ID NO: 5881391 - DNA, 25 bp, Homo sapien
cacaggtgaggaggtcatgatcccc

SEQ ID NO: 5881392 - DNA, 25 bp, Homo sapien
tgttctgtgcgtgttgcaagagaaa

SEQ ID NO: 5881393 - DNA, 25 bp, Homo sapien
gcgccgcctccaggctcagcccgaa

SEQ ID NO: 5881394 - DNA, 25 bp, Homo sapien
ttgtagggcttctcgcccgtgtggc

SEQ ID NO: 5881395 - DNA, 25 bp, Homo sapien
ctcgcccggggagcagccgcggcca

SEQ ID NO: 5881396 - DNA, 25 bp, Homo sapien
cgttctccgaggagtgctccgacga

SEQ ID NO: 5881397 - DNA, 25 bp, Homo sapien
gtttgccttgcttgcggcgagacat

SEQ ID NO: 5881398 - DNA, 25 bp, Homo sapien
tcgtcatcctctggcgtgacctgga

SEQ ID NO: 5881399 - DNA, 25 bp, Homo sapien
ggtgcacgcgtggtcgcacaggttg

SEQ ID NO: 5881400 - DNA, 25 bp, Homo sapien
tcatcatctgtaagaatggcttcaa

SEQ ID NO: 5881401 - DNA, 25 bp, Homo sapien
ccacgggattggatgcttttttcat

SEQ ID NO: 5881402 - DNA, 25 bp, Homo sapien
actcgcatgacttggacttgaccgg

SEQ ID NO: 5881403 - DNA, 25 bp, Homo sapien
ccgactcgcccggggagcagccgcg

SEQ ID NO: 5881404 - DNA, 25 bp, Homo sapien
ctgcgccccgagatccctccgtcca

SEQ ID NO: 5881405 - DNA, 25 bp, Homo sapien
ggctcagcccgaagccgtagtccac

SEQ ID NO: 5881406 - DNA, 25 bp, Homo sapien
gctgcgtctgccctcttttgagctg

SEQ ID NO: 5881407 - DNA, 25 bp, Homo sapien
aggaggtcatgatccccttctggag

SEQ ID NO: 5881408 - DNA, 25 bp, Homo sapien
ggggcatattctgcactcatcccag

SEQ ID NO: 5881409 - DNA, 25 bp, Homo sapien
gccaacctccacgggattggatgct

SEQ ID NO: 5881410 - DNA, 25 bp, Homo sapien
aaaataagaatgtcccccaatggga

SEQ ID NO: 5881411 - DNA, 25 bp, Homo sapien
gtcgcacaggttgcacttgtagggc

SEQ ID NO: 5881412 - DNA, 25 bp, Homo sapien
tcgccaggaagggcggcttgctacc

SEQ ID NO: 5881413 - DNA, 25 bp, Homo sapien
acctggctggaatggttgcagtaac

SEQ ID NO: 5881414 - DNA, 25 bp, Homo sapien
ccctgcggggcatattctgcactca

SEQ ID NO: 5881415 - DNA, 25 bp, Homo sapien
cgctgcccaccaagtcgctggtgcc

SEQ ID NO: 5881416 - DNA, 25 bp, Homo sapien
ttctgcacctagtcctgaagggata

SEQ ID NO: 5881417 - DNA, 25 bp, Homo sapien
ccgtggtctggttcatcatctgtaa

SEQ ID NO: 5881418 - DNA, 25 bp, Homo sapien
ggccattaacagtgccatcgtctat

SEQ ID NO: 5881419 - DNA, 25 bp, Homo sapien
atcttgagctctctgggtactacgc

SEQ ID NO: 5881420 - DNA, 25 bp, Homo sapien
ggcgctgcccaccaagtcgctggtg

SEQ ID NO: 5881421 - DNA, 25 bp, Homo sapien
tggaggccgcgtagccggcgagcca

SEQ ID NO: 5881422 - DNA, 25 bp, Homo sapien
ttcctctagatgacgttgataaaca

SEQ ID NO: 5881423 - DNA, 25 bp, Homo sapien
aggggacttccgtgttcgctttcta

SEQ ID NO: 5881424 - DNA, 25 bp, Homo sapien
tgggcatcgcggccgggggcaggtc

SEQ ID NO: 5881425 - DNA, 25 bp, Homo sapien
cgaccgcgccccgcgagctgttctc

SEQ ID NO: 5881426 - DNA, 25 bp, Homo sapien
agtctccgaagctaaggaagggatc

SEQ ID NO: 5881427 - DNA, 25 bp, Homo sapien
gttccctgccagctctctaagtctc

SEQ ID NO: 5881428 - DNA, 25 bp, Homo sapien
cctccaggctcagcccgaagccgta

SEQ ID NO: 5881429 - DNA, 25 bp, Homo sapien
gctggggctgcccagcagcagcttt

SEQ ID NO: 5881430 - DNA, 25 bp, Homo sapien
tttgcaagttgtacatgtgtagctg

SEQ ID NO: 5881431 - DNA, 25 bp, Homo sapien
ccgggatcaggttggggtcgttctc

SEQ ID NO: 5881432 - DNA, 25 bp, Homo sapien
gttgcagtaacctttgcatagggct

SEQ ID NO: 5881433 - DNA, 25 bp, Homo sapien
gttcctgtttggggcaaattcctct

SEQ ID NO: 5881434 - DNA, 25 bp, Homo sapien
taagaatgtcccccaatgggaagtt

SEQ ID NO: 5881435 - DNA, 25 bp, Homo sapien
ttaagtgctggggtttgccttgctt

SEQ ID NO: 5881436 - DNA, 25 bp, Homo sapien
tgaacttggccaccacggacttgag

SEQ ID NO: 5881437 - DNA, 25 bp, Homo sapien
gataccaacccgcggggtcagggga

SEQ ID NO: 5881438 - DNA, 25 bp, Homo sapien
atgtgttcctgtttggggcaaattc

SEQ ID NO: 5881439 - DNA, 25 bp, Homo sapien
gtcgtcctcctcttcctcctcgtcc

SEQ ID NO: 5881440 - DNA, 25 bp, Homo sapien
tgcgtctgccctcttttgagctggg

SEQ ID NO: 5881441 - DNA, 25 bp, Homo sapien
cttgatgcgcttagagaaggggctc

SEQ ID NO: 5881442 - DNA, 25 bp, Homo sapien
aagtgtccctgtggccctcggcctc

SEQ ID NO: 5881443 - DNA, 25 bp, Homo sapien
gcgccccgagatccctccgtccagc

SEQ ID NO: 5881444 - DNA, 25 bp, Homo sapien
aataagaatgtcccccaatgggaag

SEQ ID NO: 5881445 - DNA, 25 bp, Homo sapien
gggacttccgtgttcgctttctaag

SEQ ID NO: 5881446 - DNA, 25 bp, Homo sapien
cttctggagctcccaacgggccgtg

SEQ ID NO: 5881447 - DNA, 25 bp, Homo sapien
tcgtcggacttgaccgtcatggggg

SEQ ID NO: 5881448 - DNA, 25 bp, Homo sapien
agaatgtcccccaatgggaagttca

SEQ ID NO: 5881449 - DNA, 25 bp, Homo sapien
ggaaggcctcgctgaagtgctgcat

SEQ ID NO: 5881450 - DNA, 25 bp, Homo sapien
gtgccgggttccggggagctggcgg

SEQ ID NO: 5881451 - DNA, 25 bp, Homo sapien
aggttgctctgaaatttgaacgtct

SEQ ID NO: 5881452 - DNA, 25 bp, Homo sapien
caccatgccctgcatgacgtcgggc

SEQ ID NO: 5881453 - DNA, 25 bp, Homo sapien
ttctccgggatcaggttggggtcgt

SEQ ID NO: 5881454 - DNA, 25 bp, Homo sapien
gtggccctcggcctcggccaggtgg

SEQ ID NO: 5881455 - DNA, 25 bp, Homo sapien
tcctgtttggggcaaattcctctag

SEQ ID NO: 5881456 - DNA, 25 bp, Homo sapien
ttctgccaggccggaagcctctctc

SEQ ID NO: 5881457 - DNA, 25 bp, Homo sapien
gggattggatgcttttttcatctcg

SEQ ID NO: 5881458 - DNA, 25 bp, Homo sapien
cggcctcggccaggtggccgcgctt

SEQ ID NO: 5881459 - DNA, 25 bp, Homo sapien
cttcccgtgccgctgcgccccgaga

SEQ ID NO: 5881460 - DNA, 25 bp, Homo sapien
tccctgccagctctctaagtctcct

SEQ ID NO: 5881461 - DNA, 25 bp, Homo sapien
ttgtgctcgataaaaataagaatgt

SEQ ID NO: 5881462 - DNA, 25 bp, Homo sapien
tgccctcttttgagctgggcctgcc

SEQ ID NO: 5881463 - DNA, 25 bp, Homo sapien
ttcgctttctaagtagattcttaat

SEQ ID NO: 5881464 - DNA, 25 bp, Homo sapien
agagaaggggctcagcgagctgggg

SEQ ID NO: 5881465 - DNA, 25 bp, Homo sapien
ctccacgggattggatgcttttttc

SEQ ID NO: 5881466 - DNA, 25 bp, Homo sapien
atctttgagctgcctggaggccgcg

SEQ ID NO: 5881467 - DNA, 25 bp, Homo sapien
agctgctgggctcatctttacaaat

SEQ ID NO: 5881468 - DNA, 25 bp, Homo sapien
agtcttcgtcgcaagtgtccctgtg

SEQ ID NO: 5881469 - DNA, 25 bp, Homo sapien
gaaggacattctgcacctagtcctg

SEQ ID NO: 5881470 - DNA, 25 bp, Homo sapien
aggggcggattgcagaggagggagg

SEQ ID NO: 5881471 - DNA, 25 bp, Homo sapien
tacgccgaatgggggtgtgtgaaga

SEQ ID NO: 5881472 - DNA, 25 bp, Homo sapien
tctcgtggtggcgcgccgcctccag

SEQ ID NO: 5881473 - DNA, 25 bp, Homo sapien
agctttttctaagcagaggctgcca

SEQ ID NO: 5881474 - DNA, 25 bp, Homo sapien
gagcgcgctgctggcgctgcccacc

SEQ ID NO: 5881475 - DNA, 25 bp, Homo sapien
gcaccaccaggttgctctgaaattt

SEQ ID NO: 5881476 - DNA, 25 bp, Homo sapien
cctccacttcccgtgccgctgcgcc

SEQ ID NO: 5881477 - DNA, 25 bp, Homo sapien
tgaaggggaaggtggcttatccaca

SEQ ID NO: 5881478 - DNA, 25 bp, Homo sapien
ccgaggccgactcgcccggggagca

SEQ ID NO: 5881479 - DNA, 25 bp, Homo sapien
gcccgggcccggaccactaatatgg

SEQ ID NO: 5881480 - DNA, 25 bp, Homo sapien
ctcgagcttgatgcgcttagagaag

SEQ ID NO: 5881481 - DNA, 25 bp, Homo sapien
cttccgtgttcgctttctaagtaga

SEQ ID NO: 5881482 - DNA, 25 bp, Homo sapien
tggggattagagctccatgtgcaga

SEQ ID NO: 5881483 - DNA, 25 bp, Homo sapien
ctcgatactgatcctggtattctta

SEQ ID NO: 5881484 - DNA, 25 bp, Homo sapien
gggtccaagtgatgtctcggtggtg

SEQ ID NO: 5881485 - DNA, 25 bp, Homo sapien
ttcaaccgcagcaccctgtcaaagg

SEQ ID NO: 5881486 - DNA, 25 bp, Homo sapien
gtcccccaatgggaagttcatctgg

SEQ ID NO: 5881487 - DNA, 25 bp, Homo sapien
gcatgtgcgtcttcatgtggcgctt

SEQ ID NO: 5881488 - DNA, 25 bp, Homo sapien
cgcgtggtcgcacaggttgcacttg

SEQ ID NO: 5881489 - DNA, 25 bp, Homo sapien
cctgggtgcacgcgtggtcgcacag

SEQ ID NO: 5881490 - DNA, 25 bp, Homo sapien
catgacgtcgggcagggcgcggctc

SEQ ID NO: 5881491 - DNA, 25 bp, Homo sapien
caccacggacttgagcgcgctgctg

SEQ ID NO: 5881492 - DNA, 25 bp, Homo sapien
ccggggagctggcggtggagagacc

SEQ ID NO: 5881493 - DNA, 25 bp, Homo sapien
aatcccatggagaggtggctgggaa

SEQ ID NO: 5881494 - DNA, 25 bp, Homo sapien
gggagcagccgcggccattaacagt

SEQ ID NO: 5881495 - DNA, 25 bp, Homo sapien
agaggctcgggcgagaattcccgtt

SEQ ID NO: 5881496 - DNA, 25 bp, Homo sapien
aagcagaggctgccattgcattgtt

SEQ ID NO: 5881497 - DNA, 25 bp, Homo sapien
gcgcgctgctggcgctgcccaccaa

SEQ ID NO: 5881498 - DNA, 25 bp, Homo sapien
tctccgaagctaaggaagggatctt

SEQ ID NO: 5881499 - DNA, 25 bp, Homo sapien
aggcgctctatgcggtgggggtcca

SEQ ID NO: 5881500 - DNA, 25 bp, Homo sapien
tgaggaggtcatgatccccttctgg

SEQ ID NO: 5881501 - DNA, 25 bp, Homo sapien
agctcccgttctccgaggagtgctc

SEQ ID NO: 5881502 - DNA, 25 bp, Homo sapien
tgggccggcctggggacagcggtgg

SEQ ID NO: 5881503 - DNA, 25 bp, Homo sapien
gctccctccacttcccgtgccgctg

SEQ ID NO: 5881504 - DNA, 25 bp, Homo sapien
gctgggccggcctggggacagcggt

SEQ ID NO: 5881505 - DNA, 25 bp, Homo sapien
cgagcttgatgcgcttagagaaggg

SEQ ID NO: 5881506 - DNA, 25 bp, Homo sapien
aggaggcaaaaggcgattgtctgga

SEQ ID NO: 5881507 - DNA, 25 bp, Homo sapien
gatgggtggccagggccatctcttc

SEQ ID NO: 5881508 - DNA, 25 bp, Homo sapien
gtagccggcgagccactgcgagtac

SEQ ID NO: 5881509 - DNA, 25 bp, Homo sapien
gggcccggaccactaatatggggcg

SEQ ID NO: 5881510 - DNA, 25 bp, Homo sapien
gtgttccctgccagctctctaagtc

SEQ ID NO: 5881511 - DNA, 25 bp, Homo sapien
tggacttgaccgggggctgggaggg

SEQ ID NO: 5881512 - DNA, 25 bp, Homo sapien
gctttttggacaggccccccgaggc

SEQ ID NO: 5881513 - DNA, 25 bp, Homo sapien
ccgaaaactgccacacatcttgagc

SEQ ID NO: 5881514 - DNA, 25 bp, Homo sapien
cacgaccgcgccccgcgagctgttc

SEQ ID NO: 5881515 - DNA, 25 bp, Homo sapien
ggcagggcgcggctctcgtcgccca

SEQ ID NO: 5881516 - DNA, 25 bp, Homo sapien
aggcgattgtctggagtctccgaag

SEQ ID NO: 5881517 - DNA, 25 bp, Homo sapien
ggccgggggcaggtcgaactccttc

SEQ ID NO: 5881518 - DNA, 25 bp, Homo sapien
agaacgaggggaggagaggcccctc

SEQ ID NO: 5881519 - DNA, 25 bp, Homo sapien
tcagcttgctggcctgggtgcacgc

SEQ ID NO: 5881520 - DNA, 25 bp, Homo sapien
gatgtctcggtggtggactaaacag

SEQ ID NO: 5881521 - DNA, 25 bp, Homo sapien
caaaaggcgattgtctggagtctcc

SEQ ID NO: 5881522 - DNA, 25 bp, Homo sapien
ctttctaagtagattcttaatccat

SEQ ID NO: 5881523 - DNA, 25 bp, Homo sapien
gaagtttatctgctatgtgttcctg

SEQ ID NO: 5881524 - DNA, 25 bp, Homo sapien
ggttaaaggggttattgtctgcaat

SEQ ID NO: 5881525 - DNA, 25 bp, Homo sapien
tcttcgtcgcaagtgtccctgtggc

SEQ ID NO: 5881526 - DNA, 25 bp, Homo sapien
cagcaccctgtcaaaggcactcggg

SEQ ID NO: 5881527 - DNA, 25 bp, Homo sapien
tggtggaaggcctcgctgaagtgct

SEQ ID NO: 5881528 - DNA, 25 bp, Homo sapien
atgggaagttcatctggcactgccc

SEQ ID NO: 5881529 - DNA, 25 bp, Homo sapien
ctgtggccctcggcctcggccaggt

SEQ ID NO: 5881530 - DNA, 25 bp, Homo sapien
cggacttgaccgtcatgggggacga

SEQ ID NO: 5881531 - DNA, 25 bp, Homo sapien
tgtaagaatggcttcaagaggctcg

SEQ ID NO: 5881532 - DNA, 25 bp, Homo sapien
ttgccgcagaactcgcatgacttgg

SEQ ID NO: 5881533 - DNA, 25 bp, Homo sapien
aacgtcttgccgcagaactcgcatg

SEQ ID NO: 5881534 - DNA, 25 bp, Homo sapien
ggatgccaacctccacgggattgga

SEQ ID NO: 5881535 - DNA, 25 bp, Homo sapien
agaaggggctcagcgagctggggct

SEQ ID NO: 5881536 - DNA, 25 bp, Homo sapien
ttgtctggagtctccgaagctaagg

SEQ ID NO: 5881537 - DNA, 25 bp, Homo sapien
ttaatccatgagtgttctgtgcgtg

SEQ ID NO: 5881538 - DNA, 25 bp, Homo sapien
aagtgctgcatggagctgagcacca

SEQ ID NO: 5881539 - DNA, 25 bp, Homo sapien
ccctccagtgcagaagtttatctgc

SEQ ID NO: 5881540 - DNA, 25 bp, Homo sapien
ccctcggcctcggccaggtggccgc

SEQ ID NO: 5881541 - DNA, 25 bp, Homo sapien
aaggtggcttatccacagctttttc

SEQ ID NO: 5881542 - DNA, 25 bp, Homo sapien
gggaaggacattctgcacctagtcc

SEQ ID NO: 5881543 - DNA, 25 bp, Homo sapien
agaggctgccattgcattgtttccg

SEQ ID NO: 5881544 - DNA, 25 bp, Homo sapien
tcttgccgcagaactcgcatgactt

SEQ ID NO: 5881545 - DNA, 25 bp, Homo sapien
ccggcgagccactgcgagtacacgt

SEQ ID NO: 5881546 - DNA, 25 bp, Homo sapien
gtgttgggcatcgcggccgggggca

SEQ ID NO: 5881547 - DNA, 25 bp, Homo sapien
ttcatctggcactgcccacaggtga

SEQ ID NO: 5881548 - DNA, 25 bp, Homo sapien
cgagctgttctcgtggtggcgcgcc

SEQ ID NO: 5881549 - DNA, 25 bp, Homo sapien
tgcggtgggggtccaagtgatgtct

SEQ ID NO: 5881550 - DNA, 25 bp, Homo sapien
ccaccaagtcgctggtgccgggttc

SEQ ID NO: 5881551 - DNA, 25 bp, Homo sapien
tcgcccacgcccacgaccgcgcccc

SEQ ID NO: 5881552 - DNA, 25 bp, Homo sapien
ggagaggtggctgggaaggacattc

SEQ ID NO: 5881553 - DNA, 25 bp, Homo sapien
accctgtcaaaggcactcgggtgat

SEQ ID NO: 5881554 - DNA, 25 bp, Homo sapien
tgtcaaaggcactcgggtgatgggt

SEQ ID NO: 5881555 - DNA, 25 bp, Homo sapien
tgaatggctgtttgcaagttgtaca

SEQ ID NO: 5881556 - DNA, 25 bp, Homo sapien
gctcgggcgagaattcccgtttgct

SEQ ID NO: 5881557 - DNA, 25 bp, Homo sapien
gaagcgcaagctcccgttctccgag

SEQ ID NO: 5881558 - DNA, 25 bp, Homo sapien
ctatgtgttcctgtttggggcaaat

SEQ ID NO: 5881559 - DNA, 25 bp, Homo sapien
aatggcttcaagaggctcgggcgag

SEQ ID NO: 5881560 - DNA, 25 bp, Homo sapien
gaagaacaagtgtcgctgcgtctgc

SEQ ID NO: 5881561 - DNA, 25 bp, Homo sapien
ccgaatgggggtgtgtgaagaacaa

SEQ ID NO: 5881562 - DNA, 25 bp, Homo sapien
cttgaccgtcatgggggacgatttg

SEQ ID NO: 5881563 - DNA, 25 bp, Homo sapien
gctgtttgcaagttgtacatgtgta

SEQ ID NO: 5881564 - DNA, 25 bp, Homo sapien
ggaagggcggcttgctacctggctg

SEQ ID NO: 5881565 - DNA, 25 bp, Homo sapien
cggtgggggtccaagtgatgtctcg

SEQ ID NO: 5881566 - DNA, 25 bp, Homo sapien
ggccgtggtctggttcatcatctgt

SEQ ID NO: 5881567 - DNA, 25 bp, Homo sapien
ccctctcgctctccgtcagctcctc

SEQ ID NO: 5881568 - DNA, 25 bp, Homo sapien
ctccttctcgagcttgatgcgctta

SEQ ID NO: 5881569 - DNA, 25 bp, Homo sapien
gttgctctgaaatttgaacgtcttg

SEQ ID NO: 5881570 - DNA, 25 bp, Homo sapien
cttctcgcccaggacctggtggaag

SEQ ID NO: 5881571 - DNA, 25 bp, Homo sapien
agctctctgggtactacgccgaatg

SEQ ID NO: 5881572 - DNA, 25 bp, Homo sapien
agaacaagtgtcgctgcgtctgccc

SEQ ID NO: 5881573 - DNA, 25 bp, Homo sapien
ctgcacctagtcctgaagggatacc

SEQ ID NO: 5881574 - DNA, 25 bp, Homo sapien
cccaatgggaagttcatctggcact

SEQ ID NO: 5881575 - DNA, 25 bp, Homo sapien
cgtcgtcggacttgaccgtcatggg

SEQ ID NO: 5881576 - DNA, 25 bp, Homo sapien
gggtttgccttgcttgcggcgagac

SEQ ID NO: 5881577 - DNA, 25 bp, Homo sapien
aaaggcgattgtctggagtctccga

SEQ ID NO: 5881578 - DNA, 25 bp, Homo sapien
ttgtctgcaatatgaatcccatgga

SEQ ID NO: 5881579 - DNA, 25 bp, Homo sapien
caagtgtcgctgcgtctgccctctt

SEQ ID NO: 5881580 - DNA, 25 bp, Homo sapien
ctgcgccggtgcaccaccaggttgc

SEQ ID NO: 5881581 - DNA, 25 bp, Homo sapien
gtagattcttaatccatgagtgttc

SEQ ID NO: 5881582 - DNA, 25 bp, Homo sapien
gcaatatgaatcccatggagaggtg

SEQ ID NO: 5881583 - DNA, 25 bp, Homo sapien
ccaggacctggtggaaggcctcgct

SEQ ID NO: 5881584 - DNA, 25 bp, Homo sapien
ccactgcgagtacacgttctccgtg

SEQ ID NO: 5881585 - DNA, 25 bp, Homo sapien
cctcttcctcgtcgtcctcctcttc

SEQ ID NO: 5881586 - DNA, 25 bp, Homo sapien
acttaagggctctcgagcttccatc

SEQ ID NO: 5881587 - DNA, 25 bp, Homo sapien
accaccaggttgctctgaaatttga

SEQ ID NO: 5881588 - DNA, 25 bp, Homo sapien
tgcatggagctgagcaccatgccct

SEQ ID NO: 5881589 - DNA, 25 bp, Homo sapien
tctagatgacgttgataaacaatcg

SEQ ID NO: 5881590 - DNA, 25 bp, Homo sapien
ccacggacttgagcgcgctgctggc

SEQ ID NO: 5881591 - DNA, 25 bp, Homo sapien
tcctgaagggataccaacccgcggg

SEQ ID NO: 5881592 - DNA, 25 bp, Homo sapien
tccccttctggagctcccaacgggc

SEQ ID NO: 5881593 - DNA, 25 bp, Homo sapien
aattcctctagatgacgttgataaa

SEQ ID NO: 5881594 - DNA, 25 bp, Homo sapien
aatatggggcgtgctccctccactt

SEQ ID NO: 5881595 - DNA, 25 bp, Homo sapien
catctttacaaataccctgcggggc

SEQ ID NO: 5881596 - DNA, 25 bp, Homo sapien
tgcaagttgtacatgtgtagctgct

SEQ ID NO: 5881597 - DNA, 25 bp, Homo sapien
ttttcatctcgattggtgaagggga

SEQ ID NO: 5881598 - DNA, 25 bp, Homo sapien
ggcatcgcggccgggggcaggtcga

SEQ ID NO: 5881599 - DNA, 25 bp, Homo sapien
gtccagctccccgggcggtgtggag

SEQ ID NO: 5881600 - DNA, 25 bp, Homo sapien
atcctggtattcttagcaggttaaa

SEQ ID NO: 5881601 - DNA, 25 bp, Homo sapien
ccatagccattggattcaaccgcag

SEQ ID NO: 5881602 - DNA, 25 bp, Homo sapien
ctccgggatcaggttggggtcgttc

SEQ ID NO: 5881603 - DNA, 25 bp, Homo sapien
tggattcaaccgcagcaccctgtca

SEQ ID NO: 5881604 - DNA, 25 bp, Homo sapien
attaacagtgccatcgtctatgcgg

SEQ ID NO: 5881605 - DNA, 25 bp, Homo sapien
tcccatggagaggtggctgggaagg

SEQ ID NO: 5881606 - DNA, 25 bp, Homo sapien
gcggattgcagaggagggagggggg

SEQ ID NO: 5881607 - DNA, 25 bp, Homo sapien
tgcagaagtttatctgctatgtgtt

SEQ ID NO: 5881608 - DNA, 25 bp, Homo sapien
tgcccagcagcagctttttggacag

SEQ ID NO: 5881609 - DNA, 25 bp, Homo sapien
ggctgggaaggacattctgcaccta

SEQ ID NO: 5881610 - DNA, 25 bp, Homo sapien
gttcatcatctgtaagaatggcttc

SEQ ID NO: 5881611 - DNA, 25 bp, Homo sapien
tggggctgcccagcagcagcttttt

SEQ ID NO: 5881612 - DNA, 25 bp, Homo sapien
tggccagggccatctcttccgcccc

SEQ ID NO: 5881613 - DNA, 25 bp, Homo sapien
tgtttgcaagttgtacatgtgtagc

SEQ ID NO: 5881614 - DNA, 25 bp, Homo sapien
accactaatatggggcgtgctccct

SEQ ID NO: 5881615 - DNA, 25 bp, Homo sapien
ccagctctctaagtctcctagagaa

SEQ ID NO: 5881616 - DNA, 25 bp, Homo sapien
cccaggcgtggggattagagctcca

SEQ ID NO: 5881617 - DNA, 25 bp, Homo sapien
cttctcgcccgtgtggctgcgccgg

SEQ ID NO: 5881618 - DNA, 25 bp, Homo sapien
gggggcaggtcgaactccttctcga

SEQ ID NO: 5881619 - DNA, 25 bp, Homo sapien
ccgcggccattaacagtgccatcgt

SEQ ID NO: 5881620 - DNA, 25 bp, Homo sapien
gcgtagccggcgagccactgcgagt

SEQ ID NO: 5881621 - DNA, 25 bp, Homo sapien
tgggctcatctttacaaataccctg

SEQ ID NO: 5881622 - DNA, 25 bp, Homo sapien
acagtgccatcgtctatgcggtccg

SEQ ID NO: 5881623 - DNA, 25 bp, Homo sapien
gcggcttgctacctggctggaatgg

SEQ ID NO: 5881624 - DNA, 25 bp, Homo sapien
gctgcctggaggccgcgtagccggc

SEQ ID NO: 5881625 - DNA, 25 bp, Homo sapien
ttctgtgcgtgttgcaagagaaacc

SEQ ID NO: 5881626 - DNA, 25 bp, Homo sapien
ttcaagaggctcgggcgagaattcc

SEQ ID NO: 5881627 - DNA, 25 bp, Homo sapien
cgtgacctggatgccaacctccacg

SEQ ID NO: 5881628 - DNA, 25 bp, Homo sapien
gttgcaagagaaaccatgcactggt

SEQ ID NO: 5881629 - DNA, 25 bp, Homo sapien
gcagccgcggccattaacagtgcca

SEQ ID NO: 5881630 - DNA, 25 bp, Homo sapien
ttctaagtagattcttaatccatga

SEQ ID NO: 5881631 - DNA, 25 bp, Homo sapien
ctgtttggggcaaattcctctagat

SEQ ID NO: 5881632 - DNA, 25 bp, Homo sapien
gacagcggtgggctagacgtgttcc

SEQ ID NO: 5881633 - DNA, 25 bp, Homo sapien
gtgttcctgtttggggcaaattcct

SEQ ID NO: 5881634 - DNA, 25 bp, Homo sapien
ggggggcgtcgccaggaagggcggc

SEQ ID NO: 5881635 - DNA, 25 bp, Homo sapien
tcgtggtggcgcgccgcctccaggc

SEQ ID NO: 5881636 - DNA, 25 bp, Homo sapien
accgtcgtcggacttgaccgtcatg

SEQ ID NO: 5881637 - DNA, 25 bp, Homo sapien
gagcagccgcggccattaacagtgc

SEQ ID NO: 5881638 - DNA, 25 bp, Homo sapien
gagctggggctgcccagcagcagct

SEQ ID NO: 5881639 - DNA, 25 bp, Homo sapien
gtggcgcttcagcttgctggcctgg

SEQ ID NO: 5881640 - DNA, 25 bp, Homo sapien
gggtgatgggtggccagggccatct

SEQ ID NO: 5881641 - DNA, 25 bp, Homo sapien
cttgctacctggctggaatggttgc

SEQ ID NO: 5881642 - DNA, 25 bp, Homo sapien
ggggctcagcgagctggggctgccc

SEQ ID NO: 5881643 - DNA, 25 bp, Homo sapien
ttgtgcatgtgcgtcttcatgtggc

SEQ ID NO: 5881644 - DNA, 25 bp, Homo sapien
gcaagtgtccctgtggccctcggcc

SEQ ID NO: 5881645 - DNA, 25 bp, Homo sapien
gactcgccggccaccgagtcttcgt

SEQ ID NO: 5881646 - DNA, 25 bp, Homo sapien
gaattcccgtttgcttaagtgctgg

SEQ ID NO: 5881647 - DNA, 25 bp, Homo sapien
agaggcccctccagtgcagaagttt

SEQ ID NO: 5881648 - DNA, 25 bp, Homo sapien
ggatctttgagctgcctggaggccg

SEQ ID NO: 5881649 - DNA, 25 bp, Homo sapien
tcaaaggcactcgggtgatgggtgg

SEQ ID NO: 5881650 - DNA, 25 bp, Homo sapien
gcttcaagaggctcgggcgagaatt

SEQ ID NO: 5881651 - DNA, 25 bp, Homo sapien
cctggggacagcggtgggctagacg

SEQ ID NO: 5881652 - DNA, 25 bp, Homo sapien
ccaggcgctctatgcggtgggggtc

SEQ ID NO: 5881653 - DNA, 25 bp, Homo sapien
tggcgggaggctccatagccattgg

SEQ ID NO: 5881654 - DNA, 25 bp, Homo sapien
gggtcgttctcgctcttgaacttgg

SEQ ID NO: 5881655 - DNA, 25 bp, Homo sapien
catctgtaagaatggcttcaagagg

SEQ ID NO: 5881656 - DNA, 25 bp, Homo sapien
ttcgtcgcaagtgtccctgtggccc

SEQ ID NO: 5881657 - DNA, 25 bp, Homo sapien
gccggtgcaccaccaggttgctctg

SEQ ID NO: 5881658 - DNA, 25 bp, Homo sapien
caaataccctgcggggcatattctg

SEQ ID NO: 5881659 - DNA, 25 bp, Homo sapien
gcccttctgccaggccggaagcctc

SEQ ID NO: 5881660 - DNA, 25 bp, Homo sapien
cgatttgtgcatgtgcgtcttcatg

SEQ ID NO: 5881661 - DNA, 25 bp, Homo sapien
caggttgcacttgtagggcttctcg

SEQ ID NO: 5881662 - DNA, 25 bp, Homo sapien
ggcaaattcctctagatgacgttga

SEQ ID NO: 5881663 - DNA, 25 bp, Homo sapien
gtttgtgctcgataaaaataagaat

SEQ ID NO: 5881664 - DNA, 25 bp, Homo sapien
tgacgttgataaacaatcgtcatcc

SEQ ID NO: 5881665 - DNA, 25 bp, Homo sapien
ggggcaaattcctctagatgacgtt

SEQ ID NO: 5881666 - DNA, 25 bp, Homo sapien
gacgaggaggcaaaaggcgattgtc

SEQ ID NO: 5881667 - DNA, 25 bp, Homo sapien
gcgtgctccctccacttcccgtgcc

SEQ ID NO: 5881668 - DNA, 25 bp, Homo sapien
ggagtgggtggaaagcgcccttctg

SEQ ID NO: 5881669 - DNA, 25 bp, Homo sapien
gtccctgtggccctcggcctcggcc

SEQ ID NO: 5881670 - DNA, 25 bp, Homo sapien
ctacctggctggaatggttgcagta

SEQ ID NO: 5881671 - DNA, 25 bp, Homo sapien
aggacctggtggaaggcctcgctga

SEQ ID NO: 5881672 - DNA, 25 bp, Homo sapien
catcgcggccgggggcaggtcgaac

SEQ ID NO: 5881673 - DNA, 25 bp, Homo sapien
aagggctctcgagcttccatccgaa

SEQ ID NO: 5881674 - DNA, 25 bp, Homo sapien
tgatgcgcttagagaaggggctcag

SEQ ID NO: 5881675 - DNA, 25 bp, Homo sapien
aggaagggatctttgagctgcctgg

SEQ ID NO: 5881676 - DNA, 25 bp, Homo sapien
cgatactgatcctggtattcttagc

SEQ ID NO: 5881677 - DNA, 25 bp, Homo sapien
atgtgtagctgctgggctcatcttt

SEQ ID NO: 5881678 - DNA, 25 bp, Homo sapien
ctccatagccattggattcaaccgc

SEQ ID NO: 5881679 - DNA, 25 bp, Homo sapien
ctcggccaggtggccgcgcttatgc

SEQ ID NO: 5881680 - DNA, 25 bp, Homo sapien
gagcttccatccgaaaactgccaca

SEQ ID NO: 5881681 - DNA, 25 bp, Homo sapien
tgccattgcattgtttccgtttgtg

SEQ ID NO: 5881682 - DNA, 25 bp, Homo sapien
gagatccctccgtccagctccccgg

SEQ ID NO: 5881683 - DNA, 25 bp, Homo sapien
cctcgtcgtcctcctcttcctcctc

SEQ ID NO: 5881684 - DNA, 25 bp, Homo sapien
aatccatgagtgttctgtgcgtgtt

SEQ ID NO: 5881685 - DNA, 25 bp, Homo sapien
caagttgtacatgtgtagctgctgg

SEQ ID NO: 5881686 - DNA, 25 bp, Homo sapien
ggtctggttcatcatctgtaagaat

SEQ ID NO: 5881687 - DNA, 25 bp, Homo sapien
tccaggctcagcccgaagccgtagt

SEQ ID NO: 5881688 - DNA, 25 bp, Homo sapien
tggaaagcgcccttctgccaggccg

SEQ ID NO: 5881689 - DNA, 25 bp, Homo sapien
ggcgtcgccaggaagggcggcttgc

SEQ ID NO: 5881690 - DNA, 25 bp, Homo sapien
gccaggccggaagcctctctcgata

SEQ ID NO: 5881691 - DNA, 25 bp, Homo sapien
gcgagctggggctgcccagcagcag

SEQ ID NO: 5881692 - DNA, 25 bp, Homo sapien
tcatgtggcgcttcagcttgctggc

SEQ ID NO: 5881693 - DNA, 25 bp, Homo sapien
ccttctcgagcttgatgcgcttaga

SEQ ID NO: 5881694 - DNA, 25 bp, Homo sapien
cgtcatgggggacgatttgtgcatg

SEQ ID NO: 5881695 - DNA, 25 bp, Homo sapien
gcgcttagagaaggggctcagcgag

SEQ ID NO: 5881696 - DNA, 25 bp, Homo sapien
ggcctgggtgcacgcgtggtcgcac

SEQ ID NO: 5881697 - DNA, 25 bp, Homo sapien
tcttagcaggttaaaggggttattg

SEQ ID NO: 5881698 - DNA, 25 bp, Homo sapien
ctccatgtgcagaacgaggggagga

SEQ ID NO: 5881699 - DNA, 25 bp, Homo sapien
ctctgggtactacgccgaatggggg

SEQ ID NO: 5881700 - DNA, 25 bp, Homo sapien
cttgaacttggccaccacggacttg

SEQ ID NO: 5881701 - DNA, 25 bp, Homo sapien
agcagctttttggacaggccccccg

SEQ ID NO: 5881702 - DNA, 25 bp, Homo sapien
ctctcgctctccgtcagctcctcct

SEQ ID NO: 5881703 - DNA, 25 bp, Homo sapien
tggcgcgccgcctccaggctcagcc

SEQ ID NO: 5881704 - DNA, 25 bp, Homo sapien
ggacaggccccccgaggccgactcg

SEQ ID NO: 5881705 - DNA, 25 bp, Homo sapien
gctggggtttgccttgcttgcggcg

SEQ ID NO: 5881706 - DNA, 25 bp, Homo sapien
tggctgtttgcaagttgtacatgtg

SEQ ID NO: 5881707 - DNA, 25 bp, Homo sapien
cgcttcagcttgctggcctgggtgc

SEQ ID NO: 5881708 - DNA, 25 bp, Homo sapien
ggggctgggagggaggaggggcgga

SEQ ID NO: 5881709 - DNA, 25 bp, Homo sapien
ggtggaaagcgcccttctgccaggc

SEQ ID NO: 5881710 - DNA, 25 bp, Homo sapien
cgctcttgaacttggccaccacgga

SEQ ID NO: 5881711 - DNA, 25 bp, Homo sapien
gcatgacttggacttgaccgggggc

SEQ ID NO: 5881712 - DNA, 25 bp, Homo sapien
gagaattcccgtttgcttaagtgct

SEQ ID NO: 5881713 - DNA, 25 bp, Homo sapien
tctggagctcccaacgggccgtggt

SEQ ID NO: 5881714 - DNA, 25 bp, Homo sapien
ttatccacagctttttctaagcaga

SEQ ID NO: 5881715 - DNA, 25 bp, Homo sapien
tgatcctggtattcttagcaggtta

SEQ ID NO: 5881716 - DNA, 25 bp, Homo sapien
cgtggtcgcacaggttgcacttgta

SEQ ID NO: 5881717 - DNA, 25 bp, Homo sapien
gcctgcccgggcccggaccactaat

SEQ ID NO: 5881718 - DNA, 25 bp, Homo sapien
cgaactccttctcgagcttgatgcg

SEQ ID NO: 5881719 - DNA, 25 bp, Homo sapien
ctgcccaccaagtcgctggtgccgg

SEQ ID NO: 5881720 - DNA, 25 bp, Homo sapien
caggctcagcccgaagccgtagtcc

SEQ ID NO: 5881721 - DNA, 25 bp, Homo sapien
gtgtgaagaacaagtgtcgctgcgt

SEQ ID NO: 5881722 - DNA, 25 bp, Homo sapien
ttccatccgaaaactgccacacatc

SEQ ID NO: 5881723 - DNA, 25 bp, Homo sapien
tagaacttaagggctctcgagcttc

SEQ ID NO: 5881724 - DNA, 25 bp, Homo sapien
tggttcatcatctgtaagaatggct

SEQ ID NO: 5881725 - DNA, 25 bp, Homo sapien
ttagagctccatgtgcagaacgagg

SEQ ID NO: 5881726 - DNA, 25 bp, Homo sapien
ctctgaaatttgaacgtcttgccgc

SEQ ID NO: 5881727 - DNA, 25 bp, Homo sapien
atttgtgcatgtgcgtcttcatgtg

SEQ ID NO: 5881728 - DNA, 25 bp, Homo sapien
tccacttcccgtgccgctgcgcccc

SEQ ID NO: 5881729 - DNA, 25 bp, Homo sapien
tgttcgctttctaagtagattctta

SEQ ID NO: 5881730 - DNA, 25 bp, Homo sapien
tccgtgttcgctttctaagtagatt

SEQ ID NO: 5881731 - DNA, 25 bp, Homo sapien
ggccgactcgcccggggagcagccg

SEQ ID NO: 5881732 - DNA, 25 bp, Homo sapien
tcgcggccgggggcaggtcgaactc

SEQ ID NO: 5881733 - DNA, 25 bp, Homo sapien
gcgctctatgcggtgggggtccaag

SEQ ID NO: 5881734 - DNA, 25 bp, Homo sapien
atgacttggacttgaccgggggctg

SEQ ID NO: 5881735 - DNA, 25 bp, Homo sapien
ccgtttgtgctcgataaaaataaga

SEQ ID NO: 5881736 - DNA, 25 bp, Homo sapien
tgaccgtcatgggggacgatttgtg

SEQ ID NO: 5881737 - DNA, 25 bp, Homo sapien
gcccaggacctggtggaaggcctcg

SEQ ID NO: 5881738 - DNA, 25 bp, Homo sapien
ggcctggggacagcggtgggctaga

SEQ ID NO: 5881739 - DNA, 25 bp, Homo sapien
gattgtctggagtctccgaagctaa

SEQ ID NO: 5881740 - DNA, 25 bp, Homo sapien
tggcttcaagaggctcgggcgagaa

SEQ ID NO: 5881741 - DNA, 25 bp, Homo sapien
agctccatgtgcagaacgaggggag

SEQ ID NO: 5881742 - DNA, 25 bp, Homo sapien
gccgcgcttatgcttctcgcccagg

SEQ ID NO: 5881743 - DNA, 25 bp, Homo sapien
cctggaggccgcgtagccggcgagc

SEQ ID NO: 5881744 - DNA, 25 bp, Homo sapien
ggtggccagggccatctcttccgcc

SEQ ID NO: 5881745 - DNA, 25 bp, Homo sapien
ggtgaggaggtcatgatccccttct

SEQ ID NO: 5881746 - DNA, 25 bp, Homo sapien
tcccaacgggccgtggtctggttca

SEQ ID NO: 5881747 - DNA, 25 bp, Homo sapien
ggggagtgggtggaaagcgcccttc

SEQ ID NO: 5881748 - DNA, 25 bp, Homo sapien
aagtgctggggtttgccttgcttgc

SEQ ID NO: 5881749 - DNA, 25 bp, Homo sapien
gggttattgtctgcaatatgaatcc

SEQ ID NO: 5881750 - DNA, 25 bp, Homo sapien
actgcgagtacacgttctccgtgtt

SEQ ID NO: 5881751 - DNA, 25 bp, Homo sapien
ggggaaggtggcttatccacagctt

SEQ ID NO: 5881752 - DNA, 25 bp, Homo sapien
gcttttttcatctcgattggtgaag

SEQ ID NO: 5881753 - DNA, 25 bp, Homo sapien
tggcttatccacagctttttctaag

SEQ ID NO: 5881754 - DNA, 25 bp, Homo sapien
atagccattggattcaaccgcagca

SEQ ID NO: 5881755 - DNA, 25 bp, Homo sapien
tctggttcatcatctgtaagaatgg

SEQ ID NO: 5881756 - DNA, 25 bp, Homo sapien
ggtggcgcgccgcctccaggctcag

SEQ ID NO: 5881757 - DNA, 25 bp, Homo sapien
ctgggtactacgccgaatgggggtg

SEQ ID NO: 5881758 - DNA, 25 bp, Homo sapien
gcccgtgtggctgcgccggtgcacc

SEQ ID NO: 5881759 - DNA, 25 bp, Homo sapien
caggcgtggggattagagctccatg

SEQ ID NO: 5881760 - DNA, 25 bp, Homo sapien
caggccggaagcctctctcgatact

SEQ ID NO: 5881761 - DNA, 25 bp, Homo sapien
agaggtggctgggaaggacattctg

SEQ ID NO: 5881762 - DNA, 25 bp, Homo sapien
atgtcccccaatgggaagttcatct

SEQ ID NO: 5881763 - DNA, 25 bp, Homo sapien
caccaggttgctctgaaatttgaac

SEQ ID NO: 5881764 - DNA, 25 bp, Homo sapien
gaagccgtagtccaccctctcgctc

SEQ ID NO: 5881765 - DNA, 25 bp, Homo sapien
ggctctcgtcgcccacgcccacgac

SEQ ID NO: 5881766 - DNA, 25 bp, Homo sapien
gggacagcggtgggctagacgtgtt

SEQ ID NO: 5881767 - DNA, 25 bp, Homo sapien
gcacttgtagggcttctcgcccgtg

SEQ ID NO: 5881768 - DNA, 25 bp, Homo sapien
tggcactgcccacaggtgaggaggt

SEQ ID NO: 5881769 - DNA, 25 bp, Homo sapien
acgttgataaacaatcgtcatcctc

SEQ ID NO: 5881770 - DNA, 25 bp, Homo sapien
tcgctggtgccgggttccggggagc

SEQ ID NO: 5881771 - DNA, 25 bp, Homo sapien
agcttgctggcctgggtgcacgcgt

SEQ ID NO: 5881772 - DNA, 25 bp, Homo sapien
aagctaaggaagggatctttgagct

SEQ ID NO: 5881773 - DNA, 25 bp, Homo sapien
gaagggataccaacccgcggggtca

SEQ ID NO: 5881774 - DNA, 25 bp, Homo sapien
agaaaccatgcactggtgaatggct

SEQ ID NO: 5881775 - DNA, 25 bp, Homo sapien
cggccaggtggccgcgcttatgctt

SEQ ID NO: 5881776 - DNA, 25 bp, Homo sapien
actgcccacaggtgaggaggtcatg

SEQ ID NO: 5881777 - DNA, 25 bp, Homo sapien
gataaaaataagaatgtcccccaat

SEQ ID NO: 5881778 - DNA, 25 bp, Homo sapien
gcctctctcgatactgatcctggta

SEQ ID NO: 5881779 - DNA, 25 bp, Homo sapien
tgcacgcgtggtcgcacaggttgca

SEQ ID NO: 5881780 - DNA, 25 bp, Homo sapien
caggtgaggaggtcatgatcccctt

SEQ ID NO: 5881781 - DNA, 25 bp, Homo sapien
ccgacgaggaggcaaaaggcgattg

SEQ ID NO: 5881782 - DNA, 25 bp, Homo sapien
gaagggatctttgagctgcctggag

SEQ ID NO: 5881783 - DNA, 25 bp, Homo sapien
agctccccgggcggtgtggagaagc

SEQ ID NO: 5881784 - DNA, 25 bp, Homo sapien
catggcgggaggctccatagccatt

SEQ ID NO: 5881785 - DNA, 25 bp, Homo sapien
tggttgcagtaacctttgcataggg

SEQ ID NO: 5881786 - DNA, 25 bp, Homo sapien
cctttgcatagggctgggccggcct

SEQ ID NO: 5881787 - DNA, 25 bp, Homo sapien
gcgccccgcgagctgttctcgtggt

SEQ ID NO: 5881788 - DNA, 25 bp, Homo sapien
ctcatctttacaaataccctgcggg

SEQ ID NO: 5881789 - DNA, 25 bp, Homo sapien
gtgtggctgcgccggtgcaccacca

SEQ ID NO: 5881790 - DNA, 25 bp, Homo sapien
ggagaggcccctccagtgcagaagt

SEQ ID NO: 5881791 - DNA, 25 bp, Homo sapien
gctcgataaaaataagaatgtcccc

SEQ ID NO: 5881792 - DNA, 25 bp, Homo sapien
tatgaatcccatggagaggtggctg

SEQ ID NO: 5881793 - DNA, 25 bp, Homo sapien
gaacttaagggctctcgagcttcca

SEQ ID NO: 5881794 - DNA, 25 bp, Homo sapien
gattggatgcttttttcatctcgat

SEQ ID NO: 5881795 - DNA, 25 bp, Homo sapien
agcaccatgccctgcatgacgtcgg

SEQ ID NO: 5881796 - DNA, 25 bp, Homo sapien
ctctctcgatactgatcctggtatt

SEQ ID NO: 5881797 - DNA, 25 bp, Homo sapien
acgcccacgaccgcgccccgcgagc

SEQ ID NO: 5881798 - DNA, 25 bp, Homo sapien
tacacgttctccgtgttgggcatcg

SEQ ID NO: 5881799 - DNA, 25 bp, Homo sapien
caggtggccgcgcttatgcttctcg

SEQ ID NO: 5881800 - DNA, 25 bp, Homo sapien
ttctccgtgttgggcatcgcggccg

SEQ ID NO: 5881801 - DNA, 25 bp, Homo sapien
ccgtgccgctgcgccccgagatccc

SEQ ID NO: 5881802 - DNA, 25 bp, Homo sapien
tcttcctcttcctcgtcgtcctcct

SEQ ID NO: 5881803 - DNA, 25 bp, Homo sapien
gtcggacttgaccgtcatgggggac

SEQ ID NO: 5881804 - DNA, 25 bp, Homo sapien
gtgctccctccacttcccgtgccgc

SEQ ID NO: 5881805 - DNA, 25 bp, Homo sapien
ctctctaagtctcctagagaaatcc

SEQ ID NO: 5881806 - DNA, 25 bp, Homo sapien
cagcggtgggctagacgtgttccct

SEQ ID NO: 5881807 - DNA, 25 bp, Homo sapien
tcctctggcgtgacctggatgccaa

SEQ ID NO: 5881808 - DNA, 25 bp, Homo sapien
gcggggcatattctgcactcatccc

SEQ ID NO: 5881809 - DNA, 25 bp, Homo sapien
gatcaggttggggtcgttctcgctc

SEQ ID NO: 5881810 - DNA, 25 bp, Homo sapien
gaggagggagggggggcgtcgccag

SEQ ID NO: 5881811 - DNA, 25 bp, Homo sapien
aacgggccgtggtctggttcatcat

SEQ ID NO: 5881812 - DNA, 25 bp, Homo sapien
ttggatgcttttttcatctcgattg

SEQ ID NO: 5881813 - DNA, 25 bp, Homo sapien
gggcaggtcgaactccttctcgagc

SEQ ID NO: 5881814 - DNA, 25 bp, Homo sapien
gtgcgtcttcatgtggcgcttcagc

SEQ ID NO: 5881815 - DNA, 25 bp, Homo sapien
gtggctgcgccggtgcaccaccagg

SEQ ID NO: 5881816 - DNA, 25 bp, Homo sapien
agctgggcctgcccgggcccggacc

SEQ ID NO: 5881817 - DNA, 25 bp, Homo sapien
gtctggagtctccgaagctaaggaa

SEQ ID NO: 5881818 - DNA, 25 bp, Homo sapien
gtccgactcgccggccaccgagtct

SEQ ID NO: 5881819 - DNA, 25 bp, Homo sapien
tctggcactgcccacaggtgaggag

SEQ ID NO: 5881820 - DNA, 25 bp, Homo sapien
gcaccctgtcaaaggcactcgggtg

SEQ ID NO: 5881821 - DNA, 25 bp, Homo sapien
atcccaggcgtggggattagagctc

SEQ ID NO: 5881822 - DNA, 25 bp, Homo sapien
tattgtctgcaatatgaatcccatg

SEQ ID NO: 5881823 - DNA, 25 bp, Homo sapien
caggaagggcggcttgctacctggc

SEQ ID NO: 5881824 - DNA, 25 bp, Homo sapien
tatctgctatgtgttcctgtttggg

SEQ ID NO: 5881825 - DNA, 25 bp, Homo sapien
tttgagctgggcctgcccgggcccg

SEQ ID NO: 5881826 - DNA, 25 bp, Homo sapien
gcactcatcccaggcgtggggatta

SEQ ID NO: 5881827 - DNA, 25 bp, Homo sapien
agccattggattcaaccgcagcacc

SEQ ID NO: 5881828 - DNA, 25 bp, Homo sapien
cgggccgtggtctggttcatcatct

SEQ ID NO: 5881829 - DNA, 25 bp, Homo sapien
cgtggggattagagctccatgtgca

SEQ ID NO: 5881830 - DNA, 25 bp, Homo sapien
aatggttgcagtaacctttgcatag

SEQ ID NO: 5881831 - DNA, 25 bp, Homo sapien
cggtggagagaccgtcgtcggactt

SEQ ID NO: 5881832 - DNA, 25 bp, Homo sapien
attgcattgtttccgtttgtgctcg

SEQ ID NO: 5881833 - DNA, 25 bp, Homo sapien
gcttatccacagctttttctaagca

SEQ ID NO: 5881834 - DNA, 25 bp, Homo sapien
ctcttttgagctgggcctgcccggg

SEQ ID NO: 5881835 - DNA, 25 bp, Homo sapien
cgcgcttatgcttctcgcccaggac

SEQ ID NO: 5881836 - DNA, 25 bp, Homo sapien
ggtgaatggctgtttgcaagttgta

SEQ ID NO: 5881837 - DNA, 25 bp, Homo sapien
aatggctgtttgcaagttgtacatg

SEQ ID NO: 5881838 - DNA, 25 bp, Homo sapien
cgtgttcgctttctaagtagattct

SEQ ID NO: 5881839 - DNA, 25 bp, Homo sapien
gttctcgtggtggcgcgccgcctcc

SEQ ID NO: 5881840 - DNA, 25 bp, Homo sapien
agtgcagaagtttatctgctatgtg

SEQ ID NO: 5881841 - DNA, 25 bp, Homo sapien
ggtgtggagaagcgcaagctcccgt

SEQ ID NO: 5881842 - DNA, 25 bp, Homo sapien
tcaggttggggtcgttctcgctctt

SEQ ID NO: 5881843 - DNA, 25 bp, Homo sapien
tgaacgtcttgccgcagaactcgca

SEQ ID NO: 5881844 - DNA, 25 bp, Homo sapien
gctgctggcgctgcccaccaagtcg

SEQ ID NO: 5881845 - DNA, 25 bp, Homo sapien
ttgcacttgtagggcttctcgcccg

SEQ ID NO: 5881846 - DNA, 25 bp, Homo sapien
ggcgagccactgcgagtacacgttc

SEQ ID NO: 5881847 - DNA, 25 bp, Homo sapien
caggttaaaggggttattgtctgca

SEQ ID NO: 5881848 - DNA, 25 bp, Homo sapien
ggcgtggggattagagctccatgtg

SEQ ID NO: 5881849 - DNA, 25 bp, Homo sapien
tggtcgcacaggttgcacttgtagg

SEQ ID NO: 5881850 - DNA, 25 bp, Homo sapien
tgacgtcgggcagggcgcggctctc

SEQ ID NO: 5881851 - DNA, 25 bp, Homo sapien
accaagtcgctggtgccgggttccg

SEQ ID NO: 5881852 - DNA, 25 bp, Homo sapien
ctaagtctcctagagaaatccatgg

SEQ ID NO: 5881853 - DNA, 25 bp, Homo sapien
tgcattgtttccgtttgtgctcgat

SEQ ID NO: 5881854 - DNA, 25 bp, Homo sapien
gtctgcaatatgaatcccatggaga

SEQ ID NO: 5881855 - DNA, 25 bp, Homo sapien
ctccgacgaggaggcaaaaggcgat

SEQ ID NO: 5881856 - DNA, 25 bp, Homo sapien
cgcctccaggctcagcccgaagccg

SEQ ID NO: 5881857 - DNA, 25 bp, Homo sapien
gctcccaacgggccgtggtctggtt

SEQ ID NO: 5881858 - DNA, 25 bp, Homo sapien
atcgtctatgcggtccgactcgccg

SEQ ID NO: 5881859 - DNA, 25 bp, Homo sapien
ctcggcctcggccaggtggccgcgc

SEQ ID NO: 5881860 - DNA, 25 bp, Homo sapien
ctcgctctccgtcagctcctcctcc

SEQ ID NO: 5881861 - DNA, 25 bp, Homo sapien
cttttgagctgggcctgcccgggcc

SEQ ID NO: 5881862 - DNA, 25 bp, Homo sapien
gctctatgcggtgggggtccaagtg

SEQ ID NO: 5881863 - DNA, 25 bp, Homo sapien
tgataaacaatcgtcatcctctggc

SEQ ID NO: 5881864 - DNA, 25 bp, Homo sapien
gattggtgaaggggaaggtggctta

SEQ ID NO: 5881865 - DNA, 25 bp, Homo sapien
cgcagcaccctgtcaaaggcactcg

SEQ ID NO: 5881866 - DNA, 25 bp, Homo sapien
ctggtgaatggctgtttgcaagttg

SEQ ID NO: 5881867 - DNA, 25 bp, Homo sapien
tggggacagcggtgggctagacgtg

SEQ ID NO: 5881868 - DNA, 25 bp, Homo sapien
actacgccgaatgggggtgtgtgaa

SEQ ID NO: 5881869 - DNA, 25 bp, Homo sapien
ggaatggttgcagtaacctttgcat

SEQ ID NO: 5881870 - DNA, 25 bp, Homo sapien
tcgcccaggacctggtggaaggcct

SEQ ID NO: 5881871 - DNA, 25 bp, Homo sapien
gtgcgtgttgcaagagaaaccatgc

SEQ ID NO: 5881872 - DNA, 25 bp, Homo sapien
ctggaatggttgcagtaacctttgc

SEQ ID NO: 5881873 - DNA, 25 bp, Homo sapien
ggccctcggcctcggccaggtggcc

SEQ ID NO: 5881874 - DNA, 25 bp, Homo sapien
ccgtccagctccccgggcggtgtgg

SEQ ID NO: 5881875 - DNA, 25 bp, Homo sapien
agggcttctcgcccgtgtggctgcg

SEQ ID NO: 5881876 - DNA, 25 bp, Homo sapien
gcaggtcgaactccttctcgagctt

SEQ ID NO: 5881877 - DNA, 25 bp, Homo sapien
tgctggcgctgcccaccaagtcgct

SEQ ID NO: 5881878 - DNA, 25 bp, Homo sapien
cccggggagcagccgcggccattaa

SEQ ID NO: 5881879 - DNA, 25 bp, Homo sapien
ctctcgatactgatcctggtattct

SEQ ID NO: 5881880 - DNA, 25 bp, Homo sapien
accgtcatgggggacgatttgtgca

SEQ ID NO: 5881881 - DNA, 25 bp, Homo sapien
ggaccactaatatggggcgtgctcc

SEQ ID NO: 5881882 - DNA, 25 bp, Homo sapien
gcgggaggctccatagccattggat

SEQ ID NO: 5881883 - DNA, 25 bp, Homo sapien
agtcgctggtgccgggttccgggga

SEQ ID NO: 5881884 - DNA, 25 bp, Homo sapien
ctctccgtcagctcctcctcctcct

SEQ ID NO: 5881885 - DNA, 25 bp, Homo sapien
ggctggaatggttgcagtaaccttt

SEQ ID NO: 5881886 - DNA, 25 bp, Homo sapien
cggggagcagccgcggccattaaca

SEQ ID NO: 5881887 - DNA, 25 bp, Homo sapien
tcctcttcttcctcttcctcgtcgt

SEQ ID NO: 5881888 - DNA, 25 bp, Homo sapien
aggctcgggcgagaattcccgtttg

SEQ ID NO: 5881889 - DNA, 25 bp, Homo sapien
tgtggagaagcgcaagctcccgttc

SEQ ID NO: 5881890 - DNA, 25 bp, Homo sapien
ctgggaaggacattctgcacctagt

SEQ ID NO: 5881891 - DNA, 25 bp, Homo sapien
ctcccgttctccgaggagtgctccg

SEQ ID NO: 5881892 - DNA, 25 bp, Homo sapien
tggtattcttagcaggttaaagggg

SEQ ID NO: 5881893 - DNA, 25 bp, Homo sapien
gtacatgtgtagctgctgggctcat

SEQ ID NO: 5881894 - DNA, 25 bp, Homo sapien
catctggcactgcccacaggtgagg

SEQ ID NO: 5881895 - DNA, 25 bp, Homo sapien
cttggccaccacggacttgagcgcg

SEQ ID NO: 5881896 - DNA, 25 bp, Homo sapien
ttagagaaggggctcagcgagctgg

SEQ ID NO: 5881897 - DNA, 25 bp, Homo sapien
ccgtgtggctgcgccggtgcaccac

SEQ ID NO: 5881898 - DNA, 25 bp, Homo sapien
cttcttcctcttcctcgtcgtcctc

SEQ ID NO: 5881899 - DNA, 25 bp, Homo sapien
gcgattgtctggagtctccgaagct

SEQ ID NO: 5881900 - DNA, 25 bp, Homo sapien
ccgactcgccggccaccgagtcttc

SEQ ID NO: 5881901 - DNA, 25 bp, Homo sapien
gcgccggtgcaccaccaggttgctc

SEQ ID NO: 5881902 - DNA, 25 bp, Homo sapien
gccgggttccggggagctggcggtg

SEQ ID NO: 5881903 - DNA, 25 bp, Homo sapien
gtgggggtccaagtgatgtctcggt

SEQ ID NO: 5881904 - DNA, 25 bp, Homo sapien
gggatcaggttggggtcgttctcgc

SEQ ID NO: 5881905 - DNA, 25 bp, Homo sapien
ctaagtagattcttaatccatgagt

SEQ ID NO: 5881906 - DNA, 25 bp, Homo sapien
aagcctctctcgatactgatcctgg

SEQ ID NO: 5881907 - DNA, 25 bp, Homo sapien
atgcttttttcatctcgattggtga

SEQ ID NO: 5881908 - DNA, 25 bp, Homo sapien
ctggcctgggtgcacgcgtggtcgc

SEQ ID NO: 5881909 - DNA, 25 bp, Homo sapien
agccgtagtccaccctctcgctctc

SEQ ID NO: 5881910 - DNA, 25 bp, Homo sapien
atgccaacctccacgggattggatg

SEQ ID NO: 5881911 - DNA, 25 bp, Homo sapien
aaaggcactcgggtgatgggtggcc

SEQ ID NO: 5881912 - DNA, 25 bp, Homo sapien
cagaagtttatctgctatgtgttcc

SEQ ID NO: 5881913 - DNA, 25 bp, Homo sapien
gtttggggcaaattcctctagatga

SEQ ID NO: 5881914 - DNA, 25 bp, Homo sapien
gtgctgcatggagctgagcaccatg

SEQ ID NO: 5881915 - DNA, 25 bp, Homo sapien
accgcagcaccctgtcaaaggcact

SEQ ID NO: 5881916 - DNA, 25 bp, Homo sapien
ctgtgcgtgttgcaagagaaaccat

SEQ ID NO: 5881917 - DNA, 25 bp, Homo sapien
agctggcggtggagagaccgtcgtc

SEQ ID NO: 5881918 - DNA, 25 bp, Homo sapien
gcggtgggctagacgtgttccctgc

SEQ ID NO: 5881919 - DNA, 25 bp, Homo sapien
cgctctccgtcagctcctcctcctc

SEQ ID NO: 5881920 - DNA, 25 bp, Homo sapien
gttgggcatcgcggccgggggcagg

SEQ ID NO: 5881921 - DNA, 25 bp, Homo sapien
tgagctgggcctgcccgggcccgga

SEQ ID NO: 5881922 - DNA, 25 bp, Homo sapien
tcatgggggacgatttgtgcatgtg

SEQ ID NO: 5881923 - DNA, 25 bp, Homo sapien
gggcctgcccgggcccggaccacta

SEQ ID NO: 5881924 - DNA, 25 bp, Homo sapien
tcgattggtgaaggggaaggtggct

SEQ ID NO: 5881925 - DNA, 25 bp, Homo sapien
cacgttctccgtgttgggcatcgcg

SEQ ID NO: 5881926 - DNA, 25 bp, Homo sapien
gcagaacgaggggaggagaggcccc

SEQ ID NO: 5881927 - DNA, 25 bp, Homo sapien
gtgccgctgcgccccgagatccctc

SEQ ID NO: 5881928 - DNA, 25 bp, Homo sapien
atccgaaaactgccacacatcttga

SEQ ID NO: 5881929 - DNA, 25 bp, Homo sapien
aggcccctccagtgcagaagtttat

SEQ ID NO: 5881930 - DNA, 25 bp, Homo sapien
ccgtttgcttaagtgctggggtttg

SEQ ID NO: 5881931 - DNA, 25 bp, Homo sapien
gtaacctttgcatagggctgggccg

SEQ ID NO: 5881932 - DNA, 25 bp, Homo sapien
gtgctcgataaaaataagaatgtcc

SEQ ID NO: 5881933 - DNA, 25 bp, Homo sapien
tgctctgaaatttgaacgtcttgcc

SEQ ID NO: 5881934 - DNA, 25 bp, Homo sapien
cagaactcgcatgacttggacttga

SEQ ID NO: 5881935 - DNA, 25 bp, Homo sapien
gaggccgactcgcccggggagcagc

SEQ ID NO: 5881936 - DNA, 25 bp, Homo sapien
tggagctcccaacgggccgtggtct

SEQ ID NO: 5881937 - DNA, 25 bp, Homo sapien
gtggtctggttcatcatctgtaaga

SEQ ID NO: 5881938 - DNA, 25 bp, Homo sapien
agacgtgttccctgccagctctcta

SEQ ID NO: 5881939 - DNA, 25 bp, Homo sapien
tgccagctctctaagtctcctagag

SEQ ID NO: 5881940 - DNA, 25 bp, Homo sapien
catagggctgggccggcctggggac

SEQ ID NO: 5881941 - DNA, 25 bp, Homo sapien
cttcagcttgctggcctgggtgcac

SEQ ID NO: 5881942 - DNA, 25 bp, Homo sapien
acttgagcgcgctgctggcgctgcc

SEQ ID NO: 5881943 - DNA, 25 bp, Homo sapien
ctagacgtgttccctgccagctctc

SEQ ID NO: 5881944 - DNA, 25 bp, Homo sapien
gagggaggaggggcggattgcagag

SEQ ID NO: 5881945 - DNA, 25 bp, Homo sapien
cgtctgccctcttttgagctgggcc

SEQ ID NO: 5881946 - DNA, 25 bp, Homo sapien
gtgcatgtgcgtcttcatgtggcgc

SEQ ID NO: 5881947 - DNA, 25 bp, Homo sapien
tccctccacttcccgtgccgctgcg

SEQ ID NO: 5881948 - DNA, 25 bp, Homo sapien
cgtctatgcggtccgactcgccggc

SEQ ID NO: 5881949 - DNA, 25 bp, Homo sapien
tttgcatagggctgggccggcctgg

SEQ ID NO: 5881950 - DNA, 25 bp, Homo sapien
ggctagacgtgttccctgccagctc

SEQ ID NO: 5881951 - DNA, 25 bp, Homo sapien
ctccgtcagctcctcctcctcctct

SEQ ID NO: 5881952 - DNA, 25 bp, Homo sapien
tgggtggccagggccatctcttccg

SEQ ID NO: 5881953 - DNA, 25 bp, Homo sapien
aggtcgaactccttctcgagcttga

SEQ ID NO: 5881954 - DNA, 25 bp, Homo sapien
cttcatgtggcgcttcagcttgctg

SEQ ID NO: 5881955 - DNA, 25 bp, Homo sapien
ccggccaccgagtcttcgtcgcaag

SEQ ID NO: 5881956 - DNA, 25 bp, Homo sapien
aaggggaaggtggcttatccacagc

SEQ ID NO: 5881957 - DNA, 25 bp, Homo sapien
ggaagcctctctcgatactgatcct

SEQ ID NO: 5881958 - DNA, 25 bp, Homo sapien
ggtcatgatccccttctggagctcc

SEQ ID NO: 5881959 - DNA, 25 bp, Homo sapien
tcgagcttccatccgaaaactgcca

SEQ ID NO: 5881960 - DNA, 25 bp, Homo sapien
gtgaagaacaagtgtcgctgcgtct

SEQ ID NO: 5881961 - DNA, 25 bp, Homo sapien
ggccggaagcctctctcgatactga

SEQ ID NO: 5881962 - DNA, 25 bp, Homo sapien
gagaagcgcaagctcccgttctccg

SEQ ID NO: 5881963 - DNA, 25 bp, Homo sapien
tggtgccgggttccggggagctggc

SEQ ID NO: 5881964 - DNA, 25 bp, Homo sapien
aaactgccacacatcttgagctctc

SEQ ID NO: 5881965 - DNA, 25 bp, Homo sapien
gcggggtcaggggacttccgtgttc

SEQ ID NO: 5881966 - DNA, 25 bp, Homo sapien
caaccgcagcaccctgtcaaaggca

SEQ ID NO: 5881967 - DNA, 25 bp, Homo sapien
gcacctagtcctgaagggataccaa

SEQ ID NO: 5881968 - DNA, 25 bp, Homo sapien
gaggagaggcccctccagtgcagaa

SEQ ID NO: 5881969 - DNA, 25 bp, Homo sapien
gaggagtgctccgacgaggaggcaa

SEQ ID NO: 5881970 - DNA, 25 bp, Homo sapien
ggagagaccgtcgtcggacttgacc

SEQ ID NO: 5881971 - DNA, 25 bp, Homo sapien
ctctggcgtgacctggatgccaacc

SEQ ID NO: 5881972 - DNA, 25 bp, Homo sapien
cttggacttgaccgggggctgggag

SEQ ID NO: 5881973 - DNA, 25 bp, Homo sapien
caagagaaaccatgcactggtgaat

SEQ ID NO: 5881974 - DNA, 25 bp, Homo sapien
taaggaagggatctttgagctgcct

SEQ ID NO: 5881975 - DNA, 25 bp, Homo sapien
aacttggccaccacggacttgagcg

SEQ ID NO: 5881976 - DNA, 25 bp, Homo sapien
gggcgcggctctcgtcgcccacgcc

SEQ ID NO: 5881977 - DNA, 25 bp, Homo sapien
ctccgaggagtgctccgacgaggag

SEQ ID NO: 5881978 - DNA, 25 bp, Homo sapien
ggaaggtggcttatccacagctttt

SEQ ID NO: 5881979 - DNA, 25 bp, Homo sapien
gggcggattgcagaggagggagggg

SEQ ID NO: 5881980 - DNA, 25 bp, Homo sapien
cctagagaaatccatggcgggaggc

SEQ ID NO: 5881981 - DNA, 25 bp, Homo sapien
cggtgcaccaccaggttgctctgaa

SEQ ID NO: 5881982 - DNA, 25 bp, Homo sapien
tacaaataccctgcggggcatattc

SEQ ID NO: 5881983 - DNA, 25 bp, Homo sapien
tgagcaccatgccctgcatgacgtc

SEQ ID NO: 5881984 - DNA, 25 bp, Homo sapien
atgccctgcatgacgtcgggcaggg

SEQ ID NO: 5881985 - DNA, 25 bp, Homo sapien
tcccgtgccgctgcgccccgagatc

SEQ ID NO: 5881986 - DNA, 25 bp, Homo sapien
ctctctgggtactacgccgaatggg

SEQ ID NO: 5881987 - DNA, 25 bp, Homo sapien
ttctccgaggagtgctccgacgagg

SEQ ID NO: 5881988 - DNA, 25 bp, Homo sapien
gcttaagtgctggggtttgccttgc

SEQ ID NO: 5881989 - DNA, 25 bp, Homo sapien
ccgtagtccaccctctcgctctccg

SEQ ID NO: 5881990 - DNA, 25 bp, Homo sapien
gtggaaggcctcgctgaagtgctgc

SEQ ID NO: 5881991 - DNA, 25 bp, Homo sapien
gactcgcccggggagcagccgcggc

SEQ ID NO: 5881992 - DNA, 25 bp, Homo sapien
gccccgagatccctccgtccagctc

SEQ ID NO: 5881993 - DNA, 25 bp, Homo sapien
ctctaagtctcctagagaaatccat

SEQ ID NO: 5881994 - DNA, 25 bp, Homo sapien
ttttggacaggccccccgaggccga

SEQ ID NO: 5881995 - DNA, 25 bp, Homo sapien
taaaaataagaatgtcccccaatgg

SEQ ID NO: 5881996 - DNA, 25 bp, Homo sapien
atggagaggtggctgggaaggacat

SEQ ID NO: 5881997 - DNA, 25 bp, Homo sapien
ccacgcccacgaccgcgccccgcga

SEQ ID NO: 5881998 - DNA, 25 bp, Homo sapien
tccaccctctcgctctccgtcagct

SEQ ID NO: 5881999 - DNA, 25 bp, Homo sapien
gagggggggcgtcgccaggaagggc

SEQ ID NO: 5882000 - DNA, 25 bp, Homo sapien
tggagctgagcaccatgccctgcat

SEQ ID NO: 5882001 - DNA, 25 bp, Homo sapien
agaccgtcgtcggacttgaccgtca

SEQ ID NO: 5882002 - DNA, 25 bp, Homo sapien
ctccgtccagctccccgggcggtgt

SEQ ID NO: 5882003 - DNA, 25 bp, Homo sapien
ttccgtttgtgctcgataaaaataa

SEQ ID NO: 5882004 - DNA, 25 bp, Homo sapien
aatcgtcatcctctggcgtgacctg

SEQ ID NO: 5882005 - DNA, 25 bp, Homo sapien
agccggcgagccactgcgagtacac

SEQ ID NO: 5882006 - DNA, 25 bp, Homo sapien
tcgggcgagaattcccgtttgctta

SEQ ID NO: 5882007 - DNA, 25 bp, Homo sapien
gggtgtgtgaagaacaagtgtcgct

SEQ ID NO: 5882008 - DNA, 25 bp, Homo sapien
ctctcgtcgcccacgcccacgaccg

SEQ ID NO: 5882009 - DNA, 25 bp, Homo sapien
cagggggggagtgggtggaaagcgc

SEQ ID NO: 5882010 - DNA, 25 bp, Homo sapien
aacgaggggaggagaggcccctcca

SEQ ID NO: 5882011 - DNA, 25 bp, Homo sapien
tgggtggaaagcgcccttctgccag

SEQ ID NO: 5882012 - DNA, 25 bp, Homo sapien
ttctaagcagaggctgccattgcat

SEQ ID NO: 5882013 - DNA, 25 bp, Homo sapien
gggcgagaattcccgtttgcttaag

SEQ ID NO: 5882014 - DNA, 25 bp, Homo sapien
caagtcgctggtgccgggttccggg

SEQ ID NO: 5882015 - DNA, 25 bp, Homo sapien
ctaagcagaggctgccattgcattg

SEQ ID NO: 5882016 - DNA, 25 bp, Homo sapien
ccagtgcagaagtttatctgctatg

SEQ ID NO: 5882017 - DNA, 25 bp, Homo sapien
ccaagtgatgtctcggtggtggact

SEQ ID NO: 5882018 - DNA, 25 bp, Homo sapien
cactggtgaatggctgtttgcaagt

SEQ ID NO: 5882019 - DNA, 25 bp, Homo sapien
ggcctcgctgaagtgctgcatggag

SEQ ID NO: 5882020 - DNA, 25 bp, Homo sapien
tgcagtaacctttgcatagggctgg

SEQ ID NO: 5882021 - DNA, 25 bp, Homo sapien
ctggcggtggagagaccgtcgtcgg

SEQ ID NO: 5882022 - DNA, 25 bp, Homo sapien
gggggtgtgtgaagaacaagtgtcg

SEQ ID NO: 5882023 - DNA, 25 bp, Homo sapien
ggtgaaggggaaggtggcttatcca

SEQ ID NO: 5882024 - DNA, 25 bp, Homo sapien
gttattgtctgcaatatgaatccca

SEQ ID NO: 5882025 - DNA, 25 bp, Homo sapien
acctagtcctgaagggataccaacc

SEQ ID NO: 5882026 - DNA, 25 bp, Homo sapien
tgtctcggtggtggactaaacaggg

SEQ ID NO: 5882027 - DNA, 25 bp, Homo sapien
gcagaggctgccattgcattgtttc

SEQ ID NO: 5882028 - DNA, 25 bp, Homo sapien
ctcttcttcctcttcctcgtcgtcc

SEQ ID NO: 5882029 - DNA, 25 bp, Homo sapien
tctgtaagaatggcttcaagaggct

SEQ ID NO: 5882030 - DNA, 25 bp, Homo sapien
tctcgcccgtgtggctgcgccggtg

SEQ ID NO: 5882031 - DNA, 25 bp, Homo sapien
gcggccattaacagtgccatcgtct

SEQ ID NO: 5882032 - DNA, 25 bp, Homo sapien
aggggttattgtctgcaatatgaat

SEQ ID NO: 5882033 - DNA, 25 bp, Homo sapien
tctatgcggtccgactcgccggcca

SEQ ID NO: 5882034 - DNA, 25 bp, Homo sapien
ctccccgggcggtgtggagaagcgc

SEQ ID NO: 5882035 - DNA, 25 bp, Homo sapien
tgaagtgctgcatggagctgagcac

SEQ ID NO: 5882036 - DNA, 25 bp, Homo sapien
tattcttagcaggttaaaggggtta

SEQ ID NO: 5882037 - DNA, 25 bp, Homo sapien
cccttctggagctcccaacgggccg

SEQ ID NO: 5882038 - DNA, 25 bp, Homo sapien
aatatgaatcccatggagaggtggc

SEQ ID NO: 5882039 - DNA, 25 bp, Homo sapien
agtgtcgctgcgtctgccctctttt

SEQ ID NO: 5882040 - DNA, 25 bp, Homo sapien
gggggtccaagtgatgtctcggtgg

SEQ ID NO: 5882041 - DNA, 25 bp, Homo sapien
agtcctgaagggataccaacccgcg

SEQ ID NO: 5882042 - DNA, 25 bp, Homo sapien
ctggcgctgcccaccaagtcgctgg

SEQ ID NO: 5882043 - DNA, 25 bp, Homo sapien
tagggctgggccggcctggggacag

SEQ ID NO: 5882044 - DNA, 25 bp, Homo sapien
ggcatattctgcactcatcccaggc

SEQ ID NO: 5882045 - DNA, 25 bp, Homo sapien
actcgggtgatgggtggccagggcc

SEQ ID NO: 5882046 - DNA, 25 bp, Homo sapien
tgctatgtgttcctgtttggggcaa

SEQ ID NO: 5882047 - DNA, 25 bp, Homo sapien
cacaggttgcacttgtagggcttct

SEQ ID NO: 5882048 - DNA, 25 bp, Homo sapien
cgtcttgccgcagaactcgcatgac

SEQ ID NO: 5882049 - DNA, 25 bp, Homo sapien
acctccacgggattggatgcttttt

SEQ ID NO: 5882050 - DNA, 25 bp, Homo sapien
aacctttgcatagggctgggccggc

SEQ ID NO: 5882051 - DNA, 25 bp, Homo sapien
tcgataaaaataagaatgtccccca

SEQ ID NO: 5882052 - DNA, 25 bp, Homo sapien
gtgatgggtggccagggccatctct

SEQ ID NO: 5882053 - DNA, 25 bp, Homo sapien
ctcagcgagctggggctgcccagca

SEQ ID NO: 5882054 - DNA, 25 bp, Homo sapien
ccgcgtagccggcgagccactgcga

SEQ ID NO: 5882055 - DNA, 25 bp, Homo sapien
gtctcctagagaaatccatggcggg

SEQ ID NO: 5882056 - DNA, 25 bp, Homo sapien
ggacttgagcgcgctgctggcgctg

SEQ ID NO: 5882057 - DNA, 25 bp, Homo sapien
gagaaatccatggcgggaggctcca

SEQ ID NO: 5882058 - DNA, 25 bp, Homo sapien
tgctggcctgggtgcacgcgtggtc

SEQ ID NO: 5882059 - DNA, 25 bp, Homo sapien
gtcatcctctggcgtgacctggatg

SEQ ID NO: 5882060 - DNA, 25 bp, Homo sapien
atactgatcctggtattcttagcag

SEQ ID NO: 5882061 - DNA, 25 bp, Homo sapien
tgggtgcacgcgtggtcgcacaggt

SEQ ID NO: 5882062 - DNA, 25 bp, Homo sapien
ggggtcaggggacttccgtgttcgc

SEQ ID NO: 5882063 - DNA, 25 bp, Homo sapien
tcgcccgtgtggctgcgccggtgca

SEQ ID NO: 5882064 - DNA, 25 bp, Homo sapien
ccatgtgcagaacgaggggaggaga

SEQ ID NO: 5882065 - DNA, 25 bp, Homo sapien
ccgaggagtgctccgacgaggaggc

SEQ ID NO: 5882066 - DNA, 25 bp, Homo sapien
ccgcgccccgcgagctgttctcgtg

SEQ ID NO: 5882067 - DNA, 25 bp, Homo sapien
gccaggaagggcggcttgctacctg

SEQ ID NO: 5882068 - DNA, 25 bp, Homo sapien
gtcgaactccttctcgagcttgatg

SEQ ID NO: 5882069 - DNA, 25 bp, Homo sapien
gacttggacttgaccgggggctggg

SEQ ID NO: 5882070 - DNA, 25 bp, Homo sapien
ggcttgctacctggctggaatggtt

SEQ ID NO: 5882071 - DNA, 25 bp, Homo sapien
cggtccgactcgccggccaccgagt

SEQ ID NO: 5882072 - DNA, 25 bp, Homo sapien
gaatgggggtgtgtgaagaacaagt

SEQ ID NO: 5882073 - DNA, 25 bp, Homo sapien
cgagccactgcgagtacacgttctc

SEQ ID NO: 5882074 - DNA, 25 bp, Homo sapien
ggcgtgacctggatgccaacctcca

SEQ ID NO: 5882075 - DNA, 25 bp, Homo sapien
gggcggcttgctacctggctggaat

SEQ ID NO: 5882076 - DNA, 25 bp, Homo sapien
ctgcccgggcccggaccactaatat

SEQ ID NO: 5882077 - DNA, 25 bp, Homo sapien
ctgggagggaggaggggcggattgc

SEQ ID NO: 5882078 - DNA, 25 bp, Homo sapien
ccatcgtctatgcggtccgactcgc

SEQ ID NO: 5882079 - DNA, 25 bp, Homo sapien
ccgtcagctcctcctcctcctcttc

SEQ ID NO: 5882080 - DNA, 25 bp, Homo sapien
cgtcgcaagtgtccctgtggccctc

SEQ ID NO: 5882081 - DNA, 25 bp, Homo sapien
gtgcaccaccaggttgctctgaaat

SEQ ID NO: 5882082 - DNA, 25 bp, Homo sapien
agttcatctggcactgcccacaggt

SEQ ID NO: 5882083 - DNA, 25 bp, Homo sapien
gcgtcttcatgtggcgcttcagctt

SEQ ID NO: 5882084 - DNA, 25 bp, Homo sapien
gcgcccttctgccaggccggaagcc

SEQ ID NO: 5882085 - DNA, 25 bp, Homo sapien
ataaacaatcgtcatcctctggcgt

SEQ ID NO: 5882086 - DNA, 25 bp, Homo sapien
gaagttcatctggcactgcccacag

SEQ ID NO: 5882087 - DNA, 25 bp, Homo sapien
gcgctgctggcgctgcccaccaagt

SEQ ID NO: 5882088 - DNA, 25 bp, Homo sapien
aatccatggcgggaggctccatagc

SEQ ID NO: 5882089 - DNA, 25 bp, Homo sapien
acgtgttccctgccagctctctaag

SEQ ID NO: 5882090 - DNA, 25 bp, Homo sapien
gggcgtgctccctccacttcccgtg

SEQ ID NO: 5882091 - DNA, 25 bp, Homo sapien
gggctgcccagcagcagctttttgg

SEQ ID NO: 5882092 - DNA, 25 bp, Homo sapien
gtgttgcaagagaaaccatgcactg

SEQ ID NO: 5882093 - DNA, 25 bp, Homo sapien
ctcctagagaaatccatggcgggag

SEQ ID NO: 5882094 - DNA, 25 bp, Homo sapien
tttatctgctatgtgttcctgtttg

SEQ ID NO: 5882095 - DNA, 25 bp, Homo sapien
cattctgcacctagtcctgaaggga

SEQ ID NO: 5882096 - DNA, 25 bp, Homo sapien
gacttgaccgggggctgggagggag

SEQ ID NO: 5882097 - DNA, 25 bp, Homo sapien
ctcttgaacttggccaccacggact

SEQ ID NO: 5882098 - DNA, 25 bp, Homo sapien
tcgctgcgtctgccctcttttgagc

SEQ ID NO: 5882099 - DNA, 25 bp, Homo sapien
atgtgcagaacgaggggaggagagg

SEQ ID NO: 5882100 - DNA, 25 bp, Homo sapien
ggttccggggagctggcggtggaga

SEQ ID NO: 5882101 - DNA, 25 bp, Homo sapien
ggctgggagggaggaggggcggatt

SEQ ID NO: 5882102 - DNA, 25 bp, Homo sapien
actgatcctggtattcttagcaggt

SEQ ID NO: 5882103 - DNA, 25 bp, Homo sapien
ggccaccgagtcttcgtcgcaagtg

SEQ ID NO: 5882104 - DNA, 25 bp, Homo sapien
gaggtcatgatccccttctggagct

SEQ ID NO: 5882105 - DNA, 25 bp, Homo sapien
ccaacgggccgtggtctggttcatc

SEQ ID NO: 5882106 - DNA, 25 bp, Homo sapien
ggggcgtcgccaggaagggcggctt

SEQ ID NO: 5882107 - DNA, 25 bp, Homo sapien
cgttctccgggatcaggttggggtc

SEQ ID NO: 5882108 - DNA, 25 bp, Homo sapien
tctcgcccaggacctggtggaaggc

SEQ ID NO: 5882109 - DNA, 25 bp, Homo sapien
tccgaagctaaggaagggatctttg

SEQ ID NO: 5882110 - DNA, 25 bp, Homo sapien
ccgaagccgtagtccaccctctcgc

SEQ ID NO: 5882111 - DNA, 25 bp, Homo sapien
ttggtgaaggggaaggtggcttatc

SEQ ID NO: 5882112 - DNA, 25 bp, Homo sapien
gccaccacggacttgagcgcgctgc

SEQ ID NO: 5882113 - DNA, 25 bp, Homo sapien
caatgggaagttcatctggcactgc

SEQ ID NO: 5882114 - DNA, 25 bp, Homo sapien
gtgatgtctcggtggtggactaaac

SEQ ID NO: 5882115 - DNA, 25 bp, Homo sapien
aaaccatgcactggtgaatggctgt

SEQ ID NO: 5882116 - DNA, 25 bp, Homo sapien
ccggaccactaatatggggcgtgct

SEQ ID NO: 5882117 - DNA, 25 bp, Homo sapien
ctgggcctgcccgggcccggaccac

SEQ ID NO: 5882118 - DNA, 25 bp, Homo sapien
gccgcctccaggctcagcccgaagc

SEQ ID NO: 5882119 - DNA, 25 bp, Homo sapien
gctaaggaagggatctttgagctgc

SEQ ID NO: 5882120 - DNA, 25 bp, Homo sapien
cgttctccgtgttgggcatcgcggc

SEQ ID NO: 5882121 - DNA, 25 bp, Homo sapien
cgtcgccaggaagggcggcttgcta

SEQ ID NO: 5882122 - DNA, 25 bp, Homo sapien
cgctgcgccccgagatccctccgtc

SEQ ID NO: 5882123 - DNA, 25 bp, Homo sapien
ccgagatccctccgtccagctcccc

SEQ ID NO: 5882124 - DNA, 25 bp, Homo sapien
cgcgagctgttctcgtggtggcgcg

SEQ ID NO: 5882125 - DNA, 25 bp, Homo sapien
acatcttgagctctctgggtactac

SEQ ID NO: 5882126 - DNA, 25 bp, Homo sapien
ggatgcttttttcatctcgattggt

SEQ ID NO: 5882127 - DNA, 25 bp, Homo sapien
tggggtcgttctcgctcttgaactt

SEQ ID NO: 5882128 - DNA, 25 bp, Homo sapien
gggctgggccggcctggggacagcg

SEQ ID NO: 5882129 - DNA, 25 bp, Homo sapien
agtccaccctctcgctctccgtcag

SEQ ID NO: 5882130 - DNA, 25 bp, Homo sapien
ctgctgggctcatctttacaaatac

SEQ ID NO: 5882131 - DNA, 25 bp, Homo sapien
gctggtgccgggttccggggagctg

SEQ ID NO: 5882132 - DNA, 25 bp, Homo sapien
gaaaactgccacacatcttgagctc

SEQ ID NO: 5882133 - DNA, 25 bp, Homo sapien
tatgcggtgggggtccaagtgatgt

SEQ ID NO: 5882134 - DNA, 25 bp, Homo sapien
tcatcccaggcgtggggattagagc

SEQ ID NO: 5882135 - DNA, 25 bp, Homo sapien
agcaggttaaaggggttattgtctg

SEQ ID NO: 5882136 - DNA, 25 bp, Homo sapien
tctcggtggtggactaaacaggggg

SEQ ID NO: 5882137 - DNA, 25 bp, Homo sapien
ccaccgagtcttcgtcgcaagtgtc

SEQ ID NO: 5882138 - DNA, 25 bp, Homo sapien
cccccaatgggaagttcatctggca

SEQ ID NO: 5882139 - DNA, 25 bp, Homo sapien
gtgtccctgtggccctcggcctcgg

SEQ ID NO: 5882140 - DNA, 25 bp, Homo sapien
gagctgagcaccatgccctgcatga

SEQ ID NO: 5882141 - DNA, 25 bp, Homo sapien
tgctccgacgaggaggcaaaaggcg

SEQ ID NO: 5882142 - DNA, 25 bp, Homo sapien
tcgcatgacttggacttgaccgggg

SEQ ID NO: 5882143 - DNA, 25 bp, Homo sapien
ccacacatcttgagctctctgggta

SEQ ID NO: 5882144 - DNA, 25 bp, Homo sapien
cacttcccgtgccgctgcgccccga

SEQ ID NO: 5882145 - DNA, 25 bp, Homo sapien
gtggagagaccgtcgtcggacttga

SEQ ID NO: 5882146 - DNA, 25 bp, Homo sapien
tccatggcgggaggctccatagcca

SEQ ID NO: 5882147 - DNA, 25 bp, Homo sapien
ttgcttaagtgctggggtttgcctt

SEQ ID NO: 5882148 - DNA, 25 bp, Homo sapien
ttctgcactcatcccaggcgtgggg

SEQ ID NO: 5882149 - DNA, 25 bp, Homo sapien
gagggagggggggcgtcgccaggaa

SEQ ID NO: 5882150 - DNA, 25 bp, Homo sapien
gggaggagaggcccctccagtgcag

SEQ ID NO: 5882151 - DNA, 25 bp, Homo sapien
ccatggagaggtggctgggaaggac

SEQ ID NO: 5882152 - DNA, 25 bp, Homo sapien
tgcggtccgactcgccggccaccga

SEQ ID NO: 5882153 - DNA, 25 bp, Homo sapien
gcggccgggggcaggtcgaactcct

SEQ ID NO: 5882154 - DNA, 25 bp, Homo sapien
atgtgcgtcttcatgtggcgcttca

SEQ ID NO: 5882155 - DNA, 25 bp, Homo sapien
tgaccgggggctgggagggaggagg

SEQ ID NO: 5882156 - DNA, 25 bp, Homo sapien
ggattgcagaggagggagggggggc

SEQ ID NO: 5882157 - DNA, 25 bp, Homo sapien
aacaagtgtcgctgcgtctgccctc

SEQ ID NO: 5882158 - DNA, 25 bp, Homo sapien
gcactgcccacaggtgaggaggtca

SEQ ID NO: 5882159 - DNA, 25 bp, Homo sapien
cctctagatgacgttgataaacaat

SEQ ID NO: 5882160 - DNA, 25 bp, Homo sapien
aataccctgcggggcatattctgca

SEQ ID NO: 5882161 - DNA, 25 bp, Homo sapien
agagaaaccatgcactggtgaatgg

SEQ ID NO: 5882162 - DNA, 25 bp, Homo sapien
tttacaaataccctgcggggcatat

SEQ ID NO: 5882163 - DNA, 25 bp, Homo sapien
cgcaagctcccgttctccgaggagt

SEQ ID NO: 5882164 - DNA, 25 bp, Homo sapien
actcatcccaggcgtggggattaga

SEQ ID NO: 5882165 - DNA, 25 bp, Homo sapien
tggagaagcgcaagctcccgttctc

SEQ ID NO: 5882166 - DNA, 25 bp, Homo sapien
aggtggctgggaaggacattctgca

SEQ ID NO: 5882167 - DNA, 25 bp, Homo sapien
gggagggaggaggggcggattgcag

SEQ ID NO: 5882168 - DNA, 25 bp, Homo sapien
cagcccgaagccgtagtccaccctc

SEQ ID NO: 5882169 - DNA, 25 bp, Homo sapien
ttaaaggggttattgtctgcaatat

SEQ ID NO: 5882170 - DNA, 25 bp, Homo sapien
acacatcttgagctctctgggtact

SEQ ID NO: 5882171 - DNA, 25 bp, Homo sapien
ctccgtgttgggcatcgcggccggg

SEQ ID NO: 5882172 - DNA, 25 bp, Homo sapien
gcccccaggcgctctatgcggtggg

SEQ ID NO: 5882173 - DNA, 25 bp, Homo sapien
tctgccctcttttgagctgggcctg

SEQ ID NO: 5882174 - DNA, 25 bp, Homo sapien
gagctgcctggaggccgcgtagccg

SEQ ID NO: 5882175 - DNA, 25 bp, Homo sapien
tgccacacatcttgagctctctggg

SEQ ID NO: 5882176 - DNA, 25 bp, Homo sapien
catcctctggcgtgacctggatgcc

SEQ ID NO: 5882177 - DNA, 25 bp, Homo sapien
ctggagtctccgaagctaaggaagg

SEQ ID NO: 5882178 - DNA, 25 bp, Homo sapien
accgagtcttcgtcgcaagtgtccc

SEQ ID NO: 5882179 - DNA, 25 bp, Homo sapien
gatgacgttgataaacaatcgtcat

SEQ ID NO: 5882180 - DNA, 25 bp, Homo sapien
cctgcatgacgtcgggcagggcgcg

SEQ ID NO: 5882181 - DNA, 25 bp, Homo sapien
ttgtttccgtttgtgctcgataaaa

SEQ ID NO: 5882182 - DNA, 25 bp, Homo sapien
caaattcctctagatgacgttgata

SEQ ID NO: 5882183 - DNA, 25 bp, Homo sapien
ttttttcatctcgattggtgaaggg

SEQ ID NO: 5882184 - DNA, 25 bp, Homo sapien
gtgctggggtttgccttgcttgcgg

SEQ ID NO: 5882185 - DNA, 25 bp, Homo sapien
cctggtattcttagcaggttaaagg

SEQ ID NO: 5882186 - DNA, 25 bp, Homo sapien
acaatcgtcatcctctggcgtgacc

SEQ ID NO: 5882187 - DNA, 25 bp, Homo sapien
atgatccccttctggagctcccaac

SEQ ID NO: 5882188 - DNA, 25 bp, Homo sapien
cgctttctaagtagattcttaatcc

SEQ ID NO: 5882189 - DNA, 25 bp, Homo sapien
ttcctcgtcgtcctcctcttcctcc

SEQ ID NO: 5882190 - DNA, 25 bp, Homo sapien
gaggccgcgtagccggcgagccact

SEQ ID NO: 5882191 - DNA, 25 bp, Homo sapien
cgggttccggggagctggcggtgga

SEQ ID NO: 5882192 - DNA, 25 bp, Homo sapien
gtgcagaacgaggggaggagaggcc

SEQ ID NO: 5882193 - DNA, 25 bp, Homo sapien
tctttacaaataccctgcggggcat

SEQ ID NO: 5882194 - DNA, 25 bp, Homo sapien
ggcgcttcagcttgctggcctgggt

SEQ ID NO: 5882195 - DNA, 25 bp, Homo sapien
gggacgatttgtgcatgtgcgtctt

SEQ ID NO: 5882196 - DNA, 25 bp, Homo sapien
cctgccagctctctaagtctcctag

SEQ ID NO: 5882197 - DNA, 25 bp, Homo sapien
agccactgcgagtacacgttctccg

SEQ ID NO: 5882198 - DNA, 25 bp, Homo sapien
gctgccattgcattgtttccgtttg

SEQ ID NO: 5882199 - DNA, 25 bp, Homo sapien
ggtcaggggacttccgtgttcgctt

SEQ ID NO: 5882200 - DNA, 25 bp, Homo sapien
attcccgtttgcttaagtgctgggg

SEQ ID NO: 5882201 - DNA, 25 bp, Homo sapien
ccggaagcctctctcgatactgatc

SEQ ID NO: 5882202 - DNA, 25 bp, Homo sapien
tcttcctcgtcgtcctcctcttcct

SEQ ID NO: 5882203 - DNA, 25 bp, Homo sapien
ccagctccccgggcggtgtggagaa

SEQ ID NO: 5882204 - DNA, 25 bp, Homo sapien
agctgttctcgtggtggcgcgccgc

SEQ ID NO: 5882205 - DNA, 25 bp, Homo sapien
gctgcccagcagcagctttttggac

SEQ ID NO: 5882206 - DNA, 25 bp, Homo sapien
gctctcgagcttccatccgaaaact

SEQ ID NO: 5882207 - DNA, 25 bp, Homo sapien
cctggtggaaggcctcgctgaagtg

SEQ ID NO: 5882208 - DNA, 25 bp, Homo sapien
tccatgagtgttctgtgcgtgttgc

SEQ ID NO: 5882209 - DNA, 25 bp, Homo sapien
gcggctctcgtcgcccacgcccacg

SEQ ID NO: 5882210 - DNA, 25 bp, Homo sapien
aagtctcctagagaaatccatggcg

SEQ ID NO: 5882211 - DNA, 25 bp, Homo sapien
atgtggcgcttcagcttgctggcct

SEQ ID NO: 5882212 - DNA, 25 bp, Homo sapien
tagatgacgttgataaacaatcgtc

SEQ ID NO: 5882213 - DNA, 25 bp, Homo sapien
gtcagctcctcctcctcctcttcct

SEQ ID NO: 5882214 - DNA, 25 bp, Homo sapien
cctgtcaaaggcactcgggtgatgg

SEQ ID NO: 5882215 - DNA, 25 bp, Homo sapien
ctgcaatatgaatcccatggagagg

SEQ ID NO: 5882216 - DNA, 25 bp, Homo sapien
ttggacaggccccccgaggccgact

SEQ ID NO: 5882217 - DNA, 25 bp, Homo sapien
ggttgcacttgtagggcttctcgcc

SEQ ID NO: 5882218 - DNA, 25 bp, Homo sapien
gcccctccagtgcagaagtttatct

SEQ ID NO: 5882219 - DNA, 25 bp, Homo sapien
ttctcgagcttgatgcgcttagaga

SEQ ID NO: 5882220 - DNA, 25 bp, Homo sapien
acggacttgagcgcgctgctggcgc

SEQ ID NO: 5882221 - DNA, 25 bp, Homo sapien
attgcagaggagggagggggggcgt

SEQ ID NO: 5882222 - DNA, 25 bp, Homo sapien
tcccgtttgcttaagtgctggggtt

SEQ ID NO: 5882223 - DNA, 25 bp, Homo sapien
ctttgagctgcctggaggccgcgta

SEQ ID NO: 5882224 - DNA, 25 bp, Homo sapien
cgccgaatgggggtgtgtgaagaac

SEQ ID NO: 5882225 - DNA, 25 bp, Homo sapien
ccatgccctgcatgacgtcgggcag

SEQ ID NO: 5882226 - DNA, 25 bp, Homo sapien
gtgtgtgaagaacaagtgtcgctgc

SEQ ID NO: 5882227 - DNA, 25 bp, Homo sapien
gccgcagaactcgcatgacttggac

SEQ ID NO: 5882228 - DNA, 25 bp, Homo sapien
tcgtcgtcctcctcttcctcctcgt

SEQ ID NO: 5882229 - DNA, 25 bp, Homo sapien
ctagtcctgaagggataccaacccg

SEQ ID NO: 5882230 - DNA, 25 bp, Homo sapien
tggtggactaaacagggggggagtg

SEQ ID NO: 5882231 - DNA, 25 bp, Homo sapien
ctaatatggggcgtgctccctccac

SEQ ID NO: 5882232 - DNA, 25 bp, Homo sapien
ttagcaggttaaaggggttattgtc

SEQ ID NO: 5882233 - DNA, 25 bp, Homo sapien
ccggcctggggacagcggtgggcta

SEQ ID NO: 5882234 - DNA, 25 bp, Homo sapien
ctccagtgcagaagtttatctgcta

SEQ ID NO: 5882235 - DNA, 25 bp, Homo sapien
gacctggtggaaggcctcgctgaag

SEQ ID NO: 5882236 - DNA, 25 bp, Homo sapien
agtgggtggaaagcgcccttctgcc

SEQ ID NO: 5882237 - DNA, 25 bp, Homo sapien
gggaggaggggcggattgcagagga

SEQ ID NO: 5882238 - DNA, 25 bp, Homo sapien
gagctcccaacgggccgtggtctgg

SEQ ID NO: 5882239 - DNA, 25 bp, Homo sapien
ctggcgtgacctggatgccaacctc

SEQ ID NO: 5882240 - DNA, 25 bp, Homo sapien
agtgccatcgtctatgcggtccgac

SEQ ID NO: 5882241 - DNA, 25 bp, Homo sapien
ggcaaaaggcgattgtctggagtct

SEQ ID NO: 5882242 - DNA, 25 bp, Homo sapien
aaacaatcgtcatcctctggcgtga

SEQ ID NO: 5882243 - DNA, 25 bp, Homo sapien
aggacattctgcacctagtcctgaa

SEQ ID NO: 5882244 - DNA, 25 bp, Homo sapien
atgcgcttagagaaggggctcagcg

SEQ ID NO: 5882245 - DNA, 25 bp, Homo sapien
gaaatccatggcgggaggctccata

SEQ ID NO: 5882246 - DNA, 25 bp, Homo sapien
cactaatatggggcgtgctccctcc

SEQ ID NO: 5882247 - DNA, 25 bp, Homo sapien
ggaggggcggattgcagaggaggga

SEQ ID NO: 5882248 - DNA, 25 bp, Homo sapien
gcgagaattcccgtttgcttaagtg

SEQ ID NO: 5882249 - DNA, 25 bp, Homo sapien
aggctgccattgcattgtttccgtt

SEQ ID NO: 5882250 - DNA, 25 bp, Homo sapien
tctcgattggtgaaggggaaggtgg

SEQ ID NO: 5882251 - DNA, 25 bp, Homo sapien
gacgatttgtgcatgtgcgtcttca

SEQ ID NO: 5882252 - DNA, 25 bp, Homo sapien
catgcactggtgaatggctgtttgc

SEQ ID NO: 5882253 - DNA, 25 bp, Homo sapien
attcttaatccatgagtgttctgtg

SEQ ID NO: 5882254 - DNA, 25 bp, Homo sapien
gggcggtgtggagaagcgcaagctc

SEQ ID NO: 5882255 - DNA, 25 bp, Homo sapien
gcagcagctttttggacaggccccc

SEQ ID NO: 5882256 - DNA, 25 bp, Homo sapien
tcttaatccatgagtgttctgtgcg

SEQ ID NO: 5882257 - DNA, 25 bp, Homo sapien
atccacagctttttctaagcagagg

SEQ ID NO: 5882258 - DNA, 25 bp, Homo sapien
ctgaaatttgaacgtcttgccgcag

SEQ ID NO: 5882259 - DNA, 25 bp, Homo sapien
cttgagctctctgggtactacgccg

SEQ ID NO: 5882260 - DNA, 25 bp, Homo sapien
agggatctttgagctgcctggaggc

SEQ ID NO: 5882261 - DNA, 25 bp, Homo sapien
cgttctcgctcttgaacttggccac

SEQ ID NO: 5882262 - DNA, 25 bp, Homo sapien
aagggcggcttgctacctggctgga

SEQ ID NO: 5882263 - DNA, 25 bp, Homo sapien
ggtggcttatccacagctttttcta

SEQ ID NO: 5882264 - DNA, 25 bp, Homo sapien
gcttagagaaggggctcagcgagct

SEQ ID NO: 5882265 - DNA, 25 bp, Homo sapien
cagggcgcggctctcgtcgcccacg

SEQ ID NO: 5882266 - DNA, 25 bp, Homo sapien
ccattaacagtgccatcgtctatgc

SEQ ID NO: 5882267 - DNA, 25 bp, Homo sapien
gcgtgttgcaagagaaaccatgcac

SEQ ID NO: 5882268 - DNA, 25 bp, Homo sapien
cattgtttccgtttgtgctcgataa

SEQ ID NO: 5882269 - DNA, 25 bp, Homo sapien
agtacacgttctccgtgttgggcat

SEQ ID NO: 5882270 - DNA, 25 bp, Homo sapien
gtactacgccgaatgggggtgtgtg

SEQ ID NO: 5882271 - DNA, 25 bp, Homo sapien
atgggggacgatttgtgcatgtgcg

SEQ ID NO: 5882272 - DNA, 25 bp, Homo sapien
gacattctgcacctagtcctgaagg

SEQ ID NO: 5882273 - DNA, 25 bp, Homo sapien
gaactcgcatgacttggacttgacc

SEQ ID NO: 5882274 - DNA, 25 bp, Homo sapien
ggctgcgccggtgcaccaccaggtt

SEQ ID NO: 5882275 - DNA, 25 bp, Homo sapien
ttgagcgcgctgctggcgctgccca

SEQ ID NO: 5882276 - DNA, 25 bp, Homo sapien
ctggatgccaacctccacgggattg

SEQ ID NO: 5882277 - DNA, 25 bp, Homo sapien
gtttgcttaagtgctggggtttgcc

SEQ ID NO: 5882278 - DNA, 25 bp, Homo sapien
gtccaagtgatgtctcggtggtgga

SEQ ID NO: 5882279 - DNA, 25 bp, Homo sapien
agagctccatgtgcagaacgagggg

SEQ ID NO: 5882280 - DNA, 25 bp, Homo sapien
cgaagctaaggaagggatctttgag

SEQ ID NO: 5882281 - DNA, 25 bp, Homo sapien
tgcagaggagggagggggggcgtcg

SEQ ID NO: 5882282 - DNA, 25 bp, Homo sapien
caggccccccgaggccgactcgccc

SEQ ID NO: 5882283 - DNA, 25 bp, Homo sapien
tgagtgttctgtgcgtgttgcaaga

SEQ ID NO: 5882284 - DNA, 25 bp, Homo sapien
tgcccacaggtgaggaggtcatgat

SEQ ID NO: 5882285 - DNA, 25 bp, Homo sapien
ctggctggaatggttgcagtaacct

SEQ ID NO: 5882286 - DNA, 25 bp, Homo sapien
cacgcgtggtcgcacaggttgcact

SEQ ID NO: 5882287 - DNA, 25 bp, Homo sapien
cgaggaggcaaaaggcgattgtctg

SEQ ID NO: 5882288 - DNA, 25 bp, Homo sapien
ccgggcggtgtggagaagcgcaagc

SEQ ID NO: 5882289 - DNA, 25 bp, Homo sapien
tgcttctcgcccaggacctggtgga

SEQ ID NO: 5882290 - DNA, 25 bp, Homo sapien
agcgcaagctcccgttctccgagga

SEQ ID NO: 5882291 - DNA, 25 bp, Homo sapien
gattcaaccgcagcaccctgtcaaa

SEQ ID NO: 5882292 - DNA, 25 bp, Homo sapien
ctcgccggccaccgagtcttcgtcg

SEQ ID NO: 5882293 - DNA, 25 bp, Homo sapien
ttcatctcgattggtgaaggggaag

SEQ ID NO: 5882294 - DNA, 25 bp, Homo sapien
agagaccgtcgtcggacttgaccgt

SEQ ID NO: 5882295 - DNA, 25 bp, Homo sapien
cgggcagggcgcggctctcgtcgcc

SEQ ID NO: 5882296 - DNA, 25 bp, Homo sapien
aggggaggagaggcccctccagtgc

SEQ ID NO: 5882297 - DNA, 25 bp, Homo sapien
tggccaccacggacttgagcgcgct

SEQ ID NO: 5882298 - DNA, 25 bp, Homo sapien
acgggattggatgcttttttcatct

SEQ ID NO: 5882299 - DNA, 25 bp, Homo sapien
tgccatcgtctatgcggtccgactc

SEQ ID NO: 5882300 - DNA, 25 bp, Homo sapien
ggtggccgcgcttatgcttctcgcc

SEQ ID NO: 5882301 - DNA, 25 bp, Homo sapien
tgagctctctgggtactacgccgaa

SEQ ID NO: 5882302 - DNA, 25 bp, Homo sapien
tgaatcccatggagaggtggctggg

SEQ ID NO: 5882303 - DNA, 25 bp, Homo sapien
ccctgtggccctcggcctcggccag

SEQ ID NO: 5882304 - DNA, 25 bp, Homo sapien
gaggaggggcggattgcagaggagg

SEQ ID NO: 5882305 - DNA, 25 bp, Homo sapien
tctgctatgtgttcctgtttggggc

SEQ ID NO: 5882306 - DNA, 25 bp, Homo sapien
gacttgaccgtcatgggggacgatt

SEQ ID NO: 5882307 - DNA, 25 bp, Homo sapien
ttcctcttcctcgtcgtcctcctct

SEQ ID NO: 5882308 - DNA, 25 bp, Homo sapien
acatgtgtagctgctgggctcatct

SEQ ID NO: 5882309 - DNA, 25 bp, Homo sapien
gggctctcgagcttccatccgaaaa

SEQ ID NO: 5882310 - DNA, 25 bp, Homo sapien
gctgaagtgctgcatggagctgagc

SEQ ID NO: 5882311 - DNA, 25 bp, Homo sapien
gctgcatggagctgagcaccatgcc

SEQ ID NO: 5882312 - DNA, 25 bp, Homo sapien
tctatgcggtgggggtccaagtgat

SEQ ID NO: 5882313 - DNA, 25 bp, Homo sapien
aatttgaacgtcttgccgcagaact

SEQ ID NO: 5882314 - DNA, 25 bp, Homo sapien
agttgtacatgtgtagctgctgggc

SEQ ID NO: 5882315 - DNA, 25 bp, Homo sapien
gtagctgctgggctcatctttacaa

SEQ ID NO: 5882316 - DNA, 25 bp, Homo sapien
gccgctgcgccccgagatccctccg

SEQ ID NO: 5882317 - DNA, 25 bp, Homo sapien
atcatctgtaagaatggcttcaaga

SEQ ID NO: 5882318 - DNA, 25 bp, Homo sapien
catctcgattggtgaaggggaaggt

SEQ ID NO: 5882319 - DNA, 25 bp, Homo sapien
cttgaccgggggctgggagggagga

SEQ ID NO: 5882320 - DNA, 25 bp, Homo sapien
ccacagctttttctaagcagaggct

SEQ ID NO: 5882321 - DNA, 25 bp, Homo sapien
ttggggcaaattcctctagatgacg

SEQ ID NO: 5882322 - DNA, 25 bp, Homo sapien
cgcttatgcttctcgcccaggacct

SEQ ID NO: 5882323 - DNA, 25 bp, Homo sapien
tgcatgacgtcgggcagggcgcggc

SEQ ID NO: 5882324 - DNA, 25 bp, Homo sapien
gggattagagctccatgtgcagaac

SEQ ID NO: 5882325 - DNA, 25 bp, Homo sapien
aagcgcccttctgccaggccggaag

SEQ ID NO: 5882326 - DNA, 25 bp, Homo sapien
agtgttctgtgcgtgttgcaagaga

SEQ ID NO: 5882327 - DNA, 25 bp, Homo sapien
tgcaagagaaaccatgcactggtga

SEQ ID NO: 5882328 - DNA, 25 bp, Homo sapien
tgcgagtacacgttctccgtgttgg

SEQ ID NO: 5882329 - DNA, 25 bp, Homo sapien
ccccgggcggtgtggagaagcgcaa

SEQ ID NO: 5882330 - DNA, 25 bp, Homo sapien
aaaggggttattgtctgcaatatga

SEQ ID NO: 5882331 - DNA, 25 bp, Homo sapien
taccctgcggggcatattctgcact

SEQ ID NO: 5882332 - DNA, 25 bp, Homo sapien
tgacctggatgccaacctccacggg

SEQ ID NO: 5882333 - DNA, 25 bp, Homo sapien
cgcccggggagcagccgcggccatt

SEQ ID NO: 5882334 - DNA, 25 bp, Homo sapien
cctcgctgaagtgctgcatggagct

SEQ ID NO: 5882335 - DNA, 25 bp, Homo sapien
gcccgaagccgtagtccaccctctc

SEQ ID NO: 5882336 - DNA, 25 bp, Homo sapien
gctgagcaccatgccctgcatgacg

SEQ ID NO: 5882337 - DNA, 25 bp, Homo sapien
tggggtttgccttgcttgcggcgag

SEQ ID NO: 5882338 - DNA, 25 bp, Homo sapien
agtttatctgctatgtgttcctgtt

SEQ ID NO: 5882339 - DNA, 25 bp, Homo sapien
gcccggaccactaatatggggcgtg

SEQ ID NO: 5882340 - DNA, 25 bp, Homo sapien
tatggggcgtgctccctccacttcc

SEQ ID NO: 5882341 - DNA, 25 bp, Homo sapien
cgtcgcccacgcccacgaccgcgcc

SEQ ID NO: 5882342 - DNA, 25 bp, Homo sapien
aaggggctcagcgagctggggctgc

SEQ ID NO: 5882343 - DNA, 25 bp, Homo sapien
ttctcgctcttgaacttggccacca

SEQ ID NO: 5882344 - DNA, 25 bp, Homo sapien
gcactcgggtgatgggtggccaggg

SEQ ID NO: 5882345 - DNA, 25 bp, Homo sapien
ggctcagcgagctggggctgcccag

SEQ ID NO: 5882346 - DNA, 25 bp, Homo sapien
gggaggctccatagccattggattc

SEQ ID NO: 5882347 - DNA, 25 bp, Homo sapien
gttgataaacaatcgtcatcctctg

SEQ ID NO: 5882348 - DNA, 25 bp, Homo sapien
agctctctaagtctcctagagaaat

SEQ ID NO: 5882349 - DNA, 25 bp, Homo sapien
cccgttctccgaggagtgctccgac

SEQ ID NO: 5882350 - DNA, 25 bp, Homo sapien
ccaggttgctctgaaatttgaacgt

SEQ ID NO: 5882351 - DNA, 25 bp, Homo sapien
cagctttttggacaggccccccgag

SEQ ID NO: 5882352 - DNA, 25 bp, Homo sapien
tcgctgaagtgctgcatggagctga

SEQ ID NO: 5882353 - DNA, 25 bp, Homo sapien
gccctgcatgacgtcgggcagggcg

SEQ ID NO: 5882354 - DNA, 25 bp, Homo sapien
tattctgcactcatcccaggcgtgg

SEQ ID NO: 5882355 - DNA, 25 bp, Homo sapien
tgtcgctgcgtctgccctcttttga

SEQ ID NO: 5882356 - DNA, 25 bp, Homo sapien
gtcgttctcgctcttgaacttggcc

SEQ ID NO: 5882357 - DNA, 25 bp, Homo sapien
agattcttaatccatgagtgttctg

SEQ ID NO: 5882358 - DNA, 25 bp, Homo sapien
ggccgcgtagccggcgagccactgc

SEQ ID NO: 5882359 - DNA, 25 bp, Homo sapien
tcgcaagtgtccctgtggccctcgg

SEQ ID NO: 5882360 - DNA, 25 bp, Homo sapien
gcctcggccaggtggccgcgcttat

SEQ ID NO: 5882361 - DNA, 25 bp, Homo sapien
tcaggggacttccgtgttcgctttc

SEQ ID NO: 5882362 - DNA, 25 bp, Homo sapien
cagcgagctggggctgcccagcagc

SEQ ID NO: 5882363 - DNA, 25 bp, Homo sapien
cgagtacacgttctccgtgttgggc

SEQ ID NO: 5882364 - DNA, 25 bp, Homo sapien
ctgccaggccggaagcctctctcga

SEQ ID NO: 5882365 - DNA, 25 bp, Homo sapien
gatccccttctggagctcccaacgg

SEQ ID NO: 5882366 - DNA, 25 bp, Homo sapien
gaaagcgcccttctgccaggccgga

SEQ ID NO: 5882367 - DNA, 25 bp, Homo sapien
tagagaaatccatggcgggaggctc

SEQ ID NO: 5882368 - DNA, 25 bp, Homo sapien
ctgttctcgtggtggcgcgccgcct

SEQ ID NO: 5882369 - DNA, 25 bp, Homo sapien
caagctcccgttctccgaggagtgc

SEQ ID NO: 5882370 - DNA, 25 bp, Homo sapien
tgcactggtgaatggctgtttgcaa

SEQ ID NO: 5882371 - DNA, 25 bp, Homo sapien
cccacaggtgaggaggtcatgatcc

SEQ ID NO: 5882372 - DNA, 25 bp, Homo sapien
tgggctagacgtgttccctgccagc

SEQ ID NO: 5882373 - DNA, 25 bp, Homo sapien
caccctctcgctctccgtcagctcc

SEQ ID NO: 5882374 - DNA, 25 bp, Homo sapien
gtcgggcagggcgcggctctcgtcg

SEQ ID NO: 5882375 - DNA, 25 bp, Homo sapien
catgagtgttctgtgcgtgttgcaa

SEQ ID NO: 5882376 - DNA, 25 bp, Homo sapien
ctgcggggcatattctgcactcatc

SEQ ID NO: 5882377 - DNA, 25 bp, Homo sapien
gcccaccaagtcgctggtgccgggt

SEQ ID NO: 5882378 - DNA, 25 bp, Homo sapien
ccttctgccaggccggaagcctctc

SEQ ID NO: 5882379 - DNA, 25 bp, Homo sapien
ggtgggctagacgtgttccctgcca

SEQ ID NO: 5882380 - DNA, 25 bp, Homo sapien
aggcactcgggtgatgggtggccag

SEQ ID NO: 5882381 - DNA, 25 bp, Homo sapien
actgccacacatcttgagctctctg

SEQ ID NO: 5882382 - DNA, 25 bp, Homo sapien
cgagtcttcgtcgcaagtgtccctg

SEQ ID NO: 5882383 - DNA, 25 bp, Homo sapien
ctcagcccgaagccgtagtccaccc

SEQ ID NO: 5882384 - DNA, 25 bp, Homo sapien
ctcgtcgcccacgcccacgaccgcg

SEQ ID NO: 5882385 - DNA, 25 bp, Homo sapien
tggggcgtgctccctccacttcccg

SEQ ID NO: 5882386 - DNA, 25 bp, Homo sapien
ggctcatctttacaaataccctgcg

SEQ ID NO: 5882387 - DNA, 25 bp, Homo sapien
cttatgcttctcgcccaggacctgg

SEQ ID NO: 5882388 - DNA, 25 bp, Homo sapien
cttgctggcctgggtgcacgcgtgg

SEQ ID NO: 5882389 - DNA, 25 bp, Homo sapien
cagcagcagctttttggacaggccc

SEQ ID NO: 5882390 - DNA, 25 bp, Homo sapien
gggaagttcatctggcactgcccac

SEQ ID NO: 5882391 - DNA, 25 bp, Homo sapien
taagaatggcttcaagaggctcggg

SEQ ID NO: 5882392 - DNA, 25 bp, Homo sapien
catggagctgagcaccatgccctgc

SEQ ID NO: 5882393 - DNA, 25 bp, Homo sapien
ggcttctcgcccgtgtggctgcgcc

SEQ ID NO: 5882394 - DNA, 25 bp, Homo sapien
accatgcactggtgaatggctgttt

SEQ ID NO: 5882395 - DNA, 25 bp, Homo sapien
aggttggggtcgttctcgctcttga

SEQ ID NO: 5882396 - DNA, 25 bp, Homo sapien
gtggtggcgcgccgcctccaggctc

SEQ ID NO: 5882397 - DNA, 25 bp, Homo sapien
cgaggggaggagaggcccctccagt

SEQ ID NO: 5882398 - DNA, 25 bp, Homo sapien
aaggcctcgctgaagtgctgcatgg

SEQ ID NO: 5882399 - DNA, 25 bp, Homo sapien
tatgcttctcgcccaggacctggtg

SEQ ID NO: 5882400 - DNA, 25 bp, Homo sapien
gttggggtcgttctcgctcttgaac

SEQ ID NO: 5882401 - DNA, 25 bp, Homo sapien
gtttccgtttgtgctcgataaaaat

SEQ ID NO: 5882402 - DNA, 25 bp, Homo sapien
tgcatagggctgggccggcctgggg

SEQ ID NO: 5882403 - DNA, 25 bp, Homo sapien
ggctccatagccattggattcaacc

SEQ ID NO: 5882404 - DNA, 25 bp, Homo sapien
gcgcgccgcctccaggctcagcccg

SEQ ID NO: 5882405 - DNA, 25 bp, Homo sapien
ttgtacatgtgtagctgctgggctc

SEQ ID NO: 5882406 - DNA, 25 bp, Homo sapien
ccattggattcaaccgcagcaccct

SEQ ID NO: 5882407 - DNA, 25 bp, Homo sapien
ttccggggagctggcggtggagaga

SEQ ID NO: 5882408 - DNA, 25 bp, Homo sapien
gggtactacgccgaatgggggtgtg

SEQ ID NO: 5882409 - DNA, 25 bp, Homo sapien
cgccggccaccgagtcttcgtcgca

SEQ ID NO: 5882410 - DNA, 25 bp, Homo sapien
gaggcaaaaggcgattgtctggagt

SEQ ID NO: 5882411 - DNA, 25 bp, Homo sapien
tgcctggaggccgcgtagccggcga

SEQ ID NO: 5882412 - DNA, 25 bp, Homo sapien
ccccaggcgctctatgcggtggggg

SEQ ID NO: 5882413 - DNA, 25 bp, Homo sapien
cagtaacctttgcatagggctgggc

SEQ ID NO: 5882414 - DNA, 25 bp, Homo sapien
ccattgcattgtttccgtttgtgct

SEQ ID NO: 5882415 - DNA, 25 bp, Homo sapien
acttgtagggcttctcgcccgtgtg

SEQ ID NO: 5882416 - DNA, 25 bp, Homo sapien
catattctgcactcatcccaggcgt

SEQ ID NO: 5882417 - DNA, 25 bp, Homo sapien
gacttccgtgttcgctttctaagta

SEQ ID NO: 5882418 - DNA, 25 bp, Homo sapien
ttaagggctctcgagcttccatccg

SEQ ID NO: 5882419 - DNA, 25 bp, Homo sapien
cccgcgagctgttctcgtggtggcg

SEQ ID NO: 5882420 - DNA, 25 bp, Homo sapien
tttgaacgtcttgccgcagaactcg

SEQ ID NO: 5882421 - DNA, 25 bp, Homo sapien
cccagcagcagctttttggacaggc

SEQ ID NO: 5882422 - DNA, 25 bp, Homo sapien
gcgcggctctcgtcgcccacgccca

SEQ ID NO: 5882423 - DNA, 25 bp, Homo sapien
cagaggagggagggggggcgtcgcc

SEQ ID NO: 5882424 - DNA, 25 bp, Homo sapien
ggagctggcggtggagagaccgtcg

SEQ ID NO: 5882425 - DNA, 25 bp, Homo sapien
agaatggcttcaagaggctcgggcg

SEQ ID NO: 5882426 - DNA, 25 bp, Homo sapien
ctttttctaagcagaggctgccatt

SEQ ID NO: 5882427 - DNA, 25 bp, Homo sapien
caagaggctcgggcgagaattcccg

SEQ ID NO: 5882428 - DNA, 25 bp, Homo sapien
agcttgatgcgcttagagaaggggc

SEQ ID NO: 5882429 - DNA, 25 bp, Homo sapien
agtgctccgacgaggaggcaaaagg

SEQ ID NO: 5882430 - DNA, 25 bp, Homo sapien
gctgggctcatctttacaaataccc

SEQ ID NO: 5882431 - DNA, 25 bp, Homo sapien
gtcttcatgtggcgcttcagcttgc

SEQ ID NO: 5882432 - DNA, 25 bp, Homo sapien
acgtcgggcagggcgcggctctcgt

SEQ ID NO: 5882433 - DNA, 25 bp, Homo sapien
cgcacaggttgcacttgtagggctt

SEQ ID NO: 5882434 - DNA, 25 bp, Homo sapien
ccatccgaaaactgccacacatctt

SEQ ID NO: 5882435 - DNA, 25 bp, Homo sapien
ttgagctgcctggaggccgcgtagc

SEQ ID NO: 5882436 - DNA, 25 bp, Homo sapien
gattagagctccatgtgcagaacga

SEQ ID NO: 5882437 - DNA, 25 bp, Homo sapien
aagtagattcttaatccatgagtgt

SEQ ID NO: 5882438 - DNA, 25 bp, Homo sapien
atgggggtgtgtgaagaacaagtgt

SEQ ID NO: 5882439 - DNA, 25 bp, Homo sapien
ccctcttttgagctgggcctgcccg

SEQ ID NO: 5882440 - DNA, 25 bp, Homo sapien
ccgggggcaggtcgaactccttctc

SEQ ID NO: 5882441 - DNA, 25 bp, Homo sapien
tgctacctggctggaatggttgcag

SEQ ID NO: 5882442 - DNA, 25 bp, Homo sapien
gtggctgggaaggacattctgcacc

SEQ ID NO: 5882443 - DNA, 25 bp, Homo sapien
ggagtctccgaagctaaggaaggga

SEQ ID NO: 5882444 - DNA, 25 bp, Homo sapien
tctcgagcttccatccgaaaactgc

SEQ ID NO: 5882445 - DNA, 25 bp, Homo sapien
ggagtgctccgacgaggaggcaaaa

SEQ ID NO: 5882446 - DNA, 25 bp, Homo sapien
gaaatttgaacgtcttgccgcagaa

SEQ ID NO: 5882447 - DNA, 25 bp, Homo sapien
gaggctccatagccattggattcaa

SEQ ID NO: 5882448 - DNA, 25 bp, Homo sapien
acagctttttctaagcagaggctgc

SEQ ID NO: 5882449 - DNA, 25 bp, Homo sapien
tggccgcgcttatgcttctcgccca

SEQ ID NO: 5882450 - DNA, 25 bp, Homo sapien
attggattcaaccgcagcaccctgt

SEQ ID NO: 5882451 - DNA, 25 bp, Homo sapien
tatgcggtccgactcgccggccacc

SEQ ID NO: 5882452 - DNA, 25 bp, Homo sapien
tcgggtgatgggtggccagggccat

SEQ ID NO: 5882453 - DNA, 25 bp, Homo sapien
caacctccacgggattggatgcttt

SEQ ID NO: 5882454 - DNA, 25 bp, Homo sapien
ggccggcctggggacagcggtgggc

SEQ ID NO: 5882455 - DNA, 25 bp, Homo sapien
ttttctaagcagaggctgccattgc

SEQ ID NO: 5882456 - DNA, 25 bp, Homo sapien
cgacttcatgggggccatgtccttt

SEQ ID NO: 5882457 - DNA, 25 bp, Homo sapien
tgttggcgaggcccgtaacctaatt

SEQ ID NO: 5882458 - DNA, 25 bp, Homo sapien
cctgctgcgagatgaacgtgcaccg

SEQ ID NO: 5882459 - DNA, 25 bp, Homo sapien
acccgaacggtgaaagccacgctaa

SEQ ID NO: 5882460 - DNA, 25 bp, Homo sapien
gcctgggctcagggcctgatgggga

SEQ ID NO: 5882461 - DNA, 25 bp, Homo sapien
gttcaacctgaagccaggggatgtg

SEQ ID NO: 5882462 - DNA, 25 bp, Homo sapien
atctggggtatcggaaagcagggcc

SEQ ID NO: 5882463 - DNA, 25 bp, Homo sapien
gggggagacttgatgtaccacattc

SEQ ID NO: 5882464 - DNA, 25 bp, Homo sapien
ctgaagctggacaatgtgatgctgg

SEQ ID NO: 5882465 - DNA, 25 bp, Homo sapien
tttgtgaccttcgagtgtccaggcg

SEQ ID NO: 5882466 - DNA, 25 bp, Homo sapien
gccgcgggcgcctgcagctggagat

SEQ ID NO: 5882467 - DNA, 25 bp, Homo sapien
aaccccgacttcgtgcacccggatg

SEQ ID NO: 5882468 - DNA, 25 bp, Homo sapien
tatcggcctcttcttccttcacaat

SEQ ID NO: 5882469 - DNA, 25 bp, Homo sapien
atgctggatgctgagggacacatca

SEQ ID NO: 5882470 - DNA, 25 bp, Homo sapien
ggtacaagttactgaaccaggagga

SEQ ID NO: 5882471 - DNA, 25 bp, Homo sapien
ccgacttcgtgcacccggatgcccg

SEQ ID NO: 5882472 - DNA, 25 bp, Homo sapien
gcaatgtcaagtctgcagctttgtg

SEQ ID NO: 5882473 - DNA, 25 bp, Homo sapien
gagatcccgcctcctttcagacccc

SEQ ID NO: 5882474 - DNA, 25 bp, Homo sapien
gcatgaaatgctcctgctgcgagat

SEQ ID NO: 5882475 - DNA, 25 bp, Homo sapien
agtcaagagccacaagttcaccgct

SEQ ID NO: 5882476 - DNA, 25 bp, Homo sapien
ttcttcaagcagcccaccttctgca

SEQ ID NO: 5882477 - DNA, 25 bp, Homo sapien
gatgaacgtgcaccggcgctgtgtg

SEQ ID NO: 5882478 - DNA, 25 bp, Homo sapien
gcatgtgtaaggagaacgtcttccc

SEQ ID NO: 5882479 - DNA, 25 bp, Homo sapien
cgtgaaccccgacttcgtgcacccg

SEQ ID NO: 5882480 - DNA, 25 bp, Homo sapien
tggtccacgaagtcaagagccacaa

SEQ ID NO: 5882481 - DNA, 25 bp, Homo sapien
caggccgatttccagggcttcacct

SEQ ID NO: 5882482 - DNA, 25 bp, Homo sapien
ctcggaacctgacgaaacagaagac

SEQ ID NO: 5882483 - DNA, 25 bp, Homo sapien
tggcgtctcggagctgctcaaggcg

SEQ ID NO: 5882484 - DNA, 25 bp, Homo sapien
tcgcttcttcaagcagcccaccttc

SEQ ID NO: 5882485 - DNA, 25 bp, Homo sapien
gtgggactgggaccggacctcccgc

SEQ ID NO: 5882486 - DNA, 25 bp, Homo sapien
cgaccaggccgatttccagggcttc

SEQ ID NO: 5882487 - DNA, 25 bp, Homo sapien
gacgatgccacgaatttgtgacctt

SEQ ID NO: 5882488 - DNA, 25 bp, Homo sapien
acagcagccccaccttctgcgacca

SEQ ID NO: 5882489 - DNA, 25 bp, Homo sapien
gactgggagcggctggaacgattgg

SEQ ID NO: 5882490 - DNA, 25 bp, Homo sapien
ccgcagccccaccagcccagtgcct

SEQ ID NO: 5882491 - DNA, 25 bp, Homo sapien
cccacagcagatgagatccacgtaa

SEQ ID NO: 5882492 - DNA, 25 bp, Homo sapien
ccggccccacttcctcacccagctc

SEQ ID NO: 5882493 - DNA, 25 bp, Homo sapien
gcccgtgtggccgcagcggcgagaa

SEQ ID NO: 5882494 - DNA, 25 bp, Homo sapien
gggagacttgatgtaccacattcaa

SEQ ID NO: 5882495 - DNA, 25 bp, Homo sapien
ttcaggccatcatggaacaaactgt

SEQ ID NO: 5882496 - DNA, 25 bp, Homo sapien
gccacgaatttgtgaccttcgagtg

SEQ ID NO: 5882497 - DNA, 25 bp, Homo sapien
ccctccctgtgcggtgtggaccaca

SEQ ID NO: 5882498 - DNA, 25 bp, Homo sapien
aaaaggacgtgatcgtccaggacga

SEQ ID NO: 5882499 - DNA, 25 bp, Homo sapien
cggtgtggaccacaccgagcgccgc

SEQ ID NO: 5882500 - DNA, 25 bp, Homo sapien
acgctaaaccctgtgtggaatgaga

SEQ ID NO: 5882501 - DNA, 25 bp, Homo sapien
ccgtggccatctgcaaggggttcct

SEQ ID NO: 5882502 - DNA, 25 bp, Homo sapien
gagaactttgacaagttcttcacgc

SEQ ID NO: 5882503 - DNA, 25 bp, Homo sapien
gcgtagcgtgccctccctgtgcggt

SEQ ID NO: 5882504 - DNA, 25 bp, Homo sapien
ggacgtgatcgtccaggacgacgat

SEQ ID NO: 5882505 - DNA, 25 bp, Homo sapien
gctatcggcctcttcttccttcaca

SEQ ID NO: 5882506 - DNA, 25 bp, Homo sapien
gcgccagcgctgacccctccagacc

SEQ ID NO: 5882507 - DNA, 25 bp, Homo sapien
cgccggctcagcgtggaggtgtggg

SEQ ID NO: 5882508 - DNA, 25 bp, Homo sapien
ttcaacagctgggcaagtttaagga

SEQ ID NO: 5882509 - DNA, 25 bp, Homo sapien
cacgcgggcggcgccagcgctgacc

SEQ ID NO: 5882510 - DNA, 25 bp, Homo sapien
ctcaaggcgcccgtggatggctggt

SEQ ID NO: 5882511 - DNA, 25 bp, Homo sapien
cttgatgtaccacattcaacagctg

SEQ ID NO: 5882512 - DNA, 25 bp, Homo sapien
ggagttctgctgtatgagatgttgg

SEQ ID NO: 5882513 - DNA, 25 bp, Homo sapien
ccgggacgacaacccgcaccttctg

SEQ ID NO: 5882514 - DNA, 25 bp, Homo sapien
ctgcaaggggttcctgaccaagcac

SEQ ID NO: 5882515 - DNA, 25 bp, Homo sapien
tgtgccggtggccgatgctgacaac

SEQ ID NO: 5882516 - DNA, 25 bp, Homo sapien
cccaccttctgcgaccactgtggct

SEQ ID NO: 5882517 - DNA, 25 bp, Homo sapien
ggaaaaggcagttttgggaaggtga

SEQ ID NO: 5882518 - DNA, 25 bp, Homo sapien
gctggtggagaaacgtgtgctggcg

SEQ ID NO: 5882519 - DNA, 25 bp, Homo sapien
cagaagacccgaacggtgaaagcca

SEQ ID NO: 5882520 - DNA, 25 bp, Homo sapien
ctggtacaagttactgaaccaggag

SEQ ID NO: 5882521 - DNA, 25 bp, Homo sapien
cgctgcttcttcggggcgagtccag

SEQ ID NO: 5882522 - DNA, 25 bp, Homo sapien
cacccagggaagcgcctgggctcag

SEQ ID NO: 5882523 - DNA, 25 bp, Homo sapien
agccgtggccatctgcaaggggttc

SEQ ID NO: 5882524 - DNA, 25 bp, Homo sapien
ccatgcagcgttctacgcggcagaa

SEQ ID NO: 5882525 - DNA, 25 bp, Homo sapien
ccaggaggagggcgagtattacaat

SEQ ID NO: 5882526 - DNA, 25 bp, Homo sapien
ggcggcgccagcgctgacccctcca

SEQ ID NO: 5882527 - DNA, 25 bp, Homo sapien
atggctggtctgggccccggcgtag

SEQ ID NO: 5882528 - DNA, 25 bp, Homo sapien
cctatggaccccaacggtctctctg

SEQ ID NO: 5882529 - DNA, 25 bp, Homo sapien
ccaacggtctctctgatccctatgt

SEQ ID NO: 5882530 - DNA, 25 bp, Homo sapien
ggatggctggtacaagttactgaac

SEQ ID NO: 5882531 - DNA, 25 bp, Homo sapien
aggcccgtaacctaattcctatgga

SEQ ID NO: 5882532 - DNA, 25 bp, Homo sapien
cttcatctggggtatcggaaagcag

SEQ ID NO: 5882533 - DNA, 25 bp, Homo sapien
ccttctgcgggaccccggactacat

SEQ ID NO: 5882534 - DNA, 25 bp, Homo sapien
acgaagtcaagagccacaagttcac

SEQ ID NO: 5882535 - DNA, 25 bp, Homo sapien
ccgatttccagggcttcacctacgt

SEQ ID NO: 5882536 - DNA, 25 bp, Homo sapien
ggaagtctgtcgattggtggtcctt

SEQ ID NO: 5882537 - DNA, 25 bp, Homo sapien
ggagggcgagtattacaatgtgccg

SEQ ID NO: 5882538 - DNA, 25 bp, Homo sapien
ggcgagtattacaatgtgccggtgg

SEQ ID NO: 5882539 - DNA, 25 bp, Homo sapien
gcttgtgcaccagggcatgaaatgc

SEQ ID NO: 5882540 - DNA, 25 bp, Homo sapien
tgcaccggcgctgtgtgcgtagcgt

SEQ ID NO: 5882541 - DNA, 25 bp, Homo sapien
ctgcacatctccgacttcagcttcc

SEQ ID NO: 5882542 - DNA, 25 bp, Homo sapien
gacttcatctggggtatcggaaagc

SEQ ID NO: 5882543 - DNA, 25 bp, Homo sapien
ggaaggtgatgctggccgagcgcag

SEQ ID NO: 5882544 - DNA, 25 bp, Homo sapien
atgtaccacattcaacagctgggca

SEQ ID NO: 5882545 - DNA, 25 bp, Homo sapien
ttcacgcgggcggcgccagcgctga

SEQ ID NO: 5882546 - DNA, 25 bp, Homo sapien
cacattcaacagctgggcaagttta

SEQ ID NO: 5882547 - DNA, 25 bp, Homo sapien
gccggggtcctggcggccggcccca

SEQ ID NO: 5882548 - DNA, 25 bp, Homo sapien
ttttccgctggattgactgggagcg

SEQ ID NO: 5882549 - DNA, 25 bp, Homo sapien
ttccgcctgcatagctacagcagcc

SEQ ID NO: 5882550 - DNA, 25 bp, Homo sapien
gaactttgacaagttcttcacgcgg

SEQ ID NO: 5882551 - DNA, 25 bp, Homo sapien
aacggtctctctgatccctatgtga

SEQ ID NO: 5882552 - DNA, 25 bp, Homo sapien
gctggccgagcgcaggggctctgat

SEQ ID NO: 5882553 - DNA, 25 bp, Homo sapien
ccgcctgcatagctacagcagcccc

SEQ ID NO: 5882554 - DNA, 25 bp, Homo sapien
gcagccccaccagcccagtgcctgt

SEQ ID NO: 5882555 - DNA, 25 bp, Homo sapien
ccacgaagtcaagagccacaagttc

SEQ ID NO: 5882556 - DNA, 25 bp, Homo sapien
atctgcaaggggttcctgaccaagc

SEQ ID NO: 5882557 - DNA, 25 bp, Homo sapien
ggttcctgaccaagcacccagggaa

SEQ ID NO: 5882558 - DNA, 25 bp, Homo sapien
gcggcagaaatcgctatcggcctct

SEQ ID NO: 5882559 - DNA, 25 bp, Homo sapien
agcggcgagaactttgacaagttct

SEQ ID NO: 5882560 - DNA, 25 bp, Homo sapien
ttgtggttcatcgacgatgccacga

SEQ ID NO: 5882561 - DNA, 25 bp, Homo sapien
ggggttcctgaccaagcacccaggg

SEQ ID NO: 5882562 - DNA, 25 bp, Homo sapien
attggagatcccgcctcctttcaga

SEQ ID NO: 5882563 - DNA, 25 bp, Homo sapien
ggaccggacctcccgcaacgacttc

SEQ ID NO: 5882564 - DNA, 25 bp, Homo sapien
atgtgtaaggagaacgtcttccccg

SEQ ID NO: 5882565 - DNA, 25 bp, Homo sapien
gactgggaccggacctcccgcaacg

SEQ ID NO: 5882566 - DNA, 25 bp, Homo sapien
gaaatgctcctgctgcgagatgaac

SEQ ID NO: 5882567 - DNA, 25 bp, Homo sapien
tcaagatcttgaaaaaggacgtgat

SEQ ID NO: 5882568 - DNA, 25 bp, Homo sapien
ctgtgtgcgtagcgtgccctccctg

SEQ ID NO: 5882569 - DNA, 25 bp, Homo sapien
gtcctggcggccggccccacttcct

SEQ ID NO: 5882570 - DNA, 25 bp, Homo sapien
ccctcggaacctgacgaaacagaag

SEQ ID NO: 5882571 - DNA, 25 bp, Homo sapien
agtcgctttcccgggaagccgtggc

SEQ ID NO: 5882572 - DNA, 25 bp, Homo sapien
gtggagaaacgtgtgctggcgctgg

SEQ ID NO: 5882573 - DNA, 25 bp, Homo sapien
ggagaaacgtgtgctggcgctgggg

SEQ ID NO: 5882574 - DNA, 25 bp, Homo sapien
accagcccagtgcctgtgcccgtca

SEQ ID NO: 5882575 - DNA, 25 bp, Homo sapien
tggtggtcctttggagttctgctgt

SEQ ID NO: 5882576 - DNA, 25 bp, Homo sapien
ttgtgcaccagggcatgaaatgctc

SEQ ID NO: 5882577 - DNA, 25 bp, Homo sapien
gcacccggatgcccgcagccccacc

SEQ ID NO: 5882578 - DNA, 25 bp, Homo sapien
tcactgactttggcatgtgtaagga

SEQ ID NO: 5882579 - DNA, 25 bp, Homo sapien
aggtgtgggactgggaccggacctc

SEQ ID NO: 5882580 - DNA, 25 bp, Homo sapien
ttcctgaccaagcacccagggaagc

SEQ ID NO: 5882581 - DNA, 25 bp, Homo sapien
gtctcggagctgctcaaggcgcccg

SEQ ID NO: 5882582 - DNA, 25 bp, Homo sapien
gcgcccgtggatggctggtacaagt

SEQ ID NO: 5882583 - DNA, 25 bp, Homo sapien
ctgatgagctctacgccatcaagat

SEQ ID NO: 5882584 - DNA, 25 bp, Homo sapien
gtgttcaacctgaagccaggggatg

SEQ ID NO: 5882585 - DNA, 25 bp, Homo sapien
gctaaaccctgtgtggaatgagacc

SEQ ID NO: 5882586 - DNA, 25 bp, Homo sapien
cctcctccagaagtttgaggcttgt

SEQ ID NO: 5882587 - DNA, 25 bp, Homo sapien
ctgcagccactgcaccgacttcatc

SEQ ID NO: 5882588 - DNA, 25 bp, Homo sapien
cagccctatgggaagtctgtcgatt

SEQ ID NO: 5882589 - DNA, 25 bp, Homo sapien
gggctcagggcctgatggggaacct

SEQ ID NO: 5882590 - DNA, 25 bp, Homo sapien
attggtggtcctttggagttctgct

SEQ ID NO: 5882591 - DNA, 25 bp, Homo sapien
aaggagccccatgcagcgttctacg

SEQ ID NO: 5882592 - DNA, 25 bp, Homo sapien
gcgtctcggagctgctcaaggcgcc

SEQ ID NO: 5882593 - DNA, 25 bp, Homo sapien
tcctctcccatcccctccccttccc

SEQ ID NO: 5882594 - DNA, 25 bp, Homo sapien
actgaaccaggaggagggcgagtat

SEQ ID NO: 5882595 - DNA, 25 bp, Homo sapien
tggaccccaacggtctctctgatcc

SEQ ID NO: 5882596 - DNA, 25 bp, Homo sapien
acgctggtggagaaacgtgtgctgg

SEQ ID NO: 5882597 - DNA, 25 bp, Homo sapien
catggttctaggaaaaggcagtttt

SEQ ID NO: 5882598 - DNA, 25 bp, Homo sapien
gcgaccactgtggctccctcctcta

SEQ ID NO: 5882599 - DNA, 25 bp, Homo sapien
accccggactacatagccccggaga

SEQ ID NO: 5882600 - DNA, 25 bp, Homo sapien
caaacacaagttccgcctgcatagc

SEQ ID NO: 5882601 - DNA, 25 bp, Homo sapien
ccacgctaaaccctgtgtggaatga

SEQ ID NO: 5882602 - DNA, 25 bp, Homo sapien
gttcttcacgcgggcggcgccagcg

SEQ ID NO: 5882603 - DNA, 25 bp, Homo sapien
cctaccatccgtgcacatggctttt

SEQ ID NO: 5882604 - DNA, 25 bp, Homo sapien
gcggctggaacgattggagatcccg

SEQ ID NO: 5882605 - DNA, 25 bp, Homo sapien
agggacctgaagctggacaatgtga

SEQ ID NO: 5882606 - DNA, 25 bp, Homo sapien
tggatgctgagggacacatcaagat

SEQ ID NO: 5882607 - DNA, 25 bp, Homo sapien
ggccgcagcggcgagaactttgaca

SEQ ID NO: 5882608 - DNA, 25 bp, Homo sapien
gaaatcgctatcggcctcttcttcc

SEQ ID NO: 5882609 - DNA, 25 bp, Homo sapien
ctgatccctatgtgaaactgaagct

SEQ ID NO: 5882610 - DNA, 25 bp, Homo sapien
tgaccttcgagtgtccaggcgctgg

SEQ ID NO: 5882611 - DNA, 25 bp, Homo sapien
ttgactgggagcggctggaacgatt

SEQ ID NO: 5882612 - DNA, 25 bp, Homo sapien
atgcagcgttctacgcggcagaaat

SEQ ID NO: 5882613 - DNA, 25 bp, Homo sapien
gaagtcaagagccacaagttcaccg

SEQ ID NO: 5882614 - DNA, 25 bp, Homo sapien
gctttcccgggaagccgtggccatc

SEQ ID NO: 5882615 - DNA, 25 bp, Homo sapien
gggactgggaccggacctcccgcaa

SEQ ID NO: 5882616 - DNA, 25 bp, Homo sapien
aattgtatgagcgggtgcggatggg

SEQ ID NO: 5882617 - DNA, 25 bp, Homo sapien
tcgtgatggagtacgtcaccggggg

SEQ ID NO: 5882618 - DNA, 25 bp, Homo sapien
agcagggcctgcaatgtcaagtctg

SEQ ID NO: 5882619 - DNA, 25 bp, Homo sapien
atgggcccctcttcctctcccatcc

SEQ ID NO: 5882620 - DNA, 25 bp, Homo sapien
acgccatcaagatcttgaaaaagga

SEQ ID NO: 5882621 - DNA, 25 bp, Homo sapien
gcctgcatagctacagcagccccac

SEQ ID NO: 5882622 - DNA, 25 bp, Homo sapien
tctgggccccggcgtaggcgattca

SEQ ID NO: 5882623 - DNA, 25 bp, Homo sapien
acaatgtgatgctggatgctgaggg

SEQ ID NO: 5882624 - DNA, 25 bp, Homo sapien
ggtcctttggagttctgctgtatga

SEQ ID NO: 5882625 - DNA, 25 bp, Homo sapien
catcgacgatgccacgaatttgtga

SEQ ID NO: 5882626 - DNA, 25 bp, Homo sapien
ccctccagaccgcctagtcctggcc

SEQ ID NO: 5882627 - DNA, 25 bp, Homo sapien
ttcatcgacgatgccacgaatttgt

SEQ ID NO: 5882628 - DNA, 25 bp, Homo sapien
ttgaaaaaggacgtgatcgtccagg

SEQ ID NO: 5882629 - DNA, 25 bp, Homo sapien
tttcccgggaagccgtggccatctg

SEQ ID NO: 5882630 - DNA, 25 bp, Homo sapien
gacgacaacccgcaccttctgcggg

SEQ ID NO: 5882631 - DNA, 25 bp, Homo sapien
tgaagccaggggatgtggagcgccg

SEQ ID NO: 5882632 - DNA, 25 bp, Homo sapien
gatggagtacgtcaccgggggagac

SEQ ID NO: 5882633 - DNA, 25 bp, Homo sapien
gacgaaacagaagacccgaacggtg

SEQ ID NO: 5882634 - DNA, 25 bp, Homo sapien
gccagcatcgaccaggccgatttcc

SEQ ID NO: 5882635 - DNA, 25 bp, Homo sapien
ctgcacgctggtggagaaacgtgtg

SEQ ID NO: 5882636 - DNA, 25 bp, Homo sapien
atcattgcctaccagccctatggga

SEQ ID NO: 5882637 - DNA, 25 bp, Homo sapien
ccctagtcccaccgaccccaagcgc

SEQ ID NO: 5882638 - DNA, 25 bp, Homo sapien
aaaaggcagttttgggaaggtgatg

SEQ ID NO: 5882639 - DNA, 25 bp, Homo sapien
tcctttcagaccccgcccgtgtggc

SEQ ID NO: 5882640 - DNA, 25 bp, Homo sapien
gaccctcggaacctgacgaaacaga

SEQ ID NO: 5882641 - DNA, 25 bp, Homo sapien
agtcccaccgaccccaagcgctgct

SEQ ID NO: 5882642 - DNA, 25 bp, Homo sapien
agcacccagggaagcgcctgggctc

SEQ ID NO: 5882643 - DNA, 25 bp, Homo sapien
gtcctggccagcatcgaccaggccg

SEQ ID NO: 5882644 - DNA, 25 bp, Homo sapien
ctggacaatgtgatgctggatgctg

SEQ ID NO: 5882645 - DNA, 25 bp, Homo sapien
aagtctgcagctttgtggttcatcg

SEQ ID NO: 5882646 - DNA, 25 bp, Homo sapien
ctccaccttccagaccccggaccgc

SEQ ID NO: 5882647 - DNA, 25 bp, Homo sapien
aatgtgccggtggccgatgctgaca

SEQ ID NO: 5882648 - DNA, 25 bp, Homo sapien
ctacagggacctgaagctggacaat

SEQ ID NO: 5882649 - DNA, 25 bp, Homo sapien
gcaccagggcatgaaatgctcctgc

SEQ ID NO: 5882650 - DNA, 25 bp, Homo sapien
ccggatgcccgcagccccaccagcc

SEQ ID NO: 5882651 - DNA, 25 bp, Homo sapien
ctgtttcaggccatcatggaacaaa

SEQ ID NO: 5882652 - DNA, 25 bp, Homo sapien
tggagtacgtcaccgggggagactt

SEQ ID NO: 5882653 - DNA, 25 bp, Homo sapien
aatcagggcatcatctacagggacc

SEQ ID NO: 5882654 - DNA, 25 bp, Homo sapien
cacgtaactgttggcgaggcccgta

SEQ ID NO: 5882655 - DNA, 25 bp, Homo sapien
agatgttggcaggacagcctccctt

SEQ ID NO: 5882656 - DNA, 25 bp, Homo sapien
aaagccacgctaaaccctgtgtgga

SEQ ID NO: 5882657 - DNA, 25 bp, Homo sapien
aggacgaggaggagctgtttcaggc

SEQ ID NO: 5882658 - DNA, 25 bp, Homo sapien
gtttgaggcttgtaactaccccctg

SEQ ID NO: 5882659 - DNA, 25 bp, Homo sapien
ggcgctgtgtgcgtagcgtgccctc

SEQ ID NO: 5882660 - DNA, 25 bp, Homo sapien
tgaggcagaaggtggtccacgaagt

SEQ ID NO: 5882661 - DNA, 25 bp, Homo sapien
gggtgcggatgggcccctcttcctc

SEQ ID NO: 5882662 - DNA, 25 bp, Homo sapien
gggtcctggcggccggccccacttc

SEQ ID NO: 5882663 - DNA, 25 bp, Homo sapien
gaccccggcccctgttttgcagaaa

SEQ ID NO: 5882664 - DNA, 25 bp, Homo sapien
tcacaatcagggcatcatctacagg

SEQ ID NO: 5882665 - DNA, 25 bp, Homo sapien
gagggacacatcaagatcactgact

SEQ ID NO: 5882666 - DNA, 25 bp, Homo sapien
actgtggctccctcctctacgggct

SEQ ID NO: 5882667 - DNA, 25 bp, Homo sapien
ccggagatcattgcctaccagccct

SEQ ID NO: 5882668 - DNA, 25 bp, Homo sapien
tcatctacagggacctgaagctgga

SEQ ID NO: 5882669 - DNA, 25 bp, Homo sapien
gatcttgaaaaaggacgtgatcgtc

SEQ ID NO: 5882670 - DNA, 25 bp, Homo sapien
cgattggtggtcctttggagttctg

SEQ ID NO: 5882671 - DNA, 25 bp, Homo sapien
agctacagcagccccaccttctgcg

SEQ ID NO: 5882672 - DNA, 25 bp, Homo sapien
gtctgcagctttgtggttcatcgac

SEQ ID NO: 5882673 - DNA, 25 bp, Homo sapien
tggactgcacgctggtggagaaacg

SEQ ID NO: 5882674 - DNA, 25 bp, Homo sapien
actgaagctcatcccagaccctcgg

SEQ ID NO: 5882675 - DNA, 25 bp, Homo sapien
accagccctatgggaagtctgtcga

SEQ ID NO: 5882676 - DNA, 25 bp, Homo sapien
ctgcaatgtcaagtctgcagctttg

SEQ ID NO: 5882677 - DNA, 25 bp, Homo sapien
acaatcagggcatcatctacaggga

SEQ ID NO: 5882678 - DNA, 25 bp, Homo sapien
ccactccaccttccagaccccggac

SEQ ID NO: 5882679 - DNA, 25 bp, Homo sapien
tcagcttcctcatggttctaggaaa

SEQ ID NO: 5882680 - DNA, 25 bp, Homo sapien
cgcgggcgcctgcagctggagatcc

SEQ ID NO: 5882681 - DNA, 25 bp, Homo sapien
gagatccgggctcccacagcagatg

SEQ ID NO: 5882682 - DNA, 25 bp, Homo sapien
gatgctgagggacacatcaagatca

SEQ ID NO: 5882683 - DNA, 25 bp, Homo sapien
gatccacgtaactgttggcgaggcc

SEQ ID NO: 5882684 - DNA, 25 bp, Homo sapien
gtccacgaagtcaagagccacaagt

SEQ ID NO: 5882685 - DNA, 25 bp, Homo sapien
acaaactgtcacctaccccaagtcg

SEQ ID NO: 5882686 - DNA, 25 bp, Homo sapien
agcgctgcttcttcggggcgagtcc

SEQ ID NO: 5882687 - DNA, 25 bp, Homo sapien
gatccctatgtgaaactgaagctca

SEQ ID NO: 5882688 - DNA, 25 bp, Homo sapien
gcagcctcctccagaagtttgaggc

SEQ ID NO: 5882689 - DNA, 25 bp, Homo sapien
ccatgtcctttggcgtctcggagct

SEQ ID NO: 5882690 - DNA, 25 bp, Homo sapien
caagtcgctttcccgggaagccgtg

SEQ ID NO: 5882691 - DNA, 25 bp, Homo sapien
tcaagtctgcagctttgtggttcat

SEQ ID NO: 5882692 - DNA, 25 bp, Homo sapien
agttactgaaccaggaggagggcga

SEQ ID NO: 5882693 - DNA, 25 bp, Homo sapien
ctgcgagatgaacgtgcaccggcgc

SEQ ID NO: 5882694 - DNA, 25 bp, Homo sapien
agcgcaggggctctgatgagctcta

SEQ ID NO: 5882695 - DNA, 25 bp, Homo sapien
cggcgtaggcgattcagagggggga

SEQ ID NO: 5882696 - DNA, 25 bp, Homo sapien
cctgtgcggtgtggaccacaccgag

SEQ ID NO: 5882697 - DNA, 25 bp, Homo sapien
ccagaccccggaccgcctgtatttc

SEQ ID NO: 5882698 - DNA, 25 bp, Homo sapien
aacagaagacccgaacggtgaaagc

SEQ ID NO: 5882699 - DNA, 25 bp, Homo sapien
caccgagcgccgcgggcgcctgcag

SEQ ID NO: 5882700 - DNA, 25 bp, Homo sapien
gggcttgtgcaccagggcatgaaat

SEQ ID NO: 5882701 - DNA, 25 bp, Homo sapien
agctgtttcaggccatcatggaaca

SEQ ID NO: 5882702 - DNA, 25 bp, Homo sapien
ggccatcatggaacaaactgtcacc

SEQ ID NO: 5882703 - DNA, 25 bp, Homo sapien
ctccactccaccttccagaccccgg

SEQ ID NO: 5882704 - DNA, 25 bp, Homo sapien
gaggcttgtaactaccccctggaat

SEQ ID NO: 5882705 - DNA, 25 bp, Homo sapien
gaccccggaccgcctgtatttcgtg

SEQ ID NO: 5882706 - DNA, 25 bp, Homo sapien
cagggcctgcaatgtcaagtctgca

SEQ ID NO: 5882707 - DNA, 25 bp, Homo sapien
gcacatggctttttccgctggattg

SEQ ID NO: 5882708 - DNA, 25 bp, Homo sapien
gaagccgtggccatctgcaaggggt

SEQ ID NO: 5882709 - DNA, 25 bp, Homo sapien
cgcaggggctctgatgagctctacg

SEQ ID NO: 5882710 - DNA, 25 bp, Homo sapien
ctggtctgggccccggcgtaggcga

SEQ ID NO: 5882711 - DNA, 25 bp, Homo sapien
acccctccagaccgcctagtcctgg

SEQ ID NO: 5882712 - DNA, 25 bp, Homo sapien
tatggaccccaacggtctctctgat

SEQ ID NO: 5882713 - DNA, 25 bp, Homo sapien
aagccaggggatgtggagcgccggc

SEQ ID NO: 5882714 - DNA, 25 bp, Homo sapien
gctgacaactgcagcctcctccaga

SEQ ID NO: 5882715 - DNA, 25 bp, Homo sapien
cgtaactgttggcgaggcccgtaac

SEQ ID NO: 5882716 - DNA, 25 bp, Homo sapien
aaggacgtgatcgtccaggacgacg

SEQ ID NO: 5882717 - DNA, 25 bp, Homo sapien
cttcgtgcacccggatgcccgcagc

SEQ ID NO: 5882718 - DNA, 25 bp, Homo sapien
tgctgagggacacatcaagatcact

SEQ ID NO: 5882719 - DNA, 25 bp, Homo sapien
gcaacgacttcatgggggccatgtc

SEQ ID NO: 5882720 - DNA, 25 bp, Homo sapien
atccgtgcacatggctttttccgct

SEQ ID NO: 5882721 - DNA, 25 bp, Homo sapien
gcgccgcgggcgcctgcagctggag

SEQ ID NO: 5882722 - DNA, 25 bp, Homo sapien
gggcatgaaatgctcctgctgcgag

SEQ ID NO: 5882723 - DNA, 25 bp, Homo sapien
ggaccccggactacatagccccgga

SEQ ID NO: 5882724 - DNA, 25 bp, Homo sapien
tgccctccctgtgcggtgtggacca

SEQ ID NO: 5882725 - DNA, 25 bp, Homo sapien
gtttaaggagccccatgcagcgttc

SEQ ID NO: 5882726 - DNA, 25 bp, Homo sapien
gtccaggcgctgggaagggccccca

SEQ ID NO: 5882727 - DNA, 25 bp, Homo sapien
gtgatggagtacgtcaccgggggag

SEQ ID NO: 5882728 - DNA, 25 bp, Homo sapien
ggccgatttccagggcttcacctac

SEQ ID NO: 5882729 - DNA, 25 bp, Homo sapien
accacaccgagcgccgcgggcgcct

SEQ ID NO: 5882730 - DNA, 25 bp, Homo sapien
ctgacgaaacagaagacccgaacgg

SEQ ID NO: 5882731 - DNA, 25 bp, Homo sapien
aagttcttcacgcgggcggcgccag

SEQ ID NO: 5882732 - DNA, 25 bp, Homo sapien
ggaattgtatgagcgggtgcggatg

SEQ ID NO: 5882733 - DNA, 25 bp, Homo sapien
gggaagcgcctgggctcagggcctg

SEQ ID NO: 5882734 - DNA, 25 bp, Homo sapien
atgctggccgagcgcaggggctctg

SEQ ID NO: 5882735 - DNA, 25 bp, Homo sapien
gaggagctgtttcaggccatcatgg

SEQ ID NO: 5882736 - DNA, 25 bp, Homo sapien
aagatcttgaaaaaggacgtgatcg

SEQ ID NO: 5882737 - DNA, 25 bp, Homo sapien
ctgggaccggacctcccgcaacgac

SEQ ID NO: 5882738 - DNA, 25 bp, Homo sapien
agccactgcaccgacttcatctggg

SEQ ID NO: 5882739 - DNA, 25 bp, Homo sapien
gatgtggactgcacgctggtggaga

SEQ ID NO: 5882740 - DNA, 25 bp, Homo sapien
aacacaagttccgcctgcatagcta

SEQ ID NO: 5882741 - DNA, 25 bp, Homo sapien
ttgtatgagcgggtgcggatgggcc

SEQ ID NO: 5882742 - DNA, 25 bp, Homo sapien
ctcatggttctaggaaaaggcagtt

SEQ ID NO: 5882743 - DNA, 25 bp, Homo sapien
cccaagcgctgcttcttcggggcga

SEQ ID NO: 5882744 - DNA, 25 bp, Homo sapien
acagggacctgaagctggacaatgt

SEQ ID NO: 5882745 - DNA, 25 bp, Homo sapien
acttcatgggggccatgtcctttgg

SEQ ID NO: 5882746 - DNA, 25 bp, Homo sapien
ctgtgtggaatgagacctttgtgtt

SEQ ID NO: 5882747 - DNA, 25 bp, Homo sapien
gaggagggcgagtattacaatgtgc

SEQ ID NO: 5882748 - DNA, 25 bp, Homo sapien
ggtggccgatgctgacaactgcagc

SEQ ID NO: 5882749 - DNA, 25 bp, Homo sapien
gtgtccaggcgctgggaagggcccc

SEQ ID NO: 5882750 - DNA, 25 bp, Homo sapien
cacgaatttgtgaccttcgagtgtc

SEQ ID NO: 5882751 - DNA, 25 bp, Homo sapien
ccccaacggtctctctgatccctat

SEQ ID NO: 5882752 - DNA, 25 bp, Homo sapien
ctggaattgtatgagcgggtgcgga

SEQ ID NO: 5882753 - DNA, 25 bp, Homo sapien
ctccagaccgcctagtcctggccag

SEQ ID NO: 5882754 - DNA, 25 bp, Homo sapien
ttctgcgaccactgtggctccctcc

SEQ ID NO: 5882755 - DNA, 25 bp, Homo sapien
cctggccagcatcgaccaggccgat

SEQ ID NO: 5882756 - DNA, 25 bp, Homo sapien
tcccgcctcctttcagaccccgccc

SEQ ID NO: 5882757 - DNA, 25 bp, Homo sapien
agttcaccgctcgcttcttcaagca

SEQ ID NO: 5882758 - DNA, 25 bp, Homo sapien
tggccgatgctgacaactgcagcct

SEQ ID NO: 5882759 - DNA, 25 bp, Homo sapien
taactaccccctggaattgtatgag

SEQ ID NO: 5882760 - DNA, 25 bp, Homo sapien
ggcttgtaactaccccctggaattg

SEQ ID NO: 5882761 - DNA, 25 bp, Homo sapien
tatgtgaaactgaagctcatcccag

SEQ ID NO: 5882762 - DNA, 25 bp, Homo sapien
ctgcagcctcctccagaagtttgag

SEQ ID NO: 5882763 - DNA, 25 bp, Homo sapien
gctcgcttcttcaagcagcccacct

SEQ ID NO: 5882764 - DNA, 25 bp, Homo sapien
tgacaagttcttcacgcgggcggcg

SEQ ID NO: 5882765 - DNA, 25 bp, Homo sapien
ggaccgcctgtatttcgtgatggag

SEQ ID NO: 5882766 - DNA, 25 bp, Homo sapien
ttggcgaggcccgtaacctaattcc

SEQ ID NO: 5882767 - DNA, 25 bp, Homo sapien
agctctacgccatcaagatcttgaa

SEQ ID NO: 5882768 - DNA, 25 bp, Homo sapien
cagggaagcgcctgggctcagggcc

SEQ ID NO: 5882769 - DNA, 25 bp, Homo sapien
ggatgggcccctcttcctctcccat

SEQ ID NO: 5882770 - DNA, 25 bp, Homo sapien
cctcttcttccttcacaatcagggc

SEQ ID NO: 5882771 - DNA, 25 bp, Homo sapien
caacagctgggcaagtttaaggagc

SEQ ID NO: 5882772 - DNA, 25 bp, Homo sapien
ctggaacgattggagatcccgcctc

SEQ ID NO: 5882773 - DNA, 25 bp, Homo sapien
aaacgtgtgctggcgctggggggcc

SEQ ID NO: 5882774 - DNA, 25 bp, Homo sapien
agggcctgatggggaacctaccatc

SEQ ID NO: 5882775 - DNA, 25 bp, Homo sapien
gactgcacgctggtggagaaacgtg

SEQ ID NO: 5882776 - DNA, 25 bp, Homo sapien
tggattgactgggagcggctggaac

SEQ ID NO: 5882777 - DNA, 25 bp, Homo sapien
ggcatcatctacagggacctgaagc

SEQ ID NO: 5882778 - DNA, 25 bp, Homo sapien
gggctctgaggcagaaggtggtcca

SEQ ID NO: 5882779 - DNA, 25 bp, Homo sapien
cgcctgcagctggagatccgggctc

SEQ ID NO: 5882780 - DNA, 25 bp, Homo sapien
cgctgtgtgcgtagcgtgccctccc

SEQ ID NO: 5882781 - DNA, 25 bp, Homo sapien
ttccagaccccggaccgcctgtatt

SEQ ID NO: 5882782 - DNA, 25 bp, Homo sapien
ttgtgttcaacctgaagccagggga

SEQ ID NO: 5882783 - DNA, 25 bp, Homo sapien
cacaccgagcgccgcgggcgcctgc

SEQ ID NO: 5882784 - DNA, 25 bp, Homo sapien
gtggaatgagacctttgtgttcaac

SEQ ID NO: 5882785 - DNA, 25 bp, Homo sapien
tcaacctgaagccaggggatgtgga

SEQ ID NO: 5882786 - DNA, 25 bp, Homo sapien
gcctgcacatctccgacttcagctt

SEQ ID NO: 5882787 - DNA, 25 bp, Homo sapien
gcctaccagccctatgggaagtctg

SEQ ID NO: 5882788 - DNA, 25 bp, Homo sapien
ctttcagaccccgcccgtgtggccg

SEQ ID NO: 5882789 - DNA, 25 bp, Homo sapien
acccggatgcccgcagccccaccag

SEQ ID NO: 5882790 - DNA, 25 bp, Homo sapien
ccggaccgcctgtatttcgtgatgg

SEQ ID NO: 5882791 - DNA, 25 bp, Homo sapien
acctgacgaaacagaagacccgaac

SEQ ID NO: 5882792 - DNA, 25 bp, Homo sapien
taccccctggaattgtatgagcggg

SEQ ID NO: 5882793 - DNA, 25 bp, Homo sapien
aatttgtgaccttcgagtgtccagg

SEQ ID NO: 5882794 - DNA, 25 bp, Homo sapien
tcaagcagcccaccttctgcagcca

SEQ ID NO: 5882795 - DNA, 25 bp, Homo sapien
gcagatgagatccacgtaactgttg

SEQ ID NO: 5882796 - DNA, 25 bp, Homo sapien
ggcctgatggggaacctaccatccg

SEQ ID NO: 5882797 - DNA, 25 bp, Homo sapien
gcggccggccccacttcctcaccca

SEQ ID NO: 5882798 - DNA, 25 bp, Homo sapien
tgtggactgcacgctggtggagaaa

SEQ ID NO: 5882799 - DNA, 25 bp, Homo sapien
atgagcgggtgcggatgggcccctc

SEQ ID NO: 5882800 - DNA, 25 bp, Homo sapien
caccttctgcgggaccccggactac

SEQ ID NO: 5882801 - DNA, 25 bp, Homo sapien
acatggctttttccgctggattgac

SEQ ID NO: 5882802 - DNA, 25 bp, Homo sapien
ctgcttcttcggggcgagtccagga

SEQ ID NO: 5882803 - DNA, 25 bp, Homo sapien
cgggcggcgccagcgctgacccctc

SEQ ID NO: 5882804 - DNA, 25 bp, Homo sapien
cggactacatagccccggagatcat

SEQ ID NO: 5882805 - DNA, 25 bp, Homo sapien
gggcccctcttcctctcccatcccc

SEQ ID NO: 5882806 - DNA, 25 bp, Homo sapien
ggccccggcgtaggcgattcagagg

SEQ ID NO: 5882807 - DNA, 25 bp, Homo sapien
aagcagcccaccttctgcagccact

SEQ ID NO: 5882808 - DNA, 25 bp, Homo sapien
accgcctgtatttcgtgatggagta

SEQ ID NO: 5882809 - DNA, 25 bp, Homo sapien
ttgcctaccagccctatgggaagtc

SEQ ID NO: 5882810 - DNA, 25 bp, Homo sapien
ctgctgtatgagatgttggcaggac

SEQ ID NO: 5882811 - DNA, 25 bp, Homo sapien
aagagccacaagttcaccgctcgct

SEQ ID NO: 5882812 - DNA, 25 bp, Homo sapien
gttggcaggacagcctcccttcgat

SEQ ID NO: 5882813 - DNA, 25 bp, Homo sapien
tcgtgcacccggatgcccgcagccc

SEQ ID NO: 5882814 - DNA, 25 bp, Homo sapien
cttcacaatcagggcatcatctaca

SEQ ID NO: 5882815 - DNA, 25 bp, Homo sapien
ggcctcttcttccttcacaatcagg

SEQ ID NO: 5882816 - DNA, 25 bp, Homo sapien
gcagcggcgagaactttgacaagtt

SEQ ID NO: 5882817 - DNA, 25 bp, Homo sapien
cggacctcccgcaacgacttcatgg

SEQ ID NO: 5882818 - DNA, 25 bp, Homo sapien
ggaccacaccgagcgccgcgggcgc

SEQ ID NO: 5882819 - DNA, 25 bp, Homo sapien
tggtggagaaacgtgtgctggcgct

SEQ ID NO: 5882820 - DNA, 25 bp, Homo sapien
agatgagatccacgtaactgttggc

SEQ ID NO: 5882821 - DNA, 25 bp, Homo sapien
gacgacgatgtggactgcacgctgg

SEQ ID NO: 5882822 - DNA, 25 bp, Homo sapien
tgggaagtctgtcgattggtggtcc

SEQ ID NO: 5882823 - DNA, 25 bp, Homo sapien
gcttcttcaagcagcccaccttctg

SEQ ID NO: 5882824 - DNA, 25 bp, Homo sapien
agggcgagtattacaatgtgccggt

SEQ ID NO: 5882825 - DNA, 25 bp, Homo sapien
gtagcgtgccctccctgtgcggtgt

SEQ ID NO: 5882826 - DNA, 25 bp, Homo sapien
aatcgctatcggcctcttcttcctt

SEQ ID NO: 5882827 - DNA, 25 bp, Homo sapien
tgatgctggatgctgagggacacat

SEQ ID NO: 5882828 - DNA, 25 bp, Homo sapien
atggctttttccgctggattgactg

SEQ ID NO: 5882829 - DNA, 25 bp, Homo sapien
ccaccgaccccaagcgctgcttctt

SEQ ID NO: 5882830 - DNA, 25 bp, Homo sapien
tgactttggcatgtgtaaggagaac

SEQ ID NO: 5882831 - DNA, 25 bp, Homo sapien
cgattggagatcccgcctcctttca

SEQ ID NO: 5882832 - DNA, 25 bp, Homo sapien
tcccgcaacgacttcatgggggcca

SEQ ID NO: 5882833 - DNA, 25 bp, Homo sapien
cagcagatgagatccacgtaactgt

SEQ ID NO: 5882834 - DNA, 25 bp, Homo sapien
atgccacgaatttgtgaccttcgag

SEQ ID NO: 5882835 - DNA, 25 bp, Homo sapien
cgggctcccacagcagatgagatcc

SEQ ID NO: 5882836 - DNA, 25 bp, Homo sapien
cctttggcgtctcggagctgctcaa

SEQ ID NO: 5882837 - DNA, 25 bp, Homo sapien
aagtctgtcgattggtggtcctttg

SEQ ID NO: 5882838 - DNA, 25 bp, Homo sapien
aggaggagctgtttcaggccatcat

SEQ ID NO: 5882839 - DNA, 25 bp, Homo sapien
tggttctaggaaaaggcagttttgg

SEQ ID NO: 5882840 - DNA, 25 bp, Homo sapien
aaccctgtgtggaatgagacctttg

SEQ ID NO: 5882841 - DNA, 25 bp, Homo sapien
caaggcgcccgtggatggctggtac

SEQ ID NO: 5882842 - DNA, 25 bp, Homo sapien
ccatcatggaacaaactgtcaccta

SEQ ID NO: 5882843 - DNA, 25 bp, Homo sapien
gctggatgctgagggacacatcaag

SEQ ID NO: 5882844 - DNA, 25 bp, Homo sapien
atgagatccacgtaactgttggcga

SEQ ID NO: 5882845 - DNA, 25 bp, Homo sapien
gaccccaacggtctctctgatccct

SEQ ID NO: 5882846 - DNA, 25 bp, Homo sapien
ccgcccgtgtggccgcagcggcgag

SEQ ID NO: 5882847 - DNA, 25 bp, Homo sapien
ggtggtccacgaagtcaagagccac

SEQ ID NO: 5882848 - DNA, 25 bp, Homo sapien
acttcctcacccagctccactccac

SEQ ID NO: 5882849 - DNA, 25 bp, Homo sapien
ccgggaagccgtggccatctgcaag

SEQ ID NO: 5882850 - DNA, 25 bp, Homo sapien
cgcgggcggcgccagcgctgacccc

SEQ ID NO: 5882851 - DNA, 25 bp, Homo sapien
caccgacttcatctggggtatcgga

SEQ ID NO: 5882852 - DNA, 25 bp, Homo sapien
cagttttgggaaggtgatgctggcc

SEQ ID NO: 5882853 - DNA, 25 bp, Homo sapien
gggagcggctggaacgattggagat

SEQ ID NO: 5882854 - DNA, 25 bp, Homo sapien
catcaagatcactgactttggcatg

SEQ ID NO: 5882855 - DNA, 25 bp, Homo sapien
ggacctgaagctggacaatgtgatg

SEQ ID NO: 5882856 - DNA, 25 bp, Homo sapien
ctctctgatccctatgtgaaactga

SEQ ID NO: 5882857 - DNA, 25 bp, Homo sapien
accaagcacccagggaagcgcctgg

SEQ ID NO: 5882858 - DNA, 25 bp, Homo sapien
ctgcgaccactgtggctccctcctc

SEQ ID NO: 5882859 - DNA, 25 bp, Homo sapien
cggtctctctgatccctatgtgaaa

SEQ ID NO: 5882860 - DNA, 25 bp, Homo sapien
cattgcctaccagccctatgggaag

SEQ ID NO: 5882861 - DNA, 25 bp, Homo sapien
aggcgcccgtggatggctggtacaa

SEQ ID NO: 5882862 - DNA, 25 bp, Homo sapien
gtggttcatcgacgatgccacgaat

SEQ ID NO: 5882863 - DNA, 25 bp, Homo sapien
ttcttcggggcgagtccaggacgcc

SEQ ID NO: 5882864 - DNA, 25 bp, Homo sapien
ccagctccactccaccttccagacc

SEQ ID NO: 5882865 - DNA, 25 bp, Homo sapien
gagatccacgtaactgttggcgagg

SEQ ID NO: 5882866 - DNA, 25 bp, Homo sapien
tgacaactgcagcctcctccagaag

SEQ ID NO: 5882867 - DNA, 25 bp, Homo sapien
acatctccgacttcagcttcctcat

SEQ ID NO: 5882868 - DNA, 25 bp, Homo sapien
tggcggccggccccacttcctcacc

SEQ ID NO: 5882869 - DNA, 25 bp, Homo sapien
gattgactgggagcggctggaacga

SEQ ID NO: 5882870 - DNA, 25 bp, Homo sapien
ctgggctcagggcctgatggggaac

SEQ ID NO: 5882871 - DNA, 25 bp, Homo sapien
ctctgatccctatgtgaaactgaag

SEQ ID NO: 5882872 - DNA, 25 bp, Homo sapien
tgtgaccttcgagtgtccaggcgct

SEQ ID NO: 5882873 - DNA, 25 bp, Homo sapien
gctcagggcctgatggggaacctac

SEQ ID NO: 5882874 - DNA, 25 bp, Homo sapien
gtgcaccagggcatgaaatgctcct

SEQ ID NO: 5882875 - DNA, 25 bp, Homo sapien
aaggcagttttgggaaggtgatgct

SEQ ID NO: 5882876 - DNA, 25 bp, Homo sapien
accacattcaacagctgggcaagtt

SEQ ID NO: 5882877 - DNA, 25 bp, Homo sapien
cttcggggcgagtccaggacgcctg

SEQ ID NO: 5882878 - DNA, 25 bp, Homo sapien
tcccctagtcccaccgaccccaagc

SEQ ID NO: 5882879 - DNA, 25 bp, Homo sapien
ccgacttcatctggggtatcggaaa

SEQ ID NO: 5882880 - DNA, 25 bp, Homo sapien
tgaaccccgacttcgtgcacccgga

SEQ ID NO: 5882881 - DNA, 25 bp, Homo sapien
cgcctagtcctggccagcatcgacc

SEQ ID NO: 5882882 - DNA, 25 bp, Homo sapien
tatgagatgttggcaggacagcctc

SEQ ID NO: 5882883 - DNA, 25 bp, Homo sapien
ccttctgcgaccactgtggctccct

SEQ ID NO: 5882884 - DNA, 25 bp, Homo sapien
caccgggggagacttgatgtaccac

SEQ ID NO: 5882885 - DNA, 25 bp, Homo sapien
ggctcccacagcagatgagatccac

SEQ ID NO: 5882886 - DNA, 25 bp, Homo sapien
cggaacctgacgaaacagaagaccc

SEQ ID NO: 5882887 - DNA, 25 bp, Homo sapien
ggtgatgctggccgagcgcaggggc

SEQ ID NO: 5882888 - DNA, 25 bp, Homo sapien
ccttccagaccccggaccgcctgta

SEQ ID NO: 5882889 - DNA, 25 bp, Homo sapien
cctgatggggaacctaccatccgtg

SEQ ID NO: 5882890 - DNA, 25 bp, Homo sapien
tcacctaccccaagtcgctttcccg

SEQ ID NO: 5882891 - DNA, 25 bp, Homo sapien
gccaggggatgtggagcgccggctc

SEQ ID NO: 5882892 - DNA, 25 bp, Homo sapien
agttctgctgtatgagatgttggca

SEQ ID NO: 5882893 - DNA, 25 bp, Homo sapien
acaatgtgccggtggccgatgctga

SEQ ID NO: 5882894 - DNA, 25 bp, Homo sapien
gcgctgacccctccagaccgcctag

SEQ ID NO: 5882895 - DNA, 25 bp, Homo sapien
gctccctcctctacgggcttgtgca

SEQ ID NO: 5882896 - DNA, 25 bp, Homo sapien
ctacgccatcaagatcttgaaaaag

SEQ ID NO: 5882897 - DNA, 25 bp, Homo sapien
agttccgcctgcatagctacagcag

SEQ ID NO: 5882898 - DNA, 25 bp, Homo sapien
tttggcgtctcggagctgctcaagg

SEQ ID NO: 5882899 - DNA, 25 bp, Homo sapien
tctaggaaaaggcagttttgggaag

SEQ ID NO: 5882900 - DNA, 25 bp, Homo sapien
cacctacgtgaaccccgacttcgtg

SEQ ID NO: 5882901 - DNA, 25 bp, Homo sapien
gcccgtggatggctggtacaagtta

SEQ ID NO: 5882902 - DNA, 25 bp, Homo sapien
agctgggcaagtttaaggagcccca

SEQ ID NO: 5882903 - DNA, 25 bp, Homo sapien
gccccaccttctgcgaccactgtgg

SEQ ID NO: 5882904 - DNA, 25 bp, Homo sapien
ccaccagcccagtgcctgtgcccgt

SEQ ID NO: 5882905 - DNA, 25 bp, Homo sapien
ctccgacttcagcttcctcatggtt

SEQ ID NO: 5882906 - DNA, 25 bp, Homo sapien
ccgtgcacatggctttttccgctgg

SEQ ID NO: 5882907 - DNA, 25 bp, Homo sapien
ctacatagccccggagatcattgcc

SEQ ID NO: 5882908 - DNA, 25 bp, Homo sapien
ccgagcgccgcgggcgcctgcagct

SEQ ID NO: 5882909 - DNA, 25 bp, Homo sapien
tcagggcatcatctacagggacctg

SEQ ID NO: 5882910 - DNA, 25 bp, Homo sapien
tgatggggaacctaccatccgtgca

SEQ ID NO: 5882911 - DNA, 25 bp, Homo sapien
tcaagagccacaagttcaccgctcg

SEQ ID NO: 5882912 - DNA, 25 bp, Homo sapien
atggggaacctaccatccgtgcaca

SEQ ID NO: 5882913 - DNA, 25 bp, Homo sapien
actgactttggcatgtgtaaggaga

SEQ ID NO: 5882914 - DNA, 25 bp, Homo sapien
tttgacaagttcttcacgcgggcgg

SEQ ID NO: 5882915 - DNA, 25 bp, Homo sapien
ccccggaccgcctgtatttcgtgat

SEQ ID NO: 5882916 - DNA, 25 bp, Homo sapien
tcggaaagcagggcctgcaatgtca

SEQ ID NO: 5882917 - DNA, 25 bp, Homo sapien
gcccctcttcctctcccatcccctc

SEQ ID NO: 5882918 - DNA, 25 bp, Homo sapien
gctcatcccagaccctcggaacctg

SEQ ID NO: 5882919 - DNA, 25 bp, Homo sapien
cctgtatttcgtgatggagtacgtc

SEQ ID NO: 5882920 - DNA, 25 bp, Homo sapien
caccttctgcagccactgcaccgac

SEQ ID NO: 5882921 - DNA, 25 bp, Homo sapien
caagcacccagggaagcgcctgggc

SEQ ID NO: 5882922 - DNA, 25 bp, Homo sapien
gtccaggacgacgatgtggactgca

SEQ ID NO: 5882923 - DNA, 25 bp, Homo sapien
gtgtggaatgagacctttgtgttca

SEQ ID NO: 5882924 - DNA, 25 bp, Homo sapien
ccatctgcaaggggttcctgaccaa

SEQ ID NO: 5882925 - DNA, 25 bp, Homo sapien
gcagaaggtggtccacgaagtcaag

SEQ ID NO: 5882926 - DNA, 25 bp, Homo sapien
gtgtgcgtagcgtgccctccctgtg

SEQ ID NO: 5882927 - DNA, 25 bp, Homo sapien
acgcctgcacatctccgacttcagc

SEQ ID NO: 5882928 - DNA, 25 bp, Homo sapien
agaagtttgaggcttgtaactaccc

SEQ ID NO: 5882929 - DNA, 25 bp, Homo sapien
ctgtcgattggtggtcctttggagt

SEQ ID NO: 5882930 - DNA, 25 bp, Homo sapien
agcgtgccctccctgtgcggtgtgg

SEQ ID NO: 5882931 - DNA, 25 bp, Homo sapien
cagggcttcacctacgtgaaccccg

SEQ ID NO: 5882932 - DNA, 25 bp, Homo sapien
aagtttaaggagccccatgcagcgt

SEQ ID NO: 5882933 - DNA, 25 bp, Homo sapien
tcttcacgcgggcggcgccagcgct

SEQ ID NO: 5882934 - DNA, 25 bp, Homo sapien
agcgccggctcagcgtggaggtgtg

SEQ ID NO: 5882935 - DNA, 25 bp, Homo sapien
tgggaagggcccccagacggacgac

SEQ ID NO: 5882936 - DNA, 25 bp, Homo sapien
ctggggtatcggaaagcagggcctg

SEQ ID NO: 5882937 - DNA, 25 bp, Homo sapien
agccccggagatcattgcctaccag

SEQ ID NO: 5882938 - DNA, 25 bp, Homo sapien
atgtcctttggcgtctcggagctgc

SEQ ID NO: 5882939 - DNA, 25 bp, Homo sapien
gtttcaggccatcatggaacaaact

SEQ ID NO: 5882940 - DNA, 25 bp, Homo sapien
cacaagttccgcctgcatagctaca

SEQ ID NO: 5882941 - DNA, 25 bp, Homo sapien
gtctgtcgattggtggtcctttgga

SEQ ID NO: 5882942 - DNA, 25 bp, Homo sapien
gtcgattggtggtcctttggagttc

SEQ ID NO: 5882943 - DNA, 25 bp, Homo sapien
gctgtatgagatgttggcaggacag

SEQ ID NO: 5882944 - DNA, 25 bp, Homo sapien
tggccagcatcgaccaggccgattt

SEQ ID NO: 5882945 - DNA, 25 bp, Homo sapien
acgcggcagaaatcgctatcggcct

SEQ ID NO: 5882946 - DNA, 25 bp, Homo sapien
tattacaatgtgccggtggccgatg

SEQ ID NO: 5882947 - DNA, 25 bp, Homo sapien
tgaaagccacgctaaaccctgtgtg

SEQ ID NO: 5882948 - DNA, 25 bp, Homo sapien
atctccgacttcagcttcctcatgg

SEQ ID NO: 5882949 - DNA, 25 bp, Homo sapien
ggctttttccgctggattgactggg

SEQ ID NO: 5882950 - DNA, 25 bp, Homo sapien
gagatgaacgtgcaccggcgctgtg

SEQ ID NO: 5882951 - DNA, 25 bp, Homo sapien
ggccccacttcctcacccagctcca

SEQ ID NO: 5882952 - DNA, 25 bp, Homo sapien
ggatgtggagcgccggctcagcgtg

SEQ ID NO: 5882953 - DNA, 25 bp, Homo sapien
cttccttcacaatcagggcatcatc

SEQ ID NO: 5882954 - DNA, 25 bp, Homo sapien
ctctacgccatcaagatcttgaaaa

SEQ ID NO: 5882955 - DNA, 25 bp, Homo sapien
atgctgacaactgcagcctcctcca

SEQ ID NO: 5882956 - DNA, 25 bp, Homo sapien
atcccagaccctcggaacctgacga

SEQ ID NO: 5882957 - DNA, 25 bp, Homo sapien
ggagctgtttcaggccatcatggaa

SEQ ID NO: 5882958 - DNA, 25 bp, Homo sapien
cagaaatcgctatcggcctcttctt

SEQ ID NO: 5882959 - DNA, 25 bp, Homo sapien
gctgggaagggcccccagacggacg

SEQ ID NO: 5882960 - DNA, 25 bp, Homo sapien
ggccggccccacttcctcacccagc

SEQ ID NO: 5882961 - DNA, 25 bp, Homo sapien
gcccgtaacctaattcctatggacc

SEQ ID NO: 5882962 - DNA, 25 bp, Homo sapien
tttcgtgatggagtacgtcaccggg

SEQ ID NO: 5882963 - DNA, 25 bp, Homo sapien
caagttactgaaccaggaggagggc

SEQ ID NO: 5882964 - DNA, 25 bp, Homo sapien
acaactgcagcctcctccagaagtt

SEQ ID NO: 5882965 - DNA, 25 bp, Homo sapien
cctggcggccggccccacttcctca

SEQ ID NO: 5882966 - DNA, 25 bp, Homo sapien
ccgcaacgacttcatgggggccatg

SEQ ID NO: 5882967 - DNA, 25 bp, Homo sapien
ggggcgagtccaggacgcctgcaca

SEQ ID NO: 5882968 - DNA, 25 bp, Homo sapien
aacgattggagatcccgcctccttt

SEQ ID NO: 5882969 - DNA, 25 bp, Homo sapien
gaagacccgaacggtgaaagccacg

SEQ ID NO: 5882970 - DNA, 25 bp, Homo sapien
acccagctccactccaccttccaga

SEQ ID NO: 5882971 - DNA, 25 bp, Homo sapien
cagctggagatccgggctcccacag

SEQ ID NO: 5882972 - DNA, 25 bp, Homo sapien
ctgagggacacatcaagatcactga

SEQ ID NO: 5882973 - DNA, 25 bp, Homo sapien
tgagacctttgtgttcaacctgaag

SEQ ID NO: 5882974 - DNA, 25 bp, Homo sapien
gcgtaggcgattcagaggggggacc

SEQ ID NO: 5882975 - DNA, 25 bp, Homo sapien
gtgcacatggctttttccgctggat

SEQ ID NO: 5882976 - DNA, 25 bp, Homo sapien
gagcggctggaacgattggagatcc

SEQ ID NO: 5882977 - DNA, 25 bp, Homo sapien
cggagctgctcaaggcgcccgtgga

SEQ ID NO: 5882978 - DNA, 25 bp, Homo sapien
agcgttctacgcggcagaaatcgct

SEQ ID NO: 5882979 - DNA, 25 bp, Homo sapien
tgaacgtgcaccggcgctgtgtgcg

SEQ ID NO: 5882980 - DNA, 25 bp, Homo sapien
tgaaactgaagctcatcccagaccc

SEQ ID NO: 5882981 - DNA, 25 bp, Homo sapien
gcaggacagcctcccttcgatgggg

SEQ ID NO: 5882982 - DNA, 25 bp, Homo sapien
gtatgagcgggtgcggatgggcccc

SEQ ID NO: 5882983 - DNA, 25 bp, Homo sapien
gtggatggctggtacaagttactga

SEQ ID NO: 5882984 - DNA, 25 bp, Homo sapien
ggaacctaccatccgtgcacatggc

SEQ ID NO: 5882985 - DNA, 25 bp, Homo sapien
ctacgggcttgtgcaccagggcatg

SEQ ID NO: 5882986 - DNA, 25 bp, Homo sapien
ctgggagcggctggaacgattggag

SEQ ID NO: 5882987 - DNA, 25 bp, Homo sapien
gtgtggaccacaccgagcgccgcgg

SEQ ID NO: 5882988 - DNA, 25 bp, Homo sapien
caccttctgcgaccactgtggctcc

SEQ ID NO: 5882989 - DNA, 25 bp, Homo sapien
gcagctttgtggttcatcgacgatg

SEQ ID NO: 5882990 - DNA, 25 bp, Homo sapien
ggaacaaacacaagttccgcctgca

SEQ ID NO: 5882991 - DNA, 25 bp, Homo sapien
gcgagaactttgacaagttcttcac

SEQ ID NO: 5882992 - DNA, 25 bp, Homo sapien
ggccatgtcctttggcgtctcggag

SEQ ID NO: 5882993 - DNA, 25 bp, Homo sapien
aacctgaagccaggggatgtggagc

SEQ ID NO: 5882994 - DNA, 25 bp, Homo sapien
atgttggcaggacagcctcccttcg

SEQ ID NO: 5882995 - DNA, 25 bp, Homo sapien
tggcaggacagcctcccttcgatgg

SEQ ID NO: 5882996 - DNA, 25 bp, Homo sapien
catgggggccatgtcctttggcgtc

SEQ ID NO: 5882997 - DNA, 25 bp, Homo sapien
tgaccaagcacccagggaagcgcct

SEQ ID NO: 5882998 - DNA, 25 bp, Homo sapien
atggggaggacgaggaggagctgtt

SEQ ID NO: 5882999 - DNA, 25 bp, Homo sapien
tcccaccgaccccaagcgctgcttc

SEQ ID NO: 5883000 - DNA, 25 bp, Homo sapien
ttctgcgggaccccggactacatag

SEQ ID NO: 5883001 - DNA, 25 bp, Homo sapien
tctgaggcagaaggtggtccacgaa

SEQ ID NO: 5883002 - DNA, 25 bp, Homo sapien
cgggcgcctgcagctggagatccgg

SEQ ID NO: 5883003 - DNA, 25 bp, Homo sapien
actgcaccgacttcatctggggtat

SEQ ID NO: 5883004 - DNA, 25 bp, Homo sapien
gtaccacattcaacagctgggcaag

SEQ ID NO: 5883005 - DNA, 25 bp, Homo sapien
tatcggaaagcagggcctgcaatgt

SEQ ID NO: 5883006 - DNA, 25 bp, Homo sapien
atagctacagcagccccaccttctg

SEQ ID NO: 5883007 - DNA, 25 bp, Homo sapien
ggcgcctgcagctggagatccgggc

SEQ ID NO: 5883008 - DNA, 25 bp, Homo sapien
ttgaggcttgtaactaccccctgga

SEQ ID NO: 5883009 - DNA, 25 bp, Homo sapien
cggcgccagcgctgacccctccaga

SEQ ID NO: 5883010 - DNA, 25 bp, Homo sapien
gaagcgcctgggctcagggcctgat

SEQ ID NO: 5883011 - DNA, 25 bp, Homo sapien
tctcccatcccctccccttccccta

SEQ ID NO: 5883012 - DNA, 25 bp, Homo sapien
gtgatcgtccaggacgacgatgtgg

SEQ ID NO: 5883013 - DNA, 25 bp, Homo sapien
caccttccagaccccggaccgcctg

SEQ ID NO: 5883014 - DNA, 25 bp, Homo sapien
gcagaaagggggctctgaggcagaa

SEQ ID NO: 5883015 - DNA, 25 bp, Homo sapien
cctagtcctggccagcatcgaccag

SEQ ID NO: 5883016 - DNA, 25 bp, Homo sapien
ccgctcgcttcttcaagcagcccac

SEQ ID NO: 5883017 - DNA, 25 bp, Homo sapien
cccagggaagcgcctgggctcaggg

SEQ ID NO: 5883018 - DNA, 25 bp, Homo sapien
gtggagcgccggctcagcgtggagg

SEQ ID NO: 5883019 - DNA, 25 bp, Homo sapien
gatcccgcctcctttcagaccccgc

SEQ ID NO: 5883020 - DNA, 25 bp, Homo sapien
tgtaaggagaacgtcttccccggga

SEQ ID NO: 5883021 - DNA, 25 bp, Homo sapien
cagccccaccttctgcgaccactgt

SEQ ID NO: 5883022 - DNA, 25 bp, Homo sapien
cagcatcgaccaggccgatttccag

SEQ ID NO: 5883023 - DNA, 25 bp, Homo sapien
cgatgctgacaactgcagcctcctc

SEQ ID NO: 5883024 - DNA, 25 bp, Homo sapien
gggcctgcaatgtcaagtctgcagc

SEQ ID NO: 5883025 - DNA, 25 bp, Homo sapien
aagatcactgactttggcatgtgta

SEQ ID NO: 5883026 - DNA, 25 bp, Homo sapien
cacagcagatgagatccacgtaact

SEQ ID NO: 5883027 - DNA, 25 bp, Homo sapien
cacatcaagatcactgactttggca

SEQ ID NO: 5883028 - DNA, 25 bp, Homo sapien
accaggccgatttccagggcttcac

SEQ ID NO: 5883029 - DNA, 25 bp, Homo sapien
ccaggcgctgggaagggcccccaga

SEQ ID NO: 5883030 - DNA, 25 bp, Homo sapien
accagggcatgaaatgctcctgctg

SEQ ID NO: 5883031 - DNA, 25 bp, Homo sapien
agatcattgcctaccagccctatgg

SEQ ID NO: 5883032 - DNA, 25 bp, Homo sapien
gaccactgtggctccctcctctacg

SEQ ID NO: 5883033 - DNA, 25 bp, Homo sapien
cggcgagaactttgacaagttcttc

SEQ ID NO: 5883034 - DNA, 25 bp, Homo sapien
cttcagcttcctcatggttctagga

SEQ ID NO: 5883035 - DNA, 25 bp, Homo sapien
tcgtccaggacgacgatgtggactg

SEQ ID NO: 5883036 - DNA, 25 bp, Homo sapien
ttcatgggggccatgtcctttggcg

SEQ ID NO: 5883037 - DNA, 25 bp, Homo sapien
tcatctggggtatcggaaagcaggg

SEQ ID NO: 5883038 - DNA, 25 bp, Homo sapien
gtctctctgatccctatgtgaaact

SEQ ID NO: 5883039 - DNA, 25 bp, Homo sapien
tgtggctccctcctctacgggcttg

SEQ ID NO: 5883040 - DNA, 25 bp, Homo sapien
ttctacgcggcagaaatcgctatcg

SEQ ID NO: 5883041 - DNA, 25 bp, Homo sapien
ctagtcccaccgaccccaagcgctg

SEQ ID NO: 5883042 - DNA, 25 bp, Homo sapien
agggcatcatctacagggacctgaa

SEQ ID NO: 5883043 - DNA, 25 bp, Homo sapien
gaaagggggctctgaggcagaaggt

SEQ ID NO: 5883044 - DNA, 25 bp, Homo sapien
atcatggaacaaactgtcacctacc

SEQ ID NO: 5883045 - DNA, 25 bp, Homo sapien
acgggcttgtgcaccagggcatgaa

SEQ ID NO: 5883046 - DNA, 25 bp, Homo sapien
aaggggttcctgaccaagcacccag

SEQ ID NO: 5883047 - DNA, 25 bp, Homo sapien
tcagggcctgatggggaacctacca

SEQ ID NO: 5883048 - DNA, 25 bp, Homo sapien
gtggaccacaccgagcgccgcgggc

SEQ ID NO: 5883049 - DNA, 25 bp, Homo sapien
actgttggcgaggcccgtaacctaa

SEQ ID NO: 5883050 - DNA, 25 bp, Homo sapien
gcggatgggcccctcttcctctccc

SEQ ID NO: 5883051 - DNA, 25 bp, Homo sapien
ccactgcaccgacttcatctggggt

SEQ ID NO: 5883052 - DNA, 25 bp, Homo sapien
gatttccagggcttcacctacgtga

SEQ ID NO: 5883053 - DNA, 25 bp, Homo sapien
cagcgctgacccctccagaccgcct

SEQ ID NO: 5883054 - DNA, 25 bp, Homo sapien
ccggcgctgtgtgcgtagcgtgccc

SEQ ID NO: 5883055 - DNA, 25 bp, Homo sapien
ccagaccgcctagtcctggccagca

SEQ ID NO: 5883056 - DNA, 25 bp, Homo sapien
tcgctttcccgggaagccgtggcca

SEQ ID NO: 5883057 - DNA, 25 bp, Homo sapien
tccagggcttcacctacgtgaaccc

SEQ ID NO: 5883058 - DNA, 25 bp, Homo sapien
gagtacgtcaccgggggagacttga

SEQ ID NO: 5883059 - DNA, 25 bp, Homo sapien
aacgacttcatgggggccatgtcct

SEQ ID NO: 5883060 - DNA, 25 bp, Homo sapien
gtgcgtagcgtgccctccctgtgcg

SEQ ID NO: 5883061 - DNA, 25 bp, Homo sapien
cgaccccaagcgctgcttcttcggg

SEQ ID NO: 5883062 - DNA, 25 bp, Homo sapien
agccccatgcagcgttctacgcggc

SEQ ID NO: 5883063 - DNA, 25 bp, Homo sapien
gccagcgctgacccctccagaccgc

SEQ ID NO: 5883064 - DNA, 25 bp, Homo sapien
tgaaccaggaggagggcgagtatta

SEQ ID NO: 5883065 - DNA, 25 bp, Homo sapien
ttcacctacgtgaaccccgacttcg

SEQ ID NO: 5883066 - DNA, 25 bp, Homo sapien
aatgctcctgctgcgagatgaacgt

SEQ ID NO: 5883067 - DNA, 25 bp, Homo sapien
ctccagaagtttgaggcttgtaact

SEQ ID NO: 5883068 - DNA, 25 bp, Homo sapien
gcagccactgcaccgacttcatctg

SEQ ID NO: 5883069 - DNA, 25 bp, Homo sapien
aatgtgatgctggatgctgagggac

SEQ ID NO: 5883070 - DNA, 25 bp, Homo sapien
aaagcagggcctgcaatgtcaagtc

SEQ ID NO: 5883071 - DNA, 25 bp, Homo sapien
gacagcctcccttcgatggggagga

SEQ ID NO: 5883072 - DNA, 25 bp, Homo sapien
caagcgctgcttcttcggggcgagt

SEQ ID NO: 5883073 - DNA, 25 bp, Homo sapien
agcagccccaccttctgcgaccact

SEQ ID NO: 5883074 - DNA, 25 bp, Homo sapien
tcctccagaagtttgaggcttgtaa

SEQ ID NO: 5883075 - DNA, 25 bp, Homo sapien
ctacgcggcagaaatcgctatcggc

SEQ ID NO: 5883076 - DNA, 25 bp, Homo sapien
cgatgccacgaatttgtgaccttcg

SEQ ID NO: 5883077 - DNA, 25 bp, Homo sapien
tgggaaggtgatgctggccgagcgc

SEQ ID NO: 5883078 - DNA, 25 bp, Homo sapien
ttggagttctgctgtatgagatgtt

SEQ ID NO: 5883079 - DNA, 25 bp, Homo sapien
tcggcctcttcttccttcacaatca

SEQ ID NO: 5883080 - DNA, 25 bp, Homo sapien
accttcgagtgtccaggcgctggga

SEQ ID NO: 5883081 - DNA, 25 bp, Homo sapien
ggctggtctgggccccggcgtaggc

SEQ ID NO: 5883082 - DNA, 25 bp, Homo sapien
tgcagctggagatccgggctcccac

SEQ ID NO: 5883083 - DNA, 25 bp, Homo sapien
ccgcagcggcgagaactttgacaag

SEQ ID NO: 5883084 - DNA, 25 bp, Homo sapien
ttctgctgtatgagatgttggcagg

SEQ ID NO: 5883085 - DNA, 25 bp, Homo sapien
gcaagtttaaggagccccatgcagc

SEQ ID NO: 5883086 - DNA, 25 bp, Homo sapien
ccctggaattgtatgagcgggtgcg

SEQ ID NO: 5883087 - DNA, 25 bp, Homo sapien
ttactgaaccaggaggagggcgagt

SEQ ID NO: 5883088 - DNA, 25 bp, Homo sapien
gtggaggtgtgggactgggaccgga

SEQ ID NO: 5883089 - DNA, 25 bp, Homo sapien
tcgctatcggcctcttcttccttca

SEQ ID NO: 5883090 - DNA, 25 bp, Homo sapien
gtgcggatgggcccctcttcctctc

SEQ ID NO: 5883091 - DNA, 25 bp, Homo sapien
cgaggaggagctgtttcaggccatc

SEQ ID NO: 5883092 - DNA, 25 bp, Homo sapien
ttcctatggaccccaacggtctctc

SEQ ID NO: 5883093 - DNA, 25 bp, Homo sapien
ctacagcagccccaccttctgcgac

SEQ ID NO: 5883094 - DNA, 25 bp, Homo sapien
gacacatcaagatcactgactttgg

SEQ ID NO: 5883095 - DNA, 25 bp, Homo sapien
tgtgatgctggatgctgagggacac

SEQ ID NO: 5883096 - DNA, 25 bp, Homo sapien
ccactgtggctccctcctctacggg

SEQ ID NO: 5883097 - DNA, 25 bp, Homo sapien
ccccgacttcgtgcacccggatgcc

SEQ ID NO: 5883098 - DNA, 25 bp, Homo sapien
gcatcgaccaggccgatttccaggg

SEQ ID NO: 5883099 - DNA, 25 bp, Homo sapien
gggggctctgaggcagaaggtggtc

SEQ ID NO: 5883100 - DNA, 25 bp, Homo sapien
agccccaccagcccagtgcctgtgc

SEQ ID NO: 5883101 - DNA, 25 bp, Homo sapien
gcagcgttctacgcggcagaaatcg

SEQ ID NO: 5883102 - DNA, 25 bp, Homo sapien
tggcatgtgtaaggagaacgtcttc

SEQ ID NO: 5883103 - DNA, 25 bp, Homo sapien
acgtcaccgggggagacttgatgta

SEQ ID NO: 5883104 - DNA, 25 bp, Homo sapien
tgatgtaccacattcaacagctggg

SEQ ID NO: 5883105 - DNA, 25 bp, Homo sapien
ctgggcaagtttaaggagccccatg

SEQ ID NO: 5883106 - DNA, 25 bp, Homo sapien
aacctaccatccgtgcacatggctt

SEQ ID NO: 5883107 - DNA, 25 bp, Homo sapien
caggggatgtggagcgccggctcag

SEQ ID NO: 5883108 - DNA, 25 bp, Homo sapien
tgaagctcatcccagaccctcggaa

SEQ ID NO: 5883109 - DNA, 25 bp, Homo sapien
tgagatgttggcaggacagcctccc

SEQ ID NO: 5883110 - DNA, 25 bp, Homo sapien
tgctgcgagatgaacgtgcaccggc

SEQ ID NO: 5883111 - DNA, 25 bp, Homo sapien
gtgcacccggatgcccgcagcccca

SEQ ID NO: 5883112 - DNA, 25 bp, Homo sapien
gatccgggctcccacagcagatgag

SEQ ID NO: 5883113 - DNA, 25 bp, Homo sapien
tccttcacaatcagggcatcatcta

SEQ ID NO: 5883114 - DNA, 25 bp, Homo sapien
ggggctctgatgagctctacgccat

SEQ ID NO: 5883115 - DNA, 25 bp, Homo sapien
atgtggagcgccggctcagcgtgga

SEQ ID NO: 5883116 - DNA, 25 bp, Homo sapien
ctcttcctctcccatcccctcccct

SEQ ID NO: 5883117 - DNA, 25 bp, Homo sapien
gctgctcaaggcgcccgtggatggc

SEQ ID NO: 5883118 - DNA, 25 bp, Homo sapien
aacaaacacaagttccgcctgcata

SEQ ID NO: 5883119 - DNA, 25 bp, Homo sapien
tggaacaaactgtcacctaccccaa

SEQ ID NO: 5883120 - DNA, 25 bp, Homo sapien
caccgctcgcttcttcaagcagccc

SEQ ID NO: 5883121 - DNA, 25 bp, Homo sapien
tgtaactaccccctggaattgtatg

SEQ ID NO: 5883122 - DNA, 25 bp, Homo sapien
ttccgctggattgactgggagcggc

SEQ ID NO: 5883123 - DNA, 25 bp, Homo sapien
agtattacaatgtgccggtggccga

SEQ ID NO: 5883124 - DNA, 25 bp, Homo sapien
tcttgaaaaaggacgtgatcgtcca

SEQ ID NO: 5883125 - DNA, 25 bp, Homo sapien
gggacacatcaagatcactgacttt

SEQ ID NO: 5883126 - DNA, 25 bp, Homo sapien
tcctttggagttctgctgtatgaga

SEQ ID NO: 5883127 - DNA, 25 bp, Homo sapien
tccctcctctacgggcttgtgcacc

SEQ ID NO: 5883128 - DNA, 25 bp, Homo sapien
tgggggccatgtcctttggcgtctc

SEQ ID NO: 5883129 - DNA, 25 bp, Homo sapien
tgtcaagtctgcagctttgtggttc

SEQ ID NO: 5883130 - DNA, 25 bp, Homo sapien
actttggcatgtgtaaggagaacgt

SEQ ID NO: 5883131 - DNA, 25 bp, Homo sapien
tcaagatcactgactttggcatgtg

SEQ ID NO: 5883132 - DNA, 25 bp, Homo sapien
ctaattcctatggaccccaacggtc

SEQ ID NO: 5883133 - DNA, 25 bp, Homo sapien
ctcggagctgctcaaggcgcccgtg

SEQ ID NO: 5883134 - DNA, 25 bp, Homo sapien
atgaaatgctcctgctgcgagatga

SEQ ID NO: 5883135 - DNA, 25 bp, Homo sapien
acctgaagctggacaatgtgatgct

SEQ ID NO: 5883136 - DNA, 25 bp, Homo sapien
accggacctcccgcaacgacttcat

SEQ ID NO: 5883137 - DNA, 25 bp, Homo sapien
aacgtgcaccggcgctgtgtgcgta

SEQ ID NO: 5883138 - DNA, 25 bp, Homo sapien
ggggtatcggaaagcagggcctgca

SEQ ID NO: 5883139 - DNA, 25 bp, Homo sapien
taactgttggcgaggcccgtaacct

SEQ ID NO: 5883140 - DNA, 25 bp, Homo sapien
caggggctctgatgagctctacgcc

SEQ ID NO: 5883141 - DNA, 25 bp, Homo sapien
gctggattgactgggagcggctgga

SEQ ID NO: 5883142 - DNA, 25 bp, Homo sapien
gagccacaagttcaccgctcgcttc

SEQ ID NO: 5883143 - DNA, 25 bp, Homo sapien
gggaccccggcccctgttttgcaga

SEQ ID NO: 5883144 - DNA, 25 bp, Homo sapien
cgacaacccgcaccttctgcgggac

SEQ ID NO: 5883145 - DNA, 25 bp, Homo sapien
cgaaacagaagacccgaacggtgaa

SEQ ID NO: 5883146 - DNA, 25 bp, Homo sapien
ggtgaaagccacgctaaaccctgtg

SEQ ID NO: 5883147 - DNA, 25 bp, Homo sapien
cgcctgtatttcgtgatggagtacg

SEQ ID NO: 5883148 - DNA, 25 bp, Homo sapien
gacttgatgtaccacattcaacagc

SEQ ID NO: 5883149 - DNA, 25 bp, Homo sapien
tcgagtgtccaggcgctgggaaggg

SEQ ID NO: 5883150 - DNA, 25 bp, Homo sapien
cccgcaccttctgcgggaccccgga

SEQ ID NO: 5883151 - DNA, 25 bp, Homo sapien
cgcaccttctgcgggaccccggact

SEQ ID NO: 5883152 - DNA, 25 bp, Homo sapien
gactacatagccccggagatcattg

SEQ ID NO: 5883153 - DNA, 25 bp, Homo sapien
tgtcacctaccccaagtcgctttcc

SEQ ID NO: 5883154 - DNA, 25 bp, Homo sapien
tagtcctggccagcatcgaccaggc

SEQ ID NO: 5883155 - DNA, 25 bp, Homo sapien
aggacgacgatgtggactgcacgct

SEQ ID NO: 5883156 - DNA, 25 bp, Homo sapien
ttcagaccccgcccgtgtggccgca

SEQ ID NO: 5883157 - DNA, 25 bp, Homo sapien
ccctgtgtggaatgagacctttgtg

SEQ ID NO: 5883158 - DNA, 25 bp, Homo sapien
cttcctcatggttctaggaaaaggc

SEQ ID NO: 5883159 - DNA, 25 bp, Homo sapien
accgcctagtcctggccagcatcga

SEQ ID NO: 5883160 - DNA, 25 bp, Homo sapien
cagcccagtgcctgtgcccgtcatg

SEQ ID NO: 5883161 - DNA, 25 bp, Homo sapien
caggacgcctgcacatctccgactt

SEQ ID NO: 5883162 - DNA, 25 bp, Homo sapien
aaactgtcacctaccccaagtcgct

SEQ ID NO: 5883163 - DNA, 25 bp, Homo sapien
agaaacgtgtgctggcgctgggggg

SEQ ID NO: 5883164 - DNA, 25 bp, Homo sapien
cctgaccaagcacccagggaagcgc

SEQ ID NO: 5883165 - DNA, 25 bp, Homo sapien
cgtaacctaattcctatggacccca

SEQ ID NO: 5883166 - DNA, 25 bp, Homo sapien
agcccaccttctgcagccactgcac

SEQ ID NO: 5883167 - DNA, 25 bp, Homo sapien
caggccatcatggaacaaactgtca

SEQ ID NO: 5883168 - DNA, 25 bp, Homo sapien
gctctgaggcagaaggtggtccacg

SEQ ID NO: 5883169 - DNA, 25 bp, Homo sapien
tcttcttccttcacaatcagggcat

SEQ ID NO: 5883170 - DNA, 25 bp, Homo sapien
gacctcccgcaacgacttcatgggg

SEQ ID NO: 5883171 - DNA, 25 bp, Homo sapien
caagttcaccgctcgcttcttcaag

SEQ ID NO: 5883172 - DNA, 25 bp, Homo sapien
ggccatctgcaaggggttcctgacc

SEQ ID NO: 5883173 - DNA, 25 bp, Homo sapien
ggctctgatgagctctacgccatca

SEQ ID NO: 5883174 - DNA, 25 bp, Homo sapien
ccggctcagcgtggaggtgtgggac

SEQ ID NO: 5883175 - DNA, 25 bp, Homo sapien
cgaggcccgtaacctaattcctatg

SEQ ID NO: 5883176 - DNA, 25 bp, Homo sapien
cgcctcctttcagaccccgcccgtg

SEQ ID NO: 5883177 - DNA, 25 bp, Homo sapien
ggggatgtggagcgccggctcagcg

SEQ ID NO: 5883178 - DNA, 25 bp, Homo sapien
ggacgcctgcacatctccgacttca

SEQ ID NO: 5883179 - DNA, 25 bp, Homo sapien
tcctcatggttctaggaaaaggcag

SEQ ID NO: 5883180 - DNA, 25 bp, Homo sapien
aaggtgatgctggccgagcgcaggg

SEQ ID NO: 5883181 - DNA, 25 bp, Homo sapien
ggaacgattggagatcccgcctcct

SEQ ID NO: 5883182 - DNA, 25 bp, Homo sapien
cgtgccctccctgtgcggtgtggac

SEQ ID NO: 5883183 - DNA, 25 bp, Homo sapien
gatgagctctacgccatcaagatct

SEQ ID NO: 5883184 - DNA, 25 bp, Homo sapien
cttcctctcccatcccctccccttc

SEQ ID NO: 5883185 - DNA, 25 bp, Homo sapien
catggaacaaactgtcacctacccc

SEQ ID NO: 5883186 - DNA, 25 bp, Homo sapien
acaacccgcaccttctgcgggaccc

SEQ ID NO: 5883187 - DNA, 25 bp, Homo sapien
gcgggtgcggatgggcccctcttcc

SEQ ID NO: 5883188 - DNA, 25 bp, Homo sapien
gaagctggacaatgtgatgctggat

SEQ ID NO: 5883189 - DNA, 25 bp, Homo sapien
acctttgtgttcaacctgaagccag

SEQ ID NO: 5883190 - DNA, 25 bp, Homo sapien
cgtgcaccggcgctgtgtgcgtagc

SEQ ID NO: 5883191 - DNA, 25 bp, Homo sapien
agcctcctccagaagtttgaggctt

SEQ ID NO: 5883192 - DNA, 25 bp, Homo sapien
aaactgaagctcatcccagaccctc

SEQ ID NO: 5883193 - DNA, 25 bp, Homo sapien
aaccaggaggagggcgagtattaca

SEQ ID NO: 5883194 - DNA, 25 bp, Homo sapien
gatcactgactttggcatgtgtaag

SEQ ID NO: 5883195 - DNA, 25 bp, Homo sapien
cctatgtgaaactgaagctcatccc

SEQ ID NO: 5883196 - DNA, 25 bp, Homo sapien
ggaatgagacctttgtgttcaacct

SEQ ID NO: 5883197 - DNA, 25 bp, Homo sapien
cgagtccaggacgcctgcacatctc

SEQ ID NO: 5883198 - DNA, 25 bp, Homo sapien
ggaggtgtgggactgggaccggacc

SEQ ID NO: 5883199 - DNA, 25 bp, Homo sapien
gatcgtccaggacgacgatgtggac

SEQ ID NO: 5883200 - DNA, 25 bp, Homo sapien
gcaaggggttcctgaccaagcaccc

SEQ ID NO: 5883201 - DNA, 25 bp, Homo sapien
tgatgctggccgagcgcaggggctc

SEQ ID NO: 5883202 - DNA, 25 bp, Homo sapien
acaagttcttcacgcgggcggcgcc

SEQ ID NO: 5883203 - DNA, 25 bp, Homo sapien
ccccctggaattgtatgagcgggtg

SEQ ID NO: 5883204 - DNA, 25 bp, Homo sapien
gttctaggaaaaggcagttttggga

SEQ ID NO: 5883205 - DNA, 25 bp, Homo sapien
ccctcttcctctcccatcccctccc

SEQ ID NO: 5883206 - DNA, 25 bp, Homo sapien
ctcagcgtggaggtgtgggactggg

SEQ ID NO: 5883207 - DNA, 25 bp, Homo sapien
cattcaacagctgggcaagtttaag

SEQ ID NO: 5883208 - DNA, 25 bp, Homo sapien
ccgctggattgactgggagcggctg

SEQ ID NO: 5883209 - DNA, 25 bp, Homo sapien
agcttcctcatggttctaggaaaag

SEQ ID NO: 5883210 - DNA, 25 bp, Homo sapien
ccggtggccgatgctgacaactgca

SEQ ID NO: 5883211 - DNA, 25 bp, Homo sapien
agctggacaatgtgatgctggatgc

SEQ ID NO: 5883212 - DNA, 25 bp, Homo sapien
taacctaattcctatggaccccaac

SEQ ID NO: 5883213 - DNA, 25 bp, Homo sapien
gagctgctcaaggcgcccgtggatg

SEQ ID NO: 5883214 - DNA, 25 bp, Homo sapien
gcttcttcggggcgagtccaggacg

SEQ ID NO: 5883215 - DNA, 25 bp, Homo sapien
acagctgggcaagtttaaggagccc

SEQ ID NO: 5883216 - DNA, 25 bp, Homo sapien
tccgggctcccacagcagatgagat

SEQ ID NO: 5883217 - DNA, 25 bp, Homo sapien
cagggcatgaaatgctcctgctgcg

SEQ ID NO: 5883218 - DNA, 25 bp, Homo sapien
tttgggaaggtgatgctggccgagc

SEQ ID NO: 5883219 - DNA, 25 bp, Homo sapien
actgtcacctaccccaagtcgcttt

SEQ ID NO: 5883220 - DNA, 25 bp, Homo sapien
gcgctgggaagggcccccagacgga

SEQ ID NO: 5883221 - DNA, 25 bp, Homo sapien
tcggggcgagtccaggacgcctgca

SEQ ID NO: 5883222 - DNA, 25 bp, Homo sapien
gagacttgatgtaccacattcaaca

SEQ ID NO: 5883223 - DNA, 25 bp, Homo sapien
tgacccctccagaccgcctagtcct

SEQ ID NO: 5883224 - DNA, 25 bp, Homo sapien
cctcccgcaacgacttcatgggggc

SEQ ID NO: 5883225 - DNA, 25 bp, Homo sapien
tacgtgaaccccgacttcgtgcacc

SEQ ID NO: 5883226 - DNA, 25 bp, Homo sapien
accccaagcgctgcttcttcggggc

SEQ ID NO: 5883227 - DNA, 25 bp, Homo sapien
aatgtcaagtctgcagctttgtggt

SEQ ID NO: 5883228 - DNA, 25 bp, Homo sapien
cttcgagtgtccaggcgctgggaag

SEQ ID NO: 5883229 - DNA, 25 bp, Homo sapien
ccccatgcagcgttctacgcggcag

SEQ ID NO: 5883230 - DNA, 25 bp, Homo sapien
cccagaccctcggaacctgacgaaa

SEQ ID NO: 5883231 - DNA, 25 bp, Homo sapien
actttgacaagttcttcacgcgggc

SEQ ID NO: 5883232 - DNA, 25 bp, Homo sapien
cagaccccgcccgtgtggccgcagc

SEQ ID NO: 5883233 - DNA, 25 bp, Homo sapien
cgagcgcaggggctctgatgagctc

SEQ ID NO: 5883234 - DNA, 25 bp, Homo sapien
ctttggagttctgctgtatgagatg

SEQ ID NO: 5883235 - DNA, 25 bp, Homo sapien
ggggccatgtcctttggcgtctcgg

SEQ ID NO: 5883236 - DNA, 25 bp, Homo sapien
gagcgccgcgggcgcctgcagctgg

SEQ ID NO: 5883237 - DNA, 25 bp, Homo sapien
gacttcgtgcacccggatgcccgca

SEQ ID NO: 5883238 - DNA, 25 bp, Homo sapien
cttgtaactaccccctggaattgta

SEQ ID NO: 5883239 - DNA, 25 bp, Homo sapien
ggtatcggaaagcagggcctgcaat

SEQ ID NO: 5883240 - DNA, 25 bp, Homo sapien
gccatcaagatcttgaaaaaggacg

SEQ ID NO: 5883241 - DNA, 25 bp, Homo sapien
ccgtggatggctggtacaagttact

SEQ ID NO: 5883242 - DNA, 25 bp, Homo sapien
ggctggtacaagttactgaaccagg

SEQ ID NO: 5883243 - DNA, 25 bp, Homo sapien
gggaagccgtggccatctgcaaggg

SEQ ID NO: 5883244 - DNA, 25 bp, Homo sapien
gttttgggaaggtgatgctggccga

SEQ ID NO: 5883245 - DNA, 25 bp, Homo sapien
tgctcctgctgcgagatgaacgtgc

SEQ ID NO: 5883246 - DNA, 25 bp, Homo sapien
ccttctgcagccactgcaccgactt

SEQ ID NO: 5883247 - DNA, 25 bp, Homo sapien
tacaagttactgaaccaggaggagg

SEQ ID NO: 5883248 - DNA, 25 bp, Homo sapien
gcgtggaggtgtgggactgggaccg

SEQ ID NO: 5883249 - DNA, 25 bp, Homo sapien
cctcctttcagaccccgcccgtgtg

SEQ ID NO: 5883250 - DNA, 25 bp, Homo sapien
ggagccccatgcagcgttctacgcg

SEQ ID NO: 5883251 - DNA, 25 bp, Homo sapien
gagcgggtgcggatgggcccctctt

SEQ ID NO: 5883252 - DNA, 25 bp, Homo sapien
cccggactacatagccccggagatc

SEQ ID NO: 5883253 - DNA, 25 bp, Homo sapien
ctttttccgctggattgactgggag

SEQ ID NO: 5883254 - DNA, 25 bp, Homo sapien
ttacaatgtgccggtggccgatgct

SEQ ID NO: 5883255 - DNA, 25 bp, Homo sapien
agtccaggacgcctgcacatctccg

SEQ ID NO: 5883256 - DNA, 25 bp, Homo sapien
tccctatgtgaaactgaagctcatc

SEQ ID NO: 5883257 - DNA, 25 bp, Homo sapien
ttctgcagccactgcaccgacttca

SEQ ID NO: 5883258 - DNA, 25 bp, Homo sapien
tgtatgagatgttggcaggacagcc

SEQ ID NO: 5883259 - DNA, 25 bp, Homo sapien
ctctgatgagctctacgccatcaag

SEQ ID NO: 5883260 - DNA, 25 bp, Homo sapien
agacccgaacggtgaaagccacgct

SEQ ID NO: 5883261 - DNA, 25 bp, Homo sapien
cttcaagcagcccaccttctgcagc

SEQ ID NO: 5883262 - DNA, 25 bp, Homo sapien
acgtgtgctggcgctggggggccgg

SEQ ID NO: 5883263 - DNA, 25 bp, Homo sapien
atctacagggacctgaagctggaca

SEQ ID NO: 5883264 - DNA, 25 bp, Homo sapien
gaacctgacgaaacagaagacccga

SEQ ID NO: 5883265 - DNA, 25 bp, Homo sapien
acgatgtggactgcacgctggtgga

SEQ ID NO: 5883266 - DNA, 25 bp, Homo sapien
ccagaagtttgaggcttgtaactac

SEQ ID NO: 5883267 - DNA, 25 bp, Homo sapien
gcgagatgaacgtgcaccggcgctg

SEQ ID NO: 5883268 - DNA, 25 bp, Homo sapien
cctcacccagctccactccaccttc

SEQ ID NO: 5883269 - DNA, 25 bp, Homo sapien
atgcccgcagccccaccagcccagt

SEQ ID NO: 5883270 - DNA, 25 bp, Homo sapien
gtgtggccgcagcggcgagaacttt

SEQ ID NO: 5883271 - DNA, 25 bp, Homo sapien
gagtgtccaggcgctgggaagggcc

SEQ ID NO: 5883272 - DNA, 25 bp, Homo sapien
gcacatctccgacttcagcttcctc

SEQ ID NO: 5883273 - DNA, 25 bp, Homo sapien
ggaaagcagggcctgcaatgtcaag

SEQ ID NO: 5883274 - DNA, 25 bp, Homo sapien
cgacgatgtggactgcacgctggtg

SEQ ID NO: 5883275 - DNA, 25 bp, Homo sapien
tccacgtaactgttggcgaggcccg

SEQ ID NO: 5883276 - DNA, 25 bp, Homo sapien
ggttcatcgacgatgccacgaattt

SEQ ID NO: 5883277 - DNA, 25 bp, Homo sapien
ccccgcccgtgtggccgcagcggcg

SEQ ID NO: 5883278 - DNA, 25 bp, Homo sapien
tggagatccgggctcccacagcaga

SEQ ID NO: 5883279 - DNA, 25 bp, Homo sapien
tggccgagcgcaggggctctgatga

SEQ ID NO: 5883280 - DNA, 25 bp, Homo sapien
gaaaaaggacgtgatcgtccaggac

SEQ ID NO: 5883281 - DNA, 25 bp, Homo sapien
ggagaacgtcttccccgggacgaca

SEQ ID NO: 5883282 - DNA, 25 bp, Homo sapien
aggcgctgggaagggcccccagacg

SEQ ID NO: 5883283 - DNA, 25 bp, Homo sapien
tccaggacgcctgcacatctccgac

SEQ ID NO: 5883284 - DNA, 25 bp, Homo sapien
tcatcccagaccctcggaacctgac

SEQ ID NO: 5883285 - DNA, 25 bp, Homo sapien
ggtctgggccccggcgtaggcgatt

SEQ ID NO: 5883286 - DNA, 25 bp, Homo sapien
gcctgcaatgtcaagtctgcagctt

SEQ ID NO: 5883287 - DNA, 25 bp, Homo sapien
gtcctttggcgtctcggagctgctc

SEQ ID NO: 5883288 - DNA, 25 bp, Homo sapien
ctcccacagcagatgagatccacgt

SEQ ID NO: 5883289 - DNA, 25 bp, Homo sapien
ctgcatagctacagcagccccacct

SEQ ID NO: 5883290 - DNA, 25 bp, Homo sapien
aggacagcctcccttcgatggggag

SEQ ID NO: 5883291 - DNA, 25 bp, Homo sapien
gcacgctggtggagaaacgtgtgct

SEQ ID NO: 5883292 - DNA, 25 bp, Homo sapien
tggctccctcctctacgggcttgtg

SEQ ID NO: 5883293 - DNA, 25 bp, Homo sapien
acggtgaaagccacgctaaaccctg

SEQ ID NO: 5883294 - DNA, 25 bp, Homo sapien
gggcttcacctacgtgaaccccgac

SEQ ID NO: 5883295 - DNA, 25 bp, Homo sapien
gaacaaactgtcacctaccccaagt

SEQ ID NO: 5883296 - DNA, 25 bp, Homo sapien
tgagctctacgccatcaagatcttg

SEQ ID NO: 5883297 - DNA, 25 bp, Homo sapien
ccgaacggtgaaagccacgctaaac

SEQ ID NO: 5883298 - DNA, 25 bp, Homo sapien
cctatgggaagtctgtcgattggtg

SEQ ID NO: 5883299 - DNA, 25 bp, Homo sapien
ccaggacgacgatgtggactgcacg

SEQ ID NO: 5883300 - DNA, 25 bp, Homo sapien
ccacttcctcacccagctccactcc

SEQ ID NO: 5883301 - DNA, 25 bp, Homo sapien
tttccagggcttcacctacgtgaac

SEQ ID NO: 5883302 - DNA, 25 bp, Homo sapien
actaccccctggaattgtatgagcg

SEQ ID NO: 5883303 - DNA, 25 bp, Homo sapien
gggacgacaacccgcaccttctgcg

SEQ ID NO: 5883304 - DNA, 25 bp, Homo sapien
tatttcgtgatggagtacgtcaccg

SEQ ID NO: 5883305 - DNA, 25 bp, Homo sapien
ttcaccgctcgcttcttcaagcagc

SEQ ID NO: 5883306 - DNA, 25 bp, Homo sapien
ctttgtgttcaacctgaagccaggg

SEQ ID NO: 5883307 - DNA, 25 bp, Homo sapien
acgtgatcgtccaggacgacgatgt

SEQ ID NO: 5883308 - DNA, 25 bp, Homo sapien
ccatccgtgcacatggctttttccg

SEQ ID NO: 5883309 - DNA, 25 bp, Homo sapien
cctcctctacgggcttgtgcaccag

SEQ ID NO: 5883310 - DNA, 25 bp, Homo sapien
ctccctgtgcggtgtggaccacacc

SEQ ID NO: 5883311 - DNA, 25 bp, Homo sapien
aatgagacctttgtgttcaacctga

SEQ ID NO: 5883312 - DNA, 25 bp, Homo sapien
atggctggtacaagttactgaacca

SEQ ID NO: 5883313 - DNA, 25 bp, Homo sapien
ccggaacaaacacaagttccgcctg

SEQ ID NO: 5883314 - DNA, 25 bp, Homo sapien
cctgcagctggagatccgggctccc

SEQ ID NO: 5883315 - DNA, 25 bp, Homo sapien
ccgggggagacttgatgtaccacat

SEQ ID NO: 5883316 - DNA, 25 bp, Homo sapien
ctctacgggcttgtgcaccagggca

SEQ ID NO: 5883317 - DNA, 25 bp, Homo sapien
ggcgagtccaggacgcctgcacatc

SEQ ID NO: 5883318 - DNA, 25 bp, Homo sapien
ggctggaacgattggagatcccgcc

SEQ ID NO: 5883319 - DNA, 25 bp, Homo sapien
ccccaccagcccagtgcctgtgccc

SEQ ID NO: 5883320 - DNA, 25 bp, Homo sapien
gcccagtgcctgtgcccgtcatgta

SEQ ID NO: 5883321 - DNA, 25 bp, Homo sapien
atagccccggagatcattgcctacc

SEQ ID NO: 5883322 - DNA, 25 bp, Homo sapien
aattcctatggaccccaacggtctc

SEQ ID NO: 5883323 - DNA, 25 bp, Homo sapien
agaccgcctagtcctggccagcatc

SEQ ID NO: 5883324 - DNA, 25 bp, Homo sapien
tcgacgatgccacgaatttgtgacc

SEQ ID NO: 5883325 - DNA, 25 bp, Homo sapien
ggagatcattgcctaccagccctat

SEQ ID NO: 5883326 - DNA, 25 bp, Homo sapien
ctaccagccctatgggaagtctgtc

SEQ ID NO: 5883327 - DNA, 25 bp, Homo sapien
tgcaccgacttcatctggggtatcg

SEQ ID NO: 5883328 - DNA, 25 bp, Homo sapien
ctttgtggttcatcgacgatgccac

SEQ ID NO: 5883329 - DNA, 25 bp, Homo sapien
gtggccgcagcggcgagaactttga

SEQ ID NO: 5883330 - DNA, 25 bp, Homo sapien
gccacaagttcaccgctcgcttctt

SEQ ID NO: 5883331 - DNA, 25 bp, Homo sapien
agctttgtggttcatcgacgatgcc

SEQ ID NO: 5883332 - DNA, 25 bp, Homo sapien
gaccccgcccgtgtggccgcagcgg

SEQ ID NO: 5883333 - DNA, 25 bp, Homo sapien
gtcaccgggggagacttgatgtacc

SEQ ID NO: 5883334 - DNA, 25 bp, Homo sapien
ggcgaggcccgtaacctaattccta

SEQ ID NO: 5883335 - DNA, 25 bp, Homo sapien
aactgcagcctcctccagaagtttg

SEQ ID NO: 5883336 - DNA, 25 bp, Homo sapien
cctacgtgaaccccgacttcgtgca

SEQ ID NO: 5883337 - DNA, 25 bp, Homo sapien
ggcagttttgggaaggtgatgctgg

SEQ ID NO: 5883338 - DNA, 25 bp, Homo sapien
ccgacttcagcttcctcatggttct

SEQ ID NO: 5883339 - DNA, 25 bp, Homo sapien
gggcaagtttaaggagccccatgca

SEQ ID NO: 5883340 - DNA, 25 bp, Homo sapien
gacgaggaggagctgtttcaggcca

SEQ ID NO: 5883341 - DNA, 25 bp, Homo sapien
tgccggtggccgatgctgacaactg

SEQ ID NO: 5883342 - DNA, 25 bp, Homo sapien
tgtgcggtgtggaccacaccgagcg

SEQ ID NO: 5883343 - DNA, 25 bp, Homo sapien
gtggccatctgcaaggggttcctga

SEQ ID NO: 5883344 - DNA, 25 bp, Homo sapien
aggaggagggcgagtattacaatgt

SEQ ID NO: 5883345 - DNA, 25 bp, Homo sapien
ttcctcacccagctccactccacct

SEQ ID NO: 5883346 - DNA, 25 bp, Homo sapien
ccgtgtggccgcagcggcgagaact

SEQ ID NO: 5883347 - DNA, 25 bp, Homo sapien
agacctttgtgttcaacctgaagcc

SEQ ID NO: 5883348 - DNA, 25 bp, Homo sapien
cagaccctcggaacctgacgaaaca

SEQ ID NO: 5883349 - DNA, 25 bp, Homo sapien
caccggcgctgtgtgcgtagcgtgc

SEQ ID NO: 5883350 - DNA, 25 bp, Homo sapien
cgaatttgtgaccttcgagtgtcca

SEQ ID NO: 5883351 - DNA, 25 bp, Homo sapien
cgttctacgcggcagaaatcgctat

SEQ ID NO: 5883352 - DNA, 25 bp, Homo sapien
tggagatcccgcctcctttcagacc

SEQ ID NO: 5883353 - DNA, 25 bp, Homo sapien
ttaaggagccccatgcagcgttcta

SEQ ID NO: 5883354 - DNA, 25 bp, Homo sapien
tgctcaaggcgcccgtggatggctg

SEQ ID NO: 5883355 - DNA, 25 bp, Homo sapien
ggagcgccggctcagcgtggaggtg

SEQ ID NO: 5883356 - DNA, 25 bp, Homo sapien
cgagtattacaatgtgccggtggcc

SEQ ID NO: 5883357 - DNA, 25 bp, Homo sapien
ggctcagcgtggaggtgtgggactg

SEQ ID NO: 5883358 - DNA, 25 bp, Homo sapien
gtcttccccgggacgacaacccgca

SEQ ID NO: 5883359 - DNA, 25 bp, Homo sapien
ggggaggacgaggaggagctgtttc

SEQ ID NO: 5883360 - DNA, 25 bp, Homo sapien
gcttcacctacgtgaaccccgactt

SEQ ID NO: 5883361 - DNA, 25 bp, Homo sapien
tcctctacgggcttgtgcaccaggg

SEQ ID NO: 5883362 - DNA, 25 bp, Homo sapien
gcccctgttttgcagaaagggggct

SEQ ID NO: 5883363 - DNA, 25 bp, Homo sapien
tttggcatgtgtaaggagaacgtct

SEQ ID NO: 5883364 - DNA, 25 bp, Homo sapien
agccacgctaaaccctgtgtggaat

SEQ ID NO: 5883365 - DNA, 25 bp, Homo sapien
gcatagctacagcagccccaccttc

SEQ ID NO: 5883366 - DNA, 25 bp, Homo sapien
cacaagttcaccgctcgcttcttca

SEQ ID NO: 5883367 - DNA, 25 bp, Homo sapien
gacttcagcttcctcatggttctag

SEQ ID NO: 5883368 - DNA, 25 bp, Homo sapien
gtgtgggactgggaccggacctccc

SEQ ID NO: 5883369 - DNA, 25 bp, Homo sapien
gccgagcgcaggggctctgatgagc

SEQ ID NO: 5883370 - DNA, 25 bp, Homo sapien
catcaagatcttgaaaaaggacgtg

SEQ ID NO: 5883371 - DNA, 25 bp, Homo sapien
gcccgcagccccaccagcccagtgc

SEQ ID NO: 5883372 - DNA, 25 bp, Homo sapien
gtacgtcaccgggggagacttgatg

SEQ ID NO: 5883373 - DNA, 25 bp, Homo sapien
caagttccgcctgcatagctacagc

SEQ ID NO: 5883374 - DNA, 25 bp, Homo sapien
tcacccagctccactccaccttcca

SEQ ID NO: 5883375 - DNA, 25 bp, Homo sapien
cagcgtggaggtgtgggactgggac

SEQ ID NO: 5883376 - DNA, 25 bp, Homo sapien
aagctcatcccagaccctcggaacc

SEQ ID NO: 5883377 - DNA, 25 bp, Homo sapien
ccccggagatcattgcctaccagcc

SEQ ID NO: 5883378 - DNA, 25 bp, Homo sapien
ggaggacgaggaggagctgtttcag

SEQ ID NO: 5883379 - DNA, 25 bp, Homo sapien
atcgaccaggccgatttccagggct

SEQ ID NO: 5883380 - DNA, 25 bp, Homo sapien
ctcctgctgcgagatgaacgtgcac

SEQ ID NO: 5883381 - DNA, 25 bp, Homo sapien
ttcttccttcacaatcagggcatca

SEQ ID NO: 5883382 - DNA, 25 bp, Homo sapien
gcgggaccccggactacatagcccc

SEQ ID NO: 5883383 - DNA, 25 bp, Homo sapien
cccaccttctgcagccactgcaccg

SEQ ID NO: 5883384 - DNA, 25 bp, Homo sapien
gctgacccctccagaccgcctagtc

SEQ ID NO: 5883385 - DNA, 25 bp, Homo sapien
ctgcagctttgtggttcatcgacga

SEQ ID NO: 5883386 - DNA, 25 bp, Homo sapien
ggggaacctaccatccgtgcacatg

SEQ ID NO: 5883387 - DNA, 25 bp, Homo sapien
tcccgggaagccgtggccatctgca

SEQ ID NO: 5883388 - DNA, 25 bp, Homo sapien
taaaccctgtgtggaatgagacctt

SEQ ID NO: 5883389 - DNA, 25 bp, Homo sapien
agcgcctgggctcagggcctgatgg

SEQ ID NO: 5883390 - DNA, 25 bp, Homo sapien
gccgatgctgacaactgcagcctcc

SEQ ID NO: 5883391 - DNA, 25 bp, Homo sapien
aaggtggtccacgaagtcaagagcc

SEQ ID NO: 5883392 - DNA, 25 bp, Homo sapien
taccatccgtgcacatggctttttc

SEQ ID NO: 5883393 - DNA, 25 bp, Homo sapien
gtggtcctttggagttctgctgtat

SEQ ID NO: 5883394 - DNA, 25 bp, Homo sapien
gcagcccaccttctgcagccactgc

SEQ ID NO: 5883395 - DNA, 25 bp, Homo sapien
catcatctacagggacctgaagctg

SEQ ID NO: 5883396 - DNA, 25 bp, Homo sapien
gaacggtgaaagccacgctaaaccc

SEQ ID NO: 5883397 - DNA, 25 bp, Homo sapien
ggcagaaatcgctatcggcctcttc

SEQ ID NO: 5883398 - DNA, 25 bp, Homo sapien
accgaccccaagcgctgcttcttcg

SEQ ID NO: 5883399 - DNA, 25 bp, Homo sapien
tgggccccggcgtaggcgattcaga

SEQ ID NO: 5883400 - DNA, 25 bp, Homo sapien
ctgcgggaccccggactacatagcc

SEQ ID NO: 5883401 - DNA, 25 bp, Homo sapien
agaaggtggtccacgaagtcaagag

SEQ ID NO: 5883402 - DNA, 25 bp, Homo sapien
gccctatgggaagtctgtcgattgg

SEQ ID NO: 5883403 - DNA, 25 bp, Homo sapien
tgtgaaactgaagctcatcccagac

SEQ ID NO: 5883404 - DNA, 25 bp, Homo sapien
tatgggaagtctgtcgattggtggt

SEQ ID NO: 5883405 - DNA, 25 bp, Homo sapien
agctccactccaccttccagacccc

SEQ ID NO: 5883406 - DNA, 25 bp, Homo sapien
ggatgcccgcagccccaccagccca

SEQ ID NO: 5883407 - DNA, 25 bp, Homo sapien
ccccacttcctcacccagctccact

SEQ ID NO: 5883408 - DNA, 25 bp, Homo sapien
tgtatttcgtgatggagtacgtcac

SEQ ID NO: 5883409 - DNA, 25 bp, Homo sapien
gctggagatccgggctcccacagca

SEQ ID NO: 5883410 - DNA, 25 bp, Homo sapien
acatagccccggagatcattgccta

SEQ ID NO: 5883411 - DNA, 25 bp, Homo sapien
ggacaatgtgatgctggatgctgag

SEQ ID NO: 5883412 - DNA, 25 bp, Homo sapien
aggcagaaggtggtccacgaagtca

SEQ ID NO: 5883413 - DNA, 25 bp, Homo sapien
tccttaaacttgcccagctgttgaa

SEQ ID NO: 5883414 - DNA, 25 bp, Homo sapien
ttgtaccagccatccacgggcgcct

SEQ ID NO: 5883415 - DNA, 25 bp, Homo sapien
tggggccggccgccaggaccccggc

SEQ ID NO: 5883416 - DNA, 25 bp, Homo sapien
cttcagtttcacatagggatcagag

SEQ ID NO: 5883417 - DNA, 25 bp, Homo sapien
gagctcatcagagcccctgcgctcg

SEQ ID NO: 5883418 - DNA, 25 bp, Homo sapien
ggccagcatcaccttcccaaaactg

SEQ ID NO: 5883419 - DNA, 25 bp, Homo sapien
tggtccacaccgcacagggagggca

SEQ ID NO: 5883420 - DNA, 25 bp, Homo sapien
cggatggtaggttccccatcaggcc

SEQ ID NO: 5883421 - DNA, 25 bp, Homo sapien
accccttgcagatggccacggcttc

SEQ ID NO: 5883422 - DNA, 25 bp, Homo sapien
agtggctgcagaaggtgggctgctt

SEQ ID NO: 5883423 - DNA, 25 bp, Homo sapien
tgctggccaggactaggcggtctgg

SEQ ID NO: 5883424 - DNA, 25 bp, Homo sapien
acttgtggctcttgacttcgtggac

SEQ ID NO: 5883425 - DNA, 25 bp, Homo sapien
gagacgccaaaggacatggccccca

SEQ ID NO: 5883426 - DNA, 25 bp, Homo sapien
gcacattgtaatactcgccctcctc

SEQ ID NO: 5883427 - DNA, 25 bp, Homo sapien
attcgtggcatcgtcgatgaaccac

SEQ ID NO: 5883428 - DNA, 25 bp, Homo sapien
ccatgaggaagctgaagtcggagat

SEQ ID NO: 5883429 - DNA, 25 bp, Homo sapien
ggtcagcgctggcgccgcccgcgtg

SEQ ID NO: 5883430 - DNA, 25 bp, Homo sapien
attgtgaaggaagaagaggccgata

SEQ ID NO: 5883431 - DNA, 25 bp, Homo sapien
gcacgttcatctcgcagcaggagca

SEQ ID NO: 5883432 - DNA, 25 bp, Homo sapien
tgcgggcatccgggtgcacgaagtc

SEQ ID NO: 5883433 - DNA, 25 bp, Homo sapien
catgccctggtgcacaagcccgtag

SEQ ID NO: 5883434 - DNA, 25 bp, Homo sapien
ctccaatcgttccagccgctcccag

SEQ ID NO: 5883435 - DNA, 25 bp, Homo sapien
cgccaaaggacatggcccccatgaa

SEQ ID NO: 5883436 - DNA, 25 bp, Homo sapien
gtgggctgcttgaagaagcgagcgg

SEQ ID NO: 5883437 - DNA, 25 bp, Homo sapien
ggggcccatccgcacccgctcatac

SEQ ID NO: 5883438 - DNA, 25 bp, Homo sapien
ggaaagcgacttggggtaggtgaca

SEQ ID NO: 5883439 - DNA, 25 bp, Homo sapien
aagtcggagatgtgcaggcgtcctg

SEQ ID NO: 5883440 - DNA, 25 bp, Homo sapien
catcaccttcccaaaactgcctttt

SEQ ID NO: 5883441 - DNA, 25 bp, Homo sapien
attgtccagcttcaggtccctgtag

SEQ ID NO: 5883442 - DNA, 25 bp, Homo sapien
ccagcatcacattgtccagcttcag

SEQ ID NO: 5883443 - DNA, 25 bp, Homo sapien
tgcttgaagaagcgagcggtgaact

SEQ ID NO: 5883444 - DNA, 25 bp, Homo sapien
gcttggggtcggtgggactagggga

SEQ ID NO: 5883445 - DNA, 25 bp, Homo sapien
gcggggtctgaaaggaggcgggatc

SEQ ID NO: 5883446 - DNA, 25 bp, Homo sapien
agttacgtggatctcatctgctgtg

SEQ ID NO: 5883447 - DNA, 25 bp, Homo sapien
acattgtccagcttcaggtccctgt

SEQ ID NO: 5883448 - DNA, 25 bp, Homo sapien
tctgtttcgtcaggttccgagggtc

SEQ ID NO: 5883449 - DNA, 25 bp, Homo sapien
ggatcagagagaccgttggggtcca

SEQ ID NO: 5883450 - DNA, 25 bp, Homo sapien
catctgctgtgggagcccggatctc

SEQ ID NO: 5883451 - DNA, 25 bp, Homo sapien
acaggcactgggctggtggggctgc

SEQ ID NO: 5883452 - DNA, 25 bp, Homo sapien
acttgtaccagccatccacgggcgc

SEQ ID NO: 5883453 - DNA, 25 bp, Homo sapien
tcggccagcatcaccttcccaaaac

SEQ ID NO: 5883454 - DNA, 25 bp, Homo sapien
gtccacatcgtcgtcctggacgatc

SEQ ID NO: 5883455 - DNA, 25 bp, Homo sapien
tccccatcaggccctgagcccaggc

SEQ ID NO: 5883456 - DNA, 25 bp, Homo sapien
cccatccgcacccgctcatacaatt

SEQ ID NO: 5883457 - DNA, 25 bp, Homo sapien
gctttccgataccccagatgaagtc

SEQ ID NO: 5883458 - DNA, 25 bp, Homo sapien
ggggtctgaaaggaggcgggatctc

SEQ ID NO: 5883459 - DNA, 25 bp, Homo sapien
tcctccccatcgaagggaggctgtc

SEQ ID NO: 5883460 - DNA, 25 bp, Homo sapien
ggtccggtcccagtcccacacctcc

SEQ ID NO: 5883461 - DNA, 25 bp, Homo sapien
accgcacagggagggcacgctacgc

SEQ ID NO: 5883462 - DNA, 25 bp, Homo sapien
gagagaccgttggggtccataggaa

SEQ ID NO: 5883463 - DNA, 25 bp, Homo sapien
tgacttcgtggaccaccttctgcct

SEQ ID NO: 5883464 - DNA, 25 bp, Homo sapien
gctcggccagcatcaccttcccaaa

SEQ ID NO: 5883465 - DNA, 25 bp, Homo sapien
aagaagcagcgcttggggtcggtgg

SEQ ID NO: 5883466 - DNA, 25 bp, Homo sapien
aggctgcagttgtcagcatcggcca

SEQ ID NO: 5883467 - DNA, 25 bp, Homo sapien
tgaagaagcgagcggtgaacttgtg

SEQ ID NO: 5883468 - DNA, 25 bp, Homo sapien
tcatcagagcccctgcgctcggcca

SEQ ID NO: 5883469 - DNA, 25 bp, Homo sapien
atgtgtccctcagcatccagcatca

SEQ ID NO: 5883470 - DNA, 25 bp, Homo sapien
cagcaggagcatttcatgccctggt

SEQ ID NO: 5883471 - DNA, 25 bp, Homo sapien
ggctatgtagtccggggtcccgcag

SEQ ID NO: 5883472 - DNA, 25 bp, Homo sapien
aatcgcctacgccggggcccagacc

SEQ ID NO: 5883473 - DNA, 25 bp, Homo sapien
ggggtctggaaggtggagtggagct

SEQ ID NO: 5883474 - DNA, 25 bp, Homo sapien
gaatgtggtacatcaagtctccccc

SEQ ID NO: 5883475 - DNA, 25 bp, Homo sapien
atccagcggaaaaagccatgtgcac

SEQ ID NO: 5883476 - DNA, 25 bp, Homo sapien
ctgcgctcggccagcatcaccttcc

SEQ ID NO: 5883477 - DNA, 25 bp, Homo sapien
tgatcttgatgtgtccctcagcatc

SEQ ID NO: 5883478 - DNA, 25 bp, Homo sapien
gtagttacaagcctcaaacttctgg

SEQ ID NO: 5883479 - DNA, 25 bp, Homo sapien
gtgtccctcagcatccagcatcaca

SEQ ID NO: 5883480 - DNA, 25 bp, Homo sapien
ccctgggtgcttggtcaggaacccc

SEQ ID NO: 5883481 - DNA, 25 bp, Homo sapien
cttttcctagaaccatgaggaagct

SEQ ID NO: 5883482 - DNA, 25 bp, Homo sapien
ccagcgcctggacactcgaaggtca

SEQ ID NO: 5883483 - DNA, 25 bp, Homo sapien
tcaggttgaacacaaaggtctcatt

SEQ ID NO: 5883484 - DNA, 25 bp, Homo sapien
gaaatacaggcggtccggggtctgg

SEQ ID NO: 5883485 - DNA, 25 bp, Homo sapien
tgcagaaggtgggctgcttgaagaa

SEQ ID NO: 5883486 - DNA, 25 bp, Homo sapien
tgcacaagcccgtagaggagggagc

SEQ ID NO: 5883487 - DNA, 25 bp, Homo sapien
ctagaaccatgaggaagctgaagtc

SEQ ID NO: 5883488 - DNA, 25 bp, Homo sapien
ctggtaggcaatgatctccggggct

SEQ ID NO: 5883489 - DNA, 25 bp, Homo sapien
gggctccttaaacttgcccagctgt

SEQ ID NO: 5883490 - DNA, 25 bp, Homo sapien
taacttgtaccagccatccacgggc

SEQ ID NO: 5883491 - DNA, 25 bp, Homo sapien
ccctgctttccgataccccagatga

SEQ ID NO: 5883492 - DNA, 25 bp, Homo sapien
tcgccaacagttacgtggatctcat

SEQ ID NO: 5883493 - DNA, 25 bp, Homo sapien
ccaatcgacagacttcccatagggc

SEQ ID NO: 5883494 - DNA, 25 bp, Homo sapien
atttctgccgcgtagaacgctgcat

SEQ ID NO: 5883495 - DNA, 25 bp, Homo sapien
ttttcaagatcttgatggcgtagag

SEQ ID NO: 5883496 - DNA, 25 bp, Homo sapien
atcggcctggtcgatgctggccagg

SEQ ID NO: 5883497 - DNA, 25 bp, Homo sapien
gtcggagatgtgcaggcgtcctgga

SEQ ID NO: 5883498 - DNA, 25 bp, Homo sapien
tccggtcccagtcccacacctccac

SEQ ID NO: 5883499 - DNA, 25 bp, Homo sapien
cctggttcagtaacttgtaccagcc

SEQ ID NO: 5883500 - DNA, 25 bp, Homo sapien
ttacgtggatctcatctgctgtggg

SEQ ID NO: 5883501 - DNA, 25 bp, Homo sapien
tcgacagacttcccatagggctggt

SEQ ID NO: 5883502 - DNA, 25 bp, Homo sapien
gcgcttccctgggtgcttggtcagg

SEQ ID NO: 5883503 - DNA, 25 bp, Homo sapien
ggccaggactaggcggtctggaggg

SEQ ID NO: 5883504 - DNA, 25 bp, Homo sapien
gcggtctggaggggtcagcgctggc

SEQ ID NO: 5883505 - DNA, 25 bp, Homo sapien
tgttccatgatggcctgaaacagct

SEQ ID NO: 5883506 - DNA, 25 bp, Homo sapien
gggcacaggcactgggctggtgggg

SEQ ID NO: 5883507 - DNA, 25 bp, Homo sapien
cagacttcccatagggctggtaggc

SEQ ID NO: 5883508 - DNA, 25 bp, Homo sapien
gcctcaaacttctggaggaggctgc

SEQ ID NO: 5883509 - DNA, 25 bp, Homo sapien
cggtgaacttgtggctcttgacttc

SEQ ID NO: 5883510 - DNA, 25 bp, Homo sapien
cagtcccacacctccacgctgagcc

SEQ ID NO: 5883511 - DNA, 25 bp, Homo sapien
aggccgatagcgatttctgccgcgt

SEQ ID NO: 5883512 - DNA, 25 bp, Homo sapien
cgtagagctcatcagagcccctgcg

SEQ ID NO: 5883513 - DNA, 25 bp, Homo sapien
tagaggagggagccacagtggtcgc

SEQ ID NO: 5883514 - DNA, 25 bp, Homo sapien
ggcgccgcccgcgtgaagaacttgt

SEQ ID NO: 5883515 - DNA, 25 bp, Homo sapien
cacgtcctttttcaagatcttgatg

SEQ ID NO: 5883516 - DNA, 25 bp, Homo sapien
gatctccggggctatgtagtccggg

SEQ ID NO: 5883517 - DNA, 25 bp, Homo sapien
tgggctggtggggctgcgggcatcc

SEQ ID NO: 5883518 - DNA, 25 bp, Homo sapien
cctcgccaacagttacgtggatctc

SEQ ID NO: 5883519 - DNA, 25 bp, Homo sapien
acatcgtcgtcctggacgatcacgt

SEQ ID NO: 5883520 - DNA, 25 bp, Homo sapien
ccccatcgaagggaggctgtcctgc

SEQ ID NO: 5883521 - DNA, 25 bp, Homo sapien
cacctccacgctgagccggcgctcc

SEQ ID NO: 5883522 - DNA, 25 bp, Homo sapien
cgccgcccgcgtgaagaacttgtca

SEQ ID NO: 5883523 - DNA, 25 bp, Homo sapien
tggaggggtcagcgctggcgccgcc

SEQ ID NO: 5883524 - DNA, 25 bp, Homo sapien
cacaaagctgcagacttgacattgc

SEQ ID NO: 5883525 - DNA, 25 bp, Homo sapien
cggaaaaagccatgtgcacggatgg

SEQ ID NO: 5883526 - DNA, 25 bp, Homo sapien
tcacgtaggtgaagccctggaaatc

SEQ ID NO: 5883527 - DNA, 25 bp, Homo sapien
ggtcaggaaccccttgcagatggcc

SEQ ID NO: 5883528 - DNA, 25 bp, Homo sapien
agtttgttccatgatggcctgaaac

SEQ ID NO: 5883529 - DNA, 25 bp, Homo sapien
ctcaaacttctggaggaggctgcag

SEQ ID NO: 5883530 - DNA, 25 bp, Homo sapien
gcctggtcgatgctggccaggacta

SEQ ID NO: 5883531 - DNA, 25 bp, Homo sapien
gtcctgccaacatctcatacagcag

SEQ ID NO: 5883532 - DNA, 25 bp, Homo sapien
tcgttccagccgctcccagtcaatc

SEQ ID NO: 5883533 - DNA, 25 bp, Homo sapien
cagcttcaggtccctgtagatgatg

SEQ ID NO: 5883534 - DNA, 25 bp, Homo sapien
tgcgggttgtcgtcccggggaagac

SEQ ID NO: 5883535 - DNA, 25 bp, Homo sapien
aagtcggtgcagtggctgcagaagg

SEQ ID NO: 5883536 - DNA, 25 bp, Homo sapien
cgcctggacactcgaaggtcacaaa

SEQ ID NO: 5883537 - DNA, 25 bp, Homo sapien
atccagcatcacattgtccagcttc

SEQ ID NO: 5883538 - DNA, 25 bp, Homo sapien
atctcgcagcaggagcatttcatgc

SEQ ID NO: 5883539 - DNA, 25 bp, Homo sapien
gacagacttcccatagggctggtag

SEQ ID NO: 5883540 - DNA, 25 bp, Homo sapien
gaacgctgcatggggctccttaaac

SEQ ID NO: 5883541 - DNA, 25 bp, Homo sapien
gcgctcggccagcatcaccttccca

SEQ ID NO: 5883542 - DNA, 25 bp, Homo sapien
tcccatagggctggtaggcaatgat

SEQ ID NO: 5883543 - DNA, 25 bp, Homo sapien
cgatgaaccacaaagctgcagactt

SEQ ID NO: 5883544 - DNA, 25 bp, Homo sapien
gtccggggtctggaaggtggagtgg

SEQ ID NO: 5883545 - DNA, 25 bp, Homo sapien
aggaggcgggatctccaatcgttcc

SEQ ID NO: 5883546 - DNA, 25 bp, Homo sapien
aatcgttccagccgctcccagtcaa

SEQ ID NO: 5883547 - DNA, 25 bp, Homo sapien
tttccgataccccagatgaagtcgg

SEQ ID NO: 5883548 - DNA, 25 bp, Homo sapien
ctgtgggagcccggatctccagctg

SEQ ID NO: 5883549 - DNA, 25 bp, Homo sapien
gaggaggctgcagttgtcagcatcg

SEQ ID NO: 5883550 - DNA, 25 bp, Homo sapien
ggcatccgggtgcacgaagtcgggg

SEQ ID NO: 5883551 - DNA, 25 bp, Homo sapien
gacatggcccccatgaagtcgttgc

SEQ ID NO: 5883552 - DNA, 25 bp, Homo sapien
ctccgagacgccaaaggacatggcc

SEQ ID NO: 5883553 - DNA, 25 bp, Homo sapien
cggcgctccacatcccctggcttca

SEQ ID NO: 5883554 - DNA, 25 bp, Homo sapien
tccgtctgggggcccttcccagcgc

SEQ ID NO: 5883555 - DNA, 25 bp, Homo sapien
gggaagacgttctccttacacatgc

SEQ ID NO: 5883556 - DNA, 25 bp, Homo sapien
cacgggcgccttgagcagctccgag

SEQ ID NO: 5883557 - DNA, 25 bp, Homo sapien
cccagtcaatccagcggaaaaagcc

SEQ ID NO: 5883558 - DNA, 25 bp, Homo sapien
tttgttccatgatggcctgaaacag

SEQ ID NO: 5883559 - DNA, 25 bp, Homo sapien
tacacatgccaaagtcagtgatctt

SEQ ID NO: 5883560 - DNA, 25 bp, Homo sapien
tttcctagaaccatgaggaagctga

SEQ ID NO: 5883561 - DNA, 25 bp, Homo sapien
tcagtaacttgtaccagccatccac

SEQ ID NO: 5883562 - DNA, 25 bp, Homo sapien
gacttgacattgcaggccctgcttt

SEQ ID NO: 5883563 - DNA, 25 bp, Homo sapien
acgttctccttacacatgccaaagt

SEQ ID NO: 5883564 - DNA, 25 bp, Homo sapien
gcccccatgaagtcgttgcgggagg

SEQ ID NO: 5883565 - DNA, 25 bp, Homo sapien
ggtctcattccacacagggtttagc

SEQ ID NO: 5883566 - DNA, 25 bp, Homo sapien
aggcgcccgcggcgctcggtgtggt

SEQ ID NO: 5883567 - DNA, 25 bp, Homo sapien
cgtccgtctgggggcccttcccagc

SEQ ID NO: 5883568 - DNA, 25 bp, Homo sapien
acattgcaggccctgctttccgata

SEQ ID NO: 5883569 - DNA, 25 bp, Homo sapien
ctggtgcacaagcccgtagaggagg

SEQ ID NO: 5883570 - DNA, 25 bp, Homo sapien
gagggtctgggatgagcttcagttt

SEQ ID NO: 5883571 - DNA, 25 bp, Homo sapien
cctcctcctggttcagtaacttgta

SEQ ID NO: 5883572 - DNA, 25 bp, Homo sapien
ggaaatcggcctggtcgatgctggc

SEQ ID NO: 5883573 - DNA, 25 bp, Homo sapien
agcatcggccaccggcacattgtaa

SEQ ID NO: 5883574 - DNA, 25 bp, Homo sapien
cgcgtagaacgctgcatggggctcc

SEQ ID NO: 5883575 - DNA, 25 bp, Homo sapien
ggcccttcccagcgcctggacactc

SEQ ID NO: 5883576 - DNA, 25 bp, Homo sapien
cacacgtttctccaccagcgtgcag

SEQ ID NO: 5883577 - DNA, 25 bp, Homo sapien
gaaggtggggctgctgtagctatgc

SEQ ID NO: 5883578 - DNA, 25 bp, Homo sapien
cggtgcacgttcatctcgcagcagg

SEQ ID NO: 5883579 - DNA, 25 bp, Homo sapien
ctgccttttcctagaaccatgagga

SEQ ID NO: 5883580 - DNA, 25 bp, Homo sapien
cttgtcaaagttctcgccgctgcgg

SEQ ID NO: 5883581 - DNA, 25 bp, Homo sapien
acatagggatcagagagaccgttgg

SEQ ID NO: 5883582 - DNA, 25 bp, Homo sapien
gttgaacacaaaggtctcattccac

SEQ ID NO: 5883583 - DNA, 25 bp, Homo sapien
ctgagcccaggcgcttccctgggtg

SEQ ID NO: 5883584 - DNA, 25 bp, Homo sapien
gctgcagttgtcagcatcggccacc

SEQ ID NO: 5883585 - DNA, 25 bp, Homo sapien
ccatgatggcctgaaacagctcctc

SEQ ID NO: 5883586 - DNA, 25 bp, Homo sapien
gcggtccggggtctggaaggtggag

SEQ ID NO: 5883587 - DNA, 25 bp, Homo sapien
cgatagcgatttctgccgcgtagaa

SEQ ID NO: 5883588 - DNA, 25 bp, Homo sapien
aggacatggcccccatgaagtcgtt

SEQ ID NO: 5883589 - DNA, 25 bp, Homo sapien
gaggggtcagcgctggcgccgcccg

SEQ ID NO: 5883590 - DNA, 25 bp, Homo sapien
gcacaggcactgggctggtggggct

SEQ ID NO: 5883591 - DNA, 25 bp, Homo sapien
atggcgtagagctcatcagagcccc

SEQ ID NO: 5883592 - DNA, 25 bp, Homo sapien
gacttcccatagggctggtaggcaa

SEQ ID NO: 5883593 - DNA, 25 bp, Homo sapien
ccagctgcaggcgcccgcggcgctc

SEQ ID NO: 5883594 - DNA, 25 bp, Homo sapien
cggggttcacgtaggtgaagccctg

SEQ ID NO: 5883595 - DNA, 25 bp, Homo sapien
gccctgattgtgaaggaagaagagg

SEQ ID NO: 5883596 - DNA, 25 bp, Homo sapien
atacagcagaactccaaaggaccac

SEQ ID NO: 5883597 - DNA, 25 bp, Homo sapien
aggtgggctgcttgaagaagcgagc

SEQ ID NO: 5883598 - DNA, 25 bp, Homo sapien
gcccggatctccagctgcaggcgcc

SEQ ID NO: 5883599 - DNA, 25 bp, Homo sapien
gttcgggtcttctgtttcgtcaggt

SEQ ID NO: 5883600 - DNA, 25 bp, Homo sapien
agcatcacattgtccagcttcaggt

SEQ ID NO: 5883601 - DNA, 25 bp, Homo sapien
catcccctggcttcaggttgaacac

SEQ ID NO: 5883602 - DNA, 25 bp, Homo sapien
tctgaatcgcctacgccggggccca

SEQ ID NO: 5883603 - DNA, 25 bp, Homo sapien
gcagctccgagacgccaaaggacat

SEQ ID NO: 5883604 - DNA, 25 bp, Homo sapien
cagctgttgaatgtggtacatcaag

SEQ ID NO: 5883605 - DNA, 25 bp, Homo sapien
gcttggtcaggaaccccttgcagat

SEQ ID NO: 5883606 - DNA, 25 bp, Homo sapien
aacttgcccagctgttgaatgtggt

SEQ ID NO: 5883607 - DNA, 25 bp, Homo sapien
ggtccataggaattaggttacgggc

SEQ ID NO: 5883608 - DNA, 25 bp, Homo sapien
cggccacacgggcggggtctgaaag

SEQ ID NO: 5883609 - DNA, 25 bp, Homo sapien
cgatcacgtcctttttcaagatctt

SEQ ID NO: 5883610 - DNA, 25 bp, Homo sapien
aggttgaacacaaaggtctcattcc

SEQ ID NO: 5883611 - DNA, 25 bp, Homo sapien
gtggatctcatctgctgtgggagcc

SEQ ID NO: 5883612 - DNA, 25 bp, Homo sapien
gaccgttggggtccataggaattag

SEQ ID NO: 5883613 - DNA, 25 bp, Homo sapien
ttccgagggtctgggatgagcttca

SEQ ID NO: 5883614 - DNA, 25 bp, Homo sapien
gtcggtgcagtggctgcagaaggtg

SEQ ID NO: 5883615 - DNA, 25 bp, Homo sapien
ttccctgggtgcttggtcaggaacc

SEQ ID NO: 5883616 - DNA, 25 bp, Homo sapien
ggggctatgtagtccggggtcccgc

SEQ ID NO: 5883617 - DNA, 25 bp, Homo sapien
cgggaaagcgacttggggtaggtga

SEQ ID NO: 5883618 - DNA, 25 bp, Homo sapien
atgtggtacatcaagtctcccccgg

SEQ ID NO: 5883619 - DNA, 25 bp, Homo sapien
agatcttgatggcgtagagctcatc

SEQ ID NO: 5883620 - DNA, 25 bp, Homo sapien
ggctgtcctgccaacatctcataca

SEQ ID NO: 5883621 - DNA, 25 bp, Homo sapien
ggactcgccccgaagaagcagcgct

SEQ ID NO: 5883622 - DNA, 25 bp, Homo sapien
agccctggaaatcggcctggtcgat

SEQ ID NO: 5883623 - DNA, 25 bp, Homo sapien
cgctcatacaattccagggggtagt

SEQ ID NO: 5883624 - DNA, 25 bp, Homo sapien
ctcatctgctgtgggagcccggatc

SEQ ID NO: 5883625 - DNA, 25 bp, Homo sapien
tcagcatcggccaccggcacattgt

SEQ ID NO: 5883626 - DNA, 25 bp, Homo sapien
caaacttctggaggaggctgcagtt

SEQ ID NO: 5883627 - DNA, 25 bp, Homo sapien
tgtgcaggcgtcctggactcgcccc

SEQ ID NO: 5883628 - DNA, 25 bp, Homo sapien
tatgcaggcggaacttgtgtttgtt

SEQ ID NO: 5883629 - DNA, 25 bp, Homo sapien
ctcttgacttcgtggaccaccttct

SEQ ID NO: 5883630 - DNA, 25 bp, Homo sapien
attgcaggccctgctttccgatacc

SEQ ID NO: 5883631 - DNA, 25 bp, Homo sapien
tggctgcagaaggtgggctgcttga

SEQ ID NO: 5883632 - DNA, 25 bp, Homo sapien
aattaggttacgggcctcgccaaca

SEQ ID NO: 5883633 - DNA, 25 bp, Homo sapien
ttagcgtggctttcaccgttcgggt

SEQ ID NO: 5883634 - DNA, 25 bp, Homo sapien
tgcaggccctgctttccgatacccc

SEQ ID NO: 5883635 - DNA, 25 bp, Homo sapien
cgcagaaggtgcgggttgtcgtccc

SEQ ID NO: 5883636 - DNA, 25 bp, Homo sapien
gaagtggggccggccgccaggaccc

SEQ ID NO: 5883637 - DNA, 25 bp, Homo sapien
tctcattccacacagggtttagcgt

SEQ ID NO: 5883638 - DNA, 25 bp, Homo sapien
ccacagtggtcgcagaaggtggggc

SEQ ID NO: 5883639 - DNA, 25 bp, Homo sapien
ccccagcgccagcacacgtttctcc

SEQ ID NO: 5883640 - DNA, 25 bp, Homo sapien
aagaagcgagcggtgaacttgtggc

SEQ ID NO: 5883641 - DNA, 25 bp, Homo sapien
tccgggtgcacgaagtcggggttca

SEQ ID NO: 5883642 - DNA, 25 bp, Homo sapien
tgagcttcagtttcacatagggatc

SEQ ID NO: 5883643 - DNA, 25 bp, Homo sapien
cacgctgagccggcgctccacatcc

SEQ ID NO: 5883644 - DNA, 25 bp, Homo sapien
gatgagcttcagtttcacataggga

SEQ ID NO: 5883645 - DNA, 25 bp, Homo sapien
gctgtagctatgcaggcggaacttg

SEQ ID NO: 5883646 - DNA, 25 bp, Homo sapien
gccgatagcgatttctgccgcgtag

SEQ ID NO: 5883647 - DNA, 25 bp, Homo sapien
ccacaccgcacagggagggcacgct

SEQ ID NO: 5883648 - DNA, 25 bp, Homo sapien
agtccggggtcccgcagaaggtgcg

SEQ ID NO: 5883649 - DNA, 25 bp, Homo sapien
tggtaggttccccatcaggccctga

SEQ ID NO: 5883650 - DNA, 25 bp, Homo sapien
aggactaggcggtctggaggggtca

SEQ ID NO: 5883651 - DNA, 25 bp, Homo sapien
ggatctccagctgcaggcgcccgcg

SEQ ID NO: 5883652 - DNA, 25 bp, Homo sapien
atcttgatggcgtagagctcatcag

SEQ ID NO: 5883653 - DNA, 25 bp, Homo sapien
cacatgccaaagtcagtgatcttga

SEQ ID NO: 5883654 - DNA, 25 bp, Homo sapien
tcccggggaagacgttctccttaca

SEQ ID NO: 5883655 - DNA, 25 bp, Homo sapien
cacagggagggcacgctacgcacac

SEQ ID NO: 5883656 - DNA, 25 bp, Homo sapien
tccacgggcgccttgagcagctccg

SEQ ID NO: 5883657 - DNA, 25 bp, Homo sapien
caggtccctgtagatgatgccctga

SEQ ID NO: 5883658 - DNA, 25 bp, Homo sapien
gaggctgtcctgccaacatctcata

SEQ ID NO: 5883659 - DNA, 25 bp, Homo sapien
atactcgccctcctcctggttcagt

SEQ ID NO: 5883660 - DNA, 25 bp, Homo sapien
cgtagaacgctgcatggggctcctt

SEQ ID NO: 5883661 - DNA, 25 bp, Homo sapien
ggtcgatgctggccaggactaggcg

SEQ ID NO: 5883662 - DNA, 25 bp, Homo sapien
actcgccccgaagaagcagcgcttg

SEQ ID NO: 5883663 - DNA, 25 bp, Homo sapien
aacacaaaggtctcattccacacag

SEQ ID NO: 5883664 - DNA, 25 bp, Homo sapien
caggccctgctttccgataccccag

SEQ ID NO: 5883665 - DNA, 25 bp, Homo sapien
tccacatcccctggcttcaggttga

SEQ ID NO: 5883666 - DNA, 25 bp, Homo sapien
tggttcagtaacttgtaccagccat

SEQ ID NO: 5883667 - DNA, 25 bp, Homo sapien
tactccatcacgaaatacaggcggt

SEQ ID NO: 5883668 - DNA, 25 bp, Homo sapien
catccgcacccgctcatacaattcc

SEQ ID NO: 5883669 - DNA, 25 bp, Homo sapien
tgttgaatgtggtacatcaagtctc

SEQ ID NO: 5883670 - DNA, 25 bp, Homo sapien
ttgagcagctccgagacgccaaagg

SEQ ID NO: 5883671 - DNA, 25 bp, Homo sapien
tgtgaaggaagaagaggccgatagc

SEQ ID NO: 5883672 - DNA, 25 bp, Homo sapien
cggtgacgtactccatcacgaaata

SEQ ID NO: 5883673 - DNA, 25 bp, Homo sapien
tccacgctgagccggcgctccacat

SEQ ID NO: 5883674 - DNA, 25 bp, Homo sapien
tgggggcccttcccagcgcctggac

SEQ ID NO: 5883675 - DNA, 25 bp, Homo sapien
cagaaggtggggctgctgtagctat

SEQ ID NO: 5883676 - DNA, 25 bp, Homo sapien
tcgatgctggccaggactaggcggt

SEQ ID NO: 5883677 - DNA, 25 bp, Homo sapien
gtcgttgcgggaggtccggtcccag

SEQ ID NO: 5883678 - DNA, 25 bp, Homo sapien
taatactcgccctcctcctggttca

SEQ ID NO: 5883679 - DNA, 25 bp, Homo sapien
gggtttagcgtggctttcaccgttc

SEQ ID NO: 5883680 - DNA, 25 bp, Homo sapien
tgacattgcaggccctgctttccga

SEQ ID NO: 5883681 - DNA, 25 bp, Homo sapien
aggttccccatcaggccctgagccc

SEQ ID NO: 5883682 - DNA, 25 bp, Homo sapien
acttggggtaggtgacagtttgttc

SEQ ID NO: 5883683 - DNA, 25 bp, Homo sapien
atgatggcctgaaacagctcctcct

SEQ ID NO: 5883684 - DNA, 25 bp, Homo sapien
cgcacagggagggcacgctacgcac

SEQ ID NO: 5883685 - DNA, 25 bp, Homo sapien
atcacgaaatacaggcggtccgggg

SEQ ID NO: 5883686 - DNA, 25 bp, Homo sapien
cgccgctgcggccacacgggcgggg

SEQ ID NO: 5883687 - DNA, 25 bp, Homo sapien
ccacatcgtcgtcctggacgatcac

SEQ ID NO: 5883688 - DNA, 25 bp, Homo sapien
cgctgagccggcgctccacatcccc

SEQ ID NO: 5883689 - DNA, 25 bp, Homo sapien
gctgcagaaggtgggctgcttgaag

SEQ ID NO: 5883690 - DNA, 25 bp, Homo sapien
acagtggtcgcagaaggtggggctg

SEQ ID NO: 5883691 - DNA, 25 bp, Homo sapien
gttgtcagcatcggccaccggcaca

SEQ ID NO: 5883692 - DNA, 25 bp, Homo sapien
atgaggaagctgaagtcggagatgt

SEQ ID NO: 5883693 - DNA, 25 bp, Homo sapien
cccggtgacgtactccatcacgaaa

SEQ ID NO: 5883694 - DNA, 25 bp, Homo sapien
gtaggtgaagccctggaaatcggcc

SEQ ID NO: 5883695 - DNA, 25 bp, Homo sapien
tccctgtagatgatgccctgattgt

SEQ ID NO: 5883696 - DNA, 25 bp, Homo sapien
cgccagcacacgtttctccaccagc

SEQ ID NO: 5883697 - DNA, 25 bp, Homo sapien
ctgagccggcgctccacatcccctg

SEQ ID NO: 5883698 - DNA, 25 bp, Homo sapien
ttacaagcctcaaacttctggagga

SEQ ID NO: 5883699 - DNA, 25 bp, Homo sapien
accaccaatcgacagacttcccata

SEQ ID NO: 5883700 - DNA, 25 bp, Homo sapien
atgaagtcgttgcgggaggtccggt

SEQ ID NO: 5883701 - DNA, 25 bp, Homo sapien
cccccggtgacgtactccatcacga

SEQ ID NO: 5883702 - DNA, 25 bp, Homo sapien
ctcatacaattccagggggtagtta

SEQ ID NO: 5883703 - DNA, 25 bp, Homo sapien
gaagaggccgatagcgatttctgcc

SEQ ID NO: 5883704 - DNA, 25 bp, Homo sapien
gccccgaagaagcagcgcttggggt

SEQ ID NO: 5883705 - DNA, 25 bp, Homo sapien
gtaccagccatccacgggcgccttg

SEQ ID NO: 5883706 - DNA, 25 bp, Homo sapien
agtttcacatagggatcagagagac

SEQ ID NO: 5883707 - DNA, 25 bp, Homo sapien
tcctggactcgccccgaagaagcag

SEQ ID NO: 5883708 - DNA, 25 bp, Homo sapien
tgtaatactcgccctcctcctggtt

SEQ ID NO: 5883709 - DNA, 25 bp, Homo sapien
cgtcgtcctggacgatcacgtcctt

SEQ ID NO: 5883710 - DNA, 25 bp, Homo sapien
tggctttcaccgttcgggtcttctg

SEQ ID NO: 5883711 - DNA, 25 bp, Homo sapien
cagagagaccgttggggtccatagg

SEQ ID NO: 5883712 - DNA, 25 bp, Homo sapien
tcgggtcttctgtttcgtcaggttc

SEQ ID NO: 5883713 - DNA, 25 bp, Homo sapien
tagctatgcaggcggaacttgtgtt

SEQ ID NO: 5883714 - DNA, 25 bp, Homo sapien
taggggaaggggaggggatgggaga

SEQ ID NO: 5883715 - DNA, 25 bp, Homo sapien
gccgctcccagtcaatccagcggaa

SEQ ID NO: 5883716 - DNA, 25 bp, Homo sapien
tccgataccccagatgaagtcggtg

SEQ ID NO: 5883717 - DNA, 25 bp, Homo sapien
gcctacgccggggcccagaccagcc

SEQ ID NO: 5883718 - DNA, 25 bp, Homo sapien
tcacatagggatcagagagaccgtt

SEQ ID NO: 5883719 - DNA, 25 bp, Homo sapien
gagcccaggcgcttccctgggtgct

SEQ ID NO: 5883720 - DNA, 25 bp, Homo sapien
ccccccagcgccagcacacgtttct

SEQ ID NO: 5883721 - DNA, 25 bp, Homo sapien
cgtctgggggcccttcccagcgcct

SEQ ID NO: 5883722 - DNA, 25 bp, Homo sapien
cactcgaaggtcacaaattcgtggc

SEQ ID NO: 5883723 - DNA, 25 bp, Homo sapien
atctccaatcgttccagccgctccc

SEQ ID NO: 5883724 - DNA, 25 bp, Homo sapien
gtcttctgtttcgtcaggttccgag

SEQ ID NO: 5883725 - DNA, 25 bp, Homo sapien
gagcatttcatgccctggtgcacaa

SEQ ID NO: 5883726 - DNA, 25 bp, Homo sapien
tcgccccgaagaagcagcgcttggg

SEQ ID NO: 5883727 - DNA, 25 bp, Homo sapien
tcattccacacagggtttagcgtgg

SEQ ID NO: 5883728 - DNA, 25 bp, Homo sapien
caccaatcgacagacttcccatagg

SEQ ID NO: 5883729 - DNA, 25 bp, Homo sapien
acaccgcacagggagggcacgctac

SEQ ID NO: 5883730 - DNA, 25 bp, Homo sapien
tcatacagcagaactccaaaggacc

SEQ ID NO: 5883731 - DNA, 25 bp, Homo sapien
ttgtggctcttgacttcgtggacca

SEQ ID NO: 5883732 - DNA, 25 bp, Homo sapien
ttggtcaggaaccccttgcagatgg

SEQ ID NO: 5883733 - DNA, 25 bp, Homo sapien
cagcgccggtgcacgttcatctcgc

SEQ ID NO: 5883734 - DNA, 25 bp, Homo sapien
aggcactgggctggtggggctgcgg

SEQ ID NO: 5883735 - DNA, 25 bp, Homo sapien
gtgcacgttcatctcgcagcaggag

SEQ ID NO: 5883736 - DNA, 25 bp, Homo sapien
gctgcggccacacgggcggggtctg

SEQ ID NO: 5883737 - DNA, 25 bp, Homo sapien
cagtccacatcgtcgtcctggacga

SEQ ID NO: 5883738 - DNA, 25 bp, Homo sapien
cgaaggtcacaaattcgtggcatcg

SEQ ID NO: 5883739 - DNA, 25 bp, Homo sapien
cttcccagcgcctggacactcgaag

SEQ ID NO: 5883740 - DNA, 25 bp, Homo sapien
cgcagaaggtggggctgctgtagct

SEQ ID NO: 5883741 - DNA, 25 bp, Homo sapien
tttctccaccagcgtgcagtccaca

SEQ ID NO: 5883742 - DNA, 25 bp, Homo sapien
gtcggggttcacgtaggtgaagccc

SEQ ID NO: 5883743 - DNA, 25 bp, Homo sapien
gggctgcgggcatccgggtgcacga

SEQ ID NO: 5883744 - DNA, 25 bp, Homo sapien
cccgcagaaggtgcgggttgtcgtc

SEQ ID NO: 5883745 - DNA, 25 bp, Homo sapien
cttcccaaaactgccttttcctaga

SEQ ID NO: 5883746 - DNA, 25 bp, Homo sapien
ctccccatcgaagggaggctgtcct

SEQ ID NO: 5883747 - DNA, 25 bp, Homo sapien
tctggaggaggctgcagttgtcagc

SEQ ID NO: 5883748 - DNA, 25 bp, Homo sapien
tcagcgctggcgccgcccgcgtgaa

SEQ ID NO: 5883749 - DNA, 25 bp, Homo sapien
gccggtgcacgttcatctcgcagca

SEQ ID NO: 5883750 - DNA, 25 bp, Homo sapien
cagttgtcagcatcggccaccggca

SEQ ID NO: 5883751 - DNA, 25 bp, Homo sapien
ctaggcggtctggaggggtcagcgc

SEQ ID NO: 5883752 - DNA, 25 bp, Homo sapien
tctggaaggtggagtggagctgggt

SEQ ID NO: 5883753 - DNA, 25 bp, Homo sapien
aaaggacatggcccccatgaagtcg

SEQ ID NO: 5883754 - DNA, 25 bp, Homo sapien
caatgatctccggggctatgtagtc

SEQ ID NO: 5883755 - DNA, 25 bp, Homo sapien
cgtgcagtccacatcgtcgtcctgg

SEQ ID NO: 5883756 - DNA, 25 bp, Homo sapien
tccttacacatgccaaagtcagtga

SEQ ID NO: 5883757 - DNA, 25 bp, Homo sapien
gcatccagcatcacattgtccagct

SEQ ID NO: 5883758 - DNA, 25 bp, Homo sapien
atttcatgccctggtgcacaagccc

SEQ ID NO: 5883759 - DNA, 25 bp, Homo sapien
tcacattgtccagcttcaggtccct

SEQ ID NO: 5883760 - DNA, 25 bp, Homo sapien
acattgtaatactcgccctcctcct

SEQ ID NO: 5883761 - DNA, 25 bp, Homo sapien
gtttagcgtggctttcaccgttcgg

SEQ ID NO: 5883762 - DNA, 25 bp, Homo sapien
ttgaatgtggtacatcaagtctccc

SEQ ID NO: 5883763 - DNA, 25 bp, Homo sapien
ccatagggctggtaggcaatgatct

SEQ ID NO: 5883764 - DNA, 25 bp, Homo sapien
tctccttacacatgccaaagtcagt

SEQ ID NO: 5883765 - DNA, 25 bp, Homo sapien
tggggctgcgggcatccgggtgcac

SEQ ID NO: 5883766 - DNA, 25 bp, Homo sapien
agcgatttctgccgcgtagaacgct

SEQ ID NO: 5883767 - DNA, 25 bp, Homo sapien
ccggatctccagctgcaggcgcccg

SEQ ID NO: 5883768 - DNA, 25 bp, Homo sapien
gggagaggaagaggggcccatccgc

SEQ ID NO: 5883769 - DNA, 25 bp, Homo sapien
tgatgtgtccctcagcatccagcat

SEQ ID NO: 5883770 - DNA, 25 bp, Homo sapien
gggaggctgtcctgccaacatctca

SEQ ID NO: 5883771 - DNA, 25 bp, Homo sapien
tttcacatagggatcagagagaccg

SEQ ID NO: 5883772 - DNA, 25 bp, Homo sapien
gtggctcttgacttcgtggaccacc

SEQ ID NO: 5883773 - DNA, 25 bp, Homo sapien
ccatgaagtcgttgcgggaggtccg

SEQ ID NO: 5883774 - DNA, 25 bp, Homo sapien
ctccagctgcaggcgcccgcggcgc

SEQ ID NO: 5883775 - DNA, 25 bp, Homo sapien
gcccctgcgctcggccagcatcacc

SEQ ID NO: 5883776 - DNA, 25 bp, Homo sapien
agaggccgatagcgatttctgccgc

SEQ ID NO: 5883777 - DNA, 25 bp, Homo sapien
cttctgtttcgtcaggttccgaggg

SEQ ID NO: 5883778 - DNA, 25 bp, Homo sapien
tacaattccagggggtagttacaag

SEQ ID NO: 5883779 - DNA, 25 bp, Homo sapien
agttacaagcctcaaacttctggag

SEQ ID NO: 5883780 - DNA, 25 bp, Homo sapien
aaggaccaccaatcgacagacttcc

SEQ ID NO: 5883781 - DNA, 25 bp, Homo sapien
cccttcccagcgcctggacactcga

SEQ ID NO: 5883782 - DNA, 25 bp, Homo sapien
tctgaaaggaggcgggatctccaat

SEQ ID NO: 5883783 - DNA, 25 bp, Homo sapien
gagctgggtgaggaagtggggccgg

SEQ ID NO: 5883784 - DNA, 25 bp, Homo sapien
ttcaggtccctgtagatgatgccct

SEQ ID NO: 5883785 - DNA, 25 bp, Homo sapien
catacaattccagggggtagttaca

SEQ ID NO: 5883786 - DNA, 25 bp, Homo sapien
ggggcccttcccagcgcctggacac

SEQ ID NO: 5883787 - DNA, 25 bp, Homo sapien
tggccacggcttcccgggaaagcga

SEQ ID NO: 5883788 - DNA, 25 bp, Homo sapien
ctcgcagcaggagcatttcatgccc

SEQ ID NO: 5883789 - DNA, 25 bp, Homo sapien
cgcacacagcgccggtgcacgttca

SEQ ID NO: 5883790 - DNA, 25 bp, Homo sapien
ggcgtagagctcatcagagcccctg

SEQ ID NO: 5883791 - DNA, 25 bp, Homo sapien
ctgccgcgtagaacgctgcatgggg

SEQ ID NO: 5883792 - DNA, 25 bp, Homo sapien
ctgctttccgataccccagatgaag

SEQ ID NO: 5883793 - DNA, 25 bp, Homo sapien
gtcccacacctccacgctgagccgg

SEQ ID NO: 5883794 - DNA, 25 bp, Homo sapien
tgccaaagtcagtgatcttgatgtg

SEQ ID NO: 5883795 - DNA, 25 bp, Homo sapien
gctgcttgaagaagcgagcggtgaa

SEQ ID NO: 5883796 - DNA, 25 bp, Homo sapien
ccggggtctggaaggtggagtggag

SEQ ID NO: 5883797 - DNA, 25 bp, Homo sapien
tggacgatcacgtcctttttcaaga

SEQ ID NO: 5883798 - DNA, 25 bp, Homo sapien
cacatcccctggcttcaggttgaac

SEQ ID NO: 5883799 - DNA, 25 bp, Homo sapien
cgtggaccaccttctgcctcagagc

SEQ ID NO: 5883800 - DNA, 25 bp, Homo sapien
gccgcgtagaacgctgcatggggct

SEQ ID NO: 5883801 - DNA, 25 bp, Homo sapien
gtccacaccgcacagggagggcacg

SEQ ID NO: 5883802 - DNA, 25 bp, Homo sapien
gaacttgtggctcttgacttcgtgg

SEQ ID NO: 5883803 - DNA, 25 bp, Homo sapien
gaaccacaaagctgcagacttgaca

SEQ ID NO: 5883804 - DNA, 25 bp, Homo sapien
cagacttgacattgcaggccctgct

SEQ ID NO: 5883805 - DNA, 25 bp, Homo sapien
ccaggactaggcggtctggaggggt

SEQ ID NO: 5883806 - DNA, 25 bp, Homo sapien
cacagggtttagcgtggctttcacc

SEQ ID NO: 5883807 - DNA, 25 bp, Homo sapien
ctggactcgccccgaagaagcagcg

SEQ ID NO: 5883808 - DNA, 25 bp, Homo sapien
gctgttgaatgtggtacatcaagtc

SEQ ID NO: 5883809 - DNA, 25 bp, Homo sapien
aaatcggcctggtcgatgctggcca

SEQ ID NO: 5883810 - DNA, 25 bp, Homo sapien
agcgacttggggtaggtgacagttt

SEQ ID NO: 5883811 - DNA, 25 bp, Homo sapien
gggtcttctgtttcgtcaggttccg

SEQ ID NO: 5883812 - DNA, 25 bp, Homo sapien
gggatgagcttcagtttcacatagg

SEQ ID NO: 5883813 - DNA, 25 bp, Homo sapien
agctgcaggcgcccgcggcgctcgg

SEQ ID NO: 5883814 - DNA, 25 bp, Homo sapien
cttcccatagggctggtaggcaatg

SEQ ID NO: 5883815 - DNA, 25 bp, Homo sapien
cgacttggggtaggtgacagtttgt

SEQ ID NO: 5883816 - DNA, 25 bp, Homo sapien
caagcccgtagaggagggagccaca

SEQ ID NO: 5883817 - DNA, 25 bp, Homo sapien
cgggcgccttgagcagctccgagac

SEQ ID NO: 5883818 - DNA, 25 bp, Homo sapien
tgtcgtcccggggaagacgttctcc

SEQ ID NO: 5883819 - DNA, 25 bp, Homo sapien
gagccggcgctccacatcccctggc

SEQ ID NO: 5883820 - DNA, 25 bp, Homo sapien
aagctgcagacttgacattgcaggc

SEQ ID NO: 5883821 - DNA, 25 bp, Homo sapien
gatggcctgaaacagctcctcctcg

SEQ ID NO: 5883822 - DNA, 25 bp, Homo sapien
gcgtgaagaacttgtcaaagttctc

SEQ ID NO: 5883823 - DNA, 25 bp, Homo sapien
accggcacattgtaatactcgccct

SEQ ID NO: 5883824 - DNA, 25 bp, Homo sapien
ggcttcaggttgaacacaaaggtct

SEQ ID NO: 5883825 - DNA, 25 bp, Homo sapien
ctggcttcaggttgaacacaaaggt

SEQ ID NO: 5883826 - DNA, 25 bp, Homo sapien
ggtaggtgacagtttgttccatgat

SEQ ID NO: 5883827 - DNA, 25 bp, Homo sapien
tcccagcgcctggacactcgaaggt

SEQ ID NO: 5883828 - DNA, 25 bp, Homo sapien
tctccaccagcgtgcagtccacatc

SEQ ID NO: 5883829 - DNA, 25 bp, Homo sapien
tgtcagcatcggccaccggcacatt

SEQ ID NO: 5883830 - DNA, 25 bp, Homo sapien
gctacgcacacagcgccggtgcacg

SEQ ID NO: 5883831 - DNA, 25 bp, Homo sapien
cgggcatccgggtgcacgaagtcgg

SEQ ID NO: 5883832 - DNA, 25 bp, Homo sapien
ccaatcgttccagccgctcccagtc

SEQ ID NO: 5883833 - DNA, 25 bp, Homo sapien
ggtgaggaagtggggccggccgcca

SEQ ID NO: 5883834 - DNA, 25 bp, Homo sapien
ccctgcgctcggccagcatcacctt

SEQ ID NO: 5883835 - DNA, 25 bp, Homo sapien
acgtggatctcatctgctgtgggag

SEQ ID NO: 5883836 - DNA, 25 bp, Homo sapien
accttctgcctcagagccccctttc

SEQ ID NO: 5883837 - DNA, 25 bp, Homo sapien
tggggctccttaaacttgcccagct

SEQ ID NO: 5883838 - DNA, 25 bp, Homo sapien
gccatccacgggcgccttgagcagc

SEQ ID NO: 5883839 - DNA, 25 bp, Homo sapien
cgagcggtgaacttgtggctcttga

SEQ ID NO: 5883840 - DNA, 25 bp, Homo sapien
ctggccaggactaggcggtctggag

SEQ ID NO: 5883841 - DNA, 25 bp, Homo sapien
tggcccccatgaagtcgttgcggga

SEQ ID NO: 5883842 - DNA, 25 bp, Homo sapien
cttctggaggaggctgcagttgtca

SEQ ID NO: 5883843 - DNA, 25 bp, Homo sapien
aagctgaagtcggagatgtgcaggc

SEQ ID NO: 5883844 - DNA, 25 bp, Homo sapien
caggcgtcctggactcgccccgaag

SEQ ID NO: 5883845 - DNA, 25 bp, Homo sapien
ctcccagtcaatccagcggaaaaag

SEQ ID NO: 5883846 - DNA, 25 bp, Homo sapien
gctgcatggggctccttaaacttgc

SEQ ID NO: 5883847 - DNA, 25 bp, Homo sapien
cgtagaggagggagccacagtggtc

SEQ ID NO: 5883848 - DNA, 25 bp, Homo sapien
agcgcctggacactcgaaggtcaca

SEQ ID NO: 5883849 - DNA, 25 bp, Homo sapien
catcgtcgatgaaccacaaagctgc

SEQ ID NO: 5883850 - DNA, 25 bp, Homo sapien
tctccggggctatgtagtccggggt

SEQ ID NO: 5883851 - DNA, 25 bp, Homo sapien
tgacagtttgttccatgatggcctg

SEQ ID NO: 5883852 - DNA, 25 bp, Homo sapien
ctttttcaagatcttgatggcgtag

SEQ ID NO: 5883853 - DNA, 25 bp, Homo sapien
gggcacgctacgcacacagcgccgg

SEQ ID NO: 5883854 - DNA, 25 bp, Homo sapien
gggagcccggatctccagctgcagg

SEQ ID NO: 5883855 - DNA, 25 bp, Homo sapien
tgccaacatctcatacagcagaact

SEQ ID NO: 5883856 - DNA, 25 bp, Homo sapien
tgcatggggctccttaaacttgccc

SEQ ID NO: 5883857 - DNA, 25 bp, Homo sapien
tagatgatgccctgattgtgaagga

SEQ ID NO: 5883858 - DNA, 25 bp, Homo sapien
gtggggctgctgtagctatgcaggc

SEQ ID NO: 5883859 - DNA, 25 bp, Homo sapien
ggtccctgtagatgatgccctgatt

SEQ ID NO: 5883860 - DNA, 25 bp, Homo sapien
ccggccccccagcgccagcacacgt

SEQ ID NO: 5883861 - DNA, 25 bp, Homo sapien
cggcctggtcgatgctggccaggac

SEQ ID NO: 5883862 - DNA, 25 bp, Homo sapien
catgccaaagtcagtgatcttgatg

SEQ ID NO: 5883863 - DNA, 25 bp, Homo sapien
agtggtcgcagaaggtggggctgct

SEQ ID NO: 5883864 - DNA, 25 bp, Homo sapien
gggaggtccggtcccagtcccacac

SEQ ID NO: 5883865 - DNA, 25 bp, Homo sapien
ggtctgaaaggaggcgggatctcca

SEQ ID NO: 5883866 - DNA, 25 bp, Homo sapien
ccagcacacgtttctccaccagcgt

SEQ ID NO: 5883867 - DNA, 25 bp, Homo sapien
agccccctttctgcaaaacaggggc

SEQ ID NO: 5883868 - DNA, 25 bp, Homo sapien
caccagcgtgcagtccacatcgtcg

SEQ ID NO: 5883869 - DNA, 25 bp, Homo sapien
cttgatgtgtccctcagcatccagc

SEQ ID NO: 5883870 - DNA, 25 bp, Homo sapien
tgcaggcggaacttgtgtttgttcc

SEQ ID NO: 5883871 - DNA, 25 bp, Homo sapien
cttcaggttgaacacaaaggtctca

SEQ ID NO: 5883872 - DNA, 25 bp, Homo sapien
cagggagggcacgctacgcacacag

SEQ ID NO: 5883873 - DNA, 25 bp, Homo sapien
cccacacctccacgctgagccggcg

SEQ ID NO: 5883874 - DNA, 25 bp, Homo sapien
gaactccaaaggaccaccaatcgac

SEQ ID NO: 5883875 - DNA, 25 bp, Homo sapien
ggatctccaatcgttccagccgctc

SEQ ID NO: 5883876 - DNA, 25 bp, Homo sapien
gaagacgttctccttacacatgcca

SEQ ID NO: 5883877 - DNA, 25 bp, Homo sapien
acagcagaactccaaaggaccacca

SEQ ID NO: 5883878 - DNA, 25 bp, Homo sapien
gccctcctcctggttcagtaacttg

SEQ ID NO: 5883879 - DNA, 25 bp, Homo sapien
tacgggcctcgccaacagttacgtg

SEQ ID NO: 5883880 - DNA, 25 bp, Homo sapien
ccgagggtctgggatgagcttcagt

SEQ ID NO: 5883881 - DNA, 25 bp, Homo sapien
cgtcctttttcaagatcttgatggc

SEQ ID NO: 5883882 - DNA, 25 bp, Homo sapien
gaggagggagccacagtggtcgcag

SEQ ID NO: 5883883 - DNA, 25 bp, Homo sapien
gaggcgggatctccaatcgttccag

SEQ ID NO: 5883884 - DNA, 25 bp, Homo sapien
gaggggcccatccgcacccgctcat

SEQ ID NO: 5883885 - DNA, 25 bp, Homo sapien
cggggaagacgttctccttacacat

SEQ ID NO: 5883886 - DNA, 25 bp, Homo sapien
ggtctggaaggtggagtggagctgg

SEQ ID NO: 5883887 - DNA, 25 bp, Homo sapien
ggtggggctgcgggcatccgggtgc

SEQ ID NO: 5883888 - DNA, 25 bp, Homo sapien
tagagctcatcagagcccctgcgct

SEQ ID NO: 5883889 - DNA, 25 bp, Homo sapien
cacaagcccgtagaggagggagcca

SEQ ID NO: 5883890 - DNA, 25 bp, Homo sapien
ctcgaaggtcacaaattcgtggcat

SEQ ID NO: 5883891 - DNA, 25 bp, Homo sapien
atgtagtccggggtcccgcagaagg

SEQ ID NO: 5883892 - DNA, 25 bp, Homo sapien
tctggaggggtcagcgctggcgccg

SEQ ID NO: 5883893 - DNA, 25 bp, Homo sapien
gcactgggctggtggggctgcgggc

SEQ ID NO: 5883894 - DNA, 25 bp, Homo sapien
tgcggccacacgggcggggtctgaa

SEQ ID NO: 5883895 - DNA, 25 bp, Homo sapien
gtgaacttgtggctcttgacttcgt

SEQ ID NO: 5883896 - DNA, 25 bp, Homo sapien
cttgaagaagcgagcggtgaacttg

SEQ ID NO: 5883897 - DNA, 25 bp, Homo sapien
gctttcaccgttcgggtcttctgtt

SEQ ID NO: 5883898 - DNA, 25 bp, Homo sapien
agcttcagtttcacatagggatcag

SEQ ID NO: 5883899 - DNA, 25 bp, Homo sapien
ttggggtaggtgacagtttgttcca

SEQ ID NO: 5883900 - DNA, 25 bp, Homo sapien
ccaacatctcatacagcagaactcc

SEQ ID NO: 5883901 - DNA, 25 bp, Homo sapien
gggctgcttgaagaagcgagcggtg

SEQ ID NO: 5883902 - DNA, 25 bp, Homo sapien
ttctgcctcagagccccctttctgc

SEQ ID NO: 5883903 - DNA, 25 bp, Homo sapien
agcagaactccaaaggaccaccaat

SEQ ID NO: 5883904 - DNA, 25 bp, Homo sapien
tgcagatggccacggcttcccggga

SEQ ID NO: 5883905 - DNA, 25 bp, Homo sapien
gggaaggggaggggatgggagagga

SEQ ID NO: 5883906 - DNA, 25 bp, Homo sapien
gagcagctccgagacgccaaaggac

SEQ ID NO: 5883907 - DNA, 25 bp, Homo sapien
gagatgtgcaggcgtcctggactcg

SEQ ID NO: 5883908 - DNA, 25 bp, Homo sapien
ccgagacgccaaaggacatggcccc

SEQ ID NO: 5883909 - DNA, 25 bp, Homo sapien
ccatcgaagggaggctgtcctgcca

SEQ ID NO: 5883910 - DNA, 25 bp, Homo sapien
gctccacatcccctggcttcaggtt

SEQ ID NO: 5883911 - DNA, 25 bp, Homo sapien
aggggaggggatgggagaggaagag

SEQ ID NO: 5883912 - DNA, 25 bp, Homo sapien
gtctgggatgagcttcagtttcaca

SEQ ID NO: 5883913 - DNA, 25 bp, Homo sapien
atcaggccctgagcccaggcgcttc

SEQ ID NO: 5883914 - DNA, 25 bp, Homo sapien
actccaaaggaccaccaatcgacag

SEQ ID NO: 5883915 - DNA, 25 bp, Homo sapien
gaggaagctgaagtcggagatgtgc

SEQ ID NO: 5883916 - DNA, 25 bp, Homo sapien
tgtccagcttcaggtccctgtagat

SEQ ID NO: 5883917 - DNA, 25 bp, Homo sapien
taggtgacagtttgttccatgatgg

SEQ ID NO: 5883918 - DNA, 25 bp, Homo sapien
cagatgaagtcggtgcagtggctgc

SEQ ID NO: 5883919 - DNA, 25 bp, Homo sapien
tccacacagggtttagcgtggcttt

SEQ ID NO: 5883920 - DNA, 25 bp, Homo sapien
gctgggtgaggaagtggggccggcc

SEQ ID NO: 5883921 - DNA, 25 bp, Homo sapien
tccagcttcaggtccctgtagatga

SEQ ID NO: 5883922 - DNA, 25 bp, Homo sapien
tgcaggcgtcctggactcgccccga

SEQ ID NO: 5883923 - DNA, 25 bp, Homo sapien
aagtctcccccggtgacgtactcca

SEQ ID NO: 5883924 - DNA, 25 bp, Homo sapien
atagcgatttctgccgcgtagaacg

SEQ ID NO: 5883925 - DNA, 25 bp, Homo sapien
ggcaatgatctccggggctatgtag

SEQ ID NO: 5883926 - DNA, 25 bp, Homo sapien
ctcagcatccagcatcacattgtcc

SEQ ID NO: 5883927 - DNA, 25 bp, Homo sapien
gaggggatgggagaggaagaggggc

SEQ ID NO: 5883928 - DNA, 25 bp, Homo sapien
ggcccatccgcacccgctcatacaa

SEQ ID NO: 5883929 - DNA, 25 bp, Homo sapien
tttcgtcaggttccgagggtctggg

SEQ ID NO: 5883930 - DNA, 25 bp, Homo sapien
cacacgggcggggtctgaaaggagg

SEQ ID NO: 5883931 - DNA, 25 bp, Homo sapien
ctcggtgtggtccacaccgcacagg

SEQ ID NO: 5883932 - DNA, 25 bp, Homo sapien
tgaaggaagaagaggccgatagcga

SEQ ID NO: 5883933 - DNA, 25 bp, Homo sapien
gtcgatgaaccacaaagctgcagac

SEQ ID NO: 5883934 - DNA, 25 bp, Homo sapien
cttaaacttgcccagctgttgaatg

SEQ ID NO: 5883935 - DNA, 25 bp, Homo sapien
gcctgaaacagctcctcctcgtcct

SEQ ID NO: 5883936 - DNA, 25 bp, Homo sapien
ctcgccgctgcggccacacgggcgg

SEQ ID NO: 5883937 - DNA, 25 bp, Homo sapien
tcgtcaggttccgagggtctgggat

SEQ ID NO: 5883938 - DNA, 25 bp, Homo sapien
aggtgaagccctggaaatcggcctg

SEQ ID NO: 5883939 - DNA, 25 bp, Homo sapien
gcccaggcgcttccctgggtgcttg

SEQ ID NO: 5883940 - DNA, 25 bp, Homo sapien
tcggccaccggcacattgtaatact

SEQ ID NO: 5883941 - DNA, 25 bp, Homo sapien
tggtcgcagaaggtggggctgctgt

SEQ ID NO: 5883942 - DNA, 25 bp, Homo sapien
ccttgagcagctccgagacgccaaa

SEQ ID NO: 5883943 - DNA, 25 bp, Homo sapien
attccacacagggtttagcgtggct

SEQ ID NO: 5883944 - DNA, 25 bp, Homo sapien
gaaccccttgcagatggccacggct

SEQ ID NO: 5883945 - DNA, 25 bp, Homo sapien
tccagggggtagttacaagcctcaa

SEQ ID NO: 5883946 - DNA, 25 bp, Homo sapien
caggcggaacttgtgtttgttccgg

SEQ ID NO: 5883947 - DNA, 25 bp, Homo sapien
cggagatgtgcaggcgtcctggact

SEQ ID NO: 5883948 - DNA, 25 bp, Homo sapien
tgtcaaagttctcgccgctgcggcc

SEQ ID NO: 5883949 - DNA, 25 bp, Homo sapien
ggctggtaggcaatgatctccgggg

SEQ ID NO: 5883950 - DNA, 25 bp, Homo sapien
aatcgacagacttcccatagggctg

SEQ ID NO: 5883951 - DNA, 25 bp, Homo sapien
ggaggctgcagttgtcagcatcggc

SEQ ID NO: 5883952 - DNA, 25 bp, Homo sapien
ctgcaggcgcccgcggcgctcggtg

SEQ ID NO: 5883953 - DNA, 25 bp, Homo sapien
gtggcatcgtcgatgaaccacaaag

SEQ ID NO: 5883954 - DNA, 25 bp, Homo sapien
ggtgtggtccacaccgcacagggag

SEQ ID NO: 5883955 - DNA, 25 bp, Homo sapien
atgaaccacaaagctgcagacttga

SEQ ID NO: 5883956 - DNA, 25 bp, Homo sapien
gaaggtgggctgcttgaagaagcga

SEQ ID NO: 5883957 - DNA, 25 bp, Homo sapien
gaagccctggaaatcggcctggtcg

SEQ ID NO: 5883958 - DNA, 25 bp, Homo sapien
gttggggtccataggaattaggtta

SEQ ID NO: 5883959 - DNA, 25 bp, Homo sapien
gtgaagaacttgtcaaagttctcgc

SEQ ID NO: 5883960 - DNA, 25 bp, Homo sapien
cgaagggaggctgtcctgccaacat

SEQ ID NO: 5883961 - DNA, 25 bp, Homo sapien
gaaacagctcctcctcgtcctcccc

SEQ ID NO: 5883962 - DNA, 25 bp, Homo sapien
cgggcctcgccaacagttacgtgga

SEQ ID NO: 5883963 - DNA, 25 bp, Homo sapien
cagcatccagcatcacattgtccag

SEQ ID NO: 5883964 - DNA, 25 bp, Homo sapien
gctcatcagagcccctgcgctcggc

SEQ ID NO: 5883965 - DNA, 25 bp, Homo sapien
ggggatgggagaggaagaggggccc

SEQ ID NO: 5883966 - DNA, 25 bp, Homo sapien
cccgaagaagcagcgcttggggtcg

SEQ ID NO: 5883967 - DNA, 25 bp, Homo sapien
tctcatacagcagaactccaaagga

SEQ ID NO: 5883968 - DNA, 25 bp, Homo sapien
aggttacgggcctcgccaacagtta

SEQ ID NO: 5883969 - DNA, 25 bp, Homo sapien
cagagcccctgcgctcggccagcat

SEQ ID NO: 5883970 - DNA, 25 bp, Homo sapien
ttcaagatcttgatggcgtagagct

SEQ ID NO: 5883971 - DNA, 25 bp, Homo sapien
gaggtccggtcccagtcccacacct

SEQ ID NO: 5883972 - DNA, 25 bp, Homo sapien
gtcaggttccgagggtctgggatga

SEQ ID NO: 5883973 - DNA, 25 bp, Homo sapien
cggtcccagtcccacacctccacgc

SEQ ID NO: 5883974 - DNA, 25 bp, Homo sapien
tgacgggcacaggcactgggctggt

SEQ ID NO: 5883975 - DNA, 25 bp, Homo sapien
ataccccagatgaagtcggtgcagt

SEQ ID NO: 5883976 - DNA, 25 bp, Homo sapien
taggcaatgatctccggggctatgt

SEQ ID NO: 5883977 - DNA, 25 bp, Homo sapien
cacacagggtttagcgtggctttca

SEQ ID NO: 5883978 - DNA, 25 bp, Homo sapien
tctgggggcccttcccagcgcctgg

SEQ ID NO: 5883979 - DNA, 25 bp, Homo sapien
ctggtcgatgctggccaggactagg

SEQ ID NO: 5883980 - DNA, 25 bp, Homo sapien
gcatttcatgccctggtgcacaagc

SEQ ID NO: 5883981 - DNA, 25 bp, Homo sapien
gcgggaggtccggtcccagtcccac

SEQ ID NO: 5883982 - DNA, 25 bp, Homo sapien
tcctcctggttcagtaacttgtacc

SEQ ID NO: 5883983 - DNA, 25 bp, Homo sapien
gaaggtggagtggagctgggtgagg

SEQ ID NO: 5883984 - DNA, 25 bp, Homo sapien
cagcgcttggggtcggtgggactag

SEQ ID NO: 5883985 - DNA, 25 bp, Homo sapien
agcggaaaaagccatgtgcacggat

SEQ ID NO: 5883986 - DNA, 25 bp, Homo sapien
aagccatgtgcacggatggtaggtt

SEQ ID NO: 5883987 - DNA, 25 bp, Homo sapien
ttcaccgttcgggtcttctgtttcg

SEQ ID NO: 5883988 - DNA, 25 bp, Homo sapien
aaagttctcgccgctgcggccacac

SEQ ID NO: 5883989 - DNA, 25 bp, Homo sapien
gttcagtaacttgtaccagccatcc

SEQ ID NO: 5883990 - DNA, 25 bp, Homo sapien
attgtaatactcgccctcctcctgg

SEQ ID NO: 5883991 - DNA, 25 bp, Homo sapien
tcacaaattcgtggcatcgtcgatg

SEQ ID NO: 5883992 - DNA, 25 bp, Homo sapien
cccgtagaggagggagccacagtgg

SEQ ID NO: 5883993 - DNA, 25 bp, Homo sapien
gtcaatccagcggaaaaagccatgt

SEQ ID NO: 5883994 - DNA, 25 bp, Homo sapien
cgtactccatcacgaaatacaggcg

SEQ ID NO: 5883995 - DNA, 25 bp, Homo sapien
gcacgctacgcacacagcgccggtg

SEQ ID NO: 5883996 - DNA, 25 bp, Homo sapien
tgaggaagtggggccggccgccagg

SEQ ID NO: 5883997 - DNA, 25 bp, Homo sapien
attccagggggtagttacaagcctc

SEQ ID NO: 5883998 - DNA, 25 bp, Homo sapien
gggcggggtctgaaaggaggcggga

SEQ ID NO: 5883999 - DNA, 25 bp, Homo sapien
cccttgcagatggccacggcttccc

SEQ ID NO: 5884000 - DNA, 25 bp, Homo sapien
gagcccggatctccagctgcaggcg

SEQ ID NO: 5884001 - DNA, 25 bp, Homo sapien
gacgtactccatcacgaaatacagg

SEQ ID NO: 5884002 - DNA, 25 bp, Homo sapien
tcatctcgcagcaggagcatttcat

SEQ ID NO: 5884003 - DNA, 25 bp, Homo sapien
agcgtggctttcaccgttcgggtct

SEQ ID NO: 5884004 - DNA, 25 bp, Homo sapien
tgcacggatggtaggttccccatca

SEQ ID NO: 5884005 - DNA, 25 bp, Homo sapien
tccgcacccgctcatacaattccag

SEQ ID NO: 5884006 - DNA, 25 bp, Homo sapien
gtcccgcagaaggtgcgggttgtcg

SEQ ID NO: 5884007 - DNA, 25 bp, Homo sapien
tgaacacaaaggtctcattccacac

SEQ ID NO: 5884008 - DNA, 25 bp, Homo sapien
cgataccccagatgaagtcggtgca

SEQ ID NO: 5884009 - DNA, 25 bp, Homo sapien
cccgctcatacaattccagggggta

SEQ ID NO: 5884010 - DNA, 25 bp, Homo sapien
aacttctggaggaggctgcagttgt

SEQ ID NO: 5884011 - DNA, 25 bp, Homo sapien
agcatcaccttcccaaaactgcctt

SEQ ID NO: 5884012 - DNA, 25 bp, Homo sapien
gtcccagtcccacacctccacgctg

SEQ ID NO: 5884013 - DNA, 25 bp, Homo sapien
atcgaagggaggctgtcctgccaac

SEQ ID NO: 5884014 - DNA, 25 bp, Homo sapien
agtgatcttgatgtgtccctcagca

SEQ ID NO: 5884015 - DNA, 25 bp, Homo sapien
gatgctggccaggactaggcggtct

SEQ ID NO: 5884016 - DNA, 25 bp, Homo sapien
gtcgcagaaggtggggctgctgtag

SEQ ID NO: 5884017 - DNA, 25 bp, Homo sapien
gaaggggaggggatgggagaggaag

SEQ ID NO: 5884018 - DNA, 25 bp, Homo sapien
gggtctgggatgagcttcagtttca

SEQ ID NO: 5884019 - DNA, 25 bp, Homo sapien
cttgacttcgtggaccaccttctgc

SEQ ID NO: 5884020 - DNA, 25 bp, Homo sapien
gtgacgtactccatcacgaaataca

SEQ ID NO: 5884021 - DNA, 25 bp, Homo sapien
agcacacgtttctccaccagcgtgc

SEQ ID NO: 5884022 - DNA, 25 bp, Homo sapien
acgttcatctcgcagcaggagcatt

SEQ ID NO: 5884023 - DNA, 25 bp, Homo sapien
taaacttgcccagctgttgaatgtg

SEQ ID NO: 5884024 - DNA, 25 bp, Homo sapien
gagaccgttggggtccataggaatt

SEQ ID NO: 5884025 - DNA, 25 bp, Homo sapien
agaaccatgaggaagctgaagtcgg

SEQ ID NO: 5884026 - DNA, 25 bp, Homo sapien
agaacttgtcaaagttctcgccgct

SEQ ID NO: 5884027 - DNA, 25 bp, Homo sapien
agggagccacagtggtcgcagaagg

SEQ ID NO: 5884028 - DNA, 25 bp, Homo sapien
cctgccaacatctcatacagcagaa

SEQ ID NO: 5884029 - DNA, 25 bp, Homo sapien
tccataggaattaggttacgggcct

SEQ ID NO: 5884030 - DNA, 25 bp, Homo sapien
gggtgcttggtcaggaaccccttgc

SEQ ID NO: 5884031 - DNA, 25 bp, Homo sapien
agttctcgccgctgcggccacacgg

SEQ ID NO: 5884032 - DNA, 25 bp, Homo sapien
gccacacgggcggggtctgaaagga

SEQ ID NO: 5884033 - DNA, 25 bp, Homo sapien
cttgacattgcaggccctgctttcc

SEQ ID NO: 5884034 - DNA, 25 bp, Homo sapien
caaaggtctcattccacacagggtt

SEQ ID NO: 5884035 - DNA, 25 bp, Homo sapien
aagaagaggccgatagcgatttctg

SEQ ID NO: 5884036 - DNA, 25 bp, Homo sapien
tgtagatgatgccctgattgtgaag

SEQ ID NO: 5884037 - DNA, 25 bp, Homo sapien
acgctacgcacacagcgccggtgca

SEQ ID NO: 5884038 - DNA, 25 bp, Homo sapien
ggctggtggggctgcgggcatccgg

SEQ ID NO: 5884039 - DNA, 25 bp, Homo sapien
gttccagccgctcccagtcaatcca

SEQ ID NO: 5884040 - DNA, 25 bp, Homo sapien
cgttgcgggaggtccggtcccagtc

SEQ ID NO: 5884041 - DNA, 25 bp, Homo sapien
gggtagttacaagcctcaaacttct

SEQ ID NO: 5884042 - DNA, 25 bp, Homo sapien
tgctgtgggagcccggatctccagc

SEQ ID NO: 5884043 - DNA, 25 bp, Homo sapien
gtcgtccgtctgggggcccttccca

SEQ ID NO: 5884044 - DNA, 25 bp, Homo sapien
tacatgacgggcacaggcactgggc

SEQ ID NO: 5884045 - DNA, 25 bp, Homo sapien
atgatctccggggctatgtagtccg

SEQ ID NO: 5884046 - DNA, 25 bp, Homo sapien
cagaaggtgggctgcttgaagaagc

SEQ ID NO: 5884047 - DNA, 25 bp, Homo sapien
ctgaaacagctcctcctcgtcctcc

SEQ ID NO: 5884048 - DNA, 25 bp, Homo sapien
ccagcggaaaaagccatgtgcacgg

SEQ ID NO: 5884049 - DNA, 25 bp, Homo sapien
ggcatcgtcgatgaaccacaaagct

SEQ ID NO: 5884050 - DNA, 25 bp, Homo sapien
gaagcagcgcttggggtcggtggga

SEQ ID NO: 5884051 - DNA, 25 bp, Homo sapien
caaaggaccaccaatcgacagactt

SEQ ID NO: 5884052 - DNA, 25 bp, Homo sapien
aactgccttttcctagaaccatgag

SEQ ID NO: 5884053 - DNA, 25 bp, Homo sapien
gaggaagaggggcccatccgcaccc

SEQ ID NO: 5884054 - DNA, 25 bp, Homo sapien
ttctcgccgctgcggccacacgggc

SEQ ID NO: 5884055 - DNA, 25 bp, Homo sapien
caggccctgagcccaggcgcttccc

SEQ ID NO: 5884056 - DNA, 25 bp, Homo sapien
ggctcttgacttcgtggaccacctt

SEQ ID NO: 5884057 - DNA, 25 bp, Homo sapien
gatgtgcaggcgtcctggactcgcc

SEQ ID NO: 5884058 - DNA, 25 bp, Homo sapien
ggccctgctttccgataccccagat

SEQ ID NO: 5884059 - DNA, 25 bp, Homo sapien
gccggcgctccacatcccctggctt

SEQ ID NO: 5884060 - DNA, 25 bp, Homo sapien
agtcagtgatcttgatgtgtccctc

SEQ ID NO: 5884061 - DNA, 25 bp, Homo sapien
ctgggatgagcttcagtttcacata

SEQ ID NO: 5884062 - DNA, 25 bp, Homo sapien
tttctgcaaaacaggggccggggtc

SEQ ID NO: 5884063 - DNA, 25 bp, Homo sapien
tgccctggtgcacaagcccgtagag

SEQ ID NO: 5884064 - DNA, 25 bp, Homo sapien
cgctggcgccgcccgcgtgaagaac

SEQ ID NO: 5884065 - DNA, 25 bp, Homo sapien
cgggatctccaatcgttccagccgc

SEQ ID NO: 5884066 - DNA, 25 bp, Homo sapien
gctatgcaggcggaacttgtgtttg

SEQ ID NO: 5884067 - DNA, 25 bp, Homo sapien
gtgggagcccggatctccagctgca

SEQ ID NO: 5884068 - DNA, 25 bp, Homo sapien
gtctcccccggtgacgtactccatc

SEQ ID NO: 5884069 - DNA, 25 bp, Homo sapien
gagcccctgcgctcggccagcatca

SEQ ID NO: 5884070 - DNA, 25 bp, Homo sapien
aaagcgacttggggtaggtgacagt

SEQ ID NO: 5884071 - DNA, 25 bp, Homo sapien
cagggggtagttacaagcctcaaac

SEQ ID NO: 5884072 - DNA, 25 bp, Homo sapien
tacatcaagtctcccccggtgacgt

SEQ ID NO: 5884073 - DNA, 25 bp, Homo sapien
ttccatgatggcctgaaacagctcc

SEQ ID NO: 5884074 - DNA, 25 bp, Homo sapien
gaaaaagccatgtgcacggatggta

SEQ ID NO: 5884075 - DNA, 25 bp, Homo sapien
tcctttttcaagatcttgatggcgt

SEQ ID NO: 5884076 - DNA, 25 bp, Homo sapien
ctgctgtagctatgcaggcggaact

SEQ ID NO: 5884077 - DNA, 25 bp, Homo sapien
gccaacagttacgtggatctcatct

SEQ ID NO: 5884078 - DNA, 25 bp, Homo sapien
tcccaaaactgccttttcctagaac

SEQ ID NO: 5884079 - DNA, 25 bp, Homo sapien
gacgatcacgtcctttttcaagatc

SEQ ID NO: 5884080 - DNA, 25 bp, Homo sapien
gatggccacggcttcccgggaaagc

SEQ ID NO: 5884081 - DNA, 25 bp, Homo sapien
catcaagtctcccccggtgacgtac

SEQ ID NO: 5884082 - DNA, 25 bp, Homo sapien
gatgatgccctgattgtgaaggaag

SEQ ID NO: 5884083 - DNA, 25 bp, Homo sapien
tcaaagttctcgccgctgcggccac

SEQ ID NO: 5884084 - DNA, 25 bp, Homo sapien
cttacacatgccaaagtcagtgatc

SEQ ID NO: 5884085 - DNA, 25 bp, Homo sapien
gagaggaagaggggcccatccgcac

SEQ ID NO: 5884086 - DNA, 25 bp, Homo sapien
acgggcacaggcactgggctggtgg

SEQ ID NO: 5884087 - DNA, 25 bp, Homo sapien
gcagtggctgcagaaggtgggctgc

SEQ ID NO: 5884088 - DNA, 25 bp, Homo sapien
atctccagctgcaggcgcccgcggc

SEQ ID NO: 5884089 - DNA, 25 bp, Homo sapien
tgtggtccacaccgcacagggaggg

SEQ ID NO: 5884090 - DNA, 25 bp, Homo sapien
agacgttctccttacacatgccaaa

SEQ ID NO: 5884091 - DNA, 25 bp, Homo sapien
ctcctggttcagtaacttgtaccag

SEQ ID NO: 5884092 - DNA, 25 bp, Homo sapien
actcgccctcctcctggttcagtaa

SEQ ID NO: 5884093 - DNA, 25 bp, Homo sapien
ttcgtggaccaccttctgcctcaga

SEQ ID NO: 5884094 - DNA, 25 bp, Homo sapien
cacccgctcatacaattccaggggg

SEQ ID NO: 5884095 - DNA, 25 bp, Homo sapien
aggaaccccttgcagatggccacgg

SEQ ID NO: 5884096 - DNA, 25 bp, Homo sapien
cgtggctttcaccgttcgggtcttc

SEQ ID NO: 5884097 - DNA, 25 bp, Homo sapien
catggggctccttaaacttgcccag

SEQ ID NO: 5884098 - DNA, 25 bp, Homo sapien
ccatcacgaaatacaggcggtccgg

SEQ ID NO: 5884099 - DNA, 25 bp, Homo sapien
aacatctcatacagcagaactccaa

SEQ ID NO: 5884100 - DNA, 25 bp, Homo sapien
cacgaagtcggggttcacgtaggtg

SEQ ID NO: 5884101 - DNA, 25 bp, Homo sapien
tggaggaggctgcagttgtcagcat

SEQ ID NO: 5884102 - DNA, 25 bp, Homo sapien
ccctcagcatccagcatcacattgt

SEQ ID NO: 5884103 - DNA, 25 bp, Homo sapien
tgtagctatgcaggcggaacttgtg

SEQ ID NO: 5884104 - DNA, 25 bp, Homo sapien
tagaacgctgcatggggctccttaa

SEQ ID NO: 5884105 - DNA, 25 bp, Homo sapien
gatggtaggttccccatcaggccct

SEQ ID NO: 5884106 - DNA, 25 bp, Homo sapien
gttctccttacacatgccaaagtca

SEQ ID NO: 5884107 - DNA, 25 bp, Homo sapien
ccctggtgcacaagcccgtagagga

SEQ ID NO: 5884108 - DNA, 25 bp, Homo sapien
gactaggcggtctggaggggtcagc

SEQ ID NO: 5884109 - DNA, 25 bp, Homo sapien
tacgcacacagcgccggtgcacgtt

SEQ ID NO: 5884110 - DNA, 25 bp, Homo sapien
atgccctgattgtgaaggaagaaga

SEQ ID NO: 5884111 - DNA, 25 bp, Homo sapien
gagggcacgctacgcacacagcgcc

SEQ ID NO: 5884112 - DNA, 25 bp, Homo sapien
cgccttgagcagctccgagacgcca

SEQ ID NO: 5884113 - DNA, 25 bp, Homo sapien
tcagtgatcttgatgtgtccctcag

SEQ ID NO: 5884114 - DNA, 25 bp, Homo sapien
cagaactccaaaggaccaccaatcg

SEQ ID NO: 5884115 - DNA, 25 bp, Homo sapien
catggcccccatgaagtcgttgcgg

SEQ ID NO: 5884116 - DNA, 25 bp, Homo sapien
gaagtcgttgcgggaggtccggtcc

SEQ ID NO: 5884117 - DNA, 25 bp, Homo sapien
tggaccaccttctgcctcagagccc

SEQ ID NO: 5884118 - DNA, 25 bp, Homo sapien
cacacagcgccggtgcacgttcatc

SEQ ID NO: 5884119 - DNA, 25 bp, Homo sapien
ccatcaggccctgagcccaggcgct

SEQ ID NO: 5884120 - DNA, 25 bp, Homo sapien
cacggcttcccgggaaagcgacttg

SEQ ID NO: 5884121 - DNA, 25 bp, Homo sapien
cagggtttagcgtggctttcaccgt

SEQ ID NO: 5884122 - DNA, 25 bp, Homo sapien
agtaacttgtaccagccatccacgg

SEQ ID NO: 5884123 - DNA, 25 bp, Homo sapien
aaaggaggcgggatctccaatcgtt

SEQ ID NO: 5884124 - DNA, 25 bp, Homo sapien
ccaccggcacattgtaatactcgcc

SEQ ID NO: 5884125 - DNA, 25 bp, Homo sapien
ggaccaccaatcgacagacttccca

SEQ ID NO: 5884126 - DNA, 25 bp, Homo sapien
gcgcccgcggcgctcggtgtggtcc

SEQ ID NO: 5884127 - DNA, 25 bp, Homo sapien
gcttccctgggtgcttggtcaggaa

SEQ ID NO: 5884128 - DNA, 25 bp, Homo sapien
aggtggggctgctgtagctatgcag

SEQ ID NO: 5884129 - DNA, 25 bp, Homo sapien
tcaggaaccccttgcagatggccac

SEQ ID NO: 5884130 - DNA, 25 bp, Homo sapien
catccgggtgcacgaagtcggggtt

SEQ ID NO: 5884131 - DNA, 25 bp, Homo sapien
agccacagtggtcgcagaaggtggg

SEQ ID NO: 5884132 - DNA, 25 bp, Homo sapien
gaagcgagcggtgaacttgtggctc

SEQ ID NO: 5884133 - DNA, 25 bp, Homo sapien
accacaaagctgcagacttgacatt

SEQ ID NO: 5884134 - DNA, 25 bp, Homo sapien
caccgttcgggtcttctgtttcgtc

SEQ ID NO: 5884135 - DNA, 25 bp, Homo sapien
cggtgcagtggctgcagaaggtggg

SEQ ID NO: 5884136 - DNA, 25 bp, Homo sapien
tgtttcgtcaggttccgagggtctg

SEQ ID NO: 5884137 - DNA, 25 bp, Homo sapien
cacggatggtaggttccccatcagg

SEQ ID NO: 5884138 - DNA, 25 bp, Homo sapien
ggggtaggtgacagtttgttccatg

SEQ ID NO: 5884139 - DNA, 25 bp, Homo sapien
tgcagtccacatcgtcgtcctggac

SEQ ID NO: 5884140 - DNA, 25 bp, Homo sapien
ggcgccttgagcagctccgagacgc

SEQ ID NO: 5884141 - DNA, 25 bp, Homo sapien
tgatggcgtagagctcatcagagcc

SEQ ID NO: 5884142 - DNA, 25 bp, Homo sapien
tggaaggtggagtggagctgggtga

SEQ ID NO: 5884143 - DNA, 25 bp, Homo sapien
ccccatgaagtcgttgcgggaggtc

SEQ ID NO: 5884144 - DNA, 25 bp, Homo sapien
aaaactgccttttcctagaaccatg

SEQ ID NO: 5884145 - DNA, 25 bp, Homo sapien
cctggacactcgaaggtcacaaatt

SEQ ID NO: 5884146 - DNA, 25 bp, Homo sapien
catgacgggcacaggcactgggctg

SEQ ID NO: 5884147 - DNA, 25 bp, Homo sapien
catctcatacagcagaactccaaag

SEQ ID NO: 5884148 - DNA, 25 bp, Homo sapien
aatacaggcggtccggggtctggaa

SEQ ID NO: 5884149 - DNA, 25 bp, Homo sapien
gcggcgctcggtgtggtccacaccg

SEQ ID NO: 5884150 - DNA, 25 bp, Homo sapien
gccttttcctagaaccatgaggaag

SEQ ID NO: 5884151 - DNA, 25 bp, Homo sapien
tgaagtcggtgcagtggctgcagaa

SEQ ID NO: 5884152 - DNA, 25 bp, Homo sapien
atcttgatgtgtccctcagcatcca

SEQ ID NO: 5884153 - DNA, 25 bp, Homo sapien
caagatcttgatggcgtagagctca

SEQ ID NO: 5884154 - DNA, 25 bp, Homo sapien
agctccgagacgccaaaggacatgg

SEQ ID NO: 5884155 - DNA, 25 bp, Homo sapien
aaagtcagtgatcttgatgtgtccc

SEQ ID NO: 5884156 - DNA, 25 bp, Homo sapien
ccagcatcaccttcccaaaactgcc

SEQ ID NO: 5884157 - DNA, 25 bp, Homo sapien
cctgtagatgatgccctgattgtga

SEQ ID NO: 5884158 - DNA, 25 bp, Homo sapien
ggagccacagtggtcgcagaaggtg

SEQ ID NO: 5884159 - DNA, 25 bp, Homo sapien
cctgattgtgaaggaagaagaggcc

SEQ ID NO: 5884160 - DNA, 25 bp, Homo sapien
ggtctggaggggtcagcgctggcgc

SEQ ID NO: 5884161 - DNA, 25 bp, Homo sapien
tcgtcgatgaaccacaaagctgcag

SEQ ID NO: 5884162 - DNA, 25 bp, Homo sapien
ccgcggcgctcggtgtggtccacac

SEQ ID NO: 5884163 - DNA, 25 bp, Homo sapien
ccctgagcccaggcgcttccctggg

SEQ ID NO: 5884164 - DNA, 25 bp, Homo sapien
ttgcgggaggtccggtcccagtccc

SEQ ID NO: 5884165 - DNA, 25 bp, Homo sapien
tccggggtcccgcagaaggtgcggg

SEQ ID NO: 5884166 - DNA, 25 bp, Homo sapien
ggatgggagaggaagaggggcccat

SEQ ID NO: 5884167 - DNA, 25 bp, Homo sapien
cgcacccgctcatacaattccaggg

SEQ ID NO: 5884168 - DNA, 25 bp, Homo sapien
catccacgggcgccttgagcagctc

SEQ ID NO: 5884169 - DNA, 25 bp, Homo sapien
tcctagaaccatgaggaagctgaag

SEQ ID NO: 5884170 - DNA, 25 bp, Homo sapien
atgggagaggaagaggggcccatcc

SEQ ID NO: 5884171 - DNA, 25 bp, Homo sapien
gccacggcttcccgggaaagcgact

SEQ ID NO: 5884172 - DNA, 25 bp, Homo sapien
ctggcgccgcccgcgtgaagaactt

SEQ ID NO: 5884173 - DNA, 25 bp, Homo sapien
ccaaaactgccttttcctagaacca

SEQ ID NO: 5884174 - DNA, 25 bp, Homo sapien
aaggtcacaaattcgtggcatcgtc

SEQ ID NO: 5884175 - DNA, 25 bp, Homo sapien
gttcacgtaggtgaagccctggaaa

SEQ ID NO: 5884176 - DNA, 25 bp, Homo sapien
cgctcggtgtggtccacaccgcaca

SEQ ID NO: 5884177 - DNA, 25 bp, Homo sapien
ggtcccccctctgaatcgcctacgc

SEQ ID NO: 5884178 - DNA, 25 bp, Homo sapien
catcacattgtccagcttcaggtcc

SEQ ID NO: 5884179 - DNA, 25 bp, Homo sapien
ggggctgctgtagctatgcaggcgg

SEQ ID NO: 5884180 - DNA, 25 bp, Homo sapien
agcgtgcagtccacatcgtcgtcct

SEQ ID NO: 5884181 - DNA, 25 bp, Homo sapien
ggtcacaaattcgtggcatcgtcga

SEQ ID NO: 5884182 - DNA, 25 bp, Homo sapien
ggtgcacaagcccgtagaggaggga

SEQ ID NO: 5884183 - DNA, 25 bp, Homo sapien
catgtgcacggatggtaggttcccc

SEQ ID NO: 5884184 - DNA, 25 bp, Homo sapien
acttcgtggaccaccttctgcctca

SEQ ID NO: 5884185 - DNA, 25 bp, Homo sapien
gtagtccggggtcccgcagaaggtg

SEQ ID NO: 5884186 - DNA, 25 bp, Homo sapien
ggaagaagaggccgatagcgatttc

SEQ ID NO: 5884187 - DNA, 25 bp, Homo sapien
gacgccaaaggacatggcccccatg

SEQ ID NO: 5884188 - DNA, 25 bp, Homo sapien
tgcccagctgttgaatgtggtacat

SEQ ID NO: 5884189 - DNA, 25 bp, Homo sapien
ctggaaatcggcctggtcgatgctg

SEQ ID NO: 5884190 - DNA, 25 bp, Homo sapien
cacgtttctccaccagcgtgcagtc

SEQ ID NO: 5884191 - DNA, 25 bp, Homo sapien
agcgccagcacacgtttctccacca

SEQ ID NO: 5884192 - DNA, 25 bp, Homo sapien
ccgctgcggccacacgggcggggtc

SEQ ID NO: 5884193 - DNA, 25 bp, Homo sapien
cacacctccacgctgagccggcgct

SEQ ID NO: 5884194 - DNA, 25 bp, Homo sapien
cgaagtcggggttcacgtaggtgaa

SEQ ID NO: 5884195 - DNA, 25 bp, Homo sapien
caggttccgagggtctgggatgagc

SEQ ID NO: 5884196 - DNA, 25 bp, Homo sapien
ccctggaaatcggcctggtcgatgc

SEQ ID NO: 5884197 - DNA, 25 bp, Homo sapien
ccaaaggacatggcccccatgaagt

SEQ ID NO: 5884198 - DNA, 25 bp, Homo sapien
tcgcctacgccggggcccagaccag

SEQ ID NO: 5884199 - DNA, 25 bp, Homo sapien
cttgcagatggccacggcttcccgg

SEQ ID NO: 5884200 - DNA, 25 bp, Homo sapien
tggcctgaaacagctcctcctcgtc

SEQ ID NO: 5884201 - DNA, 25 bp, Homo sapien
gtgcttggtcaggaaccccttgcag

SEQ ID NO: 5884202 - DNA, 25 bp, Homo sapien
acagtttgttccatgatggcctgaa

SEQ ID NO: 5884203 - DNA, 25 bp, Homo sapien
gtggtacatcaagtctcccccggtg

SEQ ID NO: 5884204 - DNA, 25 bp, Homo sapien
ctatgtagtccggggtcccgcagaa

SEQ ID NO: 5884205 - DNA, 25 bp, Homo sapien
caatccagcggaaaaagccatgtgc

SEQ ID NO: 5884206 - DNA, 25 bp, Homo sapien
cctggacgatcacgtcctttttcaa

SEQ ID NO: 5884207 - DNA, 25 bp, Homo sapien
tcccctggcttcaggttgaacacaa

SEQ ID NO: 5884208 - DNA, 25 bp, Homo sapien
tcgccctcctcctggttcagtaact

SEQ ID NO: 5884209 - DNA, 25 bp, Homo sapien
tggggtccataggaattaggttacg

SEQ ID NO: 5884210 - DNA, 25 bp, Homo sapien
aacttgtcaaagttctcgccgctgc

SEQ ID NO: 5884211 - DNA, 25 bp, Homo sapien
gcaggcgcccgcggcgctcggtgtg

SEQ ID NO: 5884212 - DNA, 25 bp, Homo sapien
gcttcaggtccctgtagatgatgcc

SEQ ID NO: 5884213 - DNA, 25 bp, Homo sapien
ctggtggggctgcgggcatccgggt

SEQ ID NO: 5884214 - DNA, 25 bp, Homo sapien
cgtcctggactcgccccgaagaagc

SEQ ID NO: 5884215 - DNA, 25 bp, Homo sapien
cctctgaatcgcctacgccggggcc

SEQ ID NO: 5884216 - DNA, 25 bp, Homo sapien
tgcagttgtcagcatcggccaccgg

SEQ ID NO: 5884217 - DNA, 25 bp, Homo sapien
tctgctgtgggagcccggatctcca

SEQ ID NO: 5884218 - DNA, 25 bp, Homo sapien
ggtgacagtttgttccatgatggcc

SEQ ID NO: 5884219 - DNA, 25 bp, Homo sapien
aggcggtctggaggggtcagcgctg

SEQ ID NO: 5884220 - DNA, 25 bp, Homo sapien
gttacgggcctcgccaacagttacg

SEQ ID NO: 5884221 - DNA, 25 bp, Homo sapien
gatgaagtcggtgcagtggctgcag

SEQ ID NO: 5884222 - DNA, 25 bp, Homo sapien
ttctgccgcgtagaacgctgcatgg

SEQ ID NO: 5884223 - DNA, 25 bp, Homo sapien
gttccccatcaggccctgagcccag

SEQ ID NO: 5884224 - DNA, 25 bp, Homo sapien
cttgatggcgtagagctcatcagag

SEQ ID NO: 5884225 - DNA, 25 bp, Homo sapien
gggtcccgcagaaggtgcgggttgt

SEQ ID NO: 5884226 - DNA, 25 bp, Homo sapien
gaccaccttctgcctcagagccccc

SEQ ID NO: 5884227 - DNA, 25 bp, Homo sapien
ggcctcgccaacagttacgtggatc

SEQ ID NO: 5884228 - DNA, 25 bp, Homo sapien
cttgcccagctgttgaatgtggtac

SEQ ID NO: 5884229 - DNA, 25 bp, Homo sapien
gccatgtgcacggatggtaggttcc

SEQ ID NO: 5884230 - DNA, 25 bp, Homo sapien
tgattgtgaaggaagaagaggccga

SEQ ID NO: 5884231 - DNA, 25 bp, Homo sapien
cgggtgcacgaagtcggggttcacg

SEQ ID NO: 5884232 - DNA, 25 bp, Homo sapien
aaggtctcattccacacagggttta

SEQ ID NO: 5884233 - DNA, 25 bp, Homo sapien
agcgagcggtgaacttgtggctctt

SEQ ID NO: 5884234 - DNA, 25 bp, Homo sapien
cgaagaagcagcgcttggggtcggt

SEQ ID NO: 5884235 - DNA, 25 bp, Homo sapien
cgctcccagtcaatccagcggaaaa

SEQ ID NO: 5884236 - DNA, 25 bp, Homo sapien
ccagcgtgcagtccacatcgtcgtc

SEQ ID NO: 5884237 - DNA, 25 bp, Homo sapien
tgaagtcggagatgtgcaggcgtcc

SEQ ID NO: 5884238 - DNA, 25 bp, Homo sapien
gacactcgaaggtcacaaattcgtg

SEQ ID NO: 5884239 - DNA, 25 bp, Homo sapien
cacgggcggggtctgaaaggaggcg

SEQ ID NO: 5884240 - DNA, 25 bp, Homo sapien
cggcacattgtaatactcgccctcc

SEQ ID NO: 5884241 - DNA, 25 bp, Homo sapien
tgcacgaagtcggggttcacgtagg

SEQ ID NO: 5884242 - DNA, 25 bp, Homo sapien
ggaagaggggcccatccgcacccgc

SEQ ID NO: 5884243 - DNA, 25 bp, Homo sapien
aagggaggctgtcctgccaacatct

SEQ ID NO: 5884244 - DNA, 25 bp, Homo sapien
aagcctcaaacttctggaggaggct

SEQ ID NO: 5884245 - DNA, 25 bp, Homo sapien
cagtcaatccagcggaaaaagccat

SEQ ID NO: 5884246 - DNA, 25 bp, Homo sapien
catcggccaccggcacattgtaata

SEQ ID NO: 5884247 - DNA, 25 bp, Homo sapien
accccagatgaagtcggtgcagtgg

SEQ ID NO: 5884248 - DNA, 25 bp, Homo sapien
tcagtttcacatagggatcagagag

SEQ ID NO: 5884249 - DNA, 25 bp, Homo sapien
gttcatctcgcagcaggagcatttc

SEQ ID NO: 5884250 - DNA, 25 bp, Homo sapien
cgtttctccaccagcgtgcagtcca

SEQ ID NO: 5884251 - DNA, 25 bp, Homo sapien
agcagcgcttggggtcggtgggact

SEQ ID NO: 5884252 - DNA, 25 bp, Homo sapien
caggcggtccggggtctggaaggtg

SEQ ID NO: 5884253 - DNA, 25 bp, Homo sapien
aggaagtggggccggccgccaggac

SEQ ID NO: 5884254 - DNA, 25 bp, Homo sapien
ccaggcgcttccctgggtgcttggt

SEQ ID NO: 5884255 - DNA, 25 bp, Homo sapien
agtggagctgggtgaggaagtgggg

SEQ ID NO: 5884256 - DNA, 25 bp, Homo sapien
ccagcgccagcacacgtttctccac

SEQ ID NO: 5884257 - DNA, 25 bp, Homo sapien
gcccgcgtgaagaacttgtcaaagt

SEQ ID NO: 5884258 - DNA, 25 bp, Homo sapien
aagaggggcccatccgcacccgctc

SEQ ID NO: 5884259 - DNA, 25 bp, Homo sapien
gaagaacttgtcaaagttctcgccg

SEQ ID NO: 5884260 - DNA, 25 bp, Homo sapien
gggagggcacgctacgcacacagcg

SEQ ID NO: 5884261 - DNA, 25 bp, Homo sapien
cacgaaatacaggcggtccggggtc

SEQ ID NO: 5884262 - DNA, 25 bp, Homo sapien
agcggtgaacttgtggctcttgact

SEQ ID NO: 5884263 - DNA, 25 bp, Homo sapien
gcgccggtgcacgttcatctcgcag

SEQ ID NO: 5884264 - DNA, 25 bp, Homo sapien
tgaaaggaggcgggatctccaatcg

SEQ ID NO: 5884265 - DNA, 25 bp, Homo sapien
ggagtggagctgggtgaggaagtgg

SEQ ID NO: 5884266 - DNA, 25 bp, Homo sapien
tgcagacttgacattgcaggccctg

SEQ ID NO: 5884267 - DNA, 25 bp, Homo sapien
acgctgcatggggctccttaaactt

SEQ ID NO: 5884268 - DNA, 25 bp, Homo sapien
ggtgcacgaagtcggggttcacgta

SEQ ID NO: 5884269 - DNA, 25 bp, Homo sapien
cccagctgttgaatgtggtacatca

SEQ ID NO: 5884270 - DNA, 25 bp, Homo sapien
gtccctcagcatccagcatcacatt

SEQ ID NO: 5884271 - DNA, 25 bp, Homo sapien
gctccttaaacttgcccagctgttg

SEQ ID NO: 5884272 - DNA, 25 bp, Homo sapien
taggaattaggttacgggcctcgcc

SEQ ID NO: 5884273 - DNA, 25 bp, Homo sapien
atcagagagaccgttggggtccata

SEQ ID NO: 5884274 - DNA, 25 bp, Homo sapien
ggccctgagcccaggcgcttccctg

SEQ ID NO: 5884275 - DNA, 25 bp, Homo sapien
atcagagcccctgcgctcggccagc

SEQ ID NO: 5884276 - DNA, 25 bp, Homo sapien
ggaagctgaagtcggagatgtgcag

SEQ ID NO: 5884277 - DNA, 25 bp, Homo sapien
aaggaagaagaggccgatagcgatt

SEQ ID NO: 5884278 - DNA, 25 bp, Homo sapien
acaagcctcaaacttctggaggagg

SEQ ID NO: 5884279 - DNA, 25 bp, Homo sapien
ttaggttacgggcctcgccaacagt

SEQ ID NO: 5884280 - DNA, 25 bp, Homo sapien
tccaaaggaccaccaatcgacagac

SEQ ID NO: 5884281 - DNA, 25 bp, Homo sapien
ggtaggcaatgatctccggggctat

SEQ ID NO: 5884282 - DNA, 25 bp, Homo sapien
cgcagcaggagcatttcatgccctg

SEQ ID NO: 5884283 - DNA, 25 bp, Homo sapien
gtaggttccccatcaggccctgagc

SEQ ID NO: 5884284 - DNA, 25 bp, Homo sapien
tgaatcgcctacgccggggcccaga

SEQ ID NO: 5884285 - DNA, 25 bp, Homo sapien
ggtacatcaagtctcccccggtgac

SEQ ID NO: 5884286 - DNA, 25 bp, Homo sapien
cgatttctgccgcgtagaacgctgc

SEQ ID NO: 5884287 - DNA, 25 bp, Homo sapien
ggccaccggcacattgtaatactcg

SEQ ID NO: 5884288 - DNA, 25 bp, Homo sapien
caacagttacgtggatctcatctgc

SEQ ID NO: 5884289 - DNA, 25 bp, Homo sapien
ctccatcacgaaatacaggcggtcc

SEQ ID NO: 5884290 - DNA, 25 bp, Homo sapien
atcacgtcctttttcaagatcttga

SEQ ID NO: 5884291 - DNA, 25 bp, Homo sapien
cacaaaggtctcattccacacaggg

SEQ ID NO: 5884292 - DNA, 25 bp, Homo sapien
agggctggtaggcaatgatctccgg

SEQ ID NO: 5884293 - DNA, 25 bp, Homo sapien
tcaagtctcccccggtgacgtactc

SEQ ID NO: 5884294 - DNA, 25 bp, Homo sapien
tccaccagcgtgcagtccacatcgt

SEQ ID NO: 5884295 - DNA, 25 bp, Homo sapien
actgggctggtggggctgcgggcat

SEQ ID NO: 5884296 - DNA, 25 bp, Homo sapien
cagccgctcccagtcaatccagcgg

SEQ ID NO: 5884297 - DNA, 25 bp, Homo sapien
gggaggggatgggagaggaagaggg

SEQ ID NO: 5884298 - DNA, 25 bp, Homo sapien
agcccgtagaggagggagccacagt

SEQ ID NO: 5884299 - DNA, 25 bp, Homo sapien
gcgcttggggtcggtgggactaggg

SEQ ID NO: 5884300 - DNA, 25 bp, Homo sapien
tacaggcggtccggggtctggaagg

SEQ ID NO: 5884301 - DNA, 25 bp, Homo sapien
cctccacgctgagccggcgctccac

SEQ ID NO: 5884302 - DNA, 25 bp, Homo sapien
ggcgggatctccaatcgttccagcc

SEQ ID NO: 5884303 - DNA, 25 bp, Homo sapien
aacagctcctcctcgtcctccccat

SEQ ID NO: 5884304 - DNA, 25 bp, Homo sapien
tccggggctatgtagtccggggtcc

SEQ ID NO: 5884305 - DNA, 25 bp, Homo sapien
ctacgccggggcccagaccagccat

SEQ ID NO: 5884306 - DNA, 25 bp, Homo sapien
gtggagtggagctgggtgaggaagt

SEQ ID NO: 5884307 - DNA, 25 bp, Homo sapien
gctgcagacttgacattgcaggccc

SEQ ID NO: 5884308 - DNA, 25 bp, Homo sapien
gtcctggacgatcacgtcctttttc

SEQ ID NO: 5884309 - DNA, 25 bp, Homo sapien
ccaaagtcagtgatcttgatgtgtc

SEQ ID NO: 5884310 - DNA, 25 bp, Homo sapien
aagtcggggttcacgtaggtgaagc

SEQ ID NO: 5884311 - DNA, 25 bp, Homo sapien
ccgcccgcgtgaagaacttgtcaaa

SEQ ID NO: 5884312 - DNA, 25 bp, Homo sapien
atagggctggtaggcaatgatctcc

SEQ ID NO: 5884313 - DNA, 25 bp, Homo sapien
tggacactcgaaggtcacaaattcg

SEQ ID NO: 5884314 - DNA, 25 bp, Homo sapien
ctcccccggtgacgtactccatcac

SEQ ID NO: 5884315 - DNA, 25 bp, Homo sapien
cagccatccacgggcgccttgagca

SEQ ID NO: 5884316 - DNA, 25 bp, Homo sapien
caattccagggggtagttacaagcc

SEQ ID NO: 5884317 - DNA, 25 bp, Homo sapien
gtgaagccctggaaatcggcctggt

SEQ ID NO: 5884318 - DNA, 25 bp, Homo sapien
ccctggcttcaggttgaacacaaag

SEQ ID NO: 5884319 - DNA, 25 bp, Homo sapien
ccgcgtgaagaacttgtcaaagttc

SEQ ID NO: 5884320 - DNA, 25 bp, Homo sapien
ggcgtcctggactcgccccgaagaa

SEQ ID NO: 5884321 - DNA, 25 bp, Homo sapien
gtgcagtggctgcagaaggtgggct

SEQ ID NO: 5884322 - DNA, 25 bp, Homo sapien
aggcgcttccctgggtgcttggtca

SEQ ID NO: 5884323 - DNA, 25 bp, Homo sapien
tcaccttcccaaaactgccttttcc

SEQ ID NO: 5884324 - DNA, 25 bp, Homo sapien
cacagcgccggtgcacgttcatctc

SEQ ID NO: 5884325 - DNA, 25 bp, Homo sapien
ccgttcgggtcttctgtttcgtcag

SEQ ID NO: 5884326 - DNA, 25 bp, Homo sapien
atagggatcagagagaccgttgggg

SEQ ID NO: 5884327 - DNA, 25 bp, Homo sapien
ggggtcagcgctggcgccgcccgcg

SEQ ID NO: 5884328 - DNA, 25 bp, Homo sapien
gcccgcggcgctcggtgtggtccac

SEQ ID NO: 5884329 - DNA, 25 bp, Homo sapien
ttcatgccctggtgcacaagcccgt

SEQ ID NO: 5884330 - DNA, 25 bp, Homo sapien
agggatcagagagaccgttggggtc

SEQ ID NO: 5884331 - DNA, 25 bp, Homo sapien
tccagccgctcccagtcaatccagc

SEQ ID NO: 5884332 - DNA, 25 bp, Homo sapien
ggaattaggttacgggcctcgccaa

SEQ ID NO: 5884333 - DNA, 25 bp, Homo sapien
ggctgctgtagctatgcaggcggaa

SEQ ID NO: 5884334 - DNA, 25 bp, Homo sapien
aggtggagtggagctgggtgaggaa

SEQ ID NO: 5884335 - DNA, 25 bp, Homo sapien
gctgaagtcggagatgtgcaggcgt

SEQ ID NO: 5884336 - DNA, 25 bp, Homo sapien
gctgcgggcatccgggtgcacgaag

SEQ ID NO: 5884337 - DNA, 25 bp, Homo sapien
aggagcatttcatgccctggtgcac

SEQ ID NO: 5884338 - DNA, 25 bp, Homo sapien
ctgggtgcttggtcaggaacccctt

SEQ ID NO: 5884339 - DNA, 25 bp, Homo sapien
cagaaggtgcgggttgtcgtcccgg

SEQ ID NO: 5884340 - DNA, 25 bp, Homo sapien
atctcatctgctgtgggagcccgga

SEQ ID NO: 5884341 - DNA, 25 bp, Homo sapien
tcccccctctgaatcgcctacgccg

SEQ ID NO: 5884342 - DNA, 25 bp, Homo sapien
gcaggagcatttcatgccctggtgc

SEQ ID NO: 5884343 - DNA, 25 bp, Homo sapien
cccagtcccacacctccacgctgag

SEQ ID NO: 5884344 - DNA, 25 bp, Homo sapien
cagatggccacggcttcccgggaaa

SEQ ID NO: 5884345 - DNA, 25 bp, Homo sapien
ggttccgagggtctgggatgagctt

SEQ ID NO: 5884346 - DNA, 25 bp, Homo sapien
tgggtgaggaagtggggccggccgc

SEQ ID NO: 5884347 - DNA, 25 bp, Homo sapien
tctgcaaaacaggggccggggtccc

SEQ ID NO: 5884348 - DNA, 25 bp, Homo sapien
tgatgccctgattgtgaaggaagaa

SEQ ID NO: 5884349 - DNA, 25 bp, Homo sapien
acgtaggtgaagccctggaaatcgg

SEQ ID NO: 5884350 - DNA, 25 bp, Homo sapien
acaaattcgtggcatcgtcgatgaa

SEQ ID NO: 5884351 - DNA, 25 bp, Homo sapien
ctgtcctgccaacatctcatacagc

SEQ ID NO: 5884352 - DNA, 25 bp, Homo sapien
tcgtggcatcgtcgatgaaccacaa

SEQ ID NO: 5884353 - DNA, 25 bp, Homo sapien
cccagatgaagtcggtgcagtggct

SEQ ID NO: 5884354 - DNA, 25 bp, Homo sapien
caaagctgcagacttgacattgcag

SEQ ID NO: 5884355 - DNA, 25 bp, Homo sapien
ggagggagccacagtggtcgcagaa

SEQ ID NO: 5884356 - DNA, 25 bp, Homo sapien
aaattcgtggcatcgtcgatgaacc

SEQ ID NO: 5884357 - DNA, 25 bp, Homo sapien
accagccatccacgggcgccttgag

SEQ ID NO: 5884358 - DNA, 25 bp, Homo sapien
agcgctggcgccgcccgcgtgaaga

SEQ ID NO: 5884359 - DNA, 25 bp, Homo sapien
ggccccccagcgccagcacacgttt

SEQ ID NO: 5884360 - DNA, 25 bp, Homo sapien
tggagctgggtgaggaagtggggcc

SEQ ID NO: 5884361 - DNA, 25 bp, Homo sapien
acagttacgtggatctcatctgctg

SEQ ID NO: 5884362 - DNA, 25 bp, Homo sapien
cataggaattaggttacgggcctcg

SEQ ID NO: 5884363 - DNA, 25 bp, Homo sapien
aaccatgaggaagctgaagtcggag

SEQ ID NO: 5884364 - DNA, 25 bp, Homo sapien
gggttcacgtaggtgaagccctgga

SEQ ID NO: 5884365 - DNA, 25 bp, Homo sapien
ggatctcatctgctgtgggagcccg

SEQ ID NO: 5884366 - DNA, 25 bp, Homo sapien
atcgtcgtcctggacgatcacgtcc

SEQ ID NO: 5884367 - DNA, 25 bp, Homo sapien
aaaagccatgtgcacggatggtagg

SEQ ID NO: 5884368 - DNA, 25 bp, Homo sapien
tgtgcacggatggtaggttccccat

SEQ ID NO: 5884369 - DNA, 25 bp, Homo sapien
tcgtcctggacgatcacgtcctttt

SEQ ID NO: 5884370 - DNA, 25 bp, Homo sapien
ggtttgctaaaactgtagaaaggta

SEQ ID NO: 5884371 - DNA, 25 bp, Homo sapien
cttgtcacgtgaggatcccgtaccg

SEQ ID NO: 5884372 - DNA, 25 bp, Homo sapien
tgctttttccaaatgtctgtggtca

SEQ ID NO: 5884373 - DNA, 25 bp, Homo sapien
attggaggacacggcaactttagtc

SEQ ID NO: 5884374 - DNA, 25 bp, Homo sapien
ttgttgatgaggacagatgggtaaa

SEQ ID NO: 5884375 - DNA, 25 bp, Homo sapien
cagaacgagcagcggcgccagggcc

SEQ ID NO: 5884376 - DNA, 25 bp, Homo sapien
cgacaggttcctactcattcgttta

SEQ ID NO: 5884377 - DNA, 25 bp, Homo sapien
gcccagaagccgaggatttcgagtg

SEQ ID NO: 5884378 - DNA, 25 bp, Homo sapien
agagatactttgaagaactttttaa

SEQ ID NO: 5884379 - DNA, 25 bp, Homo sapien
atgtctgtggtcaattcaaactttt

SEQ ID NO: 5884380 - DNA, 25 bp, Homo sapien
atgacaagaaagcattcttttggac

SEQ ID NO: 5884381 - DNA, 25 bp, Homo sapien
tgaaacctacctaccttactcgaca

SEQ ID NO: 5884382 - DNA, 25 bp, Homo sapien
aaagaagcctaccgatattgtgcgg

SEQ ID NO: 5884383 - DNA, 25 bp, Homo sapien
tcatgttgtcccaagagttattgtt

SEQ ID NO: 5884384 - DNA, 25 bp, Homo sapien
tgctaaaactgtagaaaggtataac

SEQ ID NO: 5884385 - DNA, 25 bp, Homo sapien
atttgaatacatgggaacatgtttg

SEQ ID NO: 5884386 - DNA, 25 bp, Homo sapien
acagatgggtaaatctgccacatat

SEQ ID NO: 5884387 - DNA, 25 bp, Homo sapien
gccgaggtccgaggcagcggcacgg

SEQ ID NO: 5884388 - DNA, 25 bp, Homo sapien
gaagtcctaagcatcgaaggagcag

SEQ ID NO: 5884389 - DNA, 25 bp, Homo sapien
cctcgttatgggcaaaacatggatg

SEQ ID NO: 5884390 - DNA, 25 bp, Homo sapien
ctctcaaattgtgtggcaattcata

SEQ ID NO: 5884391 - DNA, 25 bp, Homo sapien
taatcacctcgatggacatgctgtt

SEQ ID NO: 5884392 - DNA, 25 bp, Homo sapien
tgatgacaagaaagcattcttttgg

SEQ ID NO: 5884393 - DNA, 25 bp, Homo sapien
gttatgggcaaaacatggatgtgat

SEQ ID NO: 5884394 - DNA, 25 bp, Homo sapien
aaaacagtgatgatattgataaaca

SEQ ID NO: 5884395 - DNA, 25 bp, Homo sapien
aggtccgaggcagcggcacggtgga

SEQ ID NO: 5884396 - DNA, 25 bp, Homo sapien
ctgtcctggcggcagaacgagcagc

SEQ ID NO: 5884397 - DNA, 25 bp, Homo sapien
gtggtcaattcaaacttttatcaga

SEQ ID NO: 5884398 - DNA, 25 bp, Homo sapien
tcatagcttagcacacatgtacacc

SEQ ID NO: 5884399 - DNA, 25 bp, Homo sapien
attgtgcggagaggaagaggtggat

SEQ ID NO: 5884400 - DNA, 25 bp, Homo sapien
tttgtatacattgccgcccgcactc

SEQ ID NO: 5884401 - DNA, 25 bp, Homo sapien
gctcagagctgtcctggcggcagaa

SEQ ID NO: 5884402 - DNA, 25 bp, Homo sapien
agaaaaaacttcatctctcaaattg

SEQ ID NO: 5884403 - DNA, 25 bp, Homo sapien
taaaggctgtaattacttgctatga

SEQ ID NO: 5884404 - DNA, 25 bp, Homo sapien
tgctgaagagagagagagatacttt

SEQ ID NO: 5884405 - DNA, 25 bp, Homo sapien
gttattgtttagaaaacgaagaggc

SEQ ID NO: 5884406 - DNA, 25 bp, Homo sapien
cagccaagtgtctgatgagatcctt

SEQ ID NO: 5884407 - DNA, 25 bp, Homo sapien
tgatattgataaacagtatcggaaa

SEQ ID NO: 5884408 - DNA, 25 bp, Homo sapien
atttctcaagaaaaaacttcatctc

SEQ ID NO: 5884409 - DNA, 25 bp, Homo sapien
attgaagaccggtttgtatacattg

SEQ ID NO: 5884410 - DNA, 25 bp, Homo sapien
gtcagcacgggcagcgtgcacgagg

SEQ ID NO: 5884411 - DNA, 25 bp, Homo sapien
ggttattggaggtgtgtcagaagga

SEQ ID NO: 5884412 - DNA, 25 bp, Homo sapien
accccacttctcatgtgtcactatt

SEQ ID NO: 5884413 - DNA, 25 bp, Homo sapien
atcgagtacatgtacaccgggcgca

SEQ ID NO: 5884414 - DNA, 25 bp, Homo sapien
agatgcaagagatacatcgtcacgc

SEQ ID NO: 5884415 - DNA, 25 bp, Homo sapien
ggcgagcgggggcgatccgggccca

SEQ ID NO: 5884416 - DNA, 25 bp, Homo sapien
cggagaggaagaggtggatgcttct

SEQ ID NO: 5884417 - DNA, 25 bp, Homo sapien
tcagatttggaaattactgttgatt

SEQ ID NO: 5884418 - DNA, 25 bp, Homo sapien
ccaagagttattgtttagaaaacga

SEQ ID NO: 5884419 - DNA, 25 bp, Homo sapien
agagactggctttcagatttggaaa

SEQ ID NO: 5884420 - DNA, 25 bp, Homo sapien
tggacatgctgttgcagtaacagaa

SEQ ID NO: 5884421 - DNA, 25 bp, Homo sapien
cagccatttgctattacaaagatga

SEQ ID NO: 5884422 - DNA, 25 bp, Homo sapien
tgaaatgggttcagagaaatgctga

SEQ ID NO: 5884423 - DNA, 25 bp, Homo sapien
tcattataggaggctggaaaaacag

SEQ ID NO: 5884424 - DNA, 25 bp, Homo sapien
ttaagtgaatgtgtgggatattttg

SEQ ID NO: 5884425 - DNA, 25 bp, Homo sapien
cacggtggacttcgggcctgggccg

SEQ ID NO: 5884426 - DNA, 25 bp, Homo sapien
aggatgaagaattttatacgttacc

SEQ ID NO: 5884427 - DNA, 25 bp, Homo sapien
ttcctcctatgccacaacctcgttg

SEQ ID NO: 5884428 - DNA, 25 bp, Homo sapien
tctcatgtgtcactattgcctcgtt

SEQ ID NO: 5884429 - DNA, 25 bp, Homo sapien
cactcctgtagaccgggacactgaa

SEQ ID NO: 5884430 - DNA, 25 bp, Homo sapien
gcggcagaacgagcagcggcgccag

SEQ ID NO: 5884431 - DNA, 25 bp, Homo sapien
cagagataccctatgcctcaaaacc

SEQ ID NO: 5884432 - DNA, 25 bp, Homo sapien
gtacttgcatggcacacagagatac

SEQ ID NO: 5884433 - DNA, 25 bp, Homo sapien
cgaggtccgaggcagcggcacggtg

SEQ ID NO: 5884434 - DNA, 25 bp, Homo sapien
gtaattacttgctatgatacagaga

SEQ ID NO: 5884435 - DNA, 25 bp, Homo sapien
agagctgtcctggcggcagaacgag

SEQ ID NO: 5884436 - DNA, 25 bp, Homo sapien
aggctggaaaaacagtgatgatatt

SEQ ID NO: 5884437 - DNA, 25 bp, Homo sapien
gaggacagatgggtaaatctgccac

SEQ ID NO: 5884438 - DNA, 25 bp, Homo sapien
atacggagaaatttccacaaagtga

SEQ ID NO: 5884439 - DNA, 25 bp, Homo sapien
ttattgacaattactgctttttcca

SEQ ID NO: 5884440 - DNA, 25 bp, Homo sapien
gccagggtttgctaaaactgtagaa

SEQ ID NO: 5884441 - DNA, 25 bp, Homo sapien
ggcagaacgagcagcggcgccaggg

SEQ ID NO: 5884442 - DNA, 25 bp, Homo sapien
caagaaagcattcttttggactaac

SEQ ID NO: 5884443 - DNA, 25 bp, Homo sapien
gaattttatacgttacctttccatc

SEQ ID NO: 5884444 - DNA, 25 bp, Homo sapien
cgaaggagcagccatttgctattac

SEQ ID NO: 5884445 - DNA, 25 bp, Homo sapien
agccaacttgctctgaaggctgctg

SEQ ID NO: 5884446 - DNA, 25 bp, Homo sapien
tcgttatgggcaaaacatggatgtg

SEQ ID NO: 5884447 - DNA, 25 bp, Homo sapien
cacgaggtgctggagttggccgaca

SEQ ID NO: 5884448 - DNA, 25 bp, Homo sapien
tcttcctcctatgccacaacctcgt

SEQ ID NO: 5884449 - DNA, 25 bp, Homo sapien
tttgaaatgggttcagagaaatgct

SEQ ID NO: 5884450 - DNA, 25 bp, Homo sapien
ccgtaccggtacttgcatggcacac

SEQ ID NO: 5884451 - DNA, 25 bp, Homo sapien
aaacatggatgtgatcatggttatt

SEQ ID NO: 5884452 - DNA, 25 bp, Homo sapien
ataatcctgagcttgataaatggca

SEQ ID NO: 5884453 - DNA, 25 bp, Homo sapien
ggattaaaggctgtaattacttgct

SEQ ID NO: 5884454 - DNA, 25 bp, Homo sapien
acgcccctgctctcgggccagtttt

SEQ ID NO: 5884455 - DNA, 25 bp, Homo sapien
cagagaaatgctgaagagagagaga

SEQ ID NO: 5884456 - DNA, 25 bp, Homo sapien
ggcgagtgccaagctctcagattga

SEQ ID NO: 5884457 - DNA, 25 bp, Homo sapien
tggcagaaggaccgcatcagacaga

SEQ ID NO: 5884458 - DNA, 25 bp, Homo sapien
ctagccattgaagaccggtttgtat

SEQ ID NO: 5884459 - DNA, 25 bp, Homo sapien
cctccagaagtcctaagcatcgaag

SEQ ID NO: 5884460 - DNA, 25 bp, Homo sapien
aagaccggtttgtatacattgccgc

SEQ ID NO: 5884461 - DNA, 25 bp, Homo sapien
gccacaacctcgttgtagagccact

SEQ ID NO: 5884462 - DNA, 25 bp, Homo sapien
aagcctaccgatattgtgcggagag

SEQ ID NO: 5884463 - DNA, 25 bp, Homo sapien
gcctcaaaacctgatgtggcagaag

SEQ ID NO: 5884464 - DNA, 25 bp, Homo sapien
gaatgtgtgggatattttgttgatg

SEQ ID NO: 5884465 - DNA, 25 bp, Homo sapien
aataatgaagtttgtgtcaagttgg

SEQ ID NO: 5884466 - DNA, 25 bp, Homo sapien
acatgtcaaaccagagaggctggta

SEQ ID NO: 5884467 - DNA, 25 bp, Homo sapien
ctatgcctcaaaacctgatgtggca

SEQ ID NO: 5884468 - DNA, 25 bp, Homo sapien
gggcctcttctgcgacattaccctg

SEQ ID NO: 5884469 - DNA, 25 bp, Homo sapien
tgctcaggttgtcccagatgaaacc

SEQ ID NO: 5884470 - DNA, 25 bp, Homo sapien
gcgcatccgcgtcagcacgggcagc

SEQ ID NO: 5884471 - DNA, 25 bp, Homo sapien
cttttggactaacagaagtcaaagg

SEQ ID NO: 5884472 - DNA, 25 bp, Homo sapien
gcatggagacggccgccgccggctc

SEQ ID NO: 5884473 - DNA, 25 bp, Homo sapien
gatgaagaattttatacgttacctt

SEQ ID NO: 5884474 - DNA, 25 bp, Homo sapien
aggatttcgagtgcagctctcactg

SEQ ID NO: 5884475 - DNA, 25 bp, Homo sapien
gcatccgcgtcagcacgggcagcgt

SEQ ID NO: 5884476 - DNA, 25 bp, Homo sapien
ggagaaatttccacaaagtgattca

SEQ ID NO: 5884477 - DNA, 25 bp, Homo sapien
agtttgtgtcaagttggtcgctgac

SEQ ID NO: 5884478 - DNA, 25 bp, Homo sapien
gattcttcgagatgtcaaagcacta

SEQ ID NO: 5884479 - DNA, 25 bp, Homo sapien
aatggagccagggtttgctaaaact

SEQ ID NO: 5884480 - DNA, 25 bp, Homo sapien
gcaagagatacatcgtcacgccctg

SEQ ID NO: 5884481 - DNA, 25 bp, Homo sapien
ctattgcctcgttatgggcaaaaca

SEQ ID NO: 5884482 - DNA, 25 bp, Homo sapien
tttatacgttacctttccatctcat

SEQ ID NO: 5884483 - DNA, 25 bp, Homo sapien
tcccaagagttattgtttagaaaac

SEQ ID NO: 5884484 - DNA, 25 bp, Homo sapien
cgagtgccaagctctcagattgaat

SEQ ID NO: 5884485 - DNA, 25 bp, Homo sapien
cagggtttgctaaaactgtagaaag

SEQ ID NO: 5884486 - DNA, 25 bp, Homo sapien
cggctgcggcagtggcggcggcggc

SEQ ID NO: 5884487 - DNA, 25 bp, Homo sapien
ccgccgaggtccgaggcagcggcac

SEQ ID NO: 5884488 - DNA, 25 bp, Homo sapien
ggccgccgaggtccgaggcagcggc

SEQ ID NO: 5884489 - DNA, 25 bp, Homo sapien
ttttaaagatgtgactgtttataat

SEQ ID NO: 5884490 - DNA, 25 bp, Homo sapien
gagccagggtttgctaaaactgtag

SEQ ID NO: 5884491 - DNA, 25 bp, Homo sapien
ctacctaccttactcgacatgtcaa

SEQ ID NO: 5884492 - DNA, 25 bp, Homo sapien
aaatgtctgtggtcaattcaaactt

SEQ ID NO: 5884493 - DNA, 25 bp, Homo sapien
atgtgatcatggttattggaggtgt

SEQ ID NO: 5884494 - DNA, 25 bp, Homo sapien
gccagggcctcttctgcgacattac

SEQ ID NO: 5884495 - DNA, 25 bp, Homo sapien
tgttgctggatcaatggagccaggg

SEQ ID NO: 5884496 - DNA, 25 bp, Homo sapien
ttgtcccagatgaaacctacctacc

SEQ ID NO: 5884497 - DNA, 25 bp, Homo sapien
tctgaagaggttctctttgaaaccg

SEQ ID NO: 5884498 - DNA, 25 bp, Homo sapien
ttcgtttaaaagaattttgtggaga

SEQ ID NO: 5884499 - DNA, 25 bp, Homo sapien
gagaatttctcaagaaaaaacttca

SEQ ID NO: 5884500 - DNA, 25 bp, Homo sapien
tacattgccgcccgcactcctgtag

SEQ ID NO: 5884501 - DNA, 25 bp, Homo sapien
gtaaatctgccacatattcataatc

SEQ ID NO: 5884502 - DNA, 25 bp, Homo sapien
atccgcgtcagcacgggcagcgtgc

SEQ ID NO: 5884503 - DNA, 25 bp, Homo sapien
gatgatattgataaacagtatcgga

SEQ ID NO: 5884504 - DNA, 25 bp, Homo sapien
atgccagcaccccacttctcatgtg

SEQ ID NO: 5884505 - DNA, 25 bp, Homo sapien
ggacttcgggcctgggccggggatc

SEQ ID NO: 5884506 - DNA, 25 bp, Homo sapien
ctgacgcagtggagagacatgctct

SEQ ID NO: 5884507 - DNA, 25 bp, Homo sapien
ccgttttgaaatgggttcagagaaa

SEQ ID NO: 5884508 - DNA, 25 bp, Homo sapien
ctaccttactcgacatgtcaaacca

SEQ ID NO: 5884509 - DNA, 25 bp, Homo sapien
ggcccaccgctcggtactggctgcc

SEQ ID NO: 5884510 - DNA, 25 bp, Homo sapien
cgccggctcggcaggactggccgcc

SEQ ID NO: 5884511 - DNA, 25 bp, Homo sapien
gaagtcaaagggaagctctatagca

SEQ ID NO: 5884512 - DNA, 25 bp, Homo sapien
tctgcgacattaccctgtgcttcgg

SEQ ID NO: 5884513 - DNA, 25 bp, Homo sapien
aagattcttcgagatgtcaaagcac

SEQ ID NO: 5884514 - DNA, 25 bp, Homo sapien
tcaaagcactagccattgaagaccg

SEQ ID NO: 5884515 - DNA, 25 bp, Homo sapien
agatgcgcaagtggagctccgagcc

SEQ ID NO: 5884516 - DNA, 25 bp, Homo sapien
ctcgggacgggtggagatgcgcaag

SEQ ID NO: 5884517 - DNA, 25 bp, Homo sapien
ggagctccgagccggggcccgaacc

SEQ ID NO: 5884518 - DNA, 25 bp, Homo sapien
acgagcagcggcgccagggcctctt

SEQ ID NO: 5884519 - DNA, 25 bp, Homo sapien
tgcagtaacagaatcctacgtgtat

SEQ ID NO: 5884520 - DNA, 25 bp, Homo sapien
gcaccaaagattcttcgagatgtca

SEQ ID NO: 5884521 - DNA, 25 bp, Homo sapien
atcggcaccaaagattcttcgagat

SEQ ID NO: 5884522 - DNA, 25 bp, Homo sapien
ttacctttccatctcattagagact

SEQ ID NO: 5884523 - DNA, 25 bp, Homo sapien
aaggagcagccatttgctattacaa

SEQ ID NO: 5884524 - DNA, 25 bp, Homo sapien
aagccgtaatcgagtacatgtacac

SEQ ID NO: 5884525 - DNA, 25 bp, Homo sapien
gggcagcgtgcacgaggtgctggag

SEQ ID NO: 5884526 - DNA, 25 bp, Homo sapien
tcaggtactggagatggagagcatg

SEQ ID NO: 5884527 - DNA, 25 bp, Homo sapien
gttgattctgaagaggttctctttg

SEQ ID NO: 5884528 - DNA, 25 bp, Homo sapien
agaaatttccacaaagtgattcagg

SEQ ID NO: 5884529 - DNA, 25 bp, Homo sapien
ggtttgtatacattgccgcccgcac

SEQ ID NO: 5884530 - DNA, 25 bp, Homo sapien
atggcggctgcggcagtggcggcgg

SEQ ID NO: 5884531 - DNA, 25 bp, Homo sapien
tgtacaccgggcgcatccgcgtcag

SEQ ID NO: 5884532 - DNA, 25 bp, Homo sapien
acctttccatctcattagagactgg

SEQ ID NO: 5884533 - DNA, 25 bp, Homo sapien
acaatctggcacatgccagcacccc

SEQ ID NO: 5884534 - DNA, 25 bp, Homo sapien
gtggcaattcatagcttagcacaca

SEQ ID NO: 5884535 - DNA, 25 bp, Homo sapien
tgtggagaatttctcaagaaaaaac

SEQ ID NO: 5884536 - DNA, 25 bp, Homo sapien
atggattaaaggctgtaattacttg

SEQ ID NO: 5884537 - DNA, 25 bp, Homo sapien
tataacccaaatttgaatacatggg

SEQ ID NO: 5884538 - DNA, 25 bp, Homo sapien
gggatattttgttgatgaggacaga

SEQ ID NO: 5884539 - DNA, 25 bp, Homo sapien
acaggttcctactcattcgtttaaa

SEQ ID NO: 5884540 - DNA, 25 bp, Homo sapien
cggcggcggcggccgcggctgcatc

SEQ ID NO: 5884541 - DNA, 25 bp, Homo sapien
ggaggctggaaaaacagtgatgata

SEQ ID NO: 5884542 - DNA, 25 bp, Homo sapien
aaaacttcatctctcaaattgtgtg

SEQ ID NO: 5884543 - DNA, 25 bp, Homo sapien
gctctgagagctgagaatatacaat

SEQ ID NO: 5884544 - DNA, 25 bp, Homo sapien
agagacatgctctgagagctgagaa

SEQ ID NO: 5884545 - DNA, 25 bp, Homo sapien
ttttccaaatgtctgtggtcaattc

SEQ ID NO: 5884546 - DNA, 25 bp, Homo sapien
tcgagatgtcaaagcactagccatt

SEQ ID NO: 5884547 - DNA, 25 bp, Homo sapien
ggttttaaagatgtgactgtttata

SEQ ID NO: 5884548 - DNA, 25 bp, Homo sapien
tggcacaacttggaatcggcaccaa

SEQ ID NO: 5884549 - DNA, 25 bp, Homo sapien
gaagatggattaaaggctgtaatta

SEQ ID NO: 5884550 - DNA, 25 bp, Homo sapien
gctttcagatttggaaattactgtt

SEQ ID NO: 5884551 - DNA, 25 bp, Homo sapien
cgctgacgcagtggagagacatgct

SEQ ID NO: 5884552 - DNA, 25 bp, Homo sapien
gatcaatggagccagggtttgctaa

SEQ ID NO: 5884553 - DNA, 25 bp, Homo sapien
gcctcttctgcgacattaccctgtg

SEQ ID NO: 5884554 - DNA, 25 bp, Homo sapien
gtggacttcgggcctgggccgggga

SEQ ID NO: 5884555 - DNA, 25 bp, Homo sapien
aacttggaatcggcaccaaagattc

SEQ ID NO: 5884556 - DNA, 25 bp, Homo sapien
agctgtcctggcggcagaacgagca

SEQ ID NO: 5884557 - DNA, 25 bp, Homo sapien
attcatagcttagcacacatgtaca

SEQ ID NO: 5884558 - DNA, 25 bp, Homo sapien
gcacgggcagcgtgcacgaggtgct

SEQ ID NO: 5884559 - DNA, 25 bp, Homo sapien
ccgcgtcagcacgggcagcgtgcac

SEQ ID NO: 5884560 - DNA, 25 bp, Homo sapien
gtaccggtacttgcatggcacacag

SEQ ID NO: 5884561 - DNA, 25 bp, Homo sapien
atttaagtgaatgtgtgggatattt

SEQ ID NO: 5884562 - DNA, 25 bp, Homo sapien
tgatgaggacagatgggtaaatctg

SEQ ID NO: 5884563 - DNA, 25 bp, Homo sapien
ttggaaattactgttgattctgaag

SEQ ID NO: 5884564 - DNA, 25 bp, Homo sapien
agagagatactttgaagaacttttt

SEQ ID NO: 5884565 - DNA, 25 bp, Homo sapien
tggagttggccgacaggttcctact

SEQ ID NO: 5884566 - DNA, 25 bp, Homo sapien
aatggcacaacttggaatcggcacc

SEQ ID NO: 5884567 - DNA, 25 bp, Homo sapien
cttctcatgtgtcactattgcctcg

SEQ ID NO: 5884568 - DNA, 25 bp, Homo sapien
gcacatgccagcaccccacttctca

SEQ ID NO: 5884569 - DNA, 25 bp, Homo sapien
agaaggaccgcatcagacagatgca

SEQ ID NO: 5884570 - DNA, 25 bp, Homo sapien
gtttgtagtctgatgacaagaaagc

SEQ ID NO: 5884571 - DNA, 25 bp, Homo sapien
ccgggcgcatccgcgtcagcacggg

SEQ ID NO: 5884572 - DNA, 25 bp, Homo sapien
gatggagagcatggagacggccgcc

SEQ ID NO: 5884573 - DNA, 25 bp, Homo sapien
tggatcaatggagccagggtttgct

SEQ ID NO: 5884574 - DNA, 25 bp, Homo sapien
cagaagtcaaagggaagctctatag

SEQ ID NO: 5884575 - DNA, 25 bp, Homo sapien
tctgatgagatccttgaaagcttgc

SEQ ID NO: 5884576 - DNA, 25 bp, Homo sapien
taatgaagtttgtgtcaagttggtc

SEQ ID NO: 5884577 - DNA, 25 bp, Homo sapien
ggcagtaagaaaaattgccagccaa

SEQ ID NO: 5884578 - DNA, 25 bp, Homo sapien
acgggtggagatgcgcaagtggagc

SEQ ID NO: 5884579 - DNA, 25 bp, Homo sapien
ctgctctcgggccagttttccgagt

SEQ ID NO: 5884580 - DNA, 25 bp, Homo sapien
agcttagcacacatgtacaccctga

SEQ ID NO: 5884581 - DNA, 25 bp, Homo sapien
tcagacagcatcatgttgtcccaag

SEQ ID NO: 5884582 - DNA, 25 bp, Homo sapien
agcagccatttgctattacaaagat

SEQ ID NO: 5884583 - DNA, 25 bp, Homo sapien
actgctttttccaaatgtctgtggt

SEQ ID NO: 5884584 - DNA, 25 bp, Homo sapien
cccagatgaaacctacctaccttac

SEQ ID NO: 5884585 - DNA, 25 bp, Homo sapien
gcatggcacacagagataccctatg

SEQ ID NO: 5884586 - DNA, 25 bp, Homo sapien
ttgaatacatgggaacatgtttgta

SEQ ID NO: 5884587 - DNA, 25 bp, Homo sapien
gccgaggatttcgagtgcagctctc

SEQ ID NO: 5884588 - DNA, 25 bp, Homo sapien
tgcggcagtggcggcggcggcggcg

SEQ ID NO: 5884589 - DNA, 25 bp, Homo sapien
aatctttgccgcttattgacaatta

SEQ ID NO: 5884590 - DNA, 25 bp, Homo sapien
cactgctcagagctgtcctggcggc

SEQ ID NO: 5884591 - DNA, 25 bp, Homo sapien
cctcctatgccacaacctcgttgta

SEQ ID NO: 5884592 - DNA, 25 bp, Homo sapien
gagttggccgacaggttcctactca

SEQ ID NO: 5884593 - DNA, 25 bp, Homo sapien
tcagagctgtcctggcggcagaacg

SEQ ID NO: 5884594 - DNA, 25 bp, Homo sapien
cgacatgtcaaaccagagaggctgg

SEQ ID NO: 5884595 - DNA, 25 bp, Homo sapien
cctgagccaacttgctctgaaggct

SEQ ID NO: 5884596 - DNA, 25 bp, Homo sapien
cttcttcctcctatgccacaacctc

SEQ ID NO: 5884597 - DNA, 25 bp, Homo sapien
aattacttgctatgatacagagact

SEQ ID NO: 5884598 - DNA, 25 bp, Homo sapien
ccctgctctcgggccagttttccga

SEQ ID NO: 5884599 - DNA, 25 bp, Homo sapien
tcatggttattggaggtgtgtcaga

SEQ ID NO: 5884600 - DNA, 25 bp, Homo sapien
acacatgtacaccctgagccaactt

SEQ ID NO: 5884601 - DNA, 25 bp, Homo sapien
ctgctcagagctgtcctggcggcag

SEQ ID NO: 5884602 - DNA, 25 bp, Homo sapien
cggcaggactggccgccgaggtccg

SEQ ID NO: 5884603 - DNA, 25 bp, Homo sapien
accgagtacttcacgcccctgctct

SEQ ID NO: 5884604 - DNA, 25 bp, Homo sapien
atctcattagagactggctttcaga

SEQ ID NO: 5884605 - DNA, 25 bp, Homo sapien
cggggcccgaacccgacacagtgga

SEQ ID NO: 5884606 - DNA, 25 bp, Homo sapien
acctacctaccttactcgacatgtc

SEQ ID NO: 5884607 - DNA, 25 bp, Homo sapien
ctgaagagagagagagatactttga

SEQ ID NO: 5884608 - DNA, 25 bp, Homo sapien
cattcgtttaaaagaattttgtgga

SEQ ID NO: 5884609 - DNA, 25 bp, Homo sapien
cttcacgcccctgctctcgggccag

SEQ ID NO: 5884610 - DNA, 25 bp, Homo sapien
gctggaaaaacagtgatgatattga

SEQ ID NO: 5884611 - DNA, 25 bp, Homo sapien
cttgctctgaaggctgctgatatga

SEQ ID NO: 5884612 - DNA, 25 bp, Homo sapien
ggagcagccatttgctattacaaag

SEQ ID NO: 5884613 - DNA, 25 bp, Homo sapien
gagaggaagaggtggatgcttcttc

SEQ ID NO: 5884614 - DNA, 25 bp, Homo sapien
aggatcccgtaccggtacttgcatg

SEQ ID NO: 5884615 - DNA, 25 bp, Homo sapien
acgggcagcgtgcacgaggtgctgg

SEQ ID NO: 5884616 - DNA, 25 bp, Homo sapien
gacgcagtggagagacatgctctga

SEQ ID NO: 5884617 - DNA, 25 bp, Homo sapien
attgataaacagtatcggaaagaag

SEQ ID NO: 5884618 - DNA, 25 bp, Homo sapien
acatgccagcaccccacttctcatg

SEQ ID NO: 5884619 - DNA, 25 bp, Homo sapien
gttggtcgctgacgcagtggagaga

SEQ ID NO: 5884620 - DNA, 25 bp, Homo sapien
agcgggggcgatccgggcccagaag

SEQ ID NO: 5884621 - DNA, 25 bp, Homo sapien
taacccaaatttgaatacatgggaa

SEQ ID NO: 5884622 - DNA, 25 bp, Homo sapien
gcatcgaaggagcagccatttgcta

SEQ ID NO: 5884623 - DNA, 25 bp, Homo sapien
cccaccgctcggtactggctgccgc

SEQ ID NO: 5884624 - DNA, 25 bp, Homo sapien
gtcacgccctgaacatgaggcgagt

SEQ ID NO: 5884625 - DNA, 25 bp, Homo sapien
catttgctattacaaagatgatgtc

SEQ ID NO: 5884626 - DNA, 25 bp, Homo sapien
ttagagactggctttcagatttgga

SEQ ID NO: 5884627 - DNA, 25 bp, Homo sapien
tcggaaagaagcctaccgatattgt

SEQ ID NO: 5884628 - DNA, 25 bp, Homo sapien
ctgtgcttcggcggggctggaggcc

SEQ ID NO: 5884629 - DNA, 25 bp, Homo sapien
aaacctacctaccttactcgacatg

SEQ ID NO: 5884630 - DNA, 25 bp, Homo sapien
tttgctattacaaagatgatgtctt

SEQ ID NO: 5884631 - DNA, 25 bp, Homo sapien
gaagagagagagagatactttgaag

SEQ ID NO: 5884632 - DNA, 25 bp, Homo sapien
aaaagaattttgtggagaatttctc

SEQ ID NO: 5884633 - DNA, 25 bp, Homo sapien
aaggctgtaattacttgctatgata

SEQ ID NO: 5884634 - DNA, 25 bp, Homo sapien
gttttgaaatgggttcagagaaatg

SEQ ID NO: 5884635 - DNA, 25 bp, Homo sapien
ctcattagagactggctttcagatt

SEQ ID NO: 5884636 - DNA, 25 bp, Homo sapien
gggtggagatgcgcaagtggagctc

SEQ ID NO: 5884637 - DNA, 25 bp, Homo sapien
gatcatggttattggaggtgtgtca

SEQ ID NO: 5884638 - DNA, 25 bp, Homo sapien
agctgagaatatacaatctggcaca

SEQ ID NO: 5884639 - DNA, 25 bp, Homo sapien
aattgccagccaagtgtctgatgag

SEQ ID NO: 5884640 - DNA, 25 bp, Homo sapien
tttgtgtcaagttggtcgctgacgc

SEQ ID NO: 5884641 - DNA, 25 bp, Homo sapien
gggacactgaagatggattaaaggc

SEQ ID NO: 5884642 - DNA, 25 bp, Homo sapien
ttcctactcattcgtttaaaagaat

SEQ ID NO: 5884643 - DNA, 25 bp, Homo sapien
aactttttaaattgctcaggttgtc

SEQ ID NO: 5884644 - DNA, 25 bp, Homo sapien
tccgggcccaccgctcggtactggc

SEQ ID NO: 5884645 - DNA, 25 bp, Homo sapien
gaggacacggcaactttagtcctgg

SEQ ID NO: 5884646 - DNA, 25 bp, Homo sapien
atgtacaccctgagccaacttgctc

SEQ ID NO: 5884647 - DNA, 25 bp, Homo sapien
gtgggatattttgttgatgaggaca

SEQ ID NO: 5884648 - DNA, 25 bp, Homo sapien
cgaggtgctggagttggccgacagg

SEQ ID NO: 5884649 - DNA, 25 bp, Homo sapien
aaatttccacaaagtgattcaggat

SEQ ID NO: 5884650 - DNA, 25 bp, Homo sapien
tgtgtcaagttggtcgctgacgcag

SEQ ID NO: 5884651 - DNA, 25 bp, Homo sapien
gataaatggcacaacttggaatcgg

SEQ ID NO: 5884652 - DNA, 25 bp, Homo sapien
agatgggtaaatctgccacatattc

SEQ ID NO: 5884653 - DNA, 25 bp, Homo sapien
gctatgatacagagactcgacagtg

SEQ ID NO: 5884654 - DNA, 25 bp, Homo sapien
taaaactgtagaaaggtataaccca

SEQ ID NO: 5884655 - DNA, 25 bp, Homo sapien
tttggactaacagaagtcaaaggga

SEQ ID NO: 5884656 - DNA, 25 bp, Homo sapien
caattcatagcttagcacacatgta

SEQ ID NO: 5884657 - DNA, 25 bp, Homo sapien
gcgcaagtggagctccgagccgggg

SEQ ID NO: 5884658 - DNA, 25 bp, Homo sapien
agtcaaagggaagctctatagcatt

SEQ ID NO: 5884659 - DNA, 25 bp, Homo sapien
tctgagagctgagaatatacaatct

SEQ ID NO: 5884660 - DNA, 25 bp, Homo sapien
caaagatgatgtcttcattatagga

SEQ ID NO: 5884661 - DNA, 25 bp, Homo sapien
gactaacagaagtcaaagggaagct

SEQ ID NO: 5884662 - DNA, 25 bp, Homo sapien
tcatctctcaaattgtgtggcaatt

SEQ ID NO: 5884663 - DNA, 25 bp, Homo sapien
gtgtcactattgcctcgttatgggc

SEQ ID NO: 5884664 - DNA, 25 bp, Homo sapien
tcgagtgcagctctcactgctcaga

SEQ ID NO: 5884665 - DNA, 25 bp, Homo sapien
ctgccgccaccgagtacttcacgcc

SEQ ID NO: 5884666 - DNA, 25 bp, Homo sapien
acggagaaatttccacaaagtgatt

SEQ ID NO: 5884667 - DNA, 25 bp, Homo sapien
atctctcaaattgtgtggcaattca

SEQ ID NO: 5884668 - DNA, 25 bp, Homo sapien
cttcattataggaggctggaaaaac

SEQ ID NO: 5884669 - DNA, 25 bp, Homo sapien
gcaagtggagctccgagccggggcc

SEQ ID NO: 5884670 - DNA, 25 bp, Homo sapien
tgaaagcttgcctccagaagtccta

SEQ ID NO: 5884671 - DNA, 25 bp, Homo sapien
ctaagcatcgaaggagcagccattt

SEQ ID NO: 5884672 - DNA, 25 bp, Homo sapien
taaatggcacaacttggaatcggca

SEQ ID NO: 5884673 - DNA, 25 bp, Homo sapien
gtactggagatggagagcatggaga

SEQ ID NO: 5884674 - DNA, 25 bp, Homo sapien
gccaagtgtctgatgagatccttga

SEQ ID NO: 5884675 - DNA, 25 bp, Homo sapien
cgagttccgggcccaccgctcggta

SEQ ID NO: 5884676 - DNA, 25 bp, Homo sapien
agcgtgcacgaggtgctggagttgg

SEQ ID NO: 5884677 - DNA, 25 bp, Homo sapien
atacatgggaacatgtttgtagtct

SEQ ID NO: 5884678 - DNA, 25 bp, Homo sapien
gagatggagagcatggagacggccg

SEQ ID NO: 5884679 - DNA, 25 bp, Homo sapien
ctttagtcctggttttaaagatgtg

SEQ ID NO: 5884680 - DNA, 25 bp, Homo sapien
tgtatgttgctggatcaatggagcc

SEQ ID NO: 5884681 - DNA, 25 bp, Homo sapien
tacatgtacaccgggcgcatccgcg

SEQ ID NO: 5884682 - DNA, 25 bp, Homo sapien
ttgaaaccgttttgaaatgggttca

SEQ ID NO: 5884683 - DNA, 25 bp, Homo sapien
gcaccccacttctcatgtgtcacta

SEQ ID NO: 5884684 - DNA, 25 bp, Homo sapien
gccgccggctcggcaggactggccg

SEQ ID NO: 5884685 - DNA, 25 bp, Homo sapien
gcccctgctctcgggccagttttcc

SEQ ID NO: 5884686 - DNA, 25 bp, Homo sapien
atggttattggaggtgtgtcagaag

SEQ ID NO: 5884687 - DNA, 25 bp, Homo sapien
ttgctatgatacagagactcgacag

SEQ ID NO: 5884688 - DNA, 25 bp, Homo sapien
aaggaccgcatcagacagatgcaag

SEQ ID NO: 5884689 - DNA, 25 bp, Homo sapien
aaatctgccacatattcataatcac

SEQ ID NO: 5884690 - DNA, 25 bp, Homo sapien
attaccctgtgcttcggcggggctg

SEQ ID NO: 5884691 - DNA, 25 bp, Homo sapien
ggcggctgcggcagtggcggcggcg

SEQ ID NO: 5884692 - DNA, 25 bp, Homo sapien
ctggctgccgccaccgagtacttca

SEQ ID NO: 5884693 - DNA, 25 bp, Homo sapien
atccgggcccagaagccgaggattt

SEQ ID NO: 5884694 - DNA, 25 bp, Homo sapien
cagggcctcttctgcgacattaccc

SEQ ID NO: 5884695 - DNA, 25 bp, Homo sapien
tgggccggggatctctgcaatggag

SEQ ID NO: 5884696 - DNA, 25 bp, Homo sapien
gatgtcaaagcactagccattgaag

SEQ ID NO: 5884697 - DNA, 25 bp, Homo sapien
gaaatgctgaagagagagagagata

SEQ ID NO: 5884698 - DNA, 25 bp, Homo sapien
ctgagcttgataaatggcacaactt

SEQ ID NO: 5884699 - DNA, 25 bp, Homo sapien
atattgataaacagtatcggaaaga

SEQ ID NO: 5884700 - DNA, 25 bp, Homo sapien
cttctgcgacattaccctgtgcttc

SEQ ID NO: 5884701 - DNA, 25 bp, Homo sapien
gctgcggcagtggcggcggcggcgg

SEQ ID NO: 5884702 - DNA, 25 bp, Homo sapien
ataaacagtatcggaaagaagccta

SEQ ID NO: 5884703 - DNA, 25 bp, Homo sapien
acttcgggcctgggccggggatctc

SEQ ID NO: 5884704 - DNA, 25 bp, Homo sapien
gcggcggcggccgcggctgcatctc

SEQ ID NO: 5884705 - DNA, 25 bp, Homo sapien
gaggcagtaagaaaaattgccagcc

SEQ ID NO: 5884706 - DNA, 25 bp, Homo sapien
gaggttctctttgaaaccgttttga

SEQ ID NO: 5884707 - DNA, 25 bp, Homo sapien
tacaccgggcgcatccgcgtcagca

SEQ ID NO: 5884708 - DNA, 25 bp, Homo sapien
cacttctcatgtgtcactattgcct

SEQ ID NO: 5884709 - DNA, 25 bp, Homo sapien
ggcaaaacatggatgtgatcatggt

SEQ ID NO: 5884710 - DNA, 25 bp, Homo sapien
ccctgtgcttcggcggggctggagg

SEQ ID NO: 5884711 - DNA, 25 bp, Homo sapien
gggcccagaagccgaggatttcgag

SEQ ID NO: 5884712 - DNA, 25 bp, Homo sapien
atgtcttcattataggaggctggaa

SEQ ID NO: 5884713 - DNA, 25 bp, Homo sapien
cattagagactggctttcagatttg

SEQ ID NO: 5884714 - DNA, 25 bp, Homo sapien
tgcctcgttatgggcaaaacatgga

SEQ ID NO: 5884715 - DNA, 25 bp, Homo sapien
atgtggaatctttgccgcttattga

SEQ ID NO: 5884716 - DNA, 25 bp, Homo sapien
ttctctttgaaaccgttttgaaatg

SEQ ID NO: 5884717 - DNA, 25 bp, Homo sapien
cacagtggaagccgtaatcgagtac

SEQ ID NO: 5884718 - DNA, 25 bp, Homo sapien
ctggttttaaagatgtgactgttta

SEQ ID NO: 5884719 - DNA, 25 bp, Homo sapien
cgttgtagagccactgcttgtcacg

SEQ ID NO: 5884720 - DNA, 25 bp, Homo sapien
cgctcgggacgggtggagatgcgca

SEQ ID NO: 5884721 - DNA, 25 bp, Homo sapien
caaaccagagaggctggtagccaat

SEQ ID NO: 5884722 - DNA, 25 bp, Homo sapien
tgataaacagtatcggaaagaagcc

SEQ ID NO: 5884723 - DNA, 25 bp, Homo sapien
ttctcaagaaaaaacttcatctctc

SEQ ID NO: 5884724 - DNA, 25 bp, Homo sapien
atgtgactgtttataatcctgagct

SEQ ID NO: 5884725 - DNA, 25 bp, Homo sapien
ggctggaggccgcgagttccgggcc

SEQ ID NO: 5884726 - DNA, 25 bp, Homo sapien
gtcactattgcctcgttatgggcaa

SEQ ID NO: 5884727 - DNA, 25 bp, Homo sapien
tttgccgcttattgacaattactgc

SEQ ID NO: 5884728 - DNA, 25 bp, Homo sapien
tcgatggacatgctgttgcagtaac

SEQ ID NO: 5884729 - DNA, 25 bp, Homo sapien
ttattggaggtgtgtcagaaggagg

SEQ ID NO: 5884730 - DNA, 25 bp, Homo sapien
gttgatgaggacagatgggtaaatc

SEQ ID NO: 5884731 - DNA, 25 bp, Homo sapien
tggagatggagagcatggagacggc

SEQ ID NO: 5884732 - DNA, 25 bp, Homo sapien
ggcaattcatagcttagcacacatg

SEQ ID NO: 5884733 - DNA, 25 bp, Homo sapien
tctgatgacaagaaagcattctttt

SEQ ID NO: 5884734 - DNA, 25 bp, Homo sapien
aagcatcgaaggagcagccatttgc

SEQ ID NO: 5884735 - DNA, 25 bp, Homo sapien
ggaatctttgccgcttattgacaat

SEQ ID NO: 5884736 - DNA, 25 bp, Homo sapien
gcccgaacccgacacagtggaagcc

SEQ ID NO: 5884737 - DNA, 25 bp, Homo sapien
gaggcagcggcacggtggacttcgg

SEQ ID NO: 5884738 - DNA, 25 bp, Homo sapien
atacaatctggcacatgccagcacc

SEQ ID NO: 5884739 - DNA, 25 bp, Homo sapien
tcctgagcttgataaatggcacaac

SEQ ID NO: 5884740 - DNA, 25 bp, Homo sapien
cctgtagaccgggacactgaagatg

SEQ ID NO: 5884741 - DNA, 25 bp, Homo sapien
cctacgtgtatgttgctggatcaat

SEQ ID NO: 5884742 - DNA, 25 bp, Homo sapien
gcagaaggaccgcatcagacagatg

SEQ ID NO: 5884743 - DNA, 25 bp, Homo sapien
gaggcgagtgccaagctctcagatt

SEQ ID NO: 5884744 - DNA, 25 bp, Homo sapien
ggtggatgcttcttcctcctatgcc

SEQ ID NO: 5884745 - DNA, 25 bp, Homo sapien
gtgaatgtgtgggatattttgttga

SEQ ID NO: 5884746 - DNA, 25 bp, Homo sapien
agagttattgtttagaaaacgaaga

SEQ ID NO: 5884747 - DNA, 25 bp, Homo sapien
atgtgtcactattgcctcgttatgg

SEQ ID NO: 5884748 - DNA, 25 bp, Homo sapien
ttcgggcctgggccggggatctctg

SEQ ID NO: 5884749 - DNA, 25 bp, Homo sapien
agtgccaagctctcagattgaatgc

SEQ ID NO: 5884750 - DNA, 25 bp, Homo sapien
acatgggaacatgtttgtagtctga

SEQ ID NO: 5884751 - DNA, 25 bp, Homo sapien
aaagcttgcctccagaagtcctaag

SEQ ID NO: 5884752 - DNA, 25 bp, Homo sapien
ccgaggcagcggcacggtggacttc

SEQ ID NO: 5884753 - DNA, 25 bp, Homo sapien
atctgccacatattcataatcacct

SEQ ID NO: 5884754 - DNA, 25 bp, Homo sapien
ccaataatgaagtttgtgtcaagtt

SEQ ID NO: 5884755 - DNA, 25 bp, Homo sapien
atttccacaaagtgattcaggatga

SEQ ID NO: 5884756 - DNA, 25 bp, Homo sapien
gcatctcttcaggtactggagatgg

SEQ ID NO: 5884757 - DNA, 25 bp, Homo sapien
tcctggttttaaagatgtgactgtt

SEQ ID NO: 5884758 - DNA, 25 bp, Homo sapien
tactgttgattctgaagaggttctc

SEQ ID NO: 5884759 - DNA, 25 bp, Homo sapien
tattgtttagaaaacgaagaggcag

SEQ ID NO: 5884760 - DNA, 25 bp, Homo sapien
agacagcatcatgttgtcccaagag

SEQ ID NO: 5884761 - DNA, 25 bp, Homo sapien
cttcaggtactggagatggagagca

SEQ ID NO: 5884762 - DNA, 25 bp, Homo sapien
gctggatcaatggagccagggtttg

SEQ ID NO: 5884763 - DNA, 25 bp, Homo sapien
ggcacggtggacttcgggcctgggc

SEQ ID NO: 5884764 - DNA, 25 bp, Homo sapien
ctgccacatattcataatcacctcg

SEQ ID NO: 5884765 - DNA, 25 bp, Homo sapien
ccaacttgctctgaaggctgctgat

SEQ ID NO: 5884766 - DNA, 25 bp, Homo sapien
agtcctaagcatcgaaggagcagcc

SEQ ID NO: 5884767 - DNA, 25 bp, Homo sapien
gagataccctatgcctcaaaacctg

SEQ ID NO: 5884768 - DNA, 25 bp, Homo sapien
gtagagccactgcttgtcacgtgag

SEQ ID NO: 5884769 - DNA, 25 bp, Homo sapien
tctggcacatgccagcaccccactt

SEQ ID NO: 5884770 - DNA, 25 bp, Homo sapien
gatacatcgtcacgccctgaacatg

SEQ ID NO: 5884771 - DNA, 25 bp, Homo sapien
cgaggatttcgagtgcagctctcac

SEQ ID NO: 5884772 - DNA, 25 bp, Homo sapien
aagagatacatcgtcacgccctgaa

SEQ ID NO: 5884773 - DNA, 25 bp, Homo sapien
aatcctgagcttgataaatggcaca

SEQ ID NO: 5884774 - DNA, 25 bp, Homo sapien
atgtttgtagtctgatgacaagaaa

SEQ ID NO: 5884775 - DNA, 25 bp, Homo sapien
ctgatatgatacggagaaatttcca

SEQ ID NO: 5884776 - DNA, 25 bp, Homo sapien
gagtgcagctctcactgctcagagc

SEQ ID NO: 5884777 - DNA, 25 bp, Homo sapien
atggcacacagagataccctatgcc

SEQ ID NO: 5884778 - DNA, 25 bp, Homo sapien
ctgaagatggattaaaggctgtaat

SEQ ID NO: 5884779 - DNA, 25 bp, Homo sapien
taggaggctggaaaaacagtgatga

SEQ ID NO: 5884780 - DNA, 25 bp, Homo sapien
tgtcaaagcactagccattgaagac

SEQ ID NO: 5884781 - DNA, 25 bp, Homo sapien
gctgctgatatgatacggagaaatt

SEQ ID NO: 5884782 - DNA, 25 bp, Homo sapien
ctttttccaaatgtctgtggtcaat

SEQ ID NO: 5884783 - DNA, 25 bp, Homo sapien
cagcaccccacttctcatgtgtcac

SEQ ID NO: 5884784 - DNA, 25 bp, Homo sapien
tgccgcttattgacaattactgctt

SEQ ID NO: 5884785 - DNA, 25 bp, Homo sapien
aacttcatctctcaaattgtgtggc

SEQ ID NO: 5884786 - DNA, 25 bp, Homo sapien
gagatccttgaaagcttgcctccag

SEQ ID NO: 5884787 - DNA, 25 bp, Homo sapien
tgccaagctctcagattgaatgcta

SEQ ID NO: 5884788 - DNA, 25 bp, Homo sapien
gttggccgacaggttcctactcatt

SEQ ID NO: 5884789 - DNA, 25 bp, Homo sapien
agcggcgccagggcctcttctgcga

SEQ ID NO: 5884790 - DNA, 25 bp, Homo sapien
gccggggcccgaacccgacacagtg

SEQ ID NO: 5884791 - DNA, 25 bp, Homo sapien
cccgctcgggacgggtggagatgcg

SEQ ID NO: 5884792 - DNA, 25 bp, Homo sapien
gatattttgttgatgaggacagatg

SEQ ID NO: 5884793 - DNA, 25 bp, Homo sapien
ctgaacatgaggcgagtgccaagct

SEQ ID NO: 5884794 - DNA, 25 bp, Homo sapien
caaattgtgtggcaattcatagctt

SEQ ID NO: 5884795 - DNA, 25 bp, Homo sapien
aaagcactagccattgaagaccggt

SEQ ID NO: 5884796 - DNA, 25 bp, Homo sapien
gtgcagctctcactgctcagagctg

SEQ ID NO: 5884797 - DNA, 25 bp, Homo sapien
ctcaggttgtcccagatgaaaccta

SEQ ID NO: 5884798 - DNA, 25 bp, Homo sapien
ggttcctactcattcgtttaaaaga

SEQ ID NO: 5884799 - DNA, 25 bp, Homo sapien
gagaatatacaatctggcacatgcc

SEQ ID NO: 5884800 - DNA, 25 bp, Homo sapien
cactattgcctcgttatgggcaaaa

SEQ ID NO: 5884801 - DNA, 25 bp, Homo sapien
gaattttgtggagaatttctcaaga

SEQ ID NO: 5884802 - DNA, 25 bp, Homo sapien
gtcttcattataggaggctggaaaa

SEQ ID NO: 5884803 - DNA, 25 bp, Homo sapien
ggagacggccgccgccggctcggca

SEQ ID NO: 5884804 - DNA, 25 bp, Homo sapien
tattttgttgatgaggacagatggg

SEQ ID NO: 5884805 - DNA, 25 bp, Homo sapien
tttcagatttggaaattactgttga

SEQ ID NO: 5884806 - DNA, 25 bp, Homo sapien
atgagatccttgaaagcttgcctcc

SEQ ID NO: 5884807 - DNA, 25 bp, Homo sapien
atgcctcaaaacctgatgtggcaga

SEQ ID NO: 5884808 - DNA, 25 bp, Homo sapien
cacagagataccctatgcctcaaaa

SEQ ID NO: 5884809 - DNA, 25 bp, Homo sapien
ccgcggctgcatctcttcaggtact

SEQ ID NO: 5884810 - DNA, 25 bp, Homo sapien
tgtgcggagaggaagaggtggatgc

SEQ ID NO: 5884811 - DNA, 25 bp, Homo sapien
tatacgttacctttccatctcatta

SEQ ID NO: 5884812 - DNA, 25 bp, Homo sapien
aacagtgatgatattgataaacagt

SEQ ID NO: 5884813 - DNA, 25 bp, Homo sapien
tggtagccaataatgaagtttgtgt

SEQ ID NO: 5884814 - DNA, 25 bp, Homo sapien
agtgattcaggatgaagaattttat

SEQ ID NO: 5884815 - DNA, 25 bp, Homo sapien
tcctatgccacaacctcgttgtaga

SEQ ID NO: 5884816 - DNA, 25 bp, Homo sapien
ggccgcggctgcatctcttcaggta

SEQ ID NO: 5884817 - DNA, 25 bp, Homo sapien
atggatgtgatcatggttattggag

SEQ ID NO: 5884818 - DNA, 25 bp, Homo sapien
aacagaagtcaaagggaagctctat

SEQ ID NO: 5884819 - DNA, 25 bp, Homo sapien
ctcaaattgtgtggcaattcatagc

SEQ ID NO: 5884820 - DNA, 25 bp, Homo sapien
aatctggcacatgccagcaccccac

SEQ ID NO: 5884821 - DNA, 25 bp, Homo sapien
aaggtataacccaaatttgaataca

SEQ ID NO: 5884822 - DNA, 25 bp, Homo sapien
gggttcagagaaatgctgaagagag

SEQ ID NO: 5884823 - DNA, 25 bp, Homo sapien
taatcgagtacatgtacaccgggcg

SEQ ID NO: 5884824 - DNA, 25 bp, Homo sapien
agtatcggaaagaagcctaccgata

SEQ ID NO: 5884825 - DNA, 25 bp, Homo sapien
ggaagctctatagcattggaggaca

SEQ ID NO: 5884826 - DNA, 25 bp, Homo sapien
tgatacggagaaatttccacaaagt

SEQ ID NO: 5884827 - DNA, 25 bp, Homo sapien
caccgctcggtactggctgccgcca

SEQ ID NO: 5884828 - DNA, 25 bp, Homo sapien
ttcaaacttttatcagacagcatca

SEQ ID NO: 5884829 - DNA, 25 bp, Homo sapien
tttgctaaaactgtagaaaggtata

SEQ ID NO: 5884830 - DNA, 25 bp, Homo sapien
tgattcaggatgaagaattttatac

SEQ ID NO: 5884831 - DNA, 25 bp, Homo sapien
ttccacaaagtgattcaggatgaag

SEQ ID NO: 5884832 - DNA, 25 bp, Homo sapien
catgctgttgcagtaacagaatcct

SEQ ID NO: 5884833 - DNA, 25 bp, Homo sapien
tcacgcccctgctctcgggccagtt

SEQ ID NO: 5884834 - DNA, 25 bp, Homo sapien
tcaattcaaacttttatcagacagc

SEQ ID NO: 5884835 - DNA, 25 bp, Homo sapien
gccacatattcataatcacctcgat

SEQ ID NO: 5884836 - DNA, 25 bp, Homo sapien
tataggaggctggaaaaacagtgat

SEQ ID NO: 5884837 - DNA, 25 bp, Homo sapien
atgccacaacctcgttgtagagcca

SEQ ID NO: 5884838 - DNA, 25 bp, Homo sapien
cattgccgcccgcactcctgtagac

SEQ ID NO: 5884839 - DNA, 25 bp, Homo sapien
gtgactgtttataatcctgagcttg

SEQ ID NO: 5884840 - DNA, 25 bp, Homo sapien
attcaggatgaagaattttatacgt

SEQ ID NO: 5884841 - DNA, 25 bp, Homo sapien
tatcagacagcatcatgttgtccca

SEQ ID NO: 5884842 - DNA, 25 bp, Homo sapien
agagaggctggtagccaataatgaa

SEQ ID NO: 5884843 - DNA, 25 bp, Homo sapien
ctgcatctcttcaggtactggagat

SEQ ID NO: 5884844 - DNA, 25 bp, Homo sapien
atgtgtgggatattttgttgatgag

SEQ ID NO: 5884845 - DNA, 25 bp, Homo sapien
caggttgtcccagatgaaacctacc

SEQ ID NO: 5884846 - DNA, 25 bp, Homo sapien
gactatttaagtgaatgtgtgggat

SEQ ID NO: 5884847 - DNA, 25 bp, Homo sapien
ctttgaagaactttttaaattgctc

SEQ ID NO: 5884848 - DNA, 25 bp, Homo sapien
tggagaatttctcaagaaaaaactt

SEQ ID NO: 5884849 - DNA, 25 bp, Homo sapien
acattaccctgtgcttcggcggggc

SEQ ID NO: 5884850 - DNA, 25 bp, Homo sapien
ggcctgggccggggatctctgcaat

SEQ ID NO: 5884851 - DNA, 25 bp, Homo sapien
acatggatgtgatcatggttattgg

SEQ ID NO: 5884852 - DNA, 25 bp, Homo sapien
tgtctgatgagatccttgaaagctt

SEQ ID NO: 5884853 - DNA, 25 bp, Homo sapien
gaatttctcaagaaaaaacttcatc

SEQ ID NO: 5884854 - DNA, 25 bp, Homo sapien
ggaaagaagcctaccgatattgtgc

SEQ ID NO: 5884855 - DNA, 25 bp, Homo sapien
gaatcctacgtgtatgttgctggat

SEQ ID NO: 5884856 - DNA, 25 bp, Homo sapien
acggccgccgccggctcggcaggac

SEQ ID NO: 5884857 - DNA, 25 bp, Homo sapien
ctcttctgcgacattaccctgtgct

SEQ ID NO: 5884858 - DNA, 25 bp, Homo sapien
cttcatctctcaaattgtgtggcaa

SEQ ID NO: 5884859 - DNA, 25 bp, Homo sapien
atattgtgcggagaggaagaggtgg

SEQ ID NO: 5884860 - DNA, 25 bp, Homo sapien
ctcaaaacctgatgtggcagaagga

SEQ ID NO: 5884861 - DNA, 25 bp, Homo sapien
tcgtcacgccctgaacatgaggcga

SEQ ID NO: 5884862 - DNA, 25 bp, Homo sapien
aagctctatagcattggaggacacg

SEQ ID NO: 5884863 - DNA, 25 bp, Homo sapien
agagagagagagatactttgaagaa

SEQ ID NO: 5884864 - DNA, 25 bp, Homo sapien
tgatacagagactcgacagtggcaa

SEQ ID NO: 5884865 - DNA, 25 bp, Homo sapien
gatgcttcttcctcctatgccacaa

SEQ ID NO: 5884866 - DNA, 25 bp, Homo sapien
ctgtggtcaattcaaacttttatca

SEQ ID NO: 5884867 - DNA, 25 bp, Homo sapien
agaggctggtagccaataatgaagt

SEQ ID NO: 5884868 - DNA, 25 bp, Homo sapien
ttgataaatggcacaacttggaatc

SEQ ID NO: 5884869 - DNA, 25 bp, Homo sapien
ctttccatctcattagagactggct

SEQ ID NO: 5884870 - DNA, 25 bp, Homo sapien
ttcttcgagatgtcaaagcactagc

SEQ ID NO: 5884871 - DNA, 25 bp, Homo sapien
cgagccggggcccgaacccgacaca

SEQ ID NO: 5884872 - DNA, 25 bp, Homo sapien
ggagatgcgcaagtggagctccgag

SEQ ID NO: 5884873 - DNA, 25 bp, Homo sapien
gaaggctgctgatatgatacggaga

SEQ ID NO: 5884874 - DNA, 25 bp, Homo sapien
agcatcatgttgtcccaagagttat

SEQ ID NO: 5884875 - DNA, 25 bp, Homo sapien
gtgatcatggttattggaggtgtgt

SEQ ID NO: 5884876 - DNA, 25 bp, Homo sapien
agggaagctctatagcattggagga

SEQ ID NO: 5884877 - DNA, 25 bp, Homo sapien
agatggattaaaggctgtaattact

SEQ ID NO: 5884878 - DNA, 25 bp, Homo sapien
cactgaagatggattaaaggctgta

SEQ ID NO: 5884879 - DNA, 25 bp, Homo sapien
cgagtacatgtacaccgggcgcatc

SEQ ID NO: 5884880 - DNA, 25 bp, Homo sapien
atatacaatctggcacatgccagca

SEQ ID NO: 5884881 - DNA, 25 bp, Homo sapien
atcctacgtgtatgttgctggatca

SEQ ID NO: 5884882 - DNA, 25 bp, Homo sapien
atgaggcgagtgccaagctctcaga

SEQ ID NO: 5884883 - DNA, 25 bp, Homo sapien
agtctgatgacaagaaagcattctt

SEQ ID NO: 5884884 - DNA, 25 bp, Homo sapien
ggcggcggccgcggctgcatctctt

SEQ ID NO: 5884885 - DNA, 25 bp, Homo sapien
gagtcccgctcgggacgggtggaga

SEQ ID NO: 5884886 - DNA, 25 bp, Homo sapien
cagaatcctacgtgtatgttgctgg

SEQ ID NO: 5884887 - DNA, 25 bp, Homo sapien
attataggaggctggaaaaacagtg

SEQ ID NO: 5884888 - DNA, 25 bp, Homo sapien
caagtgtctgatgagatccttgaaa

SEQ ID NO: 5884889 - DNA, 25 bp, Homo sapien
gagcagcggcgccagggcctcttct

SEQ ID NO: 5884890 - DNA, 25 bp, Homo sapien
ttttgttgatgaggacagatgggta

SEQ ID NO: 5884891 - DNA, 25 bp, Homo sapien
atgggtaaatctgccacatattcat

SEQ ID NO: 5884892 - DNA, 25 bp, Homo sapien
cgcatcagacagatgcaagagatac

SEQ ID NO: 5884893 - DNA, 25 bp, Homo sapien
tctcgggccagttttccgagtcccg

SEQ ID NO: 5884894 - DNA, 25 bp, Homo sapien
acaaagtgattcaggatgaagaatt

SEQ ID NO: 5884895 - DNA, 25 bp, Homo sapien
acctcgttgtagagccactgcttgt

SEQ ID NO: 5884896 - DNA, 25 bp, Homo sapien
attactgttgattctgaagaggttc

SEQ ID NO: 5884897 - DNA, 25 bp, Homo sapien
gttgcagtaacagaatcctacgtgt

SEQ ID NO: 5884898 - DNA, 25 bp, Homo sapien
gccgacaggttcctactcattcgtt

SEQ ID NO: 5884899 - DNA, 25 bp, Homo sapien
tgctgttgcagtaacagaatcctac

SEQ ID NO: 5884900 - DNA, 25 bp, Homo sapien
gcttgataaatggcacaacttggaa

SEQ ID NO: 5884901 - DNA, 25 bp, Homo sapien
ggaaattactgttgattctgaagag

SEQ ID NO: 5884902 - DNA, 25 bp, Homo sapien
actggctttcagatttggaaattac

SEQ ID NO: 5884903 - DNA, 25 bp, Homo sapien
gtagtctgatgacaagaaagcattc

SEQ ID NO: 5884904 - DNA, 25 bp, Homo sapien
cgcccgcactcctgtagaccgggac

SEQ ID NO: 5884905 - DNA, 25 bp, Homo sapien
acccgacacagtggaagccgtaatc

SEQ ID NO: 5884906 - DNA, 25 bp, Homo sapien
cgaagaggcagtaagaaaaattgcc

SEQ ID NO: 5884907 - DNA, 25 bp, Homo sapien
gccagccaagtgtctgatgagatcc

SEQ ID NO: 5884908 - DNA, 25 bp, Homo sapien
gtggagagacatgctctgagagctg

SEQ ID NO: 5884909 - DNA, 25 bp, Homo sapien
tgtcacgtgaggatcccgtaccggt

SEQ ID NO: 5884910 - DNA, 25 bp, Homo sapien
attttatacgttacctttccatctc

SEQ ID NO: 5884911 - DNA, 25 bp, Homo sapien
atgtcaaaccagagaggctggtagc

SEQ ID NO: 5884912 - DNA, 25 bp, Homo sapien
ctgatgtggcagaaggaccgcatca

SEQ ID NO: 5884913 - DNA, 25 bp, Homo sapien
ggctgtaattacttgctatgataca

SEQ ID NO: 5884914 - DNA, 25 bp, Homo sapien
ggctgccgccaccgagtacttcacg

SEQ ID NO: 5884915 - DNA, 25 bp, Homo sapien
aatgctgaagagagagagagatact

SEQ ID NO: 5884916 - DNA, 25 bp, Homo sapien
cgtgcacgaggtgctggagttggcc

SEQ ID NO: 5884917 - DNA, 25 bp, Homo sapien
aagccgaggatttcgagtgcagctc

SEQ ID NO: 5884918 - DNA, 25 bp, Homo sapien
cgatccgggcccagaagccgaggat

SEQ ID NO: 5884919 - DNA, 25 bp, Homo sapien
gggactatttaagtgaatgtgtggg

SEQ ID NO: 5884920 - DNA, 25 bp, Homo sapien
tatgatacagagactcgacagtggc

SEQ ID NO: 5884921 - DNA, 25 bp, Homo sapien
cttagcacacatgtacaccctgagc

SEQ ID NO: 5884922 - DNA, 25 bp, Homo sapien
agaaagcattcttttggactaacag

SEQ ID NO: 5884923 - DNA, 25 bp, Homo sapien
tggatgcttcttcctcctatgccac

SEQ ID NO: 5884924 - DNA, 25 bp, Homo sapien
attgacaattactgctttttccaaa

SEQ ID NO: 5884925 - DNA, 25 bp, Homo sapien
agactcgacagtggcaagatgtgga

SEQ ID NO: 5884926 - DNA, 25 bp, Homo sapien
gaacatgtttgtagtctgatgacaa

SEQ ID NO: 5884927 - DNA, 25 bp, Homo sapien
cttgcctccagaagtcctaagcatc

SEQ ID NO: 5884928 - DNA, 25 bp, Homo sapien
ggggcgatccgggcccagaagccga

SEQ ID NO: 5884929 - DNA, 25 bp, Homo sapien
tggccgacaggttcctactcattcg

SEQ ID NO: 5884930 - DNA, 25 bp, Homo sapien
agaaaacgaagaggcagtaagaaaa

SEQ ID NO: 5884931 - DNA, 25 bp, Homo sapien
aggactggccgccgaggtccgaggc

SEQ ID NO: 5884932 - DNA, 25 bp, Homo sapien
cgatattgtgcggagaggaagaggt

SEQ ID NO: 5884933 - DNA, 25 bp, Homo sapien
tacatcgtcacgccctgaacatgag

SEQ ID NO: 5884934 - DNA, 25 bp, Homo sapien
catcatgttgtcccaagagttattg

SEQ ID NO: 5884935 - DNA, 25 bp, Homo sapien
tcctaagcatcgaaggagcagccat

SEQ ID NO: 5884936 - DNA, 25 bp, Homo sapien
ccaaatgtctgtggtcaattcaaac

SEQ ID NO: 5884937 - DNA, 25 bp, Homo sapien
cgggcccaccgctcggtactggctg

SEQ ID NO: 5884938 - DNA, 25 bp, Homo sapien
ccgaacccgacacagtggaagccgt

SEQ ID NO: 5884939 - DNA, 25 bp, Homo sapien
gcaggactggccgccgaggtccgag

SEQ ID NO: 5884940 - DNA, 25 bp, Homo sapien
agtacttcacgcccctgctctcggg

SEQ ID NO: 5884941 - DNA, 25 bp, Homo sapien
ggcgatccgggcccagaagccgagg

SEQ ID NO: 5884942 - DNA, 25 bp, Homo sapien
accaaagattcttcgagatgtcaaa

SEQ ID NO: 5884943 - DNA, 25 bp, Homo sapien
atttggaaattactgttgattctga

SEQ ID NO: 5884944 - DNA, 25 bp, Homo sapien
cttggaatcggcaccaaagattctt

SEQ ID NO: 5884945 - DNA, 25 bp, Homo sapien
ccattgaagaccggtttgtatacat

SEQ ID NO: 5884946 - DNA, 25 bp, Homo sapien
atgaagtttgtgtcaagttggtcgc

SEQ ID NO: 5884947 - DNA, 25 bp, Homo sapien
ttcttttggactaacagaagtcaaa

SEQ ID NO: 5884948 - DNA, 25 bp, Homo sapien
actgcttgtcacgtgaggatcccgt

SEQ ID NO: 5884949 - DNA, 25 bp, Homo sapien
gatccttgaaagcttgcctccagaa

SEQ ID NO: 5884950 - DNA, 25 bp, Homo sapien
gccgccaccgagtacttcacgcccc

SEQ ID NO: 5884951 - DNA, 25 bp, Homo sapien
ggccgccgccggctcggcaggactg

SEQ ID NO: 5884952 - DNA, 25 bp, Homo sapien
ctttttaaattgctcaggttgtccc

SEQ ID NO: 5884953 - DNA, 25 bp, Homo sapien
gcagcgtgcacgaggtgctggagtt

SEQ ID NO: 5884954 - DNA, 25 bp, Homo sapien
tgtcccaagagttattgtttagaaa

SEQ ID NO: 5884955 - DNA, 25 bp, Homo sapien
tcaaagggaagctctatagcattgg

SEQ ID NO: 5884956 - DNA, 25 bp, Homo sapien
tgatgtcttcattataggaggctgg

SEQ ID NO: 5884957 - DNA, 25 bp, Homo sapien
tagcattggaggacacggcaacttt

SEQ ID NO: 5884958 - DNA, 25 bp, Homo sapien
gcagtggcggcggcggcggcggcgg

SEQ ID NO: 5884959 - DNA, 25 bp, Homo sapien
aaatttgaatacatgggaacatgtt

SEQ ID NO: 5884960 - DNA, 25 bp, Homo sapien
ctcaagaaaaaacttcatctctcaa

SEQ ID NO: 5884961 - DNA, 25 bp, Homo sapien
gcggccgcggctgcatctcttcagg

SEQ ID NO: 5884962 - DNA, 25 bp, Homo sapien
agcttgcctccagaagtcctaagca

SEQ ID NO: 5884963 - DNA, 25 bp, Homo sapien
cgggacgggtggagatgcgcaagtg

SEQ ID NO: 5884964 - DNA, 25 bp, Homo sapien
gatgaaacctacctaccttactcga

SEQ ID NO: 5884965 - DNA, 25 bp, Homo sapien
gactgtttataatcctgagcttgat

SEQ ID NO: 5884966 - DNA, 25 bp, Homo sapien
ggtcaattcaaacttttatcagaca

SEQ ID NO: 5884967 - DNA, 25 bp, Homo sapien
cagtggagagacatgctctgagagc

SEQ ID NO: 5884968 - DNA, 25 bp, Homo sapien
gcacaacttggaatcggcaccaaag

SEQ ID NO: 5884969 - DNA, 25 bp, Homo sapien
agtgtctgatgagatccttgaaagc

SEQ ID NO: 5884970 - DNA, 25 bp, Homo sapien
gaccggtttgtatacattgccgccc

SEQ ID NO: 5884971 - DNA, 25 bp, Homo sapien
cgttacctttccatctcattagaga

SEQ ID NO: 5884972 - DNA, 25 bp, Homo sapien
ttgtttagaaaacgaagaggcagta

SEQ ID NO: 5884973 - DNA, 25 bp, Homo sapien
ggaccgcatcagacagatgcaagag

SEQ ID NO: 5884974 - DNA, 25 bp, Homo sapien
tatacattgccgcccgcactcctgt

SEQ ID NO: 5884975 - DNA, 25 bp, Homo sapien
tggaggacacggcaactttagtcct

SEQ ID NO: 5884976 - DNA, 25 bp, Homo sapien
cagtaacagaatcctacgtgtatgt

SEQ ID NO: 5884977 - DNA, 25 bp, Homo sapien
cattcttttggactaacagaagtca

SEQ ID NO: 5884978 - DNA, 25 bp, Homo sapien
gctctatagcattggaggacacggc

SEQ ID NO: 5884979 - DNA, 25 bp, Homo sapien
attacaaagatgatgtcttcattat

SEQ ID NO: 5884980 - DNA, 25 bp, Homo sapien
cacatattcataatcacctcgatgg

SEQ ID NO: 5884981 - DNA, 25 bp, Homo sapien
ttacttgctatgatacagagactcg

SEQ ID NO: 5884982 - DNA, 25 bp, Homo sapien
atagcttagcacacatgtacaccct

SEQ ID NO: 5884983 - DNA, 25 bp, Homo sapien
ggcggcggcggcggccgcggctgca

SEQ ID NO: 5884984 - DNA, 25 bp, Homo sapien
agctctcactgctcagagctgtcct

SEQ ID NO: 5884985 - DNA, 25 bp, Homo sapien
tcaagttggtcgctgacgcagtgga

SEQ ID NO: 5884986 - DNA, 25 bp, Homo sapien
accttactcgacatgtcaaaccaga

SEQ ID NO: 5884987 - DNA, 25 bp, Homo sapien
atcacctcgatggacatgctgttgc

SEQ ID NO: 5884988 - DNA, 25 bp, Homo sapien
aaagggaagctctatagcattggag

SEQ ID NO: 5884989 - DNA, 25 bp, Homo sapien
ccgcttattgacaattactgctttt

SEQ ID NO: 5884990 - DNA, 25 bp, Homo sapien
gctccgagccggggcccgaacccga

SEQ ID NO: 5884991 - DNA, 25 bp, Homo sapien
tggagagcatggagacggccgccgc

SEQ ID NO: 5884992 - DNA, 25 bp, Homo sapien
agaactttttaaattgctcaggttg

SEQ ID NO: 5884993 - DNA, 25 bp, Homo sapien
gctggtagccaataatgaagtttgt

SEQ ID NO: 5884994 - DNA, 25 bp, Homo sapien
gtctgtggtcaattcaaacttttat

SEQ ID NO: 5884995 - DNA, 25 bp, Homo sapien
ccgggcccagaagccgaggatttcg

SEQ ID NO: 5884996 - DNA, 25 bp, Homo sapien
gacaagaaagcattcttttggacta

SEQ ID NO: 5884997 - DNA, 25 bp, Homo sapien
tgcttcttcctcctatgccacaacc

SEQ ID NO: 5884998 - DNA, 25 bp, Homo sapien
cggcggggctggaggccgcgagttc

SEQ ID NO: 5884999 - DNA, 25 bp, Homo sapien
gtgtggcaattcatagcttagcaca

SEQ ID NO: 5885000 - DNA, 25 bp, Homo sapien
tgcacgaggtgctggagttggccga

SEQ ID NO: 5885001 - DNA, 25 bp, Homo sapien
cagtggcaagatgtggaatctttgc

SEQ ID NO: 5885002 - DNA, 25 bp, Homo sapien
gagcttgataaatggcacaacttgg

SEQ ID NO: 5885003 - DNA, 25 bp, Homo sapien
caccgggcgcatccgcgtcagcacg

SEQ ID NO: 5885004 - DNA, 25 bp, Homo sapien
caaagattcttcgagatgtcaaagc

SEQ ID NO: 5885005 - DNA, 25 bp, Homo sapien
gaatacatgggaacatgtttgtagt

SEQ ID NO: 5885006 - DNA, 25 bp, Homo sapien
tggcacatgccagcaccccacttct

SEQ ID NO: 5885007 - DNA, 25 bp, Homo sapien
cagtggaagccgtaatcgagtacat

SEQ ID NO: 5885008 - DNA, 25 bp, Homo sapien
gacagtggcaagatgtggaatcttt

SEQ ID NO: 5885009 - DNA, 25 bp, Homo sapien
caaacttttatcagacagcatcatg

SEQ ID NO: 5885010 - DNA, 25 bp, Homo sapien
ctattacaaagatgatgtcttcatt

SEQ ID NO: 5885011 - DNA, 25 bp, Homo sapien
aaacagtatcggaaagaagcctacc

SEQ ID NO: 5885012 - DNA, 25 bp, Homo sapien
catgtacaccgggcgcatccgcgtc

SEQ ID NO: 5885013 - DNA, 25 bp, Homo sapien
aagtgaatgtgtgggatattttgtt

SEQ ID NO: 5885014 - DNA, 25 bp, Homo sapien
catcagacagatgcaagagatacat

SEQ ID NO: 5885015 - DNA, 25 bp, Homo sapien
aacagaatcctacgtgtatgttgct

SEQ ID NO: 5885016 - DNA, 25 bp, Homo sapien
tgtagaaaggtataacccaaatttg

SEQ ID NO: 5885017 - DNA, 25 bp, Homo sapien
tacaaagatgatgtcttcattatag

SEQ ID NO: 5885018 - DNA, 25 bp, Homo sapien
acatgtttgtagtctgatgacaaga

SEQ ID NO: 5885019 - DNA, 25 bp, Homo sapien
ggatctctgcaatggaggcgagcgg

SEQ ID NO: 5885020 - DNA, 25 bp, Homo sapien
aagtggagctccgagccggggcccg

SEQ ID NO: 5885021 - DNA, 25 bp, Homo sapien
gctcggtactggctgccgccaccga

SEQ ID NO: 5885022 - DNA, 25 bp, Homo sapien
actcgacagtggcaagatgtggaat

SEQ ID NO: 5885023 - DNA, 25 bp, Homo sapien
tgtcaagttggtcgctgacgcagtg

SEQ ID NO: 5885024 - DNA, 25 bp, Homo sapien
gaccgggacactgaagatggattaa

SEQ ID NO: 5885025 - DNA, 25 bp, Homo sapien
ttgtagtctgatgacaagaaagcat

SEQ ID NO: 5885026 - DNA, 25 bp, Homo sapien
gtcctggcggcagaacgagcagcgg

SEQ ID NO: 5885027 - DNA, 25 bp, Homo sapien
ttgtagagccactgcttgtcacgtg

SEQ ID NO: 5885028 - DNA, 25 bp, Homo sapien
tgcttgtcacgtgaggatcccgtac

SEQ ID NO: 5885029 - DNA, 25 bp, Homo sapien
tgtggcagaaggaccgcatcagaca

SEQ ID NO: 5885030 - DNA, 25 bp, Homo sapien
gtggagctccgagccggggcccgaa

SEQ ID NO: 5885031 - DNA, 25 bp, Homo sapien
gacactgaagatggattaaaggctg

SEQ ID NO: 5885032 - DNA, 25 bp, Homo sapien
atcgaaggagcagccatttgctatt

SEQ ID NO: 5885033 - DNA, 25 bp, Homo sapien
ttactgctttttccaaatgtctgtg

SEQ ID NO: 5885034 - DNA, 25 bp, Homo sapien
acctaccttactcgacatgtcaaac

SEQ ID NO: 5885035 - DNA, 25 bp, Homo sapien
ttccatctcattagagactggcttt

SEQ ID NO: 5885036 - DNA, 25 bp, Homo sapien
tggactaacagaagtcaaagggaag

SEQ ID NO: 5885037 - DNA, 25 bp, Homo sapien
tctttgccgcttattgacaattact

SEQ ID NO: 5885038 - DNA, 25 bp, Homo sapien
tccgagccggggcccgaacccgaca

SEQ ID NO: 5885039 - DNA, 25 bp, Homo sapien
ccaccgagtacttcacgcccctgct

SEQ ID NO: 5885040 - DNA, 25 bp, Homo sapien
tgctgatatgatacggagaaatttc

SEQ ID NO: 5885041 - DNA, 25 bp, Homo sapien
cactagccattgaagaccggtttgt

SEQ ID NO: 5885042 - DNA, 25 bp, Homo sapien
ccggggatctctgcaatggaggcga

SEQ ID NO: 5885043 - DNA, 25 bp, Homo sapien
cacacagagataccctatgcctcaa

SEQ ID NO: 5885044 - DNA, 25 bp, Homo sapien
gcaactttagtcctggttttaaaga

SEQ ID NO: 5885045 - DNA, 25 bp, Homo sapien
cccacttctcatgtgtcactattgc

SEQ ID NO: 5885046 - DNA, 25 bp, Homo sapien
ctcattcgtttaaaagaattttgtg

SEQ ID NO: 5885047 - DNA, 25 bp, Homo sapien
agagactcgacagtggcaagatgtg

SEQ ID NO: 5885048 - DNA, 25 bp, Homo sapien
gcgtcagcacgggcagcgtgcacga

SEQ ID NO: 5885049 - DNA, 25 bp, Homo sapien
caacctcgttgtagagccactgctt

SEQ ID NO: 5885050 - DNA, 25 bp, Homo sapien
cagtgatgatattgataaacagtat

SEQ ID NO: 5885051 - DNA, 25 bp, Homo sapien
cgggggcgatccgggcccagaagcc

SEQ ID NO: 5885052 - DNA, 25 bp, Homo sapien
taccctgtgcttcggcggggctgga

SEQ ID NO: 5885053 - DNA, 25 bp, Homo sapien
gtgatgatattgataaacagtatcg

SEQ ID NO: 5885054 - DNA, 25 bp, Homo sapien
gtagccaataatgaagtttgtgtca

SEQ ID NO: 5885055 - DNA, 25 bp, Homo sapien
aagttggtcgctgacgcagtggaga

SEQ ID NO: 5885056 - DNA, 25 bp, Homo sapien
ttaaaagaattttgtggagaatttc

SEQ ID NO: 5885057 - DNA, 25 bp, Homo sapien
tgacaattactgctttttccaaatg

SEQ ID NO: 5885058 - DNA, 25 bp, Homo sapien
ccatctcattagagactggctttca

SEQ ID NO: 5885059 - DNA, 25 bp, Homo sapien
agaagccgaggatttcgagtgcagc

SEQ ID NO: 5885060 - DNA, 25 bp, Homo sapien
cgtgtatgttgctggatcaatggag

SEQ ID NO: 5885061 - DNA, 25 bp, Homo sapien
gtcgctgacgcagtggagagacatg

SEQ ID NO: 5885062 - DNA, 25 bp, Homo sapien
gtcccgctcgggacgggtggagatg

SEQ ID NO: 5885063 - DNA, 25 bp, Homo sapien
tgaagaggttctctttgaaaccgtt

SEQ ID NO: 5885064 - DNA, 25 bp, Homo sapien
ttccgagtcccgctcgggacgggtg

SEQ ID NO: 5885065 - DNA, 25 bp, Homo sapien
aaccgttttgaaatgggttcagaga

SEQ ID NO: 5885066 - DNA, 25 bp, Homo sapien
aattcaaacttttatcagacagcat

SEQ ID NO: 5885067 - DNA, 25 bp, Homo sapien
tgatgagatccttgaaagcttgcct

SEQ ID NO: 5885068 - DNA, 25 bp, Homo sapien
gatggacatgctgttgcagtaacag

SEQ ID NO: 5885069 - DNA, 25 bp, Homo sapien
ggcacacagagataccctatgcctc

SEQ ID NO: 5885070 - DNA, 25 bp, Homo sapien
agtggcggcggcggcggcggcggcc

SEQ ID NO: 5885071 - DNA, 25 bp, Homo sapien
taccctatgcctcaaaacctgatgt

SEQ ID NO: 5885072 - DNA, 25 bp, Homo sapien
tagaccgggacactgaagatggatt

SEQ ID NO: 5885073 - DNA, 25 bp, Homo sapien
tcccgtaccggtacttgcatggcac

SEQ ID NO: 5885074 - DNA, 25 bp, Homo sapien
aggctggtagccaataatgaagttt

SEQ ID NO: 5885075 - DNA, 25 bp, Homo sapien
ggaggccgcgagttccgggcccacc

SEQ ID NO: 5885076 - DNA, 25 bp, Homo sapien
aaacctgatgtggcagaaggaccgc

SEQ ID NO: 5885077 - DNA, 25 bp, Homo sapien
aagaaaaattgccagccaagtgtct

SEQ ID NO: 5885078 - DNA, 25 bp, Homo sapien
atgggttcagagaaatgctgaagag

SEQ ID NO: 5885079 - DNA, 25 bp, Homo sapien
ctcttcaggtactggagatggagag

SEQ ID NO: 5885080 - DNA, 25 bp, Homo sapien
gaacccgacacagtggaagccgtaa

SEQ ID NO: 5885081 - DNA, 25 bp, Homo sapien
tacgtgtatgttgctggatcaatgg

SEQ ID NO: 5885082 - DNA, 25 bp, Homo sapien
acaattactgctttttccaaatgtc

SEQ ID NO: 5885083 - DNA, 25 bp, Homo sapien
gtgtgggatattttgttgatgagga

SEQ ID NO: 5885084 - DNA, 25 bp, Homo sapien
cgcgagttccgggcccaccgctcgg

SEQ ID NO: 5885085 - DNA, 25 bp, Homo sapien
tatgggcaaaacatggatgtgatca

SEQ ID NO: 5885086 - DNA, 25 bp, Homo sapien
ctgtaattacttgctatgatacaga

SEQ ID NO: 5885087 - DNA, 25 bp, Homo sapien
attttgtggagaatttctcaagaaa

SEQ ID NO: 5885088 - DNA, 25 bp, Homo sapien
aacttttatcagacagcatcatgtt

SEQ ID NO: 5885089 - DNA, 25 bp, Homo sapien
gaacgagcagcggcgccagggcctc

SEQ ID NO: 5885090 - DNA, 25 bp, Homo sapien
ctgttgcagtaacagaatcctacgt

SEQ ID NO: 5885091 - DNA, 25 bp, Homo sapien
gatatgatacggagaaatttccaca

SEQ ID NO: 5885092 - DNA, 25 bp, Homo sapien
gacatgctgttgcagtaacagaatc

SEQ ID NO: 5885093 - DNA, 25 bp, Homo sapien
gtcccagatgaaacctacctacctt

SEQ ID NO: 5885094 - DNA, 25 bp, Homo sapien
aagaggtggatgcttcttcctccta

SEQ ID NO: 5885095 - DNA, 25 bp, Homo sapien
tgctctgaaggctgctgatatgata

SEQ ID NO: 5885096 - DNA, 25 bp, Homo sapien
gactggccgccgaggtccgaggcag

SEQ ID NO: 5885097 - DNA, 25 bp, Homo sapien
atggagacggccgccgccggctcgg

SEQ ID NO: 5885098 - DNA, 25 bp, Homo sapien
caaaacatggatgtgatcatggtta

SEQ ID NO: 5885099 - DNA, 25 bp, Homo sapien
tcatgtgtcactattgcctcgttat

SEQ ID NO: 5885100 - DNA, 25 bp, Homo sapien
gaggaagaggtggatgcttcttcct

SEQ ID NO: 5885101 - DNA, 25 bp, Homo sapien
ctgaaggctgctgatatgatacgga

SEQ ID NO: 5885102 - DNA, 25 bp, Homo sapien
attgcctcgttatgggcaaaacatg

SEQ ID NO: 5885103 - DNA, 25 bp, Homo sapien
cggcggccgcggctgcatctcttca

SEQ ID NO: 5885104 - DNA, 25 bp, Homo sapien
ttataatcctgagcttgataaatgg

SEQ ID NO: 5885105 - DNA, 25 bp, Homo sapien
gaaaaacagtgatgatattgataaa

SEQ ID NO: 5885106 - DNA, 25 bp, Homo sapien
ctaccgatattgtgcggagaggaag

SEQ ID NO: 5885107 - DNA, 25 bp, Homo sapien
aggctgctgatatgatacggagaaa

SEQ ID NO: 5885108 - DNA, 25 bp, Homo sapien
gagaaatgctgaagagagagagaga

SEQ ID NO: 5885109 - DNA, 25 bp, Homo sapien
agtcctggttttaaagatgtgactg

SEQ ID NO: 5885110 - DNA, 25 bp, Homo sapien
gatcccgtaccggtacttgcatggc

SEQ ID NO: 5885111 - DNA, 25 bp, Homo sapien
cagcggcacggtggacttcgggcct

SEQ ID NO: 5885112 - DNA, 25 bp, Homo sapien
ttgccagccaagtgtctgatgagat

SEQ ID NO: 5885113 - DNA, 25 bp, Homo sapien
ggctgcatctcttcaggtactggag

SEQ ID NO: 5885114 - DNA, 25 bp, Homo sapien
ggagagacatgctctgagagctgag

SEQ ID NO: 5885115 - DNA, 25 bp, Homo sapien
tgcctccagaagtcctaagcatcga

SEQ ID NO: 5885116 - DNA, 25 bp, Homo sapien
tatagcattggaggacacggcaact

SEQ ID NO: 5885117 - DNA, 25 bp, Homo sapien
ggggatctctgcaatggaggcgagc

SEQ ID NO: 5885118 - DNA, 25 bp, Homo sapien
cacggcaactttagtcctggtttta

SEQ ID NO: 5885119 - DNA, 25 bp, Homo sapien
gtggaatctttgccgcttattgaca

SEQ ID NO: 5885120 - DNA, 25 bp, Homo sapien
tttatcagacagcatcatgttgtcc

SEQ ID NO: 5885121 - DNA, 25 bp, Homo sapien
gagcatggagacggccgccgccggc

SEQ ID NO: 5885122 - DNA, 25 bp, Homo sapien
tggtcgctgacgcagtggagagaca

SEQ ID NO: 5885123 - DNA, 25 bp, Homo sapien
gtttagaaaacgaagaggcagtaag

SEQ ID NO: 5885124 - DNA, 25 bp, Homo sapien
aacgaagaggcagtaagaaaaattg

SEQ ID NO: 5885125 - DNA, 25 bp, Homo sapien
acatgtacaccctgagccaacttgc

SEQ ID NO: 5885126 - DNA, 25 bp, Homo sapien
tgggcaaaacatggatgtgatcatg

SEQ ID NO: 5885127 - DNA, 25 bp, Homo sapien
attgctcaggttgtcccagatgaaa

SEQ ID NO: 5885128 - DNA, 25 bp, Homo sapien
tactttgaagaactttttaaattgc

SEQ ID NO: 5885129 - DNA, 25 bp, Homo sapien
ccactgcttgtcacgtgaggatccc

SEQ ID NO: 5885130 - DNA, 25 bp, Homo sapien
acttgcatggcacacagagataccc

SEQ ID NO: 5885131 - DNA, 25 bp, Homo sapien
gtggagatgcgcaagtggagctccg

SEQ ID NO: 5885132 - DNA, 25 bp, Homo sapien
gtttataatcctgagcttgataaat

SEQ ID NO: 5885133 - DNA, 25 bp, Homo sapien
tgaagaattttatacgttacctttc

SEQ ID NO: 5885134 - DNA, 25 bp, Homo sapien
cctcgatggacatgctgttgcagta

SEQ ID NO: 5885135 - DNA, 25 bp, Homo sapien
gacacagtggaagccgtaatcgagt

SEQ ID NO: 5885136 - DNA, 25 bp, Homo sapien
gagatgtcaaagcactagccattga

SEQ ID NO: 5885137 - DNA, 25 bp, Homo sapien
gtggaagccgtaatcgagtacatgt

SEQ ID NO: 5885138 - DNA, 25 bp, Homo sapien
cttactcgacatgtcaaaccagaga

SEQ ID NO: 5885139 - DNA, 25 bp, Homo sapien
cagatgaaacctacctaccttactc

SEQ ID NO: 5885140 - DNA, 25 bp, Homo sapien
cgacattaccctgtgcttcggcggg

SEQ ID NO: 5885141 - DNA, 25 bp, Homo sapien
acatgctctgagagctgagaatata

SEQ ID NO: 5885142 - DNA, 25 bp, Homo sapien
atacagagactcgacagtggcaaga

SEQ ID NO: 5885143 - DNA, 25 bp, Homo sapien
tccagaagtcctaagcatcgaagga

SEQ ID NO: 5885144 - DNA, 25 bp, Homo sapien
tttgtggagaatttctcaagaaaaa

SEQ ID NO: 5885145 - DNA, 25 bp, Homo sapien
aagatgatgtcttcattataggagg

SEQ ID NO: 5885146 - DNA, 25 bp, Homo sapien
catattcataatcacctcgatggac

SEQ ID NO: 5885147 - DNA, 25 bp, Homo sapien
agccaataatgaagtttgtgtcaag

SEQ ID NO: 5885148 - DNA, 25 bp, Homo sapien
tatcggaaagaagcctaccgatatt

SEQ ID NO: 5885149 - DNA, 25 bp, Homo sapien
ttgccgcccgcactcctgtagaccg

SEQ ID NO: 5885150 - DNA, 25 bp, Homo sapien
tggaaaaacagtgatgatattgata

SEQ ID NO: 5885151 - DNA, 25 bp, Homo sapien
ctctcactgctcagagctgtcctgg

SEQ ID NO: 5885152 - DNA, 25 bp, Homo sapien
tgctattacaaagatgatgtcttca

SEQ ID NO: 5885153 - DNA, 25 bp, Homo sapien
ccacaaagtgattcaggatgaagaa

SEQ ID NO: 5885154 - DNA, 25 bp, Homo sapien
gaaaaattgccagccaagtgtctga

SEQ ID NO: 5885155 - DNA, 25 bp, Homo sapien
ccggtttgtatacattgccgcccgc

SEQ ID NO: 5885156 - DNA, 25 bp, Homo sapien
tggctttcagatttggaaattactg

SEQ ID NO: 5885157 - DNA, 25 bp, Homo sapien
ctcgttgtagagccactgcttgtca

SEQ ID NO: 5885158 - DNA, 25 bp, Homo sapien
ggtataacccaaatttgaatacatg

SEQ ID NO: 5885159 - DNA, 25 bp, Homo sapien
tagaaaggtataacccaaatttgaa

SEQ ID NO: 5885160 - DNA, 25 bp, Homo sapien
ccagagaggctggtagccaataatg

SEQ ID NO: 5885161 - DNA, 25 bp, Homo sapien
gctctcgggccagttttccgagtcc

SEQ ID NO: 5885162 - DNA, 25 bp, Homo sapien
cacctcgatggacatgctgttgcag

SEQ ID NO: 5885163 - DNA, 25 bp, Homo sapien
gccgcccgcactcctgtagaccggg

SEQ ID NO: 5885164 - DNA, 25 bp, Homo sapien
atctcttcaggtactggagatggag

SEQ ID NO: 5885165 - DNA, 25 bp, Homo sapien
cacgccctgaacatgaggcgagtgc

SEQ ID NO: 5885166 - DNA, 25 bp, Homo sapien
agtacatgtacaccgggcgcatccg

SEQ ID NO: 5885167 - DNA, 25 bp, Homo sapien
cgagcgggggcgatccgggcccaga

SEQ ID NO: 5885168 - DNA, 25 bp, Homo sapien
gataccctatgcctcaaaacctgat

SEQ ID NO: 5885169 - DNA, 25 bp, Homo sapien
cagcacgggcagcgtgcacgaggtg

SEQ ID NO: 5885170 - DNA, 25 bp, Homo sapien
ttagtcctggttttaaagatgtgac

SEQ ID NO: 5885171 - DNA, 25 bp, Homo sapien
tggcggcagaacgagcagcggcgcc

SEQ ID NO: 5885172 - DNA, 25 bp, Homo sapien
gcgccagggcctcttctgcgacatt

SEQ ID NO: 5885173 - DNA, 25 bp, Homo sapien
agagagagatactttgaagaacttt

SEQ ID NO: 5885174 - DNA, 25 bp, Homo sapien
cgagtacttcacgcccctgctctcg

SEQ ID NO: 5885175 - DNA, 25 bp, Homo sapien
ggggctggaggccgcgagttccggg

SEQ ID NO: 5885176 - DNA, 25 bp, Homo sapien
cgccaccgagtacttcacgcccctg

SEQ ID NO: 5885177 - DNA, 25 bp, Homo sapien
aagaattttgtggagaatttctcaa

SEQ ID NO: 5885178 - DNA, 25 bp, Homo sapien
gcagcggcgccagggcctcttctgc

SEQ ID NO: 5885179 - DNA, 25 bp, Homo sapien
tatgatacggagaaatttccacaaa

SEQ ID NO: 5885180 - DNA, 25 bp, Homo sapien
gctggagttggccgacaggttccta

SEQ ID NO: 5885181 - DNA, 25 bp, Homo sapien
ccgccgccggctcggcaggactggc

SEQ ID NO: 5885182 - DNA, 25 bp, Homo sapien
gccatttgctattacaaagatgatg

SEQ ID NO: 5885183 - DNA, 25 bp, Homo sapien
gggaacatgtttgtagtctgatgac

SEQ ID NO: 5885184 - DNA, 25 bp, Homo sapien
agcactagccattgaagaccggttt

SEQ ID NO: 5885185 - DNA, 25 bp, Homo sapien
gtccgaggcagcggcacggtggact

SEQ ID NO: 5885186 - DNA, 25 bp, Homo sapien
gaatatacaatctggcacatgccag

SEQ ID NO: 5885187 - DNA, 25 bp, Homo sapien
gcggggctggaggccgcgagttccg

SEQ ID NO: 5885188 - DNA, 25 bp, Homo sapien
agacggccgccgccggctcggcagg

SEQ ID NO: 5885189 - DNA, 25 bp, Homo sapien
aacttgctctgaaggctgctgatat

SEQ ID NO: 5885190 - DNA, 25 bp, Homo sapien
tactcattcgtttaaaagaattttg

SEQ ID NO: 5885191 - DNA, 25 bp, Homo sapien
tacgttacctttccatctcattaga

SEQ ID NO: 5885192 - DNA, 25 bp, Homo sapien
ttccaaatgtctgtggtcaattcaa

SEQ ID NO: 5885193 - DNA, 25 bp, Homo sapien
caaaacctgatgtggcagaaggacc

SEQ ID NO: 5885194 - DNA, 25 bp, Homo sapien
acagcatcatgttgtcccaagagtt

SEQ ID NO: 5885195 - DNA, 25 bp, Homo sapien
gatgtggcagaaggaccgcatcaga

SEQ ID NO: 5885196 - DNA, 25 bp, Homo sapien
agacagatgcaagagatacatcgtc

SEQ ID NO: 5885197 - DNA, 25 bp, Homo sapien
ggacacggcaactttagtcctggtt

SEQ ID NO: 5885198 - DNA, 25 bp, Homo sapien
ttagaaaacgaagaggcagtaagaa

SEQ ID NO: 5885199 - DNA, 25 bp, Homo sapien
ttttaaattgctcaggttgtcccag

SEQ ID NO: 5885200 - DNA, 25 bp, Homo sapien
acaacttggaatcggcaccaaagat

SEQ ID NO: 5885201 - DNA, 25 bp, Homo sapien
agatgtgactgtttataatcctgag

SEQ ID NO: 5885202 - DNA, 25 bp, Homo sapien
ggacgggtggagatgcgcaagtgga

SEQ ID NO: 5885203 - DNA, 25 bp, Homo sapien
caagaaaaaacttcatctctcaaat

SEQ ID NO: 5885204 - DNA, 25 bp, Homo sapien
accctgagccaacttgctctgaagg

SEQ ID NO: 5885205 - DNA, 25 bp, Homo sapien
ccgacacagtggaagccgtaatcga

SEQ ID NO: 5885206 - DNA, 25 bp, Homo sapien
cgccctgaacatgaggcgagtgcca

SEQ ID NO: 5885207 - DNA, 25 bp, Homo sapien
tttcgagtgcagctctcactgctca

SEQ ID NO: 5885208 - DNA, 25 bp, Homo sapien
ctggaggccgcgagttccgggccca

SEQ ID NO: 5885209 - DNA, 25 bp, Homo sapien
gtaagaaaaattgccagccaagtgt

SEQ ID NO: 5885210 - DNA, 25 bp, Homo sapien
ccgggacactgaagatggattaaag

SEQ ID NO: 5885211 - DNA, 25 bp, Homo sapien
agatttggaaattactgttgattct

SEQ ID NO: 5885212 - DNA, 25 bp, Homo sapien
ccctatgcctcaaaacctgatgtgg

SEQ ID NO: 5885213 - DNA, 25 bp, Homo sapien
agagagagagatactttgaagaact

SEQ ID NO: 5885214 - DNA, 25 bp, Homo sapien
ctcactgctcagagctgtcctggcg

SEQ ID NO: 5885215 - DNA, 25 bp, Homo sapien
cgtaatcgagtacatgtacaccggg

SEQ ID NO: 5885216 - DNA, 25 bp, Homo sapien
gcttattgacaattactgctttttc

SEQ ID NO: 5885217 - DNA, 25 bp, Homo sapien
gttccgggcccaccgctcggtactg

SEQ ID NO: 5885218 - DNA, 25 bp, Homo sapien
acagatgcaagagatacatcgtcac

SEQ ID NO: 5885219 - DNA, 25 bp, Homo sapien
tctatagcattggaggacacggcaa

SEQ ID NO: 5885220 - DNA, 25 bp, Homo sapien
aaagatgtgactgtttataatcctg

SEQ ID NO: 5885221 - DNA, 25 bp, Homo sapien
gaagtttgtgtcaagttggtcgctg

SEQ ID NO: 5885222 - DNA, 25 bp, Homo sapien
cagttttccgagtcccgctcgggac

SEQ ID NO: 5885223 - DNA, 25 bp, Homo sapien
agccattgaagaccggtttgtatac

SEQ ID NO: 5885224 - DNA, 25 bp, Homo sapien
gcacacatgtacaccctgagccaac

SEQ ID NO: 5885225 - DNA, 25 bp, Homo sapien
ggttgtcccagatgaaacctaccta

SEQ ID NO: 5885226 - DNA, 25 bp, Homo sapien
gtacaccctgagccaacttgctctg

SEQ ID NO: 5885227 - DNA, 25 bp, Homo sapien
acaccctgagccaacttgctctgaa

SEQ ID NO: 5885228 - DNA, 25 bp, Homo sapien
aaagcattcttttggactaacagaa

SEQ ID NO: 5885229 - DNA, 25 bp, Homo sapien
atgcaagagatacatcgtcacgccc

SEQ ID NO: 5885230 - DNA, 25 bp, Homo sapien
cgtgaggatcccgtaccggtacttg

SEQ ID NO: 5885231 - DNA, 25 bp, Homo sapien
ggtactggctgccgccaccgagtac

SEQ ID NO: 5885232 - DNA, 25 bp, Homo sapien
agccactgcttgtcacgtgaggatc

SEQ ID NO: 5885233 - DNA, 25 bp, Homo sapien
tccttgaaagcttgcctccagaagt

SEQ ID NO: 5885234 - DNA, 25 bp, Homo sapien
gcggctgcatctcttcaggtactgg

SEQ ID NO: 5885235 - DNA, 25 bp, Homo sapien
ttgctggatcaatggagccagggtt

SEQ ID NO: 5885236 - DNA, 25 bp, Homo sapien
acagagactcgacagtggcaagatg

SEQ ID NO: 5885237 - DNA, 25 bp, Homo sapien
gtaacagaatcctacgtgtatgttg

SEQ ID NO: 5885238 - DNA, 25 bp, Homo sapien
aaccagagaggctggtagccaataa

SEQ ID NO: 5885239 - DNA, 25 bp, Homo sapien
ccgagtcccgctcgggacgggtgga

SEQ ID NO: 5885240 - DNA, 25 bp, Homo sapien
tgaggatcccgtaccggtacttgca

SEQ ID NO: 5885241 - DNA, 25 bp, Homo sapien
gtggcaagatgtggaatctttgccg

SEQ ID NO: 5885242 - DNA, 25 bp, Homo sapien
gggccagttttccgagtcccgctcg

SEQ ID NO: 5885243 - DNA, 25 bp, Homo sapien
cgggcctgggccggggatctctgca

SEQ ID NO: 5885244 - DNA, 25 bp, Homo sapien
gtgctggagttggccgacaggttcc

SEQ ID NO: 5885245 - DNA, 25 bp, Homo sapien
gaacatgaggcgagtgccaagctct

SEQ ID NO: 5885246 - DNA, 25 bp, Homo sapien
gcagctctcactgctcagagctgtc

SEQ ID NO: 5885247 - DNA, 25 bp, Homo sapien
tcaggatgaagaattttatacgtta

SEQ ID NO: 5885248 - DNA, 25 bp, Homo sapien
tgtatacattgccgcccgcactcct

SEQ ID NO: 5885249 - DNA, 25 bp, Homo sapien
ccaaatttgaatacatgggaacatg

SEQ ID NO: 5885250 - DNA, 25 bp, Homo sapien
aggtactggagatggagagcatgga

SEQ ID NO: 5885251 - DNA, 25 bp, Homo sapien
gccgcgagttccgggcccaccgctc

SEQ ID NO: 5885252 - DNA, 25 bp, Homo sapien
agcattcttttggactaacagaagt

SEQ ID NO: 5885253 - DNA, 25 bp, Homo sapien
ctcgacatgtcaaaccagagaggct

SEQ ID NO: 5885254 - DNA, 25 bp, Homo sapien
ttaaattgctcaggttgtcccagat

SEQ ID NO: 5885255 - DNA, 25 bp, Homo sapien
ggcaagatgtggaatctttgccgct

SEQ ID NO: 5885256 - DNA, 25 bp, Homo sapien
agactggctttcagatttggaaatt

SEQ ID NO: 5885257 - DNA, 25 bp, Homo sapien
gagagcatggagacggccgccgccg

SEQ ID NO: 5885258 - DNA, 25 bp, Homo sapien
ccctgaacatgaggcgagtgccaag

SEQ ID NO: 5885259 - DNA, 25 bp, Homo sapien
accgcatcagacagatgcaagagat

SEQ ID NO: 5885260 - DNA, 25 bp, Homo sapien
tgaagaccggtttgtatacattgcc

SEQ ID NO: 5885261 - DNA, 25 bp, Homo sapien
cagaagtcctaagcatcgaaggagc

SEQ ID NO: 5885262 - DNA, 25 bp, Homo sapien
acatgaggcgagtgccaagctctca

SEQ ID NO: 5885263 - DNA, 25 bp, Homo sapien
gaggtggatgcttcttcctcctatg

SEQ ID NO: 5885264 - DNA, 25 bp, Homo sapien
catcgtcacgccctgaacatgaggc

SEQ ID NO: 5885265 - DNA, 25 bp, Homo sapien
acccaaatttgaatacatgggaaca

SEQ ID NO: 5885266 - DNA, 25 bp, Homo sapien
tcgacagtggcaagatgtggaatct

SEQ ID NO: 5885267 - DNA, 25 bp, Homo sapien
atgggaacatgtttgtagtctgatg

SEQ ID NO: 5885268 - DNA, 25 bp, Homo sapien
accggtacttgcatggcacacagag

SEQ ID NO: 5885269 - DNA, 25 bp, Homo sapien
aaattgctcaggttgtcccagatga

SEQ ID NO: 5885270 - DNA, 25 bp, Homo sapien
tcacgtgaggatcccgtaccggtac

SEQ ID NO: 5885271 - DNA, 25 bp, Homo sapien
gcctaccgatattgtgcggagagga

SEQ ID NO: 5885272 - DNA, 25 bp, Homo sapien
atgcgcaagtggagctccgagccgg

SEQ ID NO: 5885273 - DNA, 25 bp, Homo sapien
cctggcggcagaacgagcagcggcg

SEQ ID NO: 5885274 - DNA, 25 bp, Homo sapien
ctgttgattctgaagaggttctctt

SEQ ID NO: 5885275 - DNA, 25 bp, Homo sapien
agagccactgcttgtcacgtgagga

SEQ ID NO: 5885276 - DNA, 25 bp, Homo sapien
gatgatgtcttcattataggaggct

SEQ ID NO: 5885277 - DNA, 25 bp, Homo sapien
attctgaagaggttctctttgaaac

SEQ ID NO: 5885278 - DNA, 25 bp, Homo sapien
ggccggggatctctgcaatggaggc

SEQ ID NO: 5885279 - DNA, 25 bp, Homo sapien
cctgggccggggatctctgcaatgg

SEQ ID NO: 5885280 - DNA, 25 bp, Homo sapien
cttgaaagcttgcctccagaagtcc

SEQ ID NO: 5885281 - DNA, 25 bp, Homo sapien
gaagaactttttaaattgctcaggt

SEQ ID NO: 5885282 - DNA, 25 bp, Homo sapien
ctatgccacaacctcgttgtagagc

SEQ ID NO: 5885283 - DNA, 25 bp, Homo sapien
gtcaaaccagagaggctggtagcca

SEQ ID NO: 5885284 - DNA, 25 bp, Homo sapien
ttgtgtggcaattcatagcttagca

SEQ ID NO: 5885285 - DNA, 25 bp, Homo sapien
acagtatcggaaagaagcctaccga

SEQ ID NO: 5885286 - DNA, 25 bp, Homo sapien
ctctgaaggctgctgatatgatacg

SEQ ID NO: 5885287 - DNA, 25 bp, Homo sapien
tagcacacatgtacaccctgagcca

SEQ ID NO: 5885288 - DNA, 25 bp, Homo sapien
gccagcaccccacttctcatgtgtc

SEQ ID NO: 5885289 - DNA, 25 bp, Homo sapien
tacttcacgcccctgctctcgggcc

SEQ ID NO: 5885290 - DNA, 25 bp, Homo sapien
cggcgccagggcctcttctgcgaca

SEQ ID NO: 5885291 - DNA, 25 bp, Homo sapien
gcggcacggtggacttcgggcctgg

SEQ ID NO: 5885292 - DNA, 25 bp, Homo sapien
aagaggcagtaagaaaaattgccag

SEQ ID NO: 5885293 - DNA, 25 bp, Homo sapien
tcggtactggctgccgccaccgagt

SEQ ID NO: 5885294 - DNA, 25 bp, Homo sapien
gcattggaggacacggcaactttag

SEQ ID NO: 5885295 - DNA, 25 bp, Homo sapien
tactcgacatgtcaaaccagagagg

SEQ ID NO: 5885296 - DNA, 25 bp, Homo sapien
ctggccgccgaggtccgaggcagcg

SEQ ID NO: 5885297 - DNA, 25 bp, Homo sapien
ctgtttataatcctgagcttgataa

SEQ ID NO: 5885298 - DNA, 25 bp, Homo sapien
cccgcactcctgtagaccgggacac

SEQ ID NO: 5885299 - DNA, 25 bp, Homo sapien
gggtaaatctgccacatattcataa

SEQ ID NO: 5885300 - DNA, 25 bp, Homo sapien
gccgtaatcgagtacatgtacaccg

SEQ ID NO: 5885301 - DNA, 25 bp, Homo sapien
atgttgtcccaagagttattgttta

SEQ ID NO: 5885302 - DNA, 25 bp, Homo sapien
agatgtggaatctttgccgcttatt

SEQ ID NO: 5885303 - DNA, 25 bp, Homo sapien
gaatcggcaccaaagattcttcgag

SEQ ID NO: 5885304 - DNA, 25 bp, Homo sapien
ggctcggcaggactggccgccgagg

SEQ ID NO: 5885305 - DNA, 25 bp, Homo sapien
aaatgggttcagagaaatgctgaag

SEQ ID NO: 5885306 - DNA, 25 bp, Homo sapien
cagtaagaaaaattgccagccaagt

SEQ ID NO: 5885307 - DNA, 25 bp, Homo sapien
gttgtcccaagagttattgtttaga

SEQ ID NO: 5885308 - DNA, 25 bp, Homo sapien
cttcgagatgtcaaagcactagcca

SEQ ID NO: 5885309 - DNA, 25 bp, Homo sapien
atctctgcaatggaggcgagcgggg

SEQ ID NO: 5885310 - DNA, 25 bp, Homo sapien
cggcaccaaagattcttcgagatgt

SEQ ID NO: 5885311 - DNA, 25 bp, Homo sapien
ctatttaagtgaatgtgtgggatat

SEQ ID NO: 5885312 - DNA, 25 bp, Homo sapien
aaaattgccagccaagtgtctgatg

SEQ ID NO: 5885313 - DNA, 25 bp, Homo sapien
ggatgtgatcatggttattggaggt

SEQ ID NO: 5885314 - DNA, 25 bp, Homo sapien
ctaacagaagtcaaagggaagctct

SEQ ID NO: 5885315 - DNA, 25 bp, Homo sapien
cgcactcctgtagaccgggacactg

SEQ ID NO: 5885316 - DNA, 25 bp, Homo sapien
atgaggacagatgggtaaatctgcc

SEQ ID NO: 5885317 - DNA, 25 bp, Homo sapien
aattgtgtggcaattcatagcttag

SEQ ID NO: 5885318 - DNA, 25 bp, Homo sapien
ctcggcaggactggccgccgaggtc

SEQ ID NO: 5885319 - DNA, 25 bp, Homo sapien
cggtacttgcatggcacacagagat

SEQ ID NO: 5885320 - DNA, 25 bp, Homo sapien
acttgctatgatacagagactcgac

SEQ ID NO: 5885321 - DNA, 25 bp, Homo sapien
agagctgagaatatacaatctggca

SEQ ID NO: 5885322 - DNA, 25 bp, Homo sapien
ctcctgtagaccgggacactgaaga

SEQ ID NO: 5885323 - DNA, 25 bp, Homo sapien
aggccgcgagttccgggcccaccgc

SEQ ID NO: 5885324 - DNA, 25 bp, Homo sapien
tgagagctgagaatatacaatctgg

SEQ ID NO: 5885325 - DNA, 25 bp, Homo sapien
aaattactgttgattctgaagaggt

SEQ ID NO: 5885326 - DNA, 25 bp, Homo sapien
ttcataatcacctcgatggacatgc

SEQ ID NO: 5885327 - DNA, 25 bp, Homo sapien
ggaagaggtggatgcttcttcctcc

SEQ ID NO: 5885328 - DNA, 25 bp, Homo sapien
ccagaagccgaggatttcgagtgca

SEQ ID NO: 5885329 - DNA, 25 bp, Homo sapien
ctgagaatatacaatctggcacatg

SEQ ID NO: 5885330 - DNA, 25 bp, Homo sapien
agacatgctctgagagctgagaata

SEQ ID NO: 5885331 - DNA, 25 bp, Homo sapien
cataatcacctcgatggacatgctg

SEQ ID NO: 5885332 - DNA, 25 bp, Homo sapien
gagatacatcgtcacgccctgaaca

SEQ ID NO: 5885333 - DNA, 25 bp, Homo sapien
gatttcgagtgcagctctcactgct

SEQ ID NO: 5885334 - DNA, 25 bp, Homo sapien
tattcataatcacctcgatggacat

SEQ ID NO: 5885335 - DNA, 25 bp, Homo sapien
tgtagaccgggacactgaagatgga

SEQ ID NO: 5885336 - DNA, 25 bp, Homo sapien
tgattctgaagaggttctctttgaa

SEQ ID NO: 5885337 - DNA, 25 bp, Homo sapien
tgagccaacttgctctgaaggctgc

SEQ ID NO: 5885338 - DNA, 25 bp, Homo sapien
aaaaaacttcatctctcaaattgtg

SEQ ID NO: 5885339 - DNA, 25 bp, Homo sapien
tcagacagatgcaagagatacatcg

SEQ ID NO: 5885340 - DNA, 25 bp, Homo sapien
tggaatcggcaccaaagattcttcg

SEQ ID NO: 5885341 - DNA, 25 bp, Homo sapien
gggcccgaacccgacacagtggaag

SEQ ID NO: 5885342 - DNA, 25 bp, Homo sapien
acctgatgtggcagaaggaccgcat

SEQ ID NO: 5885343 - DNA, 25 bp, Homo sapien
ggcagcggcacggtggacttcgggc

SEQ ID NO: 5885344 - DNA, 25 bp, Homo sapien
ggacagatgggtaaatctgccacat

SEQ ID NO: 5885345 - DNA, 25 bp, Homo sapien
tgcggagaggaagaggtggatgctt

SEQ ID NO: 5885346 - DNA, 25 bp, Homo sapien
cggcagtggcggcggcggcggcggc

SEQ ID NO: 5885347 - DNA, 25 bp, Homo sapien
actggagatggagagcatggagacg

SEQ ID NO: 5885348 - DNA, 25 bp, Homo sapien
caagatgtggaatctttgccgctta

SEQ ID NO: 5885349 - DNA, 25 bp, Homo sapien
gaaaggtataacccaaatttgaata

SEQ ID NO: 5885350 - DNA, 25 bp, Homo sapien
tggagccagggtttgctaaaactgt

SEQ ID NO: 5885351 - DNA, 25 bp, Homo sapien
tgcgacattaccctgtgcttcggcg

SEQ ID NO: 5885352 - DNA, 25 bp, Homo sapien
tactggctgccgccaccgagtactt

SEQ ID NO: 5885353 - DNA, 25 bp, Homo sapien
aggtgctggagttggccgacaggtt

SEQ ID NO: 5885354 - DNA, 25 bp, Homo sapien
aattactgctttttccaaatgtctg

SEQ ID NO: 5885355 - DNA, 25 bp, Homo sapien
ggaagccgtaatcgagtacatgtac

SEQ ID NO: 5885356 - DNA, 25 bp, Homo sapien
tatgttgctggatcaatggagccag

SEQ ID NO: 5885357 - DNA, 25 bp, Homo sapien
cttttatcagacagcatcatgttgt

SEQ ID NO: 5885358 - DNA, 25 bp, Homo sapien
ccggctcggcaggactggccgccga

SEQ ID NO: 5885359 - DNA, 25 bp, Homo sapien
tcaatggagccagggtttgctaaaa

SEQ ID NO: 5885360 - DNA, 25 bp, Homo sapien
ttgcatggcacacagagatacccta

SEQ ID NO: 5885361 - DNA, 25 bp, Homo sapien
accgatattgtgcggagaggaagag

SEQ ID NO: 5885362 - DNA, 25 bp, Homo sapien
atgctctgagagctgagaatataca

SEQ ID NO: 5885363 - DNA, 25 bp, Homo sapien
cacaacctcgttgtagagccactgc

SEQ ID NO: 5885364 - DNA, 25 bp, Homo sapien
gaaaccgttttgaaatgggttcaga

SEQ ID NO: 5885365 - DNA, 25 bp, Homo sapien
ttaaagatgtgactgtttataatcc

SEQ ID NO: 5885366 - DNA, 25 bp, Homo sapien
gccagttttccgagtcccgctcggg

SEQ ID NO: 5885367 - DNA, 25 bp, Homo sapien
attaaaggctgtaattacttgctat

SEQ ID NO: 5885368 - DNA, 25 bp, Homo sapien
aaagtgattcaggatgaagaatttt

SEQ ID NO: 5885369 - DNA, 25 bp, Homo sapien
agaagcctaccgatattgtgcggag

SEQ ID NO: 5885370 - DNA, 25 bp, Homo sapien
gggcgcatccgcgtcagcacgggca

SEQ ID NO: 5885371 - DNA, 25 bp, Homo sapien
ttgaagaactttttaaattgctcag

SEQ ID NO: 5885372 - DNA, 25 bp, Homo sapien
tcgggccagttttccgagtcccgct

SEQ ID NO: 5885373 - DNA, 25 bp, Homo sapien
cgcagtggagagacatgctctgaga

SEQ ID NO: 5885374 - DNA, 25 bp, Homo sapien
ccgctcggtactggctgccgccacc

SEQ ID NO: 5885375 - DNA, 25 bp, Homo sapien
aggcccgaagtccaccgtgccgctg

SEQ ID NO: 5885376 - DNA, 25 bp, Homo sapien
cagtgtcccggtctacaggagtgcg

SEQ ID NO: 5885377 - DNA, 25 bp, Homo sapien
ataaaagtttgaattgaccacagac

SEQ ID NO: 5885378 - DNA, 25 bp, Homo sapien
gaaatttctccgtatcatatcagca

SEQ ID NO: 5885379 - DNA, 25 bp, Homo sapien
cttgggacaacatgatgctgtctga

SEQ ID NO: 5885380 - DNA, 25 bp, Homo sapien
tctgaaagccagtctctaatgagat

SEQ ID NO: 5885381 - DNA, 25 bp, Homo sapien
gggatcctcacgtgacaagcagtgg

SEQ ID NO: 5885382 - DNA, 25 bp, Homo sapien
ggcagccagtaccgagcggtgggcc

SEQ ID NO: 5885383 - DNA, 25 bp, Homo sapien
ttctacagttttagcaaaccctggc

SEQ ID NO: 5885384 - DNA, 25 bp, Homo sapien
gtaggattctgttactgcaacagca

SEQ ID NO: 5885385 - DNA, 25 bp, Homo sapien
ccagtacctgaagagatgcagccgc

SEQ ID NO: 5885386 - DNA, 25 bp, Homo sapien
atgctgtctgataaaagtttgaatt

SEQ ID NO: 5885387 - DNA, 25 bp, Homo sapien
gctttgacatctcgaagaatctttg

SEQ ID NO: 5885388 - DNA, 25 bp, Homo sapien
acatacacgtaggattctgttactg

SEQ ID NO: 5885389 - DNA, 25 bp, Homo sapien
gccggcggcggccgtctccatgctc

SEQ ID NO: 5885390 - DNA, 25 bp, Homo sapien
aataagcggcaaagattccacatct

SEQ ID NO: 5885391 - DNA, 25 bp, Homo sapien
tataaacagtcacatctttaaaacc

SEQ ID NO: 5885392 - DNA, 25 bp, Homo sapien
cacagacatttggaaaaagcagtaa

SEQ ID NO: 5885393 - DNA, 25 bp, Homo sapien
gaggttgtggcataggaggaagaag

SEQ ID NO: 5885394 - DNA, 25 bp, Homo sapien
ttcaaatttgggttatacctttcta

SEQ ID NO: 5885395 - DNA, 25 bp, Homo sapien
ggaggcaagctttcaaggatctcat

SEQ ID NO: 5885396 - DNA, 25 bp, Homo sapien
ttccagcctcctataatgaagacat

SEQ ID NO: 5885397 - DNA, 25 bp, Homo sapien
tccacttgcgcatctccacccgtcc

SEQ ID NO: 5885398 - DNA, 25 bp, Homo sapien
cttctttccgatactgtttatcaat

SEQ ID NO: 5885399 - DNA, 25 bp, Homo sapien
catgctctccatctccagtacctga

SEQ ID NO: 5885400 - DNA, 25 bp, Homo sapien
aacctgtcggccaactccagcacct

SEQ ID NO: 5885401 - DNA, 25 bp, Homo sapien
ggttttgaggcatagggtatctctg

SEQ ID NO: 5885402 - DNA, 25 bp, Homo sapien
ccatctccagtacctgaagagatgc

SEQ ID NO: 5885403 - DNA, 25 bp, Homo sapien
tgtcggccaactccagcacctcgtg

SEQ ID NO: 5885404 - DNA, 25 bp, Homo sapien
cagcctttaatccatcttcagtgtc

SEQ ID NO: 5885405 - DNA, 25 bp, Homo sapien
gaatatgtggcagatttacccatct

SEQ ID NO: 5885406 - DNA, 25 bp, Homo sapien
taacgtataaaattcttcatcctga

SEQ ID NO: 5885407 - DNA, 25 bp, Homo sapien
aagtttgaattgaccacagacattt

SEQ ID NO: 5885408 - DNA, 25 bp, Homo sapien
ctttaatccatcttcagtgtcccgg

SEQ ID NO: 5885409 - DNA, 25 bp, Homo sapien
tttcaaggatctcatcagacacttg

SEQ ID NO: 5885410 - DNA, 25 bp, Homo sapien
gaagcacagggtaatgtcgcagaag

SEQ ID NO: 5885411 - DNA, 25 bp, Homo sapien
gttggctcagggtgtacatgtgtgc

SEQ ID NO: 5885412 - DNA, 25 bp, Homo sapien
gctccacttgcgcatctccacccgt

SEQ ID NO: 5885413 - DNA, 25 bp, Homo sapien
gggacaacctgagcaatttaaaaag

SEQ ID NO: 5885414 - DNA, 25 bp, Homo sapien
ctgcctcttcgttttctaaacaata

SEQ ID NO: 5885415 - DNA, 25 bp, Homo sapien
cttcgatgcttaggacttctggagg

SEQ ID NO: 5885416 - DNA, 25 bp, Homo sapien
ttctgttagtccaaaagaatgcttt

SEQ ID NO: 5885417 - DNA, 25 bp, Homo sapien
agttgccgtgtcctccaatgctata

SEQ ID NO: 5885418 - DNA, 25 bp, Homo sapien
gccgccaggacagctctgagcagtg

SEQ ID NO: 5885419 - DNA, 25 bp, Homo sapien
tgaattgccacacaatttgagagat

SEQ ID NO: 5885420 - DNA, 25 bp, Homo sapien
ttcagggcgtgacgatgtatctctt

SEQ ID NO: 5885421 - DNA, 25 bp, Homo sapien
gtaatagcaaatggctgctccttcg

SEQ ID NO: 5885422 - DNA, 25 bp, Homo sapien
ggtggcggcagccagtaccgagcgg

SEQ ID NO: 5885423 - DNA, 25 bp, Homo sapien
caacgaggttgtggcataggaggaa

SEQ ID NO: 5885424 - DNA, 25 bp, Homo sapien
ctcttgggacaacatgatgctgtct

SEQ ID NO: 5885425 - DNA, 25 bp, Homo sapien
gtactcgattacggcttccactgtg

SEQ ID NO: 5885426 - DNA, 25 bp, Homo sapien
attcttttaaacgaatgagtaggaa

SEQ ID NO: 5885427 - DNA, 25 bp, Homo sapien
tcaatggctagtgctttgacatctc

SEQ ID NO: 5885428 - DNA, 25 bp, Homo sapien
gtgacgatgtatctcttgcatctgt

SEQ ID NO: 5885429 - DNA, 25 bp, Homo sapien
tttctccgtatcatatcagcagcct

SEQ ID NO: 5885430 - DNA, 25 bp, Homo sapien
cttaggacttctggaggcaagcttt

SEQ ID NO: 5885431 - DNA, 25 bp, Homo sapien
tgttcagggcgtgacgatgtatctc

SEQ ID NO: 5885432 - DNA, 25 bp, Homo sapien
ccgaagtccaccgtgccgctgcctc

SEQ ID NO: 5885433 - DNA, 25 bp, Homo sapien
tcaacagtaatttccaaatctgaaa

SEQ ID NO: 5885434 - DNA, 25 bp, Homo sapien
tactgcctcttcgttttctaaacaa

SEQ ID NO: 5885435 - DNA, 25 bp, Homo sapien
ggtttcatctgggacaacctgagca

SEQ ID NO: 5885436 - DNA, 25 bp, Homo sapien
tgacatctcgaagaatctttggtgc

SEQ ID NO: 5885437 - DNA, 25 bp, Homo sapien
aaagccagtctctaatgagatggaa

SEQ ID NO: 5885438 - DNA, 25 bp, Homo sapien
aatagcaaatggctgctccttcgat

SEQ ID NO: 5885439 - DNA, 25 bp, Homo sapien
aagcagtggctctacaacgaggttg

SEQ ID NO: 5885440 - DNA, 25 bp, Homo sapien
cgccgccgccgccgccactgccgca

SEQ ID NO: 5885441 - DNA, 25 bp, Homo sapien
acctcttcctctccgcacaatatcg

SEQ ID NO: 5885442 - DNA, 25 bp, Homo sapien
cggtgtacatgtactcgattacggc

SEQ ID NO: 5885443 - DNA, 25 bp, Homo sapien
tgacaagcagtggctctacaacgag

SEQ ID NO: 5885444 - DNA, 25 bp, Homo sapien
tccgtatcatatcagcagccttcag

SEQ ID NO: 5885445 - DNA, 25 bp, Homo sapien
agcaggggcgtgaagtactcggtgg

SEQ ID NO: 5885446 - DNA, 25 bp, Homo sapien
cgcggatgcgcccggtgtacatgta

SEQ ID NO: 5885447 - DNA, 25 bp, Homo sapien
ttgccacacaatttgagagatgaag

SEQ ID NO: 5885448 - DNA, 25 bp, Homo sapien
tcgatgcttaggacttctggaggca

SEQ ID NO: 5885449 - DNA, 25 bp, Homo sapien
ccaacttgacacaaacttcattatt

SEQ ID NO: 5885450 - DNA, 25 bp, Homo sapien
gctcgcctccattgcagagatcccc

SEQ ID NO: 5885451 - DNA, 25 bp, Homo sapien
cagcagccttcagagcaagttggct

SEQ ID NO: 5885452 - DNA, 25 bp, Homo sapien
catcagacacttggctggcaatttt

SEQ ID NO: 5885453 - DNA, 25 bp, Homo sapien
acacaaacttcattattggctacca

SEQ ID NO: 5885454 - DNA, 25 bp, Homo sapien
ttatgaatatgtggcagatttaccc

SEQ ID NO: 5885455 - DNA, 25 bp, Homo sapien
agcaacatacacgtaggattctgtt

SEQ ID NO: 5885456 - DNA, 25 bp, Homo sapien
atgtatctcttgcatctgtctgatg

SEQ ID NO: 5885457 - DNA, 25 bp, Homo sapien
cttcagcatttctctgaacccattt

SEQ ID NO: 5885458 - DNA, 25 bp, Homo sapien
catgtgccagattgtatattctcag

SEQ ID NO: 5885459 - DNA, 25 bp, Homo sapien
gacctcggcggccagtcctgccgag

SEQ ID NO: 5885460 - DNA, 25 bp, Homo sapien
attacagcctttaatccatcttcag

SEQ ID NO: 5885461 - DNA, 25 bp, Homo sapien
ggcaatttttcttactgcctcttcg

SEQ ID NO: 5885462 - DNA, 25 bp, Homo sapien
caggttttgaggcatagggtatctc

SEQ ID NO: 5885463 - DNA, 25 bp, Homo sapien
ttgagagatgaagttttttcttgag

SEQ ID NO: 5885464 - DNA, 25 bp, Homo sapien
gtggggtgctggcatgtgccagatt

SEQ ID NO: 5885465 - DNA, 25 bp, Homo sapien
cgaggcaatagtgacacatgagaag

SEQ ID NO: 5885466 - DNA, 25 bp, Homo sapien
tgcactcgaaatcctcggcttctgg

SEQ ID NO: 5885467 - DNA, 25 bp, Homo sapien
gaggccctggcgccgctgctcgttc

SEQ ID NO: 5885468 - DNA, 25 bp, Homo sapien
ttgtggcataggaggaagaagcatc

SEQ ID NO: 5885469 - DNA, 25 bp, Homo sapien
ggatctcatcagacacttggctggc

SEQ ID NO: 5885470 - DNA, 25 bp, Homo sapien
ggccaactccagcacctcgtgcacg

SEQ ID NO: 5885471 - DNA, 25 bp, Homo sapien
ttctggaggcaagctttcaaggatc

SEQ ID NO: 5885472 - DNA, 25 bp, Homo sapien
tctctgtatcatagcaagtaattac

SEQ ID NO: 5885473 - DNA, 25 bp, Homo sapien
tgctggcatgtgccagattgtatat

SEQ ID NO: 5885474 - DNA, 25 bp, Homo sapien
ccgtgccgctgcctcggacctcggc

SEQ ID NO: 5885475 - DNA, 25 bp, Homo sapien
ctacagttttagcaaaccctggctc

SEQ ID NO: 5885476 - DNA, 25 bp, Homo sapien
gccgctgcctcggacctcggcggcc

SEQ ID NO: 5885477 - DNA, 25 bp, Homo sapien
ttgagaaattctccacaaaattctt

SEQ ID NO: 5885478 - DNA, 25 bp, Homo sapien
cggagctccacttgcgcatctccac

SEQ ID NO: 5885479 - DNA, 25 bp, Homo sapien
tgtctctccactgcgtcagcgacca

SEQ ID NO: 5885480 - DNA, 25 bp, Homo sapien
tgatgctgtctgataaaagtttgaa

SEQ ID NO: 5885481 - DNA, 25 bp, Homo sapien
tccacaaaattcttttaaacgaatg

SEQ ID NO: 5885482 - DNA, 25 bp, Homo sapien
ggacaacatgatgctgtctgataaa

SEQ ID NO: 5885483 - DNA, 25 bp, Homo sapien
gcagtggctctacaacgaggttgtg

SEQ ID NO: 5885484 - DNA, 25 bp, Homo sapien
cactgtcgagtctctgtatcatagc

SEQ ID NO: 5885485 - DNA, 25 bp, Homo sapien
cgccgctgctcgttctgccgccagg

SEQ ID NO: 5885486 - DNA, 25 bp, Homo sapien
tgctctccatctccagtacctgaag

SEQ ID NO: 5885487 - DNA, 25 bp, Homo sapien
cacatccatgttttgcccataacga

SEQ ID NO: 5885488 - DNA, 25 bp, Homo sapien
ggacttctggaggcaagctttcaag

SEQ ID NO: 5885489 - DNA, 25 bp, Homo sapien
tgctcgttctgccgccaggacagct

SEQ ID NO: 5885490 - DNA, 25 bp, Homo sapien
tagcaaatggctgctccttcgatgc

SEQ ID NO: 5885491 - DNA, 25 bp, Homo sapien
tcgttttctaaacaataactcttgg

SEQ ID NO: 5885492 - DNA, 25 bp, Homo sapien
ccctggcgccgctgctcgttctgcc

SEQ ID NO: 5885493 - DNA, 25 bp, Homo sapien
caccgtgccgctgcctcggacctcg

SEQ ID NO: 5885494 - DNA, 25 bp, Homo sapien
tacaaacatgttcccatgtattcaa

SEQ ID NO: 5885495 - DNA, 25 bp, Homo sapien
ggctccattgatccagcaacataca

SEQ ID NO: 5885496 - DNA, 25 bp, Homo sapien
taggaacctgtcggccaactccagc

SEQ ID NO: 5885497 - DNA, 25 bp, Homo sapien
ggcggccagtcctgccgagccggcg

SEQ ID NO: 5885498 - DNA, 25 bp, Homo sapien
aatctgagagcttggcactcgcctc

SEQ ID NO: 5885499 - DNA, 25 bp, Homo sapien
tatattctcagctctcagagcatgt

SEQ ID NO: 5885500 - DNA, 25 bp, Homo sapien
gctgctcgttctgccgccaggacag

SEQ ID NO: 5885501 - DNA, 25 bp, Homo sapien
caagtaattacagcctttaatccat

SEQ ID NO: 5885502 - DNA, 25 bp, Homo sapien
gtcccgagcgggactcggaaaactg

SEQ ID NO: 5885503 - DNA, 25 bp, Homo sapien
tccatcttcagtgtcccggtctaca

SEQ ID NO: 5885504 - DNA, 25 bp, Homo sapien
tcgtgcacgctgcccgtgctgacgc

SEQ ID NO: 5885505 - DNA, 25 bp, Homo sapien
tatgaattgccacacaatttgagag

SEQ ID NO: 5885506 - DNA, 25 bp, Homo sapien
tttgacatctcgaagaatctttggt

SEQ ID NO: 5885507 - DNA, 25 bp, Homo sapien
tttctctgaacccatttcaaaacgg

SEQ ID NO: 5885508 - DNA, 25 bp, Homo sapien
acatgtactcgattacggcttccac

SEQ ID NO: 5885509 - DNA, 25 bp, Homo sapien
gtcctgccgagccggcggcggccgt

SEQ ID NO: 5885510 - DNA, 25 bp, Homo sapien
catttctctgaacccatttcaaaac

SEQ ID NO: 5885511 - DNA, 25 bp, Homo sapien
tcagggtgtacatgtgtgctaagct

SEQ ID NO: 5885512 - DNA, 25 bp, Homo sapien
tccaaatctgaaagccagtctctaa

SEQ ID NO: 5885513 - DNA, 25 bp, Homo sapien
ggctggcaatttttcttactgcctc

SEQ ID NO: 5885514 - DNA, 25 bp, Homo sapien
acttggctggcaatttttcttactg

SEQ ID NO: 5885515 - DNA, 25 bp, Homo sapien
catttggaaaaagcagtaattgtca

SEQ ID NO: 5885516 - DNA, 25 bp, Homo sapien
ttttgaggcatagggtatctctgtg

SEQ ID NO: 5885517 - DNA, 25 bp, Homo sapien
catttcaaaacggtttcaaagagaa

SEQ ID NO: 5885518 - DNA, 25 bp, Homo sapien
caaaccctggctccattgatccagc

SEQ ID NO: 5885519 - DNA, 25 bp, Homo sapien
gaactcgcggcctccagccccgccg

SEQ ID NO: 5885520 - DNA, 25 bp, Homo sapien
ggcttccactgtgtcgggttcgggc

SEQ ID NO: 5885521 - DNA, 25 bp, Homo sapien
acgaggttgtggcataggaggaaga

SEQ ID NO: 5885522 - DNA, 25 bp, Homo sapien
ggcctccagccccgccgaagcacag

SEQ ID NO: 5885523 - DNA, 25 bp, Homo sapien
tgtcgggttcgggccccggctcgga

SEQ ID NO: 5885524 - DNA, 25 bp, Homo sapien
catcaacaaaatatcccacacattc

SEQ ID NO: 5885525 - DNA, 25 bp, Homo sapien
cagcatgtccatcgaggtgattatg

SEQ ID NO: 5885526 - DNA, 25 bp, Homo sapien
ctgcaacagcatgtccatcgaggtg

SEQ ID NO: 5885527 - DNA, 25 bp, Homo sapien
gagaacctcttcagaatcaacagta

SEQ ID NO: 5885528 - DNA, 25 bp, Homo sapien
ggcagatttacccatctgtcctcat

SEQ ID NO: 5885529 - DNA, 25 bp, Homo sapien
tagcattcaatctgagagcttggca

SEQ ID NO: 5885530 - DNA, 25 bp, Homo sapien
tgtcctcatcaacaaaatatcccac

SEQ ID NO: 5885531 - DNA, 25 bp, Homo sapien
ggggcgtgaagtactcggtggcggc

SEQ ID NO: 5885532 - DNA, 25 bp, Homo sapien
acagttttagcaaaccctggctcca

SEQ ID NO: 5885533 - DNA, 25 bp, Homo sapien
atatgtggcagatttacccatctgt

SEQ ID NO: 5885534 - DNA, 25 bp, Homo sapien
aagcagtaattgtcaataagcggca

SEQ ID NO: 5885535 - DNA, 25 bp, Homo sapien
gttttctaaacaataactcttggga

SEQ ID NO: 5885536 - DNA, 25 bp, Homo sapien
cccgagcgggactcggaaaactggc

SEQ ID NO: 5885537 - DNA, 25 bp, Homo sapien
tatcaatatcatcactgtttttcca

SEQ ID NO: 5885538 - DNA, 25 bp, Homo sapien
cgatactgtttatcaatatcatcac

SEQ ID NO: 5885539 - DNA, 25 bp, Homo sapien
tgggttatacctttctacagtttta

SEQ ID NO: 5885540 - DNA, 25 bp, Homo sapien
cttctgccacatcaggttttgaggc

SEQ ID NO: 5885541 - DNA, 25 bp, Homo sapien
acaaaccggtcttcaatggctagtg

SEQ ID NO: 5885542 - DNA, 25 bp, Homo sapien
cacctcgtgcacgctgcccgtgctg

SEQ ID NO: 5885543 - DNA, 25 bp, Homo sapien
cacacaatttgagagatgaagtttt

SEQ ID NO: 5885544 - DNA, 25 bp, Homo sapien
aagaatctttggtgccgattccaag

SEQ ID NO: 5885545 - DNA, 25 bp, Homo sapien
catctgtcctcatcaacaaaatatc

SEQ ID NO: 5885546 - DNA, 25 bp, Homo sapien
gaacctcttcagaatcaacagtaat

SEQ ID NO: 5885547 - DNA, 25 bp, Homo sapien
tgagtaggaacctgtcggccaactc

SEQ ID NO: 5885548 - DNA, 25 bp, Homo sapien
gattctgttactgcaacagcatgtc

SEQ ID NO: 5885549 - DNA, 25 bp, Homo sapien
taaacagtcacatctttaaaaccag

SEQ ID NO: 5885550 - DNA, 25 bp, Homo sapien
accggtacgggatcctcacgtgaca

SEQ ID NO: 5885551 - DNA, 25 bp, Homo sapien
atcaagctcaggattataaacagtc

SEQ ID NO: 5885552 - DNA, 25 bp, Homo sapien
atacaaaccggtcttcaatggctag

SEQ ID NO: 5885553 - DNA, 25 bp, Homo sapien
tttacccatctgtcctcatcaacaa

SEQ ID NO: 5885554 - DNA, 25 bp, Homo sapien
gcaagctttcaaggatctcatcaga

SEQ ID NO: 5885555 - DNA, 25 bp, Homo sapien
cttactgcctcttcgttttctaaac

SEQ ID NO: 5885556 - DNA, 25 bp, Homo sapien
gtacgggatcctcacgtgacaagca

SEQ ID NO: 5885557 - DNA, 25 bp, Homo sapien
cctgaatcactttgtggaaatttct

SEQ ID NO: 5885558 - DNA, 25 bp, Homo sapien
tactgcaacagcatgtccatcgagg

SEQ ID NO: 5885559 - DNA, 25 bp, Homo sapien
gcatccacctcttcctctccgcaca

SEQ ID NO: 5885560 - DNA, 25 bp, Homo sapien
gggcgtgacgatgtatctcttgcat

SEQ ID NO: 5885561 - DNA, 25 bp, Homo sapien
tgggcccggaactcgcggcctccag

SEQ ID NO: 5885562 - DNA, 25 bp, Homo sapien
tgaatcactttgtggaaatttctcc

SEQ ID NO: 5885563 - DNA, 25 bp, Homo sapien
tgatgcggtccttctgccacatcag

SEQ ID NO: 5885564 - DNA, 25 bp, Homo sapien
aatagtgacacatgagaagtggggt

SEQ ID NO: 5885565 - DNA, 25 bp, Homo sapien
agcctctctggtttgacatgtcgag

SEQ ID NO: 5885566 - DNA, 25 bp, Homo sapien
actcgcctcatgttcagggcgtgac

SEQ ID NO: 5885567 - DNA, 25 bp, Homo sapien
tcagaatcaacagtaatttccaaat

SEQ ID NO: 5885568 - DNA, 25 bp, Homo sapien
gtatacaaaccggtcttcaatggct

SEQ ID NO: 5885569 - DNA, 25 bp, Homo sapien
gcacgctgcccgtgctgacgcggat

SEQ ID NO: 5885570 - DNA, 25 bp, Homo sapien
ctcttcagcatttctctgaacccat

SEQ ID NO: 5885571 - DNA, 25 bp, Homo sapien
gaggcatagggtatctctgtgtgcc

SEQ ID NO: 5885572 - DNA, 25 bp, Homo sapien
tttccgatactgtttatcaatatca

SEQ ID NO: 5885573 - DNA, 25 bp, Homo sapien
cctgccgagccggcggcggccgtct

SEQ ID NO: 5885574 - DNA, 25 bp, Homo sapien
acgtaggattctgttactgcaacag

SEQ ID NO: 5885575 - DNA, 25 bp, Homo sapien
catctgtctgatgcggtccttctgc

SEQ ID NO: 5885576 - DNA, 25 bp, Homo sapien
ctcgttctgccgccaggacagctct

SEQ ID NO: 5885577 - DNA, 25 bp, Homo sapien
tggaaatttctccgtatcatatcag

SEQ ID NO: 5885578 - DNA, 25 bp, Homo sapien
cgccgccgccactgccgcagccgcc

SEQ ID NO: 5885579 - DNA, 25 bp, Homo sapien
ccattgcagagatccccggcccagg

SEQ ID NO: 5885580 - DNA, 25 bp, Homo sapien
attccacatcttgccactgtcgagt

SEQ ID NO: 5885581 - DNA, 25 bp, Homo sapien
gccactgtcgagtctctgtatcata

SEQ ID NO: 5885582 - DNA, 25 bp, Homo sapien
gttagtccaaaagaatgctttcttg

SEQ ID NO: 5885583 - DNA, 25 bp, Homo sapien
gcacaatatcggtaggcttctttcc

SEQ ID NO: 5885584 - DNA, 25 bp, Homo sapien
tcgcctcatgttcagggcgtgacga

SEQ ID NO: 5885585 - DNA, 25 bp, Homo sapien
ccgagccggcggcggccgtctccat

SEQ ID NO: 5885586 - DNA, 25 bp, Homo sapien
tatacctttctacagttttagcaaa

SEQ ID NO: 5885587 - DNA, 25 bp, Homo sapien
caaatttgggttatacctttctaca

SEQ ID NO: 5885588 - DNA, 25 bp, Homo sapien
gacaacctgagcaatttaaaaagtt

SEQ ID NO: 5885589 - DNA, 25 bp, Homo sapien
cacatcttgccactgtcgagtctct

SEQ ID NO: 5885590 - DNA, 25 bp, Homo sapien
gccatgcaagtaccggtacgggatc

SEQ ID NO: 5885591 - DNA, 25 bp, Homo sapien
gtttcaaagagaacctcttcagaat

SEQ ID NO: 5885592 - DNA, 25 bp, Homo sapien
gctctacaacgaggttgtggcatag

SEQ ID NO: 5885593 - DNA, 25 bp, Homo sapien
agaagaggccctggcgccgctgctc

SEQ ID NO: 5885594 - DNA, 25 bp, Homo sapien
catgtctctccactgcgtcagcgac

SEQ ID NO: 5885595 - DNA, 25 bp, Homo sapien
agcacagggtaatgtcgcagaagag

SEQ ID NO: 5885596 - DNA, 25 bp, Homo sapien
ctcatcagacacttggctggcaatt

SEQ ID NO: 5885597 - DNA, 25 bp, Homo sapien
gcggcaatgtatacaaaccggtctt

SEQ ID NO: 5885598 - DNA, 25 bp, Homo sapien
agcagtgagagctgcactcgaaatc

SEQ ID NO: 5885599 - DNA, 25 bp, Homo sapien
catgtgtgctaagctatgaattgcc

SEQ ID NO: 5885600 - DNA, 25 bp, Homo sapien
agtggctctacaacgaggttgtggc

SEQ ID NO: 5885601 - DNA, 25 bp, Homo sapien
ctccattgcagagatccccggccca

SEQ ID NO: 5885602 - DNA, 25 bp, Homo sapien
tctgaacccatttcaaaacggtttc

SEQ ID NO: 5885603 - DNA, 25 bp, Homo sapien
atagcaagtaattacagcctttaat

SEQ ID NO: 5885604 - DNA, 25 bp, Homo sapien
atgtccatcgaggtgattatgaata

SEQ ID NO: 5885605 - DNA, 25 bp, Homo sapien
cagctctgagcagtgagagctgcac

SEQ ID NO: 5885606 - DNA, 25 bp, Homo sapien
cgagcgggactcggaaaactggccc

SEQ ID NO: 5885607 - DNA, 25 bp, Homo sapien
gtgtcccggtctacaggagtgcggg

SEQ ID NO: 5885608 - DNA, 25 bp, Homo sapien
tggctctacaacgaggttgtggcat

SEQ ID NO: 5885609 - DNA, 25 bp, Homo sapien
aagttggctcagggtgtacatgtgt

SEQ ID NO: 5885610 - DNA, 25 bp, Homo sapien
cgaaatcctcggcttctgggcccgg

SEQ ID NO: 5885611 - DNA, 25 bp, Homo sapien
aatccatcttcagtgtcccggtcta

SEQ ID NO: 5885612 - DNA, 25 bp, Homo sapien
tcggaaaactggcccgagagcaggg

SEQ ID NO: 5885613 - DNA, 25 bp, Homo sapien
caaagagaacctcttcagaatcaac

SEQ ID NO: 5885614 - DNA, 25 bp, Homo sapien
tcggcttctgggcccggatcgcccc

SEQ ID NO: 5885615 - DNA, 25 bp, Homo sapien
atctcatcagacacttggctggcaa

SEQ ID NO: 5885616 - DNA, 25 bp, Homo sapien
agggtgtacatgtgtgctaagctat

SEQ ID NO: 5885617 - DNA, 25 bp, Homo sapien
gggcggcaatgtatacaaaccggtc

SEQ ID NO: 5885618 - DNA, 25 bp, Homo sapien
catgcaagtaccggtacgggatcct

SEQ ID NO: 5885619 - DNA, 25 bp, Homo sapien
atcccacacattcacttaaatagtc

SEQ ID NO: 5885620 - DNA, 25 bp, Homo sapien
ccccgctcgcctccattgcagagat

SEQ ID NO: 5885621 - DNA, 25 bp, Homo sapien
tcaaagtatctctctctctcttcag

SEQ ID NO: 5885622 - DNA, 25 bp, Homo sapien
aaggatctcatcagacacttggctg

SEQ ID NO: 5885623 - DNA, 25 bp, Homo sapien
tatcggtaggcttctttccgatact

SEQ ID NO: 5885624 - DNA, 25 bp, Homo sapien
actcggaaaactggcccgagagcag

SEQ ID NO: 5885625 - DNA, 25 bp, Homo sapien
catgtattcaaatttgggttatacc

SEQ ID NO: 5885626 - DNA, 25 bp, Homo sapien
ggtgtacatgtgtgctaagctatga

SEQ ID NO: 5885627 - DNA, 25 bp, Homo sapien
gagcaatttaaaaagttcttcaaag

SEQ ID NO: 5885628 - DNA, 25 bp, Homo sapien
cgggccccggctcggagctccactt

SEQ ID NO: 5885629 - DNA, 25 bp, Homo sapien
taaacaataactcttgggacaacat

SEQ ID NO: 5885630 - DNA, 25 bp, Homo sapien
tgtattcaaatttgggttatacctt

SEQ ID NO: 5885631 - DNA, 25 bp, Homo sapien
ggggtgctggcatgtgccagattgt

SEQ ID NO: 5885632 - DNA, 25 bp, Homo sapien
tcctctccgcacaatatcggtaggc

SEQ ID NO: 5885633 - DNA, 25 bp, Homo sapien
cttgcgcatctccacccgtcccgag

SEQ ID NO: 5885634 - DNA, 25 bp, Homo sapien
cagccagtaccgagcggtgggcccg

SEQ ID NO: 5885635 - DNA, 25 bp, Homo sapien
tcgggttcgggccccggctcggagc

SEQ ID NO: 5885636 - DNA, 25 bp, Homo sapien
gtgtgccatgcaagtaccggtacgg

SEQ ID NO: 5885637 - DNA, 25 bp, Homo sapien
catcttgccactgtcgagtctctgt

SEQ ID NO: 5885638 - DNA, 25 bp, Homo sapien
gctctcagagcatgtctctccactg

SEQ ID NO: 5885639 - DNA, 25 bp, Homo sapien
cagcgaccaacttgacacaaacttc

SEQ ID NO: 5885640 - DNA, 25 bp, Homo sapien
ctcggacctcggcggccagtcctgc

SEQ ID NO: 5885641 - DNA, 25 bp, Homo sapien
acttcattattggctaccagcctct

SEQ ID NO: 5885642 - DNA, 25 bp, Homo sapien
taattgtcaataagcggcaaagatt

SEQ ID NO: 5885643 - DNA, 25 bp, Homo sapien
acaatatcggtaggcttctttccga

SEQ ID NO: 5885644 - DNA, 25 bp, Homo sapien
caggattataaacagtcacatcttt

SEQ ID NO: 5885645 - DNA, 25 bp, Homo sapien
caaaatatcccacacattcacttaa

SEQ ID NO: 5885646 - DNA, 25 bp, Homo sapien
acatctcgaagaatctttggtgccg

SEQ ID NO: 5885647 - DNA, 25 bp, Homo sapien
cgaagaatctttggtgccgattcca

SEQ ID NO: 5885648 - DNA, 25 bp, Homo sapien
cttcctctccgcacaatatcggtag

SEQ ID NO: 5885649 - DNA, 25 bp, Homo sapien
ctccattgatccagcaacatacacg

SEQ ID NO: 5885650 - DNA, 25 bp, Homo sapien
gctttcttgtcatcagactacaaac

SEQ ID NO: 5885651 - DNA, 25 bp, Homo sapien
tcactttgtggaaatttctccgtat

SEQ ID NO: 5885652 - DNA, 25 bp, Homo sapien
attgtcaataagcggcaaagattcc

SEQ ID NO: 5885653 - DNA, 25 bp, Homo sapien
tgtgccagattgtatattctcagct

SEQ ID NO: 5885654 - DNA, 25 bp, Homo sapien
ttctgccgccaggacagctctgagc

SEQ ID NO: 5885655 - DNA, 25 bp, Homo sapien
ggtaggtttcatctgggacaacctg

SEQ ID NO: 5885656 - DNA, 25 bp, Homo sapien
gtggcagatttacccatctgtcctc

SEQ ID NO: 5885657 - DNA, 25 bp, Homo sapien
cgcccggtgtacatgtactcgatta

SEQ ID NO: 5885658 - DNA, 25 bp, Homo sapien
atctcttgcatctgtctgatgcggt

SEQ ID NO: 5885659 - DNA, 25 bp, Homo sapien
attgtatattctcagctctcagagc

SEQ ID NO: 5885660 - DNA, 25 bp, Homo sapien
tctctctctctcttcagcatttctc

SEQ ID NO: 5885661 - DNA, 25 bp, Homo sapien
tagtgacacatgagaagtggggtgc

SEQ ID NO: 5885662 - DNA, 25 bp, Homo sapien
ttgcccataacgaggcaatagtgac

SEQ ID NO: 5885663 - DNA, 25 bp, Homo sapien
aaaattcttcatcctgaatcacttt

SEQ ID NO: 5885664 - DNA, 25 bp, Homo sapien
agacacttggctggcaatttttctt

SEQ ID NO: 5885665 - DNA, 25 bp, Homo sapien
ggactcggaaaactggcccgagagc

SEQ ID NO: 5885666 - DNA, 25 bp, Homo sapien
atttatcaagctcaggattataaac

SEQ ID NO: 5885667 - DNA, 25 bp, Homo sapien
tccttctgacacacctccaataacc

SEQ ID NO: 5885668 - DNA, 25 bp, Homo sapien
cctcggcggccagtcctgccgagcc

SEQ ID NO: 5885669 - DNA, 25 bp, Homo sapien
gagtaaggtaggtaggtttcatctg

SEQ ID NO: 5885670 - DNA, 25 bp, Homo sapien
gtgcacgctgcccgtgctgacgcgg

SEQ ID NO: 5885671 - DNA, 25 bp, Homo sapien
ctccagtacctgaagagatgcagcc

SEQ ID NO: 5885672 - DNA, 25 bp, Homo sapien
tccttctgccacatcaggttttgag

SEQ ID NO: 5885673 - DNA, 25 bp, Homo sapien
cccgccgaagcacagggtaatgtcg

SEQ ID NO: 5885674 - DNA, 25 bp, Homo sapien
aacagcatgtccatcgaggtgatta

SEQ ID NO: 5885675 - DNA, 25 bp, Homo sapien
ccagcaacatacacgtaggattctg

SEQ ID NO: 5885676 - DNA, 25 bp, Homo sapien
ctctccatctccagtacctgaagag

SEQ ID NO: 5885677 - DNA, 25 bp, Homo sapien
acaacatgatgctgtctgataaaag

SEQ ID NO: 5885678 - DNA, 25 bp, Homo sapien
tcaacaaaatatcccacacattcac

SEQ ID NO: 5885679 - DNA, 25 bp, Homo sapien
ctggcaatttttcttactgcctctt

SEQ ID NO: 5885680 - DNA, 25 bp, Homo sapien
ccgagcggtgggcccggaactcgcg

SEQ ID NO: 5885681 - DNA, 25 bp, Homo sapien
agtccaccgtgccgctgcctcggac

SEQ ID NO: 5885682 - DNA, 25 bp, Homo sapien
atcctgaatcactttgtggaaattt

SEQ ID NO: 5885683 - DNA, 25 bp, Homo sapien
ctggcatgtgccagattgtatattc

SEQ ID NO: 5885684 - DNA, 25 bp, Homo sapien
ggcatagggtatctctgtgtgccat

SEQ ID NO: 5885685 - DNA, 25 bp, Homo sapien
tacatgtgtgctaagctatgaattg

SEQ ID NO: 5885686 - DNA, 25 bp, Homo sapien
tgtttatcaatatcatcactgtttt

SEQ ID NO: 5885687 - DNA, 25 bp, Homo sapien
tcaaggatctcatcagacacttggc

SEQ ID NO: 5885688 - DNA, 25 bp, Homo sapien
atgtatacaaaccggtcttcaatgg

SEQ ID NO: 5885689 - DNA, 25 bp, Homo sapien
gtgcgggcggcaatgtatacaaacc

SEQ ID NO: 5885690 - DNA, 25 bp, Homo sapien
ctgttactgcaacagcatgtccatc

SEQ ID NO: 5885691 - DNA, 25 bp, Homo sapien
gcactcgcctcatgttcagggcgtg

SEQ ID NO: 5885692 - DNA, 25 bp, Homo sapien
aaaccggtcttcaatggctagtgct

SEQ ID NO: 5885693 - DNA, 25 bp, Homo sapien
agtctctaatgagatggaaaggtaa

SEQ ID NO: 5885694 - DNA, 25 bp, Homo sapien
ggcccgagagcaggggcgtgaagta

SEQ ID NO: 5885695 - DNA, 25 bp, Homo sapien
taatgagatggaaaggtaacgtata

SEQ ID NO: 5885696 - DNA, 25 bp, Homo sapien
cagagcaagttggctcagggtgtac

SEQ ID NO: 5885697 - DNA, 25 bp, Homo sapien
gcaagttggctcagggtgtacatgt

SEQ ID NO: 5885698 - DNA, 25 bp, Homo sapien
aaatcctcggcttctgggcccggat

SEQ ID NO: 5885699 - DNA, 25 bp, Homo sapien
cctgtcggccaactccagcacctcg

SEQ ID NO: 5885700 - DNA, 25 bp, Homo sapien
ccgcacaatatcggtaggcttcttt

SEQ ID NO: 5885701 - DNA, 25 bp, Homo sapien
tgaagagatgcagccgcggccgccg

SEQ ID NO: 5885702 - DNA, 25 bp, Homo sapien
tggtttgacatgtcgagtaaggtag

SEQ ID NO: 5885703 - DNA, 25 bp, Homo sapien
ggaaaactggcccgagagcaggggc

SEQ ID NO: 5885704 - DNA, 25 bp, Homo sapien
taccgagcggtgggcccggaactcg

SEQ ID NO: 5885705 - DNA, 25 bp, Homo sapien
ccacatcaggttttgaggcataggg

SEQ ID NO: 5885706 - DNA, 25 bp, Homo sapien
agagcatgtctctccactgcgtcag

SEQ ID NO: 5885707 - DNA, 25 bp, Homo sapien
cctcgtgcacgctgcccgtgctgac

SEQ ID NO: 5885708 - DNA, 25 bp, Homo sapien
tgctaagctatgaattgccacacaa

SEQ ID NO: 5885709 - DNA, 25 bp, Homo sapien
gacagctctgagcagtgagagctgc

SEQ ID NO: 5885710 - DNA, 25 bp, Homo sapien
gcaaagattccacatcttgccactg

SEQ ID NO: 5885711 - DNA, 25 bp, Homo sapien
taccagcctctctggtttgacatgt

SEQ ID NO: 5885712 - DNA, 25 bp, Homo sapien
acgtataaaattcttcatcctgaat

SEQ ID NO: 5885713 - DNA, 25 bp, Homo sapien
ggcttctgggcccggatcgcccccg

SEQ ID NO: 5885714 - DNA, 25 bp, Homo sapien
tgccagattgtatattctcagctct

SEQ ID NO: 5885715 - DNA, 25 bp, Homo sapien
ctggcccgagagcaggggcgtgaag

SEQ ID NO: 5885716 - DNA, 25 bp, Homo sapien
tgtatcatagcaagtaattacagcc

SEQ ID NO: 5885717 - DNA, 25 bp, Homo sapien
ttattggctaccagcctctctggtt

SEQ ID NO: 5885718 - DNA, 25 bp, Homo sapien
tctgtctgatgcggtccttctgcca

SEQ ID NO: 5885719 - DNA, 25 bp, Homo sapien
agttcttcaaagtatctctctctct

SEQ ID NO: 5885720 - DNA, 25 bp, Homo sapien
aaggtaggtaggtttcatctgggac

SEQ ID NO: 5885721 - DNA, 25 bp, Homo sapien
atatcagcagccttcagagcaagtt

SEQ ID NO: 5885722 - DNA, 25 bp, Homo sapien
aagtactcggtggcggcagccagta

SEQ ID NO: 5885723 - DNA, 25 bp, Homo sapien
agtaggaacctgtcggccaactcca

SEQ ID NO: 5885724 - DNA, 25 bp, Homo sapien
ggcggccgtctccatgctctccatc

SEQ ID NO: 5885725 - DNA, 25 bp, Homo sapien
tgcgcccggtgtacatgtactcgat

SEQ ID NO: 5885726 - DNA, 25 bp, Homo sapien
ctttgtaatagcaaatggctgctcc

SEQ ID NO: 5885727 - DNA, 25 bp, Homo sapien
ttcttcaaagtatctctctctctct

SEQ ID NO: 5885728 - DNA, 25 bp, Homo sapien
gaaaaagcagtaattgtcaataagc

SEQ ID NO: 5885729 - DNA, 25 bp, Homo sapien
actcgattacggcttccactgtgtc

SEQ ID NO: 5885730 - DNA, 25 bp, Homo sapien
tagtccaaaagaatgctttcttgtc

SEQ ID NO: 5885731 - DNA, 25 bp, Homo sapien
catctccacccgtcccgagcgggac

SEQ ID NO: 5885732 - DNA, 25 bp, Homo sapien
cggtctacaggagtgcgggcggcaa

SEQ ID NO: 5885733 - DNA, 25 bp, Homo sapien
acctccaataaccatgatcacatcc

SEQ ID NO: 5885734 - DNA, 25 bp, Homo sapien
ggcaatgtatacaaaccggtcttca

SEQ ID NO: 5885735 - DNA, 25 bp, Homo sapien
aagttgtgccatttatcaagctcag

SEQ ID NO: 5885736 - DNA, 25 bp, Homo sapien
tcatctgggacaacctgagcaattt

SEQ ID NO: 5885737 - DNA, 25 bp, Homo sapien
ccccggctcggagctccacttgcgc

SEQ ID NO: 5885738 - DNA, 25 bp, Homo sapien
tttcatctgggacaacctgagcaat

SEQ ID NO: 5885739 - DNA, 25 bp, Homo sapien
tgaccacagacatttggaaaaagca

SEQ ID NO: 5885740 - DNA, 25 bp, Homo sapien
accacagacatttggaaaaagcagt

SEQ ID NO: 5885741 - DNA, 25 bp, Homo sapien
ttcaaagagaacctcttcagaatca

SEQ ID NO: 5885742 - DNA, 25 bp, Homo sapien
aagaatgctttcttgtcatcagact

SEQ ID NO: 5885743 - DNA, 25 bp, Homo sapien
gactaaagttgccgtgtcctccaat

SEQ ID NO: 5885744 - DNA, 25 bp, Homo sapien
caatgtatacaaaccggtcttcaat

SEQ ID NO: 5885745 - DNA, 25 bp, Homo sapien
cctccttctgacacacctccaataa

SEQ ID NO: 5885746 - DNA, 25 bp, Homo sapien
tcggcggccagtcctgccgagccgg

SEQ ID NO: 5885747 - DNA, 25 bp, Homo sapien
acacctccaataaccatgatcacat

SEQ ID NO: 5885748 - DNA, 25 bp, Homo sapien
gtaatgtcgcagaagaggccctggc

SEQ ID NO: 5885749 - DNA, 25 bp, Homo sapien
tgtcaataagcggcaaagattccac

SEQ ID NO: 5885750 - DNA, 25 bp, Homo sapien
tttaaacgaatgagtaggaacctgt

SEQ ID NO: 5885751 - DNA, 25 bp, Homo sapien
gaatctttggtgccgattccaagtt

SEQ ID NO: 5885752 - DNA, 25 bp, Homo sapien
tctctaatgagatggaaaggtaacg

SEQ ID NO: 5885753 - DNA, 25 bp, Homo sapien
ttacggcttccactgtgtcgggttc

SEQ ID NO: 5885754 - DNA, 25 bp, Homo sapien
ttgccactgtcgagtctctgtatca

SEQ ID NO: 5885755 - DNA, 25 bp, Homo sapien
gctccttcgatgcttaggacttctg

SEQ ID NO: 5885756 - DNA, 25 bp, Homo sapien
ctcagctctcagagcatgtctctcc

SEQ ID NO: 5885757 - DNA, 25 bp, Homo sapien
ccgattccaagttgtgccatttatc

SEQ ID NO: 5885758 - DNA, 25 bp, Homo sapien
aggattctgttactgcaacagcatg

SEQ ID NO: 5885759 - DNA, 25 bp, Homo sapien
acaaacttcattattggctaccagc

SEQ ID NO: 5885760 - DNA, 25 bp, Homo sapien
tgataaaagtttgaattgaccacag

SEQ ID NO: 5885761 - DNA, 25 bp, Homo sapien
tgacacaaacttcattattggctac

SEQ ID NO: 5885762 - DNA, 25 bp, Homo sapien
gtgacacatgagaagtggggtgctg

SEQ ID NO: 5885763 - DNA, 25 bp, Homo sapien
cggcaaagattccacatcttgccac

SEQ ID NO: 5885764 - DNA, 25 bp, Homo sapien
ctatagagcttccctttgacttctg

SEQ ID NO: 5885765 - DNA, 25 bp, Homo sapien
tctccacaaaattcttttaaacgaa

SEQ ID NO: 5885766 - DNA, 25 bp, Homo sapien
tgcagagatccccggcccaggcccg

SEQ ID NO: 5885767 - DNA, 25 bp, Homo sapien
gagtgcgggcggcaatgtatacaaa

SEQ ID NO: 5885768 - DNA, 25 bp, Homo sapien
ctgccgccaggacagctctgagcag

SEQ ID NO: 5885769 - DNA, 25 bp, Homo sapien
tcggtaggcttctttccgatactgt

SEQ ID NO: 5885770 - DNA, 25 bp, Homo sapien
tttctaaacaataactcttgggaca

SEQ ID NO: 5885771 - DNA, 25 bp, Homo sapien
cgtctccatgctctccatctccagt

SEQ ID NO: 5885772 - DNA, 25 bp, Homo sapien
tcatctttgtaatagcaaatggctg

SEQ ID NO: 5885773 - DNA, 25 bp, Homo sapien
ctcttgcatctgtctgatgcggtcc

SEQ ID NO: 5885774 - DNA, 25 bp, Homo sapien
ccaaaagaatgctttcttgtcatca

SEQ ID NO: 5885775 - DNA, 25 bp, Homo sapien
ctgagcaatttaaaaagttcttcaa

SEQ ID NO: 5885776 - DNA, 25 bp, Homo sapien
gtcacatctttaaaaccaggactaa

SEQ ID NO: 5885777 - DNA, 25 bp, Homo sapien
ggtaacgtataaaattcttcatcct

SEQ ID NO: 5885778 - DNA, 25 bp, Homo sapien
gtttttccagcctcctataatgaag

SEQ ID NO: 5885779 - DNA, 25 bp, Homo sapien
aagtggggtgctggcatgtgccaga

SEQ ID NO: 5885780 - DNA, 25 bp, Homo sapien
aagacatcatctttgtaatagcaaa

SEQ ID NO: 5885781 - DNA, 25 bp, Homo sapien
ggcatgtgccagattgtatattctc

SEQ ID NO: 5885782 - DNA, 25 bp, Homo sapien
ccgaagcacagggtaatgtcgcaga

SEQ ID NO: 5885783 - DNA, 25 bp, Homo sapien
tgcttaggacttctggaggcaagct

SEQ ID NO: 5885784 - DNA, 25 bp, Homo sapien
tcagactacaaacatgttcccatgt

SEQ ID NO: 5885785 - DNA, 25 bp, Homo sapien
ctgtcgagtctctgtatcatagcaa

SEQ ID NO: 5885786 - DNA, 25 bp, Homo sapien
aaccctggctccattgatccagcaa

SEQ ID NO: 5885787 - DNA, 25 bp, Homo sapien
gctatgaattgccacacaatttgag

SEQ ID NO: 5885788 - DNA, 25 bp, Homo sapien
atctctgtgtgccatgcaagtaccg

SEQ ID NO: 5885789 - DNA, 25 bp, Homo sapien
ggcgtgaagtactcggtggcggcag

SEQ ID NO: 5885790 - DNA, 25 bp, Homo sapien
aacagtaatttccaaatctgaaagc

SEQ ID NO: 5885791 - DNA, 25 bp, Homo sapien
agattccacatcttgccactgtcga

SEQ ID NO: 5885792 - DNA, 25 bp, Homo sapien
tctgagagcttggcactcgcctcat

SEQ ID NO: 5885793 - DNA, 25 bp, Homo sapien
tatcatagcaagtaattacagcctt

SEQ ID NO: 5885794 - DNA, 25 bp, Homo sapien
agaagtggggtgctggcatgtgcca

SEQ ID NO: 5885795 - DNA, 25 bp, Homo sapien
gcgtcagcgaccaacttgacacaaa

SEQ ID NO: 5885796 - DNA, 25 bp, Homo sapien
tgttttgcccataacgaggcaatag

SEQ ID NO: 5885797 - DNA, 25 bp, Homo sapien
gtgccgctgcctcggacctcggcgg

SEQ ID NO: 5885798 - DNA, 25 bp, Homo sapien
aaagattccacatcttgccactgtc

SEQ ID NO: 5885799 - DNA, 25 bp, Homo sapien
cagagatccccggcccaggcccgaa

SEQ ID NO: 5885800 - DNA, 25 bp, Homo sapien
tttccaaatctgaaagccagtctct

SEQ ID NO: 5885801 - DNA, 25 bp, Homo sapien
acaagcagtggctctacaacgaggt

SEQ ID NO: 5885802 - DNA, 25 bp, Homo sapien
cgcatctccacccgtcccgagcggg

SEQ ID NO: 5885803 - DNA, 25 bp, Homo sapien
cagggtaatgtcgcagaagaggccc

SEQ ID NO: 5885804 - DNA, 25 bp, Homo sapien
ggcataggaggaagaagcatccacc

SEQ ID NO: 5885805 - DNA, 25 bp, Homo sapien
atgtggcagatttacccatctgtcc

SEQ ID NO: 5885806 - DNA, 25 bp, Homo sapien
cttctgacacacctccaataaccat

SEQ ID NO: 5885807 - DNA, 25 bp, Homo sapien
atctttgtaatagcaaatggctgct

SEQ ID NO: 5885808 - DNA, 25 bp, Homo sapien
gccacacaatttgagagatgaagtt

SEQ ID NO: 5885809 - DNA, 25 bp, Homo sapien
cgccgaagcacagggtaatgtcgca

SEQ ID NO: 5885810 - DNA, 25 bp, Homo sapien
gcctccattgcagagatccccggcc

SEQ ID NO: 5885811 - DNA, 25 bp, Homo sapien
gtatctcttgcatctgtctgatgcg

SEQ ID NO: 5885812 - DNA, 25 bp, Homo sapien
ggtgccgattccaagttgtgccatt

SEQ ID NO: 5885813 - DNA, 25 bp, Homo sapien
ctttggtgccgattccaagttgtgc

SEQ ID NO: 5885814 - DNA, 25 bp, Homo sapien
tcgcagaagaggccctggcgccgct

SEQ ID NO: 5885815 - DNA, 25 bp, Homo sapien
gaatgctttcttgtcatcagactac

SEQ ID NO: 5885816 - DNA, 25 bp, Homo sapien
ccagcctctctggtttgacatgtcg

SEQ ID NO: 5885817 - DNA, 25 bp, Homo sapien
ctataatgaagacatcatctttgta

SEQ ID NO: 5885818 - DNA, 25 bp, Homo sapien
agctcaggattataaacagtcacat

SEQ ID NO: 5885819 - DNA, 25 bp, Homo sapien
ctccaatgctatagagcttcccttt

SEQ ID NO: 5885820 - DNA, 25 bp, Homo sapien
tcctccaatgctatagagcttccct

SEQ ID NO: 5885821 - DNA, 25 bp, Homo sapien
gtaatttccaaatctgaaagccagt

SEQ ID NO: 5885822 - DNA, 25 bp, Homo sapien
gccgtgtcctccaatgctatagagc

SEQ ID NO: 5885823 - DNA, 25 bp, Homo sapien
cagatttacccatctgtcctcatca

SEQ ID NO: 5885824 - DNA, 25 bp, Homo sapien
gagaaattctccacaaaattctttt

SEQ ID NO: 5885825 - DNA, 25 bp, Homo sapien
tggctaccagcctctctggtttgac

SEQ ID NO: 5885826 - DNA, 25 bp, Homo sapien
aaaagtttgaattgaccacagacat

SEQ ID NO: 5885827 - DNA, 25 bp, Homo sapien
ttgtcatcagactacaaacatgttc

SEQ ID NO: 5885828 - DNA, 25 bp, Homo sapien
ggttcgggccccggctcggagctcc

SEQ ID NO: 5885829 - DNA, 25 bp, Homo sapien
actacaaacatgttcccatgtattc

SEQ ID NO: 5885830 - DNA, 25 bp, Homo sapien
aaagttgccgtgtcctccaatgcta

SEQ ID NO: 5885831 - DNA, 25 bp, Homo sapien
gagagatgaagttttttcttgagaa

SEQ ID NO: 5885832 - DNA, 25 bp, Homo sapien
ccataacgaggcaatagtgacacat

SEQ ID NO: 5885833 - DNA, 25 bp, Homo sapien
tgtatattctcagctctcagagcat

SEQ ID NO: 5885834 - DNA, 25 bp, Homo sapien
gtataaaattcttcatcctgaatca

SEQ ID NO: 5885835 - DNA, 25 bp, Homo sapien
ttctgttactgcaacagcatgtcca

SEQ ID NO: 5885836 - DNA, 25 bp, Homo sapien
gtgagagctgcactcgaaatcctcg

SEQ ID NO: 5885837 - DNA, 25 bp, Homo sapien
taggcttctttccgatactgtttat

SEQ ID NO: 5885838 - DNA, 25 bp, Homo sapien
catagggtatctctgtgtgccatgc

SEQ ID NO: 5885839 - DNA, 25 bp, Homo sapien
atctttggtgccgattccaagttgt

SEQ ID NO: 5885840 - DNA, 25 bp, Homo sapien
gaccaacttgacacaaacttcatta

SEQ ID NO: 5885841 - DNA, 25 bp, Homo sapien
tggcggcagccagtaccgagcggtg

SEQ ID NO: 5885842 - DNA, 25 bp, Homo sapien
gattatgaatatgtggcagatttac

SEQ ID NO: 5885843 - DNA, 25 bp, Homo sapien
tcttttaaacgaatgagtaggaacc

SEQ ID NO: 5885844 - DNA, 25 bp, Homo sapien
taggtttcatctgggacaacctgag

SEQ ID NO: 5885845 - DNA, 25 bp, Homo sapien
tcttcgttttctaaacaataactct

SEQ ID NO: 5885846 - DNA, 25 bp, Homo sapien
caatttttcttactgcctcttcgtt

SEQ ID NO: 5885847 - DNA, 25 bp, Homo sapien
attcaatctgagagcttggcactcg

SEQ ID NO: 5885848 - DNA, 25 bp, Homo sapien
ccgctgctcgttctgccgccaggac

SEQ ID NO: 5885849 - DNA, 25 bp, Homo sapien
attgatccagcaacatacacgtagg

SEQ ID NO: 5885850 - DNA, 25 bp, Homo sapien
ttagcaaaccctggctccattgatc

SEQ ID NO: 5885851 - DNA, 25 bp, Homo sapien
tacctgaagagatgcagccgcggcc

SEQ ID NO: 5885852 - DNA, 25 bp, Homo sapien
ggcccggaactcgcggcctccagcc

SEQ ID NO: 5885853 - DNA, 25 bp, Homo sapien
tttttcttgagaaattctccacaaa

SEQ ID NO: 5885854 - DNA, 25 bp, Homo sapien
tctgagcagtgagagctgcactcga

SEQ ID NO: 5885855 - DNA, 25 bp, Homo sapien
ctcatcaacaaaatatcccacacat

SEQ ID NO: 5885856 - DNA, 25 bp, Homo sapien
tcctcacgtgacaagcagtggctct

SEQ ID NO: 5885857 - DNA, 25 bp, Homo sapien
tttgtggaaatttctccgtatcata

SEQ ID NO: 5885858 - DNA, 25 bp, Homo sapien
agcggcaaagattccacatcttgcc

SEQ ID NO: 5885859 - DNA, 25 bp, Homo sapien
aatttccaaatctgaaagccagtct

SEQ ID NO: 5885860 - DNA, 25 bp, Homo sapien
cacccgtcccgagcgggactcggaa

SEQ ID NO: 5885861 - DNA, 25 bp, Homo sapien
ccatcgaggtgattatgaatatgtg

SEQ ID NO: 5885862 - DNA, 25 bp, Homo sapien
gaaattctccacaaaattcttttaa

SEQ ID NO: 5885863 - DNA, 25 bp, Homo sapien
taaacgaatgagtaggaacctgtcg

SEQ ID NO: 5885864 - DNA, 25 bp, Homo sapien
cacagggtaatgtcgcagaagaggc

SEQ ID NO: 5885865 - DNA, 25 bp, Homo sapien
tatcatcactgtttttccagcctcc

SEQ ID NO: 5885866 - DNA, 25 bp, Homo sapien
gcggtccttctgccacatcaggttt

SEQ ID NO: 5885867 - DNA, 25 bp, Homo sapien
cactgtttttccagcctcctataat

SEQ ID NO: 5885868 - DNA, 25 bp, Homo sapien
ggccccggctcggagctccacttgc

SEQ ID NO: 5885869 - DNA, 25 bp, Homo sapien
gtcgagtctctgtatcatagcaagt

SEQ ID NO: 5885870 - DNA, 25 bp, Homo sapien
tacccatctgtcctcatcaacaaaa

SEQ ID NO: 5885871 - DNA, 25 bp, Homo sapien
cgtgtcctccaatgctatagagctt

SEQ ID NO: 5885872 - DNA, 25 bp, Homo sapien
caatttgagagatgaagttttttct

SEQ ID NO: 5885873 - DNA, 25 bp, Homo sapien
ctacaggagtgcgggcggcaatgta

SEQ ID NO: 5885874 - DNA, 25 bp, Homo sapien
tgggacaacatgatgctgtctgata

SEQ ID NO: 5885875 - DNA, 25 bp, Homo sapien
actttgtggaaatttctccgtatca

SEQ ID NO: 5885876 - DNA, 25 bp, Homo sapien
cttcaatggctagtgctttgacatc

SEQ ID NO: 5885877 - DNA, 25 bp, Homo sapien
gccagtcctgccgagccggcggcgg

SEQ ID NO: 5885878 - DNA, 25 bp, Homo sapien
catgttcccatgtattcaaatttgg

SEQ ID NO: 5885879 - DNA, 25 bp, Homo sapien
tcggtggcggcagccagtaccgagc

SEQ ID NO: 5885880 - DNA, 25 bp, Homo sapien
agcacctcgtgcacgctgcccgtgc

SEQ ID NO: 5885881 - DNA, 25 bp, Homo sapien
tctgggcccggatcgcccccgctcg

SEQ ID NO: 5885882 - DNA, 25 bp, Homo sapien
tttatcaatatcatcactgtttttc

SEQ ID NO: 5885883 - DNA, 25 bp, Homo sapien
catgagaagtggggtgctggcatgt

SEQ ID NO: 5885884 - DNA, 25 bp, Homo sapien
gtcatcagactacaaacatgttccc

SEQ ID NO: 5885885 - DNA, 25 bp, Homo sapien
tgtctgataaaagtttgaattgacc

SEQ ID NO: 5885886 - DNA, 25 bp, Homo sapien
aacaataactcttgggacaacatga

SEQ ID NO: 5885887 - DNA, 25 bp, Homo sapien
cagtcacatctttaaaaccaggact

SEQ ID NO: 5885888 - DNA, 25 bp, Homo sapien
gacatttggaaaaagcagtaattgt

SEQ ID NO: 5885889 - DNA, 25 bp, Homo sapien
tccatgctctccatctccagtacct

SEQ ID NO: 5885890 - DNA, 25 bp, Homo sapien
cttgacacaaacttcattattggct

SEQ ID NO: 5885891 - DNA, 25 bp, Homo sapien
cccgagagcaggggcgtgaagtact

SEQ ID NO: 5885892 - DNA, 25 bp, Homo sapien
aacgaatgagtaggaacctgtcggc

SEQ ID NO: 5885893 - DNA, 25 bp, Homo sapien
ctgcctcggacctcggcggccagtc

SEQ ID NO: 5885894 - DNA, 25 bp, Homo sapien
ctcatgttcagggcgtgacgatgta

SEQ ID NO: 5885895 - DNA, 25 bp, Homo sapien
tgtcgcagaagaggccctggcgccg

SEQ ID NO: 5885896 - DNA, 25 bp, Homo sapien
tctctggtttgacatgtcgagtaag

SEQ ID NO: 5885897 - DNA, 25 bp, Homo sapien
cttctgggcccggatcgcccccgct

SEQ ID NO: 5885898 - DNA, 25 bp, Homo sapien
gcaatttaaaaagttcttcaaagta

SEQ ID NO: 5885899 - DNA, 25 bp, Homo sapien
tgttcccatgtattcaaatttgggt

SEQ ID NO: 5885900 - DNA, 25 bp, Homo sapien
aacttgacacaaacttcattattgg

SEQ ID NO: 5885901 - DNA, 25 bp, Homo sapien
tgcccgtgctgacgcggatgcgccc

SEQ ID NO: 5885902 - DNA, 25 bp, Homo sapien
caacatacacgtaggattctgttac

SEQ ID NO: 5885903 - DNA, 25 bp, Homo sapien
acatcaggttttgaggcatagggta

SEQ ID NO: 5885904 - DNA, 25 bp, Homo sapien
cccatgtattcaaatttgggttata

SEQ ID NO: 5885905 - DNA, 25 bp, Homo sapien
aattgccacacaatttgagagatga

SEQ ID NO: 5885906 - DNA, 25 bp, Homo sapien
ccgccgccactgccgcagccgccat

SEQ ID NO: 5885907 - DNA, 25 bp, Homo sapien
ttaaaaagttcttcaaagtatctct

SEQ ID NO: 5885908 - DNA, 25 bp, Homo sapien
cagtaccgagcggtgggcccggaac

SEQ ID NO: 5885909 - DNA, 25 bp, Homo sapien
tctggtttgacatgtcgagtaaggt

SEQ ID NO: 5885910 - DNA, 25 bp, Homo sapien
ccagattgtatattctcagctctca

SEQ ID NO: 5885911 - DNA, 25 bp, Homo sapien
ccttcagagcaagttggctcagggt

SEQ ID NO: 5885912 - DNA, 25 bp, Homo sapien
accggtcttcaatggctagtgcttt

SEQ ID NO: 5885913 - DNA, 25 bp, Homo sapien
gagatccccggcccaggcccgaagt

SEQ ID NO: 5885914 - DNA, 25 bp, Homo sapien
cacaaaattcttttaaacgaatgag

SEQ ID NO: 5885915 - DNA, 25 bp, Homo sapien
tattcaaatttgggttatacctttc

SEQ ID NO: 5885916 - DNA, 25 bp, Homo sapien
tcctcatcaacaaaatatcccacac

SEQ ID NO: 5885917 - DNA, 25 bp, Homo sapien
tgtgtcgggttcgggccccggctcg

SEQ ID NO: 5885918 - DNA, 25 bp, Homo sapien
cggtttcaaagagaacctcttcaga

SEQ ID NO: 5885919 - DNA, 25 bp, Homo sapien
ccattgatccagcaacatacacgta

SEQ ID NO: 5885920 - DNA, 25 bp, Homo sapien
gcagtaattgtcaataagcggcaaa

SEQ ID NO: 5885921 - DNA, 25 bp, Homo sapien
gattacggcttccactgtgtcgggt

SEQ ID NO: 5885922 - DNA, 25 bp, Homo sapien
atgctttcttgtcatcagactacaa

SEQ ID NO: 5885923 - DNA, 25 bp, Homo sapien
agtaattacagcctttaatccatct

SEQ ID NO: 5885924 - DNA, 25 bp, Homo sapien
taaaaccaggactaaagttgccgtg

SEQ ID NO: 5885925 - DNA, 25 bp, Homo sapien
agagcttggcactcgcctcatgttc

SEQ ID NO: 5885926 - DNA, 25 bp, Homo sapien
cggacctcggcggccagtcctgccg

SEQ ID NO: 5885927 - DNA, 25 bp, Homo sapien
acgctgcccgtgctgacgcggatgc

SEQ ID NO: 5885928 - DNA, 25 bp, Homo sapien
gtgccatgcaagtaccggtacggga

SEQ ID NO: 5885929 - DNA, 25 bp, Homo sapien
cagccccgccgaagcacagggtaat

SEQ ID NO: 5885930 - DNA, 25 bp, Homo sapien
catccatgttttgcccataacgagg

SEQ ID NO: 5885931 - DNA, 25 bp, Homo sapien
ctcggagctccacttgcgcatctcc

SEQ ID NO: 5885932 - DNA, 25 bp, Homo sapien
caataactcttgggacaacatgatg

SEQ ID NO: 5885933 - DNA, 25 bp, Homo sapien
cgaggtgattatgaatatgtggcag

SEQ ID NO: 5885934 - DNA, 25 bp, Homo sapien
cggcggcggccgtctccatgctctc

SEQ ID NO: 5885935 - DNA, 25 bp, Homo sapien
tccacatcttgccactgtcgagtct

SEQ ID NO: 5885936 - DNA, 25 bp, Homo sapien
gcctcggacctcggcggccagtcct

SEQ ID NO: 5885937 - DNA, 25 bp, Homo sapien
gccgccgccgccgccgccactgccg

SEQ ID NO: 5885938 - DNA, 25 bp, Homo sapien
aactggcccgagagcaggggcgtga

SEQ ID NO: 5885939 - DNA, 25 bp, Homo sapien
atggctgctccttcgatgcttagga

SEQ ID NO: 5885940 - DNA, 25 bp, Homo sapien
gcggtgggcccggaactcgcggcct

SEQ ID NO: 5885941 - DNA, 25 bp, Homo sapien
tctcagagcatgtctctccactgcg

SEQ ID NO: 5885942 - DNA, 25 bp, Homo sapien
tctccgtatcatatcagcagccttc

SEQ ID NO: 5885943 - DNA, 25 bp, Homo sapien
gacatcatctttgtaatagcaaatg

SEQ ID NO: 5885944 - DNA, 25 bp, Homo sapien
gagatgcagccgcggccgccgccgc

SEQ ID NO: 5885945 - DNA, 25 bp, Homo sapien
ttgacatgtcgagtaaggtaggtag

SEQ ID NO: 5885946 - DNA, 25 bp, Homo sapien
ccaggactaaagttgccgtgtcctc

SEQ ID NO: 5885947 - DNA, 25 bp, Homo sapien
tgagaagtggggtgctggcatgtgc

SEQ ID NO: 5885948 - DNA, 25 bp, Homo sapien
tgtcgagtaaggtaggtaggtttca

SEQ ID NO: 5885949 - DNA, 25 bp, Homo sapien
gccgtctccatgctctccatctcca

SEQ ID NO: 5885950 - DNA, 25 bp, Homo sapien
aatttctccgtatcatatcagcagc

SEQ ID NO: 5885951 - DNA, 25 bp, Homo sapien
ttcagtgtcccggtctacaggagtg

SEQ ID NO: 5885952 - DNA, 25 bp, Homo sapien
attgaccacagacatttggaaaaag

SEQ ID NO: 5885953 - DNA, 25 bp, Homo sapien
tctttaaaaccaggactaaagttgc

SEQ ID NO: 5885954 - DNA, 25 bp, Homo sapien
aatgagtaggaacctgtcggccaac

SEQ ID NO: 5885955 - DNA, 25 bp, Homo sapien
ggcgccgctgctcgttctgccgcca

SEQ ID NO: 5885956 - DNA, 25 bp, Homo sapien
tcaataagcggcaaagattccacat

SEQ ID NO: 5885957 - DNA, 25 bp, Homo sapien
agcatgtctctccactgcgtcagcg

SEQ ID NO: 5885958 - DNA, 25 bp, Homo sapien
taggtaggtttcatctgggacaacc

SEQ ID NO: 5885959 - DNA, 25 bp, Homo sapien
taggacttctggaggcaagctttca

SEQ ID NO: 5885960 - DNA, 25 bp, Homo sapien
gaattgaccacagacatttggaaaa

SEQ ID NO: 5885961 - DNA, 25 bp, Homo sapien
gagctgcactcgaaatcctcggctt

SEQ ID NO: 5885962 - DNA, 25 bp, Homo sapien
cgtgctgacgcggatgcgcccggtg

SEQ ID NO: 5885963 - DNA, 25 bp, Homo sapien
tccactgcgtcagcgaccaacttga

SEQ ID NO: 5885964 - DNA, 25 bp, Homo sapien
tctgtcctcatcaacaaaatatccc

SEQ ID NO: 5885965 - DNA, 25 bp, Homo sapien
tttcttgtcatcagactacaaacat

SEQ ID NO: 5885966 - DNA, 25 bp, Homo sapien
atgcggtccttctgccacatcaggt

SEQ ID NO: 5885967 - DNA, 25 bp, Homo sapien
aggactaaagttgccgtgtcctcca

SEQ ID NO: 5885968 - DNA, 25 bp, Homo sapien
cacatgagaagtggggtgctggcat

SEQ ID NO: 5885969 - DNA, 25 bp, Homo sapien
ctgtgtgccatgcaagtaccggtac

SEQ ID NO: 5885970 - DNA, 25 bp, Homo sapien
tgccgagccggcggcggccgtctcc

SEQ ID NO: 5885971 - DNA, 25 bp, Homo sapien
ccaggacagctctgagcagtgagag

SEQ ID NO: 5885972 - DNA, 25 bp, Homo sapien
ggcttctttccgatactgtttatca

SEQ ID NO: 5885973 - DNA, 25 bp, Homo sapien
gcgggcggcaatgtatacaaaccgg

SEQ ID NO: 5885974 - DNA, 25 bp, Homo sapien
aagttttttcttgagaaattctcca

SEQ ID NO: 5885975 - DNA, 25 bp, Homo sapien
gggtatctctgtgtgccatgcaagt

SEQ ID NO: 5885976 - DNA, 25 bp, Homo sapien
tcgattacggcttccactgtgtcgg

SEQ ID NO: 5885977 - DNA, 25 bp, Homo sapien
ccgccgccgccgccgccgccactgc

SEQ ID NO: 5885978 - DNA, 25 bp, Homo sapien
cgtgaagtactcggtggcggcagcc

SEQ ID NO: 5885979 - DNA, 25 bp, Homo sapien
atcaggttttgaggcatagggtatc

SEQ ID NO: 5885980 - DNA, 25 bp, Homo sapien
aaaagcagtaattgtcaataagcgg

SEQ ID NO: 5885981 - DNA, 25 bp, Homo sapien
tcaatatcatcactgtttttccagc

SEQ ID NO: 5885982 - DNA, 25 bp, Homo sapien
acacgtaggattctgttactgcaac

SEQ ID NO: 5885983 - DNA, 25 bp, Homo sapien
ggctgctccttcgatgcttaggact

SEQ ID NO: 5885984 - DNA, 25 bp, Homo sapien
ttgtaatagcaaatggctgctcctt

SEQ ID NO: 5885985 - DNA, 25 bp, Homo sapien
tgaaagccagtctctaatgagatgg

SEQ ID NO: 5885986 - DNA, 25 bp, Homo sapien
acacttggctggcaatttttcttac

SEQ ID NO: 5885987 - DNA, 25 bp, Homo sapien
tcggccaactccagcacctcgtgca

SEQ ID NO: 5885988 - DNA, 25 bp, Homo sapien
gttgtgccatttatcaagctcagga

SEQ ID NO: 5885989 - DNA, 25 bp, Homo sapien
cccatctgtcctcatcaacaaaata

SEQ ID NO: 5885990 - DNA, 25 bp, Homo sapien
tttcttgagaaattctccacaaaat

SEQ ID NO: 5885991 - DNA, 25 bp, Homo sapien
tcttgagaaattctccacaaaattc

SEQ ID NO: 5885992 - DNA, 25 bp, Homo sapien
ccgccgccgccgccactgccgcagc

SEQ ID NO: 5885993 - DNA, 25 bp, Homo sapien
aaaaagttcttcaaagtatctctct

SEQ ID NO: 5885994 - DNA, 25 bp, Homo sapien
gtttgaattgaccacagacatttgg

SEQ ID NO: 5885995 - DNA, 25 bp, Homo sapien
ctgcgtcagcgaccaacttgacaca

SEQ ID NO: 5885996 - DNA, 25 bp, Homo sapien
ttccaagttgtgccatttatcaagc

SEQ ID NO: 5885997 - DNA, 25 bp, Homo sapien
tcatcactgtttttccagcctccta

SEQ ID NO: 5885998 - DNA, 25 bp, Homo sapien
attgcagagatccccggcccaggcc

SEQ ID NO: 5885999 - DNA, 25 bp, Homo sapien
atagagcttccctttgacttctgtt

SEQ ID NO: 5886000 - DNA, 25 bp, Homo sapien
cggcccaggcccgaagtccaccgtg

SEQ ID NO: 5886001 - DNA, 25 bp, Homo sapien
aaccaggactaaagttgccgtgtcc

SEQ ID NO: 5886002 - DNA, 25 bp, Homo sapien
ggttgtggcataggaggaagaagca

SEQ ID NO: 5886003 - DNA, 25 bp, Homo sapien
ctccagcacctcgtgcacgctgccc

SEQ ID NO: 5886004 - DNA, 25 bp, Homo sapien
tgatcacatccatgttttgcccata

SEQ ID NO: 5886005 - DNA, 25 bp, Homo sapien
gcgaccaacttgacacaaacttcat

SEQ ID NO: 5886006 - DNA, 25 bp, Homo sapien
taattacagcctttaatccatcttc

SEQ ID NO: 5886007 - DNA, 25 bp, Homo sapien
gtaccggtacgggatcctcacgtga

SEQ ID NO: 5886008 - DNA, 25 bp, Homo sapien
tgcgcatctccacccgtcccgagcg

SEQ ID NO: 5886009 - DNA, 25 bp, Homo sapien
ccatttatcaagctcaggattataa

SEQ ID NO: 5886010 - DNA, 25 bp, Homo sapien
ttgccgtgtcctccaatgctataga

SEQ ID NO: 5886011 - DNA, 25 bp, Homo sapien
agccagtctctaatgagatggaaag

SEQ ID NO: 5886012 - DNA, 25 bp, Homo sapien
tctgataaaagtttgaattgaccac

SEQ ID NO: 5886013 - DNA, 25 bp, Homo sapien
ttaatccatcttcagtgtcccggtc

SEQ ID NO: 5886014 - DNA, 25 bp, Homo sapien
cagtgagagctgcactcgaaatcct

SEQ ID NO: 5886015 - DNA, 25 bp, Homo sapien
ctggcgccgctgctcgttctgccgc

SEQ ID NO: 5886016 - DNA, 25 bp, Homo sapien
ttatcaagctcaggattataaacag

SEQ ID NO: 5886017 - DNA, 25 bp, Homo sapien
cacgtgacaagcagtggctctacaa

SEQ ID NO: 5886018 - DNA, 25 bp, Homo sapien
ttttcttactgcctcttcgttttct

SEQ ID NO: 5886019 - DNA, 25 bp, Homo sapien
tccgatactgtttatcaatatcatc

SEQ ID NO: 5886020 - DNA, 25 bp, Homo sapien
gcagccttcagagcaagttggctca

SEQ ID NO: 5886021 - DNA, 25 bp, Homo sapien
ctcacgtgacaagcagtggctctac

SEQ ID NO: 5886022 - DNA, 25 bp, Homo sapien
gcctcttcgttttctaaacaataac

SEQ ID NO: 5886023 - DNA, 25 bp, Homo sapien
cttgcatctgtctgatgcggtcctt

SEQ ID NO: 5886024 - DNA, 25 bp, Homo sapien
ataacgaggcaatagtgacacatga

SEQ ID NO: 5886025 - DNA, 25 bp, Homo sapien
agtctctgtatcatagcaagtaatt

SEQ ID NO: 5886026 - DNA, 25 bp, Homo sapien
cataggaggaagaagcatccacctc

SEQ ID NO: 5886027 - DNA, 25 bp, Homo sapien
cccggaactcgcggcctccagcccc

SEQ ID NO: 5886028 - DNA, 25 bp, Homo sapien
ttcattattggctaccagcctctct

SEQ ID NO: 5886029 - DNA, 25 bp, Homo sapien
aactcttgggacaacatgatgctgt

SEQ ID NO: 5886030 - DNA, 25 bp, Homo sapien
gtcagcgaccaacttgacacaaact

SEQ ID NO: 5886031 - DNA, 25 bp, Homo sapien
acgggatcctcacgtgacaagcagt

SEQ ID NO: 5886032 - DNA, 25 bp, Homo sapien
tttggaaaaagcagtaattgtcaat

SEQ ID NO: 5886033 - DNA, 25 bp, Homo sapien
ctgttagtccaaaagaatgctttct

SEQ ID NO: 5886034 - DNA, 25 bp, Homo sapien
ccaactccagcacctcgtgcacgct

SEQ ID NO: 5886035 - DNA, 25 bp, Homo sapien
tgcaagtaccggtacgggatcctca

SEQ ID NO: 5886036 - DNA, 25 bp, Homo sapien
cttccactgtgtcgggttcgggccc

SEQ ID NO: 5886037 - DNA, 25 bp, Homo sapien
aatcaacagtaatttccaaatctga

SEQ ID NO: 5886038 - DNA, 25 bp, Homo sapien
gcccgaagtccaccgtgccgctgcc

SEQ ID NO: 5886039 - DNA, 25 bp, Homo sapien
agaatcaacagtaatttccaaatct

SEQ ID NO: 5886040 - DNA, 25 bp, Homo sapien
tgacacacctccaataaccatgatc

SEQ ID NO: 5886041 - DNA, 25 bp, Homo sapien
tctctccactgcgtcagcgaccaac

SEQ ID NO: 5886042 - DNA, 25 bp, Homo sapien
ctctcttcagcatttctctgaaccc

SEQ ID NO: 5886043 - DNA, 25 bp, Homo sapien
aggagtgcgggcggcaatgtataca

SEQ ID NO: 5886044 - DNA, 25 bp, Homo sapien
tgacttctgttagtccaaaagaatg

SEQ ID NO: 5886045 - DNA, 25 bp, Homo sapien
cactgtgtcgggttcgggccccggc

SEQ ID NO: 5886046 - DNA, 25 bp, Homo sapien
catgttttgcccataacgaggcaat

SEQ ID NO: 5886047 - DNA, 25 bp, Homo sapien
ccaggcccgaagtccaccgtgccgc

SEQ ID NO: 5886048 - DNA, 25 bp, Homo sapien
aaagtatctctctctctcttcagca

SEQ ID NO: 5886049 - DNA, 25 bp, Homo sapien
accatgatcacatccatgttttgcc

SEQ ID NO: 5886050 - DNA, 25 bp, Homo sapien
tgcagccgcggccgccgccgccgcc

SEQ ID NO: 5886051 - DNA, 25 bp, Homo sapien
atccacctcttcctctccgcacaat

SEQ ID NO: 5886052 - DNA, 25 bp, Homo sapien
aaagttcttcaaagtatctctctct

SEQ ID NO: 5886053 - DNA, 25 bp, Homo sapien
tcgagtaaggtaggtaggtttcatc

SEQ ID NO: 5886054 - DNA, 25 bp, Homo sapien
ctaaagttgccgtgtcctccaatgc

SEQ ID NO: 5886055 - DNA, 25 bp, Homo sapien
ttggtgccgattccaagttgtgcca

SEQ ID NO: 5886056 - DNA, 25 bp, Homo sapien
gtgctttgacatctcgaagaatctt

SEQ ID NO: 5886057 - DNA, 25 bp, Homo sapien
tctgccacatcaggttttgaggcat

SEQ ID NO: 5886058 - DNA, 25 bp, Homo sapien
agtatctctctctctcttcagcatt

SEQ ID NO: 5886059 - DNA, 25 bp, Homo sapien
aagagatgcagccgcggccgccgcc

SEQ ID NO: 5886060 - DNA, 25 bp, Homo sapien
ttcccatgtattcaaatttgggtta

SEQ ID NO: 5886061 - DNA, 25 bp, Homo sapien
ttctcagctctcagagcatgtctct

SEQ ID NO: 5886062 - DNA, 25 bp, Homo sapien
tccatgttttgcccataacgaggca

SEQ ID NO: 5886063 - DNA, 25 bp, Homo sapien
gacgatgtatctcttgcatctgtct

SEQ ID NO: 5886064 - DNA, 25 bp, Homo sapien
gcagaagaggccctggcgccgctgc

SEQ ID NO: 5886065 - DNA, 25 bp, Homo sapien
aaaactggcccgagagcaggggcgt

SEQ ID NO: 5886066 - DNA, 25 bp, Homo sapien
aacatgatgctgtctgataaaagtt

SEQ ID NO: 5886067 - DNA, 25 bp, Homo sapien
ggccctggcgccgctgctcgttctg

SEQ ID NO: 5886068 - DNA, 25 bp, Homo sapien
gctgcccgtgctgacgcggatgcgc

SEQ ID NO: 5886069 - DNA, 25 bp, Homo sapien
tgaagttttttcttgagaaattctc

SEQ ID NO: 5886070 - DNA, 25 bp, Homo sapien
ccagtctctaatgagatggaaaggt

SEQ ID NO: 5886071 - DNA, 25 bp, Homo sapien
tcaatctgagagcttggcactcgcc

SEQ ID NO: 5886072 - DNA, 25 bp, Homo sapien
gatgcagccgcggccgccgccgccg

SEQ ID NO: 5886073 - DNA, 25 bp, Homo sapien
aagctttcaaggatctcatcagaca

SEQ ID NO: 5886074 - DNA, 25 bp, Homo sapien
agcaagtaattacagcctttaatcc

SEQ ID NO: 5886075 - DNA, 25 bp, Homo sapien
tctaatgagatggaaaggtaacgta

SEQ ID NO: 5886076 - DNA, 25 bp, Homo sapien
cctccagccccgccgaagcacaggg

SEQ ID NO: 5886077 - DNA, 25 bp, Homo sapien
cctcggcttctgggcccggatcgcc

SEQ ID NO: 5886078 - DNA, 25 bp, Homo sapien
cagtaatttccaaatctgaaagcca

SEQ ID NO: 5886079 - DNA, 25 bp, Homo sapien
ccacctcttcctctccgcacaatat

SEQ ID NO: 5886080 - DNA, 25 bp, Homo sapien
tattctcagctctcagagcatgtct

SEQ ID NO: 5886081 - DNA, 25 bp, Homo sapien
aaaagaatgctttcttgtcatcaga

SEQ ID NO: 5886082 - DNA, 25 bp, Homo sapien
catcttcagtgtcccggtctacagg

SEQ ID NO: 5886083 - DNA, 25 bp, Homo sapien
cggtacgggatcctcacgtgacaag

SEQ ID NO: 5886084 - DNA, 25 bp, Homo sapien
gagagctgcactcgaaatcctcggc

SEQ ID NO: 5886085 - DNA, 25 bp, Homo sapien
gatggaaaggtaacgtataaaattc

SEQ ID NO: 5886086 - DNA, 25 bp, Homo sapien
acctgagcaatttaaaaagttcttc

SEQ ID NO: 5886087 - DNA, 25 bp, Homo sapien
gttttttcttgagaaattctccaca

SEQ ID NO: 5886088 - DNA, 25 bp, Homo sapien
gtacatgtactcgattacggcttcc

SEQ ID NO: 5886089 - DNA, 25 bp, Homo sapien
gtgattatgaatatgtggcagattt

SEQ ID NO: 5886090 - DNA, 25 bp, Homo sapien
atgagatggaaaggtaacgtataaa

SEQ ID NO: 5886091 - DNA, 25 bp, Homo sapien
tgaagacatcatctttgtaatagca

SEQ ID NO: 5886092 - DNA, 25 bp, Homo sapien
tcttcagtgtcccggtctacaggag

SEQ ID NO: 5886093 - DNA, 25 bp, Homo sapien
tggaaaaagcagtaattgtcaataa

SEQ ID NO: 5886094 - DNA, 25 bp, Homo sapien
tgctgacgcggatgcgcccggtgta

SEQ ID NO: 5886095 - DNA, 25 bp, Homo sapien
gtccaaaagaatgctttcttgtcat

SEQ ID NO: 5886096 - DNA, 25 bp, Homo sapien
aatgtcgcagaagaggccctggcgc

SEQ ID NO: 5886097 - DNA, 25 bp, Homo sapien
gaagtccaccgtgccgctgcctcgg

SEQ ID NO: 5886098 - DNA, 25 bp, Homo sapien
gacgcggatgcgcccggtgtacatg

SEQ ID NO: 5886099 - DNA, 25 bp, Homo sapien
atcgaggtgattatgaatatgtggc

SEQ ID NO: 5886100 - DNA, 25 bp, Homo sapien
gcggcagccagtaccgagcggtggg

SEQ ID NO: 5886101 - DNA, 25 bp, Homo sapien
cacaatttgagagatgaagtttttt

SEQ ID NO: 5886102 - DNA, 25 bp, Homo sapien
gggtaatgtcgcagaagaggccctg

SEQ ID NO: 5886103 - DNA, 25 bp, Homo sapien
tacagcctttaatccatcttcagtg

SEQ ID NO: 5886104 - DNA, 25 bp, Homo sapien
gtggcataggaggaagaagcatcca

SEQ ID NO: 5886105 - DNA, 25 bp, Homo sapien
tcatatcagcagccttcagagcaag

SEQ ID NO: 5886106 - DNA, 25 bp, Homo sapien
tctacaacgaggttgtggcatagga

SEQ ID NO: 5886107 - DNA, 25 bp, Homo sapien
tgagagcttggcactcgcctcatgt

SEQ ID NO: 5886108 - DNA, 25 bp, Homo sapien
gattccaagttgtgccatttatcaa

SEQ ID NO: 5886109 - DNA, 25 bp, Homo sapien
cgccaggacagctctgagcagtgag

SEQ ID NO: 5886110 - DNA, 25 bp, Homo sapien
gcaatagtgacacatgagaagtggg

SEQ ID NO: 5886111 - DNA, 25 bp, Homo sapien
caacctgagcaatttaaaaagttct

SEQ ID NO: 5886112 - DNA, 25 bp, Homo sapien
aggtgattatgaatatgtggcagat

SEQ ID NO: 5886113 - DNA, 25 bp, Homo sapien
ctcgaagaatctttggtgccgattc

SEQ ID NO: 5886114 - DNA, 25 bp, Homo sapien
tagggtatctctgtgtgccatgcaa

SEQ ID NO: 5886115 - DNA, 25 bp, Homo sapien
catgatgctgtctgataaaagtttg

SEQ ID NO: 5886116 - DNA, 25 bp, Homo sapien
tttgacttctgttagtccaaaagaa

SEQ ID NO: 5886117 - DNA, 25 bp, Homo sapien
ataactcttgggacaacatgatgct

SEQ ID NO: 5886118 - DNA, 25 bp, Homo sapien
gtaaggtaggtaggtttcatctggg

SEQ ID NO: 5886119 - DNA, 25 bp, Homo sapien
tctttccgatactgtttatcaatat

SEQ ID NO: 5886120 - DNA, 25 bp, Homo sapien
caggggcgtgaagtactcggtggcg

SEQ ID NO: 5886121 - DNA, 25 bp, Homo sapien
tctccactgcgtcagcgaccaactt

SEQ ID NO: 5886122 - DNA, 25 bp, Homo sapien
ctccgcacaatatcggtaggcttct

SEQ ID NO: 5886123 - DNA, 25 bp, Homo sapien
catcagactacaaacatgttcccat

SEQ ID NO: 5886124 - DNA, 25 bp, Homo sapien
ttcttcatcctgaatcactttgtgg

SEQ ID NO: 5886125 - DNA, 25 bp, Homo sapien
tgcatctgtctgatgcggtccttct

SEQ ID NO: 5886126 - DNA, 25 bp, Homo sapien
ggaggaagaagcatccacctcttcc

SEQ ID NO: 5886127 - DNA, 25 bp, Homo sapien
gaaaggtaacgtataaaattcttca

SEQ ID NO: 5886128 - DNA, 25 bp, Homo sapien
tgaagtactcggtggcggcagccag

SEQ ID NO: 5886129 - DNA, 25 bp, Homo sapien
ctctgtgtgccatgcaagtaccggt

SEQ ID NO: 5886130 - DNA, 25 bp, Homo sapien
aatgaagacatcatctttgtaatag

SEQ ID NO: 5886131 - DNA, 25 bp, Homo sapien
ctgacgcggatgcgcccggtgtaca

SEQ ID NO: 5886132 - DNA, 25 bp, Homo sapien
cgtatcatatcagcagccttcagag

SEQ ID NO: 5886133 - DNA, 25 bp, Homo sapien
cctcctataatgaagacatcatctt

SEQ ID NO: 5886134 - DNA, 25 bp, Homo sapien
ctttctacagttttagcaaaccctg

SEQ ID NO: 5886135 - DNA, 25 bp, Homo sapien
aacggtttcaaagagaacctcttca

SEQ ID NO: 5886136 - DNA, 25 bp, Homo sapien
gagcaagttggctcagggtgtacat

SEQ ID NO: 5886137 - DNA, 25 bp, Homo sapien
atactgtttatcaatatcatcactg

SEQ ID NO: 5886138 - DNA, 25 bp, Homo sapien
agcttggcactcgcctcatgttcag

SEQ ID NO: 5886139 - DNA, 25 bp, Homo sapien
aactccagcacctcgtgcacgctgc

SEQ ID NO: 5886140 - DNA, 25 bp, Homo sapien
tctgatgcggtccttctgccacatc

SEQ ID NO: 5886141 - DNA, 25 bp, Homo sapien
ccggctcggagctccacttgcgcat

SEQ ID NO: 5886142 - DNA, 25 bp, Homo sapien
ggtaggtaggtttcatctgggacaa

SEQ ID NO: 5886143 - DNA, 25 bp, Homo sapien
cacatctttaaaaccaggactaaag

SEQ ID NO: 5886144 - DNA, 25 bp, Homo sapien
agactacaaacatgttcccatgtat

SEQ ID NO: 5886145 - DNA, 25 bp, Homo sapien
taggaggaagaagcatccacctctt

SEQ ID NO: 5886146 - DNA, 25 bp, Homo sapien
gagcggtgggcccggaactcgcggc

SEQ ID NO: 5886147 - DNA, 25 bp, Homo sapien
ctcgaaatcctcggcttctgggccc

SEQ ID NO: 5886148 - DNA, 25 bp, Homo sapien
ggaacctgtcggccaactccagcac

SEQ ID NO: 5886149 - DNA, 25 bp, Homo sapien
gcatgtccatcgaggtgattatgaa

SEQ ID NO: 5886150 - DNA, 25 bp, Homo sapien
cacttgcgcatctccacccgtcccg

SEQ ID NO: 5886151 - DNA, 25 bp, Homo sapien
acggcttccactgtgtcgggttcgg

SEQ ID NO: 5886152 - DNA, 25 bp, Homo sapien
tccttcgatgcttaggacttctgga

SEQ ID NO: 5886153 - DNA, 25 bp, Homo sapien
gcattcaatctgagagcttggcact

SEQ ID NO: 5886154 - DNA, 25 bp, Homo sapien
ccaatgctatagagcttccctttga

SEQ ID NO: 5886155 - DNA, 25 bp, Homo sapien
agagcttccctttgacttctgttag

SEQ ID NO: 5886156 - DNA, 25 bp, Homo sapien
gctttcaaggatctcatcagacact

SEQ ID NO: 5886157 - DNA, 25 bp, Homo sapien
atgtactcgattacggcttccactg

SEQ ID NO: 5886158 - DNA, 25 bp, Homo sapien
gcctcatgttcagggcgtgacgatg

SEQ ID NO: 5886159 - DNA, 25 bp, Homo sapien
tggctagtgctttgacatctcgaag

SEQ ID NO: 5886160 - DNA, 25 bp, Homo sapien
atcactgtttttccagcctcctata

SEQ ID NO: 5886161 - DNA, 25 bp, Homo sapien
gatgaagttttttcttgagaaattc

SEQ ID NO: 5886162 - DNA, 25 bp, Homo sapien
ctccatctccagtacctgaagagat

SEQ ID NO: 5886163 - DNA, 25 bp, Homo sapien
gatgcttaggacttctggaggcaag

SEQ ID NO: 5886164 - DNA, 25 bp, Homo sapien
caagctcaggattataaacagtcac

SEQ ID NO: 5886165 - DNA, 25 bp, Homo sapien
cggatgcgcccggtgtacatgtact

SEQ ID NO: 5886166 - DNA, 25 bp, Homo sapien
tcagacacttggctggcaatttttc

SEQ ID NO: 5886167 - DNA, 25 bp, Homo sapien
ttgaggcatagggtatctctgtgtg

SEQ ID NO: 5886168 - DNA, 25 bp, Homo sapien
aacaaaatatcccacacattcactt

SEQ ID NO: 5886169 - DNA, 25 bp, Homo sapien
gcctttaatccatcttcagtgtccc

SEQ ID NO: 5886170 - DNA, 25 bp, Homo sapien
atctccagtacctgaagagatgcag

SEQ ID NO: 5886171 - DNA, 25 bp, Homo sapien
aataaccatgatcacatccatgttt

SEQ ID NO: 5886172 - DNA, 25 bp, Homo sapien
caagtaccggtacgggatcctcacg

SEQ ID NO: 5886173 - DNA, 25 bp, Homo sapien
gtctacaggagtgcgggcggcaatg

SEQ ID NO: 5886174 - DNA, 25 bp, Homo sapien
tgtggaaatttctccgtatcatatc

SEQ ID NO: 5886175 - DNA, 25 bp, Homo sapien
atctgggacaacctgagcaatttaa

SEQ ID NO: 5886176 - DNA, 25 bp, Homo sapien
ctctccgcacaatatcggtaggctt

SEQ ID NO: 5886177 - DNA, 25 bp, Homo sapien
gcgtgacgatgtatctcttgcatct

SEQ ID NO: 5886178 - DNA, 25 bp, Homo sapien
atctcgaagaatctttggtgccgat

SEQ ID NO: 5886179 - DNA, 25 bp, Homo sapien
cgagtctctgtatcatagcaagtaa

SEQ ID NO: 5886180 - DNA, 25 bp, Homo sapien
aagagaacctcttcagaatcaacag

SEQ ID NO: 5886181 - DNA, 25 bp, Homo sapien
cagacatttggaaaaagcagtaatt

SEQ ID NO: 5886182 - DNA, 25 bp, Homo sapien
tacaacgaggttgtggcataggagg

SEQ ID NO: 5886183 - DNA, 25 bp, Homo sapien
gctcagggtgtacatgtgtgctaag

SEQ ID NO: 5886184 - DNA, 25 bp, Homo sapien
tagtgctttgacatctcgaagaatc

SEQ ID NO: 5886185 - DNA, 25 bp, Homo sapien
gcggcggccgtctccatgctctcca

SEQ ID NO: 5886186 - DNA, 25 bp, Homo sapien
tccacccgtcccgagcgggactcgg

SEQ ID NO: 5886187 - DNA, 25 bp, Homo sapien
tcagcatttctctgaacccatttca

SEQ ID NO: 5886188 - DNA, 25 bp, Homo sapien
cttcagaatcaacagtaatttccaa

SEQ ID NO: 5886189 - DNA, 25 bp, Homo sapien
aaggtaacgtataaaattcttcatc

SEQ ID NO: 5886190 - DNA, 25 bp, Homo sapien
aatggctagtgctttgacatctcga

SEQ ID NO: 5886191 - DNA, 25 bp, Homo sapien
tcagagcatgtctctccactgcgtc

SEQ ID NO: 5886192 - DNA, 25 bp, Homo sapien
ggctcggagctccacttgcgcatct

SEQ ID NO: 5886193 - DNA, 25 bp, Homo sapien
tcttgccactgtcgagtctctgtat

SEQ ID NO: 5886194 - DNA, 25 bp, Homo sapien
aggcaagctttcaaggatctcatca

SEQ ID NO: 5886195 - DNA, 25 bp, Homo sapien
tctgtatcatagcaagtaattacag

SEQ ID NO: 5886196 - DNA, 25 bp, Homo sapien
tcttgtcatcagactacaaacatgt

SEQ ID NO: 5886197 - DNA, 25 bp, Homo sapien
cgttctgccgccaggacagctctga

SEQ ID NO: 5886198 - DNA, 25 bp, Homo sapien
agaagcatccacctcttcctctccg

SEQ ID NO: 5886199 - DNA, 25 bp, Homo sapien
tgtacatgtgtgctaagctatgaat

SEQ ID NO: 5886200 - DNA, 25 bp, Homo sapien
cggccagtcctgccgagccggcggc

SEQ ID NO: 5886201 - DNA, 25 bp, Homo sapien
acacacctccaataaccatgatcac

SEQ ID NO: 5886202 - DNA, 25 bp, Homo sapien
ttggctggcaatttttcttactgcc

SEQ ID NO: 5886203 - DNA, 25 bp, Homo sapien
gtttgacatgtcgagtaaggtaggt

SEQ ID NO: 5886204 - DNA, 25 bp, Homo sapien
agtaattgtcaataagcggcaaaga

SEQ ID NO: 5886205 - DNA, 25 bp, Homo sapien
ccctggctccattgatccagcaaca

SEQ ID NO: 5886206 - DNA, 25 bp, Homo sapien
cctgaagagatgcagccgcggccgc

SEQ ID NO: 5886207 - DNA, 25 bp, Homo sapien
cggtcttcaatggctagtgctttga

SEQ ID NO: 5886208 - DNA, 25 bp, Homo sapien
tcatcctgaatcactttgtggaaat

SEQ ID NO: 5886209 - DNA, 25 bp, Homo sapien
aggaagaagcatccacctcttcctc

SEQ ID NO: 5886210 - DNA, 25 bp, Homo sapien
aggacagctctgagcagtgagagct

SEQ ID NO: 5886211 - DNA, 25 bp, Homo sapien
gacatgtcgagtaaggtaggtaggt

SEQ ID NO: 5886212 - DNA, 25 bp, Homo sapien
ggtgctggcatgtgccagattgtat

SEQ ID NO: 5886213 - DNA, 25 bp, Homo sapien
tctgacacacctccaataaccatga

SEQ ID NO: 5886214 - DNA, 25 bp, Homo sapien
aggcaatagtgacacatgagaagtg

SEQ ID NO: 5886215 - DNA, 25 bp, Homo sapien
cagggcgtgacgatgtatctcttgc

SEQ ID NO: 5886216 - DNA, 25 bp, Homo sapien
ttgaattgaccacagacatttggaa

SEQ ID NO: 5886217 - DNA, 25 bp, Homo sapien
gctgtctgataaaagtttgaattga

SEQ ID NO: 5886218 - DNA, 25 bp, Homo sapien
cagctctcagagcatgtctctccac

SEQ ID NO: 5886219 - DNA, 25 bp, Homo sapien
actgtttatcaatatcatcactgtt

SEQ ID NO: 5886220 - DNA, 25 bp, Homo sapien
cccggtgtacatgtactcgattacg

SEQ ID NO: 5886221 - DNA, 25 bp, Homo sapien
ccaagttgtgccatttatcaagctc

SEQ ID NO: 5886222 - DNA, 25 bp, Homo sapien
tgccacatcaggttttgaggcatag

SEQ ID NO: 5886223 - DNA, 25 bp, Homo sapien
aacagtcacatctttaaaaccagga

SEQ ID NO: 5886224 - DNA, 25 bp, Homo sapien
ctggctccattgatccagcaacata

SEQ ID NO: 5886225 - DNA, 25 bp, Homo sapien
catgatcacatccatgttttgccca

SEQ ID NO: 5886226 - DNA, 25 bp, Homo sapien
acttctggaggcaagctttcaagga

SEQ ID NO: 5886227 - DNA, 25 bp, Homo sapien
ttttagcaaaccctggctccattga

SEQ ID NO: 5886228 - DNA, 25 bp, Homo sapien
agccttcagagcaagttggctcagg

SEQ ID NO: 5886229 - DNA, 25 bp, Homo sapien
ggtgggcccggaactcgcggcctcc

SEQ ID NO: 5886230 - DNA, 25 bp, Homo sapien
caaaattcttttaaacgaatgagta

SEQ ID NO: 5886231 - DNA, 25 bp, Homo sapien
ggtccttctgccacatcaggttttg

SEQ ID NO: 5886232 - DNA, 25 bp, Homo sapien
cttggcactcgcctcatgttcaggg

SEQ ID NO: 5886233 - DNA, 25 bp, Homo sapien
tgctatagagcttccctttgacttc

SEQ ID NO: 5886234 - DNA, 25 bp, Homo sapien
atatcccacacattcacttaaatag

SEQ ID NO: 5886235 - DNA, 25 bp, Homo sapien
agtacctgaagagatgcagccgcgg

SEQ ID NO: 5886236 - DNA, 25 bp, Homo sapien
tgtgtgctaagctatgaattgccac

SEQ ID NO: 5886237 - DNA, 25 bp, Homo sapien
tggctcagggtgtacatgtgtgcta

SEQ ID NO: 5886238 - DNA, 25 bp, Homo sapien
aagcatccacctcttcctctccgca

SEQ ID NO: 5886239 - DNA, 25 bp, Homo sapien
atccagcaacatacacgtaggattc

SEQ ID NO: 5886240 - DNA, 25 bp, Homo sapien
ggtaggcttctttccgatactgttt

SEQ ID NO: 5886241 - DNA, 25 bp, Homo sapien
cgggactcggaaaactggcccgaga

SEQ ID NO: 5886242 - DNA, 25 bp, Homo sapien
cgtgacaagcagtggctctacaacg

SEQ ID NO: 5886243 - DNA, 25 bp, Homo sapien
gtgtacatgtactcgattacggctt

SEQ ID NO: 5886244 - DNA, 25 bp, Homo sapien
cgatgtatctcttgcatctgtctga

SEQ ID NO: 5886245 - DNA, 25 bp, Homo sapien
gcaacagcatgtccatcgaggtgat

SEQ ID NO: 5886246 - DNA, 25 bp, Homo sapien
ctcaggattataaacagtcacatct

SEQ ID NO: 5886247 - DNA, 25 bp, Homo sapien
tgagcagtgagagctgcactcgaaa

SEQ ID NO: 5886248 - DNA, 25 bp, Homo sapien
aatctgaaagccagtctctaatgag

SEQ ID NO: 5886249 - DNA, 25 bp, Homo sapien
aacatgttcccatgtattcaaattt

SEQ ID NO: 5886250 - DNA, 25 bp, Homo sapien
agcaaaccctggctccattgatcca

SEQ ID NO: 5886251 - DNA, 25 bp, Homo sapien
agcttccctttgacttctgttagtc

SEQ ID NO: 5886252 - DNA, 25 bp, Homo sapien
gcccaggcccgaagtccaccgtgcc

SEQ ID NO: 5886253 - DNA, 25 bp, Homo sapien
cggccgtctccatgctctccatctc

SEQ ID NO: 5886254 - DNA, 25 bp, Homo sapien
aatgctatagagcttccctttgact

SEQ ID NO: 5886255 - DNA, 25 bp, Homo sapien
ctaagctatgaattgccacacaatt

SEQ ID NO: 5886256 - DNA, 25 bp, Homo sapien
aaatggctgctccttcgatgcttag

SEQ ID NO: 5886257 - DNA, 25 bp, Homo sapien
tgtcctccaatgctatagagcttcc

SEQ ID NO: 5886258 - DNA, 25 bp, Homo sapien
tacctttctacagttttagcaaacc

SEQ ID NO: 5886259 - DNA, 25 bp, Homo sapien
acaggagtgcgggcggcaatgtata

SEQ ID NO: 5886260 - DNA, 25 bp, Homo sapien
gatcctcacgtgacaagcagtggct

SEQ ID NO: 5886261 - DNA, 25 bp, Homo sapien
gtatctctgtgtgccatgcaagtac

SEQ ID NO: 5886262 - DNA, 25 bp, Homo sapien
tctccatgctctccatctccagtac

SEQ ID NO: 5886263 - DNA, 25 bp, Homo sapien
aagctatgaattgccacacaatttg

SEQ ID NO: 5886264 - DNA, 25 bp, Homo sapien
ttttccagcctcctataatgaagac

SEQ ID NO: 5886265 - DNA, 25 bp, Homo sapien
ctcttcctctccgcacaatatcggt

SEQ ID NO: 5886266 - DNA, 25 bp, Homo sapien
gctgcactcgaaatcctcggcttct

SEQ ID NO: 5886267 - DNA, 25 bp, Homo sapien
atttgagagatgaagttttttcttg

SEQ ID NO: 5886268 - DNA, 25 bp, Homo sapien
gcccataacgaggcaatagtgacac

SEQ ID NO: 5886269 - DNA, 25 bp, Homo sapien
ttcttactgcctcttcgttttctaa

SEQ ID NO: 5886270 - DNA, 25 bp, Homo sapien
gccgccgccgccactgccgcagccg

SEQ ID NO: 5886271 - DNA, 25 bp, Homo sapien
cgagagcaggggcgtgaagtactcg

SEQ ID NO: 5886272 - DNA, 25 bp, Homo sapien
tccactgtgtcgggttcgggccccg

SEQ ID NO: 5886273 - DNA, 25 bp, Homo sapien
acctcttcagaatcaacagtaattt

SEQ ID NO: 5886274 - DNA, 25 bp, Homo sapien
catgttcagggcgtgacgatgtatc

SEQ ID NO: 5886275 - DNA, 25 bp, Homo sapien
gatccccggcccaggcccgaagtcc

SEQ ID NO: 5886276 - DNA, 25 bp, Homo sapien
agattgtatattctcagctctcaga

SEQ ID NO: 5886277 - DNA, 25 bp, Homo sapien
atcagcagccttcagagcaagttgg

SEQ ID NO: 5886278 - DNA, 25 bp, Homo sapien
catgtcgagtaaggtaggtaggttt

SEQ ID NO: 5886279 - DNA, 25 bp, Homo sapien
cctctctggtttgacatgtcgagta

SEQ ID NO: 5886280 - DNA, 25 bp, Homo sapien
tgtgctaagctatgaattgccacac

SEQ ID NO: 5886281 - DNA, 25 bp, Homo sapien
gttactgcaacagcatgtccatcga

SEQ ID NO: 5886282 - DNA, 25 bp, Homo sapien
tgtgccatttatcaagctcaggatt

SEQ ID NO: 5886283 - DNA, 25 bp, Homo sapien
gatgcgcccggtgtacatgtactcg

SEQ ID NO: 5886284 - DNA, 25 bp, Homo sapien
gagatgaagttttttcttgagaaat

SEQ ID NO: 5886285 - DNA, 25 bp, Homo sapien
agagcaggggcgtgaagtactcggt

SEQ ID NO: 5886286 - DNA, 25 bp, Homo sapien
cccgtgctgacgcggatgcgcccgg

SEQ ID NO: 5886287 - DNA, 25 bp, Homo sapien
tctctgaacccatttcaaaacggtt

SEQ ID NO: 5886288 - DNA, 25 bp, Homo sapien
atacacgtaggattctgttactgca

SEQ ID NO: 5886289 - DNA, 25 bp, Homo sapien
tgccatttatcaagctcaggattat

SEQ ID NO: 5886290 - DNA, 25 bp, Homo sapien
gtactcggtggcggcagccagtacc

SEQ ID NO: 5886291 - DNA, 25 bp, Homo sapien
ataaaattcttcatcctgaatcact

SEQ ID NO: 5886292 - DNA, 25 bp, Homo sapien
cttcatcctgaatcactttgtggaa

SEQ ID NO: 5886293 - DNA, 25 bp, Homo sapien
tctaaacaataactcttgggacaac

SEQ ID NO: 5886294 - DNA, 25 bp, Homo sapien
gttatacctttctacagttttagca

SEQ ID NO: 5886295 - DNA, 25 bp, Homo sapien
gctctgagcagtgagagctgcactc

SEQ ID NO: 5886296 - DNA, 25 bp, Homo sapien
ccagcctcctataatgaagacatca

SEQ ID NO: 5886297 - DNA, 25 bp, Homo sapien
caaatctgaaagccagtctctaatg

SEQ ID NO: 5886298 - DNA, 25 bp, Homo sapien
gtcccggtctacaggagtgcgggcg

SEQ ID NO: 5886299 - DNA, 25 bp, Homo sapien
ttcgggccccggctcggagctccac

SEQ ID NO: 5886300 - DNA, 25 bp, Homo sapien
tccaccgtgccgctgcctcggacct

SEQ ID NO: 5886301 - DNA, 25 bp, Homo sapien
cactcgaaatcctcggcttctgggc

SEQ ID NO: 5886302 - DNA, 25 bp, Homo sapien
gctaccagcctctctggtttgacat

SEQ ID NO: 5886303 - DNA, 25 bp, Homo sapien
attggctaccagcctctctggtttg

SEQ ID NO: 5886304 - DNA, 25 bp, Homo sapien
tgatccagcaacatacacgtaggat

SEQ ID NO: 5886305 - DNA, 25 bp, Homo sapien
atgaatatgtggcagatttacccat

SEQ ID NO: 5886306 - DNA, 25 bp, Homo sapien
cttcaaagtatctctctctctcttc

SEQ ID NO: 5886307 - DNA, 25 bp, Homo sapien
tatctctctctctcttcagcatttc

SEQ ID NO: 5886308 - DNA, 25 bp, Homo sapien
taaccatgatcacatccatgttttg

SEQ ID NO: 5886309 - DNA, 25 bp, Homo sapien
gaagaagcatccacctcttcctctc

SEQ ID NO: 5886310 - DNA, 25 bp, Homo sapien
agcatttctctgaacccatttcaaa

SEQ ID NO: 5886311 - DNA, 25 bp, Homo sapien
actcggtggcggcagccagtaccga

SEQ ID NO: 5886312 - DNA, 25 bp, Homo sapien
gccccgccgaagcacagggtaatgt

SEQ ID NO: 5886313 - DNA, 25 bp, Homo sapien
tgtctgatgcggtccttctgccaca

SEQ ID NO: 5886314 - DNA, 25 bp, Homo sapien
caaacatgttcccatgtattcaaat

SEQ ID NO: 5886315 - DNA, 25 bp, Homo sapien
cctttgacttctgttagtccaaaag

SEQ ID NO: 5886316 - DNA, 25 bp, Homo sapien
cgaatgagtaggaacctgtcggcca

SEQ ID NO: 5886317 - DNA, 25 bp, Homo sapien
gcaaatggctgctccttcgatgctt

SEQ ID NO: 5886318 - DNA, 25 bp, Homo sapien
gagctccacttgcgcatctccaccc

SEQ ID NO: 5886319 - DNA, 25 bp, Homo sapien
tgggcccggatcgcccccgctcgcc

SEQ ID NO: 5886320 - DNA, 25 bp, Homo sapien
cccacacattcacttaaatagtccc

SEQ ID NO: 5886321 - DNA, 25 bp, Homo sapien
tggcactcgcctcatgttcagggcg

SEQ ID NO: 5886322 - DNA, 25 bp, Homo sapien
atcctcggcttctgggcccggatcg

SEQ ID NO: 5886323 - DNA, 25 bp, Homo sapien
tctctctctcttcagcatttctctg

SEQ ID NO: 5886324 - DNA, 25 bp, Homo sapien
aattcttcatcctgaatcactttgt

SEQ ID NO: 5886325 - DNA, 25 bp, Homo sapien
ttcagagcaagttggctcagggtgt

SEQ ID NO: 5886326 - DNA, 25 bp, Homo sapien
aatatcggtaggcttctttccgata

SEQ ID NO: 5886327 - DNA, 25 bp, Homo sapien
cccggtctacaggagtgcgggcggc

SEQ ID NO: 5886328 - DNA, 25 bp, Homo sapien
tccccggcccaggcccgaagtccac

SEQ ID NO: 5886329 - DNA, 25 bp, Homo sapien
gccagtaccgagcggtgggcccgga

SEQ ID NO: 5886330 - DNA, 25 bp, Homo sapien
aatatcatcactgtttttccagcct

SEQ ID NO: 5886331 - DNA, 25 bp, Homo sapien
ctggaggcaagctttcaaggatctc

SEQ ID NO: 5886332 - DNA, 25 bp, Homo sapien
tcgcctccattgcagagatccccgg

SEQ ID NO: 5886333 - DNA, 25 bp, Homo sapien
tccagccccgccgaagcacagggta

SEQ ID NO: 5886334 - DNA, 25 bp, Homo sapien
gagccggcggcggccgtctccatgc

SEQ ID NO: 5886335 - DNA, 25 bp, Homo sapien
gagatggaaaggtaacgtataaaat

SEQ ID NO: 5886336 - DNA, 25 bp, Homo sapien
cgctgcctcggacctcggcggccag

SEQ ID NO: 5886337 - DNA, 25 bp, Homo sapien
cttccctttgacttctgttagtcca

SEQ ID NO: 5886338 - DNA, 25 bp, Homo sapien
tcatagcaagtaattacagccttta

SEQ ID NO: 5886339 - DNA, 25 bp, Homo sapien
ataatgaagacatcatctttgtaat

SEQ ID NO: 5886340 - DNA, 25 bp, Homo sapien
ctgggacaacctgagcaatttaaaa

SEQ ID NO: 5886341 - DNA, 25 bp, Homo sapien
agcctcctataatgaagacatcatc

SEQ ID NO: 5886342 - DNA, 25 bp, Homo sapien
ctcttcagaatcaacagtaatttcc

SEQ ID NO: 5886343 - DNA, 25 bp, Homo sapien
agcgggactcggaaaactggcccga

SEQ ID NO: 5886344 - DNA, 25 bp, Homo sapien
ctgtttttccagcctcctataatga

SEQ ID NO: 5886345 - DNA, 25 bp, Homo sapien
attataaacagtcacatctttaaaa

SEQ ID NO: 5886346 - DNA, 25 bp, Homo sapien
gacacatgagaagtggggtgctggc

SEQ ID NO: 5886347 - DNA, 25 bp, Homo sapien
ccaataaccatgatcacatccatgt

SEQ ID NO: 5886348 - DNA, 25 bp, Homo sapien
gtccatcgaggtgattatgaatatg

SEQ ID NO: 5886349 - DNA, 25 bp, Homo sapien
gatttacccatctgtcctcatcaac

SEQ ID NO: 5886350 - DNA, 25 bp, Homo sapien
aagaggccctggcgccgctgctcgt

SEQ ID NO: 5886351 - DNA, 25 bp, Homo sapien
agttttagcaaaccctggctccatt

SEQ ID NO: 5886352 - DNA, 25 bp, Homo sapien
ccgctcgcctccattgcagagatcc

SEQ ID NO: 5886353 - DNA, 25 bp, Homo sapien
tgaacccatttcaaaacggtttcaa

SEQ ID NO: 5886354 - DNA, 25 bp, Homo sapien
acttctgttagtccaaaagaatgct

SEQ ID NO: 5886355 - DNA, 25 bp, Homo sapien
tgccgattccaagttgtgccattta

SEQ ID NO: 5886356 - DNA, 25 bp, Homo sapien
tcaaaacggtttcaaagagaacctc

SEQ ID NO: 5886357 - DNA, 25 bp, Homo sapien
aaacttcattattggctaccagcct

SEQ ID NO: 5886358 - DNA, 25 bp, Homo sapien
cagtcctgccgagccggcggcggcc

SEQ ID NO: 5886359 - DNA, 25 bp, Homo sapien
ctccaataaccatgatcacatccat

SEQ ID NO: 5886360 - DNA, 25 bp, Homo sapien
ccagcacctcgtgcacgctgcccgt

SEQ ID NO: 5886361 - DNA, 25 bp, Homo sapien
tctccacccgtcccgagcgggactc

SEQ ID NO: 5886362 - DNA, 25 bp, Homo sapien
aacgaggcaatagtgacacatgaga

SEQ ID NO: 5886363 - DNA, 25 bp, Homo sapien
atcacatccatgttttgcccataac

SEQ ID NO: 5886364 - DNA, 25 bp, Homo sapien
ggccgccgccgccgccgccgccact

SEQ ID NO: 5886365 - DNA, 25 bp, Homo sapien
ggattataaacagtcacatctttaa

SEQ ID NO: 5886366 - DNA, 25 bp, Homo sapien
cggaactcgcggcctccagccccgc

SEQ ID NO: 5886367 - DNA, 25 bp, Homo sapien
tatcatatcagcagccttcagagca

SEQ ID NO: 5886368 - DNA, 25 bp, Homo sapien
gctagtgctttgacatctcgaagaa

SEQ ID NO: 5886369 - DNA, 25 bp, Homo sapien
tcctataatgaagacatcatctttg

SEQ ID NO: 5886370 - DNA, 25 bp, Homo sapien
tccctttgacttctgttagtccaaa

SEQ ID NO: 5886371 - DNA, 25 bp, Homo sapien
ctgctccttcgatgcttaggacttc

SEQ ID NO: 5886372 - DNA, 25 bp, Homo sapien
gtcttcaatggctagtgctttgaca

SEQ ID NO: 5886373 - DNA, 25 bp, Homo sapien
cattattggctaccagcctctctgg

SEQ ID NO: 5886374 - DNA, 25 bp, Homo sapien
taagcggcaaagattccacatcttg

SEQ ID NO: 5886375 - DNA, 25 bp, Homo sapien
aaatatcccacacattcacttaaat

SEQ ID NO: 5886376 - DNA, 25 bp, Homo sapien
catcatctttgtaatagcaaatggc

SEQ ID NO: 5886377 - DNA, 25 bp, Homo sapien
cactgcgtcagcgaccaacttgaca

SEQ ID NO: 5886378 - DNA, 25 bp, Homo sapien
ttttgcccataacgaggcaatagtg

SEQ ID NO: 5886379 - DNA, 25 bp, Homo sapien
aatcactttgtggaaatttctccgt

SEQ ID NO: 5886380 - DNA, 25 bp, Homo sapien
gatcctgtgcagaaaaatgaattca

SEQ ID NO: 5886381 - DNA, 25 bp, Homo sapien
cgcttttctgtaggcgatgttttaa

SEQ ID NO: 5886382 - DNA, 25 bp, Homo sapien
tgctatgcaaaagttatgatggtta

SEQ ID NO: 5886383 - DNA, 25 bp, Homo sapien
tgcaattattcttttcatgcaacac

SEQ ID NO: 5886384 - DNA, 25 bp, Homo sapien
tgtgggctgcacactgcagaaagat

SEQ ID NO: 5886385 - DNA, 25 bp, Homo sapien
acccccaccattaatgtgctggaat

SEQ ID NO: 5886386 - DNA, 25 bp, Homo sapien
aatttccttctgataaaatttttga

SEQ ID NO: 5886387 - DNA, 25 bp, Homo sapien
aaccaagaatggaaacagcgaagga

SEQ ID NO: 5886388 - DNA, 25 bp, Homo sapien
tgatcatccacggcagccttgtgac

SEQ ID NO: 5886389 - DNA, 25 bp, Homo sapien
ggtatttttgccaagagagccatcc

SEQ ID NO: 5886390 - DNA, 25 bp, Homo sapien
gagacgatcctgaagaaagagaaga

SEQ ID NO: 5886391 - DNA, 25 bp, Homo sapien
atgcccttggtcaatataatgatga

SEQ ID NO: 5886392 - DNA, 25 bp, Homo sapien
atgtagttcagagtgtcaaaaccgc

SEQ ID NO: 5886393 - DNA, 25 bp, Homo sapien
cacggcagccttgtgacagttcgtg

SEQ ID NO: 5886394 - DNA, 25 bp, Homo sapien
tacagctgaaaaaggacggctcctc

SEQ ID NO: 5886395 - DNA, 25 bp, Homo sapien
aaaacatgtagacaggtgtatgagt

SEQ ID NO: 5886396 - DNA, 25 bp, Homo sapien
cagacagtgatagggaagcagggac

SEQ ID NO: 5886397 - DNA, 25 bp, Homo sapien
gagaagggaccagtttgttggcgga

SEQ ID NO: 5886398 - DNA, 25 bp, Homo sapien
ccgagatgataaagaaagccgccca

SEQ ID NO: 5886399 - DNA, 25 bp, Homo sapien
agacaacaaaccttgtggaccacag

SEQ ID NO: 5886400 - DNA, 25 bp, Homo sapien
aagccaaatattgaacctcctgaga

SEQ ID NO: 5886401 - DNA, 25 bp, Homo sapien
ccattgggacagtaaaaatgtgtcc

SEQ ID NO: 5886402 - DNA, 25 bp, Homo sapien
caaccctgtgatcatccacggcagc

SEQ ID NO: 5886403 - DNA, 25 bp, Homo sapien
tgtgatcatccacggcagccttgtg

SEQ ID NO: 5886404 - DNA, 25 bp, Homo sapien
tatgagtttagagtcaaagaatcta

SEQ ID NO: 5886405 - DNA, 25 bp, Homo sapien
atttttgtgaaaagttttgtcaatg

SEQ ID NO: 5886406 - DNA, 25 bp, Homo sapien
ttttttgattacagatacagccagg

SEQ ID NO: 5886407 - DNA, 25 bp, Homo sapien
ttacactcctttcatacgcttttct

SEQ ID NO: 5886408 - DNA, 25 bp, Homo sapien
atggtactttcattgaagaactaat

SEQ ID NO: 5886409 - DNA, 25 bp, Homo sapien
ctgttcagagagagcaaagcttaca

SEQ ID NO: 5886410 - DNA, 25 bp, Homo sapien
ctcagaatactgtggagagattatt

SEQ ID NO: 5886411 - DNA, 25 bp, Homo sapien
gatggagacgatcctgaagaaagag

SEQ ID NO: 5886412 - DNA, 25 bp, Homo sapien
ccgtgctacctggctgtccgagagt

SEQ ID NO: 5886413 - DNA, 25 bp, Homo sapien
agcaaagcttacactcctttcatac

SEQ ID NO: 5886414 - DNA, 25 bp, Homo sapien
ggcgaagagctgttttttgattaca

SEQ ID NO: 5886415 - DNA, 25 bp, Homo sapien
tgaagcaaattctcggtgtcaaaca

SEQ ID NO: 5886416 - DNA, 25 bp, Homo sapien
gacgatgatgatgatggagacgatc

SEQ ID NO: 5886417 - DNA, 25 bp, Homo sapien
cgatcctgaagaaagagaagaaaag

SEQ ID NO: 5886418 - DNA, 25 bp, Homo sapien
gactggcgaagagctgttttttgat

SEQ ID NO: 5886419 - DNA, 25 bp, Homo sapien
gaccagtgacttggattttccaaca

SEQ ID NO: 5886420 - DNA, 25 bp, Homo sapien
aaaaaggacggctcctctaaccatg

SEQ ID NO: 5886421 - DNA, 25 bp, Homo sapien
tggtgcggaagcctcaatgtttaga

SEQ ID NO: 5886422 - DNA, 25 bp, Homo sapien
ataaaatttttgaagccatttcctc

SEQ ID NO: 5886423 - DNA, 25 bp, Homo sapien
ctaaatctgttcagagagagcaaag

SEQ ID NO: 5886424 - DNA, 25 bp, Homo sapien
gtattcagcggggctccaaaaagca

SEQ ID NO: 5886425 - DNA, 25 bp, Homo sapien
aagactctgaatgcagttgcttcag

SEQ ID NO: 5886426 - DNA, 25 bp, Homo sapien
agctgacagaagagggaaagtgtat

SEQ ID NO: 5886427 - DNA, 25 bp, Homo sapien
ggaccaaatgctaaatctgttcaga

SEQ ID NO: 5886428 - DNA, 25 bp, Homo sapien
agatcaggatggtactttcattgaa

SEQ ID NO: 5886429 - DNA, 25 bp, Homo sapien
aataaagatgaagccaaatattgaa

SEQ ID NO: 5886430 - DNA, 25 bp, Homo sapien
atgacaatttctgtgccattgctag

SEQ ID NO: 5886431 - DNA, 25 bp, Homo sapien
ctgaatgcagttgcttcagtaccca

SEQ ID NO: 5886432 - DNA, 25 bp, Homo sapien
gaatactgtggagagattatttctc

SEQ ID NO: 5886433 - DNA, 25 bp, Homo sapien
gtctcccctacagcagaattttatg

SEQ ID NO: 5886434 - DNA, 25 bp, Homo sapien
atgataaatacatgtgcagctttct

SEQ ID NO: 5886435 - DNA, 25 bp, Homo sapien
aagcatctattgctggcaccatctg

SEQ ID NO: 5886436 - DNA, 25 bp, Homo sapien
ttcagtacccataatgtattcttgg

SEQ ID NO: 5886437 - DNA, 25 bp, Homo sapien
gctgttttttgattacagatacagc

SEQ ID NO: 5886438 - DNA, 25 bp, Homo sapien
gtatgtttagttccaatcgtcagaa

SEQ ID NO: 5886439 - DNA, 25 bp, Homo sapien
ctggaatcaaaggatacagacagtg

SEQ ID NO: 5886440 - DNA, 25 bp, Homo sapien
agatacagccaggctgatgccctga

SEQ ID NO: 5886441 - DNA, 25 bp, Homo sapien
ggtaacaaaattcgttttgcaaatc

SEQ ID NO: 5886442 - DNA, 25 bp, Homo sapien
ttcatacgcttttctgtaggcgatg

SEQ ID NO: 5886443 - DNA, 25 bp, Homo sapien
tgagaatgtggagtggagtggtgcg

SEQ ID NO: 5886444 - DNA, 25 bp, Homo sapien
ctgacagaagagggaaagtgtatga

SEQ ID NO: 5886445 - DNA, 25 bp, Homo sapien
actgcagaaagatacagctgaaaaa

SEQ ID NO: 5886446 - DNA, 25 bp, Homo sapien
gctgatgaagtaaagagtatgttta

SEQ ID NO: 5886447 - DNA, 25 bp, Homo sapien
gacagttcgtgcccttgtgtgatag

SEQ ID NO: 5886448 - DNA, 25 bp, Homo sapien
tgcagctttctgttcaacttgaaca

SEQ ID NO: 5886449 - DNA, 25 bp, Homo sapien
cttatatgggagatgaagttttaga

SEQ ID NO: 5886450 - DNA, 25 bp, Homo sapien
ggaagcctcaatgtttagagtcctc

SEQ ID NO: 5886451 - DNA, 25 bp, Homo sapien
aagttatgatggttaacggtgatca

SEQ ID NO: 5886452 - DNA, 25 bp, Homo sapien
tgtcaaacaccaataaagatgaagc

SEQ ID NO: 5886453 - DNA, 25 bp, Homo sapien
agtgtgaccctgacctctgtcttac

SEQ ID NO: 5886454 - DNA, 25 bp, Homo sapien
cgctttccgggatgccgctgcaaag

SEQ ID NO: 5886455 - DNA, 25 bp, Homo sapien
ctgttttacataacattccttatat

SEQ ID NO: 5886456 - DNA, 25 bp, Homo sapien
ttctcaagatgaagctgacagaaga

SEQ ID NO: 5886457 - DNA, 25 bp, Homo sapien
caagaggttcagacgagctgatgaa

SEQ ID NO: 5886458 - DNA, 25 bp, Homo sapien
tgtaggcgatgttttaaatatgact

SEQ ID NO: 5886459 - DNA, 25 bp, Homo sapien
tcagagagagcaaagcttacactcc

SEQ ID NO: 5886460 - DNA, 25 bp, Homo sapien
gtagttcagagtgtcaaaaccgctt

SEQ ID NO: 5886461 - DNA, 25 bp, Homo sapien
gtgccattgctaggttaattgggac

SEQ ID NO: 5886462 - DNA, 25 bp, Homo sapien
accaagcagtgcccgtgctacctgg

SEQ ID NO: 5886463 - DNA, 25 bp, Homo sapien
aacaaaccttgtggaccacagtgtt

SEQ ID NO: 5886464 - DNA, 25 bp, Homo sapien
cagaaagatctggaggatcaccgag

SEQ ID NO: 5886465 - DNA, 25 bp, Homo sapien
ggtggaagatgaaactgttttacat

SEQ ID NO: 5886466 - DNA, 25 bp, Homo sapien
cctgagaatgtggagtggagtggtg

SEQ ID NO: 5886467 - DNA, 25 bp, Homo sapien
acactgcagaaagatacagctgaaa

SEQ ID NO: 5886468 - DNA, 25 bp, Homo sapien
tttgtggtggatgcaacccgcaagg

SEQ ID NO: 5886469 - DNA, 25 bp, Homo sapien
cataacattccttatatgggagatg

SEQ ID NO: 5886470 - DNA, 25 bp, Homo sapien
gcagttgcttcagtacccataatgt

SEQ ID NO: 5886471 - DNA, 25 bp, Homo sapien
ctgggaagaaatctgagaagggacc

SEQ ID NO: 5886472 - DNA, 25 bp, Homo sapien
actgctatgcaaaagttatgatggt

SEQ ID NO: 5886473 - DNA, 25 bp, Homo sapien
acgagctgatgaagtaaagagtatg

SEQ ID NO: 5886474 - DNA, 25 bp, Homo sapien
gtgcggaagcctcaatgtttagagt

SEQ ID NO: 5886475 - DNA, 25 bp, Homo sapien
agggaccagtttgttggcggaagcg

SEQ ID NO: 5886476 - DNA, 25 bp, Homo sapien
acaagtcatcccattaaagactctg

SEQ ID NO: 5886477 - DNA, 25 bp, Homo sapien
gcaaattctcggtgtcaaacaccaa

SEQ ID NO: 5886478 - DNA, 25 bp, Homo sapien
atgcaaaagttatgatggttaacgg

SEQ ID NO: 5886479 - DNA, 25 bp, Homo sapien
cccaggcgcacttcctcctgaatgt

SEQ ID NO: 5886480 - DNA, 25 bp, Homo sapien
catttcctcaatgtttccagataag

SEQ ID NO: 5886481 - DNA, 25 bp, Homo sapien
aaaggacggctcctctaaccatgtt

SEQ ID NO: 5886482 - DNA, 25 bp, Homo sapien
tatgatggttaacggtgatcacagg

SEQ ID NO: 5886483 - DNA, 25 bp, Homo sapien
cagactggcgaagagctgttttttg

SEQ ID NO: 5886484 - DNA, 25 bp, Homo sapien
gtggagtggtgcggaagcctcaatg

SEQ ID NO: 5886485 - DNA, 25 bp, Homo sapien
gtacccataatgtattcttggtctc

SEQ ID NO: 5886486 - DNA, 25 bp, Homo sapien
gcacactgcagaaagatacagctga

SEQ ID NO: 5886487 - DNA, 25 bp, Homo sapien
tacagcagaattttatggtggaaga

SEQ ID NO: 5886488 - DNA, 25 bp, Homo sapien
ttgaacctcctgagaatgtggagtg

SEQ ID NO: 5886489 - DNA, 25 bp, Homo sapien
agtggtgcggaagcctcaatgttta

SEQ ID NO: 5886490 - DNA, 25 bp, Homo sapien
gctacctggctgtccgagagtgtga

SEQ ID NO: 5886491 - DNA, 25 bp, Homo sapien
aaggatacagcctgtgcacatcctg

SEQ ID NO: 5886492 - DNA, 25 bp, Homo sapien
ttgattacagatacagccaggctga

SEQ ID NO: 5886493 - DNA, 25 bp, Homo sapien
aagaatctagcatcatagctccagc

SEQ ID NO: 5886494 - DNA, 25 bp, Homo sapien
gacggcttcccaataacagtagcag

SEQ ID NO: 5886495 - DNA, 25 bp, Homo sapien
tattcttttcatgcaacacccaaca

SEQ ID NO: 5886496 - DNA, 25 bp, Homo sapien
aggacggctcctctaaccatgttta

SEQ ID NO: 5886497 - DNA, 25 bp, Homo sapien
gtcaaaaccgctttccgggatgccg

SEQ ID NO: 5886498 - DNA, 25 bp, Homo sapien
gacttctgtgagctcattgcgcggg

SEQ ID NO: 5886499 - DNA, 25 bp, Homo sapien
gtttgctgctgctctcaccgctgag

SEQ ID NO: 5886500 - DNA, 25 bp, Homo sapien
taaagatgaagccaaatattgaacc

SEQ ID NO: 5886501 - DNA, 25 bp, Homo sapien
ctatgacaatttctgtgccattgct

SEQ ID NO: 5886502 - DNA, 25 bp, Homo sapien
aagatgaagccaaatattgaacctc

SEQ ID NO: 5886503 - DNA, 25 bp, Homo sapien
atgtttagagtcctcattggcactt

SEQ ID NO: 5886504 - DNA, 25 bp, Homo sapien
tgtatgagtttagagtcaaagaatc

SEQ ID NO: 5886505 - DNA, 25 bp, Homo sapien
ggggatttttatcaaagatcctgtg

SEQ ID NO: 5886506 - DNA, 25 bp, Homo sapien
caggtgtatgagtttagagtcaaag

SEQ ID NO: 5886507 - DNA, 25 bp, Homo sapien
agcatcatagctccagctcccgctg

SEQ ID NO: 5886508 - DNA, 25 bp, Homo sapien
aacggtgatcacaggataggtattt

SEQ ID NO: 5886509 - DNA, 25 bp, Homo sapien
atggttaacggtgatcacaggatag

SEQ ID NO: 5886510 - DNA, 25 bp, Homo sapien
aacgtccaggaggccgcagaagagg

SEQ ID NO: 5886511 - DNA, 25 bp, Homo sapien
cctgaagtatgtcggcatcgaaaga

SEQ ID NO: 5886512 - DNA, 25 bp, Homo sapien
aatgtacccccaacatagatggacc

SEQ ID NO: 5886513 - DNA, 25 bp, Homo sapien
cggtgaccagtgacttggattttcc

SEQ ID NO: 5886514 - DNA, 25 bp, Homo sapien
aaacaccggttgtgggctgcacact

SEQ ID NO: 5886515 - DNA, 25 bp, Homo sapien
ggaccagtttgttggcggaagcgtg

SEQ ID NO: 5886516 - DNA, 25 bp, Homo sapien
gccaaatattgaacctcctgagaat

SEQ ID NO: 5886517 - DNA, 25 bp, Homo sapien
gcccgtgctacctggctgtccgaga

SEQ ID NO: 5886518 - DNA, 25 bp, Homo sapien
gttgtgggctgcacactgcagaaag

SEQ ID NO: 5886519 - DNA, 25 bp, Homo sapien
ccaaactgctatgcaaaagttatga

SEQ ID NO: 5886520 - DNA, 25 bp, Homo sapien
agagtgtgaccctgacctctgtctt

SEQ ID NO: 5886521 - DNA, 25 bp, Homo sapien
aagcacagtgcaacaccaagcagtg

SEQ ID NO: 5886522 - DNA, 25 bp, Homo sapien
ggcaccatctgacgtggcaggctgg

SEQ ID NO: 5886523 - DNA, 25 bp, Homo sapien
gcggaagcctcaatgtttagagtcc

SEQ ID NO: 5886524 - DNA, 25 bp, Homo sapien
aaaaatgaattcatctcagaatact

SEQ ID NO: 5886525 - DNA, 25 bp, Homo sapien
agatgaagctgacagaagagggaaa

SEQ ID NO: 5886526 - DNA, 25 bp, Homo sapien
acatagatggaccaaatgctaaatc

SEQ ID NO: 5886527 - DNA, 25 bp, Homo sapien
ttgaacaatgattttgtggtggatg

SEQ ID NO: 5886528 - DNA, 25 bp, Homo sapien
agtgcaattattcttttcatgcaac

SEQ ID NO: 5886529 - DNA, 25 bp, Homo sapien
tctgtaggcgatgttttaaatatga

SEQ ID NO: 5886530 - DNA, 25 bp, Homo sapien
acagctcaagaggttcagacgagct

SEQ ID NO: 5886531 - DNA, 25 bp, Homo sapien
gaactcaccgaacagcagctcccag

SEQ ID NO: 5886532 - DNA, 25 bp, Homo sapien
atactcctccaaggaaaaagaagag

SEQ ID NO: 5886533 - DNA, 25 bp, Homo sapien
ggagatgaagttttagatcaggatg

SEQ ID NO: 5886534 - DNA, 25 bp, Homo sapien
gtttagttccaatcgtcagaaaatt

SEQ ID NO: 5886535 - DNA, 25 bp, Homo sapien
tgtggtggatgcaacccgcaagggt

SEQ ID NO: 5886536 - DNA, 25 bp, Homo sapien
cattgcgcgggactagggagtgttc

SEQ ID NO: 5886537 - DNA, 25 bp, Homo sapien
accgaacagcagctcccaggcgcac

SEQ ID NO: 5886538 - DNA, 25 bp, Homo sapien
gtggatgcaacccgcaagggtaaca

SEQ ID NO: 5886539 - DNA, 25 bp, Homo sapien
aagaggaaacaccggttgtgggctg

SEQ ID NO: 5886540 - DNA, 25 bp, Homo sapien
aatcagagtacatgcgactgagaca

SEQ ID NO: 5886541 - DNA, 25 bp, Homo sapien
agatggaccaaatgctaaatctgtt

SEQ ID NO: 5886542 - DNA, 25 bp, Homo sapien
gtcggcatcgaaagagaaatggaaa

SEQ ID NO: 5886543 - DNA, 25 bp, Homo sapien
cctgtgcacatcctgacttctgtga

SEQ ID NO: 5886544 - DNA, 25 bp, Homo sapien
acactcctttcatacgcttttctgt

SEQ ID NO: 5886545 - DNA, 25 bp, Homo sapien
acttggattttccaacacaagtcat

SEQ ID NO: 5886546 - DNA, 25 bp, Homo sapien
taaaaatgtgtcctgcaagaactgc

SEQ ID NO: 5886547 - DNA, 25 bp, Homo sapien
gaaagatctggaggatcaccgagat

SEQ ID NO: 5886548 - DNA, 25 bp, Homo sapien
ttgggaccaaaacatgtagacaggt

SEQ ID NO: 5886549 - DNA, 25 bp, Homo sapien
tatatgggagatgaagttttagatc

SEQ ID NO: 5886550 - DNA, 25 bp, Homo sapien
gactagggagtgttcggtgaccagt

SEQ ID NO: 5886551 - DNA, 25 bp, Homo sapien
gtgtatgataaatacatgtgcagct

SEQ ID NO: 5886552 - DNA, 25 bp, Homo sapien
tggagagattatttctcaagatgaa

SEQ ID NO: 5886553 - DNA, 25 bp, Homo sapien
tcccattaaagactctgaatgcagt

SEQ ID NO: 5886554 - DNA, 25 bp, Homo sapien
ggcgatgttttaaatatgactgctt

SEQ ID NO: 5886555 - DNA, 25 bp, Homo sapien
gagtcaaagaatctagcatcatagc

SEQ ID NO: 5886556 - DNA, 25 bp, Homo sapien
gttggcggaagcgtgtaaaatcaga

SEQ ID NO: 5886557 - DNA, 25 bp, Homo sapien
tgatgacgatgatgatgatggagac

SEQ ID NO: 5886558 - DNA, 25 bp, Homo sapien
ctcaagaggttcagacgagctgatg

SEQ ID NO: 5886559 - DNA, 25 bp, Homo sapien
taacaaaattcgttttgcaaatcat

SEQ ID NO: 5886560 - DNA, 25 bp, Homo sapien
aaaagcatctattgctggcaccatc

SEQ ID NO: 5886561 - DNA, 25 bp, Homo sapien
gttaccagcatttggagggagcaaa

SEQ ID NO: 5886562 - DNA, 25 bp, Homo sapien
attcatctcagaatactgtggagag

SEQ ID NO: 5886563 - DNA, 25 bp, Homo sapien
tatgggagatgaagttttagatcag

SEQ ID NO: 5886564 - DNA, 25 bp, Homo sapien
cccccaacatagatggaccaaatgc

SEQ ID NO: 5886565 - DNA, 25 bp, Homo sapien
acaggataggtatttttgccaagag

SEQ ID NO: 5886566 - DNA, 25 bp, Homo sapien
aatataatgatgatgacgatgatga

SEQ ID NO: 5886567 - DNA, 25 bp, Homo sapien
gaagatgaaactgttttacataaca

SEQ ID NO: 5886568 - DNA, 25 bp, Homo sapien
ttctgtgccattgctaggttaattg

SEQ ID NO: 5886569 - DNA, 25 bp, Homo sapien
aagcggaagaacacagaaacagctc

SEQ ID NO: 5886570 - DNA, 25 bp, Homo sapien
ctaaccatgtttacaactatcaacc

SEQ ID NO: 5886571 - DNA, 25 bp, Homo sapien
aggataggtatttttgccaagagag

SEQ ID NO: 5886572 - DNA, 25 bp, Homo sapien
tcagagtacatgcgactgagacagc

SEQ ID NO: 5886573 - DNA, 25 bp, Homo sapien
atgtttccagataagggcacagcag

SEQ ID NO: 5886574 - DNA, 25 bp, Homo sapien
ttcttttcatgcaacacccaacact

SEQ ID NO: 5886575 - DNA, 25 bp, Homo sapien
tgcaacaccaagcagtgcccgtgct

SEQ ID NO: 5886576 - DNA, 25 bp, Homo sapien
accattaatgtgctggaatcaaagg

SEQ ID NO: 5886577 - DNA, 25 bp, Homo sapien
tgcaaagcacagtgcaacaccaagc

SEQ ID NO: 5886578 - DNA, 25 bp, Homo sapien
tacgcttttctgtaggcgatgtttt

SEQ ID NO: 5886579 - DNA, 25 bp, Homo sapien
agcatttggagggagcaaaggagtt

SEQ ID NO: 5886580 - DNA, 25 bp, Homo sapien
gacaggtgtatgagtttagagtcaa

SEQ ID NO: 5886581 - DNA, 25 bp, Homo sapien
ttttatcaaagatcctgtgcagaaa

SEQ ID NO: 5886582 - DNA, 25 bp, Homo sapien
cgatgttttaaatatgactgcttcc

SEQ ID NO: 5886583 - DNA, 25 bp, Homo sapien
aaaggagtttgctgctgctctcacc

SEQ ID NO: 5886584 - DNA, 25 bp, Homo sapien
gataaatacatgtgcagctttctgt

SEQ ID NO: 5886585 - DNA, 25 bp, Homo sapien
cctctgaagcaaattctcggtgtca

SEQ ID NO: 5886586 - DNA, 25 bp, Homo sapien
ccagctcccgctgaggatgtggata

SEQ ID NO: 5886587 - DNA, 25 bp, Homo sapien
aatattgaacctcctgagaatgtgg

SEQ ID NO: 5886588 - DNA, 25 bp, Homo sapien
tttccaacacaagtcatcccattaa

SEQ ID NO: 5886589 - DNA, 25 bp, Homo sapien
tactttcattgaagaactaataaaa

SEQ ID NO: 5886590 - DNA, 25 bp, Homo sapien
cgctgagcggataaagaccccacca

SEQ ID NO: 5886591 - DNA, 25 bp, Homo sapien
gatgaaacttcgagctcctctgaag

SEQ ID NO: 5886592 - DNA, 25 bp, Homo sapien
catccacggcagccttgtgacagtt

SEQ ID NO: 5886593 - DNA, 25 bp, Homo sapien
gtttgttggcggaagcgtgtaaaat

SEQ ID NO: 5886594 - DNA, 25 bp, Homo sapien
cggcttcccaataacagtagcaggc

SEQ ID NO: 5886595 - DNA, 25 bp, Homo sapien
aaaattcgttttgcaaatcattcgg

SEQ ID NO: 5886596 - DNA, 25 bp, Homo sapien
ttcggtaaatccaaactgctatgca

SEQ ID NO: 5886597 - DNA, 25 bp, Homo sapien
aatataaagaactcaccgaacagca

SEQ ID NO: 5886598 - DNA, 25 bp, Homo sapien
caaagaatctagcatcatagctcca

SEQ ID NO: 5886599 - DNA, 25 bp, Homo sapien
gaatgtgggtttataaatgatgaaa

SEQ ID NO: 5886600 - DNA, 25 bp, Homo sapien
taccagcatttggagggagcaaagg

SEQ ID NO: 5886601 - DNA, 25 bp, Homo sapien
attttgtggtggatgcaacccgcaa

SEQ ID NO: 5886602 - DNA, 25 bp, Homo sapien
atgtgggtttataaatgatgaaatt

SEQ ID NO: 5886603 - DNA, 25 bp, Homo sapien
ctatcaaccctgtgatcatccacgg

SEQ ID NO: 5886604 - DNA, 25 bp, Homo sapien
tggagacgatcctgaagaaagagaa

SEQ ID NO: 5886605 - DNA, 25 bp, Homo sapien
gaaaagttttgtcaatgtagttcag

SEQ ID NO: 5886606 - DNA, 25 bp, Homo sapien
gtgttaccagcatttggagggagca

SEQ ID NO: 5886607 - DNA, 25 bp, Homo sapien
cacagtgttaccagcatttggaggg

SEQ ID NO: 5886608 - DNA, 25 bp, Homo sapien
tcctgcaagaactgcagtattcagc

SEQ ID NO: 5886609 - DNA, 25 bp, Homo sapien
ccatgtttacaactatcaaccctgt

SEQ ID NO: 5886610 - DNA, 25 bp, Homo sapien
ttaattgggaccaaaacatgtagac

SEQ ID NO: 5886611 - DNA, 25 bp, Homo sapien
tacctggctgtccgagagtgtgacc

SEQ ID NO: 5886612 - DNA, 25 bp, Homo sapien
aatacatgtgcagctttctgttcaa

SEQ ID NO: 5886613 - DNA, 25 bp, Homo sapien
taaatgatgaaatttttgtggagtt

SEQ ID NO: 5886614 - DNA, 25 bp, Homo sapien
ggcacttactatgacaatttctgtg

SEQ ID NO: 5886615 - DNA, 25 bp, Homo sapien
aagcttacactcctttcatacgctt

SEQ ID NO: 5886616 - DNA, 25 bp, Homo sapien
ataatgtattcttggtctcccctac

SEQ ID NO: 5886617 - DNA, 25 bp, Homo sapien
cccctacagcagaattttatggtgg

SEQ ID NO: 5886618 - DNA, 25 bp, Homo sapien
attccttatatgggagatgaagttt

SEQ ID NO: 5886619 - DNA, 25 bp, Homo sapien
aaagttttgtcaatgtagttcagag

SEQ ID NO: 5886620 - DNA, 25 bp, Homo sapien
atagctccagctcccgctgaggatg

SEQ ID NO: 5886621 - DNA, 25 bp, Homo sapien
acagcctgtgcacatcctgacttct

SEQ ID NO: 5886622 - DNA, 25 bp, Homo sapien
ccaaaacatgtagacaggtgtatga

SEQ ID NO: 5886623 - DNA, 25 bp, Homo sapien
actcaccgaacagcagctcccaggc

SEQ ID NO: 5886624 - DNA, 25 bp, Homo sapien
ttagagtcctcattggcacttacta

SEQ ID NO: 5886625 - DNA, 25 bp, Homo sapien
caccatctgacgtggcaggctgggg

SEQ ID NO: 5886626 - DNA, 25 bp, Homo sapien
agtgacttggattttccaacacaag

SEQ ID NO: 5886627 - DNA, 25 bp, Homo sapien
agaagaaagatgaaacttcgagctc

SEQ ID NO: 5886628 - DNA, 25 bp, Homo sapien
gggatagagaatgtgggtttataaa

SEQ ID NO: 5886629 - DNA, 25 bp, Homo sapien
gagcggataaagaccccaccaaaac

SEQ ID NO: 5886630 - DNA, 25 bp, Homo sapien
aagaactgcagtattcagcggggct

SEQ ID NO: 5886631 - DNA, 25 bp, Homo sapien
tacccccaacatagatggaccaaat

SEQ ID NO: 5886632 - DNA, 25 bp, Homo sapien
tgaaacttcgagctcctctgaagca

SEQ ID NO: 5886633 - DNA, 25 bp, Homo sapien
catcatagctccagctcccgctgag

SEQ ID NO: 5886634 - DNA, 25 bp, Homo sapien
ttggcacttactatgacaatttctg

SEQ ID NO: 5886635 - DNA, 25 bp, Homo sapien
accggttgtgggctgcacactgcag

SEQ ID NO: 5886636 - DNA, 25 bp, Homo sapien
aactatcaaccctgtgatcatccac

SEQ ID NO: 5886637 - DNA, 25 bp, Homo sapien
taaagactctgaatgcagttgcttc

SEQ ID NO: 5886638 - DNA, 25 bp, Homo sapien
ttcttggtctcccctacagcagaat

SEQ ID NO: 5886639 - DNA, 25 bp, Homo sapien
gaaactgttttacataacattcctt

SEQ ID NO: 5886640 - DNA, 25 bp, Homo sapien
gaacaatgattttgtggtggatgca

SEQ ID NO: 5886641 - DNA, 25 bp, Homo sapien
cattaatgtgctggaatcaaaggat

SEQ ID NO: 5886642 - DNA, 25 bp, Homo sapien
cgcccacctcggaaatttccttctg

SEQ ID NO: 5886643 - DNA, 25 bp, Homo sapien
tttgaagccatttcctcaatgtttc

SEQ ID NO: 5886644 - DNA, 25 bp, Homo sapien
gcggaagcgtgtaaaatcagagtac

SEQ ID NO: 5886645 - DNA, 25 bp, Homo sapien
cggttgtgggctgcacactgcagaa

SEQ ID NO: 5886646 - DNA, 25 bp, Homo sapien
cagttcgtgcccttgtgtgatagca

SEQ ID NO: 5886647 - DNA, 25 bp, Homo sapien
gattatttctcaagatgaagctgac

SEQ ID NO: 5886648 - DNA, 25 bp, Homo sapien
gataggtatttttgccaagagagcc

SEQ ID NO: 5886649 - DNA, 25 bp, Homo sapien
tctcaccgctgagcggataaagacc

SEQ ID NO: 5886650 - DNA, 25 bp, Homo sapien
actcctttcatacgcttttctgtag

SEQ ID NO: 5886651 - DNA, 25 bp, Homo sapien
cggtaaatccaaactgctatgcaaa

SEQ ID NO: 5886652 - DNA, 25 bp, Homo sapien
aagtatgtcggcatcgaaagagaaa

SEQ ID NO: 5886653 - DNA, 25 bp, Homo sapien
gactgggaagaaatctgagaaggga

SEQ ID NO: 5886654 - DNA, 25 bp, Homo sapien
agttcagagtgtcaaaaccgctttc

SEQ ID NO: 5886655 - DNA, 25 bp, Homo sapien
gtgcccgtgctacctggctgtccga

SEQ ID NO: 5886656 - DNA, 25 bp, Homo sapien
gagggagcaaaggagtttgctgctg

SEQ ID NO: 5886657 - DNA, 25 bp, Homo sapien
aggacggcttcccaataacagtagc

SEQ ID NO: 5886658 - DNA, 25 bp, Homo sapien
ccaggctgatgccctgaagtatgtc

SEQ ID NO: 5886659 - DNA, 25 bp, Homo sapien
ggagtggtgcggaagcctcaatgtt

SEQ ID NO: 5886660 - DNA, 25 bp, Homo sapien
ggaggccgcagaagaggacggcttc

SEQ ID NO: 5886661 - DNA, 25 bp, Homo sapien
attgctggcaccatctgacgtggca

SEQ ID NO: 5886662 - DNA, 25 bp, Homo sapien
tgtacccccaacatagatggaccaa

SEQ ID NO: 5886663 - DNA, 25 bp, Homo sapien
ccttgtgacagttcgtgcccttgtg

SEQ ID NO: 5886664 - DNA, 25 bp, Homo sapien
atcaggatggtactttcattgaaga

SEQ ID NO: 5886665 - DNA, 25 bp, Homo sapien
cacttcctcctgaatgtacccccaa

SEQ ID NO: 5886666 - DNA, 25 bp, Homo sapien
accctgacctctgtcttacttgtgg

SEQ ID NO: 5886667 - DNA, 25 bp, Homo sapien
agaaaaatgaattcatctcagaata

SEQ ID NO: 5886668 - DNA, 25 bp, Homo sapien
aggatacagacagtgatagggaagc

SEQ ID NO: 5886669 - DNA, 25 bp, Homo sapien
acaatgattttgtggtggatgcaac

SEQ ID NO: 5886670 - DNA, 25 bp, Homo sapien
aatcgtcagaaaattttggaaagaa

SEQ ID NO: 5886671 - DNA, 25 bp, Homo sapien
aagcctcaatgtttagagtcctcat

SEQ ID NO: 5886672 - DNA, 25 bp, Homo sapien
cgctgaggatgtggatactcctcca

SEQ ID NO: 5886673 - DNA, 25 bp, Homo sapien
gctcctctaaccatgtttacaacta

SEQ ID NO: 5886674 - DNA, 25 bp, Homo sapien
cggtgatcacaggataggtattttt

SEQ ID NO: 5886675 - DNA, 25 bp, Homo sapien
gaagaaatctgagaagggaccagtt

SEQ ID NO: 5886676 - DNA, 25 bp, Homo sapien
tttcatgcaacacccaacacttata

SEQ ID NO: 5886677 - DNA, 25 bp, Homo sapien
ctctagacaacaaaccttgtggacc

SEQ ID NO: 5886678 - DNA, 25 bp, Homo sapien
tgtggagccgctgaccattgggaca

SEQ ID NO: 5886679 - DNA, 25 bp, Homo sapien
tattgaacctcctgagaatgtggag

SEQ ID NO: 5886680 - DNA, 25 bp, Homo sapien
ttatggtggaagatgaaactgtttt

SEQ ID NO: 5886681 - DNA, 25 bp, Homo sapien
ttttgattacagatacagccaggct

SEQ ID NO: 5886682 - DNA, 25 bp, Homo sapien
aacagtagcaggcccagcaccccca

SEQ ID NO: 5886683 - DNA, 25 bp, Homo sapien
aagaaaagcagaaagatctggagga

SEQ ID NO: 5886684 - DNA, 25 bp, Homo sapien
aagaaagatgaaacttcgagctcct

SEQ ID NO: 5886685 - DNA, 25 bp, Homo sapien
ctctgtcttacttgtggagccgctg

SEQ ID NO: 5886686 - DNA, 25 bp, Homo sapien
tgccgctgcaaagcacagtgcaaca

SEQ ID NO: 5886687 - DNA, 25 bp, Homo sapien
gaaagatacagctgaaaaaggacgg

SEQ ID NO: 5886688 - DNA, 25 bp, Homo sapien
caccgagatgataaagaaagccgcc

SEQ ID NO: 5886689 - DNA, 25 bp, Homo sapien
ataagcggaagaacacagaaacagc

SEQ ID NO: 5886690 - DNA, 25 bp, Homo sapien
agcgaaggatacagcctgtgcacat

SEQ ID NO: 5886691 - DNA, 25 bp, Homo sapien
aatgtggagtggagtggtgcggaag

SEQ ID NO: 5886692 - DNA, 25 bp, Homo sapien
gaactgcagtattcagcggggctcc

SEQ ID NO: 5886693 - DNA, 25 bp, Homo sapien
ttgctaggttaattgggaccaaaac

SEQ ID NO: 5886694 - DNA, 25 bp, Homo sapien
acggaaatcttaaaccaagaatgga

SEQ ID NO: 5886695 - DNA, 25 bp, Homo sapien
gatgaagccaaatattgaacctcct

SEQ ID NO: 5886696 - DNA, 25 bp, Homo sapien
agtaaaaatgtgtcctgcaagaact

SEQ ID NO: 5886697 - DNA, 25 bp, Homo sapien
gtatgataaatacatgtgcagcttt

SEQ ID NO: 5886698 - DNA, 25 bp, Homo sapien
taggttaattgggaccaaaacatgt

SEQ ID NO: 5886699 - DNA, 25 bp, Homo sapien
tgaagccaaatattgaacctcctga

SEQ ID NO: 5886700 - DNA, 25 bp, Homo sapien
caaaccttgtggaccacagtgttac

SEQ ID NO: 5886701 - DNA, 25 bp, Homo sapien
tcctacatcgtaagtgcaattattc

SEQ ID NO: 5886702 - DNA, 25 bp, Homo sapien
gctccaaaaagcatctattgctggc

SEQ ID NO: 5886703 - DNA, 25 bp, Homo sapien
acaacaaaccttgtggaccacagtg

SEQ ID NO: 5886704 - DNA, 25 bp, Homo sapien
tgtattcttggtctcccctacagca

SEQ ID NO: 5886705 - DNA, 25 bp, Homo sapien
atgacgatgatgatgatggagacga

SEQ ID NO: 5886706 - DNA, 25 bp, Homo sapien
cagactgggaagaaatctgagaagg

SEQ ID NO: 5886707 - DNA, 25 bp, Homo sapien
aacacccaacacttataagcggaag

SEQ ID NO: 5886708 - DNA, 25 bp, Homo sapien
atctcagaatactgtggagagatta

SEQ ID NO: 5886709 - DNA, 25 bp, Homo sapien
acagaaacagctctagacaacaaac

SEQ ID NO: 5886710 - DNA, 25 bp, Homo sapien
cagcagctcccaggcgcacttcctc

SEQ ID NO: 5886711 - DNA, 25 bp, Homo sapien
aggttcagacgagctgatgaagtaa

SEQ ID NO: 5886712 - DNA, 25 bp, Homo sapien
actgtggagagattatttctcaaga

SEQ ID NO: 5886713 - DNA, 25 bp, Homo sapien
caagcagtgcccgtgctacctggct

SEQ ID NO: 5886714 - DNA, 25 bp, Homo sapien
caaagcacagtgcaacaccaagcag

SEQ ID NO: 5886715 - DNA, 25 bp, Homo sapien
tgtagacaggtgtatgagtttagag

SEQ ID NO: 5886716 - DNA, 25 bp, Homo sapien
gatgatgacgatgatgatgatggag

SEQ ID NO: 5886717 - DNA, 25 bp, Homo sapien
accaataaagatgaagccaaatatt

SEQ ID NO: 5886718 - DNA, 25 bp, Homo sapien
gaaaaatataaagaactcaccgaac

SEQ ID NO: 5886719 - DNA, 25 bp, Homo sapien
atttctcaagatgaagctgacagaa

SEQ ID NO: 5886720 - DNA, 25 bp, Homo sapien
atctagcatcatagctccagctccc

SEQ ID NO: 5886721 - DNA, 25 bp, Homo sapien
cccgctgaggatgtggatactcctc

SEQ ID NO: 5886722 - DNA, 25 bp, Homo sapien
cgagctcctctgaagcaaattctcg

SEQ ID NO: 5886723 - DNA, 25 bp, Homo sapien
gggaagaaatctgagaagggaccag

SEQ ID NO: 5886724 - DNA, 25 bp, Homo sapien
ttcgagctcctctgaagcaaattct

SEQ ID NO: 5886725 - DNA, 25 bp, Homo sapien
catgtagacaggtgtatgagtttag

SEQ ID NO: 5886726 - DNA, 25 bp, Homo sapien
agaatgtggagtggagtggtgcgga

SEQ ID NO: 5886727 - DNA, 25 bp, Homo sapien
acagcgaaggatacagcctgtgcac

SEQ ID NO: 5886728 - DNA, 25 bp, Homo sapien
agttccaatcgtcagaaaattttgg

SEQ ID NO: 5886729 - DNA, 25 bp, Homo sapien
caattattcttttcatgcaacaccc

SEQ ID NO: 5886730 - DNA, 25 bp, Homo sapien
gactctgaatgcagttgcttcagta

SEQ ID NO: 5886731 - DNA, 25 bp, Homo sapien
aatcaaaggatacagacagtgatag

SEQ ID NO: 5886732 - DNA, 25 bp, Homo sapien
cggctcctctaaccatgtttacaac

SEQ ID NO: 5886733 - DNA, 25 bp, Homo sapien
gaggatgtggatactcctccaagga

SEQ ID NO: 5886734 - DNA, 25 bp, Homo sapien
aaacaccaataaagatgaagccaaa

SEQ ID NO: 5886735 - DNA, 25 bp, Homo sapien
cagaagaggacggcttcccaataac

SEQ ID NO: 5886736 - DNA, 25 bp, Homo sapien
tgatggttaacggtgatcacaggat

SEQ ID NO: 5886737 - DNA, 25 bp, Homo sapien
cagaagagggaaagtgtatgataaa

SEQ ID NO: 5886738 - DNA, 25 bp, Homo sapien
gaagagggaaagtgtatgataaata

SEQ ID NO: 5886739 - DNA, 25 bp, Homo sapien
gcaagaactgcagtattcagcgggg

SEQ ID NO: 5886740 - DNA, 25 bp, Homo sapien
caaaaccgctttccgggatgccgct

SEQ ID NO: 5886741 - DNA, 25 bp, Homo sapien
gccgcccacctcggaaatttccttc

SEQ ID NO: 5886742 - DNA, 25 bp, Homo sapien
gtagcaggcccagcacccccaccat

SEQ ID NO: 5886743 - DNA, 25 bp, Homo sapien
atgaattcatctcagaatactgtgg

SEQ ID NO: 5886744 - DNA, 25 bp, Homo sapien
tgacctctgtcttacttgtggagcc

SEQ ID NO: 5886745 - DNA, 25 bp, Homo sapien
tgacttggattttccaacacaagtc

SEQ ID NO: 5886746 - DNA, 25 bp, Homo sapien
tttcctcaatgtttccagataaggg

SEQ ID NO: 5886747 - DNA, 25 bp, Homo sapien
ccataatgtattcttggtctcccct

SEQ ID NO: 5886748 - DNA, 25 bp, Homo sapien
caggcccagcacccccaccattaat

SEQ ID NO: 5886749 - DNA, 25 bp, Homo sapien
acaaaattcgttttgcaaatcattc

SEQ ID NO: 5886750 - DNA, 25 bp, Homo sapien
aagatgaaacttcgagctcctctga

SEQ ID NO: 5886751 - DNA, 25 bp, Homo sapien
tgtccgagagtgtgaccctgacctc

SEQ ID NO: 5886752 - DNA, 25 bp, Homo sapien
tactatgacaatttctgtgccattg

SEQ ID NO: 5886753 - DNA, 25 bp, Homo sapien
atacagcctgtgcacatcctgactt

SEQ ID NO: 5886754 - DNA, 25 bp, Homo sapien
ctagacaacaaaccttgtggaccac

SEQ ID NO: 5886755 - DNA, 25 bp, Homo sapien
tataaagaactcaccgaacagcagc

SEQ ID NO: 5886756 - DNA, 25 bp, Homo sapien
cttactatgacaatttctgtgccat

SEQ ID NO: 5886757 - DNA, 25 bp, Homo sapien
accctgtgatcatccacggcagcct

SEQ ID NO: 5886758 - DNA, 25 bp, Homo sapien
gaaagccgcccacctcggaaatttc

SEQ ID NO: 5886759 - DNA, 25 bp, Homo sapien
ccaccattaatgtgctggaatcaaa

SEQ ID NO: 5886760 - DNA, 25 bp, Homo sapien
caacacttataagcggaagaacaca

SEQ ID NO: 5886761 - DNA, 25 bp, Homo sapien
aatgtgctggaatcaaaggatacag

SEQ ID NO: 5886762 - DNA, 25 bp, Homo sapien
gaggatcaccgagatgataaagaaa

SEQ ID NO: 5886763 - DNA, 25 bp, Homo sapien
agagaagaaagatgaaacttcgagc

SEQ ID NO: 5886764 - DNA, 25 bp, Homo sapien
caatttctgtgccattgctaggtta

SEQ ID NO: 5886765 - DNA, 25 bp, Homo sapien
aaaatataaagaactcaccgaacag

SEQ ID NO: 5886766 - DNA, 25 bp, Homo sapien
ttagatcaggatggtactttcattg

SEQ ID NO: 5886767 - DNA, 25 bp, Homo sapien
ttaacggtgatcacaggataggtat

SEQ ID NO: 5886768 - DNA, 25 bp, Homo sapien
ttgtgaaaagttttgtcaatgtagt

SEQ ID NO: 5886769 - DNA, 25 bp, Homo sapien
tgtggagagattatttctcaagatg

SEQ ID NO: 5886770 - DNA, 25 bp, Homo sapien
agctctagacaacaaaccttgtgga

SEQ ID NO: 5886771 - DNA, 25 bp, Homo sapien
tggtctcccctacagcagaatttta

SEQ ID NO: 5886772 - DNA, 25 bp, Homo sapien
aggagtttgctgctgctctcaccgc

SEQ ID NO: 5886773 - DNA, 25 bp, Homo sapien
gaacctcctgagaatgtggagtgga

SEQ ID NO: 5886774 - DNA, 25 bp, Homo sapien
aaaatcagagtacatgcgactgaga

SEQ ID NO: 5886775 - DNA, 25 bp, Homo sapien
ggatcaccgagatgataaagaaagc

SEQ ID NO: 5886776 - DNA, 25 bp, Homo sapien
caacacaagtcatcccattaaagac

SEQ ID NO: 5886777 - DNA, 25 bp, Homo sapien
tgtgcagctttctgttcaacttgaa

SEQ ID NO: 5886778 - DNA, 25 bp, Homo sapien
ttatcaaagatcctgtgcagaaaaa

SEQ ID NO: 5886779 - DNA, 25 bp, Homo sapien
ccattaaagactctgaatgcagttg

SEQ ID NO: 5886780 - DNA, 25 bp, Homo sapien
tcgtgcccttgtgtgatagcacaaa

SEQ ID NO: 5886781 - DNA, 25 bp, Homo sapien
ggaagaacacagaaacagctctaga

SEQ ID NO: 5886782 - DNA, 25 bp, Homo sapien
aaaacgtccaggaggccgcagaaga

SEQ ID NO: 5886783 - DNA, 25 bp, Homo sapien
ccgctgcaaagcacagtgcaacacc

SEQ ID NO: 5886784 - DNA, 25 bp, Homo sapien
atgggccagactgggaagaaatctg

SEQ ID NO: 5886785 - DNA, 25 bp, Homo sapien
taaatacatgtgcagctttctgttc

SEQ ID NO: 5886786 - DNA, 25 bp, Homo sapien
gcaacccgcaagggtaacaaaattc

SEQ ID NO: 5886787 - DNA, 25 bp, Homo sapien
tccagactggcgaagagctgttttt

SEQ ID NO: 5886788 - DNA, 25 bp, Homo sapien
ggatggtactttcattgaagaacta

SEQ ID NO: 5886789 - DNA, 25 bp, Homo sapien
tgtcctgcaagaactgcagtattca

SEQ ID NO: 5886790 - DNA, 25 bp, Homo sapien
gcagaaaaatgaattcatctcagaa

SEQ ID NO: 5886791 - DNA, 25 bp, Homo sapien
atgtttacaactatcaaccctgtga

SEQ ID NO: 5886792 - DNA, 25 bp, Homo sapien
atcattcggtaaatccaaactgcta

SEQ ID NO: 5886793 - DNA, 25 bp, Homo sapien
tgagctcattgcgcgggactaggga

SEQ ID NO: 5886794 - DNA, 25 bp, Homo sapien
cggcatcgaaagagaaatggaaatc

SEQ ID NO: 5886795 - DNA, 25 bp, Homo sapien
aggctgggggatttttatcaaagat

SEQ ID NO: 5886796 - DNA, 25 bp, Homo sapien
taagtgcaattattcttttcatgca

SEQ ID NO: 5886797 - DNA, 25 bp, Homo sapien
cccacctcggaaatttccttctgat

SEQ ID NO: 5886798 - DNA, 25 bp, Homo sapien
acagccaggctgatgccctgaagta

SEQ ID NO: 5886799 - DNA, 25 bp, Homo sapien
tgttcaacttgaacaatgattttgt

SEQ ID NO: 5886800 - DNA, 25 bp, Homo sapien
gaacggaaatcttaaaccaagaatg

SEQ ID NO: 5886801 - DNA, 25 bp, Homo sapien
ttcccaataacagtagcaggcccag

SEQ ID NO: 5886802 - DNA, 25 bp, Homo sapien
tgttcggtgaccagtgacttggatt

SEQ ID NO: 5886803 - DNA, 25 bp, Homo sapien
ttataagcggaagaacacagaaaca

SEQ ID NO: 5886804 - DNA, 25 bp, Homo sapien
acagcagaagaactaaaggaaaaat

SEQ ID NO: 5886805 - DNA, 25 bp, Homo sapien
gagaatgtgggtttataaatgatga

SEQ ID NO: 5886806 - DNA, 25 bp, Homo sapien
cagtttgttggcggaagcgtgtaaa

SEQ ID NO: 5886807 - DNA, 25 bp, Homo sapien
ggaaatcttaaaccaagaatggaaa

SEQ ID NO: 5886808 - DNA, 25 bp, Homo sapien
atcgtaagtgcaattattcttttca

SEQ ID NO: 5886809 - DNA, 25 bp, Homo sapien
gatacagctgaaaaaggacggctcc

SEQ ID NO: 5886810 - DNA, 25 bp, Homo sapien
atggaaacagcgaaggatacagcct

SEQ ID NO: 5886811 - DNA, 25 bp, Homo sapien
gagttggtgaatgcccttggtcaat

SEQ ID NO: 5886812 - DNA, 25 bp, Homo sapien
tgggggatttttatcaaagatcctg

SEQ ID NO: 5886813 - DNA, 25 bp, Homo sapien
ggaaacaccggttgtgggctgcaca

SEQ ID NO: 5886814 - DNA, 25 bp, Homo sapien
gccgcagaagaggacggcttcccaa

SEQ ID NO: 5886815 - DNA, 25 bp, Homo sapien
tctggaggatcaccgagatgataaa

SEQ ID NO: 5886816 - DNA, 25 bp, Homo sapien
tgaagccatttcctcaatgtttcca

SEQ ID NO: 5886817 - DNA, 25 bp, Homo sapien
ccagtgacttggattttccaacaca

SEQ ID NO: 5886818 - DNA, 25 bp, Homo sapien
gggaccaaaacatgtagacaggtgt

SEQ ID NO: 5886819 - DNA, 25 bp, Homo sapien
aagcgtgtaaaatcagagtacatgc

SEQ ID NO: 5886820 - DNA, 25 bp, Homo sapien
ccttggtcaatataatgatgatgac

SEQ ID NO: 5886821 - DNA, 25 bp, Homo sapien
atacagccaggctgatgccctgaag

SEQ ID NO: 5886822 - DNA, 25 bp, Homo sapien
ctcccgctgaggatgtggatactcc

SEQ ID NO: 5886823 - DNA, 25 bp, Homo sapien
actgcagtattcagcggggctccaa

SEQ ID NO: 5886824 - DNA, 25 bp, Homo sapien
gaatggaaacagcgaaggatacagc

SEQ ID NO: 5886825 - DNA, 25 bp, Homo sapien
tcaaacaccaataaagatgaagcca

SEQ ID NO: 5886826 - DNA, 25 bp, Homo sapien
gtttccagataagggcacagcagaa

SEQ ID NO: 5886827 - DNA, 25 bp, Homo sapien
ggtgtcaaacaccaataaagatgaa

SEQ ID NO: 5886828 - DNA, 25 bp, Homo sapien
gccatttcctcaatgtttccagata

SEQ ID NO: 5886829 - DNA, 25 bp, Homo sapien
ctgagaagggaccagtttgttggcg

SEQ ID NO: 5886830 - DNA, 25 bp, Homo sapien
attttccaacacaagtcatcccatt

SEQ ID NO: 5886831 - DNA, 25 bp, Homo sapien
tgcgactgagacagctcaagaggtt

SEQ ID NO: 5886832 - DNA, 25 bp, Homo sapien
acagtaaaaatgtgtcctgcaagaa

SEQ ID NO: 5886833 - DNA, 25 bp, Homo sapien
gatgccgctgcaaagcacagtgcaa

SEQ ID NO: 5886834 - DNA, 25 bp, Homo sapien
atgccctgaagtatgtcggcatcga

SEQ ID NO: 5886835 - DNA, 25 bp, Homo sapien
cgcagaagaggacggcttcccaata

SEQ ID NO: 5886836 - DNA, 25 bp, Homo sapien
ttttgcaaatcattcggtaaatcca

SEQ ID NO: 5886837 - DNA, 25 bp, Homo sapien
aagaactcaccgaacagcagctccc

SEQ ID NO: 5886838 - DNA, 25 bp, Homo sapien
ctggcgaagagctgttttttgatta

SEQ ID NO: 5886839 - DNA, 25 bp, Homo sapien
gaaaagcagaaagatctggaggatc

SEQ ID NO: 5886840 - DNA, 25 bp, Homo sapien
agcagaaagatctggaggatcaccg

SEQ ID NO: 5886841 - DNA, 25 bp, Homo sapien
gagatgataaagaaagccgcccacc

SEQ ID NO: 5886842 - DNA, 25 bp, Homo sapien
ggtgtatgagtttagagtcaaagaa

SEQ ID NO: 5886843 - DNA, 25 bp, Homo sapien
agccaggctgatgccctgaagtatg

SEQ ID NO: 5886844 - DNA, 25 bp, Homo sapien
atggaccaaatgctaaatctgttca

SEQ ID NO: 5886845 - DNA, 25 bp, Homo sapien
ggttaacggtgatcacaggataggt

SEQ ID NO: 5886846 - DNA, 25 bp, Homo sapien
ctattgctggcaccatctgacgtgg

SEQ ID NO: 5886847 - DNA, 25 bp, Homo sapien
agagcaaagcttacactcctttcat

SEQ ID NO: 5886848 - DNA, 25 bp, Homo sapien
aattgggaccaaaacatgtagacag

SEQ ID NO: 5886849 - DNA, 25 bp, Homo sapien
caacttgaacaatgattttgtggtg

SEQ ID NO: 5886850 - DNA, 25 bp, Homo sapien
ataaagaaagccgcccacctcggaa

SEQ ID NO: 5886851 - DNA, 25 bp, Homo sapien
tttctgtaggcgatgttttaaatat

SEQ ID NO: 5886852 - DNA, 25 bp, Homo sapien
aattttatggtggaagatgaaactg

SEQ ID NO: 5886853 - DNA, 25 bp, Homo sapien
aaacggggggagagaacaatgataa

SEQ ID NO: 5886854 - DNA, 25 bp, Homo sapien
aaactgctatgcaaaagttatgatg

SEQ ID NO: 5886855 - DNA, 25 bp, Homo sapien
attattcttttcatgcaacacccaa

SEQ ID NO: 5886856 - DNA, 25 bp, Homo sapien
tgcagaaagatacagctgaaaaagg

SEQ ID NO: 5886857 - DNA, 25 bp, Homo sapien
cagtagcaggcccagcacccccacc

SEQ ID NO: 5886858 - DNA, 25 bp, Homo sapien
atccaaactgctatgcaaaagttat

SEQ ID NO: 5886859 - DNA, 25 bp, Homo sapien
ttcaacttgaacaatgattttgtgg

SEQ ID NO: 5886860 - DNA, 25 bp, Homo sapien
agataagggcacagcagaagaacta

SEQ ID NO: 5886861 - DNA, 25 bp, Homo sapien
accaaatgctaaatctgttcagaga

SEQ ID NO: 5886862 - DNA, 25 bp, Homo sapien
acttgaacaatgattttgtggtgga

SEQ ID NO: 5886863 - DNA, 25 bp, Homo sapien
gctgcaaagcacagtgcaacaccaa

SEQ ID NO: 5886864 - DNA, 25 bp, Homo sapien
tacatgtgcagctttctgttcaact

SEQ ID NO: 5886865 - DNA, 25 bp, Homo sapien
cctacagcagaattttatggtggaa

SEQ ID NO: 5886866 - DNA, 25 bp, Homo sapien
tctgtgagctcattgcgcgggacta

SEQ ID NO: 5886867 - DNA, 25 bp, Homo sapien
accgctttccgggatgccgctgcaa

SEQ ID NO: 5886868 - DNA, 25 bp, Homo sapien
gatagggaagcagggactgaaacgg

SEQ ID NO: 5886869 - DNA, 25 bp, Homo sapien
gtgtaaaatcagagtacatgcgact

SEQ ID NO: 5886870 - DNA, 25 bp, Homo sapien
tacagacagtgatagggaagcaggg

SEQ ID NO: 5886871 - DNA, 25 bp, Homo sapien
tccgagagtgtgaccctgacctctg

SEQ ID NO: 5886872 - DNA, 25 bp, Homo sapien
cgaagagctgttttttgattacaga

SEQ ID NO: 5886873 - DNA, 25 bp, Homo sapien
tgctgctctcaccgctgagcggata

SEQ ID NO: 5886874 - DNA, 25 bp, Homo sapien
agtgcaacaccaagcagtgcccgtg

SEQ ID NO: 5886875 - DNA, 25 bp, Homo sapien
atcatccacggcagccttgtgacag

SEQ ID NO: 5886876 - DNA, 25 bp, Homo sapien
tcctttcatacgcttttctgtaggc

SEQ ID NO: 5886877 - DNA, 25 bp, Homo sapien
catttggagggagcaaaggagtttg

SEQ ID NO: 5886878 - DNA, 25 bp, Homo sapien
gcttcccaataacagtagcaggccc

SEQ ID NO: 5886879 - DNA, 25 bp, Homo sapien
tctgaagcaaattctcggtgtcaaa

SEQ ID NO: 5886880 - DNA, 25 bp, Homo sapien
gctgggggatttttatcaaagatcc

SEQ ID NO: 5886881 - DNA, 25 bp, Homo sapien
cgaaagagaaatggaaatcccttag

SEQ ID NO: 5886882 - DNA, 25 bp, Homo sapien
cagtgttaccagcatttggagggag

SEQ ID NO: 5886883 - DNA, 25 bp, Homo sapien
agaagaggaaacaccggttgtgggc

SEQ ID NO: 5886884 - DNA, 25 bp, Homo sapien
ccaagaatggaaacagcgaaggata

SEQ ID NO: 5886885 - DNA, 25 bp, Homo sapien
aagagctgttttttgattacagata

SEQ ID NO: 5886886 - DNA, 25 bp, Homo sapien
tggagttggtgaatgcccttggtca

SEQ ID NO: 5886887 - DNA, 25 bp, Homo sapien
ttacagatacagccaggctgatgcc

SEQ ID NO: 5886888 - DNA, 25 bp, Homo sapien
aaaatgtgtcctgcaagaactgcag

SEQ ID NO: 5886889 - DNA, 25 bp, Homo sapien
ctgaccattgggacagtaaaaatgt

SEQ ID NO: 5886890 - DNA, 25 bp, Homo sapien
tacatgcgactgagacagctcaaga

SEQ ID NO: 5886891 - DNA, 25 bp, Homo sapien
cccagcacccccaccattaatgtgc

SEQ ID NO: 5886892 - DNA, 25 bp, Homo sapien
agagagcaaagcttacactcctttc

SEQ ID NO: 5886893 - DNA, 25 bp, Homo sapien
attcagcggggctccaaaaagcatc

SEQ ID NO: 5886894 - DNA, 25 bp, Homo sapien
agtaaagagtatgtttagttccaat

SEQ ID NO: 5886895 - DNA, 25 bp, Homo sapien
gccagactgggaagaaatctgagaa

SEQ ID NO: 5886896 - DNA, 25 bp, Homo sapien
agtgttcggtgaccagtgacttgga

SEQ ID NO: 5886897 - DNA, 25 bp, Homo sapien
ccttgtgtgatagcacaaaattttt

SEQ ID NO: 5886898 - DNA, 25 bp, Homo sapien
aatgattttgtggtggatgcaaccc

SEQ ID NO: 5886899 - DNA, 25 bp, Homo sapien
accacagtgttaccagcatttggag

SEQ ID NO: 5886900 - DNA, 25 bp, Homo sapien
caaagcttacactcctttcatacgc

SEQ ID NO: 5886901 - DNA, 25 bp, Homo sapien
atctattgctggcaccatctgacgt

SEQ ID NO: 5886902 - DNA, 25 bp, Homo sapien
ttccagataagggcacagcagaaga

SEQ ID NO: 5886903 - DNA, 25 bp, Homo sapien
atgaaatttttgtggagttggtgaa

SEQ ID NO: 5886904 - DNA, 25 bp, Homo sapien
aatatgactgcttcctacatcgtaa

SEQ ID NO: 5886905 - DNA, 25 bp, Homo sapien
cgtaagtgcaattattcttttcatg

SEQ ID NO: 5886906 - DNA, 25 bp, Homo sapien
actgcttcctacatcgtaagtgcaa

SEQ ID NO: 5886907 - DNA, 25 bp, Homo sapien
ggcgcacttcctcctgaatgtaccc

SEQ ID NO: 5886908 - DNA, 25 bp, Homo sapien
atgaaactgttttacataacattcc

SEQ ID NO: 5886909 - DNA, 25 bp, Homo sapien
gacggctcctctaaccatgtttaca

SEQ ID NO: 5886910 - DNA, 25 bp, Homo sapien
ttgtgacagttcgtgcccttgtgtg

SEQ ID NO: 5886911 - DNA, 25 bp, Homo sapien
aagaatggaaacagcgaaggataca

SEQ ID NO: 5886912 - DNA, 25 bp, Homo sapien
ctctgaatgcagttgcttcagtacc

SEQ ID NO: 5886913 - DNA, 25 bp, Homo sapien
agtcctcattggcacttactatgac

SEQ ID NO: 5886914 - DNA, 25 bp, Homo sapien
tacataacattccttatatgggaga

SEQ ID NO: 5886915 - DNA, 25 bp, Homo sapien
cttttctgtaggcgatgttttaaat

SEQ ID NO: 5886916 - DNA, 25 bp, Homo sapien
gaacacagaaacagctctagacaac

SEQ ID NO: 5886917 - DNA, 25 bp, Homo sapien
gaagttttagatcaggatggtactt

SEQ ID NO: 5886918 - DNA, 25 bp, Homo sapien
tgaagtatgtcggcatcgaaagaga

SEQ ID NO: 5886919 - DNA, 25 bp, Homo sapien
gggctccaaaaagcatctattgctg

SEQ ID NO: 5886920 - DNA, 25 bp, Homo sapien
aagatcctgtgcagaaaaatgaatt

SEQ ID NO: 5886921 - DNA, 25 bp, Homo sapien
gataaagaccccaccaaaacgtcca

SEQ ID NO: 5886922 - DNA, 25 bp, Homo sapien
tgtgtcctgcaagaactgcagtatt

SEQ ID NO: 5886923 - DNA, 25 bp, Homo sapien
gcaaaagttatgatggttaacggtg

SEQ ID NO: 5886924 - DNA, 25 bp, Homo sapien
gatcacaggataggtatttttgcca

SEQ ID NO: 5886925 - DNA, 25 bp, Homo sapien
ctgacgtggcaggctgggggatttt

SEQ ID NO: 5886926 - DNA, 25 bp, Homo sapien
ccaaaacgtccaggaggccgcagaa

SEQ ID NO: 5886927 - DNA, 25 bp, Homo sapien
ataagggcacagcagaagaactaaa

SEQ ID NO: 5886928 - DNA, 25 bp, Homo sapien
ataacagtagcaggcccagcacccc

SEQ ID NO: 5886929 - DNA, 25 bp, Homo sapien
ggaccacagtgttaccagcatttgg

SEQ ID NO: 5886930 - DNA, 25 bp, Homo sapien
cagtgatagggaagcagggactgaa

SEQ ID NO: 5886931 - DNA, 25 bp, Homo sapien
atcgaaagagaaatggaaatccctt

SEQ ID NO: 5886932 - DNA, 25 bp, Homo sapien
cagaaagatacagctgaaaaaggac

SEQ ID NO: 5886933 - DNA, 25 bp, Homo sapien
tcggaaatttccttctgataaaatt

SEQ ID NO: 5886934 - DNA, 25 bp, Homo sapien
gaccattgggacagtaaaaatgtgt

SEQ ID NO: 5886935 - DNA, 25 bp, Homo sapien
ggatactcctccaaggaaaaagaag

SEQ ID NO: 5886936 - DNA, 25 bp, Homo sapien
acacttataagcggaagaacacaga

SEQ ID NO: 5886937 - DNA, 25 bp, Homo sapien
gcgcgggactagggagtgttcggtg

SEQ ID NO: 5886938 - DNA, 25 bp, Homo sapien
gggatgccgctgcaaagcacagtgc

SEQ ID NO: 5886939 - DNA, 25 bp, Homo sapien
acattccttatatgggagatgaagt

SEQ ID NO: 5886940 - DNA, 25 bp, Homo sapien
gtgcagaaaaatgaattcatctcag

SEQ ID NO: 5886941 - DNA, 25 bp, Homo sapien
tctgttcaacttgaacaatgatttt

SEQ ID NO: 5886942 - DNA, 25 bp, Homo sapien
cacatcctgacttctgtgagctcat

SEQ ID NO: 5886943 - DNA, 25 bp, Homo sapien
cacttactatgacaatttctgtgcc

SEQ ID NO: 5886944 - DNA, 25 bp, Homo sapien
caatgtttccagataagggcacagc

SEQ ID NO: 5886945 - DNA, 25 bp, Homo sapien
ctcctgagaatgtggagtggagtgg

SEQ ID NO: 5886946 - DNA, 25 bp, Homo sapien
cggcagccttgtgacagttcgtgcc

SEQ ID NO: 5886947 - DNA, 25 bp, Homo sapien
agttttgtcaatgtagttcagagtg

SEQ ID NO: 5886948 - DNA, 25 bp, Homo sapien
acttcgagctcctctgaagcaaatt

SEQ ID NO: 5886949 - DNA, 25 bp, Homo sapien
aaacttcgagctcctctgaagcaaa

SEQ ID NO: 5886950 - DNA, 25 bp, Homo sapien
gagtatgtttagttccaatcgtcag

SEQ ID NO: 5886951 - DNA, 25 bp, Homo sapien
agagtcctcattggcacttactatg

SEQ ID NO: 5886952 - DNA, 25 bp, Homo sapien
acctctgtcttacttgtggagccgc

SEQ ID NO: 5886953 - DNA, 25 bp, Homo sapien
aatgatgaaatttttgtggagttgg

SEQ ID NO: 5886954 - DNA, 25 bp, Homo sapien
aaattctcggtgtcaaacaccaata

SEQ ID NO: 5886955 - DNA, 25 bp, Homo sapien
tacttgtggagccgctgaccattgg

SEQ ID NO: 5886956 - DNA, 25 bp, Homo sapien
aagaacacagaaacagctctagaca

SEQ ID NO: 5886957 - DNA, 25 bp, Homo sapien
tattcttggtctcccctacagcaga

SEQ ID NO: 5886958 - DNA, 25 bp, Homo sapien
ttaatgtgctggaatcaaaggatac

SEQ ID NO: 5886959 - DNA, 25 bp, Homo sapien
gacgatcctgaagaaagagaagaaa

SEQ ID NO: 5886960 - DNA, 25 bp, Homo sapien
agctcccaggcgcacttcctcctga

SEQ ID NO: 5886961 - DNA, 25 bp, Homo sapien
tgatgggaaagtacacggggataga

SEQ ID NO: 5886962 - DNA, 25 bp, Homo sapien
ggatgtggatactcctccaaggaaa

SEQ ID NO: 5886963 - DNA, 25 bp, Homo sapien
gcggaagaacacagaaacagctcta

SEQ ID NO: 5886964 - DNA, 25 bp, Homo sapien
atgatgatgacgatgatgatgatgg

SEQ ID NO: 5886965 - DNA, 25 bp, Homo sapien
gcgggactagggagtgttcggtgac

SEQ ID NO: 5886966 - DNA, 25 bp, Homo sapien
gccgctgaccattgggacagtaaaa

SEQ ID NO: 5886967 - DNA, 25 bp, Homo sapien
tcatagctccagctcccgctgagga

SEQ ID NO: 5886968 - DNA, 25 bp, Homo sapien
cagtgcccgtgctacctggctgtcc

SEQ ID NO: 5886969 - DNA, 25 bp, Homo sapien
gttttacataacattccttatatgg

SEQ ID NO: 5886970 - DNA, 25 bp, Homo sapien
atcaaagatcctgtgcagaaaaatg

SEQ ID NO: 5886971 - DNA, 25 bp, Homo sapien
cctcggaaatttccttctgataaaa

SEQ ID NO: 5886972 - DNA, 25 bp, Homo sapien
ttgtcaatgtagttcagagtgtcaa

SEQ ID NO: 5886973 - DNA, 25 bp, Homo sapien
caaaaagcatctattgctggcacca

SEQ ID NO: 5886974 - DNA, 25 bp, Homo sapien
ttccaatcgtcagaaaattttggaa

SEQ ID NO: 5886975 - DNA, 25 bp, Homo sapien
cctgacctctgtcttacttgtggag

SEQ ID NO: 5886976 - DNA, 25 bp, Homo sapien
gcaacacccaacacttataagcgga

SEQ ID NO: 5886977 - DNA, 25 bp, Homo sapien
aatttttgtggagttggtgaatgcc

SEQ ID NO: 5886978 - DNA, 25 bp, Homo sapien
tgccaagagagccatccagactggc

SEQ ID NO: 5886979 - DNA, 25 bp, Homo sapien
ctccagctcccgctgaggatgtgga

SEQ ID NO: 5886980 - DNA, 25 bp, Homo sapien
ccgggatgccgctgcaaagcacagt

SEQ ID NO: 5886981 - DNA, 25 bp, Homo sapien
ttgtgtgatagcacaaaatttttgt

SEQ ID NO: 5886982 - DNA, 25 bp, Homo sapien
aagtgtatgataaatacatgtgcag

SEQ ID NO: 5886983 - DNA, 25 bp, Homo sapien
ctagggagtgttcggtgaccagtga

SEQ ID NO: 5886984 - DNA, 25 bp, Homo sapien
tcagacgagctgatgaagtaaagag

SEQ ID NO: 5886985 - DNA, 25 bp, Homo sapien
ctcattggcacttactatgacaatt

SEQ ID NO: 5886986 - DNA, 25 bp, Homo sapien
tgattttgtggtggatgcaacccgc

SEQ ID NO: 5886987 - DNA, 25 bp, Homo sapien
gagctgatgaagtaaagagtatgtt

SEQ ID NO: 5886988 - DNA, 25 bp, Homo sapien
ctgacttctgtgagctcattgcgcg

SEQ ID NO: 5886989 - DNA, 25 bp, Homo sapien
ggatacagcctgtgcacatcctgac

SEQ ID NO: 5886990 - DNA, 25 bp, Homo sapien
atttttatcaaagatcctgtgcaga

SEQ ID NO: 5886991 - DNA, 25 bp, Homo sapien
agttttagatcaggatggtactttc

SEQ ID NO: 5886992 - DNA, 25 bp, Homo sapien
tcctcaatgtttccagataagggca

SEQ ID NO: 5886993 - DNA, 25 bp, Homo sapien
tgatgaaatttttgtggagttggtg

SEQ ID NO: 5886994 - DNA, 25 bp, Homo sapien
acagtgcaacaccaagcagtgcccg

SEQ ID NO: 5886995 - DNA, 25 bp, Homo sapien
tagacaggtgtatgagtttagagtc

SEQ ID NO: 5886996 - DNA, 25 bp, Homo sapien
aaaggatacagacagtgatagggaa

SEQ ID NO: 5886997 - DNA, 25 bp, Homo sapien
gtgatcacaggataggtatttttgc

SEQ ID NO: 5886998 - DNA, 25 bp, Homo sapien
tatttttgccaagagagccatccag

SEQ ID NO: 5886999 - DNA, 25 bp, Homo sapien
gatctggaggatcaccgagatgata

SEQ ID NO: 5887000 - DNA, 25 bp, Homo sapien
aaacagctctagacaacaaaccttg

SEQ ID NO: 5887001 - DNA, 25 bp, Homo sapien
ttttagatcaggatggtactttcat

SEQ ID NO: 5887002 - DNA, 25 bp, Homo sapien
gacagtgatagggaagcagggactg

SEQ ID NO: 5887003 - DNA, 25 bp, Homo sapien
tgaccctgacctctgtcttacttgt

SEQ ID NO: 5887004 - DNA, 25 bp, Homo sapien
aacagcagctcccaggcgcacttcc

SEQ ID NO: 5887005 - DNA, 25 bp, Homo sapien
catgcgactgagacagctcaagagg

SEQ ID NO: 5887006 - DNA, 25 bp, Homo sapien
caaatgctaaatctgttcagagaga

SEQ ID NO: 5887007 - DNA, 25 bp, Homo sapien
gggagcaaaggagtttgctgctgct

SEQ ID NO: 5887008 - DNA, 25 bp, Homo sapien
tcctgtgcagaaaaatgaattcatc

SEQ ID NO: 5887009 - DNA, 25 bp, Homo sapien
gtgctacctggctgtccgagagtgt

SEQ ID NO: 5887010 - DNA, 25 bp, Homo sapien
gaaagtgtatgataaatacatgtgc

SEQ ID NO: 5887011 - DNA, 25 bp, Homo sapien
caccaaaacgtccaggaggccgcag

SEQ ID NO: 5887012 - DNA, 25 bp, Homo sapien
gaaagatgaaacttcgagctcctct

SEQ ID NO: 5887013 - DNA, 25 bp, Homo sapien
tcaccgaacagcagctcccaggcgc

SEQ ID NO: 5887014 - DNA, 25 bp, Homo sapien
agaggacggcttcccaataacagta

SEQ ID NO: 5887015 - DNA, 25 bp, Homo sapien
tgctggcaccatctgacgtggcagg

SEQ ID NO: 5887016 - DNA, 25 bp, Homo sapien
gggccagactgggaagaaatctgag

SEQ ID NO: 5887017 - DNA, 25 bp, Homo sapien
agaattttatggtggaagatgaaac

SEQ ID NO: 5887018 - DNA, 25 bp, Homo sapien
aggctgatgccctgaagtatgtcgg

SEQ ID NO: 5887019 - DNA, 25 bp, Homo sapien
aaatctgttcagagagagcaaagct

SEQ ID NO: 5887020 - DNA, 25 bp, Homo sapien
tcggtgtcaaacaccaataaagatg

SEQ ID NO: 5887021 - DNA, 25 bp, Homo sapien
agacgagctgatgaagtaaagagta

SEQ ID NO: 5887022 - DNA, 25 bp, Homo sapien
taaagaactcaccgaacagcagctc

SEQ ID NO: 5887023 - DNA, 25 bp, Homo sapien
ctacatcgtaagtgcaattattctt

SEQ ID NO: 5887024 - DNA, 25 bp, Homo sapien
ctgctctcaccgctgagcggataaa

SEQ ID NO: 5887025 - DNA, 25 bp, Homo sapien
ctgtgccattgctaggttaattggg

SEQ ID NO: 5887026 - DNA, 25 bp, Homo sapien
tgaatgtacccccaacatagatgga

SEQ ID NO: 5887027 - DNA, 25 bp, Homo sapien
ccagataagggcacagcagaagaac

SEQ ID NO: 5887028 - DNA, 25 bp, Homo sapien
gaatgcccttggtcaatataatgat

SEQ ID NO: 5887029 - DNA, 25 bp, Homo sapien
gagattatttctcaagatgaagctg

SEQ ID NO: 5887030 - DNA, 25 bp, Homo sapien
cagctgaaaaaggacggctcctcta

SEQ ID NO: 5887031 - DNA, 25 bp, Homo sapien
agcctgtgcacatcctgacttctgt

SEQ ID NO: 5887032 - DNA, 25 bp, Homo sapien
cttcctcctgaatgtacccccaaca

SEQ ID NO: 5887033 - DNA, 25 bp, Homo sapien
caaatattgaacctcctgagaatgt

SEQ ID NO: 5887034 - DNA, 25 bp, Homo sapien
taaagagtatgtttagttccaatcg

SEQ ID NO: 5887035 - DNA, 25 bp, Homo sapien
cttttcatgcaacacccaacactta

SEQ ID NO: 5887036 - DNA, 25 bp, Homo sapien
tgtgaccctgacctctgtcttactt

SEQ ID NO: 5887037 - DNA, 25 bp, Homo sapien
acctcctgagaatgtggagtggagt

SEQ ID NO: 5887038 - DNA, 25 bp, Homo sapien
atgtttagttccaatcgtcagaaaa

SEQ ID NO: 5887039 - DNA, 25 bp, Homo sapien
cctgaatgtacccccaacatagatg

SEQ ID NO: 5887040 - DNA, 25 bp, Homo sapien
gaagctgacagaagagggaaagtgt

SEQ ID NO: 5887041 - DNA, 25 bp, Homo sapien
gttatgatggttaacggtgatcaca

SEQ ID NO: 5887042 - DNA, 25 bp, Homo sapien
aagatctggaggatcaccgagatga

SEQ ID NO: 5887043 - DNA, 25 bp, Homo sapien
cttcctacatcgtaagtgcaattat

SEQ ID NO: 5887044 - DNA, 25 bp, Homo sapien
cgaaggatacagcctgtgcacatcc

SEQ ID NO: 5887045 - DNA, 25 bp, Homo sapien
gagccgctgaccattgggacagtaa

SEQ ID NO: 5887046 - DNA, 25 bp, Homo sapien
cagcacccccaccattaatgtgctg

SEQ ID NO: 5887047 - DNA, 25 bp, Homo sapien
atgttttaaatatgactgcttccta

SEQ ID NO: 5887048 - DNA, 25 bp, Homo sapien
tttagagtcaaagaatctagcatca

SEQ ID NO: 5887049 - DNA, 25 bp, Homo sapien
ttcgttttgcaaatcattcggtaaa

SEQ ID NO: 5887050 - DNA, 25 bp, Homo sapien
tgcacatcctgacttctgtgagctc

SEQ ID NO: 5887051 - DNA, 25 bp, Homo sapien
caacatagatggaccaaatgctaaa

SEQ ID NO: 5887052 - DNA, 25 bp, Homo sapien
ctttccgggatgccgctgcaaagca

SEQ ID NO: 5887053 - DNA, 25 bp, Homo sapien
cgttttgcaaatcattcggtaaatc

SEQ ID NO: 5887054 - DNA, 25 bp, Homo sapien
tttaaatatgactgcttcctacatc

SEQ ID NO: 5887055 - DNA, 25 bp, Homo sapien
tggcaggctgggggatttttatcaa

SEQ ID NO: 5887056 - DNA, 25 bp, Homo sapien
ctgcacactgcagaaagatacagct

SEQ ID NO: 5887057 - DNA, 25 bp, Homo sapien
tgagacagctcaagaggttcagacg

SEQ ID NO: 5887058 - DNA, 25 bp, Homo sapien
gcaggctgggggatttttatcaaag

SEQ ID NO: 5887059 - DNA, 25 bp, Homo sapien
acaactatcaaccctgtgatcatcc

SEQ ID NO: 5887060 - DNA, 25 bp, Homo sapien
aaccttgtggaccacagtgttacca

SEQ ID NO: 5887061 - DNA, 25 bp, Homo sapien
tcaccgctgagcggataaagacccc

SEQ ID NO: 5887062 - DNA, 25 bp, Homo sapien
ctcctgaatgtacccccaacataga

SEQ ID NO: 5887063 - DNA, 25 bp, Homo sapien
gctgtccgagagtgtgaccctgacc

SEQ ID NO: 5887064 - DNA, 25 bp, Homo sapien
gctgctgctctcaccgctgagcgga

SEQ ID NO: 5887065 - DNA, 25 bp, Homo sapien
ttcagagtgtcaaaaccgctttccg

SEQ ID NO: 5887066 - DNA, 25 bp, Homo sapien
cagcagaattttatggtggaagatg

SEQ ID NO: 5887067 - DNA, 25 bp, Homo sapien
cccaataacagtagcaggcccagca

SEQ ID NO: 5887068 - DNA, 25 bp, Homo sapien
tttctgttcaacttgaacaatgatt

SEQ ID NO: 5887069 - DNA, 25 bp, Homo sapien
ggtcaatataatgatgatgacgatg

SEQ ID NO: 5887070 - DNA, 25 bp, Homo sapien
atgtggatactcctccaaggaaaaa

SEQ ID NO: 5887071 - DNA, 25 bp, Homo sapien
gcatcgaaagagaaatggaaatccc

SEQ ID NO: 5887072 - DNA, 25 bp, Homo sapien
ttagttccaatcgtcagaaaatttt

SEQ ID NO: 5887073 - DNA, 25 bp, Homo sapien
tatgatgggaaagtacacggggata

SEQ ID NO: 5887074 - DNA, 25 bp, Homo sapien
agtacatgcgactgagacagctcaa

SEQ ID NO: 5887075 - DNA, 25 bp, Homo sapien
ccaagagagccatccagactggcga

SEQ ID NO: 5887076 - DNA, 25 bp, Homo sapien
atagatggaccaaatgctaaatctg

SEQ ID NO: 5887077 - DNA, 25 bp, Homo sapien
cattcggtaaatccaaactgctatg

SEQ ID NO: 5887078 - DNA, 25 bp, Homo sapien
tggtgaatgcccttggtcaatataa

SEQ ID NO: 5887079 - DNA, 25 bp, Homo sapien
actgagacagctcaagaggttcaga

SEQ ID NO: 5887080 - DNA, 25 bp, Homo sapien
tttttgaagccatttcctcaatgtt

SEQ ID NO: 5887081 - DNA, 25 bp, Homo sapien
gattacagatacagccaggctgatg

SEQ ID NO: 5887082 - DNA, 25 bp, Homo sapien
cctggctgtccgagagtgtgaccct

SEQ ID NO: 5887083 - DNA, 25 bp, Homo sapien
gaagtaaagagtatgtttagttcca

SEQ ID NO: 5887084 - DNA, 25 bp, Homo sapien
gtgcccttgtgtgatagcacaaaat

SEQ ID NO: 5887085 - DNA, 25 bp, Homo sapien
tgtgagctcattgcgcgggactagg

SEQ ID NO: 5887086 - DNA, 25 bp, Homo sapien
ccccaccattaatgtgctggaatca

SEQ ID NO: 5887087 - DNA, 25 bp, Homo sapien
aaccatgtttacaactatcaaccct

SEQ ID NO: 5887088 - DNA, 25 bp, Homo sapien
acagatacagccaggctgatgccct

SEQ ID NO: 5887089 - DNA, 25 bp, Homo sapien
aatgtgtcctgcaagaactgcagta

SEQ ID NO: 5887090 - DNA, 25 bp, Homo sapien
agatgaaactgttttacataacatt

SEQ ID NO: 5887091 - DNA, 25 bp, Homo sapien
gcagccttgtgacagttcgtgccct

SEQ ID NO: 5887092 - DNA, 25 bp, Homo sapien
gtttagagtcctcattggcacttac

SEQ ID NO: 5887093 - DNA, 25 bp, Homo sapien
gaagggaccagtttgttggcggaag

SEQ ID NO: 5887094 - DNA, 25 bp, Homo sapien
aatgctaaatctgttcagagagagc

SEQ ID NO: 5887095 - DNA, 25 bp, Homo sapien
caagatgaagctgacagaagaggga

SEQ ID NO: 5887096 - DNA, 25 bp, Homo sapien
ggagtgttcggtgaccagtgacttg

SEQ ID NO: 5887097 - DNA, 25 bp, Homo sapien
tccttatatgggagatgaagtttta

SEQ ID NO: 5887098 - DNA, 25 bp, Homo sapien
gtaaatccaaactgctatgcaaaag

SEQ ID NO: 5887099 - DNA, 25 bp, Homo sapien
ctcaatgtttagagtcctcattggc

SEQ ID NO: 5887100 - DNA, 25 bp, Homo sapien
tttttgtggagttggtgaatgccct

SEQ ID NO: 5887101 - DNA, 25 bp, Homo sapien
agctcattgcgcgggactagggagt

SEQ ID NO: 5887102 - DNA, 25 bp, Homo sapien
gtttacaactatcaaccctgtgatc

SEQ ID NO: 5887103 - DNA, 25 bp, Homo sapien
caacaccaagcagtgcccgtgctac

SEQ ID NO: 5887104 - DNA, 25 bp, Homo sapien
atgcagttgcttcagtacccataat

SEQ ID NO: 5887105 - DNA, 25 bp, Homo sapien
ctctaaccatgtttacaactatcaa

SEQ ID NO: 5887106 - DNA, 25 bp, Homo sapien
tcagcggggctccaaaaagcatcta

SEQ ID NO: 5887107 - DNA, 25 bp, Homo sapien
gttttaaatatgactgcttcctaca

SEQ ID NO: 5887108 - DNA, 25 bp, Homo sapien
cggggctccaaaaagcatctattgc

SEQ ID NO: 5887109 - DNA, 25 bp, Homo sapien
catacgcttttctgtaggcgatgtt

SEQ ID NO: 5887110 - DNA, 25 bp, Homo sapien
atgtcggcatcgaaagagaaatgga

SEQ ID NO: 5887111 - DNA, 25 bp, Homo sapien
agctcctctgaagcaaattctcggt

SEQ ID NO: 5887112 - DNA, 25 bp, Homo sapien
gtcagaaaattttggaaagaacgga

SEQ ID NO: 5887113 - DNA, 25 bp, Homo sapien
aattcgttttgcaaatcattcggta

SEQ ID NO: 5887114 - DNA, 25 bp, Homo sapien
catccagactggcgaagagctgttt

SEQ ID NO: 5887115 - DNA, 25 bp, Homo sapien
agatgaagttttagatcaggatggt

SEQ ID NO: 5887116 - DNA, 25 bp, Homo sapien
tgtggagttggtgaatgcccttggt

SEQ ID NO: 5887117 - DNA, 25 bp, Homo sapien
gcctcaatgtttagagtcctcattg

SEQ ID NO: 5887118 - DNA, 25 bp, Homo sapien
atgatggagacgatcctgaagaaag

SEQ ID NO: 5887119 - DNA, 25 bp, Homo sapien
agtttagagtcaaagaatctagcat

SEQ ID NO: 5887120 - DNA, 25 bp, Homo sapien
cgctgaccattgggacagtaaaaat

SEQ ID NO: 5887121 - DNA, 25 bp, Homo sapien
tggcggaagcgtgtaaaatcagagt

SEQ ID NO: 5887122 - DNA, 25 bp, Homo sapien
tggagtggagtggtgcggaagcctc

SEQ ID NO: 5887123 - DNA, 25 bp, Homo sapien
tgttttttgattacagatacagcca

SEQ ID NO: 5887124 - DNA, 25 bp, Homo sapien
gtgacagttcgtgcccttgtgtgat

SEQ ID NO: 5887125 - DNA, 25 bp, Homo sapien
gccatccagactggcgaagagctgt

SEQ ID NO: 5887126 - DNA, 25 bp, Homo sapien
atgcaacccgcaagggtaacaaaat

SEQ ID NO: 5887127 - DNA, 25 bp, Homo sapien
aatgtattcttggtctcccctacag

SEQ ID NO: 5887128 - DNA, 25 bp, Homo sapien
ctcaatgtttccagataagggcaca

SEQ ID NO: 5887129 - DNA, 25 bp, Homo sapien
agccttgtgacagttcgtgcccttg

SEQ ID NO: 5887130 - DNA, 25 bp, Homo sapien
tcctctaaccatgtttacaactatc

SEQ ID NO: 5887131 - DNA, 25 bp, Homo sapien
acttataagcggaagaacacagaaa

SEQ ID NO: 5887132 - DNA, 25 bp, Homo sapien
cccaccaaaacgtccaggaggccgc

SEQ ID NO: 5887133 - DNA, 25 bp, Homo sapien
gcacccccaccattaatgtgctgga

SEQ ID NO: 5887134 - DNA, 25 bp, Homo sapien
cgagagtgtgaccctgacctctgtc

SEQ ID NO: 5887135 - DNA, 25 bp, Homo sapien
gagtttgctgctgctctcaccgctg

SEQ ID NO: 5887136 - DNA, 25 bp, Homo sapien
tgtgctggaatcaaaggatacagac

SEQ ID NO: 5887137 - DNA, 25 bp, Homo sapien
aagggcacagcagaagaactaaagg

SEQ ID NO: 5887138 - DNA, 25 bp, Homo sapien
cgaacagcagctcccaggcgcactt

SEQ ID NO: 5887139 - DNA, 25 bp, Homo sapien
taacattccttatatgggagatgaa

SEQ ID NO: 5887140 - DNA, 25 bp, Homo sapien
ttgcttcagtacccataatgtattc

SEQ ID NO: 5887141 - DNA, 25 bp, Homo sapien
tcaatataatgatgatgacgatgat

SEQ ID NO: 5887142 - DNA, 25 bp, Homo sapien
acaccggttgtgggctgcacactgc

SEQ ID NO: 5887143 - DNA, 25 bp, Homo sapien
gatgatgatggagacgatcctgaag

SEQ ID NO: 5887144 - DNA, 25 bp, Homo sapien
catgtgcagctttctgttcaacttg

SEQ ID NO: 5887145 - DNA, 25 bp, Homo sapien
ttttgtcaatgtagttcagagtgtc

SEQ ID NO: 5887146 - DNA, 25 bp, Homo sapien
atgaagctgacagaagagggaaagt

SEQ ID NO: 5887147 - DNA, 25 bp, Homo sapien
atgcaacacccaacacttataagcg

SEQ ID NO: 5887148 - DNA, 25 bp, Homo sapien
tgctggaatcaaaggatacagacag

SEQ ID NO: 5887149 - DNA, 25 bp, Homo sapien
ttgctgctgctctcaccgctgagcg

SEQ ID NO: 5887150 - DNA, 25 bp, Homo sapien
atttctgtgccattgctaggttaat

SEQ ID NO: 5887151 - DNA, 25 bp, Homo sapien
actcctccaaggaaaaagaagagga

SEQ ID NO: 5887152 - DNA, 25 bp, Homo sapien
ttgcgcgggactagggagtgttcgg

SEQ ID NO: 5887153 - DNA, 25 bp, Homo sapien
aagcaaattctcggtgtcaaacacc

SEQ ID NO: 5887154 - DNA, 25 bp, Homo sapien
gtggaccacagtgttaccagcattt

SEQ ID NO: 5887155 - DNA, 25 bp, Homo sapien
gctaggttaattgggaccaaaacat

SEQ ID NO: 5887156 - DNA, 25 bp, Homo sapien
ggttaattgggaccaaaacatgtag

SEQ ID NO: 5887157 - DNA, 25 bp, Homo sapien
agttgcttcagtacccataatgtat

SEQ ID NO: 5887158 - DNA, 25 bp, Homo sapien
caggcgcacttcctcctgaatgtac

SEQ ID NO: 5887159 - DNA, 25 bp, Homo sapien
gcatctattgctggcaccatctgac

SEQ ID NO: 5887160 - DNA, 25 bp, Homo sapien
tcaaaggatacagacagtgataggg

SEQ ID NO: 5887161 - DNA, 25 bp, Homo sapien
tctgataaaatttttgaagccattt

SEQ ID NO: 5887162 - DNA, 25 bp, Homo sapien
gcttacactcctttcatacgctttt

SEQ ID NO: 5887163 - DNA, 25 bp, Homo sapien
cctgtgatcatccacggcagccttg

SEQ ID NO: 5887164 - DNA, 25 bp, Homo sapien
gtggatactcctccaaggaaaaaga

SEQ ID NO: 5887165 - DNA, 25 bp, Homo sapien
aaacagcgaaggatacagcctgtgc

SEQ ID NO: 5887166 - DNA, 25 bp, Homo sapien
atctgacgtggcaggctgggggatt

SEQ ID NO: 5887167 - DNA, 25 bp, Homo sapien
ctgaggatgtggatactcctccaag

SEQ ID NO: 5887168 - DNA, 25 bp, Homo sapien
ttggtcaatataatgatgatgacga

SEQ ID NO: 5887169 - DNA, 25 bp, Homo sapien
gccattgctaggttaattgggacca

SEQ ID NO: 5887170 - DNA, 25 bp, Homo sapien
atctgttcagagagagcaaagctta

SEQ ID NO: 5887171 - DNA, 25 bp, Homo sapien
tcctcctgaatgtacccccaacata

SEQ ID NO: 5887172 - DNA, 25 bp, Homo sapien
gatacagacagtgatagggaagcag

SEQ ID NO: 5887173 - DNA, 25 bp, Homo sapien
cacccaacacttataagcggaagaa

SEQ ID NO: 5887174 - DNA, 25 bp, Homo sapien
aagcagggactgaaacggggggaga

SEQ ID NO: 5887175 - DNA, 25 bp, Homo sapien
aatttttgaagccatttcctcaatg

SEQ ID NO: 5887176 - DNA, 25 bp, Homo sapien
acatcgtaagtgcaattattctttt

SEQ ID NO: 5887177 - DNA, 25 bp, Homo sapien
acacaagtcatcccattaaagactc

SEQ ID NO: 5887178 - DNA, 25 bp, Homo sapien
aagccatttcctcaatgtttccaga

SEQ ID NO: 5887179 - DNA, 25 bp, Homo sapien
tttacataacattccttatatggga

SEQ ID NO: 5887180 - DNA, 25 bp, Homo sapien
cgcacttcctcctgaatgtaccccc

SEQ ID NO: 5887181 - DNA, 25 bp, Homo sapien
caggatggtactttcattgaagaac

SEQ ID NO: 5887182 - DNA, 25 bp, Homo sapien
tgaaaaaggacggctcctctaacca

SEQ ID NO: 5887183 - DNA, 25 bp, Homo sapien
tgataaaatttttgaagccatttcc

SEQ ID NO: 5887184 - DNA, 25 bp, Homo sapien
gccctgaagtatgtcggcatcgaaa

SEQ ID NO: 5887185 - DNA, 25 bp, Homo sapien
ttgttggcggaagcgtgtaaaatca

SEQ ID NO: 5887186 - DNA, 25 bp, Homo sapien
gcccttgtgtgatagcacaaaattt

SEQ ID NO: 5887187 - DNA, 25 bp, Homo sapien
tcatgcaacacccaacacttataag

SEQ ID NO: 5887188 - DNA, 25 bp, Homo sapien
ggcccagcacccccaccattaatgt

SEQ ID NO: 5887189 - DNA, 25 bp, Homo sapien
tggaagatgaaactgttttacataa

SEQ ID NO: 5887190 - DNA, 25 bp, Homo sapien
ttttgtgaaaagttttgtcaatgta

SEQ ID NO: 5887191 - DNA, 25 bp, Homo sapien
aagatacagctgaaaaaggacggct

SEQ ID NO: 5887192 - DNA, 25 bp, Homo sapien
gaatgcagttgcttcagtacccata

SEQ ID NO: 5887193 - DNA, 25 bp, Homo sapien
tgggagatgaagttttagatcagga

SEQ ID NO: 5887194 - DNA, 25 bp, Homo sapien
gcagaattttatggtggaagatgaa

SEQ ID NO: 5887195 - DNA, 25 bp, Homo sapien
cttaaaccaagaatggaaacagcga

SEQ ID NO: 5887196 - DNA, 25 bp, Homo sapien
ggatgcaacccgcaagggtaacaaa

SEQ ID NO: 5887197 - DNA, 25 bp, Homo sapien
ggctgcacactgcagaaagatacag

SEQ ID NO: 5887198 - DNA, 25 bp, Homo sapien
agctccagctcccgctgaggatgtg

SEQ ID NO: 5887199 - DNA, 25 bp, Homo sapien
ttatttctcaagatgaagctgacag

SEQ ID NO: 5887200 - DNA, 25 bp, Homo sapien
gcagctcccaggcgcacttcctcct

SEQ ID NO: 5887201 - DNA, 25 bp, Homo sapien
gcgtgtaaaatcagagtacatgcga

SEQ ID NO: 5887202 - DNA, 25 bp, Homo sapien
aaaaaattatgatgggaaagtacac

SEQ ID NO: 5887203 - DNA, 25 bp, Homo sapien
ttgcaaatcattcggtaaatccaaa

SEQ ID NO: 5887204 - DNA, 25 bp, Homo sapien
tgatgccctgaagtatgtcggcatc

SEQ ID NO: 5887205 - DNA, 25 bp, Homo sapien
atcttaaaccaagaatggaaacagc

SEQ ID NO: 5887206 - DNA, 25 bp, Homo sapien
atgatgatgatggagacgatcctga

SEQ ID NO: 5887207 - DNA, 25 bp, Homo sapien
tagagtcaaagaatctagcatcata

SEQ ID NO: 5887208 - DNA, 25 bp, Homo sapien
gctttctgttcaacttgaacaatga

SEQ ID NO: 5887209 - DNA, 25 bp, Homo sapien
gcaaatcattcggtaaatccaaact

SEQ ID NO: 5887210 - DNA, 25 bp, Homo sapien
agaaacagctctagacaacaaacct

SEQ ID NO: 5887211 - DNA, 25 bp, Homo sapien
aagagagccatccagactggcgaag

SEQ ID NO: 5887212 - DNA, 25 bp, Homo sapien
tttttgccaagagagccatccagac

SEQ ID NO: 5887213 - DNA, 25 bp, Homo sapien
aaatccaaactgctatgcaaaagtt

SEQ ID NO: 5887214 - DNA, 25 bp, Homo sapien
tttgccaagagagccatccagactg

SEQ ID NO: 5887215 - DNA, 25 bp, Homo sapien
atgaagtaaagagtatgtttagttc

SEQ ID NO: 5887216 - DNA, 25 bp, Homo sapien
gttcagagagagcaaagcttacact

SEQ ID NO: 5887217 - DNA, 25 bp, Homo sapien
cgatgatgatgatggagacgatcct

SEQ ID NO: 5887218 - DNA, 25 bp, Homo sapien
tctcggtgtcaaacaccaataaaga

SEQ ID NO: 5887219 - DNA, 25 bp, Homo sapien
gaccccaccaaaacgtccaggaggc

SEQ ID NO: 5887220 - DNA, 25 bp, Homo sapien
aaatgaattcatctcagaatactgt

SEQ ID NO: 5887221 - DNA, 25 bp, Homo sapien
tcacaggataggtatttttgccaag

SEQ ID NO: 5887222 - DNA, 25 bp, Homo sapien
ctatgcaaaagttatgatggttaac

SEQ ID NO: 5887223 - DNA, 25 bp, Homo sapien
cttctgataaaatttttgaagccat

SEQ ID NO: 5887224 - DNA, 25 bp, Homo sapien
gctgaaaaaggacggctcctctaac

SEQ ID NO: 5887225 - DNA, 25 bp, Homo sapien
tcctcattggcacttactatgacaa

SEQ ID NO: 5887226 - DNA, 25 bp, Homo sapien
cagtattcagcggggctccaaaaag

SEQ ID NO: 5887227 - DNA, 25 bp, Homo sapien
ccttgtggaccacagtgttaccagc

SEQ ID NO: 5887228 - DNA, 25 bp, Homo sapien
caggaggccgcagaagaggacggct

SEQ ID NO: 5887229 - DNA, 25 bp, Homo sapien
atggtggaagatgaaactgttttac

SEQ ID NO: 5887230 - DNA, 25 bp, Homo sapien
gagagattatttctcaagatgaagc

SEQ ID NO: 5887231 - DNA, 25 bp, Homo sapien
gagtggagtggtgcggaagcctcaa

SEQ ID NO: 5887232 - DNA, 25 bp, Homo sapien
attatgatgggaaagtacacgggga

SEQ ID NO: 5887233 - DNA, 25 bp, Homo sapien
cgtggcaggctgggggatttttatc

SEQ ID NO: 5887234 - DNA, 25 bp, Homo sapien
ggaatcaaaggatacagacagtgat

SEQ ID NO: 5887235 - DNA, 25 bp, Homo sapien
tgggacagtaaaaatgtgtcctgca

SEQ ID NO: 5887236 - DNA, 25 bp, Homo sapien
ctcctctgaagcaaattctcggtgt

SEQ ID NO: 5887237 - DNA, 25 bp, Homo sapien
catcctgacttctgtgagctcattg

SEQ ID NO: 5887238 - DNA, 25 bp, Homo sapien
ctcccaggcgcacttcctcctgaat

SEQ ID NO: 5887239 - DNA, 25 bp, Homo sapien
atctgagaagggaccagtttgttgg

SEQ ID NO: 5887240 - DNA, 25 bp, Homo sapien
ctcaagatgaagctgacagaagagg

SEQ ID NO: 5887241 - DNA, 25 bp, Homo sapien
acaccaataaagatgaagccaaata

SEQ ID NO: 5887242 - DNA, 25 bp, Homo sapien
gatgataaagaaagccgcccacctc

SEQ ID NO: 5887243 - DNA, 25 bp, Homo sapien
aaaagttatgatggttaacggtgat

SEQ ID NO: 5887244 - DNA, 25 bp, Homo sapien
tatgactgcttcctacatcgtaagt

SEQ ID NO: 5887245 - DNA, 25 bp, Homo sapien
gggcacagcagaagaactaaaggaa

SEQ ID NO: 5887246 - DNA, 25 bp, Homo sapien
caaagatcctgtgcagaaaaatgaa

SEQ ID NO: 5887247 - DNA, 25 bp, Homo sapien
gttcagacgagctgatgaagtaaag

SEQ ID NO: 5887248 - DNA, 25 bp, Homo sapien
tttggagggagcaaaggagtttgct

SEQ ID NO: 5887249 - DNA, 25 bp, Homo sapien
gtcaaagaatctagcatcatagctc

SEQ ID NO: 5887250 - DNA, 25 bp, Homo sapien
tgagtttagagtcaaagaatctagc

SEQ ID NO: 5887251 - DNA, 25 bp, Homo sapien
agagtacatgcgactgagacagctc

SEQ ID NO: 5887252 - DNA, 25 bp, Homo sapien
taaaccaagaatggaaacagcgaag

SEQ ID NO: 5887253 - DNA, 25 bp, Homo sapien
agcggggctccaaaaagcatctatt

SEQ ID NO: 5887254 - DNA, 25 bp, Homo sapien
cagaatactgtggagagattatttc

SEQ ID NO: 5887255 - DNA, 25 bp, Homo sapien
attaaagactctgaatgcagttgct

SEQ ID NO: 5887256 - DNA, 25 bp, Homo sapien
tgtgcacatcctgacttctgtgagc

SEQ ID NO: 5887257 - DNA, 25 bp, Homo sapien
aggccgcagaagaggacggcttccc

SEQ ID NO: 5887258 - DNA, 25 bp, Homo sapien
gaatctagcatcatagctccagctc

SEQ ID NO: 5887259 - DNA, 25 bp, Homo sapien
gcacagcagaagaactaaaggaaaa

SEQ ID NO: 5887260 - DNA, 25 bp, Homo sapien
cccaacacttataagcggaagaaca

SEQ ID NO: 5887261 - DNA, 25 bp, Homo sapien
aactgttttacataacattccttat

SEQ ID NO: 5887262 - DNA, 25 bp, Homo sapien
ctttcatacgcttttctgtaggcga

SEQ ID NO: 5887263 - DNA, 25 bp, Homo sapien
gaaatttttgtggagttggtgaatg

SEQ ID NO: 5887264 - DNA, 25 bp, Homo sapien
ttgtggaccacagtgttaccagcat

SEQ ID NO: 5887265 - DNA, 25 bp, Homo sapien
cgactgagacagctcaagaggttca

SEQ ID NO: 5887266 - DNA, 25 bp, Homo sapien
gcttcagtacccataatgtattctt

SEQ ID NO: 5887267 - DNA, 25 bp, Homo sapien
gtgatagggaagcagggactgaaac

SEQ ID NO: 5887268 - DNA, 25 bp, Homo sapien
atgaagttttagatcaggatggtac

SEQ ID NO: 5887269 - DNA, 25 bp, Homo sapien
cattggcacttactatgacaatttc

SEQ ID NO: 5887270 - DNA, 25 bp, Homo sapien
ctgtcttacttgtggagccgctgac

SEQ ID NO: 5887271 - DNA, 25 bp, Homo sapien
tggtggatgcaacccgcaagggtaa

SEQ ID NO: 5887272 - DNA, 25 bp, Homo sapien
gggactagggagtgttcggtgacca

SEQ ID NO: 5887273 - DNA, 25 bp, Homo sapien
agcaggcccagcacccccaccatta

SEQ ID NO: 5887274 - DNA, 25 bp, Homo sapien
gttggtgaatgcccttggtcaatat

SEQ ID NO: 5887275 - DNA, 25 bp, Homo sapien
tgcttcctacatcgtaagtgcaatt

SEQ ID NO: 5887276 - DNA, 25 bp, Homo sapien
gctgatgccctgaagtatgtcggca

SEQ ID NO: 5887277 - DNA, 25 bp, Homo sapien
agagagagcaaagcttacactcctt

SEQ ID NO: 5887278 - DNA, 25 bp, Homo sapien
tggctgtccgagagtgtgaccctga

SEQ ID NO: 5887279 - DNA, 25 bp, Homo sapien
aaaattatgatgggaaagtacacgg

SEQ ID NO: 5887280 - DNA, 25 bp, Homo sapien
cattgctaggttaattgggaccaaa

SEQ ID NO: 5887281 - DNA, 25 bp, Homo sapien
acagctctagacaacaaaccttgtg

SEQ ID NO: 5887282 - DNA, 25 bp, Homo sapien
gtcatcccattaaagactctgaatg

SEQ ID NO: 5887283 - DNA, 25 bp, Homo sapien
tccaaaaagcatctattgctggcac

SEQ ID NO: 5887284 - DNA, 25 bp, Homo sapien
attctcggtgtcaaacaccaataaa

SEQ ID NO: 5887285 - DNA, 25 bp, Homo sapien
ggaagcgtgtaaaatcagagtacat

SEQ ID NO: 5887286 - DNA, 25 bp, Homo sapien
tttgtggagttggtgaatgcccttg

SEQ ID NO: 5887287 - DNA, 25 bp, Homo sapien
caatgtttagagtcctcattggcac

SEQ ID NO: 5887288 - DNA, 25 bp, Homo sapien
cagagtgtcaaaaccgctttccggg

SEQ ID NO: 5887289 - DNA, 25 bp, Homo sapien
ctgagcggataaagaccccaccaaa

SEQ ID NO: 5887290 - DNA, 25 bp, Homo sapien
ggaaacagcgaaggatacagcctgt

SEQ ID NO: 5887291 - DNA, 25 bp, Homo sapien
tgtggagtggagtggtgcggaagcc

SEQ ID NO: 5887292 - DNA, 25 bp, Homo sapien
ttttatggtggaagatgaaactgtt

SEQ ID NO: 5887293 - DNA, 25 bp, Homo sapien
gaattcatctcagaatactgtggag

SEQ ID NO: 5887294 - DNA, 25 bp, Homo sapien
tggagccgctgaccattgggacagt

SEQ ID NO: 5887295 - DNA, 25 bp, Homo sapien
gcaaaggagtttgctgctgctctca

SEQ ID NO: 5887296 - DNA, 25 bp, Homo sapien
tagagaatgtgggtttataaatgat

SEQ ID NO: 5887297 - DNA, 25 bp, Homo sapien
gttcgtgcccttgtgtgatagcaca

SEQ ID NO: 5887298 - DNA, 25 bp, Homo sapien
cttggtctcccctacagcagaattt

SEQ ID NO: 5887299 - DNA, 25 bp, Homo sapien
agctcaagaggttcagacgagctga

SEQ ID NO: 5887300 - DNA, 25 bp, Homo sapien
gaccaaaacatgtagacaggtgtat

SEQ ID NO: 5887301 - DNA, 25 bp, Homo sapien
ccaatcgtcagaaaattttggaaag

SEQ ID NO: 5887302 - DNA, 25 bp, Homo sapien
aaagcagaaagatctggaggatcac

SEQ ID NO: 5887303 - DNA, 25 bp, Homo sapien
cttacttgtggagccgctgaccatt

SEQ ID NO: 5887304 - DNA, 25 bp, Homo sapien
ggatttttatcaaagatcctgtgca

SEQ ID NO: 5887305 - DNA, 25 bp, Homo sapien
gatagagaatgtgggtttataaatg

SEQ ID NO: 5887306 - DNA, 25 bp, Homo sapien
gtgaccagtgacttggattttccaa

SEQ ID NO: 5887307 - DNA, 25 bp, Homo sapien
gcccttggtcaatataatgatgatg

SEQ ID NO: 5887308 - DNA, 25 bp, Homo sapien
ctagcatcatagctccagctcccgc

SEQ ID NO: 5887309 - DNA, 25 bp, Homo sapien
tccaggaggccgcagaagaggacgg

SEQ ID NO: 5887310 - DNA, 25 bp, Homo sapien
tcgtcagaaaattttggaaagaacg

SEQ ID NO: 5887311 - DNA, 25 bp, Homo sapien
gaagaggacggcttcccaataacag

SEQ ID NO: 5887312 - DNA, 25 bp, Homo sapien
gaggaaacaccggttgtgggctgca

SEQ ID NO: 5887313 - DNA, 25 bp, Homo sapien
agggagtgttcggtgaccagtgact

SEQ ID NO: 5887314 - DNA, 25 bp, Homo sapien
tgactgcttcctacatcgtaagtgc

SEQ ID NO: 5887315 - DNA, 25 bp, Homo sapien
gacaatttctgtgccattgctaggt

SEQ ID NO: 5887316 - DNA, 25 bp, Homo sapien
catcccattaaagactctgaatgca

SEQ ID NO: 5887317 - DNA, 25 bp, Homo sapien
ctcccctacagcagaattttatggt

SEQ ID NO: 5887318 - DNA, 25 bp, Homo sapien
acccataatgtattcttggtctccc

SEQ ID NO: 5887319 - DNA, 25 bp, Homo sapien
ttacaactatcaaccctgtgatcat

SEQ ID NO: 5887320 - DNA, 25 bp, Homo sapien
tgctaaatctgttcagagagagcaa

SEQ ID NO: 5887321 - DNA, 25 bp, Homo sapien
tggaggatcaccgagatgataaaga

SEQ ID NO: 5887322 - DNA, 25 bp, Homo sapien
atcaccgagatgataaagaaagccg

SEQ ID NO: 5887323 - DNA, 25 bp, Homo sapien
ggattttccaacacaagtcatccca

SEQ ID NO: 5887324 - DNA, 25 bp, Homo sapien
tgatgatggagacgatcctgaagaa

SEQ ID NO: 5887325 - DNA, 25 bp, Homo sapien
gcaagggtaacaaaattcgttttgc

SEQ ID NO: 5887326 - DNA, 25 bp, Homo sapien
gtaaaatcagagtacatgcgactga

SEQ ID NO: 5887327 - DNA, 25 bp, Homo sapien
accagtttgttggcggaagcgtgta

SEQ ID NO: 5887328 - DNA, 25 bp, Homo sapien
taggcgatgttttaaatatgactgc

SEQ ID NO: 5887329 - DNA, 25 bp, Homo sapien
caataacagtagcaggcccagcacc

SEQ ID NO: 5887330 - DNA, 25 bp, Homo sapien
aaatcttaaaccaagaatggaaaca

SEQ ID NO: 5887331 - DNA, 25 bp, Homo sapien
tggaaagaacggaaatcttaaacca

SEQ ID NO: 5887332 - DNA, 25 bp, Homo sapien
aagtcatcccattaaagactctgaa

SEQ ID NO: 5887333 - DNA, 25 bp, Homo sapien
cttgtggagccgctgaccattggga

SEQ ID NO: 5887334 - DNA, 25 bp, Homo sapien
ttccgggatgccgctgcaaagcaca

SEQ ID NO: 5887335 - DNA, 25 bp, Homo sapien
ccatctgacgtggcaggctggggga

SEQ ID NO: 5887336 - DNA, 25 bp, Homo sapien
aagagtatgtttagttccaatcgtc

SEQ ID NO: 5887337 - DNA, 25 bp, Homo sapien
gacagaagagggaaagtgtatgata

SEQ ID NO: 5887338 - DNA, 25 bp, Homo sapien
gagccatccagactggcgaagagct

SEQ ID NO: 5887339 - DNA, 25 bp, Homo sapien
ctcattgcgcgggactagggagtgt

SEQ ID NO: 5887340 - DNA, 25 bp, Homo sapien
gtcaatgtagttcagagtgtcaaaa

SEQ ID NO: 5887341 - DNA, 25 bp, Homo sapien
atcaaccctgtgatcatccacggca

SEQ ID NO: 5887342 - DNA, 25 bp, Homo sapien
gagctgttttttgattacagataca

SEQ ID NO: 5887343 - DNA, 25 bp, Homo sapien
agctcccgctgaggatgtggatact

SEQ ID NO: 5887344 - DNA, 25 bp, Homo sapien
tgcagtattcagcggggctccaaaa

SEQ ID NO: 5887345 - DNA, 25 bp, Homo sapien
gtgaaaagttttgtcaatgtagttc

SEQ ID NO: 5887346 - DNA, 25 bp, Homo sapien
tgataaagaaagccgcccacctcgg

SEQ ID NO: 5887347 - DNA, 25 bp, Homo sapien
agacagctcaagaggttcagacgag

SEQ ID NO: 5887348 - DNA, 25 bp, Homo sapien
agcagtgcccgtgctacctggctgt

SEQ ID NO: 5887349 - DNA, 25 bp, Homo sapien
gtatgtcggcatcgaaagagaaatg

SEQ ID NO: 5887350 - DNA, 25 bp, Homo sapien
tcctgacttctgtgagctcattgcg

SEQ ID NO: 5887351 - DNA, 25 bp, Homo sapien
tccaacacaagtcatcccattaaag

SEQ ID NO: 5887352 - DNA, 25 bp, Homo sapien
cgtccaggaggccgcagaagaggac

SEQ ID NO: 5887353 - DNA, 25 bp, Homo sapien
taggtatttttgccaagagagccat

SEQ ID NO: 5887354 - DNA, 25 bp, Homo sapien
ggtactttcattgaagaactaataa

SEQ ID NO: 5887355 - DNA, 25 bp, Homo sapien
cttctgtgagctcattgcgcgggac

SEQ ID NO: 5887356 - DNA, 25 bp, Homo sapien
tcatctcagaatactgtggagagat

SEQ ID NO: 5887357 - DNA, 25 bp, Homo sapien
acacagaaacagctctagacaacaa

SEQ ID NO: 5887358 - DNA, 25 bp, Homo sapien
aaatctgagaagggaccagtttgtt

SEQ ID NO: 5887359 - DNA, 25 bp, Homo sapien
agaaatctgagaagggaccagtttg

SEQ ID NO: 5887360 - DNA, 25 bp, Homo sapien
tataatgatgatgacgatgatgatg

SEQ ID NO: 5887361 - DNA, 25 bp, Homo sapien
gtcttacttgtggagccgctgacca

SEQ ID NO: 5887362 - DNA, 25 bp, Homo sapien
cacctcggaaatttccttctgataa

SEQ ID NO: 5887363 - DNA, 25 bp, Homo sapien
gagcaaaggagtttgctgctgctct

SEQ ID NO: 5887364 - DNA, 25 bp, Homo sapien
ctggcaccatctgacgtggcaggct

SEQ ID NO: 5887365 - DNA, 25 bp, Homo sapien
gcacagtgcaacaccaagcagtgcc

SEQ ID NO: 5887366 - DNA, 25 bp, Homo sapien
aaaatttttgaagccatttcctcaa

SEQ ID NO: 5887367 - DNA, 25 bp, Homo sapien
acaccaagcagtgcccgtgctacct

SEQ ID NO: 5887368 - DNA, 25 bp, Homo sapien
atactgtggagagattatttctcaa

SEQ ID NO: 5887369 - DNA, 25 bp, Homo sapien
gagagccatccagactggcgaagag

SEQ ID NO: 5887370 - DNA, 25 bp, Homo sapien
cagtacccataatgtattcttggtc

SEQ ID NO: 5887371 - DNA, 25 bp, Homo sapien
tccttctgataaaatttttgaagcc

SEQ ID NO: 5887372 - DNA, 25 bp, Homo sapien
gctctcaccgctgagcggataaaga

SEQ ID NO: 5887373 - DNA, 25 bp, Homo sapien
tccacggcagccttgtgacagttcg

SEQ ID NO: 5887374 - DNA, 25 bp, Homo sapien
aaaccgctttccgggatgccgctgc

SEQ ID NO: 5887375 - DNA, 25 bp, Homo sapien
gtgtgatagcacaaaatttttgtga

SEQ ID NO: 5887376 - DNA, 25 bp, Homo sapien
attgggacagtaaaaatgtgtcctg

SEQ ID NO: 5887377 - DNA, 25 bp, Homo sapien
gtgtcaaaaccgctttccgggatgc

SEQ ID NO: 5887378 - DNA, 25 bp, Homo sapien
tgggctgcacactgcagaaagatac

SEQ ID NO: 5887379 - DNA, 25 bp, Homo sapien
ttcggtgaccagtgacttggatttt

SEQ ID NO: 5887380 - DNA, 25 bp, Homo sapien
taatgatgatgacgatgatgatgat

SEQ ID NO: 5887381 - DNA, 25 bp, Homo sapien
tggagggagcaaaggagtttgctgc

SEQ ID NO: 5887382 - DNA, 25 bp, Homo sapien
tttccttctgataaaatttttgaag

SEQ ID NO: 5887383 - DNA, 25 bp, Homo sapien
ctgcaagaactgcagtattcagcgg

SEQ ID NO: 5887384 - DNA, 25 bp, Homo sapien
aacatgtagacaggtgtatgagttt

SEQ ID NO: 5887385 - DNA, 25 bp, Homo sapien
caatgtagttcagagtgtcaaaacc

SEQ ID NO: 5887386 - DNA, 25 bp, Homo sapien
cccaacatagatggaccaaatgcta

SEQ ID NO: 5887387 - DNA, 25 bp, Homo sapien
gagtgtcaaaaccgctttccgggat

SEQ ID NO: 5887388 - DNA, 25 bp, Homo sapien
aggaaaaatataaagaactcaccga

SEQ ID NO: 5887389 - DNA, 25 bp, Homo sapien
ttggattttccaacacaagtcatcc

SEQ ID NO: 5887390 - DNA, 25 bp, Homo sapien
accgctgagcggataaagaccccac

SEQ ID NO: 5887391 - DNA, 25 bp, Homo sapien
cagctttctgttcaacttgaacaat

SEQ ID NO: 5887392 - DNA, 25 bp, Homo sapien
taaatatgactgcttcctacatcgt

SEQ ID NO: 5887393 - DNA, 25 bp, Homo sapien
gtgaatgcccttggtcaatataatg

SEQ ID NO: 5887394 - DNA, 25 bp, Homo sapien
gacgtggcaggctgggggattttta

SEQ ID NO: 5887395 - DNA, 25 bp, Homo sapien
aaatcattcggtaaatccaaactgc

SEQ ID NO: 5887396 - DNA, 25 bp, Homo sapien
ccagcatttggagggagcaaaggag

SEQ ID NO: 5887397 - DNA, 25 bp, Homo sapien
ctgtgcagaaaaatgaattcatctc

SEQ ID NO: 5887398 - DNA, 25 bp, Homo sapien
agaggttcagacgagctgatgaagt

SEQ ID NO: 5887399 - DNA, 25 bp, Homo sapien
ggacagtaaaaatgtgtcctgcaag

SEQ ID NO: 5887400 - DNA, 25 bp, Homo sapien
tgctgtaggggagaccaagaataca

SEQ ID NO: 5887401 - DNA, 25 bp, Homo sapien
tcgtctccatcatcatcatcgtcat

SEQ ID NO: 5887402 - DNA, 25 bp, Homo sapien
tagcatttggtccatctatgttggg

SEQ ID NO: 5887403 - DNA, 25 bp, Homo sapien
ccatcatcatcatcgtcatcatcat

SEQ ID NO: 5887404 - DNA, 25 bp, Homo sapien
ccaacaaactggtcccttctcagat

SEQ ID NO: 5887405 - DNA, 25 bp, Homo sapien
gacgattggaactaaacatactctt

SEQ ID NO: 5887406 - DNA, 25 bp, Homo sapien
ggtgggcggctttctttatcatctc

SEQ ID NO: 5887407 - DNA, 25 bp, Homo sapien
accgagaatttgcttcagaggagct

SEQ ID NO: 5887408 - DNA, 25 bp, Homo sapien
ctctaaactcatacacctgtctaca

SEQ ID NO: 5887409 - DNA, 25 bp, Homo sapien
ttcttccgcttataagtgttgggtg

SEQ ID NO: 5887410 - DNA, 25 bp, Homo sapien
atcacacaagggcacgaactgtcac

SEQ ID NO: 5887411 - DNA, 25 bp, Homo sapien
ctttgataaaaatcccccagcctgc

SEQ ID NO: 5887412 - DNA, 25 bp, Homo sapien
cgcaccactccactccacattctca

SEQ ID NO: 5887413 - DNA, 25 bp, Homo sapien
cccgcgcaatgagctcacagaagtc

SEQ ID NO: 5887414 - DNA, 25 bp, Homo sapien
tgtgatcaccgttaaccatcataac

SEQ ID NO: 5887415 - DNA, 25 bp, Homo sapien
tgttgggtgttgcatgaaaagaata

SEQ ID NO: 5887416 - DNA, 25 bp, Homo sapien
actccctagtcccgcgcaatgagct

SEQ ID NO: 5887417 - DNA, 25 bp, Homo sapien
gaaagcggttttgacactctgaact

SEQ ID NO: 5887418 - DNA, 25 bp, Homo sapien
acactctcggacagccaggtagcac

SEQ ID NO: 5887419 - DNA, 25 bp, Homo sapien
gctagattctttgactctaaactca

SEQ ID NO: 5887420 - DNA, 25 bp, Homo sapien
agcctgccacgtcagatggtgccag

SEQ ID NO: 5887421 - DNA, 25 bp, Homo sapien
agcagcagcaaactcctttgctccc

SEQ ID NO: 5887422 - DNA, 25 bp, Homo sapien
gaccaagaatacattatgggtactg

SEQ ID NO: 5887423 - DNA, 25 bp, Homo sapien
ttgcactgtgctttgcagcggcatc

SEQ ID NO: 5887424 - DNA, 25 bp, Homo sapien
tatccgctcagcggtgagagcagca

SEQ ID NO: 5887425 - DNA, 25 bp, Homo sapien
gggagctggagctatgatgctagat

SEQ ID NO: 5887426 - DNA, 25 bp, Homo sapien
ccacaagtaagacagaggtcagggt

SEQ ID NO: 5887427 - DNA, 25 bp, Homo sapien
tctcagtcgcatgtactctgatttt

SEQ ID NO: 5887428 - DNA, 25 bp, Homo sapien
cgagaatttgcttcagaggagctcg

SEQ ID NO: 5887429 - DNA, 25 bp, Homo sapien
aaatacctatcctgtgatcaccgtt

SEQ ID NO: 5887430 - DNA, 25 bp, Homo sapien
taaaaatcccccagcctgccacgtc

SEQ ID NO: 5887431 - DNA, 25 bp, Homo sapien
cccaattaacctagcaatggcacag

SEQ ID NO: 5887432 - DNA, 25 bp, Homo sapien
attcaggaggaagtgcgcctgggag

SEQ ID NO: 5887433 - DNA, 25 bp, Homo sapien
gggtacattcaggaggaagtgcgcc

SEQ ID NO: 5887434 - DNA, 25 bp, Homo sapien
gctgccgtggatgatcacagggttg

SEQ ID NO: 5887435 - DNA, 25 bp, Homo sapien
gatgccgacatacttcagggcatca

SEQ ID NO: 5887436 - DNA, 25 bp, Homo sapien
gggttgcatccaccacaaaatcatt

SEQ ID NO: 5887437 - DNA, 25 bp, Homo sapien
taacctagcaatggcacagaaattg

SEQ ID NO: 5887438 - DNA, 25 bp, Homo sapien
actctaaacattgaggcttccgcac

SEQ ID NO: 5887439 - DNA, 25 bp, Homo sapien
atacacctgtctacatgttttggtc

SEQ ID NO: 5887440 - DNA, 25 bp, Homo sapien
cagcaatagatgctttttggagccc

SEQ ID NO: 5887441 - DNA, 25 bp, Homo sapien
acgatgtaggaagcagtcatattta

SEQ ID NO: 5887442 - DNA, 25 bp, Homo sapien
tgcacaggatctttgataaaaatcc

SEQ ID NO: 5887443 - DNA, 25 bp, Homo sapien
ttactgtcccaatggtcagcggctc

SEQ ID NO: 5887444 - DNA, 25 bp, Homo sapien
accaagggcattcaccaactccaca

SEQ ID NO: 5887445 - DNA, 25 bp, Homo sapien
gaggcttccgcaccactccactcca

SEQ ID NO: 5887446 - DNA, 25 bp, Homo sapien
tggctgtatctgtaatcaaaaaaca

SEQ ID NO: 5887447 - DNA, 25 bp, Homo sapien
tttgacaccgagaatttgcttcaga

SEQ ID NO: 5887448 - DNA, 25 bp, Homo sapien
cacaaggctgccgtggatgatcaca

SEQ ID NO: 5887449 - DNA, 25 bp, Homo sapien
tagtcccgcgcaatgagctcacaga

SEQ ID NO: 5887450 - DNA, 25 bp, Homo sapien
aacactgtggtccacaaggtttgtt

SEQ ID NO: 5887451 - DNA, 25 bp, Homo sapien
ttatcattgttctctccccccgttt

SEQ ID NO: 5887452 - DNA, 25 bp, Homo sapien
aataatctctccacagtattctgag

SEQ ID NO: 5887453 - DNA, 25 bp, Homo sapien
aatggtcagcggctccacaagtaag

SEQ ID NO: 5887454 - DNA, 25 bp, Homo sapien
gcagcaaactcctttgctccctcca

SEQ ID NO: 5887455 - DNA, 25 bp, Homo sapien
ttcaccaactccacaaaaatttcat

SEQ ID NO: 5887456 - DNA, 25 bp, Homo sapien
tggacgttttggtggggtctttatc

SEQ ID NO: 5887457 - DNA, 25 bp, Homo sapien
gctcgaagtttcatctttcttctct

SEQ ID NO: 5887458 - DNA, 25 bp, Homo sapien
tcgccagtctggatggctctcttgg

SEQ ID NO: 5887459 - DNA, 25 bp, Homo sapien
gtttcagtccctgcttccctatcac

SEQ ID NO: 5887460 - DNA, 25 bp, Homo sapien
taagctttgctctctctgaacagat

SEQ ID NO: 5887461 - DNA, 25 bp, Homo sapien
ctctttcttcaggatcgtctccatc

SEQ ID NO: 5887462 - DNA, 25 bp, Homo sapien
gtgcgcctgggagctgctgttcggt

SEQ ID NO: 5887463 - DNA, 25 bp, Homo sapien
ccgaacactccctagtcccgcgcaa

SEQ ID NO: 5887464 - DNA, 25 bp, Homo sapien
caagggcattcaccaactccacaaa

SEQ ID NO: 5887465 - DNA, 25 bp, Homo sapien
ctgtggtccacaaggtttgttgtct

SEQ ID NO: 5887466 - DNA, 25 bp, Homo sapien
actcatacacctgtctacatgtttt

SEQ ID NO: 5887467 - DNA, 25 bp, Homo sapien
tccattcttggtttaagatttccgt

SEQ ID NO: 5887468 - DNA, 25 bp, Homo sapien
caatgaaagtaccatcctgatctaa

SEQ ID NO: 5887469 - DNA, 25 bp, Homo sapien
acacctgtctacatgttttggtccc

SEQ ID NO: 5887470 - DNA, 25 bp, Homo sapien
atggtgggggtgctgggcctgctac

SEQ ID NO: 5887471 - DNA, 25 bp, Homo sapien
cagcgggagctggagctatgatgct

SEQ ID NO: 5887472 - DNA, 25 bp, Homo sapien
gaacagaaagctgcacatgtattta

SEQ ID NO: 5887473 - DNA, 25 bp, Homo sapien
tccaccacaaaatcattgttcaagt

SEQ ID NO: 5887474 - DNA, 25 bp, Homo sapien
ttgctctctctgaacagatttagca

SEQ ID NO: 5887475 - DNA, 25 bp, Homo sapien
gtggggtctttatccgctcagcggt

SEQ ID NO: 5887476 - DNA, 25 bp, Homo sapien
gatctaaaacttcatctcccatata

SEQ ID NO: 5887477 - DNA, 25 bp, Homo sapien
ctgtctacatgttttggtcccaatt

SEQ ID NO: 5887478 - DNA, 25 bp, Homo sapien
ggggtgctgggcctgctactgttat

SEQ ID NO: 5887479 - DNA, 25 bp, Homo sapien
aacatggttagaggagccgtccttt

SEQ ID NO: 5887480 - DNA, 25 bp, Homo sapien
gcctgctactgttattgggaagccg

SEQ ID NO: 5887481 - DNA, 25 bp, Homo sapien
ttcatctcccatataaggaatgtta

SEQ ID NO: 5887482 - DNA, 25 bp, Homo sapien
gctgctgttcggtgagttctttata

SEQ ID NO: 5887483 - DNA, 25 bp, Homo sapien
tttctctttcgatgccgacatactt

SEQ ID NO: 5887484 - DNA, 25 bp, Homo sapien
tcggacagccaggtagcacgggcac

SEQ ID NO: 5887485 - DNA, 25 bp, Homo sapien
cttttcttctctttcttcaggatcg

SEQ ID NO: 5887486 - DNA, 25 bp, Homo sapien
aaaagcgtatgaaaggagtgtaagc

SEQ ID NO: 5887487 - DNA, 25 bp, Homo sapien
ttgcagcggcatcccggaaagcggt

SEQ ID NO: 5887488 - DNA, 25 bp, Homo sapien
tctccccccgtttcagtccctgctt

SEQ ID NO: 5887489 - DNA, 25 bp, Homo sapien
caccaactccacaaaaatttcatca

SEQ ID NO: 5887490 - DNA, 25 bp, Homo sapien
tggatttaccgaatgatttgcaaaa

SEQ ID NO: 5887491 - DNA, 25 bp, Homo sapien
agcaaactcctttgctccctccaaa

SEQ ID NO: 5887492 - DNA, 25 bp, Homo sapien
ctcagcgggagctggagctatgatg

SEQ ID NO: 5887493 - DNA, 25 bp, Homo sapien
ccgtggatgatcacagggttgatag

SEQ ID NO: 5887494 - DNA, 25 bp, Homo sapien
agtcactggtcaccgaacactccct

SEQ ID NO: 5887495 - DNA, 25 bp, Homo sapien
cttgtgttggaaaatccaagtcact

SEQ ID NO: 5887496 - DNA, 25 bp, Homo sapien
ttatcagaaggaaatttccgaggtg

SEQ ID NO: 5887497 - DNA, 25 bp, Homo sapien
tgttatgtaaaacagtttcatcttc

SEQ ID NO: 5887498 - DNA, 25 bp, Homo sapien
tttttctgcacaggatctttgataa

SEQ ID NO: 5887499 - DNA, 25 bp, Homo sapien
cagaggtcagggtcacactctcgga

SEQ ID NO: 5887500 - DNA, 25 bp, Homo sapien
tccatttctctttcgatgccgacat

SEQ ID NO: 5887501 - DNA, 25 bp, Homo sapien
accatcataacttttgcatagcagt

SEQ ID NO: 5887502 - DNA, 25 bp, Homo sapien
atgatcacagggttgatagttgtaa

SEQ ID NO: 5887503 - DNA, 25 bp, Homo sapien
tgattccagcacattaatggtgggg

SEQ ID NO: 5887504 - DNA, 25 bp, Homo sapien
ttctgagatgaattcatttttctgc

SEQ ID NO: 5887505 - DNA, 25 bp, Homo sapien
gtcatcatcattatattgaccaagg

SEQ ID NO: 5887506 - DNA, 25 bp, Homo sapien
tagtaagtgccaatgaggactctaa

SEQ ID NO: 5887507 - DNA, 25 bp, Homo sapien
tttccatttctctttcgatgccgac

SEQ ID NO: 5887508 - DNA, 25 bp, Homo sapien
gctggtaacactgtggtccacaagg

SEQ ID NO: 5887509 - DNA, 25 bp, Homo sapien
catgaaaagaataattgcacttacg

SEQ ID NO: 5887510 - DNA, 25 bp, Homo sapien
gactctaaactcatacacctgtcta

SEQ ID NO: 5887511 - DNA, 25 bp, Homo sapien
tcttctgctgtgcccttatctggaa

SEQ ID NO: 5887512 - DNA, 25 bp, Homo sapien
agggcatcagcctggctgtatctgt

SEQ ID NO: 5887513 - DNA, 25 bp, Homo sapien
cacacaagggcacgaactgtcacaa

SEQ ID NO: 5887514 - DNA, 25 bp, Homo sapien
gtaagacagaggtcagggtcacact

SEQ ID NO: 5887515 - DNA, 25 bp, Homo sapien
ccacattctcaggaggttcaatatt

SEQ ID NO: 5887516 - DNA, 25 bp, Homo sapien
ccacgtcagatggtgccagcaatag

SEQ ID NO: 5887517 - DNA, 25 bp, Homo sapien
ttcaagttgaacagaaagctgcaca

SEQ ID NO: 5887518 - DNA, 25 bp, Homo sapien
aaaaacagctcttcgccagtctgga

SEQ ID NO: 5887519 - DNA, 25 bp, Homo sapien
cgattggaactaaacatactcttta

SEQ ID NO: 5887520 - DNA, 25 bp, Homo sapien
agggcacgaactgtcacaaggctgc

SEQ ID NO: 5887521 - DNA, 25 bp, Homo sapien
gacatacttcagggcatcagcctgg

SEQ ID NO: 5887522 - DNA, 25 bp, Homo sapien
tttcagctgtatctttctgcagtgt

SEQ ID NO: 5887523 - DNA, 25 bp, Homo sapien
tctgcacaggatctttgataaaaat

SEQ ID NO: 5887524 - DNA, 25 bp, Homo sapien
gctcacagaagtcaggatgtgcaca

SEQ ID NO: 5887525 - DNA, 25 bp, Homo sapien
tctgtgttcttccgcttataagtgt

SEQ ID NO: 5887526 - DNA, 25 bp, Homo sapien
tcaggaggttcaatatttggcttca

SEQ ID NO: 5887527 - DNA, 25 bp, Homo sapien
cacagaaattgtcatagtaagtgcc

SEQ ID NO: 5887528 - DNA, 25 bp, Homo sapien
gggagaccaagaatacattatgggt

SEQ ID NO: 5887529 - DNA, 25 bp, Homo sapien
tggaaacattgaggaaatggcttca

SEQ ID NO: 5887530 - DNA, 25 bp, Homo sapien
ttcagtccctgcttccctatcactg

SEQ ID NO: 5887531 - DNA, 25 bp, Homo sapien
caagggcacgaactgtcacaaggct

SEQ ID NO: 5887532 - DNA, 25 bp, Homo sapien
ttacgatgtaggaagcagtcatatt

SEQ ID NO: 5887533 - DNA, 25 bp, Homo sapien
atttttcctttagttcttctgctgt

SEQ ID NO: 5887534 - DNA, 25 bp, Homo sapien
aacttttgcatagcagtttggattt

SEQ ID NO: 5887535 - DNA, 25 bp, Homo sapien
cagaaggaaatttccgaggtgggcg

SEQ ID NO: 5887536 - DNA, 25 bp, Homo sapien
aactggtcccttctcagatttcttc

SEQ ID NO: 5887537 - DNA, 25 bp, Homo sapien
gcagtttggatttaccgaatgattt

SEQ ID NO: 5887538 - DNA, 25 bp, Homo sapien
gtcagatggtgccagcaatagatgc

SEQ ID NO: 5887539 - DNA, 25 bp, Homo sapien
cacaggatctttgataaaaatcccc

SEQ ID NO: 5887540 - DNA, 25 bp, Homo sapien
cagcacattaatggtgggggtgctg

SEQ ID NO: 5887541 - DNA, 25 bp, Homo sapien
gctgtgcccttatctggaaacattg

SEQ ID NO: 5887542 - DNA, 25 bp, Homo sapien
cacaaggtttgttgtctagagctgt

SEQ ID NO: 5887543 - DNA, 25 bp, Homo sapien
gatggtgccagcaatagatgctttt

SEQ ID NO: 5887544 - DNA, 25 bp, Homo sapien
tagttgtaaacatggttagaggagc

SEQ ID NO: 5887545 - DNA, 25 bp, Homo sapien
agggcattcaccaactccacaaaaa

SEQ ID NO: 5887546 - DNA, 25 bp, Homo sapien
gtgatcctccagatctttctgcttt

SEQ ID NO: 5887547 - DNA, 25 bp, Homo sapien
aattcatttttctgcacaggatctt

SEQ ID NO: 5887548 - DNA, 25 bp, Homo sapien
acttcatcagctcgtctgaacctct

SEQ ID NO: 5887549 - DNA, 25 bp, Homo sapien
gatagttgtaaacatggttagagga

SEQ ID NO: 5887550 - DNA, 25 bp, Homo sapien
gcggtgagagcagcagcaaactcct

SEQ ID NO: 5887551 - DNA, 25 bp, Homo sapien
tatgttgggggtacattcaggagga

SEQ ID NO: 5887552 - DNA, 25 bp, Homo sapien
atctcggtgatcctccagatctttc

SEQ ID NO: 5887553 - DNA, 25 bp, Homo sapien
agtatccacatcctcagcgggagct

SEQ ID NO: 5887554 - DNA, 25 bp, Homo sapien
gaaattgtcatagtaagtgccaatg

SEQ ID NO: 5887555 - DNA, 25 bp, Homo sapien
aattgtcatagtaagtgccaatgag

SEQ ID NO: 5887556 - DNA, 25 bp, Homo sapien
gcttcatcttgagaaataatctctc

SEQ ID NO: 5887557 - DNA, 25 bp, Homo sapien
gcggttttgacactctgaactacat

SEQ ID NO: 5887558 - DNA, 25 bp, Homo sapien
acctagcaatggcacagaaattgtc

SEQ ID NO: 5887559 - DNA, 25 bp, Homo sapien
gaggtcagggtcacactctcggaca

SEQ ID NO: 5887560 - DNA, 25 bp, Homo sapien
gcgggagctggagctatgatgctag

SEQ ID NO: 5887561 - DNA, 25 bp, Homo sapien
ctgttattgggaagccgtcctcttc

SEQ ID NO: 5887562 - DNA, 25 bp, Homo sapien
ttcttcaggatcgtctccatcatca

SEQ ID NO: 5887563 - DNA, 25 bp, Homo sapien
gccagtctggatggctctcttggca

SEQ ID NO: 5887564 - DNA, 25 bp, Homo sapien
gtcaccgaacactccctagtcccgc

SEQ ID NO: 5887565 - DNA, 25 bp, Homo sapien
ttgagctgtctcagtcgcatgtact

SEQ ID NO: 5887566 - DNA, 25 bp, Homo sapien
caccacaaaatcattgttcaagttg

SEQ ID NO: 5887567 - DNA, 25 bp, Homo sapien
cggctttctttatcatctcggtgat

SEQ ID NO: 5887568 - DNA, 25 bp, Homo sapien
aagacagaggtcagggtcacactct

SEQ ID NO: 5887569 - DNA, 25 bp, Homo sapien
tggtaacactgtggtccacaaggtt

SEQ ID NO: 5887570 - DNA, 25 bp, Homo sapien
ccgtttcagtccctgcttccctatc

SEQ ID NO: 5887571 - DNA, 25 bp, Homo sapien
cctcttctgtcagcttcatcttgag

SEQ ID NO: 5887572 - DNA, 25 bp, Homo sapien
agcacgggcactgcttggtgttgca

SEQ ID NO: 5887573 - DNA, 25 bp, Homo sapien
aggggagaccaagaatacattatgg

SEQ ID NO: 5887574 - DNA, 25 bp, Homo sapien
catcagctcgtctgaacctcttgag

SEQ ID NO: 5887575 - DNA, 25 bp, Homo sapien
ccttctcagatttcttcccagtctg

SEQ ID NO: 5887576 - DNA, 25 bp, Homo sapien
cagagtctttaatgggatgacttgt

SEQ ID NO: 5887577 - DNA, 25 bp, Homo sapien
agaaaagcgtatgaaaggagtgtaa

SEQ ID NO: 5887578 - DNA, 25 bp, Homo sapien
ttttgacactctgaactacattgac

SEQ ID NO: 5887579 - DNA, 25 bp, Homo sapien
aatcattgttcaagttgaacagaaa

SEQ ID NO: 5887580 - DNA, 25 bp, Homo sapien
taagtgttgggtgttgcatgaaaag

SEQ ID NO: 5887581 - DNA, 25 bp, Homo sapien
gtctgtatcctttgattccagcaca

SEQ ID NO: 5887582 - DNA, 25 bp, Homo sapien
gcggctccacaagtaagacagaggt

SEQ ID NO: 5887583 - DNA, 25 bp, Homo sapien
gtatgaaaggagtgtaagctttgct

SEQ ID NO: 5887584 - DNA, 25 bp, Homo sapien
cttatctggaaacattgaggaaatg

SEQ ID NO: 5887585 - DNA, 25 bp, Homo sapien
aaattctgctgtaggggagaccaag

SEQ ID NO: 5887586 - DNA, 25 bp, Homo sapien
tacattgacaaaacttttcacaaaa

SEQ ID NO: 5887587 - DNA, 25 bp, Homo sapien
aaaatcattgttcaagttgaacaga

SEQ ID NO: 5887588 - DNA, 25 bp, Homo sapien
gtgttgcatgaaaagaataattgca

SEQ ID NO: 5887589 - DNA, 25 bp, Homo sapien
aaagctgcacatgtatttatcatac

SEQ ID NO: 5887590 - DNA, 25 bp, Homo sapien
gaatacattatgggtactgaagcaa

SEQ ID NO: 5887591 - DNA, 25 bp, Homo sapien
atacactttccctcttctgtcagct

SEQ ID NO: 5887592 - DNA, 25 bp, Homo sapien
atatttaaaacatcgcctacagaaa

SEQ ID NO: 5887593 - DNA, 25 bp, Homo sapien
tttagttcttctgctgtgcccttat

SEQ ID NO: 5887594 - DNA, 25 bp, Homo sapien
tgaattcatttttctgcacaggatc

SEQ ID NO: 5887595 - DNA, 25 bp, Homo sapien
tctctctgaacagatttagcatttg

SEQ ID NO: 5887596 - DNA, 25 bp, Homo sapien
tcagcctggctgtatctgtaatcaa

SEQ ID NO: 5887597 - DNA, 25 bp, Homo sapien
gaaggaaatttccgaggtgggcggc

SEQ ID NO: 5887598 - DNA, 25 bp, Homo sapien
cttcagaggagctcgaagtttcatc

SEQ ID NO: 5887599 - DNA, 25 bp, Homo sapien
gctttctttatcatctcggtgatcc

SEQ ID NO: 5887600 - DNA, 25 bp, Homo sapien
ccaagaatacattatgggtactgaa

SEQ ID NO: 5887601 - DNA, 25 bp, Homo sapien
gatgctttttggagccccgctgaat

SEQ ID NO: 5887602 - DNA, 25 bp, Homo sapien
atttttactgtcccaatggtcagcg

SEQ ID NO: 5887603 - DNA, 25 bp, Homo sapien
ctgcacatgtatttatcatacactt

SEQ ID NO: 5887604 - DNA, 25 bp, Homo sapien
tgtatccttcgctgtttccattctt

SEQ ID NO: 5887605 - DNA, 25 bp, Homo sapien
gcacattaatggtgggggtgctggg

SEQ ID NO: 5887606 - DNA, 25 bp, Homo sapien
attgaccaagggcattcaccaactc

SEQ ID NO: 5887607 - DNA, 25 bp, Homo sapien
cagcttcatcttgagaaataatctc

SEQ ID NO: 5887608 - DNA, 25 bp, Homo sapien
cattgaggcttccgcaccactccac

SEQ ID NO: 5887609 - DNA, 25 bp, Homo sapien
ggcatcagcctggctgtatctgtaa

SEQ ID NO: 5887610 - DNA, 25 bp, Homo sapien
ctcagcggtgagagcagcagcaaac

SEQ ID NO: 5887611 - DNA, 25 bp, Homo sapien
cacgggcactgcttggtgttgcact

SEQ ID NO: 5887612 - DNA, 25 bp, Homo sapien
cacgaactgtcacaaggctgccgtg

SEQ ID NO: 5887613 - DNA, 25 bp, Homo sapien
cattgacaaaacttttcacaaaaat

SEQ ID NO: 5887614 - DNA, 25 bp, Homo sapien
acctatcctgtgatcaccgttaacc

SEQ ID NO: 5887615 - DNA, 25 bp, Homo sapien
attctcaggaggttcaatatttggc

SEQ ID NO: 5887616 - DNA, 25 bp, Homo sapien
gttgtctagagctgtttctgtgttc

SEQ ID NO: 5887617 - DNA, 25 bp, Homo sapien
tatttatcatacactttccctcttc

SEQ ID NO: 5887618 - DNA, 25 bp, Homo sapien
caggatctttgataaaaatccccca

SEQ ID NO: 5887619 - DNA, 25 bp, Homo sapien
tcatcatcgtcatcatcattatatt

SEQ ID NO: 5887620 - DNA, 25 bp, Homo sapien
gcacatgtatttatcatacactttc

SEQ ID NO: 5887621 - DNA, 25 bp, Homo sapien
ttcatttttctgcacaggatctttg

SEQ ID NO: 5887622 - DNA, 25 bp, Homo sapien
attggaactaaacatactctttact

SEQ ID NO: 5887623 - DNA, 25 bp, Homo sapien
cataaaattctgctgtaggggagac

SEQ ID NO: 5887624 - DNA, 25 bp, Homo sapien
tgtttgacaccgagaatttgcttca

SEQ ID NO: 5887625 - DNA, 25 bp, Homo sapien
ttaaaacatcgcctacagaaaagcg

SEQ ID NO: 5887626 - DNA, 25 bp, Homo sapien
cattatattgaccaagggcattcac

SEQ ID NO: 5887627 - DNA, 25 bp, Homo sapien
gcatcccggaaagcggttttgacac

SEQ ID NO: 5887628 - DNA, 25 bp, Homo sapien
ggaagcagtcatatttaaaacatcg

SEQ ID NO: 5887629 - DNA, 25 bp, Homo sapien
aaatggcttcaaaaattttatcaga

SEQ ID NO: 5887630 - DNA, 25 bp, Homo sapien
tcaggaggaagtgcgcctgggagct

SEQ ID NO: 5887631 - DNA, 25 bp, Homo sapien
gggggtacattcaggaggaagtgcg

SEQ ID NO: 5887632 - DNA, 25 bp, Homo sapien
ggactctaaacattgaggcttccgc

SEQ ID NO: 5887633 - DNA, 25 bp, Homo sapien
ctccaaatgctggtaacactgtggt

SEQ ID NO: 5887634 - DNA, 25 bp, Homo sapien
gcatgtactctgattttacacgctt

SEQ ID NO: 5887635 - DNA, 25 bp, Homo sapien
gtactctgattttacacgcttccgc

SEQ ID NO: 5887636 - DNA, 25 bp, Homo sapien
tatttggcttcatctttattggtgt

SEQ ID NO: 5887637 - DNA, 25 bp, Homo sapien
tccacatcctcagcgggagctggag

SEQ ID NO: 5887638 - DNA, 25 bp, Homo sapien
gctgtatccttcgctgtttccattc

SEQ ID NO: 5887639 - DNA, 25 bp, Homo sapien
agcctggctgtatctgtaatcaaaa

SEQ ID NO: 5887640 - DNA, 25 bp, Homo sapien
ctttgcagcggcatcccggaaagcg

SEQ ID NO: 5887641 - DNA, 25 bp, Homo sapien
ccacagtattctgagatgaattcat

SEQ ID NO: 5887642 - DNA, 25 bp, Homo sapien
catttctctttcgatgccgacatac

SEQ ID NO: 5887643 - DNA, 25 bp, Homo sapien
atctctccacagtattctgagatga

SEQ ID NO: 5887644 - DNA, 25 bp, Homo sapien
aaaagaataattgcacttacgatgt

SEQ ID NO: 5887645 - DNA, 25 bp, Homo sapien
catggttagaggagccgtccttttt

SEQ ID NO: 5887646 - DNA, 25 bp, Homo sapien
catttataaacccacattctctatc

SEQ ID NO: 5887647 - DNA, 25 bp, Homo sapien
gatgtaggaagcagtcatatttaaa

SEQ ID NO: 5887648 - DNA, 25 bp, Homo sapien
aatccaagtcactggtcaccgaaca

SEQ ID NO: 5887649 - DNA, 25 bp, Homo sapien
catagcagtttggatttaccgaatg

SEQ ID NO: 5887650 - DNA, 25 bp, Homo sapien
tagagctgtttctgtgttcttccgc

SEQ ID NO: 5887651 - DNA, 25 bp, Homo sapien
aggtagcacgggcactgcttggtgt

SEQ ID NO: 5887652 - DNA, 25 bp, Homo sapien
agccgtcctttttcagctgtatctt

SEQ ID NO: 5887653 - DNA, 25 bp, Homo sapien
aagaatacattatgggtactgaagc

SEQ ID NO: 5887654 - DNA, 25 bp, Homo sapien
tttctgcacaggatctttgataaaa

SEQ ID NO: 5887655 - DNA, 25 bp, Homo sapien
gagctgtttctgtgttcttccgctt

SEQ ID NO: 5887656 - DNA, 25 bp, Homo sapien
cagcggtgagagcagcagcaaactc

SEQ ID NO: 5887657 - DNA, 25 bp, Homo sapien
ttctcagatttcttcccagtctggc

SEQ ID NO: 5887658 - DNA, 25 bp, Homo sapien
ttccgaggtgggcggctttctttat

SEQ ID NO: 5887659 - DNA, 25 bp, Homo sapien
ggctccacaagtaagacagaggtca

SEQ ID NO: 5887660 - DNA, 25 bp, Homo sapien
tccatctatgttgggggtacattca

SEQ ID NO: 5887661 - DNA, 25 bp, Homo sapien
tatccttcgctgtttccattcttgg

SEQ ID NO: 5887662 - DNA, 25 bp, Homo sapien
tgttcttccgcttataagtgttggg

SEQ ID NO: 5887663 - DNA, 25 bp, Homo sapien
tcctcagcgggagctggagctatga

SEQ ID NO: 5887664 - DNA, 25 bp, Homo sapien
ctacatgttttggtcccaattaacc

SEQ ID NO: 5887665 - DNA, 25 bp, Homo sapien
gtcccaattaacctagcaatggcac

SEQ ID NO: 5887666 - DNA, 25 bp, Homo sapien
tagaggagccgtcctttttcagctg

SEQ ID NO: 5887667 - DNA, 25 bp, Homo sapien
ggagtatccacatcctcagcgggag

SEQ ID NO: 5887668 - DNA, 25 bp, Homo sapien
gaaatttccgaggtgggcggctttc

SEQ ID NO: 5887669 - DNA, 25 bp, Homo sapien
cgcgcaatgagctcacagaagtcag

SEQ ID NO: 5887670 - DNA, 25 bp, Homo sapien
gttattgggaagccgtcctcttctg

SEQ ID NO: 5887671 - DNA, 25 bp, Homo sapien
tctctgaacagatttagcatttggt

SEQ ID NO: 5887672 - DNA, 25 bp, Homo sapien
cattcttggtttaagatttccgttc

SEQ ID NO: 5887673 - DNA, 25 bp, Homo sapien
ggcacgaactgtcacaaggctgccg

SEQ ID NO: 5887674 - DNA, 25 bp, Homo sapien
ttctgacgattggaactaaacatac

SEQ ID NO: 5887675 - DNA, 25 bp, Homo sapien
tttggatttaccgaatgatttgcaa

SEQ ID NO: 5887676 - DNA, 25 bp, Homo sapien
ggcattcaccaactccacaaaaatt

SEQ ID NO: 5887677 - DNA, 25 bp, Homo sapien
ggacacatttttactgtcccaatgg

SEQ ID NO: 5887678 - DNA, 25 bp, Homo sapien
gctgtttccattcttggtttaagat

SEQ ID NO: 5887679 - DNA, 25 bp, Homo sapien
agcggcatcccggaaagcggttttg

SEQ ID NO: 5887680 - DNA, 25 bp, Homo sapien
agtcatatttaaaacatcgcctaca

SEQ ID NO: 5887681 - DNA, 25 bp, Homo sapien
tttattggtgtttgacaccgagaat

SEQ ID NO: 5887682 - DNA, 25 bp, Homo sapien
gtcagcttcatcttgagaaataatc

SEQ ID NO: 5887683 - DNA, 25 bp, Homo sapien
catcgcctacagaaaagcgtatgaa

SEQ ID NO: 5887684 - DNA, 25 bp, Homo sapien
attatgggtactgaagcaactgcat

SEQ ID NO: 5887685 - DNA, 25 bp, Homo sapien
tctatccccgtgtactttcccatca

SEQ ID NO: 5887686 - DNA, 25 bp, Homo sapien
ctgggcctgctactgttattgggaa

SEQ ID NO: 5887687 - DNA, 25 bp, Homo sapien
ggatgacttgtgttggaaaatccaa

SEQ ID NO: 5887688 - DNA, 25 bp, Homo sapien
cattgaggaaatggcttcaaaaatt

SEQ ID NO: 5887689 - DNA, 25 bp, Homo sapien
ggagccccgctgaatactgcagttc

SEQ ID NO: 5887690 - DNA, 25 bp, Homo sapien
tctcccatataaggaatgttatgta

SEQ ID NO: 5887691 - DNA, 25 bp, Homo sapien
aacattgaggaaatggcttcaaaaa

SEQ ID NO: 5887692 - DNA, 25 bp, Homo sapien
agcaatggcacagaaattgtcatag

SEQ ID NO: 5887693 - DNA, 25 bp, Homo sapien
tcacagaagtcaggatgtgcacagg

SEQ ID NO: 5887694 - DNA, 25 bp, Homo sapien
aaaatccaagtcactggtcaccgaa

SEQ ID NO: 5887695 - DNA, 25 bp, Homo sapien
ctccacagtattctgagatgaattc

SEQ ID NO: 5887696 - DNA, 25 bp, Homo sapien
tgtgctatcacacaagggcacgaac

SEQ ID NO: 5887697 - DNA, 25 bp, Homo sapien
gtgtactttcccatcataatttttt

SEQ ID NO: 5887698 - DNA, 25 bp, Homo sapien
tccagcacattaatggtgggggtgc

SEQ ID NO: 5887699 - DNA, 25 bp, Homo sapien
ctgggagctgctgttcggtgagttc

SEQ ID NO: 5887700 - DNA, 25 bp, Homo sapien
ttgacactctgaactacattgacaa

SEQ ID NO: 5887701 - DNA, 25 bp, Homo sapien
acagaaagctgcacatgtatttatc

SEQ ID NO: 5887702 - DNA, 25 bp, Homo sapien
ggatggctctcttggcaaaaatacc

SEQ ID NO: 5887703 - DNA, 25 bp, Homo sapien
agttcttgcaggacacatttttact

SEQ ID NO: 5887704 - DNA, 25 bp, Homo sapien
taccgaatgatttgcaaaacgaatt

SEQ ID NO: 5887705 - DNA, 25 bp, Homo sapien
tgccgtggatgatcacagggttgat

SEQ ID NO: 5887706 - DNA, 25 bp, Homo sapien
cttccgccaacaaactggtcccttc

SEQ ID NO: 5887707 - DNA, 25 bp, Homo sapien
cctttgattccagcacattaatggt

SEQ ID NO: 5887708 - DNA, 25 bp, Homo sapien
ccctccaaatgctggtaacactgtg

SEQ ID NO: 5887709 - DNA, 25 bp, Homo sapien
ctttaatgggatgacttgtgttgga

SEQ ID NO: 5887710 - DNA, 25 bp, Homo sapien
acaagtaagacagaggtcagggtca

SEQ ID NO: 5887711 - DNA, 25 bp, Homo sapien
cagcccacaaccggtgtttcctctt

SEQ ID NO: 5887712 - DNA, 25 bp, Homo sapien
tagttcttctgctgtgcccttatct

SEQ ID NO: 5887713 - DNA, 25 bp, Homo sapien
ttttcctttagttcttctgctgtgc

SEQ ID NO: 5887714 - DNA, 25 bp, Homo sapien
atgacttgtgttggaaaatccaagt

SEQ ID NO: 5887715 - DNA, 25 bp, Homo sapien
acagggttgatagttgtaaacatgg

SEQ ID NO: 5887716 - DNA, 25 bp, Homo sapien
tgtgttggaaaatccaagtcactgg

SEQ ID NO: 5887717 - DNA, 25 bp, Homo sapien
aaaacatcgcctacagaaaagcgta

SEQ ID NO: 5887718 - DNA, 25 bp, Homo sapien
tgtctagagctgtttctgtgttctt

SEQ ID NO: 5887719 - DNA, 25 bp, Homo sapien
gtcatagtaagtgccaatgaggact

SEQ ID NO: 5887720 - DNA, 25 bp, Homo sapien
atcatcgtcatcatcattatattga

SEQ ID NO: 5887721 - DNA, 25 bp, Homo sapien
aaacagctcttcgccagtctggatg

SEQ ID NO: 5887722 - DNA, 25 bp, Homo sapien
tcttctgcggcctcctggacgtttt

SEQ ID NO: 5887723 - DNA, 25 bp, Homo sapien
tttgcatagcagtttggatttaccg

SEQ ID NO: 5887724 - DNA, 25 bp, Homo sapien
tgtttctgtgttcttccgcttataa

SEQ ID NO: 5887725 - DNA, 25 bp, Homo sapien
ctcctttgctccctccaaatgctgg

SEQ ID NO: 5887726 - DNA, 25 bp, Homo sapien
atggctctcttggcaaaaataccta

SEQ ID NO: 5887727 - DNA, 25 bp, Homo sapien
tttcttctctttcttcaggatcgtc

SEQ ID NO: 5887728 - DNA, 25 bp, Homo sapien
tgaacctcttgagctgtctcagtcg

SEQ ID NO: 5887729 - DNA, 25 bp, Homo sapien
tggtttaagatttccgttctttcca

SEQ ID NO: 5887730 - DNA, 25 bp, Homo sapien
gtcctcttctgcggcctcctggacg

SEQ ID NO: 5887731 - DNA, 25 bp, Homo sapien
tcccttctcagatttcttcccagtc

SEQ ID NO: 5887732 - DNA, 25 bp, Homo sapien
ggttcaatatttggcttcatcttta

SEQ ID NO: 5887733 - DNA, 25 bp, Homo sapien
caaactggtcccttctcagatttct

SEQ ID NO: 5887734 - DNA, 25 bp, Homo sapien
tggaggagtatccacatcctcagcg

SEQ ID NO: 5887735 - DNA, 25 bp, Homo sapien
ggaagtgcgcctgggagctgctgtt

SEQ ID NO: 5887736 - DNA, 25 bp, Homo sapien
tcttctctttcttcaggatcgtctc

SEQ ID NO: 5887737 - DNA, 25 bp, Homo sapien
aacagtttcatcttccaccataaaa

SEQ ID NO: 5887738 - DNA, 25 bp, Homo sapien
ctgtatctttctgcagtgtgcagcc

SEQ ID NO: 5887739 - DNA, 25 bp, Homo sapien
catagtaagtgccaatgaggactct

SEQ ID NO: 5887740 - DNA, 25 bp, Homo sapien
tccctcttctgtcagcttcatcttg

SEQ ID NO: 5887741 - DNA, 25 bp, Homo sapien
tttagcatttggtccatctatgttg

SEQ ID NO: 5887742 - DNA, 25 bp, Homo sapien
cagtttcatcttccaccataaaatt

SEQ ID NO: 5887743 - DNA, 25 bp, Homo sapien
gttgtaaacatggttagaggagccg

SEQ ID NO: 5887744 - DNA, 25 bp, Homo sapien
gtgcacaggctgtatccttcgctgt

SEQ ID NO: 5887745 - DNA, 25 bp, Homo sapien
agagcagcagcaaactcctttgctc

SEQ ID NO: 5887746 - DNA, 25 bp, Homo sapien
acgtcagatggtgccagcaatagat

SEQ ID NO: 5887747 - DNA, 25 bp, Homo sapien
gcttcatctttattggtgtttgaca

SEQ ID NO: 5887748 - DNA, 25 bp, Homo sapien
tgaatactgcagttcttgcaggaca

SEQ ID NO: 5887749 - DNA, 25 bp, Homo sapien
ctcgtctgaacctcttgagctgtct

SEQ ID NO: 5887750 - DNA, 25 bp, Homo sapien
ttgttgtctagagctgtttctgtgt

SEQ ID NO: 5887751 - DNA, 25 bp, Homo sapien
gttcggtgagttctttatatttttc

SEQ ID NO: 5887752 - DNA, 25 bp, Homo sapien
tggtgccagcaatagatgctttttg

SEQ ID NO: 5887753 - DNA, 25 bp, Homo sapien
tgtaggaagcagtcatatttaaaac

SEQ ID NO: 5887754 - DNA, 25 bp, Homo sapien
gaggaagtgcgcctgggagctgctg

SEQ ID NO: 5887755 - DNA, 25 bp, Homo sapien
gtaggggagaccaagaatacattat

SEQ ID NO: 5887756 - DNA, 25 bp, Homo sapien
aatgttatgtaaaacagtttcatct

SEQ ID NO: 5887757 - DNA, 25 bp, Homo sapien
tcacaaaaattttgtgctatcacac

SEQ ID NO: 5887758 - DNA, 25 bp, Homo sapien
tgtcccaatggtcagcggctccaca

SEQ ID NO: 5887759 - DNA, 25 bp, Homo sapien
tttgtgctatcacacaagggcacga

SEQ ID NO: 5887760 - DNA, 25 bp, Homo sapien
tagatgctttttggagccccgctga

SEQ ID NO: 5887761 - DNA, 25 bp, Homo sapien
tataagtgttgggtgttgcatgaaa

SEQ ID NO: 5887762 - DNA, 25 bp, Homo sapien
atgctggtaacactgtggtccacaa

SEQ ID NO: 5887763 - DNA, 25 bp, Homo sapien
caattaacctagcaatggcacagaa

SEQ ID NO: 5887764 - DNA, 25 bp, Homo sapien
agctcttcgccagtctggatggctc

SEQ ID NO: 5887765 - DNA, 25 bp, Homo sapien
taaacattgaggcttccgcaccact

SEQ ID NO: 5887766 - DNA, 25 bp, Homo sapien
tatcatacactttccctcttctgtc

SEQ ID NO: 5887767 - DNA, 25 bp, Homo sapien
ccgacatacttcagggcatcagcct

SEQ ID NO: 5887768 - DNA, 25 bp, Homo sapien
acactttccctcttctgtcagcttc

SEQ ID NO: 5887769 - DNA, 25 bp, Homo sapien
tctgattttacacgcttccgccaac

SEQ ID NO: 5887770 - DNA, 25 bp, Homo sapien
tttctgtgttcttccgcttataagt

SEQ ID NO: 5887771 - DNA, 25 bp, Homo sapien
ttcttgcaggacacatttttactgt

SEQ ID NO: 5887772 - DNA, 25 bp, Homo sapien
atctttctgcagtgtgcagcccaca

SEQ ID NO: 5887773 - DNA, 25 bp, Homo sapien
ggtgagagcagcagcaaactccttt

SEQ ID NO: 5887774 - DNA, 25 bp, Homo sapien
tcctcttctttttccttggaggagt

SEQ ID NO: 5887775 - DNA, 25 bp, Homo sapien
agggttgatagttgtaaacatggtt

SEQ ID NO: 5887776 - DNA, 25 bp, Homo sapien
ttggaaaatccaagtcactggtcac

SEQ ID NO: 5887777 - DNA, 25 bp, Homo sapien
ccaaatgctggtaacactgtggtcc

SEQ ID NO: 5887778 - DNA, 25 bp, Homo sapien
acaggctgtatccttcgctgtttcc

SEQ ID NO: 5887779 - DNA, 25 bp, Homo sapien
ttggtgtttgacaccgagaatttgc

SEQ ID NO: 5887780 - DNA, 25 bp, Homo sapien
agaaagctgcacatgtatttatcat

SEQ ID NO: 5887781 - DNA, 25 bp, Homo sapien
cctgtgatcaccgttaaccatcata

SEQ ID NO: 5887782 - DNA, 25 bp, Homo sapien
aaggaatgttatgtaaaacagtttc

SEQ ID NO: 5887783 - DNA, 25 bp, Homo sapien
tgtgcagcccacaaccggtgtttcc

SEQ ID NO: 5887784 - DNA, 25 bp, Homo sapien
gaatgatttgcaaaacgaattttgt

SEQ ID NO: 5887785 - DNA, 25 bp, Homo sapien
gaagccgtcctcttctgcggcctcc

SEQ ID NO: 5887786 - DNA, 25 bp, Homo sapien
atcatttataaacccacattctcta

SEQ ID NO: 5887787 - DNA, 25 bp, Homo sapien
ttcaatgaaagtaccatcctgatct

SEQ ID NO: 5887788 - DNA, 25 bp, Homo sapien
caatgaggactctaaacattgaggc

SEQ ID NO: 5887789 - DNA, 25 bp, Homo sapien
agtttggatttaccgaatgatttgc

SEQ ID NO: 5887790 - DNA, 25 bp, Homo sapien
tttctttatcatctcggtgatcctc

SEQ ID NO: 5887791 - DNA, 25 bp, Homo sapien
acattaatggtgggggtgctgggcc

SEQ ID NO: 5887792 - DNA, 25 bp, Homo sapien
tccaagtcactggtcaccgaacact

SEQ ID NO: 5887793 - DNA, 25 bp, Homo sapien
gaaaggagtgtaagctttgctctct

SEQ ID NO: 5887794 - DNA, 25 bp, Homo sapien
cttggaggagtatccacatcctcag

SEQ ID NO: 5887795 - DNA, 25 bp, Homo sapien
ttcctttagttcttctgctgtgccc

SEQ ID NO: 5887796 - DNA, 25 bp, Homo sapien
attctgctgtaggggagaccaagaa

SEQ ID NO: 5887797 - DNA, 25 bp, Homo sapien
ggtccacaaggtttgttgtctagag

SEQ ID NO: 5887798 - DNA, 25 bp, Homo sapien
atgaaagtaccatcctgatctaaaa

SEQ ID NO: 5887799 - DNA, 25 bp, Homo sapien
catcagcctggctgtatctgtaatc

SEQ ID NO: 5887800 - DNA, 25 bp, Homo sapien
tctaaacattgaggcttccgcacca

SEQ ID NO: 5887801 - DNA, 25 bp, Homo sapien
tcgtcatcatcattatattgaccaa

SEQ ID NO: 5887802 - DNA, 25 bp, Homo sapien
tcataacttttgcatagcagtttgg

SEQ ID NO: 5887803 - DNA, 25 bp, Homo sapien
cagatggtgccagcaatagatgctt

SEQ ID NO: 5887804 - DNA, 25 bp, Homo sapien
cattcagagtctttaatgggatgac

SEQ ID NO: 5887805 - DNA, 25 bp, Homo sapien
ctttcttcaggatcgtctccatcat

SEQ ID NO: 5887806 - DNA, 25 bp, Homo sapien
aggatcgtctccatcatcatcatcg

SEQ ID NO: 5887807 - DNA, 25 bp, Homo sapien
catcttgagaaataatctctccaca

SEQ ID NO: 5887808 - DNA, 25 bp, Homo sapien
tagattctttgactctaaactcata

SEQ ID NO: 5887809 - DNA, 25 bp, Homo sapien
ttatgtaaaacagtttcatcttcca

SEQ ID NO: 5887810 - DNA, 25 bp, Homo sapien
ttctctttcttcaggatcgtctcca

SEQ ID NO: 5887811 - DNA, 25 bp, Homo sapien
catctatgttgggggtacattcagg

SEQ ID NO: 5887812 - DNA, 25 bp, Homo sapien
caagtcactggtcaccgaacactcc

SEQ ID NO: 5887813 - DNA, 25 bp, Homo sapien
gggagctgctgttcggtgagttctt

SEQ ID NO: 5887814 - DNA, 25 bp, Homo sapien
gtgccagcaatagatgctttttgga

SEQ ID NO: 5887815 - DNA, 25 bp, Homo sapien
gattctttgactctaaactcataca

SEQ ID NO: 5887816 - DNA, 25 bp, Homo sapien
tgctatcacacaagggcacgaactg

SEQ ID NO: 5887817 - DNA, 25 bp, Homo sapien
gctatgatgctagattctttgactc

SEQ ID NO: 5887818 - DNA, 25 bp, Homo sapien
cctagtcccgcgcaatgagctcaca

SEQ ID NO: 5887819 - DNA, 25 bp, Homo sapien
gggtgttgcatgaaaagaataattg

SEQ ID NO: 5887820 - DNA, 25 bp, Homo sapien
gttaaccatcataacttttgcatag

SEQ ID NO: 5887821 - DNA, 25 bp, Homo sapien
ccgtcctttttcagctgtatctttc

SEQ ID NO: 5887822 - DNA, 25 bp, Homo sapien
ttgggaagccgtcctcttctgcggc

SEQ ID NO: 5887823 - DNA, 25 bp, Homo sapien
attccagcacattaatggtgggggt

SEQ ID NO: 5887824 - DNA, 25 bp, Homo sapien
aaaatcccccagcctgccacgtcag

SEQ ID NO: 5887825 - DNA, 25 bp, Homo sapien
tatcatctcggtgatcctccagatc

SEQ ID NO: 5887826 - DNA, 25 bp, Homo sapien
gcttggtgttgcactgtgctttgca

SEQ ID NO: 5887827 - DNA, 25 bp, Homo sapien
tggcaaaaatacctatcctgtgatc

SEQ ID NO: 5887828 - DNA, 25 bp, Homo sapien
cttgcaggacacatttttactgtcc

SEQ ID NO: 5887829 - DNA, 25 bp, Homo sapien
actctgattttacacgcttccgcca

SEQ ID NO: 5887830 - DNA, 25 bp, Homo sapien
attagttcttcaatgaaagtaccat

SEQ ID NO: 5887831 - DNA, 25 bp, Homo sapien
ctcttcgccagtctggatggctctc

SEQ ID NO: 5887832 - DNA, 25 bp, Homo sapien
cttccgcttataagtgttgggtgtt

SEQ ID NO: 5887833 - DNA, 25 bp, Homo sapien
aaaacagtttcatcttccaccataa

SEQ ID NO: 5887834 - DNA, 25 bp, Homo sapien
gaactaaacatactctttacttcat

SEQ ID NO: 5887835 - DNA, 25 bp, Homo sapien
gggcctgctactgttattgggaagc

SEQ ID NO: 5887836 - DNA, 25 bp, Homo sapien
gaaataatctctccacagtattctg

SEQ ID NO: 5887837 - DNA, 25 bp, Homo sapien
ccaaaattttctgacgattggaact

SEQ ID NO: 5887838 - DNA, 25 bp, Homo sapien
gagatgaattcatttttctgcacag

SEQ ID NO: 5887839 - DNA, 25 bp, Homo sapien
ttctgcggcctcctggacgttttgg

SEQ ID NO: 5887840 - DNA, 25 bp, Homo sapien
tcgatgccgacatacttcagggcat

SEQ ID NO: 5887841 - DNA, 25 bp, Homo sapien
aacctcttgagctgtctcagtcgca

SEQ ID NO: 5887842 - DNA, 25 bp, Homo sapien
tcaggatcgtctccatcatcatcat

SEQ ID NO: 5887843 - DNA, 25 bp, Homo sapien
agctcgtctgaacctcttgagctgt

SEQ ID NO: 5887844 - DNA, 25 bp, Homo sapien
cttcgccagtctggatggctctctt

SEQ ID NO: 5887845 - DNA, 25 bp, Homo sapien
tggttagaggagccgtcctttttca

SEQ ID NO: 5887846 - DNA, 25 bp, Homo sapien
gctgtatctgtaatcaaaaaacagc

SEQ ID NO: 5887847 - DNA, 25 bp, Homo sapien
cttggcaaaaatacctatcctgtga

SEQ ID NO: 5887848 - DNA, 25 bp, Homo sapien
tttggtcccaattaacctagcaatg

SEQ ID NO: 5887849 - DNA, 25 bp, Homo sapien
gagaaataatctctccacagtattc

SEQ ID NO: 5887850 - DNA, 25 bp, Homo sapien
tactgcagttcttgcaggacacatt

SEQ ID NO: 5887851 - DNA, 25 bp, Homo sapien
gtaccatcctgatctaaaacttcat

SEQ ID NO: 5887852 - DNA, 25 bp, Homo sapien
gaggagtatccacatcctcagcggg

SEQ ID NO: 5887853 - DNA, 25 bp, Homo sapien
ctccacattctcaggaggttcaata

SEQ ID NO: 5887854 - DNA, 25 bp, Homo sapien
ttgggtgttgcatgaaaagaataat

SEQ ID NO: 5887855 - DNA, 25 bp, Homo sapien
agctgcacatgtatttatcatacac

SEQ ID NO: 5887856 - DNA, 25 bp, Homo sapien
acagaagtcaggatgtgcacaggct

SEQ ID NO: 5887857 - DNA, 25 bp, Homo sapien
cgcttataagtgttgggtgttgcat

SEQ ID NO: 5887858 - DNA, 25 bp, Homo sapien
tcctccagatctttctgcttttctt

SEQ ID NO: 5887859 - DNA, 25 bp, Homo sapien
tgttggaaaatccaagtcactggtc

SEQ ID NO: 5887860 - DNA, 25 bp, Homo sapien
aggctgccgtggatgatcacagggt

SEQ ID NO: 5887861 - DNA, 25 bp, Homo sapien
catcatcattatattgaccaagggc

SEQ ID NO: 5887862 - DNA, 25 bp, Homo sapien
ctaaactcatacacctgtctacatg

SEQ ID NO: 5887863 - DNA, 25 bp, Homo sapien
ctggatggctctcttggcaaaaata

SEQ ID NO: 5887864 - DNA, 25 bp, Homo sapien
ggatctttgataaaaatcccccagc

SEQ ID NO: 5887865 - DNA, 25 bp, Homo sapien
tatccacatcctcagcgggagctgg

SEQ ID NO: 5887866 - DNA, 25 bp, Homo sapien
tggaactaaacatactctttacttc

SEQ ID NO: 5887867 - DNA, 25 bp, Homo sapien
tgtaaacatggttagaggagccgtc

SEQ ID NO: 5887868 - DNA, 25 bp, Homo sapien
atataaggaatgttatgtaaaacag

SEQ ID NO: 5887869 - DNA, 25 bp, Homo sapien
aattttctgacgattggaactaaac

SEQ ID NO: 5887870 - DNA, 25 bp, Homo sapien
gtagcacgggcactgcttggtgttg

SEQ ID NO: 5887871 - DNA, 25 bp, Homo sapien
ccgctgaatactgcagttcttgcag

SEQ ID NO: 5887872 - DNA, 25 bp, Homo sapien
cttataagtgttgggtgttgcatga

SEQ ID NO: 5887873 - DNA, 25 bp, Homo sapien
acttacgatgtaggaagcagtcata

SEQ ID NO: 5887874 - DNA, 25 bp, Homo sapien
ctttgactctaaactcatacacctg

SEQ ID NO: 5887875 - DNA, 25 bp, Homo sapien
ctttccaaaattttctgacgattgg

SEQ ID NO: 5887876 - DNA, 25 bp, Homo sapien
tttatcatctcggtgatcctccaga

SEQ ID NO: 5887877 - DNA, 25 bp, Homo sapien
tattctgagatgaattcatttttct

SEQ ID NO: 5887878 - DNA, 25 bp, Homo sapien
ctgaagcaactgcattcagagtctt

SEQ ID NO: 5887879 - DNA, 25 bp, Homo sapien
tcagctgtatctttctgcagtgtgc

SEQ ID NO: 5887880 - DNA, 25 bp, Homo sapien
gaggttcaatatttggcttcatctt

SEQ ID NO: 5887881 - DNA, 25 bp, Homo sapien
attaatggtgggggtgctgggcctg

SEQ ID NO: 5887882 - DNA, 25 bp, Homo sapien
acctgtctacatgttttggtcccaa

SEQ ID NO: 5887883 - DNA, 25 bp, Homo sapien
ctgctactgttattgggaagccgtc

SEQ ID NO: 5887884 - DNA, 25 bp, Homo sapien
ggagccgtcctttttcagctgtatc

SEQ ID NO: 5887885 - DNA, 25 bp, Homo sapien
gaggagccgtcctttttcagctgta

SEQ ID NO: 5887886 - DNA, 25 bp, Homo sapien
tgctgttcggtgagttctttatatt

SEQ ID NO: 5887887 - DNA, 25 bp, Homo sapien
gtctttaatgggatgacttgtgttg

SEQ ID NO: 5887888 - DNA, 25 bp, Homo sapien
ccagcctgccacgtcagatggtgcc

SEQ ID NO: 5887889 - DNA, 25 bp, Homo sapien
ttctgctgtgcccttatctggaaac

SEQ ID NO: 5887890 - DNA, 25 bp, Homo sapien
acttcatctcccatataaggaatgt

SEQ ID NO: 5887891 - DNA, 25 bp, Homo sapien
atacattatgggtactgaagcaact

SEQ ID NO: 5887892 - DNA, 25 bp, Homo sapien
aagcggttttgacactctgaactac

SEQ ID NO: 5887893 - DNA, 25 bp, Homo sapien
ttgactctaaactcatacacctgtc

SEQ ID NO: 5887894 - DNA, 25 bp, Homo sapien
cagcagcaaactcctttgctccctc

SEQ ID NO: 5887895 - DNA, 25 bp, Homo sapien
tggtggggtctttatccgctcagcg

SEQ ID NO: 5887896 - DNA, 25 bp, Homo sapien
tgtgttcttccgcttataagtgttg

SEQ ID NO: 5887897 - DNA, 25 bp, Homo sapien
agttgaacagaaagctgcacatgta

SEQ ID NO: 5887898 - DNA, 25 bp, Homo sapien
ttatattgaccaagggcattcacca

SEQ ID NO: 5887899 - DNA, 25 bp, Homo sapien
aagtgccaatgaggactctaaacat

SEQ ID NO: 5887900 - DNA, 25 bp, Homo sapien
acaaaatcattgttcaagttgaaca

SEQ ID NO: 5887901 - DNA, 25 bp, Homo sapien
cttccgcaccactccactccacatt

SEQ ID NO: 5887902 - DNA, 25 bp, Homo sapien
ctatcacacaagggcacgaactgtc

SEQ ID NO: 5887903 - DNA, 25 bp, Homo sapien
tgtttccattcttggtttaagattt

SEQ ID NO: 5887904 - DNA, 25 bp, Homo sapien
agaggagctcgaagtttcatctttc

SEQ ID NO: 5887905 - DNA, 25 bp, Homo sapien
aagtaagacagaggtcagggtcaca

SEQ ID NO: 5887906 - DNA, 25 bp, Homo sapien
ttccctatcactgtctgtatccttt

SEQ ID NO: 5887907 - DNA, 25 bp, Homo sapien
ccttgcgggttgcatccaccacaaa

SEQ ID NO: 5887908 - DNA, 25 bp, Homo sapien
tcagggcatcagcctggctgtatct

SEQ ID NO: 5887909 - DNA, 25 bp, Homo sapien
ttctgcagtgtgcagcccacaaccg

SEQ ID NO: 5887910 - DNA, 25 bp, Homo sapien
ttcagagtctttaatgggatgactt

SEQ ID NO: 5887911 - DNA, 25 bp, Homo sapien
ccccagcctgccacgtcagatggtg

SEQ ID NO: 5887912 - DNA, 25 bp, Homo sapien
tctttatccgctcagcggtgagagc

SEQ ID NO: 5887913 - DNA, 25 bp, Homo sapien
ggcttcaaaaattttatcagaagga

SEQ ID NO: 5887914 - DNA, 25 bp, Homo sapien
ttttatcagaaggaaatttccgagg

SEQ ID NO: 5887915 - DNA, 25 bp, Homo sapien
aattttatcagaaggaaatttccga

SEQ ID NO: 5887916 - DNA, 25 bp, Homo sapien
tttatcatacactttccctcttctg

SEQ ID NO: 5887917 - DNA, 25 bp, Homo sapien
tcggtgagttctttatatttttcct

SEQ ID NO: 5887918 - DNA, 25 bp, Homo sapien
gtttcatcttccaccataaaattct

SEQ ID NO: 5887919 - DNA, 25 bp, Homo sapien
ttttactgtcccaatggtcagcggc

SEQ ID NO: 5887920 - DNA, 25 bp, Homo sapien
tatccccgtgtactttcccatcata

SEQ ID NO: 5887921 - DNA, 25 bp, Homo sapien
gctactgttattgggaagccgtcct

SEQ ID NO: 5887922 - DNA, 25 bp, Homo sapien
ataacttttgcatagcagtttggat

SEQ ID NO: 5887923 - DNA, 25 bp, Homo sapien
atcaaaaaacagctcttcgccagtc

SEQ ID NO: 5887924 - DNA, 25 bp, Homo sapien
aattgcacttacgatgtaggaagca

SEQ ID NO: 5887925 - DNA, 25 bp, Homo sapien
atcagaaggaaatttccgaggtggg

SEQ ID NO: 5887926 - DNA, 25 bp, Homo sapien
actttccctcttctgtcagcttcat

SEQ ID NO: 5887927 - DNA, 25 bp, Homo sapien
gtctccatcatcatcatcgtcatca

SEQ ID NO: 5887928 - DNA, 25 bp, Homo sapien
gggaagccgtcctcttctgcggcct

SEQ ID NO: 5887929 - DNA, 25 bp, Homo sapien
gaggtgggcggctttctttatcatc

SEQ ID NO: 5887930 - DNA, 25 bp, Homo sapien
ttggtgttgcactgtgctttgcagc

SEQ ID NO: 5887931 - DNA, 25 bp, Homo sapien
tttccttggaggagtatccacatcc

SEQ ID NO: 5887932 - DNA, 25 bp, Homo sapien
catactctttacttcatcagctcgt

SEQ ID NO: 5887933 - DNA, 25 bp, Homo sapien
tgtaagctttgctctctctgaacag

SEQ ID NO: 5887934 - DNA, 25 bp, Homo sapien
tcttctgtcagcttcatcttgagaa

SEQ ID NO: 5887935 - DNA, 25 bp, Homo sapien
ctaagggatttccatttctctttcg

SEQ ID NO: 5887936 - DNA, 25 bp, Homo sapien
aagtaccatcctgatctaaaacttc

SEQ ID NO: 5887937 - DNA, 25 bp, Homo sapien
tttataaacccacattctctatccc

SEQ ID NO: 5887938 - DNA, 25 bp, Homo sapien
gatttgcaaaacgaattttgttacc

SEQ ID NO: 5887939 - DNA, 25 bp, Homo sapien
ttcatcttccaccataaaattctgc

SEQ ID NO: 5887940 - DNA, 25 bp, Homo sapien
aacaaactggtcccttctcagattt

SEQ ID NO: 5887941 - DNA, 25 bp, Homo sapien
atattgaccaagggcattcaccaac

SEQ ID NO: 5887942 - DNA, 25 bp, Homo sapien
agtattctgagatgaattcattttt

SEQ ID NO: 5887943 - DNA, 25 bp, Homo sapien
caggatgtgcacaggctgtatcctt

SEQ ID NO: 5887944 - DNA, 25 bp, Homo sapien
gacactctgaactacattgacaaaa

SEQ ID NO: 5887945 - DNA, 25 bp, Homo sapien
tttccattcttggtttaagatttcc

SEQ ID NO: 5887946 - DNA, 25 bp, Homo sapien
gcccacaaccggtgtttcctcttct

SEQ ID NO: 5887947 - DNA, 25 bp, Homo sapien
tcaaaaattttatcagaaggaaatt

SEQ ID NO: 5887948 - DNA, 25 bp, Homo sapien
ctgttcggtgagttctttatatttt

SEQ ID NO: 5887949 - DNA, 25 bp, Homo sapien
ttcatcttgagaaataatctctcca

SEQ ID NO: 5887950 - DNA, 25 bp, Homo sapien
ttacccttgcgggttgcatccacca

SEQ ID NO: 5887951 - DNA, 25 bp, Homo sapien
gtaacactgtggtccacaaggtttg

SEQ ID NO: 5887952 - DNA, 25 bp, Homo sapien
gatttccatttctctttcgatgccg

SEQ ID NO: 5887953 - DNA, 25 bp, Homo sapien
aactccacaaaaatttcatcattta

SEQ ID NO: 5887954 - DNA, 25 bp, Homo sapien
ggagtgtaagctttgctctctctga

SEQ ID NO: 5887955 - DNA, 25 bp, Homo sapien
tcctgatctaaaacttcatctccca

SEQ ID NO: 5887956 - DNA, 25 bp, Homo sapien
ccctgcttccctatcactgtctgta

SEQ ID NO: 5887957 - DNA, 25 bp, Homo sapien
tttatccgctcagcggtgagagcag

SEQ ID NO: 5887958 - DNA, 25 bp, Homo sapien
ctatcctgtgatcaccgttaaccat

SEQ ID NO: 5887959 - DNA, 25 bp, Homo sapien
tgcatccaccacaaaatcattgttc

SEQ ID NO: 5887960 - DNA, 25 bp, Homo sapien
caccgttaaccatcataacttttgc

SEQ ID NO: 5887961 - DNA, 25 bp, Homo sapien
agccgtcctcttctgcggcctcctg

SEQ ID NO: 5887962 - DNA, 25 bp, Homo sapien
ctgcagttcttgcaggacacatttt

SEQ ID NO: 5887963 - DNA, 25 bp, Homo sapien
cacaagggcacgaactgtcacaagg

SEQ ID NO: 5887964 - DNA, 25 bp, Homo sapien
agccccgctgaatactgcagttctt

SEQ ID NO: 5887965 - DNA, 25 bp, Homo sapien
acatttttactgtcccaatggtcag

SEQ ID NO: 5887966 - DNA, 25 bp, Homo sapien
gcttccctatcactgtctgtatcct

SEQ ID NO: 5887967 - DNA, 25 bp, Homo sapien
tcttgagaaataatctctccacagt

SEQ ID NO: 5887968 - DNA, 25 bp, Homo sapien
cagtccctgcttccctatcactgtc

SEQ ID NO: 5887969 - DNA, 25 bp, Homo sapien
tactgaagcaactgcattcagagtc

SEQ ID NO: 5887970 - DNA, 25 bp, Homo sapien
ccgaggtgggcggctttctttatca

SEQ ID NO: 5887971 - DNA, 25 bp, Homo sapien
ttgaggaaatggcttcaaaaatttt

SEQ ID NO: 5887972 - DNA, 25 bp, Homo sapien
atcactgtctgtatcctttgattcc

SEQ ID NO: 5887973 - DNA, 25 bp, Homo sapien
tagttcttcaatgaaagtaccatcc

SEQ ID NO: 5887974 - DNA, 25 bp, Homo sapien
tcccaatggtcagcggctccacaag

SEQ ID NO: 5887975 - DNA, 25 bp, Homo sapien
gatttaccgaatgatttgcaaaacg

SEQ ID NO: 5887976 - DNA, 25 bp, Homo sapien
ttcaatatttggcttcatctttatt

SEQ ID NO: 5887977 - DNA, 25 bp, Homo sapien
ggcggctttctttatcatctcggtg

SEQ ID NO: 5887978 - DNA, 25 bp, Homo sapien
tattgggaagccgtcctcttctgcg

SEQ ID NO: 5887979 - DNA, 25 bp, Homo sapien
ggcttccgcaccactccactccaca

SEQ ID NO: 5887980 - DNA, 25 bp, Homo sapien
gaggactctaaacattgaggcttcc

SEQ ID NO: 5887981 - DNA, 25 bp, Homo sapien
tgggtactgaagcaactgcattcag

SEQ ID NO: 5887982 - DNA, 25 bp, Homo sapien
tactctttacttcatcagctcgtct

SEQ ID NO: 5887983 - DNA, 25 bp, Homo sapien
gaattttgttacccttgcgggttgc

SEQ ID NO: 5887984 - DNA, 25 bp, Homo sapien
ttaatgggatgacttgtgttggaaa

SEQ ID NO: 5887985 - DNA, 25 bp, Homo sapien
ggaaatggcttcaaaaattttatca

SEQ ID NO: 5887986 - DNA, 25 bp, Homo sapien
taatctctccacagtattctgagat

SEQ ID NO: 5887987 - DNA, 25 bp, Homo sapien
gagtctttaatgggatgacttgtgt

SEQ ID NO: 5887988 - DNA, 25 bp, Homo sapien
tcttgagctgtctcagtcgcatgta

SEQ ID NO: 5887989 - DNA, 25 bp, Homo sapien
actccactccacattctcaggaggt

SEQ ID NO: 5887990 - DNA, 25 bp, Homo sapien
gtggatgatcacagggttgatagtt

SEQ ID NO: 5887991 - DNA, 25 bp, Homo sapien
acacatttttactgtcccaatggtc

SEQ ID NO: 5887992 - DNA, 25 bp, Homo sapien
cgaactgtcacaaggctgccgtgga

SEQ ID NO: 5887993 - DNA, 25 bp, Homo sapien
tttgctccctccaaatgctggtaac

SEQ ID NO: 5887994 - DNA, 25 bp, Homo sapien
ttgcgggttgcatccaccacaaaat

SEQ ID NO: 5887995 - DNA, 25 bp, Homo sapien
aacatactctttacttcatcagctc

SEQ ID NO: 5887996 - DNA, 25 bp, Homo sapien
tttttcagctgtatctttctgcagt

SEQ ID NO: 5887997 - DNA, 25 bp, Homo sapien
ctggtcccttctcagatttcttccc

SEQ ID NO: 5887998 - DNA, 25 bp, Homo sapien
agtcgcatgtactctgattttacac

SEQ ID NO: 5887999 - DNA, 25 bp, Homo sapien
tggagctatgatgctagattctttg

SEQ ID NO: 5888000 - DNA, 25 bp, Homo sapien
tccttcgctgtttccattcttggtt

SEQ ID NO: 5888001 - DNA, 25 bp, Homo sapien
gtcctttttcagctgtatctttctg

SEQ ID NO: 5888002 - DNA, 25 bp, Homo sapien
tatgggtactgaagcaactgcattc

SEQ ID NO: 5888003 - DNA, 25 bp, Homo sapien
gagctgtctcagtcgcatgtactct

SEQ ID NO: 5888004 - DNA, 25 bp, Homo sapien
ttggagccccgctgaatactgcagt

SEQ ID NO: 5888005 - DNA, 25 bp, Homo sapien
ctatcactgtctgtatcctttgatt

SEQ ID NO: 5888006 - DNA, 25 bp, Homo sapien
gcggcctcctggacgttttggtggg

SEQ ID NO: 5888007 - DNA, 25 bp, Homo sapien
ttgagaaataatctctccacagtat

SEQ ID NO: 5888008 - DNA, 25 bp, Homo sapien
aacagatttagcatttggtccatct

SEQ ID NO: 5888009 - DNA, 25 bp, Homo sapien
gatcctccagatctttctgcttttc

SEQ ID NO: 5888010 - DNA, 25 bp, Homo sapien
ggttttgacactctgaactacattg

SEQ ID NO: 5888011 - DNA, 25 bp, Homo sapien
tttggtggggtctttatccgctcag

SEQ ID NO: 5888012 - DNA, 25 bp, Homo sapien
tgctccctccaaatgctggtaacac

SEQ ID NO: 5888013 - DNA, 25 bp, Homo sapien
ccaatggtcagcggctccacaagta

SEQ ID NO: 5888014 - DNA, 25 bp, Homo sapien
cagtctggatggctctcttggcaaa

SEQ ID NO: 5888015 - DNA, 25 bp, Homo sapien
ttgaggcttccgcaccactccactc

SEQ ID NO: 5888016 - DNA, 25 bp, Homo sapien
ctagcaatggcacagaaattgtcat

SEQ ID NO: 5888017 - DNA, 25 bp, Homo sapien
aagtgcgcctgggagctgctgttcg

SEQ ID NO: 5888018 - DNA, 25 bp, Homo sapien
ccgaatgatttgcaaaacgaatttt

SEQ ID NO: 5888019 - DNA, 25 bp, Homo sapien
tgattttacacgcttccgccaacaa

SEQ ID NO: 5888020 - DNA, 25 bp, Homo sapien
acattcaggaggaagtgcgcctggg

SEQ ID NO: 5888021 - DNA, 25 bp, Homo sapien
tctttttccttggaggagtatccac

SEQ ID NO: 5888022 - DNA, 25 bp, Homo sapien
gctctctctgaacagatttagcatt

SEQ ID NO: 5888023 - DNA, 25 bp, Homo sapien
tgctttttggagccccgctgaatac

SEQ ID NO: 5888024 - DNA, 25 bp, Homo sapien
aacatcgcctacagaaaagcgtatg

SEQ ID NO: 5888025 - DNA, 25 bp, Homo sapien
gataaaaatcccccagcctgccacg

SEQ ID NO: 5888026 - DNA, 25 bp, Homo sapien
tgcaggacacatttttactgtccca

SEQ ID NO: 5888027 - DNA, 25 bp, Homo sapien
ctttctgcagtgtgcagcccacaac

SEQ ID NO: 5888028 - DNA, 25 bp, Homo sapien
ttgtcatagtaagtgccaatgagga

SEQ ID NO: 5888029 - DNA, 25 bp, Homo sapien
catcataacttttgcatagcagttt

SEQ ID NO: 5888030 - DNA, 25 bp, Homo sapien
atgttttggtcccaattaacctagc

SEQ ID NO: 5888031 - DNA, 25 bp, Homo sapien
ttattagttcttcaatgaaagtacc

SEQ ID NO: 5888032 - DNA, 25 bp, Homo sapien
actctcggacagccaggtagcacgg

SEQ ID NO: 5888033 - DNA, 25 bp, Homo sapien
tgtatctgtaatcaaaaaacagctc

SEQ ID NO: 5888034 - DNA, 25 bp, Homo sapien
gagaccaagaatacattatgggtac

SEQ ID NO: 5888035 - DNA, 25 bp, Homo sapien
attttgtgctatcacacaagggcac

SEQ ID NO: 5888036 - DNA, 25 bp, Homo sapien
ctccctccaaatgctggtaacactg

SEQ ID NO: 5888037 - DNA, 25 bp, Homo sapien
tttaccgaatgatttgcaaaacgaa

SEQ ID NO: 5888038 - DNA, 25 bp, Homo sapien
atttggtccatctatgttgggggta

SEQ ID NO: 5888039 - DNA, 25 bp, Homo sapien
caaactcctttgctccctccaaatg

SEQ ID NO: 5888040 - DNA, 25 bp, Homo sapien
atggcttcaaaaattttatcagaag

SEQ ID NO: 5888041 - DNA, 25 bp, Homo sapien
agggtcacactctcggacagccagg

SEQ ID NO: 5888042 - DNA, 25 bp, Homo sapien
ggcactgcttggtgttgcactgtgc

SEQ ID NO: 5888043 - DNA, 25 bp, Homo sapien
taaaacttcatctcccatataagga

SEQ ID NO: 5888044 - DNA, 25 bp, Homo sapien
tgccgacatacttcagggcatcagc

SEQ ID NO: 5888045 - DNA, 25 bp, Homo sapien
ggtctttatccgctcagcggtgaga

SEQ ID NO: 5888046 - DNA, 25 bp, Homo sapien
acatgttttggtcccaattaaccta

SEQ ID NO: 5888047 - DNA, 25 bp, Homo sapien
tgctttgcagcggcatcccggaaag

SEQ ID NO: 5888048 - DNA, 25 bp, Homo sapien
tgctgggcctgctactgttattggg

SEQ ID NO: 5888049 - DNA, 25 bp, Homo sapien
gtatcctttgattccagcacattaa

SEQ ID NO: 5888050 - DNA, 25 bp, Homo sapien
gcaaaacgaattttgttacccttgc

SEQ ID NO: 5888051 - DNA, 25 bp, Homo sapien
gttcttctgctgtgcccttatctgg

SEQ ID NO: 5888052 - DNA, 25 bp, Homo sapien
tctcggacagccaggtagcacgggc

SEQ ID NO: 5888053 - DNA, 25 bp, Homo sapien
ccacaaaatcattgttcaagttgaa

SEQ ID NO: 5888054 - DNA, 25 bp, Homo sapien
tttcatcatttataaacccacattc

SEQ ID NO: 5888055 - DNA, 25 bp, Homo sapien
tcatcatttataaacccacattctc

SEQ ID NO: 5888056 - DNA, 25 bp, Homo sapien
gcgggttgcatccaccacaaaatca

SEQ ID NO: 5888057 - DNA, 25 bp, Homo sapien
agctttgctctctctgaacagattt

SEQ ID NO: 5888058 - DNA, 25 bp, Homo sapien
acccttgcgggttgcatccaccaca

SEQ ID NO: 5888059 - DNA, 25 bp, Homo sapien
ggggtctttatccgctcagcggtga

SEQ ID NO: 5888060 - DNA, 25 bp, Homo sapien
tctaaaacttcatctcccatataag

SEQ ID NO: 5888061 - DNA, 25 bp, Homo sapien
gcagtcatatttaaaacatcgccta

SEQ ID NO: 5888062 - DNA, 25 bp, Homo sapien
ataattgcacttacgatgtaggaag

SEQ ID NO: 5888063 - DNA, 25 bp, Homo sapien
tggtcccaattaacctagcaatggc

SEQ ID NO: 5888064 - DNA, 25 bp, Homo sapien
caggacacatttttactgtcccaat

SEQ ID NO: 5888065 - DNA, 25 bp, Homo sapien
gtgccaatgaggactctaaacattg

SEQ ID NO: 5888066 - DNA, 25 bp, Homo sapien
tcccccagcctgccacgtcagatgg

SEQ ID NO: 5888067 - DNA, 25 bp, Homo sapien
actgtcccaatggtcagcggctcca

SEQ ID NO: 5888068 - DNA, 25 bp, Homo sapien
cggtgatcctccagatctttctgct

SEQ ID NO: 5888069 - DNA, 25 bp, Homo sapien
gttgcatccaccacaaaatcattgt

SEQ ID NO: 5888070 - DNA, 25 bp, Homo sapien
atcctgtgatcaccgttaaccatca

SEQ ID NO: 5888071 - DNA, 25 bp, Homo sapien
aagtcaggatgtgcacaggctgtat

SEQ ID NO: 5888072 - DNA, 25 bp, Homo sapien
ttgcacttacgatgtaggaagcagt

SEQ ID NO: 5888073 - DNA, 25 bp, Homo sapien
caatgagctcacagaagtcaggatg

SEQ ID NO: 5888074 - DNA, 25 bp, Homo sapien
ccgtgtactttcccatcataatttt

SEQ ID NO: 5888075 - DNA, 25 bp, Homo sapien
tctttatcatctcggtgatcctcca

SEQ ID NO: 5888076 - DNA, 25 bp, Homo sapien
cttcagggcatcagcctggctgtat

SEQ ID NO: 5888077 - DNA, 25 bp, Homo sapien
aactgtcacaaggctgccgtggatg

SEQ ID NO: 5888078 - DNA, 25 bp, Homo sapien
gcgtatgaaaggagtgtaagctttg

SEQ ID NO: 5888079 - DNA, 25 bp, Homo sapien
atgtaaaacagtttcatcttccacc

SEQ ID NO: 5888080 - DNA, 25 bp, Homo sapien
taaaattctgctgtaggggagacca

SEQ ID NO: 5888081 - DNA, 25 bp, Homo sapien
gaactacattgacaaaacttttcac

SEQ ID NO: 5888082 - DNA, 25 bp, Homo sapien
cgccaacaaactggtcccttctcag

SEQ ID NO: 5888083 - DNA, 25 bp, Homo sapien
cttcaggatcgtctccatcatcatc

SEQ ID NO: 5888084 - DNA, 25 bp, Homo sapien
cttttgcatagcagtttggatttac

SEQ ID NO: 5888085 - DNA, 25 bp, Homo sapien
caatggcacagaaattgtcatagta

SEQ ID NO: 5888086 - DNA, 25 bp, Homo sapien
ggaaaatccaagtcactggtcaccg

SEQ ID NO: 5888087 - DNA, 25 bp, Homo sapien
gcctacagaaaagcgtatgaaagga

SEQ ID NO: 5888088 - DNA, 25 bp, Homo sapien
tgttcaagttgaacagaaagctgca

SEQ ID NO: 5888089 - DNA, 25 bp, Homo sapien
gcagttcttgcaggacacattttta

SEQ ID NO: 5888090 - DNA, 25 bp, Homo sapien
aaggagtgtaagctttgctctctct

SEQ ID NO: 5888091 - DNA, 25 bp, Homo sapien
ctgtatcctttgattccagcacatt

SEQ ID NO: 5888092 - DNA, 25 bp, Homo sapien
cttctttttccttggaggagtatcc

SEQ ID NO: 5888093 - DNA, 25 bp, Homo sapien
tcatacacctgtctacatgttttgg

SEQ ID NO: 5888094 - DNA, 25 bp, Homo sapien
aatgggatgacttgtgttggaaaat

SEQ ID NO: 5888095 - DNA, 25 bp, Homo sapien
ggtccatctatgttgggggtacatt

SEQ ID NO: 5888096 - DNA, 25 bp, Homo sapien
ataaggaatgttatgtaaaacagtt

SEQ ID NO: 5888097 - DNA, 25 bp, Homo sapien
gcaatagatgctttttggagccccg

SEQ ID NO: 5888098 - DNA, 25 bp, Homo sapien
tgcagcccacaaccggtgtttcctc

SEQ ID NO: 5888099 - DNA, 25 bp, Homo sapien
aaattttgtgctatcacacaagggc

SEQ ID NO: 5888100 - DNA, 25 bp, Homo sapien
agccaggtagcacgggcactgcttg

SEQ ID NO: 5888101 - DNA, 25 bp, Homo sapien
gagctcgaagtttcatctttcttct

SEQ ID NO: 5888102 - DNA, 25 bp, Homo sapien
aggaggttcaatatttggcttcatc

SEQ ID NO: 5888103 - DNA, 25 bp, Homo sapien
ccatataaggaatgttatgtaaaac

SEQ ID NO: 5888104 - DNA, 25 bp, Homo sapien
tacttcagggcatcagcctggctgt

SEQ ID NO: 5888105 - DNA, 25 bp, Homo sapien
actggtcaccgaacactccctagtc

SEQ ID NO: 5888106 - DNA, 25 bp, Homo sapien
tccgccaacaaactggtcccttctc

SEQ ID NO: 5888107 - DNA, 25 bp, Homo sapien
ggaatgttatgtaaaacagtttcat

SEQ ID NO: 5888108 - DNA, 25 bp, Homo sapien
tgtgctttgcagcggcatcccggaa

SEQ ID NO: 5888109 - DNA, 25 bp, Homo sapien
gctgtctcagtcgcatgtactctga

SEQ ID NO: 5888110 - DNA, 25 bp, Homo sapien
caaaaaacagctcttcgccagtctg

SEQ ID NO: 5888111 - DNA, 25 bp, Homo sapien
ctcggtgatcctccagatctttctg

SEQ ID NO: 5888112 - DNA, 25 bp, Homo sapien
atggcacagaaattgtcatagtaag

SEQ ID NO: 5888113 - DNA, 25 bp, Homo sapien
atgaaaggagtgtaagctttgctct

SEQ ID NO: 5888114 - DNA, 25 bp, Homo sapien
aggaggaagtgcgcctgggagctgc

SEQ ID NO: 5888115 - DNA, 25 bp, Homo sapien
attttacacgcttccgccaacaaac

SEQ ID NO: 5888116 - DNA, 25 bp, Homo sapien
cctttttcagctgtatctttctgca

SEQ ID NO: 5888117 - DNA, 25 bp, Homo sapien
cctttgctccctccaaatgctggta

SEQ ID NO: 5888118 - DNA, 25 bp, Homo sapien
tctggaaacattgaggaaatggctt

SEQ ID NO: 5888119 - DNA, 25 bp, Homo sapien
aaatgctggtaacactgtggtccac

SEQ ID NO: 5888120 - DNA, 25 bp, Homo sapien
cagcggctccacaagtaagacagag

SEQ ID NO: 5888121 - DNA, 25 bp, Homo sapien
tcttccaccataaaattctgctgta

SEQ ID NO: 5888122 - DNA, 25 bp, Homo sapien
accatcctgatctaaaacttcatct

SEQ ID NO: 5888123 - DNA, 25 bp, Homo sapien
ctgaactacattgacaaaacttttc

SEQ ID NO: 5888124 - DNA, 25 bp, Homo sapien
tctttattggtgtttgacaccgaga

SEQ ID NO: 5888125 - DNA, 25 bp, Homo sapien
ctacagaaaagcgtatgaaaggagt

SEQ ID NO: 5888126 - DNA, 25 bp, Homo sapien
aaaaatacctatcctgtgatcaccg

SEQ ID NO: 5888127 - DNA, 25 bp, Homo sapien
cccttatctggaaacattgaggaaa

SEQ ID NO: 5888128 - DNA, 25 bp, Homo sapien
ccccgctgaatactgcagttcttgc

SEQ ID NO: 5888129 - DNA, 25 bp, Homo sapien
tttgcttcagaggagctcgaagttt

SEQ ID NO: 5888130 - DNA, 25 bp, Homo sapien
cactgtggtccacaaggtttgttgt

SEQ ID NO: 5888131 - DNA, 25 bp, Homo sapien
aagcagtcatatttaaaacatcgcc

SEQ ID NO: 5888132 - DNA, 25 bp, Homo sapien
ttggtccatctatgttgggggtaca

SEQ ID NO: 5888133 - DNA, 25 bp, Homo sapien
catttttctgcacaggatctttgat

SEQ ID NO: 5888134 - DNA, 25 bp, Homo sapien
tgaacagatttagcatttggtccat

SEQ ID NO: 5888135 - DNA, 25 bp, Homo sapien
tgttacccttgcgggttgcatccac

SEQ ID NO: 5888136 - DNA, 25 bp, Homo sapien
atgtactctgattttacacgcttcc

SEQ ID NO: 5888137 - DNA, 25 bp, Homo sapien
cagaaattgtcatagtaagtgccaa

SEQ ID NO: 5888138 - DNA, 25 bp, Homo sapien
aggagctcgaagtttcatctttctt

SEQ ID NO: 5888139 - DNA, 25 bp, Homo sapien
caaggctgccgtggatgatcacagg

SEQ ID NO: 5888140 - DNA, 25 bp, Homo sapien
gtacattcaggaggaagtgcgcctg

SEQ ID NO: 5888141 - DNA, 25 bp, Homo sapien
tctgaacagatttagcatttggtcc

SEQ ID NO: 5888142 - DNA, 25 bp, Homo sapien
atgctagattctttgactctaaact

SEQ ID NO: 5888143 - DNA, 25 bp, Homo sapien
tttccctcttctgtcagcttcatct

SEQ ID NO: 5888144 - DNA, 25 bp, Homo sapien
actgcattcagagtctttaatggga

SEQ ID NO: 5888145 - DNA, 25 bp, Homo sapien
aatttcatcatttataaacccacat

SEQ ID NO: 5888146 - DNA, 25 bp, Homo sapien
atcatcatcatcgtcatcatcatta

SEQ ID NO: 5888147 - DNA, 25 bp, Homo sapien
gtcagcggctccacaagtaagacag

SEQ ID NO: 5888148 - DNA, 25 bp, Homo sapien
tcagctcgtctgaacctcttgagct

SEQ ID NO: 5888149 - DNA, 25 bp, Homo sapien
ctcagatttcttcccagtctggccc

SEQ ID NO: 5888150 - DNA, 25 bp, Homo sapien
tcccatataaggaatgttatgtaaa

SEQ ID NO: 5888151 - DNA, 25 bp, Homo sapien
ctgctgtgcccttatctggaaacat

SEQ ID NO: 5888152 - DNA, 25 bp, Homo sapien
agaagtcaggatgtgcacaggctgt

SEQ ID NO: 5888153 - DNA, 25 bp, Homo sapien
atgagctcacagaagtcaggatgtg

SEQ ID NO: 5888154 - DNA, 25 bp, Homo sapien
tgcttcagaggagctcgaagtttca

SEQ ID NO: 5888155 - DNA, 25 bp, Homo sapien
attaacctagcaatggcacagaaat

SEQ ID NO: 5888156 - DNA, 25 bp, Homo sapien
cctttagttcttctgctgtgccctt

SEQ ID NO: 5888157 - DNA, 25 bp, Homo sapien
gcagcggcatcccggaaagcggttt

SEQ ID NO: 5888158 - DNA, 25 bp, Homo sapien
ttgggggtacattcaggaggaagtg

SEQ ID NO: 5888159 - DNA, 25 bp, Homo sapien
taatcaaaaaacagctcttcgccag

SEQ ID NO: 5888160 - DNA, 25 bp, Homo sapien
tccgcttataagtgttgggtgttgc

SEQ ID NO: 5888161 - DNA, 25 bp, Homo sapien
tctgtaatcaaaaaacagctcttcg

SEQ ID NO: 5888162 - DNA, 25 bp, Homo sapien
gagctcacagaagtcaggatgtgca

SEQ ID NO: 5888163 - DNA, 25 bp, Homo sapien
tgaaaagaataattgcacttacgat

SEQ ID NO: 5888164 - DNA, 25 bp, Homo sapien
cagatttcttcccagtctggcccat

SEQ ID NO: 5888165 - DNA, 25 bp, Homo sapien
ccactccactccacattctcaggag

SEQ ID NO: 5888166 - DNA, 25 bp, Homo sapien
ggctctcttggcaaaaatacctatc

SEQ ID NO: 5888167 - DNA, 25 bp, Homo sapien
ttcatctttattggtgtttgacacc

SEQ ID NO: 5888168 - DNA, 25 bp, Homo sapien
tttttccttggaggagtatccacat

SEQ ID NO: 5888169 - DNA, 25 bp, Homo sapien
atgatttgcaaaacgaattttgtta

SEQ ID NO: 5888170 - DNA, 25 bp, Homo sapien
catcgtcatcatcattatattgacc

SEQ ID NO: 5888171 - DNA, 25 bp, Homo sapien
tgacaccgagaatttgcttcagagg

SEQ ID NO: 5888172 - DNA, 25 bp, Homo sapien
acagccaggtagcacgggcactgct

SEQ ID NO: 5888173 - DNA, 25 bp, Homo sapien
tggtcaccgaacactccctagtccc

SEQ ID NO: 5888174 - DNA, 25 bp, Homo sapien
aagcgtatgaaaggagtgtaagctt

SEQ ID NO: 5888175 - DNA, 25 bp, Homo sapien
aaacttcatctcccatataaggaat

SEQ ID NO: 5888176 - DNA, 25 bp, Homo sapien
aggtttgttgtctagagctgtttct

SEQ ID NO: 5888177 - DNA, 25 bp, Homo sapien
gcgcctgggagctgctgttcggtga

SEQ ID NO: 5888178 - DNA, 25 bp, Homo sapien
tctatgttgggggtacattcaggag

SEQ ID NO: 5888179 - DNA, 25 bp, Homo sapien
attgttcaagttgaacagaaagctg

SEQ ID NO: 5888180 - DNA, 25 bp, Homo sapien
ctgtaggggagaccaagaatacatt

SEQ ID NO: 5888181 - DNA, 25 bp, Homo sapien
atcaccgttaaccatcataactttt

SEQ ID NO: 5888182 - DNA, 25 bp, Homo sapien
cattcaccaactccacaaaaatttc

SEQ ID NO: 5888183 - DNA, 25 bp, Homo sapien
gtaagtgccaatgaggactctaaac

SEQ ID NO: 5888184 - DNA, 25 bp, Homo sapien
atgtgcacaggctgtatccttcgct

SEQ ID NO: 5888185 - DNA, 25 bp, Homo sapien
tacacgcttccgccaacaaactggt

SEQ ID NO: 5888186 - DNA, 25 bp, Homo sapien
gctgaatactgcagttcttgcagga

SEQ ID NO: 5888187 - DNA, 25 bp, Homo sapien
tcttcaatgaaagtaccatcctgat

SEQ ID NO: 5888188 - DNA, 25 bp, Homo sapien
cggcatcccggaaagcggttttgac

SEQ ID NO: 5888189 - DNA, 25 bp, Homo sapien
caactgcattcagagtctttaatgg

SEQ ID NO: 5888190 - DNA, 25 bp, Homo sapien
ccctatcactgtctgtatcctttga

SEQ ID NO: 5888191 - DNA, 25 bp, Homo sapien
catctttattggtgtttgacaccga

SEQ ID NO: 5888192 - DNA, 25 bp, Homo sapien
tgcattcagagtctttaatgggatg

SEQ ID NO: 5888193 - DNA, 25 bp, Homo sapien
gatcgtctccatcatcatcatcgtc

SEQ ID NO: 5888194 - DNA, 25 bp, Homo sapien
actacattgacaaaacttttcacaa

SEQ ID NO: 5888195 - DNA, 25 bp, Homo sapien
ccaccataaaattctgctgtagggg

SEQ ID NO: 5888196 - DNA, 25 bp, Homo sapien
taaccatcataacttttgcatagca

SEQ ID NO: 5888197 - DNA, 25 bp, Homo sapien
gcctgggagctgctgttcggtgagt

SEQ ID NO: 5888198 - DNA, 25 bp, Homo sapien
cttcaaaaattttatcagaaggaaa

SEQ ID NO: 5888199 - DNA, 25 bp, Homo sapien
ttctttgactctaaactcatacacc

SEQ ID NO: 5888200 - DNA, 25 bp, Homo sapien
gttagaggagccgtcctttttcagc

SEQ ID NO: 5888201 - DNA, 25 bp, Homo sapien
catacttcagggcatcagcctggct

SEQ ID NO: 5888202 - DNA, 25 bp, Homo sapien
tcagaggagctcgaagtttcatctt

SEQ ID NO: 5888203 - DNA, 25 bp, Homo sapien
tatctggaaacattgaggaaatggc

SEQ ID NO: 5888204 - DNA, 25 bp, Homo sapien
ggtactgaagcaactgcattcagag

SEQ ID NO: 5888205 - DNA, 25 bp, Homo sapien
ctgacgattggaactaaacatactc

SEQ ID NO: 5888206 - DNA, 25 bp, Homo sapien
taggaagcagtcatatttaaaacat

SEQ ID NO: 5888207 - DNA, 25 bp, Homo sapien
cgcaatgagctcacagaagtcagga

SEQ ID NO: 5888208 - DNA, 25 bp, Homo sapien
tttgttacccttgcgggttgcatcc

SEQ ID NO: 5888209 - DNA, 25 bp, Homo sapien
gttcttcaatgaaagtaccatcctg

SEQ ID NO: 5888210 - DNA, 25 bp, Homo sapien
ggtcagggtcacactctcggacagc

SEQ ID NO: 5888211 - DNA, 25 bp, Homo sapien
tctcaggaggttcaatatttggctt

SEQ ID NO: 5888212 - DNA, 25 bp, Homo sapien
ggtgctgggcctgctactgttattg

SEQ ID NO: 5888213 - DNA, 25 bp, Homo sapien
ctctccacagtattctgagatgaat

SEQ ID NO: 5888214 - DNA, 25 bp, Homo sapien
tccacaaggtttgttgtctagagct

SEQ ID NO: 5888215 - DNA, 25 bp, Homo sapien
cggaaagcggttttgacactctgaa

SEQ ID NO: 5888216 - DNA, 25 bp, Homo sapien
aatactgcagttcttgcaggacaca

SEQ ID NO: 5888217 - DNA, 25 bp, Homo sapien
cgctcagcggtgagagcagcagcaa

SEQ ID NO: 5888218 - DNA, 25 bp, Homo sapien
tgagagcagcagcaaactcctttgc

SEQ ID NO: 5888219 - DNA, 25 bp, Homo sapien
atctttgataaaaatcccccagcct

SEQ ID NO: 5888220 - DNA, 25 bp, Homo sapien
taaacatggttagaggagccgtcct

SEQ ID NO: 5888221 - DNA, 25 bp, Homo sapien
gtggtccacaaggtttgttgtctag

SEQ ID NO: 5888222 - DNA, 25 bp, Homo sapien
ttttggagccccgctgaatactgca

SEQ ID NO: 5888223 - DNA, 25 bp, Homo sapien
tactgttattgggaagccgtcctct

SEQ ID NO: 5888224 - DNA, 25 bp, Homo sapien
aaaattttctgacgattggaactaa

SEQ ID NO: 5888225 - DNA, 25 bp, Homo sapien
ttgaacagaaagctgcacatgtatt

SEQ ID NO: 5888226 - DNA, 25 bp, Homo sapien
gccagcaatagatgctttttggagc

SEQ ID NO: 5888227 - DNA, 25 bp, Homo sapien
ctttgctctctctgaacagatttag

SEQ ID NO: 5888228 - DNA, 25 bp, Homo sapien
ttgatagttgtaaacatggttagag

SEQ ID NO: 5888229 - DNA, 25 bp, Homo sapien
ttccaaaattttctgacgattggaa

SEQ ID NO: 5888230 - DNA, 25 bp, Homo sapien
acattctcaggaggttcaatatttg

SEQ ID NO: 5888231 - DNA, 25 bp, Homo sapien
gtttgttgtctagagctgtttctgt

SEQ ID NO: 5888232 - DNA, 25 bp, Homo sapien
tgggggtgctgggcctgctactgtt

SEQ ID NO: 5888233 - DNA, 25 bp, Homo sapien
tttacacgcttccgccaacaaactg

SEQ ID NO: 5888234 - DNA, 25 bp, Homo sapien
ttttattagttcttcaatgaaagta

SEQ ID NO: 5888235 - DNA, 25 bp, Homo sapien
ctgtcagcttcatcttgagaaataa

SEQ ID NO: 5888236 - DNA, 25 bp, Homo sapien
ggatgatcacagggttgatagttgt

SEQ ID NO: 5888237 - DNA, 25 bp, Homo sapien
caccactccactccacattctcagg

SEQ ID NO: 5888238 - DNA, 25 bp, Homo sapien
taaacatactctttacttcatcagc

SEQ ID NO: 5888239 - DNA, 25 bp, Homo sapien
taatggtgggggtgctgggcctgct

SEQ ID NO: 5888240 - DNA, 25 bp, Homo sapien
aatatttggcttcatctttattggt

SEQ ID NO: 5888241 - DNA, 25 bp, Homo sapien
aaaaattttgtgctatcacacaagg

SEQ ID NO: 5888242 - DNA, 25 bp, Homo sapien
gctggagctatgatgctagattctt

SEQ ID NO: 5888243 - DNA, 25 bp, Homo sapien
agtgttgggtgttgcatgaaaagaa

SEQ ID NO: 5888244 - DNA, 25 bp, Homo sapien
aatagatgctttttggagccccgct

SEQ ID NO: 5888245 - DNA, 25 bp, Homo sapien
cactgcttggtgttgcactgtgctt

SEQ ID NO: 5888246 - DNA, 25 bp, Homo sapien
ggatgtgcacaggctgtatccttcg

SEQ ID NO: 5888247 - DNA, 25 bp, Homo sapien
tcatctcggtgatcctccagatctt

SEQ ID NO: 5888248 - DNA, 25 bp, Homo sapien
gtccctgcttccctatcactgtctg

SEQ ID NO: 5888249 - DNA, 25 bp, Homo sapien
ctgcagtgtgcagcccacaaccggt

SEQ ID NO: 5888250 - DNA, 25 bp, Homo sapien
gaacactccctagtcccgcgcaatg

SEQ ID NO: 5888251 - DNA, 25 bp, Homo sapien
ttctttccaaaattttctgacgatt

SEQ ID NO: 5888252 - DNA, 25 bp, Homo sapien
atcccggaaagcggttttgacactc

SEQ ID NO: 5888253 - DNA, 25 bp, Homo sapien
tccctagtcccgcgcaatgagctca

SEQ ID NO: 5888254 - DNA, 25 bp, Homo sapien
ctctcttggcaaaaatacctatcct

SEQ ID NO: 5888255 - DNA, 25 bp, Homo sapien
ggacagccaggtagcacgggcactg

SEQ ID NO: 5888256 - DNA, 25 bp, Homo sapien
gctgtttctgtgttcttccgcttat

SEQ ID NO: 5888257 - DNA, 25 bp, Homo sapien
acagtattctgagatgaattcattt

SEQ ID NO: 5888258 - DNA, 25 bp, Homo sapien
acagaaaagcgtatgaaaggagtgt

SEQ ID NO: 5888259 - DNA, 25 bp, Homo sapien
gtctggatggctctcttggcaaaaa

SEQ ID NO: 5888260 - DNA, 25 bp, Homo sapien
tgggatgacttgtgttggaaaatcc

SEQ ID NO: 5888261 - DNA, 25 bp, Homo sapien
tgttgggggtacattcaggaggaag

SEQ ID NO: 5888262 - DNA, 25 bp, Homo sapien
cgttctttccaaaattttctgacga

SEQ ID NO: 5888263 - DNA, 25 bp, Homo sapien
gcaaaaatacctatcctgtgatcac

SEQ ID NO: 5888264 - DNA, 25 bp, Homo sapien
ttttctgacgattggaactaaacat

SEQ ID NO: 5888265 - DNA, 25 bp, Homo sapien
atacctatcctgtgatcaccgttaa

SEQ ID NO: 5888266 - DNA, 25 bp, Homo sapien
catccaccacaaaatcattgttcaa

SEQ ID NO: 5888267 - DNA, 25 bp, Homo sapien
ttacttcatcagctcgtctgaacct

SEQ ID NO: 5888268 - DNA, 25 bp, Homo sapien
gttgcatgaaaagaataattgcact

SEQ ID NO: 5888269 - DNA, 25 bp, Homo sapien
ggcacagaaattgtcatagtaagtg

SEQ ID NO: 5888270 - DNA, 25 bp, Homo sapien
catcatcatcgtcatcatcattata

SEQ ID NO: 5888271 - DNA, 25 bp, Homo sapien
ctcttggcaaaaatacctatcctgt

SEQ ID NO: 5888272 - DNA, 25 bp, Homo sapien
tcgcctacagaaaagcgtatgaaag

SEQ ID NO: 5888273 - DNA, 25 bp, Homo sapien
aatttgcttcagaggagctcgaagt

SEQ ID NO: 5888274 - DNA, 25 bp, Homo sapien
gacagaggtcagggtcacactctcg

SEQ ID NO: 5888275 - DNA, 25 bp, Homo sapien
gaataattgcacttacgatgtagga

SEQ ID NO: 5888276 - DNA, 25 bp, Homo sapien
gagctgctgttcggtgagttcttta

SEQ ID NO: 5888277 - DNA, 25 bp, Homo sapien
tgggcggctttctttatcatctcgg

SEQ ID NO: 5888278 - DNA, 25 bp, Homo sapien
caagttgaacagaaagctgcacatg

SEQ ID NO: 5888279 - DNA, 25 bp, Homo sapien
catcttccaccataaaattctgctg

SEQ ID NO: 5888280 - DNA, 25 bp, Homo sapien
attttgttacccttgcgggttgcat

SEQ ID NO: 5888281 - DNA, 25 bp, Homo sapien
tctgaacctcttgagctgtctcagt

SEQ ID NO: 5888282 - DNA, 25 bp, Homo sapien
ctctttacttcatcagctcgtctga

SEQ ID NO: 5888283 - DNA, 25 bp, Homo sapien
gaggaaatggcttcaaaaattttat

SEQ ID NO: 5888284 - DNA, 25 bp, Homo sapien
tttcgatgccgacatacttcagggc

SEQ ID NO: 5888285 - DNA, 25 bp, Homo sapien
tgtctcagtcgcatgtactctgatt

SEQ ID NO: 5888286 - DNA, 25 bp, Homo sapien
ctgcggcctcctggacgttttggtg

SEQ ID NO: 5888287 - DNA, 25 bp, Homo sapien
actgtgctttgcagcggcatcccgg

SEQ ID NO: 5888288 - DNA, 25 bp, Homo sapien
ctttttggagccccgctgaatactg

SEQ ID NO: 5888289 - DNA, 25 bp, Homo sapien
gatcacagggttgatagttgtaaac

SEQ ID NO: 5888290 - DNA, 25 bp, Homo sapien
tcattgttcaagttgaacagaaagc

SEQ ID NO: 5888291 - DNA, 25 bp, Homo sapien
ttccaccataaaattctgctgtagg

SEQ ID NO: 5888292 - DNA, 25 bp, Homo sapien
tcacagggttgatagttgtaaacat

SEQ ID NO: 5888293 - DNA, 25 bp, Homo sapien
tggcttcatctttattggtgtttga

SEQ ID NO: 5888294 - DNA, 25 bp, Homo sapien
aggctgtatccttcgctgtttccat

SEQ ID NO: 5888295 - DNA, 25 bp, Homo sapien
agcaactgcattcagagtctttaat

SEQ ID NO: 5888296 - DNA, 25 bp, Homo sapien
tcgctgtttccattcttggtttaag

SEQ ID NO: 5888297 - DNA, 25 bp, Homo sapien
cacgcttccgccaacaaactggtcc

SEQ ID NO: 5888298 - DNA, 25 bp, Homo sapien
cgtctgaacctcttgagctgtctca

SEQ ID NO: 5888299 - DNA, 25 bp, Homo sapien
tccgctcagcggtgagagcagcagc

SEQ ID NO: 5888300 - DNA, 25 bp, Homo sapien
accataaaattctgctgtaggggag

SEQ ID NO: 5888301 - DNA, 25 bp, Homo sapien
gaaagtaccatcctgatctaaaact

SEQ ID NO: 5888302 - DNA, 25 bp, Homo sapien
catcctcagcgggagctggagctat

SEQ ID NO: 5888303 - DNA, 25 bp, Homo sapien
aatcccccagcctgccacgtcagat

SEQ ID NO: 5888304 - DNA, 25 bp, Homo sapien
tgcatgaaaagaataattgcactta

SEQ ID NO: 5888305 - DNA, 25 bp, Homo sapien
tgccacgtcagatggtgccagcaat

SEQ ID NO: 5888306 - DNA, 25 bp, Homo sapien
gtctacatgttttggtcccaattaa

SEQ ID NO: 5888307 - DNA, 25 bp, Homo sapien
cccggaaagcggttttgacactctg

SEQ ID NO: 5888308 - DNA, 25 bp, Homo sapien
ggtcacactctcggacagccaggta

SEQ ID NO: 5888309 - DNA, 25 bp, Homo sapien
gatgaattcatttttctgcacagga

SEQ ID NO: 5888310 - DNA, 25 bp, Homo sapien
agtgtgcagcccacaaccggtgttt

SEQ ID NO: 5888311 - DNA, 25 bp, Homo sapien
acaaaaattttgtgctatcacacaa

SEQ ID NO: 5888312 - DNA, 25 bp, Homo sapien
ccgttaaccatcataacttttgcat

SEQ ID NO: 5888313 - DNA, 25 bp, Homo sapien
tcatatttaaaacatcgcctacaga

SEQ ID NO: 5888314 - DNA, 25 bp, Homo sapien
gcactgtgctttgcagcggcatccc

SEQ ID NO: 5888315 - DNA, 25 bp, Homo sapien
gtatctttctgcagtgtgcagccca

SEQ ID NO: 5888316 - DNA, 25 bp, Homo sapien
tcatacactttccctcttctgtcag

SEQ ID NO: 5888317 - DNA, 25 bp, Homo sapien
catctcccatataaggaatgttatg

SEQ ID NO: 5888318 - DNA, 25 bp, Homo sapien
tcagggtcacactctcggacagcca

SEQ ID NO: 5888319 - DNA, 25 bp, Homo sapien
tgttgcactgtgctttgcagcggca

SEQ ID NO: 5888320 - DNA, 25 bp, Homo sapien
ggtgggggtgctgggcctgctactg

SEQ ID NO: 5888321 - DNA, 25 bp, Homo sapien
gttttggtggggtctttatccgctc

SEQ ID NO: 5888322 - DNA, 25 bp, Homo sapien
ttcatcagctcgtctgaacctcttg

SEQ ID NO: 5888323 - DNA, 25 bp, Homo sapien
ctgtctgtatcctttgattccagca

SEQ ID NO: 5888324 - DNA, 25 bp, Homo sapien
ccaggtagcacgggcactgcttggt

SEQ ID NO: 5888325 - DNA, 25 bp, Homo sapien
ctccacaagtaagacagaggtcagg

SEQ ID NO: 5888326 - DNA, 25 bp, Homo sapien
tctctttcgatgccgacatacttca

SEQ ID NO: 5888327 - DNA, 25 bp, Homo sapien
cctgccacgtcagatggtgccagca

SEQ ID NO: 5888328 - DNA, 25 bp, Homo sapien
gcagtgtgcagcccacaaccggtgt

SEQ ID NO: 5888329 - DNA, 25 bp, Homo sapien
cacatcctcagcgggagctggagct

SEQ ID NO: 5888330 - DNA, 25 bp, Homo sapien
cctcttgagctgtctcagtcgcatg

SEQ ID NO: 5888331 - DNA, 25 bp, Homo sapien
tcactggtcaccgaacactccctag

SEQ ID NO: 5888332 - DNA, 25 bp, Homo sapien
ttgataaaaatcccccagcctgcca

SEQ ID NO: 5888333 - DNA, 25 bp, Homo sapien
aactcctttgctccctccaaatgct

SEQ ID NO: 5888334 - DNA, 25 bp, Homo sapien
acagctcttcgccagtctggatggc

SEQ ID NO: 5888335 - DNA, 25 bp, Homo sapien
ctgtcacaaggctgccgtggatgat

SEQ ID NO: 5888336 - DNA, 25 bp, Homo sapien
tatctgtaatcaaaaaacagctctt

SEQ ID NO: 5888337 - DNA, 25 bp, Homo sapien
atgaggactctaaacattgaggctt

SEQ ID NO: 5888338 - DNA, 25 bp, Homo sapien
gggatttccatttctctttcgatgc

SEQ ID NO: 5888339 - DNA, 25 bp, Homo sapien
tttgattccagcacattaatggtgg

SEQ ID NO: 5888340 - DNA, 25 bp, Homo sapien
cctcttctgcggcctcctggacgtt

SEQ ID NO: 5888341 - DNA, 25 bp, Homo sapien
tctagagctgtttctgtgttcttcc

SEQ ID NO: 5888342 - DNA, 25 bp, Homo sapien
ggtcccttctcagatttcttcccag

SEQ ID NO: 5888343 - DNA, 25 bp, Homo sapien
agaatttgcttcagaggagctcgaa

SEQ ID NO: 5888344 - DNA, 25 bp, Homo sapien
ggttgatagttgtaaacatggttag

SEQ ID NO: 5888345 - DNA, 25 bp, Homo sapien
tgaccaagggcattcaccaactcca

SEQ ID NO: 5888346 - DNA, 25 bp, Homo sapien
tagcagtttggatttaccgaatgat

SEQ ID NO: 5888347 - DNA, 25 bp, Homo sapien
tgatcaccgttaaccatcataactt

SEQ ID NO: 5888348 - DNA, 25 bp, Homo sapien
acactccctagtcccgcgcaatgag

SEQ ID NO: 5888349 - DNA, 25 bp, Homo sapien
caaggtttgttgtctagagctgttt

SEQ ID NO: 5888350 - DNA, 25 bp, Homo sapien
gaagcaactgcattcagagtcttta

SEQ ID NO: 5888351 - DNA, 25 bp, Homo sapien
cgggcactgcttggtgttgcactgt

SEQ ID NO: 5888352 - DNA, 25 bp, Homo sapien
cactgtctgtatcctttgattccag

SEQ ID NO: 5888353 - DNA, 25 bp, Homo sapien
tatgatgctagattctttgactcta

SEQ ID NO: 5888354 - DNA, 25 bp, Homo sapien
agtgtaagctttgctctctctgaac

SEQ ID NO: 5888355 - DNA, 25 bp, Homo sapien
agctgtatctttctgcagtgtgcag

SEQ ID NO: 5888356 - DNA, 25 bp, Homo sapien
ggtgtttgacaccgagaatttgctt

SEQ ID NO: 5888357 - DNA, 25 bp, Homo sapien
gcctcctggacgttttggtggggtc

SEQ ID NO: 5888358 - DNA, 25 bp, Homo sapien
tgcccttatctggaaacattgagga

SEQ ID NO: 5888359 - DNA, 25 bp, Homo sapien
tccccgtgtactttcccatcataat

SEQ ID NO: 5888360 - DNA, 25 bp, Homo sapien
ctgcttggtgttgcactgtgctttg

SEQ ID NO: 5888361 - DNA, 25 bp, Homo sapien
tctttcgatgccgacatacttcagg

SEQ ID NO: 5888362 - DNA, 25 bp, Homo sapien
gcacaggctgtatccttcgctgttt

SEQ ID NO: 5888363 - DNA, 25 bp, Homo sapien
tattggtgtttgacaccgagaattt

SEQ ID NO: 5888364 - DNA, 25 bp, Homo sapien
gcatttggtccatctatgttggggg

SEQ ID NO: 5888365 - DNA, 25 bp, Homo sapien
cagatttagcatttggtccatctat

SEQ ID NO: 5888366 - DNA, 25 bp, Homo sapien
tccttggaggagtatccacatcctc

SEQ ID NO: 5888367 - DNA, 25 bp, Homo sapien
gttttggtcccaattaacctagcaa

SEQ ID NO: 5888368 - DNA, 25 bp, Homo sapien
ctgcttccctatcactgtctgtatc

SEQ ID NO: 5888369 - DNA, 25 bp, Homo sapien
cttcgctgtttccattcttggttta

SEQ ID NO: 5888370 - DNA, 25 bp, Homo sapien
gagctatgatgctagattctttgac

SEQ ID NO: 5888371 - DNA, 25 bp, Homo sapien
tgatgctagattctttgactctaaa

SEQ ID NO: 5888372 - DNA, 25 bp, Homo sapien
acaccgagaatttgcttcagaggag

SEQ ID NO: 5888373 - DNA, 25 bp, Homo sapien
gtcaggatgtgcacaggctgtatcc

SEQ ID NO: 5888374 - DNA, 25 bp, Homo sapien
gatttagcatttggtccatctatgt

SEQ ID NO: 5888375 - DNA, 25 bp, Homo sapien
ggtgttgcactgtgctttgcagcgg

SEQ ID NO: 5888376 - DNA, 25 bp, Homo sapien
gacttgtgttggaaaatccaagtca

SEQ ID NO: 5888377 - DNA, 25 bp, Homo sapien
tggtcagcggctccacaagtaagac

SEQ ID NO: 5888378 - DNA, 25 bp, Homo sapien
ctgagatgaattcatttttctgcac

SEQ ID NO: 5888379 - DNA, 25 bp, Homo sapien
gcacttacgatgtaggaagcagtca

SEQ ID NO: 5888380 - DNA, 25 bp, Homo sapien
tccactccacattctcaggaggttc

SEQ ID NO: 5888381 - DNA, 25 bp, Homo sapien
acattatgggtactgaagcaactgc

SEQ ID NO: 5888382 - DNA, 25 bp, Homo sapien
tcatcattatattgaccaagggcat

SEQ ID NO: 5888383 - DNA, 25 bp, Homo sapien
cactccacattctcaggaggttcaa

SEQ ID NO: 5888384 - DNA, 25 bp, Homo sapien
ttctgtcagcttcatcttgagaaat

SEQ ID NO: 5888385 - DNA, 25 bp, Homo sapien
tccgttctttccaaaattttctgac

SEQ ID NO: 5888386 - DNA, 25 bp, Homo sapien
gtcacaaggctgccgtggatgatca

SEQ ID NO: 5888387 - DNA, 25 bp, Homo sapien
cctggctgtatctgtaatcaaaaaa

SEQ ID NO: 5888388 - DNA, 25 bp, Homo sapien
cgcttccgccaacaaactggtccct

SEQ ID NO: 5888389 - DNA, 25 bp, Homo sapien
atcattatattgaccaagggcattc

SEQ ID NO: 5888390 - DNA, 25 bp, Homo sapien
gtaaaacagtttcatcttccaccat

SEQ ID NO: 5888391 - DNA, 25 bp, Homo sapien
ctttacttcatcagctcgtctgaac

SEQ ID NO: 5888392 - DNA, 25 bp, Homo sapien
caccgaacactccctagtcccgcgc

SEQ ID NO: 5888393 - DNA, 25 bp, Homo sapien
gccaatgaggactctaaacattgag

SEQ ID NO: 5888394 - DNA, 25 bp, Homo sapien
atcctttgattccagcacattaatg

SEQ ID NO: 5888395 - DNA, 25 bp, Homo sapien
tgtgcccttatctggaaacattgag

SEQ ID NO: 5888396 - DNA, 25 bp, Homo sapien
atttaaaacatcgcctacagaaaag

SEQ ID NO: 5888397 - DNA, 25 bp, Homo sapien
cactctgaactacattgacaaaact

SEQ ID NO: 5888398 - DNA, 25 bp, Homo sapien
gtcccgcgcaatgagctcacagaag

SEQ ID NO: 5888399 - DNA, 25 bp, Homo sapien
ctgatctaaaacttcatctcccata

SEQ ID NO: 5888400 - DNA, 25 bp, Homo sapien
tgcatagcagtttggatttaccgaa

SEQ ID NO: 5888401 - DNA, 25 bp, Homo sapien
aagggatttccatttctctttcgat

SEQ ID NO: 5888402 - DNA, 25 bp, Homo sapien
tgtaatcaaaaaacagctcttcgcc

SEQ ID NO: 5888403 - DNA, 25 bp, Homo sapien
tttggcttcatctttattggtgttt

SEQ ID NO: 5888404 - DNA, 25 bp, Homo sapien
aagaataattgcacttacgatgtag

SEQ ID NO: 5888405 - DNA, 25 bp, Homo sapien
catcctgatctaaaacttcatctcc

SEQ ID NO: 5888406 - DNA, 25 bp, Homo sapien
aaactcatacacctgtctacatgtt

SEQ ID NO: 5888407 - DNA, 25 bp, Homo sapien
gaaacattgaggaaatggcttcaaa

SEQ ID NO: 5888408 - DNA, 25 bp, Homo sapien
ccgtcctcttctgcggcctcctgga

SEQ ID NO: 5888409 - DNA, 25 bp, Homo sapien
tccgcaccactccactccacattct

SEQ ID NO: 5888410 - DNA, 25 bp, Homo sapien
aacattgaggcttccgcaccactcc

SEQ ID NO: 5888411 - DNA, 25 bp, Homo sapien
ccaactccacaaaaatttcatcatt

SEQ ID NO: 5888412 - DNA, 25 bp, Homo sapien
ctccatcatcatcatcgtcatcatc

SEQ ID NO: 5888413 - DNA, 25 bp, Homo sapien
tctgctgtaggggagaccaagaata

SEQ ID NO: 5888414 - DNA, 25 bp, Homo sapien
gagctggagctatgatgctagattc

SEQ ID NO: 5888415 - DNA, 25 bp, Homo sapien
ctctgaactacattgacaaaacttt

SEQ ID NO: 5888416 - DNA, 25 bp, Homo sapien
tcacactctcggacagccaggtagc

SEQ ID NO: 5888417 - DNA, 25 bp, Homo sapien
ctcttctttttccttggaggagtat

SEQ ID NO: 5888418 - DNA, 25 bp, Homo sapien
tcagtcgcatgtactctgattttac

SEQ ID NO: 5888419 - DNA, 25 bp, Homo sapien
tcgcatgtactctgattttacacgc

SEQ ID NO: 5888420 - DNA, 25 bp, Homo sapien
gaggactgagagctcatggcatgag

SEQ ID NO: 5888421 - DNA, 25 bp, Homo sapien
ggagggtccttgagacggggccctg

SEQ ID NO: 5888422 - DNA, 25 bp, Homo sapien
gctcaggctccatgaagatcacctg

SEQ ID NO: 5888423 - DNA, 25 bp, Homo sapien
ttaattaccaaaaccattctctgag

SEQ ID NO: 5888424 - DNA, 25 bp, Homo sapien
tcaacacctctgagaaagctcactg

SEQ ID NO: 5888425 - DNA, 25 bp, Homo sapien
gcagcccctggccccgctgagatac

SEQ ID NO: 5888426 - DNA, 25 bp, Homo sapien
cagtgaaagggctgcaggagggtcc

SEQ ID NO: 5888427 - DNA, 25 bp, Homo sapien
acttttactaaacagaagcactact

SEQ ID NO: 5888428 - DNA, 25 bp, Homo sapien
tagagtagagctctcgttcccaaac

SEQ ID NO: 5888429 - DNA, 25 bp, Homo sapien
actttgttgcctagagaaaaatctt

SEQ ID NO: 5888430 - DNA, 25 bp, Homo sapien
tacacctgactcaacacctctgaga

SEQ ID NO: 5888431 - DNA, 25 bp, Homo sapien
atggcatgactagaaacagccttaa

SEQ ID NO: 5888432 - DNA, 25 bp, Homo sapien
gactcctgactttgaagttgcttta

SEQ ID NO: 5888433 - DNA, 25 bp, Homo sapien
tcctaagctcaggttcgagaacatt

SEQ ID NO: 5888434 - DNA, 25 bp, Homo sapien
acatctctaatgcctatctttctat

SEQ ID NO: 5888435 - DNA, 25 bp, Homo sapien
attctgtgtatctagagactcctga

SEQ ID NO: 5888436 - DNA, 25 bp, Homo sapien
cagatgccagacagtggctcccaga

SEQ ID NO: 5888437 - DNA, 25 bp, Homo sapien
ccttgaaggtgagggtgcagaagct

SEQ ID NO: 5888438 - DNA, 25 bp, Homo sapien
ctgagcagcccctggccccgctgag

SEQ ID NO: 5888439 - DNA, 25 bp, Homo sapien
tctcatctctgagcagcccctggcc

SEQ ID NO: 5888440 - DNA, 25 bp, Homo sapien
tagctcatcagcgtcttctgtcgtt

SEQ ID NO: 5888441 - DNA, 25 bp, Homo sapien
aaacaagcctttctcaggtggtatt

SEQ ID NO: 5888442 - DNA, 25 bp, Homo sapien
gatactcgggtgtttttgttagtgt

SEQ ID NO: 5888443 - DNA, 25 bp, Homo sapien
agattcagaatttctatcttttctt

SEQ ID NO: 5888444 - DNA, 25 bp, Homo sapien
ctttaaagcctgtgtgggtttgcgg

SEQ ID NO: 5888445 - DNA, 25 bp, Homo sapien
acaagggagtcagatgccagacagt

SEQ ID NO: 5888446 - DNA, 25 bp, Homo sapien
tctcaggacttttattccaggcctc

SEQ ID NO: 5888447 - DNA, 25 bp, Homo sapien
gttcgagaacattctgtgtatctag

SEQ ID NO: 5888448 - DNA, 25 bp, Homo sapien
ggtacagacttcctaatgacaactt

SEQ ID NO: 5888449 - DNA, 25 bp, Homo sapien
tgcctatctttctatcagatattaa

SEQ ID NO: 5888450 - DNA, 25 bp, Homo sapien
tgacaacttgtgactaacggtttct

SEQ ID NO: 5888451 - DNA, 25 bp, Homo sapien
tgcaggagggtccttgagacggggc

SEQ ID NO: 5888452 - DNA, 25 bp, Homo sapien
aggtgagggtgcagaagctttcagg

SEQ ID NO: 5888453 - DNA, 25 bp, Homo sapien
ttgtcaggtagttgtaaatgaatgt

SEQ ID NO: 5888454 - DNA, 25 bp, Homo sapien
aagttgctttaaagcctgtgtgggt

SEQ ID NO: 5888455 - DNA, 25 bp, Homo sapien
accctgcgtagccttagctcatcag

SEQ ID NO: 5888456 - DNA, 25 bp, Homo sapien
gttctttcttgactattttgctaaa

SEQ ID NO: 5888457 - DNA, 25 bp, Homo sapien
actcaacacctctgagaaagctcac

SEQ ID NO: 5888458 - DNA, 25 bp, Homo sapien
agctccttgaaggtgagggtgcaga

SEQ ID NO: 5888459 - DNA, 25 bp, Homo sapien
tgactaacggtttcttcagtggagt

SEQ ID NO: 5888460 - DNA, 25 bp, Homo sapien
ggcatgactagaaacagccttaact

SEQ ID NO: 5888461 - DNA, 25 bp, Homo sapien
tgttagtgtagcctgggcagtgaaa

SEQ ID NO: 5888462 - DNA, 25 bp, Homo sapien
agaatttctatcttttcttgtatgt

SEQ ID NO: 5888463 - DNA, 25 bp, Homo sapien
tatgttaattaccaaaaccattctc

SEQ ID NO: 5888464 - DNA, 25 bp, Homo sapien
cgttgataatggcatgactagaaac

SEQ ID NO: 5888465 - DNA, 25 bp, Homo sapien
acattctgtgtatctagagactcct

SEQ ID NO: 5888466 - DNA, 25 bp, Homo sapien
taaacagaagcactactttgttgcc

SEQ ID NO: 5888467 - DNA, 25 bp, Homo sapien
agacaagggagtcagatgccagaca

SEQ ID NO: 5888468 - DNA, 25 bp, Homo sapien
tcacctgctctaatgtccctgtgct

SEQ ID NO: 5888469 - DNA, 25 bp, Homo sapien
aaagcctgtgtgggtttgcggcggg

SEQ ID NO: 5888470 - DNA, 25 bp, Homo sapien
cctctgagacaagggagtcagatgc

SEQ ID NO: 5888471 - DNA, 25 bp, Homo sapien
gtgcttagttcagaggactgagagc

SEQ ID NO: 5888472 - DNA, 25 bp, Homo sapien
ctaatgcctatctttctatcagata

SEQ ID NO: 5888473 - DNA, 25 bp, Homo sapien
ttcttgtatgtttccatgttgtcag

SEQ ID NO: 5888474 - DNA, 25 bp, Homo sapien
cttgtatgtttccatgttgtcaggt

SEQ ID NO: 5888475 - DNA, 25 bp, Homo sapien
tggcatgagtaaatacatctctaat

SEQ ID NO: 5888476 - DNA, 25 bp, Homo sapien
tttctcatctctgagcagcccctgg

SEQ ID NO: 5888477 - DNA, 25 bp, Homo sapien
cacctctgagacaagggagtcagat

SEQ ID NO: 5888478 - DNA, 25 bp, Homo sapien
gaaacagccttaactcctaagctca

SEQ ID NO: 5888479 - DNA, 25 bp, Homo sapien
gcgtcttctgtcgttgttatatccc

SEQ ID NO: 5888480 - DNA, 25 bp, Homo sapien
cctacagttctttcttgactatttt

SEQ ID NO: 5888481 - DNA, 25 bp, Homo sapien
gcagctctgtacagtgagctccttg

SEQ ID NO: 5888482 - DNA, 25 bp, Homo sapien
agtgtagcctgggcagtgaaagggc

SEQ ID NO: 5888483 - DNA, 25 bp, Homo sapien
gcctgggcagtgaaagggctgcagg

SEQ ID NO: 5888484 - DNA, 25 bp, Homo sapien
cagacttcctaatgacaacttgtga

SEQ ID NO: 5888485 - DNA, 25 bp, Homo sapien
tatcttttcttgtatgtttccatgt

SEQ ID NO: 5888486 - DNA, 25 bp, Homo sapien
ggactgagagctcatggcatgagta

SEQ ID NO: 5888487 - DNA, 25 bp, Homo sapien
taacggtttcttcagtggagttatt

SEQ ID NO: 5888488 - DNA, 25 bp, Homo sapien
tgaagttgctttaaagcctgtgtgg

SEQ ID NO: 5888489 - DNA, 25 bp, Homo sapien
ttactaaacagaagcactactttgt

SEQ ID NO: 5888490 - DNA, 25 bp, Homo sapien
tctttgtacacctgactcaacacct

SEQ ID NO: 5888491 - DNA, 25 bp, Homo sapien
gagaacattctgtgtatctagagac

SEQ ID NO: 5888492 - DNA, 25 bp, Homo sapien
caggtggtattaatttactggacac

SEQ ID NO: 5888493 - DNA, 25 bp, Homo sapien
gggtccttgagacggggccctggga

SEQ ID NO: 5888494 - DNA, 25 bp, Homo sapien
cccatagagtagagctctcgttccc

SEQ ID NO: 5888495 - DNA, 25 bp, Homo sapien
agttatttgagaaagattcagaatt

SEQ ID NO: 5888496 - DNA, 25 bp, Homo sapien
aacacctctgagaaagctcactgct

SEQ ID NO: 5888497 - DNA, 25 bp, Homo sapien
agtgagctccttgaaggtgagggtg

SEQ ID NO: 5888498 - DNA, 25 bp, Homo sapien
actagaaacagccttaactcctaag

SEQ ID NO: 5888499 - DNA, 25 bp, Homo sapien
tttctatcttttcttgtatgtttcc

SEQ ID NO: 5888500 - DNA, 25 bp, Homo sapien
atacatctctaatgcctatctttct

SEQ ID NO: 5888501 - DNA, 25 bp, Homo sapien
acttttattccaggcctccgttagc

SEQ ID NO: 5888502 - DNA, 25 bp, Homo sapien
ctctgtacagtgagctccttgaagg

SEQ ID NO: 5888503 - DNA, 25 bp, Homo sapien
tttgttgcctagagaaaaatcttct

SEQ ID NO: 5888504 - DNA, 25 bp, Homo sapien
acacaaacttgggtatagctgaact

SEQ ID NO: 5888505 - DNA, 25 bp, Homo sapien
tggtattaatttactggacacgttg

SEQ ID NO: 5888506 - DNA, 25 bp, Homo sapien
ttctctgagaaaaaaaaaacaagcc

SEQ ID NO: 5888507 - DNA, 25 bp, Homo sapien
taatggcatgactagaaacagcctt

SEQ ID NO: 5888508 - DNA, 25 bp, Homo sapien
gagtcagatgccagacagtggctcc

SEQ ID NO: 5888509 - DNA, 25 bp, Homo sapien
ctagagaaaaatcttctcaggactt

SEQ ID NO: 5888510 - DNA, 25 bp, Homo sapien
ctctcgttcccaaacactccataga

SEQ ID NO: 5888511 - DNA, 25 bp, Homo sapien
gcttagttcagaggactgagagctc

SEQ ID NO: 5888512 - DNA, 25 bp, Homo sapien
ttagctttgttctctttgtacacct

SEQ ID NO: 5888513 - DNA, 25 bp, Homo sapien
cctgcgtagccttagctcatcagcg

SEQ ID NO: 5888514 - DNA, 25 bp, Homo sapien
ctttctcaggtggtattaatttact

SEQ ID NO: 5888515 - DNA, 25 bp, Homo sapien
cttgagacggggccctgggaaccca

SEQ ID NO: 5888516 - DNA, 25 bp, Homo sapien
gtaaatacatctctaatgcctatct

SEQ ID NO: 5888517 - DNA, 25 bp, Homo sapien
aaatcttctcaggacttttattcca

SEQ ID NO: 5888518 - DNA, 25 bp, Homo sapien
gagcagcccctggccccgctgagat

SEQ ID NO: 5888519 - DNA, 25 bp, Homo sapien
cttagctcatcagcgtcttctgtcg

SEQ ID NO: 5888520 - DNA, 25 bp, Homo sapien
ttgaaggtgagggtgcagaagcttt

SEQ ID NO: 5888521 - DNA, 25 bp, Homo sapien
aagctttcaggtgtgagctaaaagg

SEQ ID NO: 5888522 - DNA, 25 bp, Homo sapien
tgttgtcaggtagttgtaaatgaat

SEQ ID NO: 5888523 - DNA, 25 bp, Homo sapien
cttcctaatgacaacttgtgactaa

SEQ ID NO: 5888524 - DNA, 25 bp, Homo sapien
atatcccatagagtagagctctcgt

SEQ ID NO: 5888525 - DNA, 25 bp, Homo sapien
acaagcctttctcaggtggtattaa

SEQ ID NO: 5888526 - DNA, 25 bp, Homo sapien
tggacacgttgataatggcatgact

SEQ ID NO: 5888527 - DNA, 25 bp, Homo sapien
caggagggtccttgagacggggccc

SEQ ID NO: 5888528 - DNA, 25 bp, Homo sapien
ggacttttattccaggcctccgtta

SEQ ID NO: 5888529 - DNA, 25 bp, Homo sapien
tttgttagtgtagcctgggcagtga

SEQ ID NO: 5888530 - DNA, 25 bp, Homo sapien
tgtgactaacggtttcttcagtgga

SEQ ID NO: 5888531 - DNA, 25 bp, Homo sapien
gagtaaatacatctctaatgcctat

SEQ ID NO: 5888532 - DNA, 25 bp, Homo sapien
gcctagagaaaaatcttctcaggac

SEQ ID NO: 5888533 - DNA, 25 bp, Homo sapien
agacaagctcaggctccatgaagat

SEQ ID NO: 5888534 - DNA, 25 bp, Homo sapien
gcagaagctttcaggtgtgagctaa

SEQ ID NO: 5888535 - DNA, 25 bp, Homo sapien
tgagaaagctcactgctgtttacag

SEQ ID NO: 5888536 - DNA, 25 bp, Homo sapien
gatgccagacagtggctcccagaca

SEQ ID NO: 5888537 - DNA, 25 bp, Homo sapien
tgtacacctgactcaacacctctga

SEQ ID NO: 5888538 - DNA, 25 bp, Homo sapien
gggtatagctgaacttttactaaac

SEQ ID NO: 5888539 - DNA, 25 bp, Homo sapien
tgttaattaccaaaaccattctctg

SEQ ID NO: 5888540 - DNA, 25 bp, Homo sapien
tgtcgttgttatatcccatagagta

SEQ ID NO: 5888541 - DNA, 25 bp, Homo sapien
cagtggagttatttgagaaagattc

SEQ ID NO: 5888542 - DNA, 25 bp, Homo sapien
cagcgtcttctgtcgttgttatatc

SEQ ID NO: 5888543 - DNA, 25 bp, Homo sapien
acaagctcaggctccatgaagatca

SEQ ID NO: 5888544 - DNA, 25 bp, Homo sapien
gtgaaagggctgcaggagggtcctt

SEQ ID NO: 5888545 - DNA, 25 bp, Homo sapien
aggctccatgaagatcacctgctct

SEQ ID NO: 5888546 - DNA, 25 bp, Homo sapien
tttgaagttgctttaaagcctgtgt

SEQ ID NO: 5888547 - DNA, 25 bp, Homo sapien
cttctgtcgttgttatatcccatag

SEQ ID NO: 5888548 - DNA, 25 bp, Homo sapien
atagctgaacttttactaaacagaa

SEQ ID NO: 5888549 - DNA, 25 bp, Homo sapien
cgctgagatactcgggtgtttttgt

SEQ ID NO: 5888550 - DNA, 25 bp, Homo sapien
agttcagaggactgagagctcatgg

SEQ ID NO: 5888551 - DNA, 25 bp, Homo sapien
aagcctttctcaggtggtattaatt

SEQ ID NO: 5888552 - DNA, 25 bp, Homo sapien
tcaggtgtgagctaaaagggtacag

SEQ ID NO: 5888553 - DNA, 25 bp, Homo sapien
ttcagaggactgagagctcatggca

SEQ ID NO: 5888554 - DNA, 25 bp, Homo sapien
tgtagcctgggcagtgaaagggctg

SEQ ID NO: 5888555 - DNA, 25 bp, Homo sapien
accctttctcatctctgagcagccc

SEQ ID NO: 5888556 - DNA, 25 bp, Homo sapien
cctgactttgaagttgctttaaagc

SEQ ID NO: 5888557 - DNA, 25 bp, Homo sapien
tctagagactcctgactttgaagtt

SEQ ID NO: 5888558 - DNA, 25 bp, Homo sapien
cctctgagaaagctcactgctgttt

SEQ ID NO: 5888559 - DNA, 25 bp, Homo sapien
ctcctgactttgaagttgctttaaa

SEQ ID NO: 5888560 - DNA, 25 bp, Homo sapien
gctaaaagggtacagacttcctaat

SEQ ID NO: 5888561 - DNA, 25 bp, Homo sapien
aggttcgagaacattctgtgtatct

SEQ ID NO: 5888562 - DNA, 25 bp, Homo sapien
atttactggacacgttgataatggc

SEQ ID NO: 5888563 - DNA, 25 bp, Homo sapien
ttaccaaaaccattctctgagaaaa

SEQ ID NO: 5888564 - DNA, 25 bp, Homo sapien
attttgctaaaatctcttaaacaga

SEQ ID NO: 5888565 - DNA, 25 bp, Homo sapien
aagctcaggctccatgaagatcacc

SEQ ID NO: 5888566 - DNA, 25 bp, Homo sapien
ctcatggcatgagtaaatacatctc

SEQ ID NO: 5888567 - DNA, 25 bp, Homo sapien
aaagggtacagacttcctaatgaca

SEQ ID NO: 5888568 - DNA, 25 bp, Homo sapien
agagaaaaatcttctcaggactttt

SEQ ID NO: 5888569 - DNA, 25 bp, Homo sapien
cggggccctgggaacccacctctga

SEQ ID NO: 5888570 - DNA, 25 bp, Homo sapien
ctgaacttttactaaacagaagcac

SEQ ID NO: 5888571 - DNA, 25 bp, Homo sapien
tgtgggtttgcggcgggcagctctg

SEQ ID NO: 5888572 - DNA, 25 bp, Homo sapien
tacagacttcctaatgacaacttgt

SEQ ID NO: 5888573 - DNA, 25 bp, Homo sapien
gccctgggaacccacctctgagaca

SEQ ID NO: 5888574 - DNA, 25 bp, Homo sapien
ctccatagaaacaccctttctcatc

SEQ ID NO: 5888575 - DNA, 25 bp, Homo sapien
aaatacatctctaatgcctatcttt

SEQ ID NO: 5888576 - DNA, 25 bp, Homo sapien
ccctgtgcttagttcagaggactga

SEQ ID NO: 5888577 - DNA, 25 bp, Homo sapien
tgctttaaagcctgtgtgggtttgc

SEQ ID NO: 5888578 - DNA, 25 bp, Homo sapien
tcttttcttgtatgtttccatgttg

SEQ ID NO: 5888579 - DNA, 25 bp, Homo sapien
actcctaagctcaggttcgagaaca

SEQ ID NO: 5888580 - DNA, 25 bp, Homo sapien
gctcccagacaagctcaggctccat

SEQ ID NO: 5888581 - DNA, 25 bp, Homo sapien
ttaaagcctgtgtgggtttgcggcg

SEQ ID NO: 5888582 - DNA, 25 bp, Homo sapien
tttcaggtgtgagctaaaagggtac

SEQ ID NO: 5888583 - DNA, 25 bp, Homo sapien
gcctttctcaggtggtattaattta

SEQ ID NO: 5888584 - DNA, 25 bp, Homo sapien
cggcgggcagctctgtacagtgagc

SEQ ID NO: 5888585 - DNA, 25 bp, Homo sapien
gaacttttactaaacagaagcacta

SEQ ID NO: 5888586 - DNA, 25 bp, Homo sapien
cttaactcctaagctcaggttcgag

SEQ ID NO: 5888587 - DNA, 25 bp, Homo sapien
tttcttcagtggagttatttgagaa

SEQ ID NO: 5888588 - DNA, 25 bp, Homo sapien
tgagagctcatggcatgagtaaata

SEQ ID NO: 5888589 - DNA, 25 bp, Homo sapien
tgctaaaatctcttaaacagaaaag

SEQ ID NO: 5888590 - DNA, 25 bp, Homo sapien
acaccctttctcatctctgagcagc

SEQ ID NO: 5888591 - DNA, 25 bp, Homo sapien
cctgactcaacacctctgagaaagc

SEQ ID NO: 5888592 - DNA, 25 bp, Homo sapien
aaacaccctttctcatctctgagca

SEQ ID NO: 5888593 - DNA, 25 bp, Homo sapien
agctctcgttcccaaacactccata

SEQ ID NO: 5888594 - DNA, 25 bp, Homo sapien
cctccgttagctttgttctctttgt

SEQ ID NO: 5888595 - DNA, 25 bp, Homo sapien
catgaagatcacctgctctaatgtc

SEQ ID NO: 5888596 - DNA, 25 bp, Homo sapien
aaacacaaacttgggtatagctgaa

SEQ ID NO: 5888597 - DNA, 25 bp, Homo sapien
cactactttgttgcctagagaaaaa

SEQ ID NO: 5888598 - DNA, 25 bp, Homo sapien
cccctggccccgctgagatactcgg

SEQ ID NO: 5888599 - DNA, 25 bp, Homo sapien
gaagcactactttgttgcctagaga

SEQ ID NO: 5888600 - DNA, 25 bp, Homo sapien
cagccttaactcctaagctcaggtt

SEQ ID NO: 5888601 - DNA, 25 bp, Homo sapien
atgtccctgtgcttagttcagagga

SEQ ID NO: 5888602 - DNA, 25 bp, Homo sapien
taaaagggtacagacttcctaatga

SEQ ID NO: 5888603 - DNA, 25 bp, Homo sapien
tagagactcctgactttgaagttgc

SEQ ID NO: 5888604 - DNA, 25 bp, Homo sapien
tctgtcgttgttatatcccatagag

SEQ ID NO: 5888605 - DNA, 25 bp, Homo sapien
tccatgttgtcaggtagttgtaaat

SEQ ID NO: 5888606 - DNA, 25 bp, Homo sapien
acggtttcttcagtggagttatttg

SEQ ID NO: 5888607 - DNA, 25 bp, Homo sapien
aacactccatagaaacaccctttct

SEQ ID NO: 5888608 - DNA, 25 bp, Homo sapien
taaaatatgttaattaccaaaacca

SEQ ID NO: 5888609 - DNA, 25 bp, Homo sapien
aagggctgcaggagggtccttgaga

SEQ ID NO: 5888610 - DNA, 25 bp, Homo sapien
tggctcccagacaagctcaggctcc

SEQ ID NO: 5888611 - DNA, 25 bp, Homo sapien
tatctagagactcctgactttgaag

SEQ ID NO: 5888612 - DNA, 25 bp, Homo sapien
taactcctaagctcaggttcgagaa

SEQ ID NO: 5888613 - DNA, 25 bp, Homo sapien
tcccagacaagctcaggctccatga

SEQ ID NO: 5888614 - DNA, 25 bp, Homo sapien
tcttcagtggagttatttgagaaag

SEQ ID NO: 5888615 - DNA, 25 bp, Homo sapien
agcactactttgttgcctagagaaa

SEQ ID NO: 5888616 - DNA, 25 bp, Homo sapien
tcaggacttttattccaggcctccg

SEQ ID NO: 5888617 - DNA, 25 bp, Homo sapien
gctcatcagcgtcttctgtcgttgt

SEQ ID NO: 5888618 - DNA, 25 bp, Homo sapien
tggccccgctgagatactcgggtgt

SEQ ID NO: 5888619 - DNA, 25 bp, Homo sapien
cccaaacactccatagaaacaccct

SEQ ID NO: 5888620 - DNA, 25 bp, Homo sapien
acctgctctaatgtccctgtgctta

SEQ ID NO: 5888621 - DNA, 25 bp, Homo sapien
ccagacagtggctcccagacaagct

SEQ ID NO: 5888622 - DNA, 25 bp, Homo sapien
tcatctctgagcagcccctggcccc

SEQ ID NO: 5888623 - DNA, 25 bp, Homo sapien
acaaacttgggtatagctgaacttt

SEQ ID NO: 5888624 - DNA, 25 bp, Homo sapien
tcaggttcgagaacattctgtgtat

SEQ ID NO: 5888625 - DNA, 25 bp, Homo sapien
gagctaaaagggtacagacttccta

SEQ ID NO: 5888626 - DNA, 25 bp, Homo sapien
gtagagctctcgttcccaaacactc

SEQ ID NO: 5888627 - DNA, 25 bp, Homo sapien
atcccatagagtagagctctcgttc

SEQ ID NO: 5888628 - DNA, 25 bp, Homo sapien
ctctgagcagcccctggccccgctg

SEQ ID NO: 5888629 - DNA, 25 bp, Homo sapien
cctgtgtgggtttgcggcgggcagc

SEQ ID NO: 5888630 - DNA, 25 bp, Homo sapien
tctaatgtccctgtgcttagttcag

SEQ ID NO: 5888631 - DNA, 25 bp, Homo sapien
tttttgttagtgtagcctgggcagt

SEQ ID NO: 5888632 - DNA, 25 bp, Homo sapien
tgggaacccacctctgagacaaggg

SEQ ID NO: 5888633 - DNA, 25 bp, Homo sapien
ctgtgcttagttcagaggactgaga

SEQ ID NO: 5888634 - DNA, 25 bp, Homo sapien
ggtggtattaatttactggacacgt

SEQ ID NO: 5888635 - DNA, 25 bp, Homo sapien
ctcgggtgtttttgttagtgtagcc

SEQ ID NO: 5888636 - DNA, 25 bp, Homo sapien
actggacacgttgataatggcatga

SEQ ID NO: 5888637 - DNA, 25 bp, Homo sapien
tgtttacagtaccctgcgtagcctt

SEQ ID NO: 5888638 - DNA, 25 bp, Homo sapien
tgtttttgttagtgtagcctgggca

SEQ ID NO: 5888639 - DNA, 25 bp, Homo sapien
actaacggtttcttcagtggagtta

SEQ ID NO: 5888640 - DNA, 25 bp, Homo sapien
caggcctccgttagctttgttctct

SEQ ID NO: 5888641 - DNA, 25 bp, Homo sapien
tgtgtgggtttgcggcgggcagctc

SEQ ID NO: 5888642 - DNA, 25 bp, Homo sapien
ggcagtgaaagggctgcaggagggt

SEQ ID NO: 5888643 - DNA, 25 bp, Homo sapien
ctaaaatctcttaaacagaaaagat

SEQ ID NO: 5888644 - DNA, 25 bp, Homo sapien
tttacagtaccctgcgtagccttag

SEQ ID NO: 5888645 - DNA, 25 bp, Homo sapien
tccgttagctttgttctctttgtac

SEQ ID NO: 5888646 - DNA, 25 bp, Homo sapien
cagaggactgagagctcatggcatg

SEQ ID NO: 5888647 - DNA, 25 bp, Homo sapien
tcaggctccatgaagatcacctgct

SEQ ID NO: 5888648 - DNA, 25 bp, Homo sapien
tctttcttgactattttgctaaaat

SEQ ID NO: 5888649 - DNA, 25 bp, Homo sapien
ttattccaggcctccgttagctttg

SEQ ID NO: 5888650 - DNA, 25 bp, Homo sapien
tcatcagcgtcttctgtcgttgtta

SEQ ID NO: 5888651 - DNA, 25 bp, Homo sapien
cccacctctgagacaagggagtcag

SEQ ID NO: 5888652 - DNA, 25 bp, Homo sapien
tctgagacaagggagtcagatgcca

SEQ ID NO: 5888653 - DNA, 25 bp, Homo sapien
ctgtacagtgagctccttgaaggtg

SEQ ID NO: 5888654 - DNA, 25 bp, Homo sapien
cagtaccctgcgtagccttagctca

SEQ ID NO: 5888655 - DNA, 25 bp, Homo sapien
gggctgcaggagggtccttgagacg

SEQ ID NO: 5888656 - DNA, 25 bp, Homo sapien
tctctttgtacacctgactcaacac

SEQ ID NO: 5888657 - DNA, 25 bp, Homo sapien
cacctgactcaacacctctgagaaa

SEQ ID NO: 5888658 - DNA, 25 bp, Homo sapien
agagctctcgttcccaaacactcca

SEQ ID NO: 5888659 - DNA, 25 bp, Homo sapien
ttgactattttgctaaaatctctta

SEQ ID NO: 5888660 - DNA, 25 bp, Homo sapien
gtgcagaagctttcaggtgtgagct

SEQ ID NO: 5888661 - DNA, 25 bp, Homo sapien
tgtatctagagactcctgactttga

SEQ ID NO: 5888662 - DNA, 25 bp, Homo sapien
catgttgtcaggtagttgtaaatga

SEQ ID NO: 5888663 - DNA, 25 bp, Homo sapien
taagtgcctacagttctttcttgac

SEQ ID NO: 5888664 - DNA, 25 bp, Homo sapien
aagatcacctgctctaatgtccctg

SEQ ID NO: 5888665 - DNA, 25 bp, Homo sapien
gaaggtgagggtgcagaagctttca

SEQ ID NO: 5888666 - DNA, 25 bp, Homo sapien
attaatttactggacacgttgataa

SEQ ID NO: 5888667 - DNA, 25 bp, Homo sapien
gtgagctaaaagggtacagacttcc

SEQ ID NO: 5888668 - DNA, 25 bp, Homo sapien
cttctcaggacttttattccaggcc

SEQ ID NO: 5888669 - DNA, 25 bp, Homo sapien
tgagaaagattcagaatttctatct

SEQ ID NO: 5888670 - DNA, 25 bp, Homo sapien
gatcacctgctctaatgtccctgtg

SEQ ID NO: 5888671 - DNA, 25 bp, Homo sapien
aagggagtcagatgccagacagtgg

SEQ ID NO: 5888672 - DNA, 25 bp, Homo sapien
tgttatatcccatagagtagagctc

SEQ ID NO: 5888673 - DNA, 25 bp, Homo sapien
aaaaatcttctcaggacttttattc

SEQ ID NO: 5888674 - DNA, 25 bp, Homo sapien
gaacattctgtgtatctagagactc

SEQ ID NO: 5888675 - DNA, 25 bp, Homo sapien
agtggctcccagacaagctcaggct

SEQ ID NO: 5888676 - DNA, 25 bp, Homo sapien
aacttgtgactaacggtttcttcag

SEQ ID NO: 5888677 - DNA, 25 bp, Homo sapien
gcgggcagctctgtacagtgagctc

SEQ ID NO: 5888678 - DNA, 25 bp, Homo sapien
tagcctgggcagtgaaagggctgca

SEQ ID NO: 5888679 - DNA, 25 bp, Homo sapien
atgagtaaatacatctctaatgcct

SEQ ID NO: 5888680 - DNA, 25 bp, Homo sapien
gccttaactcctaagctcaggttcg

SEQ ID NO: 5888681 - DNA, 25 bp, Homo sapien
tttgctaaaatctcttaaacagaaa

SEQ ID NO: 5888682 - DNA, 25 bp, Homo sapien
gagtagagctctcgttcccaaacac

SEQ ID NO: 5888683 - DNA, 25 bp, Homo sapien
cctttctcatctctgagcagcccct

SEQ ID NO: 5888684 - DNA, 25 bp, Homo sapien
tgactagaaacagccttaactccta

SEQ ID NO: 5888685 - DNA, 25 bp, Homo sapien
tatgtttccatgttgtcaggtagtt

SEQ ID NO: 5888686 - DNA, 25 bp, Homo sapien
acagtgagctccttgaaggtgaggg

SEQ ID NO: 5888687 - DNA, 25 bp, Homo sapien
ctcgttcccaaacactccatagaaa

SEQ ID NO: 5888688 - DNA, 25 bp, Homo sapien
tttgcggcgggcagctctgtacagt

SEQ ID NO: 5888689 - DNA, 25 bp, Homo sapien
ctcaggtggtattaatttactggac

SEQ ID NO: 5888690 - DNA, 25 bp, Homo sapien
cgtagccttagctcatcagcgtctt

SEQ ID NO: 5888691 - DNA, 25 bp, Homo sapien
tctgtgtatctagagactcctgact

SEQ ID NO: 5888692 - DNA, 25 bp, Homo sapien
gagggtgcagaagctttcaggtgtg

SEQ ID NO: 5888693 - DNA, 25 bp, Homo sapien
ggtttgcggcgggcagctctgtaca

SEQ ID NO: 5888694 - DNA, 25 bp, Homo sapien
aaagctcactgctgtttacagtacc

SEQ ID NO: 5888695 - DNA, 25 bp, Homo sapien
gtattaatttactggacacgttgat

SEQ ID NO: 5888696 - DNA, 25 bp, Homo sapien
gacacgttgataatggcatgactag

SEQ ID NO: 5888697 - DNA, 25 bp, Homo sapien
acagaaaagataaacacaaacttgg

SEQ ID NO: 5888698 - DNA, 25 bp, Homo sapien
aacagccttaactcctaagctcagg

SEQ ID NO: 5888699 - DNA, 25 bp, Homo sapien
gttctctttgtacacctgactcaac

SEQ ID NO: 5888700 - DNA, 25 bp, Homo sapien
gctttcaggtgtgagctaaaagggt

SEQ ID NO: 5888701 - DNA, 25 bp, Homo sapien
gaaagggctgcaggagggtccttga

SEQ ID NO: 5888702 - DNA, 25 bp, Homo sapien
ggagttatttgagaaagattcagaa

SEQ ID NO: 5888703 - DNA, 25 bp, Homo sapien
tgggtttgcggcgggcagctctgta

SEQ ID NO: 5888704 - DNA, 25 bp, Homo sapien
aggtgtgagctaaaagggtacagac

SEQ ID NO: 5888705 - DNA, 25 bp, Homo sapien
agctcatggcatgagtaaatacatc

SEQ ID NO: 5888706 - DNA, 25 bp, Homo sapien
gctctaatgtccctgtgcttagttc

SEQ ID NO: 5888707 - DNA, 25 bp, Homo sapien
actttgaagttgctttaaagcctgt

SEQ ID NO: 5888708 - DNA, 25 bp, Homo sapien
aaagataaacacaaacttgggtata

SEQ ID NO: 5888709 - DNA, 25 bp, Homo sapien
gagactcctgactttgaagttgctt

SEQ ID NO: 5888710 - DNA, 25 bp, Homo sapien
tgtgtatctagagactcctgacttt

SEQ ID NO: 5888711 - DNA, 25 bp, Homo sapien
taatttactggacacgttgataatg

SEQ ID NO: 5888712 - DNA, 25 bp, Homo sapien
cctgggaacccacctctgagacaag

SEQ ID NO: 5888713 - DNA, 25 bp, Homo sapien
gctcaggttcgagaacattctgtgt

SEQ ID NO: 5888714 - DNA, 25 bp, Homo sapien
tgccagacagtggctcccagacaag

SEQ ID NO: 5888715 - DNA, 25 bp, Homo sapien
agggtacagacttcctaatgacaac

SEQ ID NO: 5888716 - DNA, 25 bp, Homo sapien
ggtttcttcagtggagttatttgag

SEQ ID NO: 5888717 - DNA, 25 bp, Homo sapien
ctgctctaatgtccctgtgcttagt

SEQ ID NO: 5888718 - DNA, 25 bp, Homo sapien
acttgggtatagctgaacttttact

SEQ ID NO: 5888719 - DNA, 25 bp, Homo sapien
tgagacaagggagtcagatgccaga

SEQ ID NO: 5888720 - DNA, 25 bp, Homo sapien
cccgctgagatactcgggtgttttt

SEQ ID NO: 5888721 - DNA, 25 bp, Homo sapien
tacagtaccctgcgtagccttagct

SEQ ID NO: 5888722 - DNA, 25 bp, Homo sapien
catagagtagagctctcgttcccaa

SEQ ID NO: 5888723 - DNA, 25 bp, Homo sapien
tgtttccatgttgtcaggtagttgt

SEQ ID NO: 5888724 - DNA, 25 bp, Homo sapien
taatgtccctgtgcttagttcagag

SEQ ID NO: 5888725 - DNA, 25 bp, Homo sapien
ttgataatggcatgactagaaacag

SEQ ID NO: 5888726 - DNA, 25 bp, Homo sapien
gactattttgctaaaatctcttaaa

SEQ ID NO: 5888727 - DNA, 25 bp, Homo sapien
gtacagtgagctccttgaaggtgag

SEQ ID NO: 5888728 - DNA, 25 bp, Homo sapien
agataaacacaaacttgggtatagc

SEQ ID NO: 5888729 - DNA, 25 bp, Homo sapien
cacctctgagaaagctcactgctgt

SEQ ID NO: 5888730 - DNA, 25 bp, Homo sapien
tgactttgaagttgctttaaagcct

SEQ ID NO: 5888731 - DNA, 25 bp, Homo sapien
actgagagctcatggcatgagtaaa

SEQ ID NO: 5888732 - DNA, 25 bp, Homo sapien
gttgttatatcccatagagtagagc

SEQ ID NO: 5888733 - DNA, 25 bp, Homo sapien
cagaagcactactttgttgcctaga

SEQ ID NO: 5888734 - DNA, 25 bp, Homo sapien
tcagaatttctatcttttcttgtat

SEQ ID NO: 5888735 - DNA, 25 bp, Homo sapien
agaaagattcagaatttctatcttt

SEQ ID NO: 5888736 - DNA, 25 bp, Homo sapien
caaacactccatagaaacacccttt

SEQ ID NO: 5888737 - DNA, 25 bp, Homo sapien
gctgcaggagggtccttgagacggg

SEQ ID NO: 5888738 - DNA, 25 bp, Homo sapien
agctgaacttttactaaacagaagc

SEQ ID NO: 5888739 - DNA, 25 bp, Homo sapien
gtcaggtagttgtaaatgaatgtat

SEQ ID NO: 5888740 - DNA, 25 bp, Homo sapien
ggcctccgttagctttgttctcttt

SEQ ID NO: 5888741 - DNA, 25 bp, Homo sapien
ctattttgctaaaatctcttaaaca

SEQ ID NO: 5888742 - DNA, 25 bp, Homo sapien
ctctaatgcctatctttctatcaga

SEQ ID NO: 5888743 - DNA, 25 bp, Homo sapien
tgcgtagccttagctcatcagcgtc

SEQ ID NO: 5888744 - DNA, 25 bp, Homo sapien
agacagtggctcccagacaagctca

SEQ ID NO: 5888745 - DNA, 25 bp, Homo sapien
ttttattccaggcctccgttagctt

SEQ ID NO: 5888746 - DNA, 25 bp, Homo sapien
ttgttctctttgtacacctgactca

SEQ ID NO: 5888747 - DNA, 25 bp, Homo sapien
ctaagctcaggttcgagaacattct

SEQ ID NO: 5888748 - DNA, 25 bp, Homo sapien
ctccttgaaggtgagggtgcagaag

SEQ ID NO: 5888749 - DNA, 25 bp, Homo sapien
tacagttctttcttgactattttgc

SEQ ID NO: 5888750 - DNA, 25 bp, Homo sapien
aatttctatcttttcttgtatgttt

SEQ ID NO: 5888751 - DNA, 25 bp, Homo sapien
tgcctacagttctttcttgactatt

SEQ ID NO: 5888752 - DNA, 25 bp, Homo sapien
gcatgagtaaatacatctctaatgc

SEQ ID NO: 5888753 - DNA, 25 bp, Homo sapien
tgcggcgggcagctctgtacagtga

SEQ ID NO: 5888754 - DNA, 25 bp, Homo sapien
ttatatcccatagagtagagctctc

SEQ ID NO: 5888755 - DNA, 25 bp, Homo sapien
gggccctgggaacccacctctgaga

SEQ ID NO: 5888756 - DNA, 25 bp, Homo sapien
agagctcatggcatgagtaaataca

SEQ ID NO: 5888757 - DNA, 25 bp, Homo sapien
tagccttagctcatcagcgtcttct

SEQ ID NO: 5888758 - DNA, 25 bp, Homo sapien
ccatagaaacaccctttctcatctc

SEQ ID NO: 5888759 - DNA, 25 bp, Homo sapien
tctatcttttcttgtatgtttccat

SEQ ID NO: 5888760 - DNA, 25 bp, Homo sapien
tcgttgttatatcccatagagtaga

SEQ ID NO: 5888761 - DNA, 25 bp, Homo sapien
ataaacacaaacttgggtatagctg

SEQ ID NO: 5888762 - DNA, 25 bp, Homo sapien
agcccctggccccgctgagatactc

SEQ ID NO: 5888763 - DNA, 25 bp, Homo sapien
tttgagaaagattcagaatttctat

SEQ ID NO: 5888764 - DNA, 25 bp, Homo sapien
gggagtcagatgccagacagtggct

SEQ ID NO: 5888765 - DNA, 25 bp, Homo sapien
ctgggcagtgaaagggctgcaggag

SEQ ID NO: 5888766 - DNA, 25 bp, Homo sapien
agaagctttcaggtgtgagctaaaa

SEQ ID NO: 5888767 - DNA, 25 bp, Homo sapien
gtgagggtgcagaagctttcaggtg

SEQ ID NO: 5888768 - DNA, 25 bp, Homo sapien
acagtggctcccagacaagctcagg

SEQ ID NO: 5888769 - DNA, 25 bp, Homo sapien
tcgagaacattctgtgtatctagag

SEQ ID NO: 5888770 - DNA, 25 bp, Homo sapien
gggcagctctgtacagtgagctcct

SEQ ID NO: 5888771 - DNA, 25 bp, Homo sapien
agctttgttctctttgtacacctga

SEQ ID NO: 5888772 - DNA, 25 bp, Homo sapien
tgactcaacacctctgagaaagctc

SEQ ID NO: 5888773 - DNA, 25 bp, Homo sapien
ctgagatactcgggtgtttttgtta

SEQ ID NO: 5888774 - DNA, 25 bp, Homo sapien
gtggagttatttgagaaagattcag

SEQ ID NO: 5888775 - DNA, 25 bp, Homo sapien
tcctaatgacaacttgtgactaacg

SEQ ID NO: 5888776 - DNA, 25 bp, Homo sapien
ttagttcagaggactgagagctcat

SEQ ID NO: 5888777 - DNA, 25 bp, Homo sapien
aatgcctatctttctatcagatatt

SEQ ID NO: 5888778 - DNA, 25 bp, Homo sapien
gtcttctgtcgttgttatatcccat

SEQ ID NO: 5888779 - DNA, 25 bp, Homo sapien
atctctgagcagcccctggccccgc

SEQ ID NO: 5888780 - DNA, 25 bp, Homo sapien
cgggtgtttttgttagtgtagcctg

SEQ ID NO: 5888781 - DNA, 25 bp, Homo sapien
tttgtacacctgactcaacacctct

SEQ ID NO: 5888782 - DNA, 25 bp, Homo sapien
tgagacggggccctgggaacccacc

SEQ ID NO: 5888783 - DNA, 25 bp, Homo sapien
tgaagatcacctgctctaatgtccc

SEQ ID NO: 5888784 - DNA, 25 bp, Homo sapien
gtcagatgccagacagtggctccca

SEQ ID NO: 5888785 - DNA, 25 bp, Homo sapien
cactgctgtttacagtaccctgcgt

SEQ ID NO: 5888786 - DNA, 25 bp, Homo sapien
ttctcaggtggtattaatttactgg

SEQ ID NO: 5888787 - DNA, 25 bp, Homo sapien
aatatgttaattaccaaaaccattc

SEQ ID NO: 5888788 - DNA, 25 bp, Homo sapien
cctatctttctatcagatattaaaa

SEQ ID NO: 5888789 - DNA, 25 bp, Homo sapien
tccaggcctccgttagctttgttct

SEQ ID NO: 5888790 - DNA, 25 bp, Homo sapien
ttatttgagaaagattcagaatttc

SEQ ID NO: 5888791 - DNA, 25 bp, Homo sapien
catggcatgagtaaatacatctcta

SEQ ID NO: 5888792 - DNA, 25 bp, Homo sapien
agctcactgctgtttacagtaccct

SEQ ID NO: 5888793 - DNA, 25 bp, Homo sapien
atcttctcaggacttttattccagg

SEQ ID NO: 5888794 - DNA, 25 bp, Homo sapien
aacagaagcactactttgttgccta

SEQ ID NO: 5888795 - DNA, 25 bp, Homo sapien
gttgctttaaagcctgtgtgggttt

SEQ ID NO: 5888796 - DNA, 25 bp, Homo sapien
actaaacagaagcactactttgttg

SEQ ID NO: 5888797 - DNA, 25 bp, Homo sapien
acaacttgtgactaacggtttcttc

SEQ ID NO: 5888798 - DNA, 25 bp, Homo sapien
agtgcctacagttctttcttgacta

SEQ ID NO: 5888799 - DNA, 25 bp, Homo sapien
gagatactcgggtgtttttgttagt

SEQ ID NO: 5888800 - DNA, 25 bp, Homo sapien
tccatgaagatcacctgctctaatg

SEQ ID NO: 5888801 - DNA, 25 bp, Homo sapien
ctactttgttgcctagagaaaaatc

SEQ ID NO: 5888802 - DNA, 25 bp, Homo sapien
attccaggcctccgttagctttgtt

SEQ ID NO: 5888803 - DNA, 25 bp, Homo sapien
agaaaaatcttctcaggacttttat

SEQ ID NO: 5888804 - DNA, 25 bp, Homo sapien
aaacttgggtatagctgaactttta

SEQ ID NO: 5888805 - DNA, 25 bp, Homo sapien
cagttctttcttgactattttgcta

SEQ ID NO: 5888806 - DNA, 25 bp, Homo sapien
gtccttgagacggggccctgggaac

SEQ ID NO: 5888807 - DNA, 25 bp, Homo sapien
catgactagaaacagccttaactcc

SEQ ID NO: 5888808 - DNA, 25 bp, Homo sapien
ctcactgctgtttacagtaccctgc

SEQ ID NO: 5888809 - DNA, 25 bp, Homo sapien
cactccatagaaacaccctttctca

SEQ ID NO: 5888810 - DNA, 25 bp, Homo sapien
aaagattcagaatttctatcttttc

SEQ ID NO: 5888811 - DNA, 25 bp, Homo sapien
ggaacccacctctgagacaagggag

SEQ ID NO: 5888812 - DNA, 25 bp, Homo sapien
gccccgctgagatactcgggtgttt

SEQ ID NO: 5888813 - DNA, 25 bp, Homo sapien
tttcttgactattttgctaaaatct

SEQ ID NO: 5888814 - DNA, 25 bp, Homo sapien
agaaacaccctttctcatctctgag

SEQ ID NO: 5888815 - DNA, 25 bp, Homo sapien
gctgtttacagtaccctgcgtagcc

SEQ ID NO: 5888816 - DNA, 25 bp, Homo sapien
gtgtgagctaaaagggtacagactt

SEQ ID NO: 5888817 - DNA, 25 bp, Homo sapien
aaaaacaagcctttctcaggtggta

SEQ ID NO: 5888818 - DNA, 25 bp, Homo sapien
ttttcttgtatgtttccatgttgtc

SEQ ID NO: 5888819 - DNA, 25 bp, Homo sapien
aacccacctctgagacaagggagtc

SEQ ID NO: 5888820 - DNA, 25 bp, Homo sapien
tttccatgttgtcaggtagttgtaa

SEQ ID NO: 5888821 - DNA, 25 bp, Homo sapien
cttgtgactaacggtttcttcagtg

SEQ ID NO: 5888822 - DNA, 25 bp, Homo sapien
agcctgtgtgggtttgcggcgggca

SEQ ID NO: 5888823 - DNA, 25 bp, Homo sapien
gggtgcagaagctttcaggtgtgag

SEQ ID NO: 5888824 - DNA, 25 bp, Homo sapien
caaaaccattctctgagaaaaaaaa

SEQ ID NO: 5888825 - DNA, 25 bp, Homo sapien
gctccatgaagatcacctgctctaa

SEQ ID NO: 5888826 - DNA, 25 bp, Homo sapien
agctctgtacagtgagctccttgaa

SEQ ID NO: 5888827 - DNA, 25 bp, Homo sapien
ttgggtatagctgaacttttactaa

SEQ ID NO: 5888828 - DNA, 25 bp, Homo sapien
ctgctgtttacagtaccctgcgtag

SEQ ID NO: 5888829 - DNA, 25 bp, Homo sapien
tagaaacagccttaactcctaagct

SEQ ID NO: 5888830 - DNA, 25 bp, Homo sapien
atagaaacaccctttctcatctctg

SEQ ID NO: 5888831 - DNA, 25 bp, Homo sapien
aatgacaacttgtgactaacggttt

SEQ ID NO: 5888832 - DNA, 25 bp, Homo sapien
cgttcccaaacactccatagaaaca

SEQ ID NO: 5888833 - DNA, 25 bp, Homo sapien
ccagacaagctcaggctccatgaag

SEQ ID NO: 5888834 - DNA, 25 bp, Homo sapien
atctctaatgcctatctttctatca

SEQ ID NO: 5888835 - DNA, 25 bp, Homo sapien
atcagcgtcttctgtcgttgttata

SEQ ID NO: 5888836 - DNA, 25 bp, Homo sapien
gaaaagataaacacaaacttgggta

SEQ ID NO: 5888837 - DNA, 25 bp, Homo sapien
tctgagaaagctcactgctgtttac

SEQ ID NO: 5888838 - DNA, 25 bp, Homo sapien
tcttgactattttgctaaaatctct

SEQ ID NO: 5888839 - DNA, 25 bp, Homo sapien
ttactggacacgttgataatggcat

SEQ ID NO: 5888840 - DNA, 25 bp, Homo sapien
tgagctccttgaaggtgagggtgca

SEQ ID NO: 5888841 - DNA, 25 bp, Homo sapien
accaaaaccattctctgagaaaaaa

SEQ ID NO: 5888842 - DNA, 25 bp, Homo sapien
ctttgttctctttgtacacctgact

SEQ ID NO: 5888843 - DNA, 25 bp, Homo sapien
agaaagctcactgctgtttacagta

SEQ ID NO: 5888844 - DNA, 25 bp, Homo sapien
ttcagtggagttatttgagaaagat

SEQ ID NO: 5888845 - DNA, 25 bp, Homo sapien
gtaccctgcgtagccttagctcatc

SEQ ID NO: 5888846 - DNA, 25 bp, Homo sapien
tgttgcctagagaaaaatcttctca

SEQ ID NO: 5888847 - DNA, 25 bp, Homo sapien
gtatagctgaacttttactaaacag

SEQ ID NO: 5888848 - DNA, 25 bp, Homo sapien
gataatggcatgactagaaacagcc

SEQ ID NO: 5888849 - DNA, 25 bp, Homo sapien
tgtatgtttccatgttgtcaggtag

SEQ ID NO: 5888850 - DNA, 25 bp, Homo sapien
aattaccaaaaccattctctgagaa

SEQ ID NO: 5888851 - DNA, 25 bp, Homo sapien
cacgttgataatggcatgactagaa

SEQ ID NO: 5888852 - DNA, 25 bp, Homo sapien
ctaatgacaacttgtgactaacggt

SEQ ID NO: 5888853 - DNA, 25 bp, Homo sapien
ttcccaaacactccatagaaacacc

SEQ ID NO: 5888854 - DNA, 25 bp, Homo sapien
tactcgggtgtttttgttagtgtag

SEQ ID NO: 5888855 - DNA, 25 bp, Homo sapien
gtccctgtgcttagttcagaggact

SEQ ID NO: 5888856 - DNA, 25 bp, Homo sapien
ttttactaaacagaagcactacttt

SEQ ID NO: 5888857 - DNA, 25 bp, Homo sapien
ttgcctagagaaaaatcttctcagg

SEQ ID NO: 5888858 - DNA, 25 bp, Homo sapien
attcagaatttctatcttttcttgt

SEQ ID NO: 5888859 - DNA, 25 bp, Homo sapien
cgttagctttgttctctttgtacac

SEQ ID NO: 5888860 - DNA, 25 bp, Homo sapien
gccttagctcatcagcgtcttctgt

SEQ ID NO: 5888861 - DNA, 25 bp, Homo sapien
ggtgtttttgttagtgtagcctggg

SEQ ID NO: 5888862 - DNA, 25 bp, Homo sapien
gacttcctaatgacaacttgtgact

SEQ ID NO: 5888863 - DNA, 25 bp, Homo sapien
cctggccccgctgagatactcgggt

SEQ ID NO: 5888864 - DNA, 25 bp, Homo sapien
ttagtgtagcctgggcagtgaaagg

SEQ ID NO: 5888865 - DNA, 25 bp, Homo sapien
aagctcaggttcgagaacattctgt

SEQ ID NO: 5888866 - DNA, 25 bp, Homo sapien
atctgactcccttgtctcagaggtg

SEQ ID NO: 5888867 - DNA, 25 bp, Homo sapien
tcacaagttgtcattaggaagtctg

SEQ ID NO: 5888868 - DNA, 25 bp, Homo sapien
ttagagcaggtgatcttcatggagc

SEQ ID NO: 5888869 - DNA, 25 bp, Homo sapien
taaattaataccacctgagaaaggc

SEQ ID NO: 5888870 - DNA, 25 bp, Homo sapien
attcatttacaactacctgacaaca

SEQ ID NO: 5888871 - DNA, 25 bp, Homo sapien
caccctcaccttcaaggagctcact

SEQ ID NO: 5888872 - DNA, 25 bp, Homo sapien
ccaggggctgctcagagatgagaaa

SEQ ID NO: 5888873 - DNA, 25 bp, Homo sapien
tcagtcctctgaactaagcacaggg

SEQ ID NO: 5888874 - DNA, 25 bp, Homo sapien
aattctgaatctttctcaaataact

SEQ ID NO: 5888875 - DNA, 25 bp, Homo sapien
tgggagccactgtctggcatctgac

SEQ ID NO: 5888876 - DNA, 25 bp, Homo sapien
cagccctttcactgcccaggctaca

SEQ ID NO: 5888877 - DNA, 25 bp, Homo sapien
taactccactgaagaaaccgttagt

SEQ ID NO: 5888878 - DNA, 25 bp, Homo sapien
aattaataccacctgagaaaggctt

SEQ ID NO: 5888879 - DNA, 25 bp, Homo sapien
ccaagtttgtgtttatcttttctgt

SEQ ID NO: 5888880 - DNA, 25 bp, Homo sapien
ccttttagctcacacctgaaagctt

SEQ ID NO: 5888881 - DNA, 25 bp, Homo sapien
atacacagaatgttctcgaacctga

SEQ ID NO: 5888882 - DNA, 25 bp, Homo sapien
cagtgagctttctcagaggtgttga

SEQ ID NO: 5888883 - DNA, 25 bp, Homo sapien
tcattaggaagtctgtaccctttta

SEQ ID NO: 5888884 - DNA, 25 bp, Homo sapien
agaacaaagctaacggaggcctgga

SEQ ID NO: 5888885 - DNA, 25 bp, Homo sapien
ggtgtttctatggagtgtttgggaa

SEQ ID NO: 5888886 - DNA, 25 bp, Homo sapien
cttcatggagcctgagcttgtctgg

SEQ ID NO: 5888887 - DNA, 25 bp, Homo sapien
ttaaggctgtttctagtcatgccat

SEQ ID NO: 5888888 - DNA, 25 bp, Homo sapien
tcactgtacagagctgcccgccgca

SEQ ID NO: 5888889 - DNA, 25 bp, Homo sapien
cctgcagccctttcactgcccaggc

SEQ ID NO: 5888890 - DNA, 25 bp, Homo sapien
taagagattttagcaaaatagtcaa

SEQ ID NO: 5888891 - DNA, 25 bp, Homo sapien
gtacaaagagaacaaagctaacgga

SEQ ID NO: 5888892 - DNA, 25 bp, Homo sapien
aaagtcaggagtctctagatacaca

SEQ ID NO: 5888893 - DNA, 25 bp, Homo sapien
acacccgagtatctcagcggggcca

SEQ ID NO: 5888894 - DNA, 25 bp, Homo sapien
gtcctgagaagatttttctctaggc

SEQ ID NO: 5888895 - DNA, 25 bp, Homo sapien
agaaaccgttagtcacaagttgtca

SEQ ID NO: 5888896 - DNA, 25 bp, Homo sapien
gagatgtatttactcatgccatgag

SEQ ID NO: 5888897 - DNA, 25 bp, Homo sapien
cgctgatgagctaaggctacgcagg

SEQ ID NO: 5888898 - DNA, 25 bp, Homo sapien
ttctcaaataactccactgaagaaa

SEQ ID NO: 5888899 - DNA, 25 bp, Homo sapien
aacctgagcttaggagttaaggctg

SEQ ID NO: 5888900 - DNA, 25 bp, Homo sapien
cagagatgagaaagggtgtttctat

SEQ ID NO: 5888901 - DNA, 25 bp, Homo sapien
gctctcagtcctctgaactaagcac

SEQ ID NO: 5888902 - DNA, 25 bp, Homo sapien
caacaaagtagtgcttctgtttagt

SEQ ID NO: 5888903 - DNA, 25 bp, Homo sapien
aagtcctgagaagatttttctctag

SEQ ID NO: 5888904 - DNA, 25 bp, Homo sapien
tgtctgggagccactgtctggcatc

SEQ ID NO: 5888905 - DNA, 25 bp, Homo sapien
ccagtaaattaataccacctgagaa

SEQ ID NO: 5888906 - DNA, 25 bp, Homo sapien
gaaaagatagaaattctgaatcttt

SEQ ID NO: 5888907 - DNA, 25 bp, Homo sapien
atggagcctgagcttgtctgggagc

SEQ ID NO: 5888908 - DNA, 25 bp, Homo sapien
ggggccaggggctgctcagagatga

SEQ ID NO: 5888909 - DNA, 25 bp, Homo sapien
acagaagacgctgatgagctaaggc

SEQ ID NO: 5888910 - DNA, 25 bp, Homo sapien
cacctgaaagcttctgcaccctcac

SEQ ID NO: 5888911 - DNA, 25 bp, Homo sapien
tttctctaggcaacaaagtagtgct

SEQ ID NO: 5888912 - DNA, 25 bp, Homo sapien
tatggagtgtttgggaacgagagct

SEQ ID NO: 5888913 - DNA, 25 bp, Homo sapien
ggcttgttttttttttctcagagaa

SEQ ID NO: 5888914 - DNA, 25 bp, Homo sapien
aataccacctgagaaaggcttgttt

SEQ ID NO: 5888915 - DNA, 25 bp, Homo sapien
tctactctatgggatataacaacga

SEQ ID NO: 5888916 - DNA, 25 bp, Homo sapien
gtttgggaacgagagctctactcta

SEQ ID NO: 5888917 - DNA, 25 bp, Homo sapien
ccgcaaacccacacaggctttaaag

SEQ ID NO: 5888918 - DNA, 25 bp, Homo sapien
acaggctttaaagcaacttcaaagt

SEQ ID NO: 5888919 - DNA, 25 bp, Homo sapien
gggatataacaacgacagaagacgc

SEQ ID NO: 5888920 - DNA, 25 bp, Homo sapien
caacgtgtccagtaaattaatacca

SEQ ID NO: 5888921 - DNA, 25 bp, Homo sapien
gttcccagggccccgtctcaaggac

SEQ ID NO: 5888922 - DNA, 25 bp, Homo sapien
agtaaattaataccacctgagaaag

SEQ ID NO: 5888923 - DNA, 25 bp, Homo sapien
ctcccttgtctcagaggtgggttcc

SEQ ID NO: 5888924 - DNA, 25 bp, Homo sapien
tctgatagaaagataggcattagag

SEQ ID NO: 5888925 - DNA, 25 bp, Homo sapien
gagctctactctatgggatataaca

SEQ ID NO: 5888926 - DNA, 25 bp, Homo sapien
agcttaggagttaaggctgtttcta

SEQ ID NO: 5888927 - DNA, 25 bp, Homo sapien
taggcaacaaagtagtgcttctgtt

SEQ ID NO: 5888928 - DNA, 25 bp, Homo sapien
aagcaacttcaaagtcaggagtctc

SEQ ID NO: 5888929 - DNA, 25 bp, Homo sapien
agtcctctgaactaagcacagggac

SEQ ID NO: 5888930 - DNA, 25 bp, Homo sapien
agcacagggacattagagcaggtga

SEQ ID NO: 5888931 - DNA, 25 bp, Homo sapien
agttaaggctgtttctagtcatgcc

SEQ ID NO: 5888932 - DNA, 25 bp, Homo sapien
ctgtacccttttagctcacacctga

SEQ ID NO: 5888933 - DNA, 25 bp, Homo sapien
cttgtctcagaggtgggttcccagg

SEQ ID NO: 5888934 - DNA, 25 bp, Homo sapien
tcctctgaactaagcacagggacat

SEQ ID NO: 5888935 - DNA, 25 bp, Homo sapien
cctgagcttgtctgggagccactgt

SEQ ID NO: 5888936 - DNA, 25 bp, Homo sapien
ttcagctatacccaagtttgtgttt

SEQ ID NO: 5888937 - DNA, 25 bp, Homo sapien
tagtcaagaaagaactgtaggcact

SEQ ID NO: 5888938 - DNA, 25 bp, Homo sapien
taccacctgagaaaggcttgttttt

SEQ ID NO: 5888939 - DNA, 25 bp, Homo sapien
acccttttagctcacacctgaaagc

SEQ ID NO: 5888940 - DNA, 25 bp, Homo sapien
ctacactaacaaaaacacccgagta

SEQ ID NO: 5888941 - DNA, 25 bp, Homo sapien
tttttctctaggcaacaaagtagtg

SEQ ID NO: 5888942 - DNA, 25 bp, Homo sapien
aaaaacacccgagtatctcagcggg

SEQ ID NO: 5888943 - DNA, 25 bp, Homo sapien
ggtactgtaaacagcagtgagcttt

SEQ ID NO: 5888944 - DNA, 25 bp, Homo sapien
ttaatatctgatagaaagataggca

SEQ ID NO: 5888945 - DNA, 25 bp, Homo sapien
acaagaaaagatagaaattctgaat

SEQ ID NO: 5888946 - DNA, 25 bp, Homo sapien
acagcagtgagctttctcagaggtg

SEQ ID NO: 5888947 - DNA, 25 bp, Homo sapien
tctgggagccactgtctggcatctg

SEQ ID NO: 5888948 - DNA, 25 bp, Homo sapien
tgtacagagctgcccgccgcaaacc

SEQ ID NO: 5888949 - DNA, 25 bp, Homo sapien
ccctcaccttcaaggagctcactgt

SEQ ID NO: 5888950 - DNA, 25 bp, Homo sapien
tctatggagtgtttgggaacgagag

SEQ ID NO: 5888951 - DNA, 25 bp, Homo sapien
atacattcatttacaactacctgac

SEQ ID NO: 5888952 - DNA, 25 bp, Homo sapien
aaaatagtcaagaaagaactgtagg

SEQ ID NO: 5888953 - DNA, 25 bp, Homo sapien
caacatggaaacatacaagaaaaga

SEQ ID NO: 5888954 - DNA, 25 bp, Homo sapien
ttctcgaacctgagcttaggagtta

SEQ ID NO: 5888955 - DNA, 25 bp, Homo sapien
agattttagcaaaatagtcaagaaa

SEQ ID NO: 5888956 - DNA, 25 bp, Homo sapien
gagctcactgtacagagctgcccgc

SEQ ID NO: 5888957 - DNA, 25 bp, Homo sapien
cgtctcaaggaccctcctgcagccc

SEQ ID NO: 5888958 - DNA, 25 bp, Homo sapien
ttctgaatctttctcaaataactcc

SEQ ID NO: 5888959 - DNA, 25 bp, Homo sapien
tcagaggtgttgagtcaggtgtaca

SEQ ID NO: 5888960 - DNA, 25 bp, Homo sapien
tggaataaaagtcctgagaagattt

SEQ ID NO: 5888961 - DNA, 25 bp, Homo sapien
cattagagcaggtgatcttcatgga

SEQ ID NO: 5888962 - DNA, 25 bp, Homo sapien
actgcccaggctacactaacaaaaa

SEQ ID NO: 5888963 - DNA, 25 bp, Homo sapien
ctatgggatataacaacgacagaag

SEQ ID NO: 5888964 - DNA, 25 bp, Homo sapien
gcttctgtttagtaaaagttcagct

SEQ ID NO: 5888965 - DNA, 25 bp, Homo sapien
ggagttaaggctgtttctagtcatg

SEQ ID NO: 5888966 - DNA, 25 bp, Homo sapien
tggcatctgactcccttgtctcaga

SEQ ID NO: 5888967 - DNA, 25 bp, Homo sapien
tttcactgcccaggctacactaaca

SEQ ID NO: 5888968 - DNA, 25 bp, Homo sapien
aaaagtcctgagaagatttttctct

SEQ ID NO: 5888969 - DNA, 25 bp, Homo sapien
ttttctcagagaatggttttggtaa

SEQ ID NO: 5888970 - DNA, 25 bp, Homo sapien
gaataaaagtcctgagaagattttt

SEQ ID NO: 5888971 - DNA, 25 bp, Homo sapien
cctgagaagatttttctctaggcaa

SEQ ID NO: 5888972 - DNA, 25 bp, Homo sapien
tctcagaggtgttgagtcaggtgta

SEQ ID NO: 5888973 - DNA, 25 bp, Homo sapien
tgtctggcatctgactcccttgtct

SEQ ID NO: 5888974 - DNA, 25 bp, Homo sapien
cctgaaagcttctgcaccctcacct

SEQ ID NO: 5888975 - DNA, 25 bp, Homo sapien
ctctgaactaagcacagggacatta

SEQ ID NO: 5888976 - DNA, 25 bp, Homo sapien
acactaacaaaaacacccgagtatc

SEQ ID NO: 5888977 - DNA, 25 bp, Homo sapien
cgaacctgagcttaggagttaaggc

SEQ ID NO: 5888978 - DNA, 25 bp, Homo sapien
tgaaagcttctgcaccctcaccttc

SEQ ID NO: 5888979 - DNA, 25 bp, Homo sapien
agttcagctatacccaagtttgtgt

SEQ ID NO: 5888980 - DNA, 25 bp, Homo sapien
ctgaatctttctcaaataactccac

SEQ ID NO: 5888981 - DNA, 25 bp, Homo sapien
gccctttcactgcccaggctacact

SEQ ID NO: 5888982 - DNA, 25 bp, Homo sapien
ccactgtctggcatctgactccctt

SEQ ID NO: 5888983 - DNA, 25 bp, Homo sapien
tctcaaggaccctcctgcagccctt

SEQ ID NO: 5888984 - DNA, 25 bp, Homo sapien
tctcagtcctctgaactaagcacag

SEQ ID NO: 5888985 - DNA, 25 bp, Homo sapien
tgagtcaggtgtacaaagagaacaa

SEQ ID NO: 5888986 - DNA, 25 bp, Homo sapien
tataacaacgacagaagacgctgat

SEQ ID NO: 5888987 - DNA, 25 bp, Homo sapien
tttctgtttaagagattttagcaaa

SEQ ID NO: 5888988 - DNA, 25 bp, Homo sapien
accgttagtcacaagttgtcattag

SEQ ID NO: 5888989 - DNA, 25 bp, Homo sapien
agtagtgcttctgtttagtaaaagt

SEQ ID NO: 5888990 - DNA, 25 bp, Homo sapien
atagaaagataggcattagagatgt

SEQ ID NO: 5888991 - DNA, 25 bp, Homo sapien
agcagtgagctttctcagaggtgtt

SEQ ID NO: 5888992 - DNA, 25 bp, Homo sapien
tcccagggccccgtctcaaggaccc

SEQ ID NO: 5888993 - DNA, 25 bp, Homo sapien
ttttttttctcagagaatggttttg

SEQ ID NO: 5888994 - DNA, 25 bp, Homo sapien
gcatctgactcccttgtctcagagg

SEQ ID NO: 5888995 - DNA, 25 bp, Homo sapien
atctcagcggggccaggggctgctc

SEQ ID NO: 5888996 - DNA, 25 bp, Homo sapien
ctagatacacagaatgttctcgaac

SEQ ID NO: 5888997 - DNA, 25 bp, Homo sapien
aagacgctgatgagctaaggctacg

SEQ ID NO: 5888998 - DNA, 25 bp, Homo sapien
tacccaagtttgtgtttatcttttc

SEQ ID NO: 5888999 - DNA, 25 bp, Homo sapien
ctcaccttcaaggagctcactgtac

SEQ ID NO: 5889000 - DNA, 25 bp, Homo sapien
tgatagaaagataggcattagagat

SEQ ID NO: 5889001 - DNA, 25 bp, Homo sapien
acaaaaacacccgagtatctcagcg

SEQ ID NO: 5889002 - DNA, 25 bp, Homo sapien
cacagggacattagagcaggtgatc

SEQ ID NO: 5889003 - DNA, 25 bp, Homo sapien
gcggggccaggggctgctcagagat

SEQ ID NO: 5889004 - DNA, 25 bp, Homo sapien
ccttcaaggagctcactgtacagag

SEQ ID NO: 5889005 - DNA, 25 bp, Homo sapien
tctgtttaagagattttagcaaaat

SEQ ID NO: 5889006 - DNA, 25 bp, Homo sapien
gtgtccagtaaattaataccacctg

SEQ ID NO: 5889007 - DNA, 25 bp, Homo sapien
tcatggagcctgagcttgtctggga

SEQ ID NO: 5889008 - DNA, 25 bp, Homo sapien
cccaggctacactaacaaaaacacc

SEQ ID NO: 5889009 - DNA, 25 bp, Homo sapien
agtaaaagttcagctatacccaagt

SEQ ID NO: 5889010 - DNA, 25 bp, Homo sapien
cttcaaagtcaggagtctctagata

SEQ ID NO: 5889011 - DNA, 25 bp, Homo sapien
gacgctgatgagctaaggctacgca

SEQ ID NO: 5889012 - DNA, 25 bp, Homo sapien
agaatgttctcgaacctgagcttag

SEQ ID NO: 5889013 - DNA, 25 bp, Homo sapien
aagtctgtacccttttagctcacac

SEQ ID NO: 5889014 - DNA, 25 bp, Homo sapien
agaagacgctgatgagctaaggcta

SEQ ID NO: 5889015 - DNA, 25 bp, Homo sapien
gagtatctcagcggggccaggggct

SEQ ID NO: 5889016 - DNA, 25 bp, Homo sapien
aagaaaagatagaaattctgaatct

SEQ ID NO: 5889017 - DNA, 25 bp, Homo sapien
tgtatttactcatgccatgagctct

SEQ ID NO: 5889018 - DNA, 25 bp, Homo sapien
aactacctgacaacatggaaacata

SEQ ID NO: 5889019 - DNA, 25 bp, Homo sapien
tacagagctgcccgccgcaaaccca

SEQ ID NO: 5889020 - DNA, 25 bp, Homo sapien
aaagataggcattagagatgtattt

SEQ ID NO: 5889021 - DNA, 25 bp, Homo sapien
tgcaccctcaccttcaaggagctca

SEQ ID NO: 5889022 - DNA, 25 bp, Homo sapien
aaacccacacaggctttaaagcaac

SEQ ID NO: 5889023 - DNA, 25 bp, Homo sapien
cgccgcaaacccacacaggctttaa

SEQ ID NO: 5889024 - DNA, 25 bp, Homo sapien
taacaacgacagaagacgctgatga

SEQ ID NO: 5889025 - DNA, 25 bp, Homo sapien
agtcatgccattatcaacgtgtcca

SEQ ID NO: 5889026 - DNA, 25 bp, Homo sapien
agaaagggtgtttctatggagtgtt

SEQ ID NO: 5889027 - DNA, 25 bp, Homo sapien
ggaaacatacaagaaaagatagaaa

SEQ ID NO: 5889028 - DNA, 25 bp, Homo sapien
agaggtgttgagtcaggtgtacaaa

SEQ ID NO: 5889029 - DNA, 25 bp, Homo sapien
cggaggcctggaataaaagtcctga

SEQ ID NO: 5889030 - DNA, 25 bp, Homo sapien
tgccatgagctctcagtcctctgaa

SEQ ID NO: 5889031 - DNA, 25 bp, Homo sapien
ggctacactaacaaaaacacccgag

SEQ ID NO: 5889032 - DNA, 25 bp, Homo sapien
tgatcttcatggagcctgagcttgt

SEQ ID NO: 5889033 - DNA, 25 bp, Homo sapien
aaacacccgagtatctcagcggggc

SEQ ID NO: 5889034 - DNA, 25 bp, Homo sapien
actgtacagagctgcccgccgcaaa

SEQ ID NO: 5889035 - DNA, 25 bp, Homo sapien
tgcagccctttcactgcccaggcta

SEQ ID NO: 5889036 - DNA, 25 bp, Homo sapien
gagctctcagtcctctgaactaagc

SEQ ID NO: 5889037 - DNA, 25 bp, Homo sapien
gtctgtacccttttagctcacacct

SEQ ID NO: 5889038 - DNA, 25 bp, Homo sapien
gccattatcaacgtgtccagtaaat

SEQ ID NO: 5889039 - DNA, 25 bp, Homo sapien
gggccccgtctcaaggaccctcctg

SEQ ID NO: 5889040 - DNA, 25 bp, Homo sapien
attttagcaaaatagtcaagaaaga

SEQ ID NO: 5889041 - DNA, 25 bp, Homo sapien
agataggcattagagatgtatttac

SEQ ID NO: 5889042 - DNA, 25 bp, Homo sapien
agtcaggagtctctagatacacaga

SEQ ID NO: 5889043 - DNA, 25 bp, Homo sapien
gaatggttttggtaattaacatatt

SEQ ID NO: 5889044 - DNA, 25 bp, Homo sapien
taggaagtctgtacccttttagctc

SEQ ID NO: 5889045 - DNA, 25 bp, Homo sapien
cccgtctcaaggaccctcctgcagc

SEQ ID NO: 5889046 - DNA, 25 bp, Homo sapien
tcatgccattatcaacgtgtccagt

SEQ ID NO: 5889047 - DNA, 25 bp, Homo sapien
ttgggaacgagagctctactctatg

SEQ ID NO: 5889048 - DNA, 25 bp, Homo sapien
gctgcccgccgcaaacccacacagg

SEQ ID NO: 5889049 - DNA, 25 bp, Homo sapien
ctacctgacaacatggaaacataca

SEQ ID NO: 5889050 - DNA, 25 bp, Homo sapien
atcttcatggagcctgagcttgtct

SEQ ID NO: 5889051 - DNA, 25 bp, Homo sapien
atgggatataacaacgacagaagac

SEQ ID NO: 5889052 - DNA, 25 bp, Homo sapien
actccactgaagaaaccgttagtca

SEQ ID NO: 5889053 - DNA, 25 bp, Homo sapien
ctcatgccatgagctctcagtcctc

SEQ ID NO: 5889054 - DNA, 25 bp, Homo sapien
tgtttaagagattttagcaaaatag

SEQ ID NO: 5889055 - DNA, 25 bp, Homo sapien
gtgtacaaagagaacaaagctaacg

SEQ ID NO: 5889056 - DNA, 25 bp, Homo sapien
gggaacgagagctctactctatggg

SEQ ID NO: 5889057 - DNA, 25 bp, Homo sapien
tttctatggagtgtttgggaacgag

SEQ ID NO: 5889058 - DNA, 25 bp, Homo sapien
tactctatgggatataacaacgaca

SEQ ID NO: 5889059 - DNA, 25 bp, Homo sapien
tttaaagcaacttcaaagtcaggag

SEQ ID NO: 5889060 - DNA, 25 bp, Homo sapien
agcttctgcaccctcaccttcaagg

SEQ ID NO: 5889061 - DNA, 25 bp, Homo sapien
aatagtcaagaaagaactgtaggca

SEQ ID NO: 5889062 - DNA, 25 bp, Homo sapien
aacttcaaagtcaggagtctctaga

SEQ ID NO: 5889063 - DNA, 25 bp, Homo sapien
gagtctctagatacacagaatgttc

SEQ ID NO: 5889064 - DNA, 25 bp, Homo sapien
cttaggagttaaggctgtttctagt

SEQ ID NO: 5889065 - DNA, 25 bp, Homo sapien
ccgagtatctcagcggggccagggg

SEQ ID NO: 5889066 - DNA, 25 bp, Homo sapien
agagattttagcaaaatagtcaaga

SEQ ID NO: 5889067 - DNA, 25 bp, Homo sapien
ttagctcacacctgaaagcttctgc

SEQ ID NO: 5889068 - DNA, 25 bp, Homo sapien
taacggaggcctggaataaaagtcc

SEQ ID NO: 5889069 - DNA, 25 bp, Homo sapien
gggacattagagcaggtgatcttca

SEQ ID NO: 5889070 - DNA, 25 bp, Homo sapien
acgagagctctactctatgggatat

SEQ ID NO: 5889071 - DNA, 25 bp, Homo sapien
tgagctaaggctacgcagggtactg

SEQ ID NO: 5889072 - DNA, 25 bp, Homo sapien
ggagccactgtctggcatctgactc

SEQ ID NO: 5889073 - DNA, 25 bp, Homo sapien
taagcacagggacattagagcaggt

SEQ ID NO: 5889074 - DNA, 25 bp, Homo sapien
agaagatttttctctaggcaacaaa

SEQ ID NO: 5889075 - DNA, 25 bp, Homo sapien
ttttaatatctgatagaaagatagg

SEQ ID NO: 5889076 - DNA, 25 bp, Homo sapien
aaagagaacaaagctaacggaggcc

SEQ ID NO: 5889077 - DNA, 25 bp, Homo sapien
caaggagctcactgtacagagctgc

SEQ ID NO: 5889078 - DNA, 25 bp, Homo sapien
caggctacactaacaaaaacacccg

SEQ ID NO: 5889079 - DNA, 25 bp, Homo sapien
ttagtaaaagttcagctatacccaa

SEQ ID NO: 5889080 - DNA, 25 bp, Homo sapien
tcaaagtcaggagtctctagataca

SEQ ID NO: 5889081 - DNA, 25 bp, Homo sapien
tactcatgccatgagctctcagtcc

SEQ ID NO: 5889082 - DNA, 25 bp, Homo sapien
caaagctaacggaggcctggaataa

SEQ ID NO: 5889083 - DNA, 25 bp, Homo sapien
acaactacctgacaacatggaaaca

SEQ ID NO: 5889084 - DNA, 25 bp, Homo sapien
cttgtctgggagccactgtctggca

SEQ ID NO: 5889085 - DNA, 25 bp, Homo sapien
actgtctggcatctgactcccttgt

SEQ ID NO: 5889086 - DNA, 25 bp, Homo sapien
taacaaaaacacccgagtatctcag

SEQ ID NO: 5889087 - DNA, 25 bp, Homo sapien
gaggcctggaataaaagtcctgaga

SEQ ID NO: 5889088 - DNA, 25 bp, Homo sapien
tctctaggcaacaaagtagtgcttc

SEQ ID NO: 5889089 - DNA, 25 bp, Homo sapien
gcaacttcaaagtcaggagtctcta

SEQ ID NO: 5889090 - DNA, 25 bp, Homo sapien
agctcacacctgaaagcttctgcac

SEQ ID NO: 5889091 - DNA, 25 bp, Homo sapien
cagctatacccaagtttgtgtttat

SEQ ID NO: 5889092 - DNA, 25 bp, Homo sapien
cagagaatggttttggtaattaaca

SEQ ID NO: 5889093 - DNA, 25 bp, Homo sapien
caccttcaaggagctcactgtacag

SEQ ID NO: 5889094 - DNA, 25 bp, Homo sapien
agatagaaattctgaatctttctca

SEQ ID NO: 5889095 - DNA, 25 bp, Homo sapien
cagggccccgtctcaaggaccctcc

SEQ ID NO: 5889096 - DNA, 25 bp, Homo sapien
gtgttgagtcaggtgtacaaagaga

SEQ ID NO: 5889097 - DNA, 25 bp, Homo sapien
gaactaagcacagggacattagagc

SEQ ID NO: 5889098 - DNA, 25 bp, Homo sapien
agcaggtgatcttcatggagcctga

SEQ ID NO: 5889099 - DNA, 25 bp, Homo sapien
aacgacagaagacgctgatgagcta

SEQ ID NO: 5889100 - DNA, 25 bp, Homo sapien
gctctactctatgggatataacaac

SEQ ID NO: 5889101 - DNA, 25 bp, Homo sapien
ccacacaggctttaaagcaacttca

SEQ ID NO: 5889102 - DNA, 25 bp, Homo sapien
acatggaaacatacaagaaaagata

SEQ ID NO: 5889103 - DNA, 25 bp, Homo sapien
gagaatggttttggtaattaacata

SEQ ID NO: 5889104 - DNA, 25 bp, Homo sapien
tccactgaagaaaccgttagtcaca

SEQ ID NO: 5889105 - DNA, 25 bp, Homo sapien
atttacaactacctgacaacatgga

SEQ ID NO: 5889106 - DNA, 25 bp, Homo sapien
tcactgcccaggctacactaacaaa

SEQ ID NO: 5889107 - DNA, 25 bp, Homo sapien
ctcaaataactccactgaagaaacc

SEQ ID NO: 5889108 - DNA, 25 bp, Homo sapien
acagaatgttctcgaacctgagctt

SEQ ID NO: 5889109 - DNA, 25 bp, Homo sapien
cctgagcttaggagttaaggctgtt

SEQ ID NO: 5889110 - DNA, 25 bp, Homo sapien
ggaccctcctgcagccctttcactg

SEQ ID NO: 5889111 - DNA, 25 bp, Homo sapien
ggtgggttcccagggccccgtctca

SEQ ID NO: 5889112 - DNA, 25 bp, Homo sapien
gcagggtactgtaaacagcagtgag

SEQ ID NO: 5889113 - DNA, 25 bp, Homo sapien
ctgacaacatggaaacatacaagaa

SEQ ID NO: 5889114 - DNA, 25 bp, Homo sapien
aaagatagaaattctgaatctttct

SEQ ID NO: 5889115 - DNA, 25 bp, Homo sapien
tgggttcccagggccccgtctcaag

SEQ ID NO: 5889116 - DNA, 25 bp, Homo sapien
aaaccgttagtcacaagttgtcatt

SEQ ID NO: 5889117 - DNA, 25 bp, Homo sapien
acccgagtatctcagcggggccagg

SEQ ID NO: 5889118 - DNA, 25 bp, Homo sapien
gtccagtaaattaataccacctgag

SEQ ID NO: 5889119 - DNA, 25 bp, Homo sapien
actaagcacagggacattagagcag

SEQ ID NO: 5889120 - DNA, 25 bp, Homo sapien
tctggcatctgactcccttgtctca

SEQ ID NO: 5889121 - DNA, 25 bp, Homo sapien
tagagatgtatttactcatgccatg

SEQ ID NO: 5889122 - DNA, 25 bp, Homo sapien
ctgactcccttgtctcagaggtggg

SEQ ID NO: 5889123 - DNA, 25 bp, Homo sapien
gtacccttttagctcacacctgaaa

SEQ ID NO: 5889124 - DNA, 25 bp, Homo sapien
aaagcttctgcaccctcaccttcaa

SEQ ID NO: 5889125 - DNA, 25 bp, Homo sapien
aataactccactgaagaaaccgtta

SEQ ID NO: 5889126 - DNA, 25 bp, Homo sapien
acaagttgtcattaggaagtctgta

SEQ ID NO: 5889127 - DNA, 25 bp, Homo sapien
tatttactcatgccatgagctctca

SEQ ID NO: 5889128 - DNA, 25 bp, Homo sapien
taaaagttcagctatacccaagttt

SEQ ID NO: 5889129 - DNA, 25 bp, Homo sapien
aaacatacaagaaaagatagaaatt

SEQ ID NO: 5889130 - DNA, 25 bp, Homo sapien
gttgagtcaggtgtacaaagagaac

SEQ ID NO: 5889131 - DNA, 25 bp, Homo sapien
agagaacaaagctaacggaggcctg

SEQ ID NO: 5889132 - DNA, 25 bp, Homo sapien
caggtgatcttcatggagcctgagc

SEQ ID NO: 5889133 - DNA, 25 bp, Homo sapien
tctaggcaacaaagtagtgcttctg

SEQ ID NO: 5889134 - DNA, 25 bp, Homo sapien
acaacgacagaagacgctgatgagc

SEQ ID NO: 5889135 - DNA, 25 bp, Homo sapien
cagagctgcccgccgcaaacccaca

SEQ ID NO: 5889136 - DNA, 25 bp, Homo sapien
aaagggtgtttctatggagtgtttg

SEQ ID NO: 5889137 - DNA, 25 bp, Homo sapien
tgtcattaggaagtctgtacccttt

SEQ ID NO: 5889138 - DNA, 25 bp, Homo sapien
cactgaagaaaccgttagtcacaag

SEQ ID NO: 5889139 - DNA, 25 bp, Homo sapien
agcctgagcttgtctgggagccact

SEQ ID NO: 5889140 - DNA, 25 bp, Homo sapien
ctttctcaaataactccactgaaga

SEQ ID NO: 5889141 - DNA, 25 bp, Homo sapien
gacaacatggaaacatacaagaaaa

SEQ ID NO: 5889142 - DNA, 25 bp, Homo sapien
tttagcaaaatagtcaagaaagaac

SEQ ID NO: 5889143 - DNA, 25 bp, Homo sapien
cattatcaacgtgtccagtaaatta

SEQ ID NO: 5889144 - DNA, 25 bp, Homo sapien
gatgagctaaggctacgcagggtac

SEQ ID NO: 5889145 - DNA, 25 bp, Homo sapien
tatctgatagaaagataggcattag

SEQ ID NO: 5889146 - DNA, 25 bp, Homo sapien
gtcaagaaagaactgtaggcactta

SEQ ID NO: 5889147 - DNA, 25 bp, Homo sapien
ggaagtctgtacccttttagctcac

SEQ ID NO: 5889148 - DNA, 25 bp, Homo sapien
aaagttcagctatacccaagtttgt

SEQ ID NO: 5889149 - DNA, 25 bp, Homo sapien
tgagaaagggtgtttctatggagtg

SEQ ID NO: 5889150 - DNA, 25 bp, Homo sapien
aagatttttctctaggcaacaaagt

SEQ ID NO: 5889151 - DNA, 25 bp, Homo sapien
aggggctgctcagagatgagaaagg

SEQ ID NO: 5889152 - DNA, 25 bp, Homo sapien
cagggacattagagcaggtgatctt

SEQ ID NO: 5889153 - DNA, 25 bp, Homo sapien
cccttgtctcagaggtgggttccca

SEQ ID NO: 5889154 - DNA, 25 bp, Homo sapien
tgtttctatggagtgtttgggaacg

SEQ ID NO: 5889155 - DNA, 25 bp, Homo sapien
ctgtttagtaaaagttcagctatac

SEQ ID NO: 5889156 - DNA, 25 bp, Homo sapien
ttacaactacctgacaacatggaaa

SEQ ID NO: 5889157 - DNA, 25 bp, Homo sapien
atggaaacatacaagaaaagataga

SEQ ID NO: 5889158 - DNA, 25 bp, Homo sapien
aatgttctcgaacctgagcttagga

SEQ ID NO: 5889159 - DNA, 25 bp, Homo sapien
ctcgaacctgagcttaggagttaag

SEQ ID NO: 5889160 - DNA, 25 bp, Homo sapien
tcaaggaccctcctgcagccctttc

SEQ ID NO: 5889161 - DNA, 25 bp, Homo sapien
cgttagtcacaagttgtcattagga

SEQ ID NO: 5889162 - DNA, 25 bp, Homo sapien
gactcccttgtctcagaggtgggtt

SEQ ID NO: 5889163 - DNA, 25 bp, Homo sapien
gctcactgtacagagctgcccgccg

SEQ ID NO: 5889164 - DNA, 25 bp, Homo sapien
tcaggtgtacaaagagaacaaagct

SEQ ID NO: 5889165 - DNA, 25 bp, Homo sapien
tgagcttgtctgggagccactgtct

SEQ ID NO: 5889166 - DNA, 25 bp, Homo sapien
gaacgagagctctactctatgggat

SEQ ID NO: 5889167 - DNA, 25 bp, Homo sapien
ttcaaggagctcactgtacagagct

SEQ ID NO: 5889168 - DNA, 25 bp, Homo sapien
acccacacaggctttaaagcaactt

SEQ ID NO: 5889169 - DNA, 25 bp, Homo sapien
gcaaaatagtcaagaaagaactgta

SEQ ID NO: 5889170 - DNA, 25 bp, Homo sapien
atgagctctcagtcctctgaactaa

SEQ ID NO: 5889171 - DNA, 25 bp, Homo sapien
aaggctgtttctagtcatgccatta

SEQ ID NO: 5889172 - DNA, 25 bp, Homo sapien
aggcattagagatgtatttactcat

SEQ ID NO: 5889173 - DNA, 25 bp, Homo sapien
cctttcactgcccaggctacactaa

SEQ ID NO: 5889174 - DNA, 25 bp, Homo sapien
aggctttaaagcaacttcaaagtca

SEQ ID NO: 5889175 - DNA, 25 bp, Homo sapien
tgcccgccgcaaacccacacaggct

SEQ ID NO: 5889176 - DNA, 25 bp, Homo sapien
cccgccgcaaacccacacaggcttt

SEQ ID NO: 5889177 - DNA, 25 bp, Homo sapien
gcaaacccacacaggctttaaagca

SEQ ID NO: 5889178 - DNA, 25 bp, Homo sapien
tctgcaccctcaccttcaaggagct

SEQ ID NO: 5889179 - DNA, 25 bp, Homo sapien
ttagtcacaagttgtcattaggaag

SEQ ID NO: 5889180 - DNA, 25 bp, Homo sapien
ctgatgagctaaggctacgcagggt

SEQ ID NO: 5889181 - DNA, 25 bp, Homo sapien
tctcagaggtgggttcccagggccc

SEQ ID NO: 5889182 - DNA, 25 bp, Homo sapien
aggagctcactgtacagagctgccc

SEQ ID NO: 5889183 - DNA, 25 bp, Homo sapien
ttctcagagaatggttttggtaatt

SEQ ID NO: 5889184 - DNA, 25 bp, Homo sapien
aatatctgatagaaagataggcatt

SEQ ID NO: 5889185 - DNA, 25 bp, Homo sapien
ggcctggaataaaagtcctgagaag

SEQ ID NO: 5889186 - DNA, 25 bp, Homo sapien
tcaggagtctctagatacacagaat

SEQ ID NO: 5889187 - DNA, 25 bp, Homo sapien
aacaaagctaacggaggcctggaat

SEQ ID NO: 5889188 - DNA, 25 bp, Homo sapien
aagttgtcattaggaagtctgtacc

SEQ ID NO: 5889189 - DNA, 25 bp, Homo sapien
atcttttctgtttaagagattttag

SEQ ID NO: 5889190 - DNA, 25 bp, Homo sapien
tgttctcgaacctgagcttaggagt

SEQ ID NO: 5889191 - DNA, 25 bp, Homo sapien
ctctatgggatataacaacgacaga

SEQ ID NO: 5889192 - DNA, 25 bp, Homo sapien
acctgacaacatggaaacatacaag

SEQ ID NO: 5889193 - DNA, 25 bp, Homo sapien
atagaaattctgaatctttctcaaa

SEQ ID NO: 5889194 - DNA, 25 bp, Homo sapien
cctggaataaaagtcctgagaagat

SEQ ID NO: 5889195 - DNA, 25 bp, Homo sapien
gacattagagcaggtgatcttcatg

SEQ ID NO: 5889196 - DNA, 25 bp, Homo sapien
acgcagggtactgtaaacagcagtg

SEQ ID NO: 5889197 - DNA, 25 bp, Homo sapien
aagctaacggaggcctggaataaaa

SEQ ID NO: 5889198 - DNA, 25 bp, Homo sapien
tgtctcagaggtgggttcccagggc

SEQ ID NO: 5889199 - DNA, 25 bp, Homo sapien
aggtgttgagtcaggtgtacaaaga

SEQ ID NO: 5889200 - DNA, 25 bp, Homo sapien
tgagaagatttttctctaggcaaca

SEQ ID NO: 5889201 - DNA, 25 bp, Homo sapien
gtttagtaaaagttcagctataccc

SEQ ID NO: 5889202 - DNA, 25 bp, Homo sapien
ctacgcagggtactgtaaacagcag

SEQ ID NO: 5889203 - DNA, 25 bp, Homo sapien
gaagaaaccgttagtcacaagttgt

SEQ ID NO: 5889204 - DNA, 25 bp, Homo sapien
gagctttctcagaggtgttgagtca

SEQ ID NO: 5889205 - DNA, 25 bp, Homo sapien
ctgaactaagcacagggacattaga

SEQ ID NO: 5889206 - DNA, 25 bp, Homo sapien
acatacaagaaaagatagaaattct

SEQ ID NO: 5889207 - DNA, 25 bp, Homo sapien
gatgtatttactcatgccatgagct

SEQ ID NO: 5889208 - DNA, 25 bp, Homo sapien
ctcagagaatggttttggtaattaa

SEQ ID NO: 5889209 - DNA, 25 bp, Homo sapien
ctcacacctgaaagcttctgcaccc

SEQ ID NO: 5889210 - DNA, 25 bp, Homo sapien
aaacagcagtgagctttctcagagg

SEQ ID NO: 5889211 - DNA, 25 bp, Homo sapien
gaatctttctcaaataactccactg

SEQ ID NO: 5889212 - DNA, 25 bp, Homo sapien
tgcccaggctacactaacaaaaaca

SEQ ID NO: 5889213 - DNA, 25 bp, Homo sapien
cttctgcaccctcaccttcaaggag

SEQ ID NO: 5889214 - DNA, 25 bp, Homo sapien
tagcaaaatagtcaagaaagaactg

SEQ ID NO: 5889215 - DNA, 25 bp, Homo sapien
taggagttaaggctgtttctagtca

SEQ ID NO: 5889216 - DNA, 25 bp, Homo sapien
cagcggggccaggggctgctcagag

SEQ ID NO: 5889217 - DNA, 25 bp, Homo sapien
cgacagaagacgctgatgagctaag

SEQ ID NO: 5889218 - DNA, 25 bp, Homo sapien
tttactcatgccatgagctctcagt

SEQ ID NO: 5889219 - DNA, 25 bp, Homo sapien
gcattagagatgtatttactcatgc

SEQ ID NO: 5889220 - DNA, 25 bp, Homo sapien
gctatacccaagtttgtgtttatct

SEQ ID NO: 5889221 - DNA, 25 bp, Homo sapien
gtctctagatacacagaatgttctc

SEQ ID NO: 5889222 - DNA, 25 bp, Homo sapien
ggctacgcagggtactgtaaacagc

SEQ ID NO: 5889223 - DNA, 25 bp, Homo sapien
aaagtagtgcttctgtttagtaaaa

SEQ ID NO: 5889224 - DNA, 25 bp, Homo sapien
attagagatgtatttactcatgcca

SEQ ID NO: 5889225 - DNA, 25 bp, Homo sapien
taaagcaacttcaaagtcaggagtc

SEQ ID NO: 5889226 - DNA, 25 bp, Homo sapien
gtaaacagcagtgagctttctcaga

SEQ ID NO: 5889227 - DNA, 25 bp, Homo sapien
ttctgtttagtaaaagttcagctat

SEQ ID NO: 5889228 - DNA, 25 bp, Homo sapien
tactgtaaacagcagtgagctttct

SEQ ID NO: 5889229 - DNA, 25 bp, Homo sapien
tgagcttaggagttaaggctgtttc

SEQ ID NO: 5889230 - DNA, 25 bp, Homo sapien
ggctgtttctagtcatgccattatc

SEQ ID NO: 5889231 - DNA, 25 bp, Homo sapien
ggcaacaaagtagtgcttctgttta

SEQ ID NO: 5889232 - DNA, 25 bp, Homo sapien
aaggctacgcagggtactgtaaaca

SEQ ID NO: 5889233 - DNA, 25 bp, Homo sapien
gagctgcccgccgcaaacccacaca

SEQ ID NO: 5889234 - DNA, 25 bp, Homo sapien
gatttttctctaggcaacaaagtag

SEQ ID NO: 5889235 - DNA, 25 bp, Homo sapien
gtttctagtcatgccattatcaacg

SEQ ID NO: 5889236 - DNA, 25 bp, Homo sapien
agtcaggtgtacaaagagaacaaag

SEQ ID NO: 5889237 - DNA, 25 bp, Homo sapien
tcatttacaactacctgacaacatg

SEQ ID NO: 5889238 - DNA, 25 bp, Homo sapien
gtgtttgggaacgagagctctactc

SEQ ID NO: 5889239 - DNA, 25 bp, Homo sapien
accctcctgcagccctttcactgcc

SEQ ID NO: 5889240 - DNA, 25 bp, Homo sapien
acaaagtagtgcttctgtttagtaa

SEQ ID NO: 5889241 - DNA, 25 bp, Homo sapien
agccactgtctggcatctgactccc

SEQ ID NO: 5889242 - DNA, 25 bp, Homo sapien
atcaacgtgtccagtaaattaatac

SEQ ID NO: 5889243 - DNA, 25 bp, Homo sapien
acacaggctttaaagcaacttcaaa

SEQ ID NO: 5889244 - DNA, 25 bp, Homo sapien
tggagtgtttgggaacgagagctct

SEQ ID NO: 5889245 - DNA, 25 bp, Homo sapien
ttatcaacgtgtccagtaaattaat

SEQ ID NO: 5889246 - DNA, 25 bp, Homo sapien
acaaagagaacaaagctaacggagg

SEQ ID NO: 5889247 - DNA, 25 bp, Homo sapien
ctgtttctagtcatgccattatcaa

SEQ ID NO: 5889248 - DNA, 25 bp, Homo sapien
gatgagaaagggtgtttctatggag

SEQ ID NO: 5889249 - DNA, 25 bp, Homo sapien
acacagaatgttctcgaacctgagc

SEQ ID NO: 5889250 - DNA, 25 bp, Homo sapien
cacacctgaaagcttctgcaccctc

SEQ ID NO: 5889251 - DNA, 25 bp, Homo sapien
ccatgagctctcagtcctctgaact

SEQ ID NO: 5889252 - DNA, 25 bp, Homo sapien
ttttagctcacacctgaaagcttct

SEQ ID NO: 5889253 - DNA, 25 bp, Homo sapien
gggctgctcagagatgagaaagggt

SEQ ID NO: 5889254 - DNA, 25 bp, Homo sapien
gaaattctgaatctttctcaaataa

SEQ ID NO: 5889255 - DNA, 25 bp, Homo sapien
acattcatttacaactacctgacaa

SEQ ID NO: 5889256 - DNA, 25 bp, Homo sapien
ctctagatacacagaatgttctcga

SEQ ID NO: 5889257 - DNA, 25 bp, Homo sapien
gtgagctttctcagaggtgttgagt

SEQ ID NO: 5889258 - DNA, 25 bp, Homo sapien
gctttctcagaggtgttgagtcagg

SEQ ID NO: 5889259 - DNA, 25 bp, Homo sapien
ctcctgcagccctttcactgcccag

SEQ ID NO: 5889260 - DNA, 25 bp, Homo sapien
gtatctcagcggggccaggggctgc

SEQ ID NO: 5889261 - DNA, 25 bp, Homo sapien
attaggaagtctgtacccttttagc

SEQ ID NO: 5889262 - DNA, 25 bp, Homo sapien
caaataactccactgaagaaaccgt

SEQ ID NO: 5889263 - DNA, 25 bp, Homo sapien
ctgtaaacagcagtgagctttctca

SEQ ID NO: 5889264 - DNA, 25 bp, Homo sapien
agctaaggctacgcagggtactgta

SEQ ID NO: 5889265 - DNA, 25 bp, Homo sapien
atctttctcaaataactccactgaa

SEQ ID NO: 5889266 - DNA, 25 bp, Homo sapien
actaacaaaaacacccgagtatctc

SEQ ID NO: 5889267 - DNA, 25 bp, Homo sapien
gatataacaacgacagaagacgctg

SEQ ID NO: 5889268 - DNA, 25 bp, Homo sapien
catgccatgagctctcagtcctctg

SEQ ID NO: 5889269 - DNA, 25 bp, Homo sapien
tttctcagaggtgttgagtcaggtg

SEQ ID NO: 5889270 - DNA, 25 bp, Homo sapien
ggagcctgagcttgtctgggagcca

SEQ ID NO: 5889271 - DNA, 25 bp, Homo sapien
gagtgtttgggaacgagagctctac

SEQ ID NO: 5889272 - DNA, 25 bp, Homo sapien
tcagaggtgggttcccagggccccg

SEQ ID NO: 5889273 - DNA, 25 bp, Homo sapien
aaggaccctcctgcagccctttcac

SEQ ID NO: 5889274 - DNA, 25 bp, Homo sapien
ataggcattagagatgtatttactc

SEQ ID NO: 5889275 - DNA, 25 bp, Homo sapien
gctaacggaggcctggaataaaagt

SEQ ID NO: 5889276 - DNA, 25 bp, Homo sapien
ctcagagatgagaaagggtgtttct

SEQ ID NO: 5889277 - DNA, 25 bp, Homo sapien
ctgaagaaaccgttagtcacaagtt

SEQ ID NO: 5889278 - DNA, 25 bp, Homo sapien
aggtgtacaaagagaacaaagctaa

SEQ ID NO: 5889279 - DNA, 25 bp, Homo sapien
agggtactgtaaacagcagtgagct

SEQ ID NO: 5889280 - DNA, 25 bp, Homo sapien
agtcacaagttgtcattaggaagtc

SEQ ID NO: 5889281 - DNA, 25 bp, Homo sapien
gttgtcattaggaagtctgtaccct

SEQ ID NO: 5889282 - DNA, 25 bp, Homo sapien
ctagtcatgccattatcaacgtgtc

SEQ ID NO: 5889283 - DNA, 25 bp, Homo sapien
ggccaggggctgctcagagatgaga

SEQ ID NO: 5889284 - DNA, 25 bp, Homo sapien
gctgctcagagatgagaaagggtgt

SEQ ID NO: 5889285 - DNA, 25 bp, Homo sapien
gagagctctactctatgggatataa

SEQ ID NO: 5889286 - DNA, 25 bp, Homo sapien
ttctagtcatgccattatcaacgtg

SEQ ID NO: 5889287 - DNA, 25 bp, Homo sapien
ttaataccacctgagaaaggcttgt

SEQ ID NO: 5889288 - DNA, 25 bp, Homo sapien
tatacccaagtttgtgtttatcttt

SEQ ID NO: 5889289 - DNA, 25 bp, Homo sapien
ttttttctcagagaatggttttggt

SEQ ID NO: 5889290 - DNA, 25 bp, Homo sapien
agcttgtctgggagccactgtctgg

SEQ ID NO: 5889291 - DNA, 25 bp, Homo sapien
gccccgtctcaaggaccctcctgca

SEQ ID NO: 5889292 - DNA, 25 bp, Homo sapien
ctaaggctacgcagggtactgtaaa

SEQ ID NO: 5889293 - DNA, 25 bp, Homo sapien
ggtgatcttcatggagcctgagctt

SEQ ID NO: 5889294 - DNA, 25 bp, Homo sapien
tttaagagattttagcaaaatagtc

SEQ ID NO: 5889295 - DNA, 25 bp, Homo sapien
atgccattatcaacgtgtccagtaa

SEQ ID NO: 5889296 - DNA, 25 bp, Homo sapien
tgctcagagatgagaaagggtgttt

SEQ ID NO: 5889297 - DNA, 25 bp, Homo sapien
atacaagaaaagatagaaattctga

SEQ ID NO: 5889298 - DNA, 25 bp, Homo sapien
tggttttggtaattaacatatttta

SEQ ID NO: 5889299 - DNA, 25 bp, Homo sapien
gctttaaagcaacttcaaagtcagg

SEQ ID NO: 5889300 - DNA, 25 bp, Homo sapien
agggtgtttctatggagtgtttggg

SEQ ID NO: 5889301 - DNA, 25 bp, Homo sapien
ataaaagtcctgagaagatttttct

SEQ ID NO: 5889302 - DNA, 25 bp, Homo sapien
tagtgcttctgtttagtaaaagttc

SEQ ID NO: 5889303 - DNA, 25 bp, Homo sapien
acgtgtccagtaaattaataccacc

SEQ ID NO: 5889304 - DNA, 25 bp, Homo sapien
ctcagcggggccaggggctgctcag

SEQ ID NO: 5889305 - DNA, 25 bp, Homo sapien
cttttctgtttaagagattttagca

SEQ ID NO: 5889306 - DNA, 25 bp, Homo sapien
agaaagataggcattagagatgtat

SEQ ID NO: 5889307 - DNA, 25 bp, Homo sapien
gtgcttctgtttagtaaaagttcag

SEQ ID NO: 5889308 - DNA, 25 bp, Homo sapien
gagatgagaaagggtgtttctatgg

SEQ ID NO: 5889309 - DNA, 25 bp, Homo sapien
agatacacagaatgttctcgaacct

SEQ ID NO: 5889310 - DNA, 25 bp, Homo sapien
agagcaggtgatcttcatggagcct

SEQ ID NO: 5889311 - DNA, 25 bp, Homo sapien
aggagtctctagatacacagaatgt

SEQ ID NO: 5889312 - DNA, 25 bp, Homo sapien
aatacaagcacagcagtccttgaat

SEQ ID NO: 5889313 - DNA, 25 bp, Homo sapien
ggcaaggggctgcattcctctgagg

SEQ ID NO: 5889314 - DNA, 25 bp, Homo sapien
ggacttggcctgaggcctttcgggc

SEQ ID NO: 5889315 - DNA, 25 bp, Homo sapien
tgacagttatttgagaagccatttc

SEQ ID NO: 5889316 - DNA, 25 bp, Homo sapien
cttcctatatgcagcgtgtgctttc

SEQ ID NO: 5889317 - DNA, 25 bp, Homo sapien
cagcctgcttaaagcaaatccgaat

SEQ ID NO: 5889318 - DNA, 25 bp, Homo sapien
gaggacagtgggactttagcaagga

SEQ ID NO: 5889319 - DNA, 25 bp, Homo sapien
tctgtctcccagataatgtgaaaac

SEQ ID NO: 5889320 - DNA, 25 bp, Homo sapien
tgctttcttattcttatttttaata

SEQ ID NO: 5889321 - DNA, 25 bp, Homo sapien
gtaaagagccctctggttcattgcc

SEQ ID NO: 5889322 - DNA, 25 bp, Homo sapien
tggggctgccagaattcccttgggc

SEQ ID NO: 5889323 - DNA, 25 bp, Homo sapien
tccgaatttaaataggacatttaca

SEQ ID NO: 5889324 - DNA, 25 bp, Homo sapien
agggatgcattctctccaaacagct

SEQ ID NO: 5889325 - DNA, 25 bp, Homo sapien
aataggacatttacatcggaaaagt

SEQ ID NO: 5889326 - DNA, 25 bp, Homo sapien
tttgtgttgaaacccagatttgtac

SEQ ID NO: 5889327 - DNA, 25 bp, Homo sapien
tgtctcccagataatgtgaaaacgg

SEQ ID NO: 5889328 - DNA, 25 bp, Homo sapien
acagtgggactttagcaaggaagtg

SEQ ID NO: 5889329 - DNA, 25 bp, Homo sapien
gcctgcttaaagcaaatccgaattt

SEQ ID NO: 5889330 - DNA, 25 bp, Homo sapien
cctggggctgccagaattcccttgg

SEQ ID NO: 5889331 - DNA, 25 bp, Homo sapien
ggtggagacatacagtctgctttgt

SEQ ID NO: 5889332 - DNA, 25 bp, Homo sapien
agggacttggcctgaggcctttcgg

SEQ ID NO: 5889333 - DNA, 25 bp, Homo sapien
cattcttcaaaatgttccatagaat

SEQ ID NO: 5889334 - DNA, 25 bp, Homo sapien
tgggactttagcaaggaagtgcagc

SEQ ID NO: 5889335 - DNA, 25 bp, Homo sapien
aggggctgcattcctctgagggact

SEQ ID NO: 5889336 - DNA, 25 bp, Homo sapien
ggccgtgcacccttttcagctggat

SEQ ID NO: 5889337 - DNA, 25 bp, Homo sapien
cttgggcgccaagcaacctgccagg

SEQ ID NO: 5889338 - DNA, 25 bp, Homo sapien
ggtaatctcattcttcaaaatgttc

SEQ ID NO: 5889339 - DNA, 25 bp, Homo sapien
taatctcattcttcaaaatgttcca

SEQ ID NO: 5889340 - DNA, 25 bp, Homo sapien
tcctccaaattcccccagcagactt

SEQ ID NO: 5889341 - DNA, 25 bp, Homo sapien
ctcattcttcaaaatgttccataga

SEQ ID NO: 5889342 - DNA, 25 bp, Homo sapien
tctgtttatcctctcatgggtgatt

SEQ ID NO: 5889343 - DNA, 25 bp, Homo sapien
agtctctccctaccttaatccccca

SEQ ID NO: 5889344 - DNA, 25 bp, Homo sapien
ccagaattcccttgggcgccaagca

SEQ ID NO: 5889345 - DNA, 25 bp, Homo sapien
agtgcagccgaggggtaaagagccc

SEQ ID NO: 5889346 - DNA, 25 bp, Homo sapien
gtgaatactgtattttgtttcagtt

SEQ ID NO: 5889347 - DNA, 25 bp, Homo sapien
cgtgtgctttcttattcttattttt

SEQ ID NO: 5889348 - DNA, 25 bp, Homo sapien
gctttcaaaatacaagcacagcagt

SEQ ID NO: 5889349 - DNA, 25 bp, Homo sapien
aggggtaaagagccctctggttcat

SEQ ID NO: 5889350 - DNA, 25 bp, Homo sapien
acaagcctttgcatctggataggga

SEQ ID NO: 5889351 - DNA, 25 bp, Homo sapien
cagatttgtaccctgtgtttataca

SEQ ID NO: 5889352 - DNA, 25 bp, Homo sapien
gaaacccagatttgtaccctgtgtt

SEQ ID NO: 5889353 - DNA, 25 bp, Homo sapien
caaatccgaatttaaataggacatt

SEQ ID NO: 5889354 - DNA, 25 bp, Homo sapien
aaggtaatctcattcttcaaaatgt

SEQ ID NO: 5889355 - DNA, 25 bp, Homo sapien
cgccaagttcccaaaacccactcag

SEQ ID NO: 5889356 - DNA, 25 bp, Homo sapien
ccaggggcttcctcccagaagtcag

SEQ ID NO: 5889357 - DNA, 25 bp, Homo sapien
tttatcctctcatgggtgattatct

SEQ ID NO: 5889358 - DNA, 25 bp, Homo sapien
caaggggctgcattcctctgaggga

SEQ ID NO: 5889359 - DNA, 25 bp, Homo sapien
cacagcagtccttgaatggctgttg

SEQ ID NO: 5889360 - DNA, 25 bp, Homo sapien
acccttttcagctggatgagagcca

SEQ ID NO: 5889361 - DNA, 25 bp, Homo sapien
gacccagggcacctagctgtccctg

SEQ ID NO: 5889362 - DNA, 25 bp, Homo sapien
ttaaggtaatctcattcttcaaaat

SEQ ID NO: 5889363 - DNA, 25 bp, Homo sapien
aggcctttcgggcctctccagtggg

SEQ ID NO: 5889364 - DNA, 25 bp, Homo sapien
catccccaggccgtgcacccttttc

SEQ ID NO: 5889365 - DNA, 25 bp, Homo sapien
cccattttaaggtaatctcattctt

SEQ ID NO: 5889366 - DNA, 25 bp, Homo sapien
aagtcagtcatccccaggccgtgca

SEQ ID NO: 5889367 - DNA, 25 bp, Homo sapien
ctgtccctgctggtcctggggctgc

SEQ ID NO: 5889368 - DNA, 25 bp, Homo sapien
atacactgctgctggctcccgagga

SEQ ID NO: 5889369 - DNA, 25 bp, Homo sapien
ctgtgtttatacactgctgctggct

SEQ ID NO: 5889370 - DNA, 25 bp, Homo sapien
taccctgtgtttatacactgctgct

SEQ ID NO: 5889371 - DNA, 25 bp, Homo sapien
aggcagcttcctatatgcagcgtgt

SEQ ID NO: 5889372 - DNA, 25 bp, Homo sapien
tgccagaattcccttgggcgccaag

SEQ ID NO: 5889373 - DNA, 25 bp, Homo sapien
taccttaatcccccattctcttgct

SEQ ID NO: 5889374 - DNA, 25 bp, Homo sapien
tacaagcacagcagtccttgaatgg

SEQ ID NO: 5889375 - DNA, 25 bp, Homo sapien
agggcaaggggctgcattcctctga

SEQ ID NO: 5889376 - DNA, 25 bp, Homo sapien
cagtgttgtgtgtggtgaatactgt

SEQ ID NO: 5889377 - DNA, 25 bp, Homo sapien
ccctctggttcattgcctgatcggc

SEQ ID NO: 5889378 - DNA, 25 bp, Homo sapien
agttgccaacctcgacgggctagca

SEQ ID NO: 5889379 - DNA, 25 bp, Homo sapien
tgctgctggctcccgaggacagtgg

SEQ ID NO: 5889380 - DNA, 25 bp, Homo sapien
gacagcctgcttaaagcaaatccga

SEQ ID NO: 5889381 - DNA, 25 bp, Homo sapien
ccagcagacttctaccctcgccaag

SEQ ID NO: 5889382 - DNA, 25 bp, Homo sapien
taccctggcccattttaaggtaatc

SEQ ID NO: 5889383 - DNA, 25 bp, Homo sapien
ttcccttgggcgccaagcaacctgc

SEQ ID NO: 5889384 - DNA, 25 bp, Homo sapien
agccctctggttcattgcctgatcg

SEQ ID NO: 5889385 - DNA, 25 bp, Homo sapien
ggttcagtgttgtgtgtggtgaata

SEQ ID NO: 5889386 - DNA, 25 bp, Homo sapien
ccagaagtcagtcatccccaggccg

SEQ ID NO: 5889387 - DNA, 25 bp, Homo sapien
tgtctaagcagcgatgggttcagtg

SEQ ID NO: 5889388 - DNA, 25 bp, Homo sapien
atttacatcggaaaagtctctccct

SEQ ID NO: 5889389 - DNA, 25 bp, Homo sapien
agctgtccctgctggtcctggggct

SEQ ID NO: 5889390 - DNA, 25 bp, Homo sapien
ccgaggacagtgggactttagcaag

SEQ ID NO: 5889391 - DNA, 25 bp, Homo sapien
gggctgcattcctctgagggacttg

SEQ ID NO: 5889392 - DNA, 25 bp, Homo sapien
cgccaagcaacctgccaggtagcca

SEQ ID NO: 5889393 - DNA, 25 bp, Homo sapien
ccattctcttgctttcaaaatacaa

SEQ ID NO: 5889394 - DNA, 25 bp, Homo sapien
ttaatatatgacagttatttgagaa

SEQ ID NO: 5889395 - DNA, 25 bp, Homo sapien
tggtgaatactgtattttgtttcag

SEQ ID NO: 5889396 - DNA, 25 bp, Homo sapien
ttcattgcctgatcggctttgagag

SEQ ID NO: 5889397 - DNA, 25 bp, Homo sapien
ataatgtgaaaacggtccaggagaa

SEQ ID NO: 5889398 - DNA, 25 bp, Homo sapien
aggtagccagtccctctgttacaag

SEQ ID NO: 5889399 - DNA, 25 bp, Homo sapien
gttctgtttatcctctcatgggtga

SEQ ID NO: 5889400 - DNA, 25 bp, Homo sapien
agaatcctccaaattcccccagcag

SEQ ID NO: 5889401 - DNA, 25 bp, Homo sapien
tttcaaaatacaagcacagcagtcc

SEQ ID NO: 5889402 - DNA, 25 bp, Homo sapien
cattcctctgagggacttggcctga

SEQ ID NO: 5889403 - DNA, 25 bp, Homo sapien
cgacgggctagcagtgtctaagcag

SEQ ID NO: 5889404 - DNA, 25 bp, Homo sapien
cgaggggtaaagagccctctggttc

SEQ ID NO: 5889405 - DNA, 25 bp, Homo sapien
gaaaggggtggagacatacagtctg

SEQ ID NO: 5889406 - DNA, 25 bp, Homo sapien
gcattctctccaaacagctaccctg

SEQ ID NO: 5889407 - DNA, 25 bp, Homo sapien
cagcagtccttgaatggctgttgac

SEQ ID NO: 5889408 - DNA, 25 bp, Homo sapien
gatgggttcagtgttgtgtgtggtg

SEQ ID NO: 5889409 - DNA, 25 bp, Homo sapien
ttgaaacccagatttgtaccctgtg

SEQ ID NO: 5889410 - DNA, 25 bp, Homo sapien
cagtctgctttgtgttgaaacccag

SEQ ID NO: 5889411 - DNA, 25 bp, Homo sapien
gatttgtaccctgtgtttatacact

SEQ ID NO: 5889412 - DNA, 25 bp, Homo sapien
tgtgaaaacggtccaggagaaggca

SEQ ID NO: 5889413 - DNA, 25 bp, Homo sapien
aaggaagtgcagccgaggggtaaag

SEQ ID NO: 5889414 - DNA, 25 bp, Homo sapien
tcccccagcagacttctaccctcgc

SEQ ID NO: 5889415 - DNA, 25 bp, Homo sapien
gagacatacagtctgctttgtgttg

SEQ ID NO: 5889416 - DNA, 25 bp, Homo sapien
ggcctctccagtgggttctgtttat

SEQ ID NO: 5889417 - DNA, 25 bp, Homo sapien
gtttggagggcaaggggctgcattc

SEQ ID NO: 5889418 - DNA, 25 bp, Homo sapien
gatgagagccagggatgcattctct

SEQ ID NO: 5889419 - DNA, 25 bp, Homo sapien
ttcctctgagggacttggcctgagg

SEQ ID NO: 5889420 - DNA, 25 bp, Homo sapien
gcttcctcccagaagtcagtcatcc

SEQ ID NO: 5889421 - DNA, 25 bp, Homo sapien
atgcagcgtgtgctttcttattctt

SEQ ID NO: 5889422 - DNA, 25 bp, Homo sapien
cagcaaagttgccaacctcgacggg

SEQ ID NO: 5889423 - DNA, 25 bp, Homo sapien
aacggtccaggagaaggcagcttcc

SEQ ID NO: 5889424 - DNA, 25 bp, Homo sapien
acttggcctgaggcctttcgggcct

SEQ ID NO: 5889425 - DNA, 25 bp, Homo sapien
tctgttacaagcctttgcatctgga

SEQ ID NO: 5889426 - DNA, 25 bp, Homo sapien
tgtgttgaaacccagatttgtaccc

SEQ ID NO: 5889427 - DNA, 25 bp, Homo sapien
tgccaggtagccagtccctctgtta

SEQ ID NO: 5889428 - DNA, 25 bp, Homo sapien
tgtgctttcttattcttatttttaa

SEQ ID NO: 5889429 - DNA, 25 bp, Homo sapien
ccctgctggtcctggggctgccaga

SEQ ID NO: 5889430 - DNA, 25 bp, Homo sapien
gcctttcgggcctctccagtgggtt

SEQ ID NO: 5889431 - DNA, 25 bp, Homo sapien
caaacagctaccctggcccatttta

SEQ ID NO: 5889432 - DNA, 25 bp, Homo sapien
attctctccaaacagctaccctggc

SEQ ID NO: 5889433 - DNA, 25 bp, Homo sapien
aacagctaccctggcccattttaag

SEQ ID NO: 5889434 - DNA, 25 bp, Homo sapien
gtgcacccttttcagctggatgaga

SEQ ID NO: 5889435 - DNA, 25 bp, Homo sapien
gtgtcaccaggggcttcctcccaga

SEQ ID NO: 5889436 - DNA, 25 bp, Homo sapien
tctgagggacttggcctgaggcctt

SEQ ID NO: 5889437 - DNA, 25 bp, Homo sapien
agcagacttctaccctcgccaagtt

SEQ ID NO: 5889438 - DNA, 25 bp, Homo sapien
caacctcgacgggctagcagtgtct

SEQ ID NO: 5889439 - DNA, 25 bp, Homo sapien
aaagttgccaacctcgacgggctag

SEQ ID NO: 5889440 - DNA, 25 bp, Homo sapien
tgttccatagaatcctccaaattcc

SEQ ID NO: 5889441 - DNA, 25 bp, Homo sapien
acgggctagcagtgtctaagcagcg

SEQ ID NO: 5889442 - DNA, 25 bp, Homo sapien
agtccctctgttacaagcctttgca

SEQ ID NO: 5889443 - DNA, 25 bp, Homo sapien
cttatttttaatatatgacagttat

SEQ ID NO: 5889444 - DNA, 25 bp, Homo sapien
ctttcgggcctctccagtgggttct

SEQ ID NO: 5889445 - DNA, 25 bp, Homo sapien
agcttcctatatgcagcgtgtgctt

SEQ ID NO: 5889446 - DNA, 25 bp, Homo sapien
tctccaaacagctaccctggcccat

SEQ ID NO: 5889447 - DNA, 25 bp, Homo sapien
agccagtccctctgttacaagcctt

SEQ ID NO: 5889448 - DNA, 25 bp, Homo sapien
gttctgtctcccagataatgtgaaa

SEQ ID NO: 5889449 - DNA, 25 bp, Homo sapien
ccccattctcttgctttcaaaatac

SEQ ID NO: 5889450 - DNA, 25 bp, Homo sapien
ttttgtttcagttctgtctcccaga

SEQ ID NO: 5889451 - DNA, 25 bp, Homo sapien
ggagggcaaggggctgcattcctct

SEQ ID NO: 5889452 - DNA, 25 bp, Homo sapien
aatgttccatagaatcctccaaatt

SEQ ID NO: 5889453 - DNA, 25 bp, Homo sapien
ttcagttctgtctcccagataatgt

SEQ ID NO: 5889454 - DNA, 25 bp, Homo sapien
aaaacccactcagcaaagttgccaa

SEQ ID NO: 5889455 - DNA, 25 bp, Homo sapien
gcagcttcctatatgcagcgtgtgc

SEQ ID NO: 5889456 - DNA, 25 bp, Homo sapien
ttgtttcagttctgtctcccagata

SEQ ID NO: 5889457 - DNA, 25 bp, Homo sapien
tgttacaagcctttgcatctggata

SEQ ID NO: 5889458 - DNA, 25 bp, Homo sapien
ctttgagagagggtttggagggcaa

SEQ ID NO: 5889459 - DNA, 25 bp, Homo sapien
ctgctttgtgttgaaacccagattt

SEQ ID NO: 5889460 - DNA, 25 bp, Homo sapien
cagtcatccccaggccgtgcaccct

SEQ ID NO: 5889461 - DNA, 25 bp, Homo sapien
aacccactcagcaaagttgccaacc

SEQ ID NO: 5889462 - DNA, 25 bp, Homo sapien
atctcattcttcaaaatgttccata

SEQ ID NO: 5889463 - DNA, 25 bp, Homo sapien
cctctgagggacttggcctgaggcc

SEQ ID NO: 5889464 - DNA, 25 bp, Homo sapien
ggcctgaggcctttcgggcctctcc

SEQ ID NO: 5889465 - DNA, 25 bp, Homo sapien
tggctcccgaggacagtgggacttt

SEQ ID NO: 5889466 - DNA, 25 bp, Homo sapien
acatttacatcggaaaagtctctcc

SEQ ID NO: 5889467 - DNA, 25 bp, Homo sapien
tacagtctgctttgtgttgaaaccc

SEQ ID NO: 5889468 - DNA, 25 bp, Homo sapien
ctctggttcattgcctgatcggctt

SEQ ID NO: 5889469 - DNA, 25 bp, Homo sapien
cctcccagaagtcagtcatccccag

SEQ ID NO: 5889470 - DNA, 25 bp, Homo sapien
atgcattctctccaaacagctaccc

SEQ ID NO: 5889471 - DNA, 25 bp, Homo sapien
aagcaacctgccaggtagccagtcc

SEQ ID NO: 5889472 - DNA, 25 bp, Homo sapien
aatttaaataggacatttacatcgg

SEQ ID NO: 5889473 - DNA, 25 bp, Homo sapien
gtcctggggctgccagaattccctt

SEQ ID NO: 5889474 - DNA, 25 bp, Homo sapien
ccaaaacccactcagcaaagttgcc

SEQ ID NO: 5889475 - DNA, 25 bp, Homo sapien
cgaatttaaataggacatttacatc

SEQ ID NO: 5889476 - DNA, 25 bp, Homo sapien
acagttatttgagaagccatttcta

SEQ ID NO: 5889477 - DNA, 25 bp, Homo sapien
tccagtgggttctgtttatcctctc

SEQ ID NO: 5889478 - DNA, 25 bp, Homo sapien
ccaagcaacctgccaggtagccagt

SEQ ID NO: 5889479 - DNA, 25 bp, Homo sapien
gctcccgaggacagtgggactttag

SEQ ID NO: 5889480 - DNA, 25 bp, Homo sapien
tctcttgctttcaaaatacaagcac

SEQ ID NO: 5889481 - DNA, 25 bp, Homo sapien
gtctgctttgtgttgaaacccagat

SEQ ID NO: 5889482 - DNA, 25 bp, Homo sapien
tgtattttgtttcagttctgtctcc

SEQ ID NO: 5889483 - DNA, 25 bp, Homo sapien
agtgggactttagcaaggaagtgca

SEQ ID NO: 5889484 - DNA, 25 bp, Homo sapien
gtccctgctggtcctggggctgcca

SEQ ID NO: 5889485 - DNA, 25 bp, Homo sapien
actttagcaaggaagtgcagccgag

SEQ ID NO: 5889486 - DNA, 25 bp, Homo sapien
aatcccccattctcttgctttcaaa

SEQ ID NO: 5889487 - DNA, 25 bp, Homo sapien
tgtgtgtggtgaatactgtattttg

SEQ ID NO: 5889488 - DNA, 25 bp, Homo sapien
cctaccttaatcccccattctcttg

SEQ ID NO: 5889489 - DNA, 25 bp, Homo sapien
tctcccagataatgtgaaaacggtc

SEQ ID NO: 5889490 - DNA, 25 bp, Homo sapien
gaaggcagcttcctatatgcagcgt

SEQ ID NO: 5889491 - DNA, 25 bp, Homo sapien
aatatatgacagttatttgagaagc

SEQ ID NO: 5889492 - DNA, 25 bp, Homo sapien
ctgcttaaagcaaatccgaatttaa

SEQ ID NO: 5889493 - DNA, 25 bp, Homo sapien
atactgtattttgtttcagttctgt

SEQ ID NO: 5889494 - DNA, 25 bp, Homo sapien
gttgtgtgtggtgaatactgtattt

SEQ ID NO: 5889495 - DNA, 25 bp, Homo sapien
gggcacctagctgtccctgctggtc

SEQ ID NO: 5889496 - DNA, 25 bp, Homo sapien
tttagcaaggaagtgcagccgaggg

SEQ ID NO: 5889497 - DNA, 25 bp, Homo sapien
ctctcatgggtgattatctcagtgg

SEQ ID NO: 5889498 - DNA, 25 bp, Homo sapien
ttaatcccccattctcttgctttca

SEQ ID NO: 5889499 - DNA, 25 bp, Homo sapien
gggtaaagagccctctggttcattg

SEQ ID NO: 5889500 - DNA, 25 bp, Homo sapien
aatccgaatttaaataggacattta

SEQ ID NO: 5889501 - DNA, 25 bp, Homo sapien
gacatacagtctgctttgtgttgaa

SEQ ID NO: 5889502 - DNA, 25 bp, Homo sapien
gggaaaggggtggagacatacagtc

SEQ ID NO: 5889503 - DNA, 25 bp, Homo sapien
caccaggggcttcctcccagaagtc

SEQ ID NO: 5889504 - DNA, 25 bp, Homo sapien
gtagccagtccctctgttacaagcc

SEQ ID NO: 5889505 - DNA, 25 bp, Homo sapien
tgaaaacggtccaggagaaggcagc

SEQ ID NO: 5889506 - DNA, 25 bp, Homo sapien
gcctgatcggctttgagagagggtt

SEQ ID NO: 5889507 - DNA, 25 bp, Homo sapien
tcctatatgcagcgtgtgctttctt

SEQ ID NO: 5889508 - DNA, 25 bp, Homo sapien
gacttctaccctcgccaagttccca

SEQ ID NO: 5889509 - DNA, 25 bp, Homo sapien
aagttcccaaaacccactcagcaaa

SEQ ID NO: 5889510 - DNA, 25 bp, Homo sapien
taggacatttacatcggaaaagtct

SEQ ID NO: 5889511 - DNA, 25 bp, Homo sapien
actgctgctggctcccgaggacagt

SEQ ID NO: 5889512 - DNA, 25 bp, Homo sapien
gcgatgggttcagtgttgtgtgtgg

SEQ ID NO: 5889513 - DNA, 25 bp, Homo sapien
gctgttgacccagggcacctagctg

SEQ ID NO: 5889514 - DNA, 25 bp, Homo sapien
ctgctggtcctggggctgccagaat

SEQ ID NO: 5889515 - DNA, 25 bp, Homo sapien
aaggggtggagacatacagtctgct

SEQ ID NO: 5889516 - DNA, 25 bp, Homo sapien
tccaaacagctaccctggcccattt

SEQ ID NO: 5889517 - DNA, 25 bp, Homo sapien
agaagtcagtcatccccaggccgtg

SEQ ID NO: 5889518 - DNA, 25 bp, Homo sapien
agataatgtgaaaacggtccaggag

SEQ ID NO: 5889519 - DNA, 25 bp, Homo sapien
gtcaccaggggcttcctcccagaag

SEQ ID NO: 5889520 - DNA, 25 bp, Homo sapien
ggttcattgcctgatcggctttgag

SEQ ID NO: 5889521 - DNA, 25 bp, Homo sapien
tgtgtggtgaatactgtattttgtt

SEQ ID NO: 5889522 - DNA, 25 bp, Homo sapien
tgttgaaacccagatttgtaccctg

SEQ ID NO: 5889523 - DNA, 25 bp, Homo sapien
cccactcagcaaagttgccaacctc

SEQ ID NO: 5889524 - DNA, 25 bp, Homo sapien
gcacctagctgtccctgctggtcct

SEQ ID NO: 5889525 - DNA, 25 bp, Homo sapien
gcacccttttcagctggatgagagc

SEQ ID NO: 5889526 - DNA, 25 bp, Homo sapien
tggagacatacagtctgctttgtgt

SEQ ID NO: 5889527 - DNA, 25 bp, Homo sapien
ttccatagaatcctccaaattcccc

SEQ ID NO: 5889528 - DNA, 25 bp, Homo sapien
gggctgccagaattcccttgggcgc

SEQ ID NO: 5889529 - DNA, 25 bp, Homo sapien
tctccctaccttaatcccccattct

SEQ ID NO: 5889530 - DNA, 25 bp, Homo sapien
tctccagtgggttctgtttatcctc

SEQ ID NO: 5889531 - DNA, 25 bp, Homo sapien
tctctccaaacagctaccctggccc

SEQ ID NO: 5889532 - DNA, 25 bp, Homo sapien
ctcgccaagttcccaaaacccactc

SEQ ID NO: 5889533 - DNA, 25 bp, Homo sapien
ccatagaatcctccaaattccccca

SEQ ID NO: 5889534 - DNA, 25 bp, Homo sapien
aatgtgaaaacggtccaggagaagg

SEQ ID NO: 5889535 - DNA, 25 bp, Homo sapien
ttgcctgatcggctttgagagaggg

SEQ ID NO: 5889536 - DNA, 25 bp, Homo sapien
aagcctttgcatctggatagggaaa

SEQ ID NO: 5889537 - DNA, 25 bp, Homo sapien
ctgctggctcccgaggacagtggga

SEQ ID NO: 5889538 - DNA, 25 bp, Homo sapien
cctgaggcctttcgggcctctccag

SEQ ID NO: 5889539 - DNA, 25 bp, Homo sapien
ccttttcagctggatgagagccagg

SEQ ID NO: 5889540 - DNA, 25 bp, Homo sapien
ttggagggcaaggggctgcattcct

SEQ ID NO: 5889541 - DNA, 25 bp, Homo sapien
catgggtgattatctcagtggtgtc

SEQ ID NO: 5889542 - DNA, 25 bp, Homo sapien
tcctctcatgggtgattatctcagt

SEQ ID NO: 5889543 - DNA, 25 bp, Homo sapien
tagcagtgtctaagcagcgatgggt

SEQ ID NO: 5889544 - DNA, 25 bp, Homo sapien
tcaaaatacaagcacagcagtcctt

SEQ ID NO: 5889545 - DNA, 25 bp, Homo sapien
tgagagccagggatgcattctctcc

SEQ ID NO: 5889546 - DNA, 25 bp, Homo sapien
cagggcacctagctgtccctgctgg

SEQ ID NO: 5889547 - DNA, 25 bp, Homo sapien
cccttgggcgccaagcaacctgcca

SEQ ID NO: 5889548 - DNA, 25 bp, Homo sapien
attcccccagcagacttctaccctc

SEQ ID NO: 5889549 - DNA, 25 bp, Homo sapien
gagaaggcagcttcctatatgcagc

SEQ ID NO: 5889550 - DNA, 25 bp, Homo sapien
atatgcagcgtgtgctttcttattc

SEQ ID NO: 5889551 - DNA, 25 bp, Homo sapien
cccaggccgtgcacccttttcagct

SEQ ID NO: 5889552 - DNA, 25 bp, Homo sapien
tggtcctggggctgccagaattccc

SEQ ID NO: 5889553 - DNA, 25 bp, Homo sapien
aggggcttcctcccagaagtcagtc

SEQ ID NO: 5889554 - DNA, 25 bp, Homo sapien
ctggttcattgcctgatcggctttg

SEQ ID NO: 5889555 - DNA, 25 bp, Homo sapien
ggacagtgggactttagcaaggaag

SEQ ID NO: 5889556 - DNA, 25 bp, Homo sapien
tatctcagtggtgtcaccaggggct

SEQ ID NO: 5889557 - DNA, 25 bp, Homo sapien
ttcgggcctctccagtgggttctgt

SEQ ID NO: 5889558 - DNA, 25 bp, Homo sapien
ggggtggagacatacagtctgcttt

SEQ ID NO: 5889559 - DNA, 25 bp, Homo sapien
cagcgatgggttcagtgttgtgtgt

SEQ ID NO: 5889560 - DNA, 25 bp, Homo sapien
tttgtaccctgtgtttatacactgc

SEQ ID NO: 5889561 - DNA, 25 bp, Homo sapien
tgtggtgaatactgtattttgtttc

SEQ ID NO: 5889562 - DNA, 25 bp, Homo sapien
tgtttatcctctcatgggtgattat

SEQ ID NO: 5889563 - DNA, 25 bp, Homo sapien
tgtaccctgtgtttatacactgctg

SEQ ID NO: 5889564 - DNA, 25 bp, Homo sapien
cttgaatggctgttgacccagggca

SEQ ID NO: 5889565 - DNA, 25 bp, Homo sapien
gctggctcccgaggacagtgggact

SEQ ID NO: 5889566 - DNA, 25 bp, Homo sapien
aatcctccaaattcccccagcagac

SEQ ID NO: 5889567 - DNA, 25 bp, Homo sapien
ctagctgtccctgctggtcctgggg

SEQ ID NO: 5889568 - DNA, 25 bp, Homo sapien
ccctggcccattttaaggtaatctc

SEQ ID NO: 5889569 - DNA, 25 bp, Homo sapien
tatatgacagttatttgagaagcca

SEQ ID NO: 5889570 - DNA, 25 bp, Homo sapien
aaagagccctctggttcattgcctg

SEQ ID NO: 5889571 - DNA, 25 bp, Homo sapien
ggcccattttaaggtaatctcattc

SEQ ID NO: 5889572 - DNA, 25 bp, Homo sapien
ttggcctgaggcctttcgggcctct

SEQ ID NO: 5889573 - DNA, 25 bp, Homo sapien
gcaaagttgccaacctcgacgggct

SEQ ID NO: 5889574 - DNA, 25 bp, Homo sapien
gcaaggaagtgcagccgaggggtaa

SEQ ID NO: 5889575 - DNA, 25 bp, Homo sapien
tattcttatttttaatatatgacag

SEQ ID NO: 5889576 - DNA, 25 bp, Homo sapien
cccagggcacctagctgtccctgct

SEQ ID NO: 5889577 - DNA, 25 bp, Homo sapien
ttttcagctggatgagagccaggga

SEQ ID NO: 5889578 - DNA, 25 bp, Homo sapien
ttcctcccagaagtcagtcatcccc

SEQ ID NO: 5889579 - DNA, 25 bp, Homo sapien
ctcagcaaagttgccaacctcgacg

SEQ ID NO: 5889580 - DNA, 25 bp, Homo sapien
tatcctctcatgggtgattatctca

SEQ ID NO: 5889581 - DNA, 25 bp, Homo sapien
aggagaaggcagcttcctatatgca

SEQ ID NO: 5889582 - DNA, 25 bp, Homo sapien
tgagggacttggcctgaggcctttc

SEQ ID NO: 5889583 - DNA, 25 bp, Homo sapien
ccagataatgtgaaaacggtccagg

SEQ ID NO: 5889584 - DNA, 25 bp, Homo sapien
tccctaccttaatcccccattctct

SEQ ID NO: 5889585 - DNA, 25 bp, Homo sapien
ggtgattatctcagtggtgtcacca

SEQ ID NO: 5889586 - DNA, 25 bp, Homo sapien
tctcagtggtgtcaccaggggcttc

SEQ ID NO: 5889587 - DNA, 25 bp, Homo sapien
taaataggacatttacatcggaaaa

SEQ ID NO: 5889588 - DNA, 25 bp, Homo sapien
cccagatttgtaccctgtgtttata

SEQ ID NO: 5889589 - DNA, 25 bp, Homo sapien
tagcaaggaagtgcagccgaggggt

SEQ ID NO: 5889590 - DNA, 25 bp, Homo sapien
gtgtttatacactgctgctggctcc

SEQ ID NO: 5889591 - DNA, 25 bp, Homo sapien
tttaaataggacatttacatcggaa

SEQ ID NO: 5889592 - DNA, 25 bp, Homo sapien
gggtttggagggcaaggggctgcat

SEQ ID NO: 5889593 - DNA, 25 bp, Homo sapien
gctggtcctggggctgccagaattc

SEQ ID NO: 5889594 - DNA, 25 bp, Homo sapien
ttcttcaaaatgttccatagaatcc

SEQ ID NO: 5889595 - DNA, 25 bp, Homo sapien
gtgttgtgtgtggtgaatactgtat

SEQ ID NO: 5889596 - DNA, 25 bp, Homo sapien
cactcagcaaagttgccaacctcga

SEQ ID NO: 5889597 - DNA, 25 bp, Homo sapien
gtttcagttctgtctcccagataat

SEQ ID NO: 5889598 - DNA, 25 bp, Homo sapien
ttcagctggatgagagccagggatg

SEQ ID NO: 5889599 - DNA, 25 bp, Homo sapien
atagaatcctccaaattcccccagc

SEQ ID NO: 5889600 - DNA, 25 bp, Homo sapien
ctttcttattcttatttttaatata

SEQ ID NO: 5889601 - DNA, 25 bp, Homo sapien
gggcttcctcccagaagtcagtcat

SEQ ID NO: 5889602 - DNA, 25 bp, Homo sapien
ggctttgagagagggtttggagggc

SEQ ID NO: 5889603 - DNA, 25 bp, Homo sapien
tggatgagagccagggatgcattct

SEQ ID NO: 5889604 - DNA, 25 bp, Homo sapien
aaaatgttccatagaatcctccaaa

SEQ ID NO: 5889605 - DNA, 25 bp, Homo sapien
ccagggatgcattctctccaaacag

SEQ ID NO: 5889606 - DNA, 25 bp, Homo sapien
gatcggctttgagagagggtttgga

SEQ ID NO: 5889607 - DNA, 25 bp, Homo sapien
gcagtgtctaagcagcgatgggttc

SEQ ID NO: 5889608 - DNA, 25 bp, Homo sapien
aacccagatttgtaccctgtgttta

SEQ ID NO: 5889609 - DNA, 25 bp, Homo sapien
gcaacctgccaggtagccagtccct

SEQ ID NO: 5889610 - DNA, 25 bp, Homo sapien
ggactttagcaaggaagtgcagccg

SEQ ID NO: 5889611 - DNA, 25 bp, Homo sapien
gtcagtcatccccaggccgtgcacc

SEQ ID NO: 5889612 - DNA, 25 bp, Homo sapien
actgtattttgtttcagttctgtct

SEQ ID NO: 5889613 - DNA, 25 bp, Homo sapien
ttgccaacctcgacgggctagcagt

SEQ ID NO: 5889614 - DNA, 25 bp, Homo sapien
ccaaattcccccagcagacttctac

SEQ ID NO: 5889615 - DNA, 25 bp, Homo sapien
gtcatccccaggccgtgcacccttt

SEQ ID NO: 5889616 - DNA, 25 bp, Homo sapien
tctaagcagcgatgggttcagtgtt

SEQ ID NO: 5889617 - DNA, 25 bp, Homo sapien
acctagctgtccctgctggtcctgg

SEQ ID NO: 5889618 - DNA, 25 bp, Homo sapien
gcctttgcatctggatagggaaagg

SEQ ID NO: 5889619 - DNA, 25 bp, Homo sapien
ccctgtgtttatacactgctgctgg

SEQ ID NO: 5889620 - DNA, 25 bp, Homo sapien
catacagtctgctttgtgttgaaac

SEQ ID NO: 5889621 - DNA, 25 bp, Homo sapien
atcggaaaagtctctccctacctta

SEQ ID NO: 5889622 - DNA, 25 bp, Homo sapien
gaatactgtattttgtttcagttct

SEQ ID NO: 5889623 - DNA, 25 bp, Homo sapien
gctagcagtgtctaagcagcgatgg

SEQ ID NO: 5889624 - DNA, 25 bp, Homo sapien
agagccagggatgcattctctccaa

SEQ ID NO: 5889625 - DNA, 25 bp, Homo sapien
ggaaaagtctctccctaccttaatc

SEQ ID NO: 5889626 - DNA, 25 bp, Homo sapien
cagctggatgagagccagggatgca

SEQ ID NO: 5889627 - DNA, 25 bp, Homo sapien
ttcagtgttgtgtgtggtgaatact

SEQ ID NO: 5889628 - DNA, 25 bp, Homo sapien
cctctccagtgggttctgtttatcc

SEQ ID NO: 5889629 - DNA, 25 bp, Homo sapien
cggtccaggagaaggcagcttccta

SEQ ID NO: 5889630 - DNA, 25 bp, Homo sapien
tcccccattctcttgctttcaaaat

SEQ ID NO: 5889631 - DNA, 25 bp, Homo sapien
caggccgtgcacccttttcagctgg

SEQ ID NO: 5889632 - DNA, 25 bp, Homo sapien
cagtgggttctgtttatcctctcat

SEQ ID NO: 5889633 - DNA, 25 bp, Homo sapien
ccttaatcccccattctcttgcttt

SEQ ID NO: 5889634 - DNA, 25 bp, Homo sapien
agtgtctaagcagcgatgggttcag

SEQ ID NO: 5889635 - DNA, 25 bp, Homo sapien
ggacatttacatcggaaaagtctct

SEQ ID NO: 5889636 - DNA, 25 bp, Homo sapien
cattgcctgatcggctttgagagag

SEQ ID NO: 5889637 - DNA, 25 bp, Homo sapien
tattttgtttcagttctgtctccca

SEQ ID NO: 5889638 - DNA, 25 bp, Homo sapien
ttttaaggtaatctcattcttcaaa

SEQ ID NO: 5889639 - DNA, 25 bp, Homo sapien
tcccgaggacagtgggactttagca

SEQ ID NO: 5889640 - DNA, 25 bp, Homo sapien
cagctaccctggcccattttaaggt

SEQ ID NO: 5889641 - DNA, 25 bp, Homo sapien
ttaaagcaaatccgaatttaaatag

SEQ ID NO: 5889642 - DNA, 25 bp, Homo sapien
tcagtggtgtcaccaggggcttcct

SEQ ID NO: 5889643 - DNA, 25 bp, Homo sapien
tctctccctaccttaatcccccatt

SEQ ID NO: 5889644 - DNA, 25 bp, Homo sapien
tccttgaatggctgttgacccaggg

SEQ ID NO: 5889645 - DNA, 25 bp, Homo sapien
acctcgacgggctagcagtgtctaa

SEQ ID NO: 5889646 - DNA, 25 bp, Homo sapien
gctgcattcctctgagggacttggc

SEQ ID NO: 5889647 - DNA, 25 bp, Homo sapien
agaattcccttgggcgccaagcaac

SEQ ID NO: 5889648 - DNA, 25 bp, Homo sapien
agcaaatccgaatttaaataggaca

SEQ ID NO: 5889649 - DNA, 25 bp, Homo sapien
agtccttgaatggctgttgacccag

SEQ ID NO: 5889650 - DNA, 25 bp, Homo sapien
agcagcgatgggttcagtgttgtgt

SEQ ID NO: 5889651 - DNA, 25 bp, Homo sapien
tcccagataatgtgaaaacggtcca

SEQ ID NO: 5889652 - DNA, 25 bp, Homo sapien
tgggtgattatctcagtggtgtcac

SEQ ID NO: 5889653 - DNA, 25 bp, Homo sapien
ccaggtagccagtccctctgttaca

SEQ ID NO: 5889654 - DNA, 25 bp, Homo sapien
tcaaaatgttccatagaatcctcca

SEQ ID NO: 5889655 - DNA, 25 bp, Homo sapien
cagacttctaccctcgccaagttcc

SEQ ID NO: 5889656 - DNA, 25 bp, Homo sapien
ctatatgcagcgtgtgctttcttat

SEQ ID NO: 5889657 - DNA, 25 bp, Homo sapien
gtccaggagaaggcagcttcctata

SEQ ID NO: 5889658 - DNA, 25 bp, Homo sapien
tgaggcctttcgggcctctccagtg

SEQ ID NO: 5889659 - DNA, 25 bp, Homo sapien
tgggcgccaagcaacctgccaggta

SEQ ID NO: 5889660 - DNA, 25 bp, Homo sapien
gctgccagaattcccttgggcgcca

SEQ ID NO: 5889661 - DNA, 25 bp, Homo sapien
ctcgacgggctagcagtgtctaagc

SEQ ID NO: 5889662 - DNA, 25 bp, Homo sapien
ccaggagaaggcagcttcctatatg

SEQ ID NO: 5889663 - DNA, 25 bp, Homo sapien
gaagtgcagccgaggggtaaagagc

SEQ ID NO: 5889664 - DNA, 25 bp, Homo sapien
cattttaaggtaatctcattcttca

SEQ ID NO: 5889665 - DNA, 25 bp, Homo sapien
agagccctctggttcattgcctgat

SEQ ID NO: 5889666 - DNA, 25 bp, Homo sapien
gcttaaagcaaatccgaatttaaat

SEQ ID NO: 5889667 - DNA, 25 bp, Homo sapien
tgattatctcagtggtgtcaccagg

SEQ ID NO: 5889668 - DNA, 25 bp, Homo sapien
cctctgttacaagcctttgcatctg

SEQ ID NO: 5889669 - DNA, 25 bp, Homo sapien
tcggctttgagagagggtttggagg

SEQ ID NO: 5889670 - DNA, 25 bp, Homo sapien
tctaccctcgccaagttcccaaaac

SEQ ID NO: 5889671 - DNA, 25 bp, Homo sapien
ctccaaattcccccagcagacttct

SEQ ID NO: 5889672 - DNA, 25 bp, Homo sapien
aaattcccccagcagacttctaccc

SEQ ID NO: 5889673 - DNA, 25 bp, Homo sapien
aacctgccaggtagccagtccctct

SEQ ID NO: 5889674 - DNA, 25 bp, Homo sapien
tccctctgttacaagcctttgcatc

SEQ ID NO: 5889675 - DNA, 25 bp, Homo sapien
aaagcaaatccgaatttaaatagga

SEQ ID NO: 5889676 - DNA, 25 bp, Homo sapien
gggttctgtttatcctctcatgggt

SEQ ID NO: 5889677 - DNA, 25 bp, Homo sapien
ccaagttcccaaaacccactcagca

SEQ ID NO: 5889678 - DNA, 25 bp, Homo sapien
ctgatcggctttgagagagggtttg

SEQ ID NO: 5889679 - DNA, 25 bp, Homo sapien
ggcgccaagcaacctgccaggtagc

SEQ ID NO: 5889680 - DNA, 25 bp, Homo sapien
cttcaaaatgttccatagaatcctc

SEQ ID NO: 5889681 - DNA, 25 bp, Homo sapien
aaaatacaagcacagcagtccttga

SEQ ID NO: 5889682 - DNA, 25 bp, Homo sapien
ttgctttcaaaatacaagcacagca

SEQ ID NO: 5889683 - DNA, 25 bp, Homo sapien
tcttgctttcaaaatacaagcacag

SEQ ID NO: 5889684 - DNA, 25 bp, Homo sapien
ttgagagagggtttggagggcaagg

SEQ ID NO: 5889685 - DNA, 25 bp, Homo sapien
aattcccttgggcgccaagcaacct

SEQ ID NO: 5889686 - DNA, 25 bp, Homo sapien
cttctaccctcgccaagttcccaaa

SEQ ID NO: 5889687 - DNA, 25 bp, Homo sapien
ccccagcagacttctaccctcgcca

SEQ ID NO: 5889688 - DNA, 25 bp, Homo sapien
ttatacactgctgctggctcccgag

SEQ ID NO: 5889689 - DNA, 25 bp, Homo sapien
tcccaaaacccactcagcaaagttg

SEQ ID NO: 5889690 - DNA, 25 bp, Homo sapien
attctcttgctttcaaaatacaagc

SEQ ID NO: 5889691 - DNA, 25 bp, Homo sapien
tgggttcagtgttgtgtgtggtgaa

SEQ ID NO: 5889692 - DNA, 25 bp, Homo sapien
agttatttgagaagccatttctact

SEQ ID NO: 5889693 - DNA, 25 bp, Homo sapien
attatctcagtggtgtcaccagggg

SEQ ID NO: 5889694 - DNA, 25 bp, Homo sapien
tggctgttgacccagggcacctagc

SEQ ID NO: 5889695 - DNA, 25 bp, Homo sapien
ttacaagcctttgcatctggatagg

SEQ ID NO: 5889696 - DNA, 25 bp, Homo sapien
gctaccctggcccattttaaggtaa

SEQ ID NO: 5889697 - DNA, 25 bp, Homo sapien
tggtgtcaccaggggcttcctccca

SEQ ID NO: 5889698 - DNA, 25 bp, Homo sapien
gctttgtgttgaaacccagatttgt

SEQ ID NO: 5889699 - DNA, 25 bp, Homo sapien
gtttatacactgctgctggctcccg

SEQ ID NO: 5889700 - DNA, 25 bp, Homo sapien
gtgggttctgtttatcctctcatgg

SEQ ID NO: 5889701 - DNA, 25 bp, Homo sapien
aaaacggtccaggagaaggcagctt

SEQ ID NO: 5889702 - DNA, 25 bp, Homo sapien
acatcggaaaagtctctccctacct

SEQ ID NO: 5889703 - DNA, 25 bp, Homo sapien
ttgacccagggcacctagctgtccc

SEQ ID NO: 5889704 - DNA, 25 bp, Homo sapien
gggctagcagtgtctaagcagcgat

SEQ ID NO: 5889705 - DNA, 25 bp, Homo sapien
agtggtgtcaccaggggcttcctcc

SEQ ID NO: 5889706 - DNA, 25 bp, Homo sapien
cagttctgtctcccagataatgtga

SEQ ID NO: 5889707 - DNA, 25 bp, Homo sapien
agcacagcagtccttgaatggctgt

SEQ ID NO: 5889708 - DNA, 25 bp, Homo sapien
gctggatgagagccagggatgcatt

SEQ ID NO: 5889709 - DNA, 25 bp, Homo sapien
ctcatgggtgattatctcagtggtg

SEQ ID NO: 5889710 - DNA, 25 bp, Homo sapien
gcagtccttgaatggctgttgaccc

SEQ ID NO: 5889711 - DNA, 25 bp, Homo sapien
ccgtgcacccttttcagctggatga

SEQ ID NO: 5889712 - DNA, 25 bp, Homo sapien
tatgacagttatttgagaagccatt

SEQ ID NO: 5889713 - DNA, 25 bp, Homo sapien
tgaatggctgttgacccagggcacc

SEQ ID NO: 5889714 - DNA, 25 bp, Homo sapien
ccagtccctctgttacaagcctttg

SEQ ID NO: 5889715 - DNA, 25 bp, Homo sapien
cgggcctctccagtgggttctgttt

SEQ ID NO: 5889716 - DNA, 25 bp, Homo sapien
gcagcgtgtgctttcttattcttat

SEQ ID NO: 5889717 - DNA, 25 bp, Homo sapien
acactgctgctggctcccgaggaca

SEQ ID NO: 5889718 - DNA, 25 bp, Homo sapien
cctgccaggtagccagtccctctgt

SEQ ID NO: 5889719 - DNA, 25 bp, Homo sapien
ggatgcattctctccaaacagctac

SEQ ID NO: 5889720 - DNA, 25 bp, Homo sapien
aatggctgttgacccagggcaccta

SEQ ID NO: 5889721 - DNA, 25 bp, Homo sapien
gccaacctcgacgggctagcagtgt

SEQ ID NO: 5889722 - DNA, 25 bp, Homo sapien
agcgtgtgctttcttattcttattt

SEQ ID NO: 5889723 - DNA, 25 bp, Homo sapien
taagcagcgatgggttcagtgttgt

SEQ ID NO: 5889724 - DNA, 25 bp, Homo sapien
tgcattcctctgagggacttggcct

SEQ ID NO: 5889725 - DNA, 25 bp, Homo sapien
gttcccaaaacccactcagcaaagt

SEQ ID NO: 5889726 - DNA, 25 bp, Homo sapien
tcccagaagtcagtcatccccaggc

SEQ ID NO: 5889727 - DNA, 25 bp, Homo sapien
tccccaggccgtgcacccttttcag

SEQ ID NO: 5889728 - DNA, 25 bp, Homo sapien
caagcacagcagtccttgaatggct

SEQ ID NO: 5889729 - DNA, 25 bp, Homo sapien
agccagggatgcattctctccaaac

SEQ ID NO: 5889730 - DNA, 25 bp, Homo sapien
ttacatcggaaaagtctctccctac

SEQ ID NO: 5889731 - DNA, 25 bp, Homo sapien
ctggcccattttaaggtaatctcat

SEQ ID NO: 5889732 - DNA, 25 bp, Homo sapien
tgttgacccagggcacctagctgtc

SEQ ID NO: 5889733 - DNA, 25 bp, Homo sapien
tatccagatgcaaaggcttgtaaca

SEQ ID NO: 5889734 - DNA, 25 bp, Homo sapien
tcctcgggagccagcagcagtgtat

SEQ ID NO: 5889735 - DNA, 25 bp, Homo sapien
gaacccatcgctgcttagacactgc

SEQ ID NO: 5889736 - DNA, 25 bp, Homo sapien
gggtcaacagccattcaaggactgc

SEQ ID NO: 5889737 - DNA, 25 bp, Homo sapien
tctcatccagctgaaaagggtgcac

SEQ ID NO: 5889738 - DNA, 25 bp, Homo sapien
gaggattctatggaacattttgaag

SEQ ID NO: 5889739 - DNA, 25 bp, Homo sapien
ccctcggctgcacttccttgctaaa

SEQ ID NO: 5889740 - DNA, 25 bp, Homo sapien
aagcacacgctgcatataggaagct

SEQ ID NO: 5889741 - DNA, 25 bp, Homo sapien
ctgtcatatattaaaaataagaata

SEQ ID NO: 5889742 - DNA, 25 bp, Homo sapien
ttctcaaataactgtcatatattaa

SEQ ID NO: 5889743 - DNA, 25 bp, Homo sapien
ctcgggagccagcagcagtgtataa

SEQ ID NO: 5889744 - DNA, 25 bp, Homo sapien
ccagcagggacagctaggtgccctg

SEQ ID NO: 5889745 - DNA, 25 bp, Homo sapien
acagccattcaaggactgctgtgct

SEQ ID NO: 5889746 - DNA, 25 bp, Homo sapien
agtagaaatggcttctcaaataact

SEQ ID NO: 5889747 - DNA, 25 bp, Homo sapien
tgctgagtgggttttgggaacttgg

SEQ ID NO: 5889748 - DNA, 25 bp, Homo sapien
tacctggcaggttgcttggcgccca

SEQ ID NO: 5889749 - DNA, 25 bp, Homo sapien
attcaaggactgctgtgcttgtatt

SEQ ID NO: 5889750 - DNA, 25 bp, Homo sapien
agccattcaaggactgctgtgcttg

SEQ ID NO: 5889751 - DNA, 25 bp, Homo sapien
caacagccattcaaggactgctgtg

SEQ ID NO: 5889752 - DNA, 25 bp, Homo sapien
atgggccagggtagctgtttggaga

SEQ ID NO: 5889753 - DNA, 25 bp, Homo sapien
ggaagctgccttctcctggaccgtt

SEQ ID NO: 5889754 - DNA, 25 bp, Homo sapien
cccgtcgaggttggcaactttgctg

SEQ ID NO: 5889755 - DNA, 25 bp, Homo sapien
ccagcagcagtgtataaacacaggg

SEQ ID NO: 5889756 - DNA, 25 bp, Homo sapien
actgctagcccgtcgaggttggcaa

SEQ ID NO: 5889757 - DNA, 25 bp, Homo sapien
tgcacggcctggggatgactgactt

SEQ ID NO: 5889758 - DNA, 25 bp, Homo sapien
acactgctagcccgtcgaggttggc

SEQ ID NO: 5889759 - DNA, 25 bp, Homo sapien
gaaatggcttctcaaataactgtca

SEQ ID NO: 5889760 - DNA, 25 bp, Homo sapien
tgcatataggaagctgccttctcct

SEQ ID NO: 5889761 - DNA, 25 bp, Homo sapien
tgggggaatttggaggattctatgg

SEQ ID NO: 5889762 - DNA, 25 bp, Homo sapien
gggaattctggcagccccaggacca

SEQ ID NO: 5889763 - DNA, 25 bp, Homo sapien
agctgaaaagggtgcacggcctggg

SEQ ID NO: 5889764 - DNA, 25 bp, Homo sapien
tctggcagccccaggaccagcaggg

SEQ ID NO: 5889765 - DNA, 25 bp, Homo sapien
tggaggattctatggaacattttga

SEQ ID NO: 5889766 - DNA, 25 bp, Homo sapien
caactttgctgagtgggttttggga

SEQ ID NO: 5889767 - DNA, 25 bp, Homo sapien
tggcgagggtagaagtctgctgggg

SEQ ID NO: 5889768 - DNA, 25 bp, Homo sapien
caccacacacaacactgaacccatc

SEQ ID NO: 5889769 - DNA, 25 bp, Homo sapien
ggggatgactgacttctgggaggaa

SEQ ID NO: 5889770 - DNA, 25 bp, Homo sapien
ctgtgcttgtattttgaaagcaaga

SEQ ID NO: 5889771 - DNA, 25 bp, Homo sapien
aaggactgctgtgcttgtattttga

SEQ ID NO: 5889772 - DNA, 25 bp, Homo sapien
caccactgagataatcacccatgag

SEQ ID NO: 5889773 - DNA, 25 bp, Homo sapien
cggcctggggatgactgacttctgg

SEQ ID NO: 5889774 - DNA, 25 bp, Homo sapien
agacactgctagcccgtcgaggttg

SEQ ID NO: 5889775 - DNA, 25 bp, Homo sapien
tttggaggattctatggaacatttt

SEQ ID NO: 5889776 - DNA, 25 bp, Homo sapien
tatattaaaaataagaataagaaag

SEQ ID NO: 5889777 - DNA, 25 bp, Homo sapien
ccagctgaaaagggtgcacggcctg

SEQ ID NO: 5889778 - DNA, 25 bp, Homo sapien
ctgaaacaaaatacagtattcacca

SEQ ID NO: 5889779 - DNA, 25 bp, Homo sapien
acacaacactgaacccatcgctgct

SEQ ID NO: 5889780 - DNA, 25 bp, Homo sapien
gaggataaacagaacccactggaga

SEQ ID NO: 5889781 - DNA, 25 bp, Homo sapien
caacacaaagcagactgtatgtctc

SEQ ID NO: 5889782 - DNA, 25 bp, Homo sapien
agggtgcacggcctggggatgactg

SEQ ID NO: 5889783 - DNA, 25 bp, Homo sapien
cctcaggccaagtccctcagaggaa

SEQ ID NO: 5889784 - DNA, 25 bp, Homo sapien
caatgaaccagagggctctttaccc

SEQ ID NO: 5889785 - DNA, 25 bp, Homo sapien
gcttgtattttgaaagcaagagaat

SEQ ID NO: 5889786 - DNA, 25 bp, Homo sapien
gcagccccaggaccagcagggacag

SEQ ID NO: 5889787 - DNA, 25 bp, Homo sapien
actgagataatcacccatgagagga

SEQ ID NO: 5889788 - DNA, 25 bp, Homo sapien
tggctacctggcaggttgcttggcg

SEQ ID NO: 5889789 - DNA, 25 bp, Homo sapien
aggccaagtccctcagaggaatgca

SEQ ID NO: 5889790 - DNA, 25 bp, Homo sapien
acaacactgaacccatcgctgctta

SEQ ID NO: 5889791 - DNA, 25 bp, Homo sapien
cgatcaggcaatgaaccagagggct

SEQ ID NO: 5889792 - DNA, 25 bp, Homo sapien
gaaccagagggctctttacccctcg

SEQ ID NO: 5889793 - DNA, 25 bp, Homo sapien
attctatggaacattttgaagaatg

SEQ ID NO: 5889794 - DNA, 25 bp, Homo sapien
tgcttggcgcccaagggaattctgg

SEQ ID NO: 5889795 - DNA, 25 bp, Homo sapien
ttacccctcggctgcacttccttgc

SEQ ID NO: 5889796 - DNA, 25 bp, Homo sapien
tgctgtgcttgtattttgaaagcaa

SEQ ID NO: 5889797 - DNA, 25 bp, Homo sapien
cacttccttgctaaagtcccactgt

SEQ ID NO: 5889798 - DNA, 25 bp, Homo sapien
gtagctgtttggagagaatgcatcc

SEQ ID NO: 5889799 - DNA, 25 bp, Homo sapien
gtgacaccactgagataatcaccca

SEQ ID NO: 5889800 - DNA, 25 bp, Homo sapien
ccttctcctggaccgttttcacatt

SEQ ID NO: 5889801 - DNA, 25 bp, Homo sapien
gttttgggaacttggcgagggtaga

SEQ ID NO: 5889802 - DNA, 25 bp, Homo sapien
gaaacaaaatacagtattcaccaca

SEQ ID NO: 5889803 - DNA, 25 bp, Homo sapien
aggaccagcagggacagctaggtgc

SEQ ID NO: 5889804 - DNA, 25 bp, Homo sapien
gggacagctaggtgccctgggtcaa

SEQ ID NO: 5889805 - DNA, 25 bp, Homo sapien
agagaatgggggattaaggtaggga

SEQ ID NO: 5889806 - DNA, 25 bp, Homo sapien
ggcttgtaacagagggactggctac

SEQ ID NO: 5889807 - DNA, 25 bp, Homo sapien
ctctctcaaagccgatcaggcaatg

SEQ ID NO: 5889808 - DNA, 25 bp, Homo sapien
tgaagaatgagattaccttaaaatg

SEQ ID NO: 5889809 - DNA, 25 bp, Homo sapien
cagggtacaaatctgggtttcaaca

SEQ ID NO: 5889810 - DNA, 25 bp, Homo sapien
caagtccctcagaggaatgcagccc

SEQ ID NO: 5889811 - DNA, 25 bp, Homo sapien
ggagacagaactgaaacaaaataca

SEQ ID NO: 5889812 - DNA, 25 bp, Homo sapien
tccctatccagatgcaaaggcttgt

SEQ ID NO: 5889813 - DNA, 25 bp, Homo sapien
agaggcccgaaaggcctcaggccaa

SEQ ID NO: 5889814 - DNA, 25 bp, Homo sapien
actgctgtgcttgtattttgaaagc

SEQ ID NO: 5889815 - DNA, 25 bp, Homo sapien
gctacctggcaggttgcttggcgcc

SEQ ID NO: 5889816 - DNA, 25 bp, Homo sapien
agggactggctacctggcaggttgc

SEQ ID NO: 5889817 - DNA, 25 bp, Homo sapien
ctgaacccatcgctgcttagacact

SEQ ID NO: 5889818 - DNA, 25 bp, Homo sapien
taaaatgggccagggtagctgtttg

SEQ ID NO: 5889819 - DNA, 25 bp, Homo sapien
gtagggagagacttttccgatgtaa

SEQ ID NO: 5889820 - DNA, 25 bp, Homo sapien
agctgtttggagagaatgcatccct

SEQ ID NO: 5889821 - DNA, 25 bp, Homo sapien
aacacagggtacaaatctgggtttc

SEQ ID NO: 5889822 - DNA, 25 bp, Homo sapien
ccatgagaggataaacagaacccac

SEQ ID NO: 5889823 - DNA, 25 bp, Homo sapien
tcggatttgctttaagcaggctgtc

SEQ ID NO: 5889824 - DNA, 25 bp, Homo sapien
gggccagggtagctgtttggagaga

SEQ ID NO: 5889825 - DNA, 25 bp, Homo sapien
ataactgtcatatattaaaaataag

SEQ ID NO: 5889826 - DNA, 25 bp, Homo sapien
agaagtctgctgggggaatttggag

SEQ ID NO: 5889827 - DNA, 25 bp, Homo sapien
ccactgagataatcacccatgagag

SEQ ID NO: 5889828 - DNA, 25 bp, Homo sapien
gaattctggcagccccaggaccagc

SEQ ID NO: 5889829 - DNA, 25 bp, Homo sapien
tgtcctatttaaattcggatttgct

SEQ ID NO: 5889830 - DNA, 25 bp, Homo sapien
cacggcctggggatgactgacttct

SEQ ID NO: 5889831 - DNA, 25 bp, Homo sapien
tgtaaatgtcctatttaaattcgga

SEQ ID NO: 5889832 - DNA, 25 bp, Homo sapien
ccgttttcacattatctgggagaca

SEQ ID NO: 5889833 - DNA, 25 bp, Homo sapien
atctgggtttcaacacaaagcagac

SEQ ID NO: 5889834 - DNA, 25 bp, Homo sapien
actgtcctcgggagccagcagcagt

SEQ ID NO: 5889835 - DNA, 25 bp, Homo sapien
acaaagcagactgtatgtctccacc

SEQ ID NO: 5889836 - DNA, 25 bp, Homo sapien
aatgtcctatttaaattcggatttg

SEQ ID NO: 5889837 - DNA, 25 bp, Homo sapien
aaagcagactgtatgtctccacccc

SEQ ID NO: 5889838 - DNA, 25 bp, Homo sapien
aacccactggagaggcccgaaaggc

SEQ ID NO: 5889839 - DNA, 25 bp, Homo sapien
cttggcgagggtagaagtctgctgg

SEQ ID NO: 5889840 - DNA, 25 bp, Homo sapien
aaggcctcaggccaagtccctcaga

SEQ ID NO: 5889841 - DNA, 25 bp, Homo sapien
aagaatgagattaccttaaaatggg

SEQ ID NO: 5889842 - DNA, 25 bp, Homo sapien
gattaccttaaaatgggccagggta

SEQ ID NO: 5889843 - DNA, 25 bp, Homo sapien
agaacccactggagaggcccgaaag

SEQ ID NO: 5889844 - DNA, 25 bp, Homo sapien
tcccactgtcctcgggagccagcag

SEQ ID NO: 5889845 - DNA, 25 bp, Homo sapien
gtcaacagccattcaaggactgctg

SEQ ID NO: 5889846 - DNA, 25 bp, Homo sapien
tccaaaccctctctcaaagccgatc

SEQ ID NO: 5889847 - DNA, 25 bp, Homo sapien
actggctacctggcaggttgcttgg

SEQ ID NO: 5889848 - DNA, 25 bp, Homo sapien
tcaggccaagtccctcagaggaatg

SEQ ID NO: 5889849 - DNA, 25 bp, Homo sapien
aggtagggagagacttttccgatgt

SEQ ID NO: 5889850 - DNA, 25 bp, Homo sapien
gctgcatataggaagctgccttctc

SEQ ID NO: 5889851 - DNA, 25 bp, Homo sapien
ggaacttggcgagggtagaagtctg

SEQ ID NO: 5889852 - DNA, 25 bp, Homo sapien
agaatgcatccctggctctcatcca

SEQ ID NO: 5889853 - DNA, 25 bp, Homo sapien
cactgaacccatcgctgcttagaca

SEQ ID NO: 5889854 - DNA, 25 bp, Homo sapien
ttagacactgctagcccgtcgaggt

SEQ ID NO: 5889855 - DNA, 25 bp, Homo sapien
tgggaggaagcccctggtgacacca

SEQ ID NO: 5889856 - DNA, 25 bp, Homo sapien
attctggcagccccaggaccagcag

SEQ ID NO: 5889857 - DNA, 25 bp, Homo sapien
tggcttctcaaataactgtcatata

SEQ ID NO: 5889858 - DNA, 25 bp, Homo sapien
ctgggtcaacagccattcaaggact

SEQ ID NO: 5889859 - DNA, 25 bp, Homo sapien
ccctctctcaaagccgatcaggcaa

SEQ ID NO: 5889860 - DNA, 25 bp, Homo sapien
tcgaggttggcaactttgctgagtg

SEQ ID NO: 5889861 - DNA, 25 bp, Homo sapien
tgtataaacacagggtacaaatctg

SEQ ID NO: 5889862 - DNA, 25 bp, Homo sapien
gaccagcagggacagctaggtgccc

SEQ ID NO: 5889863 - DNA, 25 bp, Homo sapien
gcttctcaaataactgtcatatatt

SEQ ID NO: 5889864 - DNA, 25 bp, Homo sapien
gtttggagagaatgcatccctggct

SEQ ID NO: 5889865 - DNA, 25 bp, Homo sapien
gccagggtagctgtttggagagaat

SEQ ID NO: 5889866 - DNA, 25 bp, Homo sapien
gggctctttacccctcggctgcact

SEQ ID NO: 5889867 - DNA, 25 bp, Homo sapien
tggcagccccaggaccagcagggac

SEQ ID NO: 5889868 - DNA, 25 bp, Homo sapien
ctgggtttcaacacaaagcagactg

SEQ ID NO: 5889869 - DNA, 25 bp, Homo sapien
cttgctaaagtcccactgtcctcgg

SEQ ID NO: 5889870 - DNA, 25 bp, Homo sapien
ggagaggcccgaaaggcctcaggcc

SEQ ID NO: 5889871 - DNA, 25 bp, Homo sapien
tctgggagacagaactgaaacaaaa

SEQ ID NO: 5889872 - DNA, 25 bp, Homo sapien
agagacttttccgatgtaaatgtcc

SEQ ID NO: 5889873 - DNA, 25 bp, Homo sapien
aagctgccttctcctggaccgtttt

SEQ ID NO: 5889874 - DNA, 25 bp, Homo sapien
gtattttgaaagcaagagaatgggg

SEQ ID NO: 5889875 - DNA, 25 bp, Homo sapien
cagactgtatgtctccacccctttc

SEQ ID NO: 5889876 - DNA, 25 bp, Homo sapien
aaattcggatttgctttaagcaggc

SEQ ID NO: 5889877 - DNA, 25 bp, Homo sapien
ctaaagtcccactgtcctcgggagc

SEQ ID NO: 5889878 - DNA, 25 bp, Homo sapien
ttctcctggaccgttttcacattat

SEQ ID NO: 5889879 - DNA, 25 bp, Homo sapien
aaatgggccagggtagctgtttgga

SEQ ID NO: 5889880 - DNA, 25 bp, Homo sapien
ctatttaaattcggatttgctttaa

SEQ ID NO: 5889881 - DNA, 25 bp, Homo sapien
aggaagcccctggtgacaccactga

SEQ ID NO: 5889882 - DNA, 25 bp, Homo sapien
tcacccatgagaggataaacagaac

SEQ ID NO: 5889883 - DNA, 25 bp, Homo sapien
tttcacattatctgggagacagaac

SEQ ID NO: 5889884 - DNA, 25 bp, Homo sapien
ctggggatgactgacttctgggagg

SEQ ID NO: 5889885 - DNA, 25 bp, Homo sapien
gctctcatccagctgaaaagggtgc

SEQ ID NO: 5889886 - DNA, 25 bp, Homo sapien
atcaggcaatgaaccagagggctct

SEQ ID NO: 5889887 - DNA, 25 bp, Homo sapien
acttttccgatgtaaatgtcctatt

SEQ ID NO: 5889888 - DNA, 25 bp, Homo sapien
ctgaaaagggtgcacggcctgggga

SEQ ID NO: 5889889 - DNA, 25 bp, Homo sapien
agataatcacccatgagaggataaa

SEQ ID NO: 5889890 - DNA, 25 bp, Homo sapien
taggtgccctgggtcaacagccatt

SEQ ID NO: 5889891 - DNA, 25 bp, Homo sapien
gactgtatgtctccacccctttccc

SEQ ID NO: 5889892 - DNA, 25 bp, Homo sapien
tggtgacaccactgagataatcacc

SEQ ID NO: 5889893 - DNA, 25 bp, Homo sapien
gcgagggtagaagtctgctggggga

SEQ ID NO: 5889894 - DNA, 25 bp, Homo sapien
ttcaccacacacaacactgaaccca

SEQ ID NO: 5889895 - DNA, 25 bp, Homo sapien
ccattcaaggactgctgtgcttgta

SEQ ID NO: 5889896 - DNA, 25 bp, Homo sapien
aagaataagaaagcacacgctgcat

SEQ ID NO: 5889897 - DNA, 25 bp, Homo sapien
agcaagagaatgggggattaaggta

SEQ ID NO: 5889898 - DNA, 25 bp, Homo sapien
tgcatccctggctctcatccagctg

SEQ ID NO: 5889899 - DNA, 25 bp, Homo sapien
ggggaatttggaggattctatggaa

SEQ ID NO: 5889900 - DNA, 25 bp, Homo sapien
tggaacattttgaagaatgagatta

SEQ ID NO: 5889901 - DNA, 25 bp, Homo sapien
cggctgcacttccttgctaaagtcc

SEQ ID NO: 5889902 - DNA, 25 bp, Homo sapien
ttaaattcggatttgctttaagcag

SEQ ID NO: 5889903 - DNA, 25 bp, Homo sapien
caagagaatgggggattaaggtagg

SEQ ID NO: 5889904 - DNA, 25 bp, Homo sapien
tttgggaacttggcgagggtagaag

SEQ ID NO: 5889905 - DNA, 25 bp, Homo sapien
cgtcgaggttggcaactttgctgag

SEQ ID NO: 5889906 - DNA, 25 bp, Homo sapien
atccagctgaaaagggtgcacggcc

SEQ ID NO: 5889907 - DNA, 25 bp, Homo sapien
acccctcggctgcacttccttgcta

SEQ ID NO: 5889908 - DNA, 25 bp, Homo sapien
gcacacgctgcatataggaagctgc

SEQ ID NO: 5889909 - DNA, 25 bp, Homo sapien
tgagataatcacccatgagaggata

SEQ ID NO: 5889910 - DNA, 25 bp, Homo sapien
ttggagagaatgcatccctggctct

SEQ ID NO: 5889911 - DNA, 25 bp, Homo sapien
cactggagaggcccgaaaggcctca

SEQ ID NO: 5889912 - DNA, 25 bp, Homo sapien
cagggacagctaggtgccctgggtc

SEQ ID NO: 5889913 - DNA, 25 bp, Homo sapien
caaaggcttgtaacagagggactgg

SEQ ID NO: 5889914 - DNA, 25 bp, Homo sapien
ttggcaactttgctgagtgggtttt

SEQ ID NO: 5889915 - DNA, 25 bp, Homo sapien
ccactgtcctcgggagccagcagca

SEQ ID NO: 5889916 - DNA, 25 bp, Homo sapien
ccttgccctccaaaccctctctcaa

SEQ ID NO: 5889917 - DNA, 25 bp, Homo sapien
agccccaggaccagcagggacagct

SEQ ID NO: 5889918 - DNA, 25 bp, Homo sapien
gccaagtccctcagaggaatgcagc

SEQ ID NO: 5889919 - DNA, 25 bp, Homo sapien
tgctagcccgtcgaggttggcaact

SEQ ID NO: 5889920 - DNA, 25 bp, Homo sapien
catataggaagctgccttctcctgg

SEQ ID NO: 5889921 - DNA, 25 bp, Homo sapien
gatgtaaatgtcctatttaaattcg

SEQ ID NO: 5889922 - DNA, 25 bp, Homo sapien
cttccttgctaaagtcccactgtcc

SEQ ID NO: 5889923 - DNA, 25 bp, Homo sapien
tgcaaaggcttgtaacagagggact

SEQ ID NO: 5889924 - DNA, 25 bp, Homo sapien
tatctgggagacagaactgaaacaa

SEQ ID NO: 5889925 - DNA, 25 bp, Homo sapien
aggaatgcagccccttgccctccaa

SEQ ID NO: 5889926 - DNA, 25 bp, Homo sapien
ccctgggtcaacagccattcaagga

SEQ ID NO: 5889927 - DNA, 25 bp, Homo sapien
tgccctgggtcaacagccattcaag

SEQ ID NO: 5889928 - DNA, 25 bp, Homo sapien
ggatgactgacttctgggaggaagc

SEQ ID NO: 5889929 - DNA, 25 bp, Homo sapien
tcacattatctgggagacagaactg

SEQ ID NO: 5889930 - DNA, 25 bp, Homo sapien
attcggatttgctttaagcaggctg

SEQ ID NO: 5889931 - DNA, 25 bp, Homo sapien
gaatgcagccccttgccctccaaac

SEQ ID NO: 5889932 - DNA, 25 bp, Homo sapien
taaggtagggagagacttttccgat

SEQ ID NO: 5889933 - DNA, 25 bp, Homo sapien
gctctttacccctcggctgcacttc

SEQ ID NO: 5889934 - DNA, 25 bp, Homo sapien
tgggaacttggcgagggtagaagtc

SEQ ID NO: 5889935 - DNA, 25 bp, Homo sapien
accttaaaatgggccagggtagctg

SEQ ID NO: 5889936 - DNA, 25 bp, Homo sapien
gaggttggcaactttgctgagtggg

SEQ ID NO: 5889937 - DNA, 25 bp, Homo sapien
aacttggcgagggtagaagtctgct

SEQ ID NO: 5889938 - DNA, 25 bp, Homo sapien
catccctggctctcatccagctgaa

SEQ ID NO: 5889939 - DNA, 25 bp, Homo sapien
ctctcaaagccgatcaggcaatgaa

SEQ ID NO: 5889940 - DNA, 25 bp, Homo sapien
agcagggacagctaggtgccctggg

SEQ ID NO: 5889941 - DNA, 25 bp, Homo sapien
acagaacccactggagaggcccgaa

SEQ ID NO: 5889942 - DNA, 25 bp, Homo sapien
cttgtaacagagggactggctacct

SEQ ID NO: 5889943 - DNA, 25 bp, Homo sapien
gaatgagattaccttaaaatgggcc

SEQ ID NO: 5889944 - DNA, 25 bp, Homo sapien
cccactggagaggcccgaaaggcct

SEQ ID NO: 5889945 - DNA, 25 bp, Homo sapien
aaagcaagagaatgggggattaagg

SEQ ID NO: 5889946 - DNA, 25 bp, Homo sapien
agcccctggtgacaccactgagata

SEQ ID NO: 5889947 - DNA, 25 bp, Homo sapien
ccacacacaacactgaacccatcgc

SEQ ID NO: 5889948 - DNA, 25 bp, Homo sapien
tattaaaaataagaataagaaagca

SEQ ID NO: 5889949 - DNA, 25 bp, Homo sapien
cctggcaggttgcttggcgcccaag

SEQ ID NO: 5889950 - DNA, 25 bp, Homo sapien
tgcacttccttgctaaagtcccact

SEQ ID NO: 5889951 - DNA, 25 bp, Homo sapien
ccatcgctgcttagacactgctagc

SEQ ID NO: 5889952 - DNA, 25 bp, Homo sapien
ggtgcacggcctggggatgactgac

SEQ ID NO: 5889953 - DNA, 25 bp, Homo sapien
cctccaaaccctctctcaaagccga

SEQ ID NO: 5889954 - DNA, 25 bp, Homo sapien
agtgtataaacacagggtacaaatc

SEQ ID NO: 5889955 - DNA, 25 bp, Homo sapien
agcccgtcgaggttggcaactttgc

SEQ ID NO: 5889956 - DNA, 25 bp, Homo sapien
atacagtattcaccacacacaacac

SEQ ID NO: 5889957 - DNA, 25 bp, Homo sapien
tcagaggaatgcagccccttgccct

SEQ ID NO: 5889958 - DNA, 25 bp, Homo sapien
gcaggttgcttggcgcccaagggaa

SEQ ID NO: 5889959 - DNA, 25 bp, Homo sapien
aaagtcccactgtcctcgggagcca

SEQ ID NO: 5889960 - DNA, 25 bp, Homo sapien
caaagccgatcaggcaatgaaccag

SEQ ID NO: 5889961 - DNA, 25 bp, Homo sapien
aatgcatccctggctctcatccagc

SEQ ID NO: 5889962 - DNA, 25 bp, Homo sapien
aatggcttctcaaataactgtcata

SEQ ID NO: 5889963 - DNA, 25 bp, Homo sapien
aaacagaacccactggagaggcccg

SEQ ID NO: 5889964 - DNA, 25 bp, Homo sapien
gacaccactgagataatcacccatg

SEQ ID NO: 5889965 - DNA, 25 bp, Homo sapien
acacgctgcatataggaagctgcct

SEQ ID NO: 5889966 - DNA, 25 bp, Homo sapien
taggaagctgccttctcctggaccg

SEQ ID NO: 5889967 - DNA, 25 bp, Homo sapien
tgtcctcgggagccagcagcagtgt

SEQ ID NO: 5889968 - DNA, 25 bp, Homo sapien
agccagcagcagtgtataaacacag

SEQ ID NO: 5889969 - DNA, 25 bp, Homo sapien
gcccgaaaggcctcaggccaagtcc

SEQ ID NO: 5889970 - DNA, 25 bp, Homo sapien
acacaaagcagactgtatgtctcca

SEQ ID NO: 5889971 - DNA, 25 bp, Homo sapien
taacagagggactggctacctggca

SEQ ID NO: 5889972 - DNA, 25 bp, Homo sapien
gaagcccctggtgacaccactgaga

SEQ ID NO: 5889973 - DNA, 25 bp, Homo sapien
ggttggcaactttgctgagtgggtt

SEQ ID NO: 5889974 - DNA, 25 bp, Homo sapien
aagtctgctgggggaatttggagga

SEQ ID NO: 5889975 - DNA, 25 bp, Homo sapien
tataaacacagggtacaaatctggg

SEQ ID NO: 5889976 - DNA, 25 bp, Homo sapien
aactgaaacaaaatacagtattcac

SEQ ID NO: 5889977 - DNA, 25 bp, Homo sapien
cgggagccagcagcagtgtataaac

SEQ ID NO: 5889978 - DNA, 25 bp, Homo sapien
gtacaaatctgggtttcaacacaaa

SEQ ID NO: 5889979 - DNA, 25 bp, Homo sapien
cctggtgacaccactgagataatca

SEQ ID NO: 5889980 - DNA, 25 bp, Homo sapien
ctttacccctcggctgcacttcctt

SEQ ID NO: 5889981 - DNA, 25 bp, Homo sapien
gagattaccttaaaatgggccaggg

SEQ ID NO: 5889982 - DNA, 25 bp, Homo sapien
agggagagacttttccgatgtaaat

SEQ ID NO: 5889983 - DNA, 25 bp, Homo sapien
gagtgggttttgggaacttggcgag

SEQ ID NO: 5889984 - DNA, 25 bp, Homo sapien
ggactgctgtgcttgtattttgaaa

SEQ ID NO: 5889985 - DNA, 25 bp, Homo sapien
gaataagaaagcacacgctgcatat

SEQ ID NO: 5889986 - DNA, 25 bp, Homo sapien
cttaaaatgggccagggtagctgtt

SEQ ID NO: 5889987 - DNA, 25 bp, Homo sapien
tccagatgcaaaggcttgtaacaga

SEQ ID NO: 5889988 - DNA, 25 bp, Homo sapien
gacttctgggaggaagcccctggtg

SEQ ID NO: 5889989 - DNA, 25 bp, Homo sapien
attttgaaagcaagagaatggggga

SEQ ID NO: 5889990 - DNA, 25 bp, Homo sapien
tagaaatggcttctcaaataactgt

SEQ ID NO: 5889991 - DNA, 25 bp, Homo sapien
gtagaagtctgctgggggaatttgg

SEQ ID NO: 5889992 - DNA, 25 bp, Homo sapien
agcagactgtatgtctccacccctt

SEQ ID NO: 5889993 - DNA, 25 bp, Homo sapien
tcctatttaaattcggatttgcttt

SEQ ID NO: 5889994 - DNA, 25 bp, Homo sapien
actttgctgagtgggttttgggaac

SEQ ID NO: 5889995 - DNA, 25 bp, Homo sapien
ttaccttaaaatgggccagggtagc

SEQ ID NO: 5889996 - DNA, 25 bp, Homo sapien
tgtaacagagggactggctacctgg

SEQ ID NO: 5889997 - DNA, 25 bp, Homo sapien
gaacattttgaagaatgagattacc

SEQ ID NO: 5889998 - DNA, 25 bp, Homo sapien
gctgcacttccttgctaaagtccca

SEQ ID NO: 5889999 - DNA, 25 bp, Homo sapien
tgggagacagaactgaaacaaaata

SEQ ID NO: 5890000 - DNA, 25 bp, Homo sapien
tccttgctaaagtcccactgtcctc

SEQ ID NO: 5890001 - DNA, 25 bp, Homo sapien
gtgcttgtattttgaaagcaagaga

SEQ ID NO: 5890002 - DNA, 25 bp, Homo sapien
aaataagaataagaaagcacacgct

SEQ ID NO: 5890003 - DNA, 25 bp, Homo sapien
cccctggtgacaccactgagataat

SEQ ID NO: 5890004 - DNA, 25 bp, Homo sapien
tctatggaacattttgaagaatgag

SEQ ID NO: 5890005 - DNA, 25 bp, Homo sapien
tgccttctcctggaccgttttcaca

SEQ ID NO: 5890006 - DNA, 25 bp, Homo sapien
gactgacttctgggaggaagcccct

SEQ ID NO: 5890007 - DNA, 25 bp, Homo sapien
gccgatcaggcaatgaaccagaggg

SEQ ID NO: 5890008 - DNA, 25 bp, Homo sapien
attttgaagaatgagattaccttaa

SEQ ID NO: 5890009 - DNA, 25 bp, Homo sapien
gaaaagggtgcacggcctggggatg

SEQ ID NO: 5890010 - DNA, 25 bp, Homo sapien
ctgtttggagagaatgcatccctgg

SEQ ID NO: 5890011 - DNA, 25 bp, Homo sapien
aaatctgggtttcaacacaaagcag

SEQ ID NO: 5890012 - DNA, 25 bp, Homo sapien
tatggaacattttgaagaatgagat

SEQ ID NO: 5890013 - DNA, 25 bp, Homo sapien
acgctgcatataggaagctgccttc

SEQ ID NO: 5890014 - DNA, 25 bp, Homo sapien
gggtacaaatctgggtttcaacaca

SEQ ID NO: 5890015 - DNA, 25 bp, Homo sapien
acccatgagaggataaacagaaccc

SEQ ID NO: 5890016 - DNA, 25 bp, Homo sapien
ctgctgggggaatttggaggattct

SEQ ID NO: 5890017 - DNA, 25 bp, Homo sapien
ggagccagcagcagtgtataaacac

SEQ ID NO: 5890018 - DNA, 25 bp, Homo sapien
aaggcttgtaacagagggactggct

SEQ ID NO: 5890019 - DNA, 25 bp, Homo sapien
taaacacagggtacaaatctgggtt

SEQ ID NO: 5890020 - DNA, 25 bp, Homo sapien
acaaatctgggtttcaacacaaagc

SEQ ID NO: 5890021 - DNA, 25 bp, Homo sapien
tttgctgagtgggttttgggaactt

SEQ ID NO: 5890022 - DNA, 25 bp, Homo sapien
gggtagaagtctgctgggggaattt

SEQ ID NO: 5890023 - DNA, 25 bp, Homo sapien
agacttttccgatgtaaatgtccta

SEQ ID NO: 5890024 - DNA, 25 bp, Homo sapien
tattcaccacacacaacactgaacc

SEQ ID NO: 5890025 - DNA, 25 bp, Homo sapien
taaatgtcctatttaaattcggatt

SEQ ID NO: 5890026 - DNA, 25 bp, Homo sapien
ccaagggaattctggcagccccagg

SEQ ID NO: 5890027 - DNA, 25 bp, Homo sapien
aaaaataagaataagaaagcacacg

SEQ ID NO: 5890028 - DNA, 25 bp, Homo sapien
gtctgctgggggaatttggaggatt

SEQ ID NO: 5890029 - DNA, 25 bp, Homo sapien
ggcaatgaaccagagggctctttac

SEQ ID NO: 5890030 - DNA, 25 bp, Homo sapien
ggagagacttttccgatgtaaatgt

SEQ ID NO: 5890031 - DNA, 25 bp, Homo sapien
gaaaggcctcaggccaagtccctca

SEQ ID NO: 5890032 - DNA, 25 bp, Homo sapien
agtattcaccacacacaacactgaa

SEQ ID NO: 5890033 - DNA, 25 bp, Homo sapien
tctgggaggaagcccctggtgacac

SEQ ID NO: 5890034 - DNA, 25 bp, Homo sapien
ctcaaagccgatcaggcaatgaacc

SEQ ID NO: 5890035 - DNA, 25 bp, Homo sapien
gctgggggaatttggaggattctat

SEQ ID NO: 5890036 - DNA, 25 bp, Homo sapien
tcatccagctgaaaagggtgcacgg

SEQ ID NO: 5890037 - DNA, 25 bp, Homo sapien
aagaaagcacacgctgcatatagga

SEQ ID NO: 5890038 - DNA, 25 bp, Homo sapien
ggtgccctgggtcaacagccattca

SEQ ID NO: 5890039 - DNA, 25 bp, Homo sapien
ggataaacagaacccactggagagg

SEQ ID NO: 5890040 - DNA, 25 bp, Homo sapien
gaaagcacacgctgcatataggaag

SEQ ID NO: 5890041 - DNA, 25 bp, Homo sapien
cctggctctcatccagctgaaaagg

SEQ ID NO: 5890042 - DNA, 25 bp, Homo sapien
tttgaaagcaagagaatgggggatt

SEQ ID NO: 5890043 - DNA, 25 bp, Homo sapien
cctatccagatgcaaaggcttgtaa

SEQ ID NO: 5890044 - DNA, 25 bp, Homo sapien
cagctaggtgccctgggtcaacagc

SEQ ID NO: 5890045 - DNA, 25 bp, Homo sapien
acattttgaagaatgagattacctt

SEQ ID NO: 5890046 - DNA, 25 bp, Homo sapien
tggcgcccaagggaattctggcagc

SEQ ID NO: 5890047 - DNA, 25 bp, Homo sapien
atgcagccccttgccctccaaaccc

SEQ ID NO: 5890048 - DNA, 25 bp, Homo sapien
ttgtattttgaaagcaagagaatgg

SEQ ID NO: 5890049 - DNA, 25 bp, Homo sapien
cttctgggaggaagcccctggtgac

SEQ ID NO: 5890050 - DNA, 25 bp, Homo sapien
acagtattcaccacacacaacactg

SEQ ID NO: 5890051 - DNA, 25 bp, Homo sapien
gcttagacactgctagcccgtcgag

SEQ ID NO: 5890052 - DNA, 25 bp, Homo sapien
cctcagaggaatgcagccccttgcc

SEQ ID NO: 5890053 - DNA, 25 bp, Homo sapien
cttggcgcccaagggaattctggca

SEQ ID NO: 5890054 - DNA, 25 bp, Homo sapien
cagatgcaaaggcttgtaacagagg

SEQ ID NO: 5890055 - DNA, 25 bp, Homo sapien
tttccctatccagatgcaaaggctt

SEQ ID NO: 5890056 - DNA, 25 bp, Homo sapien
gctgccttctcctggaccgttttca

SEQ ID NO: 5890057 - DNA, 25 bp, Homo sapien
gttttcacattatctgggagacaga

SEQ ID NO: 5890058 - DNA, 25 bp, Homo sapien
gccctccaaaccctctctcaaagcc

SEQ ID NO: 5890059 - DNA, 25 bp, Homo sapien
ataagaataagaaagcacacgctgc

SEQ ID NO: 5890060 - DNA, 25 bp, Homo sapien
agtccctcagaggaatgcagcccct

SEQ ID NO: 5890061 - DNA, 25 bp, Homo sapien
ggcctcaggccaagtccctcagagg

SEQ ID NO: 5890062 - DNA, 25 bp, Homo sapien
ggaatttggaggattctatggaaca

SEQ ID NO: 5890063 - DNA, 25 bp, Homo sapien
atgaaccagagggctctttacccct

SEQ ID NO: 5890064 - DNA, 25 bp, Homo sapien
attatctgggagacagaactgaaac

SEQ ID NO: 5890065 - DNA, 25 bp, Homo sapien
tgctaaagtcccactgtcctcggga

SEQ ID NO: 5890066 - DNA, 25 bp, Homo sapien
ttttccgatgtaaatgtcctattta

SEQ ID NO: 5890067 - DNA, 25 bp, Homo sapien
ccgatgtaaatgtcctatttaaatt

SEQ ID NO: 5890068 - DNA, 25 bp, Homo sapien
agaatgggggattaaggtagggaga

SEQ ID NO: 5890069 - DNA, 25 bp, Homo sapien
ctggagaggcccgaaaggcctcagg

SEQ ID NO: 5890070 - DNA, 25 bp, Homo sapien
gcagtgtataaacacagggtacaaa

SEQ ID NO: 5890071 - DNA, 25 bp, Homo sapien
atgagattaccttaaaatgggccag

SEQ ID NO: 5890072 - DNA, 25 bp, Homo sapien
aagggaattctggcagccccaggac

SEQ ID NO: 5890073 - DNA, 25 bp, Homo sapien
ggagagaatgcatccctggctctca

SEQ ID NO: 5890074 - DNA, 25 bp, Homo sapien
gcgcccaagggaattctggcagccc

SEQ ID NO: 5890075 - DNA, 25 bp, Homo sapien
atcgctgcttagacactgctagccc

SEQ ID NO: 5890076 - DNA, 25 bp, Homo sapien
tataggaagctgccttctcctggac

SEQ ID NO: 5890077 - DNA, 25 bp, Homo sapien
acccatcgctgcttagacactgcta

SEQ ID NO: 5890078 - DNA, 25 bp, Homo sapien
atgagaggataaacagaacccactg

SEQ ID NO: 5890079 - DNA, 25 bp, Homo sapien
ttgccctccaaaccctctctcaaag

SEQ ID NO: 5890080 - DNA, 25 bp, Homo sapien
ctgacttctgggaggaagcccctgg

SEQ ID NO: 5890081 - DNA, 25 bp, Homo sapien
aggcccgaaaggcctcaggccaagt

SEQ ID NO: 5890082 - DNA, 25 bp, Homo sapien
ggcaactttgctgagtgggttttgg

SEQ ID NO: 5890083 - DNA, 25 bp, Homo sapien
ccaggaccagcagggacagctaggt

SEQ ID NO: 5890084 - DNA, 25 bp, Homo sapien
ttcaacacaaagcagactgtatgtc

SEQ ID NO: 5890085 - DNA, 25 bp, Homo sapien
aacaaaatacagtattcaccacaca

SEQ ID NO: 5890086 - DNA, 25 bp, Homo sapien
atgactgacttctgggaggaagccc

SEQ ID NO: 5890087 - DNA, 25 bp, Homo sapien
caaaatacagtattcaccacacaca

SEQ ID NO: 5890088 - DNA, 25 bp, Homo sapien
ataaacagaacccactggagaggcc

SEQ ID NO: 5890089 - DNA, 25 bp, Homo sapien
agaggaatgcagccccttgccctcc

SEQ ID NO: 5890090 - DNA, 25 bp, Homo sapien
aacactgaacccatcgctgcttaga

SEQ ID NO: 5890091 - DNA, 25 bp, Homo sapien
tgaaagcaagagaatgggggattaa

SEQ ID NO: 5890092 - DNA, 25 bp, Homo sapien
aaatacagtattcaccacacacaac

SEQ ID NO: 5890093 - DNA, 25 bp, Homo sapien
tcaaggactgctgtgcttgtatttt

SEQ ID NO: 5890094 - DNA, 25 bp, Homo sapien
ctagcccgtcgaggttggcaacttt

SEQ ID NO: 5890095 - DNA, 25 bp, Homo sapien
gagggtagaagtctgctgggggaat

SEQ ID NO: 5890096 - DNA, 25 bp, Homo sapien
agacagaactgaaacaaaatacagt

SEQ ID NO: 5890097 - DNA, 25 bp, Homo sapien
tggaccgttttcacattatctggga

SEQ ID NO: 5890098 - DNA, 25 bp, Homo sapien
tccctggctctcatccagctgaaaa

SEQ ID NO: 5890099 - DNA, 25 bp, Homo sapien
ttaaaaataagaataagaaagcaca

SEQ ID NO: 5890100 - DNA, 25 bp, Homo sapien
gttgcttggcgcccaagggaattct

SEQ ID NO: 5890101 - DNA, 25 bp, Homo sapien
tgggggattaaggtagggagagact

SEQ ID NO: 5890102 - DNA, 25 bp, Homo sapien
cagggtagctgtttggagagaatgc

SEQ ID NO: 5890103 - DNA, 25 bp, Homo sapien
gcctggggatgactgacttctggga

SEQ ID NO: 5890104 - DNA, 25 bp, Homo sapien
gcccaagggaattctggcagcccca

SEQ ID NO: 5890105 - DNA, 25 bp, Homo sapien
acattatctgggagacagaactgaa

SEQ ID NO: 5890106 - DNA, 25 bp, Homo sapien
cctggaccgttttcacattatctgg

SEQ ID NO: 5890107 - DNA, 25 bp, Homo sapien
caggcaatgaaccagagggctcttt

SEQ ID NO: 5890108 - DNA, 25 bp, Homo sapien
ggaggaagcccctggtgacaccact

SEQ ID NO: 5890109 - DNA, 25 bp, Homo sapien
gaccgttttcacattatctgggaga

SEQ ID NO: 5890110 - DNA, 25 bp, Homo sapien
gatgcaaaggcttgtaacagaggga

SEQ ID NO: 5890111 - DNA, 25 bp, Homo sapien
cacagggtacaaatctgggtttcaa

SEQ ID NO: 5890112 - DNA, 25 bp, Homo sapien
aatgggggattaaggtagggagaga

SEQ ID NO: 5890113 - DNA, 25 bp, Homo sapien
aggttgcttggcgcccaagggaatt

SEQ ID NO: 5890114 - DNA, 25 bp, Homo sapien
aatttggaggattctatggaacatt

SEQ ID NO: 5890115 - DNA, 25 bp, Homo sapien
ctgagtgggttttgggaacttggcg

SEQ ID NO: 5890116 - DNA, 25 bp, Homo sapien
agaactgaaacaaaatacagtattc

SEQ ID NO: 5890117 - DNA, 25 bp, Homo sapien
aaagggtgcacggcctggggatgac

SEQ ID NO: 5890118 - DNA, 25 bp, Homo sapien
aagccgatcaggcaatgaaccagag

SEQ ID NO: 5890119 - DNA, 25 bp, Homo sapien
cagcagtgtataaacacagggtaca

SEQ ID NO: 5890120 - DNA, 25 bp, Homo sapien
aaccctctctcaaagccgatcaggc

SEQ ID NO: 5890121 - DNA, 25 bp, Homo sapien
ctcctggaccgttttcacattatct

SEQ ID NO: 5890122 - DNA, 25 bp, Homo sapien
agtcccactgtcctcgggagccagc

SEQ ID NO: 5890123 - DNA, 25 bp, Homo sapien
gagaggataaacagaacccactgga

SEQ ID NO: 5890124 - DNA, 25 bp, Homo sapien
agagggactggctacctggcaggtt

SEQ ID NO: 5890125 - DNA, 25 bp, Homo sapien
ctcggctgcacttccttgctaaagt

SEQ ID NO: 5890126 - DNA, 25 bp, Homo sapien
gggtttcaacacaaagcagactgta

SEQ ID NO: 5890127 - DNA, 25 bp, Homo sapien
tggctctcatccagctgaaaagggt

SEQ ID NO: 5890128 - DNA, 25 bp, Homo sapien
gggtagctgtttggagagaatgcat

SEQ ID NO: 5890129 - DNA, 25 bp, Homo sapien
gattaaggtagggagagacttttcc

SEQ ID NO: 5890130 - DNA, 25 bp, Homo sapien
atttaaattcggatttgctttaagc

SEQ ID NO: 5890131 - DNA, 25 bp, Homo sapien
acacacaacactgaacccatcgctg

SEQ ID NO: 5890132 - DNA, 25 bp, Homo sapien
agcagcagtgtataaacacagggta

SEQ ID NO: 5890133 - DNA, 25 bp, Homo sapien
acagagggactggctacctggcagg

SEQ ID NO: 5890134 - DNA, 25 bp, Homo sapien
cctttccctatccagatgcaaaggc

SEQ ID NO: 5890135 - DNA, 25 bp, Homo sapien
gctaggtgccctgggtcaacagcca

SEQ ID NO: 5890136 - DNA, 25 bp, Homo sapien
gacagctaggtgccctgggtcaaca

SEQ ID NO: 5890137 - DNA, 25 bp, Homo sapien
caaaccctctctcaaagccgatcag

SEQ ID NO: 5890138 - DNA, 25 bp, Homo sapien
agagaatgcatccctggctctcatc

SEQ ID NO: 5890139 - DNA, 25 bp, Homo sapien
cgctgcttagacactgctagcccgt

SEQ ID NO: 5890140 - DNA, 25 bp, Homo sapien
ataatcacccatgagaggataaaca

SEQ ID NO: 5890141 - DNA, 25 bp, Homo sapien
ttccgatgtaaatgtcctatttaaa

SEQ ID NO: 5890142 - DNA, 25 bp, Homo sapien
ctgcttagacactgctagcccgtcg

SEQ ID NO: 5890143 - DNA, 25 bp, Homo sapien
aatcacccatgagaggataaacaga

SEQ ID NO: 5890144 - DNA, 25 bp, Homo sapien
ggattctatggaacattttgaagaa

SEQ ID NO: 5890145 - DNA, 25 bp, Homo sapien
ccgaaaggcctcaggccaagtccct

SEQ ID NO: 5890146 - DNA, 25 bp, Homo sapien
gtttcaacacaaagcagactgtatg

SEQ ID NO: 5890147 - DNA, 25 bp, Homo sapien
tggcaggttgcttggcgcccaaggg

SEQ ID NO: 5890148 - DNA, 25 bp, Homo sapien
tccctcagaggaatgcagccccttg

SEQ ID NO: 5890149 - DNA, 25 bp, Homo sapien
acagaactgaaacaaaatacagtat

SEQ ID NO: 5890150 - DNA, 25 bp, Homo sapien
ccccaggaccagcagggacagctag

SEQ ID NO: 5890151 - DNA, 25 bp, Homo sapien
ataagaaagcacacgctgcatatag

SEQ ID NO: 5890152 - DNA, 25 bp, Homo sapien
tttgaagaatgagattaccttaaaa

SEQ ID NO: 5890153 - DNA, 25 bp, Homo sapien
ggactggctacctggcaggttgctt

SEQ ID NO: 5890154 - DNA, 25 bp, Homo sapien
agaagagaaaatccaacccattggc

SEQ ID NO: 5890155 - DNA, 25 bp, Homo sapien
agactatttccatgctagaaaatac

SEQ ID NO: 5890156 - DNA, 25 bp, Homo sapien
cccttggtctctttatgctgctgag

SEQ ID NO: 5890157 - DNA, 25 bp, Homo sapien
ggtttctgcatcttgcactttgaca

SEQ ID NO: 5890158 - DNA, 25 bp, Homo sapien
ctcacctaccatactgtgccatctc

SEQ ID NO: 5890159 - DNA, 25 bp, Homo sapien
ctcacaaactgtgagactgcgtttt

SEQ ID NO: 5890160 - DNA, 25 bp, Homo sapien
aactgtgagactgcgttttttatac

SEQ ID NO: 5890161 - DNA, 25 bp, Homo sapien
gctctcatttgccccttggtctctt

SEQ ID NO: 5890162 - DNA, 25 bp, Homo sapien
taccctcccagtctcacctaccata

SEQ ID NO: 5890163 - DNA, 25 bp, Homo sapien
ctgcgttttttatacttggaagtgg

SEQ ID NO: 5890164 - DNA, 25 bp, Homo sapien
ttctggttacagactatttccatgc

SEQ ID NO: 5890165 - DNA, 25 bp, Homo sapien
aagccaggtttagagaagggtcaaa

SEQ ID NO: 5890166 - DNA, 25 bp, Homo sapien
aggaacccttctctcctctgagaaa

SEQ ID NO: 5890167 - DNA, 25 bp, Homo sapien
actgggtcaataatctttcaggcca

SEQ ID NO: 5890168 - DNA, 25 bp, Homo sapien
gcactttgacattcccaggagggaa

SEQ ID NO: 5890169 - DNA, 25 bp, Homo sapien
ctcaaatccacctttggagccgccc

SEQ ID NO: 5890170 - DNA, 25 bp, Homo sapien
tctatactctagcccctcagccagc

SEQ ID NO: 5890171 - DNA, 25 bp, Homo sapien
gaaggaaaaacacagaaacaaaaca

SEQ ID NO: 5890172 - DNA, 25 bp, Homo sapien
agcctccttcctgttgtctgaaacc

SEQ ID NO: 5890173 - DNA, 25 bp, Homo sapien
cacctaccatactgtgccatctcta

SEQ ID NO: 5890174 - DNA, 25 bp, Homo sapien
tccatgctagaaaatacatatttta

SEQ ID NO: 5890175 - DNA, 25 bp, Homo sapien
ttgcactttgacattcccaggaggg

SEQ ID NO: 5890176 - DNA, 25 bp, Homo sapien
tattaaagacagaagagaaaatcca

SEQ ID NO: 5890177 - DNA, 25 bp, Homo sapien
acctgacccaggtaggcaagggtac

SEQ ID NO: 5890178 - DNA, 25 bp, Homo sapien
ccatgctccaaccccaccctcttct

SEQ ID NO: 5890179 - DNA, 25 bp, Homo sapien
ttgaaaatatgtgtgcacccctaag

SEQ ID NO: 5890180 - DNA, 25 bp, Homo sapien
atttgccccttggtctctttatgct

SEQ ID NO: 5890181 - DNA, 25 bp, Homo sapien
gagaaagctcagagggagcactgcc

SEQ ID NO: 5890182 - DNA, 25 bp, Homo sapien
ctgttgtctgaaacctggagctaag

SEQ ID NO: 5890183 - DNA, 25 bp, Homo sapien
gttttttatacttggaagtggtgaa

SEQ ID NO: 5890184 - DNA, 25 bp, Homo sapien
ctctgagaaagctcagagggagcac

SEQ ID NO: 5890185 - DNA, 25 bp, Homo sapien
ggagagtggtctgtaagctccatca

SEQ ID NO: 5890186 - DNA, 25 bp, Homo sapien
ccaggtaggcaagggtaccctccca

SEQ ID NO: 5890187 - DNA, 25 bp, Homo sapien
ggggaggcagagacaaaggccacag

SEQ ID NO: 5890188 - DNA, 25 bp, Homo sapien
caggccatgaatctgggaggagagt

SEQ ID NO: 5890189 - DNA, 25 bp, Homo sapien
acagaaacaaaacaaaacaaggcat

SEQ ID NO: 5890190 - DNA, 25 bp, Homo sapien
ctggggactgagctccatgctccaa

SEQ ID NO: 5890191 - DNA, 25 bp, Homo sapien
tgcctggttacatcggagcagggga

SEQ ID NO: 5890192 - DNA, 25 bp, Homo sapien
ggcattctctacccctccaccttaa

SEQ ID NO: 5890193 - DNA, 25 bp, Homo sapien
ttagccttctggttacagactattt

SEQ ID NO: 5890194 - DNA, 25 bp, Homo sapien
ttggcaagaagctctttgtgggtgc

SEQ ID NO: 5890195 - DNA, 25 bp, Homo sapien
tttatacttggaagtggtgaattat

SEQ ID NO: 5890196 - DNA, 25 bp, Homo sapien
gcttgaaattgatctctatactcta

SEQ ID NO: 5890197 - DNA, 25 bp, Homo sapien
agccctgtcctgagacagcaggggg

SEQ ID NO: 5890198 - DNA, 25 bp, Homo sapien
aaaacaaaacaaggcattctctacc

SEQ ID NO: 5890199 - DNA, 25 bp, Homo sapien
ctgtttcccaggccaggcttgtctg

SEQ ID NO: 5890200 - DNA, 25 bp, Homo sapien
gcagagacaaaggccacaggcagag

SEQ ID NO: 5890201 - DNA, 25 bp, Homo sapien
tgctgagtccccctttcctgccctc

SEQ ID NO: 5890202 - DNA, 25 bp, Homo sapien
caagggtaccctcccagtctcacct

SEQ ID NO: 5890203 - DNA, 25 bp, Homo sapien
tggtgaattattttatataaggtca

SEQ ID NO: 5890204 - DNA, 25 bp, Homo sapien
gcttgtctgtggtgacctgggcatg

SEQ ID NO: 5890205 - DNA, 25 bp, Homo sapien
ccctcccagtctcacctaccatact

SEQ ID NO: 5890206 - DNA, 25 bp, Homo sapien
tggggcttacttagccttctggtta

SEQ ID NO: 5890207 - DNA, 25 bp, Homo sapien
caaactgtgagactgcgttttttat

SEQ ID NO: 5890208 - DNA, 25 bp, Homo sapien
ccatgaatctgggaggagagtggtc

SEQ ID NO: 5890209 - DNA, 25 bp, Homo sapien
gaacccttctctcctctgagaaagc

SEQ ID NO: 5890210 - DNA, 25 bp, Homo sapien
cccaggccaggcttgtctgtggtga

SEQ ID NO: 5890211 - DNA, 25 bp, Homo sapien
atgctgctgagtccccctttcctgc

SEQ ID NO: 5890212 - DNA, 25 bp, Homo sapien
ccaggcttgtctgtggtgacctggg

SEQ ID NO: 5890213 - DNA, 25 bp, Homo sapien
aatagaaggaaaaacacagaaacaa

SEQ ID NO: 5890214 - DNA, 25 bp, Homo sapien
aagtgactagtggaagggagagagg

SEQ ID NO: 5890215 - DNA, 25 bp, Homo sapien
aaacaaggcattctctacccctcca

SEQ ID NO: 5890216 - DNA, 25 bp, Homo sapien
tgccctctgtttcccaggccaggct

SEQ ID NO: 5890217 - DNA, 25 bp, Homo sapien
agaagctctttgtgggtgcctggtt

SEQ ID NO: 5890218 - DNA, 25 bp, Homo sapien
ggcaagggtaccctcccagtctcac

SEQ ID NO: 5890219 - DNA, 25 bp, Homo sapien
gctcagagggagcactgcctcacaa

SEQ ID NO: 5890220 - DNA, 25 bp, Homo sapien
ctctagcccctcagccagcctcctt

SEQ ID NO: 5890221 - DNA, 25 bp, Homo sapien
ccttctctcctctgagaaagctcag

SEQ ID NO: 5890222 - DNA, 25 bp, Homo sapien
caagaagctctttgtgggtgcctgg

SEQ ID NO: 5890223 - DNA, 25 bp, Homo sapien
tttgacattcccaggagggaagtga

SEQ ID NO: 5890224 - DNA, 25 bp, Homo sapien
aatccacctttggagccgcccctgt

SEQ ID NO: 5890225 - DNA, 25 bp, Homo sapien
ccaccttaaacatatattattaaag

SEQ ID NO: 5890226 - DNA, 25 bp, Homo sapien
agacctgacccaggtaggcaagggt

SEQ ID NO: 5890227 - DNA, 25 bp, Homo sapien
tcagccctgtcctgagacagcaggg

SEQ ID NO: 5890228 - DNA, 25 bp, Homo sapien
ctctagccaagcaagccaggtttag

SEQ ID NO: 5890229 - DNA, 25 bp, Homo sapien
taggcaagggtaccctcccagtctc

SEQ ID NO: 5890230 - DNA, 25 bp, Homo sapien
tatttccatgctagaaaatacatat

SEQ ID NO: 5890231 - DNA, 25 bp, Homo sapien
cttcctgttgtctgaaacctggagc

SEQ ID NO: 5890232 - DNA, 25 bp, Homo sapien
gtctgtggtgacctgggcatgggtg

SEQ ID NO: 5890233 - DNA, 25 bp, Homo sapien
atatgtgtgcacccctaagcttgaa

SEQ ID NO: 5890234 - DNA, 25 bp, Homo sapien
ctctgtttcccaggccaggcttgtc

SEQ ID NO: 5890235 - DNA, 25 bp, Homo sapien
gtgtgcacccctaagcttgaaattg

SEQ ID NO: 5890236 - DNA, 25 bp, Homo sapien
aagctcagagggagcactgcctcac

SEQ ID NO: 5890237 - DNA, 25 bp, Homo sapien
tgtcctgtcacaagctctggggact

SEQ ID NO: 5890238 - DNA, 25 bp, Homo sapien
cttgcccaggtttctgcatcttgca

SEQ ID NO: 5890239 - DNA, 25 bp, Homo sapien
cctgtgtgcattaggaacccttctc

SEQ ID NO: 5890240 - DNA, 25 bp, Homo sapien
acttagccttctggttacagactat

SEQ ID NO: 5890241 - DNA, 25 bp, Homo sapien
ctgcctcacaaactgtgagactgcg

SEQ ID NO: 5890242 - DNA, 25 bp, Homo sapien
gtgactagtggaagggagagaggaa

SEQ ID NO: 5890243 - DNA, 25 bp, Homo sapien
ttgatctctatactctagcccctca

SEQ ID NO: 5890244 - DNA, 25 bp, Homo sapien
cttgttctgatgccctctgtttccc

SEQ ID NO: 5890245 - DNA, 25 bp, Homo sapien
ggggaaggacactggagactttctt

SEQ ID NO: 5890246 - DNA, 25 bp, Homo sapien
actttgacattcccaggagggaagt

SEQ ID NO: 5890247 - DNA, 25 bp, Homo sapien
acccctaagcttgaaattgatctct

SEQ ID NO: 5890248 - DNA, 25 bp, Homo sapien
tttgttctccagacctgacccaggt

SEQ ID NO: 5890249 - DNA, 25 bp, Homo sapien
gggaggagagtggtctgtaagctcc

SEQ ID NO: 5890250 - DNA, 25 bp, Homo sapien
gaaaatatgtgtgcacccctaagct

SEQ ID NO: 5890251 - DNA, 25 bp, Homo sapien
gcacccctaagcttgaaattgatct

SEQ ID NO: 5890252 - DNA, 25 bp, Homo sapien
cactgcctcacaaactgtgagactg

SEQ ID NO: 5890253 - DNA, 25 bp, Homo sapien
ctaagcaggttgtcctgtcacaagc

SEQ ID NO: 5890254 - DNA, 25 bp, Homo sapien
tcccaggagggaagtgactagtgga

SEQ ID NO: 5890255 - DNA, 25 bp, Homo sapien
gctctttgtgggtgcctggttacat

SEQ ID NO: 5890256 - DNA, 25 bp, Homo sapien
atgtgtgcacccctaagcttgaaat

SEQ ID NO: 5890257 - DNA, 25 bp, Homo sapien
ctagcccctcagccagcctccttcc

SEQ ID NO: 5890258 - DNA, 25 bp, Homo sapien
gttgtctgaaacctggagctaagca

SEQ ID NO: 5890259 - DNA, 25 bp, Homo sapien
tgggtcaataatctttcaggccatg

SEQ ID NO: 5890260 - DNA, 25 bp, Homo sapien
gtgacagggctctcatttgcccctt

SEQ ID NO: 5890261 - DNA, 25 bp, Homo sapien
actatttccatgctagaaaatacat

SEQ ID NO: 5890262 - DNA, 25 bp, Homo sapien
ctgtaagctccatcagccctgtcct

SEQ ID NO: 5890263 - DNA, 25 bp, Homo sapien
agaaacaaaacaaaacaaggcattc

SEQ ID NO: 5890264 - DNA, 25 bp, Homo sapien
ggggggaaggacactggagactttc

SEQ ID NO: 5890265 - DNA, 25 bp, Homo sapien
acccttctctcctctgagaaagctc

SEQ ID NO: 5890266 - DNA, 25 bp, Homo sapien
ccctccctggctactgggtcaataa

SEQ ID NO: 5890267 - DNA, 25 bp, Homo sapien
ttacttccaacttgttctgatgccc

SEQ ID NO: 5890268 - DNA, 25 bp, Homo sapien
actggagactttcttgtggggctta

SEQ ID NO: 5890269 - DNA, 25 bp, Homo sapien
ggtgacctgggcatgggtgacaggg

SEQ ID NO: 5890270 - DNA, 25 bp, Homo sapien
tgcattaggaacccttctctcctct

SEQ ID NO: 5890271 - DNA, 25 bp, Homo sapien
gctccaaccccaccctcttctgacc

SEQ ID NO: 5890272 - DNA, 25 bp, Homo sapien
ccaacccattggcaagaagctcttt

SEQ ID NO: 5890273 - DNA, 25 bp, Homo sapien
ttgccccttggtctctttatgctgc

SEQ ID NO: 5890274 - DNA, 25 bp, Homo sapien
tgtgcattaggaacccttctctcct

SEQ ID NO: 5890275 - DNA, 25 bp, Homo sapien
acattcccaggagggaagtgactag

SEQ ID NO: 5890276 - DNA, 25 bp, Homo sapien
ctttcaggccatgaatctgggagga

SEQ ID NO: 5890277 - DNA, 25 bp, Homo sapien
tctgaaacctggagctaagcaggtt

SEQ ID NO: 5890278 - DNA, 25 bp, Homo sapien
gaaattgatctctatactctagccc

SEQ ID NO: 5890279 - DNA, 25 bp, Homo sapien
taatctttcaggccatgaatctggg

SEQ ID NO: 5890280 - DNA, 25 bp, Homo sapien
cctgccctccctggctactgggtca

SEQ ID NO: 5890281 - DNA, 25 bp, Homo sapien
tatactctagcccctcagccagcct

SEQ ID NO: 5890282 - DNA, 25 bp, Homo sapien
cctttggagccgcccctgtgtgcat

SEQ ID NO: 5890283 - DNA, 25 bp, Homo sapien
ttaaagacagaagagaaaatccaac

SEQ ID NO: 5890284 - DNA, 25 bp, Homo sapien
cccagtctcacctaccatactgtgc

SEQ ID NO: 5890285 - DNA, 25 bp, Homo sapien
atctctagccaagcaagccaggttt

SEQ ID NO: 5890286 - DNA, 25 bp, Homo sapien
ttgaaattgatctctatactctagc

SEQ ID NO: 5890287 - DNA, 25 bp, Homo sapien
tcttgcactttgacattcccaggag

SEQ ID NO: 5890288 - DNA, 25 bp, Homo sapien
tcctgttgtctgaaacctggagcta

SEQ ID NO: 5890289 - DNA, 25 bp, Homo sapien
tccttgcccaggtttctgcatcttg

SEQ ID NO: 5890290 - DNA, 25 bp, Homo sapien
tggagccgcccctgtgtgcattagg

SEQ ID NO: 5890291 - DNA, 25 bp, Homo sapien
ggttacatcggagcaggggagcctc

SEQ ID NO: 5890292 - DNA, 25 bp, Homo sapien
ggagggaagtgactagtggaaggga

SEQ ID NO: 5890293 - DNA, 25 bp, Homo sapien
taccatactgtgccatctctagcca

SEQ ID NO: 5890294 - DNA, 25 bp, Homo sapien
gactgcgttttttatacttggaagt

SEQ ID NO: 5890295 - DNA, 25 bp, Homo sapien
gctgctgagtccccctttcctgccc

SEQ ID NO: 5890296 - DNA, 25 bp, Homo sapien
ctgagaaagctcagagggagcactg

SEQ ID NO: 5890297 - DNA, 25 bp, Homo sapien
atccaacccattggcaagaagctct

SEQ ID NO: 5890298 - DNA, 25 bp, Homo sapien
tttgtgggtgcctggttacatcgga

SEQ ID NO: 5890299 - DNA, 25 bp, Homo sapien
ggacactggagactttcttgtgggg

SEQ ID NO: 5890300 - DNA, 25 bp, Homo sapien
gccaggtttagagaagggtcaaaaa

SEQ ID NO: 5890301 - DNA, 25 bp, Homo sapien
cattggcaagaagctctttgtgggt

SEQ ID NO: 5890302 - DNA, 25 bp, Homo sapien
gggagcctcaaatccacctttggag

SEQ ID NO: 5890303 - DNA, 25 bp, Homo sapien
cccattggcaagaagctctttgtgg

SEQ ID NO: 5890304 - DNA, 25 bp, Homo sapien
agctccatgctccaaccccaccctc

SEQ ID NO: 5890305 - DNA, 25 bp, Homo sapien
ccaacttgttctgatgccctctgtt

SEQ ID NO: 5890306 - DNA, 25 bp, Homo sapien
cacctttggagccgcccctgtgtgc

SEQ ID NO: 5890307 - DNA, 25 bp, Homo sapien
gcaggttgtcctgtcacaagctctg

SEQ ID NO: 5890308 - DNA, 25 bp, Homo sapien
cttgtggggcttacttagccttctg

SEQ ID NO: 5890309 - DNA, 25 bp, Homo sapien
attcccaggagggaagtgactagtg

SEQ ID NO: 5890310 - DNA, 25 bp, Homo sapien
agggaagtgactagtggaagggaga

SEQ ID NO: 5890311 - DNA, 25 bp, Homo sapien
cattaggaacccttctctcctctga

SEQ ID NO: 5890312 - DNA, 25 bp, Homo sapien
ccctggctactgggtcaataatctt

SEQ ID NO: 5890313 - DNA, 25 bp, Homo sapien
ctgtcacaagctctggggactgagc

SEQ ID NO: 5890314 - DNA, 25 bp, Homo sapien
ctggttacagactatttccatgcta

SEQ ID NO: 5890315 - DNA, 25 bp, Homo sapien
aggcagagacaaaggccacaggcag

SEQ ID NO: 5890316 - DNA, 25 bp, Homo sapien
aggttgtcctgtcacaagctctggg

SEQ ID NO: 5890317 - DNA, 25 bp, Homo sapien
gcctcaaatccacctttggagccgc

SEQ ID NO: 5890318 - DNA, 25 bp, Homo sapien
ttacatcggagcaggggagcctcaa

SEQ ID NO: 5890319 - DNA, 25 bp, Homo sapien
aaatatgtgtgcacccctaagcttg

SEQ ID NO: 5890320 - DNA, 25 bp, Homo sapien
tgaaacctggagctaagcaggttgt

SEQ ID NO: 5890321 - DNA, 25 bp, Homo sapien
tatacttggaagtggtgaattattt

SEQ ID NO: 5890322 - DNA, 25 bp, Homo sapien
gagactgcgttttttatacttggaa

SEQ ID NO: 5890323 - DNA, 25 bp, Homo sapien
ctcccagtctcacctaccatactgt

SEQ ID NO: 5890324 - DNA, 25 bp, Homo sapien
aagcaggttgtcctgtcacaagctc

SEQ ID NO: 5890325 - DNA, 25 bp, Homo sapien
gactttcttgtggggcttacttagc

SEQ ID NO: 5890326 - DNA, 25 bp, Homo sapien
gtttcccaggccaggcttgtctgtg

SEQ ID NO: 5890327 - DNA, 25 bp, Homo sapien
actgagctccatgctccaaccccac

SEQ ID NO: 5890328 - DNA, 25 bp, Homo sapien
accctcttctgacctttgttctcca

SEQ ID NO: 5890329 - DNA, 25 bp, Homo sapien
acacagaaacaaaacaaaacaaggc

SEQ ID NO: 5890330 - DNA, 25 bp, Homo sapien
ttctccagacctgacccaggtaggc

SEQ ID NO: 5890331 - DNA, 25 bp, Homo sapien
gtctgtaagctccatcagccctgtc

SEQ ID NO: 5890332 - DNA, 25 bp, Homo sapien
ggggactgagctccatgctccaacc

SEQ ID NO: 5890333 - DNA, 25 bp, Homo sapien
agcactgcctcacaaactgtgagac

SEQ ID NO: 5890334 - DNA, 25 bp, Homo sapien
agagggagcactgcctcacaaactg

SEQ ID NO: 5890335 - DNA, 25 bp, Homo sapien
tgtggggcttacttagccttctggt

SEQ ID NO: 5890336 - DNA, 25 bp, Homo sapien
atactgtgccatctctagccaagca

SEQ ID NO: 5890337 - DNA, 25 bp, Homo sapien
ctctttatgctgctgagtccccctt

SEQ ID NO: 5890338 - DNA, 25 bp, Homo sapien
tctctatactctagcccctcagcca

SEQ ID NO: 5890339 - DNA, 25 bp, Homo sapien
ctttatgctgctgagtccccctttc

SEQ ID NO: 5890340 - DNA, 25 bp, Homo sapien
cagggctctcatttgccccttggtc

SEQ ID NO: 5890341 - DNA, 25 bp, Homo sapien
tgtgggtgcctggttacatcggagc

SEQ ID NO: 5890342 - DNA, 25 bp, Homo sapien
ggcaagaagctctttgtgggtgcct

SEQ ID NO: 5890343 - DNA, 25 bp, Homo sapien
gagcctcaaatccacctttggagcc

SEQ ID NO: 5890344 - DNA, 25 bp, Homo sapien
gaaagctcagagggagcactgcctc

SEQ ID NO: 5890345 - DNA, 25 bp, Homo sapien
acctggagctaagcaggttgtcctg

SEQ ID NO: 5890346 - DNA, 25 bp, Homo sapien
gtgagactgcgttttttatacttgg

SEQ ID NO: 5890347 - DNA, 25 bp, Homo sapien
caggtttctgcatcttgcactttga

SEQ ID NO: 5890348 - DNA, 25 bp, Homo sapien
ggagcactgcctcacaaactgtgag

SEQ ID NO: 5890349 - DNA, 25 bp, Homo sapien
agggagcactgcctcacaaactgtg

SEQ ID NO: 5890350 - DNA, 25 bp, Homo sapien
gtgcacccctaagcttgaaattgat

SEQ ID NO: 5890351 - DNA, 25 bp, Homo sapien
ctacccctccaccttaaacatatat

SEQ ID NO: 5890352 - DNA, 25 bp, Homo sapien
tgccatctctagccaagcaagccag

SEQ ID NO: 5890353 - DNA, 25 bp, Homo sapien
gcaagccaggtttagagaagggtca

SEQ ID NO: 5890354 - DNA, 25 bp, Homo sapien
gagactttcttgtggggcttactta

SEQ ID NO: 5890355 - DNA, 25 bp, Homo sapien
caggccaggcttgtctgtggtgacc

SEQ ID NO: 5890356 - DNA, 25 bp, Homo sapien
cattctctacccctccaccttaaac

SEQ ID NO: 5890357 - DNA, 25 bp, Homo sapien
ctttcctgccctccctggctactgg

SEQ ID NO: 5890358 - DNA, 25 bp, Homo sapien
cctccttcctgttgtctgaaacctg

SEQ ID NO: 5890359 - DNA, 25 bp, Homo sapien
ggactgagctccatgctccaacccc

SEQ ID NO: 5890360 - DNA, 25 bp, Homo sapien
caggcagagctatgaatgagaatgg

SEQ ID NO: 5890361 - DNA, 25 bp, Homo sapien
cccaggtttctgcatcttgcacttt

SEQ ID NO: 5890362 - DNA, 25 bp, Homo sapien
aagctctttgtgggtgcctggttac

SEQ ID NO: 5890363 - DNA, 25 bp, Homo sapien
acttccaacttgttctgatgccctc

SEQ ID NO: 5890364 - DNA, 25 bp, Homo sapien
gtttacttccaacttgttctgatgc

SEQ ID NO: 5890365 - DNA, 25 bp, Homo sapien
ggtcttgaaaatatgtgtgcacccc

SEQ ID NO: 5890366 - DNA, 25 bp, Homo sapien
acactggagactttcttgtggggct

SEQ ID NO: 5890367 - DNA, 25 bp, Homo sapien
ggtcaataatctttcaggccatgaa

SEQ ID NO: 5890368 - DNA, 25 bp, Homo sapien
ctactgggtcaataatctttcaggc

SEQ ID NO: 5890369 - DNA, 25 bp, Homo sapien
gtggtgacctgggcatgggtgacag

SEQ ID NO: 5890370 - DNA, 25 bp, Homo sapien
aatgggtcttgaaaatatgtgtgca

SEQ ID NO: 5890371 - DNA, 25 bp, Homo sapien
ctaagcttgaaattgatctctatac

SEQ ID NO: 5890372 - DNA, 25 bp, Homo sapien
tcagccagcctccttcctgttgtct

SEQ ID NO: 5890373 - DNA, 25 bp, Homo sapien
ctgagtccccctttcctgccctccc

SEQ ID NO: 5890374 - DNA, 25 bp, Homo sapien
ctgagacagcaggggggaaggacac

SEQ ID NO: 5890375 - DNA, 25 bp, Homo sapien
gaaaatccaacccattggcaagaag

SEQ ID NO: 5890376 - DNA, 25 bp, Homo sapien
agcccctcagccagcctccttcctg

SEQ ID NO: 5890377 - DNA, 25 bp, Homo sapien
ggaaggacactggagactttcttgt

SEQ ID NO: 5890378 - DNA, 25 bp, Homo sapien
tgttctccagacctgacccaggtag

SEQ ID NO: 5890379 - DNA, 25 bp, Homo sapien
gccacaggcagagctatgaatgaga

SEQ ID NO: 5890380 - DNA, 25 bp, Homo sapien
aacaaaacaaggcattctctacccc

SEQ ID NO: 5890381 - DNA, 25 bp, Homo sapien
cgcccctgtgtgcattaggaaccct

SEQ ID NO: 5890382 - DNA, 25 bp, Homo sapien
gggcttacttagccttctggttaca

SEQ ID NO: 5890383 - DNA, 25 bp, Homo sapien
ctgggaggagagtggtctgtaagct

SEQ ID NO: 5890384 - DNA, 25 bp, Homo sapien
gttgtcctgtcacaagctctgggga

SEQ ID NO: 5890385 - DNA, 25 bp, Homo sapien
atctttcaggccatgaatctgggag

SEQ ID NO: 5890386 - DNA, 25 bp, Homo sapien
ccaagcaagccaggtttagagaagg

SEQ ID NO: 5890387 - DNA, 25 bp, Homo sapien
ggtaggcaagggtaccctcccagtc

SEQ ID NO: 5890388 - DNA, 25 bp, Homo sapien
acccctccaccttaaacatatatta

SEQ ID NO: 5890389 - DNA, 25 bp, Homo sapien
ttctctcctctgagaaagctcagag

SEQ ID NO: 5890390 - DNA, 25 bp, Homo sapien
tgacattcccaggagggaagtgact

SEQ ID NO: 5890391 - DNA, 25 bp, Homo sapien
tgtctgaaacctggagctaagcagg

SEQ ID NO: 5890392 - DNA, 25 bp, Homo sapien
gacagggctctcatttgccccttgg

SEQ ID NO: 5890393 - DNA, 25 bp, Homo sapien
catcttgcactttgacattcccagg

SEQ ID NO: 5890394 - DNA, 25 bp, Homo sapien
gcaggggagcctcaaatccaccttt

SEQ ID NO: 5890395 - DNA, 25 bp, Homo sapien
ggccaggcttgtctgtggtgacctg

SEQ ID NO: 5890396 - DNA, 25 bp, Homo sapien
agagacaaaggccacaggcagagct

SEQ ID NO: 5890397 - DNA, 25 bp, Homo sapien
catcagccctgtcctgagacagcag

SEQ ID NO: 5890398 - DNA, 25 bp, Homo sapien
ttcctgccctccctggctactgggt

SEQ ID NO: 5890399 - DNA, 25 bp, Homo sapien
ctgggcatgggtgacagggctctca

SEQ ID NO: 5890400 - DNA, 25 bp, Homo sapien
ccagcctccttcctgttgtctgaaa

SEQ ID NO: 5890401 - DNA, 25 bp, Homo sapien
tctgcatcttgcactttgacattcc

SEQ ID NO: 5890402 - DNA, 25 bp, Homo sapien
agccagcctccttcctgttgtctga

SEQ ID NO: 5890403 - DNA, 25 bp, Homo sapien
acctgggcatgggtgacagggctct

SEQ ID NO: 5890404 - DNA, 25 bp, Homo sapien
tgtgccatctctagccaagcaagcc

SEQ ID NO: 5890405 - DNA, 25 bp, Homo sapien
ttatgctgctgagtccccctttcct

SEQ ID NO: 5890406 - DNA, 25 bp, Homo sapien
ctttcttgtggggcttacttagcct

SEQ ID NO: 5890407 - DNA, 25 bp, Homo sapien
aaagacagaagagaaaatccaaccc

SEQ ID NO: 5890408 - DNA, 25 bp, Homo sapien
aaaggccacaggcagagctatgaat

SEQ ID NO: 5890409 - DNA, 25 bp, Homo sapien
tgttctgatgccctctgtttcccag

SEQ ID NO: 5890410 - DNA, 25 bp, Homo sapien
ctccctggctactgggtcaataatc

SEQ ID NO: 5890411 - DNA, 25 bp, Homo sapien
ttctgatgccctctgtttcccaggc

SEQ ID NO: 5890412 - DNA, 25 bp, Homo sapien
ggtgcctggttacatcggagcaggg

SEQ ID NO: 5890413 - DNA, 25 bp, Homo sapien
tggagactttcttgtggggcttact

SEQ ID NO: 5890414 - DNA, 25 bp, Homo sapien
acaaggcattctctacccctccacc

SEQ ID NO: 5890415 - DNA, 25 bp, Homo sapien
ccccaccctcttctgacctttgttc

SEQ ID NO: 5890416 - DNA, 25 bp, Homo sapien
aggccacaggcagagctatgaatga

SEQ ID NO: 5890417 - DNA, 25 bp, Homo sapien
ctccatgctccaaccccaccctctt

SEQ ID NO: 5890418 - DNA, 25 bp, Homo sapien
ctgtgagactgcgttttttatactt

SEQ ID NO: 5890419 - DNA, 25 bp, Homo sapien
ctccaccttaaacatatattattaa

SEQ ID NO: 5890420 - DNA, 25 bp, Homo sapien
agacaaaggccacaggcagagctat

SEQ ID NO: 5890421 - DNA, 25 bp, Homo sapien
tgccctccctggctactgggtcaat

SEQ ID NO: 5890422 - DNA, 25 bp, Homo sapien
gcatgggtgacagggctctcatttg

SEQ ID NO: 5890423 - DNA, 25 bp, Homo sapien
ctggctactgggtcaataatctttc

SEQ ID NO: 5890424 - DNA, 25 bp, Homo sapien
gagtccccctttcctgccctccctg

SEQ ID NO: 5890425 - DNA, 25 bp, Homo sapien
aagcaagccaggtttagagaagggt

SEQ ID NO: 5890426 - DNA, 25 bp, Homo sapien
acaaaacaaaacaaggcattctcta

SEQ ID NO: 5890427 - DNA, 25 bp, Homo sapien
gcttacttagccttctggttacaga

SEQ ID NO: 5890428 - DNA, 25 bp, Homo sapien
ctgtggtgacctgggcatgggtgac

SEQ ID NO: 5890429 - DNA, 25 bp, Homo sapien
ctgacctttgttctccagacctgac

SEQ ID NO: 5890430 - DNA, 25 bp, Homo sapien
ggtaccctcccagtctcacctacca

SEQ ID NO: 5890431 - DNA, 25 bp, Homo sapien
tttttatacttggaagtggtgaatt

SEQ ID NO: 5890432 - DNA, 25 bp, Homo sapien
cctcagccagcctccttcctgttgt

SEQ ID NO: 5890433 - DNA, 25 bp, Homo sapien
aggggagcctcaaatccacctttgg

SEQ ID NO: 5890434 - DNA, 25 bp, Homo sapien
ctctggggactgagctccatgctcc

SEQ ID NO: 5890435 - DNA, 25 bp, Homo sapien
gagcaggggagcctcaaatccacct

SEQ ID NO: 5890436 - DNA, 25 bp, Homo sapien
cacaagctctggggactgagctcca

SEQ ID NO: 5890437 - DNA, 25 bp, Homo sapien
cacaggcagagctatgaatgagaat

SEQ ID NO: 5890438 - DNA, 25 bp, Homo sapien
agccttctggttacagactatttcc

SEQ ID NO: 5890439 - DNA, 25 bp, Homo sapien
tcttctgacctttgttctccagacc

SEQ ID NO: 5890440 - DNA, 25 bp, Homo sapien
ttccaacttgttctgatgccctctg

SEQ ID NO: 5890441 - DNA, 25 bp, Homo sapien
tagaaggaaaaacacagaaacaaaa

SEQ ID NO: 5890442 - DNA, 25 bp, Homo sapien
tcatttgccccttggtctctttatg

SEQ ID NO: 5890443 - DNA, 25 bp, Homo sapien
tgagaatgggtcttgaaaatatgtg

SEQ ID NO: 5890444 - DNA, 25 bp, Homo sapien
aaacaaaacaaaacaaggcattctc

SEQ ID NO: 5890445 - DNA, 25 bp, Homo sapien
ctccagacctgacccaggtaggcaa

SEQ ID NO: 5890446 - DNA, 25 bp, Homo sapien
tcagagggagcactgcctcacaaac

SEQ ID NO: 5890447 - DNA, 25 bp, Homo sapien
ccatctctagccaagcaagccaggt

SEQ ID NO: 5890448 - DNA, 25 bp, Homo sapien
gctccatcagccctgtcctgagaca

SEQ ID NO: 5890449 - DNA, 25 bp, Homo sapien
gaggagagtggtctgtaagctccat

SEQ ID NO: 5890450 - DNA, 25 bp, Homo sapien
tgtgtgcattaggaacccttctctc

SEQ ID NO: 5890451 - DNA, 25 bp, Homo sapien
ttgtttacttccaacttgttctgat

SEQ ID NO: 5890452 - DNA, 25 bp, Homo sapien
gttccttgcccaggtttctgcatct

SEQ ID NO: 5890453 - DNA, 25 bp, Homo sapien
tctttgtgggtgcctggttacatcg

SEQ ID NO: 5890454 - DNA, 25 bp, Homo sapien
cacaaactgtgagactgcgtttttt

SEQ ID NO: 5890455 - DNA, 25 bp, Homo sapien
ccctccaccttaaacatatattatt

SEQ ID NO: 5890456 - DNA, 25 bp, Homo sapien
gacccaggtaggcaagggtaccctc

SEQ ID NO: 5890457 - DNA, 25 bp, Homo sapien
agaatgggtcttgaaaatatgtgtg

SEQ ID NO: 5890458 - DNA, 25 bp, Homo sapien
tttctgcatcttgcactttgacatt

SEQ ID NO: 5890459 - DNA, 25 bp, Homo sapien
acagactatttccatgctagaaaat

SEQ ID NO: 5890460 - DNA, 25 bp, Homo sapien
gggtgacagggctctcatttgcccc

SEQ ID NO: 5890461 - DNA, 25 bp, Homo sapien
ctgatgccctctgtttcccaggcca

SEQ ID NO: 5890462 - DNA, 25 bp, Homo sapien
tgacctgggcatgggtgacagggct

SEQ ID NO: 5890463 - DNA, 25 bp, Homo sapien
ctgacccaggtaggcaagggtaccc

SEQ ID NO: 5890464 - DNA, 25 bp, Homo sapien
gaagtggtgaattattttatataag

SEQ ID NO: 5890465 - DNA, 25 bp, Homo sapien
ggagctaagcaggttgtcctgtcac

SEQ ID NO: 5890466 - DNA, 25 bp, Homo sapien
ctctcctctgagaaagctcagaggg

SEQ ID NO: 5890467 - DNA, 25 bp, Homo sapien
aacttgttctgatgccctctgtttc

SEQ ID NO: 5890468 - DNA, 25 bp, Homo sapien
actgtgccatctctagccaagcaag

SEQ ID NO: 5890469 - DNA, 25 bp, Homo sapien
gtctctttatgctgctgagtccccc

SEQ ID NO: 5890470 - DNA, 25 bp, Homo sapien
caaccccaccctcttctgacctttg

SEQ ID NO: 5890471 - DNA, 25 bp, Homo sapien
agagtggtctgtaagctccatcagc

SEQ ID NO: 5890472 - DNA, 25 bp, Homo sapien
caagctctggggactgagctccatg

SEQ ID NO: 5890473 - DNA, 25 bp, Homo sapien
gatctctatactctagcccctcagc

SEQ ID NO: 5890474 - DNA, 25 bp, Homo sapien
ggctactgggtcaataatctttcag

SEQ ID NO: 5890475 - DNA, 25 bp, Homo sapien
gaatctgggaggagagtggtctgta

SEQ ID NO: 5890476 - DNA, 25 bp, Homo sapien
aagctccatcagccctgtcctgaga

SEQ ID NO: 5890477 - DNA, 25 bp, Homo sapien
aggcttgtctgtggtgacctgggca

SEQ ID NO: 5890478 - DNA, 25 bp, Homo sapien
ctgtgttccttgcccaggtttctgc

SEQ ID NO: 5890479 - DNA, 25 bp, Homo sapien
gccccttggtctctttatgctgctg

SEQ ID NO: 5890480 - DNA, 25 bp, Homo sapien
gacctttgttctccagacctgaccc

SEQ ID NO: 5890481 - DNA, 25 bp, Homo sapien
tgagctccatgctccaaccccaccc

SEQ ID NO: 5890482 - DNA, 25 bp, Homo sapien
ttcccaggccaggcttgtctgtggt

SEQ ID NO: 5890483 - DNA, 25 bp, Homo sapien
tcttgaaaatatgtgtgcaccccta

SEQ ID NO: 5890484 - DNA, 25 bp, Homo sapien
agccaagcaagccaggtttagagaa

SEQ ID NO: 5890485 - DNA, 25 bp, Homo sapien
aaggggaggcagagacaaaggccac

SEQ ID NO: 5890486 - DNA, 25 bp, Homo sapien
tgggtcttgaaaatatgtgtgcacc

SEQ ID NO: 5890487 - DNA, 25 bp, Homo sapien
ttcttgtggggcttacttagccttc

SEQ ID NO: 5890488 - DNA, 25 bp, Homo sapien
gtgaattattttatataaggtcatt

SEQ ID NO: 5890489 - DNA, 25 bp, Homo sapien
gtcacaagctctggggactgagctc

SEQ ID NO: 5890490 - DNA, 25 bp, Homo sapien
ggttacagactatttccatgctaga

SEQ ID NO: 5890491 - DNA, 25 bp, Homo sapien
atgctccaaccccaccctcttctga

SEQ ID NO: 5890492 - DNA, 25 bp, Homo sapien
aatgagaatgggtcttgaaaatatg

SEQ ID NO: 5890493 - DNA, 25 bp, Homo sapien
ttacagactatttccatgctagaaa

SEQ ID NO: 5890494 - DNA, 25 bp, Homo sapien
gtaagctccatcagccctgtcctga

SEQ ID NO: 5890495 - DNA, 25 bp, Homo sapien
ctggagctaagcaggttgtcctgtc

SEQ ID NO: 5890496 - DNA, 25 bp, Homo sapien
acagaagagaaaatccaacccattg

SEQ ID NO: 5890497 - DNA, 25 bp, Homo sapien
aagagaaaatccaacccattggcaa

SEQ ID NO: 5890498 - DNA, 25 bp, Homo sapien
acatcggagcaggggagcctcaaat

SEQ ID NO: 5890499 - DNA, 25 bp, Homo sapien
tctcatttgccccttggtctcttta

SEQ ID NO: 5890500 - DNA, 25 bp, Homo sapien
caaatccacctttggagccgcccct

SEQ ID NO: 5890501 - DNA, 25 bp, Homo sapien
ttaggaacccttctctcctctgaga

SEQ ID NO: 5890502 - DNA, 25 bp, Homo sapien
tgaatgagaatgggtcttgaaaata

SEQ ID NO: 5890503 - DNA, 25 bp, Homo sapien
tacttggaagtggtgaattatttta

SEQ ID NO: 5890504 - DNA, 25 bp, Homo sapien
gatgccctctgtttcccaggccagg

SEQ ID NO: 5890505 - DNA, 25 bp, Homo sapien
ttctgacctttgttctccagacctg

SEQ ID NO: 5890506 - DNA, 25 bp, Homo sapien
cttggtctctttatgctgctgagtc

SEQ ID NO: 5890507 - DNA, 25 bp, Homo sapien
ggcagagctatgaatgagaatgggt

SEQ ID NO: 5890508 - DNA, 25 bp, Homo sapien
gctatgaatgagaatgggtcttgaa

SEQ ID NO: 5890509 - DNA, 25 bp, Homo sapien
tccatcagccctgtcctgagacagc

SEQ ID NO: 5890510 - DNA, 25 bp, Homo sapien
cccctgtgtgcattaggaacccttc

SEQ ID NO: 5890511 - DNA, 25 bp, Homo sapien
aacccattggcaagaagctctttgt

SEQ ID NO: 5890512 - DNA, 25 bp, Homo sapien
caaaacaaggcattctctacccctc

SEQ ID NO: 5890513 - DNA, 25 bp, Homo sapien
tactctagcccctcagccagcctcc

SEQ ID NO: 5890514 - DNA, 25 bp, Homo sapien
gggcatgggtgacagggctctcatt

SEQ ID NO: 5890515 - DNA, 25 bp, Homo sapien
ccagacctgacccaggtaggcaagg

SEQ ID NO: 5890516 - DNA, 25 bp, Homo sapien
gcgttttttatacttggaagtggtg

SEQ ID NO: 5890517 - DNA, 25 bp, Homo sapien
cctttgttctccagacctgacccag

SEQ ID NO: 5890518 - DNA, 25 bp, Homo sapien
ccttctggttacagactatttccat

SEQ ID NO: 5890519 - DNA, 25 bp, Homo sapien
gagccgcccctgtgtgcattaggaa

SEQ ID NO: 5890520 - DNA, 25 bp, Homo sapien
tgcccaggtttctgcatcttgcact

SEQ ID NO: 5890521 - DNA, 25 bp, Homo sapien
ctagccaagcaagccaggtttagag

SEQ ID NO: 5890522 - DNA, 25 bp, Homo sapien
ttacttagccttctggttacagact

SEQ ID NO: 5890523 - DNA, 25 bp, Homo sapien
agctaagcaggttgtcctgtcacaa

SEQ ID NO: 5890524 - DNA, 25 bp, Homo sapien
ttcaggccatgaatctgggaggaga

SEQ ID NO: 5890525 - DNA, 25 bp, Homo sapien
cagagctatgaatgagaatgggtct

SEQ ID NO: 5890526 - DNA, 25 bp, Homo sapien
aattgatctctatactctagcccct

SEQ ID NO: 5890527 - DNA, 25 bp, Homo sapien
cctaccatactgtgccatctctagc

SEQ ID NO: 5890528 - DNA, 25 bp, Homo sapien
gcctcacaaactgtgagactgcgtt

SEQ ID NO: 5890529 - DNA, 25 bp, Homo sapien
gcaggggggaaggacactggagact

SEQ ID NO: 5890530 - DNA, 25 bp, Homo sapien
cctcttctgacctttgttctccaga

SEQ ID NO: 5890531 - DNA, 25 bp, Homo sapien
cagtctcacctaccatactgtgcca

SEQ ID NO: 5890532 - DNA, 25 bp, Homo sapien
cttggaagtggtgaattattttata

SEQ ID NO: 5890533 - DNA, 25 bp, Homo sapien
ccctttcctgccctccctggctact

SEQ ID NO: 5890534 - DNA, 25 bp, Homo sapien
aagcttgaaattgatctctatactc

SEQ ID NO: 5890535 - DNA, 25 bp, Homo sapien
aaggacactggagactttcttgtgg

SEQ ID NO: 5890536 - DNA, 25 bp, Homo sapien
ccctctgtttcccaggccaggcttg

SEQ ID NO: 5890537 - DNA, 25 bp, Homo sapien
cggagcaggggagcctcaaatccac

SEQ ID NO: 5890538 - DNA, 25 bp, Homo sapien
ggaggcagagacaaaggccacaggc

SEQ ID NO: 5890539 - DNA, 25 bp, Homo sapien
ccatactgtgccatctctagccaag

SEQ ID NO: 5890540 - DNA, 25 bp, Homo sapien
ctggttacatcggagcaggggagcc

SEQ ID NO: 5890541 - DNA, 25 bp, Homo sapien
gagaaaatccaacccattggcaaga

SEQ ID NO: 5890542 - DNA, 25 bp, Homo sapien
gtctcacctaccatactgtgccatc

SEQ ID NO: 5890543 - DNA, 25 bp, Homo sapien
atctgggaggagagtggtctgtaag

SEQ ID NO: 5890544 - DNA, 25 bp, Homo sapien
ggttgtttacttccaacttgttctg

SEQ ID NO: 5890545 - DNA, 25 bp, Homo sapien
ggccatgaatctgggaggagagtgg

SEQ ID NO: 5890546 - DNA, 25 bp, Homo sapien
gaattattttatataaggtcattta

SEQ ID NO: 5890547 - DNA, 25 bp, Homo sapien
agacagaagagaaaatccaacccat

SEQ ID NO: 5890548 - DNA, 25 bp, Homo sapien
tggtctctttatgctgctgagtccc

SEQ ID NO: 5890549 - DNA, 25 bp, Homo sapien
gggctctcatttgccccttggtctc

SEQ ID NO: 5890550 - DNA, 25 bp, Homo sapien
ggaagtgactagtggaagggagaga

SEQ ID NO: 5890551 - DNA, 25 bp, Homo sapien
tcctgtcacaagctctggggactga

SEQ ID NO: 5890552 - DNA, 25 bp, Homo sapien
ccctaagcttgaaattgatctctat

SEQ ID NO: 5890553 - DNA, 25 bp, Homo sapien
ccaccctcttctgacctttgttctc

SEQ ID NO: 5890554 - DNA, 25 bp, Homo sapien
aaggcattctctacccctccacctt

SEQ ID NO: 5890555 - DNA, 25 bp, Homo sapien
tcaataatctttcaggccatgaatc

SEQ ID NO: 5890556 - DNA, 25 bp, Homo sapien
agggtaccctcccagtctcacctac

SEQ ID NO: 5890557 - DNA, 25 bp, Homo sapien
gtgttccttgcccaggtttctgcat

SEQ ID NO: 5890558 - DNA, 25 bp, Homo sapien
agtggtctgtaagctccatcagccc

SEQ ID NO: 5890559 - DNA, 25 bp, Homo sapien
tccttcctgttgtctgaaacctgga

SEQ ID NO: 5890560 - DNA, 25 bp, Homo sapien
atcggagcaggggagcctcaaatcc

SEQ ID NO: 5890561 - DNA, 25 bp, Homo sapien
gagctatgaatgagaatgggtcttg

SEQ ID NO: 5890562 - DNA, 25 bp, Homo sapien
ctctacccctccaccttaaacatat

SEQ ID NO: 5890563 - DNA, 25 bp, Homo sapien
tgcatcttgcactttgacattccca

SEQ ID NO: 5890564 - DNA, 25 bp, Homo sapien
tatgaatgagaatgggtcttgaaaa

SEQ ID NO: 5890565 - DNA, 25 bp, Homo sapien
ccaggagggaagtgactagtggaag

SEQ ID NO: 5890566 - DNA, 25 bp, Homo sapien
tccacctttggagccgcccctgtgt

SEQ ID NO: 5890567 - DNA, 25 bp, Homo sapien
gtccccctttcctgccctccctggc

SEQ ID NO: 5890568 - DNA, 25 bp, Homo sapien
agtggtgaattattttatataaggt

SEQ ID NO: 5890569 - DNA, 25 bp, Homo sapien
atgggtgacagggctctcatttgcc

SEQ ID NO: 5890570 - DNA, 25 bp, Homo sapien
agctctggggactgagctccatgct

SEQ ID NO: 5890571 - DNA, 25 bp, Homo sapien
ttgtctgtggtgacctgggcatggg

SEQ ID NO: 5890572 - DNA, 25 bp, Homo sapien
tggaagtggtgaattattttatata

SEQ ID NO: 5890573 - DNA, 25 bp, Homo sapien
tttccatgctagaaaatacatattt

SEQ ID NO: 5890574 - DNA, 25 bp, Homo sapien
aataatctttcaggccatgaatctg

SEQ ID NO: 5890575 - DNA, 25 bp, Homo sapien
aaatccaacccattggcaagaagct

SEQ ID NO: 5890576 - DNA, 25 bp, Homo sapien
gccgcccctgtgtgcattaggaacc

SEQ ID NO: 5890577 - DNA, 25 bp, Homo sapien
aaacctggagctaagcaggttgtcc

SEQ ID NO: 5890578 - DNA, 25 bp, Homo sapien
acaaaggccacaggcagagctatga

SEQ ID NO: 5890579 - DNA, 25 bp, Homo sapien
tgggtgcctggttacatcggagcag

SEQ ID NO: 5890580 - DNA, 25 bp, Homo sapien
cccctcagccagcctccttcctgtt

SEQ ID NO: 5890581 - DNA, 25 bp, Homo sapien
tggtctgtaagctccatcagccctg

SEQ ID NO: 5890582 - DNA, 25 bp, Homo sapien
atgaatctgggaggagagtggtctg

SEQ ID NO: 5890583 - DNA, 25 bp, Homo sapien
tccaaccccaccctcttctgacctt

SEQ ID NO: 5890584 - DNA, 25 bp, Homo sapien
tttggagccgcccctgtgtgcatta

SEQ ID NO: 5890585 - DNA, 25 bp, Homo sapien
ccccctttcctgccctccctggcta

SEQ ID NO: 5890586 - DNA, 25 bp, Homo sapien
ttctctacccctccaccttaaacat

SEQ ID NO: 5890587 - DNA, 25 bp, Homo sapien
tcatagctctgcctgtggcctttgt

SEQ ID NO: 5890588 - DNA, 25 bp, Homo sapien
cccaggtcaccacagacaagcctgg

SEQ ID NO: 5890589 - DNA, 25 bp, Homo sapien
ccaagtataaaaaacgcagtctcac

SEQ ID NO: 5890590 - DNA, 25 bp, Homo sapien
gagtatagagatcaatttcaagctt

SEQ ID NO: 5890591 - DNA, 25 bp, Homo sapien
ttctctaaacctggcttgcttggct

SEQ ID NO: 5890592 - DNA, 25 bp, Homo sapien
tgtctcaggacagggctgatggagc

SEQ ID NO: 5890593 - DNA, 25 bp, Homo sapien
gagactgggagggtacccttgccta

SEQ ID NO: 5890594 - DNA, 25 bp, Homo sapien
gtgtccttcccccctgctgtctcag

SEQ ID NO: 5890595 - DNA, 25 bp, Homo sapien
cagcagcataaagagaccaaggggc

SEQ ID NO: 5890596 - DNA, 25 bp, Homo sapien
aaagagcttcttgccaatgggttgg

SEQ ID NO: 5890597 - DNA, 25 bp, Homo sapien
aggaaagggggactcagcagcataa

SEQ ID NO: 5890598 - DNA, 25 bp, Homo sapien
gtaggtgagactgggagggtaccct

SEQ ID NO: 5890599 - DNA, 25 bp, Homo sapien
tgatggagcttacagaccactctcc

SEQ ID NO: 5890600 - DNA, 25 bp, Homo sapien
acacaggggcggctccaaaggtgga

SEQ ID NO: 5890601 - DNA, 25 bp, Homo sapien
gggtcaggtctggagaacaaaggtc

SEQ ID NO: 5890602 - DNA, 25 bp, Homo sapien
ccctgctccgatgtaaccaggcacc

SEQ ID NO: 5890603 - DNA, 25 bp, Homo sapien
aagaaagtctccagtgtccttcccc

SEQ ID NO: 5890604 - DNA, 25 bp, Homo sapien
acccacaaagagcttcttgccaatg

SEQ ID NO: 5890605 - DNA, 25 bp, Homo sapien
acagtatggtaggtgagactgggag

SEQ ID NO: 5890606 - DNA, 25 bp, Homo sapien
aaaggtggatttgaggctcccctgc

SEQ ID NO: 5890607 - DNA, 25 bp, Homo sapien
gagctttctcagaggagagaagggt

SEQ ID NO: 5890608 - DNA, 25 bp, Homo sapien
ctctgcctgtggcctttgtctctgc

SEQ ID NO: 5890609 - DNA, 25 bp, Homo sapien
tttctagcatggaaatagtctgtaa

SEQ ID NO: 5890610 - DNA, 25 bp, Homo sapien
aggctaagtaagccccacaagaaag

SEQ ID NO: 5890611 - DNA, 25 bp, Homo sapien
aatgagagccctgtcacccatgccc

SEQ ID NO: 5890612 - DNA, 25 bp, Homo sapien
gagaatgccttgttttgttttgttt

SEQ ID NO: 5890613 - DNA, 25 bp, Homo sapien
aagtataaaaaacgcagtctcacag

SEQ ID NO: 5890614 - DNA, 25 bp, Homo sapien
caggacaacctgcttagctccaggt

SEQ ID NO: 5890615 - DNA, 25 bp, Homo sapien
acaagaaagtctccagtgtccttcc

SEQ ID NO: 5890616 - DNA, 25 bp, Homo sapien
gccttgttttgttttgtttctgtgt

SEQ ID NO: 5890617 - DNA, 25 bp, Homo sapien
ggtcagaagagggtggggttggagc

SEQ ID NO: 5890618 - DNA, 25 bp, Homo sapien
ttccctcctgggaatgtcaaagtgc

SEQ ID NO: 5890619 - DNA, 25 bp, Homo sapien
ctctaaacctggcttgcttggctag

SEQ ID NO: 5890620 - DNA, 25 bp, Homo sapien
agggttcctaatgcacacaggggcg

SEQ ID NO: 5890621 - DNA, 25 bp, Homo sapien
tgcttagctccaggtttcagacaac

SEQ ID NO: 5890622 - DNA, 25 bp, Homo sapien
ctgagctttctcagaggagagaagg

SEQ ID NO: 5890623 - DNA, 25 bp, Homo sapien
gctgatggagcttacagaccactct

SEQ ID NO: 5890624 - DNA, 25 bp, Homo sapien
cataaagagaccaaggggcaaatga

SEQ ID NO: 5890625 - DNA, 25 bp, Homo sapien
tgaccttatataaaataattcacca

SEQ ID NO: 5890626 - DNA, 25 bp, Homo sapien
agaggagagaagggttcctaatgca

SEQ ID NO: 5890627 - DNA, 25 bp, Homo sapien
catggagctcagtccccagagcttg

SEQ ID NO: 5890628 - DNA, 25 bp, Homo sapien
acctgggtcaggtctggagaacaaa

SEQ ID NO: 5890629 - DNA, 25 bp, Homo sapien
ggttggagcatggagctcagtcccc

SEQ ID NO: 5890630 - DNA, 25 bp, Homo sapien
atcagaacaagttggaagtaaacaa

SEQ ID NO: 5890631 - DNA, 25 bp, Homo sapien
gacaagcctggcctgggaaacagag

SEQ ID NO: 5890632 - DNA, 25 bp, Homo sapien
gctttctcagaggagagaagggttc

SEQ ID NO: 5890633 - DNA, 25 bp, Homo sapien
aaggggcaaatgagagccctgtcac

SEQ ID NO: 5890634 - DNA, 25 bp, Homo sapien
ctcctgggaatgtcaaagtgcaaga

SEQ ID NO: 5890635 - DNA, 25 bp, Homo sapien
gtttaaggtggaggggtagagaatg

SEQ ID NO: 5890636 - DNA, 25 bp, Homo sapien
ttcctaatgcacacaggggcggctc

SEQ ID NO: 5890637 - DNA, 25 bp, Homo sapien
atgcagaaacctgggcaaggaacac

SEQ ID NO: 5890638 - DNA, 25 bp, Homo sapien
gggagggcaggaaagggggactcag

SEQ ID NO: 5890639 - DNA, 25 bp, Homo sapien
caggaaggaggctggctgaggggct

SEQ ID NO: 5890640 - DNA, 25 bp, Homo sapien
gcacagtatggtaggtgagactggg

SEQ ID NO: 5890641 - DNA, 25 bp, Homo sapien
gagggtacccttgcctacctgggtc

SEQ ID NO: 5890642 - DNA, 25 bp, Homo sapien
aagggggactcagcagcataaagag

SEQ ID NO: 5890643 - DNA, 25 bp, Homo sapien
caggtctggagaacaaaggtcagaa

SEQ ID NO: 5890644 - DNA, 25 bp, Homo sapien
agtatggtaggtgagactgggaggg

SEQ ID NO: 5890645 - DNA, 25 bp, Homo sapien
ttcaagacccattctcattcatagc

SEQ ID NO: 5890646 - DNA, 25 bp, Homo sapien
atgtttaaggtggaggggtagagaa

SEQ ID NO: 5890647 - DNA, 25 bp, Homo sapien
agtctgtaaccagaaggctaagtaa

SEQ ID NO: 5890648 - DNA, 25 bp, Homo sapien
ggggttggagcatggagctcagtcc

SEQ ID NO: 5890649 - DNA, 25 bp, Homo sapien
ttcctctctcccttccactagtcac

SEQ ID NO: 5890650 - DNA, 25 bp, Homo sapien
ggaatgtcaaagtgcaagatgcaga

SEQ ID NO: 5890651 - DNA, 25 bp, Homo sapien
ctccaaaggtggatttgaggctccc

SEQ ID NO: 5890652 - DNA, 25 bp, Homo sapien
caaaggtcagaagagggtggggttg

SEQ ID NO: 5890653 - DNA, 25 bp, Homo sapien
cctaatgcacacaggggcggctcca

SEQ ID NO: 5890654 - DNA, 25 bp, Homo sapien
ggaaatagtctgtaaccagaaggct

SEQ ID NO: 5890655 - DNA, 25 bp, Homo sapien
tctcattcatagctctgcctgtggc

SEQ ID NO: 5890656 - DNA, 25 bp, Homo sapien
tggaggggtagagaatgccttgttt

SEQ ID NO: 5890657 - DNA, 25 bp, Homo sapien
ggggtgcacacatattttcaagacc

SEQ ID NO: 5890658 - DNA, 25 bp, Homo sapien
ctggcttgcttggctagagatggca

SEQ ID NO: 5890659 - DNA, 25 bp, Homo sapien
tgttttgtttctgtgtttttccttc

SEQ ID NO: 5890660 - DNA, 25 bp, Homo sapien
ttggagcatggagctcagtccccag

SEQ ID NO: 5890661 - DNA, 25 bp, Homo sapien
ctgctgtctcaggacagggctgatg

SEQ ID NO: 5890662 - DNA, 25 bp, Homo sapien
caggtcaccacagacaagcctggcc

SEQ ID NO: 5890663 - DNA, 25 bp, Homo sapien
tcccctgctccgatgtaaccaggca

SEQ ID NO: 5890664 - DNA, 25 bp, Homo sapien
tccccagagcttgtgacaggacaac

SEQ ID NO: 5890665 - DNA, 25 bp, Homo sapien
ttcaagcttaggggtgcacacatat

SEQ ID NO: 5890666 - DNA, 25 bp, Homo sapien
gtcacccatgcccaggtcaccacag

SEQ ID NO: 5890667 - DNA, 25 bp, Homo sapien
accagaaggctaagtaagccccaca

SEQ ID NO: 5890668 - DNA, 25 bp, Homo sapien
cagacaagcctggcctgggaaacag

SEQ ID NO: 5890669 - DNA, 25 bp, Homo sapien
ggtgcacacatattttcaagaccca

SEQ ID NO: 5890670 - DNA, 25 bp, Homo sapien
aggtgagactgggagggtacccttg

SEQ ID NO: 5890671 - DNA, 25 bp, Homo sapien
tttttgacccttctctaaacctggc

SEQ ID NO: 5890672 - DNA, 25 bp, Homo sapien
aaatagtctgtaaccagaaggctaa

SEQ ID NO: 5890673 - DNA, 25 bp, Homo sapien
agacccattctcattcatagctctg

SEQ ID NO: 5890674 - DNA, 25 bp, Homo sapien
gcggctccaaaggtggatttgaggc

SEQ ID NO: 5890675 - DNA, 25 bp, Homo sapien
catattttcaagacccattctcatt

SEQ ID NO: 5890676 - DNA, 25 bp, Homo sapien
tctggagaacaaaggtcagaagagg

SEQ ID NO: 5890677 - DNA, 25 bp, Homo sapien
aacgcagtctcacagtttgtgaggc

SEQ ID NO: 5890678 - DNA, 25 bp, Homo sapien
ctctgagctttctcagaggagagaa

SEQ ID NO: 5890679 - DNA, 25 bp, Homo sapien
agaagagggtggggttggagcatgg

SEQ ID NO: 5890680 - DNA, 25 bp, Homo sapien
aaataattcaccacttccaagtata

SEQ ID NO: 5890681 - DNA, 25 bp, Homo sapien
gacaggacaacctgcttagctccag

SEQ ID NO: 5890682 - DNA, 25 bp, Homo sapien
gcctgggaaacagagggcatcagaa

SEQ ID NO: 5890683 - DNA, 25 bp, Homo sapien
gatggcacagtatggtaggtgagac

SEQ ID NO: 5890684 - DNA, 25 bp, Homo sapien
taaaatatgtattttctagcatgga

SEQ ID NO: 5890685 - DNA, 25 bp, Homo sapien
ttgtttctgtgtttttccttctatt

SEQ ID NO: 5890686 - DNA, 25 bp, Homo sapien
ccacttccaagtataaaaaacgcag

SEQ ID NO: 5890687 - DNA, 25 bp, Homo sapien
acccttctctaaacctggcttgctt

SEQ ID NO: 5890688 - DNA, 25 bp, Homo sapien
ggggcaaatgagagccctgtcaccc

SEQ ID NO: 5890689 - DNA, 25 bp, Homo sapien
gcaggaaagggggactcagcagcat

SEQ ID NO: 5890690 - DNA, 25 bp, Homo sapien
gggactcagcagcataaagagacca

SEQ ID NO: 5890691 - DNA, 25 bp, Homo sapien
cagggctgatggagcttacagacca

SEQ ID NO: 5890692 - DNA, 25 bp, Homo sapien
agcataaagagaccaaggggcaaat

SEQ ID NO: 5890693 - DNA, 25 bp, Homo sapien
taagtaagccccacaagaaagtctc

SEQ ID NO: 5890694 - DNA, 25 bp, Homo sapien
tcaccacagacaagcctggcctggg

SEQ ID NO: 5890695 - DNA, 25 bp, Homo sapien
ctgctccgatgtaaccaggcaccca

SEQ ID NO: 5890696 - DNA, 25 bp, Homo sapien
aggggcggctccaaaggtggatttg

SEQ ID NO: 5890697 - DNA, 25 bp, Homo sapien
attcatagctctgcctgtggccttt

SEQ ID NO: 5890698 - DNA, 25 bp, Homo sapien
catggcctgaaagattattgaccca

SEQ ID NO: 5890699 - DNA, 25 bp, Homo sapien
tataaaataattcaccacttccaag

SEQ ID NO: 5890700 - DNA, 25 bp, Homo sapien
atatatgtttaaggtggaggggtag

SEQ ID NO: 5890701 - DNA, 25 bp, Homo sapien
tgacccttctctaaacctggcttgc

SEQ ID NO: 5890702 - DNA, 25 bp, Homo sapien
gggcatcagaacaagttggaagtaa

SEQ ID NO: 5890703 - DNA, 25 bp, Homo sapien
tagagaatgccttgttttgttttgt

SEQ ID NO: 5890704 - DNA, 25 bp, Homo sapien
taaccagaaggctaagtaagcccca

SEQ ID NO: 5890705 - DNA, 25 bp, Homo sapien
agtccccagagcttgtgacaggaca

SEQ ID NO: 5890706 - DNA, 25 bp, Homo sapien
aagagaccaaggggcaaatgagagc

SEQ ID NO: 5890707 - DNA, 25 bp, Homo sapien
tgcccaggtcaccacagacaagcct

SEQ ID NO: 5890708 - DNA, 25 bp, Homo sapien
aataatatatgtttaaggtggaggg

SEQ ID NO: 5890709 - DNA, 25 bp, Homo sapien
acttccaagtataaaaaacgcagtc

SEQ ID NO: 5890710 - DNA, 25 bp, Homo sapien
ccattctcattcatagctctgcctg

SEQ ID NO: 5890711 - DNA, 25 bp, Homo sapien
ggtggaggggtagagaatgccttgt

SEQ ID NO: 5890712 - DNA, 25 bp, Homo sapien
acaacaggaaggaggctggctgagg

SEQ ID NO: 5890713 - DNA, 25 bp, Homo sapien
gcacacaggggcggctccaaaggtg

SEQ ID NO: 5890714 - DNA, 25 bp, Homo sapien
tcccttccactagtcacttccctcc

SEQ ID NO: 5890715 - DNA, 25 bp, Homo sapien
gagctcagtccccagagcttgtgac

SEQ ID NO: 5890716 - DNA, 25 bp, Homo sapien
gagggtggggttggagcatggagct

SEQ ID NO: 5890717 - DNA, 25 bp, Homo sapien
gtgctccctctgagctttctcagag

SEQ ID NO: 5890718 - DNA, 25 bp, Homo sapien
gtggggttggagcatggagctcagt

SEQ ID NO: 5890719 - DNA, 25 bp, Homo sapien
gttggattttctcttctgtctttaa

SEQ ID NO: 5890720 - DNA, 25 bp, Homo sapien
agtaagccccacaagaaagtctcca

SEQ ID NO: 5890721 - DNA, 25 bp, Homo sapien
tctagcatggaaatagtctgtaacc

SEQ ID NO: 5890722 - DNA, 25 bp, Homo sapien
gggggactcagcagcataaagagac

SEQ ID NO: 5890723 - DNA, 25 bp, Homo sapien
cacagtttgtgaggcagtgctccct

SEQ ID NO: 5890724 - DNA, 25 bp, Homo sapien
ggcttgcttggctagagatggcaca

SEQ ID NO: 5890725 - DNA, 25 bp, Homo sapien
gctgtctcaggacagggctgatgga

SEQ ID NO: 5890726 - DNA, 25 bp, Homo sapien
cagaccactctcctcccagattcat

SEQ ID NO: 5890727 - DNA, 25 bp, Homo sapien
aacctgcttagctccaggtttcaga

SEQ ID NO: 5890728 - DNA, 25 bp, Homo sapien
agccctgtcacccatgcccaggtca

SEQ ID NO: 5890729 - DNA, 25 bp, Homo sapien
ctgtggcctttgtctctgcctcccc

SEQ ID NO: 5890730 - DNA, 25 bp, Homo sapien
tatataaaataattcaccacttcca

SEQ ID NO: 5890731 - DNA, 25 bp, Homo sapien
cgcagtctcacagtttgtgaggcag

SEQ ID NO: 5890732 - DNA, 25 bp, Homo sapien
cccagattcatggcctgaaagatta

SEQ ID NO: 5890733 - DNA, 25 bp, Homo sapien
ctcacagtttgtgaggcagtgctcc

SEQ ID NO: 5890734 - DNA, 25 bp, Homo sapien
gaaggctaagtaagccccacaagaa

SEQ ID NO: 5890735 - DNA, 25 bp, Homo sapien
tcagaggagagaagggttcctaatg

SEQ ID NO: 5890736 - DNA, 25 bp, Homo sapien
ggtttcagacaacaggaaggaggct

SEQ ID NO: 5890737 - DNA, 25 bp, Homo sapien
gacagggctgatggagcttacagac

SEQ ID NO: 5890738 - DNA, 25 bp, Homo sapien
tccactagtcacttccctcctggga

SEQ ID NO: 5890739 - DNA, 25 bp, Homo sapien
cagagcttgtgacaggacaacctgc

SEQ ID NO: 5890740 - DNA, 25 bp, Homo sapien
ataaaaaacgcagtctcacagtttg

SEQ ID NO: 5890741 - DNA, 25 bp, Homo sapien
atcaatttcaagcttaggggtgcac

SEQ ID NO: 5890742 - DNA, 25 bp, Homo sapien
ttaataatatatgtttaaggtggag

SEQ ID NO: 5890743 - DNA, 25 bp, Homo sapien
agagcttcttgccaatgggttggat

SEQ ID NO: 5890744 - DNA, 25 bp, Homo sapien
ttgtgacaggacaacctgcttagct

SEQ ID NO: 5890745 - DNA, 25 bp, Homo sapien
ctgggtcaggtctggagaacaaagg

SEQ ID NO: 5890746 - DNA, 25 bp, Homo sapien
taaagagaccaaggggcaaatgaga

SEQ ID NO: 5890747 - DNA, 25 bp, Homo sapien
taggggtgcacacatattttcaaga

SEQ ID NO: 5890748 - DNA, 25 bp, Homo sapien
taaaataattcaccacttccaagta

SEQ ID NO: 5890749 - DNA, 25 bp, Homo sapien
agagatcaatttcaagcttaggggt

SEQ ID NO: 5890750 - DNA, 25 bp, Homo sapien
tttctcagaggagagaagggttcct

SEQ ID NO: 5890751 - DNA, 25 bp, Homo sapien
ttttcaagacccattctcattcata

SEQ ID NO: 5890752 - DNA, 25 bp, Homo sapien
gagaccaaggggcaaatgagagccc

SEQ ID NO: 5890753 - DNA, 25 bp, Homo sapien
ctaaacctggcttgcttggctagag

SEQ ID NO: 5890754 - DNA, 25 bp, Homo sapien
gcagaaacctgggcaaggaacacag

SEQ ID NO: 5890755 - DNA, 25 bp, Homo sapien
gcagcataaagagaccaaggggcaa

SEQ ID NO: 5890756 - DNA, 25 bp, Homo sapien
ccaggcacccacaaagagcttcttg

SEQ ID NO: 5890757 - DNA, 25 bp, Homo sapien
aaggaggctggctgaggggctagag

SEQ ID NO: 5890758 - DNA, 25 bp, Homo sapien
caatttcaagcttaggggtgcacac

SEQ ID NO: 5890759 - DNA, 25 bp, Homo sapien
ttgaggctcccctgctccgatgtaa

SEQ ID NO: 5890760 - DNA, 25 bp, Homo sapien
taatatatgtttaaggtggaggggt

SEQ ID NO: 5890761 - DNA, 25 bp, Homo sapien
cttatataaaataattcaccacttc

SEQ ID NO: 5890762 - DNA, 25 bp, Homo sapien
cctgggaatgtcaaagtgcaagatg

SEQ ID NO: 5890763 - DNA, 25 bp, Homo sapien
ccctgctgtctcaggacagggctga

SEQ ID NO: 5890764 - DNA, 25 bp, Homo sapien
gagaagggttcctaatgcacacagg

SEQ ID NO: 5890765 - DNA, 25 bp, Homo sapien
tctcccttccactagtcacttccct

SEQ ID NO: 5890766 - DNA, 25 bp, Homo sapien
ccctctgagctttctcagaggagag

SEQ ID NO: 5890767 - DNA, 25 bp, Homo sapien
ttccaagtataaaaaacgcagtctc

SEQ ID NO: 5890768 - DNA, 25 bp, Homo sapien
ctcagcagcataaagagaccaaggg

SEQ ID NO: 5890769 - DNA, 25 bp, Homo sapien
gaatgccttgttttgttttgtttct

SEQ ID NO: 5890770 - DNA, 25 bp, Homo sapien
cagtgctccctctgagctttctcag

SEQ ID NO: 5890771 - DNA, 25 bp, Homo sapien
gcctgaaagattattgacccagtag

SEQ ID NO: 5890772 - DNA, 25 bp, Homo sapien
cacccatgcccaggtcaccacagac

SEQ ID NO: 5890773 - DNA, 25 bp, Homo sapien
ttgcctacctgggtcaggtctggag

SEQ ID NO: 5890774 - DNA, 25 bp, Homo sapien
tctgtaaccagaaggctaagtaagc

SEQ ID NO: 5890775 - DNA, 25 bp, Homo sapien
agatcaatttcaagcttaggggtgc

SEQ ID NO: 5890776 - DNA, 25 bp, Homo sapien
cttggctagagatggcacagtatgg

SEQ ID NO: 5890777 - DNA, 25 bp, Homo sapien
agtctccagtgtccttcccccctgc

SEQ ID NO: 5890778 - DNA, 25 bp, Homo sapien
atgccttgttttgttttgtttctgt

SEQ ID NO: 5890779 - DNA, 25 bp, Homo sapien
caaatgagagccctgtcacccatgc

SEQ ID NO: 5890780 - DNA, 25 bp, Homo sapien
gtggatttgaggctcccctgctccg

SEQ ID NO: 5890781 - DNA, 25 bp, Homo sapien
accacagacaagcctggcctgggaa

SEQ ID NO: 5890782 - DNA, 25 bp, Homo sapien
aaacctggcttgcttggctagagat

SEQ ID NO: 5890783 - DNA, 25 bp, Homo sapien
ctgcctgtggcctttgtctctgcct

SEQ ID NO: 5890784 - DNA, 25 bp, Homo sapien
ctcccagattcatggcctgaaagat

SEQ ID NO: 5890785 - DNA, 25 bp, Homo sapien
tagccagggagggcaggaaaggggg

SEQ ID NO: 5890786 - DNA, 25 bp, Homo sapien
gagggcatcagaacaagttggaagt

SEQ ID NO: 5890787 - DNA, 25 bp, Homo sapien
gagggcaggaaagggggactcagca

SEQ ID NO: 5890788 - DNA, 25 bp, Homo sapien
atagtctgtaaccagaaggctaagt

SEQ ID NO: 5890789 - DNA, 25 bp, Homo sapien
ttaaggtggaggggtagagaatgcc

SEQ ID NO: 5890790 - DNA, 25 bp, Homo sapien
atagctctgcctgtggcctttgtct

SEQ ID NO: 5890791 - DNA, 25 bp, Homo sapien
gaaagattattgacccagtagccag

SEQ ID NO: 5890792 - DNA, 25 bp, Homo sapien
tggctagagatggcacagtatggta

SEQ ID NO: 5890793 - DNA, 25 bp, Homo sapien
actctcctcccagattcatggcctg

SEQ ID NO: 5890794 - DNA, 25 bp, Homo sapien
atagagatcaatttcaagcttaggg

SEQ ID NO: 5890795 - DNA, 25 bp, Homo sapien
ctagtcacttccctcctgggaatgt

SEQ ID NO: 5890796 - DNA, 25 bp, Homo sapien
tagcatggaaatagtctgtaaccag

SEQ ID NO: 5890797 - DNA, 25 bp, Homo sapien
tggcctgggaaacagagggcatcag

SEQ ID NO: 5890798 - DNA, 25 bp, Homo sapien
gaaacagagggcatcagaacaagtt

SEQ ID NO: 5890799 - DNA, 25 bp, Homo sapien
gtgacaggacaacctgcttagctcc

SEQ ID NO: 5890800 - DNA, 25 bp, Homo sapien
tccgatgtaaccaggcacccacaaa

SEQ ID NO: 5890801 - DNA, 25 bp, Homo sapien
cacatattttcaagacccattctca

SEQ ID NO: 5890802 - DNA, 25 bp, Homo sapien
gaacaaaggtcagaagagggtgggg

SEQ ID NO: 5890803 - DNA, 25 bp, Homo sapien
gtttgtgaggcagtgctccctctga

SEQ ID NO: 5890804 - DNA, 25 bp, Homo sapien
gctagagatggcacagtatggtagg

SEQ ID NO: 5890805 - DNA, 25 bp, Homo sapien
cacacatattttcaagacccattct

SEQ ID NO: 5890806 - DNA, 25 bp, Homo sapien
cagaaggctaagtaagccccacaag

SEQ ID NO: 5890807 - DNA, 25 bp, Homo sapien
cacagacaagcctggcctgggaaac

SEQ ID NO: 5890808 - DNA, 25 bp, Homo sapien
tgaggggctagagtatagagatcaa

SEQ ID NO: 5890809 - DNA, 25 bp, Homo sapien
aggagagaagggttcctaatgcaca

SEQ ID NO: 5890810 - DNA, 25 bp, Homo sapien
atgcacacaggggcggctccaaagg

SEQ ID NO: 5890811 - DNA, 25 bp, Homo sapien
ccagtagccagggagggcaggaaag

SEQ ID NO: 5890812 - DNA, 25 bp, Homo sapien
atggaaatagtctgtaaccagaagg

SEQ ID NO: 5890813 - DNA, 25 bp, Homo sapien
gggcaggaaagggggactcagcagc

SEQ ID NO: 5890814 - DNA, 25 bp, Homo sapien
ttgccaatgggttggattttctctt

SEQ ID NO: 5890815 - DNA, 25 bp, Homo sapien
aatgaccttatataaaataattcac

SEQ ID NO: 5890816 - DNA, 25 bp, Homo sapien
gtattttctagcatggaaatagtct

SEQ ID NO: 5890817 - DNA, 25 bp, Homo sapien
taaatgaccttatataaaataattc

SEQ ID NO: 5890818 - DNA, 25 bp, Homo sapien
aaatatgtattttctagcatggaaa

SEQ ID NO: 5890819 - DNA, 25 bp, Homo sapien
ccctcctgggaatgtcaaagtgcaa

SEQ ID NO: 5890820 - DNA, 25 bp, Homo sapien
tagagtatagagatcaatttcaagc

SEQ ID NO: 5890821 - DNA, 25 bp, Homo sapien
gcctgtggcctttgtctctgcctcc

SEQ ID NO: 5890822 - DNA, 25 bp, Homo sapien
ccccacaagaaagtctccagtgtcc

SEQ ID NO: 5890823 - DNA, 25 bp, Homo sapien
gtaaccaggcacccacaaagagctt

SEQ ID NO: 5890824 - DNA, 25 bp, Homo sapien
gtcaggtctggagaacaaaggtcag

SEQ ID NO: 5890825 - DNA, 25 bp, Homo sapien
tatggtaggtgagactgggagggta

SEQ ID NO: 5890826 - DNA, 25 bp, Homo sapien
cagaacaagttggaagtaaacaacc

SEQ ID NO: 5890827 - DNA, 25 bp, Homo sapien
gtgagactgggagggtacccttgcc

SEQ ID NO: 5890828 - DNA, 25 bp, Homo sapien
cttacagaccactctcctcccagat

SEQ ID NO: 5890829 - DNA, 25 bp, Homo sapien
ggtcaccacagacaagcctggcctg

SEQ ID NO: 5890830 - DNA, 25 bp, Homo sapien
gctccgatgtaaccaggcacccaca

SEQ ID NO: 5890831 - DNA, 25 bp, Homo sapien
agacaacaggaaggaggctggctga

SEQ ID NO: 5890832 - DNA, 25 bp, Homo sapien
aggggctagagtatagagatcaatt

SEQ ID NO: 5890833 - DNA, 25 bp, Homo sapien
aggacagggctgatggagcttacag

SEQ ID NO: 5890834 - DNA, 25 bp, Homo sapien
acaacctgcttagctccaggtttca

SEQ ID NO: 5890835 - DNA, 25 bp, Homo sapien
tattttcaagacccattctcattca

SEQ ID NO: 5890836 - DNA, 25 bp, Homo sapien
taagccccacaagaaagtctccagt

SEQ ID NO: 5890837 - DNA, 25 bp, Homo sapien
aaaaaacgcagtctcacagtttgtg

SEQ ID NO: 5890838 - DNA, 25 bp, Homo sapien
atggagcttacagaccactctcctc

SEQ ID NO: 5890839 - DNA, 25 bp, Homo sapien
acaaagagcttcttgccaatgggtt

SEQ ID NO: 5890840 - DNA, 25 bp, Homo sapien
gaagggttcctaatgcacacagggg

SEQ ID NO: 5890841 - DNA, 25 bp, Homo sapien
cttccactagtcacttccctcctgg

SEQ ID NO: 5890842 - DNA, 25 bp, Homo sapien
caagatgcagaaacctgggcaagga

SEQ ID NO: 5890843 - DNA, 25 bp, Homo sapien
ggagcttacagaccactctcctccc

SEQ ID NO: 5890844 - DNA, 25 bp, Homo sapien
gattattgacccagtagccagggag

SEQ ID NO: 5890845 - DNA, 25 bp, Homo sapien
gctggctgaggggctagagtataga

SEQ ID NO: 5890846 - DNA, 25 bp, Homo sapien
atgtattttctagcatggaaatagt

SEQ ID NO: 5890847 - DNA, 25 bp, Homo sapien
ggacaacctgcttagctccaggttt

SEQ ID NO: 5890848 - DNA, 25 bp, Homo sapien
ataattcaccacttccaagtataaa

SEQ ID NO: 5890849 - DNA, 25 bp, Homo sapien
caagcttaggggtgcacacatattt

SEQ ID NO: 5890850 - DNA, 25 bp, Homo sapien
agcttcttgccaatgggttggattt

SEQ ID NO: 5890851 - DNA, 25 bp, Homo sapien
taatgcacacaggggcggctccaaa

SEQ ID NO: 5890852 - DNA, 25 bp, Homo sapien
ggatttgaggctcccctgctccgat

SEQ ID NO: 5890853 - DNA, 25 bp, Homo sapien
ggaaggaggctggctgaggggctag

SEQ ID NO: 5890854 - DNA, 25 bp, Homo sapien
gaaagggggactcagcagcataaag

SEQ ID NO: 5890855 - DNA, 25 bp, Homo sapien
aacagagggcatcagaacaagttgg

SEQ ID NO: 5890856 - DNA, 25 bp, Homo sapien
agcttaggggtgcacacatattttc

SEQ ID NO: 5890857 - DNA, 25 bp, Homo sapien
agtagccagggagggcaggaaaggg

SEQ ID NO: 5890858 - DNA, 25 bp, Homo sapien
tggcacagtatggtaggtgagactg

SEQ ID NO: 5890859 - DNA, 25 bp, Homo sapien
acctggcttgcttggctagagatgg

SEQ ID NO: 5890860 - DNA, 25 bp, Homo sapien
ggggtagagaatgccttgttttgtt

SEQ ID NO: 5890861 - DNA, 25 bp, Homo sapien
agcctggcctgggaaacagagggca

SEQ ID NO: 5890862 - DNA, 25 bp, Homo sapien
gcatcagaacaagttggaagtaaac

SEQ ID NO: 5890863 - DNA, 25 bp, Homo sapien
gaggcagtgctccctctgagctttc

SEQ ID NO: 5890864 - DNA, 25 bp, Homo sapien
acccattctcattcatagctctgcc

SEQ ID NO: 5890865 - DNA, 25 bp, Homo sapien
atatgtattttctagcatggaaata

SEQ ID NO: 5890866 - DNA, 25 bp, Homo sapien
gggctagagtatagagatcaatttc

SEQ ID NO: 5890867 - DNA, 25 bp, Homo sapien
gctaagtaagccccacaagaaagtc

SEQ ID NO: 5890868 - DNA, 25 bp, Homo sapien
ccctgtcacccatgcccaggtcacc

SEQ ID NO: 5890869 - DNA, 25 bp, Homo sapien
tgggagggtacccttgcctacctgg

SEQ ID NO: 5890870 - DNA, 25 bp, Homo sapien
ttgtgaggcagtgctccctctgagc

SEQ ID NO: 5890871 - DNA, 25 bp, Homo sapien
gcacccacaaagagcttcttgccaa

SEQ ID NO: 5890872 - DNA, 25 bp, Homo sapien
atttcaagcttaggggtgcacacat

SEQ ID NO: 5890873 - DNA, 25 bp, Homo sapien
ccacaagaaagtctccagtgtcctt

SEQ ID NO: 5890874 - DNA, 25 bp, Homo sapien
cttgcttggctagagatggcacagt

SEQ ID NO: 5890875 - DNA, 25 bp, Homo sapien
agcatggagctcagtccccagagct

SEQ ID NO: 5890876 - DNA, 25 bp, Homo sapien
acaggggcggctccaaaggtggatt

SEQ ID NO: 5890877 - DNA, 25 bp, Homo sapien
tagctccaggtttcagacaacagga

SEQ ID NO: 5890878 - DNA, 25 bp, Homo sapien
ggcaaatgagagccctgtcacccat

SEQ ID NO: 5890879 - DNA, 25 bp, Homo sapien
attctcattcatagctctgcctgtg

SEQ ID NO: 5890880 - DNA, 25 bp, Homo sapien
cagggagggcaggaaagggggactc

SEQ ID NO: 5890881 - DNA, 25 bp, Homo sapien
tgcttggctagagatggcacagtat

SEQ ID NO: 5890882 - DNA, 25 bp, Homo sapien
cgatgtaaccaggcacccacaaaga

SEQ ID NO: 5890883 - DNA, 25 bp, Homo sapien
ccaaaggtggatttgaggctcccct

SEQ ID NO: 5890884 - DNA, 25 bp, Homo sapien
acttccctcctgggaatgtcaaagt

SEQ ID NO: 5890885 - DNA, 25 bp, Homo sapien
tcttgccaatgggttggattttctc

SEQ ID NO: 5890886 - DNA, 25 bp, Homo sapien
cagattcatggcctgaaagattatt

SEQ ID NO: 5890887 - DNA, 25 bp, Homo sapien
tctcaggacagggctgatggagctt

SEQ ID NO: 5890888 - DNA, 25 bp, Homo sapien
cagtctcacagtttgtgaggcagtg

SEQ ID NO: 5890889 - DNA, 25 bp, Homo sapien
agagccctgtcacccatgcccaggt

SEQ ID NO: 5890890 - DNA, 25 bp, Homo sapien
tttcagacaacaggaaggaggctgg

SEQ ID NO: 5890891 - DNA, 25 bp, Homo sapien
agatgcagaaacctgggcaaggaac

SEQ ID NO: 5890892 - DNA, 25 bp, Homo sapien
tggcctgaaagattattgacccagt

SEQ ID NO: 5890893 - DNA, 25 bp, Homo sapien
tgcaagatgcagaaacctgggcaag

SEQ ID NO: 5890894 - DNA, 25 bp, Homo sapien
gggtggggttggagcatggagctca

SEQ ID NO: 5890895 - DNA, 25 bp, Homo sapien
tacagaccactctcctcccagattc

SEQ ID NO: 5890896 - DNA, 25 bp, Homo sapien
gagagaagggttcctaatgcacaca

SEQ ID NO: 5890897 - DNA, 25 bp, Homo sapien
cagtttgtgaggcagtgctccctct

SEQ ID NO: 5890898 - DNA, 25 bp, Homo sapien
tggagctcagtccccagagcttgtg

SEQ ID NO: 5890899 - DNA, 25 bp, Homo sapien
gattcatggcctgaaagattattga

SEQ ID NO: 5890900 - DNA, 25 bp, Homo sapien
gagaacaaaggtcagaagagggtgg

SEQ ID NO: 5890901 - DNA, 25 bp, Homo sapien
caccacttccaagtataaaaaacgc

SEQ ID NO: 5890902 - DNA, 25 bp, Homo sapien
aacaggaaggaggctggctgagggg

SEQ ID NO: 5890903 - DNA, 25 bp, Homo sapien
atgtaaccaggcacccacaaagagc

SEQ ID NO: 5890904 - DNA, 25 bp, Homo sapien
aaggtggaggggtagagaatgcctt

SEQ ID NO: 5890905 - DNA, 25 bp, Homo sapien
gcctacctgggtcaggtctggagaa

SEQ ID NO: 5890906 - DNA, 25 bp, Homo sapien
tagagatggcacagtatggtaggtg

SEQ ID NO: 5890907 - DNA, 25 bp, Homo sapien
ggagcatggagctcagtccccagag

SEQ ID NO: 5890908 - DNA, 25 bp, Homo sapien
cttaggggtgcacacatattttcaa

SEQ ID NO: 5890909 - DNA, 25 bp, Homo sapien
ctttaataatatatgtttaaggtgg

SEQ ID NO: 5890910 - DNA, 25 bp, Homo sapien
cttagctccaggtttcagacaacag

SEQ ID NO: 5890911 - DNA, 25 bp, Homo sapien
attttctagcatggaaatagtctgt

SEQ ID NO: 5890912 - DNA, 25 bp, Homo sapien
tggattttctcttctgtctttaata

SEQ ID NO: 5890913 - DNA, 25 bp, Homo sapien
gagatggcacagtatggtaggtgag

SEQ ID NO: 5890914 - DNA, 25 bp, Homo sapien
caagcctggcctgggaaacagaggg

SEQ ID NO: 5890915 - DNA, 25 bp, Homo sapien
caggtttcagacaacaggaaggagg

SEQ ID NO: 5890916 - DNA, 25 bp, Homo sapien
tgtcaaagtgcaagatgcagaaacc

SEQ ID NO: 5890917 - DNA, 25 bp, Homo sapien
agctctgcctgtggcctttgtctct

SEQ ID NO: 5890918 - DNA, 25 bp, Homo sapien
gtctcacagtttgtgaggcagtgct

SEQ ID NO: 5890919 - DNA, 25 bp, Homo sapien
caagacccattctcattcatagctc

SEQ ID NO: 5890920 - DNA, 25 bp, Homo sapien
tgacccagtagccagggagggcagg

SEQ ID NO: 5890921 - DNA, 25 bp, Homo sapien
agtgcaagatgcagaaacctgggca

SEQ ID NO: 5890922 - DNA, 25 bp, Homo sapien
ggaggctggctgaggggctagagta

SEQ ID NO: 5890923 - DNA, 25 bp, Homo sapien
tgtaaccagaaggctaagtaagccc

SEQ ID NO: 5890924 - DNA, 25 bp, Homo sapien
tcattcatagctctgcctgtggcct

SEQ ID NO: 5890925 - DNA, 25 bp, Homo sapien
ctacctgggtcaggtctggagaaca

SEQ ID NO: 5890926 - DNA, 25 bp, Homo sapien
gcatggaaatagtctgtaaccagaa

SEQ ID NO: 5890927 - DNA, 25 bp, Homo sapien
gtataaaaaacgcagtctcacagtt

SEQ ID NO: 5890928 - DNA, 25 bp, Homo sapien
gtgaggcagtgctccctctgagctt

SEQ ID NO: 5890929 - DNA, 25 bp, Homo sapien
atgggttggattttctcttctgtct

SEQ ID NO: 5890930 - DNA, 25 bp, Homo sapien
acccagtagccagggagggcaggaa

SEQ ID NO: 5890931 - DNA, 25 bp, Homo sapien
aggcacccacaaagagcttcttgcc

SEQ ID NO: 5890932 - DNA, 25 bp, Homo sapien
gactgggagggtacccttgcctacc

SEQ ID NO: 5890933 - DNA, 25 bp, Homo sapien
gactcagcagcataaagagaccaag

SEQ ID NO: 5890934 - DNA, 25 bp, Homo sapien
tcctcccagattcatggcctgaaag

SEQ ID NO: 5890935 - DNA, 25 bp, Homo sapien
atatgtttaaggtggaggggtagag

SEQ ID NO: 5890936 - DNA, 25 bp, Homo sapien
tctcctcccagattcatggcctgaa

SEQ ID NO: 5890937 - DNA, 25 bp, Homo sapien
catgcccaggtcaccacagacaagc

SEQ ID NO: 5890938 - DNA, 25 bp, Homo sapien
ccttgcctacctgggtcaggtctgg

SEQ ID NO: 5890939 - DNA, 25 bp, Homo sapien
tggctgaggggctagagtatagaga

SEQ ID NO: 5890940 - DNA, 25 bp, Homo sapien
gctcagtccccagagcttgtgacag

SEQ ID NO: 5890941 - DNA, 25 bp, Homo sapien
ttcaccacttccaagtataaaaaac

SEQ ID NO: 5890942 - DNA, 25 bp, Homo sapien
cctctctcccttccactagtcactt

SEQ ID NO: 5890943 - DNA, 25 bp, Homo sapien
gaggctcccctgctccgatgtaacc

SEQ ID NO: 5890944 - DNA, 25 bp, Homo sapien
gctgaggggctagagtatagagatc

SEQ ID NO: 5890945 - DNA, 25 bp, Homo sapien
gggaaacagagggcatcagaacaag

SEQ ID NO: 5890946 - DNA, 25 bp, Homo sapien
gtacccttgcctacctgggtcaggt

SEQ ID NO: 5890947 - DNA, 25 bp, Homo sapien
tcagtccccagagcttgtgacagga

SEQ ID NO: 5890948 - DNA, 25 bp, Homo sapien
aagattattgacccagtagccaggg

SEQ ID NO: 5890949 - DNA, 25 bp, Homo sapien
ggctcccctgctccgatgtaaccag

SEQ ID NO: 5890950 - DNA, 25 bp, Homo sapien
tcaaagtgcaagatgcagaaacctg

SEQ ID NO: 5890951 - DNA, 25 bp, Homo sapien
aaggtcagaagagggtggggttgga

SEQ ID NO: 5890952 - DNA, 25 bp, Homo sapien
gtatagagatcaatttcaagcttag

SEQ ID NO: 5890953 - DNA, 25 bp, Homo sapien
gaccactctcctcccagattcatgg

SEQ ID NO: 5890954 - DNA, 25 bp, Homo sapien
tgggaatgtcaaagtgcaagatgca

SEQ ID NO: 5890955 - DNA, 25 bp, Homo sapien
caatgggttggattttctcttctgt

SEQ ID NO: 5890956 - DNA, 25 bp, Homo sapien
ccccctgctgtctcaggacagggct

SEQ ID NO: 5890957 - DNA, 25 bp, Homo sapien
gcttgtgacaggacaacctgcttag

SEQ ID NO: 5890958 - DNA, 25 bp, Homo sapien
cccatgcccaggtcaccacagacaa

SEQ ID NO: 5890959 - DNA, 25 bp, Homo sapien
tcacttccctcctgggaatgtcaaa

SEQ ID NO: 5890960 - DNA, 25 bp, Homo sapien
cctgcttagctccaggtttcagaca

SEQ ID NO: 5890961 - DNA, 25 bp, Homo sapien
ctgggaaacagagggcatcagaaca

SEQ ID NO: 5890962 - DNA, 25 bp, Homo sapien
tctctcccttccactagtcacttcc

SEQ ID NO: 5890963 - DNA, 25 bp, Homo sapien
tgagagccctgtcacccatgcccag

SEQ ID NO: 5890964 - DNA, 25 bp, Homo sapien
atttgaggctcccctgctccgatgt

SEQ ID NO: 5890965 - DNA, 25 bp, Homo sapien
tggagaacaaaggtcagaagagggt

SEQ ID NO: 5890966 - DNA, 25 bp, Homo sapien
aaagtgcaagatgcagaaacctggg

SEQ ID NO: 5890967 - DNA, 25 bp, Homo sapien
tggtaggtgagactgggagggtacc

SEQ ID NO: 5890968 - DNA, 25 bp, Homo sapien
ggctccaaaggtggatttgaggctc

SEQ ID NO: 5890969 - DNA, 25 bp, Homo sapien
ctgaaagattattgacccagtagcc

SEQ ID NO: 5890970 - DNA, 25 bp, Homo sapien
tccaggtttcagacaacaggaagga

SEQ ID NO: 5890971 - DNA, 25 bp, Homo sapien
accttatataaaataattcaccact

SEQ ID NO: 5890972 - DNA, 25 bp, Homo sapien
gctccaggtttcagacaacaggaag

SEQ ID NO: 5890973 - DNA, 25 bp, Homo sapien
gggcggctccaaaggtggatttgag

SEQ ID NO: 5890974 - DNA, 25 bp, Homo sapien
tgcacacatattttcaagacccatt

SEQ ID NO: 5890975 - DNA, 25 bp, Homo sapien
ttcatggcctgaaagattattgacc

SEQ ID NO: 5890976 - DNA, 25 bp, Homo sapien
gccagggagggcaggaaagggggac

SEQ ID NO: 5890977 - DNA, 25 bp, Homo sapien
ggtctggagaacaaaggtcagaaga

SEQ ID NO: 5890978 - DNA, 25 bp, Homo sapien
aagagggtggggttggagcatggag

SEQ ID NO: 5890979 - DNA, 25 bp, Homo sapien
ggcagtgctccctctgagctttctc

SEQ ID NO: 5890980 - DNA, 25 bp, Homo sapien
gggttggattttctcttctgtcttt

SEQ ID NO: 5890981 - DNA, 25 bp, Homo sapien
ccttctctaaacctggcttgcttgg

SEQ ID NO: 5890982 - DNA, 25 bp, Homo sapien
tcagacaacaggaaggaggctggct

SEQ ID NO: 5890983 - DNA, 25 bp, Homo sapien
agcttacagaccactctcctcccag

SEQ ID NO: 5890984 - DNA, 25 bp, Homo sapien
ctgtcacccatgcccaggtcaccac

SEQ ID NO: 5890985 - DNA, 25 bp, Homo sapien
aatgtcaaagtgcaagatgcagaaa

SEQ ID NO: 5890986 - DNA, 25 bp, Homo sapien
aggctggctgaggggctagagtata

SEQ ID NO: 5890987 - DNA, 25 bp, Homo sapien
aggtggatttgaggctcccctgctc

SEQ ID NO: 5890988 - DNA, 25 bp, Homo sapien
gaaagtctccagtgtccttcccccc

SEQ ID NO: 5890989 - DNA, 25 bp, Homo sapien
gctagagtatagagatcaatttcaa

SEQ ID NO: 5890990 - DNA, 25 bp, Homo sapien
cagagggcatcagaacaagttggaa

SEQ ID NO: 5890991 - DNA, 25 bp, Homo sapien
aaaacgcagtctcacagtttgtgag

SEQ ID NO: 5890992 - DNA, 25 bp, Homo sapien
ccaaggggcaaatgagagccctgtc

SEQ ID NO: 5890993 - DNA, 25 bp, Homo sapien
gccaatgggttggattttctcttct

SEQ ID NO: 5890994 - DNA, 25 bp, Homo sapien
aattcaccacttccaagtataaaaa

SEQ ID NO: 5890995 - DNA, 25 bp, Homo sapien
tctcagaggagagaagggttcctaa

SEQ ID NO: 5890996 - DNA, 25 bp, Homo sapien
cccagagcttgtgacaggacaacct

SEQ ID NO: 5890997 - DNA, 25 bp, Homo sapien
ccactctcctcccagattcatggcc

SEQ ID NO: 5890998 - DNA, 25 bp, Homo sapien
ccacaaagagcttcttgccaatggg

SEQ ID NO: 5890999 - DNA, 25 bp, Homo sapien
cctggcctgggaaacagagggcatc

SEQ ID NO: 5891000 - DNA, 25 bp, Homo sapien
agccccacaagaaagtctccagtgt

SEQ ID NO: 5891001 - DNA, 25 bp, Homo sapien
gaggggtagagaatgccttgttttg

SEQ ID NO: 5891002 - DNA, 25 bp, Homo sapien
agtcacttccctcctgggaatgtca

SEQ ID NO: 5891003 - DNA, 25 bp, Homo sapien
cttcttgccaatgggttggattttc

SEQ ID NO: 5891004 - DNA, 25 bp, Homo sapien
tcaggacagggctgatggagcttac

SEQ ID NO: 5891005 - DNA, 25 bp, Homo sapien
ttattgacccagtagccagggaggg

SEQ ID NO: 5891006 - DNA, 25 bp, Homo sapien
gagcttgtgacaggacaacctgctt

SEQ ID NO: 5891007 - DNA, 25 bp, Homo sapien
gggctgatggagcttacagaccact

SEQ ID NO: 5891008 - DNA, 25 bp, Homo sapien
tttgacccttctctaaacctggctt

SEQ ID NO: 5891009 - DNA, 25 bp, Homo sapien
gtggcctttgtctctgcctcccctt

SEQ ID NO: 5891010 - DNA, 25 bp, Homo sapien
ggtagagaatgccttgttttgtttt

SEQ ID NO: 5891011 - DNA, 25 bp, Homo sapien
gggtacccttgcctacctgggtcag

SEQ ID NO: 5891012 - DNA, 25 bp, Homo sapien
attgacccagtagccagggagggca

SEQ ID NO: 5891013 - DNA, 25 bp, Homo sapien
cactagtcacttccctcctgggaat

SEQ ID NO: 5891014 - DNA, 25 bp, Homo sapien
tcagaagagggtggggttggagcat

SEQ ID NO: 5891015 - DNA, 25 bp, Homo sapien
ggttcctaatgcacacaggggcggc

SEQ ID NO: 5891016 - DNA, 25 bp, Homo sapien
gaccaaggggcaaatgagagccctg

SEQ ID NO: 5891017 - DNA, 25 bp, Homo sapien
aaccaggcacccacaaagagcttct

SEQ ID NO: 5891018 - DNA, 25 bp, Homo sapien
acccttgcctacctgggtcaggtct

SEQ ID NO: 5891019 - DNA, 25 bp, Homo sapien
ttttgtttctgtgtttttccttcta

SEQ ID NO: 5891020 - DNA, 25 bp, Homo sapien
ctccgctcagttgtagaaagcaaca

SEQ ID NO: 5891021 - DNA, 25 bp, Homo sapien
tcttaggtgagtgagtgtgctgttg

SEQ ID NO: 5891022 - DNA, 25 bp, Homo sapien
gctgtcctccgctcagttgtagaaa

SEQ ID NO: 5891023 - DNA, 25 bp, Homo sapien
tcctgggatgtggaagataaacaaa

SEQ ID NO: 5891024 - DNA, 25 bp, Homo sapien
aaacttgattgcccaaagtcactgc

SEQ ID NO: 5891025 - DNA, 25 bp, Homo sapien
ttctggaagatgggaccgggctcag

SEQ ID NO: 5891026 - DNA, 25 bp, Homo sapien
gagcctgctgtcctccgctcagttg

SEQ ID NO: 5891027 - DNA, 25 bp, Homo sapien
tcaaggctctcagcggtcctgccat

SEQ ID NO: 5891028 - DNA, 25 bp, Homo sapien
tgttgtcctacctactcagtcccat

SEQ ID NO: 5891029 - DNA, 25 bp, Homo sapien
ccagcgggcacgataactggcagtc

SEQ ID NO: 5891030 - DNA, 25 bp, Homo sapien
gactttggtgagtgagtgagtctga

SEQ ID NO: 5891031 - DNA, 25 bp, Homo sapien
gccctgggcattgctgtttcttagg

SEQ ID NO: 5891032 - DNA, 25 bp, Homo sapien
aaggctctcagcggtcctgccatag

SEQ ID NO: 5891033 - DNA, 25 bp, Homo sapien
aatccagagaatggtgaattgaaga

SEQ ID NO: 5891034 - DNA, 25 bp, Homo sapien
gctcccagctggaagctgggcctag

SEQ ID NO: 5891035 - DNA, 25 bp, Homo sapien
agcccagctggcaggtttcccagaa

SEQ ID NO: 5891036 - DNA, 25 bp, Homo sapien
tgggaccgggctcagcactgtctgc

SEQ ID NO: 5891037 - DNA, 25 bp, Homo sapien
cgctcggagcctggctgtctcctct

SEQ ID NO: 5891038 - DNA, 25 bp, Homo sapien
agttgccgggtggcagggccccagc

SEQ ID NO: 5891039 - DNA, 25 bp, Homo sapien
ggcagactttggtgagtgagtgagt

SEQ ID NO: 5891040 - DNA, 25 bp, Homo sapien
ggtggcagggccccagcgggcacga

SEQ ID NO: 5891041 - DNA, 25 bp, Homo sapien
tagacctgtcactcaaggctctcag

SEQ ID NO: 5891042 - DNA, 25 bp, Homo sapien
agtgagtgagtctgactgtgttctg

SEQ ID NO: 5891043 - DNA, 25 bp, Homo sapien
acctcatgtcagcacccaagacacc

SEQ ID NO: 5891044 - DNA, 25 bp, Homo sapien
gaggcagagcctgctgtcctccgct

SEQ ID NO: 5891045 - DNA, 25 bp, Homo sapien
tcccagctggaagctgggcctagaa

SEQ ID NO: 5891046 - DNA, 25 bp, Homo sapien
tcattgaacagccaggactgggact

SEQ ID NO: 5891047 - DNA, 25 bp, Homo sapien
cccaagacaccctcaaacttgtcag

SEQ ID NO: 5891048 - DNA, 25 bp, Homo sapien
acatatgaccagaagccagggctcc

SEQ ID NO: 5891049 - DNA, 25 bp, Homo sapien
gaggccagggttcctccaagccagg

SEQ ID NO: 5891050 - DNA, 25 bp, Homo sapien
gtcctggttggtggtcaggtggtag

SEQ ID NO: 5891051 - DNA, 25 bp, Homo sapien
gccctggtcactctcctgttcccag

SEQ ID NO: 5891052 - DNA, 25 bp, Homo sapien
tggcaggtttcccagaaatccagag

SEQ ID NO: 5891053 - DNA, 25 bp, Homo sapien
ctggctgtctcctcttccactggcc

SEQ ID NO: 5891054 - DNA, 25 bp, Homo sapien
gtcaaggcgatacctcgagggaact

SEQ ID NO: 5891055 - DNA, 25 bp, Homo sapien
tactcagtcccattttgtccaccga

SEQ ID NO: 5891056 - DNA, 25 bp, Homo sapien
ctgggctttcctagctgatgttgtc

SEQ ID NO: 5891057 - DNA, 25 bp, Homo sapien
tgtgttctggaagatgggaccgggc

SEQ ID NO: 5891058 - DNA, 25 bp, Homo sapien
ggagacagcccagctggcaggtttc

SEQ ID NO: 5891059 - DNA, 25 bp, Homo sapien
ctgctgtcctccgctcagttgtaga

SEQ ID NO: 5891060 - DNA, 25 bp, Homo sapien
aggggagggcaagggccctggtcac

SEQ ID NO: 5891061 - DNA, 25 bp, Homo sapien
gctcactgtgcttggtcccacagca

SEQ ID NO: 5891062 - DNA, 25 bp, Homo sapien
caccagaagccaacctcatgtcagc

SEQ ID NO: 5891063 - DNA, 25 bp, Homo sapien
ggcctgaccctggacgctcggagcc

SEQ ID NO: 5891064 - DNA, 25 bp, Homo sapien
cgggctcagcactgtctgctcacgt

SEQ ID NO: 5891065 - DNA, 25 bp, Homo sapien
tggggctggtcctggttggtggtca

SEQ ID NO: 5891066 - DNA, 25 bp, Homo sapien
aggtttcccagaaatccagagaatg

SEQ ID NO: 5891067 - DNA, 25 bp, Homo sapien
ttcctgggagacagcccagctggca

SEQ ID NO: 5891068 - DNA, 25 bp, Homo sapien
agacagcccagctggcaggtttccc

SEQ ID NO: 5891069 - DNA, 25 bp, Homo sapien
tttgagagaggacaggtattgcccc

SEQ ID NO: 5891070 - DNA, 25 bp, Homo sapien
attgaacagccaggactgggactag

SEQ ID NO: 5891071 - DNA, 25 bp, Homo sapien
atatgaccagaagccagggctcctg

SEQ ID NO: 5891072 - DNA, 25 bp, Homo sapien
atgaccagaagccagggctcctggg

SEQ ID NO: 5891073 - DNA, 25 bp, Homo sapien
gatagcagatggcagactttggtga

SEQ ID NO: 5891074 - DNA, 25 bp, Homo sapien
taagtcctgggctttcctagctgat

SEQ ID NO: 5891075 - DNA, 25 bp, Homo sapien
gtccaccgaatagacctgtcactca

SEQ ID NO: 5891076 - DNA, 25 bp, Homo sapien
gagggaactgtggggctggtcctgg

SEQ ID NO: 5891077 - DNA, 25 bp, Homo sapien
gccaggactgggactagaggcagag

SEQ ID NO: 5891078 - DNA, 25 bp, Homo sapien
ctggaagctgggcctagaaactcac

SEQ ID NO: 5891079 - DNA, 25 bp, Homo sapien
cctagaaactcacagatggcctggc

SEQ ID NO: 5891080 - DNA, 25 bp, Homo sapien
cgttcctaagtcctgggctttccta

SEQ ID NO: 5891081 - DNA, 25 bp, Homo sapien
gtggtagggatagcagatggcagac

SEQ ID NO: 5891082 - DNA, 25 bp, Homo sapien
tgttgttgctgaggtctgtgctgag

SEQ ID NO: 5891083 - DNA, 25 bp, Homo sapien
gctgttgttgctgaggtctgtgctg

SEQ ID NO: 5891084 - DNA, 25 bp, Homo sapien
agccagggaagtacttcctgggaga

SEQ ID NO: 5891085 - DNA, 25 bp, Homo sapien
gtgctgttgttgctgaggtctgtgc

SEQ ID NO: 5891086 - DNA, 25 bp, Homo sapien
cccacagaggccattcattgaacag

SEQ ID NO: 5891087 - DNA, 25 bp, Homo sapien
gattgcccaaagtcactgccagtta

SEQ ID NO: 5891088 - DNA, 25 bp, Homo sapien
actgccagttacccacatatgacca

SEQ ID NO: 5891089 - DNA, 25 bp, Homo sapien
cctcgagggaactgtggggctggtc

SEQ ID NO: 5891090 - DNA, 25 bp, Homo sapien
tggaagataaacaaacacagttgcc

SEQ ID NO: 5891091 - DNA, 25 bp, Homo sapien
ttttgtccaccgaatagacctgtca

SEQ ID NO: 5891092 - DNA, 25 bp, Homo sapien
tctgactgtgttctggaagatggga

SEQ ID NO: 5891093 - DNA, 25 bp, Homo sapien
cctggtcactctcctgttcccagcc

SEQ ID NO: 5891094 - DNA, 25 bp, Homo sapien
ggacacaaacttgattgcccaaagt

SEQ ID NO: 5891095 - DNA, 25 bp, Homo sapien
ccctcaaacttgtcaggggagggca

SEQ ID NO: 5891096 - DNA, 25 bp, Homo sapien
cacccaagacaccctcaaacttgtc

SEQ ID NO: 5891097 - DNA, 25 bp, Homo sapien
gtgcctgtgggcgccctgggcattg

SEQ ID NO: 5891098 - DNA, 25 bp, Homo sapien
cagtggcatgggaggccctaaaaat

SEQ ID NO: 5891099 - DNA, 25 bp, Homo sapien
aggacaggtattgccccacagaggc

SEQ ID NO: 5891100 - DNA, 25 bp, Homo sapien
tgcttggtcccacagcagtgctgac

SEQ ID NO: 5891101 - DNA, 25 bp, Homo sapien
gtctcctcttccactggcctgggct

SEQ ID NO: 5891102 - DNA, 25 bp, Homo sapien
gacgctcggagcctggctgtctcct

SEQ ID NO: 5891103 - DNA, 25 bp, Homo sapien
gctggtcctggttggtggtcaggtg

SEQ ID NO: 5891104 - DNA, 25 bp, Homo sapien
ccagaagccaacctcatgtcagcac

SEQ ID NO: 5891105 - DNA, 25 bp, Homo sapien
accgaggtgcctgtgggcgccctgg

SEQ ID NO: 5891106 - DNA, 25 bp, Homo sapien
gccagacgaccgaggtgcctgtggg

SEQ ID NO: 5891107 - DNA, 25 bp, Homo sapien
aggtgcctgtgggcgccctgggcat

SEQ ID NO: 5891108 - DNA, 25 bp, Homo sapien
ctggcagtcaaggcgatacctcgag

SEQ ID NO: 5891109 - DNA, 25 bp, Homo sapien
tcctccctcccaagggatacagggg

SEQ ID NO: 5891110 - DNA, 25 bp, Homo sapien
tgtgctgaggccagggttcctccaa

SEQ ID NO: 5891111 - DNA, 25 bp, Homo sapien
actgtggggctggtcctggttggtg

SEQ ID NO: 5891112 - DNA, 25 bp, Homo sapien
tgtttcttaggtgagtgagtgtgct

SEQ ID NO: 5891113 - DNA, 25 bp, Homo sapien
gtgggcgccctgggcattgctgttt

SEQ ID NO: 5891114 - DNA, 25 bp, Homo sapien
tgaccctggacgctcggagcctggc

SEQ ID NO: 5891115 - DNA, 25 bp, Homo sapien
gcaggtttcccagaaatccagagaa

SEQ ID NO: 5891116 - DNA, 25 bp, Homo sapien
gcactgtctgctcacgtccccactg

SEQ ID NO: 5891117 - DNA, 25 bp, Homo sapien
ccactggcctgggctctcctccctc

SEQ ID NO: 5891118 - DNA, 25 bp, Homo sapien
ggtcctgccatagctgctggacgct

SEQ ID NO: 5891119 - DNA, 25 bp, Homo sapien
agttgtagaaagcaacaaggacaca

SEQ ID NO: 5891120 - DNA, 25 bp, Homo sapien
gctctcctccctcccaagggataca

SEQ ID NO: 5891121 - DNA, 25 bp, Homo sapien
cgtccccactgttgcaacacctagt

SEQ ID NO: 5891122 - DNA, 25 bp, Homo sapien
cctacctactcagtcccattttgtc

SEQ ID NO: 5891123 - DNA, 25 bp, Homo sapien
agggccccagcgggcacgataactg

SEQ ID NO: 5891124 - DNA, 25 bp, Homo sapien
ccgctcagttgtagaaagcaacaag

SEQ ID NO: 5891125 - DNA, 25 bp, Homo sapien
ctgttgcaacacctagtctgtttgc

SEQ ID NO: 5891126 - DNA, 25 bp, Homo sapien
agaaagcaacaaggacacaaacttg

SEQ ID NO: 5891127 - DNA, 25 bp, Homo sapien
gctgtttcttaggtgagtgagtgtg

SEQ ID NO: 5891128 - DNA, 25 bp, Homo sapien
tctgtgctgaggccagggttcctcc

SEQ ID NO: 5891129 - DNA, 25 bp, Homo sapien
acaaacacagttgccgggtggcagg

SEQ ID NO: 5891130 - DNA, 25 bp, Homo sapien
tcttccactggcctgggctctcctc

SEQ ID NO: 5891131 - DNA, 25 bp, Homo sapien
agatggcagactttggtgagtgagt

SEQ ID NO: 5891132 - DNA, 25 bp, Homo sapien
tattgccccacagaggccattcatt

SEQ ID NO: 5891133 - DNA, 25 bp, Homo sapien
gccatagctgctggacgctcccagc

SEQ ID NO: 5891134 - DNA, 25 bp, Homo sapien
gtcccattttgtccaccgaatagac

SEQ ID NO: 5891135 - DNA, 25 bp, Homo sapien
tttcctagctgatgttgtcctacct

SEQ ID NO: 5891136 - DNA, 25 bp, Homo sapien
acgctcccagctggaagctgggcct

SEQ ID NO: 5891137 - DNA, 25 bp, Homo sapien
gtcactctcctgttcccagccagac

SEQ ID NO: 5891138 - DNA, 25 bp, Homo sapien
tcctgagggaataccaccagaagcc

SEQ ID NO: 5891139 - DNA, 25 bp, Homo sapien
gcagggccccagcgggcacgataac

SEQ ID NO: 5891140 - DNA, 25 bp, Homo sapien
gtgtgctgttgttgctgaggtctgt

SEQ ID NO: 5891141 - DNA, 25 bp, Homo sapien
tctgctcacgtccccactgttgcaa

SEQ ID NO: 5891142 - DNA, 25 bp, Homo sapien
ctgccatagctgctggacgctccca

SEQ ID NO: 5891143 - DNA, 25 bp, Homo sapien
aagggccctggtcactctcctgttc

SEQ ID NO: 5891144 - DNA, 25 bp, Homo sapien
acagttgccgggtggcagggcccca

SEQ ID NO: 5891145 - DNA, 25 bp, Homo sapien
gaactgtggggctggtcctggttgg

SEQ ID NO: 5891146 - DNA, 25 bp, Homo sapien
tccaagccagggaagtacttcctgg

SEQ ID NO: 5891147 - DNA, 25 bp, Homo sapien
gtggcatgggaggccctaaaaatta

SEQ ID NO: 5891148 - DNA, 25 bp, Homo sapien
cctgtcactcaaggctctcagcggt

SEQ ID NO: 5891149 - DNA, 25 bp, Homo sapien
ggtcaggtggtagggatagcagatg

SEQ ID NO: 5891150 - DNA, 25 bp, Homo sapien
gagcctggctgtctcctcttccact

SEQ ID NO: 5891151 - DNA, 25 bp, Homo sapien
agcgggcacgataactggcagtcaa

SEQ ID NO: 5891152 - DNA, 25 bp, Homo sapien
gggcgccctgggcattgctgtttct

SEQ ID NO: 5891153 - DNA, 25 bp, Homo sapien
gctttcctagctgatgttgtcctac

SEQ ID NO: 5891154 - DNA, 25 bp, Homo sapien
cagcactgtctgctcacgtccccac

SEQ ID NO: 5891155 - DNA, 25 bp, Homo sapien
agcacccaagacaccctcaaacttg

SEQ ID NO: 5891156 - DNA, 25 bp, Homo sapien
ctgtctcctcttccactggcctggg

SEQ ID NO: 5891157 - DNA, 25 bp, Homo sapien
ccagttacccacatatgaccagaag

SEQ ID NO: 5891158 - DNA, 25 bp, Homo sapien
cctccaagccagggaagtacttcct

SEQ ID NO: 5891159 - DNA, 25 bp, Homo sapien
gcctgtgggcgccctgggcattgct

SEQ ID NO: 5891160 - DNA, 25 bp, Homo sapien
gatgggaccgggctcagcactgtct

SEQ ID NO: 5891161 - DNA, 25 bp, Homo sapien
gtggtcaggtggtagggatagcaga

SEQ ID NO: 5891162 - DNA, 25 bp, Homo sapien
tcctgccatagctgctggacgctcc

SEQ ID NO: 5891163 - DNA, 25 bp, Homo sapien
acaggggctcactgtgcttggtccc

SEQ ID NO: 5891164 - DNA, 25 bp, Homo sapien
atgtaaacttggcctgaccctggac

SEQ ID NO: 5891165 - DNA, 25 bp, Homo sapien
acaaacttgattgcccaaagtcact

SEQ ID NO: 5891166 - DNA, 25 bp, Homo sapien
cccactgttgcaacacctagtctgt

SEQ ID NO: 5891167 - DNA, 25 bp, Homo sapien
caagggatacaggggctcactgtgc

SEQ ID NO: 5891168 - DNA, 25 bp, Homo sapien
gatacctcgagggaactgtggggct

SEQ ID NO: 5891169 - DNA, 25 bp, Homo sapien
ccagaagccagggctcctgggatgt

SEQ ID NO: 5891170 - DNA, 25 bp, Homo sapien
cattgctgtttcttaggtgagtgag

SEQ ID NO: 5891171 - DNA, 25 bp, Homo sapien
cacagatggcctggcagtggcatgg

SEQ ID NO: 5891172 - DNA, 25 bp, Homo sapien
gcagatggcagactttggtgagtga

SEQ ID NO: 5891173 - DNA, 25 bp, Homo sapien
agatgtaaacttggcctgaccctgg

SEQ ID NO: 5891174 - DNA, 25 bp, Homo sapien
tgtcctccgctcagttgtagaaagc

SEQ ID NO: 5891175 - DNA, 25 bp, Homo sapien
ccaccgaatagacctgtcactcaag

SEQ ID NO: 5891176 - DNA, 25 bp, Homo sapien
ggaccgggctcagcactgtctgctc

SEQ ID NO: 5891177 - DNA, 25 bp, Homo sapien
ggtgaattgaagatgtaaacttggc

SEQ ID NO: 5891178 - DNA, 25 bp, Homo sapien
actggcctgggctctcctccctccc

SEQ ID NO: 5891179 - DNA, 25 bp, Homo sapien
caagccagggaagtacttcctggga

SEQ ID NO: 5891180 - DNA, 25 bp, Homo sapien
gcctggcagtggcatgggaggccct

SEQ ID NO: 5891181 - DNA, 25 bp, Homo sapien
cagggctcctgggatgtggaagata

SEQ ID NO: 5891182 - DNA, 25 bp, Homo sapien
ggccccagcgggcacgataactggc

SEQ ID NO: 5891183 - DNA, 25 bp, Homo sapien
tgagtctgactgtgttctggaagat

SEQ ID NO: 5891184 - DNA, 25 bp, Homo sapien
gtttcccagaaatccagagaatggt

SEQ ID NO: 5891185 - DNA, 25 bp, Homo sapien
tgttcccagccagacgaccgaggtg

SEQ ID NO: 5891186 - DNA, 25 bp, Homo sapien
ctcacgtccccactgttgcaacacc

SEQ ID NO: 5891187 - DNA, 25 bp, Homo sapien
ttgccccacagaggccattcattga

SEQ ID NO: 5891188 - DNA, 25 bp, Homo sapien
gctggcaggtttcccagaaatccag

SEQ ID NO: 5891189 - DNA, 25 bp, Homo sapien
gctgctggacgctcccagctggaag

SEQ ID NO: 5891190 - DNA, 25 bp, Homo sapien
ctttggtgagtgagtgagtctgact

SEQ ID NO: 5891191 - DNA, 25 bp, Homo sapien
gtgagtgtgctgttgttgctgaggt

SEQ ID NO: 5891192 - DNA, 25 bp, Homo sapien
tgggactagaggcagagcctgctgt

SEQ ID NO: 5891193 - DNA, 25 bp, Homo sapien
ctgacgttcctaagtcctgggcttt

SEQ ID NO: 5891194 - DNA, 25 bp, Homo sapien
gaaactcacagatggcctggcagtg

SEQ ID NO: 5891195 - DNA, 25 bp, Homo sapien
gagtgagtgtgctgttgttgctgag

SEQ ID NO: 5891196 - DNA, 25 bp, Homo sapien
cagctggcaggtttcccagaaatcc

SEQ ID NO: 5891197 - DNA, 25 bp, Homo sapien
tgctgaggccagggttcctccaagc

SEQ ID NO: 5891198 - DNA, 25 bp, Homo sapien
ttcccagccagacgaccgaggtgcc

SEQ ID NO: 5891199 - DNA, 25 bp, Homo sapien
ttgtcctacctactcagtcccattt

SEQ ID NO: 5891200 - DNA, 25 bp, Homo sapien
cgaccgaggtgcctgtgggcgccct

SEQ ID NO: 5891201 - DNA, 25 bp, Homo sapien
aagccaacctcatgtcagcacccaa

SEQ ID NO: 5891202 - DNA, 25 bp, Homo sapien
cggagcctggctgtctcctcttcca

SEQ ID NO: 5891203 - DNA, 25 bp, Homo sapien
ctgaggccagggttcctccaagcca

SEQ ID NO: 5891204 - DNA, 25 bp, Homo sapien
aagatgggaccgggctcagcactgt

SEQ ID NO: 5891205 - DNA, 25 bp, Homo sapien
ctcagcggtcctgccatagctgctg

SEQ ID NO: 5891206 - DNA, 25 bp, Homo sapien
gggctctcctccctcccaagggata

SEQ ID NO: 5891207 - DNA, 25 bp, Homo sapien
ggaaattttgagagaggacaggtat

SEQ ID NO: 5891208 - DNA, 25 bp, Homo sapien
catagctgctggacgctcccagctg

SEQ ID NO: 5891209 - DNA, 25 bp, Homo sapien
ttgttgctgaggtctgtgctgaggc

SEQ ID NO: 5891210 - DNA, 25 bp, Homo sapien
ggtctgtgctgaggccagggttcct

SEQ ID NO: 5891211 - DNA, 25 bp, Homo sapien
cacgataactggcagtcaaggcgat

SEQ ID NO: 5891212 - DNA, 25 bp, Homo sapien
cagactttggtgagtgagtgagtct

SEQ ID NO: 5891213 - DNA, 25 bp, Homo sapien
gtcccacagcagtgctgacgttcct

SEQ ID NO: 5891214 - DNA, 25 bp, Homo sapien
ggcatgggaggccctaaaaattagt

SEQ ID NO: 5891215 - DNA, 25 bp, Homo sapien
ggttcctccaagccagggaagtact

SEQ ID NO: 5891216 - DNA, 25 bp, Homo sapien
ctggaagatgggaccgggctcagca

SEQ ID NO: 5891217 - DNA, 25 bp, Homo sapien
ggaagtacttcctgggagacagccc

SEQ ID NO: 5891218 - DNA, 25 bp, Homo sapien
ataaacaaacacagttgccgggtgg

SEQ ID NO: 5891219 - DNA, 25 bp, Homo sapien
cccacagcagtgctgacgttcctaa

SEQ ID NO: 5891220 - DNA, 25 bp, Homo sapien
cagagaatggtgaattgaagatgta

SEQ ID NO: 5891221 - DNA, 25 bp, Homo sapien
cagtcccattttgtccaccgaatag

SEQ ID NO: 5891222 - DNA, 25 bp, Homo sapien
ctcatgtcagcacccaagacaccct

SEQ ID NO: 5891223 - DNA, 25 bp, Homo sapien
tcctccgctcagttgtagaaagcaa

SEQ ID NO: 5891224 - DNA, 25 bp, Homo sapien
tgactgtgttctggaagatgggacc

SEQ ID NO: 5891225 - DNA, 25 bp, Homo sapien
agaagccaacctcatgtcagcaccc

SEQ ID NO: 5891226 - DNA, 25 bp, Homo sapien
tggcctgggctctcctccctcccaa

SEQ ID NO: 5891227 - DNA, 25 bp, Homo sapien
atggcagactttggtgagtgagtga

SEQ ID NO: 5891228 - DNA, 25 bp, Homo sapien
cccagccagacgaccgaggtgcctg

SEQ ID NO: 5891229 - DNA, 25 bp, Homo sapien
ctgaggtctgtgctgaggccagggt

SEQ ID NO: 5891230 - DNA, 25 bp, Homo sapien
cctgggagacagcccagctggcagg

SEQ ID NO: 5891231 - DNA, 25 bp, Homo sapien
tgtggggctggtcctggttggtggt

SEQ ID NO: 5891232 - DNA, 25 bp, Homo sapien
aagccagggctcctgggatgtggaa

SEQ ID NO: 5891233 - DNA, 25 bp, Homo sapien
acacaaacttgattgcccaaagtca

SEQ ID NO: 5891234 - DNA, 25 bp, Homo sapien
acttgattgcccaaagtcactgcca

SEQ ID NO: 5891235 - DNA, 25 bp, Homo sapien
aggtggtagggatagcagatggcag

SEQ ID NO: 5891236 - DNA, 25 bp, Homo sapien
ctggacgctcccagctggaagctgg

SEQ ID NO: 5891237 - DNA, 25 bp, Homo sapien
tggttggtggtcaggtggtagggat

SEQ ID NO: 5891238 - DNA, 25 bp, Homo sapien
ctgggatgtggaagataaacaaaca

SEQ ID NO: 5891239 - DNA, 25 bp, Homo sapien
gaggccattcattgaacagccagga

SEQ ID NO: 5891240 - DNA, 25 bp, Homo sapien
cctgaccctggacgctcggagcctg

SEQ ID NO: 5891241 - DNA, 25 bp, Homo sapien
cattttgtccaccgaatagacctgt

SEQ ID NO: 5891242 - DNA, 25 bp, Homo sapien
atggtgaattgaagatgtaaacttg

SEQ ID NO: 5891243 - DNA, 25 bp, Homo sapien
cagtcaaggcgatacctcgagggaa

SEQ ID NO: 5891244 - DNA, 25 bp, Homo sapien
gttgctgaggtctgtgctgaggcca

SEQ ID NO: 5891245 - DNA, 25 bp, Homo sapien
tgagagaggacaggtattgccccac

SEQ ID NO: 5891246 - DNA, 25 bp, Homo sapien
agcaacaaggacacaaacttgattg

SEQ ID NO: 5891247 - DNA, 25 bp, Homo sapien
gacgaccgaggtgcctgtgggcgcc

SEQ ID NO: 5891248 - DNA, 25 bp, Homo sapien
ggactagaggcagagcctgctgtcc

SEQ ID NO: 5891249 - DNA, 25 bp, Homo sapien
ggactgggactagaggcagagcctg

SEQ ID NO: 5891250 - DNA, 25 bp, Homo sapien
gctgtcctgagggaataccaccaga

SEQ ID NO: 5891251 - DNA, 25 bp, Homo sapien
accaccagaagccaacctcatgtca

SEQ ID NO: 5891252 - DNA, 25 bp, Homo sapien
gccccacagaggccattcattgaac

SEQ ID NO: 5891253 - DNA, 25 bp, Homo sapien
tgctgaggtctgtgctgaggccagg

SEQ ID NO: 5891254 - DNA, 25 bp, Homo sapien
tcactgtgcttggtcccacagcagt

SEQ ID NO: 5891255 - DNA, 25 bp, Homo sapien
tggcctggcagtggcatgggaggcc

SEQ ID NO: 5891256 - DNA, 25 bp, Homo sapien
aactggcagtcaaggcgatacctcg

SEQ ID NO: 5891257 - DNA, 25 bp, Homo sapien
gtaaacttggcctgaccctggacgc

SEQ ID NO: 5891258 - DNA, 25 bp, Homo sapien
ctcctgttcccagccagacgaccga

SEQ ID NO: 5891259 - DNA, 25 bp, Homo sapien
agtcctgggctttcctagctgatgt

SEQ ID NO: 5891260 - DNA, 25 bp, Homo sapien
tggtggtcaggtggtagggatagca

SEQ ID NO: 5891261 - DNA, 25 bp, Homo sapien
cccaagggatacaggggctcactgt

SEQ ID NO: 5891262 - DNA, 25 bp, Homo sapien
tcaggtggtagggatagcagatggc

SEQ ID NO: 5891263 - DNA, 25 bp, Homo sapien
ttaggtgagtgagtgtgctgttgtt

SEQ ID NO: 5891264 - DNA, 25 bp, Homo sapien
ttgcccaaagtcactgccagttacc

SEQ ID NO: 5891265 - DNA, 25 bp, Homo sapien
cccagctggcaggtttcccagaaat

SEQ ID NO: 5891266 - DNA, 25 bp, Homo sapien
aagctgtcctgagggaataccacca

SEQ ID NO: 5891267 - DNA, 25 bp, Homo sapien
ggtgagtgagtgagtctgactgtgt

SEQ ID NO: 5891268 - DNA, 25 bp, Homo sapien
tgaattgaagatgtaaacttggcct

SEQ ID NO: 5891269 - DNA, 25 bp, Homo sapien
tgtgcttggtcccacagcagtgctg

SEQ ID NO: 5891270 - DNA, 25 bp, Homo sapien
cacagcagtgctgacgttcctaagt

SEQ ID NO: 5891271 - DNA, 25 bp, Homo sapien
aactcacagatggcctggcagtggc

SEQ ID NO: 5891272 - DNA, 25 bp, Homo sapien
tcactgccagttacccacatatgac

SEQ ID NO: 5891273 - DNA, 25 bp, Homo sapien
gtggaaattttgagagaggacaggt

SEQ ID NO: 5891274 - DNA, 25 bp, Homo sapien
gaaagctgtcctgagggaataccac

SEQ ID NO: 5891275 - DNA, 25 bp, Homo sapien
gcaagggccctggtcactctcctgt

SEQ ID NO: 5891276 - DNA, 25 bp, Homo sapien
agtgctgacgttcctaagtcctggg

SEQ ID NO: 5891277 - DNA, 25 bp, Homo sapien
catgggaggccctaaaaattagtgg

SEQ ID NO: 5891278 - DNA, 25 bp, Homo sapien
caggtattgccccacagaggccatt

SEQ ID NO: 5891279 - DNA, 25 bp, Homo sapien
ggctctcagcggtcctgccatagct

SEQ ID NO: 5891280 - DNA, 25 bp, Homo sapien
tctcctccctcccaagggatacagg

SEQ ID NO: 5891281 - DNA, 25 bp, Homo sapien
cctcttccactggcctgggctctcc

SEQ ID NO: 5891282 - DNA, 25 bp, Homo sapien
ggcctagaaactcacagatggcctg

SEQ ID NO: 5891283 - DNA, 25 bp, Homo sapien
attagtggaaattttgagagaggac

SEQ ID NO: 5891284 - DNA, 25 bp, Homo sapien
tgtctgctcacgtccccactgttgc

SEQ ID NO: 5891285 - DNA, 25 bp, Homo sapien
actagaggcagagcctgctgtcctc

SEQ ID NO: 5891286 - DNA, 25 bp, Homo sapien
gttggtggtcaggtggtagggatag

SEQ ID NO: 5891287 - DNA, 25 bp, Homo sapien
ctccctcccaagggatacaggggct

SEQ ID NO: 5891288 - DNA, 25 bp, Homo sapien
cacagaggccattcattgaacagcc

SEQ ID NO: 5891289 - DNA, 25 bp, Homo sapien
ttgccgggtggcagggccccagcgg

SEQ ID NO: 5891290 - DNA, 25 bp, Homo sapien
agggatacaggggctcactgtgctt

SEQ ID NO: 5891291 - DNA, 25 bp, Homo sapien
ccctcccaagggatacaggggctca

SEQ ID NO: 5891292 - DNA, 25 bp, Homo sapien
gaataccaccagaagccaacctcat

SEQ ID NO: 5891293 - DNA, 25 bp, Homo sapien
tgtcctgagggaataccaccagaag

SEQ ID NO: 5891294 - DNA, 25 bp, Homo sapien
gtgagtgagtgtgctgttgttgctg

SEQ ID NO: 5891295 - DNA, 25 bp, Homo sapien
tccccactgttgcaacacctagtct

SEQ ID NO: 5891296 - DNA, 25 bp, Homo sapien
agggttcctccaagccagggaagta

SEQ ID NO: 5891297 - DNA, 25 bp, Homo sapien
cctggttggtggtcaggtggtaggg

SEQ ID NO: 5891298 - DNA, 25 bp, Homo sapien
actgggactagaggcagagcctgct

SEQ ID NO: 5891299 - DNA, 25 bp, Homo sapien
aaacacagttgccgggtggcagggc

SEQ ID NO: 5891300 - DNA, 25 bp, Homo sapien
tgggagacagcccagctggcaggtt

SEQ ID NO: 5891301 - DNA, 25 bp, Homo sapien
ccagggaagtacttcctgggagaca

SEQ ID NO: 5891302 - DNA, 25 bp, Homo sapien
actgtgttctggaagatgggaccgg

SEQ ID NO: 5891303 - DNA, 25 bp, Homo sapien
catgtcagcacccaagacaccctca

SEQ ID NO: 5891304 - DNA, 25 bp, Homo sapien
gctcagttgtagaaagcaacaagga

SEQ ID NO: 5891305 - DNA, 25 bp, Homo sapien
ctctcagcggtcctgccatagctgc

SEQ ID NO: 5891306 - DNA, 25 bp, Homo sapien
accctggacgctcggagcctggctg

SEQ ID NO: 5891307 - DNA, 25 bp, Homo sapien
gaagataaacaaacacagttgccgg

SEQ ID NO: 5891308 - DNA, 25 bp, Homo sapien
tgggcctagaaactcacagatggcc

SEQ ID NO: 5891309 - DNA, 25 bp, Homo sapien
ttgtccaccgaatagacctgtcact

SEQ ID NO: 5891310 - DNA, 25 bp, Homo sapien
tggtcccacagcagtgctgacgttc

SEQ ID NO: 5891311 - DNA, 25 bp, Homo sapien
gggaataccaccagaagccaacctc

SEQ ID NO: 5891312 - DNA, 25 bp, Homo sapien
gcctgggctctcctccctcccaagg

SEQ ID NO: 5891313 - DNA, 25 bp, Homo sapien
acagcccagctggcaggtttcccag

SEQ ID NO: 5891314 - DNA, 25 bp, Homo sapien
aaagcaacaaggacacaaacttgat

SEQ ID NO: 5891315 - DNA, 25 bp, Homo sapien
ggctcagcactgtctgctcacgtcc

SEQ ID NO: 5891316 - DNA, 25 bp, Homo sapien
agtcactgccagttacccacatatg

SEQ ID NO: 5891317 - DNA, 25 bp, Homo sapien
gtacttcctgggagacagcccagct

SEQ ID NO: 5891318 - DNA, 25 bp, Homo sapien
aacagccaggactgggactagaggc

SEQ ID NO: 5891319 - DNA, 25 bp, Homo sapien
aggggctcactgtgcttggtcccac

SEQ ID NO: 5891320 - DNA, 25 bp, Homo sapien
ggtagggatagcagatggcagactt

SEQ ID NO: 5891321 - DNA, 25 bp, Homo sapien
ggccagggttcctccaagccaggga

SEQ ID NO: 5891322 - DNA, 25 bp, Homo sapien
cagaggccattcattgaacagccag

SEQ ID NO: 5891323 - DNA, 25 bp, Homo sapien
tgctcacgtccccactgttgcaaca

SEQ ID NO: 5891324 - DNA, 25 bp, Homo sapien
cagcggtcctgccatagctgctgga

SEQ ID NO: 5891325 - DNA, 25 bp, Homo sapien
tgaacagccaggactgggactagag

SEQ ID NO: 5891326 - DNA, 25 bp, Homo sapien
tgtcagcacccaagacaccctcaaa

SEQ ID NO: 5891327 - DNA, 25 bp, Homo sapien
ctgatgttgtcctacctactcagtc

SEQ ID NO: 5891328 - DNA, 25 bp, Homo sapien
aattgaagatgtaaacttggcctga

SEQ ID NO: 5891329 - DNA, 25 bp, Homo sapien
accgaatagacctgtcactcaaggc

SEQ ID NO: 5891330 - DNA, 25 bp, Homo sapien
cttggtcccacagcagtgctgacgt

SEQ ID NO: 5891331 - DNA, 25 bp, Homo sapien
tgagtgagtgagtctgactgtgttc

SEQ ID NO: 5891332 - DNA, 25 bp, Homo sapien
agacaccctcaaacttgtcagggga

SEQ ID NO: 5891333 - DNA, 25 bp, Homo sapien
gccaacctcatgtcagcacccaaga

SEQ ID NO: 5891334 - DNA, 25 bp, Homo sapien
cgaatagacctgtcactcaaggctc

SEQ ID NO: 5891335 - DNA, 25 bp, Homo sapien
ggcagagcctgctgtcctccgctca

SEQ ID NO: 5891336 - DNA, 25 bp, Homo sapien
tgtcactcaaggctctcagcggtcc

SEQ ID NO: 5891337 - DNA, 25 bp, Homo sapien
tccagagaatggtgaattgaagatg

SEQ ID NO: 5891338 - DNA, 25 bp, Homo sapien
cagacgaccgaggtgcctgtgggcg

SEQ ID NO: 5891339 - DNA, 25 bp, Homo sapien
acacagttgccgggtggcagggccc

SEQ ID NO: 5891340 - DNA, 25 bp, Homo sapien
ggcattgctgtttcttaggtgagtg

SEQ ID NO: 5891341 - DNA, 25 bp, Homo sapien
aagctgggcctagaaactcacagat

SEQ ID NO: 5891342 - DNA, 25 bp, Homo sapien
ccagggttcctccaagccagggaag

SEQ ID NO: 5891343 - DNA, 25 bp, Homo sapien
ggctgtctcctcttccactggcctg

SEQ ID NO: 5891344 - DNA, 25 bp, Homo sapien
caaggcgatacctcgagggaactgt

SEQ ID NO: 5891345 - DNA, 25 bp, Homo sapien
gaatggtgaattgaagatgtaaact

SEQ ID NO: 5891346 - DNA, 25 bp, Homo sapien
cagccagacgaccgaggtgcctgtg

SEQ ID NO: 5891347 - DNA, 25 bp, Homo sapien
ttcccagaaatccagagaatggtga

SEQ ID NO: 5891348 - DNA, 25 bp, Homo sapien
tcagcacccaagacaccctcaaact

SEQ ID NO: 5891349 - DNA, 25 bp, Homo sapien
ccattcattgaacagccaggactgg

SEQ ID NO: 5891350 - DNA, 25 bp, Homo sapien
gaagatgtaaacttggcctgaccct

SEQ ID NO: 5891351 - DNA, 25 bp, Homo sapien
cccagaaatccagagaatggtgaat

SEQ ID NO: 5891352 - DNA, 25 bp, Homo sapien
ttgtagaaagcaacaaggacacaaa

SEQ ID NO: 5891353 - DNA, 25 bp, Homo sapien
gggctttcctagctgatgttgtcct

SEQ ID NO: 5891354 - DNA, 25 bp, Homo sapien
gaaatccagagaatggtgaattgaa

SEQ ID NO: 5891355 - DNA, 25 bp, Homo sapien
ggccattcattgaacagccaggact

SEQ ID NO: 5891356 - DNA, 25 bp, Homo sapien
gggatgtggaagataaacaaacaca

SEQ ID NO: 5891357 - DNA, 25 bp, Homo sapien
tgggaggccctaaaaattagtggaa

SEQ ID NO: 5891358 - DNA, 25 bp, Homo sapien
cactgttgcaacacctagtctgttt

SEQ ID NO: 5891359 - DNA, 25 bp, Homo sapien
ctggcagtggcatgggaggccctaa

SEQ ID NO: 5891360 - DNA, 25 bp, Homo sapien
cccattttgtccaccgaatagacct

SEQ ID NO: 5891361 - DNA, 25 bp, Homo sapien
ccagctggaagctgggcctagaaac

SEQ ID NO: 5891362 - DNA, 25 bp, Homo sapien
tgctgacgttcctaagtcctgggct

SEQ ID NO: 5891363 - DNA, 25 bp, Homo sapien
tcagttgtagaaagcaacaaggaca

SEQ ID NO: 5891364 - DNA, 25 bp, Homo sapien
tggcagggccccagcgggcacgata

SEQ ID NO: 5891365 - DNA, 25 bp, Homo sapien
ggaagctgggcctagaaactcacag

SEQ ID NO: 5891366 - DNA, 25 bp, Homo sapien
ctgggctctcctccctcccaaggga

SEQ ID NO: 5891367 - DNA, 25 bp, Homo sapien
ttcctccaagccagggaagtacttc

SEQ ID NO: 5891368 - DNA, 25 bp, Homo sapien
ttcctaagtcctgggctttcctagc

SEQ ID NO: 5891369 - DNA, 25 bp, Homo sapien
acttggcctgaccctggacgctcgg

SEQ ID NO: 5891370 - DNA, 25 bp, Homo sapien
acttcctgggagacagcccagctgg

SEQ ID NO: 5891371 - DNA, 25 bp, Homo sapien
ttacccacatatgaccagaagccag

SEQ ID NO: 5891372 - DNA, 25 bp, Homo sapien
tgagtgagtctgactgtgttctgga

SEQ ID NO: 5891373 - DNA, 25 bp, Homo sapien
tttcttaggtgagtgagtgtgctgt

SEQ ID NO: 5891374 - DNA, 25 bp, Homo sapien
gggctcctgggatgtggaagataaa

SEQ ID NO: 5891375 - DNA, 25 bp, Homo sapien
cagccaggactgggactagaggcag

SEQ ID NO: 5891376 - DNA, 25 bp, Homo sapien
agtgagtctgactgtgttctggaag

SEQ ID NO: 5891377 - DNA, 25 bp, Homo sapien
gtagaaagcaacaaggacacaaact

SEQ ID NO: 5891378 - DNA, 25 bp, Homo sapien
aaacaaacacagttgccgggtggca

SEQ ID NO: 5891379 - DNA, 25 bp, Homo sapien
ttggtgagtgagtgagtctgactgt

SEQ ID NO: 5891380 - DNA, 25 bp, Homo sapien
ggaagatgggaccgggctcagcact

SEQ ID NO: 5891381 - DNA, 25 bp, Homo sapien
gggagggcaagggccctggtcactc

SEQ ID NO: 5891382 - DNA, 25 bp, Homo sapien
gggccctggtcactctcctgttccc

SEQ ID NO: 5891383 - DNA, 25 bp, Homo sapien
ttccactggcctgggctctcctccc

SEQ ID NO: 5891384 - DNA, 25 bp, Homo sapien
gagggaataccaccagaagccaacc

SEQ ID NO: 5891385 - DNA, 25 bp, Homo sapien
ctctcctgttcccagccagacgacc

SEQ ID NO: 5891386 - DNA, 25 bp, Homo sapien
gctcctgggatgtggaagataaaca

SEQ ID NO: 5891387 - DNA, 25 bp, Homo sapien
cctgggcattgctgtttcttaggtg

SEQ ID NO: 5891388 - DNA, 25 bp, Homo sapien
gacctgtcactcaaggctctcagcg

SEQ ID NO: 5891389 - DNA, 25 bp, Homo sapien
ccccagcgggcacgataactggcag

SEQ ID NO: 5891390 - DNA, 25 bp, Homo sapien
aggtgagtgagtgtgctgttgttgc

SEQ ID NO: 5891391 - DNA, 25 bp, Homo sapien
gggaactgtggggctggtcctggtt

SEQ ID NO: 5891392 - DNA, 25 bp, Homo sapien
tggtcactctcctgttcccagccag

SEQ ID NO: 5891393 - DNA, 25 bp, Homo sapien
gcccaaagtcactgccagttaccca

SEQ ID NO: 5891394 - DNA, 25 bp, Homo sapien
tcactcaaggctctcagcggtcctg

SEQ ID NO: 5891395 - DNA, 25 bp, Homo sapien
ggatacaggggctcactgtgcttgg

SEQ ID NO: 5891396 - DNA, 25 bp, Homo sapien
cactctcctgttcccagccagacga

SEQ ID NO: 5891397 - DNA, 25 bp, Homo sapien
ataactggcagtcaaggcgatacct

SEQ ID NO: 5891398 - DNA, 25 bp, Homo sapien
aggcgatacctcgagggaactgtgg

SEQ ID NO: 5891399 - DNA, 25 bp, Homo sapien
tcgagggaactgtggggctggtcct

SEQ ID NO: 5891400 - DNA, 25 bp, Homo sapien
tgctggacgctcccagctggaagct

SEQ ID NO: 5891401 - DNA, 25 bp, Homo sapien
gggctggtcctggttggtggtcagg

SEQ ID NO: 5891402 - DNA, 25 bp, Homo sapien
gtcctacctactcagtcccattttg

SEQ ID NO: 5891403 - DNA, 25 bp, Homo sapien
actcaaggctctcagcggtcctgcc

SEQ ID NO: 5891404 - DNA, 25 bp, Homo sapien
agttacccacatatgaccagaagcc

SEQ ID NO: 5891405 - DNA, 25 bp, Homo sapien
acccacatatgaccagaagccaggg

SEQ ID NO: 5891406 - DNA, 25 bp, Homo sapien
gagggcaagggccctggtcactctc

SEQ ID NO: 5891407 - DNA, 25 bp, Homo sapien
gggatagcagatggcagactttggt

SEQ ID NO: 5891408 - DNA, 25 bp, Homo sapien
gatgttgtcctacctactcagtccc

SEQ ID NO: 5891409 - DNA, 25 bp, Homo sapien
agctgatgttgtcctacctactcag

SEQ ID NO: 5891410 - DNA, 25 bp, Homo sapien
tagtggaaattttgagagaggacag

SEQ ID NO: 5891411 - DNA, 25 bp, Homo sapien
cgaggtgcctgtgggcgccctgggc

SEQ ID NO: 5891412 - DNA, 25 bp, Homo sapien
tggtcctggttggtggtcaggtggt

SEQ ID NO: 5891413 - DNA, 25 bp, Homo sapien
gcgccctgggcattgctgtttctta

SEQ ID NO: 5891414 - DNA, 25 bp, Homo sapien
aaattttgagagaggacaggtattg

SEQ ID NO: 5891415 - DNA, 25 bp, Homo sapien
ctcaaacttgtcaggggagggcaag

SEQ ID NO: 5891416 - DNA, 25 bp, Homo sapien
cagaaatccagagaatggtgaattg

SEQ ID NO: 5891417 - DNA, 25 bp, Homo sapien
ggacgctcccagctggaagctgggc

SEQ ID NO: 5891418 - DNA, 25 bp, Homo sapien
gcctggctgtctcctcttccactgg

SEQ ID NO: 5891419 - DNA, 25 bp, Homo sapien
actgtgcttggtcccacagcagtgc

SEQ ID NO: 5891420 - DNA, 25 bp, Homo sapien
tgggcattgctgtttcttaggtgag

SEQ ID NO: 5891421 - DNA, 25 bp, Homo sapien
gaccagaagccagggctcctgggat

SEQ ID NO: 5891422 - DNA, 25 bp, Homo sapien
ttgattgcccaaagtcactgccagt

SEQ ID NO: 5891423 - DNA, 25 bp, Homo sapien
ggcagtcaaggcgatacctcgaggg

SEQ ID NO: 5891424 - DNA, 25 bp, Homo sapien
ttggcctgaccctggacgctcggag

SEQ ID NO: 5891425 - DNA, 25 bp, Homo sapien
gcagtgctgacgttcctaagtcctg

SEQ ID NO: 5891426 - DNA, 25 bp, Homo sapien
cctggacgctcggagcctggctgtc

SEQ ID NO: 5891427 - DNA, 25 bp, Homo sapien
agaggacaggtattgccccacagag

SEQ ID NO: 5891428 - DNA, 25 bp, Homo sapien
aatagacctgtcactcaaggctctc

SEQ ID NO: 5891429 - DNA, 25 bp, Homo sapien
gccagggctcctgggatgtggaaga

SEQ ID NO: 5891430 - DNA, 25 bp, Homo sapien
cgggcacgataactggcagtcaagg

SEQ ID NO: 5891431 - DNA, 25 bp, Homo sapien
gcctgctgtcctccgctcagttgta

SEQ ID NO: 5891432 - DNA, 25 bp, Homo sapien
tcctgggctttcctagctgatgttg

SEQ ID NO: 5891433 - DNA, 25 bp, Homo sapien
aaagtcactgccagttacccacata

SEQ ID NO: 5891434 - DNA, 25 bp, Homo sapien
tagctgctggacgctcccagctgga

SEQ ID NO: 5891435 - DNA, 25 bp, Homo sapien
ccacatatgaccagaagccagggct

SEQ ID NO: 5891436 - DNA, 25 bp, Homo sapien
ccaaagtcactgccagttacccaca

SEQ ID NO: 5891437 - DNA, 25 bp, Homo sapien
caagacaccctcaaacttgtcaggg

SEQ ID NO: 5891438 - DNA, 25 bp, Homo sapien
tgccagttacccacatatgaccaga

SEQ ID NO: 5891439 - DNA, 25 bp, Homo sapien
tacctactcagtcccattttgtcca

SEQ ID NO: 5891440 - DNA, 25 bp, Homo sapien
caacctcatgtcagcacccaagaca

SEQ ID NO: 5891441 - DNA, 25 bp, Homo sapien
tgttctggaagatgggaccgggctc

SEQ ID NO: 5891442 - DNA, 25 bp, Homo sapien
cagagcctgctgtcctccgctcagt

SEQ ID NO: 5891443 - DNA, 25 bp, Homo sapien
ctcctcttccactggcctgggctct

SEQ ID NO: 5891444 - DNA, 25 bp, Homo sapien
tcctagctgatgttgtcctacctac

SEQ ID NO: 5891445 - DNA, 25 bp, Homo sapien
ctcccaagggatacaggggctcact

SEQ ID NO: 5891446 - DNA, 25 bp, Homo sapien
gacaggtattgccccacagaggcca

SEQ ID NO: 5891447 - DNA, 25 bp, Homo sapien
aaacttggcctgaccctggacgctc

SEQ ID NO: 5891448 - DNA, 25 bp, Homo sapien
cagcagtgctgacgttcctaagtcc

SEQ ID NO: 5891449 - DNA, 25 bp, Homo sapien
gagaatggtgaattgaagatgtaaa

SEQ ID NO: 5891450 - DNA, 25 bp, Homo sapien
cctgttcccagccagacgaccgagg

SEQ ID NO: 5891451 - DNA, 25 bp, Homo sapien
ttgaagatgtaaacttggcctgacc

SEQ ID NO: 5891452 - DNA, 25 bp, Homo sapien
acaccctcaaacttgtcaggggagg

SEQ ID NO: 5891453 - DNA, 25 bp, Homo sapien
tggacgctcggagcctggctgtctc

SEQ ID NO: 5891454 - DNA, 25 bp, Homo sapien
actgtctgctcacgtccccactgtt

SEQ ID NO: 5891455 - DNA, 25 bp, Homo sapien
agggaagtacttcctgggagacagc

SEQ ID NO: 5891456 - DNA, 25 bp, Homo sapien
tagggatagcagatggcagactttg

SEQ ID NO: 5891457 - DNA, 25 bp, Homo sapien
ctgagggaataccaccagaagccaa

SEQ ID NO: 5891458 - DNA, 25 bp, Homo sapien
agtctgactgtgttctggaagatgg

SEQ ID NO: 5891459 - DNA, 25 bp, Homo sapien
cctactcagtcccattttgtccacc

SEQ ID NO: 5891460 - DNA, 25 bp, Homo sapien
gagtgtgctgttgttgctgaggtct

SEQ ID NO: 5891461 - DNA, 25 bp, Homo sapien
agaagccagggctcctgggatgtgg

SEQ ID NO: 5891462 - DNA, 25 bp, Homo sapien
ggcagtggcatgggaggccctaaaa

SEQ ID NO: 5891463 - DNA, 25 bp, Homo sapien
gaggtctgtgctgaggccagggttc

SEQ ID NO: 5891464 - DNA, 25 bp, Homo sapien
attcattgaacagccaggactggga

SEQ ID NO: 5891465 - DNA, 25 bp, Homo sapien
gatgtggaagataaacaaacacagt

SEQ ID NO: 5891466 - DNA, 25 bp, Homo sapien
cacgtccccactgttgcaacaccta

SEQ ID NO: 5891467 - DNA, 25 bp, Homo sapien
ggcacgataactggcagtcaaggcg

SEQ ID NO: 5891468 - DNA, 25 bp, Homo sapien
caggactgggactagaggcagagcc

SEQ ID NO: 5891469 - DNA, 25 bp, Homo sapien
agctggaagctgggcctagaaactc

SEQ ID NO: 5891470 - DNA, 25 bp, Homo sapien
aacttgtcaggggagggcaagggcc

SEQ ID NO: 5891471 - DNA, 25 bp, Homo sapien
gggctcactgtgcttggtcccacag

SEQ ID NO: 5891472 - DNA, 25 bp, Homo sapien
attttgagagaggacaggtattgcc

SEQ ID NO: 5891473 - DNA, 25 bp, Homo sapien
gacgttcctaagtcctgggctttcc

SEQ ID NO: 5891474 - DNA, 25 bp, Homo sapien
ataccaccagaagccaacctcatgt

SEQ ID NO: 5891475 - DNA, 25 bp, Homo sapien
cctaagtcctgggctttcctagctg

SEQ ID NO: 5891476 - DNA, 25 bp, Homo sapien
tagaaactcacagatggcctggcag

SEQ ID NO: 5891477 - DNA, 25 bp, Homo sapien
acaaggacacaaacttgattgccca

SEQ ID NO: 5891478 - DNA, 25 bp, Homo sapien
cagatggcctggcagtggcatggga

SEQ ID NO: 5891479 - DNA, 25 bp, Homo sapien
tagcagatggcagactttggtgagt

SEQ ID NO: 5891480 - DNA, 25 bp, Homo sapien
gttgcaacacctagtctgtttgcaa

SEQ ID NO: 5891481 - DNA, 25 bp, Homo sapien
gggcaagggccctggtcactctcct

SEQ ID NO: 5891482 - DNA, 25 bp, Homo sapien
ctcacagatggcctggcagtggcat

SEQ ID NO: 5891483 - DNA, 25 bp, Homo sapien
ctcagcactgtctgctcacgtcccc

SEQ ID NO: 5891484 - DNA, 25 bp, Homo sapien
ttgctgtttcttaggtgagtgagtg

SEQ ID NO: 5891485 - DNA, 25 bp, Homo sapien
gctgggcctagaaactcacagatgg

SEQ ID NO: 5891486 - DNA, 25 bp, Homo sapien
ctagctgatgttgtcctacctactc

SEQ ID NO: 5891487 - DNA, 25 bp, Homo sapien
accgggctcagcactgtctgctcac

SEQ ID NO: 5891488 - DNA, 25 bp, Homo sapien
agataaacaaacacagttgccgggt

SEQ ID NO: 5891489 - DNA, 25 bp, Homo sapien
tagaggcagagcctgctgtcctccg

SEQ ID NO: 5891490 - DNA, 25 bp, Homo sapien
ggtattgccccacagaggccattca

SEQ ID NO: 5891491 - DNA, 25 bp, Homo sapien
tgtggaagataaacaaacacagttg

SEQ ID NO: 5891492 - DNA, 25 bp, Homo sapien
gcgatacctcgagggaactgtgggg

SEQ ID NO: 5891493 - DNA, 25 bp, Homo sapien
gcggtcctgccatagctgctggacg

SEQ ID NO: 5891494 - DNA, 25 bp, Homo sapien
cgataactggcagtcaaggcgatac

SEQ ID NO: 5891495 - DNA, 25 bp, Homo sapien
ctcagtcccattttgtccaccgaat

SEQ ID NO: 5891496 - DNA, 25 bp, Homo sapien
agagaggacaggtattgccccacag

SEQ ID NO: 5891497 - DNA, 25 bp, Homo sapien
tacctcgagggaactgtggggctgg

SEQ ID NO: 5891498 - DNA, 25 bp, Homo sapien
ctgtgggcgccctgggcattgctgt

SEQ ID NO: 5891499 - DNA, 25 bp, Homo sapien
gccgggtggcagggccccagcgggc

SEQ ID NO: 5891500 - DNA, 25 bp, Homo sapien
cgggtggcagggccccagcgggcac

SEQ ID NO: 5891501 - DNA, 25 bp, Homo sapien
aagtacttcctgggagacagcccag

SEQ ID NO: 5891502 - DNA, 25 bp, Homo sapien
gatggcctggcagtggcatgggagg

SEQ ID NO: 5891503 - DNA, 25 bp, Homo sapien
caacaaggacacaaacttgattgcc

SEQ ID NO: 5891504 - DNA, 25 bp, Homo sapien
aaggacacaaacttgattgcccaaa

SEQ ID NO: 5891505 - DNA, 25 bp, Homo sapien
ctcggagcctggctgtctcctcttc

SEQ ID NO: 5891506 - DNA, 25 bp, Homo sapien
atacaggggctcactgtgcttggtc

SEQ ID NO: 5891507 - DNA, 25 bp, Homo sapien
gagcccggtcccatcttccagaaca

SEQ ID NO: 5891508 - DNA, 25 bp, Homo sapien
tgtatcccttgggagggaggagagc

SEQ ID NO: 5891509 - DNA, 25 bp, Homo sapien
acagactaggtgttgcaacagtggg

SEQ ID NO: 5891510 - DNA, 25 bp, Homo sapien
ccatgccactgccaggccatctgtg

SEQ ID NO: 5891511 - DNA, 25 bp, Homo sapien
gacaagtttgagggtgtcttgggtg

SEQ ID NO: 5891512 - DNA, 25 bp, Homo sapien
taagaaacagcaatgcccagggcgc

SEQ ID NO: 5891513 - DNA, 25 bp, Homo sapien
aggccaagtttacatcttcaattca

SEQ ID NO: 5891514 - DNA, 25 bp, Homo sapien
agcaatgcccagggcgcccacaggc

SEQ ID NO: 5891515 - DNA, 25 bp, Homo sapien
ctgacaagtttgagggtgtcttggg

SEQ ID NO: 5891516 - DNA, 25 bp, Homo sapien
cagcacagacctcagcaacaacagc

SEQ ID NO: 5891517 - DNA, 25 bp, Homo sapien
ctgccagttatcgtgcccgctgggg

SEQ ID NO: 5891518 - DNA, 25 bp, Homo sapien
agactcactcactcaccaaagtctg

SEQ ID NO: 5891519 - DNA, 25 bp, Homo sapien
gaccaagcacagtgagcccctgtat

SEQ ID NO: 5891520 - DNA, 25 bp, Homo sapien
gtaggacaacatcagctaggaaagc

SEQ ID NO: 5891521 - DNA, 25 bp, Homo sapien
atacctgtcctctctcaaaatttcc

SEQ ID NO: 5891522 - DNA, 25 bp, Homo sapien
gggaccaagcacagtgagcccctgt

SEQ ID NO: 5891523 - DNA, 25 bp, Homo sapien
agccccacagttccctcgaggtatc

SEQ ID NO: 5891524 - DNA, 25 bp, Homo sapien
ggtaactggcagtgactttgggcaa

SEQ ID NO: 5891525 - DNA, 25 bp, Homo sapien
catatgtgggtaactggcagtgact

SEQ ID NO: 5891526 - DNA, 25 bp, Homo sapien
cttgttgctttctacaactgagcgg

SEQ ID NO: 5891527 - DNA, 25 bp, Homo sapien
atgggactgagtaggtaggacaaca

SEQ ID NO: 5891528 - DNA, 25 bp, Homo sapien
agttccctcgaggtatcgccttgac

SEQ ID NO: 5891529 - DNA, 25 bp, Homo sapien
ctgccatctgctatccctaccacct

SEQ ID NO: 5891530 - DNA, 25 bp, Homo sapien
ccggcaactgtgtttgtttatcttc

SEQ ID NO: 5891531 - DNA, 25 bp, Homo sapien
tcccatgccactgccaggccatctg

SEQ ID NO: 5891532 - DNA, 25 bp, Homo sapien
gctttctacaactgagcggaggaca

SEQ ID NO: 5891533 - DNA, 25 bp, Homo sapien
ctcgaggtatcgccttgactgccag

SEQ ID NO: 5891534 - DNA, 25 bp, Homo sapien
actggcagtgactttgggcaatcaa

SEQ ID NO: 5891535 - DNA, 25 bp, Homo sapien
aggaaccctggcctcagcacagacc

SEQ ID NO: 5891536 - DNA, 25 bp, Homo sapien
acaggtctattcggtggacaaaatg

SEQ ID NO: 5891537 - DNA, 25 bp, Homo sapien
tgtttgtttatcttccacatcccag

SEQ ID NO: 5891538 - DNA, 25 bp, Homo sapien
caggctctgcctctagtcccagtcc

SEQ ID NO: 5891539 - DNA, 25 bp, Homo sapien
ggctgttcaatgaatggcctctgtg

SEQ ID NO: 5891540 - DNA, 25 bp, Homo sapien
atcttccagaacacagtcagactca

SEQ ID NO: 5891541 - DNA, 25 bp, Homo sapien
aagtctgccatctgctatccctacc

SEQ ID NO: 5891542 - DNA, 25 bp, Homo sapien
ccagccccacagttccctcgaggta

SEQ ID NO: 5891543 - DNA, 25 bp, Homo sapien
agacagtgctgagcccggtcccatc

SEQ ID NO: 5891544 - DNA, 25 bp, Homo sapien
cgctgagagccttgagtgacaggtc

SEQ ID NO: 5891545 - DNA, 25 bp, Homo sapien
caatcaagtttgtgtccttgttgct

SEQ ID NO: 5891546 - DNA, 25 bp, Homo sapien
gaggacagcaggctctgcctctagt

SEQ ID NO: 5891547 - DNA, 25 bp, Homo sapien
ggccatctgtgagtttctaggccca

SEQ ID NO: 5891548 - DNA, 25 bp, Homo sapien
gaaccctggcctcagcacagacctc

SEQ ID NO: 5891549 - DNA, 25 bp, Homo sapien
cttctggtggtattccctcaggaca

SEQ ID NO: 5891550 - DNA, 25 bp, Homo sapien
cctggcttggaggaaccctggcctc

SEQ ID NO: 5891551 - DNA, 25 bp, Homo sapien
agtttgagggtgtcttgggtgctga

SEQ ID NO: 5891552 - DNA, 25 bp, Homo sapien
tgccacccggcaactgtgtttgttt

SEQ ID NO: 5891553 - DNA, 25 bp, Homo sapien
ctaggcccagcttccagctgggagc

SEQ ID NO: 5891554 - DNA, 25 bp, Homo sapien
cactcacctaagaaacagcaatgcc

SEQ ID NO: 5891555 - DNA, 25 bp, Homo sapien
ctagtcccagtcctggctgttcaat

SEQ ID NO: 5891556 - DNA, 25 bp, Homo sapien
tacttccctggcttggaggaaccct

SEQ ID NO: 5891557 - DNA, 25 bp, Homo sapien
tcgtgcccgctggggccctgccacc

SEQ ID NO: 5891558 - DNA, 25 bp, Homo sapien
agggtcaggccaagtttacatcttc

SEQ ID NO: 5891559 - DNA, 25 bp, Homo sapien
gcacagacctcagcaacaacagcac

SEQ ID NO: 5891560 - DNA, 25 bp, Homo sapien
tgagcccctgtatcccttgggaggg

SEQ ID NO: 5891561 - DNA, 25 bp, Homo sapien
gtctggctgggaacaggagagtgac

SEQ ID NO: 5891562 - DNA, 25 bp, Homo sapien
tgtttatcttccacatcccaggagc

SEQ ID NO: 5891563 - DNA, 25 bp, Homo sapien
tgtctcccaggaagtacttccctgg

SEQ ID NO: 5891564 - DNA, 25 bp, Homo sapien
taactggcagtgactttgggcaatc

SEQ ID NO: 5891565 - DNA, 25 bp, Homo sapien
ggatttctgggaaacctgccagctg

SEQ ID NO: 5891566 - DNA, 25 bp, Homo sapien
ccggtcccatcttccagaacacagt

SEQ ID NO: 5891567 - DNA, 25 bp, Homo sapien
agggcgcccacaggcacctcggtcg

SEQ ID NO: 5891568 - DNA, 25 bp, Homo sapien
tccagctgggagcgtccagcagcta

SEQ ID NO: 5891569 - DNA, 25 bp, Homo sapien
tgccagctgggctgtctcccaggaa

SEQ ID NO: 5891570 - DNA, 25 bp, Homo sapien
actgtgtttgtttatcttccacatc

SEQ ID NO: 5891571 - DNA, 25 bp, Homo sapien
caggctccgagcgtccagggtcagg

SEQ ID NO: 5891572 - DNA, 25 bp, Homo sapien
cttgagtgacaggtctattcggtgg

SEQ ID NO: 5891573 - DNA, 25 bp, Homo sapien
gccatctgctatccctaccacctga

SEQ ID NO: 5891574 - DNA, 25 bp, Homo sapien
ctgagtaggtaggacaacatcagct

SEQ ID NO: 5891575 - DNA, 25 bp, Homo sapien
gccaggccatctgtgagtttctagg

SEQ ID NO: 5891576 - DNA, 25 bp, Homo sapien
tcactcaccaaagtctgccatctgc

SEQ ID NO: 5891577 - DNA, 25 bp, Homo sapien
ctgccaggccatctgtgagtttcta

SEQ ID NO: 5891578 - DNA, 25 bp, Homo sapien
gaagaggagacagccaggctccgag

SEQ ID NO: 5891579 - DNA, 25 bp, Homo sapien
gtctattcggtggacaaaatgggac

SEQ ID NO: 5891580 - DNA, 25 bp, Homo sapien
atttctgggaaacctgccagctggg

SEQ ID NO: 5891581 - DNA, 25 bp, Homo sapien
cggaggacagcaggctctgcctcta

SEQ ID NO: 5891582 - DNA, 25 bp, Homo sapien
acagcacactcactcacctaagaaa

SEQ ID NO: 5891583 - DNA, 25 bp, Homo sapien
gccctgccacccggcaactgtgttt

SEQ ID NO: 5891584 - DNA, 25 bp, Homo sapien
ccagtggaagaggagacagccaggc

SEQ ID NO: 5891585 - DNA, 25 bp, Homo sapien
agctgggctgtctcccaggaagtac

SEQ ID NO: 5891586 - DNA, 25 bp, Homo sapien
agctatggcaggaccgctgagagcc

SEQ ID NO: 5891587 - DNA, 25 bp, Homo sapien
accaccaaccaggaccagccccaca

SEQ ID NO: 5891588 - DNA, 25 bp, Homo sapien
tcctggctgttcaatgaatggcctc

SEQ ID NO: 5891589 - DNA, 25 bp, Homo sapien
tcccttgggagggaggagagcccag

SEQ ID NO: 5891590 - DNA, 25 bp, Homo sapien
accacctgaccaccaaccaggacca

SEQ ID NO: 5891591 - DNA, 25 bp, Homo sapien
ccttgactgccagttatcgtgcccg

SEQ ID NO: 5891592 - DNA, 25 bp, Homo sapien
aagcacagtgagcccctgtatccct

SEQ ID NO: 5891593 - DNA, 25 bp, Homo sapien
tgggtaactggcagtgactttgggc

SEQ ID NO: 5891594 - DNA, 25 bp, Homo sapien
ccaggaagtacttccctggcttgga

SEQ ID NO: 5891595 - DNA, 25 bp, Homo sapien
ctccgagcgtccagggtcaggccaa

SEQ ID NO: 5891596 - DNA, 25 bp, Homo sapien
gtccagggtcaggccaagtttacat

SEQ ID NO: 5891597 - DNA, 25 bp, Homo sapien
ttccctcgaggtatcgccttgactg

SEQ ID NO: 5891598 - DNA, 25 bp, Homo sapien
cacctaagaaacagcaatgcccagg

SEQ ID NO: 5891599 - DNA, 25 bp, Homo sapien
cagcactgctgtgggaccaagcaca

SEQ ID NO: 5891600 - DNA, 25 bp, Homo sapien
ggcaatcaagtttgtgtccttgttg

SEQ ID NO: 5891601 - DNA, 25 bp, Homo sapien
taggaaagcccaggacttaggaacg

SEQ ID NO: 5891602 - DNA, 25 bp, Homo sapien
aggtctattcggtggacaaaatggg

SEQ ID NO: 5891603 - DNA, 25 bp, Homo sapien
tttgagggtgtcttgggtgctgaca

SEQ ID NO: 5891604 - DNA, 25 bp, Homo sapien
agacctcagcaacaacagcacactc

SEQ ID NO: 5891605 - DNA, 25 bp, Homo sapien
gtggggacgtgagcagacagtgctg

SEQ ID NO: 5891606 - DNA, 25 bp, Homo sapien
caagtttacatcttcaattcaccat

SEQ ID NO: 5891607 - DNA, 25 bp, Homo sapien
tcagactcactcactcaccaaagtc

SEQ ID NO: 5891608 - DNA, 25 bp, Homo sapien
cattctctggatttctgggaaacct

SEQ ID NO: 5891609 - DNA, 25 bp, Homo sapien
gcccagggcgcccacaggcacctcg

SEQ ID NO: 5891610 - DNA, 25 bp, Homo sapien
cacactcactcacctaagaaacagc

SEQ ID NO: 5891611 - DNA, 25 bp, Homo sapien
ggcttctggtcatatgtgggtaact

SEQ ID NO: 5891612 - DNA, 25 bp, Homo sapien
cctcccatgccactgccaggccatc

SEQ ID NO: 5891613 - DNA, 25 bp, Homo sapien
ggagagcccaggccagtggaagagg

SEQ ID NO: 5891614 - DNA, 25 bp, Homo sapien
agtgagcccctgtatcccttgggag

SEQ ID NO: 5891615 - DNA, 25 bp, Homo sapien
ggacagcaggctctgcctctagtcc

SEQ ID NO: 5891616 - DNA, 25 bp, Homo sapien
cgcccacaggcacctcggtcgtctg

SEQ ID NO: 5891617 - DNA, 25 bp, Homo sapien
gcctcagcacagacctcagcaacaa

SEQ ID NO: 5891618 - DNA, 25 bp, Homo sapien
ctgggaaacctgccagctgggctgt

SEQ ID NO: 5891619 - DNA, 25 bp, Homo sapien
gacagccaggctccgagcgtccagg

SEQ ID NO: 5891620 - DNA, 25 bp, Homo sapien
tgtgtttgtttatcttccacatccc

SEQ ID NO: 5891621 - DNA, 25 bp, Homo sapien
ttgcaacagtggggacgtgagcaga

SEQ ID NO: 5891622 - DNA, 25 bp, Homo sapien
cacctgaccaccaaccaggaccagc

SEQ ID NO: 5891623 - DNA, 25 bp, Homo sapien
tgaccaccaaccaggaccagcccca

SEQ ID NO: 5891624 - DNA, 25 bp, Homo sapien
ggctctgcctctagtcccagtcctg

SEQ ID NO: 5891625 - DNA, 25 bp, Homo sapien
cagctgggagcgtccagcagctatg

SEQ ID NO: 5891626 - DNA, 25 bp, Homo sapien
cgtccagcagctatggcaggaccgc

SEQ ID NO: 5891627 - DNA, 25 bp, Homo sapien
agactaggtgttgcaacagtgggga

SEQ ID NO: 5891628 - DNA, 25 bp, Homo sapien
gcagctatggcaggaccgctgagag

SEQ ID NO: 5891629 - DNA, 25 bp, Homo sapien
gaacgtcagcactgctgtgggacca

SEQ ID NO: 5891630 - DNA, 25 bp, Homo sapien
ggaaagcccaggacttaggaacgtc

SEQ ID NO: 5891631 - DNA, 25 bp, Homo sapien
cctcggtcgtctggctgggaacagg

SEQ ID NO: 5891632 - DNA, 25 bp, Homo sapien
tatcccttgggagggaggagagccc

SEQ ID NO: 5891633 - DNA, 25 bp, Homo sapien
ggtgttgcaacagtggggacgtgag

SEQ ID NO: 5891634 - DNA, 25 bp, Homo sapien
tgaatggcctctgtggggcaatacc

SEQ ID NO: 5891635 - DNA, 25 bp, Homo sapien
agcccaggccagtggaagaggagac

SEQ ID NO: 5891636 - DNA, 25 bp, Homo sapien
ttgctttctacaactgagcggagga

SEQ ID NO: 5891637 - DNA, 25 bp, Homo sapien
gaccagccccacagttccctcgagg

SEQ ID NO: 5891638 - DNA, 25 bp, Homo sapien
gccaggctccgagcgtccagggtca

SEQ ID NO: 5891639 - DNA, 25 bp, Homo sapien
gctgacatgaggttggcttctggtg

SEQ ID NO: 5891640 - DNA, 25 bp, Homo sapien
gtgcccgctggggccctgccacccg

SEQ ID NO: 5891641 - DNA, 25 bp, Homo sapien
ctcactcacctaagaaacagcaatg

SEQ ID NO: 5891642 - DNA, 25 bp, Homo sapien
caggaccgctgagagccttgagtga

SEQ ID NO: 5891643 - DNA, 25 bp, Homo sapien
ccacccggcaactgtgtttgtttat

SEQ ID NO: 5891644 - DNA, 25 bp, Homo sapien
agggcctcccatgccactgccaggc

SEQ ID NO: 5891645 - DNA, 25 bp, Homo sapien
ttggcttctggtggtattccctcag

SEQ ID NO: 5891646 - DNA, 25 bp, Homo sapien
ggaccgctgagagccttgagtgaca

SEQ ID NO: 5891647 - DNA, 25 bp, Homo sapien
agggtgtcttgggtgctgacatgag

SEQ ID NO: 5891648 - DNA, 25 bp, Homo sapien
caggagccctggcttctggtcatat

SEQ ID NO: 5891649 - DNA, 25 bp, Homo sapien
ccaaccaggaccagccccacagttc

SEQ ID NO: 5891650 - DNA, 25 bp, Homo sapien
gcgtccagggtcaggccaagtttac

SEQ ID NO: 5891651 - DNA, 25 bp, Homo sapien
acagacctcagcaacaacagcacac

SEQ ID NO: 5891652 - DNA, 25 bp, Homo sapien
atcgccttgactgccagttatcgtg

SEQ ID NO: 5891653 - DNA, 25 bp, Homo sapien
ctgggctgtctcccaggaagtactt

SEQ ID NO: 5891654 - DNA, 25 bp, Homo sapien
ggtcgtctggctgggaacaggagag

SEQ ID NO: 5891655 - DNA, 25 bp, Homo sapien
cttccctggcttggaggaaccctgg

SEQ ID NO: 5891656 - DNA, 25 bp, Homo sapien
cttgccctcccctgacaagtttgag

SEQ ID NO: 5891657 - DNA, 25 bp, Homo sapien
tctacaactgagcggaggacagcag

SEQ ID NO: 5891658 - DNA, 25 bp, Homo sapien
tctcccaggaagtacttccctggct

SEQ ID NO: 5891659 - DNA, 25 bp, Homo sapien
atctgtgagtttctaggcccagctt

SEQ ID NO: 5891660 - DNA, 25 bp, Homo sapien
ccagcttccagctgggagcgtccag

SEQ ID NO: 5891661 - DNA, 25 bp, Homo sapien
attcaccattctctggatttctggg

SEQ ID NO: 5891662 - DNA, 25 bp, Homo sapien
tccagcagctatggcaggaccgctg

SEQ ID NO: 5891663 - DNA, 25 bp, Homo sapien
accctggcctcagcacagacctcag

SEQ ID NO: 5891664 - DNA, 25 bp, Homo sapien
ctgtggggcaatacctgtcctctct

SEQ ID NO: 5891665 - DNA, 25 bp, Homo sapien
tggtcatatgtgggtaactggcagt

SEQ ID NO: 5891666 - DNA, 25 bp, Homo sapien
gtatcgccttgactgccagttatcg

SEQ ID NO: 5891667 - DNA, 25 bp, Homo sapien
gtttctaggcccagcttccagctgg

SEQ ID NO: 5891668 - DNA, 25 bp, Homo sapien
tgctgtgggaccaagcacagtgagc

SEQ ID NO: 5891669 - DNA, 25 bp, Homo sapien
ctgagagccttgagtgacaggtcta

SEQ ID NO: 5891670 - DNA, 25 bp, Homo sapien
tcgtctggctgggaacaggagagtg

SEQ ID NO: 5891671 - DNA, 25 bp, Homo sapien
agcccctgtatcccttgggagggag

SEQ ID NO: 5891672 - DNA, 25 bp, Homo sapien
tcccaggaagtacttccctggcttg

SEQ ID NO: 5891673 - DNA, 25 bp, Homo sapien
acatcagctaggaaagcccaggact

SEQ ID NO: 5891674 - DNA, 25 bp, Homo sapien
acagtgctgagcccggtcccatctt

SEQ ID NO: 5891675 - DNA, 25 bp, Homo sapien
ccttgggagggaggagagcccaggc

SEQ ID NO: 5891676 - DNA, 25 bp, Homo sapien
agcgtccagcagctatggcaggacc

SEQ ID NO: 5891677 - DNA, 25 bp, Homo sapien
tcccagtcctggctgttcaatgaat

SEQ ID NO: 5891678 - DNA, 25 bp, Homo sapien
aatgaatggcctctgtggggcaata

SEQ ID NO: 5891679 - DNA, 25 bp, Homo sapien
tcggtcgtctggctgggaacaggag

SEQ ID NO: 5891680 - DNA, 25 bp, Homo sapien
gctgggagcgtccagcagctatggc

SEQ ID NO: 5891681 - DNA, 25 bp, Homo sapien
cccaggagccctggcttctggtcat

SEQ ID NO: 5891682 - DNA, 25 bp, Homo sapien
tggtggtattccctcaggacagctt

SEQ ID NO: 5891683 - DNA, 25 bp, Homo sapien
gggctgtctcccaggaagtacttcc

SEQ ID NO: 5891684 - DNA, 25 bp, Homo sapien
tggcttggaggaaccctggcctcag

SEQ ID NO: 5891685 - DNA, 25 bp, Homo sapien
gcctctgtggggcaatacctgtcct

SEQ ID NO: 5891686 - DNA, 25 bp, Homo sapien
cacaggcacctcggtcgtctggctg

SEQ ID NO: 5891687 - DNA, 25 bp, Homo sapien
gaacacagtcagactcactcactca

SEQ ID NO: 5891688 - DNA, 25 bp, Homo sapien
cccaggacttaggaacgtcagcact

SEQ ID NO: 5891689 - DNA, 25 bp, Homo sapien
tccagaacacagtcagactcactca

SEQ ID NO: 5891690 - DNA, 25 bp, Homo sapien
atgaggttggcttctggtggtattc

SEQ ID NO: 5891691 - DNA, 25 bp, Homo sapien
tttgggcaatcaagtttgtgtcctt

SEQ ID NO: 5891692 - DNA, 25 bp, Homo sapien
ctgggaacaggagagtgaccagggc

SEQ ID NO: 5891693 - DNA, 25 bp, Homo sapien
cctaagaaacagcaatgcccagggc

SEQ ID NO: 5891694 - DNA, 25 bp, Homo sapien
gggagggaggagagcccaggccagt

SEQ ID NO: 5891695 - DNA, 25 bp, Homo sapien
tcaatgaatggcctctgtggggcaa

SEQ ID NO: 5891696 - DNA, 25 bp, Homo sapien
caggccagtggaagaggagacagcc

SEQ ID NO: 5891697 - DNA, 25 bp, Homo sapien
atgcccagggcgcccacaggcacct

SEQ ID NO: 5891698 - DNA, 25 bp, Homo sapien
ggcaactgtgtttgtttatcttcca

SEQ ID NO: 5891699 - DNA, 25 bp, Homo sapien
tcttgggtgctgacatgaggttggc

SEQ ID NO: 5891700 - DNA, 25 bp, Homo sapien
actgctgtgggaccaagcacagtga

SEQ ID NO: 5891701 - DNA, 25 bp, Homo sapien
gccactgccaggccatctgtgagtt

SEQ ID NO: 5891702 - DNA, 25 bp, Homo sapien
ccgagcgtccagggtcaggccaagt

SEQ ID NO: 5891703 - DNA, 25 bp, Homo sapien
ctgcctctagtcccagtcctggctg

SEQ ID NO: 5891704 - DNA, 25 bp, Homo sapien
ggcacctcggtcgtctggctgggaa

SEQ ID NO: 5891705 - DNA, 25 bp, Homo sapien
ttctctggatttctgggaaacctgc

SEQ ID NO: 5891706 - DNA, 25 bp, Homo sapien
ggcctcccatgccactgccaggcca

SEQ ID NO: 5891707 - DNA, 25 bp, Homo sapien
cctgccagctgggctgtctcccagg

SEQ ID NO: 5891708 - DNA, 25 bp, Homo sapien
caatgcccagggcgcccacaggcac

SEQ ID NO: 5891709 - DNA, 25 bp, Homo sapien
gctgtctcccaggaagtacttccct

SEQ ID NO: 5891710 - DNA, 25 bp, Homo sapien
ggggcaatacctgtcctctctcaaa

SEQ ID NO: 5891711 - DNA, 25 bp, Homo sapien
tcttccacatcccaggagccctggc

SEQ ID NO: 5891712 - DNA, 25 bp, Homo sapien
ttcaattcaccattctctggatttc

SEQ ID NO: 5891713 - DNA, 25 bp, Homo sapien
caaagtctgccatctgctatcccta

SEQ ID NO: 5891714 - DNA, 25 bp, Homo sapien
taggtgttgcaacagtggggacgtg

SEQ ID NO: 5891715 - DNA, 25 bp, Homo sapien
gcaaacagactaggtgttgcaacag

SEQ ID NO: 5891716 - DNA, 25 bp, Homo sapien
caacagcacactcactcacctaaga

SEQ ID NO: 5891717 - DNA, 25 bp, Homo sapien
tgttgctttctacaactgagcggag

SEQ ID NO: 5891718 - DNA, 25 bp, Homo sapien
ccacatcccaggagccctggcttct

SEQ ID NO: 5891719 - DNA, 25 bp, Homo sapien
gagcgtccagggtcaggccaagttt

SEQ ID NO: 5891720 - DNA, 25 bp, Homo sapien
tggaagaggagacagccaggctccg

SEQ ID NO: 5891721 - DNA, 25 bp, Homo sapien
ggttggcttctggtggtattccctc

SEQ ID NO: 5891722 - DNA, 25 bp, Homo sapien
gtcatatgtgggtaactggcagtga

SEQ ID NO: 5891723 - DNA, 25 bp, Homo sapien
cagccaggctccgagcgtccagggt

SEQ ID NO: 5891724 - DNA, 25 bp, Homo sapien
agcccaggacttaggaacgtcagca

SEQ ID NO: 5891725 - DNA, 25 bp, Homo sapien
caactgagcggaggacagcaggctc

SEQ ID NO: 5891726 - DNA, 25 bp, Homo sapien
tcaccattctctggatttctgggaa

SEQ ID NO: 5891727 - DNA, 25 bp, Homo sapien
agtgactttgggcaatcaagtttgt

SEQ ID NO: 5891728 - DNA, 25 bp, Homo sapien
gtgagcagacagtgctgagcccggt

SEQ ID NO: 5891729 - DNA, 25 bp, Homo sapien
tgacaggtctattcggtggacaaaa

SEQ ID NO: 5891730 - DNA, 25 bp, Homo sapien
ggcgcccacaggcacctcggtcgtc

SEQ ID NO: 5891731 - DNA, 25 bp, Homo sapien
ccaggaccagccccacagttccctc

SEQ ID NO: 5891732 - DNA, 25 bp, Homo sapien
ccatctgtgagtttctaggcccagc

SEQ ID NO: 5891733 - DNA, 25 bp, Homo sapien
gtgctgacatgaggttggcttctgg

SEQ ID NO: 5891734 - DNA, 25 bp, Homo sapien
cctgaccaccaaccaggaccagccc

SEQ ID NO: 5891735 - DNA, 25 bp, Homo sapien
ctctgtggggcaatacctgtcctct

SEQ ID NO: 5891736 - DNA, 25 bp, Homo sapien
ccagctgggctgtctcccaggaagt

SEQ ID NO: 5891737 - DNA, 25 bp, Homo sapien
gtggggcaatacctgtcctctctca

SEQ ID NO: 5891738 - DNA, 25 bp, Homo sapien
acccggcaactgtgtttgtttatct

SEQ ID NO: 5891739 - DNA, 25 bp, Homo sapien
ccagggtcaggccaagtttacatct

SEQ ID NO: 5891740 - DNA, 25 bp, Homo sapien
acgtcagcactgctgtgggaccaag

SEQ ID NO: 5891741 - DNA, 25 bp, Homo sapien
attcggtggacaaaatgggactgag

SEQ ID NO: 5891742 - DNA, 25 bp, Homo sapien
aggagagtgaccagggcccttgccc

SEQ ID NO: 5891743 - DNA, 25 bp, Homo sapien
tacaactgagcggaggacagcaggc

SEQ ID NO: 5891744 - DNA, 25 bp, Homo sapien
agtacttccctggcttggaggaacc

SEQ ID NO: 5891745 - DNA, 25 bp, Homo sapien
gagccttgagtgacaggtctattcg

SEQ ID NO: 5891746 - DNA, 25 bp, Homo sapien
caactgtgtttgtttatcttccaca

SEQ ID NO: 5891747 - DNA, 25 bp, Homo sapien
agtcccagtcctggctgttcaatga

SEQ ID NO: 5891748 - DNA, 25 bp, Homo sapien
gggactgagtaggtaggacaacatc

SEQ ID NO: 5891749 - DNA, 25 bp, Homo sapien
tatcttccacatcccaggagccctg

SEQ ID NO: 5891750 - DNA, 25 bp, Homo sapien
ggaggaaccctggcctcagcacaga

SEQ ID NO: 5891751 - DNA, 25 bp, Homo sapien
atcccaggagccctggcttctggtc

SEQ ID NO: 5891752 - DNA, 25 bp, Homo sapien
cctgccacccggcaactgtgtttgt

SEQ ID NO: 5891753 - DNA, 25 bp, Homo sapien
tggacaaaatgggactgagtaggta

SEQ ID NO: 5891754 - DNA, 25 bp, Homo sapien
acaggagagtgaccagggcccttgc

SEQ ID NO: 5891755 - DNA, 25 bp, Homo sapien
acagttccctcgaggtatcgccttg

SEQ ID NO: 5891756 - DNA, 25 bp, Homo sapien
gcctctagtcccagtcctggctgtt

SEQ ID NO: 5891757 - DNA, 25 bp, Homo sapien
ctgagcccggtcccatcttccagaa

SEQ ID NO: 5891758 - DNA, 25 bp, Homo sapien
tgacatgaggttggcttctggtggt

SEQ ID NO: 5891759 - DNA, 25 bp, Homo sapien
ctctgcctctagtcccagtcctggc

SEQ ID NO: 5891760 - DNA, 25 bp, Homo sapien
ttccactaatttttagggcctccca

SEQ ID NO: 5891761 - DNA, 25 bp, Homo sapien
ttaggaacgtcagcactgctgtggg

SEQ ID NO: 5891762 - DNA, 25 bp, Homo sapien
gggccctgccacccggcaactgtgt

SEQ ID NO: 5891763 - DNA, 25 bp, Homo sapien
cagctaggaaagcccaggacttagg

SEQ ID NO: 5891764 - DNA, 25 bp, Homo sapien
aggcccagcttccagctgggagcgt

SEQ ID NO: 5891765 - DNA, 25 bp, Homo sapien
gtgagtttctaggcccagcttccag

SEQ ID NO: 5891766 - DNA, 25 bp, Homo sapien
agcaggctctgcctctagtcccagt

SEQ ID NO: 5891767 - DNA, 25 bp, Homo sapien
gagagccttgagtgacaggtctatt

SEQ ID NO: 5891768 - DNA, 25 bp, Homo sapien
ctgttcaatgaatggcctctgtggg

SEQ ID NO: 5891769 - DNA, 25 bp, Homo sapien
ttgactgccagttatcgtgcccgct

SEQ ID NO: 5891770 - DNA, 25 bp, Homo sapien
acagcaggctctgcctctagtccca

SEQ ID NO: 5891771 - DNA, 25 bp, Homo sapien
tgactttgggcaatcaagtttgtgt

SEQ ID NO: 5891772 - DNA, 25 bp, Homo sapien
gagtaggtaggacaacatcagctag

SEQ ID NO: 5891773 - DNA, 25 bp, Homo sapien
gaggttggcttctggtggtattccc

SEQ ID NO: 5891774 - DNA, 25 bp, Homo sapien
aaatgggactgagtaggtaggacaa

SEQ ID NO: 5891775 - DNA, 25 bp, Homo sapien
agcggaggacagcaggctctgcctc

SEQ ID NO: 5891776 - DNA, 25 bp, Homo sapien
ctattcggtggacaaaatgggactg

SEQ ID NO: 5891777 - DNA, 25 bp, Homo sapien
gagacagccaggctccgagcgtcca

SEQ ID NO: 5891778 - DNA, 25 bp, Homo sapien
acagtcagactcactcactcaccaa

SEQ ID NO: 5891779 - DNA, 25 bp, Homo sapien
acagcaatgcccagggcgcccacag

SEQ ID NO: 5891780 - DNA, 25 bp, Homo sapien
aggagacagccaggctccgagcgtc

SEQ ID NO: 5891781 - DNA, 25 bp, Homo sapien
tgccctcccctgacaagtttgaggg

SEQ ID NO: 5891782 - DNA, 25 bp, Homo sapien
gttatcgtgcccgctggggccctgc

SEQ ID NO: 5891783 - DNA, 25 bp, Homo sapien
aacctgccagctgggctgtctccca

SEQ ID NO: 5891784 - DNA, 25 bp, Homo sapien
gcagacagtgctgagcccggtccca

SEQ ID NO: 5891785 - DNA, 25 bp, Homo sapien
cttccagaacacagtcagactcact

SEQ ID NO: 5891786 - DNA, 25 bp, Homo sapien
gggtgctgacatgaggttggcttct

SEQ ID NO: 5891787 - DNA, 25 bp, Homo sapien
gagggaggagagcccaggccagtgg

SEQ ID NO: 5891788 - DNA, 25 bp, Homo sapien
cccacaggcacctcggtcgtctggc

SEQ ID NO: 5891789 - DNA, 25 bp, Homo sapien
gtcagcactgctgtgggaccaagca

SEQ ID NO: 5891790 - DNA, 25 bp, Homo sapien
aggaccagccccacagttccctcga

SEQ ID NO: 5891791 - DNA, 25 bp, Homo sapien
agagcccaggccagtggaagaggag

SEQ ID NO: 5891792 - DNA, 25 bp, Homo sapien
tgggcaatcaagtttgtgtccttgt

SEQ ID NO: 5891793 - DNA, 25 bp, Homo sapien
aggaagtacttccctggcttggagg

SEQ ID NO: 5891794 - DNA, 25 bp, Homo sapien
tcactcactcaccaaagtctgccat

SEQ ID NO: 5891795 - DNA, 25 bp, Homo sapien
accaaagtctgccatctgctatccc

SEQ ID NO: 5891796 - DNA, 25 bp, Homo sapien
agtcagactcactcactcaccaaag

SEQ ID NO: 5891797 - DNA, 25 bp, Homo sapien
ccaagcacagtgagcccctgtatcc

SEQ ID NO: 5891798 - DNA, 25 bp, Homo sapien
cttccagctgggagcgtccagcagc

SEQ ID NO: 5891799 - DNA, 25 bp, Homo sapien
gactgccagttatcgtgcccgctgg

SEQ ID NO: 5891800 - DNA, 25 bp, Homo sapien
ggtcaggccaagtttacatcttcaa

SEQ ID NO: 5891801 - DNA, 25 bp, Homo sapien
ttctaggcccagcttccagctggga

SEQ ID NO: 5891802 - DNA, 25 bp, Homo sapien
tttatcttccacatcccaggagccc

SEQ ID NO: 5891803 - DNA, 25 bp, Homo sapien
cccctgtatcccttgggagggagga

SEQ ID NO: 5891804 - DNA, 25 bp, Homo sapien
accgctgagagccttgagtgacagg

SEQ ID NO: 5891805 - DNA, 25 bp, Homo sapien
caagtttgtgtccttgttgctttct

SEQ ID NO: 5891806 - DNA, 25 bp, Homo sapien
tgagcggaggacagcaggctctgcc

SEQ ID NO: 5891807 - DNA, 25 bp, Homo sapien
tgtccttgttgctttctacaactga

SEQ ID NO: 5891808 - DNA, 25 bp, Homo sapien
gtgggaccaagcacagtgagcccct

SEQ ID NO: 5891809 - DNA, 25 bp, Homo sapien
cgaggtatcgccttgactgccagtt

SEQ ID NO: 5891810 - DNA, 25 bp, Homo sapien
gaaacctgccagctgggctgtctcc

SEQ ID NO: 5891811 - DNA, 25 bp, Homo sapien
actttgggcaatcaagtttgtgtcc

SEQ ID NO: 5891812 - DNA, 25 bp, Homo sapien
tctggtggtattccctcaggacagc

SEQ ID NO: 5891813 - DNA, 25 bp, Homo sapien
tttacatcttcaattcaccattctc

SEQ ID NO: 5891814 - DNA, 25 bp, Homo sapien
cttctggtcatatgtgggtaactgg

SEQ ID NO: 5891815 - DNA, 25 bp, Homo sapien
tggcctctgtggggcaatacctgtc

SEQ ID NO: 5891816 - DNA, 25 bp, Homo sapien
gcccggtcccatcttccagaacaca

SEQ ID NO: 5891817 - DNA, 25 bp, Homo sapien
tggcagtgactttgggcaatcaagt

SEQ ID NO: 5891818 - DNA, 25 bp, Homo sapien
cctcccctgacaagtttgagggtgt

SEQ ID NO: 5891819 - DNA, 25 bp, Homo sapien
cagtggggacgtgagcagacagtgc

SEQ ID NO: 5891820 - DNA, 25 bp, Homo sapien
tgtgggtaactggcagtgactttgg

SEQ ID NO: 5891821 - DNA, 25 bp, Homo sapien
gcaacagtggggacgtgagcagaca

SEQ ID NO: 5891822 - DNA, 25 bp, Homo sapien
cctggcctcagcacagacctcagca

SEQ ID NO: 5891823 - DNA, 25 bp, Homo sapien
aaccaggaccagccccacagttccc

SEQ ID NO: 5891824 - DNA, 25 bp, Homo sapien
atccctaccacctgaccaccaacca

SEQ ID NO: 5891825 - DNA, 25 bp, Homo sapien
ctggcttctggtcatatgtgggtaa

SEQ ID NO: 5891826 - DNA, 25 bp, Homo sapien
cagttatcgtgcccgctggggccct

SEQ ID NO: 5891827 - DNA, 25 bp, Homo sapien
caggacttaggaacgtcagcactgc

SEQ ID NO: 5891828 - DNA, 25 bp, Homo sapien
gaacaggagagtgaccagggccctt

SEQ ID NO: 5891829 - DNA, 25 bp, Homo sapien
atcagctaggaaagcccaggactta

SEQ ID NO: 5891830 - DNA, 25 bp, Homo sapien
tttgtgtccttgttgctttctacaa

SEQ ID NO: 5891831 - DNA, 25 bp, Homo sapien
ggctccgagcgtccagggtcaggcc

SEQ ID NO: 5891832 - DNA, 25 bp, Homo sapien
agaggagacagccaggctccgagcg

SEQ ID NO: 5891833 - DNA, 25 bp, Homo sapien
accattctctggatttctgggaaac

SEQ ID NO: 5891834 - DNA, 25 bp, Homo sapien
atggcaggaccgctgagagccttga

SEQ ID NO: 5891835 - DNA, 25 bp, Homo sapien
ccagtcctggctgttcaatgaatgg

SEQ ID NO: 5891836 - DNA, 25 bp, Homo sapien
cacctcggtcgtctggctgggaaca

SEQ ID NO: 5891837 - DNA, 25 bp, Homo sapien
atttttagggcctcccatgccactg

SEQ ID NO: 5891838 - DNA, 25 bp, Homo sapien
aggtaggacaacatcagctaggaaa

SEQ ID NO: 5891839 - DNA, 25 bp, Homo sapien
caacatcagctaggaaagcccagga

SEQ ID NO: 5891840 - DNA, 25 bp, Homo sapien
ctggctgggaacaggagagtgacca

SEQ ID NO: 5891841 - DNA, 25 bp, Homo sapien
ctatccctaccacctgaccaccaac

SEQ ID NO: 5891842 - DNA, 25 bp, Homo sapien
tttctacaactgagcggaggacagc

SEQ ID NO: 5891843 - DNA, 25 bp, Homo sapien
ccatcttccagaacacagtcagact

SEQ ID NO: 5891844 - DNA, 25 bp, Homo sapien
agtgacaggtctattcggtggacaa

SEQ ID NO: 5891845 - DNA, 25 bp, Homo sapien
caagtttgagggtgtcttgggtgct

SEQ ID NO: 5891846 - DNA, 25 bp, Homo sapien
ggagcgtccagcagctatggcagga

SEQ ID NO: 5891847 - DNA, 25 bp, Homo sapien
catctgctatccctaccacctgacc

SEQ ID NO: 5891848 - DNA, 25 bp, Homo sapien
gtgaccagggcccttgccctcccct

SEQ ID NO: 5891849 - DNA, 25 bp, Homo sapien
gagagtgaccagggcccttgccctc

SEQ ID NO: 5891850 - DNA, 25 bp, Homo sapien
ccacagttccctcgaggtatcgcct

SEQ ID NO: 5891851 - DNA, 25 bp, Homo sapien
tccctggcttggaggaaccctggcc

SEQ ID NO: 5891852 - DNA, 25 bp, Homo sapien
ttggaggaaccctggcctcagcaca

SEQ ID NO: 5891853 - DNA, 25 bp, Homo sapien
gcagtgactttgggcaatcaagttt

SEQ ID NO: 5891854 - DNA, 25 bp, Homo sapien
gcactgctgtgggaccaagcacagt

SEQ ID NO: 5891855 - DNA, 25 bp, Homo sapien
gggaacaggagagtgaccagggccc

SEQ ID NO: 5891856 - DNA, 25 bp, Homo sapien
tccttgttgctttctacaactgagc

SEQ ID NO: 5891857 - DNA, 25 bp, Homo sapien
tcggtggacaaaatgggactgagta

SEQ ID NO: 5891858 - DNA, 25 bp, Homo sapien
caatacctgtcctctctcaaaattt

SEQ ID NO: 5891859 - DNA, 25 bp, Homo sapien
ctgtgagtttctaggcccagcttcc

SEQ ID NO: 5891860 - DNA, 25 bp, Homo sapien
gccaagtttacatcttcaattcacc

SEQ ID NO: 5891861 - DNA, 25 bp, Homo sapien
ctatggcaggaccgctgagagcctt

SEQ ID NO: 5891862 - DNA, 25 bp, Homo sapien
ctggctgttcaatgaatggcctctg

SEQ ID NO: 5891863 - DNA, 25 bp, Homo sapien
acacagtcagactcactcactcacc

SEQ ID NO: 5891864 - DNA, 25 bp, Homo sapien
tgctatccctaccacctgaccacca

SEQ ID NO: 5891865 - DNA, 25 bp, Homo sapien
ctcagcacagacctcagcaacaaca

SEQ ID NO: 5891866 - DNA, 25 bp, Homo sapien
gcccagcttccagctgggagcgtcc

SEQ ID NO: 5891867 - DNA, 25 bp, Homo sapien
actgagcggaggacagcaggctctg

SEQ ID NO: 5891868 - DNA, 25 bp, Homo sapien
aggacaacatcagctaggaaagccc

SEQ ID NO: 5891869 - DNA, 25 bp, Homo sapien
cccaggccagtggaagaggagacag

SEQ ID NO: 5891870 - DNA, 25 bp, Homo sapien
acttaggaacgtcagcactgctgtg

SEQ ID NO: 5891871 - DNA, 25 bp, Homo sapien
ccgctggggccctgccacccggcaa

SEQ ID NO: 5891872 - DNA, 25 bp, Homo sapien
gtcctctctcaaaatttccactaat

SEQ ID NO: 5891873 - DNA, 25 bp, Homo sapien
ctaccacctgaccaccaaccaggac

SEQ ID NO: 5891874 - DNA, 25 bp, Homo sapien
cactcactcacctaagaaacagcaa

SEQ ID NO: 5891875 - DNA, 25 bp, Homo sapien
tggcctcagcacagacctcagcaac

SEQ ID NO: 5891876 - DNA, 25 bp, Homo sapien
caattcaccattctctggatttctg

SEQ ID NO: 5891877 - DNA, 25 bp, Homo sapien
ccctgacaagtttgagggtgtcttg

SEQ ID NO: 5891878 - DNA, 25 bp, Homo sapien
ggacgtgagcagacagtgctgagcc

SEQ ID NO: 5891879 - DNA, 25 bp, Homo sapien
caccaaccaggaccagccccacagt

SEQ ID NO: 5891880 - DNA, 25 bp, Homo sapien
ggtggacaaaatgggactgagtagg

SEQ ID NO: 5891881 - DNA, 25 bp, Homo sapien
aggtatcgccttgactgccagttat

SEQ ID NO: 5891882 - DNA, 25 bp, Homo sapien
ctgtgggaccaagcacagtgagccc

SEQ ID NO: 5891883 - DNA, 25 bp, Homo sapien
ctcacctaagaaacagcaatgccca

SEQ ID NO: 5891884 - DNA, 25 bp, Homo sapien
ggtcccatcttccagaacacagtca

SEQ ID NO: 5891885 - DNA, 25 bp, Homo sapien
ggccagtggaagaggagacagccag

SEQ ID NO: 5891886 - DNA, 25 bp, Homo sapien
gccttgagtgacaggtctattcggt

SEQ ID NO: 5891887 - DNA, 25 bp, Homo sapien
tcttcaattcaccattctctggatt

SEQ ID NO: 5891888 - DNA, 25 bp, Homo sapien
actcaccaaagtctgccatctgcta

SEQ ID NO: 5891889 - DNA, 25 bp, Homo sapien
gggaggagagcccaggccagtggaa

SEQ ID NO: 5891890 - DNA, 25 bp, Homo sapien
aaacagactaggtgttgcaacagtg

SEQ ID NO: 5891891 - DNA, 25 bp, Homo sapien
gctggggccctgccacccggcaact

SEQ ID NO: 5891892 - DNA, 25 bp, Homo sapien
gggaaacctgccagctgggctgtct

SEQ ID NO: 5891893 - DNA, 25 bp, Homo sapien
ttgggtgctgacatgaggttggctt

SEQ ID NO: 5891894 - DNA, 25 bp, Homo sapien
gtaggtaggacaacatcagctagga

SEQ ID NO: 5891895 - DNA, 25 bp, Homo sapien
ccctcgaggtatcgccttgactgcc

SEQ ID NO: 5891896 - DNA, 25 bp, Homo sapien
tatgtgggtaactggcagtgacttt

SEQ ID NO: 5891897 - DNA, 25 bp, Homo sapien
ctctagtcccagtcctggctgttca

SEQ ID NO: 5891898 - DNA, 25 bp, Homo sapien
ttctgggaaacctgccagctgggct

SEQ ID NO: 5891899 - DNA, 25 bp, Homo sapien
tgggagcgtccagcagctatggcag

SEQ ID NO: 5891900 - DNA, 25 bp, Homo sapien
aatggcctctgtggggcaatacctg

SEQ ID NO: 5891901 - DNA, 25 bp, Homo sapien
cagcagctatggcaggaccgctgag

SEQ ID NO: 5891902 - DNA, 25 bp, Homo sapien
tttgtttatcttccacatcccagga

SEQ ID NO: 5891903 - DNA, 25 bp, Homo sapien
gagcagacagtgctgagcccggtcc

SEQ ID NO: 5891904 - DNA, 25 bp, Homo sapien
agcacactcactcacctaagaaaca

SEQ ID NO: 5891905 - DNA, 25 bp, Homo sapien
catcttcaattcaccattctctgga

SEQ ID NO: 5891906 - DNA, 25 bp, Homo sapien
gacaacatcagctaggaaagcccag

SEQ ID NO: 5891907 - DNA, 25 bp, Homo sapien
ccactaatttttagggcctcccatg

SEQ ID NO: 5891908 - DNA, 25 bp, Homo sapien
cgccttgactgccagttatcgtgcc

SEQ ID NO: 5891909 - DNA, 25 bp, Homo sapien
ttccacatcccaggagccctggctt

SEQ ID NO: 5891910 - DNA, 25 bp, Homo sapien
gcccgctggggccctgccacccggc

SEQ ID NO: 5891911 - DNA, 25 bp, Homo sapien
ggcaatacctgtcctctctcaaaat

SEQ ID NO: 5891912 - DNA, 25 bp, Homo sapien
aacaacagcacactcactcacctaa

SEQ ID NO: 5891913 - DNA, 25 bp, Homo sapien
tcccctgacaagtttgagggtgtct

SEQ ID NO: 5891914 - DNA, 25 bp, Homo sapien
actaggtgttgcaacagtggggacg

SEQ ID NO: 5891915 - DNA, 25 bp, Homo sapien
ctcagcaacaacagcacactcactc

SEQ ID NO: 5891916 - DNA, 25 bp, Homo sapien
caggcacctcggtcgtctggctggg

SEQ ID NO: 5891917 - DNA, 25 bp, Homo sapien
ttttagggcctcccatgccactgcc

SEQ ID NO: 5891918 - DNA, 25 bp, Homo sapien
gttcaatgaatggcctctgtggggc

SEQ ID NO: 5891919 - DNA, 25 bp, Homo sapien
agcttccagctgggagcgtccagca

SEQ ID NO: 5891920 - DNA, 25 bp, Homo sapien
ggggacgtgagcagacagtgctgag

SEQ ID NO: 5891921 - DNA, 25 bp, Homo sapien
ccctaccacctgaccaccaaccagg

SEQ ID NO: 5891922 - DNA, 25 bp, Homo sapien
actaatttttagggcctcccatgcc

SEQ ID NO: 5891923 - DNA, 25 bp, Homo sapien
ccccacagttccctcgaggtatcgc

SEQ ID NO: 5891924 - DNA, 25 bp, Homo sapien
agtcctggctgttcaatgaatggcc

SEQ ID NO: 5891925 - DNA, 25 bp, Homo sapien
gagtttctaggcccagcttccagct

SEQ ID NO: 5891926 - DNA, 25 bp, Homo sapien
caggccatctgtgagtttctaggcc

SEQ ID NO: 5891927 - DNA, 25 bp, Homo sapien
atcaagtttgtgtccttgttgcttt

SEQ ID NO: 5891928 - DNA, 25 bp, Homo sapien
agtttgtgtccttgttgctttctac

SEQ ID NO: 5891929 - DNA, 25 bp, Homo sapien
ttgcaaacagactaggtgttgcaac

SEQ ID NO: 5891930 - DNA, 25 bp, Homo sapien
tcccatcttccagaacacagtcaga

SEQ ID NO: 5891931 - DNA, 25 bp, Homo sapien
agaaacagcaatgcccagggcgccc

SEQ ID NO: 5891932 - DNA, 25 bp, Homo sapien
ccctggcttctggtcatatgtgggt

SEQ ID NO: 5891933 - DNA, 25 bp, Homo sapien
ccagggcgcccacaggcacctcggt

SEQ ID NO: 5891934 - DNA, 25 bp, Homo sapien
aaacagcaatgcccagggcgcccac

SEQ ID NO: 5891935 - DNA, 25 bp, Homo sapien
tgagggtgtcttgggtgctgacatg

SEQ ID NO: 5891936 - DNA, 25 bp, Homo sapien
ttagggcctcccatgccactgccag

SEQ ID NO: 5891937 - DNA, 25 bp, Homo sapien
tgtcttgggtgctgacatgaggttg

SEQ ID NO: 5891938 - DNA, 25 bp, Homo sapien
tacatcttcaattcaccattctctg

SEQ ID NO: 5891939 - DNA, 25 bp, Homo sapien
ggagccctggcttctggtcatatgt

SEQ ID NO: 5891940 - DNA, 25 bp, Homo sapien
tggggccctgccacccggcaactgt

SEQ ID NO: 5891941 - DNA, 25 bp, Homo sapien
ctggatttctgggaaacctgccagc

SEQ ID NO: 5891942 - DNA, 25 bp, Homo sapien
gctaggaaagcccaggacttaggaa

SEQ ID NO: 5891943 - DNA, 25 bp, Homo sapien
ggcaggaccgctgagagccttgagt

SEQ ID NO: 5891944 - DNA, 25 bp, Homo sapien
ctgtcctctctcaaaatttccacta

SEQ ID NO: 5891945 - DNA, 25 bp, Homo sapien
acatgaggttggcttctggtggtat

SEQ ID NO: 5891946 - DNA, 25 bp, Homo sapien
gtggtattccctcaggacagctttc

SEQ ID NO: 5891947 - DNA, 25 bp, Homo sapien
ggcccttgccctcccctgacaagtt

SEQ ID NO: 5891948 - DNA, 25 bp, Homo sapien
ggcttctggtggtattccctcagga

SEQ ID NO: 5891949 - DNA, 25 bp, Homo sapien
aggaacgtcagcactgctgtgggac

SEQ ID NO: 5891950 - DNA, 25 bp, Homo sapien
gaagtacttccctggcttggaggaa

SEQ ID NO: 5891951 - DNA, 25 bp, Homo sapien
ctctggatttctgggaaacctgcca

SEQ ID NO: 5891952 - DNA, 25 bp, Homo sapien
aaagcccaggacttaggaacgtcag

SEQ ID NO: 5891953 - DNA, 25 bp, Homo sapien
tctggtcatatgtgggtaactggca

SEQ ID NO: 5891954 - DNA, 25 bp, Homo sapien
taatttttagggcctcccatgccac

SEQ ID NO: 5891955 - DNA, 25 bp, Homo sapien
gagtgaccagggcccttgccctccc

SEQ ID NO: 5891956 - DNA, 25 bp, Homo sapien
tcaggccaagtttacatcttcaatt

SEQ ID NO: 5891957 - DNA, 25 bp, Homo sapien
tgctgagcccggtcccatcttccag

SEQ ID NO: 5891958 - DNA, 25 bp, Homo sapien
tatcgtgcccgctggggccctgcca

SEQ ID NO: 5891959 - DNA, 25 bp, Homo sapien
gacaaaatgggactgagtaggtagg

SEQ ID NO: 5891960 - DNA, 25 bp, Homo sapien
actcactcaccaaagtctgccatct

SEQ ID NO: 5891961 - DNA, 25 bp, Homo sapien
actcactcactcaccaaagtctgcc

SEQ ID NO: 5891962 - DNA, 25 bp, Homo sapien
agtttacatcttcaattcaccattc

SEQ ID NO: 5891963 - DNA, 25 bp, Homo sapien
cctgtatcccttgggagggaggaga

SEQ ID NO: 5891964 - DNA, 25 bp, Homo sapien
gcttggaggaaccctggcctcagca

SEQ ID NO: 5891965 - DNA, 25 bp, Homo sapien
agtgctgagcccggtcccatcttcc

SEQ ID NO: 5891966 - DNA, 25 bp, Homo sapien
gccagttatcgtgcccgctggggcc

SEQ ID NO: 5891967 - DNA, 25 bp, Homo sapien
ttgggagggaggagagcccaggcca

SEQ ID NO: 5891968 - DNA, 25 bp, Homo sapien
acctgtcctctctcaaaatttccac

SEQ ID NO: 5891969 - DNA, 25 bp, Homo sapien
aacagtggggacgtgagcagacagt

SEQ ID NO: 5891970 - DNA, 25 bp, Homo sapien
cactgccaggccatctgtgagtttc

SEQ ID NO: 5891971 - DNA, 25 bp, Homo sapien
tctgctatccctaccacctgaccac

SEQ ID NO: 5891972 - DNA, 25 bp, Homo sapien
ggctgggaacaggagagtgaccagg

SEQ ID NO: 5891973 - DNA, 25 bp, Homo sapien
agtggaagaggagacagccaggctc

SEQ ID NO: 5891974 - DNA, 25 bp, Homo sapien
tcaccaaagtctgccatctgctatc

SEQ ID NO: 5891975 - DNA, 25 bp, Homo sapien
cagcaacaacagcacactcactcac

SEQ ID NO: 5891976 - DNA, 25 bp, Homo sapien
ggacttaggaacgtcagcactgctg

SEQ ID NO: 5891977 - DNA, 25 bp, Homo sapien
tgtgtccttgttgctttctacaact

SEQ ID NO: 5891978 - DNA, 25 bp, Homo sapien
acctcagcaacaacagcacactcac

SEQ ID NO: 5891979 - DNA, 25 bp, Homo sapien
tgttgcaacagtggggacgtgagca

SEQ ID NO: 5891980 - DNA, 25 bp, Homo sapien
gactgagtaggtaggacaacatcag

SEQ ID NO: 5891981 - DNA, 25 bp, Homo sapien
atgccactgccaggccatctgtgag

SEQ ID NO: 5891982 - DNA, 25 bp, Homo sapien
agccctggcttctggtcatatgtgg

SEQ ID NO: 5891983 - DNA, 25 bp, Homo sapien
gaggagagcccaggccagtggaaga

SEQ ID NO: 5891984 - DNA, 25 bp, Homo sapien
gcacagtgagcccctgtatcccttg

SEQ ID NO: 5891985 - DNA, 25 bp, Homo sapien
acgtgagcagacagtgctgagcccg

SEQ ID NO: 5891986 - DNA, 25 bp, Homo sapien
acagtgagcccctgtatcccttggg

SEQ ID NO: 5891987 - DNA, 25 bp, Homo sapien
cagaacacagtcagactcactcact

SEQ ID NO: 5891988 - DNA, 25 bp, Homo sapien
gtctgccatctgctatccctaccac

SEQ ID NO: 5891989 - DNA, 25 bp, Homo sapien
gcaacaacagcacactcactcacct

SEQ ID NO: 5891990 - DNA, 25 bp, Homo sapien
caaaatgggactgagtaggtaggac

SEQ ID NO: 5891991 - DNA, 25 bp, Homo sapien
acatcccaggagccctggcttctgg

SEQ ID NO: 5891992 - DNA, 25 bp, Homo sapien
tgagtgacaggtctattcggtggac

SEQ ID NO: 5891993 - DNA, 25 bp, Homo sapien
ggtgtcttgggtgctgacatgaggt

SEQ ID NO: 5891994 - DNA, 25 bp, Homo sapien
gagaccacaagataggaaaatgtac

SEQ ID NO: 5891995 - DNA, 25 bp, Homo sapien
ggagagacttctgaaacagctttgc

SEQ ID NO: 5891996 - DNA, 25 bp, Homo sapien
tacagtaaagaagcactgggattta

SEQ ID NO: 5891997 - DNA, 25 bp, Homo sapien
cactagcaagtgtgtgtttttaaaa

SEQ ID NO: 5891998 - DNA, 25 bp, Homo sapien
gtagttagaatactcaatttttaat

SEQ ID NO: 5891999 - DNA, 25 bp, Homo sapien
ttttgtacctttttcagattggaat

SEQ ID NO: 5892000 - DNA, 25 bp, Homo sapien
ttttcagattggaattagttttctg

SEQ ID NO: 5892001 - DNA, 25 bp, Homo sapien
agcaagtgtgtgtttttaaaaaaca

SEQ ID NO: 5892002 - DNA, 25 bp, Homo sapien
tacataatgtttatcagcatagact

SEQ ID NO: 5892003 - DNA, 25 bp, Homo sapien
tcgttatgggtaaagtatttacaaa

SEQ ID NO: 5892004 - DNA, 25 bp, Homo sapien
taaaagttcttagcacaatgtttta

SEQ ID NO: 5892005 - DNA, 25 bp, Homo sapien
actagaatgttagacacattttggt

SEQ ID NO: 5892006 - DNA, 25 bp, Homo sapien
aaactagaatgttagacacattttg

SEQ ID NO: 5892007 - DNA, 25 bp, Homo sapien
actttggattcaggttttttgcatg

SEQ ID NO: 5892008 - DNA, 25 bp, Homo sapien
aatggtactgatttctgaaatgata

SEQ ID NO: 5892009 - DNA, 25 bp, Homo sapien
atcaccaatttgtagcaaaatgaat

SEQ ID NO: 5892010 - DNA, 25 bp, Homo sapien
ctgttgagctgtagttagaatactc

SEQ ID NO: 5892011 - DNA, 25 bp, Homo sapien
gacacattttggtcttaatccatgt

SEQ ID NO: 5892012 - DNA, 25 bp, Homo sapien
tagacacattttggtcttaatccat

SEQ ID NO: 5892013 - DNA, 25 bp, Homo sapien
gtatttacaaaacaaagtgacattt

SEQ ID NO: 5892014 - DNA, 25 bp, Homo sapien
gttaagatacagaacgaaacaacca

SEQ ID NO: 5892015 - DNA, 25 bp, Homo sapien
cagaaagttaaatgtgatacgcttc

SEQ ID NO: 5892016 - DNA, 25 bp, Homo sapien
ccacttttgttacaatgcatttgct

SEQ ID NO: 5892017 - DNA, 25 bp, Homo sapien
ttttctgtttaaggctttaatggta

SEQ ID NO: 5892018 - DNA, 25 bp, Homo sapien
ttgcttttgttaagatacagaacga

SEQ ID NO: 5892019 - DNA, 25 bp, Homo sapien
atgtgcctttttgtacctttttcag

SEQ ID NO: 5892020 - DNA, 25 bp, Homo sapien
aaagacaaaatattttgtggcggga

SEQ ID NO: 5892021 - DNA, 25 bp, Homo sapien
agagacttctgaaacagctttgcgt

SEQ ID NO: 5892022 - DNA, 25 bp, Homo sapien
gtactgatttctgaaatgataagga

SEQ ID NO: 5892023 - DNA, 25 bp, Homo sapien
gttagacacattttggtcttaatcc

SEQ ID NO: 5892024 - DNA, 25 bp, Homo sapien
tggggaggggtaaaagttcttagca

SEQ ID NO: 5892025 - DNA, 25 bp, Homo sapien
ctagcaagtgtgtgtttttaaaaaa

SEQ ID NO: 5892026 - DNA, 25 bp, Homo sapien
aaagcttttaaactggagagacttc

SEQ ID NO: 5892027 - DNA, 25 bp, Homo sapien
tttctgtattttttccacctcgctg

SEQ ID NO: 5892028 - DNA, 25 bp, Homo sapien
atgttaatatctttcgttatgggta

SEQ ID NO: 5892029 - DNA, 25 bp, Homo sapien
cctgtttcttgcagcactagcaagt

SEQ ID NO: 5892030 - DNA, 25 bp, Homo sapien
aagttaaatgtgatacgcttcaacc

SEQ ID NO: 5892031 - DNA, 25 bp, Homo sapien
tttcataaactagaatgttagacac

SEQ ID NO: 5892032 - DNA, 25 bp, Homo sapien
ctaaaatcttaaaacttacgcagct

SEQ ID NO: 5892033 - DNA, 25 bp, Homo sapien
cacattttggtcttaatccatgtac

SEQ ID NO: 5892034 - DNA, 25 bp, Homo sapien
aaaacttacgcagctggttgcagat

SEQ ID NO: 5892035 - DNA, 25 bp, Homo sapien
aagggagttttcatatcaccaattt

SEQ ID NO: 5892036 - DNA, 25 bp, Homo sapien
tagcacaatgttttacataatttgt

SEQ ID NO: 5892037 - DNA, 25 bp, Homo sapien
actgggatttatgtgcctttttgta

SEQ ID NO: 5892038 - DNA, 25 bp, Homo sapien
gtctggaaaacaccgagctcagcta

SEQ ID NO: 5892039 - DNA, 25 bp, Homo sapien
gctggttgcagataaagggagtttt

SEQ ID NO: 5892040 - DNA, 25 bp, Homo sapien
atgcatttgcttttgttaagataca

SEQ ID NO: 5892041 - DNA, 25 bp, Homo sapien
ttgcagcactagcaagtgtgtgttt

SEQ ID NO: 5892042 - DNA, 25 bp, Homo sapien
ggaaaacaccgagctcagctacact

SEQ ID NO: 5892043 - DNA, 25 bp, Homo sapien
tcagctacacttgaattttacagta

SEQ ID NO: 5892044 - DNA, 25 bp, Homo sapien
gttgagctgtagttagaatactcaa

SEQ ID NO: 5892045 - DNA, 25 bp, Homo sapien
tgttttacataatttgtaccaaaaa

SEQ ID NO: 5892046 - DNA, 25 bp, Homo sapien
agacttctgaaacagctttgcgtct

SEQ ID NO: 5892047 - DNA, 25 bp, Homo sapien
ttttgcatgttaatatctttcgtta

SEQ ID NO: 5892048 - DNA, 25 bp, Homo sapien
gtggcgggagcagaaagttaaatgt

SEQ ID NO: 5892049 - DNA, 25 bp, Homo sapien
aagtgacatttgattcaactgttga

SEQ ID NO: 5892050 - DNA, 25 bp, Homo sapien
tctttcgttatgggtaaagtattta

SEQ ID NO: 5892051 - DNA, 25 bp, Homo sapien
ccgagctcagctacacttgaatttt

SEQ ID NO: 5892052 - DNA, 25 bp, Homo sapien
gcatgttaatatctttcgttatggg

SEQ ID NO: 5892053 - DNA, 25 bp, Homo sapien
ttttgttacaatgcatttgcttttg

SEQ ID NO: 5892054 - DNA, 25 bp, Homo sapien
ggcgggagcagaaagttaaatgtga

SEQ ID NO: 5892055 - DNA, 25 bp, Homo sapien
aaaacaccgagctcagctacacttg

SEQ ID NO: 5892056 - DNA, 25 bp, Homo sapien
aaaattaactcatggagtgattttg

SEQ ID NO: 5892057 - DNA, 25 bp, Homo sapien
ttggtcttaatccatgtacactttt

SEQ ID NO: 5892058 - DNA, 25 bp, Homo sapien
agcactagcaagtgtgtgtttttaa

SEQ ID NO: 5892059 - DNA, 25 bp, Homo sapien
tgtattatttggactttggattcag

SEQ ID NO: 5892060 - DNA, 25 bp, Homo sapien
tttgtagcaaaatgaattttttcat

SEQ ID NO: 5892061 - DNA, 25 bp, Homo sapien
gagtgattttgttacctttggggtg

SEQ ID NO: 5892062 - DNA, 25 bp, Homo sapien
taatgtttatcagcatagactatgg

SEQ ID NO: 5892063 - DNA, 25 bp, Homo sapien
atagactatggaggagtgcagagaa

SEQ ID NO: 5892064 - DNA, 25 bp, Homo sapien
gataaagggagttttcatatcacca

SEQ ID NO: 5892065 - DNA, 25 bp, Homo sapien
gtttaaggctttaatggtactgatt

SEQ ID NO: 5892066 - DNA, 25 bp, Homo sapien
tgtatgtattatttggactttggat

SEQ ID NO: 5892067 - DNA, 25 bp, Homo sapien
ggttttttgcatgttaatatctttc

SEQ ID NO: 5892068 - DNA, 25 bp, Homo sapien
ttttgttaagatacagaacgaaaca

SEQ ID NO: 5892069 - DNA, 25 bp, Homo sapien
acttttgttacaatgcatttgcttt

SEQ ID NO: 5892070 - DNA, 25 bp, Homo sapien
caccgagctcagctacacttgaatt

SEQ ID NO: 5892071 - DNA, 25 bp, Homo sapien
cagcatagactatggaggagtgcag

SEQ ID NO: 5892072 - DNA, 25 bp, Homo sapien
ttacaaaacaaagtgacatttgatt

SEQ ID NO: 5892073 - DNA, 25 bp, Homo sapien
acacttgaattttacagtaaagaag

SEQ ID NO: 5892074 - DNA, 25 bp, Homo sapien
gcaaaatgaattttttcataaacta

SEQ ID NO: 5892075 - DNA, 25 bp, Homo sapien
agtgaaaggggtggcctgtttcttg

SEQ ID NO: 5892076 - DNA, 25 bp, Homo sapien
tagaatgttagacacattttggtct

SEQ ID NO: 5892077 - DNA, 25 bp, Homo sapien
tgggggggatgagaccacaagatag

SEQ ID NO: 5892078 - DNA, 25 bp, Homo sapien
tgtttcttgcagcactagcaagtgt

SEQ ID NO: 5892079 - DNA, 25 bp, Homo sapien
cagattggaattagttttctgttta

SEQ ID NO: 5892080 - DNA, 25 bp, Homo sapien
ttaaaacttacgcagctggttgcag

SEQ ID NO: 5892081 - DNA, 25 bp, Homo sapien
gcagcactagcaagtgtgtgttttt

SEQ ID NO: 5892082 - DNA, 25 bp, Homo sapien
tttttcataaactagaatgttagac

SEQ ID NO: 5892083 - DNA, 25 bp, Homo sapien
aaaatattttgtggcgggagcagaa

SEQ ID NO: 5892084 - DNA, 25 bp, Homo sapien
cagagaactcggaacatgtgtatgt

SEQ ID NO: 5892085 - DNA, 25 bp, Homo sapien
tacattacttctagttttagacttt

SEQ ID NO: 5892086 - DNA, 25 bp, Homo sapien
ttttgtggcgggagcagaaagttaa

SEQ ID NO: 5892087 - DNA, 25 bp, Homo sapien
atcagcatagactatggaggagtgc

SEQ ID NO: 5892088 - DNA, 25 bp, Homo sapien
attttctgtattttttccacctcgc

SEQ ID NO: 5892089 - DNA, 25 bp, Homo sapien
tcttgcagcactagcaagtgtgtgt

SEQ ID NO: 5892090 - DNA, 25 bp, Homo sapien
ctttttcagattggaattagttttc

SEQ ID NO: 5892091 - DNA, 25 bp, Homo sapien
tattttttccacctcgctgtaaaaa

SEQ ID NO: 5892092 - DNA, 25 bp, Homo sapien
ttttttgcatgttaatatctttcgt

SEQ ID NO: 5892093 - DNA, 25 bp, Homo sapien
agatacagaacgaaacaaccagatt

SEQ ID NO: 5892094 - DNA, 25 bp, Homo sapien
taaactggagagacttctgaaacag

SEQ ID NO: 5892095 - DNA, 25 bp, Homo sapien
ctgtagttagaatactcaattttta

SEQ ID NO: 5892096 - DNA, 25 bp, Homo sapien
ggatttatgtgcctttttgtacctt

SEQ ID NO: 5892097 - DNA, 25 bp, Homo sapien
tatggaggagtgcagagaactcgga

SEQ ID NO: 5892098 - DNA, 25 bp, Homo sapien
cagtaaagaagcactgggatttatg

SEQ ID NO: 5892099 - DNA, 25 bp, Homo sapien
tcatatcaccaatttgtagcaaaat

SEQ ID NO: 5892100 - DNA, 25 bp, Homo sapien
tttacagtaaagaagcactgggatt

SEQ ID NO: 5892101 - DNA, 25 bp, Homo sapien
tggagtgattttgttacctttgggg

SEQ ID NO: 5892102 - DNA, 25 bp, Homo sapien
ctttttgtacctttttcagattgga

SEQ ID NO: 5892103 - DNA, 25 bp, Homo sapien
atacgcttcaacccacttttgttac

SEQ ID NO: 5892104 - DNA, 25 bp, Homo sapien
ttatgtgcctttttgtacctttttc

SEQ ID NO: 5892105 - DNA, 25 bp, Homo sapien
tttaaactggagagacttctgaaac

SEQ ID NO: 5892106 - DNA, 25 bp, Homo sapien
acaagataggaaaatgtacattact

SEQ ID NO: 5892107 - DNA, 25 bp, Homo sapien
gttaatatctttcgttatgggtaaa

SEQ ID NO: 5892108 - DNA, 25 bp, Homo sapien
ctttaatggtactgatttctgaaat

SEQ ID NO: 5892109 - DNA, 25 bp, Homo sapien
ttaaaaaaaattaactcatggagtg

SEQ ID NO: 5892110 - DNA, 25 bp, Homo sapien
gggtggcctgtttcttgcagcacta

SEQ ID NO: 5892111 - DNA, 25 bp, Homo sapien
aatgtgatacgcttcaacccacttt

SEQ ID NO: 5892112 - DNA, 25 bp, Homo sapien
aaagttcttagcacaatgttttaca

SEQ ID NO: 5892113 - DNA, 25 bp, Homo sapien
aatgtacattacttctagttttaga

SEQ ID NO: 5892114 - DNA, 25 bp, Homo sapien
ttcagattggaattagttttctgtt

SEQ ID NO: 5892115 - DNA, 25 bp, Homo sapien
cattacttctagttttagactttag

SEQ ID NO: 5892116 - DNA, 25 bp, Homo sapien
tgtacacttttttattttctgtatt

SEQ ID NO: 5892117 - DNA, 25 bp, Homo sapien
acagaacgaaacaaccagattaaaa

SEQ ID NO: 5892118 - DNA, 25 bp, Homo sapien
gaattttacagtaaagaagcactgg

SEQ ID NO: 5892119 - DNA, 25 bp, Homo sapien
acaaaacaaagtgacatttgattca

SEQ ID NO: 5892120 - DNA, 25 bp, Homo sapien
ggtgtgtgtacataatgtttatcag

SEQ ID NO: 5892121 - DNA, 25 bp, Homo sapien
aaaaaattaactcatggagtgattt

SEQ ID NO: 5892122 - DNA, 25 bp, Homo sapien
tttcgttatgggtaaagtatttaca

SEQ ID NO: 5892123 - DNA, 25 bp, Homo sapien
cataatgtttatcagcatagactat

SEQ ID NO: 5892124 - DNA, 25 bp, Homo sapien
tcataaactagaatgttagacacat

SEQ ID NO: 5892125 - DNA, 25 bp, Homo sapien
tttcatatcaccaatttgtagcaaa

SEQ ID NO: 5892126 - DNA, 25 bp, Homo sapien
ttttggtcttaatccatgtacactt

SEQ ID NO: 5892127 - DNA, 25 bp, Homo sapien
tctgtattttttccacctcgctgta

SEQ ID NO: 5892128 - DNA, 25 bp, Homo sapien
gcttcaacccacttttgttacaatg

SEQ ID NO: 5892129 - DNA, 25 bp, Homo sapien
atatctttcgttatgggtaaagtat

SEQ ID NO: 5892130 - DNA, 25 bp, Homo sapien
aattaactcatggagtgattttgtt

SEQ ID NO: 5892131 - DNA, 25 bp, Homo sapien
aatattttgtggcgggagcagaaag

SEQ ID NO: 5892132 - DNA, 25 bp, Homo sapien
catgtacacttttttattttctgta

SEQ ID NO: 5892133 - DNA, 25 bp, Homo sapien
aaaatgtacattacttctagtttta

SEQ ID NO: 5892134 - DNA, 25 bp, Homo sapien
cagataaagggagttttcatatcac

SEQ ID NO: 5892135 - DNA, 25 bp, Homo sapien
aaggctttaatggtactgatttctg

SEQ ID NO: 5892136 - DNA, 25 bp, Homo sapien
cttagcacaatgttttacataattt

SEQ ID NO: 5892137 - DNA, 25 bp, Homo sapien
ggtcttaatccatgtacactttttt

SEQ ID NO: 5892138 - DNA, 25 bp, Homo sapien
actatggaggagtgcagagaactcg

SEQ ID NO: 5892139 - DNA, 25 bp, Homo sapien
ctacacttgaattttacagtaaaga

SEQ ID NO: 5892140 - DNA, 25 bp, Homo sapien
atacagaacgaaacaaccagattaa

SEQ ID NO: 5892141 - DNA, 25 bp, Homo sapien
tagttttctgtttaaggctttaatg

SEQ ID NO: 5892142 - DNA, 25 bp, Homo sapien
tgtacataatgtttatcagcataga

SEQ ID NO: 5892143 - DNA, 25 bp, Homo sapien
ttgcatgttaatatctttcgttatg

SEQ ID NO: 5892144 - DNA, 25 bp, Homo sapien
attttttcataaactagaatgttag

SEQ ID NO: 5892145 - DNA, 25 bp, Homo sapien
aactggagagacttctgaaacagct

SEQ ID NO: 5892146 - DNA, 25 bp, Homo sapien
ttttccacctcgctgtaaaaatggt

SEQ ID NO: 5892147 - DNA, 25 bp, Homo sapien
ttggactttggattcaggttttttg

SEQ ID NO: 5892148 - DNA, 25 bp, Homo sapien
ccacctcgctgtaaaaatggtgtgt

SEQ ID NO: 5892149 - DNA, 25 bp, Homo sapien
gtagcaaaatgaattttttcataaa

SEQ ID NO: 5892150 - DNA, 25 bp, Homo sapien
tttggattcaggttttttgcatgtt

SEQ ID NO: 5892151 - DNA, 25 bp, Homo sapien
tcggaacatgtgtatgtattatttg

SEQ ID NO: 5892152 - DNA, 25 bp, Homo sapien
aggggtggcctgtttcttgcagcac

SEQ ID NO: 5892153 - DNA, 25 bp, Homo sapien
gaattttttcataaactagaatgtt

SEQ ID NO: 5892154 - DNA, 25 bp, Homo sapien
atgttagacacattttggtcttaat

SEQ ID NO: 5892155 - DNA, 25 bp, Homo sapien
tgtgtacataatgtttatcagcata

SEQ ID NO: 5892156 - DNA, 25 bp, Homo sapien
ttcaggttttttgcatgttaatatc

SEQ ID NO: 5892157 - DNA, 25 bp, Homo sapien
caaagtgacatttgattcaactgtt

SEQ ID NO: 5892158 - DNA, 25 bp, Homo sapien
gcctttttgtacctttttcagattg

SEQ ID NO: 5892159 - DNA, 25 bp, Homo sapien
ccaatttgtagcaaaatgaattttt

SEQ ID NO: 5892160 - DNA, 25 bp, Homo sapien
caacccacttttgttacaatgcatt

SEQ ID NO: 5892161 - DNA, 25 bp, Homo sapien
gcttttgttaagatacagaacgaaa

SEQ ID NO: 5892162 - DNA, 25 bp, Homo sapien
tgcagagaactcggaacatgtgtat

SEQ ID NO: 5892163 - DNA, 25 bp, Homo sapien
agacaaaatattttgtggcgggagc

SEQ ID NO: 5892164 - DNA, 25 bp, Homo sapien
ggggtaaaagttcttagcacaatgt

SEQ ID NO: 5892165 - DNA, 25 bp, Homo sapien
gattggaattagttttctgtttaag

SEQ ID NO: 5892166 - DNA, 25 bp, Homo sapien
aatcttaaaacttacgcagctggtt

SEQ ID NO: 5892167 - DNA, 25 bp, Homo sapien
tttcttgcagcactagcaagtgtgt

SEQ ID NO: 5892168 - DNA, 25 bp, Homo sapien
cgggagcagaaagttaaatgtgata

SEQ ID NO: 5892169 - DNA, 25 bp, Homo sapien
agcagaaagttaaatgtgatacgct

SEQ ID NO: 5892170 - DNA, 25 bp, Homo sapien
gaccacaagataggaaaatgtacat

SEQ ID NO: 5892171 - DNA, 25 bp, Homo sapien
tggattcaggttttttgcatgttaa

SEQ ID NO: 5892172 - DNA, 25 bp, Homo sapien
tgtgtgtacataatgtttatcagca

SEQ ID NO: 5892173 - DNA, 25 bp, Homo sapien
agctacacttgaattttacagtaaa

SEQ ID NO: 5892174 - DNA, 25 bp, Homo sapien
aacttacgcagctggttgcagataa

SEQ ID NO: 5892175 - DNA, 25 bp, Homo sapien
ttccacctcgctgtaaaaatggtgt

SEQ ID NO: 5892176 - DNA, 25 bp, Homo sapien
ctgtttaaggctttaatggtactga

SEQ ID NO: 5892177 - DNA, 25 bp, Homo sapien
tacaatgcatttgcttttgttaaga

SEQ ID NO: 5892178 - DNA, 25 bp, Homo sapien
gttttcatatcaccaatttgtagca

SEQ ID NO: 5892179 - DNA, 25 bp, Homo sapien
aatccatgtacacttttttattttc

SEQ ID NO: 5892180 - DNA, 25 bp, Homo sapien
cattttggtcttaatccatgtacac

SEQ ID NO: 5892181 - DNA, 25 bp, Homo sapien
ctcgctgtaaaaatggtgtgtgtac

SEQ ID NO: 5892182 - DNA, 25 bp, Homo sapien
cactaaaatcttaaaacttacgcag

SEQ ID NO: 5892183 - DNA, 25 bp, Homo sapien
tgtgtatgtattatttggactttgg

SEQ ID NO: 5892184 - DNA, 25 bp, Homo sapien
gagttttcatatcaccaatttgtag

SEQ ID NO: 5892185 - DNA, 25 bp, Homo sapien
ttgtacctttttcagattggaatta

SEQ ID NO: 5892186 - DNA, 25 bp, Homo sapien
tacgcagctggttgcagataaaggg

SEQ ID NO: 5892187 - DNA, 25 bp, Homo sapien
gctcagctacacttgaattttacag

SEQ ID NO: 5892188 - DNA, 25 bp, Homo sapien
ctggagagacttctgaaacagcttt

SEQ ID NO: 5892189 - DNA, 25 bp, Homo sapien
agttcttagcacaatgttttacata

SEQ ID NO: 5892190 - DNA, 25 bp, Homo sapien
actcggaacatgtgtatgtattatt

SEQ ID NO: 5892191 - DNA, 25 bp, Homo sapien
ttgaattttacagtaaagaagcact

SEQ ID NO: 5892192 - DNA, 25 bp, Homo sapien
gttgcagataaagggagttttcata

SEQ ID NO: 5892193 - DNA, 25 bp, Homo sapien
aaagaagcactgggatttatgtgcc

SEQ ID NO: 5892194 - DNA, 25 bp, Homo sapien
ttaactcatggagtgattttgttac

SEQ ID NO: 5892195 - DNA, 25 bp, Homo sapien
agaagcactgggatttatgtgcctt

SEQ ID NO: 5892196 - DNA, 25 bp, Homo sapien
gtggcctgtttcttgcagcactagc

SEQ ID NO: 5892197 - DNA, 25 bp, Homo sapien
aagtatttacaaaacaaagtgacat

SEQ ID NO: 5892198 - DNA, 25 bp, Homo sapien
aagataggaaaatgtacattacttc

SEQ ID NO: 5892199 - DNA, 25 bp, Homo sapien
agctgtagttagaatactcaatttt

SEQ ID NO: 5892200 - DNA, 25 bp, Homo sapien
cagctggttgcagataaagggagtt

SEQ ID NO: 5892201 - DNA, 25 bp, Homo sapien
gtgacatttgattcaactgttgagc

SEQ ID NO: 5892202 - DNA, 25 bp, Homo sapien
atttgtaccaaaaaaattacacaca

SEQ ID NO: 5892203 - DNA, 25 bp, Homo sapien
ggggggatgagaccacaagatagga

SEQ ID NO: 5892204 - DNA, 25 bp, Homo sapien
aaaaatggtgtgtgtacataatgtt

SEQ ID NO: 5892205 - DNA, 25 bp, Homo sapien
ggactttggattcaggttttttgca

SEQ ID NO: 5892206 - DNA, 25 bp, Homo sapien
cttttaaactggagagacttctgaa

SEQ ID NO: 5892207 - DNA, 25 bp, Homo sapien
gaaagttaaatgtgatacgcttcaa

SEQ ID NO: 5892208 - DNA, 25 bp, Homo sapien
atttgcttttgttaagatacagaac

SEQ ID NO: 5892209 - DNA, 25 bp, Homo sapien
gacatttgattcaactgttgagctg

SEQ ID NO: 5892210 - DNA, 25 bp, Homo sapien
gcacaatgttttacataatttgtac

SEQ ID NO: 5892211 - DNA, 25 bp, Homo sapien
gaactcggaacatgtgtatgtatta

SEQ ID NO: 5892212 - DNA, 25 bp, Homo sapien
acttgaattttacagtaaagaagca

SEQ ID NO: 5892213 - DNA, 25 bp, Homo sapien
attcaactgttgagctgtagttaga

SEQ ID NO: 5892214 - DNA, 25 bp, Homo sapien
taggaaaatgtacattacttctagt

SEQ ID NO: 5892215 - DNA, 25 bp, Homo sapien
aactcatggagtgattttgttacct

SEQ ID NO: 5892216 - DNA, 25 bp, Homo sapien
tatgtattatttggactttggattc

SEQ ID NO: 5892217 - DNA, 25 bp, Homo sapien
catgtgtatgtattatttggacttt

SEQ ID NO: 5892218 - DNA, 25 bp, Homo sapien
aaaggggtggcctgtttcttgcagc

SEQ ID NO: 5892219 - DNA, 25 bp, Homo sapien
ggagtgcagagaactcggaacatgt

SEQ ID NO: 5892220 - DNA, 25 bp, Homo sapien
tgtacattacttctagttttagact

SEQ ID NO: 5892221 - DNA, 25 bp, Homo sapien
catttgattcaactgttgagctgta

SEQ ID NO: 5892222 - DNA, 25 bp, Homo sapien
tgagctgtagttagaatactcaatt

SEQ ID NO: 5892223 - DNA, 25 bp, Homo sapien
ttgtaccaaaaaaattacacacaaa

SEQ ID NO: 5892224 - DNA, 25 bp, Homo sapien
aacatgtgtatgtattatttggact

SEQ ID NO: 5892225 - DNA, 25 bp, Homo sapien
agtgcagagaactcggaacatgtgt

SEQ ID NO: 5892226 - DNA, 25 bp, Homo sapien
tttgattcaactgttgagctgtagt

SEQ ID NO: 5892227 - DNA, 25 bp, Homo sapien
acctcgctgtaaaaatggtgtgtgt

SEQ ID NO: 5892228 - DNA, 25 bp, Homo sapien
ggatgagaccacaagataggaaaat

SEQ ID NO: 5892229 - DNA, 25 bp, Homo sapien
tattatttggactttggattcaggt

SEQ ID NO: 5892230 - DNA, 25 bp, Homo sapien
tgtattttttccacctcgctgtaaa

SEQ ID NO: 5892231 - DNA, 25 bp, Homo sapien
ttatttggactttggattcaggttt

SEQ ID NO: 5892232 - DNA, 25 bp, Homo sapien
gcactgggatttatgtgcctttttg

SEQ ID NO: 5892233 - DNA, 25 bp, Homo sapien
gttacaatgcatttgcttttgttaa

SEQ ID NO: 5892234 - DNA, 25 bp, Homo sapien
ggagcagaaagttaaatgtgatacg

SEQ ID NO: 5892235 - DNA, 25 bp, Homo sapien
aacaccgagctcagctacacttgaa

SEQ ID NO: 5892236 - DNA, 25 bp, Homo sapien
gattcaggttttttgcatgttaata

SEQ ID NO: 5892237 - DNA, 25 bp, Homo sapien
agcttttaaactggagagacttctg

SEQ ID NO: 5892238 - DNA, 25 bp, Homo sapien
cgctgtaaaaatggtgtgtgtacat

SEQ ID NO: 5892239 - DNA, 25 bp, Homo sapien
gcatagactatggaggagtgcagag

SEQ ID NO: 5892240 - DNA, 25 bp, Homo sapien
ttcttagcacaatgttttacataat

SEQ ID NO: 5892241 - DNA, 25 bp, Homo sapien
aacaaagtgacatttgattcaactg

SEQ ID NO: 5892242 - DNA, 25 bp, Homo sapien
ggtaaaagttcttagcacaatgttt

SEQ ID NO: 5892243 - DNA, 25 bp, Homo sapien
atatcaccaatttgtagcaaaatga

SEQ ID NO: 5892244 - DNA, 25 bp, Homo sapien
ttttttccacctcgctgtaaaaatg

SEQ ID NO: 5892245 - DNA, 25 bp, Homo sapien
tggttgcagataaagggagttttca

SEQ ID NO: 5892246 - DNA, 25 bp, Homo sapien
aaaatcttaaaacttacgcagctgg

SEQ ID NO: 5892247 - DNA, 25 bp, Homo sapien
atggtgtgtgtacataatgtttatc

SEQ ID NO: 5892248 - DNA, 25 bp, Homo sapien
tattttgtggcgggagcagaaagtt

SEQ ID NO: 5892249 - DNA, 25 bp, Homo sapien
ccacaagataggaaaatgtacatta

SEQ ID NO: 5892250 - DNA, 25 bp, Homo sapien
atgaattttttcataaactagaatg

SEQ ID NO: 5892251 - DNA, 25 bp, Homo sapien
tgcagataaagggagttttcatatc

SEQ ID NO: 5892252 - DNA, 25 bp, Homo sapien
ttcactaaaatcttaaaacttacgc

SEQ ID NO: 5892253 - DNA, 25 bp, Homo sapien
aaaacaaagtgacatttgattcaac

SEQ ID NO: 5892254 - DNA, 25 bp, Homo sapien
gtgcctttttgtacctttttcagat

SEQ ID NO: 5892255 - DNA, 25 bp, Homo sapien
tgggatttatgtgcctttttgtacc

SEQ ID NO: 5892256 - DNA, 25 bp, Homo sapien
gagaactcggaacatgtgtatgtat

SEQ ID NO: 5892257 - DNA, 25 bp, Homo sapien
caatgcatttgcttttgttaagata

SEQ ID NO: 5892258 - DNA, 25 bp, Homo sapien
ttctgtttaaggctttaatggtact

SEQ ID NO: 5892259 - DNA, 25 bp, Homo sapien
tccatgtacacttttttattttctg

SEQ ID NO: 5892260 - DNA, 25 bp, Homo sapien
ttacttctagttttagactttagat

SEQ ID NO: 5892261 - DNA, 25 bp, Homo sapien
gaatgttagacacattttggtctta

SEQ ID NO: 5892262 - DNA, 25 bp, Homo sapien
ataaactagaatgttagacacattt

SEQ ID NO: 5892263 - DNA, 25 bp, Homo sapien
catggagtgattttgttacctttgg

SEQ ID NO: 5892264 - DNA, 25 bp, Homo sapien
gtttatcagcatagactatggagga

SEQ ID NO: 5892265 - DNA, 25 bp, Homo sapien
gtacctttttcagattggaattagt

SEQ ID NO: 5892266 - DNA, 25 bp, Homo sapien
taatatctttcgttatgggtaaagt

SEQ ID NO: 5892267 - DNA, 25 bp, Homo sapien
ttcaacccacttttgttacaatgca

SEQ ID NO: 5892268 - DNA, 25 bp, Homo sapien
ttaatccatgtacacttttttattt

SEQ ID NO: 5892269 - DNA, 25 bp, Homo sapien
ttatcagcatagactatggaggagt

SEQ ID NO: 5892270 - DNA, 25 bp, Homo sapien
tgaaaggggtggcctgtttcttgca

SEQ ID NO: 5892271 - DNA, 25 bp, Homo sapien
caccaatttgtagcaaaatgaattt

SEQ ID NO: 5892272 - DNA, 25 bp, Homo sapien
agactatggaggagtgcagagaact

SEQ ID NO: 5892273 - DNA, 25 bp, Homo sapien
ggggatgagaccacaagataggaaa

SEQ ID NO: 5892274 - DNA, 25 bp, Homo sapien
cttacgcagctggttgcagataaag

SEQ ID NO: 5892275 - DNA, 25 bp, Homo sapien
ggctttaatggtactgatttctgaa

SEQ ID NO: 5892276 - DNA, 25 bp, Homo sapien
tgattcaactgttgagctgtagtta

SEQ ID NO: 5892277 - DNA, 25 bp, Homo sapien
gtaaaaatggtgtgtgtacataatg

SEQ ID NO: 5892278 - DNA, 25 bp, Homo sapien
gaggagtgcagagaactcggaacat

SEQ ID NO: 5892279 - DNA, 25 bp, Homo sapien
ttggaattagttttctgtttaaggc

SEQ ID NO: 5892280 - DNA, 25 bp, Homo sapien
acaatgttttacataatttgtacca

SEQ ID NO: 5892281 - DNA, 25 bp, Homo sapien
ttgttacaatgcatttgcttttgtt

SEQ ID NO: 5892282 - DNA, 25 bp, Homo sapien
atttacaaaacaaagtgacatttga

SEQ ID NO: 5892283 - DNA, 25 bp, Homo sapien
ggaaaatgtacattacttctagttt

SEQ ID NO: 5892284 - DNA, 25 bp, Homo sapien
ggcctgtttcttgcagcactagcaa

SEQ ID NO: 5892285 - DNA, 25 bp, Homo sapien
aatttgtagcaaaatgaattttttc

SEQ ID NO: 5892286 - DNA, 25 bp, Homo sapien
tgatacgcttcaacccacttttgtt

SEQ ID NO: 5892287 - DNA, 25 bp, Homo sapien
ttgttaagatacagaacgaaacaac

SEQ ID NO: 5892288 - DNA, 25 bp, Homo sapien
tcaactgttgagctgtagttagaat

SEQ ID NO: 5892289 - DNA, 25 bp, Homo sapien
tcttaaaacttacgcagctggttgc

SEQ ID NO: 5892290 - DNA, 25 bp, Homo sapien
gtaaagaagcactgggatttatgtg

SEQ ID NO: 5892291 - DNA, 25 bp, Homo sapien
acgcttcaacccacttttgttacaa

SEQ ID NO: 5892292 - DNA, 25 bp, Homo sapien
gttaaatgtgatacgcttcaaccca

SEQ ID NO: 5892293 - DNA, 25 bp, Homo sapien
taaagtatttacaaaacaaagtgac

SEQ ID NO: 5892294 - DNA, 25 bp, Homo sapien
ctggaaaacaccgagctcagctaca

SEQ ID NO: 5892295 - DNA, 25 bp, Homo sapien
aactgttgagctgtagttagaatac

SEQ ID NO: 5892296 - DNA, 25 bp, Homo sapien
acccacttttgttacaatgcatttg

SEQ ID NO: 5892297 - DNA, 25 bp, Homo sapien
caggttttttgcatgttaatatctt

SEQ ID NO: 5892298 - DNA, 25 bp, Homo sapien
gggaggggtaaaagttcttagcaca

SEQ ID NO: 5892299 - DNA, 25 bp, Homo sapien
ctgtctggaaaacaccgagctcagc

SEQ ID NO: 5892300 - DNA, 25 bp, Homo sapien
ttaaggctttaatggtactgatttc

SEQ ID NO: 5892301 - DNA, 25 bp, Homo sapien
ttattttctgtattttttccacctc

SEQ ID NO: 5892302 - DNA, 25 bp, Homo sapien
ctgtaaaaatggtgtgtgtacataa

SEQ ID NO: 5892303 - DNA, 25 bp, Homo sapien
gggagttttcatatcaccaatttgt

SEQ ID NO: 5892304 - DNA, 25 bp, Homo sapien
ggaacatgtgtatgtattatttgga

SEQ ID NO: 5892305 - DNA, 25 bp, Homo sapien
ctcatggagtgattttgttaccttt

SEQ ID NO: 5892306 - DNA, 25 bp, Homo sapien
ttaatggtactgatttctgaaatga

SEQ ID NO: 5892307 - DNA, 25 bp, Homo sapien
atgtttatcagcatagactatggag

SEQ ID NO: 5892308 - DNA, 25 bp, Homo sapien
atgagaccacaagataggaaaatgt

SEQ ID NO: 5892309 - DNA, 25 bp, Homo sapien
tcttaatccatgtacacttttttat

SEQ ID NO: 5892310 - DNA, 25 bp, Homo sapien
gaggggtaaaagttcttagcacaat

SEQ ID NO: 5892311 - DNA, 25 bp, Homo sapien
taaatgtgatacgcttcaacccact

SEQ ID NO: 5892312 - DNA, 25 bp, Homo sapien
aaatggtgtgtgtacataatgttta

SEQ ID NO: 5892313 - DNA, 25 bp, Homo sapien
gagctcagctacacttgaattttac

SEQ ID NO: 5892314 - DNA, 25 bp, Homo sapien
aagcactgggatttatgtgcctttt

SEQ ID NO: 5892315 - DNA, 25 bp, Homo sapien
taagatacagaacgaaacaaccaga

SEQ ID NO: 5892316 - DNA, 25 bp, Homo sapien
aatgttttacataatttgtaccaaa

SEQ ID NO: 5892317 - DNA, 25 bp, Homo sapien
taaagggagttttcatatcaccaat

SEQ ID NO: 5892318 - DNA, 25 bp, Homo sapien
tgtgatacgcttcaacccacttttg

SEQ ID NO: 5892319 - DNA, 25 bp, Homo sapien
cgcagctggttgcagataaagggag

SEQ ID NO: 5892320 - DNA, 25 bp, Homo sapien
attttacagtaaagaagcactggga

SEQ ID NO: 5892321 - DNA, 25 bp, Homo sapien
gataggaaaatgtacattacttcta

SEQ ID NO: 5892322 - DNA, 25 bp, Homo sapien
tggaggagtgcagagaactcggaac

SEQ ID NO: 5892323 - DNA, 25 bp, Homo sapien
aaaaaaaattaactcatggagtgat

SEQ ID NO: 5892324 - DNA, 25 bp, Homo sapien
gcatttgcttttgttaagatacaga

SEQ ID NO: 5892325 - DNA, 25 bp, Homo sapien
tggtactgatttctgaaatgataag

SEQ ID NO: 5892326 - DNA, 25 bp, Homo sapien
actgatttctgaaatgataaggaaa

SEQ ID NO: 5892327 - DNA, 25 bp, Homo sapien
gaaaagacaaaatattttgtggcgg

SEQ ID NO: 5892328 - DNA, 25 bp, Homo sapien
ttgtggcgggagcagaaagttaaat

SEQ ID NO: 5892329 - DNA, 25 bp, Homo sapien
acaaaatattttgtggcgggagcag

SEQ ID NO: 5892330 - DNA, 25 bp, Homo sapien
atacatacacatgttccgagttctc

SEQ ID NO: 5892331 - DNA, 25 bp, Homo sapien
agacgcaaagctgtttcagaagtct

SEQ ID NO: 5892332 - DNA, 25 bp, Homo sapien
caaaagtgggttgaagcgtatcaca

SEQ ID NO: 5892333 - DNA, 25 bp, Homo sapien
cttatcatttcagaaatcagtacca

SEQ ID NO: 5892334 - DNA, 25 bp, Homo sapien
taatacatacacatgttccgagttc

SEQ ID NO: 5892335 - DNA, 25 bp, Homo sapien
ttatgtacacacaccatttttacag

SEQ ID NO: 5892336 - DNA, 25 bp, Homo sapien
caaaagcaaatgcattgtaacaaaa

SEQ ID NO: 5892337 - DNA, 25 bp, Homo sapien
ctaacattctagtttatgaaaaaat

SEQ ID NO: 5892338 - DNA, 25 bp, Homo sapien
caagtgtagctgagctcggtgtttt

SEQ ID NO: 5892339 - DNA, 25 bp, Homo sapien
tatcacatttaactttctgctcccg

SEQ ID NO: 5892340 - DNA, 25 bp, Homo sapien
ttaacatgcaaaaaacctgaatcca

SEQ ID NO: 5892341 - DNA, 25 bp, Homo sapien
actagaagtaatgtacattttccta

SEQ ID NO: 5892342 - DNA, 25 bp, Homo sapien
aaaactccctttatctgcaaccagc

SEQ ID NO: 5892343 - DNA, 25 bp, Homo sapien
ccctttatctgcaaccagctgcgta

SEQ ID NO: 5892344 - DNA, 25 bp, Homo sapien
attttcctatcttgtggtctcatcc

SEQ ID NO: 5892345 - DNA, 25 bp, Homo sapien
gctcccgccacaaaatattttgtct

SEQ ID NO: 5892346 - DNA, 25 bp, Homo sapien
ttttaatctggttgtttcgttctgt

SEQ ID NO: 5892347 - DNA, 25 bp, Homo sapien
agtgtagctgagctcggtgttttcc

SEQ ID NO: 5892348 - DNA, 25 bp, Homo sapien
taaaacattgtgctaagaactttta

SEQ ID NO: 5892349 - DNA, 25 bp, Homo sapien
acatttaactttctgctcccgccac

SEQ ID NO: 5892350 - DNA, 25 bp, Homo sapien
tttgtaaatactttacccataacga

SEQ ID NO: 5892351 - DNA, 25 bp, Homo sapien
aaattcattttgctacaaattggtg

SEQ ID NO: 5892352 - DNA, 25 bp, Homo sapien
tgctaagaacttttacccctcccca

SEQ ID NO: 5892353 - DNA, 25 bp, Homo sapien
cagaaaataaaaaagtgtacatgga

SEQ ID NO: 5892354 - DNA, 25 bp, Homo sapien
aaccagctgcgtaagttttaagatt

SEQ ID NO: 5892355 - DNA, 25 bp, Homo sapien
taacgaaagatattaacatgcaaaa

SEQ ID NO: 5892356 - DNA, 25 bp, Homo sapien
taactacagctcaacagttgaatca

SEQ ID NO: 5892357 - DNA, 25 bp, Homo sapien
cagaaatcagtaccattaaagcctt

SEQ ID NO: 5892358 - DNA, 25 bp, Homo sapien
ctgcactcctccatagtctatgctg

SEQ ID NO: 5892359 - DNA, 25 bp, Homo sapien
agtaatgtacattttcctatcttgt

SEQ ID NO: 5892360 - DNA, 25 bp, Homo sapien
gataaacattatgtacacacaccat

SEQ ID NO: 5892361 - DNA, 25 bp, Homo sapien
tttccttatcatttcagaaatcagt

SEQ ID NO: 5892362 - DNA, 25 bp, Homo sapien
atggattaagaccaaaatgtgtcta

SEQ ID NO: 5892363 - DNA, 25 bp, Homo sapien
tatgtaaaacattgtgctaagaact

SEQ ID NO: 5892364 - DNA, 25 bp, Homo sapien
taaaactagaagtaatgtacatttt

SEQ ID NO: 5892365 - DNA, 25 bp, Homo sapien
ttttaaaaacacacacttgctagtg

SEQ ID NO: 5892366 - DNA, 25 bp, Homo sapien
cccataacgaaagatattaacatgc

SEQ ID NO: 5892367 - DNA, 25 bp, Homo sapien
atactttacccataacgaaagatat

SEQ ID NO: 5892368 - DNA, 25 bp, Homo sapien
cataacgaaagatattaacatgcaa

SEQ ID NO: 5892369 - DNA, 25 bp, Homo sapien
tgtaaatactttacccataacgaaa

SEQ ID NO: 5892370 - DNA, 25 bp, Homo sapien
atctaaagtctaaaactagaagtaa

SEQ ID NO: 5892371 - DNA, 25 bp, Homo sapien
acattttcctatcttgtggtctcat

SEQ ID NO: 5892372 - DNA, 25 bp, Homo sapien
attgtgctaagaacttttacccctc

SEQ ID NO: 5892373 - DNA, 25 bp, Homo sapien
cataaatcccagtgcttctttactg

SEQ ID NO: 5892374 - DNA, 25 bp, Homo sapien
tgaaaactccctttatctgcaacca

SEQ ID NO: 5892375 - DNA, 25 bp, Homo sapien
gttgtttcgttctgtatcttaacaa

SEQ ID NO: 5892376 - DNA, 25 bp, Homo sapien
taaacattatgtacacacaccattt

SEQ ID NO: 5892377 - DNA, 25 bp, Homo sapien
aacatgcaaaaaacctgaatccaaa

SEQ ID NO: 5892378 - DNA, 25 bp, Homo sapien
aataatacatacacatgttccgagt

SEQ ID NO: 5892379 - DNA, 25 bp, Homo sapien
aaagctgtttcagaagtctctccag

SEQ ID NO: 5892380 - DNA, 25 bp, Homo sapien
tcctccatagtctatgctgataaac

SEQ ID NO: 5892381 - DNA, 25 bp, Homo sapien
tgctacaaattggtgatatgaaaac

SEQ ID NO: 5892382 - DNA, 25 bp, Homo sapien
tactgtaaaattcaagtgtagctga

SEQ ID NO: 5892383 - DNA, 25 bp, Homo sapien
taccattaaagccttaaacagaaaa

SEQ ID NO: 5892384 - DNA, 25 bp, Homo sapien
aagatattaacatgcaaaaaacctg

SEQ ID NO: 5892385 - DNA, 25 bp, Homo sapien
agcaaatgcattgtaacaaaagtgg

SEQ ID NO: 5892386 - DNA, 25 bp, Homo sapien
tctttactgtaaaattcaagtgtag

SEQ ID NO: 5892387 - DNA, 25 bp, Homo sapien
atctgcaaccagctgcgtaagtttt

SEQ ID NO: 5892388 - DNA, 25 bp, Homo sapien
cattgtaacaaaagtgggttgaagc

SEQ ID NO: 5892389 - DNA, 25 bp, Homo sapien
ttgaagcgtatcacatttaactttc

SEQ ID NO: 5892390 - DNA, 25 bp, Homo sapien
attcattttgctacaaattggtgat

SEQ ID NO: 5892391 - DNA, 25 bp, Homo sapien
gtgtacatggattaagaccaaaatg

SEQ ID NO: 5892392 - DNA, 25 bp, Homo sapien
ccaaaggtaacaaaatcactccatg

SEQ ID NO: 5892393 - DNA, 25 bp, Homo sapien
aaggtacaaaaaggcacataaatcc

SEQ ID NO: 5892394 - DNA, 25 bp, Homo sapien
gaaaaaggtacaaaaaggcacataa

SEQ ID NO: 5892395 - DNA, 25 bp, Homo sapien
ctgcgtaagttttaagattttagtg

SEQ ID NO: 5892396 - DNA, 25 bp, Homo sapien
cattaaagccttaaacagaaaacta

SEQ ID NO: 5892397 - DNA, 25 bp, Homo sapien
gtgatatgaaaactccctttatctg

SEQ ID NO: 5892398 - DNA, 25 bp, Homo sapien
cagttgaatcaaatgtcactttgtt

SEQ ID NO: 5892399 - DNA, 25 bp, Homo sapien
tagtttatgaaaaaattcattttgc

SEQ ID NO: 5892400 - DNA, 25 bp, Homo sapien
tgaatcaaatgtcactttgttttgt

SEQ ID NO: 5892401 - DNA, 25 bp, Homo sapien
aaagtccaaataatacatacacatg

SEQ ID NO: 5892402 - DNA, 25 bp, Homo sapien
aaataaaaaagtgtacatggattaa

SEQ ID NO: 5892403 - DNA, 25 bp, Homo sapien
cagaagtctctccagtttaaaagct

SEQ ID NO: 5892404 - DNA, 25 bp, Homo sapien
tcccgccacaaaatattttgtcttt

SEQ ID NO: 5892405 - DNA, 25 bp, Homo sapien
acaaattggtgatatgaaaactccc

SEQ ID NO: 5892406 - DNA, 25 bp, Homo sapien
gttctgtatcttaacaaaagcaaat

SEQ ID NO: 5892407 - DNA, 25 bp, Homo sapien
tttggtacaaattatgtaaaacatt

SEQ ID NO: 5892408 - DNA, 25 bp, Homo sapien
aaagcaaatgcattgtaacaaaagt

SEQ ID NO: 5892409 - DNA, 25 bp, Homo sapien
tcattttgctacaaattggtgatat

SEQ ID NO: 5892410 - DNA, 25 bp, Homo sapien
tttgctacaaattggtgatatgaaa

SEQ ID NO: 5892411 - DNA, 25 bp, Homo sapien
caagaaacaggccacccctttcact

SEQ ID NO: 5892412 - DNA, 25 bp, Homo sapien
attctaactacagctcaacagttga

SEQ ID NO: 5892413 - DNA, 25 bp, Homo sapien
agtctatgctgataaacattatgta

SEQ ID NO: 5892414 - DNA, 25 bp, Homo sapien
aaattatgtaaaacattgtgctaag

SEQ ID NO: 5892415 - DNA, 25 bp, Homo sapien
tttgtgtgtaatttttttggtacaa

SEQ ID NO: 5892416 - DNA, 25 bp, Homo sapien
taattccaatctgaaaaaggtacaa

SEQ ID NO: 5892417 - DNA, 25 bp, Homo sapien
tggtacaaattatgtaaaacattgt

SEQ ID NO: 5892418 - DNA, 25 bp, Homo sapien
atctgaaaaaggtacaaaaaggcac

SEQ ID NO: 5892419 - DNA, 25 bp, Homo sapien
cagctcaacagttgaatcaaatgtc

SEQ ID NO: 5892420 - DNA, 25 bp, Homo sapien
acatacacatgttccgagttctctg

SEQ ID NO: 5892421 - DNA, 25 bp, Homo sapien
aaatcactccatgagttaatttttt

SEQ ID NO: 5892422 - DNA, 25 bp, Homo sapien
gaatccaaagtccaaataatacata

SEQ ID NO: 5892423 - DNA, 25 bp, Homo sapien
aaagtctaaaactagaagtaatgta

SEQ ID NO: 5892424 - DNA, 25 bp, Homo sapien
aaattggtgatatgaaaactccctt

SEQ ID NO: 5892425 - DNA, 25 bp, Homo sapien
ccgccacaaaatattttgtcttttc

SEQ ID NO: 5892426 - DNA, 25 bp, Homo sapien
atgaaaaaattcattttgctacaaa

SEQ ID NO: 5892427 - DNA, 25 bp, Homo sapien
gtaacaaaatcactccatgagttaa

SEQ ID NO: 5892428 - DNA, 25 bp, Homo sapien
aaaattgagtattctaactacagct

SEQ ID NO: 5892429 - DNA, 25 bp, Homo sapien
ttaaaaacacacacttgctagtgct

SEQ ID NO: 5892430 - DNA, 25 bp, Homo sapien
taaatactttacccataacgaaaga

SEQ ID NO: 5892431 - DNA, 25 bp, Homo sapien
gtgtctaacattctagtttatgaaa

SEQ ID NO: 5892432 - DNA, 25 bp, Homo sapien
gaaaataaaaaagtgtacatggatt

SEQ ID NO: 5892433 - DNA, 25 bp, Homo sapien
aaatgtgtctaacattctagtttat

SEQ ID NO: 5892434 - DNA, 25 bp, Homo sapien
ggttgaagcgtatcacatttaactt

SEQ ID NO: 5892435 - DNA, 25 bp, Homo sapien
ctccatagtctatgctgataaacat

SEQ ID NO: 5892436 - DNA, 25 bp, Homo sapien
attggtgatatgaaaactcccttta

SEQ ID NO: 5892437 - DNA, 25 bp, Homo sapien
ccagctgcgtaagttttaagatttt

SEQ ID NO: 5892438 - DNA, 25 bp, Homo sapien
aacagttgaatcaaatgtcactttg

SEQ ID NO: 5892439 - DNA, 25 bp, Homo sapien
actcctccatagtctatgctgataa

SEQ ID NO: 5892440 - DNA, 25 bp, Homo sapien
tgtgctaagaacttttacccctccc

SEQ ID NO: 5892441 - DNA, 25 bp, Homo sapien
tatgaaaactccctttatctgcaac

SEQ ID NO: 5892442 - DNA, 25 bp, Homo sapien
tgtgtgtaatttttttggtacaaat

SEQ ID NO: 5892443 - DNA, 25 bp, Homo sapien
taaaaattgagtattctaactacag

SEQ ID NO: 5892444 - DNA, 25 bp, Homo sapien
aatcagtaccattaaagccttaaac

SEQ ID NO: 5892445 - DNA, 25 bp, Homo sapien
tggtgatatgaaaactccctttatc

SEQ ID NO: 5892446 - DNA, 25 bp, Homo sapien
ggattaagaccaaaatgtgtctaac

SEQ ID NO: 5892447 - DNA, 25 bp, Homo sapien
tctgtatcttaacaaaagcaaatgc

SEQ ID NO: 5892448 - DNA, 25 bp, Homo sapien
attccaatctgaaaaaggtacaaaa

SEQ ID NO: 5892449 - DNA, 25 bp, Homo sapien
atccaaagtccaaataatacataca

SEQ ID NO: 5892450 - DNA, 25 bp, Homo sapien
ctgctcccgccacaaaatattttgt

SEQ ID NO: 5892451 - DNA, 25 bp, Homo sapien
agtaccattaaagccttaaacagaa

SEQ ID NO: 5892452 - DNA, 25 bp, Homo sapien
tacccataacgaaagatattaacat

SEQ ID NO: 5892453 - DNA, 25 bp, Homo sapien
tgggttgaagcgtatcacatttaac

SEQ ID NO: 5892454 - DNA, 25 bp, Homo sapien
accaaaatgtgtctaacattctagt

SEQ ID NO: 5892455 - DNA, 25 bp, Homo sapien
gctgcaagaaacaggccaccccttt

SEQ ID NO: 5892456 - DNA, 25 bp, Homo sapien
ctgcaaccagctgcgtaagttttaa

SEQ ID NO: 5892457 - DNA, 25 bp, Homo sapien
gagtattctaactacagctcaacag

SEQ ID NO: 5892458 - DNA, 25 bp, Homo sapien
ttaacaaaagcaaatgcattgtaac

SEQ ID NO: 5892459 - DNA, 25 bp, Homo sapien
ttaactttctgctcccgccacaaaa

SEQ ID NO: 5892460 - DNA, 25 bp, Homo sapien
ttatctgcaaccagctgcgtaagtt

SEQ ID NO: 5892461 - DNA, 25 bp, Homo sapien
aacattatgtacacacaccattttt

SEQ ID NO: 5892462 - DNA, 25 bp, Homo sapien
ggtacaaaaaggcacataaatccca

SEQ ID NO: 5892463 - DNA, 25 bp, Homo sapien
atgtacattttcctatcttgtggtc

SEQ ID NO: 5892464 - DNA, 25 bp, Homo sapien
ttgctagtgctgcaagaaacaggcc

SEQ ID NO: 5892465 - DNA, 25 bp, Homo sapien
ttcagaagtctctccagtttaaaag

SEQ ID NO: 5892466 - DNA, 25 bp, Homo sapien
ctacaaattggtgatatgaaaactc

SEQ ID NO: 5892467 - DNA, 25 bp, Homo sapien
cagcgaggtggaaaaaatacagaaa

SEQ ID NO: 5892468 - DNA, 25 bp, Homo sapien
gctagtgctgcaagaaacaggccac

SEQ ID NO: 5892469 - DNA, 25 bp, Homo sapien
aaaagtgtacatggattaagaccaa

SEQ ID NO: 5892470 - DNA, 25 bp, Homo sapien
atttaactttctgctcccgccacaa

SEQ ID NO: 5892471 - DNA, 25 bp, Homo sapien
aaaaaagtgtacatggattaagacc

SEQ ID NO: 5892472 - DNA, 25 bp, Homo sapien
cactccatgagttaattttttttaa

SEQ ID NO: 5892473 - DNA, 25 bp, Homo sapien
gcaaagctgtttcagaagtctctcc

SEQ ID NO: 5892474 - DNA, 25 bp, Homo sapien
tcacatttaactttctgctcccgcc

SEQ ID NO: 5892475 - DNA, 25 bp, Homo sapien
caaaatgtgtctaacattctagttt

SEQ ID NO: 5892476 - DNA, 25 bp, Homo sapien
gaagtaatgtacattttcctatctt

SEQ ID NO: 5892477 - DNA, 25 bp, Homo sapien
tgcaagaaacaggccacccctttca

SEQ ID NO: 5892478 - DNA, 25 bp, Homo sapien
agaccaaaatgtgtctaacattcta

SEQ ID NO: 5892479 - DNA, 25 bp, Homo sapien
ttttttaaaaacacacacttgctag

SEQ ID NO: 5892480 - DNA, 25 bp, Homo sapien
aaacacacacttgctagtgctgcaa

SEQ ID NO: 5892481 - DNA, 25 bp, Homo sapien
tgcaaaaaacctgaatccaaagtcc

SEQ ID NO: 5892482 - DNA, 25 bp, Homo sapien
taatgtacattttcctatcttgtgg

SEQ ID NO: 5892483 - DNA, 25 bp, Homo sapien
caaatgcattgtaacaaaagtgggt

SEQ ID NO: 5892484 - DNA, 25 bp, Homo sapien
aatacagaaaataaaaaagtgtaca

SEQ ID NO: 5892485 - DNA, 25 bp, Homo sapien
acacacaccatttttacagcgaggt

SEQ ID NO: 5892486 - DNA, 25 bp, Homo sapien
aacaaaagtgggttgaagcgtatca

SEQ ID NO: 5892487 - DNA, 25 bp, Homo sapien
aagtgtacatggattaagaccaaaa

SEQ ID NO: 5892488 - DNA, 25 bp, Homo sapien
gtacaaattatgtaaaacattgtgc

SEQ ID NO: 5892489 - DNA, 25 bp, Homo sapien
agtgggttgaagcgtatcacattta

SEQ ID NO: 5892490 - DNA, 25 bp, Homo sapien
attaaaaattgagtattctaactac

SEQ ID NO: 5892491 - DNA, 25 bp, Homo sapien
agtctaaaactagaagtaatgtaca

SEQ ID NO: 5892492 - DNA, 25 bp, Homo sapien
gtcactttgttttgtaaatacttta

SEQ ID NO: 5892493 - DNA, 25 bp, Homo sapien
gtctaacattctagtttatgaaaaa

SEQ ID NO: 5892494 - DNA, 25 bp, Homo sapien
cgagttctctgcactcctccatagt

SEQ ID NO: 5892495 - DNA, 25 bp, Homo sapien
aaaaattcattttgctacaaattgg

SEQ ID NO: 5892496 - DNA, 25 bp, Homo sapien
tgcattgtaacaaaagtgggttgaa

SEQ ID NO: 5892497 - DNA, 25 bp, Homo sapien
attatgtaaaacattgtgctaagaa

SEQ ID NO: 5892498 - DNA, 25 bp, Homo sapien
ttctgctcccgccacaaaatatttt

SEQ ID NO: 5892499 - DNA, 25 bp, Homo sapien
ctccctttatctgcaaccagctgcg

SEQ ID NO: 5892500 - DNA, 25 bp, Homo sapien
tatcttaacaaaagcaaatgcattg

SEQ ID NO: 5892501 - DNA, 25 bp, Homo sapien
tccaatctgaaaaaggtacaaaaag

SEQ ID NO: 5892502 - DNA, 25 bp, Homo sapien
atgtacacacaccatttttacagcg

SEQ ID NO: 5892503 - DNA, 25 bp, Homo sapien
tcaaatgtcactttgttttgtaaat

SEQ ID NO: 5892504 - DNA, 25 bp, Homo sapien
ccatagtctatgctgataaacatta

SEQ ID NO: 5892505 - DNA, 25 bp, Homo sapien
gcaaccagctgcgtaagttttaaga

SEQ ID NO: 5892506 - DNA, 25 bp, Homo sapien
acgcaaagctgtttcagaagtctct

SEQ ID NO: 5892507 - DNA, 25 bp, Homo sapien
taagaccaaaatgtgtctaacattc

SEQ ID NO: 5892508 - DNA, 25 bp, Homo sapien
ccaaagtccaaataatacatacaca

SEQ ID NO: 5892509 - DNA, 25 bp, Homo sapien
atgttccgagttctctgcactcctc

SEQ ID NO: 5892510 - DNA, 25 bp, Homo sapien
gtattctaactacagctcaacagtt

SEQ ID NO: 5892511 - DNA, 25 bp, Homo sapien
aaacattgtgctaagaacttttacc

SEQ ID NO: 5892512 - DNA, 25 bp, Homo sapien
tccaaataatacatacacatgttcc

SEQ ID NO: 5892513 - DNA, 25 bp, Homo sapien
tttcctatcttgtggtctcatcccc

SEQ ID NO: 5892514 - DNA, 25 bp, Homo sapien
ttcaagtgtagctgagctcggtgtt

SEQ ID NO: 5892515 - DNA, 25 bp, Homo sapien
gaaaactaattccaatctgaaaaag

SEQ ID NO: 5892516 - DNA, 25 bp, Homo sapien
gaggtggaaaaaatacagaaaataa

SEQ ID NO: 5892517 - DNA, 25 bp, Homo sapien
aaatgtcactttgttttgtaaatac

SEQ ID NO: 5892518 - DNA, 25 bp, Homo sapien
tcagtaccattaaagccttaaacag

SEQ ID NO: 5892519 - DNA, 25 bp, Homo sapien
acttgctagtgctgcaagaaacagg

SEQ ID NO: 5892520 - DNA, 25 bp, Homo sapien
aaagtgggttgaagcgtatcacatt

SEQ ID NO: 5892521 - DNA, 25 bp, Homo sapien
agctgtttcagaagtctctccagtt

SEQ ID NO: 5892522 - DNA, 25 bp, Homo sapien
taaacagaaaactaattccaatctg

SEQ ID NO: 5892523 - DNA, 25 bp, Homo sapien
aatcaaatgtcactttgttttgtaa

SEQ ID NO: 5892524 - DNA, 25 bp, Homo sapien
aattcaagtgtagctgagctcggtg

SEQ ID NO: 5892525 - DNA, 25 bp, Homo sapien
aaaaacacacacttgctagtgctgc

SEQ ID NO: 5892526 - DNA, 25 bp, Homo sapien
ctatcttgtggtctcatccccccca

SEQ ID NO: 5892527 - DNA, 25 bp, Homo sapien
aggtaacaaaatcactccatgagtt

SEQ ID NO: 5892528 - DNA, 25 bp, Homo sapien
gtacatggattaagaccaaaatgtg

SEQ ID NO: 5892529 - DNA, 25 bp, Homo sapien
ccccaaaggtaacaaaatcactcca

SEQ ID NO: 5892530 - DNA, 25 bp, Homo sapien
tggttgtttcgttctgtatcttaac

SEQ ID NO: 5892531 - DNA, 25 bp, Homo sapien
ctttctgctcccgccacaaaatatt

SEQ ID NO: 5892532 - DNA, 25 bp, Homo sapien
gaagcgtatcacatttaactttctg

SEQ ID NO: 5892533 - DNA, 25 bp, Homo sapien
agtgcttctttactgtaaaattcaa

SEQ ID NO: 5892534 - DNA, 25 bp, Homo sapien
actacagctcaacagttgaatcaaa

SEQ ID NO: 5892535 - DNA, 25 bp, Homo sapien
tgttttttaaaaacacacacttgct

SEQ ID NO: 5892536 - DNA, 25 bp, Homo sapien
ccagtgcttctttactgtaaaattc

SEQ ID NO: 5892537 - DNA, 25 bp, Homo sapien
ttctctgcactcctccatagtctat

SEQ ID NO: 5892538 - DNA, 25 bp, Homo sapien
ctgaaaaaggtacaaaaaggcacat

SEQ ID NO: 5892539 - DNA, 25 bp, Homo sapien
aaacctgaatccaaagtccaaataa

SEQ ID NO: 5892540 - DNA, 25 bp, Homo sapien
acaaattatgtaaaacattgtgcta

SEQ ID NO: 5892541 - DNA, 25 bp, Homo sapien
tttactgtaaaattcaagtgtagct

SEQ ID NO: 5892542 - DNA, 25 bp, Homo sapien
tatgctgataaacattatgtacaca

SEQ ID NO: 5892543 - DNA, 25 bp, Homo sapien
actaattccaatctgaaaaaggtac

SEQ ID NO: 5892544 - DNA, 25 bp, Homo sapien
gaaatcagtaccattaaagccttaa

SEQ ID NO: 5892545 - DNA, 25 bp, Homo sapien
ctgaatccaaagtccaaataataca

SEQ ID NO: 5892546 - DNA, 25 bp, Homo sapien
caaaaaacctgaatccaaagtccaa

SEQ ID NO: 5892547 - DNA, 25 bp, Homo sapien
ctgataaacattatgtacacacacc

SEQ ID NO: 5892548 - DNA, 25 bp, Homo sapien
tctaaaactagaagtaatgtacatt

SEQ ID NO: 5892549 - DNA, 25 bp, Homo sapien
gaagtctctccagtttaaaagcttt

SEQ ID NO: 5892550 - DNA, 25 bp, Homo sapien
tttttacagcgaggtggaaaaaata

SEQ ID NO: 5892551 - DNA, 25 bp, Homo sapien
agcgtatcacatttaactttctgct

SEQ ID NO: 5892552 - DNA, 25 bp, Homo sapien
tacaaaaaggcacataaatcccagt

SEQ ID NO: 5892553 - DNA, 25 bp, Homo sapien
aaaggtaacaaaatcactccatgag

SEQ ID NO: 5892554 - DNA, 25 bp, Homo sapien
tttacagcgaggtggaaaaaataca

SEQ ID NO: 5892555 - DNA, 25 bp, Homo sapien
tctatgctgataaacattatgtaca

SEQ ID NO: 5892556 - DNA, 25 bp, Homo sapien
ctctgcactcctccatagtctatgc

SEQ ID NO: 5892557 - DNA, 25 bp, Homo sapien
gaaaaaattcattttgctacaaatt

SEQ ID NO: 5892558 - DNA, 25 bp, Homo sapien
aaggcacataaatcccagtgcttct

SEQ ID NO: 5892559 - DNA, 25 bp, Homo sapien
gcgaggtggaaaaaatacagaaaat

SEQ ID NO: 5892560 - DNA, 25 bp, Homo sapien
tagaagtaatgtacattttcctatc

SEQ ID NO: 5892561 - DNA, 25 bp, Homo sapien
atcactccatgagttaatttttttt

SEQ ID NO: 5892562 - DNA, 25 bp, Homo sapien
gctcaacagttgaatcaaatgtcac

SEQ ID NO: 5892563 - DNA, 25 bp, Homo sapien
caaataatacatacacatgttccga

SEQ ID NO: 5892564 - DNA, 25 bp, Homo sapien
aacattctagtttatgaaaaaattc

SEQ ID NO: 5892565 - DNA, 25 bp, Homo sapien
acatggattaagaccaaaatgtgtc

SEQ ID NO: 5892566 - DNA, 25 bp, Homo sapien
ttcagaaatcagtaccattaaagcc

SEQ ID NO: 5892567 - DNA, 25 bp, Homo sapien
attaagaccaaaatgtgtctaacat

SEQ ID NO: 5892568 - DNA, 25 bp, Homo sapien
gtaaaattcaagtgtagctgagctc

SEQ ID NO: 5892569 - DNA, 25 bp, Homo sapien
attttgctacaaattggtgatatga

SEQ ID NO: 5892570 - DNA, 25 bp, Homo sapien
catttttacagcgaggtggaaaaaa

SEQ ID NO: 5892571 - DNA, 25 bp, Homo sapien
cgtatcacatttaactttctgctcc

SEQ ID NO: 5892572 - DNA, 25 bp, Homo sapien
agctgcgtaagttttaagattttag

SEQ ID NO: 5892573 - DNA, 25 bp, Homo sapien
cacataaatcccagtgcttctttac

SEQ ID NO: 5892574 - DNA, 25 bp, Homo sapien
ctttatctgcaaccagctgcgtaag

SEQ ID NO: 5892575 - DNA, 25 bp, Homo sapien
aaaattcaagtgtagctgagctcgg

SEQ ID NO: 5892576 - DNA, 25 bp, Homo sapien
tcttaacaaaagcaaatgcattgta

SEQ ID NO: 5892577 - DNA, 25 bp, Homo sapien
tagctgagctcggtgttttccagac

SEQ ID NO: 5892578 - DNA, 25 bp, Homo sapien
acatgttccgagttctctgcactcc

SEQ ID NO: 5892579 - DNA, 25 bp, Homo sapien
aatgcattgtaacaaaagtgggttg

SEQ ID NO: 5892580 - DNA, 25 bp, Homo sapien
catgcaaaaaacctgaatccaaagt

SEQ ID NO: 5892581 - DNA, 25 bp, Homo sapien
aatctggttgtttcgttctgtatct

SEQ ID NO: 5892582 - DNA, 25 bp, Homo sapien
acaccatttttacagcgaggtggaa

SEQ ID NO: 5892583 - DNA, 25 bp, Homo sapien
gcgtaagttttaagattttagtgaa

SEQ ID NO: 5892584 - DNA, 25 bp, Homo sapien
tgtaaaacattgtgctaagaacttt

SEQ ID NO: 5892585 - DNA, 25 bp, Homo sapien
tttcgttctgtatcttaacaaaagc

SEQ ID NO: 5892586 - DNA, 25 bp, Homo sapien
gttccgagttctctgcactcctcca

SEQ ID NO: 5892587 - DNA, 25 bp, Homo sapien
tcatttcagaaatcagtaccattaa

SEQ ID NO: 5892588 - DNA, 25 bp, Homo sapien
tccttatcatttcagaaatcagtac

SEQ ID NO: 5892589 - DNA, 25 bp, Homo sapien
tcaacagttgaatcaaatgtcactt

SEQ ID NO: 5892590 - DNA, 25 bp, Homo sapien
cttaaacagaaaactaattccaatc

SEQ ID NO: 5892591 - DNA, 25 bp, Homo sapien
caccccaaaggtaacaaaatcactc

SEQ ID NO: 5892592 - DNA, 25 bp, Homo sapien
ctgtaaaattcaagtgtagctgagc

SEQ ID NO: 5892593 - DNA, 25 bp, Homo sapien
tgcttctttactgtaaaattcaagt

SEQ ID NO: 5892594 - DNA, 25 bp, Homo sapien
gtacacacaccatttttacagcgag

SEQ ID NO: 5892595 - DNA, 25 bp, Homo sapien
aacagaaaactaattccaatctgaa

SEQ ID NO: 5892596 - DNA, 25 bp, Homo sapien
atagtctatgctgataaacattatg

SEQ ID NO: 5892597 - DNA, 25 bp, Homo sapien
ttgagtattctaactacagctcaac

SEQ ID NO: 5892598 - DNA, 25 bp, Homo sapien
tattaacatgcaaaaaacctgaatc

SEQ ID NO: 5892599 - DNA, 25 bp, Homo sapien
tacagctcaacagttgaatcaaatg

SEQ ID NO: 5892600 - DNA, 25 bp, Homo sapien
aactttctgctcccgccacaaaata

SEQ ID NO: 5892601 - DNA, 25 bp, Homo sapien
accatttttacagcgaggtggaaaa

SEQ ID NO: 5892602 - DNA, 25 bp, Homo sapien
gctgagctcggtgttttccagacag

SEQ ID NO: 5892603 - DNA, 25 bp, Homo sapien
acacacacttgctagtgctgcaaga

SEQ ID NO: 5892604 - DNA, 25 bp, Homo sapien
tttttggtacaaattatgtaaaaca

SEQ ID NO: 5892605 - DNA, 25 bp, Homo sapien
tatcatttcagaaatcagtaccatt

SEQ ID NO: 5892606 - DNA, 25 bp, Homo sapien
tgtagctgagctcggtgttttccag

SEQ ID NO: 5892607 - DNA, 25 bp, Homo sapien
atttcagaaatcagtaccattaaag

SEQ ID NO: 5892608 - DNA, 25 bp, Homo sapien
tcccagtgcttctttactgtaaaat

SEQ ID NO: 5892609 - DNA, 25 bp, Homo sapien
cagaaaactaattccaatctgaaaa

SEQ ID NO: 5892610 - DNA, 25 bp, Homo sapien
tccgagttctctgcactcctccata

SEQ ID NO: 5892611 - DNA, 25 bp, Homo sapien
cattctagtttatgaaaaaattcat

SEQ ID NO: 5892612 - DNA, 25 bp, Homo sapien
aactccctttatctgcaaccagctg

SEQ ID NO: 5892613 - DNA, 25 bp, Homo sapien
tctaactacagctcaacagttgaat

SEQ ID NO: 5892614 - DNA, 25 bp, Homo sapien
gcactcctccatagtctatgctgat

SEQ ID NO: 5892615 - DNA, 25 bp, Homo sapien
gtgctgcaagaaacaggccacccct

SEQ ID NO: 5892616 - DNA, 25 bp, Homo sapien
caaaaaggcacataaatcccagtgc

SEQ ID NO: 5892617 - DNA, 25 bp, Homo sapien
aacaaaagcaaatgcattgtaacaa

SEQ ID NO: 5892618 - DNA, 25 bp, Homo sapien
actttacccataacgaaagatatta

SEQ ID NO: 5892619 - DNA, 25 bp, Homo sapien
gtttcagaagtctctccagtttaaa

SEQ ID NO: 5892620 - DNA, 25 bp, Homo sapien
gtaacaaaagtgggttgaagcgtat

SEQ ID NO: 5892621 - DNA, 25 bp, Homo sapien
aattgagtattctaactacagctca

SEQ ID NO: 5892622 - DNA, 25 bp, Homo sapien
acacacttgctagtgctgcaagaaa

SEQ ID NO: 5892623 - DNA, 25 bp, Homo sapien
acacatgttccgagttctctgcact

SEQ ID NO: 5892624 - DNA, 25 bp, Homo sapien
gatatgaaaactccctttatctgca

SEQ ID NO: 5892625 - DNA, 25 bp, Homo sapien
tctggttgtttcgttctgtatctta

SEQ ID NO: 5892626 - DNA, 25 bp, Homo sapien
aaaaggcacataaatcccagtgctt

SEQ ID NO: 5892627 - DNA, 25 bp, Homo sapien
ttaatctggttgtttcgttctgtat

SEQ ID NO: 5892628 - DNA, 25 bp, Homo sapien
acacaccatttttacagcgaggtgg

SEQ ID NO: 5892629 - DNA, 25 bp, Homo sapien
atacacatgttccgagttctctgca

SEQ ID NO: 5892630 - DNA, 25 bp, Homo sapien
atgtgtctaacattctagtttatga

SEQ ID NO: 5892631 - DNA, 25 bp, Homo sapien
acctgaatccaaagtccaaataata

SEQ ID NO: 5892632 - DNA, 25 bp, Homo sapien
aacaaaatcactccatgagttaatt

SEQ ID NO: 5892633 - DNA, 25 bp, Homo sapien
acacttgctagtgctgcaagaaaca

SEQ ID NO: 5892634 - DNA, 25 bp, Homo sapien
agttctctgcactcctccatagtct

SEQ ID NO: 5892635 - DNA, 25 bp, Homo sapien
caaaatcactccatgagttaatttt

SEQ ID NO: 5892636 - DNA, 25 bp, Homo sapien
gccttaaacagaaaactaattccaa

SEQ ID NO: 5892637 - DNA, 25 bp, Homo sapien
atgtcactttgttttgtaaatactt

SEQ ID NO: 5892638 - DNA, 25 bp, Homo sapien
tcctatcttgtggtctcatcccccc

SEQ ID NO: 5892639 - DNA, 25 bp, Homo sapien
ttgtaacaaaagtgggttgaagcgt

SEQ ID NO: 5892640 - DNA, 25 bp, Homo sapien
ctgtttcagaagtctctccagttta

SEQ ID NO: 5892641 - DNA, 25 bp, Homo sapien
tagtgctgcaagaaacaggccaccc

SEQ ID NO: 5892642 - DNA, 25 bp, Homo sapien
gatattaacatgcaaaaaacctgaa

SEQ ID NO: 5892643 - DNA, 25 bp, Homo sapien
cattatgtacacacaccatttttac

SEQ ID NO: 5892644 - DNA, 25 bp, Homo sapien
tgtatcttaacaaaagcaaatgcat

SEQ ID NO: 5892645 - DNA, 25 bp, Homo sapien
ctaaagtctaaaactagaagtaatg

SEQ ID NO: 5892646 - DNA, 25 bp, Homo sapien
tacagcgaggtggaaaaaatacaga

SEQ ID NO: 5892647 - DNA, 25 bp, Homo sapien
acgaaagatattaacatgcaaaaaa

SEQ ID NO: 5892648 - DNA, 25 bp, Homo sapien
gtacattttcctatcttgtggtctc

SEQ ID NO: 5892649 - DNA, 25 bp, Homo sapien
aatcccagtgcttctttactgtaaa

SEQ ID NO: 5892650 - DNA, 25 bp, Homo sapien
tgctgataaacattatgtacacaca

SEQ ID NO: 5892651 - DNA, 25 bp, Homo sapien
taaatcccagtgcttctttactgta

SEQ ID NO: 5892652 - DNA, 25 bp, Homo sapien
aaactagaagtaatgtacattttcc

SEQ ID NO: 5892653 - DNA, 25 bp, Homo sapien
acattgtgctaagaacttttacccc

SEQ ID NO: 5892654 - DNA, 25 bp, Homo sapien
cttctttactgtaaaattcaagtgt

SEQ ID NO: 5892655 - DNA, 25 bp, Homo sapien
tcgttctgtatcttaacaaaagcaa

SEQ ID NO: 5892656 - DNA, 25 bp, Homo sapien
agtccaaataatacatacacatgtt

SEQ ID NO: 5892657 - DNA, 25 bp, Homo sapien
ataaaaaagtgtacatggattaaga

SEQ ID NO: 5892658 - DNA, 25 bp, Homo sapien
tttatgaaaaaattcattttgctac

SEQ ID NO: 5892659 - DNA, 25 bp, Homo sapien
gttgaatcaaatgtcactttgtttt

SEQ ID NO: 5892660 - DNA, 25 bp, Homo sapien
tacagaaaataaaaaagtgtacatg

SEQ ID NO: 5892661 - DNA, 25 bp, Homo sapien
caatctgaaaaaggtacaaaaaggc

SEQ ID NO: 5892662 - DNA, 25 bp, Homo sapien
ggcacataaatcccagtgcttcttt

SEQ ID NO: 5892663 - DNA, 25 bp, Homo sapien
tttacccataacgaaagatattaac

SEQ ID NO: 5892664 - DNA, 25 bp, Homo sapien
tgtttcgttctgtatcttaacaaaa

SEQ ID NO: 5892665 - DNA, 25 bp, Homo sapien
gaaagatattaacatgcaaaaaacc

SEQ ID NO: 5892666 - DNA, 25 bp, Homo sapien
gtatttcaaaactgccaaggggctg

SEQ ID NO: 5892667 - DNA, 25 bp, Homo sapien
tgacgttctgttttctgtttgtaaa

SEQ ID NO: 5892668 - DNA, 25 bp, Homo sapien
cttcgcttcatagtactggagcggg

SEQ ID NO: 5892669 - DNA, 25 bp, Homo sapien
agaccagaactgtgaagatgcggtt

SEQ ID NO: 5892670 - DNA, 25 bp, Homo sapien
gtgtcaagaaataccggcccaaata

SEQ ID NO: 5892671 - DNA, 25 bp, Homo sapien
taaatgaaagcgcctctcattcctt

SEQ ID NO: 5892672 - DNA, 25 bp, Homo sapien
tacagcctattcaatgacatccaca

SEQ ID NO: 5892673 - DNA, 25 bp, Homo sapien
aatgccaaggggctgatgtggacgg

SEQ ID NO: 5892674 - DNA, 25 bp, Homo sapien
agattagttgggccaagtgaaagcc

SEQ ID NO: 5892675 - DNA, 25 bp, Homo sapien
tcgttccgactgtacagcctattca

SEQ ID NO: 5892676 - DNA, 25 bp, Homo sapien
acccggatctgtgaagtgcgtcctt

SEQ ID NO: 5892677 - DNA, 25 bp, Homo sapien
aatgtaatactggaataatttgtaa

SEQ ID NO: 5892678 - DNA, 25 bp, Homo sapien
cccctttcttggttctacaattgta

SEQ ID NO: 5892679 - DNA, 25 bp, Homo sapien
acagcagcgcagccgcagttggaga

SEQ ID NO: 5892680 - DNA, 25 bp, Homo sapien
cagggttcctagtgtgggctggaca

SEQ ID NO: 5892681 - DNA, 25 bp, Homo sapien
tcaatgacatccacaagttcaggga

SEQ ID NO: 5892682 - DNA, 25 bp, Homo sapien
gtcagatttacttatgcaggatgct

SEQ ID NO: 5892683 - DNA, 25 bp, Homo sapien
aaaataagattagttgggccaagtg

SEQ ID NO: 5892684 - DNA, 25 bp, Homo sapien
attccttcccgagcggagggggaca

SEQ ID NO: 5892685 - DNA, 25 bp, Homo sapien
agaggagaagcgcaagcatcatgga

SEQ ID NO: 5892686 - DNA, 25 bp, Homo sapien
catcatggagacgtgggtgggcgga

SEQ ID NO: 5892687 - DNA, 25 bp, Homo sapien
actctaaaactgcaaacagaaacca

SEQ ID NO: 5892688 - DNA, 25 bp, Homo sapien
gaactgtgaagatgcggttccgatg

SEQ ID NO: 5892689 - DNA, 25 bp, Homo sapien
gctccatattggagcatgtttacgg

SEQ ID NO: 5892690 - DNA, 25 bp, Homo sapien
actgcaaacagaaaccaggtgtttt

SEQ ID NO: 5892691 - DNA, 25 bp, Homo sapien
gatgaatggtgccttgctcattctt

SEQ ID NO: 5892692 - DNA, 25 bp, Homo sapien
ggacagaggagaagcgcaagcatca

SEQ ID NO: 5892693 - DNA, 25 bp, Homo sapien
aaaagggcaagaaatgcagcaagac

SEQ ID NO: 5892694 - DNA, 25 bp, Homo sapien
gaaatccccagaaccagtcagattt

SEQ ID NO: 5892695 - DNA, 25 bp, Homo sapien
tgctaagtgtatttttttgctccag

SEQ ID NO: 5892696 - DNA, 25 bp, Homo sapien
ctgcagaccagaactgtgaagatgc

SEQ ID NO: 5892697 - DNA, 25 bp, Homo sapien
agtgcgtccttgtggacaaccagtg

SEQ ID NO: 5892698 - DNA, 25 bp, Homo sapien
tgaagatgcggttccgatgcgaaga

SEQ ID NO: 5892699 - DNA, 25 bp, Homo sapien
gttcagggactaagtgcctccaggg

SEQ ID NO: 5892700 - DNA, 25 bp, Homo sapien
cttgtcctttgacagaagtaaatga

SEQ ID NO: 5892701 - DNA, 25 bp, Homo sapien
cctgcttgtcctttgacagaagtaa

SEQ ID NO: 5892702 - DNA, 25 bp, Homo sapien
gggcattattgctccatattggagc

SEQ ID NO: 5892703 - DNA, 25 bp, Homo sapien
cagcctattcaatgacatccacaag

SEQ ID NO: 5892704 - DNA, 25 bp, Homo sapien
gaagatggagagatgttttccaaga

SEQ ID NO: 5892705 - DNA, 25 bp, Homo sapien
tccttgtggacaaccagtgtacagc

SEQ ID NO: 5892706 - DNA, 25 bp, Homo sapien
aaaactgccaaggggctgatgtgga

SEQ ID NO: 5892707 - DNA, 25 bp, Homo sapien
aatggtgccttgctcattcttgagt

SEQ ID NO: 5892708 - DNA, 25 bp, Homo sapien
acactctgtgagtgtccttggggca

SEQ ID NO: 5892709 - DNA, 25 bp, Homo sapien
ctttgacagaagtaaatgaaagcgc

SEQ ID NO: 5892710 - DNA, 25 bp, Homo sapien
taagattagttgggccaagtgaaag

SEQ ID NO: 5892711 - DNA, 25 bp, Homo sapien
tggacaaccagtgtacagcagccta

SEQ ID NO: 5892712 - DNA, 25 bp, Homo sapien
gcagccgcagttggagaatgccaag

SEQ ID NO: 5892713 - DNA, 25 bp, Homo sapien
ttcttgagtagcattagggtatttc

SEQ ID NO: 5892714 - DNA, 25 bp, Homo sapien
gaagtaaatgaaagcgcctctcatt

SEQ ID NO: 5892715 - DNA, 25 bp, Homo sapien
gtttttttatttatcaaagtgtagc

SEQ ID NO: 5892716 - DNA, 25 bp, Homo sapien
ataccggcccaaatactgcggctcc

SEQ ID NO: 5892717 - DNA, 25 bp, Homo sapien
gtggacggacagcagcgcagccgca

SEQ ID NO: 5892718 - DNA, 25 bp, Homo sapien
gagaagcgcaagcatcatggagacg

SEQ ID NO: 5892719 - DNA, 25 bp, Homo sapien
ggttctacaattgtaatagagacaa

SEQ ID NO: 5892720 - DNA, 25 bp, Homo sapien
accggcccaaatactgcggctcctg

SEQ ID NO: 5892721 - DNA, 25 bp, Homo sapien
tgtttgtaaattatttgctaagtgt

SEQ ID NO: 5892722 - DNA, 25 bp, Homo sapien
tcagggactaagtgcctccagggtt

SEQ ID NO: 5892723 - DNA, 25 bp, Homo sapien
tgtgagtgtccttggggcagctacc

SEQ ID NO: 5892724 - DNA, 25 bp, Homo sapien
gaaagccctgcttgtcctttgacag

SEQ ID NO: 5892725 - DNA, 25 bp, Homo sapien
atggagacgtgggtgggcggaggat

SEQ ID NO: 5892726 - DNA, 25 bp, Homo sapien
aaatgtaactacaactgcccgcatc

SEQ ID NO: 5892727 - DNA, 25 bp, Homo sapien
ttgaatgtttttttatttatcaaag

SEQ ID NO: 5892728 - DNA, 25 bp, Homo sapien
tcattccttcccgagcggaggggga

SEQ ID NO: 5892729 - DNA, 25 bp, Homo sapien
cagaactgtgaagatgcggttccga

SEQ ID NO: 5892730 - DNA, 25 bp, Homo sapien
aagtgtatttttttgctccagaccc

SEQ ID NO: 5892731 - DNA, 25 bp, Homo sapien
gtagatggccggtgctgcacacctc

SEQ ID NO: 5892732 - DNA, 25 bp, Homo sapien
tgtccttggggcagctacctgcact

SEQ ID NO: 5892733 - DNA, 25 bp, Homo sapien
agaaataccggcccaaatactgcgg

SEQ ID NO: 5892734 - DNA, 25 bp, Homo sapien
atggagagatgttttccaagaatgt

SEQ ID NO: 5892735 - DNA, 25 bp, Homo sapien
aagtgaaagccctgcttgtcctttg

SEQ ID NO: 5892736 - DNA, 25 bp, Homo sapien
tccttggggcagctacctgcactct

SEQ ID NO: 5892737 - DNA, 25 bp, Homo sapien
gcggaggatgaatggtgccttgctc

SEQ ID NO: 5892738 - DNA, 25 bp, Homo sapien
agacgtgggtgggcggaggatgaat

SEQ ID NO: 5892739 - DNA, 25 bp, Homo sapien
tacttatgcaggatgctccagtgtc

SEQ ID NO: 5892740 - DNA, 25 bp, Homo sapien
tttatcaaagtgtagcttttgggga

SEQ ID NO: 5892741 - DNA, 25 bp, Homo sapien
agatggagagatgttttccaagaat

SEQ ID NO: 5892742 - DNA, 25 bp, Homo sapien
tctgtgagtgtccttggggcagcta

SEQ ID NO: 5892743 - DNA, 25 bp, Homo sapien
accagaactgtgaagatgcggttcc

SEQ ID NO: 5892744 - DNA, 25 bp, Homo sapien
actgtacagcctattcaatgacatc

SEQ ID NO: 5892745 - DNA, 25 bp, Homo sapien
tatttgctaagtgtatttttttgct

SEQ ID NO: 5892746 - DNA, 25 bp, Homo sapien
tagtactggagcgggcattattgct

SEQ ID NO: 5892747 - DNA, 25 bp, Homo sapien
attagggtatttcaaaactgccaag

SEQ ID NO: 5892748 - DNA, 25 bp, Homo sapien
agtgtgggctggacagaggagaagc

SEQ ID NO: 5892749 - DNA, 25 bp, Homo sapien
agaatgccaaggggctgatgtggac

SEQ ID NO: 5892750 - DNA, 25 bp, Homo sapien
gatgacgttctgttttctgtttgta

SEQ ID NO: 5892751 - DNA, 25 bp, Homo sapien
atctgtgaagtgcgtccttgtggac

SEQ ID NO: 5892752 - DNA, 25 bp, Homo sapien
aagttcagggactaagtgcctccag

SEQ ID NO: 5892753 - DNA, 25 bp, Homo sapien
gagcgggcattattgctccatattg

SEQ ID NO: 5892754 - DNA, 25 bp, Homo sapien
agcgcaagcatcatggagacgtggg

SEQ ID NO: 5892755 - DNA, 25 bp, Homo sapien
tccaagaatgtcatgatgatccagt

SEQ ID NO: 5892756 - DNA, 25 bp, Homo sapien
ggatgctccagtgtcaagaaatacc

SEQ ID NO: 5892757 - DNA, 25 bp, Homo sapien
ctgtgaagtgcgtccttgtggacaa

SEQ ID NO: 5892758 - DNA, 25 bp, Homo sapien
aatccccagaaccagtcagatttac

SEQ ID NO: 5892759 - DNA, 25 bp, Homo sapien
tgtgggctggacagaggagaagcgc

SEQ ID NO: 5892760 - DNA, 25 bp, Homo sapien
gcccaaatactgcggctcctgcgta

SEQ ID NO: 5892761 - DNA, 25 bp, Homo sapien
acgaggcatcgttccgactgtacag

SEQ ID NO: 5892762 - DNA, 25 bp, Homo sapien
aatgcagcaagaccaagaaatcccc

SEQ ID NO: 5892763 - DNA, 25 bp, Homo sapien
tatgcaggatgctccagtgtcaaga

SEQ ID NO: 5892764 - DNA, 25 bp, Homo sapien
gtactggagcgggcattattgctcc

SEQ ID NO: 5892765 - DNA, 25 bp, Homo sapien
tgatccagtcctgcaaatgtaacta

SEQ ID NO: 5892766 - DNA, 25 bp, Homo sapien
gaggcatcgttccgactgtacagcc

SEQ ID NO: 5892767 - DNA, 25 bp, Homo sapien
ttggagaagacttcgcttcatagta

SEQ ID NO: 5892768 - DNA, 25 bp, Homo sapien
ctgcacacctctgcagaccagaact

SEQ ID NO: 5892769 - DNA, 25 bp, Homo sapien
tcccgagcggagggggacactctgt

SEQ ID NO: 5892770 - DNA, 25 bp, Homo sapien
taagtgcctccagggttcctagtgt

SEQ ID NO: 5892771 - DNA, 25 bp, Homo sapien
ttctacaattgtaatagagacaaaa

SEQ ID NO: 5892772 - DNA, 25 bp, Homo sapien
agcagcgcagccgcagttggagaag

SEQ ID NO: 5892773 - DNA, 25 bp, Homo sapien
ctgcccgcatcccaacgaggcatcg

SEQ ID NO: 5892774 - DNA, 25 bp, Homo sapien
cttatgcaggatgctccagtgtcaa

SEQ ID NO: 5892775 - DNA, 25 bp, Homo sapien
ttttatttatcaaagtgtagctttt

SEQ ID NO: 5892776 - DNA, 25 bp, Homo sapien
caagaaataccggcccaaatactgc

SEQ ID NO: 5892777 - DNA, 25 bp, Homo sapien
gcagccgcagttggagaagacttcg

SEQ ID NO: 5892778 - DNA, 25 bp, Homo sapien
tgcttgtcctttgacagaagtaaat

SEQ ID NO: 5892779 - DNA, 25 bp, Homo sapien
gtgaaagccctgcttgtcctttgac

SEQ ID NO: 5892780 - DNA, 25 bp, Homo sapien
gattgaatgtttttttatttatcaa

SEQ ID NO: 5892781 - DNA, 25 bp, Homo sapien
ctacctgcactctaaaactgcaaac

SEQ ID NO: 5892782 - DNA, 25 bp, Homo sapien
agtgtccttggggcagctacctgca

SEQ ID NO: 5892783 - DNA, 25 bp, Homo sapien
tgtgaagatgcggttccgatgcgaa

SEQ ID NO: 5892784 - DNA, 25 bp, Homo sapien
ttggagcatgtttacggatgacgtt

SEQ ID NO: 5892785 - DNA, 25 bp, Homo sapien
ggccaagtgaaagccctgcttgtcc

SEQ ID NO: 5892786 - DNA, 25 bp, Homo sapien
cggttccgatgcgaagatggagaga

SEQ ID NO: 5892787 - DNA, 25 bp, Homo sapien
tccagtgtcaagaaataccggccca

SEQ ID NO: 5892788 - DNA, 25 bp, Homo sapien
cagcgcagccgcagttggagaagac

SEQ ID NO: 5892789 - DNA, 25 bp, Homo sapien
atgttttccaagaatgtcatgatga

SEQ ID NO: 5892790 - DNA, 25 bp, Homo sapien
cagaaccagtcagatttacttatgc

SEQ ID NO: 5892791 - DNA, 25 bp, Homo sapien
gctgatgtggacggacagcagcgca

SEQ ID NO: 5892792 - DNA, 25 bp, Homo sapien
ccgcatcccaacgaggcatcgttcc

SEQ ID NO: 5892793 - DNA, 25 bp, Homo sapien
aataagattagttgggccaagtgaa

SEQ ID NO: 5892794 - DNA, 25 bp, Homo sapien
acggacagcagcgcagccgcagttg

SEQ ID NO: 5892795 - DNA, 25 bp, Homo sapien
tgggccaagtgaaagccctgcttgt

SEQ ID NO: 5892796 - DNA, 25 bp, Homo sapien
caaacagaaaccaggtgttttaaga

SEQ ID NO: 5892797 - DNA, 25 bp, Homo sapien
cttgtggacaaccagtgtacagcag

SEQ ID NO: 5892798 - DNA, 25 bp, Homo sapien
tctcattccttcccgagcggagggg

SEQ ID NO: 5892799 - DNA, 25 bp, Homo sapien
ccacaagttcagggactaagtgcct

SEQ ID NO: 5892800 - DNA, 25 bp, Homo sapien
gacttcgcttcatagtactggagcg

SEQ ID NO: 5892801 - DNA, 25 bp, Homo sapien
ggctggacagaggagaagcgcaagc

SEQ ID NO: 5892802 - DNA, 25 bp, Homo sapien
tgcctccagggttcctagtgtgggc

SEQ ID NO: 5892803 - DNA, 25 bp, Homo sapien
ttctgttttctgtttgtaaattatt

SEQ ID NO: 5892804 - DNA, 25 bp, Homo sapien
actggagcgggcattattgctccat

SEQ ID NO: 5892805 - DNA, 25 bp, Homo sapien
gcgcagccgcagttggagaagactt

SEQ ID NO: 5892806 - DNA, 25 bp, Homo sapien
tcatgatgatccagtcctgcaaatg

SEQ ID NO: 5892807 - DNA, 25 bp, Homo sapien
aagacttcgcttcatagtactggag

SEQ ID NO: 5892808 - DNA, 25 bp, Homo sapien
gaaatgtaatactggaataatttgt

SEQ ID NO: 5892809 - DNA, 25 bp, Homo sapien
atgatgatccagtcctgcaaatgta

SEQ ID NO: 5892810 - DNA, 25 bp, Homo sapien
ggagaagacttcgcttcatagtact

SEQ ID NO: 5892811 - DNA, 25 bp, Homo sapien
ttttttatttatcaaagtgtagctt

SEQ ID NO: 5892812 - DNA, 25 bp, Homo sapien
aagccctgcttgtcctttgacagaa

SEQ ID NO: 5892813 - DNA, 25 bp, Homo sapien
agcgcctctcattccttcccgagcg

SEQ ID NO: 5892814 - DNA, 25 bp, Homo sapien
tgtttacggatgacgttctgttttc

SEQ ID NO: 5892815 - DNA, 25 bp, Homo sapien
gcaagaaatgcagcaagaccaagaa

SEQ ID NO: 5892816 - DNA, 25 bp, Homo sapien
agtaaatgaaagcgcctctcattcc

SEQ ID NO: 5892817 - DNA, 25 bp, Homo sapien
atttcaaaactgccaaggggctgat

SEQ ID NO: 5892818 - DNA, 25 bp, Homo sapien
tttgtaaattatttgctaagtgtat

SEQ ID NO: 5892819 - DNA, 25 bp, Homo sapien
accagtgtacagcagcctaaaaaag

SEQ ID NO: 5892820 - DNA, 25 bp, Homo sapien
cagcgcagccgcagttggagaatgc

SEQ ID NO: 5892821 - DNA, 25 bp, Homo sapien
acacctctgcagaccagaactgtga

SEQ ID NO: 5892822 - DNA, 25 bp, Homo sapien
tgcaggatgctccagtgtcaagaaa

SEQ ID NO: 5892823 - DNA, 25 bp, Homo sapien
ctaaaaaagggcaagaaatgcagca

SEQ ID NO: 5892824 - DNA, 25 bp, Homo sapien
acctctgcagaccagaactgtgaag

SEQ ID NO: 5892825 - DNA, 25 bp, Homo sapien
tagcattagggtatttcaaaactgc

SEQ ID NO: 5892826 - DNA, 25 bp, Homo sapien
aactgccaaggggctgatgtggacg

SEQ ID NO: 5892827 - DNA, 25 bp, Homo sapien
actctgtgagtgtccttggggcagc

SEQ ID NO: 5892828 - DNA, 25 bp, Homo sapien
accagtcagatttacttatgcagga

SEQ ID NO: 5892829 - DNA, 25 bp, Homo sapien
cggctcctgcgtagatggccggtgc

SEQ ID NO: 5892830 - DNA, 25 bp, Homo sapien
gttccgactgtacagcctattcaat

SEQ ID NO: 5892831 - DNA, 25 bp, Homo sapien
aaggggctgatgtggacggacagca

SEQ ID NO: 5892832 - DNA, 25 bp, Homo sapien
tcttggttctacaattgtaatagag

SEQ ID NO: 5892833 - DNA, 25 bp, Homo sapien
cctctcattccttcccgagcggagg

SEQ ID NO: 5892834 - DNA, 25 bp, Homo sapien
agaatgtcatgatgatccagtcctg

SEQ ID NO: 5892835 - DNA, 25 bp, Homo sapien
tgcggttccgatgcgaagatggaga

SEQ ID NO: 5892836 - DNA, 25 bp, Homo sapien
gcattagggtatttcaaaactgcca

SEQ ID NO: 5892837 - DNA, 25 bp, Homo sapien
tttacggatgacgttctgttttctg

SEQ ID NO: 5892838 - DNA, 25 bp, Homo sapien
aggatgaatggtgccttgctcattc

SEQ ID NO: 5892839 - DNA, 25 bp, Homo sapien
actaagtgcctccagggttcctagt

SEQ ID NO: 5892840 - DNA, 25 bp, Homo sapien
tgaaagcgcctctcattccttcccg

SEQ ID NO: 5892841 - DNA, 25 bp, Homo sapien
acgtgggtgggcggaggatgaatgg

SEQ ID NO: 5892842 - DNA, 25 bp, Homo sapien
aactacaactgcccgcatcccaacg

SEQ ID NO: 5892843 - DNA, 25 bp, Homo sapien
aggagaagcgcaagcatcatggaga

SEQ ID NO: 5892844 - DNA, 25 bp, Homo sapien
gttcctagtgtgggctggacagagg

SEQ ID NO: 5892845 - DNA, 25 bp, Homo sapien
tcatggagacgtgggtgggcggagg

SEQ ID NO: 5892846 - DNA, 25 bp, Homo sapien
acagaaaccaggtgttttaagattg

SEQ ID NO: 5892847 - DNA, 25 bp, Homo sapien
tgggctggacagaggagaagcgcaa

SEQ ID NO: 5892848 - DNA, 25 bp, Homo sapien
aaatactgcggctcctgcgtagatg

SEQ ID NO: 5892849 - DNA, 25 bp, Homo sapien
ttcaaaactgccaaggggctgatgt

SEQ ID NO: 5892850 - DNA, 25 bp, Homo sapien
tcaaagtgtagcttttggggaggga

SEQ ID NO: 5892851 - DNA, 25 bp, Homo sapien
atgctccagtgtcaagaaataccgg

SEQ ID NO: 5892852 - DNA, 25 bp, Homo sapien
ctggacagaggagaagcgcaagcat

SEQ ID NO: 5892853 - DNA, 25 bp, Homo sapien
attagttgggccaagtgaaagccct

SEQ ID NO: 5892854 - DNA, 25 bp, Homo sapien
caagcatcatggagacgtgggtggg

SEQ ID NO: 5892855 - DNA, 25 bp, Homo sapien
tgctcattcttgagtagcattaggg

SEQ ID NO: 5892856 - DNA, 25 bp, Homo sapien
atgcgaagatggagagatgttttcc

SEQ ID NO: 5892857 - DNA, 25 bp, Homo sapien
tgtaaattatttgctaagtgtattt

SEQ ID NO: 5892858 - DNA, 25 bp, Homo sapien
cttggggcagctacctgcactctaa

SEQ ID NO: 5892859 - DNA, 25 bp, Homo sapien
ctgttttctgtttgtaaattatttg

SEQ ID NO: 5892860 - DNA, 25 bp, Homo sapien
gttccgatgcgaagatggagagatg

SEQ ID NO: 5892861 - DNA, 25 bp, Homo sapien
cccagaaccagtcagatttacttat

SEQ ID NO: 5892862 - DNA, 25 bp, Homo sapien
ccaagtgaaagccctgcttgtcctt

SEQ ID NO: 5892863 - DNA, 25 bp, Homo sapien
gacagaagtaaatgaaagcgcctct

SEQ ID NO: 5892864 - DNA, 25 bp, Homo sapien
tgtcctttgacagaagtaaatgaaa

SEQ ID NO: 5892865 - DNA, 25 bp, Homo sapien
agagacccggatctgtgaagtgcgt

SEQ ID NO: 5892866 - DNA, 25 bp, Homo sapien
atggccggtgctgcacacctctgca

SEQ ID NO: 5892867 - DNA, 25 bp, Homo sapien
gaatgtttttttatttatcaaagtg

SEQ ID NO: 5892868 - DNA, 25 bp, Homo sapien
gcagaccagaactgtgaagatgcgg

SEQ ID NO: 5892869 - DNA, 25 bp, Homo sapien
caagaatgtcatgatgatccagtcc

SEQ ID NO: 5892870 - DNA, 25 bp, Homo sapien
agtagcattagggtatttcaaaact

SEQ ID NO: 5892871 - DNA, 25 bp, Homo sapien
caacgaggcatcgttccgactgtac

SEQ ID NO: 5892872 - DNA, 25 bp, Homo sapien
tccccagaaccagtcagatttactt

SEQ ID NO: 5892873 - DNA, 25 bp, Homo sapien
ggacagcagcgcagccgcagttgga

SEQ ID NO: 5892874 - DNA, 25 bp, Homo sapien
ccggatctgtgaagtgcgtccttgt

SEQ ID NO: 5892875 - DNA, 25 bp, Homo sapien
atcccaacgaggcatcgttccgact

SEQ ID NO: 5892876 - DNA, 25 bp, Homo sapien
gacaaccagtgtacagcagcctaaa

SEQ ID NO: 5892877 - DNA, 25 bp, Homo sapien
aatgacatccacaagttcagggact

SEQ ID NO: 5892878 - DNA, 25 bp, Homo sapien
gggcagctacctgcactctaaaact

SEQ ID NO: 5892879 - DNA, 25 bp, Homo sapien
gggacactctgtgagtgtccttggg

SEQ ID NO: 5892880 - DNA, 25 bp, Homo sapien
gaccaagaaatccccagaaccagtc

SEQ ID NO: 5892881 - DNA, 25 bp, Homo sapien
agccgcagttggagaatgccaaggg

SEQ ID NO: 5892882 - DNA, 25 bp, Homo sapien
aatgaaagcgcctctcattccttcc

SEQ ID NO: 5892883 - DNA, 25 bp, Homo sapien
tacggatgacgttctgttttctgtt

SEQ ID NO: 5892884 - DNA, 25 bp, Homo sapien
ccgcagttggagaagacttcgcttc

SEQ ID NO: 5892885 - DNA, 25 bp, Homo sapien
gggtgggcggaggatgaatggtgcc

SEQ ID NO: 5892886 - DNA, 25 bp, Homo sapien
gggcaagaaatgcagcaagaccaag

SEQ ID NO: 5892887 - DNA, 25 bp, Homo sapien
catagtactggagcgggcattattg

SEQ ID NO: 5892888 - DNA, 25 bp, Homo sapien
cgactgtacagcctattcaatgaca

SEQ ID NO: 5892889 - DNA, 25 bp, Homo sapien
cccaacgaggcatcgttccgactgt

SEQ ID NO: 5892890 - DNA, 25 bp, Homo sapien
gcattattgctccatattggagcat

SEQ ID NO: 5892891 - DNA, 25 bp, Homo sapien
gagcggagggggacactctgtgagt

SEQ ID NO: 5892892 - DNA, 25 bp, Homo sapien
accaggtgttttaagattgaatgtt

SEQ ID NO: 5892893 - DNA, 25 bp, Homo sapien
tattggagcatgtttacggatgacg

SEQ ID NO: 5892894 - DNA, 25 bp, Homo sapien
gcgaagatggagagatgttttccaa

SEQ ID NO: 5892895 - DNA, 25 bp, Homo sapien
gcaaatgtaactacaactgcccgca

SEQ ID NO: 5892896 - DNA, 25 bp, Homo sapien
gggttcctagtgtgggctggacaga

SEQ ID NO: 5892897 - DNA, 25 bp, Homo sapien
agccgcagttggagaagacttcgct

SEQ ID NO: 5892898 - DNA, 25 bp, Homo sapien
tttccaagaatgtcatgatgatcca

SEQ ID NO: 5892899 - DNA, 25 bp, Homo sapien
tgcggctcctgcgtagatggccggt

SEQ ID NO: 5892900 - DNA, 25 bp, Homo sapien
ttcatagtactggagcgggcattat

SEQ ID NO: 5892901 - DNA, 25 bp, Homo sapien
cgtccttgtggacaaccagtgtaca

SEQ ID NO: 5892902 - DNA, 25 bp, Homo sapien
ccaaggggctgatgtggacggacag

SEQ ID NO: 5892903 - DNA, 25 bp, Homo sapien
agagacaaaataagattagttgggc

SEQ ID NO: 5892904 - DNA, 25 bp, Homo sapien
ttgctccatattggagcatgtttac

SEQ ID NO: 5892905 - DNA, 25 bp, Homo sapien
aaaaaagggcaagaaatgcagcaag

SEQ ID NO: 5892906 - DNA, 25 bp, Homo sapien
tgacatccacaagttcagggactaa

SEQ ID NO: 5892907 - DNA, 25 bp, Homo sapien
agggactaagtgcctccagggttcc

SEQ ID NO: 5892908 - DNA, 25 bp, Homo sapien
ccgagcggagggggacactctgtga

SEQ ID NO: 5892909 - DNA, 25 bp, Homo sapien
aagaaatccccagaaccagtcagat

SEQ ID NO: 5892910 - DNA, 25 bp, Homo sapien
ggccggtgctgcacacctctgcaga

SEQ ID NO: 5892911 - DNA, 25 bp, Homo sapien
gcggagggggacactctgtgagtgt

SEQ ID NO: 5892912 - DNA, 25 bp, Homo sapien
tgagtagcattagggtatttcaaaa

SEQ ID NO: 5892913 - DNA, 25 bp, Homo sapien
atgtggacggacagcagcgcagccg

SEQ ID NO: 5892914 - DNA, 25 bp, Homo sapien
gcctattcaatgacatccacaagtt

SEQ ID NO: 5892915 - DNA, 25 bp, Homo sapien
ggaggatgaatggtgccttgctcat

SEQ ID NO: 5892916 - DNA, 25 bp, Homo sapien
acaagttcagggactaagtgcctcc

SEQ ID NO: 5892917 - DNA, 25 bp, Homo sapien
gaaatgcagcaagaccaagaaatcc

SEQ ID NO: 5892918 - DNA, 25 bp, Homo sapien
tgcgtccttgtggacaaccagtgta

SEQ ID NO: 5892919 - DNA, 25 bp, Homo sapien
gtaatactggaataatttgtaaatg

SEQ ID NO: 5892920 - DNA, 25 bp, Homo sapien
agatggccggtgctgcacacctctg

SEQ ID NO: 5892921 - DNA, 25 bp, Homo sapien
gtgccttgctcattcttgagtagca

SEQ ID NO: 5892922 - DNA, 25 bp, Homo sapien
tgcagcaagaccaagaaatccccag

SEQ ID NO: 5892923 - DNA, 25 bp, Homo sapien
gcactctaaaactgcaaacagaaac

SEQ ID NO: 5892924 - DNA, 25 bp, Homo sapien
acatccacaagttcagggactaagt

SEQ ID NO: 5892925 - DNA, 25 bp, Homo sapien
tagttgggccaagtgaaagccctgc

SEQ ID NO: 5892926 - DNA, 25 bp, Homo sapien
cagcaagaccaagaaatccccagaa

SEQ ID NO: 5892927 - DNA, 25 bp, Homo sapien
acaaaataagattagttgggccaag

SEQ ID NO: 5892928 - DNA, 25 bp, Homo sapien
agagatgttttccaagaatgtcatg

SEQ ID NO: 5892929 - DNA, 25 bp, Homo sapien
gtgaagtgcgtccttgtggacaacc

SEQ ID NO: 5892930 - DNA, 25 bp, Homo sapien
gttgggccaagtgaaagccctgctt

SEQ ID NO: 5892931 - DNA, 25 bp, Homo sapien
cgcctctcattccttcccgagcgga

SEQ ID NO: 5892932 - DNA, 25 bp, Homo sapien
taaattatttgctaagtgtattttt

SEQ ID NO: 5892933 - DNA, 25 bp, Homo sapien
tgccaaggggctgatgtggacggac

SEQ ID NO: 5892934 - DNA, 25 bp, Homo sapien
acagcagcctaaaaaagggcaagaa

SEQ ID NO: 5892935 - DNA, 25 bp, Homo sapien
gcccgcatcccaacgaggcatcgtt

SEQ ID NO: 5892936 - DNA, 25 bp, Homo sapien
ttgacagaagtaaatgaaagcgcct

SEQ ID NO: 5892937 - DNA, 25 bp, Homo sapien
tagggtatttcaaaactgccaaggg

SEQ ID NO: 5892938 - DNA, 25 bp, Homo sapien
tccttcccgagcggagggggacact

SEQ ID NO: 5892939 - DNA, 25 bp, Homo sapien
ctcattcttgagtagcattagggta

SEQ ID NO: 5892940 - DNA, 25 bp, Homo sapien
tccagggttcctagtgtgggctgga

SEQ ID NO: 5892941 - DNA, 25 bp, Homo sapien
gcagttggagaatgccaaggggctg

SEQ ID NO: 5892942 - DNA, 25 bp, Homo sapien
tccgatgcgaagatggagagatgtt

SEQ ID NO: 5892943 - DNA, 25 bp, Homo sapien
tcgcttcatagtactggagcgggca

SEQ ID NO: 5892944 - DNA, 25 bp, Homo sapien
cagtcagatttacttatgcaggatg

SEQ ID NO: 5892945 - DNA, 25 bp, Homo sapien
ggatctgtgaagtgcgtccttgtgg

SEQ ID NO: 5892946 - DNA, 25 bp, Homo sapien
gcgtagatggccggtgctgcacacc

SEQ ID NO: 5892947 - DNA, 25 bp, Homo sapien
ctaagtgtatttttttgctccagac

SEQ ID NO: 5892948 - DNA, 25 bp, Homo sapien
tgtggacaaccagtgtacagcagcc

SEQ ID NO: 5892949 - DNA, 25 bp, Homo sapien
aactgcccgcatcccaacgaggcat

SEQ ID NO: 5892950 - DNA, 25 bp, Homo sapien
agaagacttcgcttcatagtactgg

SEQ ID NO: 5892951 - DNA, 25 bp, Homo sapien
attcaatgacatccacaagttcagg

SEQ ID NO: 5892952 - DNA, 25 bp, Homo sapien
ctctgcagaccagaactgtgaagat

SEQ ID NO: 5892953 - DNA, 25 bp, Homo sapien
gtgggtgggcggaggatgaatggtg

SEQ ID NO: 5892954 - DNA, 25 bp, Homo sapien
cagtgtacagcagcctaaaaaaggg

SEQ ID NO: 5892955 - DNA, 25 bp, Homo sapien
gggcggaggatgaatggtgccttgc

SEQ ID NO: 5892956 - DNA, 25 bp, Homo sapien
ctagtgtgggctggacagaggagaa

SEQ ID NO: 5892957 - DNA, 25 bp, Homo sapien
tccgactgtacagcctattcaatga

SEQ ID NO: 5892958 - DNA, 25 bp, Homo sapien
cggcccaaatactgcggctcctgcg

SEQ ID NO: 5892959 - DNA, 25 bp, Homo sapien
aaaccaggtgttttaagattgaatg

SEQ ID NO: 5892960 - DNA, 25 bp, Homo sapien
tgcaaacagaaaccaggtgttttaa

SEQ ID NO: 5892961 - DNA, 25 bp, Homo sapien
cgcaagcatcatggagacgtgggtg

SEQ ID NO: 5892962 - DNA, 25 bp, Homo sapien
atgtaactacaactgcccgcatccc

SEQ ID NO: 5892963 - DNA, 25 bp, Homo sapien
aagaccaagaaatccccagaaccag

SEQ ID NO: 5892964 - DNA, 25 bp, Homo sapien
gggaaatgtaatactggaataattt

SEQ ID NO: 5892965 - DNA, 25 bp, Homo sapien
gaagcgcaagcatcatggagacgtg

SEQ ID NO: 5892966 - DNA, 25 bp, Homo sapien
atccacaagttcagggactaagtgc

SEQ ID NO: 5892967 - DNA, 25 bp, Homo sapien
tgagtgtccttggggcagctacctg

SEQ ID NO: 5892968 - DNA, 25 bp, Homo sapien
agcagcgcagccgcagttggagaat

SEQ ID NO: 5892969 - DNA, 25 bp, Homo sapien
gccctgcttgtcctttgacagaagt

SEQ ID NO: 5892970 - DNA, 25 bp, Homo sapien
gatttacttatgcaggatgctccag

SEQ ID NO: 5892971 - DNA, 25 bp, Homo sapien
agttggagaagacttcgcttcatag

SEQ ID NO: 5892972 - DNA, 25 bp, Homo sapien
tgaatggtgccttgctcattcttga

SEQ ID NO: 5892973 - DNA, 25 bp, Homo sapien
gtgggcggaggatgaatggtgcctt

SEQ ID NO: 5892974 - DNA, 25 bp, Homo sapien
ttggttctacaattgtaatagagac

SEQ ID NO: 5892975 - DNA, 25 bp, Homo sapien
tggtgccttgctcattcttgagtag

SEQ ID NO: 5892976 - DNA, 25 bp, Homo sapien
agacccggatctgtgaagtgcgtcc

SEQ ID NO: 5892977 - DNA, 25 bp, Homo sapien
agatgttttccaagaatgtcatgat

SEQ ID NO: 5892978 - DNA, 25 bp, Homo sapien
caaccagtgtacagcagcctaaaaa

SEQ ID NO: 5892979 - DNA, 25 bp, Homo sapien
caggatgctccagtgtcaagaaata

SEQ ID NO: 5892980 - DNA, 25 bp, Homo sapien
ctgccaaggggctgatgtggacgga

SEQ ID NO: 5892981 - DNA, 25 bp, Homo sapien
agcagcctaaaaaagggcaagaaat

SEQ ID NO: 5892982 - DNA, 25 bp, Homo sapien
tttacttatgcaggatgctccagtg

SEQ ID NO: 5892983 - DNA, 25 bp, Homo sapien
ccaaatactgcggctcctgcgtaga

SEQ ID NO: 5892984 - DNA, 25 bp, Homo sapien
gcacacctctgcagaccagaactgt

SEQ ID NO: 5892985 - DNA, 25 bp, Homo sapien
gttttccaagaatgtcatgatgatc

SEQ ID NO: 5892986 - DNA, 25 bp, Homo sapien
atactgcggctcctgcgtagatggc

SEQ ID NO: 5892987 - DNA, 25 bp, Homo sapien
gctcctgcgtagatggccggtgctg

SEQ ID NO: 5892988 - DNA, 25 bp, Homo sapien
tttctgtttgtaaattatttgctaa

SEQ ID NO: 5892989 - DNA, 25 bp, Homo sapien
ccgcagttggagaatgccaaggggc

SEQ ID NO: 5892990 - DNA, 25 bp, Homo sapien
gcatcccaacgaggcatcgttccga

SEQ ID NO: 5892991 - DNA, 25 bp, Homo sapien
ccagtcctgcaaatgtaactacaac

SEQ ID NO: 5892992 - DNA, 25 bp, Homo sapien
cttgctcattcttgagtagcattag

SEQ ID NO: 5892993 - DNA, 25 bp, Homo sapien
tgtcatgatgatccagtcctgcaaa

SEQ ID NO: 5892994 - DNA, 25 bp, Homo sapien
ccggtgctgcacacctctgcagacc

SEQ ID NO: 5892995 - DNA, 25 bp, Homo sapien
tgtacagcctattcaatgacatcca

SEQ ID NO: 5892996 - DNA, 25 bp, Homo sapien
gcttcatagtactggagcgggcatt

SEQ ID NO: 5892997 - DNA, 25 bp, Homo sapien
aagattgaatgtttttttatttatc

SEQ ID NO: 5892998 - DNA, 25 bp, Homo sapien
acaactgcccgcatcccaacgaggc

SEQ ID NO: 5892999 - DNA, 25 bp, Homo sapien
gcaagaccaagaaatccccagaacc

SEQ ID NO: 5893000 - DNA, 25 bp, Homo sapien
cggatgacgttctgttttctgtttg

SEQ ID NO: 5893001 - DNA, 25 bp, Homo sapien
ggtgctgcacacctctgcagaccag

SEQ ID NO: 5893002 - DNA, 25 bp, Homo sapien
agttggagaatgccaaggggctgat

SEQ ID NO: 5893003 - DNA, 25 bp, Homo sapien
ctgcactctaaaactgcaaacagaa

SEQ ID NO: 5893004 - DNA, 25 bp, Homo sapien
tatcaaagtgtagcttttggggagg

SEQ ID NO: 5893005 - DNA, 25 bp, Homo sapien
acctgcactctaaaactgcaaacag

SEQ ID NO: 5893006 - DNA, 25 bp, Homo sapien
aatgtcatgatgatccagtcctgca

SEQ ID NO: 5893007 - DNA, 25 bp, Homo sapien
agcatcatggagacgtgggtgggcg

SEQ ID NO: 5893008 - DNA, 25 bp, Homo sapien
cgatgcgaagatggagagatgtttt

SEQ ID NO: 5893009 - DNA, 25 bp, Homo sapien
cttgagtagcattagggtatttcaa

SEQ ID NO: 5893010 - DNA, 25 bp, Homo sapien
ggagcatgtttacggatgacgttct

SEQ ID NO: 5893011 - DNA, 25 bp, Homo sapien
aagaaatgcagcaagaccaagaaat

SEQ ID NO: 5893012 - DNA, 25 bp, Homo sapien
cctccagggttcctagtgtgggctg

SEQ ID NO: 5893013 - DNA, 25 bp, Homo sapien
catgtttacggatgacgttctgttt

SEQ ID NO: 5893014 - DNA, 25 bp, Homo sapien
gtacagcagcctaaaaaagggcaag

SEQ ID NO: 5893015 - DNA, 25 bp, Homo sapien
gggtatttcaaaactgccaaggggc

SEQ ID NO: 5893016 - DNA, 25 bp, Homo sapien
ctgcgtagatggccggtgctgcaca

SEQ ID NO: 5893017 - DNA, 25 bp, Homo sapien
tggggcagctacctgcactctaaaa

SEQ ID NO: 5893018 - DNA, 25 bp, Homo sapien
aaataccggcccaaatactgcggct

SEQ ID NO: 5893019 - DNA, 25 bp, Homo sapien
ggcatcgttccgactgtacagccta

SEQ ID NO: 5893020 - DNA, 25 bp, Homo sapien
cagtgtcaagaaataccggcccaaa

SEQ ID NO: 5893021 - DNA, 25 bp, Homo sapien
gctccagtgtcaagaaataccggcc

SEQ ID NO: 5893022 - DNA, 25 bp, Homo sapien
gaagtgcgtccttgtggacaaccag

SEQ ID NO: 5893023 - DNA, 25 bp, Homo sapien
attatttgctaagtgtatttttttg

SEQ ID NO: 5893024 - DNA, 25 bp, Homo sapien
taaaactgcaaacagaaaccaggtg

SEQ ID NO: 5893025 - DNA, 25 bp, Homo sapien
tttgctaagtgtatttttttgctcc

SEQ ID NO: 5893026 - DNA, 25 bp, Homo sapien
gcagctacctgcactctaaaactgc

SEQ ID NO: 5893027 - DNA, 25 bp, Homo sapien
tgaaagagacccggatctgtgaagt

SEQ ID NO: 5893028 - DNA, 25 bp, Homo sapien
aaactgcaaacagaaaccaggtgtt

SEQ ID NO: 5893029 - DNA, 25 bp, Homo sapien
tattgctccatattggagcatgttt

SEQ ID NO: 5893030 - DNA, 25 bp, Homo sapien
tctgtttgtaaattatttgctaagt

SEQ ID NO: 5893031 - DNA, 25 bp, Homo sapien
agacaaaataagattagttgggcca

SEQ ID NO: 5893032 - DNA, 25 bp, Homo sapien
gcgggcattattgctccatattgga

SEQ ID NO: 5893033 - DNA, 25 bp, Homo sapien
actgtgaagatgcggttccgatgcg

SEQ ID NO: 5893034 - DNA, 25 bp, Homo sapien
aaagcgcctctcattccttcccgag

SEQ ID NO: 5893035 - DNA, 25 bp, Homo sapien
tcctttgacagaagtaaatgaaagc

SEQ ID NO: 5893036 - DNA, 25 bp, Homo sapien
aagatgcggttccgatgcgaagatg

SEQ ID NO: 5893037 - DNA, 25 bp, Homo sapien
tctaaaactgcaaacagaaaccagg

SEQ ID NO: 5893038 - DNA, 25 bp, Homo sapien
attattgctccatattggagcatgt

SEQ ID NO: 5893039 - DNA, 25 bp, Homo sapien
gcctaaaaaagggcaagaaatgcag

SEQ ID NO: 5893040 - DNA, 25 bp, Homo sapien
gcgcagccgcagttggagaatgcca

SEQ ID NO: 5893041 - DNA, 25 bp, Homo sapien
catattggagcatgtttacggatga

SEQ ID NO: 5893042 - DNA, 25 bp, Homo sapien
tgatgtggacggacagcagcgcagc

SEQ ID NO: 5893043 - DNA, 25 bp, Homo sapien
gttttctgtttgtaaattatttgct

SEQ ID NO: 5893044 - DNA, 25 bp, Homo sapien
gcagttggagaagacttcgcttcat

SEQ ID NO: 5893045 - DNA, 25 bp, Homo sapien
gtcaagaaataccggcccaaatact

SEQ ID NO: 5893046 - DNA, 25 bp, Homo sapien
ctgcaaatgtaactacaactgcccg

SEQ ID NO: 5893047 - DNA, 25 bp, Homo sapien
ccaagaaatccccagaaccagtcag

SEQ ID NO: 5893048 - DNA, 25 bp, Homo sapien
tcctgcaaatgtaactacaactgcc

SEQ ID NO: 5893049 - DNA, 25 bp, Homo sapien
gatgatccagtcctgcaaatgtaac

SEQ ID NO: 5893050 - DNA, 25 bp, Homo sapien
ggactaagtgcctccagggttccta

SEQ ID NO: 5893051 - DNA, 25 bp, Homo sapien
gatgcggttccgatgcgaagatgga

SEQ ID NO: 5893052 - DNA, 25 bp, Homo sapien
cagcctaaaaaagggcaagaaatgc

SEQ ID NO: 5893053 - DNA, 25 bp, Homo sapien
ctattcaatgacatccacaagttca

SEQ ID NO: 5893054 - DNA, 25 bp, Homo sapien
aaagagacccggatctgtgaagtgc

SEQ ID NO: 5893055 - DNA, 25 bp, Homo sapien
cgttctgttttctgtttgtaaatta

SEQ ID NO: 5893056 - DNA, 25 bp, Homo sapien
ctacaactgcccgcatcccaacgag

SEQ ID NO: 5893057 - DNA, 25 bp, Homo sapien
gccttgctcattcttgagtagcatt

SEQ ID NO: 5893058 - DNA, 25 bp, Homo sapien
cagaagtaaatgaaagcgcctctca

SEQ ID NO: 5893059 - DNA, 25 bp, Homo sapien
catcgttccgactgtacagcctatt

SEQ ID NO: 5893060 - DNA, 25 bp, Homo sapien
agtcctgcaaatgtaactacaactg

SEQ ID NO: 5893061 - DNA, 25 bp, Homo sapien
actgcggctcctgcgtagatggccg

SEQ ID NO: 5893062 - DNA, 25 bp, Homo sapien
agctacctgcactctaaaactgcaa

SEQ ID NO: 5893063 - DNA, 25 bp, Homo sapien
tcctagtgtgggctggacagaggag

SEQ ID NO: 5893064 - DNA, 25 bp, Homo sapien
atgtttttttatttatcaaagtgta

SEQ ID NO: 5893065 - DNA, 25 bp, Homo sapien
cattcttgagtagcattagggtatt

SEQ ID NO: 5893066 - DNA, 25 bp, Homo sapien
tggagcgggcattattgctccatat

SEQ ID NO: 5893067 - DNA, 25 bp, Homo sapien
tttcttggttctacaattgtaatag

SEQ ID NO: 5893068 - DNA, 25 bp, Homo sapien
gtgtacagcagcctaaaaaagggca

SEQ ID NO: 5893069 - DNA, 25 bp, Homo sapien
ggacggacagcagcgcagccgcagt

SEQ ID NO: 5893070 - DNA, 25 bp, Homo sapien
cctttcttggttctacaattgtaat

SEQ ID NO: 5893071 - DNA, 25 bp, Homo sapien
gtgtatttttttgctccagaccccc

SEQ ID NO: 5893072 - DNA, 25 bp, Homo sapien
ggagacgtgggtgggcggaggatga

SEQ ID NO: 5893073 - DNA, 25 bp, Homo sapien
agaaaccaggtgttttaagattgaa

SEQ ID NO: 5893074 - DNA, 25 bp, Homo sapien
gtaactacaactgcccgcatcccaa

SEQ ID NO: 5893075 - DNA, 25 bp, Homo sapien
gggctgatgtggacggacagcagcg

SEQ ID NO: 5893076 - DNA, 25 bp, Homo sapien
agtgcctccagggttcctagtgtgg

SEQ ID NO: 5893077 - DNA, 25 bp, Homo sapien
tgctgcacacctctgcagaccagaa

SEQ ID NO: 5893078 - DNA, 25 bp, Homo sapien
caggtgttttaagattgaatgtttt

SEQ ID NO: 5893079 - DNA, 25 bp, Homo sapien
atccagtcctgcaaatgtaactaca

SEQ ID NO: 5893080 - DNA, 25 bp, Homo sapien
aagggcaagaaatgcagcaagacca

SEQ ID NO: 5893081 - DNA, 25 bp, Homo sapien
cttcccgagcggagggggacactct

SEQ ID NO: 5893082 - DNA, 25 bp, Homo sapien
ttatttatcaaagtgtagcttttgg

SEQ ID NO: 5893083 - DNA, 25 bp, Homo sapien
ggagagatgttttccaagaatgtca

SEQ ID NO: 5893084 - DNA, 25 bp, Homo sapien
acagaggagaagcgcaagcatcatg

SEQ ID NO: 5893085 - DNA, 25 bp, Homo sapien
tcctgcgtagatggccggtgctgca

SEQ ID NO: 5893086 - DNA, 25 bp, Homo sapien
agcatgtttacggatgacgttctgt

SEQ ID NO: 5893087 - DNA, 25 bp, Homo sapien
cagatttacttatgcaggatgctcc

SEQ ID NO: 5893088 - DNA, 25 bp, Homo sapien
tccatattggagcatgtttacggat

SEQ ID NO: 5893089 - DNA, 25 bp, Homo sapien
gaaccagtcagatttacttatgcag

SEQ ID NO: 5893090 - DNA, 25 bp, Homo sapien
tgcagaggtgtgcagcaccggccat

SEQ ID NO: 5893091 - DNA, 25 bp, Homo sapien
agagtgtccccctccgctcgggaag

SEQ ID NO: 5893092 - DNA, 25 bp, Homo sapien
tcggaaccgcatcttcacagttctg

SEQ ID NO: 5893093 - DNA, 25 bp, Homo sapien
atggagcaataatgcccgctccagt

SEQ ID NO: 5893094 - DNA, 25 bp, Homo sapien
gcagggctttcacttggcccaacta

SEQ ID NO: 5893095 - DNA, 25 bp, Homo sapien
tccaactgcggctgcgctgctgtcc

SEQ ID NO: 5893096 - DNA, 25 bp, Homo sapien
ccggtatttcttgacactggagcat

SEQ ID NO: 5893097 - DNA, 25 bp, Homo sapien
ttctgtcaaaggacaagcagggctt

SEQ ID NO: 5893098 - DNA, 25 bp, Homo sapien
ttgtctctattacaattgtagaacc

SEQ ID NO: 5893099 - DNA, 25 bp, Homo sapien
aagcagggctttcacttggcccaac

SEQ ID NO: 5893100 - DNA, 25 bp, Homo sapien
atccgtaaacatgctccaatatgga

SEQ ID NO: 5893101 - DNA, 25 bp, Homo sapien
ggtgtgcagcaccggccatctacgc

SEQ ID NO: 5893102 - DNA, 25 bp, Homo sapien
actgcggctgcgctgctgtccgtcc

SEQ ID NO: 5893103 - DNA, 25 bp, Homo sapien
gatgcgggcagttgtagttacattt

SEQ ID NO: 5893104 - DNA, 25 bp, Homo sapien
tccatgatgcttgcgcttctcctct

SEQ ID NO: 5893105 - DNA, 25 bp, Homo sapien
ggctgctgtacactggttgtccaca

SEQ ID NO: 5893106 - DNA, 25 bp, Homo sapien
ggagcaataatgcccgctccagtac

SEQ ID NO: 5893107 - DNA, 25 bp, Homo sapien
ccgtaaacatgctccaatatggagc

SEQ ID NO: 5893108 - DNA, 25 bp, Homo sapien
attgaataggctgtacagtcggaac

SEQ ID NO: 5893109 - DNA, 25 bp, Homo sapien
agttttagagtgcaggtagctgccc

SEQ ID NO: 5893110 - DNA, 25 bp, Homo sapien
gtcttgctgcatttcttgccctttt

SEQ ID NO: 5893111 - DNA, 25 bp, Homo sapien
ggagccgcagtatttgggccggtat

SEQ ID NO: 5893112 - DNA, 25 bp, Homo sapien
tgtagttacatttgcaggactggat

SEQ ID NO: 5893113 - DNA, 25 bp, Homo sapien
gtccgtccacatcagccccttggca

SEQ ID NO: 5893114 - DNA, 25 bp, Homo sapien
ggttctggggatttcttggtcttgc

SEQ ID NO: 5893115 - DNA, 25 bp, Homo sapien
cttctccaactgcggctgcgctgct

SEQ ID NO: 5893116 - DNA, 25 bp, Homo sapien
attctccaactgcggctgcgctgct

SEQ ID NO: 5893117 - DNA, 25 bp, Homo sapien
tgacattcttggaaaacatctctcc

SEQ ID NO: 5893118 - DNA, 25 bp, Homo sapien
accggccatctacgcaggagccgca

SEQ ID NO: 5893119 - DNA, 25 bp, Homo sapien
tgtccagcccacactaggaaccctg

SEQ ID NO: 5893120 - DNA, 25 bp, Homo sapien
cgtccacatcagccccttggcagtt

SEQ ID NO: 5893121 - DNA, 25 bp, Homo sapien
cactggagcatcctgcataagtaaa

SEQ ID NO: 5893122 - DNA, 25 bp, Homo sapien
catgatgcttgcgcttctcctctgt

SEQ ID NO: 5893123 - DNA, 25 bp, Homo sapien
aaccctggaggcacttagtccctga

SEQ ID NO: 5893124 - DNA, 25 bp, Homo sapien
aacatctctccatcttcgcatcgga

SEQ ID NO: 5893125 - DNA, 25 bp, Homo sapien
aaaacacctggtttctgtttgcagt

SEQ ID NO: 5893126 - DNA, 25 bp, Homo sapien
cactttgataaataaaaaaacattc

SEQ ID NO: 5893127 - DNA, 25 bp, Homo sapien
gcagttttagagtgcaggtagctgc

SEQ ID NO: 5893128 - DNA, 25 bp, Homo sapien
ccctggaggcacttagtccctgaac

SEQ ID NO: 5893129 - DNA, 25 bp, Homo sapien
gcaaggcaccattcatcctccgccc

SEQ ID NO: 5893130 - DNA, 25 bp, Homo sapien
atgcctcgttgggatgcgggcagtt

SEQ ID NO: 5893131 - DNA, 25 bp, Homo sapien
agtcggaacgatgcctcgttgggat

SEQ ID NO: 5893132 - DNA, 25 bp, Homo sapien
tttcatttacttctgtcaaaggaca

SEQ ID NO: 5893133 - DNA, 25 bp, Homo sapien
ctggtctgcagaggtgtgcagcacc

SEQ ID NO: 5893134 - DNA, 25 bp, Homo sapien
ggcaccattcatcctccgcccaccc

SEQ ID NO: 5893135 - DNA, 25 bp, Homo sapien
gaaaacagaacgtcatccgtaaaca

SEQ ID NO: 5893136 - DNA, 25 bp, Homo sapien
tatttcttgacactggagcatcctg

SEQ ID NO: 5893137 - DNA, 25 bp, Homo sapien
tccccctccgctcgggaaggaatga

SEQ ID NO: 5893138 - DNA, 25 bp, Homo sapien
acagtcggaacgatgcctcgttggg

SEQ ID NO: 5893139 - DNA, 25 bp, Homo sapien
ctggttctggggatttcttggtctt

SEQ ID NO: 5893140 - DNA, 25 bp, Homo sapien
ccctaatgctactcaagaatgagca

SEQ ID NO: 5893141 - DNA, 25 bp, Homo sapien
atgaagcgaagtcttctccaactgc

SEQ ID NO: 5893142 - DNA, 25 bp, Homo sapien
cagccccttggcattctccaactgc

SEQ ID NO: 5893143 - DNA, 25 bp, Homo sapien
ataagtaaatctgactggttctggg

SEQ ID NO: 5893144 - DNA, 25 bp, Homo sapien
attcatcctccgcccacccacgtct

SEQ ID NO: 5893145 - DNA, 25 bp, Homo sapien
agccgcagtatttgggccggtattt

SEQ ID NO: 5893146 - DNA, 25 bp, Homo sapien
gtccacatcagccccttggcattct

SEQ ID NO: 5893147 - DNA, 25 bp, Homo sapien
tgaataggctgtacagtcggaacga

SEQ ID NO: 5893148 - DNA, 25 bp, Homo sapien
gttgtagttacatttgcaggactgg

SEQ ID NO: 5893149 - DNA, 25 bp, Homo sapien
cttcacagttctggtctgcagaggt

SEQ ID NO: 5893150 - DNA, 25 bp, Homo sapien
tccaatatggagcaataatgcccgc

SEQ ID NO: 5893151 - DNA, 25 bp, Homo sapien
gcatttcttgcccttttttaggctg

SEQ ID NO: 5893152 - DNA, 25 bp, Homo sapien
acttagcaaataatttacaaacaga

SEQ ID NO: 5893153 - DNA, 25 bp, Homo sapien
gtctggagcaaaaaaatacacttag

SEQ ID NO: 5893154 - DNA, 25 bp, Homo sapien
gggggtctggagcaaaaaaatacac

SEQ ID NO: 5893155 - DNA, 25 bp, Homo sapien
ttagtccctgaacttgtggatgtca

SEQ ID NO: 5893156 - DNA, 25 bp, Homo sapien
acaaggacgcacttcacagatccgg

SEQ ID NO: 5893157 - DNA, 25 bp, Homo sapien
tctccatgatgcttgcgcttctcct

SEQ ID NO: 5893158 - DNA, 25 bp, Homo sapien
aataccctaatgctactcaagaatg

SEQ ID NO: 5893159 - DNA, 25 bp, Homo sapien
tctccatcttcgcatcggaaccgca

SEQ ID NO: 5893160 - DNA, 25 bp, Homo sapien
tcctgcataagtaaatctgactggt

SEQ ID NO: 5893161 - DNA, 25 bp, Homo sapien
aatgagaggcgctttcatttacttc

SEQ ID NO: 5893162 - DNA, 25 bp, Homo sapien
ttctggggatttcttggtcttgctg

SEQ ID NO: 5893163 - DNA, 25 bp, Homo sapien
caactgcggctgcgctgctgtccgt

SEQ ID NO: 5893164 - DNA, 25 bp, Homo sapien
tcattgaataggctgtacagtcgga

SEQ ID NO: 5893165 - DNA, 25 bp, Homo sapien
ttggaaaacatctctccatcttcgc

SEQ ID NO: 5893166 - DNA, 25 bp, Homo sapien
tgcggctgcgctgctgtccgtccac

SEQ ID NO: 5893167 - DNA, 25 bp, Homo sapien
gatcatcatgacattcttggaaaac

SEQ ID NO: 5893168 - DNA, 25 bp, Homo sapien
cacgtctccatgatgcttgcgcttc

SEQ ID NO: 5893169 - DNA, 25 bp, Homo sapien
aacacctggtttctgtttgcagttt

SEQ ID NO: 5893170 - DNA, 25 bp, Homo sapien
ggaggcacttagtccctgaacttgt

SEQ ID NO: 5893171 - DNA, 25 bp, Homo sapien
caggagccgcagtatttgggccggt

SEQ ID NO: 5893172 - DNA, 25 bp, Homo sapien
aaggacaagcagggctttcacttgg

SEQ ID NO: 5893173 - DNA, 25 bp, Homo sapien
tgcgggcagttgtagttacatttgc

SEQ ID NO: 5893174 - DNA, 25 bp, Homo sapien
tcaagaatgagcaaggcaccattca

SEQ ID NO: 5893175 - DNA, 25 bp, Homo sapien
tggtcttgctgcatttcttgccctt

SEQ ID NO: 5893176 - DNA, 25 bp, Homo sapien
caaataatttacaaacagaaaacag

SEQ ID NO: 5893177 - DNA, 25 bp, Homo sapien
ctttcacttggcccaactaatctta

SEQ ID NO: 5893178 - DNA, 25 bp, Homo sapien
aaaacattcaatcttaaaacacctg

SEQ ID NO: 5893179 - DNA, 25 bp, Homo sapien
cttggcccaactaatcttattttgt

SEQ ID NO: 5893180 - DNA, 25 bp, Homo sapien
agcaaataatttacaaacagaaaac

SEQ ID NO: 5893181 - DNA, 25 bp, Homo sapien
ttaaaacacctggtttctgtttgca

SEQ ID NO: 5893182 - DNA, 25 bp, Homo sapien
ttcaatcttaaaacacctggtttct

SEQ ID NO: 5893183 - DNA, 25 bp, Homo sapien
cacctggtttctgtttgcagtttta

SEQ ID NO: 5893184 - DNA, 25 bp, Homo sapien
gtctctattacaattgtagaaccaa

SEQ ID NO: 5893185 - DNA, 25 bp, Homo sapien
ccattcatcctccgcccacccacgt

SEQ ID NO: 5893186 - DNA, 25 bp, Homo sapien
ctgtacagtcggaacgatgcctcgt

SEQ ID NO: 5893187 - DNA, 25 bp, Homo sapien
ggaaggaatgagaggcgctttcatt

SEQ ID NO: 5893188 - DNA, 25 bp, Homo sapien
aacttgtggatgtcattgaataggc

SEQ ID NO: 5893189 - DNA, 25 bp, Homo sapien
ggaacgatgcctcgttgggatgcgg

SEQ ID NO: 5893190 - DNA, 25 bp, Homo sapien
ttctgtttgcagttttagagtgcag

SEQ ID NO: 5893191 - DNA, 25 bp, Homo sapien
aataatttacaaacagaaaacagaa

SEQ ID NO: 5893192 - DNA, 25 bp, Homo sapien
gctttcatttacttctgtcaaagga

SEQ ID NO: 5893193 - DNA, 25 bp, Homo sapien
agggctttcacttggcccaactaat

SEQ ID NO: 5893194 - DNA, 25 bp, Homo sapien
ctgtcaaaggacaagcagggctttc

SEQ ID NO: 5893195 - DNA, 25 bp, Homo sapien
tccatcttcgcatcggaaccgcatc

SEQ ID NO: 5893196 - DNA, 25 bp, Homo sapien
agtgtccccctccgctcgggaagga

SEQ ID NO: 5893197 - DNA, 25 bp, Homo sapien
ctattacaattgtagaaccaagaaa

SEQ ID NO: 5893198 - DNA, 25 bp, Homo sapien
ctgtccgtccacatcagccccttgg

SEQ ID NO: 5893199 - DNA, 25 bp, Homo sapien
tagttacatttgcaggactggatca

SEQ ID NO: 5893200 - DNA, 25 bp, Homo sapien
ttcacttggcccaactaatcttatt

SEQ ID NO: 5893201 - DNA, 25 bp, Homo sapien
tccctccccaaaagctacactttga

SEQ ID NO: 5893202 - DNA, 25 bp, Homo sapien
tggcagttttgaaataccctaatgc

SEQ ID NO: 5893203 - DNA, 25 bp, Homo sapien
ttgggatgcgggcagttgtagttac

SEQ ID NO: 5893204 - DNA, 25 bp, Homo sapien
acattcttggaaaacatctctccat

SEQ ID NO: 5893205 - DNA, 25 bp, Homo sapien
tctccaactgcggctgcgctgctgt

SEQ ID NO: 5893206 - DNA, 25 bp, Homo sapien
tacactggttgtccacaaggacgca

SEQ ID NO: 5893207 - DNA, 25 bp, Homo sapien
gaagcgaagtcttctccaactgcgg

SEQ ID NO: 5893208 - DNA, 25 bp, Homo sapien
attacaattgtagaaccaagaaagg

SEQ ID NO: 5893209 - DNA, 25 bp, Homo sapien
gccccttggcattctccaactgcgg

SEQ ID NO: 5893210 - DNA, 25 bp, Homo sapien
agtactatgaagcgaagtcttctcc

SEQ ID NO: 5893211 - DNA, 25 bp, Homo sapien
ccgcatcttcacagttctggtctgc

SEQ ID NO: 5893212 - DNA, 25 bp, Homo sapien
taggctgctgtacactggttgtcca

SEQ ID NO: 5893213 - DNA, 25 bp, Homo sapien
agcgaagtcttctccaactgcggct

SEQ ID NO: 5893214 - DNA, 25 bp, Homo sapien
ctcgttgggatgcgggcagttgtag

SEQ ID NO: 5893215 - DNA, 25 bp, Homo sapien
gcagttttgaaataccctaatgcta

SEQ ID NO: 5893216 - DNA, 25 bp, Homo sapien
tgggccggtatttcttgacactgga

SEQ ID NO: 5893217 - DNA, 25 bp, Homo sapien
cccttggcattctccaactgcggct

SEQ ID NO: 5893218 - DNA, 25 bp, Homo sapien
agttctggtctgcagaggtgtgcag

SEQ ID NO: 5893219 - DNA, 25 bp, Homo sapien
agtccctgaacttgtggatgtcatt

SEQ ID NO: 5893220 - DNA, 25 bp, Homo sapien
tccagcccacactaggaaccctgga

SEQ ID NO: 5893221 - DNA, 25 bp, Homo sapien
gcccacactaggaaccctggaggca

SEQ ID NO: 5893222 - DNA, 25 bp, Homo sapien
ataatgcccgctccagtactatgaa

SEQ ID NO: 5893223 - DNA, 25 bp, Homo sapien
tcttgacactggagcatcctgcata

SEQ ID NO: 5893224 - DNA, 25 bp, Homo sapien
ctaatgctactcaagaatgagcaag

SEQ ID NO: 5893225 - DNA, 25 bp, Homo sapien
cagttgtagttacatttgcaggact

SEQ ID NO: 5893226 - DNA, 25 bp, Homo sapien
tccctgaacttgtggatgtcattga

SEQ ID NO: 5893227 - DNA, 25 bp, Homo sapien
ctcgggaaggaatgagaggcgcttt

SEQ ID NO: 5893228 - DNA, 25 bp, Homo sapien
aaattattccagtattacatttccc

SEQ ID NO: 5893229 - DNA, 25 bp, Homo sapien
ggagcaaaaaaatacacttagcaaa

SEQ ID NO: 5893230 - DNA, 25 bp, Homo sapien
aagctacactttgataaataaaaaa

SEQ ID NO: 5893231 - DNA, 25 bp, Homo sapien
ttttgtctctattacaattgtagaa

SEQ ID NO: 5893232 - DNA, 25 bp, Homo sapien
gtacagtcggaacgatgcctcgttg

SEQ ID NO: 5893233 - DNA, 25 bp, Homo sapien
aagtaaatctgactggttctgggga

SEQ ID NO: 5893234 - DNA, 25 bp, Homo sapien
ggtagctgccccaaggacactcaca

SEQ ID NO: 5893235 - DNA, 25 bp, Homo sapien
catctacgcaggagccgcagtattt

SEQ ID NO: 5893236 - DNA, 25 bp, Homo sapien
gcgctttcatttacttctgtcaaag

SEQ ID NO: 5893237 - DNA, 25 bp, Homo sapien
tgctactcaagaatgagcaaggcac

SEQ ID NO: 5893238 - DNA, 25 bp, Homo sapien
ctcctctgtccagcccacactagga

SEQ ID NO: 5893239 - DNA, 25 bp, Homo sapien
tttgcaggactggatcatcatgaca

SEQ ID NO: 5893240 - DNA, 25 bp, Homo sapien
ttgtccacaaggacgcacttcacag

SEQ ID NO: 5893241 - DNA, 25 bp, Homo sapien
ctactcaagaatgagcaaggcacca

SEQ ID NO: 5893242 - DNA, 25 bp, Homo sapien
ggacaagcagggctttcacttggcc

SEQ ID NO: 5893243 - DNA, 25 bp, Homo sapien
ggaaccctggaggcacttagtccct

SEQ ID NO: 5893244 - DNA, 25 bp, Homo sapien
acaagcagggctttcacttggccca

SEQ ID NO: 5893245 - DNA, 25 bp, Homo sapien
aaacatgctccaatatggagcaata

SEQ ID NO: 5893246 - DNA, 25 bp, Homo sapien
acttagtccctgaacttgtggatgt

SEQ ID NO: 5893247 - DNA, 25 bp, Homo sapien
gctccaatatggagcaataatgccc

SEQ ID NO: 5893248 - DNA, 25 bp, Homo sapien
ttgataaataaaaaaacattcaatc

SEQ ID NO: 5893249 - DNA, 25 bp, Homo sapien
cttgcccttttttaggctgctgtac

SEQ ID NO: 5893250 - DNA, 25 bp, Homo sapien
atatggagcaataatgcccgctcca

SEQ ID NO: 5893251 - DNA, 25 bp, Homo sapien
tgctgtccgtccacatcagcccctt

SEQ ID NO: 5893252 - DNA, 25 bp, Homo sapien
gctacactttgataaataaaaaaac

SEQ ID NO: 5893253 - DNA, 25 bp, Homo sapien
ggaatgagaggcgctttcatttact

SEQ ID NO: 5893254 - DNA, 25 bp, Homo sapien
gtccacaaggacgcacttcacagat

SEQ ID NO: 5893255 - DNA, 25 bp, Homo sapien
catttgcaggactggatcatcatga

SEQ ID NO: 5893256 - DNA, 25 bp, Homo sapien
tgtccccctccgctcgggaaggaat

SEQ ID NO: 5893257 - DNA, 25 bp, Homo sapien
aaatacacttagcaaataatttaca

SEQ ID NO: 5893258 - DNA, 25 bp, Homo sapien
tcttaaaacacctggtttctgtttg

SEQ ID NO: 5893259 - DNA, 25 bp, Homo sapien
ggttgtccacaaggacgcacttcac

SEQ ID NO: 5893260 - DNA, 25 bp, Homo sapien
tacactttgataaataaaaaaacat

SEQ ID NO: 5893261 - DNA, 25 bp, Homo sapien
cactggttgtccacaaggacgcact

SEQ ID NO: 5893262 - DNA, 25 bp, Homo sapien
ggctttcacttggcccaactaatct

SEQ ID NO: 5893263 - DNA, 25 bp, Homo sapien
gagcaaggcaccattcatcctccgc

SEQ ID NO: 5893264 - DNA, 25 bp, Homo sapien
atgagcaaggcaccattcatcctcc

SEQ ID NO: 5893265 - DNA, 25 bp, Homo sapien
acactcacagagtgtccccctccgc

SEQ ID NO: 5893266 - DNA, 25 bp, Homo sapien
aaaacatctctccatcttcgcatcg

SEQ ID NO: 5893267 - DNA, 25 bp, Homo sapien
taggaaccctggaggcacttagtcc

SEQ ID NO: 5893268 - DNA, 25 bp, Homo sapien
tttttaggctgctgtacactggttg

SEQ ID NO: 5893269 - DNA, 25 bp, Homo sapien
gaaataccctaatgctactcaagaa

SEQ ID NO: 5893270 - DNA, 25 bp, Homo sapien
cacttggcccaactaatcttatttt

SEQ ID NO: 5893271 - DNA, 25 bp, Homo sapien
gaatgagcaaggcaccattcatcct

SEQ ID NO: 5893272 - DNA, 25 bp, Homo sapien
actggatcatcatgacattcttgga

SEQ ID NO: 5893273 - DNA, 25 bp, Homo sapien
tcacagagtgtccccctccgctcgg

SEQ ID NO: 5893274 - DNA, 25 bp, Homo sapien
acatcagccccttggcagttttgaa

SEQ ID NO: 5893275 - DNA, 25 bp, Homo sapien
ctgtttgcagttttagagtgcaggt

SEQ ID NO: 5893276 - DNA, 25 bp, Homo sapien
cttggtcttgctgcatttcttgccc

SEQ ID NO: 5893277 - DNA, 25 bp, Homo sapien
gcacttcacagatccgggtctcttt

SEQ ID NO: 5893278 - DNA, 25 bp, Homo sapien
acatgctccaatatggagcaataat

SEQ ID NO: 5893279 - DNA, 25 bp, Homo sapien
agcaaaaaaatacacttagcaaata

SEQ ID NO: 5893280 - DNA, 25 bp, Homo sapien
ttgacactggagcatcctgcataag

SEQ ID NO: 5893281 - DNA, 25 bp, Homo sapien
cttgtggatgtcattgaataggctg

SEQ ID NO: 5893282 - DNA, 25 bp, Homo sapien
ttctggtctgcagaggtgtgcagca

SEQ ID NO: 5893283 - DNA, 25 bp, Homo sapien
caataatgcccgctccagtactatg

SEQ ID NO: 5893284 - DNA, 25 bp, Homo sapien
cgtcatccgtaaacatgctccaata

SEQ ID NO: 5893285 - DNA, 25 bp, Homo sapien
tcacagttctggtctgcagaggtgt

SEQ ID NO: 5893286 - DNA, 25 bp, Homo sapien
ccacactaggaaccctggaggcact

SEQ ID NO: 5893287 - DNA, 25 bp, Homo sapien
ttagcaaataatttacaaacagaaa

SEQ ID NO: 5893288 - DNA, 25 bp, Homo sapien
gcttgcgcttctcctctgtccagcc

SEQ ID NO: 5893289 - DNA, 25 bp, Homo sapien
ctggagcatcctgcataagtaaatc

SEQ ID NO: 5893290 - DNA, 25 bp, Homo sapien
tccgctcgggaaggaatgagaggcg

SEQ ID NO: 5893291 - DNA, 25 bp, Homo sapien
tgcgctgctgtccgtccacatcagc

SEQ ID NO: 5893292 - DNA, 25 bp, Homo sapien
aacgtcatccgtaaacatgctccaa

SEQ ID NO: 5893293 - DNA, 25 bp, Homo sapien
caatcttaaaacacctggtttctgt

SEQ ID NO: 5893294 - DNA, 25 bp, Homo sapien
aacgatgcctcgttgggatgcgggc

SEQ ID NO: 5893295 - DNA, 25 bp, Homo sapien
actcacagagtgtccccctccgctc

SEQ ID NO: 5893296 - DNA, 25 bp, Homo sapien
tccacatcagccccttggcagtttt

SEQ ID NO: 5893297 - DNA, 25 bp, Homo sapien
aaggaatgagaggcgctttcattta

SEQ ID NO: 5893298 - DNA, 25 bp, Homo sapien
tgtggatgtcattgaataggctgta

SEQ ID NO: 5893299 - DNA, 25 bp, Homo sapien
caaaaaaatacacttagcaaataat

SEQ ID NO: 5893300 - DNA, 25 bp, Homo sapien
tacatttgcaggactggatcatcat

SEQ ID NO: 5893301 - DNA, 25 bp, Homo sapien
tcggaacgatgcctcgttgggatgc

SEQ ID NO: 5893302 - DNA, 25 bp, Homo sapien
tgatgcttgcgcttctcctctgtcc

SEQ ID NO: 5893303 - DNA, 25 bp, Homo sapien
cccttggcagttttgaaatacccta

SEQ ID NO: 5893304 - DNA, 25 bp, Homo sapien
tttacaaacagaaaacagaacgtca

SEQ ID NO: 5893305 - DNA, 25 bp, Homo sapien
cgggaaggaatgagaggcgctttca

SEQ ID NO: 5893306 - DNA, 25 bp, Homo sapien
tctctccatcttcgcatcggaaccg

SEQ ID NO: 5893307 - DNA, 25 bp, Homo sapien
ttacttctgtcaaaggacaagcagg

SEQ ID NO: 5893308 - DNA, 25 bp, Homo sapien
gctgcgctgctgtccgtccacatca

SEQ ID NO: 5893309 - DNA, 25 bp, Homo sapien
tgtacactggttgtccacaaggacg

SEQ ID NO: 5893310 - DNA, 25 bp, Homo sapien
cccctccgctcgggaaggaatgaga

SEQ ID NO: 5893311 - DNA, 25 bp, Homo sapien
tgcagcaccggccatctacgcagga

SEQ ID NO: 5893312 - DNA, 25 bp, Homo sapien
gataaataaaaaaacattcaatctt

SEQ ID NO: 5893313 - DNA, 25 bp, Homo sapien
aaatctgactggttctggggatttc

SEQ ID NO: 5893314 - DNA, 25 bp, Homo sapien
atctgactggttctggggatttctt

SEQ ID NO: 5893315 - DNA, 25 bp, Homo sapien
catttacaaattattccagtattac

SEQ ID NO: 5893316 - DNA, 25 bp, Homo sapien
acttcacagatccgggtctctttca

SEQ ID NO: 5893317 - DNA, 25 bp, Homo sapien
caaaggacaagcagggctttcactt

SEQ ID NO: 5893318 - DNA, 25 bp, Homo sapien
ggcagttgtagttacatttgcagga

SEQ ID NO: 5893319 - DNA, 25 bp, Homo sapien
cggctgcgctgctgtccgtccacat

SEQ ID NO: 5893320 - DNA, 25 bp, Homo sapien
gcacttagtccctgaacttgtggat

SEQ ID NO: 5893321 - DNA, 25 bp, Homo sapien
cgtctccatgatgcttgcgcttctc

SEQ ID NO: 5893322 - DNA, 25 bp, Homo sapien
gaggtgtgcagcaccggccatctac

SEQ ID NO: 5893323 - DNA, 25 bp, Homo sapien
tgtcattgaataggctgtacagtcg

SEQ ID NO: 5893324 - DNA, 25 bp, Homo sapien
agaggcgctttcatttacttctgtc

SEQ ID NO: 5893325 - DNA, 25 bp, Homo sapien
gactggttctggggatttcttggtc

SEQ ID NO: 5893326 - DNA, 25 bp, Homo sapien
atttcttggtcttgctgcatttctt

SEQ ID NO: 5893327 - DNA, 25 bp, Homo sapien
ggggatttcttggtcttgctgcatt

SEQ ID NO: 5893328 - DNA, 25 bp, Homo sapien
tcatcctccgcccacccacgtctcc

SEQ ID NO: 5893329 - DNA, 25 bp, Homo sapien
tccgcccacccacgtctccatgatg

SEQ ID NO: 5893330 - DNA, 25 bp, Homo sapien
gctgtacactggttgtccacaagga

SEQ ID NO: 5893331 - DNA, 25 bp, Homo sapien
catcggaaccgcatcttcacagttc

SEQ ID NO: 5893332 - DNA, 25 bp, Homo sapien
catcctgcataagtaaatctgactg

SEQ ID NO: 5893333 - DNA, 25 bp, Homo sapien
ccgtccacatcagccccttggcatt

SEQ ID NO: 5893334 - DNA, 25 bp, Homo sapien
tagctgccccaaggacactcacaga

SEQ ID NO: 5893335 - DNA, 25 bp, Homo sapien
tgagaggcgctttcatttacttctg

SEQ ID NO: 5893336 - DNA, 25 bp, Homo sapien
gtaaacatgctccaatatggagcaa

SEQ ID NO: 5893337 - DNA, 25 bp, Homo sapien
agcatcctgcataagtaaatctgac

SEQ ID NO: 5893338 - DNA, 25 bp, Homo sapien
gctgccccaaggacactcacagagt

SEQ ID NO: 5893339 - DNA, 25 bp, Homo sapien
attcttggaaaacatctctccatct

SEQ ID NO: 5893340 - DNA, 25 bp, Homo sapien
aaccgcatcttcacagttctggtct

SEQ ID NO: 5893341 - DNA, 25 bp, Homo sapien
cgctgctgtccgtccacatcagccc

SEQ ID NO: 5893342 - DNA, 25 bp, Homo sapien
cagcccacactaggaaccctggagg

SEQ ID NO: 5893343 - DNA, 25 bp, Homo sapien
tctacgcaggagccgcagtatttgg

SEQ ID NO: 5893344 - DNA, 25 bp, Homo sapien
aatgcccgctccagtactatgaagc

SEQ ID NO: 5893345 - DNA, 25 bp, Homo sapien
ctctattacaattgtagaaccaaga

SEQ ID NO: 5893346 - DNA, 25 bp, Homo sapien
catgacattcttggaaaacatctct

SEQ ID NO: 5893347 - DNA, 25 bp, Homo sapien
tcttggaaaacatctctccatcttc

SEQ ID NO: 5893348 - DNA, 25 bp, Homo sapien
gcataagtaaatctgactggttctg

SEQ ID NO: 5893349 - DNA, 25 bp, Homo sapien
taccctaatgctactcaagaatgag

SEQ ID NO: 5893350 - DNA, 25 bp, Homo sapien
gggtctggagcaaaaaaatacactt

SEQ ID NO: 5893351 - DNA, 25 bp, Homo sapien
cccttttttaggctgctgtacactg

SEQ ID NO: 5893352 - DNA, 25 bp, Homo sapien
gcctcgttgggatgcgggcagttgt

SEQ ID NO: 5893353 - DNA, 25 bp, Homo sapien
ttctcctctgtccagcccacactag

SEQ ID NO: 5893354 - DNA, 25 bp, Homo sapien
tacgcaggagccgcagtatttgggc

SEQ ID NO: 5893355 - DNA, 25 bp, Homo sapien
actcaagaatgagcaaggcaccatt

SEQ ID NO: 5893356 - DNA, 25 bp, Homo sapien
ctgcatttcttgcccttttttaggc

SEQ ID NO: 5893357 - DNA, 25 bp, Homo sapien
atttacttctgtcaaaggacaagca

SEQ ID NO: 5893358 - DNA, 25 bp, Homo sapien
ggctgtacagtcggaacgatgcctc

SEQ ID NO: 5893359 - DNA, 25 bp, Homo sapien
atgctccaatatggagcaataatgc

SEQ ID NO: 5893360 - DNA, 25 bp, Homo sapien
tacaaacagaaaacagaacgtcatc

SEQ ID NO: 5893361 - DNA, 25 bp, Homo sapien
tgcccttttttaggctgctgtacac

SEQ ID NO: 5893362 - DNA, 25 bp, Homo sapien
gacactggagcatcctgcataagta

SEQ ID NO: 5893363 - DNA, 25 bp, Homo sapien
cttttttaggctgctgtacactggt

SEQ ID NO: 5893364 - DNA, 25 bp, Homo sapien
gcaccggccatctacgcaggagccg

SEQ ID NO: 5893365 - DNA, 25 bp, Homo sapien
tgcccgctccagtactatgaagcga

SEQ ID NO: 5893366 - DNA, 25 bp, Homo sapien
atcttcacagttctggtctgcagag

SEQ ID NO: 5893367 - DNA, 25 bp, Homo sapien
acaaattattccagtattacatttc

SEQ ID NO: 5893368 - DNA, 25 bp, Homo sapien
cgcaggagccgcagtatttgggccg

SEQ ID NO: 5893369 - DNA, 25 bp, Homo sapien
gttacatttgcaggactggatcatc

SEQ ID NO: 5893370 - DNA, 25 bp, Homo sapien
gcgcttctcctctgtccagcccaca

SEQ ID NO: 5893371 - DNA, 25 bp, Homo sapien
tggtttctgtttgcagttttagagt

SEQ ID NO: 5893372 - DNA, 25 bp, Homo sapien
tttgggccggtatttcttgacactg

SEQ ID NO: 5893373 - DNA, 25 bp, Homo sapien
tggatgtcattgaataggctgtaca

SEQ ID NO: 5893374 - DNA, 25 bp, Homo sapien
cccacccacgtctccatgatgcttg

SEQ ID NO: 5893375 - DNA, 25 bp, Homo sapien
aaggcaccattcatcctccgcccac

SEQ ID NO: 5893376 - DNA, 25 bp, Homo sapien
caatatggagcaataatgcccgctc

SEQ ID NO: 5893377 - DNA, 25 bp, Homo sapien
cggccatctacgcaggagccgcagt

SEQ ID NO: 5893378 - DNA, 25 bp, Homo sapien
tacaattgtagaaccaagaaagggg

SEQ ID NO: 5893379 - DNA, 25 bp, Homo sapien
ctggaggcacttagtccctgaactt

SEQ ID NO: 5893380 - DNA, 25 bp, Homo sapien
gcttctcctctgtccagcccacact

SEQ ID NO: 5893381 - DNA, 25 bp, Homo sapien
atcagccccttggcagttttgaaat

SEQ ID NO: 5893382 - DNA, 25 bp, Homo sapien
aacagaaaacagaacgtcatccgta

SEQ ID NO: 5893383 - DNA, 25 bp, Homo sapien
cgcccacccacgtctccatgatgct

SEQ ID NO: 5893384 - DNA, 25 bp, Homo sapien
tgtgcagcaccggccatctacgcag

SEQ ID NO: 5893385 - DNA, 25 bp, Homo sapien
ggatttcttggtcttgctgcatttc

SEQ ID NO: 5893386 - DNA, 25 bp, Homo sapien
gccatctacgcaggagccgcagtat

SEQ ID NO: 5893387 - DNA, 25 bp, Homo sapien
gatgtcattgaataggctgtacagt

SEQ ID NO: 5893388 - DNA, 25 bp, Homo sapien
tttcttgacactggagcatcctgca

SEQ ID NO: 5893389 - DNA, 25 bp, Homo sapien
ccagtactatgaagcgaagtcttct

SEQ ID NO: 5893390 - DNA, 25 bp, Homo sapien
aataggctgtacagtcggaacgatg

SEQ ID NO: 5893391 - DNA, 25 bp, Homo sapien
agagtgcaggtagctgccccaagga

SEQ ID NO: 5893392 - DNA, 25 bp, Homo sapien
tctgtccagcccacactaggaaccc

SEQ ID NO: 5893393 - DNA, 25 bp, Homo sapien
atacacttagcaaataatttacaaa

SEQ ID NO: 5893394 - DNA, 25 bp, Homo sapien
tttaggctgctgtacactggttgtc

SEQ ID NO: 5893395 - DNA, 25 bp, Homo sapien
acagagtgtccccctccgctcggga

SEQ ID NO: 5893396 - DNA, 25 bp, Homo sapien
ttcttggtcttgctgcatttcttgc

SEQ ID NO: 5893397 - DNA, 25 bp, Homo sapien
ctggggatttcttggtcttgctgca

SEQ ID NO: 5893398 - DNA, 25 bp, Homo sapien
cctctgtccagcccacactaggaac

SEQ ID NO: 5893399 - DNA, 25 bp, Homo sapien
tccgtccacatcagccccttggcag

SEQ ID NO: 5893400 - DNA, 25 bp, Homo sapien
ttgcagttttagagtgcaggtagct

SEQ ID NO: 5893401 - DNA, 25 bp, Homo sapien
aaaagctacactttgataaataaaa

SEQ ID NO: 5893402 - DNA, 25 bp, Homo sapien
tcatttacttctgtcaaaggacaag

SEQ ID NO: 5893403 - DNA, 25 bp, Homo sapien
tcatccgtaaacatgctccaatatg

SEQ ID NO: 5893404 - DNA, 25 bp, Homo sapien
ctatgaagcgaagtcttctccaact

SEQ ID NO: 5893405 - DNA, 25 bp, Homo sapien
gtttgcagttttagagtgcaggtag

SEQ ID NO: 5893406 - DNA, 25 bp, Homo sapien
caggactggatcatcatgacattct

SEQ ID NO: 5893407 - DNA, 25 bp, Homo sapien
cgggcagttgtagttacatttgcag

SEQ ID NO: 5893408 - DNA, 25 bp, Homo sapien
ggaaccgcatcttcacagttctggt

SEQ ID NO: 5893409 - DNA, 25 bp, Homo sapien
agtatttgggccggtatttcttgac

SEQ ID NO: 5893410 - DNA, 25 bp, Homo sapien
agaacgtcatccgtaaacatgctcc

SEQ ID NO: 5893411 - DNA, 25 bp, Homo sapien
gtaaatctgactggttctggggatt

SEQ ID NO: 5893412 - DNA, 25 bp, Homo sapien
cccacgtctccatgatgcttgcgct

SEQ ID NO: 5893413 - DNA, 25 bp, Homo sapien
ggaaaacatctctccatcttcgcat

SEQ ID NO: 5893414 - DNA, 25 bp, Homo sapien
cgctcgggaaggaatgagaggcgct

SEQ ID NO: 5893415 - DNA, 25 bp, Homo sapien
atttcttgcccttttttaggctgct

SEQ ID NO: 5893416 - DNA, 25 bp, Homo sapien
ccaaaagctacactttgataaataa

SEQ ID NO: 5893417 - DNA, 25 bp, Homo sapien
tgcaggtagctgccccaaggacact

SEQ ID NO: 5893418 - DNA, 25 bp, Homo sapien
tactatgaagcgaagtcttctccaa

SEQ ID NO: 5893419 - DNA, 25 bp, Homo sapien
cttggcattctccaactgcggctgc

SEQ ID NO: 5893420 - DNA, 25 bp, Homo sapien
ctggagcaaaaaaatacacttagca

SEQ ID NO: 5893421 - DNA, 25 bp, Homo sapien
cccaaggacactcacagagtgtccc

SEQ ID NO: 5893422 - DNA, 25 bp, Homo sapien
atcctccgcccacccacgtctccat

SEQ ID NO: 5893423 - DNA, 25 bp, Homo sapien
atcagccccttggcattctccaact

SEQ ID NO: 5893424 - DNA, 25 bp, Homo sapien
ccacaaggacgcacttcacagatcc

SEQ ID NO: 5893425 - DNA, 25 bp, Homo sapien
aagaatgagcaaggcaccattcatc

SEQ ID NO: 5893426 - DNA, 25 bp, Homo sapien
ggacgcacttcacagatccgggtct

SEQ ID NO: 5893427 - DNA, 25 bp, Homo sapien
cttggcagttttgaaataccctaat

SEQ ID NO: 5893428 - DNA, 25 bp, Homo sapien
cgatgcctcgttgggatgcgggcag

SEQ ID NO: 5893429 - DNA, 25 bp, Homo sapien
gggatgcgggcagttgtagttacat

SEQ ID NO: 5893430 - DNA, 25 bp, Homo sapien
cctccgcccacccacgtctccatga

SEQ ID NO: 5893431 - DNA, 25 bp, Homo sapien
acgcacttcacagatccgggtctct

SEQ ID NO: 5893432 - DNA, 25 bp, Homo sapien
cctccgctcgggaaggaatgagagg

SEQ ID NO: 5893433 - DNA, 25 bp, Homo sapien
atcatgacattcttggaaaacatct

SEQ ID NO: 5893434 - DNA, 25 bp, Homo sapien
catcttcgcatcggaaccgcatctt

SEQ ID NO: 5893435 - DNA, 25 bp, Homo sapien
cattcaatcttaaaacacctggttt

SEQ ID NO: 5893436 - DNA, 25 bp, Homo sapien
atgcttgcgcttctcctctgtccag

SEQ ID NO: 5893437 - DNA, 25 bp, Homo sapien
aggcacttagtccctgaacttgtgg

SEQ ID NO: 5893438 - DNA, 25 bp, Homo sapien
cttgctgcatttcttgccctttttt

SEQ ID NO: 5893439 - DNA, 25 bp, Homo sapien
taggctgtacagtcggaacgatgcc

SEQ ID NO: 5893440 - DNA, 25 bp, Homo sapien
cagaaaacagaacgtcatccgtaaa

SEQ ID NO: 5893441 - DNA, 25 bp, Homo sapien
gccccttggcagttttgaaataccc

SEQ ID NO: 5893442 - DNA, 25 bp, Homo sapien
cacccacgtctccatgatgcttgcg

SEQ ID NO: 5893443 - DNA, 25 bp, Homo sapien
gcagtatttgggccggtatttcttg

SEQ ID NO: 5893444 - DNA, 25 bp, Homo sapien
agttttgaaataccctaatgctact

SEQ ID NO: 5893445 - DNA, 25 bp, Homo sapien
catctctccatcttcgcatcggaac

SEQ ID NO: 5893446 - DNA, 25 bp, Homo sapien
aaggacgcacttcacagatccgggt

SEQ ID NO: 5893447 - DNA, 25 bp, Homo sapien
ggtctgcagaggtgtgcagcaccgg

SEQ ID NO: 5893448 - DNA, 25 bp, Homo sapien
tggatcatcatgacattcttggaaa

SEQ ID NO: 5893449 - DNA, 25 bp, Homo sapien
tatttgggccggtatttcttgacac

SEQ ID NO: 5893450 - DNA, 25 bp, Homo sapien
ttagagtgcaggtagctgccccaag

SEQ ID NO: 5893451 - DNA, 25 bp, Homo sapien
acttctgtcaaaggacaagcagggc

SEQ ID NO: 5893452 - DNA, 25 bp, Homo sapien
tcttcgcatcggaaccgcatcttca

SEQ ID NO: 5893453 - DNA, 25 bp, Homo sapien
acactaggaaccctggaggcactta

SEQ ID NO: 5893454 - DNA, 25 bp, Homo sapien
ttacaaattattccagtattacatt

SEQ ID NO: 5893455 - DNA, 25 bp, Homo sapien
aagtcttctccaactgcggctgcgc

SEQ ID NO: 5893456 - DNA, 25 bp, Homo sapien
tcatcatgacattcttggaaaacat

SEQ ID NO: 5893457 - DNA, 25 bp, Homo sapien
gtcttctccaactgcggctgcgctg

SEQ ID NO: 5893458 - DNA, 25 bp, Homo sapien
cgcatcggaaccgcatcttcacagt

SEQ ID NO: 5893459 - DNA, 25 bp, Homo sapien
cgttgggatgcgggcagttgtagtt

SEQ ID NO: 5893460 - DNA, 25 bp, Homo sapien
ggagcatcctgcataagtaaatctg

SEQ ID NO: 5893461 - DNA, 25 bp, Homo sapien
tggcccaactaatcttattttgtct

SEQ ID NO: 5893462 - DNA, 25 bp, Homo sapien
aaacagaacgtcatccgtaaacatg

SEQ ID NO: 5893463 - DNA, 25 bp, Homo sapien
aacattcaatcttaaaacacctggt

SEQ ID NO: 5893464 - DNA, 25 bp, Homo sapien
tctgcagaggtgtgcagcaccggcc

SEQ ID NO: 5893465 - DNA, 25 bp, Homo sapien
gcatcttcacagttctggtctgcag

SEQ ID NO: 5893466 - DNA, 25 bp, Homo sapien
tgaacttgtggatgtcattgaatag

SEQ ID NO: 5893467 - DNA, 25 bp, Homo sapien
caccattcatcctccgcccacccac

SEQ ID NO: 5893468 - DNA, 25 bp, Homo sapien
ctgctgtacactggttgtccacaag

SEQ ID NO: 5893469 - DNA, 25 bp, Homo sapien
cctggtttctgtttgcagttttaga

SEQ ID NO: 5893470 - DNA, 25 bp, Homo sapien
ggccggtatttcttgacactggagc

SEQ ID NO: 5893471 - DNA, 25 bp, Homo sapien
gcattctccaactgcggctgcgctg

SEQ ID NO: 5893472 - DNA, 25 bp, Homo sapien
gcccaactaatcttattttgtctct

SEQ ID NO: 5893473 - DNA, 25 bp, Homo sapien
acacttagcaaataatttacaaaca

SEQ ID NO: 5893474 - DNA, 25 bp, Homo sapien
tgcaggactggatcatcatgacatt

SEQ ID NO: 5893475 - DNA, 25 bp, Homo sapien
agtgcaggtagctgccccaaggaca

SEQ ID NO: 5893476 - DNA, 25 bp, Homo sapien
cagcaccggccatctacgcaggagc

SEQ ID NO: 5893477 - DNA, 25 bp, Homo sapien
cagccccttggcagttttgaaatac

SEQ ID NO: 5893478 - DNA, 25 bp, Homo sapien
gtcaaaggacaagcagggctttcac

SEQ ID NO: 5893479 - DNA, 25 bp, Homo sapien
cctgaacttgtggatgtcattgaat

SEQ ID NO: 5893480 - DNA, 25 bp, Homo sapien
tccccaaaagctacactttgataaa

SEQ ID NO: 5893481 - DNA, 25 bp, Homo sapien
gtttctgtttgcagttttagagtgc

SEQ ID NO: 5893482 - DNA, 25 bp, Homo sapien
cgaagtcttctccaactgcggctgc

SEQ ID NO: 5893483 - DNA, 25 bp, Homo sapien
tggcattctccaactgcggctgcgc

SEQ ID NO: 5893484 - DNA, 25 bp, Homo sapien
tgccccaaggacactcacagagtgt

SEQ ID NO: 5893485 - DNA, 25 bp, Homo sapien
ttgcgcttctcctctgtccagccca

SEQ ID NO: 5893486 - DNA, 25 bp, Homo sapien
ctttgataaataaaaaaacattcaa

SEQ ID NO: 5893487 - DNA, 25 bp, Homo sapien
aaaaatacacttagcaaataattta

SEQ ID NO: 5893488 - DNA, 25 bp, Homo sapien
ctgcataagtaaatctgactggttc

SEQ ID NO: 5893489 - DNA, 25 bp, Homo sapien
cgctccagtactatgaagcgaagtc

SEQ ID NO: 5893490 - DNA, 25 bp, Homo sapien
ttttgaaataccctaatgctactca

SEQ ID NO: 5893491 - DNA, 25 bp, Homo sapien
acagttctggtctgcagaggtgtgc

SEQ ID NO: 5893492 - DNA, 25 bp, Homo sapien
ccgcagtatttgggccggtatttct

SEQ ID NO: 5893493 - DNA, 25 bp, Homo sapien
ggtatttcttgacactggagcatcc

SEQ ID NO: 5893494 - DNA, 25 bp, Homo sapien
ttcgcatcggaaccgcatcttcaca

SEQ ID NO: 5893495 - DNA, 25 bp, Homo sapien
ttttagagtgcaggtagctgcccca

SEQ ID NO: 5893496 - DNA, 25 bp, Homo sapien
ctgactggttctggggatttcttgg

SEQ ID NO: 5893497 - DNA, 25 bp, Homo sapien
agcaataatgcccgctccagtacta

SEQ ID NO: 5893498 - DNA, 25 bp, Homo sapien
cccgctccagtactatgaagcgaag

SEQ ID NO: 5893499 - DNA, 25 bp, Homo sapien
ctggttgtccacaaggacgcacttc

SEQ ID NO: 5893500 - DNA, 25 bp, Homo sapien
aatgctactcaagaatgagcaaggc

SEQ ID NO: 5893501 - DNA, 25 bp, Homo sapien
acagaacgtcatccgtaaacatgct

SEQ ID NO: 5893502 - DNA, 25 bp, Homo sapien
ttgaaataccctaatgctactcaag

SEQ ID NO: 5893503 - DNA, 25 bp, Homo sapien
aggcgctttcatttacttctgtcaa

SEQ ID NO: 5893504 - DNA, 25 bp, Homo sapien
ctccagtactatgaagcgaagtctt

SEQ ID NO: 5893505 - DNA, 25 bp, Homo sapien
actaggaaccctggaggcacttagt

SEQ ID NO: 5893506 - DNA, 25 bp, Homo sapien
cctccccaaaagctacactttgata

SEQ ID NO: 5893507 - DNA, 25 bp, Homo sapien
cagaggtgtgcagcaccggccatct

SEQ ID NO: 5893508 - DNA, 25 bp, Homo sapien
caaacagaaaacagaacgtcatccg

SEQ ID NO: 5893509 - DNA, 25 bp, Homo sapien
ttcttgcccttttttaggctgctgt

SEQ ID NO: 5893510 - DNA, 25 bp, Homo sapien
tgctgcatttcttgcccttttttag

SEQ ID NO: 5893511 - DNA, 25 bp, Homo sapien
taatttacaaacagaaaacagaacg

SEQ ID NO: 5893512 - DNA, 25 bp, Homo sapien
ggactggatcatcatgacattcttg

SEQ ID NO: 5893513 - DNA, 25 bp, Homo sapien
caggtagctgccccaaggacactca

SEQ ID NO: 5893514 - DNA, 25 bp, Homo sapien
gatgctcacatttgaaactttgggt

SEQ ID NO: 5893515 - DNA, 25 bp, Homo sapien
taaggtgttcttgggagccacactt

SEQ ID NO: 5893516 - DNA, 25 bp, Homo sapien
tcgtggcttggcattgtgagagctg

SEQ ID NO: 5893517 - DNA, 25 bp, Homo sapien
ttagaagtggttttgtctgcctcct

SEQ ID NO: 5893518 - DNA, 25 bp, Homo sapien
tgatgtgggttttcgtggcttggca

SEQ ID NO: 5893519 - DNA, 25 bp, Homo sapien
agaaagttagaagtggttttgtctg

SEQ ID NO: 5893520 - DNA, 25 bp, Homo sapien
ggcagttggatctctgggagtttga

SEQ ID NO: 5893521 - DNA, 25 bp, Homo sapien
gagggagctggaaagcagcctctgg

SEQ ID NO: 5893522 - DNA, 25 bp, Homo sapien
acaaacaacttttagaatgtagaat

SEQ ID NO: 5893523 - DNA, 25 bp, Homo sapien
tctgggagtttgaggccagtttggc

SEQ ID NO: 5893524 - DNA, 25 bp, Homo sapien
tcagtgaaatggacacagaacaaaa

SEQ ID NO: 5893525 - DNA, 25 bp, Homo sapien
gtgggcttcaaccttgtcaacacag

SEQ ID NO: 5893526 - DNA, 25 bp, Homo sapien
tatagtgagttctaggccagccatg

SEQ ID NO: 5893527 - DNA, 25 bp, Homo sapien
gctggaaagcagcctctggagggag

SEQ ID NO: 5893528 - DNA, 25 bp, Homo sapien
aatgatctataacatgggccaaaac

SEQ ID NO: 5893529 - DNA, 25 bp, Homo sapien
ccaaaggtcaaggcagtaaggtgtt

SEQ ID NO: 5893530 - DNA, 25 bp, Homo sapien
gaatttggaggcctcttcagaatgt

SEQ ID NO: 5893531 - DNA, 25 bp, Homo sapien
aagcagcctctggagggaggagttt

SEQ ID NO: 5893532 - DNA, 25 bp, Homo sapien
cacagcctcactgaagaaactggtc

SEQ ID NO: 5893533 - DNA, 25 bp, Homo sapien
ttccaaagatgtggagggaacagat

SEQ ID NO: 5893534 - DNA, 25 bp, Homo sapien
cgtctacgccaaaggtcaaggcagt

SEQ ID NO: 5893535 - DNA, 25 bp, Homo sapien
tggaatataggcttaaaactttata

SEQ ID NO: 5893536 - DNA, 25 bp, Homo sapien
ggcaactcagaaagtcagatttctg

SEQ ID NO: 5893537 - DNA, 25 bp, Homo sapien
tttatattatagggtagggtgtggt

SEQ ID NO: 5893538 - DNA, 25 bp, Homo sapien
gcacttggaaggcagaggcagttgg

SEQ ID NO: 5893539 - DNA, 25 bp, Homo sapien
atgtctagaatgtggaattggttca

SEQ ID NO: 5893540 - DNA, 25 bp, Homo sapien
ccatggatgcatagtgagactcttt

SEQ ID NO: 5893541 - DNA, 25 bp, Homo sapien
cttttagaatgtagaattccgtaaa

SEQ ID NO: 5893542 - DNA, 25 bp, Homo sapien
tgtgagagctgatgctcacatttga

SEQ ID NO: 5893543 - DNA, 25 bp, Homo sapien
ttgatttggaatataggcttaaaac

SEQ ID NO: 5893544 - DNA, 25 bp, Homo sapien
catgggccaaaacattcccaacttg

SEQ ID NO: 5893545 - DNA, 25 bp, Homo sapien
cccaacttgaatgtctagaatgtgg

SEQ ID NO: 5893546 - DNA, 25 bp, Homo sapien
ccactgagctctgagggagctggaa

SEQ ID NO: 5893547 - DNA, 25 bp, Homo sapien
atggacacagaacaaaagaacccag

SEQ ID NO: 5893548 - DNA, 25 bp, Homo sapien
attgtgagagctgatgctcacattt

SEQ ID NO: 5893549 - DNA, 25 bp, Homo sapien
tctttctcaaaacaaacaaacaaac

SEQ ID NO: 5893550 - DNA, 25 bp, Homo sapien
cggatgttgaattctttgttaacta

SEQ ID NO: 5893551 - DNA, 25 bp, Homo sapien
caggtgactcagaaggtcctgttcc

SEQ ID NO: 5893552 - DNA, 25 bp, Homo sapien
gggagccacacttagactctttcca

SEQ ID NO: 5893553 - DNA, 25 bp, Homo sapien
aaaattgtgattttgccactttcgg

SEQ ID NO: 5893554 - DNA, 25 bp, Homo sapien
taatggggtcctcaattttcttcct

SEQ ID NO: 5893555 - DNA, 25 bp, Homo sapien
atggggtcctcaattttcttcctag

SEQ ID NO: 5893556 - DNA, 25 bp, Homo sapien
agggtagggtgtggttgcacacacc

SEQ ID NO: 5893557 - DNA, 25 bp, Homo sapien
ttccgtgtgccagattaccctggag

SEQ ID NO: 5893558 - DNA, 25 bp, Homo sapien
cagcacttggaaggcagaggcagtt

SEQ ID NO: 5893559 - DNA, 25 bp, Homo sapien
gcctcaacaccaagacctgccccta

SEQ ID NO: 5893560 - DNA, 25 bp, Homo sapien
aattgtgattttgccactttcggat

SEQ ID NO: 5893561 - DNA, 25 bp, Homo sapien
ctcaacaccaagacctgcccctatg

SEQ ID NO: 5893562 - DNA, 25 bp, Homo sapien
ctcactgaagaaactggtctgcctc

SEQ ID NO: 5893563 - DNA, 25 bp, Homo sapien
agagtactggaaacccagcacgttc

SEQ ID NO: 5893564 - DNA, 25 bp, Homo sapien
cagattaccctggagatgacgggtc

SEQ ID NO: 5893565 - DNA, 25 bp, Homo sapien
gattttgccactttcggatgttgaa

SEQ ID NO: 5893566 - DNA, 25 bp, Homo sapien
ctgcccctatgtttccttccgtgtg

SEQ ID NO: 5893567 - DNA, 25 bp, Homo sapien
gcagtaaggtgttcttgggagccac

SEQ ID NO: 5893568 - DNA, 25 bp, Homo sapien
tggcattgtgagagctgatgctcac

SEQ ID NO: 5893569 - DNA, 25 bp, Homo sapien
ctatctgacaggtgactcagaaggt

SEQ ID NO: 5893570 - DNA, 25 bp, Homo sapien
ctcttcagaatgttgactatctgac

SEQ ID NO: 5893571 - DNA, 25 bp, Homo sapien
agatgtggagggaacagatggactc

SEQ ID NO: 5893572 - DNA, 25 bp, Homo sapien
tttggaatataggcttaaaacttta

SEQ ID NO: 5893573 - DNA, 25 bp, Homo sapien
caagtccttgatgtgggttttcgtg

SEQ ID NO: 5893574 - DNA, 25 bp, Homo sapien
tgggccaaaacattcccaacttgaa

SEQ ID NO: 5893575 - DNA, 25 bp, Homo sapien
ggtcttacccttgcctagaaaattg

SEQ ID NO: 5893576 - DNA, 25 bp, Homo sapien
cagtgtccagcaagaattgccttgc

SEQ ID NO: 5893577 - DNA, 25 bp, Homo sapien
ggatgcatagtgagactctttctca

SEQ ID NO: 5893578 - DNA, 25 bp, Homo sapien
aatgttgactatctgacaggtgact

SEQ ID NO: 5893579 - DNA, 25 bp, Homo sapien
agttagaagtggttttgtctgcctc

SEQ ID NO: 5893580 - DNA, 25 bp, Homo sapien
catctgttccccagagtactggaaa

SEQ ID NO: 5893581 - DNA, 25 bp, Homo sapien
ctcaattttcttcctagaatttgga

SEQ ID NO: 5893582 - DNA, 25 bp, Homo sapien
agaacttggctctttgttggcaact

SEQ ID NO: 5893583 - DNA, 25 bp, Homo sapien
agaattgccttgcccaaacctacgt

SEQ ID NO: 5893584 - DNA, 25 bp, Homo sapien
ggagttttgttcctgatgaagacaa

SEQ ID NO: 5893585 - DNA, 25 bp, Homo sapien
ctgcctcaacaccaagacctgcccc

SEQ ID NO: 5893586 - DNA, 25 bp, Homo sapien
ccttccgtgtgccagattaccctgg

SEQ ID NO: 5893587 - DNA, 25 bp, Homo sapien
accaagacctgcccctatgtttcct

SEQ ID NO: 5893588 - DNA, 25 bp, Homo sapien
gaggagttttgttcctgatgaagac

SEQ ID NO: 5893589 - DNA, 25 bp, Homo sapien
gccagattaccctggagatgacggg

SEQ ID NO: 5893590 - DNA, 25 bp, Homo sapien
ggccagccatggatgcatagtgaga

SEQ ID NO: 5893591 - DNA, 25 bp, Homo sapien
aaagtcagatttctggttgatttgg

SEQ ID NO: 5893592 - DNA, 25 bp, Homo sapien
tcctcaattttcttcctagaatttg

SEQ ID NO: 5893593 - DNA, 25 bp, Homo sapien
ttcggtggtgacgtgggcttcaacc

SEQ ID NO: 5893594 - DNA, 25 bp, Homo sapien
ctgatgctcacatttgaaactttgg

SEQ ID NO: 5893595 - DNA, 25 bp, Homo sapien
ttaccctggagatgacgggtctgtc

SEQ ID NO: 5893596 - DNA, 25 bp, Homo sapien
tactggaaacccagcacgttcggtg

SEQ ID NO: 5893597 - DNA, 25 bp, Homo sapien
aacccagtgtccagcaagaattgcc

SEQ ID NO: 5893598 - DNA, 25 bp, Homo sapien
gactctttccaaagatgtggaggga

SEQ ID NO: 5893599 - DNA, 25 bp, Homo sapien
tggaaagcagcctctggagggagga

SEQ ID NO: 5893600 - DNA, 25 bp, Homo sapien
tgagagctgatgctcacatttgaaa

SEQ ID NO: 5893601 - DNA, 25 bp, Homo sapien
ctgttcagtgaaatggacacagaac

SEQ ID NO: 5893602 - DNA, 25 bp, Homo sapien
gtctgcctcaacaccaagacctgcc

SEQ ID NO: 5893603 - DNA, 25 bp, Homo sapien
atctgacaggtgactcagaaggtcc

SEQ ID NO: 5893604 - DNA, 25 bp, Homo sapien
cttgcccaaacctacgtctacgcca

SEQ ID NO: 5893605 - DNA, 25 bp, Homo sapien
acccttgcctagaaaattgtgattt

SEQ ID NO: 5893606 - DNA, 25 bp, Homo sapien
ccagcaagaattgccttgcccaaac

SEQ ID NO: 5893607 - DNA, 25 bp, Homo sapien
aacatgggccaaaacattcccaact

SEQ ID NO: 5893608 - DNA, 25 bp, Homo sapien
tggagatgacgggtctgtcttagtg

SEQ ID NO: 5893609 - DNA, 25 bp, Homo sapien
cttagactctttccaaagatgtgga

SEQ ID NO: 5893610 - DNA, 25 bp, Homo sapien
ggtgactcagaaggtcctgttcctg

SEQ ID NO: 5893611 - DNA, 25 bp, Homo sapien
ttgaaactttgggtcttacccttgc

SEQ ID NO: 5893612 - DNA, 25 bp, Homo sapien
taatcccagcacttggaaggcagag

SEQ ID NO: 5893613 - DNA, 25 bp, Homo sapien
gtcttagtgagacgctccactgagc

SEQ ID NO: 5893614 - DNA, 25 bp, Homo sapien
aaacaacttttagaatgtagaattc

SEQ ID NO: 5893615 - DNA, 25 bp, Homo sapien
accttgtcaacacagcctcactgaa

SEQ ID NO: 5893616 - DNA, 25 bp, Homo sapien
gttttcgtggcttggcattgtgaga

SEQ ID NO: 5893617 - DNA, 25 bp, Homo sapien
tttagaatgtagaattccgtaaaaa

SEQ ID NO: 5893618 - DNA, 25 bp, Homo sapien
tagactctttccaaagatgtggagg

SEQ ID NO: 5893619 - DNA, 25 bp, Homo sapien
gctctttgttggcaactcagaaagt

SEQ ID NO: 5893620 - DNA, 25 bp, Homo sapien
tcccttgaaagttaatggggtcctc

SEQ ID NO: 5893621 - DNA, 25 bp, Homo sapien
gcctcttcagaatgttgactatctg

SEQ ID NO: 5893622 - DNA, 25 bp, Homo sapien
tgttggcaactcagaaagtcagatt

SEQ ID NO: 5893623 - DNA, 25 bp, Homo sapien
tctctgggagtttgaggccagtttg

SEQ ID NO: 5893624 - DNA, 25 bp, Homo sapien
acacagaacaaaagaacccagtgtc

SEQ ID NO: 5893625 - DNA, 25 bp, Homo sapien
gatgaagacaagtccttgatgtggg

SEQ ID NO: 5893626 - DNA, 25 bp, Homo sapien
ctcctcagaacttggctctttgttg

SEQ ID NO: 5893627 - DNA, 25 bp, Homo sapien
acgggtctgtcttagtgagacgctc

SEQ ID NO: 5893628 - DNA, 25 bp, Homo sapien
cctatatagtgagttctaggccagc

SEQ ID NO: 5893629 - DNA, 25 bp, Homo sapien
gtgtccagcaagaattgccttgccc

SEQ ID NO: 5893630 - DNA, 25 bp, Homo sapien
ccaaaacattcccaacttgaatgtc

SEQ ID NO: 5893631 - DNA, 25 bp, Homo sapien
tgacgtgggcttcaaccttgtcaac

SEQ ID NO: 5893632 - DNA, 25 bp, Homo sapien
ggttgcacacaccttaatcccagca

SEQ ID NO: 5893633 - DNA, 25 bp, Homo sapien
acagaacaaaagaacccagtgtcca

SEQ ID NO: 5893634 - DNA, 25 bp, Homo sapien
ccttgaaagttaatggggtcctcaa

SEQ ID NO: 5893635 - DNA, 25 bp, Homo sapien
ccaaagatgtggagggaacagatgg

SEQ ID NO: 5893636 - DNA, 25 bp, Homo sapien
cgccaaaggtcaaggcagtaaggtg

SEQ ID NO: 5893637 - DNA, 25 bp, Homo sapien
gtggcttggcattgtgagagctgat

SEQ ID NO: 5893638 - DNA, 25 bp, Homo sapien
gtggttgcacacaccttaatcccag

SEQ ID NO: 5893639 - DNA, 25 bp, Homo sapien
tgctcacatttgaaactttgggtct

SEQ ID NO: 5893640 - DNA, 25 bp, Homo sapien
tccttgatgtgggttttcgtggctt

SEQ ID NO: 5893641 - DNA, 25 bp, Homo sapien
agcacgttcggtggtgacgtgggct

SEQ ID NO: 5893642 - DNA, 25 bp, Homo sapien
ccttgcctagaaaattgtgattttg

SEQ ID NO: 5893643 - DNA, 25 bp, Homo sapien
tagtgagttctaggccagccatgga

SEQ ID NO: 5893644 - DNA, 25 bp, Homo sapien
gtgccagattaccctggagatgacg

SEQ ID NO: 5893645 - DNA, 25 bp, Homo sapien
ttgttcctgatgaagacaagtcctt

SEQ ID NO: 5893646 - DNA, 25 bp, Homo sapien
ttacccttgcctagaaaattgtgat

SEQ ID NO: 5893647 - DNA, 25 bp, Homo sapien
ctttccaaagatgtggagggaacag

SEQ ID NO: 5893648 - DNA, 25 bp, Homo sapien
tctggagggaggagttttgttcctg

SEQ ID NO: 5893649 - DNA, 25 bp, Homo sapien
tcagaacttggctctttgttggcaa

SEQ ID NO: 5893650 - DNA, 25 bp, Homo sapien
acccagcacgttcggtggtgacgtg

SEQ ID NO: 5893651 - DNA, 25 bp, Homo sapien
ctataacatgggccaaaacattccc

SEQ ID NO: 5893652 - DNA, 25 bp, Homo sapien
agcaagaattgccttgcccaaacct

SEQ ID NO: 5893653 - DNA, 25 bp, Homo sapien
cccatctgttccccagagtactgga

SEQ ID NO: 5893654 - DNA, 25 bp, Homo sapien
gtttggcctatatagtgagttctag

SEQ ID NO: 5893655 - DNA, 25 bp, Homo sapien
gatgacgggtctgtcttagtgagac

SEQ ID NO: 5893656 - DNA, 25 bp, Homo sapien
ccagagtactggaaacccagcacgt

SEQ ID NO: 5893657 - DNA, 25 bp, Homo sapien
agaatgttgactatctgacaggtga

SEQ ID NO: 5893658 - DNA, 25 bp, Homo sapien
ctgagggagctggaaagcagcctct

SEQ ID NO: 5893659 - DNA, 25 bp, Homo sapien
gtggtgacgtgggcttcaaccttgt

SEQ ID NO: 5893660 - DNA, 25 bp, Homo sapien
ttgtgattttgccactttcggatgt

SEQ ID NO: 5893661 - DNA, 25 bp, Homo sapien
ttgaatgtctagaatgtggaattgg

SEQ ID NO: 5893662 - DNA, 25 bp, Homo sapien
cgttcggtggtgacgtgggcttcaa

SEQ ID NO: 5893663 - DNA, 25 bp, Homo sapien
caattttcttcctagaatttggagg

SEQ ID NO: 5893664 - DNA, 25 bp, Homo sapien
atggatgcatagtgagactctttct

SEQ ID NO: 5893665 - DNA, 25 bp, Homo sapien
gcacacaccttaatcccagcacttg

SEQ ID NO: 5893666 - DNA, 25 bp, Homo sapien
tcctggtcaatgatctataacatgg

SEQ ID NO: 5893667 - DNA, 25 bp, Homo sapien
ggggtcctcaattttcttcctagaa

SEQ ID NO: 5893668 - DNA, 25 bp, Homo sapien
acaaacaaacaacttttagaatgta

SEQ ID NO: 5893669 - DNA, 25 bp, Homo sapien
aaacaaacaacttttagaatgtaga

SEQ ID NO: 5893670 - DNA, 25 bp, Homo sapien
ttggaaggcagaggcagttggatct

SEQ ID NO: 5893671 - DNA, 25 bp, Homo sapien
tgaggccagtttggcctatatagtg

SEQ ID NO: 5893672 - DNA, 25 bp, Homo sapien
acaccttaatcccagcacttggaag

SEQ ID NO: 5893673 - DNA, 25 bp, Homo sapien
ttgcacacaccttaatcccagcact

SEQ ID NO: 5893674 - DNA, 25 bp, Homo sapien
ttgaaagttaatggggtcctcaatt

SEQ ID NO: 5893675 - DNA, 25 bp, Homo sapien
ccctatgtttccttccgtgtgccag

SEQ ID NO: 5893676 - DNA, 25 bp, Homo sapien
agtgaaatggacacagaacaaaaga

SEQ ID NO: 5893677 - DNA, 25 bp, Homo sapien
ctgacaggtgactcagaaggtcctg

SEQ ID NO: 5893678 - DNA, 25 bp, Homo sapien
aatgtggaattggttcattttcctg

SEQ ID NO: 5893679 - DNA, 25 bp, Homo sapien
agtaaggtgttcttgggagccacac

SEQ ID NO: 5893680 - DNA, 25 bp, Homo sapien
agaaagtcagatttctggttgattt

SEQ ID NO: 5893681 - DNA, 25 bp, Homo sapien
ggtcctcaattttcttcctagaatt

SEQ ID NO: 5893682 - DNA, 25 bp, Homo sapien
gatgttgaattctttgttaactaag

SEQ ID NO: 5893683 - DNA, 25 bp, Homo sapien
tcaatgatctataacatgggccaaa

SEQ ID NO: 5893684 - DNA, 25 bp, Homo sapien
agaatgtggaattggttcattttcc

SEQ ID NO: 5893685 - DNA, 25 bp, Homo sapien
ctctgagggagctggaaagcagcct

SEQ ID NO: 5893686 - DNA, 25 bp, Homo sapien
tgaagacaagtccttgatgtgggtt

SEQ ID NO: 5893687 - DNA, 25 bp, Homo sapien
ggagtttgaggccagtttggcctat

SEQ ID NO: 5893688 - DNA, 25 bp, Homo sapien
gtctagaatgtggaattggttcatt

SEQ ID NO: 5893689 - DNA, 25 bp, Homo sapien
gatctctgggagtttgaggccagtt

SEQ ID NO: 5893690 - DNA, 25 bp, Homo sapien
caacaccaagacctgcccctatgtt

SEQ ID NO: 5893691 - DNA, 25 bp, Homo sapien
gttcctggtcaatgatctataacat

SEQ ID NO: 5893692 - DNA, 25 bp, Homo sapien
ttggcctatatagtgagttctaggc

SEQ ID NO: 5893693 - DNA, 25 bp, Homo sapien
agcctctggagggaggagttttgtt

SEQ ID NO: 5893694 - DNA, 25 bp, Homo sapien
ttccttccgtgtgccagattaccct

SEQ ID NO: 5893695 - DNA, 25 bp, Homo sapien
tagtgagacgctccactgagctctg

SEQ ID NO: 5893696 - DNA, 25 bp, Homo sapien
gcccctatgtttccttccgtgtgcc

SEQ ID NO: 5893697 - DNA, 25 bp, Homo sapien
gtccagcaagaattgccttgcccaa

SEQ ID NO: 5893698 - DNA, 25 bp, Homo sapien
aacacagcctcactgaagaaactgg

SEQ ID NO: 5893699 - DNA, 25 bp, Homo sapien
taggccagccatggatgcatagtga

SEQ ID NO: 5893700 - DNA, 25 bp, Homo sapien
gtctgcctcctcagaacttggctct

SEQ ID NO: 5893701 - DNA, 25 bp, Homo sapien
gaattggttcattttcctgttcagt

SEQ ID NO: 5893702 - DNA, 25 bp, Homo sapien
atcccatctgttccccagagtactg

SEQ ID NO: 5893703 - DNA, 25 bp, Homo sapien
cctctggagggaggagttttgttcc

SEQ ID NO: 5893704 - DNA, 25 bp, Homo sapien
actttatattatagggtagggtgtg

SEQ ID NO: 5893705 - DNA, 25 bp, Homo sapien
gaatcccatctgttccccagagtac

SEQ ID NO: 5893706 - DNA, 25 bp, Homo sapien
agtactggaaacccagcacgttcgg

SEQ ID NO: 5893707 - DNA, 25 bp, Homo sapien
tgggagtttgaggccagtttggcct

SEQ ID NO: 5893708 - DNA, 25 bp, Homo sapien
ttatagggtagggtgtggttgcaca

SEQ ID NO: 5893709 - DNA, 25 bp, Homo sapien
aacttggctctttgttggcaactca

SEQ ID NO: 5893710 - DNA, 25 bp, Homo sapien
ctatgtttccttccgtgtgccagat

SEQ ID NO: 5893711 - DNA, 25 bp, Homo sapien
cagcctcactgaagaaactggtctg

SEQ ID NO: 5893712 - DNA, 25 bp, Homo sapien
acacaccttaatcccagcacttgga

SEQ ID NO: 5893713 - DNA, 25 bp, Homo sapien
gttctaggccagccatggatgcata

SEQ ID NO: 5893714 - DNA, 25 bp, Homo sapien
aaactggtctgcctcaacaccaaga

SEQ ID NO: 5893715 - DNA, 25 bp, Homo sapien
ggcagaggcagttggatctctggga

SEQ ID NO: 5893716 - DNA, 25 bp, Homo sapien
ggtagggtgtggttgcacacacctt

SEQ ID NO: 5893717 - DNA, 25 bp, Homo sapien
gtctgtcttagtgagacgctccact

SEQ ID NO: 5893718 - DNA, 25 bp, Homo sapien
gcttcaaccttgtcaacacagcctc

SEQ ID NO: 5893719 - DNA, 25 bp, Homo sapien
ttcaaccttgtcaacacagcctcac

SEQ ID NO: 5893720 - DNA, 25 bp, Homo sapien
agttttgttcctgatgaagacaagt

SEQ ID NO: 5893721 - DNA, 25 bp, Homo sapien
ttcccaacttgaatgtctagaatgt

SEQ ID NO: 5893722 - DNA, 25 bp, Homo sapien
aaaacattcccaacttgaatgtcta

SEQ ID NO: 5893723 - DNA, 25 bp, Homo sapien
ttgggagccacacttagactctttc

SEQ ID NO: 5893724 - DNA, 25 bp, Homo sapien
gttggatctctgggagtttgaggcc

SEQ ID NO: 5893725 - DNA, 25 bp, Homo sapien
agtttgaggccagtttggcctatat

SEQ ID NO: 5893726 - DNA, 25 bp, Homo sapien
agactctttctcaaaacaaacaaac

SEQ ID NO: 5893727 - DNA, 25 bp, Homo sapien
aaagatgtggagggaacagatggac

SEQ ID NO: 5893728 - DNA, 25 bp, Homo sapien
accctggagatgacgggtctgtctt

SEQ ID NO: 5893729 - DNA, 25 bp, Homo sapien
tcttcctagaatttggaggcctctt

SEQ ID NO: 5893730 - DNA, 25 bp, Homo sapien
gcttaaaactttatattatagggta

SEQ ID NO: 5893731 - DNA, 25 bp, Homo sapien
tgacgggtctgtcttagtgagacgc

SEQ ID NO: 5893732 - DNA, 25 bp, Homo sapien
tattatagggtagggtgtggttgca

SEQ ID NO: 5893733 - DNA, 25 bp, Homo sapien
agaacaaaagaacccagtgtccagc

SEQ ID NO: 5893734 - DNA, 25 bp, Homo sapien
gcatagtgagactctttctcaaaac

SEQ ID NO: 5893735 - DNA, 25 bp, Homo sapien
acaccaagacctgcccctatgtttc

SEQ ID NO: 5893736 - DNA, 25 bp, Homo sapien
ctttcggatgttgaattctttgtta

SEQ ID NO: 5893737 - DNA, 25 bp, Homo sapien
ttcggatgttgaattctttgttaac

SEQ ID NO: 5893738 - DNA, 25 bp, Homo sapien
gcctagaaaattgtgattttgccac

SEQ ID NO: 5893739 - DNA, 25 bp, Homo sapien
ttggaggcctcttcagaatgttgac

SEQ ID NO: 5893740 - DNA, 25 bp, Homo sapien
acaacttttagaatgtagaattccg

SEQ ID NO: 5893741 - DNA, 25 bp, Homo sapien
atgtgggttttcgtggcttggcatt

SEQ ID NO: 5893742 - DNA, 25 bp, Homo sapien
ctctttccaaagatgtggagggaac

SEQ ID NO: 5893743 - DNA, 25 bp, Homo sapien
ggcctatatagtgagttctaggcca

SEQ ID NO: 5893744 - DNA, 25 bp, Homo sapien
gttcttgggagccacacttagactc

SEQ ID NO: 5893745 - DNA, 25 bp, Homo sapien
gtggttttgtctgcctcctcagaac

SEQ ID NO: 5893746 - DNA, 25 bp, Homo sapien
gtgtgccagattaccctggagatga

SEQ ID NO: 5893747 - DNA, 25 bp, Homo sapien
gtgtggttgcacacaccttaatccc

SEQ ID NO: 5893748 - DNA, 25 bp, Homo sapien
atgtttccttccgtgtgccagatta

SEQ ID NO: 5893749 - DNA, 25 bp, Homo sapien
ggcttggcattgtgagagctgatgc

SEQ ID NO: 5893750 - DNA, 25 bp, Homo sapien
attggttcattttcctgttcagtga

SEQ ID NO: 5893751 - DNA, 25 bp, Homo sapien
tgagactctttctcaaaacaaacaa

SEQ ID NO: 5893752 - DNA, 25 bp, Homo sapien
ctggtcaatgatctataacatgggc

SEQ ID NO: 5893753 - DNA, 25 bp, Homo sapien
gttaatggggtcctcaattttcttc

SEQ ID NO: 5893754 - DNA, 25 bp, Homo sapien
attttcttcctagaatttggaggcc

SEQ ID NO: 5893755 - DNA, 25 bp, Homo sapien
tcattttcctgttcagtgaaatgga

SEQ ID NO: 5893756 - DNA, 25 bp, Homo sapien
gaatataggcttaaaactttatatt

SEQ ID NO: 5893757 - DNA, 25 bp, Homo sapien
gggagctggaaagcagcctctggag

SEQ ID NO: 5893758 - DNA, 25 bp, Homo sapien
cttggcattgtgagagctgatgctc

SEQ ID NO: 5893759 - DNA, 25 bp, Homo sapien
tttcgtggcttggcattgtgagagc

SEQ ID NO: 5893760 - DNA, 25 bp, Homo sapien
aggtcaaggcagtaaggtgttcttg

SEQ ID NO: 5893761 - DNA, 25 bp, Homo sapien
agaaaattgtgattttgccactttc

SEQ ID NO: 5893762 - DNA, 25 bp, Homo sapien
acgtgggcttcaaccttgtcaacac

SEQ ID NO: 5893763 - DNA, 25 bp, Homo sapien
aacattcccaacttgaatgtctaga

SEQ ID NO: 5893764 - DNA, 25 bp, Homo sapien
ggccaaaacattcccaacttgaatg

SEQ ID NO: 5893765 - DNA, 25 bp, Homo sapien
gccagtttggcctatatagtgagtt

SEQ ID NO: 5893766 - DNA, 25 bp, Homo sapien
tcttacccttgcctagaaaattgtg

SEQ ID NO: 5893767 - DNA, 25 bp, Homo sapien
ttgaattctttgttaactaagaaag

SEQ ID NO: 5893768 - DNA, 25 bp, Homo sapien
atgtggagggaacagatggactcat

SEQ ID NO: 5893769 - DNA, 25 bp, Homo sapien
caagacctgcccctatgtttccttc

SEQ ID NO: 5893770 - DNA, 25 bp, Homo sapien
tagaatgtagaattccgtaaaaaaa

SEQ ID NO: 5893771 - DNA, 25 bp, Homo sapien
gacaagtccttgatgtgggttttcg

SEQ ID NO: 5893772 - DNA, 25 bp, Homo sapien
tgttgaattctttgttaactaagaa

SEQ ID NO: 5893773 - DNA, 25 bp, Homo sapien
actggtctgcctcaacaccaagacc

SEQ ID NO: 5893774 - DNA, 25 bp, Homo sapien
attttcctgttcagtgaaatggaca

SEQ ID NO: 5893775 - DNA, 25 bp, Homo sapien
ctgatgaagacaagtccttgatgtg

SEQ ID NO: 5893776 - DNA, 25 bp, Homo sapien
ctggaaacccagcacgttcggtggt

SEQ ID NO: 5893777 - DNA, 25 bp, Homo sapien
ttcctagaatttggaggcctcttca

SEQ ID NO: 5893778 - DNA, 25 bp, Homo sapien
aggccagtttggcctatatagtgag

SEQ ID NO: 5893779 - DNA, 25 bp, Homo sapien
cattcccaacttgaatgtctagaat

SEQ ID NO: 5893780 - DNA, 25 bp, Homo sapien
aggtgttcttgggagccacacttag

SEQ ID NO: 5893781 - DNA, 25 bp, Homo sapien
tgaaatggacacagaacaaaagaac

SEQ ID NO: 5893782 - DNA, 25 bp, Homo sapien
tctacgccaaaggtcaaggcagtaa

SEQ ID NO: 5893783 - DNA, 25 bp, Homo sapien
cttgtcaacacagcctcactgaaga

SEQ ID NO: 5893784 - DNA, 25 bp, Homo sapien
caagaattgccttgcccaaacctac

SEQ ID NO: 5893785 - DNA, 25 bp, Homo sapien
agatttctggttgatttggaatata

SEQ ID NO: 5893786 - DNA, 25 bp, Homo sapien
tgtcaacacagcctcactgaagaaa

SEQ ID NO: 5893787 - DNA, 25 bp, Homo sapien
ggttgatttggaatataggcttaaa

SEQ ID NO: 5893788 - DNA, 25 bp, Homo sapien
ggaaacccagcacgttcggtggtga

SEQ ID NO: 5893789 - DNA, 25 bp, Homo sapien
cctagaatttggaggcctcttcaga

SEQ ID NO: 5893790 - DNA, 25 bp, Homo sapien
gaagaaactggtctgcctcaacacc

SEQ ID NO: 5893791 - DNA, 25 bp, Homo sapien
atgcatagtgagactctttctcaaa

SEQ ID NO: 5893792 - DNA, 25 bp, Homo sapien
aagtggttttgtctgcctcctcaga

SEQ ID NO: 5893793 - DNA, 25 bp, Homo sapien
aggcctcttcagaatgttgactatc

SEQ ID NO: 5893794 - DNA, 25 bp, Homo sapien
gtgagacgctccactgagctctgag

SEQ ID NO: 5893795 - DNA, 25 bp, Homo sapien
gccacacttagactctttccaaaga

SEQ ID NO: 5893796 - DNA, 25 bp, Homo sapien
ggacacagaacaaaagaacccagtg

SEQ ID NO: 5893797 - DNA, 25 bp, Homo sapien
tttgttggcaactcagaaagtcaga

SEQ ID NO: 5893798 - DNA, 25 bp, Homo sapien
atctataacatgggccaaaacattc

SEQ ID NO: 5893799 - DNA, 25 bp, Homo sapien
atataggcttaaaactttatattat

SEQ ID NO: 5893800 - DNA, 25 bp, Homo sapien
agtccttgatgtgggttttcgtggc

SEQ ID NO: 5893801 - DNA, 25 bp, Homo sapien
agaacccagtgtccagcaagaattg

SEQ ID NO: 5893802 - DNA, 25 bp, Homo sapien
gacgctccactgagctctgagggag

SEQ ID NO: 5893803 - DNA, 25 bp, Homo sapien
tgttgactatctgacaggtgactca

SEQ ID NO: 5893804 - DNA, 25 bp, Homo sapien
cctggagatgacgggtctgtcttag

SEQ ID NO: 5893805 - DNA, 25 bp, Homo sapien
tggttcattttcctgttcagtgaaa

SEQ ID NO: 5893806 - DNA, 25 bp, Homo sapien
ttggcaactcagaaagtcagatttc

SEQ ID NO: 5893807 - DNA, 25 bp, Homo sapien
gagttctaggccagccatggatgca

SEQ ID NO: 5893808 - DNA, 25 bp, Homo sapien
tggatctctgggagtttgaggccag

SEQ ID NO: 5893809 - DNA, 25 bp, Homo sapien
agaagtggttttgtctgcctcctca

SEQ ID NO: 5893810 - DNA, 25 bp, Homo sapien
gggtgtggttgcacacaccttaatc

SEQ ID NO: 5893811 - DNA, 25 bp, Homo sapien
tctaggccagccatggatgcatagt

SEQ ID NO: 5893812 - DNA, 25 bp, Homo sapien
cttgatgtgggttttcgtggcttgg

SEQ ID NO: 5893813 - DNA, 25 bp, Homo sapien
gagggaggagttttgttcctgatga

SEQ ID NO: 5893814 - DNA, 25 bp, Homo sapien
ttgcctagaaaattgtgattttgcc

SEQ ID NO: 5893815 - DNA, 25 bp, Homo sapien
gtttccttccgtgtgccagattacc

SEQ ID NO: 5893816 - DNA, 25 bp, Homo sapien
ccagccatggatgcatagtgagact

SEQ ID NO: 5893817 - DNA, 25 bp, Homo sapien
gccactttcggatgttgaattcttt

SEQ ID NO: 5893818 - DNA, 25 bp, Homo sapien
ttccccagagtactggaaacccagc

SEQ ID NO: 5893819 - DNA, 25 bp, Homo sapien
ctggttgatttggaatataggctta

SEQ ID NO: 5893820 - DNA, 25 bp, Homo sapien
caaccttgtcaacacagcctcactg

SEQ ID NO: 5893821 - DNA, 25 bp, Homo sapien
gtgattttgccactttcggatgttg

SEQ ID NO: 5893822 - DNA, 25 bp, Homo sapien
cttagtgagacgctccactgagctc

SEQ ID NO: 5893823 - DNA, 25 bp, Homo sapien
agacctgcccctatgtttccttccg

SEQ ID NO: 5893824 - DNA, 25 bp, Homo sapien
ttgccttgcccaaacctacgtctac

SEQ ID NO: 5893825 - DNA, 25 bp, Homo sapien
tttgggtcttacccttgcctagaaa

SEQ ID NO: 5893826 - DNA, 25 bp, Homo sapien
tcagaatgttgactatctgacaggt

SEQ ID NO: 5893827 - DNA, 25 bp, Homo sapien
ttgtctgcctcctcagaacttggct

SEQ ID NO: 5893828 - DNA, 25 bp, Homo sapien
agccatggatgcatagtgagactct

SEQ ID NO: 5893829 - DNA, 25 bp, Homo sapien
aattgccttgcccaaacctacgtct

SEQ ID NO: 5893830 - DNA, 25 bp, Homo sapien
gtcaaggcagtaaggtgttcttggg

SEQ ID NO: 5893831 - DNA, 25 bp, Homo sapien
ttttgccactttcggatgttgaatt

SEQ ID NO: 5893832 - DNA, 25 bp, Homo sapien
tggtctgcctcaacaccaagacctg

SEQ ID NO: 5893833 - DNA, 25 bp, Homo sapien
tcagaaggtcctgttcctggtcaat

SEQ ID NO: 5893834 - DNA, 25 bp, Homo sapien
gcagcctctggagggaggagttttg

SEQ ID NO: 5893835 - DNA, 25 bp, Homo sapien
tttcctgttcagtgaaatggacaca

SEQ ID NO: 5893836 - DNA, 25 bp, Homo sapien
tgtggaattggttcattttcctgtt

SEQ ID NO: 5893837 - DNA, 25 bp, Homo sapien
aacttttagaatgtagaattccgta

SEQ ID NO: 5893838 - DNA, 25 bp, Homo sapien
tttgaggccagtttggcctatatag

SEQ ID NO: 5893839 - DNA, 25 bp, Homo sapien
cctcagaacttggctctttgttggc

SEQ ID NO: 5893840 - DNA, 25 bp, Homo sapien
tcttgggagccacacttagactctt

SEQ ID NO: 5893841 - DNA, 25 bp, Homo sapien
cgctccactgagctctgagggagct

SEQ ID NO: 5893842 - DNA, 25 bp, Homo sapien
acctgcccctatgtttccttccgtg

SEQ ID NO: 5893843 - DNA, 25 bp, Homo sapien
ccagcacgttcggtggtgacgtggg

SEQ ID NO: 5893844 - DNA, 25 bp, Homo sapien
tacgccaaaggtcaaggcagtaagg

SEQ ID NO: 5893845 - DNA, 25 bp, Homo sapien
atttctggttgatttggaatatagg

SEQ ID NO: 5893846 - DNA, 25 bp, Homo sapien
aaagttagaagtggttttgtctgcc

SEQ ID NO: 5893847 - DNA, 25 bp, Homo sapien
tggaattggttcattttcctgttca

SEQ ID NO: 5893848 - DNA, 25 bp, Homo sapien
tcctgttcagtgaaatggacacaga

SEQ ID NO: 5893849 - DNA, 25 bp, Homo sapien
gcctcctcagaacttggctctttgt

SEQ ID NO: 5893850 - DNA, 25 bp, Homo sapien
agaaactggtctgcctcaacaccaa

SEQ ID NO: 5893851 - DNA, 25 bp, Homo sapien
caaacctacgtctacgccaaaggtc

SEQ ID NO: 5893852 - DNA, 25 bp, Homo sapien
gttcattttcctgttcagtgaaatg

SEQ ID NO: 5893853 - DNA, 25 bp, Homo sapien
cccagcacttggaaggcagaggcag

SEQ ID NO: 5893854 - DNA, 25 bp, Homo sapien
tcagatttctggttgatttggaata

SEQ ID NO: 5893855 - DNA, 25 bp, Homo sapien
tctttgttggcaactcagaaagtca

SEQ ID NO: 5893856 - DNA, 25 bp, Homo sapien
agaaggtcctgttcctggtcaatga

SEQ ID NO: 5893857 - DNA, 25 bp, Homo sapien
ctcacatttgaaactttgggtctta

SEQ ID NO: 5893858 - DNA, 25 bp, Homo sapien
tggagggaggagttttgttcctgat

SEQ ID NO: 5893859 - DNA, 25 bp, Homo sapien
aaacccagcacgttcggtggtgacg

SEQ ID NO: 5893860 - DNA, 25 bp, Homo sapien
actcagaaggtcctgttcctggtca

SEQ ID NO: 5893861 - DNA, 25 bp, Homo sapien
aagacaagtccttgatgtgggtttt

SEQ ID NO: 5893862 - DNA, 25 bp, Homo sapien
tgagctctgagggagctggaaagca

SEQ ID NO: 5893863 - DNA, 25 bp, Homo sapien
cggtggtgacgtgggcttcaacctt

SEQ ID NO: 5893864 - DNA, 25 bp, Homo sapien
gactatctgacaggtgactcagaag

SEQ ID NO: 5893865 - DNA, 25 bp, Homo sapien
gaatgtctagaatgtggaattggtt

SEQ ID NO: 5893866 - DNA, 25 bp, Homo sapien
caaggcagtaaggtgttcttgggag

SEQ ID NO: 5893867 - DNA, 25 bp, Homo sapien
cccagtgtccagcaagaattgcctt

SEQ ID NO: 5893868 - DNA, 25 bp, Homo sapien
cagtttggcctatatagtgagttct

SEQ ID NO: 5893869 - DNA, 25 bp, Homo sapien
cacgttcggtggtgacgtgggcttc

SEQ ID NO: 5893870 - DNA, 25 bp, Homo sapien
ataggcttaaaactttatattatag

SEQ ID NO: 5893871 - DNA, 25 bp, Homo sapien
atagggtagggtgtggttgcacaca

SEQ ID NO: 5893872 - DNA, 25 bp, Homo sapien
ttttgttcctgatgaagacaagtcc

SEQ ID NO: 5893873 - DNA, 25 bp, Homo sapien
gtgagttctaggccagccatggatg

SEQ ID NO: 5893874 - DNA, 25 bp, Homo sapien
ggaaggcagaggcagttggatctct

SEQ ID NO: 5893875 - DNA, 25 bp, Homo sapien
aaggtcctgttcctggtcaatgatc

SEQ ID NO: 5893876 - DNA, 25 bp, Homo sapien
gttcctgatgaagacaagtccttga

SEQ ID NO: 5893877 - DNA, 25 bp, Homo sapien
ggaggcctcttcagaatgttgacta

SEQ ID NO: 5893878 - DNA, 25 bp, Homo sapien
gtgggttttcgtggcttggcattgt

SEQ ID NO: 5893879 - DNA, 25 bp, Homo sapien
taagaaagttagaagtggttttgtc

SEQ ID NO: 5893880 - DNA, 25 bp, Homo sapien
aaaggtcaaggcagtaaggtgttct

SEQ ID NO: 5893881 - DNA, 25 bp, Homo sapien
gtggagggaacagatggactcatct

SEQ ID NO: 5893882 - DNA, 25 bp, Homo sapien
accttaatcccagcacttggaaggc

SEQ ID NO: 5893883 - DNA, 25 bp, Homo sapien
ctccactgagctctgagggagctgg

SEQ ID NO: 5893884 - DNA, 25 bp, Homo sapien
ggtgacgtgggcttcaaccttgtca

SEQ ID NO: 5893885 - DNA, 25 bp, Homo sapien
gtgttcttgggagccacacttagac

SEQ ID NO: 5893886 - DNA, 25 bp, Homo sapien
tcagaaagtcagatttctggttgat

SEQ ID NO: 5893887 - DNA, 25 bp, Homo sapien
caacttgaatgtctagaatgtggaa

SEQ ID NO: 5893888 - DNA, 25 bp, Homo sapien
ccgtgtgccagattaccctggagat

SEQ ID NO: 5893889 - DNA, 25 bp, Homo sapien
gagccacacttagactctttccaaa

SEQ ID NO: 5893890 - DNA, 25 bp, Homo sapien
tgttccccagagtactggaaaccca

SEQ ID NO: 5893891 - DNA, 25 bp, Homo sapien
ctgtcttagtgagacgctccactga

SEQ ID NO: 5893892 - DNA, 25 bp, Homo sapien
tatattatagggtagggtgtggttg

SEQ ID NO: 5893893 - DNA, 25 bp, Homo sapien
caaaagaacccagtgtccagcaaga

SEQ ID NO: 5893894 - DNA, 25 bp, Homo sapien
aaggcagaggcagttggatctctgg

SEQ ID NO: 5893895 - DNA, 25 bp, Homo sapien
ctagaatgtggaattggttcatttt

SEQ ID NO: 5893896 - DNA, 25 bp, Homo sapien
tctgttccccagagtactggaaacc

SEQ ID NO: 5893897 - DNA, 25 bp, Homo sapien
gggcttcaaccttgtcaacacagcc

SEQ ID NO: 5893898 - DNA, 25 bp, Homo sapien
agtcagatttctggttgatttggaa

SEQ ID NO: 5893899 - DNA, 25 bp, Homo sapien
acttgaatgtctagaatgtggaatt

SEQ ID NO: 5893900 - DNA, 25 bp, Homo sapien
gggttttcgtggcttggcattgtga

SEQ ID NO: 5893901 - DNA, 25 bp, Homo sapien
ttgccactttcggatgttgaattct

SEQ ID NO: 5893902 - DNA, 25 bp, Homo sapien
gcctcactgaagaaactggtctgcc

SEQ ID NO: 5893903 - DNA, 25 bp, Homo sapien
tatatagtgagttctaggccagcca

SEQ ID NO: 5893904 - DNA, 25 bp, Homo sapien
cacatttgaaactttgggtcttacc

SEQ ID NO: 5893905 - DNA, 25 bp, Homo sapien
atttggaggcctcttcagaatgttg

SEQ ID NO: 5893906 - DNA, 25 bp, Homo sapien
aaatggacacagaacaaaagaaccc

SEQ ID NO: 5893907 - DNA, 25 bp, Homo sapien
ttgactatctgacaggtgactcaga

SEQ ID NO: 5893908 - DNA, 25 bp, Homo sapien
atagtgagactctttctcaaaacaa

SEQ ID NO: 5893909 - DNA, 25 bp, Homo sapien
aacaaaagaacccagtgtccagcaa

SEQ ID NO: 5893910 - DNA, 25 bp, Homo sapien
gagatgacgggtctgtcttagtgag

SEQ ID NO: 5893911 - DNA, 25 bp, Homo sapien
cttcagaatgttgactatctgacag

SEQ ID NO: 5893912 - DNA, 25 bp, Homo sapien
gccttgcccaaacctacgtctacgc

SEQ ID NO: 5893913 - DNA, 25 bp, Homo sapien
actctttctcaaaacaaacaaacaa

SEQ ID NO: 5893914 - DNA, 25 bp, Homo sapien
cctacgtctacgccaaaggtcaagg

SEQ ID NO: 5893915 - DNA, 25 bp, Homo sapien
gaggcagttggatctctgggagttt

SEQ ID NO: 5893916 - DNA, 25 bp, Homo sapien
agctgatgctcacatttgaaacttt

SEQ ID NO: 5893917 - DNA, 25 bp, Homo sapien
tgatctataacatgggccaaaacat

SEQ ID NO: 5893918 - DNA, 25 bp, Homo sapien
gagctggaaagcagcctctggaggg

SEQ ID NO: 5893919 - DNA, 25 bp, Homo sapien
gcattgtgagagctgatgctcacat

SEQ ID NO: 5893920 - DNA, 25 bp, Homo sapien
actcagaaagtcagatttctggttg

SEQ ID NO: 5893921 - DNA, 25 bp, Homo sapien
tcaacacagcctcactgaagaaact

SEQ ID NO: 5893922 - DNA, 25 bp, Homo sapien
ggtcctgttcctggtcaatgatcta

SEQ ID NO: 5893923 - DNA, 25 bp, Homo sapien
gattaccctggagatgacgggtctg

SEQ ID NO: 5893924 - DNA, 25 bp, Homo sapien
cactttcggatgttgaattctttgt

SEQ ID NO: 5893925 - DNA, 25 bp, Homo sapien
tggctctttgttggcaactcagaaa

SEQ ID NO: 5893926 - DNA, 25 bp, Homo sapien
tacgtctacgccaaaggtcaaggca

SEQ ID NO: 5893927 - DNA, 25 bp, Homo sapien
atcccagcacttggaaggcagaggc

SEQ ID NO: 5893928 - DNA, 25 bp, Homo sapien
ctagaaaattgtgattttgccactt

SEQ ID NO: 5893929 - DNA, 25 bp, Homo sapien
cagaggcagttggatctctgggagt

SEQ ID NO: 5893930 - DNA, 25 bp, Homo sapien
tttcttcctagaatttggaggcctc

SEQ ID NO: 5893931 - DNA, 25 bp, Homo sapien
tagaatttggaggcctcttcagaat

SEQ ID NO: 5893932 - DNA, 25 bp, Homo sapien
aaagaacccagtgtccagcaagaat

SEQ ID NO: 5893933 - DNA, 25 bp, Homo sapien
cagttggatctctgggagtttgagg

SEQ ID NO: 5893934 - DNA, 25 bp, Homo sapien
gttcagtgaaatggacacagaacaa

SEQ ID NO: 5893935 - DNA, 25 bp, Homo sapien
gggaggagttttgttcctgatgaag

SEQ ID NO: 5893936 - DNA, 25 bp, Homo sapien
ggttttgtctgcctcctcagaactt

SEQ ID NO: 5893937 - DNA, 25 bp, Homo sapien
tcctgatgaagacaagtccttgatg

SEQ ID NO: 5893938 - DNA, 25 bp, Homo sapien
cttaatcccagcacttggaaggcag

SEQ ID NO: 5893939 - DNA, 25 bp, Homo sapien
actttgggtcttacccttgcctaga

SEQ ID NO: 5893940 - DNA, 25 bp, Homo sapien
gagacgctccactgagctctgaggg

SEQ ID NO: 5893941 - DNA, 25 bp, Homo sapien
agtgagactctttctcaaaacaaac

SEQ ID NO: 5893942 - DNA, 25 bp, Homo sapien
cactgaagaaactggtctgcctcaa

SEQ ID NO: 5893943 - DNA, 25 bp, Homo sapien
tagggtgtggttgcacacaccttaa

SEQ ID NO: 5893944 - DNA, 25 bp, Homo sapien
ttttgtctgcctcctcagaacttgg

SEQ ID NO: 5893945 - DNA, 25 bp, Homo sapien
tgggtcttacccttgcctagaaaat

SEQ ID NO: 5893946 - DNA, 25 bp, Homo sapien
cacttagactctttccaaagatgtg

SEQ ID NO: 5893947 - DNA, 25 bp, Homo sapien
ctgaagaaactggtctgcctcaaca

SEQ ID NO: 5893948 - DNA, 25 bp, Homo sapien
ctgttcctggtcaatgatctataac

SEQ ID NO: 5893949 - DNA, 25 bp, Homo sapien
caactcagaaagtcagatttctggt

SEQ ID NO: 5893950 - DNA, 25 bp, Homo sapien
aggcagtaaggtgttcttgggagcc

SEQ ID NO: 5893951 - DNA, 25 bp, Homo sapien
cttggctctttgttggcaactcaga

SEQ ID NO: 5893952 - DNA, 25 bp, Homo sapien
gacaggtgactcagaaggtcctgtt

SEQ ID NO: 5893953 - DNA, 25 bp, Homo sapien
actgagctctgagggagctggaaag

SEQ ID NO: 5893954 - DNA, 25 bp, Homo sapien
ggtcaatgatctataacatgggcca

SEQ ID NO: 5893955 - DNA, 25 bp, Homo sapien
gaaagcagcctctggagggaggagt

SEQ ID NO: 5893956 - DNA, 25 bp, Homo sapien
acttggaaggcagaggcagttggat

SEQ ID NO: 5893957 - DNA, 25 bp, Homo sapien
tgactcagaaggtcctgttcctggt

SEQ ID NO: 5893958 - DNA, 25 bp, Homo sapien
gatttggaatataggcttaaaactt

SEQ ID NO: 5893959 - DNA, 25 bp, Homo sapien
agagctgatgctcacatttgaaact

SEQ ID NO: 5893960 - DNA, 25 bp, Homo sapien
ataacatgggccaaaacattcccaa

SEQ ID NO: 5893961 - DNA, 25 bp, Homo sapien
tcctgttcctggtcaatgatctata

SEQ ID NO: 5893962 - DNA, 25 bp, Homo sapien
ccccagagtactggaaacccagcac

SEQ ID NO: 5893963 - DNA, 25 bp, Homo sapien
ttctggttgatttggaatataggct

SEQ ID NO: 5893964 - DNA, 25 bp, Homo sapien
gggtctgtcttagtgagacgctcca

SEQ ID NO: 5893965 - DNA, 25 bp, Homo sapien
ctgcctcctcagaacttggctcttt

SEQ ID NO: 5893966 - DNA, 25 bp, Homo sapien
cacacttagactctttccaaagatg

SEQ ID NO: 5893967 - DNA, 25 bp, Homo sapien
tgcccaaacctacgtctacgccaaa

SEQ ID NO: 5893968 - DNA, 25 bp, Homo sapien
agctctgagggagctggaaagcagc

SEQ ID NO: 5893969 - DNA, 25 bp, Homo sapien
aacctacgtctacgccaaaggtcaa

SEQ ID NO: 5893970 - DNA, 25 bp, Homo sapien
atataggccaaactggcctcaaact

SEQ ID NO: 5893971 - DNA, 25 bp, Homo sapien
caaccagaaatctgactttctgagt

SEQ ID NO: 5893972 - DNA, 25 bp, Homo sapien
ataggccaaactggcctcaaactcc

SEQ ID NO: 5893973 - DNA, 25 bp, Homo sapien
cctatattccaaatcaaccagaaat

SEQ ID NO: 5893974 - DNA, 25 bp, Homo sapien
tttcttcagtgaggctgtgttgaca

SEQ ID NO: 5893975 - DNA, 25 bp, Homo sapien
gtgaggctgtgttgacaaggttgaa

SEQ ID NO: 5893976 - DNA, 25 bp, Homo sapien
tcattgaccaggaacaggaccttct

SEQ ID NO: 5893977 - DNA, 25 bp, Homo sapien
aggtttgggcaaggcaattcttgct

SEQ ID NO: 5893978 - DNA, 25 bp, Homo sapien
gtaggtttgggcaaggcaattcttg

SEQ ID NO: 5893979 - DNA, 25 bp, Homo sapien
aggaggcagacaaaaccacttctaa

SEQ ID NO: 5893980 - DNA, 25 bp, Homo sapien
tgactttctgagttgccaacaaaga

SEQ ID NO: 5893981 - DNA, 25 bp, Homo sapien
cagtgaggctgtgttgacaaggttg

SEQ ID NO: 5893982 - DNA, 25 bp, Homo sapien
tacggaattctacattctaaaagtt

SEQ ID NO: 5893983 - DNA, 25 bp, Homo sapien
ttgctggacactgggttcttttgtt

SEQ ID NO: 5893984 - DNA, 25 bp, Homo sapien
acaaagaattcaacatccgaaagtg

SEQ ID NO: 5893985 - DNA, 25 bp, Homo sapien
ccaagccacgaaaacccacatcaag

SEQ ID NO: 5893986 - DNA, 25 bp, Homo sapien
ccaaagtttcaaatgtgagcatcag

SEQ ID NO: 5893987 - DNA, 25 bp, Homo sapien
tctcactatgcatccatggctggcc

SEQ ID NO: 5893988 - DNA, 25 bp, Homo sapien
gagcgtctcactaagacagacccgt

SEQ ID NO: 5893989 - DNA, 25 bp, Homo sapien
cctccaaattctaggaagaaaattg

SEQ ID NO: 5893990 - DNA, 25 bp, Homo sapien
caacaaagagccaagttctgaggag

SEQ ID NO: 5893991 - DNA, 25 bp, Homo sapien
ggtaatctggcacacggaaggaaac

SEQ ID NO: 5893992 - DNA, 25 bp, Homo sapien
atgtgagcatcagctctcacaatgc

SEQ ID NO: 5893993 - DNA, 25 bp, Homo sapien
gtgagcatcagctctcacaatgcca

SEQ ID NO: 5893994 - DNA, 25 bp, Homo sapien
gaagaaaattgaggaccccattaac

SEQ ID NO: 5893995 - DNA, 25 bp, Homo sapien
tataaagttttaagcctatattcca

SEQ ID NO: 5893996 - DNA, 25 bp, Homo sapien
tcttcagtgaggctgtgttgacaag

SEQ ID NO: 5893997 - DNA, 25 bp, Homo sapien
cagagctcagtggagcgtctcacta

SEQ ID NO: 5893998 - DNA, 25 bp, Homo sapien
cccaagaacaccttactgccttgac

SEQ ID NO: 5893999 - DNA, 25 bp, Homo sapien
cagacccgtcatctccagggtaatc

SEQ ID NO: 5894000 - DNA, 25 bp, Homo sapien
ggctcccaagaacaccttactgcct

SEQ ID NO: 5894001 - DNA, 25 bp, Homo sapien
tatgcatccatggctggcctagaac

SEQ ID NO: 5894002 - DNA, 25 bp, Homo sapien
agccaagttctgaggaggcagacaa

SEQ ID NO: 5894003 - DNA, 25 bp, Homo sapien
caaattctaggaagaaaattgagga

SEQ ID NO: 5894004 - DNA, 25 bp, Homo sapien
tctacattctaaaagttgtttgttt

SEQ ID NO: 5894005 - DNA, 25 bp, Homo sapien
aaggacttgtcttcatcaggaacaa

SEQ ID NO: 5894006 - DNA, 25 bp, Homo sapien
caagtgctgggattaaggtgtgtgc

SEQ ID NO: 5894007 - DNA, 25 bp, Homo sapien
ctcactaagacagacccgtcatctc

SEQ ID NO: 5894008 - DNA, 25 bp, Homo sapien
ctccctccagaggctgctttccagc

SEQ ID NO: 5894009 - DNA, 25 bp, Homo sapien
aaagagccaagttctgaggaggcag

SEQ ID NO: 5894010 - DNA, 25 bp, Homo sapien
gtgctgggtttccagtactctgggg

SEQ ID NO: 5894011 - DNA, 25 bp, Homo sapien
tggctggcctagaactcactatata

SEQ ID NO: 5894012 - DNA, 25 bp, Homo sapien
tgaaccaattccacattctagacat

SEQ ID NO: 5894013 - DNA, 25 bp, Homo sapien
tgacaaggttgaagcccacgtcacc

SEQ ID NO: 5894014 - DNA, 25 bp, Homo sapien
gcgtagacgtaggtttgggcaaggc

SEQ ID NO: 5894015 - DNA, 25 bp, Homo sapien
agaattcaacatccgaaagtggcaa

SEQ ID NO: 5894016 - DNA, 25 bp, Homo sapien
aaagagtctcactatgcatccatgg

SEQ ID NO: 5894017 - DNA, 25 bp, Homo sapien
tcacctgtcagatagtcaacattct

SEQ ID NO: 5894018 - DNA, 25 bp, Homo sapien
caggaacaggaccttctgagtcacc

SEQ ID NO: 5894019 - DNA, 25 bp, Homo sapien
gaaagtggcaaaatcacaattttct

SEQ ID NO: 5894020 - DNA, 25 bp, Homo sapien
ttccaaatcaaccagaaatctgact

SEQ ID NO: 5894021 - DNA, 25 bp, Homo sapien
cgtcaccaccgaacgtgctgggttt

SEQ ID NO: 5894022 - DNA, 25 bp, Homo sapien
tctgaagaggcctccaaattctagg

SEQ ID NO: 5894023 - DNA, 25 bp, Homo sapien
tttctgagttgccaacaaagagcca

SEQ ID NO: 5894024 - DNA, 25 bp, Homo sapien
caaaactcctccctccagaggctgc

SEQ ID NO: 5894025 - DNA, 25 bp, Homo sapien
agtttcttcagtgaggctgtgttga

SEQ ID NO: 5894026 - DNA, 25 bp, Homo sapien
gtgtggctcccaagaacaccttact

SEQ ID NO: 5894027 - DNA, 25 bp, Homo sapien
tctgaggaggcagacaaaaccactt

SEQ ID NO: 5894028 - DNA, 25 bp, Homo sapien
gtttgggcaaggcaattcttgctgg

SEQ ID NO: 5894029 - DNA, 25 bp, Homo sapien
gttttaagcctatattccaaatcaa

SEQ ID NO: 5894030 - DNA, 25 bp, Homo sapien
ccatctgttccctccacatctttgg

SEQ ID NO: 5894031 - DNA, 25 bp, Homo sapien
tttttacggaattctacattctaaa

SEQ ID NO: 5894032 - DNA, 25 bp, Homo sapien
gggcaaggcaattcttgctggacac

SEQ ID NO: 5894033 - DNA, 25 bp, Homo sapien
cagacaaaaccacttctaactttct

SEQ ID NO: 5894034 - DNA, 25 bp, Homo sapien
aagtggcaaaatcacaattttctag

SEQ ID NO: 5894035 - DNA, 25 bp, Homo sapien
gaattctacattctaaaagttgttt

SEQ ID NO: 5894036 - DNA, 25 bp, Homo sapien
tcctccctccagaggctgctttcca

SEQ ID NO: 5894037 - DNA, 25 bp, Homo sapien
ttgggaatgttttggcccatgttat

SEQ ID NO: 5894038 - DNA, 25 bp, Homo sapien
ttccagctccctcagagctcagtgg

SEQ ID NO: 5894039 - DNA, 25 bp, Homo sapien
gctggacactgggttcttttgttct

SEQ ID NO: 5894040 - DNA, 25 bp, Homo sapien
tgagaaagagtctcactatgcatcc

SEQ ID NO: 5894041 - DNA, 25 bp, Homo sapien
tttctaggcaagggtaagacccaaa

SEQ ID NO: 5894042 - DNA, 25 bp, Homo sapien
ccttactgccttgacctttggcgta

SEQ ID NO: 5894043 - DNA, 25 bp, Homo sapien
tcttttgttctgtgtccatttcact

SEQ ID NO: 5894044 - DNA, 25 bp, Homo sapien
tctgagtcacctgtcagatagtcaa

SEQ ID NO: 5894045 - DNA, 25 bp, Homo sapien
aggccaaactggcctcaaactccca

SEQ ID NO: 5894046 - DNA, 25 bp, Homo sapien
cagctctcacaatgccaagccacga

SEQ ID NO: 5894047 - DNA, 25 bp, Homo sapien
gaggcctccaaattctaggaagaaa

SEQ ID NO: 5894048 - DNA, 25 bp, Homo sapien
tggaaagagtctaagtgtggctccc

SEQ ID NO: 5894049 - DNA, 25 bp, Homo sapien
acaaggttgaagcccacgtcaccac

SEQ ID NO: 5894050 - DNA, 25 bp, Homo sapien
gaggctgtgttgacaaggttgaagc

SEQ ID NO: 5894051 - DNA, 25 bp, Homo sapien
cccacgtcaccaccgaacgtgctgg

SEQ ID NO: 5894052 - DNA, 25 bp, Homo sapien
aaggtgtgtgcaaccacaccctacc

SEQ ID NO: 5894053 - DNA, 25 bp, Homo sapien
tctcacaatgccaagccacgaaaac

SEQ ID NO: 5894054 - DNA, 25 bp, Homo sapien
taacaaagaattcaacatccgaaag

SEQ ID NO: 5894055 - DNA, 25 bp, Homo sapien
tagacattcaagttgggaatgtttt

SEQ ID NO: 5894056 - DNA, 25 bp, Homo sapien
ctggcacacggaaggaaacataggg

SEQ ID NO: 5894057 - DNA, 25 bp, Homo sapien
aagaggcctccaaattctaggaaga

SEQ ID NO: 5894058 - DNA, 25 bp, Homo sapien
attctgaagaggcctccaaattcta

SEQ ID NO: 5894059 - DNA, 25 bp, Homo sapien
ccaactgcctctgccttccaagtgc

SEQ ID NO: 5894060 - DNA, 25 bp, Homo sapien
ctataatataaagttttaagcctat

SEQ ID NO: 5894061 - DNA, 25 bp, Homo sapien
cacggaaggaaacataggggcaggt

SEQ ID NO: 5894062 - DNA, 25 bp, Homo sapien
taggggcaggtcttggtgttgaggc

SEQ ID NO: 5894063 - DNA, 25 bp, Homo sapien
ctgggttcttttgttctgtgtccat

SEQ ID NO: 5894064 - DNA, 25 bp, Homo sapien
agtttcaaatgtgagcatcagctct

SEQ ID NO: 5894065 - DNA, 25 bp, Homo sapien
cactatataggccaaactggcctca

SEQ ID NO: 5894066 - DNA, 25 bp, Homo sapien
ggcaaaatcacaattttctaggcaa

SEQ ID NO: 5894067 - DNA, 25 bp, Homo sapien
ttgtcttcatcaggaacaaaactcc

SEQ ID NO: 5894068 - DNA, 25 bp, Homo sapien
aatctgactttctgagttgccaaca

SEQ ID NO: 5894069 - DNA, 25 bp, Homo sapien
gtgttgacaaggttgaagcccacgt

SEQ ID NO: 5894070 - DNA, 25 bp, Homo sapien
gaggcagacaaaaccacttctaact

SEQ ID NO: 5894071 - DNA, 25 bp, Homo sapien
cctccacatctttggaaagagtcta

SEQ ID NO: 5894072 - DNA, 25 bp, Homo sapien
ctgttccctccacatctttggaaag

SEQ ID NO: 5894073 - DNA, 25 bp, Homo sapien
gcctagaactcactatataggccaa

SEQ ID NO: 5894074 - DNA, 25 bp, Homo sapien
ttggtgttgaggcagaccagtttct

SEQ ID NO: 5894075 - DNA, 25 bp, Homo sapien
acctgtcagatagtcaacattctga

SEQ ID NO: 5894076 - DNA, 25 bp, Homo sapien
ttactgccttgacctttggcgtaga

SEQ ID NO: 5894077 - DNA, 25 bp, Homo sapien
actgccttgacctttggcgtagacg

SEQ ID NO: 5894078 - DNA, 25 bp, Homo sapien
tcaaatgtgagcatcagctctcaca

SEQ ID NO: 5894079 - DNA, 25 bp, Homo sapien
tttggcccatgttatagatcattga

SEQ ID NO: 5894080 - DNA, 25 bp, Homo sapien
acattctgaagaggcctccaaattc

SEQ ID NO: 5894081 - DNA, 25 bp, Homo sapien
ttgacctttggcgtagacgtaggtt

SEQ ID NO: 5894082 - DNA, 25 bp, Homo sapien
tgaagaggcctccaaattctaggaa

SEQ ID NO: 5894083 - DNA, 25 bp, Homo sapien
tgtgtgcaaccacaccctaccctat

SEQ ID NO: 5894084 - DNA, 25 bp, Homo sapien
ccacattctagacattcaagttggg

SEQ ID NO: 5894085 - DNA, 25 bp, Homo sapien
aactgcctctgccttccaagtgctg

SEQ ID NO: 5894086 - DNA, 25 bp, Homo sapien
caggtcttggtgttgaggcagacca

SEQ ID NO: 5894087 - DNA, 25 bp, Homo sapien
accttctgagtcacctgtcagatag

SEQ ID NO: 5894088 - DNA, 25 bp, Homo sapien
agagatccaactgcctctgccttcc

SEQ ID NO: 5894089 - DNA, 25 bp, Homo sapien
attctagacattcaagttgggaatg

SEQ ID NO: 5894090 - DNA, 25 bp, Homo sapien
tgcatccatggctggcctagaactc

SEQ ID NO: 5894091 - DNA, 25 bp, Homo sapien
aagttctgaggaggcagacaaaacc

SEQ ID NO: 5894092 - DNA, 25 bp, Homo sapien
tctagacattcaagttgggaatgtt

SEQ ID NO: 5894093 - DNA, 25 bp, Homo sapien
tctttggaaagagtctaagtgtggc

SEQ ID NO: 5894094 - DNA, 25 bp, Homo sapien
tgaggaggcagacaaaaccacttct

SEQ ID NO: 5894095 - DNA, 25 bp, Homo sapien
ccagctccctcagagctcagtggag

SEQ ID NO: 5894096 - DNA, 25 bp, Homo sapien
cataggggcaggtcttggtgttgag

SEQ ID NO: 5894097 - DNA, 25 bp, Homo sapien
ctaagtgtggctcccaagaacacct

SEQ ID NO: 5894098 - DNA, 25 bp, Homo sapien
agttgccaacaaagagccaagttct

SEQ ID NO: 5894099 - DNA, 25 bp, Homo sapien
gttaacaaagaattcaacatccgaa

SEQ ID NO: 5894100 - DNA, 25 bp, Homo sapien
actgaacaggaaaatgaaccaattc

SEQ ID NO: 5894101 - DNA, 25 bp, Homo sapien
ccttgacctttggcgtagacgtagg

SEQ ID NO: 5894102 - DNA, 25 bp, Homo sapien
caaccacaccctaccctataatata

SEQ ID NO: 5894103 - DNA, 25 bp, Homo sapien
ccctcagagctcagtggagcgtctc

SEQ ID NO: 5894104 - DNA, 25 bp, Homo sapien
agagccaagttctgaggaggcagac

SEQ ID NO: 5894105 - DNA, 25 bp, Homo sapien
agtctcactatgcatccatggctgg

SEQ ID NO: 5894106 - DNA, 25 bp, Homo sapien
ttttgttctgtgtccatttcactga

SEQ ID NO: 5894107 - DNA, 25 bp, Homo sapien
tctaggcaagggtaagacccaaagt

SEQ ID NO: 5894108 - DNA, 25 bp, Homo sapien
tttcactgaacaggaaaatgaacca

SEQ ID NO: 5894109 - DNA, 25 bp, Homo sapien
aaatcacaattttctaggcaagggt

SEQ ID NO: 5894110 - DNA, 25 bp, Homo sapien
gaaacataggggcaggtcttggtgt

SEQ ID NO: 5894111 - DNA, 25 bp, Homo sapien
ctccagaggctgctttccagctccc

SEQ ID NO: 5894112 - DNA, 25 bp, Homo sapien
tgtgcaaccacaccctaccctataa

SEQ ID NO: 5894113 - DNA, 25 bp, Homo sapien
cacgtcaccaccgaacgtgctgggt

SEQ ID NO: 5894114 - DNA, 25 bp, Homo sapien
tgagttgccaacaaagagccaagtt

SEQ ID NO: 5894115 - DNA, 25 bp, Homo sapien
gttcttttgttctgtgtccatttca

SEQ ID NO: 5894116 - DNA, 25 bp, Homo sapien
aacccacatcaaggacttgtcttca

SEQ ID NO: 5894117 - DNA, 25 bp, Homo sapien
acattctagacattcaagttgggaa

SEQ ID NO: 5894118 - DNA, 25 bp, Homo sapien
ggttgaagcccacgtcaccaccgaa

SEQ ID NO: 5894119 - DNA, 25 bp, Homo sapien
ccagtttcttcagtgaggctgtgtt

SEQ ID NO: 5894120 - DNA, 25 bp, Homo sapien
gacccgtcatctccagggtaatctg

SEQ ID NO: 5894121 - DNA, 25 bp, Homo sapien
gttccctccacatctttggaaagag

SEQ ID NO: 5894122 - DNA, 25 bp, Homo sapien
agctccctcagagctcagtggagcg

SEQ ID NO: 5894123 - DNA, 25 bp, Homo sapien
atccaactgcctctgccttccaagt

SEQ ID NO: 5894124 - DNA, 25 bp, Homo sapien
tagtcaacattctgaagaggcctcc

SEQ ID NO: 5894125 - DNA, 25 bp, Homo sapien
acatccgaaagtggcaaaatcacaa

SEQ ID NO: 5894126 - DNA, 25 bp, Homo sapien
cagtactctggggaacagatgggat

SEQ ID NO: 5894127 - DNA, 25 bp, Homo sapien
ggcacacggaaggaaacataggggc

SEQ ID NO: 5894128 - DNA, 25 bp, Homo sapien
accacaccctaccctataatataaa

SEQ ID NO: 5894129 - DNA, 25 bp, Homo sapien
gtttgtttgtttgttttgagaaaga

SEQ ID NO: 5894130 - DNA, 25 bp, Homo sapien
ttcaacatccgaaagtggcaaaatc

SEQ ID NO: 5894131 - DNA, 25 bp, Homo sapien
gtctaagtgtggctcccaagaacac

SEQ ID NO: 5894132 - DNA, 25 bp, Homo sapien
tagatcattgaccaggaacaggacc

SEQ ID NO: 5894133 - DNA, 25 bp, Homo sapien
cttccaagtgctgggattaaggtgt

SEQ ID NO: 5894134 - DNA, 25 bp, Homo sapien
aagccacgaaaacccacatcaagga

SEQ ID NO: 5894135 - DNA, 25 bp, Homo sapien
attttctaggcaagggtaagaccca

SEQ ID NO: 5894136 - DNA, 25 bp, Homo sapien
ctctgccttccaagtgctgggatta

SEQ ID NO: 5894137 - DNA, 25 bp, Homo sapien
agaggctgctttccagctccctcag

SEQ ID NO: 5894138 - DNA, 25 bp, Homo sapien
gacattcaagttgggaatgttttgg

SEQ ID NO: 5894139 - DNA, 25 bp, Homo sapien
cttcatcaggaacaaaactcctccc

SEQ ID NO: 5894140 - DNA, 25 bp, Homo sapien
gtcagatagtcaacattctgaagag

SEQ ID NO: 5894141 - DNA, 25 bp, Homo sapien
aacaaaactcctccctccagaggct

SEQ ID NO: 5894142 - DNA, 25 bp, Homo sapien
ggcagaccagtttcttcagtgaggc

SEQ ID NO: 5894143 - DNA, 25 bp, Homo sapien
caattttctaggcaagggtaagacc

SEQ ID NO: 5894144 - DNA, 25 bp, Homo sapien
attcttgctggacactgggttcttt

SEQ ID NO: 5894145 - DNA, 25 bp, Homo sapien
gacaaaaccacttctaactttctta

SEQ ID NO: 5894146 - DNA, 25 bp, Homo sapien
gaacgtgctgggtttccagtactct

SEQ ID NO: 5894147 - DNA, 25 bp, Homo sapien
gcccatgttatagatcattgaccag

SEQ ID NO: 5894148 - DNA, 25 bp, Homo sapien
tcactgaacaggaaaatgaaccaat

SEQ ID NO: 5894149 - DNA, 25 bp, Homo sapien
aacataggggcaggtcttggtgttg

SEQ ID NO: 5894150 - DNA, 25 bp, Homo sapien
aagttttaagcctatattccaaatc

SEQ ID NO: 5894151 - DNA, 25 bp, Homo sapien
gttttgagaaagagtctcactatgc

SEQ ID NO: 5894152 - DNA, 25 bp, Homo sapien
ccaagttctgaggaggcagacaaaa

SEQ ID NO: 5894153 - DNA, 25 bp, Homo sapien
cttctgagtcacctgtcagatagtc

SEQ ID NO: 5894154 - DNA, 25 bp, Homo sapien
tccatggctggcctagaactcacta

SEQ ID NO: 5894155 - DNA, 25 bp, Homo sapien
ctgtcagatagtcaacattctgaag

SEQ ID NO: 5894156 - DNA, 25 bp, Homo sapien
gttatagatcattgaccaggaacag

SEQ ID NO: 5894157 - DNA, 25 bp, Homo sapien
tccaagtgctgggattaaggtgtgt

SEQ ID NO: 5894158 - DNA, 25 bp, Homo sapien
tcttgctggacactgggttcttttg

SEQ ID NO: 5894159 - DNA, 25 bp, Homo sapien
ggcctcaaactcccagagatccaac

SEQ ID NO: 5894160 - DNA, 25 bp, Homo sapien
tttaagcctatattccaaatcaacc

SEQ ID NO: 5894161 - DNA, 25 bp, Homo sapien
tgctgggattaaggtgtgtgcaacc

SEQ ID NO: 5894162 - DNA, 25 bp, Homo sapien
aggaagaaaattgaggaccccatta

SEQ ID NO: 5894163 - DNA, 25 bp, Homo sapien
ttaaggtgtgtgcaaccacacccta

SEQ ID NO: 5894164 - DNA, 25 bp, Homo sapien
agcccacgtcaccaccgaacgtgct

SEQ ID NO: 5894165 - DNA, 25 bp, Homo sapien
ccagaggctgctttccagctccctc

SEQ ID NO: 5894166 - DNA, 25 bp, Homo sapien
cacaattttctaggcaagggtaaga

SEQ ID NO: 5894167 - DNA, 25 bp, Homo sapien
ctatataggccaaactggcctcaaa

SEQ ID NO: 5894168 - DNA, 25 bp, Homo sapien
tctgagttgccaacaaagagccaag

SEQ ID NO: 5894169 - DNA, 25 bp, Homo sapien
atgagtccatctgttccctccacat

SEQ ID NO: 5894170 - DNA, 25 bp, Homo sapien
ttccacattctagacattcaagttg

SEQ ID NO: 5894171 - DNA, 25 bp, Homo sapien
ggaacaggaccttctgagtcacctg

SEQ ID NO: 5894172 - DNA, 25 bp, Homo sapien
agcctatattccaaatcaaccagaa

SEQ ID NO: 5894173 - DNA, 25 bp, Homo sapien
ggtcttggtgttgaggcagaccagt

SEQ ID NO: 5894174 - DNA, 25 bp, Homo sapien
aaatcaaccagaaatctgactttct

SEQ ID NO: 5894175 - DNA, 25 bp, Homo sapien
actatgcatccatggctggcctaga

SEQ ID NO: 5894176 - DNA, 25 bp, Homo sapien
tacattctaaaagttgtttgtttgt

SEQ ID NO: 5894177 - DNA, 25 bp, Homo sapien
tttacggaattctacattctaaaag

SEQ ID NO: 5894178 - DNA, 25 bp, Homo sapien
gttctgaggaggcagacaaaaccac

SEQ ID NO: 5894179 - DNA, 25 bp, Homo sapien
caattcttgctggacactgggttct

SEQ ID NO: 5894180 - DNA, 25 bp, Homo sapien
caggaaaatgaaccaattccacatt

SEQ ID NO: 5894181 - DNA, 25 bp, Homo sapien
cagaccagtttcttcagtgaggctg

SEQ ID NO: 5894182 - DNA, 25 bp, Homo sapien
gagcatcagctctcacaatgccaag

SEQ ID NO: 5894183 - DNA, 25 bp, Homo sapien
accaccgaacgtgctgggtttccag

SEQ ID NO: 5894184 - DNA, 25 bp, Homo sapien
atcaggaacaaaactcctccctcca

SEQ ID NO: 5894185 - DNA, 25 bp, Homo sapien
gttctgtgtccatttcactgaacag

SEQ ID NO: 5894186 - DNA, 25 bp, Homo sapien
gccaacaaagagccaagttctgagg

SEQ ID NO: 5894187 - DNA, 25 bp, Homo sapien
tctgactttctgagttgccaacaaa

SEQ ID NO: 5894188 - DNA, 25 bp, Homo sapien
cagatagtcaacattctgaagaggc

SEQ ID NO: 5894189 - DNA, 25 bp, Homo sapien
tcactatgcatccatggctggccta

SEQ ID NO: 5894190 - DNA, 25 bp, Homo sapien
gacagacccgtcatctccagggtaa

SEQ ID NO: 5894191 - DNA, 25 bp, Homo sapien
gatcattgaccaggaacaggacctt

SEQ ID NO: 5894192 - DNA, 25 bp, Homo sapien
gctgggtttccagtactctggggaa

SEQ ID NO: 5894193 - DNA, 25 bp, Homo sapien
aaatgtgagcatcagctctcacaat

SEQ ID NO: 5894194 - DNA, 25 bp, Homo sapien
ttgtttgttttgagaaagagtctca

SEQ ID NO: 5894195 - DNA, 25 bp, Homo sapien
atcacaattttctaggcaagggtaa

SEQ ID NO: 5894196 - DNA, 25 bp, Homo sapien
tttcaaatgtgagcatcagctctca

SEQ ID NO: 5894197 - DNA, 25 bp, Homo sapien
taatctggcacacggaaggaaacat

SEQ ID NO: 5894198 - DNA, 25 bp, Homo sapien
tccaaattctaggaagaaaattgag

SEQ ID NO: 5894199 - DNA, 25 bp, Homo sapien
gttgacaaggttgaagcccacgtca

SEQ ID NO: 5894200 - DNA, 25 bp, Homo sapien
gtcttcatcaggaacaaaactcctc

SEQ ID NO: 5894201 - DNA, 25 bp, Homo sapien
gtggcaaaatcacaattttctaggc

SEQ ID NO: 5894202 - DNA, 25 bp, Homo sapien
gaggcagaccagtttcttcagtgag

SEQ ID NO: 5894203 - DNA, 25 bp, Homo sapien
tatattccaaatcaaccagaaatct

SEQ ID NO: 5894204 - DNA, 25 bp, Homo sapien
tgccttgacctttggcgtagacgta

SEQ ID NO: 5894205 - DNA, 25 bp, Homo sapien
aagagtctaagtgtggctcccaaga

SEQ ID NO: 5894206 - DNA, 25 bp, Homo sapien
gacactgggttcttttgttctgtgt

SEQ ID NO: 5894207 - DNA, 25 bp, Homo sapien
ggcaattcttgctggacactgggtt

SEQ ID NO: 5894208 - DNA, 25 bp, Homo sapien
tggcgtagacgtaggtttgggcaag

SEQ ID NO: 5894209 - DNA, 25 bp, Homo sapien
ggaacaaaactcctccctccagagg

SEQ ID NO: 5894210 - DNA, 25 bp, Homo sapien
aaggcaattcttgctggacactggg

SEQ ID NO: 5894211 - DNA, 25 bp, Homo sapien
gggattaaggtgtgtgcaaccacac

SEQ ID NO: 5894212 - DNA, 25 bp, Homo sapien
ctgggattaaggtgtgtgcaaccac

SEQ ID NO: 5894213 - DNA, 25 bp, Homo sapien
caggaccttctgagtcacctgtcag

SEQ ID NO: 5894214 - DNA, 25 bp, Homo sapien
ccctccagaggctgctttccagctc

SEQ ID NO: 5894215 - DNA, 25 bp, Homo sapien
aactggcctcaaactcccagagatc

SEQ ID NO: 5894216 - DNA, 25 bp, Homo sapien
ctcactatataggccaaactggcct

SEQ ID NO: 5894217 - DNA, 25 bp, Homo sapien
gtttgtttgttttgagaaagagtct

SEQ ID NO: 5894218 - DNA, 25 bp, Homo sapien
accagaaatctgactttctgagttg

SEQ ID NO: 5894219 - DNA, 25 bp, Homo sapien
attctacattctaaaagttgtttgt

SEQ ID NO: 5894220 - DNA, 25 bp, Homo sapien
aattccacattctagacattcaagt

SEQ ID NO: 5894221 - DNA, 25 bp, Homo sapien
ttgaagcccacgtcaccaccgaacg

SEQ ID NO: 5894222 - DNA, 25 bp, Homo sapien
tcttggtgttgaggcagaccagttt

SEQ ID NO: 5894223 - DNA, 25 bp, Homo sapien
atctggcacacggaaggaaacatag

SEQ ID NO: 5894224 - DNA, 25 bp, Homo sapien
acgtaggtttgggcaaggcaattct

SEQ ID NO: 5894225 - DNA, 25 bp, Homo sapien
cctcaaactcccagagatccaactg

SEQ ID NO: 5894226 - DNA, 25 bp, Homo sapien
cactgggttcttttgttctgtgtcc

SEQ ID NO: 5894227 - DNA, 25 bp, Homo sapien
gaatgttttggcccatgttatagat

SEQ ID NO: 5894228 - DNA, 25 bp, Homo sapien
tgccaagccacgaaaacccacatca

SEQ ID NO: 5894229 - DNA, 25 bp, Homo sapien
ggaaaatgaaccaattccacattct

SEQ ID NO: 5894230 - DNA, 25 bp, Homo sapien
cttagttaacaaagaattcaacatc

SEQ ID NO: 5894231 - DNA, 25 bp, Homo sapien
cattcaagttgggaatgttttggcc

SEQ ID NO: 5894232 - DNA, 25 bp, Homo sapien
ttcagtgaggctgtgttgacaaggt

SEQ ID NO: 5894233 - DNA, 25 bp, Homo sapien
tggagcgtctcactaagacagaccc

SEQ ID NO: 5894234 - DNA, 25 bp, Homo sapien
cagaaatctgactttctgagttgcc

SEQ ID NO: 5894235 - DNA, 25 bp, Homo sapien
cccgtcatctccagggtaatctggc

SEQ ID NO: 5894236 - DNA, 25 bp, Homo sapien
aaccaattccacattctagacattc

SEQ ID NO: 5894237 - DNA, 25 bp, Homo sapien
caagaacaccttactgccttgacct

SEQ ID NO: 5894238 - DNA, 25 bp, Homo sapien
agtgctgggattaaggtgtgtgcaa

SEQ ID NO: 5894239 - DNA, 25 bp, Homo sapien
caggaacaaaactcctccctccaga

SEQ ID NO: 5894240 - DNA, 25 bp, Homo sapien
ccgaacgtgctgggtttccagtact

SEQ ID NO: 5894241 - DNA, 25 bp, Homo sapien
cggaaggaaacataggggcaggtct

SEQ ID NO: 5894242 - DNA, 25 bp, Homo sapien
actcccagagatccaactgcctctg

SEQ ID NO: 5894243 - DNA, 25 bp, Homo sapien
gcctctgccttccaagtgctgggat

SEQ ID NO: 5894244 - DNA, 25 bp, Homo sapien
aaagtttcaaatgtgagcatcagct

SEQ ID NO: 5894245 - DNA, 25 bp, Homo sapien
gcgtctcactaagacagacccgtca

SEQ ID NO: 5894246 - DNA, 25 bp, Homo sapien
gctgctttccagctccctcagagct

SEQ ID NO: 5894247 - DNA, 25 bp, Homo sapien
gccacgaaaacccacatcaaggact

SEQ ID NO: 5894248 - DNA, 25 bp, Homo sapien
ctgccttccaagtgctgggattaag

SEQ ID NO: 5894249 - DNA, 25 bp, Homo sapien
aggctgctttccagctccctcagag

SEQ ID NO: 5894250 - DNA, 25 bp, Homo sapien
ttgttctgtgtccatttcactgaac

SEQ ID NO: 5894251 - DNA, 25 bp, Homo sapien
tttggaaagagtctaagtgtggctc

SEQ ID NO: 5894252 - DNA, 25 bp, Homo sapien
tattccaaatcaaccagaaatctga

SEQ ID NO: 5894253 - DNA, 25 bp, Homo sapien
ccaaatcaaccagaaatctgacttt

SEQ ID NO: 5894254 - DNA, 25 bp, Homo sapien
gtctcactaagacagacccgtcatc

SEQ ID NO: 5894255 - DNA, 25 bp, Homo sapien
tcccagagatccaactgcctctgcc

SEQ ID NO: 5894256 - DNA, 25 bp, Homo sapien
accaggaacaggaccttctgagtca

SEQ ID NO: 5894257 - DNA, 25 bp, Homo sapien
cacacggaaggaaacataggggcag

SEQ ID NO: 5894258 - DNA, 25 bp, Homo sapien
ccaattccacattctagacattcaa

SEQ ID NO: 5894259 - DNA, 25 bp, Homo sapien
ggcaggtcttggtgttgaggcagac

SEQ ID NO: 5894260 - DNA, 25 bp, Homo sapien
ggtgttgaggcagaccagtttcttc

SEQ ID NO: 5894261 - DNA, 25 bp, Homo sapien
tccacatctttggaaagagtctaag

SEQ ID NO: 5894262 - DNA, 25 bp, Homo sapien
aattctaggaagaaaattgaggacc

SEQ ID NO: 5894263 - DNA, 25 bp, Homo sapien
acaaagagccaagttctgaggaggc

SEQ ID NO: 5894264 - DNA, 25 bp, Homo sapien
aattcaacatccgaaagtggcaaaa

SEQ ID NO: 5894265 - DNA, 25 bp, Homo sapien
tgcaaccacaccctaccctataata

SEQ ID NO: 5894266 - DNA, 25 bp, Homo sapien
catcaaggacttgtcttcatcagga

SEQ ID NO: 5894267 - DNA, 25 bp, Homo sapien
tccatttcactgaacaggaaaatga

SEQ ID NO: 5894268 - DNA, 25 bp, Homo sapien
tccctccacatctttggaaagagtc

SEQ ID NO: 5894269 - DNA, 25 bp, Homo sapien
atctccagggtaatctggcacacgg

SEQ ID NO: 5894270 - DNA, 25 bp, Homo sapien
ccagggtaatctggcacacggaagg

SEQ ID NO: 5894271 - DNA, 25 bp, Homo sapien
ctccctcagagctcagtggagcgtc

SEQ ID NO: 5894272 - DNA, 25 bp, Homo sapien
ttgggcaaggcaattcttgctggac

SEQ ID NO: 5894273 - DNA, 25 bp, Homo sapien
gaccagtttcttcagtgaggctgtg

SEQ ID NO: 5894274 - DNA, 25 bp, Homo sapien
ccgaaagtggcaaaatcacaatttt

SEQ ID NO: 5894275 - DNA, 25 bp, Homo sapien
gatagtcaacattctgaagaggcct

SEQ ID NO: 5894276 - DNA, 25 bp, Homo sapien
tgtgtccatttcactgaacaggaaa

SEQ ID NO: 5894277 - DNA, 25 bp, Homo sapien
aagacagacccgtcatctccagggt

SEQ ID NO: 5894278 - DNA, 25 bp, Homo sapien
tcatctccagggtaatctggcacac

SEQ ID NO: 5894279 - DNA, 25 bp, Homo sapien
gcatcagctctcacaatgccaagcc

SEQ ID NO: 5894280 - DNA, 25 bp, Homo sapien
aaactcccagagatccaactgcctc

SEQ ID NO: 5894281 - DNA, 25 bp, Homo sapien
gaaagagtctaagtgtggctcccaa

SEQ ID NO: 5894282 - DNA, 25 bp, Homo sapien
gtcaacattctgaagaggcctccaa

SEQ ID NO: 5894283 - DNA, 25 bp, Homo sapien
gacctttggcgtagacgtaggtttg

SEQ ID NO: 5894284 - DNA, 25 bp, Homo sapien
ttgaggaccccattaactttcaagg

SEQ ID NO: 5894285 - DNA, 25 bp, Homo sapien
agggtaatctggcacacggaaggaa

SEQ ID NO: 5894286 - DNA, 25 bp, Homo sapien
tgtccatttcactgaacaggaaaat

SEQ ID NO: 5894287 - DNA, 25 bp, Homo sapien
tgggtttccagtactctggggaaca

SEQ ID NO: 5894288 - DNA, 25 bp, Homo sapien
agttgggaatgttttggcccatgtt

SEQ ID NO: 5894289 - DNA, 25 bp, Homo sapien
aatgccaagccacgaaaacccacat

SEQ ID NO: 5894290 - DNA, 25 bp, Homo sapien
acgtgctgggtttccagtactctgg

SEQ ID NO: 5894291 - DNA, 25 bp, Homo sapien
ccatgttatagatcattgaccagga

SEQ ID NO: 5894292 - DNA, 25 bp, Homo sapien
tccagtactctggggaacagatggg

SEQ ID NO: 5894293 - DNA, 25 bp, Homo sapien
ttgaggcagaccagtttcttcagtg

SEQ ID NO: 5894294 - DNA, 25 bp, Homo sapien
cacgaaaacccacatcaaggacttg

SEQ ID NO: 5894295 - DNA, 25 bp, Homo sapien
agagtctcactatgcatccatggct

SEQ ID NO: 5894296 - DNA, 25 bp, Homo sapien
ttgtttgtttgttttgagaaagagt

SEQ ID NO: 5894297 - DNA, 25 bp, Homo sapien
aaaacccacatcaaggacttgtctt

SEQ ID NO: 5894298 - DNA, 25 bp, Homo sapien
gaaggaaacataggggcaggtcttg

SEQ ID NO: 5894299 - DNA, 25 bp, Homo sapien
ggcagacaaaaccacttctaacttt

SEQ ID NO: 5894300 - DNA, 25 bp, Homo sapien
gaagcccacgtcaccaccgaacgtg

SEQ ID NO: 5894301 - DNA, 25 bp, Homo sapien
ctccagggtaatctggcacacggaa

SEQ ID NO: 5894302 - DNA, 25 bp, Homo sapien
ttgttttgagaaagagtctcactat

SEQ ID NO: 5894303 - DNA, 25 bp, Homo sapien
gcaaggcaattcttgctggacactg

SEQ ID NO: 5894304 - DNA, 25 bp, Homo sapien
actttctgagttgccaacaaagagc

SEQ ID NO: 5894305 - DNA, 25 bp, Homo sapien
aatataaagttttaagcctatattc

SEQ ID NO: 5894306 - DNA, 25 bp, Homo sapien
agacgtaggtttgggcaaggcaatt

SEQ ID NO: 5894307 - DNA, 25 bp, Homo sapien
gtccatctgttccctccacatcttt

SEQ ID NO: 5894308 - DNA, 25 bp, Homo sapien
aaactcctccctccagaggctgctt

SEQ ID NO: 5894309 - DNA, 25 bp, Homo sapien
ggtaagacccaaagtttcaaatgtg

SEQ ID NO: 5894310 - DNA, 25 bp, Homo sapien
gagtctaagtgtggctcccaagaac

SEQ ID NO: 5894311 - DNA, 25 bp, Homo sapien
tcaaactcccagagatccaactgcc

SEQ ID NO: 5894312 - DNA, 25 bp, Homo sapien
ataatataaagttttaagcctatat

SEQ ID NO: 5894313 - DNA, 25 bp, Homo sapien
aaggttgaagcccacgtcaccaccg

SEQ ID NO: 5894314 - DNA, 25 bp, Homo sapien
cacatcaaggacttgtcttcatcag

SEQ ID NO: 5894315 - DNA, 25 bp, Homo sapien
gggaatgttttggcccatgttatag

SEQ ID NO: 5894316 - DNA, 25 bp, Homo sapien
atccgaaagtggcaaaatcacaatt

SEQ ID NO: 5894317 - DNA, 25 bp, Homo sapien
aagtgtggctcccaagaacacctta

SEQ ID NO: 5894318 - DNA, 25 bp, Homo sapien
agaacaccttactgccttgaccttt

SEQ ID NO: 5894319 - DNA, 25 bp, Homo sapien
cggaattctacattctaaaagttgt

SEQ ID NO: 5894320 - DNA, 25 bp, Homo sapien
gctctcacaatgccaagccacgaaa

SEQ ID NO: 5894321 - DNA, 25 bp, Homo sapien
tttggcgtagacgtaggtttgggca

SEQ ID NO: 5894322 - DNA, 25 bp, Homo sapien
cgaaaacccacatcaaggacttgtc

SEQ ID NO: 5894323 - DNA, 25 bp, Homo sapien
aacaccttactgccttgacctttgg

SEQ ID NO: 5894324 - DNA, 25 bp, Homo sapien
gtggctcccaagaacaccttactgc

SEQ ID NO: 5894325 - DNA, 25 bp, Homo sapien
tcatcaggaacaaaactcctccctc

SEQ ID NO: 5894326 - DNA, 25 bp, Homo sapien
gtactctggggaacagatgggattc

SEQ ID NO: 5894327 - DNA, 25 bp, Homo sapien
agatgagtccatctgttccctccac

SEQ ID NO: 5894328 - DNA, 25 bp, Homo sapien
acaatgccaagccacgaaaacccac

SEQ ID NO: 5894329 - DNA, 25 bp, Homo sapien
tgaccaggaacaggaccttctgagt

SEQ ID NO: 5894330 - DNA, 25 bp, Homo sapien
tcaaggacttgtcttcatcaggaac

SEQ ID NO: 5894331 - DNA, 25 bp, Homo sapien
tggacactgggttcttttgttctgt

SEQ ID NO: 5894332 - DNA, 25 bp, Homo sapien
ctcccaagaacaccttactgccttg

SEQ ID NO: 5894333 - DNA, 25 bp, Homo sapien
caaaatcacaattttctaggcaagg

SEQ ID NO: 5894334 - DNA, 25 bp, Homo sapien
ttcttagttaacaaagaattcaaca

SEQ ID NO: 5894335 - DNA, 25 bp, Homo sapien
caccgaacgtgctgggtttccagta

SEQ ID NO: 5894336 - DNA, 25 bp, Homo sapien
ccagagatccaactgcctctgcctt

SEQ ID NO: 5894337 - DNA, 25 bp, Homo sapien
gctggcctagaactcactatatagg

SEQ ID NO: 5894338 - DNA, 25 bp, Homo sapien
tagttaacaaagaattcaacatccg

SEQ ID NO: 5894339 - DNA, 25 bp, Homo sapien
gtagacgtaggtttgggcaaggcaa

SEQ ID NO: 5894340 - DNA, 25 bp, Homo sapien
tatagatcattgaccaggaacagga

SEQ ID NO: 5894341 - DNA, 25 bp, Homo sapien
caagttgggaatgttttggcccatg

SEQ ID NO: 5894342 - DNA, 25 bp, Homo sapien
ctggcctcaaactcccagagatcca

SEQ ID NO: 5894343 - DNA, 25 bp, Homo sapien
tttccagtactctggggaacagatg

SEQ ID NO: 5894344 - DNA, 25 bp, Homo sapien
tcacaatgccaagccacgaaaaccc

SEQ ID NO: 5894345 - DNA, 25 bp, Homo sapien
tctgtgtccatttcactgaacagga

SEQ ID NO: 5894346 - DNA, 25 bp, Homo sapien
caccttactgccttgacctttggcg

SEQ ID NO: 5894347 - DNA, 25 bp, Homo sapien
cacatctttggaaagagtctaagtg

SEQ ID NO: 5894348 - DNA, 25 bp, Homo sapien
ctaagacagacccgtcatctccagg

SEQ ID NO: 5894349 - DNA, 25 bp, Homo sapien
agaactcactatataggccaaactg

SEQ ID NO: 5894350 - DNA, 25 bp, Homo sapien
gccaaactggcctcaaactcccaga

SEQ ID NO: 5894351 - DNA, 25 bp, Homo sapien
catggctggcctagaactcactata

SEQ ID NO: 5894352 - DNA, 25 bp, Homo sapien
tggcccatgttatagatcattgacc

SEQ ID NO: 5894353 - DNA, 25 bp, Homo sapien
ctttccagctccctcagagctcagt

SEQ ID NO: 5894354 - DNA, 25 bp, Homo sapien
atgttatagatcattgaccaggaac

SEQ ID NO: 5894355 - DNA, 25 bp, Homo sapien
caaactggcctcaaactcccagaga

SEQ ID NO: 5894356 - DNA, 25 bp, Homo sapien
gattaaggtgtgtgcaaccacaccc

SEQ ID NO: 5894357 - DNA, 25 bp, Homo sapien
tgagtcacctgtcagatagtcaaca

SEQ ID NO: 5894358 - DNA, 25 bp, Homo sapien
aggaaacataggggcaggtcttggt

SEQ ID NO: 5894359 - DNA, 25 bp, Homo sapien
acccaaagtttcaaatgtgagcatc

SEQ ID NO: 5894360 - DNA, 25 bp, Homo sapien
agacccaaagtttcaaatgtgagca

SEQ ID NO: 5894361 - DNA, 25 bp, Homo sapien
gctcagtggagcgtctcactaagac

SEQ ID NO: 5894362 - DNA, 25 bp, Homo sapien
cgtcatctccagggtaatctggcac

SEQ ID NO: 5894363 - DNA, 25 bp, Homo sapien
caacattctgaagaggcctccaaat

SEQ ID NO: 5894364 - DNA, 25 bp, Homo sapien
tgctttccagctccctcagagctca

SEQ ID NO: 5894365 - DNA, 25 bp, Homo sapien
cactaagacagacccgtcatctcca

SEQ ID NO: 5894366 - DNA, 25 bp, Homo sapien
agtggagcgtctcactaagacagac

SEQ ID NO: 5894367 - DNA, 25 bp, Homo sapien
atcaaccagaaatctgactttctga

SEQ ID NO: 5894368 - DNA, 25 bp, Homo sapien
gagtccatctgttccctccacatct

SEQ ID NO: 5894369 - DNA, 25 bp, Homo sapien
ggcctccaaattctaggaagaaaat

SEQ ID NO: 5894370 - DNA, 25 bp, Homo sapien
atgttttggcccatgttatagatca

SEQ ID NO: 5894371 - DNA, 25 bp, Homo sapien
aaaatgaaccaattccacattctag

SEQ ID NO: 5894372 - DNA, 25 bp, Homo sapien
ttcaagttgggaatgttttggccca

SEQ ID NO: 5894373 - DNA, 25 bp, Homo sapien
ggctgtgttgacaaggttgaagccc

SEQ ID NO: 5894374 - DNA, 25 bp, Homo sapien
atcagctctcacaatgccaagccac

SEQ ID NO: 5894375 - DNA, 25 bp, Homo sapien
agatccaactgcctctgccttccaa

SEQ ID NO: 5894376 - DNA, 25 bp, Homo sapien
ctaggaagaaaattgaggaccccat

SEQ ID NO: 5894377 - DNA, 25 bp, Homo sapien
ttctaggaagaaaattgaggacccc

SEQ ID NO: 5894378 - DNA, 25 bp, Homo sapien
atctgttccctccacatctttggaa

SEQ ID NO: 5894379 - DNA, 25 bp, Homo sapien
catctttggaaagagtctaagtgtg

SEQ ID NO: 5894380 - DNA, 25 bp, Homo sapien
cacaccctaccctataatataaagt

SEQ ID NO: 5894381 - DNA, 25 bp, Homo sapien
tttgagaaagagtctcactatgcat

SEQ ID NO: 5894382 - DNA, 25 bp, Homo sapien
tgttgaggcagaccagtttcttcag

SEQ ID NO: 5894383 - DNA, 25 bp, Homo sapien
taagcctatattccaaatcaaccag

SEQ ID NO: 5894384 - DNA, 25 bp, Homo sapien
aatgaaccaattccacattctagac

SEQ ID NO: 5894385 - DNA, 25 bp, Homo sapien
ggaccttctgagtcacctgtcagat

SEQ ID NO: 5894386 - DNA, 25 bp, Homo sapien
tttttttacggaattctacattcta

SEQ ID NO: 5894387 - DNA, 25 bp, Homo sapien
ctcagagctcagtggagcgtctcac

SEQ ID NO: 5894388 - DNA, 25 bp, Homo sapien
tcagtggagcgtctcactaagacag

SEQ ID NO: 5894389 - DNA, 25 bp, Homo sapien
tgaacaggaaaatgaaccaattcca

SEQ ID NO: 5894390 - DNA, 25 bp, Homo sapien
taccctataatataaagttttaagc

SEQ ID NO: 5894391 - DNA, 25 bp, Homo sapien
gggttcttttgttctgtgtccattt

SEQ ID NO: 5894392 - DNA, 25 bp, Homo sapien
ggggcaggtcttggtgttgaggcag

SEQ ID NO: 5894393 - DNA, 25 bp, Homo sapien
gaaatctgactttctgagttgccaa

SEQ ID NO: 5894394 - DNA, 25 bp, Homo sapien
catttcactgaacaggaaaatgaac

SEQ ID NO: 5894395 - DNA, 25 bp, Homo sapien
agaaagagtctcactatgcatccat

SEQ ID NO: 5894396 - DNA, 25 bp, Homo sapien
ttgccaacaaagagccaagttctga

SEQ ID NO: 5894397 - DNA, 25 bp, Homo sapien
ctttcttagttaacaaagaattcaa

SEQ ID NO: 5894398 - DNA, 25 bp, Homo sapien
aacaggaaaatgaaccaattccaca

SEQ ID NO: 5894399 - DNA, 25 bp, Homo sapien
ggacttgtcttcatcaggaacaaaa

SEQ ID NO: 5894400 - DNA, 25 bp, Homo sapien
cccacatcaaggacttgtcttcatc

SEQ ID NO: 5894401 - DNA, 25 bp, Homo sapien
attgaccaggaacaggaccttctga

SEQ ID NO: 5894402 - DNA, 25 bp, Homo sapien
gttttggcccatgttatagatcatt

SEQ ID NO: 5894403 - DNA, 25 bp, Homo sapien
tcaccaccgaacgtgctgggtttcc

SEQ ID NO: 5894404 - DNA, 25 bp, Homo sapien
catccatggctggcctagaactcac

SEQ ID NO: 5894405 - DNA, 25 bp, Homo sapien
ctgcctctgccttccaagtgctggg

SEQ ID NO: 5894406 - DNA, 25 bp, Homo sapien
taaagttttaagcctatattccaaa

SEQ ID NO: 5894407 - DNA, 25 bp, Homo sapien
aaagaattcaacatccgaaagtggc

SEQ ID NO: 5894408 - DNA, 25 bp, Homo sapien
gcaagggtaagacccaaagtttcaa

SEQ ID NO: 5894409 - DNA, 25 bp, Homo sapien
ggtgtgtgcaaccacaccctaccct

SEQ ID NO: 5894410 - DNA, 25 bp, Homo sapien
aattgaggaccccattaactttcaa

SEQ ID NO: 5894411 - DNA, 25 bp, Homo sapien
ctgtgttgacaaggttgaagcccac

SEQ ID NO: 5894412 - DNA, 25 bp, Homo sapien
ctagaactcactatataggccaaac

SEQ ID NO: 5894413 - DNA, 25 bp, Homo sapien
tggcctagaactcactatataggcc

SEQ ID NO: 5894414 - DNA, 25 bp, Homo sapien
aacaggaccttctgagtcacctgtc

SEQ ID NO: 5894415 - DNA, 25 bp, Homo sapien
caacatccgaaagtggcaaaatcac

SEQ ID NO: 5894416 - DNA, 25 bp, Homo sapien
gagctcagtggagcgtctcactaag

SEQ ID NO: 5894417 - DNA, 25 bp, Homo sapien
aactcactatataggccaaactggc

SEQ ID NO: 5894418 - DNA, 25 bp, Homo sapien
gtttgttttgagaaagagtctcact

SEQ ID NO: 5894419 - DNA, 25 bp, Homo sapien
taagacccaaagtttcaaatgtgag

SEQ ID NO: 5894420 - DNA, 25 bp, Homo sapien
agtcacctgtcagatagtcaacatt

SEQ ID NO: 5894421 - DNA, 25 bp, Homo sapien
gccttccaagtgctgggattaaggt

SEQ ID NO: 5894422 - DNA, 25 bp, Homo sapien
actcctccctccagaggctgctttc

SEQ ID NO: 5894423 - DNA, 25 bp, Homo sapien
acttgtcttcatcaggaacaaaact

SEQ ID NO: 5894424 - DNA, 25 bp, Homo sapien
ggtttccagtactctggggaacaga

SEQ ID NO: 5894425 - DNA, 25 bp, Homo sapien
gaggaccccattaactttcaaggga

SEQ ID NO: 5894426 - DNA, 25 bp, Homo sapien
ggagtctaattacatagccttgtta

SEQ ID NO: 5894427 - DNA, 25 bp, Homo sapien
tgtaagtgtatgtccaacactattc

SEQ ID NO: 5894428 - DNA, 25 bp, Homo sapien
gctttaaatataaccattccgatca

SEQ ID NO: 5894429 - DNA, 25 bp, Homo sapien
tttcatcaggaaaagatacaagatg

SEQ ID NO: 5894430 - DNA, 25 bp, Homo sapien
ttggagtttgcatattgtaatgtaa

SEQ ID NO: 5894431 - DNA, 25 bp, Homo sapien
aaaaggttgtaaaatgtgatgtgta

SEQ ID NO: 5894432 - DNA, 25 bp, Homo sapien
gtaaaatgtgatgtgtatgtgtata

SEQ ID NO: 5894433 - DNA, 25 bp, Homo sapien
attttattgaacgctaagaacaaca

SEQ ID NO: 5894434 - DNA, 25 bp, Homo sapien
aatgtaagtgtatgtccaacactat

SEQ ID NO: 5894435 - DNA, 25 bp, Homo sapien
aaatgtgtctgaggatgaatggaaa

SEQ ID NO: 5894436 - DNA, 25 bp, Homo sapien
tcttattttccagtagtctaggcat

SEQ ID NO: 5894437 - DNA, 25 bp, Homo sapien
attttccagtagtctaggcattcct

SEQ ID NO: 5894438 - DNA, 25 bp, Homo sapien
actggtgtgggcttaggagtgatcc

SEQ ID NO: 5894439 - DNA, 25 bp, Homo sapien
tgtcattccacacaggctaaaaacg

SEQ ID NO: 5894440 - DNA, 25 bp, Homo sapien
gtgtatatactgtatgtgtactttt

SEQ ID NO: 5894441 - DNA, 25 bp, Homo sapien
ggatcttggatgccaagagatattt

SEQ ID NO: 5894442 - DNA, 25 bp, Homo sapien
aagtattctgacatttatatggctt

SEQ ID NO: 5894443 - DNA, 25 bp, Homo sapien
aaggtgactatttatgatcctagaa

SEQ ID NO: 5894444 - DNA, 25 bp, Homo sapien
gcattttcatcaggaaaagatacaa

SEQ ID NO: 5894445 - DNA, 25 bp, Homo sapien
ttaggagtgatccacactaaggtga

SEQ ID NO: 5894446 - DNA, 25 bp, Homo sapien
tcaaatgtatttatggagtctaatt

SEQ ID NO: 5894447 - DNA, 25 bp, Homo sapien
agtttgcatattgtaatgtaagtgt

SEQ ID NO: 5894448 - DNA, 25 bp, Homo sapien
ctaccactgttttttaagtcaatgg

SEQ ID NO: 5894449 - DNA, 25 bp, Homo sapien
atgtatttatggagtctaattacat

SEQ ID NO: 5894450 - DNA, 25 bp, Homo sapien
aagaaatgtagggtgctactaagga

SEQ ID NO: 5894451 - DNA, 25 bp, Homo sapien
cagtttatctttagaatgatattgt

SEQ ID NO: 5894452 - DNA, 25 bp, Homo sapien
atatgtcccgacccttttgatacag

SEQ ID NO: 5894453 - DNA, 25 bp, Homo sapien
caactgccatctccaaatattttct

SEQ ID NO: 5894454 - DNA, 25 bp, Homo sapien
atagtcttattttccagtagtctag

SEQ ID NO: 5894455 - DNA, 25 bp, Homo sapien
tttactcaatttctaggctaaaaga

SEQ ID NO: 5894456 - DNA, 25 bp, Homo sapien
ctcaatttctaggctaaaagagttc

SEQ ID NO: 5894457 - DNA, 25 bp, Homo sapien
ttccgatcaaatgtatttatggagt

SEQ ID NO: 5894458 - DNA, 25 bp, Homo sapien
gatacaagatgtgtataacatttgg

SEQ ID NO: 5894459 - DNA, 25 bp, Homo sapien
ttttcatttactcaatttctaggct

SEQ ID NO: 5894460 - DNA, 25 bp, Homo sapien
tgactatttatgatcctagaatgtt

SEQ ID NO: 5894461 - DNA, 25 bp, Homo sapien
tctaggcattcctatgtgattattg

SEQ ID NO: 5894462 - DNA, 25 bp, Homo sapien
tataacatttggaaatgtgtctgag

SEQ ID NO: 5894463 - DNA, 25 bp, Homo sapien
tccagtagtctaggcattcctatgt

SEQ ID NO: 5894464 - DNA, 25 bp, Homo sapien
atctctttcctaactggtgtgggct

SEQ ID NO: 5894465 - DNA, 25 bp, Homo sapien
actatttatgatcctagaatgtttg

SEQ ID NO: 5894466 - DNA, 25 bp, Homo sapien
ccgacccttttgatacaggtttgaa

SEQ ID NO: 5894467 - DNA, 25 bp, Homo sapien
aaatgtatttatggagtctaattac

SEQ ID NO: 5894468 - DNA, 25 bp, Homo sapien
ttatatggcttcacagatatattgc

SEQ ID NO: 5894469 - DNA, 25 bp, Homo sapien
ctttcctaactggtgtgggcttagg

SEQ ID NO: 5894470 - DNA, 25 bp, Homo sapien
ggagtttgcatattgtaatgtaagt

SEQ ID NO: 5894471 - DNA, 25 bp, Homo sapien
cacacaggctaaaaacgcctctata

SEQ ID NO: 5894472 - DNA, 25 bp, Homo sapien
ataggtatatgtcccgacccttttg

SEQ ID NO: 5894473 - DNA, 25 bp, Homo sapien
atagtttatgactgaagtttaatta

SEQ ID NO: 5894474 - DNA, 25 bp, Homo sapien
acaggtttgaatttgaaattacatt

SEQ ID NO: 5894475 - DNA, 25 bp, Homo sapien
ttactgtcattccacacaggctaaa

SEQ ID NO: 5894476 - DNA, 25 bp, Homo sapien
ctagttcagtcatagattggagttt

SEQ ID NO: 5894477 - DNA, 25 bp, Homo sapien
gtttatctttagaatgatattgtga

SEQ ID NO: 5894478 - DNA, 25 bp, Homo sapien
tgaaaagcggtcgtgcattttcatc

SEQ ID NO: 5894479 - DNA, 25 bp, Homo sapien
agttcactgaataaaattttccaat

SEQ ID NO: 5894480 - DNA, 25 bp, Homo sapien
tatgtgtactttttaaaataggtat

SEQ ID NO: 5894481 - DNA, 25 bp, Homo sapien
aacaaaagctatcgtattttcattt

SEQ ID NO: 5894482 - DNA, 25 bp, Homo sapien
aaattggctttaaatataaccattc

SEQ ID NO: 5894483 - DNA, 25 bp, Homo sapien
aaatagtttatgactgaagtttaat

SEQ ID NO: 5894484 - DNA, 25 bp, Homo sapien
aatataaccattccgatcaaatgta

SEQ ID NO: 5894485 - DNA, 25 bp, Homo sapien
tcattttattgaacgctaagaacaa

SEQ ID NO: 5894486 - DNA, 25 bp, Homo sapien
tttccaatcaaaattcctatagtct

SEQ ID NO: 5894487 - DNA, 25 bp, Homo sapien
ctaaggatcttggatgccaagagat

SEQ ID NO: 5894488 - DNA, 25 bp, Homo sapien
attttgaagtaagccagtttatctt

SEQ ID NO: 5894489 - DNA, 25 bp, Homo sapien
aaaacgcctctataaggataaaatg

SEQ ID NO: 5894490 - DNA, 25 bp, Homo sapien
atggaaatgttctcattttattgaa

SEQ ID NO: 5894491 - DNA, 25 bp, Homo sapien
aggctaaaagagttcactgaataaa

SEQ ID NO: 5894492 - DNA, 25 bp, Homo sapien
tggctttaaatataaccattccgat

SEQ ID NO: 5894493 - DNA, 25 bp, Homo sapien
taaatgcacaactgccatctccaaa

SEQ ID NO: 5894494 - DNA, 25 bp, Homo sapien
aagtaagccagtttatctttagaat

SEQ ID NO: 5894495 - DNA, 25 bp, Homo sapien
gtactttttaaaataggtatatgtc

SEQ ID NO: 5894496 - DNA, 25 bp, Homo sapien
tcccgacccttttgatacaggtttg

SEQ ID NO: 5894497 - DNA, 25 bp, Homo sapien
aaagagttcactgaataaaattttc

SEQ ID NO: 5894498 - DNA, 25 bp, Homo sapien
tttgaagtaagccagtttatcttta

SEQ ID NO: 5894499 - DNA, 25 bp, Homo sapien
ttgtaatgtaagtgtatgtccaaca

SEQ ID NO: 5894500 - DNA, 25 bp, Homo sapien
gtttgtaagcattgtaaatgcacaa

SEQ ID NO: 5894501 - DNA, 25 bp, Homo sapien
taggcattcctatgtgattattgtg

SEQ ID NO: 5894502 - DNA, 25 bp, Homo sapien
gacttgagaagtattctgacattta

SEQ ID NO: 5894503 - DNA, 25 bp, Homo sapien
ttgaggaatgaaaagcggtcgtgca

SEQ ID NO: 5894504 - DNA, 25 bp, Homo sapien
gaatggaaatgttctcattttattg

SEQ ID NO: 5894505 - DNA, 25 bp, Homo sapien
agtcaatggacttgagaagtattct

SEQ ID NO: 5894506 - DNA, 25 bp, Homo sapien
aaatgatagtatctctttcctaact

SEQ ID NO: 5894507 - DNA, 25 bp, Homo sapien
tgttactgtcattccacacaggcta

SEQ ID NO: 5894508 - DNA, 25 bp, Homo sapien
tccaatcaaaattcctatagtctta

SEQ ID NO: 5894509 - DNA, 25 bp, Homo sapien
aaattttccaatcaaaattcctata

SEQ ID NO: 5894510 - DNA, 25 bp, Homo sapien
atctttagaatgatattgtgaaatt

SEQ ID NO: 5894511 - DNA, 25 bp, Homo sapien
tacaagatgtgtataacatttggaa

SEQ ID NO: 5894512 - DNA, 25 bp, Homo sapien
agtaggacaagaattttgaagtaag

SEQ ID NO: 5894513 - DNA, 25 bp, Homo sapien
cttggatgccaagagatattttaaa

SEQ ID NO: 5894514 - DNA, 25 bp, Homo sapien
ggcattcctatgtgattattgtgtc

SEQ ID NO: 5894515 - DNA, 25 bp, Homo sapien
ccaagagatattttaaagccaattt

SEQ ID NO: 5894516 - DNA, 25 bp, Homo sapien
tgtaaatgcacaactgccatctcca

SEQ ID NO: 5894517 - DNA, 25 bp, Homo sapien
tttttaaaataggtatatgtcccga

SEQ ID NO: 5894518 - DNA, 25 bp, Homo sapien
taaggataaaatgatagtatctctt

SEQ ID NO: 5894519 - DNA, 25 bp, Homo sapien
tgtccaacactattctaaatagttt

SEQ ID NO: 5894520 - DNA, 25 bp, Homo sapien
atacaggtttgaatttgaaattaca

SEQ ID NO: 5894521 - DNA, 25 bp, Homo sapien
gtaagcattgtaaatgcacaactgc

SEQ ID NO: 5894522 - DNA, 25 bp, Homo sapien
ctaaggtgactatttatgatcctag

SEQ ID NO: 5894523 - DNA, 25 bp, Homo sapien
ggaaatgttctcattttattgaacg

SEQ ID NO: 5894524 - DNA, 25 bp, Homo sapien
tcttataagactgtttttagaagaa

SEQ ID NO: 5894525 - DNA, 25 bp, Homo sapien
tggtgtgggcttaggagtgatccac

SEQ ID NO: 5894526 - DNA, 25 bp, Homo sapien
atatattgctagttcagtcatagat

SEQ ID NO: 5894527 - DNA, 25 bp, Homo sapien
agatgtgtataacatttggaaatgt

SEQ ID NO: 5894528 - DNA, 25 bp, Homo sapien
taactggtgtgggcttaggagtgat

SEQ ID NO: 5894529 - DNA, 25 bp, Homo sapien
ggctaaaaacgcctctataaggata

SEQ ID NO: 5894530 - DNA, 25 bp, Homo sapien
aatgatattgtgaaattggctttaa

SEQ ID NO: 5894531 - DNA, 25 bp, Homo sapien
agtttatgactgaagtttaattaaa

SEQ ID NO: 5894532 - DNA, 25 bp, Homo sapien
actgtatgtgtactttttaaaatag

SEQ ID NO: 5894533 - DNA, 25 bp, Homo sapien
atgtgtatatactgtatgtgtactt

SEQ ID NO: 5894534 - DNA, 25 bp, Homo sapien
caacaaaaaagaaatgtagggtgct

SEQ ID NO: 5894535 - DNA, 25 bp, Homo sapien
gcattgtaaatgcacaactgccatc

SEQ ID NO: 5894536 - DNA, 25 bp, Homo sapien
taattacatagccttgttactgtca

SEQ ID NO: 5894537 - DNA, 25 bp, Homo sapien
cactgttttttaagtcaatggactt

SEQ ID NO: 5894538 - DNA, 25 bp, Homo sapien
ttctaaatagtttatgactgaagtt

SEQ ID NO: 5894539 - DNA, 25 bp, Homo sapien
atcctagaatgtttgtaagcattgt

SEQ ID NO: 5894540 - DNA, 25 bp, Homo sapien
caaaagctatcgtattttcatttac

SEQ ID NO: 5894541 - DNA, 25 bp, Homo sapien
ggtgactatttatgatcctagaatg

SEQ ID NO: 5894542 - DNA, 25 bp, Homo sapien
tttattgaacgctaagaacaacaac

SEQ ID NO: 5894543 - DNA, 25 bp, Homo sapien
ataaaaggttgtaaaatgtgatgtg

SEQ ID NO: 5894544 - DNA, 25 bp, Homo sapien
tgtatgtccaacactattctaaata

SEQ ID NO: 5894545 - DNA, 25 bp, Homo sapien
cagtagtctaggcattcctatgtga

SEQ ID NO: 5894546 - DNA, 25 bp, Homo sapien
attttcatcaggaaaagatacaaga

SEQ ID NO: 5894547 - DNA, 25 bp, Homo sapien
attgctagttcagtcatagattgga

SEQ ID NO: 5894548 - DNA, 25 bp, Homo sapien
gtagtctaggcattcctatgtgatt

SEQ ID NO: 5894549 - DNA, 25 bp, Homo sapien
tattgtgtctctctaccactgtttt

SEQ ID NO: 5894550 - DNA, 25 bp, Homo sapien
tgattattgtgtctctctaccactg

SEQ ID NO: 5894551 - DNA, 25 bp, Homo sapien
taaaatgatagtatctctttcctaa

SEQ ID NO: 5894552 - DNA, 25 bp, Homo sapien
ggatgaatggaaatgttctcatttt

SEQ ID NO: 5894553 - DNA, 25 bp, Homo sapien
atgtttgtaagcattgtaaatgcac

SEQ ID NO: 5894554 - DNA, 25 bp, Homo sapien
gatagtatctctttcctaactggtg

SEQ ID NO: 5894555 - DNA, 25 bp, Homo sapien
tgtgaaattggctttaaatataacc

SEQ ID NO: 5894556 - DNA, 25 bp, Homo sapien
tgatcctagaatgtttgtaagcatt

SEQ ID NO: 5894557 - DNA, 25 bp, Homo sapien
cttcacagatatattgctagttcag

SEQ ID NO: 5894558 - DNA, 25 bp, Homo sapien
aaagctatcgtattttcatttactc

SEQ ID NO: 5894559 - DNA, 25 bp, Homo sapien
ttattttccagtagtctaggcattc

SEQ ID NO: 5894560 - DNA, 25 bp, Homo sapien
tccacacaggctaaaaacgcctcta

SEQ ID NO: 5894561 - DNA, 25 bp, Homo sapien
tctaattacatagccttgttactgt

SEQ ID NO: 5894562 - DNA, 25 bp, Homo sapien
atctccaaatattttcttataagac

SEQ ID NO: 5894563 - DNA, 25 bp, Homo sapien
aggagtgatccacactaaggtgact

SEQ ID NO: 5894564 - DNA, 25 bp, Homo sapien
tagtatctctttcctaactggtgtg

SEQ ID NO: 5894565 - DNA, 25 bp, Homo sapien
gtgatccacactaaggtgactattt

SEQ ID NO: 5894566 - DNA, 25 bp, Homo sapien
gatcatctttgaggaatgaaaagcg

SEQ ID NO: 5894567 - DNA, 25 bp, Homo sapien
caatttctaggctaaaagagttcac

SEQ ID NO: 5894568 - DNA, 25 bp, Homo sapien
gtatatactgtatgtgtacttttta

SEQ ID NO: 5894569 - DNA, 25 bp, Homo sapien
attgtaaatgcacaactgccatctc

SEQ ID NO: 5894570 - DNA, 25 bp, Homo sapien
acaaaaaagaaatgtagggtgctac

SEQ ID NO: 5894571 - DNA, 25 bp, Homo sapien
ttaaagccaatttgtaaaaacgata

SEQ ID NO: 5894572 - DNA, 25 bp, Homo sapien
agtctaattacatagccttgttact

SEQ ID NO: 5894573 - DNA, 25 bp, Homo sapien
gggatcatctttgaggaatgaaaag

SEQ ID NO: 5894574 - DNA, 25 bp, Homo sapien
agaatgatattgtgaaattggcttt

SEQ ID NO: 5894575 - DNA, 25 bp, Homo sapien
ccgatcaaatgtatttatggagtct

SEQ ID NO: 5894576 - DNA, 25 bp, Homo sapien
cgcctctataaggataaaatgatag

SEQ ID NO: 5894577 - DNA, 25 bp, Homo sapien
ttcctaactggtgtgggcttaggag

SEQ ID NO: 5894578 - DNA, 25 bp, Homo sapien
atgatagtatctctttcctaactgg

SEQ ID NO: 5894579 - DNA, 25 bp, Homo sapien
tacatagccttgttactgtcattcc

SEQ ID NO: 5894580 - DNA, 25 bp, Homo sapien
accattccgatcaaatgtatttatg

SEQ ID NO: 5894581 - DNA, 25 bp, Homo sapien
aagcggtcgtgcattttcatcagga

SEQ ID NO: 5894582 - DNA, 25 bp, Homo sapien
atttatatggcttcacagatatatt

SEQ ID NO: 5894583 - DNA, 25 bp, Homo sapien
tgtgattattgtgtctctctaccac

SEQ ID NO: 5894584 - DNA, 25 bp, Homo sapien
tatgtccaacactattctaaatagt

SEQ ID NO: 5894585 - DNA, 25 bp, Homo sapien
taaccattccgatcaaatgtattta

SEQ ID NO: 5894586 - DNA, 25 bp, Homo sapien
gtgcattttcatcaggaaaagatac

SEQ ID NO: 5894587 - DNA, 25 bp, Homo sapien
tagccttgttactgtcattccacac

SEQ ID NO: 5894588 - DNA, 25 bp, Homo sapien
gtaatgtaagtgtatgtccaacact

SEQ ID NO: 5894589 - DNA, 25 bp, Homo sapien
tatgatcctagaatgtttgtaagca

SEQ ID NO: 5894590 - DNA, 25 bp, Homo sapien
gtatttatggagtctaattacatag

SEQ ID NO: 5894591 - DNA, 25 bp, Homo sapien
gaggatgaatggaaatgttctcatt

SEQ ID NO: 5894592 - DNA, 25 bp, Homo sapien
atactgtatgtgtactttttaaaat

SEQ ID NO: 5894593 - DNA, 25 bp, Homo sapien
gcggtcgtgcattttcatcaggaaa

SEQ ID NO: 5894594 - DNA, 25 bp, Homo sapien
ctgaataaaattttccaatcaaaat

SEQ ID NO: 5894595 - DNA, 25 bp, Homo sapien
aacaaacaaaagctatcgtattttc

SEQ ID NO: 5894596 - DNA, 25 bp, Homo sapien
tatgtgattattgtgtctctctacc

SEQ ID NO: 5894597 - DNA, 25 bp, Homo sapien
acatttggaaatgtgtctgaggatg

SEQ ID NO: 5894598 - DNA, 25 bp, Homo sapien
tttaaatataaccattccgatcaaa

SEQ ID NO: 5894599 - DNA, 25 bp, Homo sapien
atgtgtatgtgtatatactgtatgt

SEQ ID NO: 5894600 - DNA, 25 bp, Homo sapien
ccatctccaaatattttcttataag

SEQ ID NO: 5894601 - DNA, 25 bp, Homo sapien
catattgtaatgtaagtgtatgtcc

SEQ ID NO: 5894602 - DNA, 25 bp, Homo sapien
gataaaatgatagtatctctttcct

SEQ ID NO: 5894603 - DNA, 25 bp, Homo sapien
tttaagtcaatggacttgagaagta

SEQ ID NO: 5894604 - DNA, 25 bp, Homo sapien
tgatgtgtatgtgtatatactgtat

SEQ ID NO: 5894605 - DNA, 25 bp, Homo sapien
tgccaagagatattttaaagccaat

SEQ ID NO: 5894606 - DNA, 25 bp, Homo sapien
aagcattgtaaatgcacaactgcca

SEQ ID NO: 5894607 - DNA, 25 bp, Homo sapien
actgccatctccaaatattttctta

SEQ ID NO: 5894608 - DNA, 25 bp, Homo sapien
ttatggagtctaattacatagcctt

SEQ ID NO: 5894609 - DNA, 25 bp, Homo sapien
catagccttgttactgtcattccac

SEQ ID NO: 5894610 - DNA, 25 bp, Homo sapien
tgccatctccaaatattttcttata

SEQ ID NO: 5894611 - DNA, 25 bp, Homo sapien
aaaaaagaaatgtagggtgctacta

SEQ ID NO: 5894612 - DNA, 25 bp, Homo sapien
agtctaggcattcctatgtgattat

SEQ ID NO: 5894613 - DNA, 25 bp, Homo sapien
aaaagcggtcgtgcattttcatcag

SEQ ID NO: 5894614 - DNA, 25 bp, Homo sapien
ccaaatattttcttataagactgtt

SEQ ID NO: 5894615 - DNA, 25 bp, Homo sapien
cattccgatcaaatgtatttatgga

SEQ ID NO: 5894616 - DNA, 25 bp, Homo sapien
gttttttaagtcaatggacttgaga

SEQ ID NO: 5894617 - DNA, 25 bp, Homo sapien
catcaggaaaagatacaagatgtgt

SEQ ID NO: 5894618 - DNA, 25 bp, Homo sapien
tccaacactattctaaatagtttat

SEQ ID NO: 5894619 - DNA, 25 bp, Homo sapien
aggtatatgtcccgacccttttgat

SEQ ID NO: 5894620 - DNA, 25 bp, Homo sapien
tgcatattgtaatgtaagtgtatgt

SEQ ID NO: 5894621 - DNA, 25 bp, Homo sapien
tgtagggtgctactaaggatcttgg

SEQ ID NO: 5894622 - DNA, 25 bp, Homo sapien
cagtcatagattggagtttgcatat

SEQ ID NO: 5894623 - DNA, 25 bp, Homo sapien
tactaaggatcttggatgccaagag

SEQ ID NO: 5894624 - DNA, 25 bp, Homo sapien
ctctaccactgttttttaagtcaat

SEQ ID NO: 5894625 - DNA, 25 bp, Homo sapien
caagatgtgtataacatttggaaat

SEQ ID NO: 5894626 - DNA, 25 bp, Homo sapien
tgaaattggctttaaatataaccat

SEQ ID NO: 5894627 - DNA, 25 bp, Homo sapien
attttcttataagactgtttttaga

SEQ ID NO: 5894628 - DNA, 25 bp, Homo sapien
tcacagatatattgctagttcagtc

SEQ ID NO: 5894629 - DNA, 25 bp, Homo sapien
cttgagaagtattctgacatttata

SEQ ID NO: 5894630 - DNA, 25 bp, Homo sapien
tcatctttgaggaatgaaaagcggt

SEQ ID NO: 5894631 - DNA, 25 bp, Homo sapien
caacactattctaaatagtttatga

SEQ ID NO: 5894632 - DNA, 25 bp, Homo sapien
aggataaaatgatagtatctctttc

SEQ ID NO: 5894633 - DNA, 25 bp, Homo sapien
taagtgtatgtccaacactattcta

SEQ ID NO: 5894634 - DNA, 25 bp, Homo sapien
taggacaagaattttgaagtaagcc

SEQ ID NO: 5894635 - DNA, 25 bp, Homo sapien
tcgtgcattttcatcaggaaaagat

SEQ ID NO: 5894636 - DNA, 25 bp, Homo sapien
atattgtgaaattggctttaaatat

SEQ ID NO: 5894637 - DNA, 25 bp, Homo sapien
tgctagttcagtcatagattggagt

SEQ ID NO: 5894638 - DNA, 25 bp, Homo sapien
atcttggatgccaagagatatttta

SEQ ID NO: 5894639 - DNA, 25 bp, Homo sapien
tttatgatcctagaatgtttgtaag

SEQ ID NO: 5894640 - DNA, 25 bp, Homo sapien
ttggaaaagtaggacaagaattttg

SEQ ID NO: 5894641 - DNA, 25 bp, Homo sapien
aatgtgatgtgtatgtgtatatact

SEQ ID NO: 5894642 - DNA, 25 bp, Homo sapien
taaaattttccaatcaaaattccta

SEQ ID NO: 5894643 - DNA, 25 bp, Homo sapien
tttttaagtcaatggacttgagaag

SEQ ID NO: 5894644 - DNA, 25 bp, Homo sapien
gtgtctctctaccactgttttttaa

SEQ ID NO: 5894645 - DNA, 25 bp, Homo sapien
cctagaatgtttgtaagcattgtaa

SEQ ID NO: 5894646 - DNA, 25 bp, Homo sapien
cacaggctaaaaacgcctctataag

SEQ ID NO: 5894647 - DNA, 25 bp, Homo sapien
cactgaataaaattttccaatcaaa

SEQ ID NO: 5894648 - DNA, 25 bp, Homo sapien
gagatattttaaagccaatttgtaa

SEQ ID NO: 5894649 - DNA, 25 bp, Homo sapien
gtaagccagtttatctttagaatga

SEQ ID NO: 5894650 - DNA, 25 bp, Homo sapien
gtgggcttaggagtgatccacacta

SEQ ID NO: 5894651 - DNA, 25 bp, Homo sapien
agatatattgctagttcagtcatag

SEQ ID NO: 5894652 - DNA, 25 bp, Homo sapien
gctactaaggatcttggatgccaag

SEQ ID NO: 5894653 - DNA, 25 bp, Homo sapien
tataaccattccgatcaaatgtatt

SEQ ID NO: 5894654 - DNA, 25 bp, Homo sapien
aagaattttgaagtaagccagttta

SEQ ID NO: 5894655 - DNA, 25 bp, Homo sapien
ttgaacgctaagaacaacaacaaaa

SEQ ID NO: 5894656 - DNA, 25 bp, Homo sapien
acagatatattgctagttcagtcat

SEQ ID NO: 5894657 - DNA, 25 bp, Homo sapien
caatcaaaattcctatagtcttatt

SEQ ID NO: 5894658 - DNA, 25 bp, Homo sapien
gagcgtttgggatcatctttgagga

SEQ ID NO: 5894659 - DNA, 25 bp, Homo sapien
taacatttggaaatgtgtctgagga

SEQ ID NO: 5894660 - DNA, 25 bp, Homo sapien
caaaattcctatagtcttattttcc

SEQ ID NO: 5894661 - DNA, 25 bp, Homo sapien
aacgcctctataaggataaaatgat

SEQ ID NO: 5894662 - DNA, 25 bp, Homo sapien
tttaaaataggtatatgtcccgacc

SEQ ID NO: 5894663 - DNA, 25 bp, Homo sapien
cctaactggtgtgggcttaggagtg

SEQ ID NO: 5894664 - DNA, 25 bp, Homo sapien
ttggaaatgtgtctgaggatgaatg

SEQ ID NO: 5894665 - DNA, 25 bp, Homo sapien
tatttatgatcctagaatgtttgta

SEQ ID NO: 5894666 - DNA, 25 bp, Homo sapien
actattctaaatagtttatgactga

SEQ ID NO: 5894667 - DNA, 25 bp, Homo sapien
agagttcactgaataaaattttcca

SEQ ID NO: 5894668 - DNA, 25 bp, Homo sapien
gatattttaaagccaatttgtaaaa

SEQ ID NO: 5894669 - DNA, 25 bp, Homo sapien
accactgttttttaagtcaatggac

SEQ ID NO: 5894670 - DNA, 25 bp, Homo sapien
tcattccacacaggctaaaaacgcc

SEQ ID NO: 5894671 - DNA, 25 bp, Homo sapien
tactcaatttctaggctaaaagagt

SEQ ID NO: 5894672 - DNA, 25 bp, Homo sapien
gaacgctaagaacaacaacaaaaaa

SEQ ID NO: 5894673 - DNA, 25 bp, Homo sapien
gaaatgtagggtgctactaaggatc

SEQ ID NO: 5894674 - DNA, 25 bp, Homo sapien
gtgtctgaggatgaatggaaatgtt

SEQ ID NO: 5894675 - DNA, 25 bp, Homo sapien
atttggaaatgtgtctgaggatgaa

SEQ ID NO: 5894676 - DNA, 25 bp, Homo sapien
ctccaaatattttcttataagactg

SEQ ID NO: 5894677 - DNA, 25 bp, Homo sapien
gcgtttgggatcatctttgaggaat

SEQ ID NO: 5894678 - DNA, 25 bp, Homo sapien
tgatattgtgaaattggctttaaat

SEQ ID NO: 5894679 - DNA, 25 bp, Homo sapien
ctaggctaaaagagttcactgaata

SEQ ID NO: 5894680 - DNA, 25 bp, Homo sapien
acgagcgtttgggatcatctttgag

SEQ ID NO: 5894681 - DNA, 25 bp, Homo sapien
aaggttgtaaaatgtgatgtgtatg

SEQ ID NO: 5894682 - DNA, 25 bp, Homo sapien
ctgaggatgaatggaaatgttctca

SEQ ID NO: 5894683 - DNA, 25 bp, Homo sapien
attggctttaaatataaccattccg

SEQ ID NO: 5894684 - DNA, 25 bp, Homo sapien
ttgtaaaatgtgatgtgtatgtgta

SEQ ID NO: 5894685 - DNA, 25 bp, Homo sapien
cattcctatgtgattattgtgtctc

SEQ ID NO: 5894686 - DNA, 25 bp, Homo sapien
aagccagtttatctttagaatgata

SEQ ID NO: 5894687 - DNA, 25 bp, Homo sapien
tggatgccaagagatattttaaagc

SEQ ID NO: 5894688 - DNA, 25 bp, Homo sapien
agaagtattctgacatttatatggc

SEQ ID NO: 5894689 - DNA, 25 bp, Homo sapien
taaaataggtatatgtcccgaccct

SEQ ID NO: 5894690 - DNA, 25 bp, Homo sapien
ggttgtaaaatgtgatgtgtatgtg

SEQ ID NO: 5894691 - DNA, 25 bp, Homo sapien
gtctgaggatgaatggaaatgttct

SEQ ID NO: 5894692 - DNA, 25 bp, Homo sapien
cactaaggtgactatttatgatcct

SEQ ID NO: 5894693 - DNA, 25 bp, Homo sapien
atgaatggaaatgttctcattttat

SEQ ID NO: 5894694 - DNA, 25 bp, Homo sapien
ttgtgtctctctaccactgtttttt

SEQ ID NO: 5894695 - DNA, 25 bp, Homo sapien
gtttgggatcatctttgaggaatga

SEQ ID NO: 5894696 - DNA, 25 bp, Homo sapien
gtgtgggcttaggagtgatccacac

SEQ ID NO: 5894697 - DNA, 25 bp, Homo sapien
gtatgtgtatatactgtatgtgtac

SEQ ID NO: 5894698 - DNA, 25 bp, Homo sapien
gaggaatgaaaagcggtcgtgcatt

SEQ ID NO: 5894699 - DNA, 25 bp, Homo sapien
tgtgatgtgtatgtgtatatactgt

SEQ ID NO: 5894700 - DNA, 25 bp, Homo sapien
atttctaggctaaaagagttcactg

SEQ ID NO: 5894701 - DNA, 25 bp, Homo sapien
acatttatatggcttcacagatata

SEQ ID NO: 5894702 - DNA, 25 bp, Homo sapien
gtgctactaaggatcttggatgcca

SEQ ID NO: 5894703 - DNA, 25 bp, Homo sapien
cttttgatacaggtttgaatttgaa

SEQ ID NO: 5894704 - DNA, 25 bp, Homo sapien
tattttcatttactcaatttctagg

SEQ ID NO: 5894705 - DNA, 25 bp, Homo sapien
gaatgtttgtaagcattgtaaatgc

SEQ ID NO: 5894706 - DNA, 25 bp, Homo sapien
aatggacttgagaagtattctgaca

SEQ ID NO: 5894707 - DNA, 25 bp, Homo sapien
aaattcctatagtcttattttccag

SEQ ID NO: 5894708 - DNA, 25 bp, Homo sapien
gctaaaagagttcactgaataaaat

SEQ ID NO: 5894709 - DNA, 25 bp, Homo sapien
cttgttactgtcattccacacaggc

SEQ ID NO: 5894710 - DNA, 25 bp, Homo sapien
tattctaaatagtttatgactgaag

SEQ ID NO: 5894711 - DNA, 25 bp, Homo sapien
acaagaattttgaagtaagccagtt

SEQ ID NO: 5894712 - DNA, 25 bp, Homo sapien
tgagaagtattctgacatttatatg

SEQ ID NO: 5894713 - DNA, 25 bp, Homo sapien
actgtcattccacacaggctaaaaa

SEQ ID NO: 5894714 - DNA, 25 bp, Homo sapien
gtcatagattggagtttgcatattg

SEQ ID NO: 5894715 - DNA, 25 bp, Homo sapien
agttcagtcatagattggagtttgc

SEQ ID NO: 5894716 - DNA, 25 bp, Homo sapien
tccacactaaggtgactatttatga

SEQ ID NO: 5894717 - DNA, 25 bp, Homo sapien
ttcatttactcaatttctaggctaa

SEQ ID NO: 5894718 - DNA, 25 bp, Homo sapien
gttctcattttattgaacgctaaga

SEQ ID NO: 5894719 - DNA, 25 bp, Homo sapien
tgtataacatttggaaatgtgtctg

SEQ ID NO: 5894720 - DNA, 25 bp, Homo sapien
tgaagtaagccagtttatctttaga

SEQ ID NO: 5894721 - DNA, 25 bp, Homo sapien
tagggtgctactaaggatcttggat

SEQ ID NO: 5894722 - DNA, 25 bp, Homo sapien
ctttgaggaatgaaaagcggtcgtg

SEQ ID NO: 5894723 - DNA, 25 bp, Homo sapien
cctatgtgattattgtgtctctcta

SEQ ID NO: 5894724 - DNA, 25 bp, Homo sapien
aaagtaggacaagaattttgaagta

SEQ ID NO: 5894725 - DNA, 25 bp, Homo sapien
ttcctatgtgattattgtgtctctc

SEQ ID NO: 5894726 - DNA, 25 bp, Homo sapien
attacatagccttgttactgtcatt

SEQ ID NO: 5894727 - DNA, 25 bp, Homo sapien
tgtgtactttttaaaataggtatat

SEQ ID NO: 5894728 - DNA, 25 bp, Homo sapien
agtgtatgtccaacactattctaaa

SEQ ID NO: 5894729 - DNA, 25 bp, Homo sapien
taaatataaccattccgatcaaatg

SEQ ID NO: 5894730 - DNA, 25 bp, Homo sapien
ttataagactgtttttagaagaaga

SEQ ID NO: 5894731 - DNA, 25 bp, Homo sapien
attccacacaggctaaaaacgcctc

SEQ ID NO: 5894732 - DNA, 25 bp, Homo sapien
atttatggagtctaattacatagcc

SEQ ID NO: 5894733 - DNA, 25 bp, Homo sapien
tcctatagtcttattttccagtagt

SEQ ID NO: 5894734 - DNA, 25 bp, Homo sapien
aagagatattttaaagccaatttgt

SEQ ID NO: 5894735 - DNA, 25 bp, Homo sapien
tagattggagtttgcatattgtaat

SEQ ID NO: 5894736 - DNA, 25 bp, Homo sapien
gtattctgacatttatatggcttca

SEQ ID NO: 5894737 - DNA, 25 bp, Homo sapien
gtgtatgtgtatatactgtatgtgt

SEQ ID NO: 5894738 - DNA, 25 bp, Homo sapien
gacccttttgatacaggtttgaatt

SEQ ID NO: 5894739 - DNA, 25 bp, Homo sapien
ctgttttttaagtcaatggacttga

SEQ ID NO: 5894740 - DNA, 25 bp, Homo sapien
atattttcttataagactgttttta

SEQ ID NO: 5894741 - DNA, 25 bp, Homo sapien
acgctaagaacaacaacaaaaaaga

SEQ ID NO: 5894742 - DNA, 25 bp, Homo sapien
catagattggagtttgcatattgta

SEQ ID NO: 5894743 - DNA, 25 bp, Homo sapien
attctgacatttatatggcttcaca

SEQ ID NO: 5894744 - DNA, 25 bp, Homo sapien
gtatatgtcccgacccttttgatac

SEQ ID NO: 5894745 - DNA, 25 bp, Homo sapien
gcttaggagtgatccacactaaggt

SEQ ID NO: 5894746 - DNA, 25 bp, Homo sapien
tattgtaatgtaagtgtatgtccaa

SEQ ID NO: 5894747 - DNA, 25 bp, Homo sapien
atattgctagttcagtcatagattg

SEQ ID NO: 5894748 - DNA, 25 bp, Homo sapien
atatggcttcacagatatattgcta

SEQ ID NO: 5894749 - DNA, 25 bp, Homo sapien
tttgatacaggtttgaatttgaaat

SEQ ID NO: 5894750 - DNA, 25 bp, Homo sapien
tgcacaactgccatctccaaatatt

SEQ ID NO: 5894751 - DNA, 25 bp, Homo sapien
tgatacaggtttgaatttgaaatta

SEQ ID NO: 5894752 - DNA, 25 bp, Homo sapien
aaggatcttggatgccaagagatat

SEQ ID NO: 5894753 - DNA, 25 bp, Homo sapien
tcaatggacttgagaagtattctga

SEQ ID NO: 5894754 - DNA, 25 bp, Homo sapien
tttcttataagactgtttttagaag

SEQ ID NO: 5894755 - DNA, 25 bp, Homo sapien
tggacttgagaagtattctgacatt

SEQ ID NO: 5894756 - DNA, 25 bp, Homo sapien
agctatcgtattttcatttactcaa

SEQ ID NO: 5894757 - DNA, 25 bp, Homo sapien
atgtcccgacccttttgatacaggt

SEQ ID NO: 5894758 - DNA, 25 bp, Homo sapien
aaatgttctcattttattgaacgct

SEQ ID NO: 5894759 - DNA, 25 bp, Homo sapien
atggcttcacagatatattgctagt

SEQ ID NO: 5894760 - DNA, 25 bp, Homo sapien
ctttagaatgatattgtgaaattgg

SEQ ID NO: 5894761 - DNA, 25 bp, Homo sapien
ttcactgaataaaattttccaatca

SEQ ID NO: 5894762 - DNA, 25 bp, Homo sapien
attcctatagtcttattttccagta

SEQ ID NO: 5894763 - DNA, 25 bp, Homo sapien
tttaaaacaaacaaaagctatcgta

SEQ ID NO: 5894764 - DNA, 25 bp, Homo sapien
ggacaagaattttgaagtaagccag

SEQ ID NO: 5894765 - DNA, 25 bp, Homo sapien
taagtcaatggacttgagaagtatt

SEQ ID NO: 5894766 - DNA, 25 bp, Homo sapien
ttgtaagcattgtaaatgcacaact

SEQ ID NO: 5894767 - DNA, 25 bp, Homo sapien
tgtgtataacatttggaaatgtgtc

SEQ ID NO: 5894768 - DNA, 25 bp, Homo sapien
ggaatgaaaagcggtcgtgcatttt

SEQ ID NO: 5894769 - DNA, 25 bp, Homo sapien
atctttgaggaatgaaaagcggtcg

SEQ ID NO: 5894770 - DNA, 25 bp, Homo sapien
ttctaggctaaaagagttcactgaa

SEQ ID NO: 5894771 - DNA, 25 bp, Homo sapien
ataagactgtttttagaagaagaaa

SEQ ID NO: 5894772 - DNA, 25 bp, Homo sapien
gatgccaagagatattttaaagcca

SEQ ID NO: 5894773 - DNA, 25 bp, Homo sapien
ggaaaagtaggacaagaattttgaa

SEQ ID NO: 5894774 - DNA, 25 bp, Homo sapien
ctatagtcttattttccagtagtct

SEQ ID NO: 5894775 - DNA, 25 bp, Homo sapien
cgtattttcatttactcaatttcta

SEQ ID NO: 5894776 - DNA, 25 bp, Homo sapien
tctgacatttatatggcttcacaga

SEQ ID NO: 5894777 - DNA, 25 bp, Homo sapien
ttcagtcatagattggagtttgcat

SEQ ID NO: 5894778 - DNA, 25 bp, Homo sapien
aaaatgtgatgtgtatgtgtatata

SEQ ID NO: 5894779 - DNA, 25 bp, Homo sapien
caggctaaaaacgcctctataagga

SEQ ID NO: 5894780 - DNA, 25 bp, Homo sapien
taaaacaaacaaaagctatcgtatt

SEQ ID NO: 5894781 - DNA, 25 bp, Homo sapien
tttccagtagtctaggcattcctat

SEQ ID NO: 5894782 - DNA, 25 bp, Homo sapien
gaattttgaagtaagccagtttatc

SEQ ID NO: 5894783 - DNA, 25 bp, Homo sapien
gccagtttatctttagaatgatatt

SEQ ID NO: 5894784 - DNA, 25 bp, Homo sapien
aatgtagggtgctactaaggatctt

SEQ ID NO: 5894785 - DNA, 25 bp, Homo sapien
cacactaaggtgactatttatgatc

SEQ ID NO: 5894786 - DNA, 25 bp, Homo sapien
tattgaacgctaagaacaacaacaa

SEQ ID NO: 5894787 - DNA, 25 bp, Homo sapien
gccttgttactgtcattccacacag

SEQ ID NO: 5894788 - DNA, 25 bp, Homo sapien
acactattctaaatagtttatgact

SEQ ID NO: 5894789 - DNA, 25 bp, Homo sapien
atgttctcattttattgaacgctaa

SEQ ID NO: 5894790 - DNA, 25 bp, Homo sapien
agtcttattttccagtagtctaggc

SEQ ID NO: 5894791 - DNA, 25 bp, Homo sapien
cacaactgccatctccaaatatttt

SEQ ID NO: 5894792 - DNA, 25 bp, Homo sapien
ctaaaaacgcctctataaggataaa

SEQ ID NO: 5894793 - DNA, 25 bp, Homo sapien
atgtgtctgaggatgaatggaaatg

SEQ ID NO: 5894794 - DNA, 25 bp, Homo sapien
atggagtctaattacatagccttgt

SEQ ID NO: 5894795 - DNA, 25 bp, Homo sapien
gatccacactaaggtgactatttat

SEQ ID NO: 5894796 - DNA, 25 bp, Homo sapien
gattggagtttgcatattgtaatgt

SEQ ID NO: 5894797 - DNA, 25 bp, Homo sapien
gtctctctaccactgttttttaagt

SEQ ID NO: 5894798 - DNA, 25 bp, Homo sapien
caaacaaaagctatcgtattttcat

SEQ ID NO: 5894799 - DNA, 25 bp, Homo sapien
atcaaaattcctatagtcttatttt

SEQ ID NO: 5894800 - DNA, 25 bp, Homo sapien
ggaaatgtgtctgaggatgaatgga

SEQ ID NO: 5894801 - DNA, 25 bp, Homo sapien
aatgaaaagcggtcgtgcattttca

SEQ ID NO: 5894802 - DNA, 25 bp, Homo sapien
ggtcgtgcattttcatcaggaaaag

SEQ ID NO: 5894803 - DNA, 25 bp, Homo sapien
cccttttgatacaggtttgaatttg

SEQ ID NO: 5894804 - DNA, 25 bp, Homo sapien
tgacatttatatggcttcacagata

SEQ ID NO: 5894805 - DNA, 25 bp, Homo sapien
tttgcatattgtaatgtaagtgtat

SEQ ID NO: 5894806 - DNA, 25 bp, Homo sapien
tagaatgtttgtaagcattgtaaat

SEQ ID NO: 5894807 - DNA, 25 bp, Homo sapien
ctaaatagtttatgactgaagttta

SEQ ID NO: 5894808 - DNA, 25 bp, Homo sapien
ctatcgtattttcatttactcaatt

SEQ ID NO: 5894809 - DNA, 25 bp, Homo sapien
aaaagaaatgtagggtgctactaag

SEQ ID NO: 5894810 - DNA, 25 bp, Homo sapien
gagtgatccacactaaggtgactat

SEQ ID NO: 5894811 - DNA, 25 bp, Homo sapien
ctctttcctaactggtgtgggctta

SEQ ID NO: 5894812 - DNA, 25 bp, Homo sapien
attattgtgtctctctaccactgtt

SEQ ID NO: 5894813 - DNA, 25 bp, Homo sapien
gtatctctttcctaactggtgtggg

SEQ ID NO: 5894814 - DNA, 25 bp, Homo sapien
tgtatgtgtactttttaaaataggt

SEQ ID NO: 5894815 - DNA, 25 bp, Homo sapien
gatcaaatgtatttatggagtctaa

SEQ ID NO: 5894816 - DNA, 25 bp, Homo sapien
ggcttcacagatatattgctagttc

SEQ ID NO: 5894817 - DNA, 25 bp, Homo sapien
gggtgctactaaggatcttggatgc

SEQ ID NO: 5894818 - DNA, 25 bp, Homo sapien
attttccaatcaaaattcctatagt

SEQ ID NO: 5894819 - DNA, 25 bp, Homo sapien
catttactcaatttctaggctaaaa

SEQ ID NO: 5894820 - DNA, 25 bp, Homo sapien
ttgggatcatctttgaggaatgaaa

SEQ ID NO: 5894821 - DNA, 25 bp, Homo sapien
atcgtattttcatttactcaatttc

SEQ ID NO: 5894822 - DNA, 25 bp, Homo sapien
atatactgtatgtgtactttttaaa

SEQ ID NO: 5894823 - DNA, 25 bp, Homo sapien
gggcttaggagtgatccacactaag

SEQ ID NO: 5894824 - DNA, 25 bp, Homo sapien
attgtgaaattggctttaaatataa

SEQ ID NO: 5894825 - DNA, 25 bp, Homo sapien
aatgcacaactgccatctccaaata

SEQ ID NO: 5894826 - DNA, 25 bp, Homo sapien
ctctctaccactgttttttaagtca

SEQ ID NO: 5894827 - DNA, 25 bp, Homo sapien
tctcattttattgaacgctaagaac

SEQ ID NO: 5894828 - DNA, 25 bp, Homo sapien
aagatacaagatgtgtataacattt

SEQ ID NO: 5894829 - DNA, 25 bp, Homo sapien
ttagaatgatattgtgaaattggct

SEQ ID NO: 5894830 - DNA, 25 bp, Homo sapien
tccaatctatgactgaactagcaat

SEQ ID NO: 5894831 - DNA, 25 bp, Homo sapien
aatgcacgaccgcttttcattcctc

SEQ ID NO: 5894832 - DNA, 25 bp, Homo sapien
tacaaacattctaggatcataaata

SEQ ID NO: 5894833 - DNA, 25 bp, Homo sapien
tgacagtaacaaggctatgtaatta

SEQ ID NO: 5894834 - DNA, 25 bp, Homo sapien
gtgaactcttttagcctagaaattg

SEQ ID NO: 5894835 - DNA, 25 bp, Homo sapien
tttaaaatatctcttggcatccaag

SEQ ID NO: 5894836 - DNA, 25 bp, Homo sapien
tcataaactatttagaatagtgttg

SEQ ID NO: 5894837 - DNA, 25 bp, Homo sapien
aaatgaaaatacgatagcttttgtt

SEQ ID NO: 5894838 - DNA, 25 bp, Homo sapien
attggaaaattttattcagtgaact

SEQ ID NO: 5894839 - DNA, 25 bp, Homo sapien
aatgcttacaaacattctaggatca

SEQ ID NO: 5894840 - DNA, 25 bp, Homo sapien
gttgttgttcttagcgttcaataaa

SEQ ID NO: 5894841 - DNA, 25 bp, Homo sapien
cggaatggttatatttaaagccaat

SEQ ID NO: 5894842 - DNA, 25 bp, Homo sapien
ataaatagtcaccttagtgtggatc

SEQ ID NO: 5894843 - DNA, 25 bp, Homo sapien
ggtagagagacacaataatcacata

SEQ ID NO: 5894844 - DNA, 25 bp, Homo sapien
attggctttaaaatatctcttggca

SEQ ID NO: 5894845 - DNA, 25 bp, Homo sapien
ctcctaagcccacaccagttaggaa

SEQ ID NO: 5894846 - DNA, 25 bp, Homo sapien
accttagtgtggatcactcctaagc

SEQ ID NO: 5894847 - DNA, 25 bp, Homo sapien
attcctcaaagatgatcccaaacgc

SEQ ID NO: 5894848 - DNA, 25 bp, Homo sapien
ttaggaaagagatactatcatttta

SEQ ID NO: 5894849 - DNA, 25 bp, Homo sapien
gagagacacaataatcacataggaa

SEQ ID NO: 5894850 - DNA, 25 bp, Homo sapien
tagaaattgagtaaatgaaaatacg

SEQ ID NO: 5894851 - DNA, 25 bp, Homo sapien
agcaccctacatttcttttttgttg

SEQ ID NO: 5894852 - DNA, 25 bp, Homo sapien
acctgtatcaaaagggtcgggacat

SEQ ID NO: 5894853 - DNA, 25 bp, Homo sapien
cacatacacatcacattttacaacc

SEQ ID NO: 5894854 - DNA, 25 bp, Homo sapien
gacacatttccaaatgttatacaca

SEQ ID NO: 5894855 - DNA, 25 bp, Homo sapien
aaaatatttggagatggcagttgtg

SEQ ID NO: 5894856 - DNA, 25 bp, Homo sapien
tccattcatcctcagacacatttcc

SEQ ID NO: 5894857 - DNA, 25 bp, Homo sapien
ttgagtaaatgaaaatacgatagct

SEQ ID NO: 5894858 - DNA, 25 bp, Homo sapien
ttaaagccaatttcacaatatcatt

SEQ ID NO: 5894859 - DNA, 25 bp, Homo sapien
gcaaactccaatctatgactgaact

SEQ ID NO: 5894860 - DNA, 25 bp, Homo sapien
attaaacttcagtcataaactattt

SEQ ID NO: 5894861 - DNA, 25 bp, Homo sapien
atcggaatggttatatttaaagcca

SEQ ID NO: 5894862 - DNA, 25 bp, Homo sapien
gcagttgtgcatttacaatgcttac

SEQ ID NO: 5894863 - DNA, 25 bp, Homo sapien
tggctttaaaatatctcttggcatc

SEQ ID NO: 5894864 - DNA, 25 bp, Homo sapien
gaaattgagtaaatgaaaatacgat

SEQ ID NO: 5894865 - DNA, 25 bp, Homo sapien
aattgagtaaatgaaaatacgatag

SEQ ID NO: 5894866 - DNA, 25 bp, Homo sapien
cttcagtcataaactatttagaata

SEQ ID NO: 5894867 - DNA, 25 bp, Homo sapien
tcttttttgttgttgttcttagcgt

SEQ ID NO: 5894868 - DNA, 25 bp, Homo sapien
tttagcctgtgtggaatgacagtaa

SEQ ID NO: 5894869 - DNA, 25 bp, Homo sapien
aatgacagtaacaaggctatgtaat

SEQ ID NO: 5894870 - DNA, 25 bp, Homo sapien
ggaaaataagactataggaattttg

SEQ ID NO: 5894871 - DNA, 25 bp, Homo sapien
atccaagatccttagtagcacccta

SEQ ID NO: 5894872 - DNA, 25 bp, Homo sapien
gcatttacaatgcttacaaacattc

SEQ ID NO: 5894873 - DNA, 25 bp, Homo sapien
atagtcaccttagtgtggatcactc

SEQ ID NO: 5894874 - DNA, 25 bp, Homo sapien
gacacaataatcacataggaatgcc

SEQ ID NO: 5894875 - DNA, 25 bp, Homo sapien
gactgaactagcaatatatctgtga

SEQ ID NO: 5894876 - DNA, 25 bp, Homo sapien
cattctaggatcataaatagtcacc

SEQ ID NO: 5894877 - DNA, 25 bp, Homo sapien
ttacaatgcttacaaacattctagg

SEQ ID NO: 5894878 - DNA, 25 bp, Homo sapien
taagactataggaattttgattgga

SEQ ID NO: 5894879 - DNA, 25 bp, Homo sapien
atgactgaactagcaatatatctgt

SEQ ID NO: 5894880 - DNA, 25 bp, Homo sapien
ttcagtgaactcttttagcctagaa

SEQ ID NO: 5894881 - DNA, 25 bp, Homo sapien
agcctagaaattgagtaaatgaaaa

SEQ ID NO: 5894882 - DNA, 25 bp, Homo sapien
gagtaaatgaaaatacgatagcttt

SEQ ID NO: 5894883 - DNA, 25 bp, Homo sapien
ttacaaattggctttaaaatatctc

SEQ ID NO: 5894884 - DNA, 25 bp, Homo sapien
acacttacattacaatatgcaaact

SEQ ID NO: 5894885 - DNA, 25 bp, Homo sapien
ggacatacacttacattacaatatg

SEQ ID NO: 5894886 - DNA, 25 bp, Homo sapien
tgattggaaaattttattcagtgaa

SEQ ID NO: 5894887 - DNA, 25 bp, Homo sapien
agtcataaactatttagaatagtgt

SEQ ID NO: 5894888 - DNA, 25 bp, Homo sapien
catataaatgtcagaatacttctca

SEQ ID NO: 5894889 - DNA, 25 bp, Homo sapien
atggttatatttaaagccaatttca

SEQ ID NO: 5894890 - DNA, 25 bp, Homo sapien
actcttttagcctagaaattgagta

SEQ ID NO: 5894891 - DNA, 25 bp, Homo sapien
taaaatatctcttggcatccaagat

SEQ ID NO: 5894892 - DNA, 25 bp, Homo sapien
acaaattggctttaaaatatctctt

SEQ ID NO: 5894893 - DNA, 25 bp, Homo sapien
gtatcttttcctgatgaaaatgcac

SEQ ID NO: 5894894 - DNA, 25 bp, Homo sapien
taaactggcttacttcaaaattctt

SEQ ID NO: 5894895 - DNA, 25 bp, Homo sapien
agttgtgcatttacaatgcttacaa

SEQ ID NO: 5894896 - DNA, 25 bp, Homo sapien
ccattgacttaaaaaacagtggtag

SEQ ID NO: 5894897 - DNA, 25 bp, Homo sapien
acttacattacaatatgcaaactcc

SEQ ID NO: 5894898 - DNA, 25 bp, Homo sapien
aaattggctttaaaatatctcttgg

SEQ ID NO: 5894899 - DNA, 25 bp, Homo sapien
tttattcagtgaactcttttagcct

SEQ ID NO: 5894900 - DNA, 25 bp, Homo sapien
caaaagggtcgggacatatacctat

SEQ ID NO: 5894901 - DNA, 25 bp, Homo sapien
gtggtagagagacacaataatcaca

SEQ ID NO: 5894902 - DNA, 25 bp, Homo sapien
gtggaatgacagtaacaaggctatg

SEQ ID NO: 5894903 - DNA, 25 bp, Homo sapien
cgcttttcattcctcaaagatgatc

SEQ ID NO: 5894904 - DNA, 25 bp, Homo sapien
cctaagcccacaccagttaggaaag

SEQ ID NO: 5894905 - DNA, 25 bp, Homo sapien
tgatcggaatggttatatttaaagc

SEQ ID NO: 5894906 - DNA, 25 bp, Homo sapien
cagtcttataagaaaatatttggag

SEQ ID NO: 5894907 - DNA, 25 bp, Homo sapien
aaaatgcacgaccgcttttcattcc

SEQ ID NO: 5894908 - DNA, 25 bp, Homo sapien
attctaaagataaactggcttactt

SEQ ID NO: 5894909 - DNA, 25 bp, Homo sapien
tttgattggaaaattttattcagtg

SEQ ID NO: 5894910 - DNA, 25 bp, Homo sapien
ttttttgttgttgttcttagcgttc

SEQ ID NO: 5894911 - DNA, 25 bp, Homo sapien
aggatcataaatagtcaccttagtg

SEQ ID NO: 5894912 - DNA, 25 bp, Homo sapien
attttgattggaaaattttattcag

SEQ ID NO: 5894913 - DNA, 25 bp, Homo sapien
cttataagaaaatatttggagatgg

SEQ ID NO: 5894914 - DNA, 25 bp, Homo sapien
tcacaatatcattctaaagataaac

SEQ ID NO: 5894915 - DNA, 25 bp, Homo sapien
actatttagaatagtgttggacata

SEQ ID NO: 5894916 - DNA, 25 bp, Homo sapien
tccataaatacatttgatcggaatg

SEQ ID NO: 5894917 - DNA, 25 bp, Homo sapien
aatacgatagcttttgtttgtttta

SEQ ID NO: 5894918 - DNA, 25 bp, Homo sapien
caataaaatgagaacatttccattc

SEQ ID NO: 5894919 - DNA, 25 bp, Homo sapien
ttcatcctcagacacatttccaaat

SEQ ID NO: 5894920 - DNA, 25 bp, Homo sapien
ttagcctagaaattgagtaaatgaa

SEQ ID NO: 5894921 - DNA, 25 bp, Homo sapien
agccaatttcacaatatcattctaa

SEQ ID NO: 5894922 - DNA, 25 bp, Homo sapien
ccaagatccttagtagcaccctaca

SEQ ID NO: 5894923 - DNA, 25 bp, Homo sapien
aaatgttatacacatcttgtatctt

SEQ ID NO: 5894924 - DNA, 25 bp, Homo sapien
aattagactccataaatacatttga

SEQ ID NO: 5894925 - DNA, 25 bp, Homo sapien
tcctgatgaaaatgcacgaccgctt

SEQ ID NO: 5894926 - DNA, 25 bp, Homo sapien
tttcttcttctaaaaacagtcttat

SEQ ID NO: 5894927 - DNA, 25 bp, Homo sapien
aatacttctcaagtccattgactta

SEQ ID NO: 5894928 - DNA, 25 bp, Homo sapien
cacaataatcacataggaatgccta

SEQ ID NO: 5894929 - DNA, 25 bp, Homo sapien
atttcaaattcaaacctgtatcaaa

SEQ ID NO: 5894930 - DNA, 25 bp, Homo sapien
tattcagtgaactcttttagcctag

SEQ ID NO: 5894931 - DNA, 25 bp, Homo sapien
tataaatgtcagaatacttctcaag

SEQ ID NO: 5894932 - DNA, 25 bp, Homo sapien
caaattcaaacctgtatcaaaaggg

SEQ ID NO: 5894933 - DNA, 25 bp, Homo sapien
agtcaccttagtgtggatcactcct

SEQ ID NO: 5894934 - DNA, 25 bp, Homo sapien
acattacaatatgcaaactccaatc

SEQ ID NO: 5894935 - DNA, 25 bp, Homo sapien
atctatgactgaactagcaatatat

SEQ ID NO: 5894936 - DNA, 25 bp, Homo sapien
gtccattgacttaaaaaacagtggt

SEQ ID NO: 5894937 - DNA, 25 bp, Homo sapien
cacaccagttaggaaagagatacta

SEQ ID NO: 5894938 - DNA, 25 bp, Homo sapien
atgcctagactactggaaaataaga

SEQ ID NO: 5894939 - DNA, 25 bp, Homo sapien
aggaaagagatactatcattttatc

SEQ ID NO: 5894940 - DNA, 25 bp, Homo sapien
tttagaatagtgttggacatacact

SEQ ID NO: 5894941 - DNA, 25 bp, Homo sapien
tgaagccatataaatgtcagaatac

SEQ ID NO: 5894942 - DNA, 25 bp, Homo sapien
ggctatgtaattagactccataaat

SEQ ID NO: 5894943 - DNA, 25 bp, Homo sapien
atcttttcctgatgaaaatgcacga

SEQ ID NO: 5894944 - DNA, 25 bp, Homo sapien
catcttgtatcttttcctgatgaaa

SEQ ID NO: 5894945 - DNA, 25 bp, Homo sapien
taagcccacaccagttaggaaagag

SEQ ID NO: 5894946 - DNA, 25 bp, Homo sapien
ttagcgttcaataaaatgagaacat

SEQ ID NO: 5894947 - DNA, 25 bp, Homo sapien
tttcctgatgaaaatgcacgaccgc

SEQ ID NO: 5894948 - DNA, 25 bp, Homo sapien
ggaatgacagtaacaaggctatgta

SEQ ID NO: 5894949 - DNA, 25 bp, Homo sapien
tcttcttctaaaaacagtcttataa

SEQ ID NO: 5894950 - DNA, 25 bp, Homo sapien
acatacacttacattacaatatgca

SEQ ID NO: 5894951 - DNA, 25 bp, Homo sapien
gagacacaataatcacataggaatg

SEQ ID NO: 5894952 - DNA, 25 bp, Homo sapien
aacttcagtcataaactatttagaa

SEQ ID NO: 5894953 - DNA, 25 bp, Homo sapien
agaatacttctcaagtccattgact

SEQ ID NO: 5894954 - DNA, 25 bp, Homo sapien
catcctcagacacatttccaaatgt

SEQ ID NO: 5894955 - DNA, 25 bp, Homo sapien
tatcgtttttacaaattggctttaa

SEQ ID NO: 5894956 - DNA, 25 bp, Homo sapien
gaactagcaatatatctgtgaagcc

SEQ ID NO: 5894957 - DNA, 25 bp, Homo sapien
aatatttggagatggcagttgtgca

SEQ ID NO: 5894958 - DNA, 25 bp, Homo sapien
cttagtagcaccctacatttctttt

SEQ ID NO: 5894959 - DNA, 25 bp, Homo sapien
tttatccttatagaggcgtttttag

SEQ ID NO: 5894960 - DNA, 25 bp, Homo sapien
ctatgtaattagactccataaatac

SEQ ID NO: 5894961 - DNA, 25 bp, Homo sapien
ccaatttcacaatatcattctaaag

SEQ ID NO: 5894962 - DNA, 25 bp, Homo sapien
gtggatcactcctaagcccacacca

SEQ ID NO: 5894963 - DNA, 25 bp, Homo sapien
aataagactataggaattttgattg

SEQ ID NO: 5894964 - DNA, 25 bp, Homo sapien
aaaataagactataggaattttgat

SEQ ID NO: 5894965 - DNA, 25 bp, Homo sapien
ctagactactggaaaataagactat

SEQ ID NO: 5894966 - DNA, 25 bp, Homo sapien
tatttagaatagtgttggacataca

SEQ ID NO: 5894967 - DNA, 25 bp, Homo sapien
ataaaatgagaacatttccattcat

SEQ ID NO: 5894968 - DNA, 25 bp, Homo sapien
tcctcaaagatgatcccaaacgctc

SEQ ID NO: 5894969 - DNA, 25 bp, Homo sapien
actagcaatatatctgtgaagccat

SEQ ID NO: 5894970 - DNA, 25 bp, Homo sapien
catttgatcggaatggttatattta

SEQ ID NO: 5894971 - DNA, 25 bp, Homo sapien
tcattcctcaaagatgatcccaaac

SEQ ID NO: 5894972 - DNA, 25 bp, Homo sapien
tcacataggaatgcctagactactg

SEQ ID NO: 5894973 - DNA, 25 bp, Homo sapien
atacacttacattacaatatgcaaa

SEQ ID NO: 5894974 - DNA, 25 bp, Homo sapien
tatagaggcgtttttagcctgtgtg

SEQ ID NO: 5894975 - DNA, 25 bp, Homo sapien
aaggctatgtaattagactccataa

SEQ ID NO: 5894976 - DNA, 25 bp, Homo sapien
ttttacaaattggctttaaaatatc

SEQ ID NO: 5894977 - DNA, 25 bp, Homo sapien
agactataggaattttgattggaaa

SEQ ID NO: 5894978 - DNA, 25 bp, Homo sapien
ttttagcctagaaattgagtaaatg

SEQ ID NO: 5894979 - DNA, 25 bp, Homo sapien
aatgtcagaatacttctcaagtcca

SEQ ID NO: 5894980 - DNA, 25 bp, Homo sapien
aagtccattgacttaaaaaacagtg

SEQ ID NO: 5894981 - DNA, 25 bp, Homo sapien
gcaatatatctgtgaagccatataa

SEQ ID NO: 5894982 - DNA, 25 bp, Homo sapien
ttggacatacacttacattacaata

SEQ ID NO: 5894983 - DNA, 25 bp, Homo sapien
tgaaaatgcacgaccgcttttcatt

SEQ ID NO: 5894984 - DNA, 25 bp, Homo sapien
cttttcattcctcaaagatgatccc

SEQ ID NO: 5894985 - DNA, 25 bp, Homo sapien
taattaaacttcagtcataaactat

SEQ ID NO: 5894986 - DNA, 25 bp, Homo sapien
acacatcttgtatcttttcctgatg

SEQ ID NO: 5894987 - DNA, 25 bp, Homo sapien
actactggaaaataagactatagga

SEQ ID NO: 5894988 - DNA, 25 bp, Homo sapien
cttctaaaaacagtcttataagaaa

SEQ ID NO: 5894989 - DNA, 25 bp, Homo sapien
ttagactccataaatacatttgatc

SEQ ID NO: 5894990 - DNA, 25 bp, Homo sapien
ttctaggatcataaatagtcacctt

SEQ ID NO: 5894991 - DNA, 25 bp, Homo sapien
ggtcgggacatatacctattttaaa

SEQ ID NO: 5894992 - DNA, 25 bp, Homo sapien
cttatagaggcgtttttagcctgtg

SEQ ID NO: 5894993 - DNA, 25 bp, Homo sapien
agactactggaaaataagactatag

SEQ ID NO: 5894994 - DNA, 25 bp, Homo sapien
atatctcttggcatccaagatcctt

SEQ ID NO: 5894995 - DNA, 25 bp, Homo sapien
caaacattctaggatcataaatagt

SEQ ID NO: 5894996 - DNA, 25 bp, Homo sapien
aaaagtacacatacagtatatacac

SEQ ID NO: 5894997 - DNA, 25 bp, Homo sapien
ttacattacaatatgcaaactccaa

SEQ ID NO: 5894998 - DNA, 25 bp, Homo sapien
agcccacaccagttaggaaagagat

SEQ ID NO: 5894999 - DNA, 25 bp, Homo sapien
gatccttagtagcaccctacatttc

SEQ ID NO: 5895000 - DNA, 25 bp, Homo sapien
ccaaatgttatacacatcttgtatc

SEQ ID NO: 5895001 - DNA, 25 bp, Homo sapien
tttcattcctcaaagatgatcccaa

SEQ ID NO: 5895002 - DNA, 25 bp, Homo sapien
ttgttgttgttcttagcgttcaata

SEQ ID NO: 5895003 - DNA, 25 bp, Homo sapien
gcctagactactggaaaataagact

SEQ ID NO: 5895004 - DNA, 25 bp, Homo sapien
acatacagtatatacacatacacat

SEQ ID NO: 5895005 - DNA, 25 bp, Homo sapien
cattttatccttatagaggcgtttt

SEQ ID NO: 5895006 - DNA, 25 bp, Homo sapien
tcattctaaagataaactggcttac

SEQ ID NO: 5895007 - DNA, 25 bp, Homo sapien
aatcacataggaatgcctagactac

SEQ ID NO: 5895008 - DNA, 25 bp, Homo sapien
tcaagtccattgacttaaaaaacag

SEQ ID NO: 5895009 - DNA, 25 bp, Homo sapien
gaatggttatatttaaagccaattt

SEQ ID NO: 5895010 - DNA, 25 bp, Homo sapien
catttccattcatcctcagacacat

SEQ ID NO: 5895011 - DNA, 25 bp, Homo sapien
cgaccgcttttcattcctcaaagat

SEQ ID NO: 5895012 - DNA, 25 bp, Homo sapien
tatcattctaaagataaactggctt

SEQ ID NO: 5895013 - DNA, 25 bp, Homo sapien
accgcttttcattcctcaaagatga

SEQ ID NO: 5895014 - DNA, 25 bp, Homo sapien
atcattttatccttatagaggcgtt

SEQ ID NO: 5895015 - DNA, 25 bp, Homo sapien
acttaaaaaacagtggtagagagac

SEQ ID NO: 5895016 - DNA, 25 bp, Homo sapien
cttggcatccaagatccttagtagc

SEQ ID NO: 5895017 - DNA, 25 bp, Homo sapien
ccagttaggaaagagatactatcat

SEQ ID NO: 5895018 - DNA, 25 bp, Homo sapien
caataatcacataggaatgcctaga

SEQ ID NO: 5895019 - DNA, 25 bp, Homo sapien
tcctcagacacatttccaaatgtta

SEQ ID NO: 5895020 - DNA, 25 bp, Homo sapien
ctgatgaaaatgcacgaccgctttt

SEQ ID NO: 5895021 - DNA, 25 bp, Homo sapien
acatttccaaatgttatacacatct

SEQ ID NO: 5895022 - DNA, 25 bp, Homo sapien
atgaaaatacgatagcttttgtttg

SEQ ID NO: 5895023 - DNA, 25 bp, Homo sapien
tctcaagtccattgacttaaaaaac

SEQ ID NO: 5895024 - DNA, 25 bp, Homo sapien
cttacaaacattctaggatcataaa

SEQ ID NO: 5895025 - DNA, 25 bp, Homo sapien
ggatcactcctaagcccacaccagt

SEQ ID NO: 5895026 - DNA, 25 bp, Homo sapien
gaatagtgttggacatacacttaca

SEQ ID NO: 5895027 - DNA, 25 bp, Homo sapien
agaaaatatttggagatggcagttg

SEQ ID NO: 5895028 - DNA, 25 bp, Homo sapien
ctggaaaataagactataggaattt

SEQ ID NO: 5895029 - DNA, 25 bp, Homo sapien
attttattcagtgaactcttttagc

SEQ ID NO: 5895030 - DNA, 25 bp, Homo sapien
tatacacatacacatcacattttac

SEQ ID NO: 5895031 - DNA, 25 bp, Homo sapien
gtgtggatcactcctaagcccacac

SEQ ID NO: 5895032 - DNA, 25 bp, Homo sapien
taaacttcagtcataaactatttag

SEQ ID NO: 5895033 - DNA, 25 bp, Homo sapien
ataggaatgcctagactactggaaa

SEQ ID NO: 5895034 - DNA, 25 bp, Homo sapien
tagagagacacaataatcacatagg

SEQ ID NO: 5895035 - DNA, 25 bp, Homo sapien
taacaaggctatgtaattagactcc

SEQ ID NO: 5895036 - DNA, 25 bp, Homo sapien
taatttcaaattcaaacctgtatca

SEQ ID NO: 5895037 - DNA, 25 bp, Homo sapien
tggaaaattttattcagtgaactct

SEQ ID NO: 5895038 - DNA, 25 bp, Homo sapien
tttaattaaacttcagtcataaact

SEQ ID NO: 5895039 - DNA, 25 bp, Homo sapien
gttcttagcgttcaataaaatgaga

SEQ ID NO: 5895040 - DNA, 25 bp, Homo sapien
tagcaatatatctgtgaagccatat

SEQ ID NO: 5895041 - DNA, 25 bp, Homo sapien
tacttctcaagtccattgacttaaa

SEQ ID NO: 5895042 - DNA, 25 bp, Homo sapien
gaactcttttagcctagaaattgag

SEQ ID NO: 5895043 - DNA, 25 bp, Homo sapien
aatatatctgtgaagccatataaat

SEQ ID NO: 5895044 - DNA, 25 bp, Homo sapien
cataaatacatttgatcggaatggt

SEQ ID NO: 5895045 - DNA, 25 bp, Homo sapien
ctatcattttatccttatagaggcg

SEQ ID NO: 5895046 - DNA, 25 bp, Homo sapien
aaaacagtggtagagagacacaata

SEQ ID NO: 5895047 - DNA, 25 bp, Homo sapien
tcttagcgttcaataaaatgagaac

SEQ ID NO: 5895048 - DNA, 25 bp, Homo sapien
gtacacatacagtatatacacatac

SEQ ID NO: 5895049 - DNA, 25 bp, Homo sapien
ctgaactagcaatatatctgtgaag

SEQ ID NO: 5895050 - DNA, 25 bp, Homo sapien
aacagtggtagagagacacaataat

SEQ ID NO: 5895051 - DNA, 25 bp, Homo sapien
taaaaagtacacatacagtatatac

SEQ ID NO: 5895052 - DNA, 25 bp, Homo sapien
aatgtaatttcaaattcaaacctgt

SEQ ID NO: 5895053 - DNA, 25 bp, Homo sapien
gtgcatttacaatgcttacaaacat

SEQ ID NO: 5895054 - DNA, 25 bp, Homo sapien
ttcttctaaaaacagtcttataaga

SEQ ID NO: 5895055 - DNA, 25 bp, Homo sapien
aagtacacatacagtatatacacat

SEQ ID NO: 5895056 - DNA, 25 bp, Homo sapien
tgcacgaccgcttttcattcctcaa

SEQ ID NO: 5895057 - DNA, 25 bp, Homo sapien
acctattttaaaaagtacacataca

SEQ ID NO: 5895058 - DNA, 25 bp, Homo sapien
atatgcaaactccaatctatgactg

SEQ ID NO: 5895059 - DNA, 25 bp, Homo sapien
gtcttataagaaaatatttggagat

SEQ ID NO: 5895060 - DNA, 25 bp, Homo sapien
gataaactggcttacttcaaaattc

SEQ ID NO: 5895061 - DNA, 25 bp, Homo sapien
gtatcaaaagggtcgggacatatac

SEQ ID NO: 5895062 - DNA, 25 bp, Homo sapien
atgcaaactccaatctatgactgaa

SEQ ID NO: 5895063 - DNA, 25 bp, Homo sapien
aacagtcttataagaaaatatttgg

SEQ ID NO: 5895064 - DNA, 25 bp, Homo sapien
tcataaatagtcaccttagtgtgga

SEQ ID NO: 5895065 - DNA, 25 bp, Homo sapien
tgtgaagccatataaatgtcagaat

SEQ ID NO: 5895066 - DNA, 25 bp, Homo sapien
tctaaagataaactggcttacttca

SEQ ID NO: 5895067 - DNA, 25 bp, Homo sapien
cactcctaagcccacaccagttagg

SEQ ID NO: 5895068 - DNA, 25 bp, Homo sapien
cagacacatttccaaatgttataca

SEQ ID NO: 5895069 - DNA, 25 bp, Homo sapien
ctaggatcataaatagtcaccttag

SEQ ID NO: 5895070 - DNA, 25 bp, Homo sapien
agggtcgggacatatacctatttta

SEQ ID NO: 5895071 - DNA, 25 bp, Homo sapien
aaagccaatttcacaatatcattct

SEQ ID NO: 5895072 - DNA, 25 bp, Homo sapien
gtagcaccctacatttcttttttgt

SEQ ID NO: 5895073 - DNA, 25 bp, Homo sapien
atttaaagccaatttcacaatatca

SEQ ID NO: 5895074 - DNA, 25 bp, Homo sapien
tagaggcgtttttagcctgtgtgga

SEQ ID NO: 5895075 - DNA, 25 bp, Homo sapien
tggcatccaagatccttagtagcac

SEQ ID NO: 5895076 - DNA, 25 bp, Homo sapien
agaacatttccattcatcctcagac

SEQ ID NO: 5895077 - DNA, 25 bp, Homo sapien
cttctcaagtccattgacttaaaaa

SEQ ID NO: 5895078 - DNA, 25 bp, Homo sapien
tcgggacatatacctattttaaaaa

SEQ ID NO: 5895079 - DNA, 25 bp, Homo sapien
gaaaatacgatagcttttgtttgtt

SEQ ID NO: 5895080 - DNA, 25 bp, Homo sapien
cagtggtagagagacacaataatca

SEQ ID NO: 5895081 - DNA, 25 bp, Homo sapien
tttgatcggaatggttatatttaaa

SEQ ID NO: 5895082 - DNA, 25 bp, Homo sapien
ttgtgcatttacaatgcttacaaac

SEQ ID NO: 5895083 - DNA, 25 bp, Homo sapien
tatttggagatggcagttgtgcatt

SEQ ID NO: 5895084 - DNA, 25 bp, Homo sapien
ctggcttacttcaaaattcttgtcc

SEQ ID NO: 5895085 - DNA, 25 bp, Homo sapien
atatttaaagccaatttcacaatat

SEQ ID NO: 5895086 - DNA, 25 bp, Homo sapien
aagagatactatcattttatcctta

SEQ ID NO: 5895087 - DNA, 25 bp, Homo sapien
tcagtcataaactatttagaatagt

SEQ ID NO: 5895088 - DNA, 25 bp, Homo sapien
cacatcacattttacaaccttttat

SEQ ID NO: 5895089 - DNA, 25 bp, Homo sapien
actccataaatacatttgatcggaa

SEQ ID NO: 5895090 - DNA, 25 bp, Homo sapien
tggagatggcagttgtgcatttaca

SEQ ID NO: 5895091 - DNA, 25 bp, Homo sapien
gaggcgtttttagcctgtgtggaat

SEQ ID NO: 5895092 - DNA, 25 bp, Homo sapien
tagcctgtgtggaatgacagtaaca

SEQ ID NO: 5895093 - DNA, 25 bp, Homo sapien
caaaattcttgtcctacttttccaa

SEQ ID NO: 5895094 - DNA, 25 bp, Homo sapien
tacaatatgcaaactccaatctatg

SEQ ID NO: 5895095 - DNA, 25 bp, Homo sapien
acacatacagtatatacacatacac

SEQ ID NO: 5895096 - DNA, 25 bp, Homo sapien
ttttgttgttgttcttagcgttcaa

SEQ ID NO: 5895097 - DNA, 25 bp, Homo sapien
cgttcaataaaatgagaacatttcc

SEQ ID NO: 5895098 - DNA, 25 bp, Homo sapien
acagtaacaaggctatgtaattaga

SEQ ID NO: 5895099 - DNA, 25 bp, Homo sapien
aggaatgcctagactactggaaaat

SEQ ID NO: 5895100 - DNA, 25 bp, Homo sapien
gatcataaatagtcaccttagtgtg

SEQ ID NO: 5895101 - DNA, 25 bp, Homo sapien
actataggaattttgattggaaaat

SEQ ID NO: 5895102 - DNA, 25 bp, Homo sapien
caatatgcaaactccaatctatgac

SEQ ID NO: 5895103 - DNA, 25 bp, Homo sapien
tagaatagtgttggacatacactta

SEQ ID NO: 5895104 - DNA, 25 bp, Homo sapien
atttacaatgcttacaaacattcta

SEQ ID NO: 5895105 - DNA, 25 bp, Homo sapien
taaatacatttgatcggaatggtta

SEQ ID NO: 5895106 - DNA, 25 bp, Homo sapien
aagatccttagtagcaccctacatt

SEQ ID NO: 5895107 - DNA, 25 bp, Homo sapien
acagtatatacacatacacatcaca

SEQ ID NO: 5895108 - DNA, 25 bp, Homo sapien
ctcagacacatttccaaatgttata

SEQ ID NO: 5895109 - DNA, 25 bp, Homo sapien
atacctattttaaaaagtacacata

SEQ ID NO: 5895110 - DNA, 25 bp, Homo sapien
aattcaaacctgtatcaaaagggtc

SEQ ID NO: 5895111 - DNA, 25 bp, Homo sapien
caccagttaggaaagagatactatc

SEQ ID NO: 5895112 - DNA, 25 bp, Homo sapien
aacattctaggatcataaatagtca

SEQ ID NO: 5895113 - DNA, 25 bp, Homo sapien
ggttatatttaaagccaatttcaca

SEQ ID NO: 5895114 - DNA, 25 bp, Homo sapien
ggcgtttttagcctgtgtggaatga

SEQ ID NO: 5895115 - DNA, 25 bp, Homo sapien
ttcaataaaatgagaacatttccat

SEQ ID NO: 5895116 - DNA, 25 bp, Homo sapien
attgacttaaaaaacagtggtagag

SEQ ID NO: 5895117 - DNA, 25 bp, Homo sapien
ctatgactgaactagcaatatatct

SEQ ID NO: 5895118 - DNA, 25 bp, Homo sapien
aaactccaatctatgactgaactag

SEQ ID NO: 5895119 - DNA, 25 bp, Homo sapien
tagtgtggatcactcctaagcccac

SEQ ID NO: 5895120 - DNA, 25 bp, Homo sapien
gagatggcagttgtgcatttacaat

SEQ ID NO: 5895121 - DNA, 25 bp, Homo sapien
tttttagcctgtgtggaatgacagt

SEQ ID NO: 5895122 - DNA, 25 bp, Homo sapien
tgttggacatacacttacattacaa

SEQ ID NO: 5895123 - DNA, 25 bp, Homo sapien
tactggaaaataagactataggaat

SEQ ID NO: 5895124 - DNA, 25 bp, Homo sapien
aaatagtcaccttagtgtggatcac

SEQ ID NO: 5895125 - DNA, 25 bp, Homo sapien
cctagaaattgagtaaatgaaaata

SEQ ID NO: 5895126 - DNA, 25 bp, Homo sapien
agttaggaaagagatactatcattt

SEQ ID NO: 5895127 - DNA, 25 bp, Homo sapien
ctattttaaaaagtacacatacagt

SEQ ID NO: 5895128 - DNA, 25 bp, Homo sapien
gcatccaagatccttagtagcaccc

SEQ ID NO: 5895129 - DNA, 25 bp, Homo sapien
tccttagtagcaccctacatttctt

SEQ ID NO: 5895130 - DNA, 25 bp, Homo sapien
cttagtgtggatcactcctaagccc

SEQ ID NO: 5895131 - DNA, 25 bp, Homo sapien
ataatcacataggaatgcctagact

SEQ ID NO: 5895132 - DNA, 25 bp, Homo sapien
tacttcaaaattcttgtcctacttt

SEQ ID NO: 5895133 - DNA, 25 bp, Homo sapien
gcctgtgtggaatgacagtaacaag

SEQ ID NO: 5895134 - DNA, 25 bp, Homo sapien
gatgaaaatgcacgaccgcttttca

SEQ ID NO: 5895135 - DNA, 25 bp, Homo sapien
tgtaatttcaaattcaaacctgtat

SEQ ID NO: 5895136 - DNA, 25 bp, Homo sapien
atcaaaagggtcgggacatatacct

SEQ ID NO: 5895137 - DNA, 25 bp, Homo sapien
tatatctgtgaagccatataaatgt

SEQ ID NO: 5895138 - DNA, 25 bp, Homo sapien
attacaatatgcaaactccaatcta

SEQ ID NO: 5895139 - DNA, 25 bp, Homo sapien
tagtagcaccctacatttctttttt

SEQ ID NO: 5895140 - DNA, 25 bp, Homo sapien
tcaccttagtgtggatcactcctaa

SEQ ID NO: 5895141 - DNA, 25 bp, Homo sapien
gaaagagatactatcattttatcct

SEQ ID NO: 5895142 - DNA, 25 bp, Homo sapien
atatacctattttaaaaagtacaca

SEQ ID NO: 5895143 - DNA, 25 bp, Homo sapien
tacgatagcttttgtttgttttaaa

SEQ ID NO: 5895144 - DNA, 25 bp, Homo sapien
gctttaaaatatctcttggcatcca

SEQ ID NO: 5895145 - DNA, 25 bp, Homo sapien
tttaaaaagtacacatacagtatat

SEQ ID NO: 5895146 - DNA, 25 bp, Homo sapien
cacgaccgcttttcattcctcaaag

SEQ ID NO: 5895147 - DNA, 25 bp, Homo sapien
tataagaaaatatttggagatggca

SEQ ID NO: 5895148 - DNA, 25 bp, Homo sapien
gtaaatgaaaatacgatagcttttg

SEQ ID NO: 5895149 - DNA, 25 bp, Homo sapien
gccatataaatgtcagaatacttct

SEQ ID NO: 5895150 - DNA, 25 bp, Homo sapien
tgagaacatttccattcatcctcag

SEQ ID NO: 5895151 - DNA, 25 bp, Homo sapien
tcagaatacttctcaagtccattga

SEQ ID NO: 5895152 - DNA, 25 bp, Homo sapien
ttccaaatgttatacacatcttgta

SEQ ID NO: 5895153 - DNA, 25 bp, Homo sapien
tgtcagaatacttctcaagtccatt

SEQ ID NO: 5895154 - DNA, 25 bp, Homo sapien
ctgtatcaaaagggtcgggacatat

SEQ ID NO: 5895155 - DNA, 25 bp, Homo sapien
agactccataaatacatttgatcgg

SEQ ID NO: 5895156 - DNA, 25 bp, Homo sapien
caaacctgtatcaaaagggtcggga

SEQ ID NO: 5895157 - DNA, 25 bp, Homo sapien
aagataaactggcttacttcaaaat

SEQ ID NO: 5895158 - DNA, 25 bp, Homo sapien
acaatgcttacaaacattctaggat

SEQ ID NO: 5895159 - DNA, 25 bp, Homo sapien
agtaacaaggctatgtaattagact

SEQ ID NO: 5895160 - DNA, 25 bp, Homo sapien
agtgttggacatacacttacattac

SEQ ID NO: 5895161 - DNA, 25 bp, Homo sapien
ggcttacttcaaaattcttgtccta

SEQ ID NO: 5895162 - DNA, 25 bp, Homo sapien
agcgttcaataaaatgagaacattt

SEQ ID NO: 5895163 - DNA, 25 bp, Homo sapien
taaagataaactggcttacttcaaa

SEQ ID NO: 5895164 - DNA, 25 bp, Homo sapien
taagaaaatatttggagatggcagt

SEQ ID NO: 5895165 - DNA, 25 bp, Homo sapien
tgacttaaaaaacagtggtagagag

SEQ ID NO: 5895166 - DNA, 25 bp, Homo sapien
tacacatcacattttacaacctttt

SEQ ID NO: 5895167 - DNA, 25 bp, Homo sapien
acaatatcattctaaagataaactg

SEQ ID NO: 5895168 - DNA, 25 bp, Homo sapien
tggcagttgtgcatttacaatgctt

SEQ ID NO: 5895169 - DNA, 25 bp, Homo sapien
ataaactatttagaatagtgttgga

SEQ ID NO: 5895170 - DNA, 25 bp, Homo sapien
caatctatgactgaactagcaatat

SEQ ID NO: 5895171 - DNA, 25 bp, Homo sapien
aaaaaacagtggtagagagacacaa

SEQ ID NO: 5895172 - DNA, 25 bp, Homo sapien
ttcaaacctgtatcaaaagggtcgg

SEQ ID NO: 5895173 - DNA, 25 bp, Homo sapien
cattcatcctcagacacatttccaa

SEQ ID NO: 5895174 - DNA, 25 bp, Homo sapien
tccttatagaggcgtttttagcctg

SEQ ID NO: 5895175 - DNA, 25 bp, Homo sapien
tacatttgatcggaatggttatatt

SEQ ID NO: 5895176 - DNA, 25 bp, Homo sapien
tctaaaaacagtcttataagaaaat

SEQ ID NO: 5895177 - DNA, 25 bp, Homo sapien
gaaaattttattcagtgaactcttt

SEQ ID NO: 5895178 - DNA, 25 bp, Homo sapien
catacacatcacattttacaacctt

SEQ ID NO: 5895179 - DNA, 25 bp, Homo sapien
taaatgtcagaatacttctcaagtc

SEQ ID NO: 5895180 - DNA, 25 bp, Homo sapien
cccacaccagttaggaaagagatac

SEQ ID NO: 5895181 - DNA, 25 bp, Homo sapien
gtgtggaatgacagtaacaaggcta

SEQ ID NO: 5895182 - DNA, 25 bp, Homo sapien
cagtgaactcttttagcctagaaat

SEQ ID NO: 5895183 - DNA, 25 bp, Homo sapien
ctcttggcatccaagatccttagta

SEQ ID NO: 5895184 - DNA, 25 bp, Homo sapien
tatctgtgaagccatataaatgtca

SEQ ID NO: 5895185 - DNA, 25 bp, Homo sapien
actccaatctatgactgaactagca

SEQ ID NO: 5895186 - DNA, 25 bp, Homo sapien
aacatttccattcatcctcagacac

SEQ ID NO: 5895187 - DNA, 25 bp, Homo sapien
atcactcctaagcccacaccagtta

SEQ ID NO: 5895188 - DNA, 25 bp, Homo sapien
aatgagaacatttccattcatcctc

SEQ ID NO: 5895189 - DNA, 25 bp, Homo sapien
atctcttggcatccaagatccttag

SEQ ID NO: 5895190 - DNA, 25 bp, Homo sapien
gatggcagttgtgcatttacaatgc

SEQ ID NO: 5895191 - DNA, 25 bp, Homo sapien
acaaggctatgtaattagactccat

SEQ ID NO: 5895192 - DNA, 25 bp, Homo sapien
ttgtatcttttcctgatgaaaatgc

SEQ ID NO: 5895193 - DNA, 25 bp, Homo sapien
taaaaacagtcttataagaaaatat

SEQ ID NO: 5895194 - DNA, 25 bp, Homo sapien
gacatatacctattttaaaaagtac

SEQ ID NO: 5895195 - DNA, 25 bp, Homo sapien
tgcttacaaacattctaggatcata

SEQ ID NO: 5895196 - DNA, 25 bp, Homo sapien
gtaattagactccataaatacattt

SEQ ID NO: 5895197 - DNA, 25 bp, Homo sapien
aaatatctcttggcatccaagatcc

SEQ ID NO: 5895198 - DNA, 25 bp, Homo sapien
taggaattttgattggaaaatttta

SEQ ID NO: 5895199 - DNA, 25 bp, Homo sapien
atacagtatatacacatacacatca

SEQ ID NO: 5895200 - DNA, 25 bp, Homo sapien
agtatatacacatacacatcacatt

SEQ ID NO: 5895201 - DNA, 25 bp, Homo sapien
cttttcctgatgaaaatgcacgacc

SEQ ID NO: 5895202 - DNA, 25 bp, Homo sapien
tatatacacatacacatcacatttt

SEQ ID NO: 5895203 - DNA, 25 bp, Homo sapien
ttcaaaattcttgtcctacttttcc

SEQ ID NO: 5895204 - DNA, 25 bp, Homo sapien
aaaatgagaacatttccattcatcc

SEQ ID NO: 5895205 - DNA, 25 bp, Homo sapien
aatacatttgatcggaatggttata

SEQ ID NO: 5895206 - DNA, 25 bp, Homo sapien
cgtttttagcctgtgtggaatgaca

SEQ ID NO: 5895207 - DNA, 25 bp, Homo sapien
tctgtgaagccatataaatgtcaga

SEQ ID NO: 5895208 - DNA, 25 bp, Homo sapien
ttatatttaaagccaatttcacaat

SEQ ID NO: 5895209 - DNA, 25 bp, Homo sapien
atagtgttggacatacacttacatt

SEQ ID NO: 5895210 - DNA, 25 bp, Homo sapien
tacacatacacatcacattttacaa

SEQ ID NO: 5895211 - DNA, 25 bp, Homo sapien
acataggaatgcctagactactgga

SEQ ID NO: 5895212 - DNA, 25 bp, Homo sapien
tataggaattttgattggaaaattt

SEQ ID NO: 5895213 - DNA, 25 bp, Homo sapien
cttacttcaaaattcttgtcctact

SEQ ID NO: 5895214 - DNA, 25 bp, Homo sapien
aactggcttacttcaaaattcttgt

SEQ ID NO: 5895215 - DNA, 25 bp, Homo sapien
ttcaaattcaaacctgtatcaaaag

SEQ ID NO: 5895216 - DNA, 25 bp, Homo sapien
ttgttcttagcgttcaataaaatga

SEQ ID NO: 5895217 - DNA, 25 bp, Homo sapien
tgttgttcttagcgttcaataaaat

SEQ ID NO: 5895218 - DNA, 25 bp, Homo sapien
tatccttatagaggcgtttttagcc

SEQ ID NO: 5895219 - DNA, 25 bp, Homo sapien
attttaaaaagtacacatacagtat

SEQ ID NO: 5895220 - DNA, 25 bp, Homo sapien
aatatcattctaaagataaactggc

SEQ ID NO: 5895221 - DNA, 25 bp, Homo sapien
aaactatttagaatagtgttggaca

SEQ ID NO: 5895222 - DNA, 25 bp, Homo sapien
ttaaaaaacagtggtagagagacac

SEQ ID NO: 5895223 - DNA, 25 bp, Homo sapien
ctgtgtggaatgacagtaacaaggc

SEQ ID NO: 5895224 - DNA, 25 bp, Homo sapien
tcttttagcctagaaattgagtaaa

SEQ ID NO: 5895225 - DNA, 25 bp, Homo sapien
aagccatataaatgtcagaatactt

SEQ ID NO: 5895226 - DNA, 25 bp, Homo sapien
tttccattcatcctcagacacattt

SEQ ID NO: 5895227 - DNA, 25 bp, Homo sapien
ctcaaagatgatcccaaacgctcgt

SEQ ID NO: 5895228 - DNA, 25 bp, Homo sapien
atttccaaatgttatacacatcttg

SEQ ID NO: 5895229 - DNA, 25 bp, Homo sapien
atgtaattagactccataaatacat

SEQ ID NO: 5895230 - DNA, 25 bp, Homo sapien
gaatgcctagactactggaaaataa

SEQ ID NO: 5895231 - DNA, 25 bp, Homo sapien
aatttcacaatatcattctaaagat

SEQ ID NO: 5895232 - DNA, 25 bp, Homo sapien
tttggagatggcagttgtgcattta

SEQ ID NO: 5895233 - DNA, 25 bp, Homo sapien
tcttgtatcttttcctgatgaaaat

SEQ ID NO: 5895234 - DNA, 25 bp, Homo sapien
tgttctcccaacacatctgaaaata

SEQ ID NO: 5895235 - DNA, 25 bp, Homo sapien
aaataagagagcttccaacttgccc

SEQ ID NO: 5895236 - DNA, 25 bp, Homo sapien
tagaaccaagaacatttcagtagaa

SEQ ID NO: 5895237 - DNA, 25 bp, Homo sapien
aggaaagatacaggacaagccacag

SEQ ID NO: 5895238 - DNA, 25 bp, Homo sapien
atgtaaaggtttgcggttaatagaa

SEQ ID NO: 5895239 - DNA, 25 bp, Homo sapien
ccaagacagtatcgccagctttagc

SEQ ID NO: 5895240 - DNA, 25 bp, Homo sapien
atcgccagctttagcaactgtaacc

SEQ ID NO: 5895241 - DNA, 25 bp, Homo sapien
catggtgacccctccgcttggccag

SEQ ID NO: 5895242 - DNA, 25 bp, Homo sapien
cctaagcatccactgtgccttcagt

SEQ ID NO: 5895243 - DNA, 25 bp, Homo sapien
ctggccagtccctattactgttaag

SEQ ID NO: 5895244 - DNA, 25 bp, Homo sapien
tagagacctcatcctggatgctgag

SEQ ID NO: 5895245 - DNA, 25 bp, Homo sapien
tcagccgctgtagaaccaagaacat

SEQ ID NO: 5895246 - DNA, 25 bp, Homo sapien
acgtcctcatctccctaggactcaa

SEQ ID NO: 5895247 - DNA, 25 bp, Homo sapien
actcatgttggctttagtataggaa

SEQ ID NO: 5895248 - DNA, 25 bp, Homo sapien
gtggatgtaaaggtttgcggttaat

SEQ ID NO: 5895249 - DNA, 25 bp, Homo sapien
catagagtctggaaatgttacatca

SEQ ID NO: 5895250 - DNA, 25 bp, Homo sapien
atgacccatggcgtgcccacccacc

SEQ ID NO: 5895251 - DNA, 25 bp, Homo sapien
tagtataggaagtcagaccgaccag

SEQ ID NO: 5895252 - DNA, 25 bp, Homo sapien
tgattcaaaagacaacatgcttaga

SEQ ID NO: 5895253 - DNA, 25 bp, Homo sapien
ctcccaacacatctgaaaataagag

SEQ ID NO: 5895254 - DNA, 25 bp, Homo sapien
acaggttgttctcccaacacatctg

SEQ ID NO: 5895255 - DNA, 25 bp, Homo sapien
acactgttggatgtcacaagatgct

SEQ ID NO: 5895256 - DNA, 25 bp, Homo sapien
acttgtaactgcacttgatacatac

SEQ ID NO: 5895257 - DNA, 25 bp, Homo sapien
acaagccacagcccctcaaagcatc

SEQ ID NO: 5895258 - DNA, 25 bp, Homo sapien
ccgctgtagaaccaagaacatttca

SEQ ID NO: 5895259 - DNA, 25 bp, Homo sapien
tccactgtgccttcagttccgggaa

SEQ ID NO: 5895260 - DNA, 25 bp, Homo sapien
agatgctaaaaggctcagccgctgt

SEQ ID NO: 5895261 - DNA, 25 bp, Homo sapien
caaaccatctctaagcctccgatga

SEQ ID NO: 5895262 - DNA, 25 bp, Homo sapien
cagccatggtgacccctccgcttgg

SEQ ID NO: 5895263 - DNA, 25 bp, Homo sapien
ctgcatctttctggataatagagac

SEQ ID NO: 5895264 - DNA, 25 bp, Homo sapien
ttatgatcgatgattcaaaagacaa

SEQ ID NO: 5895265 - DNA, 25 bp, Homo sapien
aaagccaagacagtatcgccagctt

SEQ ID NO: 5895266 - DNA, 25 bp, Homo sapien
agaacatttcagtagaagtgactca

SEQ ID NO: 5895267 - DNA, 25 bp, Homo sapien
cataaatgttatgatcgatgattca

SEQ ID NO: 5895268 - DNA, 25 bp, Homo sapien
gtcctcatctccctaggactcaagc

SEQ ID NO: 5895269 - DNA, 25 bp, Homo sapien
aaaggtttgcggttaatagaagata

SEQ ID NO: 5895270 - DNA, 25 bp, Homo sapien
ttccagtcttcgtgacacggggact

SEQ ID NO: 5895271 - DNA, 25 bp, Homo sapien
caaagcatctgcctttggaaaacta

SEQ ID NO: 5895272 - DNA, 25 bp, Homo sapien
gccacagcccctcaaagcatctgcc

SEQ ID NO: 5895273 - DNA, 25 bp, Homo sapien
agaggcatgggtccttttgcagttg

SEQ ID NO: 5895274 - DNA, 25 bp, Homo sapien
aagacaacatgcttagaaaatggag

SEQ ID NO: 5895275 - DNA, 25 bp, Homo sapien
ggagggatcttcattgttgttatga

SEQ ID NO: 5895276 - DNA, 25 bp, Homo sapien
gtataatcttaactgcttttatggg

SEQ ID NO: 5895277 - DNA, 25 bp, Homo sapien
gctcagccgctgtagaaccaagaac

SEQ ID NO: 5895278 - DNA, 25 bp, Homo sapien
ataatagagacctcatcctggatgc

SEQ ID NO: 5895279 - DNA, 25 bp, Homo sapien
tagaagtgactcatgttggctttag

SEQ ID NO: 5895280 - DNA, 25 bp, Homo sapien
ttaacataaatgttatgatcgatga

SEQ ID NO: 5895281 - DNA, 25 bp, Homo sapien
gatgattcaaaagacaacatgctta

SEQ ID NO: 5895282 - DNA, 25 bp, Homo sapien
aaaaataatcttgtataatcttaac

SEQ ID NO: 5895283 - DNA, 25 bp, Homo sapien
taaatgttatgatcgatgattcaaa

SEQ ID NO: 5895284 - DNA, 25 bp, Homo sapien
ggggactcagtgttgctgggacaga

SEQ ID NO: 5895285 - DNA, 25 bp, Homo sapien
ccctcaaagcatctgcctttggaaa

SEQ ID NO: 5895286 - DNA, 25 bp, Homo sapien
ataagagagcttccaacttgccctg

SEQ ID NO: 5895287 - DNA, 25 bp, Homo sapien
cctccgcttggccagcagtaccaaa

SEQ ID NO: 5895288 - DNA, 25 bp, Homo sapien
aatagaagatatttccagtcttcgt

SEQ ID NO: 5895289 - DNA, 25 bp, Homo sapien
acggggactcagtgttgctgggaca

SEQ ID NO: 5895290 - DNA, 25 bp, Homo sapien
tttttacaagtctccaaaccatctc

SEQ ID NO: 5895291 - DNA, 25 bp, Homo sapien
agtctccaaaccatctctaagcctc

SEQ ID NO: 5895292 - DNA, 25 bp, Homo sapien
tgacacggggactcagtgttgctgg

SEQ ID NO: 5895293 - DNA, 25 bp, Homo sapien
acacggggactcagtgttgctggga

SEQ ID NO: 5895294 - DNA, 25 bp, Homo sapien
gttccccatcctcttcctgtggagg

SEQ ID NO: 5895295 - DNA, 25 bp, Homo sapien
ctaagcctccgatgagttgaggagc

SEQ ID NO: 5895296 - DNA, 25 bp, Homo sapien
atgctaaaaggctcagccgctgtag

SEQ ID NO: 5895297 - DNA, 25 bp, Homo sapien
ggactcagtgttgctgggacagagc

SEQ ID NO: 5895298 - DNA, 25 bp, Homo sapien
gaaccaagaacatttcagtagaagt

SEQ ID NO: 5895299 - DNA, 25 bp, Homo sapien
tggctttagtataggaagtcagacc

SEQ ID NO: 5895300 - DNA, 25 bp, Homo sapien
ctggataatagagacctcatcctgg

SEQ ID NO: 5895301 - DNA, 25 bp, Homo sapien
ttactgttaagaggcatagagtctg

SEQ ID NO: 5895302 - DNA, 25 bp, Homo sapien
actgttggatgtcacaagatgctaa

SEQ ID NO: 5895303 - DNA, 25 bp, Homo sapien
cccatggcgtgcccacccaccccac

SEQ ID NO: 5895304 - DNA, 25 bp, Homo sapien
gtctggaaatgttacatcacagagg

SEQ ID NO: 5895305 - DNA, 25 bp, Homo sapien
atgtcacaagatgctaaaaggctca

SEQ ID NO: 5895306 - DNA, 25 bp, Homo sapien
gcatgggtccttttgcagttgccaa

SEQ ID NO: 5895307 - DNA, 25 bp, Homo sapien
aaggtctcgccctaaagagctaaac

SEQ ID NO: 5895308 - DNA, 25 bp, Homo sapien
ctcaagccctcagatcagctgcatc

SEQ ID NO: 5895309 - DNA, 25 bp, Homo sapien
ccctcagatcagctgcatctttctg

SEQ ID NO: 5895310 - DNA, 25 bp, Homo sapien
tccctattactgttaagaggcatag

SEQ ID NO: 5895311 - DNA, 25 bp, Homo sapien
gaagatatttccagtcttcgtgaca

SEQ ID NO: 5895312 - DNA, 25 bp, Homo sapien
catcctcttcctgtggaggaagatg

SEQ ID NO: 5895313 - DNA, 25 bp, Homo sapien
tgttggatgtcacaagatgctaaaa

SEQ ID NO: 5895314 - DNA, 25 bp, Homo sapien
gacccatggcgtgcccacccacccc

SEQ ID NO: 5895315 - DNA, 25 bp, Homo sapien
cctgccttctgcttctcaggacaga

SEQ ID NO: 5895316 - DNA, 25 bp, Homo sapien
gctaaacagaacaggttgttctccc

SEQ ID NO: 5895317 - DNA, 25 bp, Homo sapien
gcttagaaaatggagcaaagccaag

SEQ ID NO: 5895318 - DNA, 25 bp, Homo sapien
cagcccctcaaagcatctgcctttg

SEQ ID NO: 5895319 - DNA, 25 bp, Homo sapien
ttctgcttctcaggacagacaggga

SEQ ID NO: 5895320 - DNA, 25 bp, Homo sapien
gaacactgttggatgtcacaagatg

SEQ ID NO: 5895321 - DNA, 25 bp, Homo sapien
caagaacatttcagtagaagtgact

SEQ ID NO: 5895322 - DNA, 25 bp, Homo sapien
cacctgccttctgcttctcaggaca

SEQ ID NO: 5895323 - DNA, 25 bp, Homo sapien
gctttagtataggaagtcagaccga

SEQ ID NO: 5895324 - DNA, 25 bp, Homo sapien
gcatctgcctttggaaaactaaatt

SEQ ID NO: 5895325 - DNA, 25 bp, Homo sapien
ccttttgcagttgccaacttgtaac

SEQ ID NO: 5895326 - DNA, 25 bp, Homo sapien
gtgccttcagttccgggaagacact

SEQ ID NO: 5895327 - DNA, 25 bp, Homo sapien
ctcttcctgtggaggaagatgaccc

SEQ ID NO: 5895328 - DNA, 25 bp, Homo sapien
agctgcatctttctggataatagag

SEQ ID NO: 5895329 - DNA, 25 bp, Homo sapien
ctcagatcagctgcatctttctgga

SEQ ID NO: 5895330 - DNA, 25 bp, Homo sapien
atttctggaaggtctcgccctaaag

SEQ ID NO: 5895331 - DNA, 25 bp, Homo sapien
cagaacaggttgttctcccaacaca

SEQ ID NO: 5895332 - DNA, 25 bp, Homo sapien
tggggtggatgtaaaggtttgcggt

SEQ ID NO: 5895333 - DNA, 25 bp, Homo sapien
ctgtgccttcagttccgggaagaca

SEQ ID NO: 5895334 - DNA, 25 bp, Homo sapien
attgttgttatgaagaagatttctg

SEQ ID NO: 5895335 - DNA, 25 bp, Homo sapien
cttgttagccattggcttcgtcgga

SEQ ID NO: 5895336 - DNA, 25 bp, Homo sapien
tggccagcagtaccaaaggaaagat

SEQ ID NO: 5895337 - DNA, 25 bp, Homo sapien
ttctggaaggtctcgccctaaagag

SEQ ID NO: 5895338 - DNA, 25 bp, Homo sapien
aacatttcagtagaagtgactcatg

SEQ ID NO: 5895339 - DNA, 25 bp, Homo sapien
aggactcaagccctcagatcagctg

SEQ ID NO: 5895340 - DNA, 25 bp, Homo sapien
gatcgatgattcaaaagacaacatg

SEQ ID NO: 5895341 - DNA, 25 bp, Homo sapien
aaccatctctaagcctccgatgagt

SEQ ID NO: 5895342 - DNA, 25 bp, Homo sapien
ggatgtcacaagatgctaaaaggct

SEQ ID NO: 5895343 - DNA, 25 bp, Homo sapien
ttagccattggcttcgtcggaggga

SEQ ID NO: 5895344 - DNA, 25 bp, Homo sapien
aggcatgggtccttttgcagttgcc

SEQ ID NO: 5895345 - DNA, 25 bp, Homo sapien
agttgccaacttgtaactgcacttg

SEQ ID NO: 5895346 - DNA, 25 bp, Homo sapien
ctcaggacagacagggaaagcaaaa

SEQ ID NO: 5895347 - DNA, 25 bp, Homo sapien
tgccttctgcttctcaggacagaca

SEQ ID NO: 5895348 - DNA, 25 bp, Homo sapien
tcctgtggaggaagatgacccatgg

SEQ ID NO: 5895349 - DNA, 25 bp, Homo sapien
gcggttaatagaagatatttccagt

SEQ ID NO: 5895350 - DNA, 25 bp, Homo sapien
agtcttcgtgacacggggactcagt

SEQ ID NO: 5895351 - DNA, 25 bp, Homo sapien
tagaagatatttccagtcttcgtga

SEQ ID NO: 5895352 - DNA, 25 bp, Homo sapien
attggcttcgtcggagggatcttca

SEQ ID NO: 5895353 - DNA, 25 bp, Homo sapien
tcatcctggatgctgagaacactgt

SEQ ID NO: 5895354 - DNA, 25 bp, Homo sapien
tgtagaaccaagaacatttcagtag

SEQ ID NO: 5895355 - DNA, 25 bp, Homo sapien
aagacagtatcgccagctttagcaa

SEQ ID NO: 5895356 - DNA, 25 bp, Homo sapien
agatatttccagtcttcgtgacacg

SEQ ID NO: 5895357 - DNA, 25 bp, Homo sapien
gaagtcagaccgaccagtttctaac

SEQ ID NO: 5895358 - DNA, 25 bp, Homo sapien
taaccatgggttcaccctggccagt

SEQ ID NO: 5895359 - DNA, 25 bp, Homo sapien
gttgttctcccaacacatctgaaaa

SEQ ID NO: 5895360 - DNA, 25 bp, Homo sapien
ccacccaccccacccacagccatgg

SEQ ID NO: 5895361 - DNA, 25 bp, Homo sapien
ttcgtgacacggggactcagtgttg

SEQ ID NO: 5895362 - DNA, 25 bp, Homo sapien
gccctaaagagctaaacagaacagg

SEQ ID NO: 5895363 - DNA, 25 bp, Homo sapien
ccaaaggaaagatacaggacaagcc

SEQ ID NO: 5895364 - DNA, 25 bp, Homo sapien
gtcctaagcatccactgtgccttca

SEQ ID NO: 5895365 - DNA, 25 bp, Homo sapien
agacagggaaagcaaaaataatctt

SEQ ID NO: 5895366 - DNA, 25 bp, Homo sapien
gcttctcaggacagacagggaaagc

SEQ ID NO: 5895367 - DNA, 25 bp, Homo sapien
cttcagttccgggaagacactgctt

SEQ ID NO: 5895368 - DNA, 25 bp, Homo sapien
gcttcgtcggagggatcttcattgt

SEQ ID NO: 5895369 - DNA, 25 bp, Homo sapien
gatcagctgcatctttctggataat

SEQ ID NO: 5895370 - DNA, 25 bp, Homo sapien
ctgcttctcaggacagacagggaaa

SEQ ID NO: 5895371 - DNA, 25 bp, Homo sapien
cacagccatggtgacccctccgctt

SEQ ID NO: 5895372 - DNA, 25 bp, Homo sapien
gcctccgatgagttgaggagccacg

SEQ ID NO: 5895373 - DNA, 25 bp, Homo sapien
accccacccacagccatggtgaccc

SEQ ID NO: 5895374 - DNA, 25 bp, Homo sapien
gtatcgccagctttagcaactgtaa

SEQ ID NO: 5895375 - DNA, 25 bp, Homo sapien
gaaaataagagagcttccaacttgc

SEQ ID NO: 5895376 - DNA, 25 bp, Homo sapien
tccaaaccatctctaagcctccgat

SEQ ID NO: 5895377 - DNA, 25 bp, Homo sapien
agctttagcaactgtaaccatgggt

SEQ ID NO: 5895378 - DNA, 25 bp, Homo sapien
aatcttaactgcttttatggggtgg

SEQ ID NO: 5895379 - DNA, 25 bp, Homo sapien
ctaacacctgccttctgcttctcag

SEQ ID NO: 5895380 - DNA, 25 bp, Homo sapien
tggagcaaagccaagacagtatcgc

SEQ ID NO: 5895381 - DNA, 25 bp, Homo sapien
atctttctggataatagagacctca

SEQ ID NO: 5895382 - DNA, 25 bp, Homo sapien
cctcatcctggatgctgagaacact

SEQ ID NO: 5895383 - DNA, 25 bp, Homo sapien
aaaagacaacatgcttagaaaatgg

SEQ ID NO: 5895384 - DNA, 25 bp, Homo sapien
gccatggtgacccctccgcttggcc

SEQ ID NO: 5895385 - DNA, 25 bp, Homo sapien
agtccctattactgttaagaggcat

SEQ ID NO: 5895386 - DNA, 25 bp, Homo sapien
tcggagggatcttcattgttgttat

SEQ ID NO: 5895387 - DNA, 25 bp, Homo sapien
ggaggaagatgacccatggcgtgcc

SEQ ID NO: 5895388 - DNA, 25 bp, Homo sapien
actcagtgttgctgggacagagctg

SEQ ID NO: 5895389 - DNA, 25 bp, Homo sapien
gcacttgatacatacacattccagc

SEQ ID NO: 5895390 - DNA, 25 bp, Homo sapien
tatggggtggatgtaaaggtttgcg

SEQ ID NO: 5895391 - DNA, 25 bp, Homo sapien
catgggttcaccctggccagtccct

SEQ ID NO: 5895392 - DNA, 25 bp, Homo sapien
agatgacccatggcgtgcccaccca

SEQ ID NO: 5895393 - DNA, 25 bp, Homo sapien
atttccagtcttcgtgacacgggga

SEQ ID NO: 5895394 - DNA, 25 bp, Homo sapien
accaagaacatttcagtagaagtga

SEQ ID NO: 5895395 - DNA, 25 bp, Homo sapien
tacaagtctccaaaccatctctaag

SEQ ID NO: 5895396 - DNA, 25 bp, Homo sapien
caggacaagccacagcccctcaaag

SEQ ID NO: 5895397 - DNA, 25 bp, Homo sapien
ccaccccacccacagccatggtgac

SEQ ID NO: 5895398 - DNA, 25 bp, Homo sapien
aatggagcaaagccaagacagtatc

SEQ ID NO: 5895399 - DNA, 25 bp, Homo sapien
tggcgtcttgttagccattggcttc

SEQ ID NO: 5895400 - DNA, 25 bp, Homo sapien
ccctaggactcaagccctcagatca

SEQ ID NO: 5895401 - DNA, 25 bp, Homo sapien
gttacatcacagaggcatgggtcct

SEQ ID NO: 5895402 - DNA, 25 bp, Homo sapien
cctattactgttaagaggcatagag

SEQ ID NO: 5895403 - DNA, 25 bp, Homo sapien
aggctcagccgctgtagaaccaaga

SEQ ID NO: 5895404 - DNA, 25 bp, Homo sapien
cacagcccctcaaagcatctgcctt

SEQ ID NO: 5895405 - DNA, 25 bp, Homo sapien
gatgagttgaggagccacgtcctca

SEQ ID NO: 5895406 - DNA, 25 bp, Homo sapien
tgactcatgttggctttagtatagg

SEQ ID NO: 5895407 - DNA, 25 bp, Homo sapien
ttctcaggacagacagggaaagcaa

SEQ ID NO: 5895408 - DNA, 25 bp, Homo sapien
gtccttttgcagttgccaacttgta

SEQ ID NO: 5895409 - DNA, 25 bp, Homo sapien
ccatctctaagcctccgatgagttg

SEQ ID NO: 5895410 - DNA, 25 bp, Homo sapien
cagtcctaagcatccactgtgcctt

SEQ ID NO: 5895411 - DNA, 25 bp, Homo sapien
cccagtcctaagcatccactgtgcc

SEQ ID NO: 5895412 - DNA, 25 bp, Homo sapien
aactgcttttatggggtggatgtaa

SEQ ID NO: 5895413 - DNA, 25 bp, Homo sapien
cgtcggagggatcttcattgttgtt

SEQ ID NO: 5895414 - DNA, 25 bp, Homo sapien
gttggcgtcttgttagccattggct

SEQ ID NO: 5895415 - DNA, 25 bp, Homo sapien
tcagtagaagtgactcatgttggct

SEQ ID NO: 5895416 - DNA, 25 bp, Homo sapien
cacaagatgctaaaaggctcagccg

SEQ ID NO: 5895417 - DNA, 25 bp, Homo sapien
caacacatctgaaaataagagagct

SEQ ID NO: 5895418 - DNA, 25 bp, Homo sapien
actgtaaccatgggttcaccctggc

SEQ ID NO: 5895419 - DNA, 25 bp, Homo sapien
agccattggcttcgtcggagggatc

SEQ ID NO: 5895420 - DNA, 25 bp, Homo sapien
aacataaatgttatgatcgatgatt

SEQ ID NO: 5895421 - DNA, 25 bp, Homo sapien
ccttctgcttctcaggacagacagg

SEQ ID NO: 5895422 - DNA, 25 bp, Homo sapien
gagctaaacagaacaggttgttctc

SEQ ID NO: 5895423 - DNA, 25 bp, Homo sapien
caagtctccaaaccatctctaagcc

SEQ ID NO: 5895424 - DNA, 25 bp, Homo sapien
agatttctggaaggtctcgccctaa

SEQ ID NO: 5895425 - DNA, 25 bp, Homo sapien
caggacagacagggaaagcaaaaat

SEQ ID NO: 5895426 - DNA, 25 bp, Homo sapien
actgttaagaggcatagagtctgga

SEQ ID NO: 5895427 - DNA, 25 bp, Homo sapien
ggtctcgccctaaagagctaaacag

SEQ ID NO: 5895428 - DNA, 25 bp, Homo sapien
gcaaagccaagacagtatcgccagc

SEQ ID NO: 5895429 - DNA, 25 bp, Homo sapien
ttaagaggcatagagtctggaaatg

SEQ ID NO: 5895430 - DNA, 25 bp, Homo sapien
acttgatacatacacattccagccc

SEQ ID NO: 5895431 - DNA, 25 bp, Homo sapien
gtcacaagatgctaaaaggctcagc

SEQ ID NO: 5895432 - DNA, 25 bp, Homo sapien
ccattggcttcgtcggagggatctt

SEQ ID NO: 5895433 - DNA, 25 bp, Homo sapien
ggatgtaaaggtttgcggttaatag

SEQ ID NO: 5895434 - DNA, 25 bp, Homo sapien
ctccgatgagttgaggagccacgtc

SEQ ID NO: 5895435 - DNA, 25 bp, Homo sapien
gacaacatgcttagaaaatggagca

SEQ ID NO: 5895436 - DNA, 25 bp, Homo sapien
ccctgttccccatcctcttcctgtg

SEQ ID NO: 5895437 - DNA, 25 bp, Homo sapien
ggaaggtctcgccctaaagagctaa

SEQ ID NO: 5895438 - DNA, 25 bp, Homo sapien
ggacaagccacagcccctcaaagca

SEQ ID NO: 5895439 - DNA, 25 bp, Homo sapien
agcaactgtaaccatgggttcaccc

SEQ ID NO: 5895440 - DNA, 25 bp, Homo sapien
agtagaagtgactcatgttggcttt

SEQ ID NO: 5895441 - DNA, 25 bp, Homo sapien
cattccagcccagtcctaagcatcc

SEQ ID NO: 5895442 - DNA, 25 bp, Homo sapien
ccctggccagtccctattactgtta

SEQ ID NO: 5895443 - DNA, 25 bp, Homo sapien
gtaaaggtttgcggttaatagaaga

SEQ ID NO: 5895444 - DNA, 25 bp, Homo sapien
acatctgaaaataagagagcttcca

SEQ ID NO: 5895445 - DNA, 25 bp, Homo sapien
gatacaggacaagccacagcccctc

SEQ ID NO: 5895446 - DNA, 25 bp, Homo sapien
gagcttccaacttgccctgttcccc

SEQ ID NO: 5895447 - DNA, 25 bp, Homo sapien
cttggccagcagtaccaaaggaaag

SEQ ID NO: 5895448 - DNA, 25 bp, Homo sapien
accagtttctaacacctgccttctg

SEQ ID NO: 5895449 - DNA, 25 bp, Homo sapien
attcaaaagacaacatgcttagaaa

SEQ ID NO: 5895450 - DNA, 25 bp, Homo sapien
ctgtggaggaagatgacccatggcg

SEQ ID NO: 5895451 - DNA, 25 bp, Homo sapien
tacaggacaagccacagcccctcaa

SEQ ID NO: 5895452 - DNA, 25 bp, Homo sapien
tcacagaggcatgggtccttttgca

SEQ ID NO: 5895453 - DNA, 25 bp, Homo sapien
ggaaatgttacatcacagaggcatg

SEQ ID NO: 5895454 - DNA, 25 bp, Homo sapien
tttagtataggaagtcagaccgacc

SEQ ID NO: 5895455 - DNA, 25 bp, Homo sapien
ataatcttaactgcttttatggggt

SEQ ID NO: 5895456 - DNA, 25 bp, Homo sapien
gaagtgactcatgttggctttagta

SEQ ID NO: 5895457 - DNA, 25 bp, Homo sapien
tgttagccattggcttcgtcggagg

SEQ ID NO: 5895458 - DNA, 25 bp, Homo sapien
cctggatgctgagaacactgttgga

SEQ ID NO: 5895459 - DNA, 25 bp, Homo sapien
gcagtaccaaaggaaagatacagga

SEQ ID NO: 5895460 - DNA, 25 bp, Homo sapien
gtcttgttagccattggcttcgtcg

SEQ ID NO: 5895461 - DNA, 25 bp, Homo sapien
catcacagaggcatgggtccttttg

SEQ ID NO: 5895462 - DNA, 25 bp, Homo sapien
agccgctgtagaaccaagaacattt

SEQ ID NO: 5895463 - DNA, 25 bp, Homo sapien
tttacaagtctccaaaccatctcta

SEQ ID NO: 5895464 - DNA, 25 bp, Homo sapien
taccaaaggaaagatacaggacaag

SEQ ID NO: 5895465 - DNA, 25 bp, Homo sapien
ccgatgagttgaggagccacgtcct

SEQ ID NO: 5895466 - DNA, 25 bp, Homo sapien
tcatctccctaggactcaagccctc

SEQ ID NO: 5895467 - DNA, 25 bp, Homo sapien
ccaacttgccctgttccccatcctc

SEQ ID NO: 5895468 - DNA, 25 bp, Homo sapien
cacattccagcccagtcctaagcat

SEQ ID NO: 5895469 - DNA, 25 bp, Homo sapien
gccagcagtaccaaaggaaagatac

SEQ ID NO: 5895470 - DNA, 25 bp, Homo sapien
aatcttgtataatcttaactgcttt

SEQ ID NO: 5895471 - DNA, 25 bp, Homo sapien
tcagctgcatctttctggataatag

SEQ ID NO: 5895472 - DNA, 25 bp, Homo sapien
aagcatctgcctttggaaaactaaa

SEQ ID NO: 5895473 - DNA, 25 bp, Homo sapien
catttcagtagaagtgactcatgtt

SEQ ID NO: 5895474 - DNA, 25 bp, Homo sapien
ttccagcccagtcctaagcatccac

SEQ ID NO: 5895475 - DNA, 25 bp, Homo sapien
ttgatacatacacattccagcccag

SEQ ID NO: 5895476 - DNA, 25 bp, Homo sapien
aacttgccctgttccccatcctctt

SEQ ID NO: 5895477 - DNA, 25 bp, Homo sapien
ataatcttgtataatcttaactgct

SEQ ID NO: 5895478 - DNA, 25 bp, Homo sapien
accatgggttcaccctggccagtcc

SEQ ID NO: 5895479 - DNA, 25 bp, Homo sapien
tcagaccgaccagtttctaacacct

SEQ ID NO: 5895480 - DNA, 25 bp, Homo sapien
tatgaagaagatttctggaaggtct

SEQ ID NO: 5895481 - DNA, 25 bp, Homo sapien
gacctcatcctggatgctgagaaca

SEQ ID NO: 5895482 - DNA, 25 bp, Homo sapien
ttgaggagccacgtcctcatctccc

SEQ ID NO: 5895483 - DNA, 25 bp, Homo sapien
cagtttctaacacctgccttctgct

SEQ ID NO: 5895484 - DNA, 25 bp, Homo sapien
tgccctgttccccatcctcttcctg

SEQ ID NO: 5895485 - DNA, 25 bp, Homo sapien
ctttctggataatagagacctcatc

SEQ ID NO: 5895486 - DNA, 25 bp, Homo sapien
ccagcccagtcctaagcatccactg

SEQ ID NO: 5895487 - DNA, 25 bp, Homo sapien
ttgtaactgcacttgatacatacac

SEQ ID NO: 5895488 - DNA, 25 bp, Homo sapien
aagatacaggacaagccacagcccc

SEQ ID NO: 5895489 - DNA, 25 bp, Homo sapien
gccttcagttccgggaagacactgc

SEQ ID NO: 5895490 - DNA, 25 bp, Homo sapien
aagcaaaaataatcttgtataatct

SEQ ID NO: 5895491 - DNA, 25 bp, Homo sapien
atctgaaaataagagagcttccaac

SEQ ID NO: 5895492 - DNA, 25 bp, Homo sapien
agggatcttcattgttgttatgaag

SEQ ID NO: 5895493 - DNA, 25 bp, Homo sapien
tgaagaagatttctggaaggtctcg

SEQ ID NO: 5895494 - DNA, 25 bp, Homo sapien
ttgcagttgccaacttgtaactgca

SEQ ID NO: 5895495 - DNA, 25 bp, Homo sapien
cctcatctccctaggactcaagccc

SEQ ID NO: 5895496 - DNA, 25 bp, Homo sapien
cagtatcgccagctttagcaactgt

SEQ ID NO: 5895497 - DNA, 25 bp, Homo sapien
gggtggatgtaaaggtttgcggtta

SEQ ID NO: 5895498 - DNA, 25 bp, Homo sapien
tgggttcaccctggccagtccctat

SEQ ID NO: 5895499 - DNA, 25 bp, Homo sapien
ataggaagtcagaccgaccagtttc

SEQ ID NO: 5895500 - DNA, 25 bp, Homo sapien
caacatgcttagaaaatggagcaaa

SEQ ID NO: 5895501 - DNA, 25 bp, Homo sapien
ttaactgcttttatggggtggatgt

SEQ ID NO: 5895502 - DNA, 25 bp, Homo sapien
aaaggaaagatacaggacaagccac

SEQ ID NO: 5895503 - DNA, 25 bp, Homo sapien
ggataatagagacctcatcctggat

SEQ ID NO: 5895504 - DNA, 25 bp, Homo sapien
ctgaaaataagagagcttccaactt

SEQ ID NO: 5895505 - DNA, 25 bp, Homo sapien
tgttatgatcgatgattcaaaagac

SEQ ID NO: 5895506 - DNA, 25 bp, Homo sapien
ggagccacgtcctcatctccctagg

SEQ ID NO: 5895507 - DNA, 25 bp, Homo sapien
tagagtctggaaatgttacatcaca

SEQ ID NO: 5895508 - DNA, 25 bp, Homo sapien
tctccaaaccatctctaagcctccg

SEQ ID NO: 5895509 - DNA, 25 bp, Homo sapien
gtaactgcacttgatacatacacat

SEQ ID NO: 5895510 - DNA, 25 bp, Homo sapien
ctgttccccatcctcttcctgtgga

SEQ ID NO: 5895511 - DNA, 25 bp, Homo sapien
ttctcccaacacatctgaaaataag

SEQ ID NO: 5895512 - DNA, 25 bp, Homo sapien
tggcttcgtcggagggatcttcatt

SEQ ID NO: 5895513 - DNA, 25 bp, Homo sapien
catggcgtgcccacccaccccaccc

SEQ ID NO: 5895514 - DNA, 25 bp, Homo sapien
catacacattccagcccagtcctaa

SEQ ID NO: 5895515 - DNA, 25 bp, Homo sapien
ttgcggttaatagaagatatttcca

SEQ ID NO: 5895516 - DNA, 25 bp, Homo sapien
gctgtagaaccaagaacatttcagt

SEQ ID NO: 5895517 - DNA, 25 bp, Homo sapien
ctttagcaactgtaaccatgggttc

SEQ ID NO: 5895518 - DNA, 25 bp, Homo sapien
tctcgccctaaagagctaaacagaa

SEQ ID NO: 5895519 - DNA, 25 bp, Homo sapien
acccaccccacccacagccatggtg

SEQ ID NO: 5895520 - DNA, 25 bp, Homo sapien
taaaaggctcagccgctgtagaacc

SEQ ID NO: 5895521 - DNA, 25 bp, Homo sapien
agcccagtcctaagcatccactgtg

SEQ ID NO: 5895522 - DNA, 25 bp, Homo sapien
ttgttatgaagaagatttctggaag

SEQ ID NO: 5895523 - DNA, 25 bp, Homo sapien
ttaatagaagatatttccagtcttc

SEQ ID NO: 5895524 - DNA, 25 bp, Homo sapien
cccacccacagccatggtgacccct

SEQ ID NO: 5895525 - DNA, 25 bp, Homo sapien
tcttcgtgacacggggactcagtgt

SEQ ID NO: 5895526 - DNA, 25 bp, Homo sapien
ttagcaactgtaaccatgggttcac

SEQ ID NO: 5895527 - DNA, 25 bp, Homo sapien
gctaaaaggctcagccgctgtagaa

SEQ ID NO: 5895528 - DNA, 25 bp, Homo sapien
atcctggatgctgagaacactgttg

SEQ ID NO: 5895529 - DNA, 25 bp, Homo sapien
agttgaggagccacgtcctcatctc

SEQ ID NO: 5895530 - DNA, 25 bp, Homo sapien
ttagaaaatggagcaaagccaagac

SEQ ID NO: 5895531 - DNA, 25 bp, Homo sapien
ggatcttcattgttgttatgaagaa

SEQ ID NO: 5895532 - DNA, 25 bp, Homo sapien
acatgcttagaaaatggagcaaagc

SEQ ID NO: 5895533 - DNA, 25 bp, Homo sapien
tttcagtagaagtgactcatgttgg

SEQ ID NO: 5895534 - DNA, 25 bp, Homo sapien
tccgcttggccagcagtaccaaagg

SEQ ID NO: 5895535 - DNA, 25 bp, Homo sapien
gagtctggaaatgttacatcacaga

SEQ ID NO: 5895536 - DNA, 25 bp, Homo sapien
caagatgctaaaaggctcagccgct

SEQ ID NO: 5895537 - DNA, 25 bp, Homo sapien
atgatcgatgattcaaaagacaaca

SEQ ID NO: 5895538 - DNA, 25 bp, Homo sapien
acagacagggaaagcaaaaataatc

SEQ ID NO: 5895539 - DNA, 25 bp, Homo sapien
tcattgttgttatgaagaagatttc

SEQ ID NO: 5895540 - DNA, 25 bp, Homo sapien
catccactgtgccttcagttccggg

SEQ ID NO: 5895541 - DNA, 25 bp, Homo sapien
atgcttagaaaatggagcaaagcca

SEQ ID NO: 5895542 - DNA, 25 bp, Homo sapien
ttcaccctggccagtccctattact

SEQ ID NO: 5895543 - DNA, 25 bp, Homo sapien
gcccacccaccccacccacagccat

SEQ ID NO: 5895544 - DNA, 25 bp, Homo sapien
gactcaagccctcagatcagctgca

SEQ ID NO: 5895545 - DNA, 25 bp, Homo sapien
tcgccctaaagagctaaacagaaca

SEQ ID NO: 5895546 - DNA, 25 bp, Homo sapien
gagaacactgttggatgtcacaaga

SEQ ID NO: 5895547 - DNA, 25 bp, Homo sapien
tttttttacaagtctccaaaccatc

SEQ ID NO: 5895548 - DNA, 25 bp, Homo sapien
gttatgaagaagatttctggaaggt

SEQ ID NO: 5895549 - DNA, 25 bp, Homo sapien
gtgcccacccaccccacccacagcc

SEQ ID NO: 5895550 - DNA, 25 bp, Homo sapien
aaataatcttgtataatcttaactg

SEQ ID NO: 5895551 - DNA, 25 bp, Homo sapien
cccatcctcttcctgtggaggaaga

SEQ ID NO: 5895552 - DNA, 25 bp, Homo sapien
caccctggccagtccctattactgt

SEQ ID NO: 5895553 - DNA, 25 bp, Homo sapien
agtcagaccgaccagtttctaacac

SEQ ID NO: 5895554 - DNA, 25 bp, Homo sapien
gtataggaagtcagaccgaccagtt

SEQ ID NO: 5895555 - DNA, 25 bp, Homo sapien
gtgacccctccgcttggccagcagt

SEQ ID NO: 5895556 - DNA, 25 bp, Homo sapien
taaagagctaaacagaacaggttgt

SEQ ID NO: 5895557 - DNA, 25 bp, Homo sapien
ctaggactcaagccctcagatcagc

SEQ ID NO: 5895558 - DNA, 25 bp, Homo sapien
catagttggcgtcttgttagccatt

SEQ ID NO: 5895559 - DNA, 25 bp, Homo sapien
tgctgagaacactgttggatgtcac

SEQ ID NO: 5895560 - DNA, 25 bp, Homo sapien
gttggctttagtataggaagtcaga

SEQ ID NO: 5895561 - DNA, 25 bp, Homo sapien
tcagtgttgctgggacagagctgta

SEQ ID NO: 5895562 - DNA, 25 bp, Homo sapien
agaaaatggagcaaagccaagacag

SEQ ID NO: 5895563 - DNA, 25 bp, Homo sapien
tggcgtgcccacccaccccacccac

SEQ ID NO: 5895564 - DNA, 25 bp, Homo sapien
ggccagtccctattactgttaagag

SEQ ID NO: 5895565 - DNA, 25 bp, Homo sapien
cacccacagccatggtgacccctcc

SEQ ID NO: 5895566 - DNA, 25 bp, Homo sapien
aagagagcttccaacttgccctgtt

SEQ ID NO: 5895567 - DNA, 25 bp, Homo sapien
tgttgttatgaagaagatttctgga

SEQ ID NO: 5895568 - DNA, 25 bp, Homo sapien
atgggtccttttgcagttgccaact

SEQ ID NO: 5895569 - DNA, 25 bp, Homo sapien
gcaaaaataatcttgtataatctta

SEQ ID NO: 5895570 - DNA, 25 bp, Homo sapien
atctccctaggactcaagccctcag

SEQ ID NO: 5895571 - DNA, 25 bp, Homo sapien
aggaagtcagaccgaccagtttcta

SEQ ID NO: 5895572 - DNA, 25 bp, Homo sapien
ctgagaacactgttggatgtcacaa

SEQ ID NO: 5895573 - DNA, 25 bp, Homo sapien
gagcaaagccaagacagtatcgcca

SEQ ID NO: 5895574 - DNA, 25 bp, Homo sapien
agccacgtcctcatctccctaggac

SEQ ID NO: 5895575 - DNA, 25 bp, Homo sapien
ttcgtcggagggatcttcattgttg

SEQ ID NO: 5895576 - DNA, 25 bp, Homo sapien
gatacatacacattccagcccagtc

SEQ ID NO: 5895577 - DNA, 25 bp, Homo sapien
ctcaaagcatctgcctttggaaaac

SEQ ID NO: 5895578 - DNA, 25 bp, Homo sapien
aggaagatgacccatggcgtgccca

SEQ ID NO: 5895579 - DNA, 25 bp, Homo sapien
aatgttatgatcgatgattcaaaag

SEQ ID NO: 5895580 - DNA, 25 bp, Homo sapien
tacatcacagaggcatgggtccttt

SEQ ID NO: 5895581 - DNA, 25 bp, Homo sapien
tgtaaccatgggttcaccctggcca

SEQ ID NO: 5895582 - DNA, 25 bp, Homo sapien
ccagtccctattactgttaagaggc

SEQ ID NO: 5895583 - DNA, 25 bp, Homo sapien
tcatgttggctttagtataggaagt

SEQ ID NO: 5895584 - DNA, 25 bp, Homo sapien
aaatgttacatcacagaggcatggg

SEQ ID NO: 5895585 - DNA, 25 bp, Homo sapien
gcttccaacttgccctgttccccat

SEQ ID NO: 5895586 - DNA, 25 bp, Homo sapien
caacttgtaactgcacttgatacat

SEQ ID NO: 5895587 - DNA, 25 bp, Homo sapien
tgttaagaggcatagagtctggaaa

SEQ ID NO: 5895588 - DNA, 25 bp, Homo sapien
gtggaggaagatgacccatggcgtg

SEQ ID NO: 5895589 - DNA, 25 bp, Homo sapien
tggatgctgagaacactgttggatg

SEQ ID NO: 5895590 - DNA, 25 bp, Homo sapien
gagagcttccaacttgccctgttcc

SEQ ID NO: 5895591 - DNA, 25 bp, Homo sapien
agcatccactgtgccttcagttccg

SEQ ID NO: 5895592 - DNA, 25 bp, Homo sapien
gccaacttgtaactgcacttgatac

SEQ ID NO: 5895593 - DNA, 25 bp, Homo sapien
tagttggcgtcttgttagccattgg

SEQ ID NO: 5895594 - DNA, 25 bp, Homo sapien
taagcatccactgtgccttcagttc

SEQ ID NO: 5895595 - DNA, 25 bp, Homo sapien
tccccatcctcttcctgtggaggaa

SEQ ID NO: 5895596 - DNA, 25 bp, Homo sapien
aagccacagcccctcaaagcatctg

SEQ ID NO: 5895597 - DNA, 25 bp, Homo sapien
gtttgcggttaatagaagatatttc

SEQ ID NO: 5895598 - DNA, 25 bp, Homo sapien
gcagttgccaacttgtaactgcact

SEQ ID NO: 5895599 - DNA, 25 bp, Homo sapien
ttccaacttgccctgttccccatcc

SEQ ID NO: 5895600 - DNA, 25 bp, Homo sapien
gcccctcaaagcatctgcctttgga

SEQ ID NO: 5895601 - DNA, 25 bp, Homo sapien
cgaccagtttctaacacctgccttc

SEQ ID NO: 5895602 - DNA, 25 bp, Homo sapien
tcttgtataatcttaactgctttta

SEQ ID NO: 5895603 - DNA, 25 bp, Homo sapien
cccaacacatctgaaaataagagag

SEQ ID NO: 5895604 - DNA, 25 bp, Homo sapien
gaggcatagagtctggaaatgttac

SEQ ID NO: 5895605 - DNA, 25 bp, Homo sapien
ctggaaggtctcgccctaaagagct

SEQ ID NO: 5895606 - DNA, 25 bp, Homo sapien
gcatctttctggataatagagacct

SEQ ID NO: 5895607 - DNA, 25 bp, Homo sapien
ccacgtcctcatctccctaggactc

SEQ ID NO: 5895608 - DNA, 25 bp, Homo sapien
aaaatggagcaaagccaagacagta

SEQ ID NO: 5895609 - DNA, 25 bp, Homo sapien
agtgttgctgggacagagctgtagt

SEQ ID NO: 5895610 - DNA, 25 bp, Homo sapien
gcgtcttgttagccattggcttcgt

SEQ ID NO: 5895611 - DNA, 25 bp, Homo sapien
gaaagatacaggacaagccacagcc

SEQ ID NO: 5895612 - DNA, 25 bp, Homo sapien
taaacagaacaggttgttctcccaa

SEQ ID NO: 5895613 - DNA, 25 bp, Homo sapien
agccaagacagtatcgccagcttta

SEQ ID NO: 5895614 - DNA, 25 bp, Homo sapien
cgtgacacggggactcagtgttgct

SEQ ID NO: 5895615 - DNA, 25 bp, Homo sapien
cactgtgccttcagttccgggaaga

SEQ ID NO: 5895616 - DNA, 25 bp, Homo sapien
tcgatgattcaaaagacaacatgct

SEQ ID NO: 5895617 - DNA, 25 bp, Homo sapien
caactgtaaccatgggttcaccctg

SEQ ID NO: 5895618 - DNA, 25 bp, Homo sapien
tgagttgaggagccacgtcctcatc

SEQ ID NO: 5895619 - DNA, 25 bp, Homo sapien
ctgcacttgatacatacacattcca

SEQ ID NO: 5895620 - DNA, 25 bp, Homo sapien
atgttacatcacagaggcatgggtc

SEQ ID NO: 5895621 - DNA, 25 bp, Homo sapien
atatttccagtcttcgtgacacggg

SEQ ID NO: 5895622 - DNA, 25 bp, Homo sapien
aagaggcatagagtctggaaatgtt

SEQ ID NO: 5895623 - DNA, 25 bp, Homo sapien
aagaagatttctggaaggtctcgcc

SEQ ID NO: 5895624 - DNA, 25 bp, Homo sapien
tcaaaagacaacatgcttagaaaat

SEQ ID NO: 5895625 - DNA, 25 bp, Homo sapien
gaagatttctggaaggtctcgccct

SEQ ID NO: 5895626 - DNA, 25 bp, Homo sapien
tcctcttcctgtggaggaagatgac

SEQ ID NO: 5895627 - DNA, 25 bp, Homo sapien
gaggagccacgtcctcatctcccta

SEQ ID NO: 5895628 - DNA, 25 bp, Homo sapien
acagaggcatgggtccttttgcagt

SEQ ID NO: 5895629 - DNA, 25 bp, Homo sapien
ccagtcttcgtgacacggggactca

SEQ ID NO: 5895630 - DNA, 25 bp, Homo sapien
cccctccgcttggccagcagtacca

SEQ ID NO: 5895631 - DNA, 25 bp, Homo sapien
aggtttgcggttaatagaagatatt

SEQ ID NO: 5895632 - DNA, 25 bp, Homo sapien
aagagctaaacagaacaggttgttc

SEQ ID NO: 5895633 - DNA, 25 bp, Homo sapien
caagccctcagatcagctgcatctt

SEQ ID NO: 5895634 - DNA, 25 bp, Homo sapien
tacatacacattccagcccagtcct

SEQ ID NO: 5895635 - DNA, 25 bp, Homo sapien
ttggatgtcacaagatgctaaaagg

SEQ ID NO: 5895636 - DNA, 25 bp, Homo sapien
gtttctaacacctgccttctgcttc

SEQ ID NO: 5895637 - DNA, 25 bp, Homo sapien
aacacctgccttctgcttctcagga

SEQ ID NO: 5895638 - DNA, 25 bp, Homo sapien
ccagctttagcaactgtaaccatgg

SEQ ID NO: 5895639 - DNA, 25 bp, Homo sapien
gagacctcatcctggatgctgagaa

SEQ ID NO: 5895640 - DNA, 25 bp, Homo sapien
ctctaagcctccgatgagttgagga

SEQ ID NO: 5895641 - DNA, 25 bp, Homo sapien
aatagagacctcatcctggatgctg

SEQ ID NO: 5895642 - DNA, 25 bp, Homo sapien
acacatctgaaaataagagagcttc

SEQ ID NO: 5895643 - DNA, 25 bp, Homo sapien
gaagatgacccatggcgtgcccacc

SEQ ID NO: 5895644 - DNA, 25 bp, Homo sapien
tacacattccagcccagtcctaagc

SEQ ID NO: 5895645 - DNA, 25 bp, Homo sapien
ttctaacacctgccttctgcttctc

SEQ ID NO: 5895646 - DNA, 25 bp, Homo sapien
cctaaagagctaaacagaacaggtt

SEQ ID NO: 5895647 - DNA, 25 bp, Homo sapien
accgaccagtttctaacacctgcct

SEQ ID NO: 5895648 - DNA, 25 bp, Homo sapien
cgcttggccagcagtaccaaaggaa

SEQ ID NO: 5895649 - DNA, 25 bp, Homo sapien
ttctggataatagagacctcatcct

SEQ ID NO: 5895650 - DNA, 25 bp, Homo sapien
ttttgcagttgccaacttgtaactg

SEQ ID NO: 5895651 - DNA, 25 bp, Homo sapien
aaaggctcagccgctgtagaaccaa

SEQ ID NO: 5895652 - DNA, 25 bp, Homo sapien
gatgctgagaacactgttggatgtc

SEQ ID NO: 5895653 - DNA, 25 bp, Homo sapien
ggttaatagaagatatttccagtct

SEQ ID NO: 5895654 - DNA, 25 bp, Homo sapien
agccctcagatcagctgcatctttc

SEQ ID NO: 5895655 - DNA, 25 bp, Homo sapien
agaccgaccagtttctaacacctgc

SEQ ID NO: 5895656 - DNA, 25 bp, Homo sapien
tcagttccgggaagacactgctttt

SEQ ID NO: 5895657 - DNA, 25 bp, Homo sapien
aagcctccgatgagttgaggagcca

SEQ ID NO: 5895658 - DNA, 25 bp, Homo sapien
aggttgttctcccaacacatctgaa

SEQ ID NO: 5895659 - DNA, 25 bp, Homo sapien
gcgtgcccacccaccccacccacag

SEQ ID NO: 5895660 - DNA, 25 bp, Homo sapien
cttgccctgttccccatcctcttcc

SEQ ID NO: 5895661 - DNA, 25 bp, Homo sapien
ctccctaggactcaagccctcagat

SEQ ID NO: 5895662 - DNA, 25 bp, Homo sapien
cccacagccatggtgacccctccgc

SEQ ID NO: 5895663 - DNA, 25 bp, Homo sapien
cgccagctttagcaactgtaaccat

SEQ ID NO: 5895664 - DNA, 25 bp, Homo sapien
atctctaagcctccgatgagttgag

SEQ ID NO: 5895665 - DNA, 25 bp, Homo sapien
ggacagacagggaaagcaaaaataa

SEQ ID NO: 5895666 - DNA, 25 bp, Homo sapien
cagatcagctgcatctttctggata

SEQ ID NO: 5895667 - DNA, 25 bp, Homo sapien
aactgcacttgatacatacacattc

SEQ ID NO: 5895668 - DNA, 25 bp, Homo sapien
ttgccaacttgtaactgcacttgat

SEQ ID NO: 5895669 - DNA, 25 bp, Homo sapien
tattactgttaagaggcatagagtc

SEQ ID NO: 5895670 - DNA, 25 bp, Homo sapien
aacagaacaggttgttctcccaaca

SEQ ID NO: 5895671 - DNA, 25 bp, Homo sapien
cagcagtaccaaaggaaagatacag

SEQ ID NO: 5895672 - DNA, 25 bp, Homo sapien
gggtccttttgcagttgccaacttg

SEQ ID NO: 5895673 - DNA, 25 bp, Homo sapien
gacccctccgcttggccagcagtac

SEQ ID NO: 5895674 - DNA, 25 bp, Homo sapien
ttgtataatcttaactgcttttatg

SEQ ID NO: 5895675 - DNA, 25 bp, Homo sapien
ggcatagagtctggaaatgttacat

SEQ ID NO: 5895676 - DNA, 25 bp, Homo sapien
tcttaactgcttttatggggtggat

SEQ ID NO: 5895677 - DNA, 25 bp, Homo sapien
atgttggctttagtataggaagtca

SEQ ID NO: 5895678 - DNA, 25 bp, Homo sapien
ctggaaatgttacatcacagaggca

SEQ ID NO: 5895679 - DNA, 25 bp, Homo sapien
gaacaggttgttctcccaacacatc

SEQ ID NO: 5895680 - DNA, 25 bp, Homo sapien
agtgactcatgttggctttagtata

SEQ ID NO: 5895681 - DNA, 25 bp, Homo sapien
acagggaaagcaaaaataatcttgt

SEQ ID NO: 5895682 - DNA, 25 bp, Homo sapien
gacagtatcgccagctttagcaact

SEQ ID NO: 5895683 - DNA, 25 bp, Homo sapien
cttcctgtggaggaagatgacccat

SEQ ID NO: 5895684 - DNA, 25 bp, Homo sapien
ggttcaccctggccagtccctatta

SEQ ID NO: 5895685 - DNA, 25 bp, Homo sapien
ggaaagcaaaaataatcttgtataa

SEQ ID NO: 5895686 - DNA, 25 bp, Homo sapien
tggtgacccctccgcttggccagca

SEQ ID NO: 5895687 - DNA, 25 bp, Homo sapien
agtaccaaaggaaagatacaggaca

SEQ ID NO: 5895688 - DNA, 25 bp, Homo sapien
agggaaagcaaaaataatcttgtat

SEQ ID NO: 5895689 - DNA, 25 bp, Homo sapien
gtactgctggccaagcggaggggtc

SEQ ID NO: 5895690 - DNA, 25 bp, Homo sapien
gttggaagctctcttattttcagat

SEQ ID NO: 5895691 - DNA, 25 bp, Homo sapien
aatgaagatccctccgacgaagcca

SEQ ID NO: 5895692 - DNA, 25 bp, Homo sapien
gaagactggaaatatcttctattaa

SEQ ID NO: 5895693 - DNA, 25 bp, Homo sapien
tttccctgtctgtcctgagaagcag

SEQ ID NO: 5895694 - DNA, 25 bp, Homo sapien
cgtggctcctcaactcatcggaggc

SEQ ID NO: 5895695 - DNA, 25 bp, Homo sapien
catgcctctgtgatgtaacatttcc

SEQ ID NO: 5895696 - DNA, 25 bp, Homo sapien
gaaactggtcggtctgacttcctat

SEQ ID NO: 5895697 - DNA, 25 bp, Homo sapien
ctttgaggggctgtggcttgtcctg

SEQ ID NO: 5895698 - DNA, 25 bp, Homo sapien
cagctgatctgagggcttgagtcct

SEQ ID NO: 5895699 - DNA, 25 bp, Homo sapien
cgtgtcacgaagactggaaatatct

SEQ ID NO: 5895700 - DNA, 25 bp, Homo sapien
aactggtcggtctgacttcctatac

SEQ ID NO: 5895701 - DNA, 25 bp, Homo sapien
agggcgagaccttccagaaatcttc

SEQ ID NO: 5895702 - DNA, 25 bp, Homo sapien
cctttggtactgctggccaagcgga

SEQ ID NO: 5895703 - DNA, 25 bp, Homo sapien
actgagtccccgtgtcacgaagact

SEQ ID NO: 5895704 - DNA, 25 bp, Homo sapien
acccatggttacagttgctaaagct

SEQ ID NO: 5895705 - DNA, 25 bp, Homo sapien
gatggtttggagacttgtaaaaaaa

SEQ ID NO: 5895706 - DNA, 25 bp, Homo sapien
gctgatctgagggcttgagtcctag

SEQ ID NO: 5895707 - DNA, 25 bp, Homo sapien
ttagctctttagggcgagaccttcc

SEQ ID NO: 5895708 - DNA, 25 bp, Homo sapien
gcatccaggatgaggtctctattat

SEQ ID NO: 5895709 - DNA, 25 bp, Homo sapien
gctaaagctggcgatactgtcttgg

SEQ ID NO: 5895710 - DNA, 25 bp, Homo sapien
gatgaggtctctattatccagaaag

SEQ ID NO: 5895711 - DNA, 25 bp, Homo sapien
cggaactgaaggcacagtggatgct

SEQ ID NO: 5895712 - DNA, 25 bp, Homo sapien
gaacaacctgttctgtttagctctt

SEQ ID NO: 5895713 - DNA, 25 bp, Homo sapien
cagcatccaggatgaggtctctatt

SEQ ID NO: 5895714 - DNA, 25 bp, Homo sapien
ctatgcctcttaacagtaataggga

SEQ ID NO: 5895715 - DNA, 25 bp, Homo sapien
ccaacatgagtcacttctactgaaa

SEQ ID NO: 5895716 - DNA, 25 bp, Homo sapien
agtgttctcagcatccaggatgagg

SEQ ID NO: 5895717 - DNA, 25 bp, Homo sapien
acgaagactggaaatatcttctatt

SEQ ID NO: 5895718 - DNA, 25 bp, Homo sapien
tccagaaagatgcagctgatctgag

SEQ ID NO: 5895719 - DNA, 25 bp, Homo sapien
tagttttccaaaggcagatgctttg

SEQ ID NO: 5895720 - DNA, 25 bp, Homo sapien
caggaagaggatggggaacagggca

SEQ ID NO: 5895721 - DNA, 25 bp, Homo sapien
agtgtcttcccggaactgaaggcac

SEQ ID NO: 5895722 - DNA, 25 bp, Homo sapien
ttgagtcctagggagatgaggacgt

SEQ ID NO: 5895723 - DNA, 25 bp, Homo sapien
aggacgtggctcctcaactcatcgg

SEQ ID NO: 5895724 - DNA, 25 bp, Homo sapien
atggctgtgggtggggtgggtgggc

SEQ ID NO: 5895725 - DNA, 25 bp, Homo sapien
ttacagttgctaaagctggcgatac

SEQ ID NO: 5895726 - DNA, 25 bp, Homo sapien
ctgtcttggctttgctccattttct

SEQ ID NO: 5895727 - DNA, 25 bp, Homo sapien
cttttgaatcatcgatcataacatt

SEQ ID NO: 5895728 - DNA, 25 bp, Homo sapien
ggaggggtcaccatggctgtgggtg

SEQ ID NO: 5895729 - DNA, 25 bp, Homo sapien
tcatcgatcataacatttatgttaa

SEQ ID NO: 5895730 - DNA, 25 bp, Homo sapien
tcacgaagactggaaatatcttcta

SEQ ID NO: 5895731 - DNA, 25 bp, Homo sapien
ctacagcggctgagccttttagcat

SEQ ID NO: 5895732 - DNA, 25 bp, Homo sapien
cccgtgtcacgaagactggaaatat

SEQ ID NO: 5895733 - DNA, 25 bp, Homo sapien
gtcatcttcctccacaggaagagga

SEQ ID NO: 5895734 - DNA, 25 bp, Homo sapien
gtggggtgggtgggcacgccatggg

SEQ ID NO: 5895735 - DNA, 25 bp, Homo sapien
gtggcttgtcctgtatctttccttt

SEQ ID NO: 5895736 - DNA, 25 bp, Homo sapien
agcaacactgagtccccgtgtcacg

SEQ ID NO: 5895737 - DNA, 25 bp, Homo sapien
tccagactctatgcctcttaacagt

SEQ ID NO: 5895738 - DNA, 25 bp, Homo sapien
gggtgaacccatggttacagttgct

SEQ ID NO: 5895739 - DNA, 25 bp, Homo sapien
attatccagaaagatgcagctgatc

SEQ ID NO: 5895740 - DNA, 25 bp, Homo sapien
gacccatgcctctgtgatgtaacat

SEQ ID NO: 5895741 - DNA, 25 bp, Homo sapien
aagatgcagctgatctgagggcttg

SEQ ID NO: 5895742 - DNA, 25 bp, Homo sapien
agcatcttgtgacatccaacagtgt

SEQ ID NO: 5895743 - DNA, 25 bp, Homo sapien
tctgtcccagcaacactgagtcccc

SEQ ID NO: 5895744 - DNA, 25 bp, Homo sapien
ccaccccataaaagcagttaagatt

SEQ ID NO: 5895745 - DNA, 25 bp, Homo sapien
ttcctccacaggaagaggatgggga

SEQ ID NO: 5895746 - DNA, 25 bp, Homo sapien
cagttacaagttggcaactgcaaaa

SEQ ID NO: 5895747 - DNA, 25 bp, Homo sapien
aacctgttctgtttagctctttagg

SEQ ID NO: 5895748 - DNA, 25 bp, Homo sapien
ctactgaaatgttcttggttctaca

SEQ ID NO: 5895749 - DNA, 25 bp, Homo sapien
tgacttcctatactaaagccaacat

SEQ ID NO: 5895750 - DNA, 25 bp, Homo sapien
ttgctttccctgtctgtcctgagaa

SEQ ID NO: 5895751 - DNA, 25 bp, Homo sapien
aagcggaggggtcaccatggctgtg

SEQ ID NO: 5895752 - DNA, 25 bp, Homo sapien
gagggcttgagtcctagggagatga

SEQ ID NO: 5895753 - DNA, 25 bp, Homo sapien
tggctttgctccattttctaagcat

SEQ ID NO: 5895754 - DNA, 25 bp, Homo sapien
gatccctccgacgaagccaatggct

SEQ ID NO: 5895755 - DNA, 25 bp, Homo sapien
ccagcaacactgagtccccgtgtca

SEQ ID NO: 5895756 - DNA, 25 bp, Homo sapien
acaacctgttctgtttagctcttta

SEQ ID NO: 5895757 - DNA, 25 bp, Homo sapien
tccaaaggcagatgctttgaggggc

SEQ ID NO: 5895758 - DNA, 25 bp, Homo sapien
acgaagccaatggctaacaagacgc

SEQ ID NO: 5895759 - DNA, 25 bp, Homo sapien
acttctactgaaatgttcttggttc

SEQ ID NO: 5895760 - DNA, 25 bp, Homo sapien
tatactaaagccaacatgagtcact

SEQ ID NO: 5895761 - DNA, 25 bp, Homo sapien
tcctcaactcatcggaggcttagag

SEQ ID NO: 5895762 - DNA, 25 bp, Homo sapien
cctgtctgtcctgagaagcagaagg

SEQ ID NO: 5895763 - DNA, 25 bp, Homo sapien
ttcctttggtactgctggccaagcg

SEQ ID NO: 5895764 - DNA, 25 bp, Homo sapien
ttttagcatcttgtgacatccaaca

SEQ ID NO: 5895765 - DNA, 25 bp, Homo sapien
tctgtcctgagaagcagaaggcagg

SEQ ID NO: 5895766 - DNA, 25 bp, Homo sapien
ggatggggaacagggcaagttggaa

SEQ ID NO: 5895767 - DNA, 25 bp, Homo sapien
cagactctatgcctcttaacagtaa

SEQ ID NO: 5895768 - DNA, 25 bp, Homo sapien
taaagctggcgatactgtcttggct

SEQ ID NO: 5895769 - DNA, 25 bp, Homo sapien
agccttttagcatcttgtgacatcc

SEQ ID NO: 5895770 - DNA, 25 bp, Homo sapien
gatgtgttgggagaacaacctgttc

SEQ ID NO: 5895771 - DNA, 25 bp, Homo sapien
tgtgatgtaacatttccagactcta

SEQ ID NO: 5895772 - DNA, 25 bp, Homo sapien
gaactgaaggcacagtggatgctta

SEQ ID NO: 5895773 - DNA, 25 bp, Homo sapien
gtcaccatggctgtgggtggggtgg

SEQ ID NO: 5895774 - DNA, 25 bp, Homo sapien
aatcatcgatcataacatttatgtt

SEQ ID NO: 5895775 - DNA, 25 bp, Homo sapien
cgacgaagccaatggctaacaagac

SEQ ID NO: 5895776 - DNA, 25 bp, Homo sapien
gtttagctctttagggcgagacctt

SEQ ID NO: 5895777 - DNA, 25 bp, Homo sapien
tggaaatatcttctattaaccgcaa

SEQ ID NO: 5895778 - DNA, 25 bp, Homo sapien
ataacaacaatgaagatccctccga

SEQ ID NO: 5895779 - DNA, 25 bp, Homo sapien
agcagttaagattatacaagattat

SEQ ID NO: 5895780 - DNA, 25 bp, Homo sapien
aaagcagttaagattatacaagatt

SEQ ID NO: 5895781 - DNA, 25 bp, Homo sapien
gctctgtcccagcaacactgagtcc

SEQ ID NO: 5895782 - DNA, 25 bp, Homo sapien
tcttctattaaccgcaaacctttac

SEQ ID NO: 5895783 - DNA, 25 bp, Homo sapien
caacactgagtccccgtgtcacgaa

SEQ ID NO: 5895784 - DNA, 25 bp, Homo sapien
accgcaaacctttacatccacccca

SEQ ID NO: 5895785 - DNA, 25 bp, Homo sapien
ggctgtggcttgtcctgtatctttc

SEQ ID NO: 5895786 - DNA, 25 bp, Homo sapien
cttcataacaacaatgaagatccct

SEQ ID NO: 5895787 - DNA, 25 bp, Homo sapien
agattatacaagattatttttgctt

SEQ ID NO: 5895788 - DNA, 25 bp, Homo sapien
ccaagcggaggggtcaccatggctg

SEQ ID NO: 5895789 - DNA, 25 bp, Homo sapien
aaatgttcttggttctacagcggct

SEQ ID NO: 5895790 - DNA, 25 bp, Homo sapien
aaaggacccatgcctctgtgatgta

SEQ ID NO: 5895791 - DNA, 25 bp, Homo sapien
tgagtccccgtgtcacgaagactgg

SEQ ID NO: 5895792 - DNA, 25 bp, Homo sapien
gaggcttagagatggtttggagact

SEQ ID NO: 5895793 - DNA, 25 bp, Homo sapien
tatcttctattaaccgcaaaccttt

SEQ ID NO: 5895794 - DNA, 25 bp, Homo sapien
agaccttccagaaatcttcttcata

SEQ ID NO: 5895795 - DNA, 25 bp, Homo sapien
tgggcacgccatgggtcatcttcct

SEQ ID NO: 5895796 - DNA, 25 bp, Homo sapien
tgtgttgggagaacaacctgttctg

SEQ ID NO: 5895797 - DNA, 25 bp, Homo sapien
gtaacatttccagactctatgcctc

SEQ ID NO: 5895798 - DNA, 25 bp, Homo sapien
tccccgtgtcacgaagactggaaat

SEQ ID NO: 5895799 - DNA, 25 bp, Homo sapien
catgagtcacttctactgaaatgtt

SEQ ID NO: 5895800 - DNA, 25 bp, Homo sapien
gctggcgatactgtcttggctttgc

SEQ ID NO: 5895801 - DNA, 25 bp, Homo sapien
gttaagattatacaagattattttt

SEQ ID NO: 5895802 - DNA, 25 bp, Homo sapien
tgtctgtcctgagaagcagaaggca

SEQ ID NO: 5895803 - DNA, 25 bp, Homo sapien
actcatcggaggcttagagatggtt

SEQ ID NO: 5895804 - DNA, 25 bp, Homo sapien
tagggagatgaggacgtggctcctc

SEQ ID NO: 5895805 - DNA, 25 bp, Homo sapien
tcggtctgacttcctatactaaagc

SEQ ID NO: 5895806 - DNA, 25 bp, Homo sapien
gtcttttgaatcatcgatcataaca

SEQ ID NO: 5895807 - DNA, 25 bp, Homo sapien
ctcttattttcagatgtgttgggag

SEQ ID NO: 5895808 - DNA, 25 bp, Homo sapien
agactggaaatatcttctattaacc

SEQ ID NO: 5895809 - DNA, 25 bp, Homo sapien
atctttcctttggtactgctggcca

SEQ ID NO: 5895810 - DNA, 25 bp, Homo sapien
ctggtcggtctgacttcctatacta

SEQ ID NO: 5895811 - DNA, 25 bp, Homo sapien
cccggaactgaaggcacagtggatg

SEQ ID NO: 5895812 - DNA, 25 bp, Homo sapien
caagttggcaactgcaaaaggaccc

SEQ ID NO: 5895813 - DNA, 25 bp, Homo sapien
gaagcagaaggcaggtgttagaaac

SEQ ID NO: 5895814 - DNA, 25 bp, Homo sapien
tccaacagtgttctcagcatccagg

SEQ ID NO: 5895815 - DNA, 25 bp, Homo sapien
aacatttccagactctatgcctctt

SEQ ID NO: 5895816 - DNA, 25 bp, Homo sapien
gtgaacccatggttacagttgctaa

SEQ ID NO: 5895817 - DNA, 25 bp, Homo sapien
ttggttctacagcggctgagccttt

SEQ ID NO: 5895818 - DNA, 25 bp, Homo sapien
aagcagtgtcttcccggaactgaag

SEQ ID NO: 5895819 - DNA, 25 bp, Homo sapien
aagatccctccgacgaagccaatgg

SEQ ID NO: 5895820 - DNA, 25 bp, Homo sapien
ctctttagggcgagaccttccagaa

SEQ ID NO: 5895821 - DNA, 25 bp, Homo sapien
cctccgacgaagccaatggctaaca

SEQ ID NO: 5895822 - DNA, 25 bp, Homo sapien
ctctcttattttcagatgtgttggg

SEQ ID NO: 5895823 - DNA, 25 bp, Homo sapien
ggatgcttaggactgggctggaatg

SEQ ID NO: 5895824 - DNA, 25 bp, Homo sapien
ggtcggtctgacttcctatactaaa

SEQ ID NO: 5895825 - DNA, 25 bp, Homo sapien
actggaaatatcttctattaaccgc

SEQ ID NO: 5895826 - DNA, 25 bp, Homo sapien
gctgagccttttagcatcttgtgac

SEQ ID NO: 5895827 - DNA, 25 bp, Homo sapien
gctcctcaactcatcggaggcttag

SEQ ID NO: 5895828 - DNA, 25 bp, Homo sapien
ggttacagttgctaaagctggcgat

SEQ ID NO: 5895829 - DNA, 25 bp, Homo sapien
ccatggctgtgggtggggtgggtgg

SEQ ID NO: 5895830 - DNA, 25 bp, Homo sapien
tggaagctctcttattttcagatgt

SEQ ID NO: 5895831 - DNA, 25 bp, Homo sapien
gtggatgcttaggactgggctggaa

SEQ ID NO: 5895832 - DNA, 25 bp, Homo sapien
tgaagatccctccgacgaagccaat

SEQ ID NO: 5895833 - DNA, 25 bp, Homo sapien
aggactgggctggaatgtgtatgta

SEQ ID NO: 5895834 - DNA, 25 bp, Homo sapien
tgcagctgatctgagggcttgagtc

SEQ ID NO: 5895835 - DNA, 25 bp, Homo sapien
agcagaaggcaggtgttagaaactg

SEQ ID NO: 5895836 - DNA, 25 bp, Homo sapien
ctcttaacagtaatagggactggcc

SEQ ID NO: 5895837 - DNA, 25 bp, Homo sapien
gggtcaccatggctgtgggtggggt

SEQ ID NO: 5895838 - DNA, 25 bp, Homo sapien
cttattttcagatgtgttgggagaa

SEQ ID NO: 5895839 - DNA, 25 bp, Homo sapien
ggccaagcggaggggtcaccatggc

SEQ ID NO: 5895840 - DNA, 25 bp, Homo sapien
catgttgtcttttgaatcatcgatc

SEQ ID NO: 5895841 - DNA, 25 bp, Homo sapien
agccaacatgagtcacttctactga

SEQ ID NO: 5895842 - DNA, 25 bp, Homo sapien
agcggctgagccttttagcatcttg

SEQ ID NO: 5895843 - DNA, 25 bp, Homo sapien
accccataaaagcagttaagattat

SEQ ID NO: 5895844 - DNA, 25 bp, Homo sapien
cttccagaaatcttcttcataacaa

SEQ ID NO: 5895845 - DNA, 25 bp, Homo sapien
ggtgggtgggcacgccatgggtcat

SEQ ID NO: 5895846 - DNA, 25 bp, Homo sapien
ggcgagaccttccagaaatcttctt

SEQ ID NO: 5895847 - DNA, 25 bp, Homo sapien
gggcttgagtcctagggagatgagg

SEQ ID NO: 5895848 - DNA, 25 bp, Homo sapien
ttctacagcggctgagccttttagc

SEQ ID NO: 5895849 - DNA, 25 bp, Homo sapien
agttgctaaagctggcgatactgtc

SEQ ID NO: 5895850 - DNA, 25 bp, Homo sapien
agccaatggctaacaagacgccaac

SEQ ID NO: 5895851 - DNA, 25 bp, Homo sapien
agctctttagggcgagaccttccag

SEQ ID NO: 5895852 - DNA, 25 bp, Homo sapien
acagtaatagggactggccagggtg

SEQ ID NO: 5895853 - DNA, 25 bp, Homo sapien
ggcttgtcctgtatctttcctttgg

SEQ ID NO: 5895854 - DNA, 25 bp, Homo sapien
tcttcctccacaggaagaggatggg

SEQ ID NO: 5895855 - DNA, 25 bp, Homo sapien
acaagattatttttgctttccctgt

SEQ ID NO: 5895856 - DNA, 25 bp, Homo sapien
aaggcacagtggatgcttaggactg

SEQ ID NO: 5895857 - DNA, 25 bp, Homo sapien
gtgggtggggtgggtgggcacgcca

SEQ ID NO: 5895858 - DNA, 25 bp, Homo sapien
atcggaggcttagagatggtttgga

SEQ ID NO: 5895859 - DNA, 25 bp, Homo sapien
tgaggtctctattatccagaaagat

SEQ ID NO: 5895860 - DNA, 25 bp, Homo sapien
aggcaggtgttagaaactggtcggt

SEQ ID NO: 5895861 - DNA, 25 bp, Homo sapien
actgctggccaagcggaggggtcac

SEQ ID NO: 5895862 - DNA, 25 bp, Homo sapien
aagctggcgatactgtcttggcttt

SEQ ID NO: 5895863 - DNA, 25 bp, Homo sapien
ttacatccaccccataaaagcagtt

SEQ ID NO: 5895864 - DNA, 25 bp, Homo sapien
tttgctccattttctaagcatgttg

SEQ ID NO: 5895865 - DNA, 25 bp, Homo sapien
caactgcaaaaggacccatgcctct

SEQ ID NO: 5895866 - DNA, 25 bp, Homo sapien
ggcacagtggatgcttaggactggg

SEQ ID NO: 5895867 - DNA, 25 bp, Homo sapien
atgttcttggttctacagcggctga

SEQ ID NO: 5895868 - DNA, 25 bp, Homo sapien
tgttctgtttagctctttagggcga

SEQ ID NO: 5895869 - DNA, 25 bp, Homo sapien
cttggctttgctccattttctaagc

SEQ ID NO: 5895870 - DNA, 25 bp, Homo sapien
gaagctctcttattttcagatgtgt

SEQ ID NO: 5895871 - DNA, 25 bp, Homo sapien
actgaaggcacagtggatgcttagg

SEQ ID NO: 5895872 - DNA, 25 bp, Homo sapien
cagttaagattatacaagattattt

SEQ ID NO: 5895873 - DNA, 25 bp, Homo sapien
gaaatatcttctattaaccgcaaac

SEQ ID NO: 5895874 - DNA, 25 bp, Homo sapien
tgcaaaaggacccatgcctctgtga

SEQ ID NO: 5895875 - DNA, 25 bp, Homo sapien
gcctcttaacagtaatagggactgg

SEQ ID NO: 5895876 - DNA, 25 bp, Homo sapien
tttggtactgctggccaagcggagg

SEQ ID NO: 5895877 - DNA, 25 bp, Homo sapien
tggcgatactgtcttggctttgctc

SEQ ID NO: 5895878 - DNA, 25 bp, Homo sapien
atacaagattatttttgctttccct

SEQ ID NO: 5895879 - DNA, 25 bp, Homo sapien
caccatggctgtgggtggggtgggt

SEQ ID NO: 5895880 - DNA, 25 bp, Homo sapien
ccatggttacagttgctaaagctgg

SEQ ID NO: 5895881 - DNA, 25 bp, Homo sapien
cgagaccttccagaaatcttcttca

SEQ ID NO: 5895882 - DNA, 25 bp, Homo sapien
ccatgggtcatcttcctccacagga

SEQ ID NO: 5895883 - DNA, 25 bp, Homo sapien
tttccagactctatgcctcttaaca

SEQ ID NO: 5895884 - DNA, 25 bp, Homo sapien
ttgctaaagctggcgatactgtctt

SEQ ID NO: 5895885 - DNA, 25 bp, Homo sapien
gctttccctgtctgtcctgagaagc

SEQ ID NO: 5895886 - DNA, 25 bp, Homo sapien
tttctaagcatgttgtcttttgaat

SEQ ID NO: 5895887 - DNA, 25 bp, Homo sapien
gtgttagaaactggtcggtctgact

SEQ ID NO: 5895888 - DNA, 25 bp, Homo sapien
tttagttttccaaaggcagatgctt

SEQ ID NO: 5895889 - DNA, 25 bp, Homo sapien
gaacccatggttacagttgctaaag

SEQ ID NO: 5895890 - DNA, 25 bp, Homo sapien
ttcctatactaaagccaacatgagt

SEQ ID NO: 5895891 - DNA, 25 bp, Homo sapien
tactgtcttggctttgctccatttt

SEQ ID NO: 5895892 - DNA, 25 bp, Homo sapien
accttccagaaatcttcttcataac

SEQ ID NO: 5895893 - DNA, 25 bp, Homo sapien
tgtcacgaagactggaaatatcttc

SEQ ID NO: 5895894 - DNA, 25 bp, Homo sapien
ttatttttgctttccctgtctgtcc

SEQ ID NO: 5895895 - DNA, 25 bp, Homo sapien
ggggaacagggcaagttggaagctc

SEQ ID NO: 5895896 - DNA, 25 bp, Homo sapien
cagatgctttgaggggctgtggctt

SEQ ID NO: 5895897 - DNA, 25 bp, Homo sapien
gcgatactgtcttggctttgctcca

SEQ ID NO: 5895898 - DNA, 25 bp, Homo sapien
atcaagtgcagttacaagttggcaa

SEQ ID NO: 5895899 - DNA, 25 bp, Homo sapien
catcttcctccacaggaagaggatg

SEQ ID NO: 5895900 - DNA, 25 bp, Homo sapien
cggctgagccttttagcatcttgtg

SEQ ID NO: 5895901 - DNA, 25 bp, Homo sapien
gctggaatgtgtatgtatcaagtgc

SEQ ID NO: 5895902 - DNA, 25 bp, Homo sapien
atctgagggcttgagtcctagggag

SEQ ID NO: 5895903 - DNA, 25 bp, Homo sapien
gctttgctccattttctaagcatgt

SEQ ID NO: 5895904 - DNA, 25 bp, Homo sapien
acttcctatactaaagccaacatga

SEQ ID NO: 5895905 - DNA, 25 bp, Homo sapien
tagagatggtttggagacttgtaaa

SEQ ID NO: 5895906 - DNA, 25 bp, Homo sapien
ctttcctttggtactgctggccaag

SEQ ID NO: 5895907 - DNA, 25 bp, Homo sapien
aggacccatgcctctgtgatgtaac

SEQ ID NO: 5895908 - DNA, 25 bp, Homo sapien
ctctatgcctcttaacagtaatagg

SEQ ID NO: 5895909 - DNA, 25 bp, Homo sapien
gaggggctgtggcttgtcctgtatc

SEQ ID NO: 5895910 - DNA, 25 bp, Homo sapien
aggatgaggtctctattatccagaa

SEQ ID NO: 5895911 - DNA, 25 bp, Homo sapien
gcttgagtcctagggagatgaggac

SEQ ID NO: 5895912 - DNA, 25 bp, Homo sapien
cacaggaagaggatggggaacaggg

SEQ ID NO: 5895913 - DNA, 25 bp, Homo sapien
gcggaggggtcaccatggctgtggg

SEQ ID NO: 5895914 - DNA, 25 bp, Homo sapien
agctctcttattttcagatgtgttg

SEQ ID NO: 5895915 - DNA, 25 bp, Homo sapien
tctaagcatgttgtcttttgaatca

SEQ ID NO: 5895916 - DNA, 25 bp, Homo sapien
tccctccgacgaagccaatggctaa

SEQ ID NO: 5895917 - DNA, 25 bp, Homo sapien
ttagggcgagaccttccagaaatct

SEQ ID NO: 5895918 - DNA, 25 bp, Homo sapien
gacgtggctcctcaactcatcggag

SEQ ID NO: 5895919 - DNA, 25 bp, Homo sapien
tgaatcatcgatcataacatttatg

SEQ ID NO: 5895920 - DNA, 25 bp, Homo sapien
ggcacgccatgggtcatcttcctcc

SEQ ID NO: 5895921 - DNA, 25 bp, Homo sapien
ttcccggaactgaaggcacagtgga

SEQ ID NO: 5895922 - DNA, 25 bp, Homo sapien
atggttacagttgctaaagctggcg

SEQ ID NO: 5895923 - DNA, 25 bp, Homo sapien
tgatctgagggcttgagtcctaggg

SEQ ID NO: 5895924 - DNA, 25 bp, Homo sapien
taaccgcaaacctttacatccaccc

SEQ ID NO: 5895925 - DNA, 25 bp, Homo sapien
acatccaccccataaaagcagttaa

SEQ ID NO: 5895926 - DNA, 25 bp, Homo sapien
gaaagatgcagctgatctgagggct

SEQ ID NO: 5895927 - DNA, 25 bp, Homo sapien
caaaaggacccatgcctctgtgatg

SEQ ID NO: 5895928 - DNA, 25 bp, Homo sapien
ggaacagggcaagttggaagctctc

SEQ ID NO: 5895929 - DNA, 25 bp, Homo sapien
ttgtgacatccaacagtgttctcag

SEQ ID NO: 5895930 - DNA, 25 bp, Homo sapien
gagatgaggacgtggctcctcaact

SEQ ID NO: 5895931 - DNA, 25 bp, Homo sapien
caacaatgaagatccctccgacgaa

SEQ ID NO: 5895932 - DNA, 25 bp, Homo sapien
gggagaacaacctgttctgtttagc

SEQ ID NO: 5895933 - DNA, 25 bp, Homo sapien
actggccagggtgaacccatggtta

SEQ ID NO: 5895934 - DNA, 25 bp, Homo sapien
taaaagcagttaagattatacaaga

SEQ ID NO: 5895935 - DNA, 25 bp, Homo sapien
gcttaggactgggctggaatgtgta

SEQ ID NO: 5895936 - DNA, 25 bp, Homo sapien
cctccacaggaagaggatggggaac

SEQ ID NO: 5895937 - DNA, 25 bp, Homo sapien
tacagctctgtcccagcaacactga

SEQ ID NO: 5895938 - DNA, 25 bp, Homo sapien
gggagatgaggacgtggctcctcaa

SEQ ID NO: 5895939 - DNA, 25 bp, Homo sapien
gtcctagggagatgaggacgtggct

SEQ ID NO: 5895940 - DNA, 25 bp, Homo sapien
tgtcccagcaacactgagtccccgt

SEQ ID NO: 5895941 - DNA, 25 bp, Homo sapien
ggcttagagatggtttggagacttg

SEQ ID NO: 5895942 - DNA, 25 bp, Homo sapien
gaaggcaggtgttagaaactggtcg

SEQ ID NO: 5895943 - DNA, 25 bp, Homo sapien
attttctaagcatgttgtcttttga

SEQ ID NO: 5895944 - DNA, 25 bp, Homo sapien
tcctgagaagcagaaggcaggtgtt

SEQ ID NO: 5895945 - DNA, 25 bp, Homo sapien
cagaaggcaggtgttagaaactggt

SEQ ID NO: 5895946 - DNA, 25 bp, Homo sapien
cataaaagcagttaagattatacaa

SEQ ID NO: 5895947 - DNA, 25 bp, Homo sapien
tttccaaaggcagatgctttgaggg

SEQ ID NO: 5895948 - DNA, 25 bp, Homo sapien
gagtcctagggagatgaggacgtgg

SEQ ID NO: 5895949 - DNA, 25 bp, Homo sapien
atggggaacagggcaagttggaagc

SEQ ID NO: 5895950 - DNA, 25 bp, Homo sapien
gttagaaactggtcggtctgacttc

SEQ ID NO: 5895951 - DNA, 25 bp, Homo sapien
aacaacaatgaagatccctccgacg

SEQ ID NO: 5895952 - DNA, 25 bp, Homo sapien
ttctactgaaatgttcttggttcta

SEQ ID NO: 5895953 - DNA, 25 bp, Homo sapien
tgctggccaagcggaggggtcacca

SEQ ID NO: 5895954 - DNA, 25 bp, Homo sapien
ggaagaggatggggaacagggcaag

SEQ ID NO: 5895955 - DNA, 25 bp, Homo sapien
aacagggcaagttggaagctctctt

SEQ ID NO: 5895956 - DNA, 25 bp, Homo sapien
ggtgggcacgccatgggtcatcttc

SEQ ID NO: 5895957 - DNA, 25 bp, Homo sapien
ttttgctttccctgtctgtcctgag

SEQ ID NO: 5895958 - DNA, 25 bp, Homo sapien
tgagtcacttctactgaaatgttct

SEQ ID NO: 5895959 - DNA, 25 bp, Homo sapien
caactcatcggaggcttagagatgg

SEQ ID NO: 5895960 - DNA, 25 bp, Homo sapien
ctccattttctaagcatgttgtctt

SEQ ID NO: 5895961 - DNA, 25 bp, Homo sapien
tcttgtgacatccaacagtgttctc

SEQ ID NO: 5895962 - DNA, 25 bp, Homo sapien
ctgtggcttgtcctgtatctttcct

SEQ ID NO: 5895963 - DNA, 25 bp, Homo sapien
atgtatcaagtgcagttacaagttg

SEQ ID NO: 5895964 - DNA, 25 bp, Homo sapien
gatgaggacgtggctcctcaactca

SEQ ID NO: 5895965 - DNA, 25 bp, Homo sapien
tctgacttcctatactaaagccaac

SEQ ID NO: 5895966 - DNA, 25 bp, Homo sapien
gtgacatccaacagtgttctcagca

SEQ ID NO: 5895967 - DNA, 25 bp, Homo sapien
tggccagggtgaacccatggttaca

SEQ ID NO: 5895968 - DNA, 25 bp, Homo sapien
tgatgtaacatttccagactctatg

SEQ ID NO: 5895969 - DNA, 25 bp, Homo sapien
tgttgggagaacaacctgttctgtt

SEQ ID NO: 5895970 - DNA, 25 bp, Homo sapien
ttctattaaccgcaaacctttacat

SEQ ID NO: 5895971 - DNA, 25 bp, Homo sapien
cctgttctgtttagctctttagggc

SEQ ID NO: 5895972 - DNA, 25 bp, Homo sapien
actgcaaaaggacccatgcctctgt

SEQ ID NO: 5895973 - DNA, 25 bp, Homo sapien
atccaccccataaaagcagttaaga

SEQ ID NO: 5895974 - DNA, 25 bp, Homo sapien
acagtgttctcagcatccaggatga

SEQ ID NO: 5895975 - DNA, 25 bp, Homo sapien
ttgtcttttgaatcatcgatcataa

SEQ ID NO: 5895976 - DNA, 25 bp, Homo sapien
gagatggtttggagacttgtaaaaa

SEQ ID NO: 5895977 - DNA, 25 bp, Homo sapien
taagcatgttgtcttttgaatcatc

SEQ ID NO: 5895978 - DNA, 25 bp, Homo sapien
cggaggcttagagatggtttggaga

SEQ ID NO: 5895979 - DNA, 25 bp, Homo sapien
aagattatttttgctttccctgtct

SEQ ID NO: 5895980 - DNA, 25 bp, Homo sapien
atgcctcttaacagtaatagggact

SEQ ID NO: 5895981 - DNA, 25 bp, Homo sapien
aggtctctattatccagaaagatgc

SEQ ID NO: 5895982 - DNA, 25 bp, Homo sapien
ggttctacagcggctgagcctttta

SEQ ID NO: 5895983 - DNA, 25 bp, Homo sapien
catttccagactctatgcctcttaa

SEQ ID NO: 5895984 - DNA, 25 bp, Homo sapien
cagtggatgcttaggactgggctgg

SEQ ID NO: 5895985 - DNA, 25 bp, Homo sapien
ggggctgtggcttgtcctgtatctt

SEQ ID NO: 5895986 - DNA, 25 bp, Homo sapien
caaaggcagatgctttgaggggctg

SEQ ID NO: 5895987 - DNA, 25 bp, Homo sapien
gcaagttggaagctctcttattttc

SEQ ID NO: 5895988 - DNA, 25 bp, Homo sapien
acagcggctgagccttttagcatct

SEQ ID NO: 5895989 - DNA, 25 bp, Homo sapien
gggctggaatgtgtatgtatcaagt

SEQ ID NO: 5895990 - DNA, 25 bp, Homo sapien
gtatcaagtgcagttacaagttggc

SEQ ID NO: 5895991 - DNA, 25 bp, Homo sapien
ggggtgggtgggcacgccatgggtc

SEQ ID NO: 5895992 - DNA, 25 bp, Homo sapien
tccctgtctgtcctgagaagcagaa

SEQ ID NO: 5895993 - DNA, 25 bp, Homo sapien
tacaagttggcaactgcaaaaggac

SEQ ID NO: 5895994 - DNA, 25 bp, Homo sapien
caacagtgttctcagcatccaggat

SEQ ID NO: 5895995 - DNA, 25 bp, Homo sapien
gcaggtgttagaaactggtcggtct

SEQ ID NO: 5895996 - DNA, 25 bp, Homo sapien
cctagggagatgaggacgtggctcc

SEQ ID NO: 5895997 - DNA, 25 bp, Homo sapien
actgaaatgttcttggttctacagc

SEQ ID NO: 5895998 - DNA, 25 bp, Homo sapien
tgggtgggcacgccatgggtcatct

SEQ ID NO: 5895999 - DNA, 25 bp, Homo sapien
cagggtgaacccatggttacagttg

SEQ ID NO: 5896000 - DNA, 25 bp, Homo sapien
aaaagcagtgtcttcccggaactga

SEQ ID NO: 5896001 - DNA, 25 bp, Homo sapien
cgccatgggtcatcttcctccacag

SEQ ID NO: 5896002 - DNA, 25 bp, Homo sapien
tcttggttctacagcggctgagcct

SEQ ID NO: 5896003 - DNA, 25 bp, Homo sapien
ggtctgacttcctatactaaagcca

SEQ ID NO: 5896004 - DNA, 25 bp, Homo sapien
gaaatcttcttcataacaacaatga

SEQ ID NO: 5896005 - DNA, 25 bp, Homo sapien
gactctatgcctcttaacagtaata

SEQ ID NO: 5896006 - DNA, 25 bp, Homo sapien
ccttttagcatcttgtgacatccaa

SEQ ID NO: 5896007 - DNA, 25 bp, Homo sapien
acaatgaagatccctccgacgaagc

SEQ ID NO: 5896008 - DNA, 25 bp, Homo sapien
gagaacaacctgttctgtttagctc

SEQ ID NO: 5896009 - DNA, 25 bp, Homo sapien
ttagcatcttgtgacatccaacagt

SEQ ID NO: 5896010 - DNA, 25 bp, Homo sapien
cttgtcctgtatctttcctttggta

SEQ ID NO: 5896011 - DNA, 25 bp, Homo sapien
tgttgtcttttgaatcatcgatcat

SEQ ID NO: 5896012 - DNA, 25 bp, Homo sapien
atgcttaggactgggctggaatgtg

SEQ ID NO: 5896013 - DNA, 25 bp, Homo sapien
cgcaaacctttacatccaccccata

SEQ ID NO: 5896014 - DNA, 25 bp, Homo sapien
aatggctaacaagacgccaactatg

SEQ ID NO: 5896015 - DNA, 25 bp, Homo sapien
ttcagatgtgttgggagaacaacct
